United States Patent Application Publication US 2007/0048756 A1 - sequence listing, part 7

SEQ ID NO: 217289 - DNA, 33 bp, Homo sapien
tgcacacactgcccccaaggagcctcctggtgg

SEQ ID NO: 217290 - DNA, 33 bp, Homo sapien
tgcacacactgcccccgaggagcctcctggtgg

SEQ ID NO: 217291 - DNA, 33 bp, Homo sapien
agtctgagaagaggacaggggcagccgagatca

SEQ ID NO: 217292 - DNA, 33 bp, Homo sapien
agtctgagaagaggacgggggcagccgagatca

SEQ ID NO: 217293 - DNA, 33 bp, Homo sapien
ttgtctccatacacctaaattatgaaccagcct

SEQ ID NO: 217294 - DNA, 33 bp, Homo sapien
ttgtctccatacacctgaattatgaaccagcct

SEQ ID NO: 217295 - DNA, 33 bp, Homo sapien
ctaagctcttgacaaacagtaactcatttaact

SEQ ID NO: 217296 - DNA, 33 bp, Homo sapien
ctaagctcttgacaaatagtaactcatttaact

SEQ ID NO: 217297 - DNA, 33 bp, Homo sapien
ttggatatttcaatcaataaaaagtatagagca

SEQ ID NO: 217298 - DNA, 33 bp, Homo sapien
ttggatatttcaatcagtaaaaagtatagagca

SEQ ID NO: 217299 - DNA, 33 bp, Homo sapien
tgtatgaccttagggacgttctctgaggtcccc

SEQ ID NO: 217300 - DNA, 33 bp, Homo sapien
tgtatgaccttagggatgttctctgaggtcccc

SEQ ID NO: 217301 - DNA, 33 bp, Homo sapien
cctcttccactttccaaaacaactttagtatac

SEQ ID NO: 217302 - DNA, 33 bp, Homo sapien
cctcttccactttccagaacaactttagtatac

SEQ ID NO: 217303 - DNA, 33 bp, Homo sapien
ttaaaagcatttatgcacgtttaacttcatgaa

SEQ ID NO: 217304 - DNA, 33 bp, Homo sapien
ttaaaagcatttatgcgcgtttaacttcatgaa

SEQ ID NO: 217305 - DNA, 33 bp, Homo sapien
gctaatttcaacataaccttaagcaacataaaa

SEQ ID NO: 217306 - DNA, 33 bp, Homo sapien
gctaatttcaacataatcttaagcaacataaaa

SEQ ID NO: 217307 - DNA, 33 bp, Homo sapien
taacagtgaatgggaactgataaaatctgcatt

SEQ ID NO: 217308 - DNA, 33 bp, Homo sapien
taacagtgaatgggaattgataaaatctgcatt

SEQ ID NO: 217309 - DNA, 33 bp, Homo sapien
tggttatgacgattaaatgagttttggactgga

SEQ ID NO: 217310 - DNA, 33 bp, Homo sapien
tggttatgacgattaagtgagttttggactgga

SEQ ID NO: 217311 - DNA, 33 bp, Homo sapien
gctcacagtaggtctcactaccagatggggctc

SEQ ID NO: 217312 - DNA, 33 bp, Homo sapien
gctcacagtaggtctcgctaccagatggggctc

SEQ ID NO: 217313 - DNA, 33 bp, Homo sapien
acgaccacttctaaggacatttgggggcacttg

SEQ ID NO: 217314 - DNA, 33 bp, Homo sapien
acgaccacttctaagggcatttgggggcacttg

SEQ ID NO: 217315 - DNA, 33 bp, Homo sapien
agcagtaagtaggtcgcagcctggcagcaacaa

SEQ ID NO: 217316 - DNA, 33 bp, Homo sapien
agcagtaagtaggtcgtagcctggcagcaacaa

SEQ ID NO: 217317 - DNA, 33 bp, Homo sapien
tcttggttccttcccacgtatgtaaatatgctc

SEQ ID NO: 217318 - DNA, 33 bp, Homo sapien
tcttggttccttcccaggtatgtaaatatgctc

SEQ ID NO: 217319 - DNA, 33 bp, Homo sapien
tgatgtcattcaccatcatggggagcttgggaa

SEQ ID NO: 217320 - DNA, 33 bp, Homo sapien
tgatgtcattcaccatgatggggagcttgggaa

SEQ ID NO: 217321 - DNA, 33 bp, Homo sapien
tcttgtcaccttgagaaaaagctaaagaaaaag

SEQ ID NO: 217322 - DNA, 33 bp, Homo sapien
tcttgtcaccttgagagaaagctaaagaaaaag

SEQ ID NO: 217323 - DNA, 33 bp, Homo sapien
gaggatccatgagctcacctctgtttgcttaga

SEQ ID NO: 217324 - DNA, 33 bp, Homo sapien
gaggatccatgagctcgcctctgtttgcttaga

SEQ ID NO: 217325 - DNA, 33 bp, Homo sapien
gtattaggattacaaacgtgacccagcgcaccc

SEQ ID NO: 217326 - DNA, 33 bp, Homo sapien
gtattaggattacaaatgtgacccagcgcaccc

SEQ ID NO: 217327 - DNA, 33 bp, Homo sapien
ccttgagcttaacctccgagaatctgccaaaaa

SEQ ID NO: 217328 - DNA, 33 bp, Homo sapien
ccttgagcttaacctctgagaatctgccaaaaa

SEQ ID NO: 217329 - DNA, 33 bp, Homo sapien
ataacattgtagggcaatacattactcatgtgt

SEQ ID NO: 217330 - DNA, 33 bp, Homo sapien
ataacattgtagggcagtacattactcatgtgt

SEQ ID NO: 217331 - DNA, 33 bp, Homo sapien
cagagaggaagctggcaatctctgtcaattctg

SEQ ID NO: 217332 - DNA, 33 bp, Homo sapien
cagagaggaagctggcgatctctgtcaattctg

SEQ ID NO: 217333 - DNA, 33 bp, Homo sapien
ccatcagagcttcagaagtcttacgaggtgtaa

SEQ ID NO: 217334 - DNA, 33 bp, Homo sapien
ccatcagagcttcagaggtcttacgaggtgtaa

SEQ ID NO: 217335 - DNA, 33 bp, Homo sapien
gtaactgtacaaggaaaatggctaaaatttcaa

SEQ ID NO: 217336 - DNA, 33 bp, Homo sapien
gtaactgtacaaggaatatggctaaaatttcaa

SEQ ID NO: 217337 - DNA, 33 bp, Homo sapien
accttgactcaaccaactgcagcatttcaggta

SEQ ID NO: 217338 - DNA, 33 bp, Homo sapien
accttgactcaaccaagtgcagcatttcaggta

SEQ ID NO: 217339 - DNA, 33 bp, Homo sapien
ctaagttggagtgaaaaataaggtgagacagcc

SEQ ID NO: 217340 - DNA, 33 bp, Homo sapien
ctaagttggagtgaaagataaggtgagacagcc

SEQ ID NO: 217341 - DNA, 33 bp, Homo sapien
ttgcctgaagtaagacagatgagaaatgctacc

SEQ ID NO: 217342 - DNA, 33 bp, Homo sapien
ttgcctgaagtaagacggatgagaaatgctacc

SEQ ID NO: 217343 - DNA, 33 bp, Homo sapien
gagtgatactttgaggacatgtgactaaccccg

SEQ ID NO: 217344 - DNA, 33 bp, Homo sapien
gagtgatactttgaggtcatgtgactaaccccg

SEQ ID NO: 217345 - DNA, 33 bp, Homo sapien
cattgatagttttgaacagcctaaacagtagtc

SEQ ID NO: 217346 - DNA, 33 bp, Homo sapien
cattgatagttttgaagagcctaaacagtagtc

SEQ ID NO: 217347 - DNA, 33 bp, Homo sapien
atcaaattcctctctacggttgggatacattaa

SEQ ID NO: 217348 - DNA, 33 bp, Homo sapien
atcaaattcctctctagggttgggatacattaa

SEQ ID NO: 217349 - DNA, 33 bp, Homo sapien
taatcaagaaattagagaagccatatataaact

SEQ ID NO: 217350 - DNA, 33 bp, Homo sapien
taatcaagaaattagataagccatatataaact

SEQ ID NO: 217351 - DNA, 33 bp, Homo sapien
cctcacaggaagccctcagattgcaaacatatg

SEQ ID NO: 217352 - DNA, 33 bp, Homo sapien
cctcacaggaagcccttagattgcaaacatatg

SEQ ID NO: 217353 - DNA, 33 bp, Homo sapien
tgtgaccttcacagtacggcgatgaagggtgat

SEQ ID NO: 217354 - DNA, 33 bp, Homo sapien
tgtgaccttcacagtatggcgatgaagggtgat

SEQ ID NO: 217355 - DNA, 33 bp, Homo sapien
gatagcaagagtagagcatttaatgatgtgcta

SEQ ID NO: 217356 - DNA, 33 bp, Homo sapien
gatagcaagagtagagtatttaatgatgtgcta

SEQ ID NO: 217357 - DNA, 33 bp, Homo sapien
atgtagaagatggtacacactctgacctcctcc

SEQ ID NO: 217358 - DNA, 33 bp, Homo sapien
atgtagaagatggtacgcactctgacctcctcc

SEQ ID NO: 217359 - DNA, 33 bp, Homo sapien
ccacacagtatagccaatagtcactaggttatt

SEQ ID NO: 217360 - DNA, 33 bp, Homo sapien
ccacacagtatagccagtagtcactaggttatt

SEQ ID NO: 217361 - DNA, 33 bp, Homo sapien
ctctgaccaaaattcaagaaattaaaccagtag

SEQ ID NO: 217362 - DNA, 33 bp, Homo sapien
ctctgaccaaaattcaggaaattaaaccagtag

SEQ ID NO: 217363 - DNA, 33 bp, Homo sapien
agccactctttcttcaacccatggagacatctt

SEQ ID NO: 217364 - DNA, 33 bp, Homo sapien
agccactctttcttcaccccatggagacatctt

SEQ ID NO: 217365 - DNA, 33 bp, Homo sapien
tcaagggtacattagaatcacctggagggcttt

SEQ ID NO: 217366 - DNA, 33 bp, Homo sapien
tcaagggtacattagagtcacctggagggcttt

SEQ ID NO: 217367 - DNA, 33 bp, Homo sapien
gcagaactcagaatcaaaagtggcagaactgtt

SEQ ID NO: 217368 - DNA, 33 bp, Homo sapien
gcagaactcagaatcacaagtggcagaactgtt

SEQ ID NO: 217369 - DNA, 33 bp, Homo sapien
cgatgcagaaatggtccgaaactactgtgccag

SEQ ID NO: 217370 - DNA, 33 bp, Homo sapien
cgatgcagaaatggtctgaaactactgtgccag

SEQ ID NO: 217371 - DNA, 33 bp, Homo sapien
tctactgcaccatccacgtgactctgtagttag

SEQ ID NO: 217372 - DNA, 33 bp, Homo sapien
tctactgcaccatccatgtgactctgtagttag

SEQ ID NO: 217373 - DNA, 33 bp, Homo sapien
ctcattcttagcttccaccagagaccaccaagc

SEQ ID NO: 217374 - DNA, 33 bp, Homo sapien
ctcattcttagcttccgccagagaccaccaagc

SEQ ID NO: 217375 - DNA, 33 bp, Homo sapien
ggaaaacaaacaccccaagaagacagtaacatg

SEQ ID NO: 217376 - DNA, 33 bp, Homo sapien
ggaaaacaaacaccccgagaagacagtaacatg

SEQ ID NO: 217377 - DNA, 33 bp, Homo sapien
actgtacaactgcccccgctaatttattgataa

SEQ ID NO: 217378 - DNA, 33 bp, Homo sapien
actgtacaactgcccctgctaatttattgataa

SEQ ID NO: 217379 - DNA, 33 bp, Homo sapien
aaattaccttcttcaacgtctgcaaatagaaat

SEQ ID NO: 217380 - DNA, 33 bp, Homo sapien
aaattaccttcttcaatgtctgcaaatagaaat

SEQ ID NO: 217381 - DNA, 33 bp, Homo sapien
cctacaagtctcccacagaatttgcgctggtct

SEQ ID NO: 217382 - DNA, 33 bp, Homo sapien
cctacaagtctcccacggaatttgcgctggtct

SEQ ID NO: 217383 - DNA, 33 bp, Homo sapien
cagaaaggcaaatgcaaaagtgggggacatgtc

SEQ ID NO: 217384 - DNA, 33 bp, Homo sapien
cagaaaggcaaatgcagaagtgggggacatgtc

SEQ ID NO: 217385 - DNA, 33 bp, Homo sapien
cattgcagaagccctacggtagcgagacaaaga

SEQ ID NO: 217386 - DNA, 33 bp, Homo sapien
cattgcagaagccctatggtagcgagacaaaga

SEQ ID NO: 217387 - DNA, 33 bp, Homo sapien
agactgtgcccaagatgacaccatgagttttag

SEQ ID NO: 217388 - DNA, 33 bp, Homo sapien
agactgtgcccaagattacaccatgagttttag

SEQ ID NO: 217389 - DNA, 33 bp, Homo sapien
ccccaggaagactccacataacctaccctgtca

SEQ ID NO: 217390 - DNA, 33 bp, Homo sapien
ccccaggaagactccatataacctaccctgtca

SEQ ID NO: 217391 - DNA, 33 bp, Homo sapien
tctaatgggtgtgggacgcttcctcaaggagtc

SEQ ID NO: 217392 - DNA, 33 bp, Homo sapien
tctaatgggtgtgggatgcttcctcaaggagtc

SEQ ID NO: 217393 - DNA, 33 bp, Homo sapien
ctggacagcccaagaaagaatacagaagccccc

SEQ ID NO: 217394 - DNA, 33 bp, Homo sapien
ctggacagcccaagaaggaatacagaagccccc

SEQ ID NO: 217395 - DNA, 33 bp, Homo sapien
gatgtgcatgaatgtcaagtgcagcgcttgctc

SEQ ID NO: 217396 - DNA, 33 bp, Homo sapien
gatgtgcatgaatgtcgagtgcagcgcttgctc

SEQ ID NO: 217397 - DNA, 33 bp, Homo sapien
ctcctgtccacgcttgaagatgagtactagcat

SEQ ID NO: 217398 - DNA, 33 bp, Homo sapien
ctcctgtccacgcttggagatgagtactagcat

SEQ ID NO: 217399 - DNA, 33 bp, Homo sapien
cccaccccgtcttcaacagtaactggggcagtg

SEQ ID NO: 217400 - DNA, 33 bp, Homo sapien
cccaccccgtcttcaatagtaactggggcagtg

SEQ ID NO: 217401 - DNA, 33 bp, Homo sapien
cacagcatgaggggtacggtccctgtcagccag

SEQ ID NO: 217402 - DNA, 33 bp, Homo sapien
cacagcatgaggggtatggtccctgtcagccag

SEQ ID NO: 217403 - DNA, 33 bp, Homo sapien
cacagacagggacaagaagagagaatagagaag

SEQ ID NO: 217404 - DNA, 33 bp, Homo sapien
cacagacagggacaaggagagagaatagagaag

SEQ ID NO: 217405 - DNA, 33 bp, Homo sapien
cggcaatccccctacacatctgcatcccagctg

SEQ ID NO: 217406 - DNA, 33 bp, Homo sapien
cggcaatccccctacatatctgcatcccagctg

SEQ ID NO: 217407 - DNA, 33 bp, Homo sapien
tctccttcaccactgacggcgccgggctctctt

SEQ ID NO: 217408 - DNA, 33 bp, Homo sapien
tctccttcaccactgatggcgccgggctctctt

SEQ ID NO: 217409 - DNA, 33 bp, Homo sapien
ctttgaatctcagtgccgcaactgggaaaggca

SEQ ID NO: 217410 - DNA, 33 bp, Homo sapien
ctttgaatctcagtgctgcaactgggaaaggca

SEQ ID NO: 217411 - DNA, 33 bp, Homo sapien
ctgagctgttgcttccacagcacttgaactgga

SEQ ID NO: 217412 - DNA, 33 bp, Homo sapien
ctgagctgttgcttccgcagcacttgaactgga

SEQ ID NO: 217413 - DNA, 33 bp, Homo sapien
tctagatggtgcttagccctggagtgggaaggg

SEQ ID NO: 217414 - DNA, 33 bp, Homo sapien
tctagatggtgcttagtcctggagtgggaaggg

SEQ ID NO: 217415 - DNA, 33 bp, Homo sapien
ctttttttttgagagacaacgtactaatgcaga

SEQ ID NO: 217416 - DNA, 33 bp, Homo sapien
ctttttttttgagagataacgtactaatgcaga

SEQ ID NO: 217417 - DNA, 33 bp, Homo sapien
tcattccgtctctgagcccttagtgtccttacc

SEQ ID NO: 217418 - DNA, 33 bp, Homo sapien
tcattccgtctctgagtccttagtgtccttacc

SEQ ID NO: 217419 - DNA, 33 bp, Homo sapien
ggctcacaaatatccaatctgtccattttacag

SEQ ID NO: 217420 - DNA, 33 bp, Homo sapien
ggctcacaaatatccagtctgtccattttacag

SEQ ID NO: 217421 - DNA, 33 bp, Homo sapien
cacatcttcatatccaacgagctcttttttcaa

SEQ ID NO: 217422 - DNA, 33 bp, Homo sapien
cacatcttcatatccagcgagctcttttttcaa

SEQ ID NO: 217423 - DNA, 33 bp, Homo sapien
cctgagaatcaggccccggaacaggagattccc

SEQ ID NO: 217424 - DNA, 33 bp, Homo sapien
cctgagaatcaggccctggaacaggagattccc

SEQ ID NO: 217425 - DNA, 33 bp, Homo sapien
agtggaccaactcgcaaccctgcaaagtcggag

SEQ ID NO: 217426 - DNA, 33 bp, Homo sapien
agtggaccaactcgcacccctgcaaagtcggag

SEQ ID NO: 217427 - DNA, 33 bp, Homo sapien
gcaaattcattaaaacaaagaccagatatccca

SEQ ID NO: 217428 - DNA, 33 bp, Homo sapien
gcaaattcattaaaacgaagaccagatatccca

SEQ ID NO: 217429 - DNA, 33 bp, Homo sapien
ttcatgcagataatcaaaaactgactatgactc

SEQ ID NO: 217430 - DNA, 33 bp, Homo sapien
ttcatgcagataatcagaaactgactatgactc

SEQ ID NO: 217431 - DNA, 33 bp, Homo sapien
ctcatgtccacatggaagtcacccctcaggtca

SEQ ID NO: 217432 - DNA, 33 bp, Homo sapien
ctcatgtccacatggaggtcacccctcaggtca

SEQ ID NO: 217433 - DNA, 33 bp, Homo sapien
gaacgactggtttagacgcttggtcactatacc

SEQ ID NO: 217434 - DNA, 33 bp, Homo sapien
gaacgactggtttagatgcttggtcactatacc

SEQ ID NO: 217435 - DNA, 33 bp, Homo sapien
ccctatgagtaaaccactggccacattggatag

SEQ ID NO: 217436 - DNA, 33 bp, Homo sapien
ccctatgagtaaaccattggccacattggatag

SEQ ID NO: 217437 - DNA, 33 bp, Homo sapien
tggggcccagtgctaaaagagaggccgatgttt

SEQ ID NO: 217438 - DNA, 33 bp, Homo sapien
tggggcccagtgctaagagagaggccgatgttt

SEQ ID NO: 217439 - DNA, 33 bp, Homo sapien
agggtgaacactcagaccctgggagaccctgtg

SEQ ID NO: 217440 - DNA, 33 bp, Homo sapien
agggtgaacactcagatcctgggagaccctgtg

SEQ ID NO: 217441 - DNA, 33 bp, Homo sapien
ataagtatgcccttaactaaacatggcacagga

SEQ ID NO: 217442 - DNA, 33 bp, Homo sapien
ataagtatgcccttaattaaacatggcacagga

SEQ ID NO: 217443 - DNA, 33 bp, Homo sapien
agtagtagattaggtacagaacttttatacagt

SEQ ID NO: 217444 - DNA, 33 bp, Homo sapien
agtagtagattaggtagagaacttttatacagt

SEQ ID NO: 217445 - DNA, 33 bp, Homo sapien
tcgtgcttagtctggaaaagctcatcaagtcta

SEQ ID NO: 217446 - DNA, 33 bp, Homo sapien
tcgtgcttagtctggagaagctcatcaagtcta

SEQ ID NO: 217447 - DNA, 33 bp, Homo sapien
acttaccttcctgacactggcttaatctgctat

SEQ ID NO: 217448 - DNA, 33 bp, Homo sapien
acttaccttcctgacagtggcttaatctgctat

SEQ ID NO: 217449 - DNA, 33 bp, Homo sapien
agctggaagaaagaaaaataagccaagaaattt

SEQ ID NO: 217450 - DNA, 33 bp, Homo sapien
agctggaagaaagaaatataagccaagaaattt

SEQ ID NO: 217451 - DNA, 33 bp, Homo sapien
ctgaggcaaagcttaccggtctcatcatctgtg

SEQ ID NO: 217452 - DNA, 33 bp, Homo sapien
ctgaggcaaagcttactggtctcatcatctgtg

SEQ ID NO: 217453 - DNA, 33 bp, Homo sapien
caatgtatatcagaagaaaacttgaactcacct

SEQ ID NO: 217454 - DNA, 33 bp, Homo sapien
caatgtatatcagaagcaaacttgaactcacct

SEQ ID NO: 217455 - DNA, 33 bp, Homo sapien
accatatcaggtaaaaactcctcactctccatt

SEQ ID NO: 217456 - DNA, 33 bp, Homo sapien
accatatcaggtaaaatctcctcactctccatt

SEQ ID NO: 217457 - DNA, 33 bp, Homo sapien; identical to SEQ ID NO: 217455

SEQ ID NO: 217458 - DNA, 33 bp, Homo sapien; identical to SEQ ID NO: 217456

SEQ ID NO: 217459 - DNA, 33 bp, Homo sapien
ggtttatagttgacaaaattatcctatctcctt

SEQ ID NO: 217460 - DNA, 33 bp, Homo sapien
ggtttatagttgacaagattatcctatctcctt

SEQ ID NO: 217461 - DNA, 33 bp, Homo sapien
agaaggaaaaaactccaaacccatcggaacatc

SEQ ID NO: 217462 - DNA, 33 bp, Homo sapien
agaaggaaaaaactccgaacccatcggaacatc

SEQ ID NO: 217463 - DNA, 33 bp, Homo sapien
attgacacctctggaacagaatgtatgctaggt

SEQ ID NO: 217464 - DNA, 33 bp, Homo sapien
attgacacctctggaatagaatgtatgctaggt

SEQ ID NO: 217465 - DNA, 33 bp, Homo sapien
gctttattacctttgacattcttctgtcttcta

SEQ ID NO: 217466 - DNA, 33 bp, Homo sapien
gctttattacctttgatattcttctgtcttcta

SEQ ID NO: 217467 - DNA, 33 bp, Homo sapien
tgcattccaggttggaggactcccggaactgca

SEQ ID NO: 217468 - DNA, 33 bp, Homo sapien
tgcattccaggttggatgactcccggaactgca

SEQ ID NO: 217469 - DNA, 33 bp, Homo sapien
gcaggccttctccacacaaggaactgttggtgc

SEQ ID NO: 217470 - DNA, 33 bp, Homo sapien
gcaggccttctccacataaggaactgttggtgc

SEQ ID NO: 217471 - DNA, 33 bp, Homo sapien
ataactaaggtaacacaagtgtcctcagctggt

SEQ ID NO: 217472 - DNA, 33 bp, Homo sapien
ataactaaggtaacacgagtgtcctcagctggt

SEQ ID NO: 217473 - DNA, 33 bp, Homo sapien
cttgctcagtttgcacacatgcctacagctggg

SEQ ID NO: 217474 - DNA, 33 bp, Homo sapien
cttgctcagtttgcactcatgcctacagctggg

SEQ ID NO: 217475 - DNA, 33 bp, Homo sapien
gtctgtcttcccagaccgactggctggtgctgt

SEQ ID NO: 217476 - DNA, 33 bp, Homo sapien
gtctgtcttcccagacggactggctggtgctgt

SEQ ID NO: 217477 - DNA, 33 bp, Homo sapien
tactatctctgaaaaaatgattaagtctatata

SEQ ID NO: 217478 - DNA, 33 bp, Homo sapien
tactatctctgaaaaagtgattaagtctatata

SEQ ID NO: 217479 - DNA, 33 bp, Homo sapien; identical to SEQ ID NO: 217477

SEQ ID NO: 217480 - DNA, 33 bp, Homo sapien; identical to SEQ ID NO: 217478

SEQ ID NO: 217481 - DNA, 33 bp, Homo sapien
ccaatttctgttgctacgtatcatctctttcat

SEQ ID NO: 217482 - DNA, 33 bp, Homo sapien
ccaatttctgttgctatgtatcatctctttcat

SEQ ID NO: 217483 - DNA, 33 bp, Homo sapien
gtgtgaatgaagatacaaatggtcataaattcc

SEQ ID NO: 217484 - DNA, 33 bp, Homo sapien
gtgtgaatgaagatactaatggtcataaattcc

SEQ ID NO: 217485 - DNA, 33 bp, Homo sapien
ccaggccacataaatacgattgaaattaattgt

SEQ ID NO: 217486 - DNA, 33 bp, Homo sapien
ccaggccacataaatatgattgaaattaattgt

SEQ ID NO: 217487 - DNA, 33 bp, Homo sapien
gttatagccaaaagcacgtctagtctgtcttat

SEQ ID NO: 217488 - DNA, 33 bp, Homo sapien
gttatagccaaaagcatgtctagtctgtcttat

SEQ ID NO: 217489 - DNA, 33 bp, Homo sapien; identical to SEQ ID NO: 217487

SEQ ID NO: 217490 - DNA, 33 bp, Homo sapien; identical to SEQ ID NO: 217488

SEQ ID NO: 217491 - DNA, 33 bp, Homo sapien
taccaatctccattaccgaaaaccagaagtatg

SEQ ID NO: 217492 - DNA, 33 bp, Homo sapien
taccaatctccattactgaaaaccagaagtatg

SEQ ID NO: 217493 - DNA, 33 bp, Homo sapien
aagagagaatgtaagaaagcaatgcctgactat

SEQ ID NO: 217494 - DNA, 33 bp, Homo sapien
aagagagaatgtaagagagcaatgcctgactat

SEQ ID NO: 217495 - DNA, 33 bp, Homo sapien
ttttctttgttccacacagatgatggtaaaagg

SEQ ID NO: 217496 - DNA, 33 bp, Homo sapien
ttttctttgttccacatagatgatggtaaaagg

SEQ ID NO: 217497 - DNA, 33 bp, Homo sapien; identical to SEQ ID NO: 217495

SEQ ID NO: 217498 - DNA, 33 bp, Homo sapien; identical to SEQ ID NO: 217496

SEQ ID NO: 217499 - DNA, 33 bp, Homo sapien
aaattttcggatcccaataatgtacctatggtg

SEQ ID NO: 217500 - DNA, 33 bp, Homo sapien
aaattttcggatcccagtaatgtacctatggtg

SEQ ID NO: 217501 - DNA, 33 bp, Homo sapien; identical to SEQ ID NO: 217499

SEQ ID NO: 217502 - DNA, 33 bp, Homo sapien; identical to SEQ ID NO: 217500

SEQ ID NO: 217503 - DNA, 33 bp, Homo sapien
agctgtgcttgctacaaagttatttctgggcag

SEQ ID NO: 217504 - DNA, 33 bp, Homo sapien
agctgtgcttgctacagagttatttctgggcag

SEQ ID NO: 217505 - DNA, 33 bp, Homo sapien; identical to SEQ ID NO: 217503

SEQ ID NO: 217506 - DNA, 33 bp, Homo sapien; identical to SEQ ID NO: 217504

SEQ ID NO: 217507 - DNA, 33 bp, Homo sapien
cattaaaattagaggaaacttacaatgttagtg

SEQ ID NO: 217508 - DNA, 33 bp, Homo sapien
cattaaaattagaggacacttacaatgttagtg

SEQ ID NO: 217509 - DNA, 33 bp, Homo sapien; identical to SEQ ID NO: 217507

SEQ ID NO: 217510 - DNA, 33 bp, Homo sapien; identical to SEQ ID NO: 217508

SEQ ID NO: 217511 - DNA, 33 bp, Homo sapien
cccaagtttgaagttacggtcaatgcaccacaa

SEQ ID NO: 217512 - DNA, 33 bp, Homo sapien
cccaagtttgaagttatggtcaatgcaccacaa

SEQ ID NO: 217513 - DNA, 33 bp, Homo sapien
ccttttttcttgctcaccatctgtagactgatg

SEQ ID NO: 217514 - DNA, 33 bp, Homo sapien
ccttttttcttgctcagcatctgtagactgatg

SEQ ID NO: 217515 - DNA, 33 bp, Homo sapien
gggctctgagattaaccggaaggagagttgtag

SEQ ID NO: 217516 - DNA, 33 bp, Homo sapien
gggctctgagattaactggaaggagagttgtag

SEQ ID NO: 217517 - DNA, 33 bp, Homo sapien; identical to SEQ ID NO: 217515

SEQ ID NO: 217518 - DNA, 33 bp, Homo sapien; identical to SEQ ID NO: 217516

SEQ ID NO: 217519 - DNA, 33 bp, Homo sapien
caggatccagaaggcaatcgaatacaacagtgg

SEQ ID NO: 217520 - DNA, 33 bp, Homo sapien
caggatccagaaggcagtcgaatacaacagtgg

SEQ ID NO: 217521 - DNA, 33 bp, Homo sapien; identical to SEQ ID NO: 217519

SEQ ID NO: 217522 - DNA, 33 bp, Homo sapien; identical to SEQ ID NO: 217520

SEQ ID NO: 217523 - DNA, 33 bp, Homo sapien
gaaatggtggagtatacgaatggccaataatct

SEQ ID NO: 217524 - DNA, 33 bp, Homo sapien
gaaatggtggagtataggaatggccaataatct

SEQ ID NO: 217525 - DNA, 33 bp, Homo sapien; identical to SEQ ID NO: 217523

SEQ ID NO: 217526 - DNA, 33 bp, Homo sapien; identical to SEQ ID NO: 217524

SEQ ID NO: 217527 - DNA, 33 bp, Homo sapien
ggcagctaagagattacgtggttttatctttgc

SEQ ID NO: 217528 - DNA, 33 bp, Homo sapien
ggcagctaagagattatgtggttttatctttgc

SEQ ID NO: 217529 - DNA, 33 bp, Homo sapien
cacattttcttcattcaatctatcattgatgga

SEQ ID NO: 217530 - DNA, 33 bp, Homo sapien
cacattttcttcattcgatctatcattgatgga

SEQ ID NO: 217531 - DNA, 33 bp, Homo sapien
ggagcctcagaaagtgcatttttaaagagcacc

SEQ ID NO: 217532 - DNA, 33 bp, Homo sapien
ggagcctcagaaagtgtatttttaaagagcacc

SEQ ID NO: 217533 - DNA, 33 bp, Homo sapien
gaatttatcttgtaggcaatagtggaccattaa

SEQ ID NO: 217534 - DNA, 33 bp, Homo sapien
gaatttatcttgtaggtaatagtggaccattaa

SEQ ID NO: 217535 - DNA, 33 bp, Homo sapien
agattgccagttagcacctaaaatttggagtaa

SEQ ID NO: 217536 - DNA, 33 bp, Homo sapien
agattgccagttagcagctaaaatttggagtaa

SEQ ID NO: 217537 - DNA, 33 bp, Homo sapien
ctaaccaacgtgtaccacaaatgtatcgattaa

SEQ ID NO: 217538 - DNA, 33 bp, Homo sapien
ctaaccaacgtgtacctcaaatgtatcgattaa

SEQ ID NO: 217539 - DNA, 33 bp, Homo sapien
aggtagttacagagaaagacaaaggccttggag

SEQ ID NO: 217540 - DNA, 33 bp, Homo sapien
aggtagttacagagaaggacaaaggccttggag

SEQ ID NO: 217541 - DNA, 33 bp, Homo sapien
ccattgttcatactaacgctctttatgactaga

SEQ ID NO: 217542 - DNA, 33 bp, Homo sapien
ccattgttcatactaatgctctttatgactaga

SEQ ID NO: 217543 - DNA, 33 bp, Homo sapien
ggaggaatgcaaacaaagcaaagtcaggggtga

SEQ ID NO: 217544 - DNA, 33 bp, Homo sapien
ggaggaatgcaaacaaggcaaagtcaggggtga

SEQ ID NO: 217545 - DNA, 33 bp, Homo sapien
ggcaacatttcttcaacccttataaggtgctgg

SEQ ID NO: 217546 - DNA, 33 bp, Homo sapien
ggcaacatttcttcaatccttataaggtgctgg

SEQ ID NO: 217547 - DNA, 33 bp, Homo sapien
atggagggccccactaaccaggagagcaggtct

SEQ ID NO: 217548 - DNA, 33 bp, Homo sapien
atggagggccccactacccaggagagcaggtct

SEQ ID NO: 217549 - DNA, 33 bp, Homo sapien
attctccaggctaagaactgcactctgatacac

SEQ ID NO: 217550 - DNA, 33 bp, Homo sapien
attctccaggctaagagctgcactctgatacac

SEQ ID NO: 217551 - DNA, 33 bp, Homo sapien; identical to SEQ ID NO: 217549

SEQ ID NO: 217552 - DNA, 33 bp, Homo sapien; identical to SEQ ID NO: 217550

SEQ ID NO: 217553 - DNA, 33 bp, Homo sapien
atcattaatgaaaactaacttggaatcactatt

SEQ ID NO: 217554 - DNA, 33 bp, Homo sapien
atcattaatgaaaactgacttggaatcactatt

SEQ ID NO: 217555 - DNA, 33 bp, Homo sapien
tggctttttgtattcacccgtcatgtctcacca

SEQ ID NO: 217556 - DNA, 33 bp, Homo sapien
tggctttttgtattcatccgtcatgtctcacca

SEQ ID NO: 217557 - DNA, 33 bp, Homo sapien
ctaaggacaaataaacagcagttgagttttaca

SEQ ID NO: 217558 - DNA, 33 bp, Homo sapien
ctaaggacaaataaacggcagttgagttttaca

SEQ ID NO: 217559 - DNA, 33 bp, Homo sapien
tcctgctggagtagcaaagaaaggagcgcgtgt

SEQ ID NO: 217560 - DNA, 33 bp, Homo sapien
tcctgctggagtagcagagaaaggagcgcgtgt

SEQ ID NO: 217561 - DNA, 33 bp, Homo sapien
tcctgtttcctctgaaatgagctgttgggcaga

SEQ ID NO: 217562 - DNA, 33 bp, Homo sapien
tcctgtttcctctgaagtgagctgttgggcaga

SEQ ID NO: 217563 - DNA, 33 bp, Homo sapien
cagcactggtggagtacagcgtgtcaaaacctt

SEQ ID NO: 217564 - DNA, 33 bp, Homo sapien
cagcactggtggagtatagcgtgtcaaaacctt

SEQ ID NO: 217565 - DNA, 33 bp, Homo sapien
ccttggcaaagtaactgaaccgctcttaccttg

SEQ ID NO: 217566 - DNA, 33 bp, Homo sapien
ccttggcaaagtaacttaaccgctcttaccttg

SEQ ID NO: 217567 - DNA, 33 bp, Homo sapien
ctcagcatccccatacactgaaggcagcaggaa

SEQ ID NO: 217568 - DNA, 33 bp, Homo sapien
ctcagcatccccatacgctgaaggcagcaggaa

SEQ ID NO: 217569 - DNA, 33 bp, Homo sapien
ggtaggaaaggatccaaaatgaggctgagattt

SEQ ID NO: 217570 - DNA, 33 bp, Homo sapien
ggtaggaaaggatccacaatgaggctgagattt

SEQ ID NO: 217571 - DNA, 33 bp, Homo sapien
cctgtagctgtttaggaaaaaatataggtgagt

SEQ ID NO: 217572 - DNA, 33 bp, Homo sapien
cctgtagctgtttagggaaaaatataggtgagt

SEQ ID NO: 217573 - DNA, 33 bp, Homo sapien
caggctgttagggaatcacagtaataagagtaa

SEQ ID NO: 217574 - DNA, 33 bp, Homo sapien
caggctgttagggaatgacagtaataagagtaa

SEQ ID NO: 217575 - DNA, 33 bp, Homo sapien
gtggcaaactgggacacgaaactggtagaaggg

SEQ ID NO: 217576 - DNA, 33 bp, Homo sapien
gtggcaaactgggacatgaaactggtagaaggg

SEQ ID NO: 217577 - DNA, 33 bp, Homo sapien
tctttgatttggaagagcctgtagaacctcaga

SEQ ID NO: 217578 - DNA, 33 bp, Homo sapien
tctttgatttggaagatcctgtagaacctcaga

SEQ ID NO: 217579 - DNA, 33 bp, Homo sapien
agagctatcattgaacccaaaaagggattacca

SEQ ID NO: 217580 - DNA, 33 bp, Homo sapien
agagctatcattgaactcaaaaagggattacca

SEQ ID NO: 217581 - DNA, 33 bp, Homo sapien
aaatactcaatggtaacgaaggtacaatactat

SEQ ID NO: 217582 - DNA, 33 bp, Homo sapien
aaatactcaatggtaatgaaggtacaatactat

SEQ ID NO: 217583 - DNA, 33 bp, Homo sapien
aaccctgagccagaaccgtctaggccaagatgc

SEQ ID NO: 217584 - DNA, 33 bp, Homo sapien
aaccctgagccagaactgtctaggccaagatgc

SEQ ID NO: 217585 - DNA, 33 bp, Homo sapien
ggttacaccttcttcaaaatgactttgcaattt

SEQ ID NO: 217586 - DNA, 33 bp, Homo sapien
ggttacaccttcttcacaatgactttgcaattt

SEQ ID NO: 217587 - DNA, 33 bp, Homo sapien
agaaatgatgaaaatacacccttcaacaaagtt

SEQ ID NO: 217588 - DNA, 33 bp, Homo sapien
agaaatgatgaaaatatacccttcaacaaagtt

SEQ ID NO: 217589 - DNA, 33 bp, Homo sapien
ttcaattaaacacaaagctaggtgaaggtattc

SEQ ID NO: 217590 - DNA, 33 bp, Homo sapien
ttcaattaaacacaaatctaggtgaaggtattc

SEQ ID NO: 217591 - DNA, 33 bp, Homo sapien
atcactgcagattttgaaaaggatgacacaaaa

SEQ ID NO: 217592 - DNA, 33 bp, Homo sapien
atcactgcagattttggaaaggatgacacaaaa

SEQ ID NO: 217593 - DNA, 33 bp, Homo sapien
agctaacatttatagacgaatttattttgtttt

SEQ ID NO: 217594 - DNA, 33 bp, Homo sapien
agctaacatttatagaggaatttattttgtttt

SEQ ID NO: 217595 - DNA, 33 bp, Homo sapien
atgaagctgtacacaactaaggatgcatcctta

SEQ ID NO: 217596 - DNA, 33 bp, Homo sapien
atgaagctgtacacaattaaggatgcatcctta

SEQ ID NO: 217597 - DNA, 33 bp, Homo sapien
ttgccatcttggtttacgtgaggacactgatgt

SEQ ID NO: 217598 - DNA, 33 bp, Homo sapien
ttgccatcttggtttatgtgaggacactgatgt

SEQ ID NO: 217599 - DNA, 33 bp, Homo sapien
tgttgtaaacaaagcccgaaatgaaacccctgt

SEQ ID NO: 217600 - DNA, 33 bp, Homo sapien
tgttgtaaacaaagcctgaaatgaaacccctgt

SEQ ID NO: 217601 - DNA, 33 bp, Homo sapien
ctgttgcacttacatcaacacctcgggtgaagt

SEQ ID NO: 217602 - DNA, 33 bp, Homo sapien
ctgttgcacttacatcgacacctcgggtgaagt

SEQ ID NO: 217603 - DNA, 33 bp, Homo sapien
actacaggcgcgcaccactaatttttgcgccct

SEQ ID NO: 217604 - DNA, 33 bp, Homo sapien
actacaggcgcgcacccctaatttttgcgccct

SEQ ID NO: 217605 - DNA, 33 bp, Homo sapien
gaattgcctattcaagcaatcatttttggtgat

SEQ ID NO: 217606 - DNA, 33 bp, Homo sapien
gaattgcctattcaaggaatcatttttggtgat

SEQ ID NO: 217607 - DNA, 33 bp, Homo sapien
tcagaaccagttcatcgagactaaagactaatg

SEQ ID NO: 217608 - DNA, 33 bp, Homo sapien
tcagaaccagttcatctagactaaagactaatg

SEQ ID NO: 217609 - DNA, 33 bp, Homo sapien
taattgagctttaacacgcaaattcctgatatg

SEQ ID NO: 217610 - DNA, 33 bp, Homo sapien
taattgagctttaacatgcaaattcctgatatg

SEQ ID NO: 217611 - DNA, 33 bp, Homo sapien
aaggaaaactgtaatcaagaacctctaagctat

SEQ ID NO: 217612 - DNA, 33 bp, Homo sapien
aaggaaaactgtaatcgagaacctctaagctat

SEQ ID NO: 217613 - DNA, 33 bp, Homo sapien
aggcagaatcctgttacgttgcccggccgtagt

SEQ ID NO: 217614 - DNA, 33 bp, Homo sapien
aggcagaatcctgttatgttgcccggccgtagt

SEQ ID NO: 217615 - DNA, 33 bp, Homo sapien
agcaaaggcacagagacctgaacacaaacatga

SEQ ID NO: 217616 - DNA, 33 bp, Homo sapien
agcaaaggcacagagagctgaacacaaacatga

SEQ ID NO: 217617 - DNA, 33 bp, Homo sapien
ctgcatctatgtctaaaaaaaacactagagaag

SEQ ID NO: 217618 - DNA, 33 bp, Homo sapien
ctgcatctatgtctaagaaaaacactagagaag

SEQ ID NO: 217619 - DNA, 33 bp, Homo sapien
gtgctttaagaactcgcagctctggccgggcca

SEQ ID NO: 217620 - DNA, 33 bp, Homo sapien
gtgctttaagaactcgtagctctggccgggcca

SEQ ID NO: 217621 - DNA, 33 bp, Homo sapien
aaataataaacaatggaacctccactctggaca

SEQ ID NO: 217622 - DNA, 33 bp, Homo sapien
aaataataaacaatggcacctccactctggaca

SEQ ID NO: 217623 - DNA, 33 bp, Homo sapien
ctcagtaacccttaacagtcaattctctagact

SEQ ID NO: 217624 - DNA, 33 bp, Homo sapien
ctcagtaacccttaacggtcaattctctagact

SEQ ID NO: 217625 - DNA, 33 bp, Homo sapien
actaaattgctcaaataattatggctgtgttta

SEQ ID NO: 217626 - DNA, 33 bp, Homo sapien
actaaattgctcaaatgattatggctgtgttta

SEQ ID NO: 217627 - DNA, 33 bp, Homo sapien
tctgcctgaatcaaaccacaaaaatagccagat

SEQ ID NO: 217628 - DNA, 33 bp, Homo sapien
tctgcctgaatcaaactacaaaaatagccagat

SEQ ID NO: 217629 - DNA, 33 bp, Homo sapien
tcacataagatgacaacattcctgacgcaaatt

SEQ ID NO: 217630 - DNA, 33 bp, Homo sapien
tcacataagatgacaatattcctgacgcaaatt

SEQ ID NO: 217631 - DNA, 33 bp, Homo sapien
tggaggttcaataccccagtaaagagcacatga

SEQ ID NO: 217632 - DNA, 33 bp, Homo sapien
tggaggttcaatacccgagtaaagagcacatga

SEQ ID NO: 217633 - DNA, 33 bp, Homo sapien
caagctgagatgcacaaacattagttgataaca

SEQ ID NO: 217634 - DNA, 33 bp, Homo sapien
caagctgagatgcacacacattagttgataaca

SEQ ID NO: 217635 - DNA, 33 bp, Homo sapien
ccattatgtcatactaacttaaatctattttac

SEQ ID NO: 217636 - DNA, 33 bp, Homo sapien
ccattatgtcatactagcttaaatctattttac

SEQ ID NO: 217637 - DNA, 33 bp, Homo sapien
cagatgtcattgtgtaaattcttaatgttcttt

SEQ ID NO: 217638 - DNA, 33 bp, Homo sapien
cagatgtcattgtgtagattcttaatgttcttt

SEQ ID NO: 217639 - DNA, 33 bp, Homo sapien
gagtgctagaatgggaatagtttaggtggcttt

SEQ ID NO: 217640 - DNA, 33 bp, Homo sapien
gagtgctagaatgggagtagtttaggtggcttt

SEQ ID NO: 217641 - DNA, 33 bp, Homo sapien
tttgttctaaatgtcaacttggcttggtggttg

SEQ ID NO: 217642 - DNA, 33 bp, Homo sapien
tttgttctaaatgtcagcttggcttggtggttg

SEQ ID NO: 217643 - DNA, 33 bp, Homo sapien
agaaatttatagttgtaaaaatcagccactgtc

SEQ ID NO: 217644 - DNA, 33 bp, Homo sapien
agaaatttatagttgtgaaaatcagccactgtc

SEQ ID NO: 217645 - DNA, 33 bp, Homo sapien
tcatggtctctcttccccaataccccatcatct

SEQ ID NO: 217646 - DNA, 33 bp, Homo sapien
tcatggtctctcttcctcaataccccatcatct

SEQ ID NO: 217647 - DNA, 33 bp, Homo sapien
attaaaaaaagatacacgaatgcaatatttaca

SEQ ID NO: 217648 - DNA, 33 bp, Homo sapien
attaaaaaaagatacatgaatgcaatatttaca

SEQ ID NO: 217649 - DNA, 33 bp, Homo sapien
tctttttcaatagggaactcttttgggcactgt

SEQ ID NO: 217650 - DNA, 33 bp, Homo sapien
tctttttcaatagggatctcttttgggcactgt

SEQ ID NO: 217651 - DNA, 33 bp, Homo sapien
cattagtcttcacaaacgtactggtaaaataaa

SEQ ID NO: 217652 - DNA, 33 bp, Homo sapien
cattagtcttcacaaatgtactggtaaaataaa

SEQ ID NO: 217653 - DNA, 33 bp, Homo sapien
tctgaagggtttttagaagagggacagaattag

SEQ ID NO: 217654 - DNA, 33 bp, Homo sapien
tctgaagggtttttaggagagggacagaattag

SEQ ID NO: 217655 - DNA, 33 bp, Homo sapien
ttgtcactcttgccaaaattctccaatggactc

SEQ ID NO: 217656 - DNA, 33 bp, Homo sapien
ttgtcactcttgccaacattctccaatggactc

SEQ ID NO: 217657 - DNA, 33 bp, Homo sapien
gaccagagtcctttgaaaagaacattcaaatcc

SEQ ID NO: 217658 - DNA, 33 bp, Homo sapien
gaccagagtcctttgagaagaacattcaaatcc

SEQ ID NO: 217659 - DNA, 33 bp, Homo sapien
ccgattcctttattaccctagttcagttctgta

SEQ ID NO: 217660 - DNA, 33 bp, Homo sapien
ccgattcctttattactctagttcagttctgta

SEQ ID NO: 217661 - DNA, 33 bp, Homo sapien
acatttctgttttatgcaggcatcttgtatagg

SEQ ID NO: 217662 - DNA, 33 bp, Homo sapien
acatttctgttttatgtaggcatcttgtatagg

SEQ ID NO: 217663 - DNA, 33 bp, Homo sapien
atcacattgtgcagtaaaaaaggctaagctgag

SEQ ID NO: 217664 - DNA, 33 bp, Homo sapien
atcacattgtgcagtagaaaaggctaagctgag

SEQ ID NO: 217665 - DNA, 33 bp, Homo sapien
tttggaaacttcttagaaaagcatggccatatc

SEQ ID NO: 217666 - DNA, 33 bp, Homo sapien
tttggaaacttcttaggaaagcatggccatatc

SEQ ID NO: 217667 - DNA, 33 bp, Homo sapien
agctggaactggcctaaaagtaaaatcagaata

SEQ ID NO: 217668 - DNA, 33 bp, Homo sapien
agctggaactggcctagaagtaaaatcagaata

SEQ ID NO: 217669 - DNA, 33 bp, Homo sapien
aattaaggcatacccaaaatgtaatattataca

SEQ ID NO: 217670 - DNA, 33 bp, Homo sapien
aattaaggcatacccagaatgtaatattataca

SEQ ID NO: 217671 - DNA, 33 bp, Homo sapien
ttgttcttcctggaaaaggcaatgttttctatt

SEQ ID NO: 217672 - DNA, 33 bp, Homo sapien
ttgttcttcctggaaatggcaatgttttctatt

SEQ ID NO: 217673 - DNA, 33 bp, Homo sapien
tttccctggaatgaaacctctaagcaagagtaa

SEQ ID NO: 217674 - DNA, 33 bp, Homo sapien
tttccctggaatgaaatctctaagcaagagtaa

SEQ ID NO: 217675 - DNA, 33 bp, Homo sapien
aaaatttgtggttagaatagaagtggtagaggg

SEQ ID NO: 217676 - DNA, 33 bp, Homo sapien
aaaatttgtggttagagtagaagtggtagaggg

SEQ ID NO: 217677 - DNA, 33 bp, Homo sapien
tgcacaggaattttagaacagtctgtcttaaca

SEQ ID NO: 217678 - DNA, 33 bp, Homo sapien
tgcacaggaattttaggacagtctgtcttaaca

SEQ ID NO: 217679 - DNA, 33 bp, Homo sapien
tctaaggtcccttcaagaactaacgtgacatga

SEQ ID NO: 217680 - DNA, 33 bp, Homo sapien
tctaaggtcccttcaataactaacgtgacatga

SEQ ID NO: 217681 - DNA, 33 bp, Homo sapien
ccaaatgttgctctacagaaatagtcaagaaaa

SEQ ID NO: 217682 - DNA, 33 bp, Homo sapien
ccaaatgttgctctacggaaatagtcaagaaaa

SEQ ID NO: 217683 - DNA, 33 bp, Homo sapien
cctgagtgggacagtcactagtttgtgctggta

SEQ ID NO: 217684 - DNA, 33 bp, Homo sapien
cctgagtgggacagtccctagtttgtgctggta

SEQ ID NO: 217685 - DNA, 33 bp, Homo sapien
catataatgatacatacctaattcttgagtatc

SEQ ID NO: 217686 - DNA, 33 bp, Homo sapien
catataatgatacatagctaattcttgagtatc

SEQ ID NO: 217687 - DNA, 33 bp, Homo sapien
aaattatagcttgtggcagattgtatgttccaa

SEQ ID NO: 217688 - DNA, 33 bp, Homo sapien
aaattatagcttgtggtagattgtatgttccaa

SEQ ID NO: 217689 - DNA, 33 bp, Homo sapien
attaaccatcacaccacatttttccgcctttga

SEQ ID NO: 217690 - DNA, 33 bp, Homo sapien
attaaccatcacaccatatttttccgcctttga

SEQ ID NO: 217691 - DNA, 33 bp, Homo sapien
ttggccccatctgcgcacctgaacgcaatgctt

SEQ ID NO: 217692 - DNA, 33 bp, Homo sapien
ttggccccatctgcgcgcctgaacgcaatgctt

SEQ ID NO: 217693 - DNA, 33 bp, Homo sapien
aaagaagttccagatacgtgctgctatcattat

SEQ ID NO: 217694 - DNA, 33 bp, Homo sapien
aaagaagttccagatatgtgctgctatcattat

SEQ ID NO: 217695 - DNA, 33 bp, Homo sapien
tgaacacattaaacagcaggttgcttattcctt

SEQ ID NO: 217696 - DNA, 33 bp, Homo sapien
tgaacacattaaacagtaggttgcttattcctt

SEQ ID NO: 217697 - DNA, 33 bp, Homo sapien
gtccttgtttatgggaagatttattatacacct

SEQ ID NO: 217698 - DNA, 33 bp, Homo sapien
gtccttgtttatgggaggatttattatacacct

SEQ ID NO: 217699 - DNA, 33 bp, Homo sapien
acaccgactgtgtcaagtataagccttatcttc

SEQ ID NO: 217700 - DNA, 33 bp, Homo sapien
acaccgactgtgtcaattataagccttatcttc

SEQ ID NO: 217701 - DNA, 33 bp, Homo sapien
taattagtgcccagtaaatctatgctatacatg

SEQ ID NO: 217702 - DNA, 33 bp, Homo sapien
taattagtgcccagtacatctatgctatacatg

SEQ ID NO: 217703 - DNA, 33 bp, Homo sapien
actgaggcaagaatctcaatcaatccaggttta

SEQ ID NO: 217704 - DNA, 33 bp, Homo sapien
actgaggcaagaatctgaatcaatccaggttta

SEQ ID NO: 217705 - DNA, 33 bp, Homo sapien
ctgtggtcaggaatccagctgtaccattgaagg

SEQ ID NO: 217706 - DNA, 33 bp, Homo sapien
ctgtggtcaggaatccggctgtaccattgaagg

SEQ ID NO: 217707 - DNA, 33 bp, Homo sapien
acctgcaagagggaccaattattagagaactgg

SEQ ID NO: 217708 - DNA, 33 bp, Homo sapien
acctgcaagagggaccgattattagagaactgg

SEQ ID NO: 217709 - DNA, 33 bp, Homo sapien
ctagatattgacacataagcttccacctttttt

SEQ ID NO: 217710 - DNA, 33 bp, Homo sapien
ctagatattgacacattagcttccacctttttt

SEQ ID NO: 217711 - DNA, 33 bp, Homo sapien
aatgcaatcagcaacgaatcaggctgacctgcg

SEQ ID NO: 217712 - DNA, 33 bp, Homo sapien
aatgcaatcagcaacggatcaggctgacctgcg

SEQ ID NO: 217713 - DNA, 33 bp, Homo sapien
tcattgtgcctaaaccacactttatttctcata

SEQ ID NO: 217714 - DNA, 33 bp, Homo sapien
tcattgtgcctaaaccgcactttatttctcata

SEQ ID NO: 217715 - DNA, 33 bp, Homo sapien
tataaaggttatcccaatataagctataccaca

SEQ ID NO: 217716 - DNA, 33 bp, Homo sapien
tataaaggttatcccagtataagctataccaca

SEQ ID NO: 217717 - DNA, 33 bp, Homo sapien
catcacagttgtcctcaactacagaaacagatc

SEQ ID NO: 217718 - DNA, 33 bp, Homo sapien
catcacagttgtcctcgactacagaaacagatc

SEQ ID NO: 217719 - DNA, 33 bp, Homo sapien
gactgagacttaatcaaaggactatagaacata

SEQ ID NO: 217720 - DNA, 33 bp, Homo sapien
gactgagacttaatcacaggactatagaacata

SEQ ID NO: 217721 - DNA, 33 bp, Homo sapien
cctcacaaattagaaacgcaaatacaaagaacc

SEQ ID NO: 217722 - DNA, 33 bp, Homo sapien
cctcacaaattagaaatgcaaatacaaagaacc

SEQ ID NO: 217723 - DNA, 33 bp, Homo sapien
gttacatctaaagccccgctcaattattctccc

SEQ ID NO: 217724 - DNA, 33 bp, Homo sapien
gttacatctaaagccctgctcaattattctccc

SEQ ID NO: 217725 - DNA, 33 bp, Homo sapien
gattagaaggcaccacagaagagtcttgaatta

SEQ ID NO: 217726 - DNA, 33 bp, Homo sapien
gattagaaggcaccacggaagagtcttgaatta

SEQ ID NO: 217727 - DNA, 33 bp, Homo sapien
aatgcagtagccctgcaacaatagctctgataa

SEQ ID NO: 217728 - DNA, 33 bp, Homo sapien
aatgcagtagccctgcgacaatagctctgataa

SEQ ID NO: 217729 - DNA, 33 bp, Homo sapien
gcttgaactcggaggaagttatagtgagccgag

SEQ ID NO: 217730 - DNA, 33 bp, Homo sapien
gcttgaactcggaggaggttatagtgagccgag

SEQ ID NO: 217731 - DNA, 33 bp, Homo sapien
ctctctagagaggcaacgttttacttgagattt

SEQ ID NO: 217732 - DNA, 33 bp, Homo sapien
ctctctagagaggcaatgttttacttgagattt

SEQ ID NO: 217733 - DNA, 33 bp, Homo sapien
actactgagaaattaactgtgatttggatagag

SEQ ID NO: 217734 - DNA, 33 bp, Homo sapien
actactgagaaattaattgtgatttggatagag

SEQ ID NO: 217735 - DNA, 33 bp, Homo sapien
ccatcaactcacaaacaggattaccaaacacac

SEQ ID NO: 217736 - DNA, 33 bp, Homo sapien
ccatcaactcacaaactggattaccaaacacac

SEQ ID NO: 217737 - DNA, 33 bp, Homo sapien
attaccaaacacacaaaaaggcaatcactgtga

SEQ ID NO: 217738 - DNA, 33 bp, Homo sapien
attaccaaacacacaagaaggcaatcactgtga

SEQ ID NO: 217739 - DNA, 33 bp, Homo sapien
taaattggcttaaaacgaaaataaatgtgggat

SEQ ID NO: 217740 - DNA, 33 bp, Homo sapien
taaattggcttaaaactaaaataaatgtgggat

SEQ ID NO: 217741 - DNA, 33 bp, Homo sapien
ttcagtgcaagattccactagtttttaaaatca

SEQ ID NO: 217742 - DNA, 33 bp, Homo sapien
ttcagtgcaagattcctctagtttttaaaatca

SEQ ID NO: 217743 - DNA, 33 bp, Homo sapien
tacaggagtcaggataagtgagcatcaaaatat

SEQ ID NO: 217744 - DNA, 33 bp, Homo sapien
tacaggagtcaggataggtgagcatcaaaatat

SEQ ID NO: 217745 - DNA, 33 bp, Homo sapien
tacatattagtagccaatgagaatcaagattca

SEQ ID NO: 217746 - DNA, 33 bp, Homo sapien
tacatattagtagccagtgagaatcaagattca

SEQ ID NO: 217747 - DNA, 33 bp, Homo sapien
ccaacagggtgattgtcacaacagcactgagca

SEQ ID NO: 217748 - DNA, 33 bp, Homo sapien
ccaacagggtgattgttacaacagcactgagca

SEQ ID NO: 217749 - DNA, 33 bp, Homo sapien
acagtcactaccctaaagagctcagagtctcaa

SEQ ID NO: 217750 - DNA, 33 bp, Homo sapien
acagtcactaccctaacgagctcagagtctcaa

SEQ ID NO: 217751 - DNA, 33 bp, Homo sapien
tagtgccacagttctaaagtttaaaactggtcg

SEQ ID NO: 217752 - DNA, 33 bp, Homo sapien
tagtgccacagttctagagtttaaaactggtcg

SEQ ID NO: 217753 - DNA, 33 bp, Homo sapien
atcacacgtggacttgaaaaatgagtgcaaagt

SEQ ID NO: 217754 - DNA, 33 bp, Homo sapien
atcacacgtggacttggaaaatgagtgcaaagt

SEQ ID NO: 217755 - DNA, 33 bp, Homo sapien
tattttgtggagaagacattaaggctcacagag

SEQ ID NO: 217756 - DNA, 33 bp, Homo sapien
tattttgtggagaagatattaaggctcacagag

SEQ ID NO: 217757 - DNA, 33 bp, Homo sapien
gtcaatatttttgtcaaggtaatgatgcaaaga

SEQ ID NO: 217758 - DNA, 33 bp, Homo sapien
gtcaatatttttgtcagggtaatgatgcaaaga

SEQ ID NO: 217759 - DNA, 33 bp, Homo sapien
tatcattagaatgtcactctgtacaaatttatg

SEQ ID NO: 217760 - DNA, 33 bp, Homo sapien
tatcattagaatgtcagtctgtacaaatttatg

SEQ ID NO: 217761 - DNA, 33 bp, Homo sapien
ataatgttattgcatacctagtaggttacagta

SEQ ID NO: 217762 - DNA, 33 bp, Homo sapien
ataatgttattgcatatctagtaggttacagta

SEQ ID NO: 217763 - DNA, 33 bp, Homo sapien
aatgacactatgatgagctgggccaaggacact

SEQ ID NO: 217764 - DNA, 33 bp, Homo sapien
aatgacactatgatgatctgggccaaggacact

SEQ ID NO: 217765 - DNA, 33 bp, Homo sapien
agaacgctagcaggacagtacctacaccgcctc

SEQ ID NO: 217766 - DNA, 33 bp, Homo sapien
agaacgctagcaggaccgtacctacaccgcctc

SEQ ID NO: 217767 - DNA, 33 bp, Homo sapien
agatagagtttttccaatacagatgtaagtcag

SEQ ID NO: 217768 - DNA, 33 bp, Homo sapien
agatagagtttttccagtacagatgtaagtcag

SEQ ID NO: 217769 - DNA, 33 bp, Homo sapien
tctgacacccgtcttccacctctcagggaagag

SEQ ID NO: 217770 - DNA, 33 bp, Homo sapien
tctgacacccgtcttctacctctcagggaagag

SEQ ID NO: 217771 - DNA, 33 bp, Homo sapien
aaaaggggatttagtagaatatggttgaaagca

SEQ ID NO: 217772 - DNA, 33 bp, Homo sapien
aaaaggggatttagtataatatggttgaaagca

SEQ ID NO: 217773 - DNA, 33 bp, Homo sapien
tttaaacccagttttaggtgactctagagtctg

SEQ ID NO: 217774 - DNA, 33 bp, Homo sapien
tttaaacccagttttatgtgactctagagtctg

SEQ ID NO: 217775 - DNA, 33 bp, Homo sapien
gttgtaagaatttccaaatcaagcactcaatat

SEQ ID NO: 217776 - DNA, 33 bp, Homo sapien
gttgtaagaatttccatatcaagcactcaatat

SEQ ID NO: 217777 - DNA, 33 bp, Homo sapien
cccagaataagactcacgaaacagatatgagca

SEQ ID NO: 217778 - DNA, 33 bp, Homo sapien
cccagaataagactcaggaaacagatatgagca

SEQ ID NO: 217779 - DNA, 33 bp, Homo sapien
gagtgacagtcagaggacctcaataattgatga

SEQ ID NO: 217780 - DNA, 33 bp, Homo sapien
gagtgacagtcagaggtcctcaataattgatga

SEQ ID NO: 217781 - DNA, 33 bp, Homo sapien
aattgcaagggacctaaaatactcaaaacaatc

SEQ ID NO: 217782 - DNA, 33 bp, Homo sapien
aattgcaagggacctagaatactcaaaacaatc

SEQ ID NO: 217783 - DNA, 33 bp, Homo sapien
tgaaaagctgtagtacccaaacctgtgtggctg

SEQ ID NO: 217784 - DNA, 33 bp, Homo sapien
tgaaaagctgtagtactcaaacctgtgtggctg

SEQ ID NO: 217785 - DNA, 33 bp, Homo sapien
ttaagaagagtgccagaatcttcaaatgaggaa

SEQ ID NO: 217786 - DNA, 33 bp, Homo sapien
ttaagaagagtgccaggatcttcaaatgaggaa

SEQ ID NO: 217787 - DNA, 33 bp, Homo sapien
ctttacagctgtttgagcttaagttacatagcc

SEQ ID NO: 217788 - DNA, 33 bp, Homo sapien
ctttacagctgtttgatcttaagttacatagcc

SEQ ID NO: 217789 - DNA, 33 bp, Homo sapien
tcatttgtgggacttaacctttaagttgctttt

SEQ ID NO: 217790 - DNA, 33 bp, Homo sapien
tcatttgtgggacttaccctttaagttgctttt

SEQ ID NO: 217791 - DNA, 33 bp, Homo sapien
tggggcttgtccagcaacttaacaaaatgatga

SEQ ID NO: 217792 - DNA, 33 bp, Homo sapien
tggggcttgtccagcatcttaacaaaatgatga

SEQ ID NO: 217793 - DNA, 33 bp, Homo sapien
cagcctgtaaatctaaaatgagtagaaggaaaa

SEQ ID NO: 217794 - DNA, 33 bp, Homo sapien
cagcctgtaaatctaagatgagtagaaggaaaa

SEQ ID NO: 217795 - DNA, 33 bp, Homo sapien
aggtaggatgtaattacagggattgacaatcaa

SEQ ID NO: 217796 - DNA, 33 bp, Homo sapien
aggtaggatgtaattatagggattgacaatcaa

SEQ ID NO: 217797 - DNA, 33 bp, Homo sapien
cacaatattctttacaccagtcatttcctgttt

SEQ ID NO: 217798 - DNA, 33 bp, Homo sapien
cacaatattctttacatcagtcatttcctgttt

SEQ ID NO: 217799 - DNA, 33 bp, Homo sapien
gcacatccatttattcaccctgttaccgaaatg

SEQ ID NO: 217800 - DNA, 33 bp, Homo sapien
gcacatccatttattcgccctgttaccgaaatg

SEQ ID NO: 217801 - DNA, 33 bp, Homo sapien
tctccagaacttgagcaataaatgttcgttgtt

SEQ ID NO: 217802 - DNA, 33 bp, Homo sapien
tctccagaacttgagcgataaatgttcgttgtt

SEQ ID NO: 217803 - DNA, 33 bp, Homo sapien
cattaagagacaggtaacagctttaataattta

SEQ ID NO: 217804 - DNA, 33 bp, Homo sapien
cattaagagacaggtagcagctttaataattta

SEQ ID NO: 217805 - DNA, 33 bp, Homo sapien
agagatagtttgaaaacagtccaaaaggaagat

SEQ ID NO: 217806 - DNA, 33 bp, Homo sapien
agagatagtttgaaaatagtccaaaaggaagat

SEQ ID NO: 217807 - DNA, 33 bp, Homo sapien
attcctgaggattttcaccaagtgttgagtgta

SEQ ID NO: 217808 - DNA, 33 bp, Homo sapien
attcctgaggattttccccaagtgttgagtgta

SEQ ID NO: 217809 - DNA, 33 bp, Homo sapien
tcacataatcagaaaccaccaaactcttttcaa

SEQ ID NO: 217810 - DNA, 33 bp, Homo sapien
tcacataatcagaaactaccaaactcttttcaa

SEQ ID NO: 217811 - DNA, 33 bp, Homo sapien
ctcccaatctaagtccagcggttatacccaagg

SEQ ID NO: 217812 - DNA, 33 bp, Homo sapien
ctcccaatctaagtccggcggttatacccaagg

SEQ ID NO: 217813 - DNA, 33 bp, Homo sapien
ttgattggttgaggtagaggcaacattcctcat

SEQ ID NO: 217814 - DNA, 33 bp, Homo sapien
ttgattggttgaggtataggcaacattcctcat

SEQ ID NO: 217815 - DNA, 33 bp, Homo sapien
ccccttgaaggccacagattccttttctggggg

SEQ ID NO: 217816 - DNA, 33 bp, Homo sapien
ccccttgaaggccacatattccttttctggggg

SEQ ID NO: 217817 - DNA, 33 bp, Homo sapien
tgagcccagctggtaacgaagacttataacagt

SEQ ID NO: 217818 - DNA, 33 bp, Homo sapien
tgagcccagctggtaatgaagacttataacagt

SEQ ID NO: 217819 - DNA, 33 bp, Homo sapien
gatctgcccgctttgaccttgcaaagtactagg

SEQ ID NO: 217820 - DNA, 33 bp, Homo sapien
gatctgcccgctttgatcttgcaaagtactagg

SEQ ID NO: 217821 - DNA, 33 bp, Homo sapien
catttgcataagttcaataacaatttgctgtct

SEQ ID NO: 217822 - DNA, 33 bp, Homo sapien
catttgcataagttcagtaacaatttgctgtct

SEQ ID NO: 217823 - DNA, 33 bp, Homo sapien
cagatacagataagggaactagcacaggcagct

SEQ ID NO: 217824 - DNA, 33 bp, Homo sapien
cagatacagataagggcactagcacaggcagct

SEQ ID NO: 217825 - DNA, 33 bp, Homo sapien
cattgaactgacagatcaggcctacaatcatga

SEQ ID NO: 217826 - DNA, 33 bp, Homo sapien
cattgaactgacagattaggcctacaatcatga

SEQ ID NO: 217827 - DNA, 33 bp, Homo sapien
catccactatcattaccatgactccctcctcca

SEQ ID NO: 217828 - DNA, 33 bp, Homo sapien
catccactatcattactatgactccctcctcca

SEQ ID NO: 217829 - DNA, 33 bp, Homo sapien
tcctaaagaagcagctgaatttgatgtgaactg

SEQ ID NO: 217830 - DNA, 33 bp, Homo sapien
tcctaaagaagcagcttaatttgatgtgaactg

SEQ ID NO: 217831 - DNA, 33 bp, Homo sapien
tgtcaatcagccattgccaatcatagactgtgc

SEQ ID NO: 217832 - DNA, 33 bp, Homo sapien
tgtcaatcagccattgtcaatcatagactgtgc

SEQ ID NO: 217833 - DNA, 33 bp, Homo sapien
gcaagcagctaaatcacattccatacagacaag

SEQ ID NO: 217834 - DNA, 33 bp, Homo sapien
gcaagcagctaaatcatattccatacagacaag

SEQ ID NO: 217835 - DNA, 33 bp, Homo sapien
tttgtgacttttacaaaaggttgtagtttttgt

SEQ ID NO: 217836 - DNA, 33 bp, Homo sapien
tttgtgacttttacaacaggttgtagtttttgt

SEQ ID NO: 217837 - DNA, 33 bp, Homo sapien
tgaagacattgagctcaaagagatgaatacatt

SEQ ID NO: 217838 - DNA, 33 bp, Homo sapien
tgaagacattgagctcgaagagatgaatacatt

SEQ ID NO: 217839 - DNA, 33 bp, Homo sapien
ttagtttgaatttatccaagtcgacagagtaca

SEQ ID NO: 217840 - DNA, 33 bp, Homo sapien
ttagtttgaatttatctaagtcgacagagtaca

SEQ ID NO: 217841 - DNA, 33 bp, Homo sapien
agacattaaatcctaacggacactaagccctcc

SEQ ID NO: 217842 - DNA, 33 bp, Homo sapien
agacattaaatcctaatggacactaagccctcc

SEQ ID NO: 217843 - DNA, 33 bp, Homo sapien
tgcatgttgttccaaccacttgggggcctgagg

SEQ ID NO: 217844 - DNA, 33 bp, Homo sapien
tgcatgttgttccaactacttgggggcctgagg

SEQ ID NO: 217845 - DNA, 33 bp, Homo sapien
gtccccattttatagacgagagaacaggcagag

SEQ ID NO: 217846 - DNA, 33 bp, Homo sapien
gtccccattttatagatgagagaacaggcagag

SEQ ID NO: 217847 - DNA, 33 bp, Homo sapien
agctcctgatgcatggcaagtgcccaataaatg

SEQ ID NO: 217848 - DNA, 33 bp, Homo sapien
agctcctgatgcatggtaagtgcccaataaatg

SEQ ID NO: 217849 - DNA, 33 bp, Homo sapien
ctgaatttctgctaagacagcattacatgtccc

SEQ ID NO: 217850 - DNA, 33 bp, Homo sapien
ctgaatttctgctaaggcagcattacatgtccc

SEQ ID NO: 217851 - DNA, 33 bp, Homo sapien
aaccaggagcataaaacgtatagttccaatctc

SEQ ID NO: 217852 - DNA, 33 bp, Homo sapien
aaccaggagcataaaatgtatagttccaatctc

SEQ ID NO: 217853 - DNA, 33 bp, Homo sapien
aaaaagaaaaagaaaactgagcttatagtacag

SEQ ID NO: 217854 - DNA, 33 bp, Homo sapien
aaaaagaaaaagaaaattgagcttatagtacag

SEQ ID NO: 217855 - DNA, 33 bp, Homo sapien
tcctataaagctcttacatgggaatgctctgta

SEQ ID NO: 217856 - DNA, 33 bp, Homo sapien
tcctataaagctcttatatgggaatgctctgta

SEQ ID NO: 217857 - DNA, 33 bp, Homo sapien
tatccaatgggtcttacgggttttgataaatgc

SEQ ID NO: 217858 - DNA, 33 bp, Homo sapien
tatccaatgggtcttatgggttttgataaatgc

SEQ ID NO: 217859 - DNA, 33 bp, Homo sapien
tagcatggattacttacaagaaagtctgttaaa

SEQ ID NO: 217860 - DNA, 33 bp, Homo sapien
tagcatggattacttagaagaaagtctgttaaa

SEQ ID NO: 217861 - DNA, 33 bp, Homo sapien
agcacagctaacgataagtgctcgtcagctgct

SEQ ID NO: 217862 - DNA, 33 bp, Homo sapien
agcacagctaacgatacgtgctcgtcagctgct

SEQ ID NO: 217863 - DNA, 33 bp, Homo sapien
tttacgaaggagtaccccagtgtcagtgtaatt

SEQ ID NO: 217864 - DNA, 33 bp, Homo sapien
tttacgaaggagtacctcagtgtcagtgtaatt

SEQ ID NO: 217865 - DNA, 33 bp, Homo sapien
aagcttctcaggaaacccgacagaagaaacatg

SEQ ID NO: 217866 - DNA, 33 bp, Homo sapien
aagcttctcaggaaacgcgacagaagaaacatg

SEQ ID NO: 217867 - DNA, 33 bp, Homo sapien
gatgttaccattttaaatatagtgataacacag

SEQ ID NO: 217868 - DNA, 33 bp, Homo sapien
gatgttaccattttaactatagtgataacacag

SEQ ID NO: 217869 - DNA, 33 bp, Homo sapien
attagtatgaatgtgaccttttaaacagctatg

SEQ ID NO: 217870 - DNA, 33 bp, Homo sapien
attagtatgaatgtgatcttttaaacagctatg

SEQ ID NO: 217871 - DNA, 33 bp, Homo sapien
tgccccactgtgatgtcaatgtcaaaatatatt

SEQ ID NO: 217872 - DNA, 33 bp, Homo sapien
tgccccactgtgatgtgaatgtcaaaatatatt

SEQ ID NO: 217873 - DNA, 33 bp, Homo sapien
aaagaaactgagctgtcaaggtttcaaattagt

SEQ ID NO: 217874 - DNA, 33 bp, Homo sapien
aaagaaactgagctgtgaaggtttcaaattagt

SEQ ID NO: 217875 - DNA, 33 bp, Homo sapien
aaagctaaaagcacaaaaaattgcaatgtttca

SEQ ID NO: 217876 - DNA, 33 bp, Homo sapien
aaagctaaaagcacaagaaattgcaatgtttca

SEQ ID NO: 217877 - DNA, 33 bp, Homo sapien
gagaattacactgataaaatttactagcactac

SEQ ID NO: 217878 - DNA, 33 bp, Homo sapien
gagaattacactgatacaatttactagcactac

SEQ ID NO: 217879 - DNA, 33 bp, Homo sapien
accaaatattagctacaggcttaagtcatatat

SEQ ID NO: 217880 - DNA, 33 bp, Homo sapien
accaaatattagctactggcttaagtcatatat

SEQ ID NO: 217881 - DNA, 33 bp, Homo sapien
tttaattcctaggcccaactaaagatgccactt

SEQ ID NO: 217882 - DNA, 33 bp, Homo sapien
tttaattcctaggccccactaaagatgccactt

SEQ ID NO: 217883 - DNA, 33 bp, Homo sapien
ttatgcatcgactaaaagtaaaatgaccaaaaa

SEQ ID NO: 217884 - DNA, 33 bp, Homo sapien
ttatgcatcgactaaaggtaaaatgaccaaaaa

SEQ ID NO: 217885 - DNA, 33 bp, Homo sapien
ccaagatttgaaataaactgaacttagaagcag

SEQ ID NO: 217886 - DNA, 33 bp, Homo sapien
ccaagatttgaaataagctgaacttagaagcag

SEQ ID NO: 217887 - DNA, 33 bp, Homo sapien
gtctggcaaatatgcaatgaaatgtgtcaaaga

SEQ ID NO: 217888 - DNA, 33 bp, Homo sapien
gtctggcaaatatgcagtgaaatgtgtcaaaga

SEQ ID NO: 217889 - DNA, 33 bp, Homo sapien
gagaactccaggggccactgatgtaagtcctag

SEQ ID NO: 217890 - DNA, 33 bp, Homo sapien
gagaactccaggggccgctgatgtaagtcctag

SEQ ID NO: 217891 - DNA, 33 bp, Homo sapien
atattgatgatcctgactataagtaggcctaga

SEQ ID NO: 217892 - DNA, 33 bp, Homo sapien
atattgatgatcctgagtataagtaggcctaga

SEQ ID NO: 217893 - DNA, 33 bp, Homo sapien
gtgcaccgtaatgttgcaggctttcacattcaa

SEQ ID NO: 217894 - DNA, 33 bp, Homo sapien
gtgcaccgtaatgttgtaggctttcacattcaa

SEQ ID NO: 217895 - DNA, 33 bp, Homo sapien
cttattgtgagttcctcaaattgtcaagtactg

SEQ ID NO: 217896 - DNA, 33 bp, Homo sapien
cttattgtgagttccttaaattgtcaagtactg

SEQ ID NO: 217897 - DNA, 33 bp, Homo sapien
catgggcccggctgagaccagcgacagtaaaca

SEQ ID NO: 217898 - DNA, 33 bp, Homo sapien
catgggcccggctgaggccagcgacagtaaaca

SEQ ID NO: 217899 - DNA, 33 bp, Homo sapien
atgtaggttctagaaaattccactttacactca

SEQ ID NO: 217900 - DNA, 33 bp, Homo sapien
atgtaggttctagaaatttccactttacactca

SEQ ID NO: 217901 - DNA, 33 bp, Homo sapien
ggctggtaatggctccaaggacatcttggctct

SEQ ID NO: 217902 - DNA, 33 bp, Homo sapien
ggctggtaatggctccgaggacatcttggctct

SEQ ID NO: 217903 - DNA, 33 bp, Homo sapien
gttgactccgttctcacagacttttctggggca

SEQ ID NO: 217904 - DNA, 33 bp, Homo sapien
gttgactccgttctcagagacttttctggggca

SEQ ID NO: 217905 - DNA, 33 bp, Homo sapien
tgccggctccactgtgccaagtgaaaataactt

SEQ ID NO: 217906 - DNA, 33 bp, Homo sapien
tgccggctccactgtgtcaagtgaaaataactt

SEQ ID NO: 217907 - DNA, 33 bp, Homo sapien
aaagtttgaagaagtaagactgggatttcaata

SEQ ID NO: 217908 - DNA, 33 bp, Homo sapien
aaagtttgaagaagtaggactgggatttcaata

SEQ ID NO: 217909 - DNA, 33 bp, Homo sapien
acaaacagttacaagacctgattggttatgatc

SEQ ID NO: 217910 - DNA, 33 bp, Homo sapien
acaaacagttacaagatctgattggttatgatc

SEQ ID NO: 217911 - DNA, 33 bp, Homo sapien
tatataggaaaaaacaagaatgctgaacagaat

SEQ ID NO: 217912 - DNA, 33 bp, Homo sapien
tatataggaaaaaacaggaatgctgaacagaat

SEQ ID NO: 217913 - DNA, 33 bp, Homo sapien
ggatatattttcacagcagcttttagtgtagcc

SEQ ID NO: 217914 - DNA, 33 bp, Homo sapien
ggatatattttcacagtagcttttagtgtagcc

SEQ ID NO: 217915 - DNA, 33 bp, Homo sapien
gaggatgtagagggataagaaattacttaatgg

SEQ ID NO: 217916 - DNA, 33 bp, Homo sapien
gaggatgtagagggatgagaaattacttaatgg

SEQ ID NO: 217917 - DNA, 33 bp, Homo sapien
tgacggcaaacagtcccagcaggtcacttcatt

SEQ ID NO: 217918 - DNA, 33 bp, Homo sapien
tgacggcaaacagtcctagcaggtcacttcatt

SEQ ID NO: 217919 - DNA, 33 bp, Homo sapien
ataaggacatcacttgaataagataagggtttt

SEQ ID NO: 217920 - DNA, 33 bp, Homo sapien
ataaggacatcacttgtataagataagggtttt

SEQ ID NO: 217921 - DNA, 33 bp, Homo sapien
taggtagcacagtatacaagcttacattaaaat

SEQ ID NO: 217922 - DNA, 33 bp, Homo sapien
taggtagcacagtatataagcttacattaaaat

SEQ ID NO: 217923 - DNA, 33 bp, Homo sapien
ttttttgatcgataacacatattgcctttagtt

SEQ ID NO: 217924 - DNA, 33 bp, Homo sapien
ttttttgatcgataacgcatattgcctttagtt

SEQ ID NO: 217925 - DNA, 33 bp, Homo sapien
caagcaagcacacaacagttcgtacaacctgct

SEQ ID NO: 217926 - DNA, 33 bp, Homo sapien
caagcaagcacacaaccgttcgtacaacctgct

SEQ ID NO: 217927 - DNA, 33 bp, Homo sapien
gtggaggttgtagtgcaccgagaccatgccatt

SEQ ID NO: 217928 - DNA, 33 bp, Homo sapien
gtggaggttgtagtgcgccgagaccatgccatt

SEQ ID NO: 217929 - DNA, 33 bp, Homo sapien
agagagattgtttgcacctacaatgttcatttt

SEQ ID NO: 217930 - DNA, 33 bp, Homo sapien
agagagattgtttgcatctacaatgttcatttt

SEQ ID NO: 217931 - DNA, 33 bp, Homo sapien
ggataactcatatcacaacataaccaactaatt

SEQ ID NO: 217932 - DNA, 33 bp, Homo sapien
ggataactcatatcacgacataaccaactaatt

SEQ ID NO: 217933 - DNA, 33 bp, Homo sapien
cacagatcatttttatcaaaccaagtcaaacca

SEQ ID NO: 217934 - DNA, 33 bp, Homo sapien
cacagatcatttttattaaaccaagtcaaacca

SEQ ID NO: 217935 - DNA, 33 bp, Homo sapien
tcttttccactccaacggatacataaactagtt

SEQ ID NO: 217936 - DNA, 33 bp, Homo sapien
tcttttccactccaactgatacataaactagtt

SEQ ID NO: 217937 - DNA, 33 bp, Homo sapien
gtcccttttataaagcactaatcccatccgtga

SEQ ID NO: 217938 - DNA, 33 bp, Homo sapien
gtcccttttataaagcgctaatcccatccgtga

SEQ ID NO: 217939 - DNA, 33 bp, Homo sapien
aggcaacctggtcacaataggagttagactgag

SEQ ID NO: 217940 - DNA, 33 bp, Homo sapien
aggcaacctggtcacagtaggagttagactgag

SEQ ID NO: 217941 - DNA, 33 bp, Homo sapien
tataaaagtcaaaccagaagatattcagaagac

SEQ ID NO: 217942 - DNA, 33 bp, Homo sapien
tataaaagtcaaaccataagatattcagaagac

SEQ ID NO: 217943 - DNA, 33 bp, Homo sapien
ttagccagtgatctcaataccacaggttactga

SEQ ID NO: 217944 - DNA, 33 bp, Homo sapien
ttagccagtgatctcagtaccacaggttactga

SEQ ID NO: 217945 - DNA, 33 bp, Homo sapien
gatttatcacaaaacacacattggaaattagtg

SEQ ID NO: 217946 - DNA, 33 bp, Homo sapien
gatttatcacaaaacagacattggaaattagtg

SEQ ID NO: 217947 - DNA, 33 bp, Homo sapien
tttcataaagtattcaaaaaggtacaagttcta

SEQ ID NO: 217948 - DNA, 33 bp, Homo sapien
tttcataaagtattcagaaaggtacaagttcta

SEQ ID NO: 217949 - DNA, 33 bp, Homo sapien
aatttgttcagcactagaggcaatatttcagat

SEQ ID NO: 217950 - DNA, 33 bp, Homo sapien
aatttgttcagcactataggcaatatttcagat

SEQ ID NO: 217951 - DNA, 33 bp, Homo sapien
ctttttacttggactaacacacttgcctccctg

SEQ ID NO: 217952 - DNA, 33 bp, Homo sapien
ctttttacttggactagcacacttgcctccctg

SEQ ID NO: 217953 - DNA, 33 bp, Homo sapien
tgtaatgtgatgataacgttggtttcttgctcc

SEQ ID NO: 217954 - DNA, 33 bp, Homo sapien
tgtaatgtgatgataatgttggtttcttgctcc

SEQ ID NO: 217955 - DNA, 33 bp, Homo sapien
agaatgcaagtcctgcactatcatcctccacac

SEQ ID NO: 217956 - DNA, 33 bp, Homo sapien
agaatgcaagtcctgcgctatcatcctccacac

SEQ ID NO: 217957 - DNA, 33 bp, Homo sapien
acccaaacccagaaaacgaggatcgtaagcccc

SEQ ID NO: 217958 - DNA, 33 bp, Homo sapien
acccaaacccagaaaatgaggatcgtaagcccc

SEQ ID NO: 217959 - DNA, 33 bp, Homo sapien
tgtaatattttagaaaatgcctaaatgtcaaga

SEQ ID NO: 217960 - DNA, 33 bp, Homo sapien
tgtaatattttagaaattgcctaaatgtcaaga

SEQ ID NO: 217961 - DNA, 33 bp, Homo sapien
atccacttgtctctctaaaattgattgggcttc

SEQ ID NO: 217962 - DNA, 33 bp, Homo sapien
atccacttgtctctctcaaattgattgggcttc

SEQ ID NO: 217963 - DNA, 33 bp, Homo sapien
tgcttgactgagcagaaagactgatgatctgaa

SEQ ID NO: 217964 - DNA, 33 bp, Homo sapien
tgcttgactgagcagagagactgatgatctgaa

SEQ ID NO: 217965 - DNA, 33 bp, Homo sapien
gtgccaacccaagtacaataaatggcacactgt

SEQ ID NO: 217966 - DNA, 33 bp, Homo sapien
gtgccaacccaagtacgataaatggcacactgt

SEQ ID NO: 217967 - DNA, 33 bp, Homo sapien
atgccagtggtgataacagggacagcagaagga

SEQ ID NO: 217968 - DNA, 33 bp, Homo sapien
atgccagtggtgataatagggacagcagaagga

SEQ ID NO: 217969 - DNA, 33 bp, Homo sapien
gatttcttatccaatacctggatctgagaaaag

SEQ ID NO: 217970 - DNA, 33 bp, Homo sapien
gatttcttatccaatagctggatctgagaaaag

SEQ ID NO: 217971 - DNA, 33 bp, Homo sapien
cttgttgactcacttaacaagaatagtttcagg

SEQ ID NO: 217972 - DNA, 33 bp, Homo sapien
cttgttgactcacttagcaagaatagtttcagg

SEQ ID NO: 217973 - DNA, 33 bp, Homo sapien
gctggcgaactgattcactctgcacatttctcg

SEQ ID NO: 217974 - DNA, 33 bp, Homo sapien
gctggcgaactgattctctctgcacatttctcg

SEQ ID NO: 217975 - DNA, 33 bp, Homo sapien
ggaataatgtcctcaacaggtaacatgaaggtt

SEQ ID NO: 217976 - DNA, 33 bp, Homo sapien
ggaataatgtcctcaataggtaacatgaaggtt

SEQ ID NO: 217977 - DNA, 33 bp, Homo sapien
tgagaggctcctgataataacttttaatgattt

SEQ ID NO: 217978 - DNA, 33 bp, Homo sapien
tgagaggctcctgatagtaacttttaatgattt

SEQ ID NO: 217979 - DNA, 33 bp, Homo sapien
ctccattctgagttaactaatttgggaaagaga

SEQ ID NO: 217980 - DNA, 33 bp, Homo sapien
ctccattctgagttaattaatttgggaaagaga

SEQ ID NO: 217981 - DNA, 33 bp, Homo sapien
taagttaaatgcccaacagtgttcacagctaca

SEQ ID NO: 217982 - DNA, 33 bp, Homo sapien
taagttaaatgcccaagagtgttcacagctaca

SEQ ID NO: 217983 - DNA, 33 bp, Homo sapien
tcagataagagatataaaattcgtaccaaaatg

SEQ ID NO: 217984 - DNA, 33 bp, Homo sapien
tcagataagagatatacaattcgtaccaaaatg

SEQ ID NO: 217985 - DNA, 33 bp, Homo sapien
atagtaagtactcaataactgttggctattatt

SEQ ID NO: 217986 - DNA, 33 bp, Homo sapien
atagtaagtactcaatgactgttggctattatt

SEQ ID NO: 217987 - DNA, 33 bp, Homo sapien
agtactaagaagaagacgagacagttttcagga

SEQ ID NO: 217988 - DNA, 33 bp, Homo sapien
agtactaagaagaagatgagacagttttcagga

SEQ ID NO: 217989 - DNA, 33 bp, Homo sapien
tacttaagagagtgggaatactaggtcatatgg

SEQ ID NO: 217990 - DNA, 33 bp, Homo sapien
tacttaagagagtggggatactaggtcatatgg

SEQ ID NO: 217991 - DNA, 33 bp, Homo sapien
agcactgttactgttacgtagcaaacaccaact

SEQ ID NO: 217992 - DNA, 33 bp, Homo sapien
agcactgttactgttatgtagcaaacaccaact

SEQ ID NO: 217993 - DNA, 33 bp, Homo sapien
ctccacatggctggaaagtgaggtgagacagac

SEQ ID NO: 217994 - DNA, 33 bp, Homo sapien
ctccacatggctggaaggtgaggtgagacagac

SEQ ID NO: 217995 - DNA, 33 bp, Homo sapien
tccatttctctttgccactgtctggaaaattgt

SEQ ID NO: 217996 - DNA, 33 bp, Homo sapien
tccatttctctttgccgctgtctggaaaattgt

SEQ ID NO: 217997 - DNA, 33 bp, Homo sapien
tttgcaaagcgtttgcacagagtaggtgcttaa

SEQ ID NO: 217998 - DNA, 33 bp, Homo sapien
tttgcaaagcgtttgcgcagagtaggtgcttaa

SEQ ID NO: 217999 - DNA, 33 bp, Homo sapien
tcagacaggagtacaactcacagattgctaatg

SEQ ID NO: 218000 - DNA, 33 bp, Homo sapien
tcagacaggagtacaattcacagattgctaatg

SEQ ID NO: 218001 - DNA, 33 bp, Homo sapien
aaaatggagagatttacggattacatgtaattt

SEQ ID NO: 218002 - DNA, 33 bp, Homo sapien
aaaatggagagatttatggattacatgtaattt

SEQ ID NO: 218003 - DNA, 33 bp, Homo sapien
gagctgtgatggtgtcaatgaactctatcctgc

SEQ ID NO: 218004 - DNA, 33 bp, Homo sapien
gagctgtgatggtgtcgatgaactctatcctgc

SEQ ID NO: 218005 - DNA, 33 bp, Homo sapien
gggagtatgacatcaagagttctgttttgatca

SEQ ID NO: 218006 - DNA, 33 bp, Homo sapien
gggagtatgacatcaatagttctgttttgatca

SEQ ID NO: 218007 - DNA, 33 bp, Homo sapien
cacagcaaaatcctgacatgaactgttgattct

SEQ ID NO: 218008 - DNA, 33 bp, Homo sapien
cacagcaaaatcctgatatgaactgttgattct

SEQ ID NO: 218009 - DNA, 33 bp, Homo sapien
ggtgtctgaaaggaacagatggtgaagacatca

SEQ ID NO: 218010 - DNA, 33 bp, Homo sapien
ggtgtctgaaaggaacggatggtgaagacatca

SEQ ID NO: 218011 - DNA, 33 bp, Homo sapien
cttacttcatcatggccagaagcagttcccatg

SEQ ID NO: 218012 - DNA, 33 bp, Homo sapien
cttacttcatcatggctagaagcagttcccatg

SEQ ID NO: 218013 - DNA, 33 bp, Homo sapien
ggctctaattcccacaaggaggaatggtttctt

SEQ ID NO: 218014 - DNA, 33 bp, Homo sapien
ggctctaattcccacagggaggaatggtttctt

SEQ ID NO: 218015 - DNA, 33 bp, Homo sapien
ggtattcagagcaccacgtaatcagcatcttcc

SEQ ID NO: 218016 - DNA, 33 bp, Homo sapien
ggtattcagagcaccatgtaatcagcatcttcc

SEQ ID NO: 218017 - DNA, 33 bp, Homo sapien
aagctcatcccaacaacgcttcccagctttctt

SEQ ID NO: 218018 - DNA, 33 bp, Homo sapien
aagctcatcccaacaaggcttcccagctttctt

SEQ ID NO: 218019 - DNA, 33 bp, Homo sapien
gacgtggatttgagaaacatcagcacgcaagga

SEQ ID NO: 218020 - DNA, 33 bp, Homo sapien
gacgtggatttgagaatcatcagcacgcaagga

SEQ ID NO: 218021 - DNA, 33 bp, Homo sapien
tcagtgttctttgggaagattgaggaggaatgt

SEQ ID NO: 218022 - DNA, 33 bp, Homo sapien
tcagtgttctttgggaggattgaggaggaatgt

SEQ ID NO: 218023 - DNA, 33 bp, Homo sapien
caaatttagttaataccgaagtcaggatctgaa

SEQ ID NO: 218024 - DNA, 33 bp, Homo sapien
caaatttagttaatactgaagtcaggatctgaa

SEQ ID NO: 218025 - DNA, 33 bp, Homo sapien
aagtcagtaagtatgcgatgatggtgaaatcaa

SEQ ID NO: 218026 - DNA, 33 bp, Homo sapien
aagtcagtaagtatgctatgatggtgaaatcaa

SEQ ID NO: 218027 - DNA, 33 bp, Homo sapien
tccaatcaaaccactcactcttccacctcatca

SEQ ID NO: 218028 - DNA, 33 bp, Homo sapien
tccaatcaaaccactcgctcttccacctcatca

SEQ ID NO: 218029 - DNA, 33 bp, Homo sapien
agtggcccttccttcccgattcctacactcctc

SEQ ID NO: 218030 - DNA, 33 bp, Homo sapien
agtggcccttccttcctgattcctacactcctc

SEQ ID NO: 218031 - DNA, 33 bp, Homo sapien
acatgatctctcttgcaactacccagctctgct

SEQ ID NO: 218032 - DNA, 33 bp, Homo sapien
acatgatctctcttgcgactacccagctctgct

SEQ ID NO: 218033 - DNA, 33 bp, Homo sapien
atggtctatgggcaccacttgtgatctctgctt

SEQ ID NO: 218034 - DNA, 33 bp, Homo sapien
atggtctatgggcaccccttgtgatctctgctt

SEQ ID NO: 218035 - DNA, 33 bp, Homo sapien
cactctagcggccctaaacaaagttcttacctg

SEQ ID NO: 218036 - DNA, 33 bp, Homo sapien
cactctagcggccctacacaaagttcttacctg

SEQ ID NO: 218037 - DNA, 33 bp, Homo sapien
aaatattgcttcttcaactagaaacttcgaaag

SEQ ID NO: 218038 - DNA, 33 bp, Homo sapien
aaatattgcttcttcagctagaaacttcgaaag

SEQ ID NO: 218039 - DNA, 33 bp, Homo sapien
gcacaacaattttcaaccaggtcatctattggc

SEQ ID NO: 218040 - DNA, 33 bp, Homo sapien
gcacaacaattttcaagcaggtcatctattggc

SEQ ID NO: 218041 - DNA, 33 bp, Homo sapien
tgcgcacctcagcttacagtgtcaacatacttg

SEQ ID NO: 218042 - DNA, 33 bp, Homo sapien
tgcgcacctcagcttatagtgtcaacatacttg

SEQ ID NO: 218043 - DNA, 33 bp, Homo sapien
caggcaaggctgtaacgccctgaaccaggtgat

SEQ ID NO: 218044 - DNA, 33 bp, Homo sapien
caggcaaggctgtaactccctgaaccaggtgat

SEQ ID NO: 218045 - DNA, 33 bp, Homo sapien
catctgcttttcagatcataagtgactgtatca

SEQ ID NO: 218046 - DNA, 33 bp, Homo sapien
catctgcttttcagattataagtgactgtatca

SEQ ID NO: 218047 - DNA, 33 bp, Homo sapien
gagataagcataggaccggtgttatttttattt

SEQ ID NO: 218048 - DNA, 33 bp, Homo sapien
gagataagcataggactggtgttatttttattt

SEQ ID NO: 218049 - DNA, 33 bp, Homo sapien
agtatcgagtatcgtcaagatgagagttcagat

SEQ ID NO: 218050 - DNA, 33 bp, Homo sapien
agtatcgagtatcgtcgagatgagagttcagat

SEQ ID NO: 218051 - DNA, 33 bp, Homo sapien
gctgcactgtagatgacataataagggcgtggt

SEQ ID NO: 218052 - DNA, 33 bp, Homo sapien
gctgcactgtagatgagataataagggcgtggt

SEQ ID NO: 218053 - DNA, 33 bp, Homo sapien
aaaactttgcacagtcaatggacaaacaaatct

SEQ ID NO: 218054 - DNA, 33 bp, Homo sapien
aaaactttgcacagtctatggacaaacaaatct

SEQ ID NO: 218055 - DNA, 33 bp, Homo sapien
gttcagctgagggaaaataacatatattggtaa

SEQ ID NO: 218056 - DNA, 33 bp, Homo sapien
gttcagctgagggaaagtaacatatattggtaa

SEQ ID NO: 218057 - DNA, 33 bp, Homo sapien
tgctgccagattcttacaccagttaaaaatctt

SEQ ID NO: 218058 - DNA, 33 bp, Homo sapien
tgctgccagattcttataccagttaaaaatctt

SEQ ID NO: 218059 - DNA, 33 bp, Homo sapien
taagaatctggcagcaaaatgtacttttacctc

SEQ ID NO: 218060 - DNA, 33 bp, Homo sapien
taagaatctggcagcagaatgtacttttacctc

SEQ ID NO: 218061 - DNA, 33 bp, Homo sapien
aaaaagaaatgccgaaagagatgagagaagtgc

SEQ ID NO: 218062 - DNA, 33 bp, Homo sapien
aaaaagaaatgccgaaggagatgagagaagtgc

SEQ ID NO: 218063 - DNA, 33 bp, Homo sapien
ctcaaattattcaaaactaagcaatccaagagt

SEQ ID NO: 218064 - DNA, 33 bp, Homo sapien
ctcaaattattcaaaattaagcaatccaagagt

SEQ ID NO: 218065 - DNA, 33 bp, Homo sapien
tttaaatggatatgaaatattgtgctggaattc

SEQ ID NO: 218066 - DNA, 33 bp, Homo sapien
tttaaatggatatgaattattgtgctggaattc

SEQ ID NO: 218067 - DNA, 33 bp, Homo sapien
cacatccttctaaaaacgaggtgataagaaagg

SEQ ID NO: 218068 - DNA, 33 bp, Homo sapien
cacatccttctaaaaatgaggtgataagaaagg

SEQ ID NO: 218069 - DNA, 33 bp, Homo sapien
agggaaattgacatcacgtcttaaaaggaagaa

SEQ ID NO: 218070 - DNA, 33 bp, Homo sapien
agggaaattgacatcatgtcttaaaaggaagaa

SEQ ID NO: 218071 - DNA, 33 bp, Homo sapien
cctccttcattttacaaagtacatcctaagaca

SEQ ID NO: 218072 - DNA, 33 bp, Homo sapien
cctccttcattttacacagtacatcctaagaca

SEQ ID NO: 218073 - DNA, 33 bp, Homo sapien
gtatccctcagattccccaggaaaataaatata

SEQ ID NO: 218074 - DNA, 33 bp, Homo sapien
gtatccctcagattccgcaggaaaataaatata

SEQ ID NO: 218075 - DNA, 33 bp, Homo sapien
ctcaccccacacctaacgaatccgaatctgccc

SEQ ID NO: 218076 - DNA, 33 bp, Homo sapien
ctcaccccacacctaatgaatccgaatctgccc

SEQ ID NO: 218077 - DNA, 33 bp, Homo sapien
gagatatttttgcatacattttgagaacaagaa

SEQ ID NO: 218078 - DNA, 33 bp, Homo sapien
gagatatttttgcatagattttgagaacaagaa

SEQ ID NO: 218079 - DNA, 33 bp, Homo sapien
ttcatctcctgtggacaaacatctggggtggaa

SEQ ID NO: 218080 - DNA, 33 bp, Homo sapien
ttcatctcctgtggacgaacatctggggtggaa

SEQ ID NO: 218081 - DNA, 33 bp, Homo sapien
cgttaaagaaggctcaataacttgaagggaaaa

SEQ ID NO: 218082 - DNA, 33 bp, Homo sapien
cgttaaagaaggctcagtaacttgaagggaaaa

SEQ ID NO: 218083 - DNA, 33 bp, Homo sapien
cctactgagtctttccggataaaaggtatcaag

SEQ ID NO: 218084 - DNA, 33 bp, Homo sapien
cctactgagtctttcctgataaaaggtatcaag

SEQ ID NO: 218085 - DNA, 33 bp, Homo sapien
acattgtcttcatttcactggcgttgtatctgc

SEQ ID NO: 218086 - DNA, 33 bp, Homo sapien
acattgtcttcatttctctggcgttgtatctgc

SEQ ID NO: 218087 - DNA, 33 bp, Homo sapien
tctctaatgaaaacacagagaagtaaatctggt

SEQ ID NO: 218088 - DNA, 33 bp, Homo sapien
tctctaatgaaaacaccgagaagtaaatctggt

SEQ ID NO: 218089 - DNA, 33 bp, Homo sapien
gggggtccagtttctacgtagatgaaggaacta

SEQ ID NO: 218090 - DNA, 33 bp, Homo sapien
gggggtccagtttctaggtagatgaaggaacta

SEQ ID NO: 218091 - DNA, 33 bp, Homo sapien
tagtggcatatttagaagataggctttgtgtgg

SEQ ID NO: 218092 - DNA, 33 bp, Homo sapien
tagtggcatatttagacgataggctttgtgtgg

SEQ ID NO: 218093 - DNA, 33 bp, Homo sapien
caaagcaacaattaacagtgatatggctaactt

SEQ ID NO: 218094 - DNA, 33 bp, Homo sapien
caaagcaacaattaacggtgatatggctaactt

SEQ ID NO: 218095 - DNA, 33 bp, Homo sapien
aaaatcctcaactataagaaaatgtcttaagtg

SEQ ID NO: 218096 - DNA, 33 bp, Homo sapien
aaaatcctcaactataggaaaatgtcttaagtg

SEQ ID NO: 218097 - DNA, 33 bp, Homo sapien
aagactgaggctcagaaaagtgtaataacctgc

SEQ ID NO: 218098 - DNA, 33 bp, Homo sapien
aagactgaggctcagagaagtgtaataacctgc

SEQ ID NO: 218099 - DNA, 33 bp, Homo sapien
tgccttgtgactgttaccctttcttttcatctt

SEQ ID NO: 218100 - DNA, 33 bp, Homo sapien
tgccttgtgactgttatcctttcttttcatctt

SEQ ID NO: 218101 - DNA, 33 bp, Homo sapien
gccagattcaaagtgaaaaggttatatacctct

SEQ ID NO: 218102 - DNA, 33 bp, Homo sapien
gccagattcaaagtgagaaggttatatacctct

SEQ ID NO: 218103 - DNA, 33 bp, Homo sapien
aatgtcagaaatgctacgcaccagtgaaggtca

SEQ ID NO: 218104 - DNA, 33 bp, Homo sapien
aatgtcagaaatgctatgcaccagtgaaggtca

SEQ ID NO: 218105 - DNA, 33 bp, Homo sapien
tatccttgttgaggaactagttcactacctggg

SEQ ID NO: 218106 - DNA, 33 bp, Homo sapien
tatccttgttgaggaagtagttcactacctggg

SEQ ID NO: 218107 - DNA, 33 bp, Homo sapien
tttgaccttctcacaacgtggcagctagattcc

SEQ ID NO: 218108 - DNA, 33 bp, Homo sapien
tttgaccttctcacaatgtggcagctagattcc

SEQ ID NO: 218109 - DNA, 33 bp, Homo sapien
ttaaagaaaaacagctcacagattacagtggat

SEQ ID NO: 218110 - DNA, 33 bp, Homo sapien
ttaaagaaaaacagctgacagattacagtggat

SEQ ID NO: 218111 - DNA, 33 bp, Homo sapien
tttactacttgaaaaacgaagatctggccaggt

SEQ ID NO: 218112 - DNA, 33 bp, Homo sapien
tttactacttgaaaaatgaagatctggccaggt

SEQ ID NO: 218113 - DNA, 33 bp, Homo sapien
gcccggaatctaattacagggcctgaaacctaa

SEQ ID NO: 218114 - DNA, 33 bp, Homo sapien
gcccggaatctaattatagggcctgaaacctaa

SEQ ID NO: 218115 - DNA, 33 bp, Homo sapien
aggaccagggtgtgggcaactgttcctgcagaa

SEQ ID NO: 218116 - DNA, 33 bp, Homo sapien
aggaccagggtgtgggtaactgttcctgcagaa

SEQ ID NO: 218117 - DNA, 33 bp, Homo sapien
ctactaagagtagcaaatatttcaacattcagg

SEQ ID NO: 218118 - DNA, 33 bp, Homo sapien
ctactaagagtagcaagtatttcaacattcagg

SEQ ID NO: 218119 - DNA, 33 bp, Homo sapien
tttactgtatcctgtaaagaatgaggaatgttt

SEQ ID NO: 218120 - DNA, 33 bp, Homo sapien
tttactgtatcctgtacagaatgaggaatgttt

SEQ ID NO: 218121 - DNA, 33 bp, Homo sapien
gcagaaattagagtaaactatggcaaactagaa

SEQ ID NO: 218122 - DNA, 33 bp, Homo sapien
gcagaaattagagtaacctatggcaaactagaa

SEQ ID NO: 218123 - DNA, 33 bp, Homo sapien
ggcaggagccaatacaatgctgaggatgaggtg

SEQ ID NO: 218124 - DNA, 33 bp, Homo sapien
ggcaggagccaatacagtgctgaggatgaggtg

SEQ ID NO: 218125 - DNA, 33 bp, Homo sapien
tagttctgactgactcaccgtaaatcagaggtt

SEQ ID NO: 218126 - DNA, 33 bp, Homo sapien
tagttctgactgactcgccgtaaatcagaggtt

SEQ ID NO: 218127 - DNA, 33 bp, Homo sapien
atgtagatatgacattcaacatcaggcaaggct

SEQ ID NO: 218128 - DNA, 33 bp, Homo sapien
atgtagatatgacatttaacatcaggcaaggct

SEQ ID NO: 218129 - DNA, 33 bp, Homo sapien
ctttcactttaagaacacaagaagaatgctgtt

SEQ ID NO: 218130 - DNA, 33 bp, Homo sapien
ctttcactttaagaacgcaagaagaatgctgtt

SEQ ID NO: 218131 - DNA, 33 bp, Homo sapien
gacatttacttcgcaacattgctagtgtgacag

SEQ ID NO: 218132 - DNA, 33 bp, Homo sapien
gacatttacttcgcaagattgctagtgtgacag

SEQ ID NO: 218133 - DNA, 33 bp, Homo sapien
ttttgtttgctaccctaaaaggataaaaaggat

SEQ ID NO: 218134 - DNA, 33 bp, Homo sapien
ttttgtttgctaccctgaaaggataaaaaggat

SEQ ID NO: 218135 - DNA, 33 bp, Homo sapien
gctacctaaaattaaaaaatgtcatactgtcag

SEQ ID NO: 218136 - DNA, 33 bp, Homo sapien
gctacctaaaattaaagaatgtcatactgtcag

SEQ ID NO: 218137 - DNA, 33 bp, Homo sapien
attaaaatatgaaaaaagtttgacagtctattt

SEQ ID NO: 218138 - DNA, 33 bp, Homo sapien
attaaaatatgaaaaatgtttgacagtctattt

SEQ ID NO: 218139 - DNA, 33 bp, Homo sapien
cttttttccaagaagacagataagcttacacat

SEQ ID NO: 218140 - DNA, 33 bp, Homo sapien
cttttttccaagaagatagataagcttacacat

SEQ ID NO: 218141 - DNA, 33 bp, Homo sapien
taacaagaatttagaaagcaaaagtaatgaaag

SEQ ID NO: 218142 - DNA, 33 bp, Homo sapien
taacaagaatttagaaggcaaaagtaatgaaag

SEQ ID NO: 218143 - DNA, 33 bp, Homo sapien
attttggaaaatatcaagagttccaagtattgt

SEQ ID NO: 218144 - DNA, 33 bp, Homo sapien
attttggaaaatatcaggagttccaagtattgt

SEQ ID NO: 218145 - DNA, 33 bp, Homo sapien
gtggccagtgagggtaaagaaaaagccataatg

SEQ ID NO: 218146 - DNA, 33 bp, Homo sapien
gtggccagtgagggtagagaaaaagccataatg

SEQ ID NO: 218147 - DNA, 33 bp, Homo sapien
ttcacaacttgtaaggcatttgcagtgaggcag

SEQ ID NO: 218148 - DNA, 33 bp, Homo sapien
ttcacaacttgtaagggatttgcagtgaggcag

SEQ ID NO: 218149 - DNA, 33 bp, Homo sapien
aactgttttctccttacggtttggcatccacaa

SEQ ID NO: 218150 - DNA, 33 bp, Homo sapien
aactgttttctccttatggtttggcatccacaa

SEQ ID NO: 218151 - DNA, 33 bp, Homo sapien
tgctagggtgagccatcagaagccattttaagg

SEQ ID NO: 218152 - DNA, 33 bp, Homo sapien
tgctagggtgagccatgagaagccattttaagg

SEQ ID NO: 218153 - DNA, 33 bp, Homo sapien
tcaaactagctgctcgaaacacttcagcacaag

SEQ ID NO: 218154 - DNA, 33 bp, Homo sapien
tcaaactagctgctcggaacacttcagcacaag

SEQ ID NO: 218155 - DNA, 33 bp, Homo sapien
aatgggagcatttctacgcaccagcatgggcac

SEQ ID NO: 218156 - DNA, 33 bp, Homo sapien
aatgggagcatttctaggcaccagcatgggcac

SEQ ID NO: 218157 - DNA, 33 bp, Homo sapien
ttatatagttactagcaaccttaatgatcaaga

SEQ ID NO: 218158 - DNA, 33 bp, Homo sapien
ttatatagttactagccaccttaatgatcaaga

SEQ ID NO: 218159 - DNA, 33 bp, Homo sapien
gtcttccccattacaacgtaagctctgtaaagc

SEQ ID NO: 218160 - DNA, 33 bp, Homo sapien
gtcttccccattacaatgtaagctctgtaaagc

SEQ ID NO: 218161 - DNA, 33 bp, Homo sapien
cagagaaaatcttcacacttagtcctctttctt

SEQ ID NO: 218162 - DNA, 33 bp, Homo sapien
cagagaaaatcttcacgcttagtcctctttctt

SEQ ID NO: 218163 - DNA, 33 bp, Homo sapien
agcaactcaggccagcaaaggcagatagcacgg

SEQ ID NO: 218164 - DNA, 33 bp, Homo sapien
agcaactcaggccagcgaaggcagatagcacgg

SEQ ID NO: 218165 - DNA, 33 bp, Homo sapien
agtggggcatgacatgaagtgaattctactggt

SEQ ID NO: 218166 - DNA, 33 bp, Homo sapien
agtggggcatgacatggagtgaattctactggt

SEQ ID NO: 218167 - DNA, 33 bp, Homo sapien
ggtcgcgtaaaaaaacaccctggctcatgggcc

SEQ ID NO: 218168 - DNA, 33 bp, Homo sapien
ggtcgcgtaaaaaaactccctggctcatgggcc

SEQ ID NO: 218169 - DNA, 33 bp, Homo sapien
gaagcgagtggacagcagactcaaaatctgtag

SEQ ID NO: 218170 - DNA, 33 bp, Homo sapien
gaagcgagtggacagcggactcaaaatctgtag

SEQ ID NO: 218171 - DNA, 33 bp, Homo sapien
tagtctgtggggaccactataagagaatcacat

SEQ ID NO: 218172 - DNA, 33 bp, Homo sapien
tagtctgtggggaccattataagagaatcacat

SEQ ID NO: 218173 - DNA, 33 bp, Homo sapien
ttatgaaatcacagtgaaagtcatgaggattcc

SEQ ID NO: 218174 - DNA, 33 bp, Homo sapien
ttatgaaatcacagtggaagtcatgaggattcc

SEQ ID NO: 218175 - DNA, 33 bp, Homo sapien
aaattcagcagatagtaaaaaaaaccacaagat

SEQ ID NO: 218176 - DNA, 33 bp, Homo sapien
aaattcagcagatagtgaaaaaaaccacaagat

SEQ ID NO: 218177 - DNA, 33 bp, Homo sapien
gacatgtaggctcccaagtaaagtaatatctag

SEQ ID NO: 218178 - DNA, 33 bp, Homo sapien
gacatgtaggctcccaggtaaagtaatatctag

SEQ ID NO: 218179 - DNA, 33 bp, Homo sapien
aagattgccagctctcccccagaagtctgacta

SEQ ID NO: 218180 - DNA, 33 bp, Homo sapien
aagattgccagctctctcccagaagtctgacta

SEQ ID NO: 218181 - DNA, 33 bp, Homo sapien
tttcaaactatgataaatgactaaccacattct

SEQ ID NO: 218182 - DNA, 33 bp, Homo sapien
tttcaaactatgataagtgactaaccacattct

SEQ ID NO: 218183 - DNA, 33 bp, Homo sapien
cacaaggaatatgagacgtaatgaaatagtgat

SEQ ID NO: 218184 - DNA, 33 bp, Homo sapien
cacaaggaatatgagatgtaatgaaatagtgat

SEQ ID NO: 218185 - DNA, 33 bp, Homo sapien
catgcctctctcctagcagttagcacttggtga

SEQ ID NO: 218186 - DNA, 33 bp, Homo sapien
catgcctctctcctagtagttagcacttggtga

SEQ ID NO: 218187 - DNA, 33 bp, Homo sapien
gtacttgttaggcatacggatcttagccaggca

SEQ ID NO: 218188 - DNA, 33 bp, Homo sapien
gtacttgttaggcatatggatcttagccaggca

SEQ ID NO: 218189 - DNA, 33 bp, Homo sapien
ttagttttggaatcgcgctgttgaggctgagag

SEQ ID NO: 218190 - DNA, 33 bp, Homo sapien
ttagttttggaatcgctctgttgaggctgagag

SEQ ID NO: 218191 - DNA, 33 bp, Homo sapien
tccccatcattttccaggaggtacatagtatag

SEQ ID NO: 218192 - DNA, 33 bp, Homo sapien
tccccatcattttccatgaggtacatagtatag

SEQ ID NO: 218193 - DNA, 33 bp, Homo sapien
aatcaaaatctctggaaacaggatccaggaaac

SEQ ID NO: 218194 - DNA, 33 bp, Homo sapien
aatcaaaatctctggagacaggatccaggaaac

SEQ ID NO: 218195 - DNA, 33 bp, Homo sapien
tttttgattatagtcagcctaatgggtgtgaag

SEQ ID NO: 218196 - DNA, 33 bp, Homo sapien
tttttgattatagtcatcctaatgggtgtgaag

SEQ ID NO: 218197 - DNA, 33 bp, Homo sapien
tgggcccagcaccccaatagccttgtttttttt

SEQ ID NO: 218198 - DNA, 33 bp, Homo sapien
tgggcccagcaccccagtagccttgtttttttt

SEQ ID NO: 218199 - DNA, 33 bp, Homo sapien
gctagaaagtagattacgtggctgtttagggac

SEQ ID NO: 218200 - DNA, 33 bp, Homo sapien
gctagaaagtagattatgtggctgtttagggac

SEQ ID NO: 218201 - DNA, 33 bp, Homo sapien
acagctctcatcaccccgaagcctaaaaggaag

SEQ ID NO: 218202 - DNA, 33 bp, Homo sapien
acagctctcatcaccctgaagcctaaaaggaag

SEQ ID NO: 218203 - DNA, 33 bp, Homo sapien
gcttataggaaatcacaagggataatgcagtaa

SEQ ID NO: 218204 - DNA, 33 bp, Homo sapien
gcttataggaaatcacgagggataatgcagtaa

SEQ ID NO: 218205 - DNA, 33 bp, Homo sapien
ttctatagtcttcccccatcgcaataaatggca

SEQ ID NO: 218206 - DNA, 33 bp, Homo sapien
ttctatagtcttcccctatcgcaataaatggca

SEQ ID NO: 218207 - DNA, 33 bp, Homo sapien
ggaaaaccctcatctacaatcccacttagtatt

SEQ ID NO: 218208 - DNA, 33 bp, Homo sapien
ggaaaaccctcatctataatcccacttagtatt

SEQ ID NO: 218209 - DNA, 33 bp, Homo sapien
tctccctttagggcaacggattctttagcaata

SEQ ID NO: 218210 - DNA, 33 bp, Homo sapien
tctccctttagggcaatggattctttagcaata

SEQ ID NO: 218211 - DNA, 33 bp, Homo sapien
taccagagttgaaaacaagaataaatgttctag

SEQ ID NO: 218212 - DNA, 33 bp, Homo sapien
taccagagttgaaaacgagaataaatgttctag

SEQ ID NO: 218213 - DNA, 33 bp, Homo sapien
cacagctaatccaagcagacttaaccctattca

SEQ ID NO: 218214 - DNA, 33 bp, Homo sapien
cacagctaatccaagcggacttaaccctattca

SEQ ID NO: 218215 - DNA, 33 bp, Homo sapien; identical to SEQ ID NO: 218213

SEQ ID NO: 218216 - DNA, 33 bp, Homo sapien; identical to SEQ ID NO: 218214

SEQ ID NO: 218217 - DNA, 33 bp, Homo sapien
ctatgacccgaagaaggatcaaaacccagcaga

SEQ ID NO: 218218 - DNA, 33 bp, Homo sapien
ctatgacccgaagaagtatcaaaacccagcaga

SEQ ID NO: 218219 - DNA, 33 bp, Homo sapien
taaaggatacatctaaagacctgaggtagtgac

SEQ ID NO: 218220 - DNA, 33 bp, Homo sapien
taaaggatacatctaaggacctgaggtagtgac

SEQ ID NO: 218221 - DNA, 33 bp, Homo sapien
taatgtaacaaattgaataagatctcagatgga

SEQ ID NO: 218222 - DNA, 33 bp, Homo sapien
taatgtaacaaattgagtaagatctcagatgga

SEQ ID NO: 218223 - DNA, 33 bp, Homo sapien
gctatgtaactacacaatatgcacaccacagcc

SEQ ID NO: 218224 - DNA, 33 bp, Homo sapien
gctatgtaactacacagtatgcacaccacagcc

SEQ ID NO: 218225 - DNA, 33 bp, Homo sapien
acccttgattatctagaaagacttggtaatgat

SEQ ID NO: 218226 - DNA, 33 bp, Homo sapien
acccttgattatctagtaagacttggtaatgat

SEQ ID NO: 218227 - DNA, 33 bp, Homo sapien
gagacagagtttcactcactactcatgctgtct

SEQ ID NO: 218228 - DNA, 33 bp, Homo sapien
gagacagagtttcacttactactcatgctgtct

SEQ ID NO: 218229 - DNA, 33 bp, Homo sapien
ttttctgatgtacaaaccttgattaccatagaa

SEQ ID NO: 218230 - DNA, 33 bp, Homo sapien
ttttctgatgtacaaagcttgattaccatagaa

SEQ ID NO: 218231 - DNA, 33 bp, Homo sapien
cttggttggtatctcaaaaagttttttcaactc

SEQ ID NO: 218232 - DNA, 33 bp, Homo sapien
cttggttggtatctcagaaagttttttcaactc

SEQ ID NO: 218233 - DNA, 33 bp, Homo sapien
agagaggacgacttagacgaagcaaaacagacc

SEQ ID NO: 218234 - DNA, 33 bp, Homo sapien
agagaggacgacttaggcgaagcaaaacagacc

SEQ ID NO: 218235 - DNA, 33 bp, Homo sapien
tttctacctgggattaaaatttattataaagtc

SEQ ID NO: 218236 - DNA, 33 bp, Homo sapien
tttctacctgggattacaatttattataaagtc

SEQ ID NO: 218237 - DNA, 33 bp, Homo sapien
caatgctagagatagaaaaattttcaaagttaa

SEQ ID NO: 218238 - DNA, 33 bp, Homo sapien
caatgctagagatagagaaattttcaaagttaa

SEQ ID NO: 218239 - DNA, 33 bp, Homo sapien
catatttcagccctaaccagatctctgctgtaa

SEQ ID NO: 218240 - DNA, 33 bp, Homo sapien
catatttcagccctaatcagatctctgctgtaa

SEQ ID NO: 218241 - DNA, 33 bp, Homo sapien
gattcgttgcttgccaatcatggctgaattaca

SEQ ID NO: 218242 - DNA, 33 bp, Homo sapien
gattcgttgcttgccagtcatggctgaattaca

SEQ ID NO: 218243 - DNA, 33 bp, Homo sapien
tacaactgttgttcaccgattggcttcccttta

SEQ ID NO: 218244 - DNA, 33 bp, Homo sapien
tacaactgttgttcactgattggcttcccttta

SEQ ID NO: 218245 - DNA, 33 bp, Homo sapien
tagctgggatctgaaggaagaaggattatgtgt

SEQ ID NO: 218246 - DNA, 33 bp, Homo sapien
tagctgggatctgaagtaagaaggattatgtgt

SEQ ID NO: 218247 - DNA, 33 bp, Homo sapien
tttggttggcttcaaagtctaagtttttagctt

SEQ ID NO: 218248 - DNA, 33 bp, Homo sapien
tttggttggcttcaaattctaagtttttagctt

SEQ ID NO: 218249 - DNA, 33 bp, Homo sapien
gggactaccttttggccgaaaagagccacagcc

SEQ ID NO: 218250 - DNA, 33 bp, Homo sapien
gggactaccttttggctgaaaagagccacagcc

SEQ ID NO: 218251 - DNA, 33 bp, Homo sapien
tctttagctactggaacttattacggaaagctg

SEQ ID NO: 218252 - DNA, 33 bp, Homo sapien
tctttagctactggaatttattacggaaagctg

SEQ ID NO: 218253 - DNA, 33 bp, Homo sapien
aaacattccaccttcacagagccatgtccaaag

SEQ ID NO: 218254 - DNA, 33 bp, Homo sapien
aaacattccaccttcagagagccatgtccaaag

SEQ ID NO: 218255 - DNA, 33 bp, Homo sapien
gaggttcttctgtgaacgaacagttttgatcac

SEQ ID NO: 218256 - DNA, 33 bp, Homo sapien
gaggttcttctgtgaatgaacagttttgatcac

SEQ ID NO: 218257 - DNA, 33 bp, Homo sapien
atgatgctcattattcaagtattcagacataac

SEQ ID NO: 218258 - DNA, 33 bp, Homo sapien
atgatgctcattattcgagtattcagacataac

SEQ ID NO: 218259 - DNA, 33 bp, Homo sapien
ctgtcttatctcttccacatcttattccctttt

SEQ ID NO: 218260 - DNA, 33 bp, Homo sapien
ctgtcttatctcttccgcatcttattccctttt

SEQ ID NO: 218261 - DNA, 33 bp, Homo sapien
ggaaaaacaaatagagacattaagtagcttgct

SEQ ID NO: 218262 - DNA, 33 bp, Homo sapien
ggaaaaacaaatagaggcattaagtagcttgct

SEQ ID NO: 218263 - DNA, 33 bp, Homo sapien
gtaggcctggtattgacgaattccctcaacatt

SEQ ID NO: 218264 - DNA, 33 bp, Homo sapien
gtaggcctggtattgatgaattccctcaacatt

SEQ ID NO: 218265 - DNA, 33 bp, Homo sapien
aaaatggacacaaaaaagactagccttaaagta

SEQ ID NO: 218266 - DNA, 33 bp, Homo sapien
aaaatggacacaaaaaggactagccttaaagta

SEQ ID NO: 218267 - DNA, 33 bp, Homo sapien
tgtattttgtgacacaaggtcttattccaaaaa

SEQ ID NO: 218268 - DNA, 33 bp, Homo sapien
tgtattttgtgacacagggtcttattccaaaaa

SEQ ID NO: 218269 - DNA, 33 bp, Homo sapien
aatccaagataggagaagaaaataaattgtaca

SEQ ID NO: 218270 - DNA, 33 bp, Homo sapien
aatccaagataggagaggaaaataaattgtaca

SEQ ID NO: 218271 - DNA, 33 bp, Homo sapien
gatttttaccttcacaatacacctttcctgtta

SEQ ID NO: 218272 - DNA, 33 bp, Homo sapien
gatttttaccttcacactacacctttcctgtta

SEQ ID NO: 218273 - DNA, 33 bp, Homo sapien
agacaacagcatcttccctattggccaacttgc

SEQ ID NO: 218274 - DNA, 33 bp, Homo sapien
agacaacagcatcttctctattggccaacttgc

SEQ ID NO: 218275 - DNA, 33 bp, Homo sapien
gttggtcactaagctaaggctttctgttttttt

SEQ ID NO: 218276 - DNA, 33 bp, Homo sapien
gttggtcactaagctagggctttctgttttttt

SEQ ID NO: 218277 - DNA, 33 bp, Homo sapien
atctaaagaagcctaacgtgtatgtaattgtag

SEQ ID NO: 218278 - DNA, 33 bp, Homo sapien
atctaaagaagcctaatgtgtatgtaattgtag

SEQ ID NO: 218279 - DNA, 33 bp, Homo sapien
catataaacaccttaacccccattgctgttgaa

SEQ ID NO: 218280 - DNA, 33 bp, Homo sapien
catataaacaccttaatccccattgctgttgaa

SEQ ID NO: 218281 - DNA, 33 bp, Homo sapien
cataactctgtagagagtatagcacctcattgt

SEQ ID NO: 218282 - DNA, 33 bp, Homo sapien
cataactctgtagagattatagcacctcattgt

SEQ ID NO: 218283 - DNA, 33 bp, Homo sapien
gtttcctgctacctaaccaagaacacttcaagc

SEQ ID NO: 218284 - DNA, 33 bp, Homo sapien
gtttcctgctacctaagcaagaacacttcaagc

SEQ ID NO: 218285 - DNA, 33 bp, Homo sapien
cagcttggtaaagtgacgcccagaaggaaggtc

SEQ ID NO: 218286 - DNA, 33 bp, Homo sapien
cagcttggtaaagtgaggcccagaaggaaggtc

SEQ ID NO: 218287 - DNA, 33 bp, Homo sapien
ttttttattctttagacagagctcacgctgttg

SEQ ID NO: 218288 - DNA, 33 bp, Homo sapien
ttttttattctttagatagagctcacgctgttg

SEQ ID NO: 218289 - DNA, 33 bp, Homo sapien
tatagcaggtatatgccgaaaagaactgaaaaa

SEQ ID NO: 218290 - DNA, 33 bp, Homo sapien
tatagcaggtatatgctgaaaagaactgaaaaa

SEQ ID NO: 218291 - DNA, 33 bp, Homo sapien
ttaaggacactctgctaaagacaatgcagctag

SEQ ID NO: 218292 - DNA, 33 bp, Homo sapien
ttaaggacactctgctgaagacaatgcagctag

SEQ ID NO: 218293 - DNA, 33 bp, Homo sapien
tgaggaatatgtcctgcagttcccacactagcc

SEQ ID NO: 218294 - DNA, 33 bp, Homo sapien
tgaggaatatgtcctgtagttcccacactagcc

SEQ ID NO: 218295 - DNA, 33 bp, Homo sapien
tgtgtggttacttcaacatcctgtcataccagt

SEQ ID NO: 218296 - DNA, 33 bp, Homo sapien
tgtgtggttacttcaatatcctgtcataccagt

SEQ ID NO: 218297 - DNA, 33 bp, Homo sapien
ttctgggcaaataacccgatgctcttcatgaga

SEQ ID NO: 218298 - DNA, 33 bp, Homo sapien
ttctgggcaaataacctgatgctcttcatgaga

SEQ ID NO: 218299 - DNA, 33 bp, Homo sapien
gaaggtccatgttcaaataattttggaaaatgc

SEQ ID NO: 218300 - DNA, 33 bp, Homo sapien
gaaggtccatgttcaagtaattttggaaaatgc

SEQ ID NO: 218301 - DNA, 33 bp, Homo sapien
atatatttattgggtacgtactgtatgctaggc

SEQ ID NO: 218302 - DNA, 33 bp, Homo sapien
atatatttattgggtatgtactgtatgctaggc

SEQ ID NO: 218303 - DNA, 33 bp, Homo sapien
gacattaatcctgagaaaggaagagcaagtgaa

SEQ ID NO: 218304 - DNA, 33 bp, Homo sapien
gacattaatcctgagagaggaagagcaagtgaa

SEQ ID NO: 218305 - DNA, 33 bp, Homo sapien
tcatgatattacattccattgtgtcccttgtgt

SEQ ID NO: 218306 - DNA, 33 bp, Homo sapien
tcatgatattacattctattgtgtcccttgtgt

SEQ ID NO: 218307 - DNA, 33 bp, Homo sapien
gactgctgattatcacaggagatgttagaggac

SEQ ID NO: 218308 - DNA, 33 bp, Homo sapien
gactgctgattatcacgggagatgttagaggac

SEQ ID NO: 218309 - DNA, 33 bp, Homo sapien
taggcagggatagagacggttttcctacttaat

SEQ ID NO: 218310 - DNA, 33 bp, Homo sapien
taggcagggatagagatggttttcctacttaat

SEQ ID NO: 218311 - DNA, 33 bp, Homo sapien
ttcattaccaatagcaaccctagaatatagact

SEQ ID NO: 218312 - DNA, 33 bp, Homo sapien
ttcattaccaatagcacccctagaatatagact

SEQ ID NO: 218313 - DNA, 33 bp, Homo sapien
tccacaggccacatgacgcttgtttatcaattg

SEQ ID NO: 218314 - DNA, 33 bp, Homo sapien
tccacaggccacatgatgcttgtttatcaattg

SEQ ID NO: 218315 - DNA, 33 bp, Homo sapien
tgaagctgagtttctacggttactgtgacttct

SEQ ID NO: 218316 - DNA, 33 bp, Homo sapien
tgaagctgagtttctatggttactgtgacttct

SEQ ID NO: 218317 - DNA, 33 bp, Homo sapien
tttatctatggcacaacaatgctgcataaaaaa

SEQ ID NO: 218318 - DNA, 33 bp, Homo sapien
tttatctatggcacaataatgctgcataaaaaa

SEQ ID NO: 218319 - DNA, 33 bp, Homo sapien
agagcactcagcaaatcaattggagaagtagaa

SEQ ID NO: 218320 - DNA, 33 bp, Homo sapien
agagcactcagcaaattaattggagaagtagaa

SEQ ID NO: 218321 - DNA, 33 bp, Homo sapien
ttccaacacatgataaatagtagtgagacagag

SEQ ID NO: 218322 - DNA, 33 bp, Homo sapien
ttccaacacatgataagtagtagtgagacagag

SEQ ID NO: 218323 - DNA, 33 bp, Homo sapien
actgaactatttcagaaggaagaaagatgagtt

SEQ ID NO: 218324 - DNA, 33 bp, Homo sapien
actgaactatttcagatggaagaaagatgagtt

SEQ ID NO: 218325 - DNA, 33 bp, Homo sapien
aagacactgcacaagcaaacagacaggaaggaa

SEQ ID NO: 218326 - DNA, 33 bp, Homo sapien
aagacactgcacaagccaacagacaggaaggaa

SEQ ID NO: 218327 - DNA, 33 bp, Homo sapien
tcaccctgactcctcaagtcacttcactgagct

SEQ ID NO: 218328 - DNA, 33 bp, Homo sapien
tcaccctgactcctcaggtcacttcactgagct

SEQ ID NO: 218329 - DNA, 33 bp, Homo sapien
cactctaaaagcaaaacagagaagtataaatat

SEQ ID NO: 218330 - DNA, 33 bp, Homo sapien
cactctaaaagcaaaagagagaagtataaatat

SEQ ID NO: 218331 - DNA, 33 bp, Homo sapien
attcttgagttgaaaacagcctctggagtaatg

SEQ ID NO: 218332 - DNA, 33 bp, Homo sapien
attcttgagttgaaaagagcctctggagtaatg

SEQ ID NO: 218333 - DNA, 33 bp, Homo sapien
atcatggatgcagaacacatggctatggaaggc

SEQ ID NO: 218334 - DNA, 33 bp, Homo sapien
atcatggatgcagaacccatggctatggaaggc

SEQ ID NO: 218335 - DNA, 33 bp, Homo sapien
gctactatgaatgaaaatagactaacaagatga

SEQ ID NO: 218336 - DNA, 33 bp, Homo sapien
gctactatgaatgaaagtagactaacaagatga

SEQ ID NO: 218337 - DNA, 33 bp, Homo sapien
ggttcaagggccacaacgacctgatggaatacg

SEQ ID NO: 218338 - DNA, 33 bp, Homo sapien
ggttcaagggccacaatgacctgatggaatacg

SEQ ID NO: 218339 - DNA, 33 bp, Homo sapien; identical to SEQ ID NO: 218337

SEQ ID NO: 218340 - DNA, 33 bp, Homo sapien; identical to SEQ ID NO: 218338

SEQ ID NO: 218341 - DNA, 33 bp, Homo sapien
aatgtaattcataggcaaaaaagacaatgccta

SEQ ID NO: 218342 - DNA, 33 bp, Homo sapien
aatgtaattcataggcgaaaaagacaatgccta

SEQ ID NO: 218343 - DNA, 33 bp, Homo sapien
aaaaatctcaacccaacaaaatgtttataaggg

SEQ ID NO: 218344 - DNA, 33 bp, Homo sapien
aaaaatctcaacccaagaaaatgtttataaggg

SEQ ID NO: 218345 - DNA, 33 bp, Homo sapien
gacaaaatattaaggcactgtttaatagcagta

SEQ ID NO: 218346 - DNA, 33 bp, Homo sapien
gacaaaatattaaggcgctgtttaatagcagta

SEQ ID NO: 218347 - DNA, 33 bp, Homo sapien
cattaactatagtcaccatgtggtccaatagat

SEQ ID NO: 218348 - DNA, 33 bp, Homo sapien
cattaactatagtcacgatgtggtccaatagat

SEQ ID NO: 218349 - DNA, 33 bp, Homo sapien
tggaacttctcagctaaggatacttattgttac

SEQ ID NO: 218350 - DNA, 33 bp, Homo sapien
tggaacttctcagctagggatacttattgttac

SEQ ID NO: 218351 - DNA, 33 bp, Homo sapien
tactaggcttttgcagaaattaaattgccaaag

SEQ ID NO: 218352 - DNA, 33 bp, Homo sapien
tactaggcttttgcaggaattaaattgccaaag

SEQ ID NO: 218353 - DNA, 33 bp, Homo sapien
aacaaggttcatcaacaccttccaaaaaccaca

SEQ ID NO: 218354 - DNA, 33 bp, Homo sapien
aacaaggttcatcaacgccttccaaaaaccaca

SEQ ID NO: 218355 - DNA, 33 bp, Homo sapien
ggcattcctttcttgaggatctaggagagaatc

SEQ ID NO: 218356 - DNA, 33 bp, Homo sapien
ggcattcctttcttgatgatctaggagagaatc

SEQ ID NO: 218357 - DNA, 33 bp, Homo sapien
agtcctgcccagattcaatcacacttcccacta

SEQ ID NO: 218358 - DNA, 33 bp, Homo sapien
agtcctgcccagattcgatcacacttcccacta

SEQ ID NO: 218359 - DNA, 33 bp, Homo sapien
aaatctactgtgtttccagaattgagcaaggat

SEQ ID NO: 218360 - DNA, 33 bp, Homo sapien
aaatctactgtgtttctagaattgagcaaggat

SEQ ID NO: 218361 - DNA, 33 bp, Homo sapien
gctacagaaggaaataaccaaggcagctcaaaa

SEQ ID NO: 218362 - DNA, 33 bp, Homo sapien
gctacagaaggaaatagccaaggcagctcaaaa

SEQ ID NO: 218363 - DNA, 33 bp, Homo sapien
tctcaagttgaactctcaacagtatacacaaaa

SEQ ID NO: 218364 - DNA, 33 bp, Homo sapien
tctcaagttgaactcttaacagtatacacaaaa

SEQ ID NO: 218365 - DNA, 33 bp, Homo sapien
attagaaatggcataaagcagaaaatgatgttt

SEQ ID NO: 218366 - DNA, 33 bp, Homo sapien
attagaaatggcataacgcagaaaatgatgttt

SEQ ID NO: 218367 - DNA, 33 bp, Homo sapien
cctgaacttgtatggcaaattcccaatttaaaa

SEQ ID NO: 218368 - DNA, 33 bp, Homo sapien
cctgaacttgtatggcgaattcccaatttaaaa

SEQ ID NO: 218369 - DNA, 33 bp, Homo sapien
ggcaatcaagagatccaatcataataataaaga

SEQ ID NO: 218370 - DNA, 33 bp, Homo sapien
ggcaatcaagagatccgatcataataataaaga

SEQ ID NO: 218371 - DNA, 33 bp, Homo sapien
ctgtttctttaggctccatcaggaatggggcac

SEQ ID NO: 218372 - DNA, 33 bp, Homo sapien
ctgtttctttaggctctatcaggaatggggcac

SEQ ID NO: 218373 - DNA, 33 bp, Homo sapien
catttctttgccctcaatcttatcagaaacagg

SEQ ID NO: 218374 - DNA, 33 bp, Homo sapien
catttctttgccctcagtcttatcagaaacagg

SEQ ID NO: 218375 - DNA, 33 bp, Homo sapien
ttgttagagagacattgaactctgtattccctc

SEQ ID NO: 218376 - DNA, 33 bp, Homo sapien
ttgttagagagacatttaactctgtattccctc

SEQ ID NO: 218377 - DNA, 33 bp, Homo sapien
caccccaaactgcataagtcctttccacaggtc

SEQ ID NO: 218378 - DNA, 33 bp, Homo sapien
caccccaaactgcatatgtcctttccacaggtc

SEQ ID NO: 218379 - DNA, 33 bp, Homo sapien
gctgggaatcttgtaaacactcaataaacctat

SEQ ID NO: 218380 - DNA, 33 bp, Homo sapien
gctgggaatcttgtaagcactcaataaacctat

SEQ ID NO: 218381 - DNA, 33 bp, Homo sapien
aacacaagctgcaaaacgcttaacccaggctgg

SEQ ID NO: 218382 - DNA, 33 bp, Homo sapien
aacacaagctgcaaaatgcttaacccaggctgg

SEQ ID NO: 218383 - DNA, 33 bp, Homo sapien
aaatgaaaaggtatgaacaatgttgaaaaaaat

SEQ ID NO: 218384 - DNA, 33 bp, Homo sapien
aaatgaaaaggtatgagcaatgttgaaaaaaat

SEQ ID NO: 218385 - DNA, 33 bp, Homo sapien
tttaccctaatgctcacggcagtggccagtttt

SEQ ID NO: 218386 - DNA, 33 bp, Homo sapien
tttaccctaatgctcatggcagtggccagtttt

SEQ ID NO: 218387 - DNA, 33 bp, Homo sapien
attactgatgaataaacagtaaaggaagaaata

SEQ ID NO: 218388 - DNA, 33 bp, Homo sapien
attactgatgaataaatagtaaaggaagaaata

SEQ ID NO: 218389 - DNA, 33 bp, Homo sapien
gtccatatgaacctacaaagaaaatctcaataa

SEQ ID NO: 218390 - DNA, 33 bp, Homo sapien
gtccatatgaacctacgaagaaaatctcaataa

SEQ ID NO: 218391 - DNA, 33 bp, Homo sapien
tacaaaaatagtagaactgctatgtccaggaga

SEQ ID NO: 218392 - DNA, 33 bp, Homo sapien
tacaaaaatagtagaattgctatgtccaggaga

SEQ ID NO: 218393 - DNA, 33 bp, Homo sapien
ctgtatttccaaaagaggaaaatgttaaaggtg

SEQ ID NO: 218394 - DNA, 33 bp, Homo sapien
ctgtatttccaaaagatgaaaatgttaaaggtg

SEQ ID NO: 218395 - DNA, 33 bp, Homo sapien
agggttcaagcaaaccaaaaggctcagaggaag

SEQ ID NO: 218396 - DNA, 33 bp, Homo sapien
agggttcaagcaaaccgaaaggctcagaggaag

SEQ ID NO: 218397 - DNA, 33 bp, Homo sapien
gaacactgggtcttcaaaatagatcaagatgtt

SEQ ID NO: 218398 - DNA, 33 bp, Homo sapien
gaacactgggtcttcagaatagatcaagatgtt

SEQ ID NO: 218399 - DNA, 33 bp, Homo sapien
cctttgcagaacaaacaaaatttgaatacattt

SEQ ID NO: 218400 - DNA, 33 bp, Homo sapien
cctttgcagaacaaacgaaatttgaatacattt

SEQ ID NO: 218401 - DNA, 33 bp, Homo sapien
acttacatttattgaacatattttgtgtggcag

SEQ ID NO: 218402 - DNA, 33 bp, Homo sapien
acttacatttattgaagatattttgtgtggcag

SEQ ID NO: 218403 - DNA, 33 bp, Homo sapien
agctgccctgttcaaaataatagcgactagtca

SEQ ID NO: 218404 - DNA, 33 bp, Homo sapien
agctgccctgttcaaagtaatagcgactagtca

SEQ ID NO: 218405 - DNA, 33 bp, Homo sapien
ggttcaaatgcaaggcaaggtaactacctgcat

SEQ ID NO: 218406 - DNA, 33 bp, Homo sapien
ggttcaaatgcaaggcgaggtaactacctgcat

SEQ ID NO: 218407 - DNA, 33 bp, Homo sapien
attttcatccagaggcgcctgaaacagccaccg

SEQ ID NO: 218408 - DNA, 33 bp, Homo sapien
attttcatccagaggctcctgaaacagccaccg

SEQ ID NO: 218409 - DNA, 33 bp, Homo sapien
taaatagatagtaagcaacattttatatctgag

SEQ ID NO: 218410 - DNA, 33 bp, Homo sapien
taaatagatagtaagccacattttatatctgag

SEQ ID NO: 218411 - DNA, 33 bp, Homo sapien
cttgtaagtaaggatacgaagaatgctttccta

SEQ ID NO: 218412 - DNA, 33 bp, Homo sapien
cttgtaagtaaggatatgaagaatgctttccta

SEQ ID NO: 218413 - DNA, 33 bp, Homo sapien
ggcagagttttactgcaaatgagtggtgtttta

SEQ ID NO: 218414 - DNA, 33 bp, Homo sapien
ggcagagttttactgccaatgagtggtgtttta

SEQ ID NO: 218415 - DNA, 33 bp, Homo sapien
aataatttgacagatacggtattgcaagtatct

SEQ ID NO: 218416 - DNA, 33 bp, Homo sapien
aataatttgacagatatggtattgcaagtatct

SEQ ID NO: 218417 - DNA, 33 bp, Homo sapien
acccttctgtctcaaagaaatcacttgtggaaa

SEQ ID NO: 218418 - DNA, 33 bp, Homo sapien
acccttctgtctcaaataaatcacttgtggaaa

SEQ ID NO: 218419 - DNA, 33 bp, Homo sapien
tccactattacatttaaagaatctaacatctgt

SEQ ID NO: 218420 - DNA, 33 bp, Homo sapien
tccactattacatttagagaatctaacatctgt

SEQ ID NO: 218421 - DNA, 33 bp, Homo sapien
cttttagattgaacagaagatttgaaaaggtag

SEQ ID NO: 218422 - DNA, 33 bp, Homo sapien
cttttagattgaacaggagatttgaaaaggtag

SEQ ID NO: 218423 - DNA, 33 bp, Homo sapien
ttgcctgattcataaactaactgcaaaataaga

SEQ ID NO: 218424 - DNA, 33 bp, Homo sapien
ttgcctgattcataaagtaactgcaaaataaga

SEQ ID NO: 218425 - DNA, 33 bp, Homo sapien
tgtgagtttgggcaaaggtattccttaactgat

SEQ ID NO: 218426 - DNA, 33 bp, Homo sapien
tgtgagtttgggcaaatgtattccttaactgat

SEQ ID NO: 218427 - DNA, 33 bp, Homo sapien
agaaatcaacaaaacaagatatctggataattc

SEQ ID NO: 218428 - DNA, 33 bp, Homo sapien
agaaatcaacaaaacaggatatctggataattc

SEQ ID NO: 218429 - DNA, 33 bp, Homo sapien
gtatagttaggttaatcaagaaaaatagagtga

SEQ ID NO: 218430 - DNA, 33 bp, Homo sapien
gtatagttaggttaatgaagaaaaatagagtga

SEQ ID NO: 218431 - DNA, 33 bp, Homo sapien
catgagtaggtagttacgttttcttgtaaattc

SEQ ID NO: 218432 - DNA, 33 bp, Homo sapien
catgagtaggtagttatgttttcttgtaaattc

SEQ ID NO: 218433 - DNA, 33 bp, Homo sapien
aatgagtgatgatctacggcagaggtgaaagtg

SEQ ID NO: 218434 - DNA, 33 bp, Homo sapien
aatgagtgatgatctatggcagaggtgaaagtg

SEQ ID NO: 218435 - DNA, 33 bp, Homo sapien
tctgttttttgtttatcagaatctatcaactgg

SEQ ID NO: 218436 - DNA, 33 bp, Homo sapien
tctgttttttgtttatgagaatctatcaactgg

SEQ ID NO: 218437 - DNA, 33 bp, Homo sapien
ttctcttcaagactaacaggacagctactagac

SEQ ID NO: 218438 - DNA, 33 bp, Homo sapien
ttctcttcaagactaagaggacagctactagac

SEQ ID NO: 218439 - DNA, 33 bp, Homo sapien
taatttaattccatgcaactaaagataatgtta

SEQ ID NO: 218440 - DNA, 33 bp, Homo sapien
taatttaattccatgccactaaagataatgtta

SEQ ID NO: 218441 - DNA, 33 bp, Homo sapien
gtattagtctgttttcacaatgccataaagaac

SEQ ID NO: 218442 - DNA, 33 bp, Homo sapien
gtattagtctgttttcgcaatgccataaagaac

SEQ ID NO: 218443 - DNA, 33 bp, Homo sapien
aaacttcatcgtaatgcatccagtctctttttc

SEQ ID NO: 218444 - DNA, 33 bp, Homo sapien
aaacttcatcgtaatgtatccagtctctttttc

SEQ ID NO: 218445 - DNA, 33 bp, Homo sapien
taaaatgactgtaagactactagaaatgtgaga

SEQ ID NO: 218446 - DNA, 33 bp, Homo sapien
taaaatgactgtaagattactagaaatgtgaga

SEQ ID NO: 218447 - DNA, 33 bp, Homo sapien
gaatttactgacaaaactataggtctgaaaaag

SEQ ID NO: 218448 - DNA, 33 bp, Homo sapien
gaatttactgacaaaagtataggtctgaaaaag

SEQ ID NO: 218449 - DNA, 33 bp, Homo sapien
ctggtacatagacactcaatagatgctagtaat

SEQ ID NO: 218450 - DNA, 33 bp, Homo sapien
ctggtacatagacacttaatagatgctagtaat

SEQ ID NO: 218451 - DNA, 33 bp, Homo sapien
aacagtatagagatgacaactataaggagtgtt

SEQ ID NO: 218452 - DNA, 33 bp, Homo sapien
aacagtatagagatgataactataaggagtgtt

SEQ ID NO: 218453 - DNA, 33 bp, Homo sapien
ataaggagtgtttggagagtagaaaggacctag

SEQ ID NO: 218454 - DNA, 33 bp, Homo sapien
ataaggagtgtttggatagtagaaaggacctag

SEQ ID NO: 218455 - DNA, 33 bp, Homo sapien
agcaaattgagatgtaaggagacaaaattttga

SEQ ID NO: 218456 - DNA, 33 bp, Homo sapien
agcaaattgagatgtacggagacaaaattttga

SEQ ID NO: 218457 - DNA, 33 bp, Homo sapien
taccctggctcaaaaccataatatacatcaagt

SEQ ID NO: 218458 - DNA, 33 bp, Homo sapien
taccctggctcaaaactataatatacatcaagt

SEQ ID NO: 218459 - DNA, 33 bp, Homo sapien
ttccttacaaccaaaacgcttatgggccaaagt

SEQ ID NO: 218460 - DNA, 33 bp, Homo sapien
ttccttacaaccaaaatgcttatgggccaaagt

SEQ ID NO: 218461 - DNA, 33 bp, Homo sapien
ccatatttctttttcacggaaactatcctcatt

SEQ ID NO: 218462 - DNA, 33 bp, Homo sapien
ccatatttctttttcatggaaactatcctcatt

SEQ ID NO: 218463 - DNA, 33 bp, Homo sapien
catgagactcacgaatcagagacaaatgacttt

SEQ ID NO: 218464 - DNA, 33 bp, Homo sapien
catgagactcacgaattagagacaaatgacttt

SEQ ID NO: 218465 - DNA, 33 bp, Homo sapien
taggcaaaaccaaaaagtaggcagtataccggt

SEQ ID NO: 218466 - DNA, 33 bp, Homo sapien
taggcaaaaccaaaaattaggcagtataccggt

SEQ ID NO: 218467 - DNA, 33 bp, Homo sapien
tgatccatttcccaacaaagtgctgaacaaatt

SEQ ID NO: 218468 - DNA, 33 bp, Homo sapien
tgatccatttcccaaccaagtgctgaacaaatt

SEQ ID NO: 218469 - DNA, 33 bp, Homo sapien
aatttctcactctttgaaatgcctaaggcaaga

SEQ ID NO: 218470 - DNA, 33 bp, Homo sapien
aatttctcactctttggaatgcctaaggcaaga

SEQ ID NO: 218471 - DNA, 33 bp, Homo sapien
taatggtaatgtagagcaaacagacatggaaga

SEQ ID NO: 218472 - DNA, 33 bp, Homo sapien
taatggtaatgtagagtaaacagacatggaaga

SEQ ID NO: 218473 - DNA, 33 bp, Homo sapien
ttctttgccataaggactattttgagctgatta

SEQ ID NO: 218474 - DNA, 33 bp, Homo sapien
ttctttgccataaggattattttgagctgatta

SEQ ID NO: 218475 - DNA, 33 bp, Homo sapien
gacaaacagtcttctagacacaatgtaacttca

SEQ ID NO: 218476 - DNA, 33 bp, Homo sapien
gacaaacagtcttctatacacaatgtaacttca

SEQ ID NO: 218477 - DNA, 33 bp, Homo sapien
ctcagaagctgcttcaaaaacaaagtctctgat

SEQ ID NO: 218478 - DNA, 33 bp, Homo sapien
ctcagaagctgcttcacaaacaaagtctctgat

SEQ ID NO: 218479 - DNA, 33 bp, Homo sapien
cttgtcaaggaaatacagtaaagtccagcatct

SEQ ID NO: 218480 - DNA, 33 bp, Homo sapien
cttgtcaaggaaatacggtaaagtccagcatct

SEQ ID NO: 218481 - DNA, 33 bp, Homo sapien
aacttgcattgcaggaaatgtctggtaagggag

SEQ ID NO: 218482 - DNA, 33 bp, Homo sapien
aacttgcattgcaggagatgtctggtaagggag

SEQ ID NO: 218483 - DNA, 33 bp, Homo sapien
ctgactgactgaaataccaagaatcatggtgat

SEQ ID NO: 218484 - DNA, 33 bp, Homo sapien
ctgactgactgaaatatcaagaatcatggtgat

SEQ ID NO: 218485 - DNA, 33 bp, Homo sapien
ttggaatatatcagtaaaggtccaagcagcaat

SEQ ID NO: 218486 - DNA, 33 bp, Homo sapien
ttggaatatatcagtagaggtccaagcagcaat

SEQ ID NO: 218487 - DNA, 33 bp, Homo sapien
ttggttctttgcgatacggcagggagcatgctt

SEQ ID NO: 218488 - DNA, 33 bp, Homo sapien
ttggttctttgcgatatggcagggagcatgctt

SEQ ID NO: 218489 - DNA, 33 bp, Homo sapien
acatatttgccttaaccagacctcctcctgcag

SEQ ID NO: 218490 - DNA, 33 bp, Homo sapien
acatatttgccttaactagacctcctcctgcag

SEQ ID NO: 218491 - DNA, 33 bp, Homo sapien
tcctcatagaagatacaaataaacgcaacctct

SEQ ID NO: 218492 - DNA, 33 bp, Homo sapien
tcctcatagaagatacgaataaacgcaacctct

SEQ ID NO: 218493 - DNA, 33 bp, Homo sapien
tctctttttaggcttacggaatgactttaaagt

SEQ ID NO: 218494 - DNA, 33 bp, Homo sapien
tctctttttaggcttatggaatgactttaaagt

SEQ ID NO: 218495 - DNA, 33 bp, Homo sapien
cactcccaagtctataaccagagaaaacttcaa

SEQ ID NO: 218496 - DNA, 33 bp, Homo sapien
cactcccaagtctatacccagagaaaacttcaa

SEQ ID NO: 218497 - DNA, 33 bp, Homo sapien
gaagttgaatttagtaagtagactgaaaagagg

SEQ ID NO: 218498 - DNA, 33 bp, Homo sapien
gaagttgaatttagtatgtagactgaaaagagg

SEQ ID NO: 218499 - DNA, 33 bp, Homo sapien
ctttaaaatgttcacaataggccggcgcagtgg

SEQ ID NO: 218500 - DNA, 33 bp, Homo sapien
ctttaaaatgttcacagtaggccggcgcagtgg

SEQ ID NO: 218501 - DNA, 33 bp, Homo sapien
actaaggtggcaaaaaaaatcagacgaaattct

SEQ ID NO: 218502 - DNA, 33 bp, Homo sapien
actaaggtggcaaaaagaatcagacgaaattct

SEQ ID NO: 218503 - DNA, 33 bp, Homo sapien
aacattaaatccttgcacaatcaaattaatgtt

SEQ ID NO: 218504 - DNA, 33 bp, Homo sapien
aacattaaatccttgcgcaatcaaattaatgtt

SEQ ID NO: 218505 - DNA, 33 bp, Homo sapien
catttctagttgtgcacgtggttctgtataaac

SEQ ID NO: 218506 - DNA, 33 bp, Homo sapien
catttctagttgtgcaggtggttctgtataaac

SEQ ID NO: 218507 - DNA, 33 bp, Homo sapien
agcagcctgttcactacgtctccaactacactt

SEQ ID NO: 218508 - DNA, 33 bp, Homo sapien
agcagcctgttcactatgtctccaactacactt

SEQ ID NO: 218509 - DNA, 33 bp, Homo sapien
aagcaggacctgaataaaatatacaaatgttgt

SEQ ID NO: 218510 - DNA, 33 bp, Homo sapien
aagcaggacctgaatagaatatacaaatgttgt

SEQ ID NO: 218511 - DNA, 33 bp, Homo sapien
ttgcggtcatggattacgataggtatgtgtatc

SEQ ID NO: 218512 - DNA, 33 bp, Homo sapien
ttgcggtcatggattatgataggtatgtgtatc

SEQ ID NO: 218513 - DNA, 33 bp, Homo sapien
atcttgttttcctctacataccctatttccagc

SEQ ID NO: 218514 - DNA, 33 bp, Homo sapien
atcttgttttcctctatataccctatttccagc

SEQ ID NO: 218515 - DNA, 33 bp, Homo sapien
ccctttgttacctaccaacggctgggcgtatga

SEQ ID NO: 218516 - DNA, 33 bp, Homo sapien
ccctttgttacctaccgacggctgggcgtatga

SEQ ID NO: 218517 - DNA, 33 bp, Homo sapien
aatagctacaaaggtacaaaactgctaaaaaaa

SEQ ID NO: 218518 - DNA, 33 bp, Homo sapien
aatagctacaaaggtagaaaactgctaaaaaaa

SEQ ID NO: 218519 - DNA, 33 bp, Homo sapien
tacccctaatacaaaaagattccaatttgctat

SEQ ID NO: 218520 - DNA, 33 bp, Homo sapien
tacccctaatacaaaatgattccaatttgctat

SEQ ID NO: 218521 - DNA, 33 bp, Homo sapien
ttatataaaattgtagaaaaatgagactacatg

SEQ ID NO: 218522 - DNA, 33 bp, Homo sapien
ttatataaaattgtaggaaaatgagactacatg

SEQ ID NO: 218523 - DNA, 33 bp, Homo sapien
ggtctattaaccaagaaaagtattcctggagga

SEQ ID NO: 218524 - DNA, 33 bp, Homo sapien
ggtctattaaccaagagaagtattcctggagga

SEQ ID NO: 218525 - DNA, 33 bp, Homo sapien
gtatatatgtttacacaaggcactttacatgtt

SEQ ID NO: 218526 - DNA, 33 bp, Homo sapien
gtatatatgtttacaccaggcactttacatgtt

SEQ ID NO: 218527 - DNA, 33 bp, Homo sapien
atgcccctatctgtaaatgatgatggaagtttg

SEQ ID NO: 218528 - DNA, 33 bp, Homo sapien
atgcccctatctgtaagtgatgatggaagtttg

SEQ ID NO: 218529 - DNA, 33 bp, Homo sapien
caagaactttaggacacggaagtagctgggata

SEQ ID NO: 218530 - DNA, 33 bp, Homo sapien
caagaactttaggacatggaagtagctgggata

SEQ ID NO: 218531 - DNA, 33 bp, Homo sapien
gagacccattttcttgcattttcctgactctag

SEQ ID NO: 218532 - DNA, 33 bp, Homo sapien
gagacccattttcttggattttcctgactctag

SEQ ID NO: 218533 - DNA, 33 bp, Homo sapien
tatatgactttcccaactatcacttttcatatt

SEQ ID NO: 218534 - DNA, 33 bp, Homo sapien
tatatgactttcccaattatcacttttcatatt

SEQ ID NO: 218535 - DNA, 33 bp, Homo sapien
aaagtagggtgaatagaaagttcttttaacttt

SEQ ID NO: 218536 - DNA, 33 bp, Homo sapien
aaagtagggtgaatagcaagttcttttaacttt

SEQ ID NO: 218537 - DNA, 33 bp, Homo sapien
tctattttttgatcacagtaccttatctgctgt

SEQ ID NO: 218538 - DNA, 33 bp, Homo sapien
tctattttttgatcacggtaccttatctgctgt

SEQ ID NO: 218539 - DNA, 33 bp, Homo sapien
agaagagccattaagccgagttgaaggaaactg

SEQ ID NO: 218540 - DNA, 33 bp, Homo sapien
agaagagccattaagctgagttgaaggaaactg

SEQ ID NO: 218541 - DNA, 33 bp, Homo sapien
gagtagaaagagtgaaagatacgttgactatac

SEQ ID NO: 218542 - DNA, 33 bp, Homo sapien
gagtagaaagagtgaaggatacgttgactatac

SEQ ID NO: 218543 - DNA, 33 bp, Homo sapien
acatattaagcataaacgccaaagggatgtagt

SEQ ID NO: 218544 - DNA, 33 bp, Homo sapien
acatattaagcataaatgccaaagggatgtagt

SEQ ID NO: 218545 - DNA, 33 bp, Homo sapien
gtgaaatgattgatataaaagttctagcaaaac

SEQ ID NO: 218546 - DNA, 33 bp, Homo sapien
gtgaaatgattgatatcaaagttctagcaaaac

SEQ ID NO: 218547 - DNA, 33 bp, Homo sapien
gatatcttatagccacaaagacttaagacactc

SEQ ID NO: 218548 - DNA, 33 bp, Homo sapien
gatatcttatagccacgaagacttaagacactc

SEQ ID NO: 218549 - DNA, 33 bp, Homo sapien
catctagaatttcacaatcacaactaacagatt

SEQ ID NO: 218550 - DNA, 33 bp, Homo sapien
catctagaatttcacagtcacaactaacagatt

SEQ ID NO: 218551 - DNA, 33 bp, Homo sapien
ggtctgtctgactatacatctctaactaatttt

SEQ ID NO: 218552 - DNA, 33 bp, Homo sapien
ggtctgtctgactatatatctctaactaatttt

SEQ ID NO: 218553 - DNA, 33 bp, Homo sapien
tttctgatgacagtgaactttttctcagttttt

SEQ ID NO: 218554 - DNA, 33 bp, Homo sapien
tttctgatgacagtgatctttttctcagttttt

SEQ ID NO: 218555 - DNA, 33 bp, Homo sapien
taaatactgctaggtccaattacctactaccca

SEQ ID NO: 218556 - DNA, 33 bp, Homo sapien
taaatactgctaggtctaattacctactaccca

SEQ ID NO: 218557 - DNA, 33 bp, Homo sapien
cataattgcacactaagaaattttattggccag

SEQ ID NO: 218558 - DNA, 33 bp, Homo sapien
cataattgcacactaataaattttattggccag

SEQ ID NO: 218559 - DNA, 33 bp, Homo sapien
acctcccttcaaatcaccactagttagtgatgg

SEQ ID NO: 218560 - DNA, 33 bp, Homo sapien
acctcccttcaaatcatcactagttagtgatgg

SEQ ID NO: 218561 - DNA, 33 bp, Homo sapien
acacactctgaagaaaatcaatggatacctata

SEQ ID NO: 218562 - DNA, 33 bp, Homo sapien
acacactctgaagaaagtcaatggatacctata

SEQ ID NO: 218563 - DNA, 33 bp, Homo sapien
atctagtttatgataacagcagaaattagagca

SEQ ID NO: 218564 - DNA, 33 bp, Homo sapien
atctagtttatgataatagcagaaattagagca

SEQ ID NO: 218565 - DNA, 33 bp, Homo sapien
ttgagcttggtatacaaaatcattcataagaat

SEQ ID NO: 218566 - DNA, 33 bp, Homo sapien
ttgagcttggtatacataatcattcataagaat

SEQ ID NO: 218567 - DNA, 33 bp, Homo sapien
atttgatatagctatacgtggtagatgattacc

SEQ ID NO: 218568 - DNA, 33 bp, Homo sapien
atttgatatagctatatgtggtagatgattacc

SEQ ID NO: 218569 - DNA, 33 bp, Homo sapien
ccctctacgactgaaacgacttccaggtgattt

SEQ ID NO: 218570 - DNA, 33 bp, Homo sapien
ccctctacgactgaaaggacttccaggtgattt

SEQ ID NO: 218571 - DNA, 33 bp, Homo sapien
ccaagtgaccatttgacaaggaaattagtattg

SEQ ID NO: 218572 - DNA, 33 bp, Homo sapien
ccaagtgaccatttgataaggaaattagtattg

SEQ ID NO: 218573 - DNA, 33 bp, Homo sapien
attagtattgatggaaaagagccagatattatc

SEQ ID NO: 218574 - DNA, 33 bp, Homo sapien
attagtattgatggaagagagccagatattatc

SEQ ID NO: 218575 - DNA, 33 bp, Homo sapien
agttgtacagtttaacccttctatttaggtcat

SEQ ID NO: 218576 - DNA, 33 bp, Homo sapien
agttgtacagtttaacgcttctatttaggtcat

SEQ ID NO: 218577 - DNA, 33 bp, Homo sapien
ctaaaaagagcctcaaattacttcaaaatggat

SEQ ID NO: 218578 - DNA, 33 bp, Homo sapien
ctaaaaagagcctcaagttacttcaaaatggat

SEQ ID NO: 218579 - DNA, 33 bp, Homo sapien
agctccctaaaatagacccatcagttcagtacg

SEQ ID NO: 218580 - DNA, 33 bp, Homo sapien
agctccctaaaatagatccatcagttcagtacg

SEQ ID NO: 218581 - DNA, 33 bp, Homo sapien
gaatacttagtcctaaaaaacatccctgtgggc

SEQ ID NO: 218582 - DNA, 33 bp, Homo sapien
gaatacttagtcctaacaaacatccctgtgggc

SEQ ID NO: 218583 - DNA, 33 bp, Homo sapien
tgtatggtataagtgaaccatcattcattttat

SEQ ID NO: 218584 - DNA, 33 bp, Homo sapien
tgtatggtataagtgatccatcattcattttat

SEQ ID NO: 218585 - DNA, 33 bp, Homo sapien
caactgtcccctggaccatttccccagagacca

SEQ ID NO: 218586 - DNA, 33 bp, Homo sapien
caactgtcccctggacgatttccccagagacca

SEQ ID NO: 218587 - DNA, 33 bp, Homo sapien
accatattcaataaacagtgttgggataattgg

SEQ ID NO: 218588 - DNA, 33 bp, Homo sapien
accatattcaataaacggtgttgggataattgg

SEQ ID NO: 218589 - DNA, 33 bp, Homo sapien
tatctaattggtcttacacaagcatttagttaa

SEQ ID NO: 218590 - DNA, 33 bp, Homo sapien
tatctaattggtcttatacaagcatttagttaa

SEQ ID NO: 218591 - DNA, 33 bp, Homo sapien
tgctgacggtattagacagatgatcgagtcaga

SEQ ID NO: 218592 - DNA, 33 bp, Homo sapien
tgctgacggtattagatagatgatcgagtcaga

SEQ ID NO: 218593 - DNA, 33 bp, Homo sapien; identical to SEQ ID NO: 218591

SEQ ID NO: 218594 - DNA, 33 bp, Homo sapien; identical to SEQ ID NO: 218592

SEQ ID NO: 218595 - DNA, 33 bp, Homo sapien
gtccttgaagacaaagaccaagatttgaataca

SEQ ID NO: 218596 - DNA, 33 bp, Homo sapien
gtccttgaagacaaaggccaagatttgaataca

SEQ ID NO: 218597 - DNA, 33 bp, Homo sapien
aagttgtatgcctttcccatagttcacacatta

SEQ ID NO: 218598 - DNA, 33 bp, Homo sapien
aagttgtatgcctttctcatagttcacacatta

SEQ ID NO: 218599 - DNA, 33 bp, Homo sapien
gaggtcaagcaaactgccaacatggatttcgca

SEQ ID NO: 218600 - DNA, 33 bp, Homo sapien
gaggtcaagcaaactgtcaacatggatttcgca

SEQ ID NO: 218601 - DNA, 33 bp, Homo sapien
acttcctgagtagattcaagggaggcttcaaca

SEQ ID NO: 218602 - DNA, 33 bp, Homo sapien
acttcctgagtagatttaagggaggcttcaaca

SEQ ID NO: 218603 - DNA, 33 bp, Homo sapien
tcatgatagtcataaaactaaatgtcttatttg

SEQ ID NO: 218604 - DNA, 33 bp, Homo sapien
tcatgatagtcataaagctaaatgtcttatttg

SEQ ID NO: 218605 - DNA, 33 bp, Homo sapien
tggcctgtgattcttacctcctacaaagttgat

SEQ ID NO: 218606 - DNA, 33 bp, Homo sapien
tggcctgtgattcttatctcctacaaagttgat

SEQ ID NO: 218607 - DNA, 33 bp, Homo sapien
gtgataacatgagctacggtagtgttataataa

SEQ ID NO: 218608 - DNA, 33 bp, Homo sapien
gtgataacatgagctagggtagtgttataataa

SEQ ID NO: 218609 - DNA, 33 bp, Homo sapien
tcaaaatatacaaactcacattttgacatacat

SEQ ID NO: 218610 - DNA, 33 bp, Homo sapien
tcaaaatatacaaactgacattttgacatacat

SEQ ID NO: 218611 - DNA, 33 bp, Homo sapien
actttgactacagaaccagaataattcagcaag

SEQ ID NO: 218612 - DNA, 33 bp, Homo sapien
actttgactacagaactagaataattcagcaag

SEQ ID NO: 218613 - DNA, 33 bp, Homo sapien
gacctgccaagagcaacgagtagcaaacagacc

SEQ ID NO: 218614 - DNA, 33 bp, Homo sapien
gacctgccaagagcaatgagtagcaaacagacc

SEQ ID NO: 218615 - DNA, 33 bp, Homo sapien
gcatgaaatttcagaaaagaagattaagctcaa

SEQ ID NO: 218616 - DNA, 33 bp, Homo sapien
gcatgaaatttcagaagagaagattaagctcaa

SEQ ID NO: 218617 - DNA, 33 bp, Homo sapien
gaacccattatctccaggttttagtgctaggat

SEQ ID NO: 218618 - DNA, 33 bp, Homo sapien
gaacccattatctccatgttttagtgctaggat

SEQ ID NO: 218619 - DNA, 33 bp, Homo sapien
tgcccacatattgccaactttccagactgaaaa

SEQ ID NO: 218620 - DNA, 33 bp, Homo sapien
tgcccacatattgccagctttccagactgaaaa

SEQ ID NO: 218621 - DNA, 33 bp, Homo sapien
aaaagaagtctgtttcaaaaactcaggcaggcc

SEQ ID NO: 218622 - DNA, 33 bp, Homo sapien
aaaagaagtctgtttcgaaaactcaggcaggcc

SEQ ID NO: 218623 - DNA, 33 bp, Homo sapien
caaactcttgcttatcaatccaatccaaatttt

SEQ ID NO: 218624 - DNA, 33 bp, Homo sapien
caaactcttgcttatcgatccaatccaaatttt

SEQ ID NO: 218625 - DNA, 33 bp, Homo sapien
taattattttctccacaaactgcatagaaatga

SEQ ID NO: 218626 - DNA, 33 bp, Homo sapien
taattattttctccacgaactgcatagaaatga

SEQ ID NO: 218627 - DNA, 33 bp, Homo sapien
ttcttcaggaaattgaccagagtcatcaaaata

SEQ ID NO: 218628 - DNA, 33 bp, Homo sapien
ttcttcaggaaattgatcagagtcatcaaaata

SEQ ID NO: 218629 - DNA, 33 bp, Homo sapien
gtgtgccaaacgttgggatctgaaattatgctt

SEQ ID NO: 218630 - DNA, 33 bp, Homo sapien
gtgtgccaaacgttggtatctgaaattatgctt

SEQ ID NO: 218631 - DNA, 33 bp, Homo sapien
agaacaacatctcacaaaatgatcaacagaatg

SEQ ID NO: 218632 - DNA, 33 bp, Homo sapien
agaacaacatctcacataatgatcaacagaatg

SEQ ID NO: 218633 - DNA, 33 bp, Homo sapien
ttgaaagagcattgaaaactctcaactgtaaca

SEQ ID NO: 218634 - DNA, 33 bp, Homo sapien
ttgaaagagcattgaagactctcaactgtaaca

SEQ ID NO: 218635 - DNA, 33 bp, Homo sapien
gttaataaattagaaacggttgctcaaaattta

SEQ ID NO: 218636 - DNA, 33 bp, Homo sapien
gttaataaattagaaatggttgctcaaaattta

SEQ ID NO: 218637 - DNA, 33 bp, Homo sapien
gacagtactttcaaatcatcatgagttttgttt

SEQ ID NO: 218638 - DNA, 33 bp, Homo sapien
gacagtactttcaaattatcatgagttttgttt

SEQ ID NO: 218639 - DNA, 33 bp, Homo sapien
tttatccttcatttgcactcatgctctttgttt

SEQ ID NO: 218640 - DNA, 33 bp, Homo sapien
tttatccttcatttgcgctcatgctctttgttt

SEQ ID NO: 218641 - DNA, 33 bp, Homo sapien
agagcataagcctcagaagtttttatggaactc

SEQ ID NO: 218642 - DNA, 33 bp, Homo sapien
agagcataagcctcagcagtttttatggaactc

SEQ ID NO: 218643 - DNA, 33 bp, Homo sapien
gtagctgacttaattgaatggcaacaataactt

SEQ ID NO: 218644 - DNA, 33 bp, Homo sapien
gtagctgacttaattggatggcaacaataactt

SEQ ID NO: 218645 - DNA, 33 bp, Homo sapien
atttttctatctttaagtagatcttggcacctt

SEQ ID NO: 218646 - DNA, 33 bp, Homo sapien
atttttctatctttaattagatcttggcacctt

SEQ ID NO: 218647 - DNA, 33 bp, Homo sapien
tctggctgttctggtaacttggtgatttgagat

SEQ ID NO: 218648 - DNA, 33 bp, Homo sapien
tctggctgttctggtagcttggtgatttgagat

SEQ ID NO: 218649 - DNA, 33 bp, Homo sapien
gaccttccaggggtcaaggctgagaaaaagctg

SEQ ID NO: 218650 - DNA, 33 bp, Homo sapien
gaccttccaggggtcatggctgagaaaaagctg

SEQ ID NO: 218651 - DNA, 33 bp, Homo sapien
ctcttgcaaatttagaagttagaatttatttat

SEQ ID NO: 218652 - DNA, 33 bp, Homo sapien
ctcttgcaaatttagaggttagaatttatttat

SEQ ID NO: 218653 - DNA, 33 bp, Homo sapien
atgaaaaaatgatttcaacataccaatatacat

SEQ ID NO: 218654 - DNA, 33 bp, Homo sapien
atgaaaaaatgatttcgacataccaatatacat

SEQ ID NO: 218655 - DNA, 33 bp, Homo sapien
tattcctcactagatgacagaaatcaatgctca

SEQ ID NO: 218656 - DNA, 33 bp, Homo sapien
tattcctcactagatggcagaaatcaatgctca

SEQ ID NO: 218657 - DNA, 33 bp, Homo sapien
ttctgttttgcagtcaaaatccagaaaatccca

SEQ ID NO: 218658 - DNA, 33 bp, Homo sapien
ttctgttttgcagtcataatccagaaaatccca

SEQ ID NO: 218659 - DNA, 33 bp, Homo sapien
tcctatttagactttaccactccattgcatgat

SEQ ID NO: 218660 - DNA, 33 bp, Homo sapien
tcctatttagactttatcactccattgcatgat

SEQ ID NO: 218661 - DNA, 33 bp, Homo sapien
gttactgaaactacccccaataaatcttatgca

SEQ ID NO: 218662 - DNA, 33 bp, Homo sapien
gttactgaaactaccctcaataaatcttatgca

SEQ ID NO: 218663 - DNA, 33 bp, Homo sapien
agaaaggaagggcaaccgaactggaaaagagga

SEQ ID NO: 218664 - DNA, 33 bp, Homo sapien
agaaaggaagggcaactgaactggaaaagagga

SEQ ID NO: 218665 - DNA, 33 bp, Homo sapien
ttaaagcataaagagaacacctagaaggaaata

SEQ ID NO: 218666 - DNA, 33 bp, Homo sapien
ttaaagcataaagagatcacctagaaggaaata

SEQ ID NO: 218667 - DNA, 33 bp, Homo sapien
tttctccacactggcaaaaactattctatttgg

SEQ ID NO: 218668 - DNA, 33 bp, Homo sapien
tttctccacactggcagaaactattctatttgg

SEQ ID NO: 218669 - DNA, 33 bp, Homo sapien
ccacagtcaagacacaaaatggctccatcacta

SEQ ID NO: 218670 - DNA, 33 bp, Homo sapien
ccacagtcaagacacagaatggctccatcacta

SEQ ID NO: 218671 - DNA, 33 bp, Homo sapien
acatatttgttgacaaaatcaaacctcaactga

SEQ ID NO: 218672 - DNA, 33 bp, Homo sapien
acatatttgttgacaatatcaaacctcaactga

SEQ ID NO: 218673 - DNA, 33 bp, Homo sapien
agggagaaagggttcaaaactccaggttcctga

SEQ ID NO: 218674 - DNA, 33 bp, Homo sapien
agggagaaagggttcagaactccaggttcctga

SEQ ID NO: 218675 - DNA, 33 bp, Homo sapien
tttctctcagaatcccaaatcaaacagatatta

SEQ ID NO: 218676 - DNA, 33 bp, Homo sapien
tttctctcagaatcccgaatcaaacagatatta

SEQ ID NO: 218677 - DNA, 33 bp, Homo sapien
aaagtcaaacttcatactaaagtgcctgagtta

SEQ ID NO: 218678 - DNA, 33 bp, Homo sapien
aaagtcaaacttcatattaaagtgcctgagtta

SEQ ID NO: 218679 - DNA, 33 bp, Homo sapien
gccagagaaatttcaacggtttatacaatcccc

SEQ ID NO: 218680 - DNA, 33 bp, Homo sapien
gccagagaaatttcaatggtttatacaatcccc

SEQ ID NO: 218681 - DNA, 33 bp, Homo sapien
atataattatcagtgaacttatccaccctactg

SEQ ID NO: 218682 - DNA, 33 bp, Homo sapien
atataattatcagtgaccttatccaccctactg

SEQ ID NO: 218683 - DNA, 33 bp, Homo sapien
ctattccagtggtctacatgtcttttctggtac

SEQ ID NO: 218684 - DNA, 33 bp, Homo sapien
ctattccagtggtctatatgtcttttctggtac

SEQ ID NO: 218685 - DNA, 33 bp, Homo sapien
tctcaacatttttgtgaacttcccaaaatcatt

SEQ ID NO: 218686 - DNA, 33 bp, Homo sapien
tctcaacatttttgtggacttcccaaaatcatt

SEQ ID NO: 218687 - DNA, 33 bp, Homo sapien
tcttcatcttaatgtccagtgaagctaggagta

SEQ ID NO: 218688 - DNA, 33 bp, Homo sapien
tcttcatcttaatgtctagtgaagctaggagta

SEQ ID NO: 218689 - DNA, 33 bp, Homo sapien
ctgcactggaattcaaagacaaacacttaaggc

SEQ ID NO: 218690 - DNA, 33 bp, Homo sapien
ctgcactggaattcaaggacaaacacttaaggc

SEQ ID NO: 218691 - DNA, 33 bp, Homo sapien
aactgaagaaaaggaaaaatacacccaagtcaa

SEQ ID NO: 218692 - DNA, 33 bp, Homo sapien
aactgaagaaaaggaataatacacccaagtcaa

SEQ ID NO: 218693 - DNA, 33 bp, Homo sapien
ctctcacctgtgctgaataagaagaaactcaga

SEQ ID NO: 218694 - DNA, 33 bp, Homo sapien
ctctcacctgtgctgagtaagaagaaactcaga

SEQ ID NO: 218695 - DNA, 33 bp, Homo sapien
ctaggggagtgtagaacggaaatgtggggtcag

SEQ ID NO: 218696 - DNA, 33 bp, Homo sapien
ctaggggagtgtagaagggaaatgtggggtcag

SEQ ID NO: 218697 - DNA, 33 bp, Homo sapien
ggaagaaattcctaagcactaaggcgttcaaga

SEQ ID NO: 218698 - DNA, 33 bp, Homo sapien
ggaagaaattcctaaggactaaggcgttcaaga

SEQ ID NO: 218699 - DNA, 33 bp, Homo sapien
aaactatatcattacacccctggcccctatcaa

SEQ ID NO: 218700 - DNA, 33 bp, Homo sapien
aaactatatcattacatccctggcccctatcaa

SEQ ID NO: 218701 - DNA, 33 bp, Homo sapien
attcccttttcctctactaacagtactctaaaa

SEQ ID NO: 218702 - DNA, 33 bp, Homo sapien
attcccttttcctctattaacagtactctaaaa

SEQ ID NO: 218703 - DNA, 33 bp, Homo sapien
tgagaagaaatgaaccaaatctctgggagagtt

SEQ ID NO: 218704 - DNA, 33 bp, Homo sapien
tgagaagaaatgaaccgaatctctgggagagtt

SEQ ID NO: 218705 - DNA, 33 bp, Homo sapien
attgttaatggacaaccctttctatctccctcc

SEQ ID NO: 218706 - DNA, 33 bp, Homo sapien
attgttaatggacaacgctttctatctccctcc

SEQ ID NO: 218707 - DNA, 33 bp, Homo sapien
atcactagtatatttcccccattcttctactct

SEQ ID NO: 218708 - DNA, 33 bp, Homo sapien
atcactagtatatttctcccattcttctactct

SEQ ID NO: 218709 - DNA, 33 bp, Homo sapien
ttatgttaaggctatccagtggatttttcattt

SEQ ID NO: 218710 - DNA, 33 bp, Homo sapien
ttatgttaaggctatctagtggatttttcattt

SEQ ID NO: 218711 - DNA, 33 bp, Homo sapien
gttcatagtgctaaggaattttgttttacgtct

SEQ ID NO: 218712 - DNA, 33 bp, Homo sapien
gttcatagtgctaagggattttgttttacgtct

SEQ ID NO: 218713 - DNA, 33 bp, Homo sapien
gagctggctcctacaccgtattatctgtagcac

SEQ ID NO: 218714 - DNA, 33 bp, Homo sapien
gagctggctcctacactgtattatctgtagcac

SEQ ID NO: 218715 - DNA, 33 bp, Homo sapien
gatagtgccttttaaccaactgaatgatgcttt

SEQ ID NO: 218716 - DNA, 33 bp, Homo sapien
gatagtgccttttaacgaactgaatgatgcttt

SEQ ID NO: 218717 - DNA, 33 bp, Homo sapien
cagacaagagagaatcagagacaagtgaaaggg

SEQ ID NO: 218718 - DNA, 33 bp, Homo sapien
cagacaagagagaatcggagacaagtgaaaggg

SEQ ID NO: 218719 - DNA, 33 bp, Homo sapien
ttctaggcaatactaaccacagttggtgcaaaa

SEQ ID NO: 218720 - DNA, 33 bp, Homo sapien
ttctaggcaatactaatcacagttggtgcaaaa

SEQ ID NO: 218721 - DNA, 33 bp, Homo sapien
caattgttccttctataaactagcactgccata

SEQ ID NO: 218722 - DNA, 33 bp, Homo sapien
caattgttccttctatcaactagcactgccata

SEQ ID NO: 218723 - DNA, 33 bp, Homo sapien
aggcagcaatcatccccaagactgaagaaacaa

SEQ ID NO: 218724 - DNA, 33 bp, Homo sapien
aggcagcaatcatccctaagactgaagaaacaa

SEQ ID NO: 218725 - DNA, 33 bp, Homo sapien
tgttggtgggtgtgtaaattaattcaaccattg

SEQ ID NO: 218726 - DNA, 33 bp, Homo sapien
tgttggtgggtgtgtacattaattcaaccattg

SEQ ID NO: 218727 - DNA, 33 bp, Homo sapien
gggttctgcaaatcaacagtcacgagcagatca

SEQ ID NO: 218728 - DNA, 33 bp, Homo sapien
gggttctgcaaatcaatagtcacgagcagatca

SEQ ID NO: 218729 - DNA, 33 bp, Homo sapien
agccagaggggtatacaaaagtcaaagcaggag

SEQ ID NO: 218730 - DNA, 33 bp, Homo sapien
agccagaggggtatacgaaagtcaaagcaggag

SEQ ID NO: 218731 - DNA, 33 bp, Homo sapien
ggaatcagaagacagcacatagtcctatatcta

SEQ ID NO: 218732 - DNA, 33 bp, Homo sapien
ggaatcagaagacagcccatagtcctatatcta

SEQ ID NO: 218733 - DNA, 33 bp, Homo sapien
tacaccttgtggaacacatgaattggcatcagc

SEQ ID NO: 218734 - DNA, 33 bp, Homo sapien
tacaccttgtggaacagatgaattggcatcagc

SEQ ID NO: 218735 - DNA, 33 bp, Homo sapien
cttcagaatgaccccccacttcaccagctacat

SEQ ID NO: 218736 - DNA, 33 bp, Homo sapien
cttcagaatgacccccgacttcaccagctacat

SEQ ID NO: 218737 - DNA, 33 bp, Homo sapien
ctgtttagttctttcacgtattctgaacatata

SEQ ID NO: 218738 - DNA, 33 bp, Homo sapien
ctgtttagttctttcatgtattctgaacatata

SEQ ID NO: 218739 - DNA, 33 bp, Homo sapien
acataaaaatcctataaagagcactggccctct

SEQ ID NO: 218740 - DNA, 33 bp, Homo sapien
acataaaaatcctatacagagcactggccctct

SEQ ID NO: 218741 - DNA, 33 bp, Homo sapien
aggccatagatgtaaaaatttaaacgttagtga

SEQ ID NO: 218742 - DNA, 33 bp, Homo sapien
aggccatagatgtaaacatttaaacgttagtga

SEQ ID NO: 218743 - DNA, 33 bp, Homo sapien
aaataatattctttacaaacattactacctcaa

SEQ ID NO: 218744 - DNA, 33 bp, Homo sapien
aaataatattctttacgaacattactacctcaa

SEQ ID NO: 218745 - DNA, 33 bp, Homo sapien
caggttttgacacaaacatttccttctaattga

SEQ ID NO: 218746 - DNA, 33 bp, Homo sapien
caggttttgacacaaatatttccttctaattga

SEQ ID NO: 218747 - DNA, 33 bp, Homo sapien
ataattttcagccaaccgaccggaagactttaa

SEQ ID NO: 218748 - DNA, 33 bp, Homo sapien
ataattttcagccaactgaccggaagactttaa

SEQ ID NO: 218749 - DNA, 33 bp, Homo sapien
ctcagaagggcaataacctttcaatgaatcaga

SEQ ID NO: 218750 - DNA, 33 bp, Homo sapien
ctcagaagggcaataatctttcaatgaatcaga

SEQ ID NO: 218751 - DNA, 33 bp, Homo sapien; identical to SEQ ID NO: 218749

SEQ ID NO: 218752 - DNA, 33 bp, Homo sapien; identical to SEQ ID NO: 218750

SEQ ID NO: 218753 - DNA, 33 bp, Homo sapien
tcatcaaagatgatacacagacaggaagtaagc

SEQ ID NO: 218754 - DNA, 33 bp, Homo sapien
tcatcaaagatgatacgcagacaggaagtaagc

SEQ ID NO: 218755 - DNA, 33 bp, Homo sapien
cacttgggcagatatcgaagagtgcagatgcta

SEQ ID NO: 218756 - DNA, 33 bp, Homo sapien
cacttgggcagatatctaagagtgcagatgcta

SEQ ID NO: 218757 - DNA, 33 bp, Homo sapien
ataaatctcttgtcccaaagaattccaaataat

SEQ ID NO: 218758 - DNA, 33 bp, Homo sapien
ataaatctcttgtcccgaagaattccaaataat

SEQ ID NO: 218759 - DNA, 33 bp, Homo sapien
ctaaagttctgtctaacgcttctccattaaaca

SEQ ID NO: 218760 - DNA, 33 bp, Homo sapien
ctaaagttctgtctaatgcttctccattaaaca

SEQ ID NO: 218761 - DNA, 33 bp, Homo sapien
aataatcaagggaatgacaatgagaataaaatt

SEQ ID NO: 218762 - DNA, 33 bp, Homo sapien
aataatcaagggaatgtcaatgagaataaaatt

SEQ ID NO: 218763 - DNA, 33 bp, Homo sapien
ggaagactgcagacacaagaatatgaccaagaa

SEQ ID NO: 218764 - DNA, 33 bp, Homo sapien
ggaagactgcagacacgagaatatgaccaagaa

SEQ ID NO: 218765 - DNA, 33 bp, Homo sapien
acccaatcttgccttaaactgaacaaaagtaca

SEQ ID NO: 218766 - DNA, 33 bp, Homo sapien
acccaatcttgccttatactgaacaaaagtaca

SEQ ID NO: 218767 - DNA, 33 bp, Homo sapien
aagttcctcttctttggatgttgtgggagagga

SEQ ID NO: 218768 - DNA, 33 bp, Homo sapien
aagttcctcttctttgtatgttgtgggagagga

SEQ ID NO: 218769 - DNA, 33 bp, Homo sapien
acagggttttcaaggtcaaagatcatattgtca

SEQ ID NO: 218770 - DNA, 33 bp, Homo sapien
acagggttttcaaggtgaaagatcatattgtca

SEQ ID NO: 218771 - DNA, 33 bp, Homo sapien
tacccaccttctaaagcctactttcgtcaattc

SEQ ID NO: 218772 - DNA, 33 bp, Homo sapien
tacccaccttctaaagtctactttcgtcaattc

SEQ ID NO: 218773 - DNA, 33 bp, Homo sapien
tcacacaacaatcatactacacaatggtgcatt

SEQ ID NO: 218774 - DNA, 33 bp, Homo sapien
tcacacaacaatcatattacacaatggtgcatt

SEQ ID NO: 218775 - DNA, 33 bp, Homo sapien
actcatggtagcagacaccaggtggttcaggtc

SEQ ID NO: 218776 - DNA, 33 bp, Homo sapien
actcatggtagcagacgccaggtggttcaggtc

SEQ ID NO: 218777 - DNA, 33 bp, Homo sapien
caaattcaacagatcacgggcctaaagtagaag

SEQ ID NO: 218778 - DNA, 33 bp, Homo sapien
caaattcaacagatcatgggcctaaagtagaag

SEQ ID NO: 218779 - DNA, 33 bp, Homo sapien
taaagagtatgaagtcaaatttagtttagattt

SEQ ID NO: 218780 - DNA, 33 bp, Homo sapien
taaagagtatgaagtccaatttagtttagattt

SEQ ID NO: 218781 - DNA, 33 bp, Homo sapien
tgttggggtcactctcaccctgcttatcttccc

SEQ ID NO: 218782 - DNA, 33 bp, Homo sapien
tgttggggtcactctcgccctgcttatcttccc

SEQ ID NO: 218783 - DNA, 33 bp, Homo sapien; identical to SEQ ID NO: 218781

SEQ ID NO: 218784 - DNA, 33 bp, Homo sapien; identical to SEQ ID NO: 218782

SEQ ID NO: 218785 - DNA, 33 bp, Homo sapien
ttctcagaacctagaacgtggctatgtgactca

SEQ ID NO: 218786 - DNA, 33 bp, Homo sapien
ttctcagaacctagaatgtggctatgtgactca

SEQ ID NO: 218787 - DNA, 33 bp, Homo sapien
aatattaaatttgaacgcaattgaacatggaca

SEQ ID NO: 218788 - DNA, 33 bp, Homo sapien
aatattaaatttgaactcaattgaacatggaca

SEQ ID NO: 218789 - DNA, 33 bp, Homo sapien
gtatttccctcaagaagagcacaggttaaagct

SEQ ID NO: 218790 - DNA, 33 bp, Homo sapien
gtatttccctcaagaatagcacaggttaaagct

SEQ ID NO: 218791 - DNA, 33 bp, Homo sapien
acgaggcttccaaagagagtcctgagctgtgag

SEQ ID NO: 218792 - DNA, 33 bp, Homo sapien
acgaggcttccaaagatagtcctgagctgtgag

SEQ ID NO: 218793 - DNA, 33 bp, Homo sapien
gctcagtaggctaaggaagggtaatcccttgaa

SEQ ID NO: 218794 - DNA, 33 bp, Homo sapien
gctcagtaggctaaggcagggtaatcccttgaa

SEQ ID NO: 218795 - DNA, 33 bp, Homo sapien
aattccttcagcttcaactgatgataaaaaggg

SEQ ID NO: 218796 - DNA, 33 bp, Homo sapien
aattccttcagcttcatctgatgataaaaaggg

SEQ ID NO: 218797 - DNA, 33 bp, Homo sapien; identical to SEQ ID NO: 218795

SEQ ID NO: 218798 - DNA, 33 bp, Homo sapien; identical to SEQ ID NO: 218796

SEQ ID NO: 218799 - DNA, 33 bp, Homo sapien
agatctaatgtcaaaaatagactgaaagtagca

SEQ ID NO: 218800 - DNA, 33 bp, Homo sapien
agatctaatgtcaaaactagactgaaagtagca

SEQ ID NO: 218801 - DNA, 33 bp, Homo sapien
tcctagcatcataggtcaacagacgtacgattt

SEQ ID NO: 218802 - DNA, 33 bp, Homo sapien
tcctagcatcataggtgaacagacgtacgattt

SEQ ID NO: 218803 - DNA, 33 bp, Homo sapien
ctatcaagagatccgaacatgacactttgagtt

SEQ ID NO: 218804 - DNA, 33 bp, Homo sapien
ctatcaagagatccgagcatgacactttgagtt

SEQ ID NO: 218805 - DNA, 33 bp, Homo sapien
aagaaatgtttatctcaatgaaacaaatccgca

SEQ ID NO: 218806 - DNA, 33 bp, Homo sapien
aagaaatgtttatctcgatgaaacaaatccgca

SEQ ID NO: 218807 - DNA, 33 bp, Homo sapien
tcacgccatttttccacgttccacagctgcctc

SEQ ID NO: 218808 - DNA, 33 bp, Homo sapien
tcacgccatttttccatgttccacagctgcctc

SEQ ID NO: 218809 - DNA, 33 bp, Homo sapien
ccacgctgtgtgtcgcacccgctggggacaccc

SEQ ID NO: 218810 - DNA, 33 bp, Homo sapien
ccacgctgtgtgtcgcgcccgctggggacaccc

SEQ ID NO: 218811 - DNA, 33 bp, Homo sapien
tgcaaaccagcgatacaaggatccccagggccc

SEQ ID NO: 218812 - DNA, 33 bp, Homo sapien
tgcaaaccagcgatacgaggatccccagggccc

SEQ ID NO: 218813 - DNA, 33 bp, Homo sapien
cttgcgaccttgtttcacattcacgatgcatgt

SEQ ID NO: 218814 - DNA, 33 bp, Homo sapien
cttgcgaccttgtttcgcattcacgatgcatgt

SEQ ID NO: 218815 - DNA, 33 bp, Homo sapien
ctccactgccgtgccaatattttttccatccac

SEQ ID NO: 218816 - DNA, 33 bp, Homo sapien
ctccactgccgtgccagtattttttccatccac

SEQ ID NO: 218817 - DNA, 33 bp, Homo sapien
gaggcaccccaaaatgacaagaaggccaagaag

SEQ ID NO: 218818 - DNA, 33 bp, Homo sapien
gaggcaccccaaaatggcaagaaggccaagaag

SEQ ID NO: 218819 - DNA, 33 bp, Homo sapien
cctgtgggagtgacaagcaacttggtgcgagac

SEQ ID NO: 218820 - DNA, 33 bp, Homo sapien
cctgtgggagtgacaatcaacttggtgcgagac

SEQ ID NO: 218821 - DNA, 33 bp, Homo sapien
aaaaaaaaatggcatggcagagaagggcggcct

SEQ ID NO: 218822 - DNA, 33 bp, Homo sapien
aaaaaaaaatggcatgtcagagaagggcggcct

SEQ ID NO: 218823 - DNA, 33 bp, Homo sapien
agtctgggacccccgcagaagacagtgccttcc

SEQ ID NO: 218824 - DNA, 33 bp, Homo sapien
agtctgggacccccgcggaagacagtgccttcc

SEQ ID NO: 218825 - DNA, 33 bp, Homo sapien
tgggaaggcactttcgacctttgggaggaacca

SEQ ID NO: 218826 - DNA, 33 bp, Homo sapien
tgggaaggcactttcgtcctttgggaggaacca

SEQ ID NO: 218827 - DNA, 33 bp, Homo sapien
ctgtgttgtgcaaggaaaagagaaagagcgagg

SEQ ID NO: 218828 - DNA, 33 bp, Homo sapien
ctgtgttgtgcaaggataagagaaagagcgagg

SEQ ID NO: 218829 - DNA, 33 bp, Homo sapien
ccctggttcttgcacaaggatctcgtcagccca

SEQ ID NO: 218830 - DNA, 33 bp, Homo sapien
ccctggttcttgcacacggatctcgtcagccca

SEQ ID NO: 218831 - DNA, 33 bp, Homo sapien
gctgaccccagtggtcccgaggtgctacgtgtg

SEQ ID NO: 218832 - DNA, 33 bp, Homo sapien
gctgaccccagtggtctcgaggtgctacgtgtg

SEQ ID NO: 218833 - DNA, 33 bp, Homo sapien
gggggcaggaagtcttcaaaggggaagtcgagg

SEQ ID NO: 218834 - DNA, 33 bp, Homo sapien
gggggcaggaagtcttgaaaggggaagtcgagg

SEQ ID NO: 218835 - DNA, 33 bp, Homo sapien
gtgtgagaggaaaataaaagcggcatggcagag

SEQ ID NO: 218836 - DNA, 33 bp, Homo sapien
gtgtgagaggaaaatacaagcggcatggcagag

SEQ ID NO: 218837 - DNA, 33 bp, Homo sapien
agttttgttcattctgaaaaaggactcttggga

SEQ ID NO: 218838 - DNA, 33 bp, Homo sapien
agttttgttcattctgcaaaaggactcttggga

SEQ ID NO: 218839 - DNA, 33 bp, Homo sapien
taatgcctcaactccaagcacaatggataagag

SEQ ID NO: 218840 - DNA, 33 bp, Homo sapien
taatgcctcaactccaggcacaatggataagag

SEQ ID NO: 218841 - DNA, 33 bp, Homo sapien
gctcctctggtggaaacgattgcctggagtcta

SEQ ID NO: 218842 - DNA, 33 bp, Homo sapien
gctcctctggtggaaaggattgcctggagtcta

SEQ ID NO: 218843 - DNA, 33 bp, Homo sapien
aagatttaactgtaaaatgaatgcacacatcac

SEQ ID NO: 218844 - DNA, 33 bp, Homo sapien
aagatttaactgtaaagtgaatgcacacatcac

SEQ ID NO: 218845 - DNA, 33 bp, Homo sapien
catgtgggagctcattgaagccaatggtgaaac

SEQ ID NO: 218846 - DNA, 33 bp, Homo sapien
catgtgggagctcatttaagccaatggtgaaac

SEQ ID NO: 218847 - DNA, 33 bp, Homo sapien
caatgaaaaccacagaaaaaataggtctgtgtc

SEQ ID NO: 218848 - DNA, 33 bp, Homo sapien
caatgaaaaccacagagaaaataggtctgtgtc

SEQ ID NO: 218849 - DNA, 33 bp, Homo sapien
agggacaaaataagtcacggcagaggtcccacc

SEQ ID NO: 218850 - DNA, 33 bp, Homo sapien
agggacaaaataagtcgcggcagaggtcccacc

SEQ ID NO: 218851 - DNA, 33 bp, Homo sapien
aaaacacaaatggcgcagcaaagttacccccca

SEQ ID NO: 218852 - DNA, 33 bp, Homo sapien
aaaacacaaatggcgcggcaaagttacccccca

SEQ ID NO: 218853 - DNA, 33 bp, Homo sapien
caccattgactcacaaaatgaacaaaatggtga

SEQ ID NO: 218854 - DNA, 33 bp, Homo sapien
caccattgactcacaagatgaacaaaatggtga

SEQ ID NO: 218855 - DNA, 33 bp, Homo sapien
ttcaaaactgctcaaccgaaaggaatgttcaac

SEQ ID NO: 218856 - DNA, 33 bp, Homo sapien
ttcaaaactgctcaactgaaaggaatgttcaac

SEQ ID NO: 218857 - DNA, 33 bp, Homo sapien
gcccagttagagattccgaagtatgtcaaatct

SEQ ID NO: 218858 - DNA, 33 bp, Homo sapien
gcccagttagagattctgaagtatgtcaaatct

SEQ ID NO: 218859 - DNA, 33 bp, Homo sapien
atgaaaataactctaccgactcataaaattcat

SEQ ID NO: 218860 - DNA, 33 bp, Homo sapien
atgaaaataactctactgactcataaaattcat

SEQ ID NO: 218861 - DNA, 33 bp, Homo sapien
taaataagaggtccaaaattcagaaatatcttt

SEQ ID NO: 218862 - DNA, 33 bp, Homo sapien
taaataagaggtccaagattcagaaatatcttt

SEQ ID NO: 218863 - DNA, 33 bp, Homo sapien
tggcagctcctgaggccgcacggttctgcagaa

SEQ ID NO: 218864 - DNA, 33 bp, Homo sapien
tggcagctcctgaggctgcacggttctgcagaa

SEQ ID NO: 218865 - DNA, 33 bp, Homo sapien
tggatccaggagggggccaaaagattcagggag

SEQ ID NO: 218866 - DNA, 33 bp, Homo sapien
tggatccaggagggggtcaaaagattcagggag

SEQ ID NO: 218867 - DNA, 33 bp, Homo sapien
aagtacatccgaccccaatcctgccagcgggta

SEQ ID NO: 218868 - DNA, 33 bp, Homo sapien
aagtacatccgaccccgatcctgccagcgggta

SEQ ID NO: 218869 - DNA, 33 bp, Homo sapien
caccggaaaaactactgacaactggccacgaga

SEQ ID NO: 218870 - DNA, 33 bp, Homo sapien
caccggaaaaactacttacaactggccacgaga

SEQ ID NO: 218871 - DNA, 33 bp, Homo sapien
cccatcactaatctacagagcctcatctctcac

SEQ ID NO: 218872 - DNA, 33 bp, Homo sapien
cccatcactaatctacggagcctcatctctcac

SEQ ID NO: 218873 - DNA, 33 bp, Homo sapien
gcataattgaaaatcccacactaagaaagagct

SEQ ID NO: 218874 - DNA, 33 bp, Homo sapien
gcataattgaaaatcctacactaagaaagagct

SEQ ID NO: 218875 - DNA, 33 bp, Homo sapien
tcattcctacccctaaaatatcgcaaagtgaaa

SEQ ID NO: 218876 - DNA, 33 bp, Homo sapien
tcattcctacccctaagatatcgcaaagtgaaa

SEQ ID NO: 218877 - DNA, 33 bp, Homo sapien
taggagttgtatgccaagaaataggtacaaaga

SEQ ID NO: 218878 - DNA, 33 bp, Homo sapien
taggagttgtatgccaggaaataggtacaaaga

SEQ ID NO: 218879 - DNA, 33 bp, Homo sapien
ttattaaatccattaaaaaaatctaaaggctga

SEQ ID NO: 218880 - DNA, 33 bp, Homo sapien
ttattaaatccattaataaaatctaaaggctga

SEQ ID NO: 218881 - DNA, 33 bp, Homo sapien; identical to SEQ ID NO: 218879

SEQ ID NO: 218882 - DNA, 33 bp, Homo sapien; identical to SEQ ID NO: 218880

SEQ ID NO: 218883 - DNA, 33 bp, Homo sapien
tattcctgttgtagccagcaaacttccttcata

SEQ ID NO: 218884 - DNA, 33 bp, Homo sapien
tattcctgttgtagccggcaaacttccttcata

SEQ ID NO: 218885 - DNA, 33 bp, Homo sapien; identical to SEQ ID NO: 218883

SEQ ID NO: 218886 - DNA, 33 bp, Homo sapien; identical to SEQ ID NO: 218884

SEQ ID NO: 218887 - DNA, 33 bp, Homo sapien
caatcctaaaagaagaactctaggatggattgg

SEQ ID NO: 218888 - DNA, 33 bp, Homo sapien
caatcctaaaagaagacctctaggatggattgg

SEQ ID NO: 218889 - DNA, 33 bp, Homo sapien
ttgagcctttagtgaccaatggtggaaaacgaa

SEQ ID NO: 218890 - DNA, 33 bp, Homo sapien
ttgagcctttagtgactaatggtggaaaacgaa

SEQ ID NO: 218891 - DNA, 33 bp, Homo sapien
cttttccaccattggccactaaggactccaaat

SEQ ID NO: 218892 - DNA, 33 bp, Homo sapien
cttttccaccattggctactaaggactccaaat

SEQ ID NO: 218893 - DNA, 33 bp, Homo sapien
atttttcagattaaaaatagagataagcttttt

SEQ ID NO: 218894 - DNA, 33 bp, Homo sapien
atttttcagattaaaactagagataagcttttt

SEQ ID NO: 218895 - DNA, 33 bp, Homo sapien
tgggatatttgaaaacacagataggcctatggt

SEQ ID NO: 218896 - DNA, 33 bp, Homo sapien
tgggatatttgaaaacgcagataggcctatggt

SEQ ID NO: 218897 - DNA, 33 bp, Homo sapien
tgacaaagtgaatatcacaggataaaagctaga

SEQ ID NO: 218898 - DNA, 33 bp, Homo sapien
tgacaaagtgaatatcccaggataaaagctaga

SEQ ID NO: 218899 - DNA, 33 bp, Homo sapien
atctgctgaatgaaaacagaggtttaactctgt

SEQ ID NO: 218900 - DNA, 33 bp, Homo sapien
atctgctgaatgaaaagagaggtttaactctgt

SEQ ID NO: 218901 - DNA, 33 bp, Homo sapien
agaaaagagtgtttccaagcaggttaaatactt

SEQ ID NO: 218902 - DNA, 33 bp, Homo sapien
agaaaagagtgtttcccagcaggttaaatactt

SEQ ID NO: 218903 - DNA, 33 bp, Homo sapien
tcacctggaacttccactcagagatgagagact

SEQ ID NO: 218904 - DNA, 33 bp, Homo sapien
tcacctggaacttccattcagagatgagagact

SEQ ID NO: 218905 - DNA, 33 bp, Homo sapien
ggagcatctgcatagacccccagcccatgagga

SEQ ID NO: 218906 - DNA, 33 bp, Homo sapien
ggagcatctgcatagatccccagcccatgagga

SEQ ID NO: 218907 - DNA, 33 bp, Homo sapien
agtttacccacctctcacttaccaggctcatga

SEQ ID NO: 218908 - DNA, 33 bp, Homo sapien
agtttacccacctctcgcttaccaggctcatga

SEQ ID NO: 218909 - DNA, 33 bp, Homo sapien
caggtcctcagccacacgtatagctgaatgtct

SEQ ID NO: 218910 - DNA, 33 bp, Homo sapien
caggtcctcagccacatgtatagctgaatgtct

SEQ ID NO: 218911 - DNA, 33 bp, Homo sapien
aggctggtctgtgagaggattaaaaccaagagc

SEQ ID NO: 218912 - DNA, 33 bp, Homo sapien
aggctggtctgtgagatgattaaaaccaagagc

SEQ ID NO: 218913 - DNA, 33 bp, Homo sapien
ggatgagtccaaaccactagaagttcatgtggt

SEQ ID NO: 218914 - DNA, 33 bp, Homo sapien
ggatgagtccaaaccattagaagttcatgtggt

SEQ ID NO: 218915 - DNA, 33 bp, Homo sapien
tggcatttttttaggccactggcaaggggttgc

SEQ ID NO: 218916 - DNA, 33 bp, Homo sapien
tggcatttttttaggctactggcaaggggttgc

SEQ ID NO: 218917 - DNA, 33 bp, Homo sapien
gttgatggtactaataatagttaatagttacaa

SEQ ID NO: 218918 - DNA, 33 bp, Homo sapien
gttgatggtactaatagtagttaatagttacaa

SEQ ID NO: 218919 - DNA, 33 bp, Homo sapien
tctcagctcaatacaggaaggactttctgatgt

SEQ ID NO: 218920 - DNA, 33 bp, Homo sapien
tctcagctcaatacagtaaggactttctgatgt

SEQ ID NO: 218921 - DNA, 33 bp, Homo sapien
ggatgcttccttttcaacttgggtcaacacatc

SEQ ID NO: 218922 - DNA, 33 bp, Homo sapien
ggatgcttccttttcagcttgggtcaacacatc

SEQ ID NO: 218923 - DNA, 33 bp, Homo sapien
agcgtaaaatggtaaacgaagctgcaggtcatt

SEQ ID NO: 218924 - DNA, 33 bp, Homo sapien
agcgtaaaatggtaaatgaagctgcaggtcatt

SEQ ID NO: 218925 - DNA, 33 bp, Homo sapien
cctgactttttttgtaaaacaaacacaggcgag

SEQ ID NO: 218926 - DNA, 33 bp, Homo sapien
cctgactttttttgtacaacaaacacaggcgag

SEQ ID NO: 218927 - DNA, 33 bp, Homo sapien
actgtctaaagcttcaacacttggtaaagcagt

SEQ ID NO: 218928 - DNA, 33 bp, Homo sapien
actgtctaaagcttcagcacttggtaaagcagt

SEQ ID NO: 218929 - DNA, 33 bp, Homo sapien
tgaaatctgtcctctacgcgtggccacctaaaa

SEQ ID NO: 218930 - DNA, 33 bp, Homo sapien
tgaaatctgtcctctatgcgtggccacctaaaa

SEQ ID NO: 218931 - DNA, 33 bp, Homo sapien
acgcacttgcaaacaccgtagtgttggttgtag

SEQ ID NO: 218932 - DNA, 33 bp, Homo sapien
acgcacttgcaaacactgtagtgttggttgtag

SEQ ID NO: 218933 - DNA, 33 bp, Homo sapien
ggactctgaccagtgaactatcttgctgtggct

SEQ ID NO: 218934 - DNA, 33 bp, Homo sapien
ggactctgaccagtgagctatcttgctgtggct

SEQ ID NO: 218935 - DNA, 33 bp, Homo sapien
agagatacttgtataacctgaaaaaaagcaagt

SEQ ID NO: 218936 - DNA, 33 bp, Homo sapien
agagatacttgtataagctgaaaaaaagcaagt

SEQ ID NO: 218937 - DNA, 33 bp, Homo sapien; identical to SEQ ID NO: 218935

SEQ ID NO: 218938 - DNA, 33 bp, Homo sapien; identical to SEQ ID NO: 218936

SEQ ID NO: 218939 - DNA, 33 bp, Homo sapien
agggaaagtggtcctgcaagataaagggcacca

SEQ ID NO: 218940 - DNA, 33 bp, Homo sapien
agggaaagtggtcctggaagataaagggcacca

SEQ ID NO: 218941 - DNA, 33 bp, Homo sapien
agactctctacaggaaaggatcaacatgactgg

SEQ ID NO: 218942 - DNA, 33 bp, Homo sapien
agactctctacaggaatggatcaacatgactgg

SEQ ID NO: 218943 - DNA, 33 bp, Homo sapien
ttcaggctggcacctacggacacaaattccagg

SEQ ID NO: 218944 - DNA, 33 bp, Homo sapien
ttcaggctggcacctatggacacaaattccagg

SEQ ID NO: 218945 - DNA, 33 bp, Homo sapien
atcgctgaaaatgtcaaatcctaaaaaatgtca

SEQ ID NO: 218946 - DNA, 33 bp, Homo sapien
atcgctgaaaatgtcatatcctaaaaaatgtca

SEQ ID NO: 218947 - DNA, 33 bp, Homo sapien
ggacattcagaattaacgagaggttattacatt

SEQ ID NO: 218948 - DNA, 33 bp, Homo sapien
ggacattcagaattaatgagaggttattacatt

SEQ ID NO: 218949 - DNA, 33 bp, Homo sapien
atgctctactatagctaaccaaaactggtaaca

SEQ ID NO: 218950 - DNA, 33 bp, Homo sapien
atgctctactatagctgaccaaaactggtaaca

SEQ ID NO: 218951 - DNA, 33 bp, Homo sapien
atcctagttatgtaaacttcaatcacaagtaga

SEQ ID NO: 218952 - DNA, 33 bp, Homo sapien
atcctagttatgtaaagttcaatcacaagtaga

SEQ ID NO: 218953 - DNA, 33 bp, Homo sapien
aaagttttcaagtagaagggaagaaagtggtga

SEQ ID NO: 218954 - DNA, 33 bp, Homo sapien
aaagttttcaagtagacgggaagaaagtggtga

SEQ ID NO: 218955 - DNA, 33 bp, Homo sapien
ttaatgcctgttttaaatatggaaagggaaggt

SEQ ID NO: 218956 - DNA, 33 bp, Homo sapien
ttaatgcctgttttaactatggaaagggaaggt

SEQ ID NO: 218957 - DNA, 33 bp, Homo sapien
aagactacatttgggaaaaagggagccaaagca

SEQ ID NO: 218958 - DNA, 33 bp, Homo sapien
aagactacatttgggacaaagggagccaaagca

SEQ ID NO: 218959 - DNA, 33 bp, Homo sapien
atgttgagtaacttgactaacagttcaccaaac

SEQ ID NO: 218960 - DNA, 33 bp, Homo sapien
atgttgagtaacttgattaacagttcaccaaac

SEQ ID NO: 218961 - DNA, 33 bp, Homo sapien
aaaattggattctctaaaaactgcaagataaaa

SEQ ID NO: 218962 - DNA, 33 bp, Homo sapien
aaaattggattctctataaactgcaagataaaa

SEQ ID NO: 218963 - DNA, 33 bp, Homo sapien
actgacgggtgcattacgcttgcaacagacctg

SEQ ID NO: 218964 - DNA, 33 bp, Homo sapien
actgacgggtgcattatgcttgcaacagacctg

SEQ ID NO: 218965 - DNA, 33 bp, Homo sapien
ggttgatatgcaaatccaagaaatgcagagaac

SEQ ID NO: 218966 - DNA, 33 bp, Homo sapien
ggttgatatgcaaatctaagaaatgcagagaac

SEQ ID NO: 218967 - DNA, 33 bp, Homo sapien
cattcatgggacatccaatacaatctataattt

SEQ ID NO: 218968 - DNA, 33 bp, Homo sapien
cattcatgggacatccgatacaatctataattt

SEQ ID NO: 218969 - DNA, 33 bp, Homo sapien
attttaaatggcattacgaccaacagatattta

SEQ ID NO: 218970 - DNA, 33 bp, Homo sapien
attttaaatggcattatgaccaacagatattta

SEQ ID NO: 218971 - DNA, 33 bp, Homo sapien
gcgctaatgacttcacaacgttcctagtttcct

SEQ ID NO: 218972 - DNA, 33 bp, Homo sapien
gcgctaatgacttcacgacgttcctagtttcct

SEQ ID NO: 218973 - DNA, 33 bp, Homo sapien
agttgagagaaattaaatcaatacttttggctt

SEQ ID NO: 218974 - DNA, 33 bp, Homo sapien
agttgagagaaattaagtcaatacttttggctt

SEQ ID NO: 218975 - DNA, 33 bp, Homo sapien
tttatgcttgcttgataaataaccttcttgaca

SEQ ID NO: 218976 - DNA, 33 bp, Homo sapien
tttatgcttgcttgatgaataaccttcttgaca

SEQ ID NO: 218977 - DNA, 33 bp, Homo sapien
atgttcaaaaatagtaatacagggatctgaaca

SEQ ID NO: 218978 - DNA, 33 bp, Homo sapien
atgttcaaaaatagtagtacagggatctgaaca

SEQ ID NO: 218979 - DNA, 33 bp, Homo sapien
tgacggacttcttcacaaaaaactggacaattg

SEQ ID NO: 218980 - DNA, 33 bp, Homo sapien
tgacggacttcttcacgaaaaactggacaattg

SEQ ID NO: 218981 - DNA, 33 bp, Homo sapien
tatgagactctcattaaaatcctaggtatatac

SEQ ID NO: 218982 - DNA, 33 bp, Homo sapien
tatgagactctcattacaatcctaggtatatac

SEQ ID NO: 218983 - DNA, 33 bp, Homo sapien
atccccataatctccacgatccccacgtgtcaa

SEQ ID NO: 218984 - DNA, 33 bp, Homo sapien
atccccataatctccatgatccccacgtgtcaa

SEQ ID NO: 218985 - DNA, 33 bp, Homo sapien
ctctccatcacattacccggggcgcacagtgtc

SEQ ID NO: 218986 - DNA, 33 bp, Homo sapien
ctctccatcacattactcggggcgcacagtgtc

SEQ ID NO: 218987 - DNA, 33 bp, Homo sapien
aggaaaactggatttggaagatagaaaaattaa

SEQ ID NO: 218988 - DNA, 33 bp, Homo sapien
aggaaaactggatttgtaagatagaaaaattaa

SEQ ID NO: 218989 - DNA, 33 bp, Homo sapien
tttatttagctcgtaactctgttggtcagcaat

SEQ ID NO: 218990 - DNA, 33 bp, Homo sapien
tttatttagctcgtaattctgttggtcagcaat

SEQ ID NO: 218991 - DNA, 33 bp, Homo sapien
tgtaggtgtaactgagaccagcagaaaatcaca

SEQ ID NO: 218992 - DNA, 33 bp, Homo sapien
tgtaggtgtaactgagtccagcagaaaatcaca

SEQ ID NO: 218993 - DNA, 33 bp, Homo sapien
atttactttgtccagcaaaacagtggcaaacat

SEQ ID NO: 218994 - DNA, 33 bp, Homo sapien
atttactttgtccagcgaaacagtggcaaacat

SEQ ID NO: 218995 - DNA, 33 bp, Homo sapien
caccatggaagggtaccaccaaagggcttggat

SEQ ID NO: 218996 - DNA, 33 bp, Homo sapien
caccatggaagggtactaccaaagggcttggat

SEQ ID NO: 218997 - DNA, 33 bp, Homo sapien
gttctcaactgatgaaacaaaaaaatagtacac

SEQ ID NO: 218998 - DNA, 33 bp, Homo sapien
gttctcaactgatgaaccaaaaaaatagtacac

SEQ ID NO: 218999 - DNA, 33 bp, Homo sapien
aagtttcttactgtggaacaaattgaattgtgg

SEQ ID NO: 219000 - DNA, 33 bp, Homo sapien
aagtttcttactgtgggacaaattgaattgtgg

SEQ ID NO: 219001 - DNA, 33 bp, Homo sapien
cattcagatgagaacacattttgcaaggaaaaa

SEQ ID NO: 219002 - DNA, 33 bp, Homo sapien
cattcagatgagaacatattttgcaaggaaaaa

SEQ ID NO: 219003 - DNA, 33 bp, Homo sapien
taagtgacacatgactaaatgctgtttccttga

SEQ ID NO: 219004 - DNA, 33 bp, Homo sapien
taagtgacacatgactgaatgctgtttccttga

SEQ ID NO: 219005 - DNA, 33 bp, Homo sapien
ctatgatgttcacaaacagatgaaatcacctaa

SEQ ID NO: 219006 - DNA, 33 bp, Homo sapien
ctatgatgttcacaaatagatgaaatcacctaa

SEQ ID NO: 219007 - DNA, 33 bp, Homo sapien
tgcttactataaatggaaccatgtgaccattac

SEQ ID NO: 219008 - DNA, 33 bp, Homo sapien
tgcttactataaatgggaccatgtgaccattac

SEQ ID NO: 219009 - DNA, 33 bp, Homo sapien
ggtgaatattttcaaacgattctgattccattt

SEQ ID NO: 219010 - DNA, 33 bp, Homo sapien
ggtgaatattttcaaaggattctgattccattt

SEQ ID NO: 219011 - DNA, 33 bp, Homo sapien
tcagaatgcatcaaaaatatctaactgtattac

SEQ ID NO: 219012 - DNA, 33 bp, Homo sapien
tcagaatgcatcaaaagtatctaactgtattac

SEQ ID NO: 219013 - DNA, 33 bp, Homo sapien
gctagaatgatacatgacataaaggattaaatt

SEQ ID NO: 219014 - DNA, 33 bp, Homo sapien
gctagaatgatacatgtcataaaggattaaatt

SEQ ID NO: 219015 - DNA, 33 bp, Homo sapien
cccagatcaaggaaacaaatattactagtagcc

SEQ ID NO: 219016 - DNA, 33 bp, Homo sapien
cccagatcaaggaaacgaatattactagtagcc

SEQ ID NO: 219017 - DNA, 33 bp, Homo sapien
accctttgcccttttacaatttggcttttatgt

SEQ ID NO: 219018 - DNA, 33 bp, Homo sapien
accctttgcccttttataatttggcttttatgt

SEQ ID NO: 219019 - DNA, 33 bp, Homo sapien
aagttgacaatgggggaacagtgatactcacct

SEQ ID NO: 219020 - DNA, 33 bp, Homo sapien
aagttgacaatggggggacagtgatactcacct

SEQ ID NO: 219021 - DNA, 33 bp, Homo sapien
gttaggctgtcttgtaagtaggaatgactttct

SEQ ID NO: 219022 - DNA, 33 bp, Homo sapien
gttaggctgtcttgtaggtaggaatgactttct

SEQ ID NO: 219023 - DNA, 33 bp, Homo sapien
gtaggttctcatccaacggctggtgtccatttt

SEQ ID NO: 219024 - DNA, 33 bp, Homo sapien
gtaggttctcatccaatggctggtgtccatttt

SEQ ID NO: 219025 - DNA, 33 bp, Homo sapien
gcagctaagaaacatacggttgtcatcacatag

SEQ ID NO: 219026 - DNA, 33 bp, Homo sapien
gcagctaagaaacatatggttgtcatcacatag

SEQ ID NO: 219027 - DNA, 33 bp, Homo sapien
catagtcaagatttgcacttaggtttacctggc

SEQ ID NO: 219028 - DNA, 33 bp, Homo sapien
catagtcaagatttgcgcttaggtttacctggc

SEQ ID NO: 219029 - DNA, 33 bp, Homo sapien
tatttagcctttctcacgaagatctgttaaagg

SEQ ID NO: 219030 - DNA, 33 bp, Homo sapien
tatttagcctttctcatgaagatctgttaaagg

SEQ ID NO: 219031 - DNA, 33 bp, Homo sapien
ttcccatcgacctgataagatacctctgattac

SEQ ID NO: 219032 - DNA, 33 bp, Homo sapien
ttcccatcgacctgatgagatacctctgattac

SEQ ID NO: 219033 - DNA, 33 bp, Homo sapien
agaagaactaagacaccacctattctgtttttc

SEQ ID NO: 219034 - DNA, 33 bp, Homo sapien
agaagaactaagacactacctattctgtttttc

SEQ ID NO: 219035 - DNA, 33 bp, Homo sapien
aaaatggggatctatcaaaaaatggtaattatg

SEQ ID NO: 219036 - DNA, 33 bp, Homo sapien
aaaatggggatctatcgaaaaatggtaattatg

SEQ ID NO: 219037 - DNA, 33 bp, Homo sapien
attagaagaattggaaataatgttgattggatc

SEQ ID NO: 219038 - DNA, 33 bp, Homo sapien
attagaagaattggaattaatgttgattggatc

SEQ ID NO: 219039 - DNA, 33 bp, Homo sapien
gttgaatttcgctgaacgccttttctacatcta

SEQ ID NO: 219040 - DNA, 33 bp, Homo sapien
gttgaatttcgctgaatgccttttctacatcta

SEQ ID NO: 219041 - DNA, 33 bp, Homo sapien
atcagtgtgcaaaaacaacagtcattcctatac

SEQ ID NO: 219042 - DNA, 33 bp, Homo sapien
atcagtgtgcaaaaaccacagtcattcctatac

SEQ ID NO: 219043 - DNA, 33 bp, Homo sapien
cagtgtaaaaatactaccaggactgggtacaaa

SEQ ID NO: 219044 - DNA, 33 bp, Homo sapien
cagtgtaaaaatactatcaggactgggtacaaa

SEQ ID NO: 219045 - DNA, 33 bp, Homo sapien
acccatgtgctaaacaacttttctgcaattttt

SEQ ID NO: 219046 - DNA, 33 bp, Homo sapien
acccatgtgctaaacaccttttctgcaattttt

SEQ ID NO: 219047 - DNA, 33 bp, Homo sapien
gacaaaccacagcccacgcggaagaaacttacc

SEQ ID NO: 219048 - DNA, 33 bp, Homo sapien
gacaaaccacagcccatgcggaagaaacttacc

SEQ ID NO: 219049 - DNA, 33 bp, Homo sapien
aatagctaacaagtacaccagtgtcataacttt

SEQ ID NO: 219050 - DNA, 33 bp, Homo sapien
aatagctaacaagtactccagtgtcataacttt

SEQ ID NO: 219051 - DNA, 33 bp, Homo sapien
agcacttaccatgtgacaggaacgatgttgtga

SEQ ID NO: 219052 - DNA, 33 bp, Homo sapien
agcacttaccatgtgataggaacgatgttgtga

SEQ ID NO: 219053 - DNA, 33 bp, Homo sapien
gatgagctggttctaactcatgtatcagatact

SEQ ID NO: 219054 - DNA, 33 bp, Homo sapien
gatgagctggttctaattcatgtatcagatact

SEQ ID NO: 219055 - DNA, 33 bp, Homo sapien
cattgtgaatgctcacgaatattggtggacagg

SEQ ID NO: 219056 - DNA, 33 bp, Homo sapien
cattgtgaatgctcactaatattggtggacagg

SEQ ID NO: 219057 - DNA, 33 bp, Homo sapien
acattgactagctgaaacttaatagttggagat

SEQ ID NO: 219058 - DNA, 33 bp, Homo sapien
acattgactagctgaatcttaatagttggagat

SEQ ID NO: 219059 - DNA, 33 bp, Homo sapien
tcaagttattttgtgaggaatgaactggagatt

SEQ ID NO: 219060 - DNA, 33 bp, Homo sapien
tcaagttattttgtgatgaatgaactggagatt

SEQ ID NO: 219061 - DNA, 33 bp, Homo sapien
taatagctctgttttacagatgaatacatcaaa

SEQ ID NO: 219062 - DNA, 33 bp, Homo sapien
taatagctctgttttagagatgaatacatcaaa

SEQ ID NO: 219063 - DNA, 33 bp, Homo sapien
actacttactgctctacagggaatagagggaac

SEQ ID NO: 219064 - DNA, 33 bp, Homo sapien
actacttactgctctagagggaatagagggaac

SEQ ID NO: 219065 - DNA, 33 bp, Homo sapien
tgtgtgccagaagaaaaccacgtgaaattttgt

SEQ ID NO: 219066 - DNA, 33 bp, Homo sapien
tgtgtgccagaagaaagccacgtgaaattttgt

SEQ ID NO: 219067 - DNA, 33 bp, Homo sapien
aatcctcacgttttcaataatgcaacaataggg

SEQ ID NO: 219068 - DNA, 33 bp, Homo sapien
aatcctcacgttttcagtaatgcaacaataggg

SEQ ID NO: 219069 - DNA, 33 bp, Homo sapien
atgagcaataactaatcacttgaagataccaaa

SEQ ID NO: 219070 - DNA, 33 bp, Homo sapien
atgagcaataactaatgacttgaagataccaaa

SEQ ID NO: 219071 - DNA, 33 bp, Homo sapien
atccttattgcattccagatcttagagaaaagg

SEQ ID NO: 219072 - DNA, 33 bp, Homo sapien
atccttattgcattccggatcttagagaaaagg

SEQ ID NO: 219073 - DNA, 33 bp, Homo sapien
aaaaatcttagaattgaattggctcagagaaat

SEQ ID NO: 219074 - DNA, 33 bp, Homo sapien
aaaaatcttagaattggattggctcagagaaat

SEQ ID NO: 219075 - DNA, 33 bp, Homo sapien
gcccagtgaatccctgaaagtacagatagcaat

SEQ ID NO: 219076 - DNA, 33 bp, Homo sapien
gcccagtgaatccctggaagtacagatagcaat

SEQ ID NO: 219077 - DNA, 33 bp, Homo sapien
cactctcaaccctccacggtctggtgagcccca

SEQ ID NO: 219078 - DNA, 33 bp, Homo sapien
cactctcaaccctccatggtctggtgagcccca

SEQ ID NO: 219079 - DNA, 33 bp, Homo sapien
ccacagtgagcagaaacaaaatgctattaagtc

SEQ ID NO: 219080 - DNA, 33 bp, Homo sapien
ccacagtgagcagaaagaaaatgctattaagtc

SEQ ID NO: 219081 - DNA, 33 bp, Homo sapien
acagcccgtagaaatccaataatgttaataaag

SEQ ID NO: 219082 - DNA, 33 bp, Homo sapien
acagcccgtagaaatctaataatgttaataaag

SEQ ID NO: 219083 - DNA, 33 bp, Homo sapien
ataaatgttgtgaaaaaagctagctagtaaata

SEQ ID NO: 219084 - DNA, 33 bp, Homo sapien
ataaatgttgtgaaaagagctagctagtaaata

SEQ ID NO: 219085 - DNA, 33 bp, Homo sapien
aatgattttcctcaagaagatgccacattacct

SEQ ID NO: 219086 - DNA, 33 bp, Homo sapien
aatgattttcctcaaggagatgccacattacct

SEQ ID NO: 219087 - DNA, 33 bp, Homo sapien
attggacttatgcccaatcacattttgcctgac

SEQ ID NO: 219088 - DNA, 33 bp, Homo sapien
attggacttatgcccagtcacattttgcctgac

SEQ ID NO: 219089 - DNA, 33 bp, Homo sapien
gtgaatggcaggtctgcaacagcggcaaacagc

SEQ ID NO: 219090 - DNA, 33 bp, Homo sapien
gtgaatggcaggtctgtaacagcggcaaacagc

SEQ ID NO: 219091 - DNA, 33 bp, Homo sapien
aagtggaaggagaggacgctggaaatacaggta

SEQ ID NO: 219092 - DNA, 33 bp, Homo sapien
aagtggaaggagaggaggctggaaatacaggta

SEQ ID NO: 219093 - DNA, 33 bp, Homo sapien
atgggacatgaggctaagagagtgagttgagtc

SEQ ID NO: 219094 - DNA, 33 bp, Homo sapien
atgggacatgaggctaggagagtgagttgagtc

SEQ ID NO: 219095 - DNA, 33 bp, Homo sapien
tgataacctactcttacagtggatttccctact

SEQ ID NO: 219096 - DNA, 33 bp, Homo sapien
tgataacctactcttatagtggatttccctact

SEQ ID NO: 219097 - DNA, 33 bp, Homo sapien
tcaacgcgtcttgttacgaatgcagttggaaag

SEQ ID NO: 219098 - DNA, 33 bp, Homo sapien
tcaacgcgtcttgttatgaatgcagttggaaag

SEQ ID NO: 219099 - DNA, 33 bp, Homo sapien
gcagttggaaagttctaacctcctgaattcttg

SEQ ID NO: 219100 - DNA, 33 bp, Homo sapien
gcagttggaaagttctgacctcctgaattcttg

SEQ ID NO: 219101 - DNA, 33 bp, Homo sapien
tggtattttttttcagacaagtgcttaaggaga

SEQ ID NO: 219102 - DNA, 33 bp, Homo sapien
tggtattttttttcaggcaagtgcttaaggaga

SEQ ID NO: 219103 - DNA, 33 bp, Homo sapien
gttaactttaactggaacactggcaacttggtt

SEQ ID NO: 219104 - DNA, 33 bp, Homo sapien
gttaactttaactggagcactggcaacttggtt

SEQ ID NO: 219105 - DNA, 33 bp, Homo sapien
caatgtgccatctactaagagtcaaaaaacctt

SEQ ID NO: 219106 - DNA, 33 bp, Homo sapien
caatgtgccatctactgagagtcaaaaaacctt

SEQ ID NO: 219107 - DNA, 33 bp, Homo sapien
ttctataggctggttaggaaattgctagacgct

SEQ ID NO: 219108 - DNA, 33 bp, Homo sapien
ttctataggctggttatgaaattgctagacgct

SEQ ID NO: 219109 - DNA, 33 bp, Homo sapien
tttgcatcatcaagcaacaacttttaaatccct

SEQ ID NO: 219110 - DNA, 33 bp, Homo sapien
tttgcatcatcaagcatcaacttttaaatccct

SEQ ID NO: 219111 - DNA, 33 bp, Homo sapien
gcatgacaaatttgccaatgtctaaattacagt

SEQ ID NO: 219112 - DNA, 33 bp, Homo sapien
gcatgacaaatttgcccatgtctaaattacagt

SEQ ID NO: 219113 - DNA, 33 bp, Homo sapien
tacttatatgccctaccatatttatactgaaat

SEQ ID NO: 219114 - DNA, 33 bp, Homo sapien
tacttatatgccctacgatatttatactgaaat

SEQ ID NO: 219115 - DNA, 33 bp, Homo sapien
tgtggagtgttacctacgaagatggaaaagatg

SEQ ID NO: 219116 - DNA, 33 bp, Homo sapien
tgtggagtgttacctatgaagatggaaaagatg

SEQ ID NO: 219117 - DNA, 33 bp, Homo sapien
gcctcattccttttccacaaccactccgagttt

SEQ ID NO: 219118 - DNA, 33 bp, Homo sapien
gcctcattccttttccgcaaccactccgagttt

SEQ ID NO: 219119 - DNA, 33 bp, Homo sapien
gttattttcaagtatccccatcatctgaatttg

SEQ ID NO: 219120 - DNA, 33 bp, Homo sapien
gttattttcaagtatctccatcatctgaatttg

SEQ ID NO: 219121 - DNA, 33 bp, Homo sapien
gaaggaaatgagattacaaagataggacagtgc

SEQ ID NO: 219122 - DNA, 33 bp, Homo sapien
gaaggaaatgagattagaaagataggacagtgc

SEQ ID NO: 219123 - DNA, 33 bp, Homo sapien
cagttcaaaaaaataaatgatgtttgacaagaa

SEQ ID NO: 219124 - DNA, 33 bp, Homo sapien
cagttcaaaaaaataactgatgtttgacaagaa

SEQ ID NO: 219125 - DNA, 33 bp, Homo sapien
acaaacctaagctaaacgtgatgtatactccca

SEQ ID NO: 219126 - DNA, 33 bp, Homo sapien
acaaacctaagctaaatgtgatgtatactccca

SEQ ID NO: 219127 - DNA, 33 bp, Homo sapien
tactttcaaatttctcaacgtatagcctgtcac

SEQ ID NO: 219128 - DNA, 33 bp, Homo sapien
tactttcaaatttctccacgtatagcctgtcac

SEQ ID NO: 219129 - DNA, 33 bp, Homo sapien
ttttcattgaaactacagcaaagccatacacat

SEQ ID NO: 219130 - DNA, 33 bp, Homo sapien
ttttcattgaaactacggcaaagccatacacat

SEQ ID NO: 219131 - DNA, 33 bp, Homo sapien
ctatctgctttgattcaagttagacgaagggga

SEQ ID NO: 219132 - DNA, 33 bp, Homo sapien
ctatctgctttgattcgagttagacgaagggga

SEQ ID NO: 219133 - DNA, 33 bp, Homo sapien
agtcatatttcagtgaccttcatagcgaaagat

SEQ ID NO: 219134 - DNA, 33 bp, Homo sapien
agtcatatttcagtgatcttcatagcgaaagat

SEQ ID NO: 219135 - DNA, 33 bp, Homo sapien
gagctaagatttaaaccaggcagtctaactcca

SEQ ID NO: 219136 - DNA, 33 bp, Homo sapien
gagctaagatttaaacgaggcagtctaactcca

SEQ ID NO: 219137 - DNA, 33 bp, Homo sapien
ggatctgaatgtcctcacttgtataagaagaag

SEQ ID NO: 219138 - DNA, 33 bp, Homo sapien
ggatctgaatgtcctcgcttgtataagaagaag

SEQ ID NO: 219139 - DNA, 33 bp, Homo sapien
tatgatgacaacaatacgatgagcttagacgta

SEQ ID NO: 219140 - DNA, 33 bp, Homo sapien
tatgatgacaacaatatgatgagcttagacgta

SEQ ID NO: 219141 - DNA, 33 bp, Homo sapien
tctatttggctttacacctcggttctctgttct

SEQ ID NO: 219142 - DNA, 33 bp, Homo sapien
tctatttggctttacagctcggttctctgttct

SEQ ID NO: 219143 - DNA, 33 bp, Homo sapien
tatgtgcccatcgaccaacaagtaaacaaagaa

SEQ ID NO: 219144 - DNA, 33 bp, Homo sapien
tatgtgcccatcgacctacaagtaaacaaagaa

SEQ ID NO: 219145 - DNA, 33 bp, Homo sapien
acacccttgtgttatacggtgacaggcaaatca

SEQ ID NO: 219146 - DNA, 33 bp, Homo sapien
acacccttgtgttatatggtgacaggcaaatca

SEQ ID NO: 219147 - DNA, 33 bp, Homo sapien
gtatatataacagatacccagtacgttcggtca

SEQ ID NO: 219148 - DNA, 33 bp, Homo sapien
gtatatataacagatatccagtacgttcggtca

SEQ ID NO: 219149 - DNA, 33 bp, Homo sapien
aacttatagtacattaccaacacaggatctgtc

SEQ ID NO: 219150 - DNA, 33 bp, Homo sapien
aacttatagtacattagcaacacaggatctgtc

SEQ ID NO: 219151 - DNA, 33 bp, Homo sapien
aagggtaatcaatatgaacaggtgagaagaata

SEQ ID NO: 219152 - DNA, 33 bp, Homo sapien
aagggtaatcaatatgtacaggtgagaagaata

SEQ ID NO: 219153 - DNA, 33 bp, Homo sapien
ataaataagacctgccaatctaatgggataaac

SEQ ID NO: 219154 - DNA, 33 bp, Homo sapien
ataaataagacctgccgatctaatgggataaac

SEQ ID NO: 219155 - DNA, 33 bp, Homo sapien
atgtgctgtggagaaaggaaaactcataaatgt

SEQ ID NO: 219156 - DNA, 33 bp, Homo sapien
atgtgctgtggagaaatgaaaactcataaatgt

SEQ ID NO: 219157 - DNA, 33 bp, Homo sapien
agtttgcctagatgacagcttcagaatgtggag

SEQ ID NO: 219158 - DNA, 33 bp, Homo sapien
agtttgcctagatgacggcttcagaatgtggag

SEQ ID NO: 219159 - DNA, 33 bp, Homo sapien
attcgcttaatctaagccacctctttttcacat

SEQ ID NO: 219160 - DNA, 33 bp, Homo sapien
attcgcttaatctaagtcacctctttttcacat

SEQ ID NO: 219161 - DNA, 33 bp, Homo sapien
caacatgaatttttcaagtttcaagacttttat

SEQ ID NO: 219162 - DNA, 33 bp, Homo sapien
caacatgaatttttcatgtttcaagacttttat

SEQ ID NO: 219163 - DNA, 33 bp, Homo sapien
tgaatgaattctggtacaaaaagaacattagtg

SEQ ID NO: 219164 - DNA, 33 bp, Homo sapien
tgaatgaattctggtataaaaagaacattagtg

SEQ ID NO: 219165 - DNA, 33 bp, Homo sapien
cattcgaaaatgaatgcaagaaagtggttcaac

SEQ ID NO: 219166 - DNA, 33 bp, Homo sapien
cattcgaaaatgaatggaagaaagtggttcaac

SEQ ID NO: 219167 - DNA, 33 bp, Homo sapien
atggagatattgattacgcagtgtttgaagact

SEQ ID NO: 219168 - DNA, 33 bp, Homo sapien
atggagatattgattaggcagtgtttgaagact

SEQ ID NO: 219169 - DNA, 33 bp, Homo sapien
agaaactatattcaggaagagtggtacttggaa

SEQ ID NO: 219170 - DNA, 33 bp, Homo sapien
agaaactatattcagggagagtggtacttggaa

SEQ ID NO: 219171 - DNA, 33 bp, Homo sapien
tttgttgttaagattacgcaagcctcattactt

SEQ ID NO: 219172 - DNA, 33 bp, Homo sapien
tttgttgttaagattaggcaagcctcattactt

SEQ ID NO: 219173 - DNA, 33 bp, Homo sapien
tccacactattctaacaactgttttattccaca

SEQ ID NO: 219174 - DNA, 33 bp, Homo sapien
tccacactattctaacgactgttttattccaca

SEQ ID NO: 219175 - DNA, 33 bp, Homo sapien
cttttaacaagttcaacctgtgctggttataca

SEQ ID NO: 219176 - DNA, 33 bp, Homo sapien
cttttaacaagttcaagctgtgctggttataca

SEQ ID NO: 219177 - DNA, 33 bp, Homo sapien
atggctgaggacctcacataggaacaatcccct

SEQ ID NO: 219178 - DNA, 33 bp, Homo sapien
atggctgaggacctcatataggaacaatcccct

SEQ ID NO: 219179 - DNA, 33 bp, Homo sapien
cactcaattaagggacaacagcttttattctca

SEQ ID NO: 219180 - DNA, 33 bp, Homo sapien
cactcaattaagggacgacagcttttattctca

SEQ ID NO: 219181 - DNA, 33 bp, Homo sapien
tggtctcttggaagccaacttaattattttttg

SEQ ID NO: 219182 - DNA, 33 bp, Homo sapien
tggtctcttggaagccgacttaattattttttg

SEQ ID NO: 219183 - DNA, 33 bp, Homo sapien
ccagtaattatccgtaaatcttcaaacatcagc

SEQ ID NO: 219184 - DNA, 33 bp, Homo sapien
ccagtaattatccgtacatcttcaaacatcagc

SEQ ID NO: 219185 - DNA, 33 bp, Homo sapien
ctctagactttccctaccagttctccatatttc

SEQ ID NO: 219186 - DNA, 33 bp, Homo sapien
ctctagactttccctatcagttctccatatttc

SEQ ID NO: 219187 - DNA, 33 bp, Homo sapien
agattttgtgcatagacggctggagccaagatg

SEQ ID NO: 219188 - DNA, 33 bp, Homo sapien
agattttgtgcatagagggctggagccaagatg

SEQ ID NO: 219189 - DNA, 33 bp, Homo sapien
gcaggcttttgtggaaacctatgttaatataaa

SEQ ID NO: 219190 - DNA, 33 bp, Homo sapien
gcaggcttttgtggaagcctatgttaatataaa

SEQ ID NO: 219191 - DNA, 33 bp, Homo sapien
atggtatgcttaataacggaaaatgtaacaatg

SEQ ID NO: 219192 - DNA, 33 bp, Homo sapien
atggtatgcttaataatggaaaatgtaacaatg

SEQ ID NO: 219193 - DNA, 33 bp, Homo sapien
gaggctgaacctggaacgaggtaacattatttt

SEQ ID NO: 219194 - DNA, 33 bp, Homo sapien
gaggctgaacctggaatgaggtaacattatttt

SEQ ID NO: 219195 - DNA, 33 bp, Homo sapien
cctatcatgcttggtcaaatatatagctttttg

SEQ ID NO: 219196 - DNA, 33 bp, Homo sapien
cctatcatgcttggtccaatatatagctttttg

SEQ ID NO: 219197 - DNA, 33 bp, Homo sapien
ttgcatatatggacaacatagagagcttcagga

SEQ ID NO: 219198 - DNA, 33 bp, Homo sapien
ttgcatatatggacaatatagagagcttcagga

SEQ ID NO: 219199 - DNA, 33 bp, Homo sapien
tcacattctcttgttcaatcttttcatcttttt

SEQ ID NO: 219200 - DNA, 33 bp, Homo sapien
tcacattctcttgttcgatcttttcatcttttt

SEQ ID NO: 219201 - DNA, 33 bp, Homo sapien
tctttctcactgatgacagatgtgaggtcaatg

SEQ ID NO: 219202 - DNA, 33 bp, Homo sapien
tctttctcactgatgatagatgtgaggtcaatg

SEQ ID NO: 219203 - DNA, 33 bp, Homo sapien
ctacctaaacagtttccagtcagaacaacaacg

SEQ ID NO: 219204 - DNA, 33 bp, Homo sapien
ctacctaaacagtttcgagtcagaacaacaacg

SEQ ID NO: 219205 - DNA, 33 bp, Homo sapien
tcttttgccaatttaacagcaaggaagtctaca

SEQ ID NO: 219206 - DNA, 33 bp, Homo sapien
tcttttgccaatttaatagcaaggaagtctaca

SEQ ID NO: 219207 - DNA, 33 bp, Homo sapien
agtactgcagtagcaactgagaaaggtttttac

SEQ ID NO: 219208 - DNA, 33 bp, Homo sapien
agtactgcagtagcaattgagaaaggtttttac

SEQ ID NO: 219209 - DNA, 33 bp, Homo sapien
tacagcagttagggacactaggcatatactaag

SEQ ID NO: 219210 - DNA, 33 bp, Homo sapien
tacagcagttagggacgctaggcatatactaag

SEQ ID NO: 219211 - DNA, 33 bp, Homo sapien
aagaggtcaagtactgcatgtggctagagatga

SEQ ID NO: 219212 - DNA, 33 bp, Homo sapien
aagaggtcaagtactgtatgtggctagagatga

SEQ ID NO: 219213 - DNA, 33 bp, Homo sapien
tcagaaacagttaccaatcaaagagattacaca

SEQ ID NO: 219214 - DNA, 33 bp, Homo sapien
tcagaaacagttaccagtcaaagagattacaca

SEQ ID NO: 219215 - DNA, 33 bp, Homo sapien
gagaagagaatgtttccagaagtggctgcctgt

SEQ ID NO: 219216 - DNA, 33 bp, Homo sapien
gagaagagaatgtttctagaagtggctgcctgt

SEQ ID NO: 219217 - DNA, 33 bp, Homo sapien
tattggcctgccagaactggtatttattatgag

SEQ ID NO: 219218 - DNA, 33 bp, Homo sapien
tattggcctgccagaattggtatttattatgag

SEQ ID NO: 219219 - DNA, 33 bp, Homo sapien
ataactaaaagatgaacgtgagaaataagattt

SEQ ID NO: 219220 - DNA, 33 bp, Homo sapien
ataactaaaagatgaatgtgagaaataagattt

SEQ ID NO: 219221 - DNA, 33 bp, Homo sapien
ttgccttgtttgtttacagagttggtcttgaac

SEQ ID NO: 219222 - DNA, 33 bp, Homo sapien
ttgccttgtttgtttatagagttggtcttgaac

SEQ ID NO: 219223 - DNA, 33 bp, Homo sapien
aaaataacgaacagagaatcccattcaggaaca

SEQ ID NO: 219224 - DNA, 33 bp, Homo sapien
aaaataacgaacagagtatcccattcaggaaca

SEQ ID NO: 219225 - DNA, 33 bp, Homo sapien
ttcatttcacctataacaatgtatcctacaaaa

SEQ ID NO: 219226 - DNA, 33 bp, Homo sapien
ttcatttcacctataagaatgtatcctacaaaa

SEQ ID NO: 219227 - DNA, 33 bp, Homo sapien
gacactagagaatgatgactgatgaagattact

SEQ ID NO: 219228 - DNA, 33 bp, Homo sapien
gacactagagaatgattactgatgaagattact

SEQ ID NO: 219229 - DNA, 33 bp, Homo sapien
ctgccactggcccaaaacatttcttctcctttc

SEQ ID NO: 219230 - DNA, 33 bp, Homo sapien
ctgccactggcccaaagcatttcttctcctttc

SEQ ID NO: 219231 - DNA, 33 bp, Homo sapien
caagttcaaaattttacatccactcaagttttc

SEQ ID NO: 219232 - DNA, 33 bp, Homo sapien
caagttcaaaattttatatccactcaagttttc

SEQ ID NO: 219233 - DNA, 33 bp, Homo sapien
ttgtagggctttctccaatgatttgtgaattat

SEQ ID NO: 219234 - DNA, 33 bp, Homo sapien
ttgtagggctttctccgatgatttgtgaattat

SEQ ID NO: 219235 - DNA, 33 bp, Homo sapien
aataaaatgcaaggtacacaacctgtggcttgc

SEQ ID NO: 219236 - DNA, 33 bp, Homo sapien
aataaaatgcaaggtatacaacctgtggcttgc

SEQ ID NO: 219237 - DNA, 33 bp, Homo sapien
tcagggtgacagtcctaacgtaattgggcagct

SEQ ID NO: 219238 - DNA, 33 bp, Homo sapien
tcagggtgacagtccttacgtaattgggcagct

SEQ ID NO: 219239 - DNA, 33 bp, Homo sapien
taaaaatgtggaacataaaagtagtccatgtaa

SEQ ID NO: 219240 - DNA, 33 bp, Homo sapien
taaaaatgtggaacatgaaagtagtccatgtaa

SEQ ID NO: 219241 - DNA, 33 bp, Homo sapien
gtctctcttgttcccactctcataatgtgatgt

SEQ ID NO: 219242 - DNA, 33 bp, Homo sapien
gtctctcttgttcccattctcataatgtgatgt

SEQ ID NO: 219243 - DNA, 33 bp, Homo sapien
aaattaggcaaatacacagccaatcaaatgtca

SEQ ID NO: 219244 - DNA, 33 bp, Homo sapien
aaattaggcaaatacagagccaatcaaatgtca

SEQ ID NO: 219245 - DNA, 33 bp, Homo sapien
aggagataaaggaggcaagggaagtcttctgag

SEQ ID NO: 219246 - DNA, 33 bp, Homo sapien
aggagataaaggaggcgagggaagtcttctgag

SEQ ID NO: 219247 - DNA, 33 bp, Homo sapien
ttttaagttatagagcccatgacacttaccttg

SEQ ID NO: 219248 - DNA, 33 bp, Homo sapien
ttttaagttatagagctcatgacacttaccttg

SEQ ID NO: 219249 - DNA, 33 bp, Homo sapien
cttctcactctcttggcaggaagatatgtctgt

SEQ ID NO: 219250 - DNA, 33 bp, Homo sapien
cttctcactctcttggtaggaagatatgtctgt

SEQ ID NO: 219251 - DNA, 33 bp, Homo sapien
tttctattcctcaacaagccaaattcagtgaat

SEQ ID NO: 219252 - DNA, 33 bp, Homo sapien
tttctattcctcaacaggccaaattcagtgaat

SEQ ID NO: 219253 - DNA, 33 bp, Homo sapien
tgtgtttctcctgcaacagggccaagataacct

SEQ ID NO: 219254 - DNA, 33 bp, Homo sapien
tgtgtttctcctgcaagagggccaagataacct

SEQ ID NO: 219255 - DNA, 33 bp, Homo sapien
ttttatttttggcttacgatacatattgggttt

SEQ ID NO: 219256 - DNA, 33 bp, Homo sapien
ttttatttttggcttatgatacatattgggttt

SEQ ID NO: 219257 - DNA, 33 bp, Homo sapien
cacaagttaatcaaaaactcctccaaatcagga

SEQ ID NO: 219258 - DNA, 33 bp, Homo sapien
cacaagttaatcaaaagctcctccaaatcagga

SEQ ID NO: 219259 - DNA, 33 bp, Homo sapien
actcccatatttattgaagctgtattcataata

SEQ ID NO: 219260 - DNA, 33 bp, Homo sapien
actcccatatttattgcagctgtattcataata

SEQ ID NO: 219261 - DNA, 33 bp, Homo sapien
atatggtgattctataagacattcatgtaaagg

SEQ ID NO: 219262 - DNA, 33 bp, Homo sapien
atatggtgattctataggacattcatgtaaagg

SEQ ID NO: 219263 - DNA, 33 bp, Homo sapien
agatcctttggaggtcaatcctggagtcattgt

SEQ ID NO: 219264 - DNA, 33 bp, Homo sapien
agatcctttggaggtccatcctggagtcattgt

SEQ ID NO: 219265 - DNA, 33 bp, Homo sapien
gttctctgaactgtcacggcactgattcgtgtg

SEQ ID NO: 219266 - DNA, 33 bp, Homo sapien
gttctctgaactgtcatggcactgattcgtgtg

SEQ ID NO: 219267 - DNA, 33 bp, Homo sapien
gctcaagaacagacacaagtccgggctttctca

SEQ ID NO: 219268 - DNA, 33 bp, Homo sapien
gctcaagaacagacacgagtccgggctttctca

SEQ ID NO: 219269 - DNA, 33 bp, Homo sapien
ggctttctcaatttgacatgaattctgtgagaa

SEQ ID NO: 219270 - DNA, 33 bp, Homo sapien
ggctttctcaatttgatatgaattctgtgagaa

SEQ ID NO: 219271 - DNA, 33 bp, Homo sapien
tagataaaccttacaagcagggccctattcatg

SEQ ID NO: 219272 - DNA, 33 bp, Homo sapien
tagataaaccttacaatcagggccctattcatg

SEQ ID NO: 219273 - DNA, 33 bp, Homo sapien
tatgtaatgtctcctaagtaccaggcaccctgc

SEQ ID NO: 219274 - DNA, 33 bp, Homo sapien
tatgtaatgtctcctatgtaccaggcaccctgc

SEQ ID NO: 219275 - DNA, 33 bp, Homo sapien
ccctaattatgtacaaaaggaaacacagctgtg

SEQ ID NO: 219276 - DNA, 33 bp, Homo sapien
ccctaattatgtacaagaggaaacacagctgtg

SEQ ID NO: 219277 - DNA, 33 bp, Homo sapien
ttcatcacttgttcaactcatctctaccccagg

SEQ ID NO: 219278 - DNA, 33 bp, Homo sapien
ttcatcacttgttcaagtcatctctaccccagg

SEQ ID NO: 219279 - DNA, 33 bp, Homo sapien
tcacctccctggttagacgcattcataggtatt

SEQ ID NO: 219280 - DNA, 33 bp, Homo sapien
tcacctccctggttagccgcattcataggtatt

SEQ ID NO: 219281 - DNA, 33 bp, Homo sapien
gacttatatcttttagacctggaaaatttctct

SEQ ID NO: 219282 - DNA, 33 bp, Homo sapien
gacttatatcttttagccctggaaaatttctct

SEQ ID NO: 219283 - DNA, 33 bp, Homo sapien
tgcaaaaaccataaaaacaaatggcattaaaag

SEQ ID NO: 219284 - DNA, 33 bp, Homo sapien
tgcaaaaaccataaaatcaaatggcattaaaag

SEQ ID NO: 219285 - DNA, 33 bp, Homo sapien
tctgtatggcattgaggaaaggcatcatggcca

SEQ ID NO: 219286 - DNA, 33 bp, Homo sapien
tctgtatggcattgagtaaaggcatcatggcca

SEQ ID NO: 219287 - DNA, 33 bp, Homo sapien
catcatggccaggtcactccttatactatttaa

SEQ ID NO: 219288 - DNA, 33 bp, Homo sapien
catcatggccaggtcattccttatactatttaa

SEQ ID NO: 219289 - DNA, 33 bp, Homo sapien
tctctcgatgcttttacaattctgtcttgactt

SEQ ID NO: 219290 - DNA, 33 bp, Homo sapien
tctctcgatgcttttagaattctgtcttgactt

SEQ ID NO: 219291 - DNA, 33 bp, Homo sapien
cattccgttcataaaagccagtcaataagtaaa

SEQ ID NO: 219292 - DNA, 33 bp, Homo sapien
cattccgttcataaaatccagtcaataagtaaa

SEQ ID NO: 219293 - DNA, 33 bp, Homo sapien
ttaagagataaggaaaatccaaagtggtgggat

SEQ ID NO: 219294 - DNA, 33 bp, Homo sapien
ttaagagataaggaaattccaaagtggtgggat

SEQ ID NO: 219295 - DNA, 33 bp, Homo sapien
attctaaagctcatggccaatattatcttcttt

SEQ ID NO: 219296 - DNA, 33 bp, Homo sapien
attctaaagctcatggtcaatattatcttcttt

SEQ ID NO: 219297 - DNA, 33 bp, Homo sapien
atggtttgaatgggtcacctccaaaattcaggt

SEQ ID NO: 219298 - DNA, 33 bp, Homo sapien
atggtttgaatgggtcgcctccaaaattcaggt

SEQ ID NO: 219299 - DNA, 33 bp, Homo sapien
tggggtagaaatgatacgctaatgccttcctag

SEQ ID NO: 219300 - DNA, 33 bp, Homo sapien
tggggtagaaatgatatgctaatgccttcctag

SEQ ID NO: 219301 - DNA, 33 bp, Homo sapien
tcccaattttttgcccactgtatacactaataa

SEQ ID NO: 219302 - DNA, 33 bp, Homo sapien
tcccaattttttgcccgctgtatacactaataa

SEQ ID NO: 219303 - DNA, 33 bp, Homo sapien
aaattatttgactcaccgcataggttattttag

SEQ ID NO: 219304 - DNA, 33 bp, Homo sapien
aaattatttgactcactgcataggttattttag

SEQ ID NO: 219305 - DNA, 33 bp, Homo sapien
aggtttgactcttggaaacctggttgatttcag

SEQ ID NO: 219306 - DNA, 33 bp, Homo sapien
aggtttgactcttggagacctggttgatttcag

SEQ ID NO: 219307 - DNA, 33 bp, Homo sapien
aacaaaaggtagcagaagggatactgaatggaa

SEQ ID NO: 219308 - DNA, 33 bp, Homo sapien
aacaaaaggtagcagatgggatactgaatggaa

SEQ ID NO: 219309 - DNA, 33 bp, Homo sapien
cataagaacagaaagaatctaacagtcccaaca

SEQ ID NO: 219310 - DNA, 33 bp, Homo sapien
cataagaacagaaagagtctaacagtcccaaca

SEQ ID NO: 219311 - DNA, 33 bp, Homo sapien
ttaaatgacttcaaaaatgttttagagaaaatt

SEQ ID NO: 219312 - DNA, 33 bp, Homo sapien
ttaaatgacttcaaaattgttttagagaaaatt

SEQ ID NO: 219313 - DNA, 33 bp, Homo sapien
aagaatagatagcaaaacaaaatatacagtctg

SEQ ID NO: 219314 - DNA, 33 bp, Homo sapien
aagaatagatagcaaagcaaaatatacagtctg

SEQ ID NO: 219315 - DNA, 33 bp, Homo sapien
atcatttgctaatggagaaataataattcaatt

SEQ ID NO: 219316 - DNA, 33 bp, Homo sapien
atcatttgctaatggataaataataattcaatt

SEQ ID NO: 219317 - DNA, 33 bp, Homo sapien
ttgggaccaactgagacaatgaccaccttcttc

SEQ ID NO: 219318 - DNA, 33 bp, Homo sapien
ttgggaccaactgagagaatgaccaccttcttc

SEQ ID NO: 219319 - DNA, 33 bp, Homo sapien
aaagagtaatggataacgatatattgtactgct

SEQ ID NO: 219320 - DNA, 33 bp, Homo sapien
aaagagtaatggataaggatatattgtactgct

SEQ ID NO: 219321 - DNA, 33 bp, Homo sapien
ccagaatgtccaaatacacagttttgataggcc

SEQ ID NO: 219322 - DNA, 33 bp, Homo sapien
ccagaatgtccaaatatacagttttgataggcc

SEQ ID NO: 219323 - DNA, 33 bp, Homo sapien
tataggttgtacatcaaagaataactaatccaa

SEQ ID NO: 219324 - DNA, 33 bp, Homo sapien
tataggttgtacatcagagaataactaatccaa

SEQ ID NO: 219325 - DNA, 33 bp, Homo sapien
aagtttacaatctagcacagaagccatgtttaa

SEQ ID NO: 219326 - DNA, 33 bp, Homo sapien
aagtttacaatctagcgcagaagccatgtttaa

SEQ ID NO: 219327 - DNA, 33 bp, Homo sapien
agtgtggttttccaatgaatataaatgttatat

SEQ ID NO: 219328 - DNA, 33 bp, Homo sapien
agtgtggttttccaattaatataaatgttatat

SEQ ID NO: 219329 - DNA, 33 bp, Homo sapien
tagaggcttaacaatcagatacttgtacagcaa

SEQ ID NO: 219330 - DNA, 33 bp, Homo sapien
tagaggcttaacaatccgatacttgtacagcaa

SEQ ID NO: 219331 - DNA, 33 bp, Homo sapien
gtagggtaagtagatactaggcagcttgcaggg

SEQ ID NO: 219332 - DNA, 33 bp, Homo sapien
gtagggtaagtagatattaggcagcttgcaggg

SEQ ID NO: 219333 - DNA, 33 bp, Homo sapien
atcacaatccaaatgtcaacaaatatactattt

SEQ ID NO: 219334 - DNA, 33 bp, Homo sapien
atcacaatccaaatgtgaacaaatatactattt

SEQ ID NO: 219335 - DNA, 33 bp, Homo sapien
cctgcagttgttctgcacctgttgtaagttttc

SEQ ID NO: 219336 - DNA, 33 bp, Homo sapien
cctgcagttgttctgcgcctgttgtaagttttc

SEQ ID NO: 219337 - DNA, 33 bp, Homo sapien
agaactaggaaagataataaattaagggcttca

SEQ ID NO: 219338 - DNA, 33 bp, Homo sapien
agaactaggaaagatagtaaattaagggcttca

SEQ ID NO: 219339 - DNA, 33 bp, Homo sapien
cagagctgaccacgaactggtaaacagagaaag

SEQ ID NO: 219340 - DNA, 33 bp, Homo sapien
cagagctgaccacgaattggtaaacagagaaag

SEQ ID NO: 219341 - DNA, 33 bp, Homo sapien
gagaatttctcacttaacccctatatttatctc

SEQ ID NO: 219342 - DNA, 33 bp, Homo sapien
gagaatttctcacttatcccctatatttatctc

SEQ ID NO: 219343 - DNA, 33 bp, Homo sapien
agaatagtcaaaagccaaacttgttctcaaccc

SEQ ID NO: 219344 - DNA, 33 bp, Homo sapien
agaatagtcaaaagccgaacttgttctcaaccc

SEQ ID NO: 219345 - DNA, 33 bp, Homo sapien
tgggcaaatcatgtaaacttttgtccttcaatt

SEQ ID NO: 219346 - DNA, 33 bp, Homo sapien
tgggcaaatcatgtaaccttttgtccttcaatt

SEQ ID NO: 219347 - DNA, 33 bp, Homo sapien
ttatagcaactcagaaaaagcctgctccaaaga

SEQ ID NO: 219348 - DNA, 33 bp, Homo sapien
ttatagcaactcagaacaagcctgctccaaaga

SEQ ID NO: 219349 - DNA, 33 bp, Homo sapien
gacacccactgcaagcacaccaatttaacaact

SEQ ID NO: 219350 - DNA, 33 bp, Homo sapien
gacacccactgcaagcgcaccaatttaacaact

SEQ ID NO: 219351 - DNA, 33 bp, Homo sapien
acccaagtcctttttgaattcctggaaagcatt

SEQ ID NO: 219352 - DNA, 33 bp, Homo sapien
acccaagtcctttttgtattcctggaaagcatt

SEQ ID NO: 219353 - DNA, 33 bp, Homo sapien
tatcataaatatgaaacctgagcagggttagca

SEQ ID NO: 219354 - DNA, 33 bp, Homo sapien
tatcataaatatgaaatctgagcagggttagca

SEQ ID NO: 219355 - DNA, 33 bp, Homo sapien
gcaatcatgcctttcaaccgaatacattaccaa

SEQ ID NO: 219356 - DNA, 33 bp, Homo sapien
gcaatcatgcctttcacccgaatacattaccaa

SEQ ID NO: 219357 - DNA, 33 bp, Homo sapien
tgtaagtgaaaatgaaaaatcgtgctggaaggc

SEQ ID NO: 219358 - DNA, 33 bp, Homo sapien
tgtaagtgaaaatgaacaatcgtgctggaaggc

SEQ ID NO: 219359 - DNA, 33 bp, Homo sapien
tggacttttaaaataactgaattccgaccagcc

SEQ ID NO: 219360 - DNA, 33 bp, Homo sapien
tggacttttaaaataattgaattccgaccagcc

SEQ ID NO: 219361 - DNA, 33 bp, Homo sapien
ctacagcacgcatttacctatgtaacaaacctg

SEQ ID NO: 219362 - DNA, 33 bp, Homo sapien
ctacagcacgcatttatctatgtaacaaacctg

SEQ ID NO: 219363 - DNA, 33 bp, Homo sapien
ggaatatttaatgttcacaacagcccatgatac

SEQ ID NO: 219364 - DNA, 33 bp, Homo sapien
ggaatatttaatgttcccaacagcccatgatac

SEQ ID NO: 219365 - DNA, 33 bp, Homo sapien
catggttgaacttatacaggttgtgtatccctt

SEQ ID NO: 219366 - DNA, 33 bp, Homo sapien
catggttgaacttatagaggttgtgtatccctt

SEQ ID NO: 219367 - DNA, 33 bp, Homo sapien
cagttaaaatgcttaacctgtgaagctattatg

SEQ ID NO: 219368 - DNA, 33 bp, Homo sapien
cagttaaaatgcttaatctgtgaagctattatg

SEQ ID NO: 219369 - DNA, 33 bp, Homo sapien
ccaagtctgaatatcacgctctccttgtgcttt

SEQ ID NO: 219370 - DNA, 33 bp, Homo sapien
ccaagtctgaatatcatgctctccttgtgcttt

SEQ ID NO: 219371 - DNA, 33 bp, Homo sapien
atttatcccaggcatactacttttcttaatctt

SEQ ID NO: 219372 - DNA, 33 bp, Homo sapien
atttatcccaggcatagtacttttcttaatctt

SEQ ID NO: 219373 - DNA, 33 bp, Homo sapien
tgtattagaaagtagcccaacaatcgaagttgc

SEQ ID NO: 219374 - DNA, 33 bp, Homo sapien
tgtattagaaagtagctcaacaatcgaagttgc

SEQ ID NO: 219375 - DNA, 33 bp, Homo sapien
tcagaaataggcaaaccgtccaattggaaaatg

SEQ ID NO: 219376 - DNA, 33 bp, Homo sapien
tcagaaataggcaaactgtccaattggaaaatg

SEQ ID NO: 219377 - DNA, 33 bp, Homo sapien
aactgagaatattcccaaatttttgaacccatg

SEQ ID NO: 219378 - DNA, 33 bp, Homo sapien
aactgagaatattcccgaatttttgaacccatg

SEQ ID NO: 219379 - DNA, 33 bp, Homo sapien
aagcaacctttcaaaaaacgccaaaagatttga

SEQ ID NO: 219380 - DNA, 33 bp, Homo sapien
aagcaacctttcaaaagacgccaaaagatttga

SEQ ID NO: 219381 - DNA, 33 bp, Homo sapien
aggaggaaatctttgcaacatcagggtaagcaa

SEQ ID NO: 219382 - DNA, 33 bp, Homo sapien
aggaggaaatctttgcgacatcagggtaagcaa

SEQ ID NO: 219383 - DNA, 33 bp, Homo sapien
tttatttatttgtttacgtttctcaactcatgg

SEQ ID NO: 219384 - DNA, 33 bp, Homo sapien
tttatttatttgtttatgtttctcaactcatgg

SEQ ID NO: 219385 - DNA, 33 bp, Homo sapien
atagggacaagaaaaaatctggctagactgggc

SEQ ID NO: 219386 - DNA, 33 bp, Homo sapien
atagggacaagaaaaattctggctagactgggc

SEQ ID NO: 219387 - DNA, 33 bp, Homo sapien
gcatattgtttaattgcactgtatttccaaact

SEQ ID NO: 219388 - DNA, 33 bp, Homo sapien
gcatattgtttaattgtactgtatttccaaact

SEQ ID NO: 219389 - DNA, 33 bp, Homo sapien
atttgctccagattgacggggactcttctacat

SEQ ID NO: 219390 - DNA, 33 bp, Homo sapien
atttgctccagattgatggggactcttctacat

SEQ ID NO: 219391 - DNA, 33 bp, Homo sapien
agatagaaaactttgaagtctagaatttagacc

SEQ ID NO: 219392 - DNA, 33 bp, Homo sapien
agatagaaaactttgacgtctagaatttagacc

SEQ ID NO: 219393 - DNA, 33 bp, Homo sapien
ttccggtatcctggtgaagtatgcaggagcatt

SEQ ID NO: 219394 - DNA, 33 bp, Homo sapien
ttccggtatcctggtgcagtatgcaggagcatt

SEQ ID NO: 219395 - DNA, 33 bp, Homo sapien
gaggcagaaagttctacgtggaaaagtggtgat

SEQ ID NO: 219396 - DNA, 33 bp, Homo sapien
gaggcagaaagttctatgtggaaaagtggtgat

SEQ ID NO: 219397 - DNA, 33 bp, Homo sapien
agtagctactggaaccaaaaaggagttagtact

SEQ ID NO: 219398 - DNA, 33 bp, Homo sapien
agtagctactggaaccgaaaaggagttagtact

SEQ ID NO: 219399 - DNA, 33 bp, Homo sapien
taaaaatgaaatatcaagaagagctgaatattt

SEQ ID NO: 219400 - DNA, 33 bp, Homo sapien
taaaaatgaaatatcaggaagagctgaatattt

SEQ ID NO: 219401 - DNA, 33 bp, Homo sapien
tatccactgtcaccatcaaggttgcgttatttc

SEQ ID NO: 219402 - DNA, 33 bp, Homo sapien
tatccactgtcaccattaaggttgcgttatttc

SEQ ID NO: 219403 - DNA, 33 bp, Homo sapien
atcttctctgaccccacagtcatcttctttcag

SEQ ID NO: 219404 - DNA, 33 bp, Homo sapien
atcttctctgaccccatagtcatcttctttcag

SEQ ID NO: 219405 - DNA, 33 bp, Homo sapien
aatagataaaagtgtgcacaaagataaagacag

SEQ ID NO: 219406 - DNA, 33 bp, Homo sapien
aatagataaaagtgtgtacaaagataaagacag

SEQ ID NO: 219407 - DNA, 33 bp, Homo sapien
tttaatggtagtatgacacaattgactagtatg

SEQ ID NO: 219408 - DNA, 33 bp, Homo sapien
tttaatggtagtatgatacaattgactagtatg

SEQ ID NO: 219409 - DNA, 33 bp, Homo sapien
gctgagcgaggtgagaaaagtaattggtctttc

SEQ ID NO: 219410 - DNA, 33 bp, Homo sapien
gctgagcgaggtgagacaagtaattggtctttc

SEQ ID NO: 219411 - DNA, 33 bp, Homo sapien
ataagcagataattgacacatgatgaggcgagg

SEQ ID NO: 219412 - DNA, 33 bp, Homo sapien
ataagcagataattgagacatgatgaggcgagg

SEQ ID NO: 219413 - DNA, 33 bp, Homo sapien
acacttctgaaataaacaggtcaaggttaaagt

SEQ ID NO: 219414 - DNA, 33 bp, Homo sapien
acacttctgaaataaagaggtcaaggttaaagt

SEQ ID NO: 219415 - DNA, 33 bp, Homo sapien
tggtctgttcaaaccacctctctcccactcctg

SEQ ID NO: 219416 - DNA, 33 bp, Homo sapien
tggtctgttcaaaccatctctctcccactcctg

SEQ ID NO: 219417 - DNA, 33 bp, Homo sapien
ccataaatgctaaaaacatgacaactttatcac

SEQ ID NO: 219418 - DNA, 33 bp, Homo sapien
ccataaatgctaaaaatatgacaactttatcac

SEQ ID NO: 219419 - DNA, 33 bp, Homo sapien
gtatctgcaagaattagattttgtccaacatag

SEQ ID NO: 219420 - DNA, 33 bp, Homo sapien
gtatctgcaagaattatattttgtccaacatag

SEQ ID NO: 219421 - DNA, 33 bp, Homo sapien
agttcatcttagcacagcttcctataggtttaa

SEQ ID NO: 219422 - DNA, 33 bp, Homo sapien
agttcatcttagcacatcttcctataggtttaa

SEQ ID NO: 219423 - DNA, 33 bp, Homo sapien
aattttcaattcttgaagtcagtaattccaact

SEQ ID NO: 219424 - DNA, 33 bp, Homo sapien
aattttcaattcttgacgtcagtaattccaact

SEQ ID NO: 219425 - DNA, 33 bp, Homo sapien
agtaatgaaaagaaaacggataactcattgagt

SEQ ID NO: 219426 - DNA, 33 bp, Homo sapien
agtaatgaaaagaaaatggataactcattgagt

SEQ ID NO: 219427 - DNA, 33 bp, Homo sapien
tacttgatacgtttctaaaagatgtattacaat

SEQ ID NO: 219428 - DNA, 33 bp, Homo sapien
tacttgatacgtttctgaaagatgtattacaat

SEQ ID NO: 219429 - DNA, 33 bp, Homo sapien
aaatgataatccttccacaagacaatgactacc

SEQ ID NO: 219430 - DNA, 33 bp, Homo sapien
aaatgataatccttccgcaagacaatgactacc

SEQ ID NO: 219431 - DNA, 33 bp, Homo sapien
gtaattcactgagtccaaaaacctgcaaacaag

SEQ ID NO: 219432 - DNA, 33 bp, Homo sapien
gtaattcactgagtccgaaaacctgcaaacaag

SEQ ID NO: 219433 - DNA, 33 bp, Homo sapien
ctatgtatacaaaataagatggtgagtgcacat

SEQ ID NO: 219434 - DNA, 33 bp, Homo sapien
ctatgtatacaaaataggatggtgagtgcacat

SEQ ID NO: 219435 - DNA, 33 bp, Homo sapien
ataaatgttcactgaccagatgctttgctacat

SEQ ID NO: 219436 - DNA, 33 bp, Homo sapien
ataaatgttcactgactagatgctttgctacat

SEQ ID NO: 219437 - DNA, 33 bp, Homo sapien
gcttcaaagccaacaaatctcccaaagcaaaca

SEQ ID NO: 219438 - DNA, 33 bp, Homo sapien
gcttcaaagccaacaagtctcccaaagcaaaca

SEQ ID NO: 219439 - DNA, 33 bp, Homo sapien
cccagcccaagtgccgaattctttaacttgctc

SEQ ID NO: 219440 - DNA, 33 bp, Homo sapien
cccagcccaagtgccgcattctttaacttgctc

SEQ ID NO: 219441 - DNA, 33 bp, Homo sapien
tgttccacagagcaaccagaatgaactttgaga

SEQ ID NO: 219442 - DNA, 33 bp, Homo sapien
tgttccacagagcaactagaatgaactttgaga

SEQ ID NO: 219443 - DNA, 33 bp, Homo sapien
tagcattctacttagaactttcaccatatatgt

SEQ ID NO: 219444 - DNA, 33 bp, Homo sapien
tagcattctacttagagctttcaccatatatgt

SEQ ID NO: 219445 - DNA, 33 bp, Homo sapien
attgattttgttgcagaaagtttagaggcagag

SEQ ID NO: 219446 - DNA, 33 bp, Homo sapien
attgattttgttgcaggaagtttagaggcagag

SEQ ID NO: 219447 - DNA, 33 bp, Homo sapien
gacagcaccaccattacggttcaaattgagtag

SEQ ID NO: 219448 - DNA, 33 bp, Homo sapien
gacagcaccaccattatggttcaaattgagtag

SEQ ID NO: 219449 - DNA, 33 bp, Homo sapien
tacctgtgtgtgtaaacagtgaattaagacctg

SEQ ID NO: 219450 - DNA, 33 bp, Homo sapien
tacctgtgtgtgtaaagagtgaattaagacctg

SEQ ID NO: 219451 - DNA, 33 bp, Homo sapien
catgtctctattttcaaaattcaggaaagaatc

SEQ ID NO: 219452 - DNA, 33 bp, Homo sapien
catgtctctattttcagaattcaggaaagaatc

SEQ ID NO: 219453 - DNA, 33 bp, Homo sapien
tcaaatcctgtatcgacgggtagagggtaaaga

SEQ ID NO: 219454 - DNA, 33 bp, Homo sapien
tcaaatcctgtatcgatgggtagagggtaaaga

SEQ ID NO: 219455 - DNA, 33 bp, Homo sapien
taacttttcatccaagaaaggcttaaagtatta

SEQ ID NO: 219456 - DNA, 33 bp, Homo sapien
taacttttcatccaagcaaggcttaaagtatta

SEQ ID NO: 219457 - DNA, 33 bp, Homo sapien
aacaagatgtcggcccaagttctctctctaaac

SEQ ID NO: 219458 - DNA, 33 bp, Homo sapien
aacaagatgtcggccctagttctctctctaaac

SEQ ID NO: 219459 - DNA, 33 bp, Homo sapien
tagagatgagtgaaaggctcccctgatagcacg

SEQ ID NO: 219460 - DNA, 33 bp, Homo sapien
tagagatgagtgaaagtctcccctgatagcacg

SEQ ID NO: 219461 - DNA, 33 bp, Homo sapien
ctgcttcatttatgtacatacttttgacaaaga

SEQ ID NO: 219462 - DNA, 33 bp, Homo sapien
ctgcttcatttatgtagatacttttgacaaaga

SEQ ID NO: 219463 - DNA, 33 bp, Homo sapien
ttaagttccaggatacacatgcagtatgtgcag

SEQ ID NO: 219464 - DNA, 33 bp, Homo sapien
ttaagttccaggatacgcatgcagtatgtgcag

SEQ ID NO: 219465 - DNA, 33 bp, Homo sapien
aaacaaacagaaataccgagaatctttgtgttg

SEQ ID NO: 219466 - DNA, 33 bp, Homo sapien
aaacaaacagaaatactgagaatctttgtgttg

SEQ ID NO: 219467 - DNA, 33 bp, Homo sapien
agctgaatccagaaaaagagactgaacagaggc

SEQ ID NO: 219468 - DNA, 33 bp, Homo sapien
agctgaatccagaaaaggagactgaacagaggc

SEQ ID NO: 219469 - DNA, 33 bp, Homo sapien
acaaggatatcagcaactgagggcaagatttaa

SEQ ID NO: 219470 - DNA, 33 bp, Homo sapien
acaaggatatcagcaattgagggcaagatttaa

SEQ ID NO: 219471 - DNA, 33 bp, Homo sapien
tactagagtagacatacaacaatagaactgtat

SEQ ID NO: 219472 - DNA, 33 bp, Homo sapien
tactagagtagacatagaacaatagaactgtat

SEQ ID NO: 219473 - DNA, 33 bp, Homo sapien
ctcagatgctgtttaacagatagatgcagagca

SEQ ID NO: 219474 - DNA, 33 bp, Homo sapien
ctcagatgctgtttaagagatagatgcagagca

SEQ ID NO: 219475 - DNA, 33 bp, Homo sapien
catatctggaatatcacagagaagtttaaaggg

SEQ ID NO: 219476 - DNA, 33 bp, Homo sapien
catatctggaatatcatagagaagtttaaaggg

SEQ ID NO: 219477 - DNA, 33 bp, Homo sapien
taaaatgcgtgggatcaatgtgatgggcaaaga

SEQ ID NO: 219478 - DNA, 33 bp, Homo sapien
taaaatgcgtgggatcgatgtgatgggcaaaga

SEQ ID NO: 219479 - DNA, 33 bp, Homo sapien
tctcaataagccaagacgtattaatagttcaac

SEQ ID NO: 219480 - DNA, 33 bp, Homo sapien
tctcaataagccaagaggtattaatagttcaac

SEQ ID NO: 219481 - DNA, 33 bp, Homo sapien
tcagcaaagcaataaccgtcacagataacactg

SEQ ID NO: 219482 - DNA, 33 bp, Homo sapien
tcagcaaagcaataactgtcacagataacactg

SEQ ID NO: 219483 - DNA, 33 bp, Homo sapien
aaatcaatgaatatggcattttgcacaaatatt

SEQ ID NO: 219484 - DNA, 33 bp, Homo sapien
aaatcaatgaatatggtattttgcacaaatatt

SEQ ID NO: 219485 - DNA, 33 bp, Homo sapien
acagaaaaatttagcccctctgtatatatacct

SEQ ID NO: 219486 - DNA, 33 bp, Homo sapien
acagaaaaatttagcctctctgtatatatacct

SEQ ID NO: 219487 - DNA, 33 bp, Homo sapien
tcatgagttcattcataagaggcggaagattgc

SEQ ID NO: 219488 - DNA, 33 bp, Homo sapien
tcatgagttcattcatgagaggcggaagattgc

SEQ ID NO: 219489 - DNA, 33 bp, Homo sapien
ttagctaactgaatcccaaagcctcttggtatc

SEQ ID NO: 219490 - DNA, 33 bp, Homo sapien
ttagctaactgaatcctaaagcctcttggtatc

SEQ ID NO: 219491 - DNA, 33 bp, Homo sapien
gagcagcaaaaagttaagggtgcacagtattga

SEQ ID NO: 219492 - DNA, 33 bp, Homo sapien
gagcagcaaaaagttaggggtgcacagtattga

SEQ ID NO: 219493 - DNA, 33 bp, Homo sapien
tttttttttcctgccacagattttatacagact

SEQ ID NO: 219494 - DNA, 33 bp, Homo sapien
tttttttttcctgccatagattttatacagact

SEQ ID NO: 219495 - DNA, 33 bp, Homo sapien
gaatagagattgagaaaattgatatttaaggga

SEQ ID NO: 219496 - DNA, 33 bp, Homo sapien
gaatagagattgagaagattgatatttaaggga

SEQ ID NO: 219497 - DNA, 33 bp, Homo sapien
ctgctaagcatcttaaaaagtccatttttgggc

SEQ ID NO: 219498 - DNA, 33 bp, Homo sapien
ctgctaagcatcttaagaagtccatttttgggc

SEQ ID NO: 219499 - DNA, 33 bp, Homo sapien
gaaggcagagtgtgacaagttgcataaagaaga

SEQ ID NO: 219500 - DNA, 33 bp, Homo sapien
gaaggcagagtgtgacgagttgcataaagaaga

SEQ ID NO: 219501 - DNA, 33 bp, Homo sapien
catgttgacaggatcaaatcttaacatcaatat

SEQ ID NO: 219502 - DNA, 33 bp, Homo sapien
catgttgacaggatcagatcttaacatcaatat

SEQ ID NO: 219503 - DNA, 33 bp, Homo sapien
ttgtagggttgagtcacaggattgctcagtgaa

SEQ ID NO: 219504 - DNA, 33 bp, Homo sapien
ttgtagggttgagtcagaggattgctcagtgaa

SEQ ID NO: 219505 - DNA, 33 bp, Homo sapien
tactagaggtctgtaacgagagtgggccactcc

SEQ ID NO: 219506 - DNA, 33 bp, Homo sapien
tactagaggtctgtaatgagagtgggccactcc

SEQ ID NO: 219507 - DNA, 33 bp, Homo sapien
caaggcaccaatcacggatgcattggcaatcag

SEQ ID NO: 219508 - DNA, 33 bp, Homo sapien
caaggcaccaatcacgtatgcattggcaatcag

SEQ ID NO: 219509 - DNA, 33 bp, Homo sapien
taaacacctgtggccacgataaaagaaaatatg

SEQ ID NO: 219510 - DNA, 33 bp, Homo sapien
taaacacctgtggccatgataaaagaaaatatg

SEQ ID NO: 219511 - DNA, 33 bp, Homo sapien
aaaaattgcttggtaggatctgaacacttcctc

SEQ ID NO: 219512 - DNA, 33 bp, Homo sapien
aaaaattgcttggtagtatctgaacacttcctc

SEQ ID NO: 219513 - DNA, 33 bp, Homo sapien
gatgtgaaggtcagagaaaactgatcaagcctc

SEQ ID NO: 219514 - DNA, 33 bp, Homo sapien
gatgtgaaggtcagaggaaactgatcaagcctc

SEQ ID NO: 219515 - DNA, 33 bp, Homo sapien
atataaattcatagagaaagttctggaaagata

SEQ ID NO: 219516 - DNA, 33 bp, Homo sapien
atataaattcatagagtaagttctggaaagata

SEQ ID NO: 219517 - DNA, 33 bp, Homo sapien
ttttggatgcaagagacagagaatcgagatcaa

SEQ ID NO: 219518 - DNA, 33 bp, Homo sapien
ttttggatgcaagagatagagaatcgagatcaa

SEQ ID NO: 219519 - DNA, 33 bp, Homo sapien
gaaagcaacttcagcaatacccaaaggtggttc

SEQ ID NO: 219520 - DNA, 33 bp, Homo sapien
gaaagcaacttcagcattacccaaaggtggttc

SEQ ID NO: 219521 - DNA, 33 bp, Homo sapien
attaatatggagacaaaacacacagaagttgtg

SEQ ID NO: 219522 - DNA, 33 bp, Homo sapien
attaatatggagacaatacacacagaagttgtg

SEQ ID NO: 219523 - DNA, 33 bp, Homo sapien
ctggttagtagctaagaaagatgttcattaata

SEQ ID NO: 219524 - DNA, 33 bp, Homo sapien
ctggttagtagctaagtaagatgttcattaata

SEQ ID NO: 219525 - DNA, 33 bp, Homo sapien
atggcaggtaaagaacagtccaattaccaggaa

SEQ ID NO: 219526 - DNA, 33 bp, Homo sapien
atggcaggtaaagaaccgtccaattaccaggaa

SEQ ID NO: 219527 - DNA, 33 bp, Homo sapien
tttttatttcctgttaccttactcactgctgct

SEQ ID NO: 219528 - DNA, 33 bp, Homo sapien
tttttatttcctgttatcttactcactgctgct

SEQ ID NO: 219529 - DNA, 33 bp, Homo sapien
aacatcaatccatagaagtgattagaatacttt

SEQ ID NO: 219530 - DNA, 33 bp, Homo sapien
aacatcaatccatagaggtgattagaatacttt

SEQ ID NO: 219531 - DNA, 33 bp, Homo sapien
catgggagaattcagtcaattctgtttgaatgg

SEQ ID NO: 219532 - DNA, 33 bp, Homo sapien
catgggagaattcagttaattctgtttgaatgg

SEQ ID NO: 219533 - DNA, 33 bp, Homo sapien
taaggcaaaatatcaccaggttttcccctcttt

SEQ ID NO: 219534 - DNA, 33 bp, Homo sapien
taaggcaaaatatcacgaggttttcccctcttt

SEQ ID NO: 219535 - DNA, 33 bp, Homo sapien
ttaattctcttagtcaagttggtggctatgttt

SEQ ID NO: 219536 - DNA, 33 bp, Homo sapien
ttaattctcttagtcatgttggtggctatgttt

SEQ ID NO: 219537 - DNA, 33 bp, Homo sapien
gttgtgaataggaagggctctctgtgatctggc

SEQ ID NO: 219538 - DNA, 33 bp, Homo sapien
gttgtgaataggaaggtctctctgtgatctggc

SEQ ID NO: 219539 - DNA, 33 bp, Homo sapien
tgaccgatgagagacccgagatcgaaagggtcc

SEQ ID NO: 219540 - DNA, 33 bp, Homo sapien
tgaccgatgagagaccggagatcgaaagggtcc

SEQ ID NO: 219541 - DNA, 33 bp, Homo sapien
ggagatggtgcattacggaactggccatagttt

SEQ ID NO: 219542 - DNA, 33 bp, Homo sapien
ggagatggtgcattactgaactggccatagttt

SEQ ID NO: 219543 - DNA, 33 bp, Homo sapien
atgctgtttagaataaatagtctgaattccatt

SEQ ID NO: 219544 - DNA, 33 bp, Homo sapien
atgctgtttagaataagtagtctgaattccatt

SEQ ID NO: 219545 - DNA, 33 bp, Homo sapien
acaaggtcacagcaccaaaaagcaaagataact

SEQ ID NO: 219546 - DNA, 33 bp, Homo sapien
acaaggtcacagcaccgaaaagcaaagataact

SEQ ID NO: 219547 - DNA, 33 bp, Homo sapien
agggaggtgtcctttacagtaaaataacaaaca

SEQ ID NO: 219548 - DNA, 33 bp, Homo sapien
agggaggtgtcctttagagtaaaataacaaaca

SEQ ID NO: 219549 - DNA, 33 bp, Homo sapien
ggctgagtacattttgaaataggaaatagaaaa

SEQ ID NO: 219550 - DNA, 33 bp, Homo sapien
ggctgagtacattttggaataggaaatagaaaa

SEQ ID NO: 219551 - DNA, 33 bp, Homo sapien
tacaacctacgccaaaaaatcgttttctatttc

SEQ ID NO: 219552 - DNA, 33 bp, Homo sapien
tacaacctacgccaaacaatcgttttctatttc

SEQ ID NO: 219553 - DNA, 33 bp, Homo sapien
agtttgatgtatgaataagtagttggaatcagt

SEQ ID NO: 219554 - DNA, 33 bp, Homo sapien
agtttgatgtatgaatgagtagttggaatcagt

SEQ ID NO: 219555 - DNA, 33 bp, Homo sapien
agctcttatcaggcctaaaaagatgccagactc

SEQ ID NO: 219556 - DNA, 33 bp, Homo sapien
agctcttatcaggccttaaaagatgccagactc

SEQ ID NO: 219557 - DNA, 33 bp, Homo sapien
attgatgtactattgaagtcatcactaatcatt

SEQ ID NO: 219558 - DNA, 33 bp, Homo sapien
attgatgtactattgaggtcatcactaatcatt

SEQ ID NO: 219559 - DNA, 33 bp, Homo sapien
caccacacaaaaaccccaggccacagctcattt

SEQ ID NO: 219560 - DNA, 33 bp, Homo sapien
caccacacaaaaacccgaggccacagctcattt

SEQ ID NO: 219561 - DNA, 33 bp, Homo sapien
ctcaccaaatcttctcacctttcaagaagtact

SEQ ID NO: 219562 - DNA, 33 bp, Homo sapien
ctcaccaaatcttctcgcctttcaagaagtact

SEQ ID NO: 219563 - DNA, 33 bp, Homo sapien
aaaagatactatgttacacaaacttgcacaaca

SEQ ID NO: 219564 - DNA, 33 bp, Homo sapien
aaaagatactatgttatacaaacttgcacaaca

SEQ ID NO: 219565 - DNA, 33 bp, Homo sapien
tagttggcgtaagaaaccattgtgtatatgaat

SEQ ID NO: 219566 - DNA, 33 bp, Homo sapien
tagttggcgtaagaaatcattgtgtatatgaat

SEQ ID NO: 219567 - DNA, 33 bp, Homo sapien
attcaattcacctaaacgggaaaagtgcaaata

SEQ ID NO: 219568 - DNA, 33 bp, Homo sapien
attcaattcacctaaatgggaaaagtgcaaata

SEQ ID NO: 219569 - DNA, 33 bp, Homo sapien
ctagatggcaattactcaagtttactgcttgtt

SEQ ID NO: 219570 - DNA, 33 bp, Homo sapien
ctagatggcaattactgaagtttactgcttgtt

SEQ ID NO: 219571 - DNA, 33 bp, Homo sapien
atctaatcgctgaaaccgcacttatcctttatc

SEQ ID NO: 219572 - DNA, 33 bp, Homo sapien
atctaatcgctgaaactgcacttatcctttatc

SEQ ID NO: 219573 - DNA, 33 bp, Homo sapien
tgaggccaagagttaaaacgatcctgggaaaca

SEQ ID NO: 219574 - DNA, 33 bp, Homo sapien
tgaggccaagagttaagacgatcctgggaaaca

SEQ ID NO: 219575 - DNA, 33 bp, Homo sapien
gtgaccaatgagagtacagaaaacccagaaaca

SEQ ID NO: 219576 - DNA, 33 bp, Homo sapien
gtgaccaatgagagtatagaaaacccagaaaca

SEQ ID NO: 219577 - DNA, 33 bp, Homo sapien
ttcttccagatgtaaaagtcctcatatcaaaga

SEQ ID NO: 219578 - DNA, 33 bp, Homo sapien
ttcttccagatgtaaatgtcctcatatcaaaga

SEQ ID NO: 219579 - DNA, 33 bp, Homo sapien
ggttgtcatgtgtacaaataaatactcaaggcc

SEQ ID NO: 219580 - DNA, 33 bp, Homo sapien
ggttgtcatgtgtacagataaatactcaaggcc

SEQ ID NO: 219581 - DNA, 33 bp, Homo sapien
tttaaagaattccacaagagtagccttggattg

SEQ ID NO: 219582 - DNA, 33 bp, Homo sapien
tttaaagaattccacaggagtagccttggattg

SEQ ID NO: 219583 - DNA, 33 bp, Homo sapien
tttgatttagaaagcaaacatttaaggtaacat

SEQ ID NO: 219584 - DNA, 33 bp, Homo sapien
tttgatttagaaagcatacatttaaggtaacat

SEQ ID NO: 219585 - DNA, 33 bp, Homo sapien
aagaaagaggaaattaactttcagcacatctgt

SEQ ID NO: 219586 - DNA, 33 bp, Homo sapien
aagaaagaggaaattacctttcagcacatctgt

SEQ ID NO: 219587 - DNA, 33 bp, Homo sapien
aagaaggaagatgactcaggagtttctcttggg

SEQ ID NO: 219588 - DNA, 33 bp, Homo sapien
aagaaggaagatgacttaggagtttctcttggg

SEQ ID NO: 219589 - DNA, 33 bp, Homo sapien
aagtctaacatctaggacagttaagtagtttat

SEQ ID NO: 219590 - DNA, 33 bp, Homo sapien
aagtctaacatctagggcagttaagtagtttat

SEQ ID NO: 219591 - DNA, 33 bp, Homo sapien
tcactttcttcatccaatatcagcaaggtgatt

SEQ ID NO: 219592 - DNA, 33 bp, Homo sapien
tcactttcttcatccagtatcagcaaggtgatt

SEQ ID NO: 219593 - DNA, 33 bp, Homo sapien
attcttattttggagaccattatttaaacagat

SEQ ID NO: 219594 - DNA, 33 bp, Homo sapien
attcttattttggagatcattatttaaacagat

SEQ ID NO: 219595 - DNA, 33 bp, Homo sapien
ttatgttgtggtccaaataactctgagcttttc

SEQ ID NO: 219596 - DNA, 33 bp, Homo sapien
ttatgttgtggtccaagtaactctgagcttttc

SEQ ID NO: 219597 - DNA, 33 bp, Homo sapien
ttaggaactcgggcagccacatgcaaaactata

SEQ ID NO: 219598 - DNA, 33 bp, Homo sapien
ttaggaactcgggcagtcacatgcaaaactata

SEQ ID NO: 219599 - DNA, 33 bp, Homo sapien
aagttcaatgatttccgatccgaattaactccc

SEQ ID NO: 219600 - DNA, 33 bp, Homo sapien
aagttcaatgatttcctatccgaattaactccc

SEQ ID NO: 219601 - DNA, 33 bp, Homo sapien
gcaagttctgagaagacagtgagttttcaacag

SEQ ID NO: 219602 - DNA, 33 bp, Homo sapien
gcaagttctgagaagatagtgagttttcaacag

SEQ ID NO: 219603 - DNA, 33 bp, Homo sapien
aatcatttgctcaacaaggttgggtgttttgtg

SEQ ID NO: 219604 - DNA, 33 bp, Homo sapien
aatcatttgctcaacatggttgggtgttttgtg

SEQ ID NO: 219605 - DNA, 33 bp, Homo sapien
gcaattgccataggacacagaattaactgtcac

SEQ ID NO: 219606 - DNA, 33 bp, Homo sapien
gcaattgccataggacccagaattaactgtcac

SEQ ID NO: 219607 - DNA, 33 bp, Homo sapien
gtaaataaaatgttaccggctggacatacatga

SEQ ID NO: 219608 - DNA, 33 bp, Homo sapien
gtaaataaaatgttactggctggacatacatga

SEQ ID NO: 219609 - DNA, 33 bp, Homo sapien
acgcctcttataaaaaacaaatgtgcacaaacc

SEQ ID NO: 219610 - DNA, 33 bp, Homo sapien
acgcctcttataaaaagcaaatgtgcacaaacc

SEQ ID NO: 219611 - DNA, 33 bp, Homo sapien
catggcctatggttgaaaaattaattaaacagt

SEQ ID NO: 219612 - DNA, 33 bp, Homo sapien
catggcctatggttgagaaattaattaaacagt

SEQ ID NO: 219613 - DNA, 33 bp, Homo sapien
ttaactgcccagttaacgtaaatctggtctatg

SEQ ID NO: 219614 - DNA, 33 bp, Homo sapien
ttaactgcccagttaatgtaaatctggtctatg

SEQ ID NO: 219615 - DNA, 33 bp, Homo sapien
gacaacaagcttgtgaatagcaatttttcagca

SEQ ID NO: 219616 - DNA, 33 bp, Homo sapien
gacaacaagcttgtgagtagcaatttttcagca

SEQ ID NO: 219617 - DNA, 33 bp, Homo sapien
ggaggttgtaggtagcaaagatcacgccactgc

SEQ ID NO: 219618 - DNA, 33 bp, Homo sapien
ggaggttgtaggtagccaagatcacgccactgc

SEQ ID NO: 219619 - DNA, 33 bp, Homo sapien
aactttaaagagttaactgatatccataatccc

SEQ ID NO: 219620 - DNA, 33 bp, Homo sapien
aactttaaagagttaattgatatccataatccc

SEQ ID NO: 219621 - DNA, 33 bp, Homo sapien
gagggtaagctgggtagaaattgggagaggaga

SEQ ID NO: 219622 - DNA, 33 bp, Homo sapien
gagggtaagctgggtataaattgggagaggaga

SEQ ID NO: 219623 - DNA, 33 bp, Homo sapien
tagtgttctgtagatcaaacatttttcttccta

SEQ ID NO: 219624 - DNA, 33 bp, Homo sapien
tagtgttctgtagatccaacatttttcttccta

SEQ ID NO: 219625 - DNA, 33 bp, Homo sapien
cttactcaagtcagtacattccaagggcatcat

SEQ ID NO: 219626 - DNA, 33 bp, Homo sapien
cttactcaagtcagtagattccaagggcatcat

SEQ ID NO: 219627 - DNA, 33 bp, Homo sapien
agtaagacagtttgtcactattccagagattgt

SEQ ID NO: 219628 - DNA, 33 bp, Homo sapien
agtaagacagtttgtccctattccagagattgt

SEQ ID NO: 219629 - DNA, 33 bp, Homo sapien
tgtcttccattcaacaactagctctatattctc

SEQ ID NO: 219630 - DNA, 33 bp, Homo sapien
tgtcttccattcaacagctagctctatattctc

SEQ ID NO: 219631 - DNA, 33 bp, Homo sapien
ttcaggaaaatccaagacttacggtcagtaaac

SEQ ID NO: 219632 - DNA, 33 bp, Homo sapien
ttcaggaaaatccaagccttacggtcagtaaac

SEQ ID NO: 219633 - DNA, 33 bp, Homo sapien
taaaaaaatgccttgacggaaagcacatatgca

SEQ ID NO: 219634 - DNA, 33 bp, Homo sapien
taaaaaaatgccttgatggaaagcacatatgca

SEQ ID NO: 219635 - DNA, 33 bp, Homo sapien
acattcaccaacaagagcacttttaagagaaga

SEQ ID NO: 219636 - DNA, 33 bp, Homo sapien
acattcaccaacaagatcacttttaagagaaga

SEQ ID NO: 219637 - DNA, 33 bp, Homo sapien
gtctttttcaatgtgacgtagtttcagagctgc

SEQ ID NO: 219638 - DNA, 33 bp, Homo sapien
gtctttttcaatgtgatgtagtttcagagctgc

SEQ ID NO: 219639 - DNA, 33 bp, Homo sapien
agcatcattagctacaaggttcatcctacattt

SEQ ID NO: 219640 - DNA, 33 bp, Homo sapien
agcatcattagctacagggttcatcctacattt

SEQ ID NO: 219641 - DNA, 33 bp, Homo sapien
acatacactgccaacaatctttgacaaaggcac

SEQ ID NO: 219642 - DNA, 33 bp, Homo sapien
acatacactgccaacagtctttgacaaaggcac

SEQ ID NO: 219643 - DNA, 33 bp, Homo sapien
gaacattggagaggaagtagttacagaattcta

SEQ ID NO: 219644 - DNA, 33 bp, Homo sapien
gaacattggagaggaattagttacagaattcta

SEQ ID NO: 219645 - DNA, 33 bp, Homo sapien
ctttagtctagctgtacgtgccaaaataatttc

SEQ ID NO: 219646 - DNA, 33 bp, Homo sapien
ctttagtctagctgtatgtgccaaaataatttc

SEQ ID NO: 219647 - DNA, 33 bp, Homo sapien
aatcctggcgaagcgactccgatgtggtttgtg

SEQ ID NO: 219648 - DNA, 33 bp, Homo sapien
aatcctggcgaagcgattccgatgtggtttgtg

SEQ ID NO: 219649 - DNA, 33 bp, Homo sapien
aataactacttccttcccagtttcgctatagtc

SEQ ID NO: 219650 - DNA, 33 bp, Homo sapien
aataactacttccttctcagtttcgctatagtc

SEQ ID NO: 219651 - DNA, 33 bp, Homo sapien
ttatcgtgtgctgaaagttaaataatgttgtga

SEQ ID NO: 219652 - DNA, 33 bp, Homo sapien
ttatcgtgtgctgaaatttaaataatgttgtga

SEQ ID NO: 219653 - DNA, 33 bp, Homo sapien
tccagttaatcagtaaagtctgtccatttcacc

SEQ ID NO: 219654 - DNA, 33 bp, Homo sapien
tccagttaatcagtaaggtctgtccatttcacc

SEQ ID NO: 219655 - DNA, 33 bp, Homo sapien
gactcattctccctccaacttaggctattctcc

SEQ ID NO: 219656 - DNA, 33 bp, Homo sapien
gactcattctccctccgacttaggctattctcc

SEQ ID NO: 219657 - DNA, 33 bp, Homo sapien
accattgttatttccacaaagaccacacacttt

SEQ ID NO: 219658 - DNA, 33 bp, Homo sapien
accattgttatttccataaagaccacacacttt

SEQ ID NO: 219659 - DNA, 33 bp, Homo sapien
gggaggaaaccctgtgaaagtcactgctttcag

SEQ ID NO: 219660 - DNA, 33 bp, Homo sapien
gggaggaaaccctgtgtaagtcactgctttcag

SEQ ID NO: 219661 - DNA, 33 bp, Homo sapien
aaaaaggagtagctcacgtattcttttgaaggt

SEQ ID NO: 219662 - DNA, 33 bp, Homo sapien
aaaaaggagtagctcatgtattcttttgaaggt

SEQ ID NO: 219663 - DNA, 33 bp, Homo sapien
agtacagaaaataggaaaccttaggctttgaca

SEQ ID NO: 219664 - DNA, 33 bp, Homo sapien
agtacagaaaataggagaccttaggctttgaca

SEQ ID NO: 219665 - DNA, 33 bp, Homo sapien
tacattccttcaagtcacagaccatgcttcgcc

SEQ ID NO: 219666 - DNA, 33 bp, Homo sapien
tacattccttcaagtcgcagaccatgcttcgcc

SEQ ID NO: 219667 - DNA, 33 bp, Homo sapien
atatgccatatacgcaaagtagcgctcagtaaa

SEQ ID NO: 219668 - DNA, 33 bp, Homo sapien
atatgccatatacgcagagtagcgctcagtaaa

SEQ ID NO: 219669 - DNA, 33 bp, Homo sapien
catggaaagatttgagaaaacagtaaatgtaat

SEQ ID NO: 219670 - DNA, 33 bp, Homo sapien
catggaaagatttgaggaaacagtaaatgtaat

SEQ ID NO: 219671 - DNA, 33 bp, Homo sapien
ctatggagtacctaaaagggcatgggatgagag

SEQ ID NO: 219672 - DNA, 33 bp, Homo sapien
ctatggagtacctaaaggggcatgggatgagag

SEQ ID NO: 219673 - DNA, 33 bp, Homo sapien
gtgttaccaggtataaacacaggagctgaacat

SEQ ID NO: 219674 - DNA, 33 bp, Homo sapien
gtgttaccaggtataaccacaggagctgaacat

SEQ ID NO: 219675 - DNA, 33 bp, Homo sapien
ttgcaggtagtaatcgaccatgcagattcagac

SEQ ID NO: 219676 - DNA, 33 bp, Homo sapien
ttgcaggtagtaatcggccatgcagattcagac

SEQ ID NO: 219677 - DNA, 33 bp, Homo sapien
tcgatgatcctgttgcccctgtcacaaacacat

SEQ ID NO: 219678 - DNA, 33 bp, Homo sapien
tcgatgatcctgttgctcctgtcacaaacacat

SEQ ID NO: 219679 - DNA, 33 bp, Homo sapien
tcttgatcctgtaaccaattgtccacttgtccc

SEQ ID NO: 219680 - DNA, 33 bp, Homo sapien
tcttgatcctgtaaccgattgtccacttgtccc

SEQ ID NO: 219681 - DNA, 33 bp, Homo sapien
tcaagagcaactggataatcagctacagaatta

SEQ ID NO: 219682 - DNA, 33 bp, Homo sapien
tcaagagcaactggattatcagctacagaatta

SEQ ID NO: 219683 - DNA, 33 bp, Homo sapien
tgaaagatgatcaaaaagcgcaataatggctta

SEQ ID NO: 219684 - DNA, 33 bp, Homo sapien
tgaaagatgatcaaaacgcgcaataatggctta

SEQ ID NO: 219685 - DNA, 33 bp, Homo sapien
tctcagtacacatataaccagtggccagtgact

SEQ ID NO: 219686 - DNA, 33 bp, Homo sapien
tctcagtacacatatatccagtggccagtgact

SEQ ID NO: 219687 - DNA, 33 bp, Homo sapien
aaatggcagttccagaaggattcacaatttgac

SEQ ID NO: 219688 - DNA, 33 bp, Homo sapien
aaatggcagttccagagggattcacaatttgac

SEQ ID NO: 219689 - DNA, 33 bp, Homo sapien
acagaattttttttcacaggcaccactatcagt

SEQ ID NO: 219690 - DNA, 33 bp, Homo sapien
acagaattttttttcagaggcaccactatcagt

SEQ ID NO: 219691 - DNA, 33 bp, Homo sapien
tttaggtatcactggaataggctctgagacatc

SEQ ID NO: 219692 - DNA, 33 bp, Homo sapien
tttaggtatcactggagtaggctctgagacatc

SEQ ID NO: 219693 - DNA, 33 bp, Homo sapien
ctgggattgacaacacaggcaagtcaaaaagca

SEQ ID NO: 219694 - DNA, 33 bp, Homo sapien
ctgggattgacaacactggcaagtcaaaaagca

SEQ ID NO: 219695 - DNA, 33 bp, Homo sapien
ggggagtacagggttacgttgccctaggagact

SEQ ID NO: 219696 - DNA, 33 bp, Homo sapien
ggggagtacagggttatgttgccctaggagact

SEQ ID NO: 219697 - DNA, 33 bp, Homo sapien
agcaagtggggacaatcagggttccaagaagac

SEQ ID NO: 219698 - DNA, 33 bp, Homo sapien
agcaagtggggacaatgagggttccaagaagac

SEQ ID NO: 219699 - DNA, 33 bp, Homo sapien
aaggaatttcagaaaccgggccatctaagtcag

SEQ ID NO: 219700 - DNA, 33 bp, Homo sapien
aaggaatttcagaaactgggccatctaagtcag

SEQ ID NO: 219701 - DNA, 33 bp, Homo sapien
tgtaaaattatgtgtcaattaaaaatgtaatta

SEQ ID NO: 219702 - DNA, 33 bp, Homo sapien
tgtaaaattatgtgtcgattaaaaatgtaatta

SEQ ID NO: 219703 - DNA, 33 bp, Homo sapien
ttacctatttcaccgccaggagtagaagacaaa

SEQ ID NO: 219704 - DNA, 33 bp, Homo sapien
ttacctatttcaccgctaggagtagaagacaaa

SEQ ID NO: 219705 - DNA, 33 bp, Homo sapien
tgtgaaaatacagagaaaaagactagacagtca

SEQ ID NO: 219706 - DNA, 33 bp, Homo sapien
tgtgaaaatacagagagaaagactagacagtca

SEQ ID NO: 219707 - DNA, 33 bp, Homo sapien
cagagtatgtcaaccaaggtgcccatgtccaga

SEQ ID NO: 219708 - DNA, 33 bp, Homo sapien
cagagtatgtcaaccacggtgcccatgtccaga

SEQ ID NO: 219709 - DNA, 33 bp, Homo sapien
agctttttactctaagaccttggtgcttttatc

SEQ ID NO: 219710 - DNA, 33 bp, Homo sapien
agctttttactctaaggccttggtgcttttatc

SEQ ID NO: 219711 - DNA, 33 bp, Homo sapien
ctgaattttactcatcaattacctcaggcattt

SEQ ID NO: 219712 - DNA, 33 bp, Homo sapien
ctgaattttactcatctattacctcaggcattt

SEQ ID NO: 219713 - DNA, 33 bp, Homo sapien
ttctcctgcaaaaccacgtataccactgtggtg

SEQ ID NO: 219714 - DNA, 33 bp, Homo sapien
ttctcctgcaaaaccatgtataccactgtggtg

SEQ ID NO: 219715 - DNA, 33 bp, Homo sapien
tacttcacgcacgttcacacagaaaactttctg

SEQ ID NO: 219716 - DNA, 33 bp, Homo sapien
tacttcacgcacgttcgcacagaaaactttctg

SEQ ID NO: 219717 - DNA, 33 bp, Homo sapien
gggctacacaagtatgaataaatgcaccctgtt

SEQ ID NO: 219718 - DNA, 33 bp, Homo sapien
gggctacacaagtatggataaatgcaccctgtt

SEQ ID NO: 219719 - DNA, 33 bp, Homo sapien
attgctttaagtattacactcttcatgtgtaaa

SEQ ID NO: 219720 - DNA, 33 bp, Homo sapien
attgctttaagtattatactcttcatgtgtaaa

SEQ ID NO: 219721 - DNA, 33 bp, Homo sapien
atgtaaacctctaattaaaaaagtggatatagt

SEQ ID NO: 219722 - DNA, 33 bp, Homo sapien
atgtaaacctctaatttaaaaagtggatatagt

SEQ ID NO: 219723 - DNA, 33 bp, Homo sapien
gcctcaaaggaaatttaaaaccacactccatat

SEQ ID NO: 219724 - DNA, 33 bp, Homo sapien
gcctcaaaggaaatttgaaaccacactccatat

SEQ ID NO: 219725 - DNA, 33 bp, Homo sapien
caggacacaaatgttacacagactatgctcttt

SEQ ID NO: 219726 - DNA, 33 bp, Homo sapien
caggacacaaatgttatacagactatgctcttt

SEQ ID NO: 219727 - DNA, 33 bp, Homo sapien
ttcatccgggcatcataaggcctattccctgac

SEQ ID NO: 219728 - DNA, 33 bp, Homo sapien
ttcatccgggcatcatgaggcctattccctgac

SEQ ID NO: 219729 - DNA, 33 bp, Homo sapien
ttttttgaggttgtggaaaagggtgaactagat

SEQ ID NO: 219730 - DNA, 33 bp, Homo sapien
ttttttgaggttgtggcaaagggtgaactagat

SEQ ID NO: 219731 - DNA, 33 bp, Homo sapien
gggcaagtggatgtcaatacatgagataagccc

SEQ ID NO: 219732 - DNA, 33 bp, Homo sapien
gggcaagtggatgtcactacatgagataagccc

SEQ ID NO: 219733 - DNA, 33 bp, Homo sapien
gatgatatgcagactacgctcttctcaaaagga

SEQ ID NO: 219734 - DNA, 33 bp, Homo sapien
gatgatatgcagactatgctcttctcaaaagga

SEQ ID NO: 219735 - DNA, 33 bp, Homo sapien
cagtggtggctcctaacgaaaaggaaaagagag

SEQ ID NO: 219736 - DNA, 33 bp, Homo sapien
cagtggtggctcctaatgaaaaggaaaagagag

SEQ ID NO: 219737 - DNA, 33 bp, Homo sapien
ttgcgagtaatgctgcaatgaaaatgcaaatgc

SEQ ID NO: 219738 - DNA, 33 bp, Homo sapien
ttgcgagtaatgctgcgatgaaaatgcaaatgc

SEQ ID NO: 219739 - DNA, 33 bp, Homo sapien
ggcaccttgtgaattacagacacacaaataact

SEQ ID NO: 219740 - DNA, 33 bp, Homo sapien
ggcaccttgtgaattatagacacacaaataact

SEQ ID NO: 219741 - DNA, 33 bp, Homo sapien
ctaacacatctactaaagctagctcatgcccct

SEQ ID NO: 219742 - DNA, 33 bp, Homo sapien
ctaacacatctactaatgctagctcatgcccct

SEQ ID NO: 219743 - DNA, 33 bp, Homo sapien
gctcctggacctcctaccacaggtaagtcagat

SEQ ID NO: 219744 - DNA, 33 bp, Homo sapien
gctcctggacctcctatcacaggtaagtcagat

SEQ ID NO: 219745 - DNA, 33 bp, Homo sapien
agcaacaggagagaaaaaagatcaattaggcat

SEQ ID NO: 219746 - DNA, 33 bp, Homo sapien
agcaacaggagagaaagaagatcaattaggcat

SEQ ID NO: 219747 - DNA, 33 bp, Homo sapien
cttgttacttagatcaaagcaaggtttacctac

SEQ ID NO: 219748 - DNA, 33 bp, Homo sapien
cttgttacttagatcagagcaaggtttacctac

SEQ ID NO: 219749 - DNA, 33 bp, Homo sapien
tagtattatgttcgacaaaattggtagctcaaa

SEQ ID NO: 219750 - DNA, 33 bp, Homo sapien
tagtattatgttcgaccaaattggtagctcaaa

SEQ ID NO: 219751 - DNA, 33 bp, Homo sapien
cataactcccccactacacaatgttcaagaaat

SEQ ID NO: 219752 - DNA, 33 bp, Homo sapien
cataactcccccactatacaatgttcaagaaat

SEQ ID NO: 219753 - DNA, 33 bp, Homo sapien
attttttccttaagtacgtagctctctcatgac

SEQ ID NO: 219754 - DNA, 33 bp, Homo sapien
attttttccttaagtatgtagctctctcatgac

SEQ ID NO: 219755 - DNA, 33 bp, Homo sapien
gttactagactgtgagaagaaataaaatgtgtc

SEQ ID NO: 219756 - DNA, 33 bp, Homo sapien
gttactagactgtgagcagaaataaaatgtgtc

SEQ ID NO: 219757 - DNA, 33 bp, Homo sapien
ctatcactagcacacacctttttgctaggcaca

SEQ ID NO: 219758 - DNA, 33 bp, Homo sapien
ctatcactagcacacatctttttgctaggcaca

SEQ ID NO: 219759 - DNA, 33 bp, Homo sapien
tgtacaggtaagaaaccgaatagttgatgagag

SEQ ID NO: 219760 - DNA, 33 bp, Homo sapien
tgtacaggtaagaaactgaatagttgatgagag

SEQ ID NO: 219761 - DNA, 33 bp, Homo sapien
tcccatgacctaattacgtcctaaagtctccac

SEQ ID NO: 219762 - DNA, 33 bp, Homo sapien
tcccatgacctaattatgtcctaaagtctccac

SEQ ID NO: 219763 - DNA, 33 bp, Homo sapien
gaacagatttcaattcaaagagtatccagctgt

SEQ ID NO: 219764 - DNA, 33 bp, Homo sapien
gaacagatttcaattcgaagagtatccagctgt

SEQ ID NO: 219765 - DNA, 33 bp, Homo sapien
aaaaattctgaacttcaaaatacatctggtcct

SEQ ID NO: 219766 - DNA, 33 bp, Homo sapien
aaaaattctgaacttcgaaatacatctggtcct

SEQ ID NO: 219767 - DNA, 33 bp, Homo sapien
actttggcgtatatagcaacattgacatatcca

SEQ ID NO: 219768 - DNA, 33 bp, Homo sapien
actttggcgtatatagtaacattgacatatcca

SEQ ID NO: 219769 - DNA, 33 bp, Homo sapien
aacagctaccataagacacattacacttaagtg

SEQ ID NO: 219770 - DNA, 33 bp, Homo sapien
aacagctaccataagatacattacacttaagtg

SEQ ID NO: 219771 - DNA, 33 bp, Homo sapien
ttggatatgacttaaacgcttagcacaatttga

SEQ ID NO: 219772 - DNA, 33 bp, Homo sapien
ttggatatgacttaaatgcttagcacaatttga

SEQ ID NO: 219773 - DNA, 33 bp, Homo sapien
ccaataagctaaagacaaagatgtaaagaaatg

SEQ ID NO: 219774 - DNA, 33 bp, Homo sapien
ccaataagctaaagaccaagatgtaaagaaatg

SEQ ID NO: 219775 - DNA, 33 bp, Homo sapien
ctcctgcagtgatcaacggttgtgtttcaaggc

SEQ ID NO: 219776 - DNA, 33 bp, Homo sapien
ctcctgcagtgatcaatggttgtgtttcaaggc

SEQ ID NO: 219777 - DNA, 33 bp, Homo sapien
ttgctatcccaactcaacagtaagtaatcaaat

SEQ ID NO: 219778 - DNA, 33 bp, Homo sapien
ttgctatcccaactcagcagtaagtaatcaaat

SEQ ID NO: 219779 - DNA, 33 bp, Homo sapien
gcagagatgttcctggaaaaactaattttataa

SEQ ID NO: 219780 - DNA, 33 bp, Homo sapien
gcagagatgttcctggcaaaactaattttataa

SEQ ID NO: 219781 - DNA, 33 bp, Homo sapien
ctaaaatctcagataagactgaacactatatat

SEQ ID NO: 219782 - DNA, 33 bp, Homo sapien
ctaaaatctcagataatactgaacactatatat

SEQ ID NO: 219783 - DNA, 33 bp, Homo sapien
tattccaatttatgaaaacctattgacttcttt

SEQ ID NO: 219784 - DNA, 33 bp, Homo sapien
tattccaatttatgaagacctattgacttcttt

SEQ ID NO: 219785 - DNA, 33 bp, Homo sapien
gtaatttgagttatgaagaagacttttatgttt

SEQ ID NO: 219786 - DNA, 33 bp, Homo sapien
gtaatttgagttatgatgaagacttttatgttt

SEQ ID NO: 219787 - DNA, 33 bp, Homo sapien
atctccaggccaatacaggtctaaagttttctt

SEQ ID NO: 219788 - DNA, 33 bp, Homo sapien
atctccaggccaataccggtctaaagttttctt

SEQ ID NO: 219789 - DNA, 33 bp, Homo sapien
cttggagcttggatgaagagtatgtggagtgaa

SEQ ID NO: 219790 - DNA, 33 bp, Homo sapien
cttggagcttggatgaggagtatgtggagtgaa

SEQ ID NO: 219791 - DNA, 33 bp, Homo sapien
gtgcactcaggtgtgtaaaaattgaacttcctt

SEQ ID NO: 219792 - DNA, 33 bp, Homo sapien
gtgcactcaggtgtgtgaaaattgaacttcctt

SEQ ID NO: 219793 - DNA, 33 bp, Homo sapien
ctaaatgactttgtaaatgccttattcccttta

SEQ ID NO: 219794 - DNA, 33 bp, Homo sapien
ctaaatgactttgtaagtgccttattcccttta

SEQ ID NO: 219795 - DNA, 33 bp, Homo sapien
gatgctaaatccccaagatagtagtttcattgc

SEQ ID NO: 219796 - DNA, 33 bp, Homo sapien
gatgctaaatccccaatatagtagtttcattgc

SEQ ID NO: 219797 - DNA, 33 bp, Homo sapien
taccagggttccacacaatgttatttctaacca

SEQ ID NO: 219798 - DNA, 33 bp, Homo sapien
taccagggttccacaccatgttatttctaacca

SEQ ID NO: 219799 - DNA, 33 bp, Homo sapien
aattcctcaggtttcaacacattgttccattta

SEQ ID NO: 219800 - DNA, 33 bp, Homo sapien
aattcctcaggtttcagcacattgttccattta

SEQ ID NO: 219801 - DNA, 33 bp, Homo sapien
tggaatactatgtagcaatgaaaaaggatgagt

SEQ ID NO: 219802 - DNA, 33 bp, Homo sapien
tggaatactatgtagcgatgaaaaaggatgagt

SEQ ID NO: 219803 - DNA, 33 bp, Homo sapien
aagagcacatgaatgaaacaaatcctcttgcca

SEQ ID NO: 219804 - DNA, 33 bp, Homo sapien
aagagcacatgaatgagacaaatcctcttgcca

SEQ ID NO: 219805 - DNA, 33 bp, Homo sapien
gtccaggatcttaggcaattcccttcatttggg

SEQ ID NO: 219806 - DNA, 33 bp, Homo sapien
gtccaggatcttaggcgattcccttcatttggg

SEQ ID NO: 219807 - DNA, 33 bp, Homo sapien
cctaatgacagtgctgcagtatattgattcaac

SEQ ID NO: 219808 - DNA, 33 bp, Homo sapien
cctaatgacagtgctggagtatattgattcaac

SEQ ID NO: 219809 - DNA, 33 bp, Homo sapien
cccgtagatagaataaacaccaactcatctatg

SEQ ID NO: 219810 - DNA, 33 bp, Homo sapien
cccgtagatagaataaccaccaactcatctatg

SEQ ID NO: 219811 - DNA, 33 bp, Homo sapien
aggaagaaatagctaaggaagaagggcactgag

SEQ ID NO: 219812 - DNA, 33 bp, Homo sapien
aggaagaaatagctaatgaagaagggcactgag

SEQ ID NO: 219813 - DNA, 33 bp, Homo sapien
aacaatgagattctaccaaaagcttttgatcca

SEQ ID NO: 219814 - DNA, 33 bp, Homo sapien
aacaatgagattctactaaaagcttttgatcca

SEQ ID NO: 219815 - DNA, 33 bp, Homo sapien
ttcctccaactagtgactaaacctcagtgaagg

SEQ ID NO: 219816 - DNA, 33 bp, Homo sapien
ttcctccaactagtgattaaacctcagtgaagg

SEQ ID NO: 219817 - DNA, 33 bp, Homo sapien
ccaagtgttcaccatacagtcagtaattgattc

SEQ ID NO: 219818 - DNA, 33 bp, Homo sapien
ccaagtgttcaccatatagtcagtaattgattc

SEQ ID NO: 219819 - DNA, 33 bp, Homo sapien
gaagcactaatgaaaactgaaaacacattatac

SEQ ID NO: 219820 - DNA, 33 bp, Homo sapien
gaagcactaatgaaaattgaaaacacattatac

SEQ ID NO: 219821 - DNA, 33 bp, Homo sapien
gtagataatttttcacgcctgtacttgattttg

SEQ ID NO: 219822 - DNA, 33 bp, Homo sapien
gtagataatttttcactcctgtacttgattttg

SEQ ID NO: 219823 - DNA, 33 bp, Homo sapien
aaatctggacaagtaacatgatcttgctcatag

SEQ ID NO: 219824 - DNA, 33 bp, Homo sapien
aaatctggacaagtaagatgatcttgctcatag

SEQ ID NO: 219825 - DNA, 33 bp, Homo sapien
acaaccagatcggtcaaaagaactcactcactg

SEQ ID NO: 219826 - DNA, 33 bp, Homo sapien
acaaccagatcggtcacaagaactcactcactg

SEQ ID NO: 219827 - DNA, 33 bp, Homo sapien
attctgcagtggattgaaaaattctctgtgaaa

SEQ ID NO: 219828 - DNA, 33 bp, Homo sapien
attctgcagtggattggaaaattctctgtgaaa

SEQ ID NO: 219829 - DNA, 33 bp, Homo sapien
cagttgttcagtgtttaaaaagttttgaaccgt

SEQ ID NO: 219830 - DNA, 33 bp, Homo sapien
cagttgttcagtgttttaaaagttttgaaccgt

SEQ ID NO: 219831 - DNA, 33 bp, Homo sapien
cagagtcttcctctgtaacaaataggctggagt

SEQ ID NO: 219832 - DNA, 33 bp, Homo sapien
cagagtcttcctctgttacaaataggctggagt

SEQ ID NO: 219833 - DNA, 33 bp, Homo sapien
ttctctttggcagggaaaataagttgatgtttt

SEQ ID NO: 219834 - DNA, 33 bp, Homo sapien
ttctctttggcagggagaataagttgatgtttt

SEQ ID NO: 219835 - DNA, 33 bp, Homo sapien
agattcttggtcacatcagtagttccttcaaac

SEQ ID NO: 219836 - DNA, 33 bp, Homo sapien
agattcttggtcacattagtagttccttcaaac

SEQ ID NO: 219837 - DNA, 33 bp, Homo sapien
tgtgtaagtcggtcccagatactaggagaagtt

SEQ ID NO: 219838 - DNA, 33 bp, Homo sapien
tgtgtaagtcggtcccggatactaggagaagtt

SEQ ID NO: 219839 - DNA, 33 bp, Homo sapien
aggttttaaatgtagcaatagtgcttttcattc

SEQ ID NO: 219840 - DNA, 33 bp, Homo sapien
aggttttaaatgtagcgatagtgcttttcattc

SEQ ID NO: 219841 - DNA, 33 bp, Homo sapien
tgacctcagttgcccaatatctatgttcctttt

SEQ ID NO: 219842 - DNA, 33 bp, Homo sapien
tgacctcagttgcccagtatctatgttcctttt

SEQ ID NO: 219843 - DNA, 33 bp, Homo sapien
tttgacaaggtcattaaaatagaccaatccttg

SEQ ID NO: 219844 - DNA, 33 bp, Homo sapien
tttgacaaggtcattacaatagaccaatccttg

SEQ ID NO: 219845 - DNA, 33 bp, Homo sapien
cagtggatattccataagtcacttcatttacta

SEQ ID NO: 219846 - DNA, 33 bp, Homo sapien
cagtggatattccataggtcacttcatttacta

SEQ ID NO: 219847 - DNA, 33 bp, Homo sapien
gataactggaagggggccaggtttccagcttat

SEQ ID NO: 219848 - DNA, 33 bp, Homo sapien
gataactggaagggggtcaggtttccagcttat

SEQ ID NO: 219849 - DNA, 33 bp, Homo sapien
gcaatttcctaatagacaaaaacacctgaacct

SEQ ID NO: 219850 - DNA, 33 bp, Homo sapien
gcaatttcctaatagataaaaacacctgaacct

SEQ ID NO: 219851 - DNA, 33 bp, Homo sapien
tttttaatatgatcaaggagagtatttagaaat

SEQ ID NO: 219852 - DNA, 33 bp, Homo sapien
tttttaatatgatcaatgagagtatttagaaat

SEQ ID NO: 219853 - DNA, 33 bp, Homo sapien
tgagattgcaaatttccctctcatgaataattg

SEQ ID NO: 219854 - DNA, 33 bp, Homo sapien
tgagattgcaaatttctctctcatgaataattg

SEQ ID NO: 219855 - DNA, 33 bp, Homo sapien
tactgcctcaaaagcacatcatgacaagatacc

SEQ ID NO: 219856 - DNA, 33 bp, Homo sapien
tactgcctcaaaagcatatcatgacaagatacc

SEQ ID NO: 219857 - DNA, 33 bp, Homo sapien
ccccaaacaggtgtcactctggagcaaattgca

SEQ ID NO: 219858 - DNA, 33 bp, Homo sapien
ccccaaacaggtgtcattctggagcaaattgca

SEQ ID NO: 219859 - DNA, 33 bp, Homo sapien
ttttaagaagttgctacaattgtacaggatgat

SEQ ID NO: 219860 - DNA, 33 bp, Homo sapien
ttttaagaagttgctataattgtacaggatgat

SEQ ID NO: 219861 - DNA, 33 bp, Homo sapien
ccaaaagcaacatgataaagtgaatatagcaga

SEQ ID NO: 219862 - DNA, 33 bp, Homo sapien
ccaaaagcaacatgatcaagtgaatatagcaga

SEQ ID NO: 219863 - DNA, 33 bp, Homo sapien
ttaccagactaaaatcaaggtattgttaggtta

SEQ ID NO: 219864 - DNA, 33 bp, Homo sapien
ttaccagactaaaatcgaggtattgttaggtta

SEQ ID NO: 219865 - DNA, 33 bp, Homo sapien
ccatagagtctcaagaaagaaatataacctaac

SEQ ID NO: 219866 - DNA, 33 bp, Homo sapien
ccatagagtctcaagagagaaatataacctaac

SEQ ID NO: 219867 - DNA, 33 bp, Homo sapien
agctgagtgcaaccttcaacctagagcagcaca

SEQ ID NO: 219868 - DNA, 33 bp, Homo sapien
agctgagtgcaaccttgaacctagagcagcaca

SEQ ID NO: 219869 - DNA, 33 bp, Homo sapien
tcttgtgtatgtcacaaggctttacttcattag

SEQ ID NO: 219870 - DNA, 33 bp, Homo sapien
tcttgtgtatgtcacagggctttacttcattag

SEQ ID NO: 219871 - DNA, 33 bp, Homo sapien
ctttaaattcagtttaacacttctaatatctaa

SEQ ID NO: 219872 - DNA, 33 bp, Homo sapien
ctttaaattcagtttagcacttctaatatctaa

SEQ ID NO: 219873 - DNA, 33 bp, Homo sapien
caagcttcttctcagaataataactttcatagc

SEQ ID NO: 219874 - DNA, 33 bp, Homo sapien
caagcttcttctcagagtaataactttcatagc

SEQ ID NO: 219875 - DNA, 33 bp, Homo sapien
catctattagttcaaccctctcacagttgtcaa

SEQ ID NO: 219876 - DNA, 33 bp, Homo sapien
catctattagttcaactctctcacagttgtcaa

SEQ ID NO: 219877 - DNA, 33 bp, Homo sapien
cagatcatattcccaccagtcttccttgcagga

SEQ ID NO: 219878 - DNA, 33 bp, Homo sapien
cagatcatattcccactagtcttccttgcagga

SEQ ID NO: 219879 - DNA, 33 bp, Homo sapien
gtgggggaaaatagccaaagatgaggctagtga

SEQ ID NO: 219880 - DNA, 33 bp, Homo sapien
gtgggggaaaatagccgaagatgaggctagtga

SEQ ID NO: 219881 - DNA, 33 bp, Homo sapien
aattcttatccttcaaactttaaagcatgataa

SEQ ID NO: 219882 - DNA, 33 bp, Homo sapien
aattcttatccttcaatctttaaagcatgataa

SEQ ID NO: 219883 - DNA, 33 bp, Homo sapien
ttttgcatcaaaataaagttgtactagcttgtt

SEQ ID NO: 219884 - DNA, 33 bp, Homo sapien
ttttgcatcaaaataatgttgtactagcttgtt

SEQ ID NO: 219885 - DNA, 33 bp, Homo sapien
tggtcactctagtcaacaattttgcatctgacg

SEQ ID NO: 219886 - DNA, 33 bp, Homo sapien
tggtcactctagtcaagaattttgcatctgacg

SEQ ID NO: 219887 - DNA, 33 bp, Homo sapien
cagccaacctgagaaccacacaaggaaggggaa

SEQ ID NO: 219888 - DNA, 33 bp, Homo sapien
cagccaacctgagaacgacacaaggaaggggaa

SEQ ID NO: 219889 - DNA, 33 bp, Homo sapien
gatgctcttgtagtacaaatggtgtatcctagt

SEQ ID NO: 219890 - DNA, 33 bp, Homo sapien
gatgctcttgtagtacgaatggtgtatcctagt

SEQ ID NO: 219891 - DNA, 33 bp, Homo sapien
tgcatcctaccaaagagtctgcattcctgagtt

SEQ ID NO: 219892 - DNA, 33 bp, Homo sapien
tgcatcctaccaaagattctgcattcctgagtt

SEQ ID NO: 219893 - DNA, 33 bp, Homo sapien
tagaatgagctgaatcaataagtggaaattacc

SEQ ID NO: 219894 - DNA, 33 bp, Homo sapien
tagaatgagctgaatcgataagtggaaattacc

SEQ ID NO: 219895 - DNA, 33 bp, Homo sapien
actttagctttgcagaacctggaaggaccaccc

SEQ ID NO: 219896 - DNA, 33 bp, Homo sapien
actttagctttgcagaccctggaaggaccaccc

SEQ ID NO: 219897 - DNA, 33 bp, Homo sapien
aatctcctaatcctgaactgaagagttttagta

SEQ ID NO: 219898 - DNA, 33 bp, Homo sapien
aatctcctaatcctgagctgaagagttttagta

SEQ ID NO: 219899 - DNA, 33 bp, Homo sapien
tttactgaaagtagaacgtagccctcacctatg

SEQ ID NO: 219900 - DNA, 33 bp, Homo sapien
tttactgaaagtagaatgtagccctcacctatg

SEQ ID NO: 219901 - DNA, 33 bp, Homo sapien
tatgtctttcttctgtaaaataagaggaaggta

SEQ ID NO: 219902 - DNA, 33 bp, Homo sapien
tatgtctttcttctgttaaataagaggaaggta

SEQ ID NO: 219903 - DNA, 33 bp, Homo sapien
atttcatgaatttaacactcttttctgaactgg

SEQ ID NO: 219904 - DNA, 33 bp, Homo sapien
atttcatgaatttaaccctcttttctgaactgg

SEQ ID NO: 219905 - DNA, 33 bp, Homo sapien
aggaagatccttgggcaaatatcatggactgca

SEQ ID NO: 219906 - DNA, 33 bp, Homo sapien
aggaagatccttgggcgaatatcatggactgca

SEQ ID NO: 219907 - DNA, 33 bp, Homo sapien
taaaggccatatctgtaaaaacccaaaacataa

SEQ ID NO: 219908 - DNA, 33 bp, Homo sapien
taaaggccatatctgtgaaaacccaaaacataa

SEQ ID NO: 219909 - DNA, 33 bp, Homo sapien
aagttgggtgtcactcaaaaaatgtaaaatact

SEQ ID NO: 219910 - DNA, 33 bp, Homo sapien
aagttgggtgtcactcgaaaaatgtaaaatact

SEQ ID NO: 219911 - DNA, 33 bp, Homo sapien
ttttatgctgaaccaaaaatgttctccttctct

SEQ ID NO: 219912 - DNA, 33 bp, Homo sapien
ttttatgctgaaccaagaatgttctccttctct

SEQ ID NO: 219913 - DNA, 33 bp, Homo sapien
gtgagaagacaggttacgaagttcacagagaca

SEQ ID NO: 219914 - DNA, 33 bp, Homo sapien
gtgagaagacaggttatgaagttcacagagaca

SEQ ID NO: 219915 - DNA, 33 bp, Homo sapien
aaggcaaaagtcataacacaagtaggattgatt

SEQ ID NO: 219916 - DNA, 33 bp, Homo sapien
aaggcaaaagtcataatacaagtaggattgatt

SEQ ID NO: 219917 - DNA, 33 bp, Homo sapien
actataagagaaatgcacttaaatacaataatg

SEQ ID NO: 219918 - DNA, 33 bp, Homo sapien
actataagagaaatgcgcttaaatacaataatg

SEQ ID NO: 219919 - DNA, 33 bp, Homo sapien
aaattatttcctgaaaatgttgtcttagttact

SEQ ID NO: 219920 - DNA, 33 bp, Homo sapien
aaattatttcctgaaactgttgtcttagttact

SEQ ID NO: 219921 - DNA, 33 bp, Homo sapien
gaggatgcaagcaataaaaatgtaagcctggtt

SEQ ID NO: 219922 - DNA, 33 bp, Homo sapien
gaggatgcaagcaatataaatgtaagcctggtt

SEQ ID NO: 219923 - DNA, 33 bp, Homo sapien
ttttggcaattattaactaaggtgctataaaca

SEQ ID NO: 219924 - DNA, 33 bp, Homo sapien
ttttggcaattattaattaaggtgctataaaca

SEQ ID NO: 219925 - DNA, 33 bp, Homo sapien
ttagttagagagccataacaaaggaaaaacaaa

SEQ ID NO: 219926 - DNA, 33 bp, Homo sapien
ttagttagagagccatgacaaaggaaaaacaaa

SEQ ID NO: 219927 - DNA, 33 bp, Homo sapien
ggctattagagtgtaacgatgttgctattcaac

SEQ ID NO: 219928 - DNA, 33 bp, Homo sapien
ggctattagagtgtaaggatgttgctattcaac

SEQ ID NO: 219929 - DNA, 33 bp, Homo sapien
taccctgagagttttaaagacttcctgtgctgt

SEQ ID NO: 219930 - DNA, 33 bp, Homo sapien
taccctgagagttttacagacttcctgtgctgt

SEQ ID NO: 219931 - DNA, 33 bp, Homo sapien
gaacacatatactcccggatttgcaagaatcct

SEQ ID NO: 219932 - DNA, 33 bp, Homo sapien
gaacacatatactccctgatttgcaagaatcct

SEQ ID NO: 219933 - DNA, 33 bp, Homo sapien
ctttcaattcctggaaataaaatagaatagcaa

SEQ ID NO: 219934 - DNA, 33 bp, Homo sapien
ctttcaattcctggaagtaaaatagaatagcaa

SEQ ID NO: 219935 - DNA, 33 bp, Homo sapien
acaaaccacagatagaaattgtgtttttaaaaa

SEQ ID NO: 219936 - DNA, 33 bp, Homo sapien
acaaaccacagatagagattgtgtttttaaaaa

SEQ ID NO: 219937 - DNA, 33 bp, Homo sapien
tagtttaggtagcatacgatgggccagagtggt

SEQ ID NO: 219938 - DNA, 33 bp, Homo sapien
tagtttaggtagcatatgatgggccagagtggt

SEQ ID NO: 219939 - DNA, 33 bp, Homo sapien
cttggctttctcctaacatttgctccacaatag

SEQ ID NO: 219940 - DNA, 33 bp, Homo sapien
cttggctttctcctaatatttgctccacaatag

SEQ ID NO: 219941 - DNA, 33 bp, Homo sapien
tttccccaggctccaactgaactacttcccttt

SEQ ID NO: 219942 - DNA, 33 bp, Homo sapien
tttccccaggctccaattgaactacttcccttt

SEQ ID NO: 219943 - DNA, 33 bp, Homo sapien
aaatggaatgtgaaccagaacaactggagaact

SEQ ID NO: 219944 - DNA, 33 bp, Homo sapien
aaatggaatgtgaaccggaacaactggagaact

SEQ ID NO: 219945 - DNA, 33 bp, Homo sapien
gttattagaaatgaaactgtattgctaaataag

SEQ ID NO: 219946 - DNA, 33 bp, Homo sapien
gttattagaaatgaaattgtattgctaaataag

SEQ ID NO: 219947 - DNA, 33 bp, Homo sapien
ggaaattgggatttgaaaataaataatgctacc

SEQ ID NO: 219948 - DNA, 33 bp, Homo sapien
ggaaattgggatttgataataaataatgctacc

SEQ ID NO: 219949 - DNA, 33 bp, Homo sapien
actaattaagaaccacagggttagctgtcctga

SEQ ID NO: 219950 - DNA, 33 bp, Homo sapien
actaattaagaaccactgggttagctgtcctga

SEQ ID NO: 219951 - DNA, 33 bp, Homo sapien
tccaggcctgctgaatcagtatctctgggtcct

SEQ ID NO: 219952 - DNA, 33 bp, Homo sapien
tccaggcctgctgaattagtatctctgggtcct

SEQ ID NO: 219953 - DNA, 33 bp, Homo sapien
aaataacaaaatttccactaacattatagtcca

SEQ ID NO: 219954 - DNA, 33 bp, Homo sapien
aaataacaaaatttccgctaacattatagtcca

SEQ ID NO: 219955 - DNA, 33 bp, Homo sapien
gtagcttggaaatcaacaacattacaaggaatg

SEQ ID NO: 219956 - DNA, 33 bp, Homo sapien
gtagcttggaaatcaataacattacaaggaatg

SEQ ID NO: 219957 - DNA, 33 bp, Homo sapien
tgagaccaaaaagcagacaaaaaagctttctgt

SEQ ID NO: 219958 - DNA, 33 bp, Homo sapien
tgagaccaaaaagcaggcaaaaaagctttctgt

SEQ ID NO: 219959 - DNA, 33 bp, Homo sapien
gtcatttaatgtaacacataagatgtaaacaaa

SEQ ID NO: 219960 - DNA, 33 bp, Homo sapien
gtcatttaatgtaacatataagatgtaaacaaa

SEQ ID NO: 219961 - DNA, 33 bp, Homo sapien
tcatcagttcttcatacgtttttcagataatga

SEQ ID NO: 219962 - DNA, 33 bp, Homo sapien
tcatcagttcttcatatgtttttcagataatga

SEQ ID NO: 219963 - DNA, 33 bp, Homo sapien
caaccttccacccaaaagatctacaaaagctga

SEQ ID NO: 219964 - DNA, 33 bp, Homo sapien
caaccttccacccaaacgatctacaaaagctga

SEQ ID NO: 219965 - DNA, 33 bp, Homo sapien
actgattcattacccaaattttcatttcaggcc

SEQ ID NO: 219966 - DNA, 33 bp, Homo sapien
actgattcattacccacattttcatttcaggcc

SEQ ID NO: 219967 - DNA, 33 bp, Homo sapien
acccctcaacccctgcaaaactcaagaattata

SEQ ID NO: 219968 - DNA, 33 bp, Homo sapien
acccctcaacccctgccaaactcaagaattata

SEQ ID NO: 219969 - DNA, 33 bp, Homo sapien
aaaacaaacagtttccgatttggtgtgagggag

SEQ ID NO: 219970 - DNA, 33 bp, Homo sapien
aaaacaaacagtttcctatttggtgtgagggag

SEQ ID NO: 219971 - DNA, 33 bp, Homo sapien
gtctatggctagcaaacgatttataactaggta

SEQ ID NO: 219972 - DNA, 33 bp, Homo sapien
gtctatggctagcaaatgatttataactaggta

SEQ ID NO: 219973 - DNA, 33 bp, Homo sapien
aagttaaaaaagatgacctagaccagaaattat

SEQ ID NO: 219974 - DNA, 33 bp, Homo sapien
aagttaaaaaagatgatctagaccagaaattat

SEQ ID NO: 219975 - DNA, 33 bp, Homo sapien
tccaggcataagtgctcaaccagctgaactgat

SEQ ID NO: 219976 - DNA, 33 bp, Homo sapien
tccaggcataagtgcttaaccagctgaactgat

SEQ ID NO: 219977 - DNA, 33 bp, Homo sapien
cctgtggaaggaaccactggaagtcggactgcc

SEQ ID NO: 219978 - DNA, 33 bp, Homo sapien
cctgtggaaggaaccattggaagtcggactgcc

SEQ ID NO: 219979 - DNA, 33 bp, Homo sapien
aatggatcttgggaaagactatgtaacagttgc

SEQ ID NO: 219980 - DNA, 33 bp, Homo sapien
aatggatcttgggaaatactatgtaacagttgc

SEQ ID NO: 219981 - DNA, 33 bp, Homo sapien
ccagtagcctttggataacaccagggatagccc

SEQ ID NO: 219982 - DNA, 33 bp, Homo sapien
ccagtagcctttggatgacaccagggatagccc

SEQ ID NO: 219983 - DNA, 33 bp, Homo sapien
aaaaggagaatttttacgtaggactctagggaa

SEQ ID NO: 219984 - DNA, 33 bp, Homo sapien
aaaaggagaatttttatgtaggactctagggaa

SEQ ID NO: 219985 - DNA, 33 bp, Homo sapien
taagaatcaaatttgcagatcagcacatgaaat

SEQ ID NO: 219986 - DNA, 33 bp, Homo sapien
taagaatcaaatttgcggatcagcacatgaaat

SEQ ID NO: 219987 - DNA, 33 bp, Homo sapien
ataaaccagtttctggaaaacataagcctgttt

SEQ ID NO: 219988 - DNA, 33 bp, Homo sapien
ataaaccagtttctggcaaacataagcctgttt

SEQ ID NO: 219989 - DNA, 33 bp, Homo sapien
tcttataagaacttcacgtgcatatagcaaaac

SEQ ID NO: 219990 - DNA, 33 bp, Homo sapien
tcttataagaacttcatgtgcatatagcaaaac

SEQ ID NO: 219991 - DNA, 33 bp, Homo sapien
tcagtgcaagtcttgaaggaccagttgagcact

SEQ ID NO: 219992 - DNA, 33 bp, Homo sapien
tcagtgcaagtcttgagggaccagttgagcact

SEQ ID NO: 219993 - DNA, 33 bp, Homo sapien
tgtccacaactattagacactatcttcttttta

SEQ ID NO: 219994 - DNA, 33 bp, Homo sapien
tgtccacaactattaggcactatcttcttttta

SEQ ID NO: 219995 - DNA, 33 bp, Homo sapien
tggtcctactttacaacagtttctcaaaaattc

SEQ ID NO: 219996 - DNA, 33 bp, Homo sapien
tggtcctactttacaatagtttctcaaaaattc

SEQ ID NO: 219997 - DNA, 33 bp, Homo sapien
tactaaatgttctgaccgcctctttgtataatt

SEQ ID NO: 219998 - DNA, 33 bp, Homo sapien
tactaaatgttctgactgcctctttgtataatt

SEQ ID NO: 219999 - DNA, 33 bp, Homo sapien
ttcttagcagtatgaacgtggcctaatgcacat

SEQ ID NO: 220000 - DNA, 33 bp, Homo sapien
ttcttagcagtatgaatgtggcctaatgcacat

SEQ ID NO: 220001 - DNA, 33 bp, Homo sapien
ggcagcagcagtctagaaatcaggagaagtttc

SEQ ID NO: 220002 - DNA, 33 bp, Homo sapien
ggcagcagcagtctaggaatcaggagaagtttc

SEQ ID NO: 220003 - DNA, 33 bp, Homo sapien
aatgtttctgggcacaacagattaagtgaggag

SEQ ID NO: 220004 - DNA, 33 bp, Homo sapien
aatgtttctgggcacagcagattaagtgaggag

SEQ ID NO: 220005 - DNA, 33 bp, Homo sapien
caacagtcatgagatacaaatttaccagaatct

SEQ ID NO: 220006 - DNA, 33 bp, Homo sapien
caacagtcatgagatataaatttaccagaatct

SEQ ID NO: 220007 - DNA, 33 bp, Homo sapien
ttttaaaagctacacaacctaatttcaaatact

SEQ ID NO: 220008 - DNA, 33 bp, Homo sapien
ttttaaaagctacacaccctaatttcaaatact

SEQ ID NO: 220009 - DNA, 33 bp, Homo sapien
tttgtttttactgtgagcttcttccatttccct

SEQ ID NO: 220010 - DNA, 33 bp, Homo sapien
tttgtttttactgtgatcttcttccatttccct

SEQ ID NO: 220011 - DNA, 33 bp, Homo sapien
taaaaaggcaaatgacagtaataaatcaacctt

SEQ ID NO: 220012 - DNA, 33 bp, Homo sapien
taaaaaggcaaatgacggtaataaatcaacctt

SEQ ID NO: 220013 - DNA, 33 bp, Homo sapien
gctaccagtcacctaacatgttttcagctacaa

SEQ ID NO: 220014 - DNA, 33 bp, Homo sapien
gctaccagtcacctaatatgttttcagctacaa

SEQ ID NO: 220015 - DNA, 33 bp, Homo sapien
cccaaagatatgtataagagcatccttaacctg

SEQ ID NO: 220016 - DNA, 33 bp, Homo sapien
cccaaagatatgtatacgagcatccttaacctg

SEQ ID NO: 220017 - DNA, 33 bp, Homo sapien
tgctgccagcctccaaactgaattcttatatct

SEQ ID NO: 220018 - DNA, 33 bp, Homo sapien
tgctgccagcctccaacctgaattcttatatct

SEQ ID NO: 220019 - DNA, 33 bp, Homo sapien
gtttgttgttgttttcaataaagacattcctgc

SEQ ID NO: 220020 - DNA, 33 bp, Homo sapien
gtttgttgttgttttcgataaagacattcctgc

SEQ ID NO: 220021 - DNA, 33 bp, Homo sapien
acattgatgaggaacccaaggtcatgctgattc

SEQ ID NO: 220022 - DNA, 33 bp, Homo sapien
acattgatgaggaacctaaggtcatgctgattc

SEQ ID NO: 220023 - DNA, 33 bp, Homo sapien
aaagaacaagttgaacacaggttagcagggaga

SEQ ID NO: 220024 - DNA, 33 bp, Homo sapien
aaagaacaagttgaacgcaggttagcagggaga

SEQ ID NO: 220025 - DNA, 33 bp, Homo sapien
ggtaccaatgacttgacgcttattaatccaatg

SEQ ID NO: 220026 - DNA, 33 bp, Homo sapien
ggtaccaatgacttgatgcttattaatccaatg

SEQ ID NO: 220027 - DNA, 33 bp, Homo sapien
gtcctttgcttctgaccctaagtctagttgctc

SEQ ID NO: 220028 - DNA, 33 bp, Homo sapien
gtcctttgcttctgactctaagtctagttgctc

SEQ ID NO: 220029 - DNA, 33 bp, Homo sapien
gaatgtgggaatggaacgtatttcagtggttcc

SEQ ID NO: 220030 - DNA, 33 bp, Homo sapien
gaatgtgggaatggaatgtatttcagtggttcc

SEQ ID NO: 220031 - DNA, 33 bp, Homo sapien
atctgcaggccctttacagaaaattctctagag

SEQ ID NO: 220032 - DNA, 33 bp, Homo sapien
atctgcaggccctttatagaaaattctctagag

SEQ ID NO: 220033 - DNA, 33 bp, Homo sapien
gcatagtgctgaaagaaggaaggacataagctt

SEQ ID NO: 220034 - DNA, 33 bp, Homo sapien
gcatagtgctgaaagacggaaggacataagctt

SEQ ID NO: 220035 - DNA, 33 bp, Homo sapien
cagattctactgagaaaaaattcaaagttaact

SEQ ID NO: 220036 - DNA, 33 bp, Homo sapien
cagattctactgagaacaaattcaaagttaact

SEQ ID NO: 220037 - DNA, 33 bp, Homo sapien
atttttattattaaagaaaagcagatgtcaaaa

SEQ ID NO: 220038 - DNA, 33 bp, Homo sapien
atttttattattaaagtaaagcagatgtcaaaa

SEQ ID NO: 220039 - DNA, 33 bp, Homo sapien
atgtgtaacaaacacactggtgcaattaaagga

SEQ ID NO: 220040 - DNA, 33 bp, Homo sapien
atgtgtaacaaacacattggtgcaattaaagga

SEQ ID NO: 220041 - DNA, 33 bp, Homo sapien
cttgaccttttagaataatcacaacctaatgca

SEQ ID NO: 220042 - DNA, 33 bp, Homo sapien
cttgaccttttagaatgatcacaacctaatgca

SEQ ID NO: 220043 - DNA, 33 bp, Homo sapien
attcaaaataaaccaccgcttcccgtgattcat

SEQ ID NO: 220044 - DNA, 33 bp, Homo sapien
attcaaaataaaccactgcttcccgtgattcat

SEQ ID NO: 220045 - DNA, 33 bp, Homo sapien
agatccataataatgaggtcttaaccttgacac

SEQ ID NO: 220046 - DNA, 33 bp, Homo sapien
agatccataataatgatgtcttaaccttgacac

SEQ ID NO: 220047 - DNA, 33 bp, Homo sapien
gattgcctcagttgcaaatttttagccctgact

SEQ ID NO: 220048 - DNA, 33 bp, Homo sapien
gattgcctcagttgcagatttttagccctgact

SEQ ID NO: 220049 - DNA, 33 bp, Homo sapien
ttttgtattttaacagaagacgcagttactagt

SEQ ID NO: 220050 - DNA, 33 bp, Homo sapien
ttttgtattttaacaggagacgcagttactagt

SEQ ID NO: 220051 - DNA, 33 bp, Homo sapien
tagtagtgtggaatcaataacatcctagtcttc

SEQ ID NO: 220052 - DNA, 33 bp, Homo sapien
tagtagtgtggaatcagtaacatcctagtcttc

SEQ ID NO: 220053 - DNA, 33 bp, Homo sapien
agagcaatcttactgcacaagggcttatcaagt

SEQ ID NO: 220054 - DNA, 33 bp, Homo sapien
agagcaatcttactgctcaagggcttatcaagt

SEQ ID NO: 220055 - DNA, 33 bp, Homo sapien
caacagtatatgaagacagcatttcattaaaac

SEQ ID NO: 220056 - DNA, 33 bp, Homo sapien
caacagtatatgaagagagcatttcattaaaac

SEQ ID NO: 220057 - DNA, 33 bp, Homo sapien
accttctctgaaatcacacatttggaattctca

SEQ ID NO: 220058 - DNA, 33 bp, Homo sapien
accttctctgaaatcatacatttggaattctca

SEQ ID NO: 220059 - DNA, 33 bp, Homo sapien
tgaagagcaactgagaaaagaaaacgttgtcct

SEQ ID NO: 220060 - DNA, 33 bp, Homo sapien
tgaagagcaactgagagaagaaaacgttgtcct

SEQ ID NO: 220061 - DNA, 33 bp, Homo sapien
ggctgccctgttgatcacttgcgccttctccct

SEQ ID NO: 220062 - DNA, 33 bp, Homo sapien
ggctgccctgttgatcgcttgcgccttctccct

SEQ ID NO: 220063 - DNA, 33 bp, Homo sapien
ataaaaatcagccaacaatagccattattatcc

SEQ ID NO: 220064 - DNA, 33 bp, Homo sapien
ataaaaatcagccaacgatagccattattatcc

SEQ ID NO: 220065 - DNA, 33 bp, Homo sapien
ggtttctgttatactaagttctgcgacagatac

SEQ ID NO: 220066 - DNA, 33 bp, Homo sapien
ggtttctgttatactaggttctgcgacagatac

SEQ ID NO: 220067 - DNA, 33 bp, Homo sapien
tgttgtttgcagaagacccatagggcagagagg

SEQ ID NO: 220068 - DNA, 33 bp, Homo sapien
tgttgtttgcagaagatccatagggcagagagg

SEQ ID NO: 220069 - DNA, 33 bp, Homo sapien
tttcccaatgctagtagatttccagttatcctg

SEQ ID NO: 220070 - DNA, 33 bp, Homo sapien
tttcccaatgctagtatatttccagttatcctg

SEQ ID NO: 220071 - DNA, 33 bp, Homo sapien
atgaaaggggagaataccgttccagatcttggc

SEQ ID NO: 220072 - DNA, 33 bp, Homo sapien
atgaaaggggagaatatcgttccagatcttggc

SEQ ID NO: 220073 - DNA, 33 bp, Homo sapien
gacagtttcattttaacaagtggtgattgtggc

SEQ ID NO: 220074 - DNA, 33 bp, Homo sapien
gacagtttcattttaataagtggtgattgtggc

SEQ ID NO: 220075 - DNA, 33 bp, Homo sapien
tatttattgtctgtcaataggtacaagacccag

SEQ ID NO: 220076 - DNA, 33 bp, Homo sapien
tatttattgtctgtcactaggtacaagacccag

SEQ ID NO: 220077 - DNA, 33 bp, Homo sapien
ctctgtctgcatgagtcaccattcttgatgact

SEQ ID NO: 220078 - DNA, 33 bp, Homo sapien
ctctgtctgcatgagttaccattcttgatgact

SEQ ID NO: 220079 - DNA, 33 bp, Homo sapien
tcagttatattatccacattttcagtctgaaag

SEQ ID NO: 220080 - DNA, 33 bp, Homo sapien
tcagttatattatccatattttcagtctgaaag

SEQ ID NO: 220081 - DNA, 33 bp, Homo sapien
tcagtagttaaaaataagaagcgattgaaaatc

SEQ ID NO: 220082 - DNA, 33 bp, Homo sapien
tcagtagttaaaaataggaagcgattgaaaatc

SEQ ID NO: 220083 - DNA, 33 bp, Homo sapien
attttgattatcttctcaaaactgatcctaaga

SEQ ID NO: 220084 - DNA, 33 bp, Homo sapien
attttgattatcttctgaaaactgatcctaaga

SEQ ID NO: 220085 - DNA, 33 bp, Homo sapien
tatatttttataccaactctttgaaatctagca

SEQ ID NO: 220086 - DNA, 33 bp, Homo sapien
tatatttttataccaagtctttgaaatctagca

SEQ ID NO: 220087 - DNA, 33 bp, Homo sapien
tgattttcaaaccttacatatggtgaaattaaa

SEQ ID NO: 220088 - DNA, 33 bp, Homo sapien
tgattttcaaaccttagatatggtgaaattaaa

SEQ ID NO: 220089 - DNA, 33 bp, Homo sapien
aagctataatacccaacaactagcagcggatgc

SEQ ID NO: 220090 - DNA, 33 bp, Homo sapien
aagctataatacccaataactagcagcggatgc

SEQ ID NO: 220091 - DNA, 33 bp, Homo sapien
atgttcttccatggctaaaactaactttaatac

SEQ ID NO: 220092 - DNA, 33 bp, Homo sapien
atgttcttccatggctgaaactaactttaatac

SEQ ID NO: 220093 - DNA, 33 bp, Homo sapien
ctaagctgatactttccatatgttgatgcacta

SEQ ID NO: 220094 - DNA, 33 bp, Homo sapien
ctaagctgatactttctatatgttgatgcacta

SEQ ID NO: 220095 - DNA, 33 bp, Homo sapien
ttttattgtatactacagagtgtttgcatatct

SEQ ID NO: 220096 - DNA, 33 bp, Homo sapien
ttttattgtatactacggagtgtttgcatatct

SEQ ID NO: 220097 - DNA, 33 bp, Homo sapien
ttcccactactgagcaaaagtccacaaagtaat

SEQ ID NO: 220098 - DNA, 33 bp, Homo sapien
ttcccactactgagcagaagtccacaaagtaat

SEQ ID NO: 220099 - DNA, 33 bp, Homo sapien
ccttaatttgcatatacatacataaacctagaa

SEQ ID NO: 220100 - DNA, 33 bp, Homo sapien
ccttaatttgcatatagatacataaacctagaa

SEQ ID NO: 220101 - DNA, 33 bp, Homo sapien
tgataagttttcgtgacaataaaggaatggctc

SEQ ID NO: 220102 - DNA, 33 bp, Homo sapien
tgataagttttcgtgagaataaaggaatggctc

SEQ ID NO: 220103 - DNA, 33 bp, Homo sapien
catggatattgacagaaaagctactgggttcag

SEQ ID NO: 220104 - DNA, 33 bp, Homo sapien
catggatattgacagagaagctactgggttcag

SEQ ID NO: 220105 - DNA, 33 bp, Homo sapien
cagggtagaaacagcaatcaatacctccctacc

SEQ ID NO: 220106 - DNA, 33 bp, Homo sapien
cagggtagaaacagcagtcaatacctccctacc

SEQ ID NO: 220107 - DNA, 33 bp, Homo sapien
aacacataagaaatgcatactgattgcctgttt

SEQ ID NO: 220108 - DNA, 33 bp, Homo sapien
aacacataagaaatgcttactgattgcctgttt

SEQ ID NO: 220109 - DNA, 33 bp, Homo sapien
agtgcctaattaacaaacatttcttccattcta

SEQ ID NO: 220110 - DNA, 33 bp, Homo sapien
agtgcctaattaacaagcatttcttccattcta

SEQ ID NO: 220111 - DNA, 33 bp, Homo sapien
tctaggattaactaataaaaccatcaacccatt

SEQ ID NO: 220112 - DNA, 33 bp, Homo sapien
tctaggattaactaatgaaaccatcaacccatt

SEQ ID NO: 220113 - DNA, 33 bp, Homo sapien
tgctcatataggaggaaattctgcaaacaatgg

SEQ ID NO: 220114 - DNA, 33 bp, Homo sapien
tgctcatataggaggacattctgcaaacaatgg

SEQ ID NO: 220115 - DNA, 33 bp, Homo sapien
ggatggcattacctaacggatactttatgaaga

SEQ ID NO: 220116 - DNA, 33 bp, Homo sapien
ggatggcattacctaagggatactttatgaaga

SEQ ID NO: 220117 - DNA, 33 bp, Homo sapien
attaacatcagtgttacgtaggataaataattt

SEQ ID NO: 220118 - DNA, 33 bp, Homo sapien
attaacatcagtgttatgtaggataaataattt

SEQ ID NO: 220119 - DNA, 33 bp, Homo sapien
ttgagtttgagtagacacaacaaatatataatt

SEQ ID NO: 220120 - DNA, 33 bp, Homo sapien
ttgagtttgagtagacgcaacaaatatataatt

SEQ ID NO: 220121 - DNA, 33 bp, Homo sapien
aacaaagttcagaaaactgtttaatgataccac

SEQ ID NO: 220122 - DNA, 33 bp, Homo sapien
aacaaagttcagaaaattgtttaatgataccac

SEQ ID NO: 220123 - DNA, 33 bp, Homo sapien
aacctttatttggcaaactaggacttactgcac

SEQ ID NO: 220124 - DNA, 33 bp, Homo sapien
aacctttatttggcaagctaggacttactgcac

SEQ ID NO: 220125 - DNA, 33 bp, Homo sapien
agggtgttgtgttgacagatagcaagtagctac

SEQ ID NO: 220126 - DNA, 33 bp, Homo sapien
agggtgttgtgttgacggatagcaagtagctac

SEQ ID NO: 220127 - DNA, 33 bp, Homo sapien
agctcttctctgaaacccttgctgatctattgc

SEQ ID NO: 220128 - DNA, 33 bp, Homo sapien
agctcttctctgaaacgcttgctgatctattgc

SEQ ID NO: 220129 - DNA, 33 bp, Homo sapien
ggaccccttctgtacaacacttacaaaaattaa

SEQ ID NO: 220130 - DNA, 33 bp, Homo sapien
ggaccccttctgtacaccacttacaaaaattaa

SEQ ID NO: 220131 - DNA, 33 bp, Homo sapien
gatttaactaatttacaccaacaccgtcagtgt

SEQ ID NO: 220132 - DNA, 33 bp, Homo sapien
gatttaactaatttactccaacaccgtcagtgt

SEQ ID NO: 220133 - DNA, 33 bp, Homo sapien
gaggaatcgcaagagccaaattttgaagcattt

SEQ ID NO: 220134 - DNA, 33 bp, Homo sapien
gaggaatcgcaagagcgaaattttgaagcattt

SEQ ID NO: 220135 - DNA, 33 bp, Homo sapien
aaaagatgatctgcaaatgtaagcaagtagagc

SEQ ID NO: 220136 - DNA, 33 bp, Homo sapien
aaaagatgatctgcaagtgtaagcaagtagagc

SEQ ID NO: 220137 - DNA, 33 bp, Homo sapien
caaaaacattaacgcaaatatctcaggctgcat

SEQ ID NO: 220138 - DNA, 33 bp, Homo sapien
caaaaacattaacgcagatatctcaggctgcat

SEQ ID NO: 220139 - DNA, 33 bp, Homo sapien
cacaaggcaaagtagcccagatagtggaggaaa

SEQ ID NO: 220140 - DNA, 33 bp, Homo sapien
cacaaggcaaagtagctcagatagtggaggaaa

SEQ ID NO: 220141 - DNA, 33 bp, Homo sapien
agtgtcctgcaatagaccgaatataagtatcct

SEQ ID NO: 220142 - DNA, 33 bp, Homo sapien
agtgtcctgcaatagatcgaatataagtatcct

SEQ ID NO: 220143 - DNA, 33 bp, Homo sapien
aacaacaatagcaaacactaaaatgcagtagta

SEQ ID NO: 220144 - DNA, 33 bp, Homo sapien
aacaacaatagcaaacgctaaaatgcagtagta

SEQ ID NO: 220145 - DNA, 33 bp, Homo sapien
tgctctcatattcttgaaaccagcacctgagtt

SEQ ID NO: 220146 - DNA, 33 bp, Homo sapien
tgctctcatattcttgcaaccagcacctgagtt

SEQ ID NO: 220147 - DNA, 33 bp, Homo sapien
aatgtactagaaatacacagttggttcttgtgg

SEQ ID NO: 220148 - DNA, 33 bp, Homo sapien
aatgtactagaaatacgcagttggttcttgtgg

SEQ ID NO: 220149 - DNA, 33 bp, Homo sapien
ggcatatgaaatgcaaatctaaaaatcacaaaa

SEQ ID NO: 220150 - DNA, 33 bp, Homo sapien
ggcatatgaaatgcaattctaaaaatcacaaaa

SEQ ID NO: 220151 - DNA, 33 bp, Homo sapien
tttaggaggaaaagtcaatggaaatttattata

SEQ ID NO: 220152 - DNA, 33 bp, Homo sapien
tttaggaggaaaagtcgatggaaatttattata

SEQ ID NO: 220153 - DNA, 33 bp, Homo sapien
tagttaaatgaatttacgattaaagcagaaaaa

SEQ ID NO: 220154 - DNA, 33 bp, Homo sapien
tagttaaatgaatttatgattaaagcagaaaaa

SEQ ID NO: 220155 - DNA, 33 bp, Homo sapien
acagagcatatcagaaagtaagagccatgtaaa

SEQ ID NO: 220156 - DNA, 33 bp, Homo sapien
acagagcatatcagaaggtaagagccatgtaaa

SEQ ID NO: 220157 - DNA, 33 bp, Homo sapien; identical to SEQ ID NO: 220155

SEQ ID NO: 220158 - DNA, 33 bp, Homo sapien; identical to SEQ ID NO: 220156

SEQ ID NO: 220159 - DNA, 33 bp, Homo sapien
tttatgcattggtgtgaaaattctgtacaggaa

SEQ ID NO: 220160 - DNA, 33 bp, Homo sapien
tttatgcattggtgtggaaattctgtacaggaa

SEQ ID NO: 220161 - DNA, 33 bp, Homo sapien
ggtggtataatagggaataaccagatcatcctt

SEQ ID NO: 220162 - DNA, 33 bp, Homo sapien
ggtggtataatagggagtaaccagatcatcctt

SEQ ID NO: 220163 - DNA, 33 bp, Homo sapien
aaagtggtctagtaaaactcagtacaaactttc

SEQ ID NO: 220164 - DNA, 33 bp, Homo sapien
aaagtggtctagtaaagctcagtacaaactttc

SEQ ID NO: 220165 - DNA, 33 bp, Homo sapien
gatcaaggaagaaggaacctttaaactggacaa

SEQ ID NO: 220166 - DNA, 33 bp, Homo sapien
gatcaaggaagaaggagcctttaaactggacaa

SEQ ID NO: 220167 - DNA, 33 bp, Homo sapien
aggtaacatctggagcacaggtagggagatgta

SEQ ID NO: 220168 - DNA, 33 bp, Homo sapien
aggtaacatctggagcgcaggtagggagatgta

SEQ ID NO: 220169 - DNA, 33 bp, Homo sapien
acattagctgataaaacatatttagctgtgaca

SEQ ID NO: 220170 - DNA, 33 bp, Homo sapien
acattagctgataaaagatatttagctgtgaca

SEQ ID NO: 220171 - DNA, 33 bp, Homo sapien
tggttactctttaggaagggacaccagaaagtt

SEQ ID NO: 220172 - DNA, 33 bp, Homo sapien
tggttactctttaggatgggacaccagaaagtt

SEQ ID NO: 220173 - DNA, 33 bp, Homo sapien
tttaataacaataaaaagtcattactctatatt

SEQ ID NO: 220174 - DNA, 33 bp, Homo sapien
tttaataacaataaaaggtcattactctatatt

SEQ ID NO: 220175 - DNA, 33 bp, Homo sapien
agagctccaataagaaccagttttgataattaa

SEQ ID NO: 220176 - DNA, 33 bp, Homo sapien
agagctccaataagaagcagttttgataattaa

SEQ ID NO: 220177 - DNA, 33 bp, Homo sapien
aacattttcattgatacaagggtgagccatctt

SEQ ID NO: 220178 - DNA, 33 bp, Homo sapien
aacattttcattgatagaagggtgagccatctt

SEQ ID NO: 220179 - DNA, 33 bp, Homo sapien
cagcacatctttaaaccggacaggatagcaggt

SEQ ID NO: 220180 - DNA, 33 bp, Homo sapien
cagcacatctttaaactggacaggatagcaggt

SEQ ID NO: 220181 - DNA, 33 bp, Homo sapien
aagaaacctagaagccactcaagagggccttta

SEQ ID NO: 220182 - DNA, 33 bp, Homo sapien
aagaaacctagaagccgctcaagagggccttta

SEQ ID NO: 220183 - DNA, 33 bp, Homo sapien
tatcaactactcagcagatgtcttaaactctag

SEQ ID NO: 220184 - DNA, 33 bp, Homo sapien
tatcaactactcagcatatgtcttaaactctag

SEQ ID NO: 220185 - DNA, 33 bp, Homo sapien
gggacctcttttgagtaactacctagtgattta

SEQ ID NO: 220186 - DNA, 33 bp, Homo sapien
gggacctcttttgagtgactacctagtgattta

SEQ ID NO: 220187 - DNA, 33 bp, Homo sapien
ttgatgactttggaaacgttgcatttagatata

SEQ ID NO: 220188 - DNA, 33 bp, Homo sapien
ttgatgactttggaaatgttgcatttagatata

SEQ ID NO: 220189 - DNA, 33 bp, Homo sapien
aagcagagagtctgaacctgggaaatctagaag

SEQ ID NO: 220190 - DNA, 33 bp, Homo sapien
aagcagagagtctgaatctgggaaatctagaag

SEQ ID NO: 220191 - DNA, 33 bp, Homo sapien
atcattttgccttgcaataaacatcaattaaat

SEQ ID NO: 220192 - DNA, 33 bp, Homo sapien
atcattttgccttgcagtaaacatcaattaaat

SEQ ID NO: 220193 - DNA, 33 bp, Homo sapien
tagatgtgtgaagcaactacaagtgaaatctct

SEQ ID NO: 220194 - DNA, 33 bp, Homo sapien
tagatgtgtgaagcaattacaagtgaaatctct

SEQ ID NO: 220195 - DNA, 33 bp, Homo sapien
atttttactagcaacaaccaaaatgttaaagta

SEQ ID NO: 220196 - DNA, 33 bp, Homo sapien
atttttactagcaacagccaaaatgttaaagta

SEQ ID NO: 220197 - DNA, 33 bp, Homo sapien
aagcaggatccatgataaatttagtcctaatta

SEQ ID NO: 220198 - DNA, 33 bp, Homo sapien
aagcaggatccatgatgaatttagtcctaatta

SEQ ID NO: 220199 - DNA, 33 bp, Homo sapien
caccaatatttcatgaacattatacagacttaa

SEQ ID NO: 220200 - DNA, 33 bp, Homo sapien
caccaatatttcatgagcattatacagacttaa

SEQ ID NO: 220201 - DNA, 33 bp, Homo sapien
taaagagtaattaataagtgagatagagtagga

SEQ ID NO: 220202 - DNA, 33 bp, Homo sapien
taaagagtaattaatatgtgagatagagtagga

SEQ ID NO: 220203 - DNA, 33 bp, Homo sapien
ctgtgcccttctcccccactcttccaaataaag

SEQ ID NO: 220204 - DNA, 33 bp, Homo sapien
ctgtgcccttctcccctactcttccaaataaag

SEQ ID NO: 220205 - DNA, 33 bp, Homo sapien
gaaagtgatttaagccacctgcttctcctagga

SEQ ID NO: 220206 - DNA, 33 bp, Homo sapien
gaaagtgatttaagcctcctgcttctcctagga

SEQ ID NO: 220207 - DNA, 33 bp, Homo sapien
tttttccagttattaccaacctagccaattggg

SEQ ID NO: 220208 - DNA, 33 bp, Homo sapien
tttttccagttattacgaacctagccaattggg

SEQ ID NO: 220209 - DNA, 33 bp, Homo sapien
gcagaaatacaagctgaagaggttgaattttaa

SEQ ID NO: 220210 - DNA, 33 bp, Homo sapien
gcagaaatacaagctgtagaggttgaattttaa

SEQ ID NO: 220211 - DNA, 33 bp, Homo sapien
atatcaatggcacaaaccttttcagttgtacac

SEQ ID NO: 220212 - DNA, 33 bp, Homo sapien
atatcaatggcacaaatcttttcagttgtacac

SEQ ID NO: 220213 - DNA, 33 bp, Homo sapien
agatcttcactaaactcagggtacatcctgaag

SEQ ID NO: 220214 - DNA, 33 bp, Homo sapien
agatcttcactaaactgagggtacatcctgaag

SEQ ID NO: 220215 - DNA, 33 bp, Homo sapien
aaaaatgagcaattaaacttcttcaccagcaaa

SEQ ID NO: 220216 - DNA, 33 bp, Homo sapien
aaaaatgagcaattaagcttcttcaccagcaaa

SEQ ID NO: 220217 - DNA, 33 bp, Homo sapien
acattttccctagcaaacttgtgggaggcaaaa

SEQ ID NO: 220218 - DNA, 33 bp, Homo sapien
acattttccctagcaaccttgtgggaggcaaaa

SEQ ID NO: 220219 - DNA, 33 bp, Homo sapien
ccttgtctttcggatagtaagaagggagccctg

SEQ ID NO: 220220 - DNA, 33 bp, Homo sapien
ccttgtctttcggatattaagaagggagccctg

SEQ ID NO: 220221 - DNA, 33 bp, Homo sapien
gctatctccaatttttcaaaaagatccacactg

SEQ ID NO: 220222 - DNA, 33 bp, Homo sapien
gctatctccaatttttgaaaaagatccacactg

SEQ ID NO: 220223 - DNA, 33 bp, Homo sapien
ctgtaactgaaccacaacctcttttttgaccaa

SEQ ID NO: 220224 - DNA, 33 bp, Homo sapien
ctgtaactgaaccacatcctcttttttgaccaa

SEQ ID NO: 220225 - DNA, 33 bp, Homo sapien
acaaccaggcaatcaaagaagtagaaagaagac

SEQ ID NO: 220226 - DNA, 33 bp, Homo sapien
acaaccaggcaatcaaggaagtagaaagaagac

SEQ ID NO: 220227 - DNA, 33 bp, Homo sapien
acaaaaatggcattagaattaaaactcctgact

SEQ ID NO: 220228 - DNA, 33 bp, Homo sapien
acaaaaatggcattaggattaaaactcctgact

SEQ ID NO: 220229 - DNA, 33 bp, Homo sapien
aagagtttgaaagccaatgatggaagaaacatg

SEQ ID NO: 220230 - DNA, 33 bp, Homo sapien
aagagtttgaaagccagtgatggaagaaacatg

SEQ ID NO: 220231 - DNA, 33 bp, Homo sapien
aataatccattaaaaaaatcaccttcataagtg

SEQ ID NO: 220232 - DNA, 33 bp, Homo sapien
aataatccattaaaaacatcaccttcataagtg

SEQ ID NO: 220233 - DNA, 33 bp, Homo sapien
gtaaaatatcaaaaaaatttaacactgtgtatt

SEQ ID NO: 220234 - DNA, 33 bp, Homo sapien
gtaaaatatcaaaaaagtttaacactgtgtatt

SEQ ID NO: 220235 - DNA, 33 bp, Homo sapien
caagagcaaatggaaaagtgaaggcactgacaa

SEQ ID NO: 220236 - DNA, 33 bp, Homo sapien
caagagcaaatggaaaggtgaaggcactgacaa

SEQ ID NO: 220237 - DNA, 33 bp, Homo sapien
ctataaaagcctaagaccctagcaagcagacac

SEQ ID NO: 220238 - DNA, 33 bp, Homo sapien
ctataaaagcctaagatcctagcaagcagacac

SEQ ID NO: 220239 - DNA, 33 bp, Homo sapien
ctaaaggaaactttagaagatgtacatggatgg

SEQ ID NO: 220240 - DNA, 33 bp, Homo sapien
ctaaaggaaactttaggagatgtacatggatgg

SEQ ID NO: 220241 - DNA, 33 bp, Homo sapien
aatgaagctgggaacccgacggctatactctta

SEQ ID NO: 220242 - DNA, 33 bp, Homo sapien
aatgaagctgggaacctgacggctatactctta

SEQ ID NO: 220243 - DNA, 33 bp, Homo sapien
catgtagctactaaaccagaatgaagaatagat

SEQ ID NO: 220244 - DNA, 33 bp, Homo sapien
catgtagctactaaacgagaatgaagaatagat

SEQ ID NO: 220245 - DNA, 33 bp, Homo sapien
aaaggcccaaggaaaacgcaattgatataattg

SEQ ID NO: 220246 - DNA, 33 bp, Homo sapien
aaaggcccaaggaaaatgcaattgatataattg

SEQ ID NO: 220247 - DNA, 33 bp, Homo sapien
cccttccccttctcaccgtcaataattccctca

SEQ ID NO: 220248 - DNA, 33 bp, Homo sapien
cccttccccttctcactgtcaataattccctca

SEQ ID NO: 220249 - DNA, 33 bp, Homo sapien
gcctttattaatatgcactaaagcctgatgggg

SEQ ID NO: 220250 - DNA, 33 bp, Homo sapien
gcctttattaatatgcgctaaagcctgatgggg

SEQ ID NO: 220251 - DNA, 33 bp, Homo sapien
tgtaaaaccataggtacgtagtctttcctcttt

SEQ ID NO: 220252 - DNA, 33 bp, Homo sapien
tgtaaaaccataggtaggtagtctttcctcttt

SEQ ID NO: 220253 - DNA, 33 bp, Homo sapien
ctttctccagtgcctacaacaggatatttcagt

SEQ ID NO: 220254 - DNA, 33 bp, Homo sapien
ctttctccagtgcctagaacaggatatttcagt

SEQ ID NO: 220255 - DNA, 33 bp, Homo sapien
tgatgaagaagacaccagcatttatgtcagcga

SEQ ID NO: 220256 - DNA, 33 bp, Homo sapien
tgatgaagaagacaccggcatttatgtcagcga

SEQ ID NO: 220257 - DNA, 33 bp, Homo sapien
cttatgggcccattgacgtatctacagtccatt

SEQ ID NO: 220258 - DNA, 33 bp, Homo sapien
cttatgggcccattgatgtatctacagtccatt

SEQ ID NO: 220259 - DNA, 33 bp, Homo sapien
gtgactctgagcatcaaaagattacattatttt

SEQ ID NO: 220260 - DNA, 33 bp, Homo sapien
gtgactctgagcatcagaagattacattatttt

SEQ ID NO: 220261 - DNA, 33 bp, Homo sapien
cttagggatattgtggccaggtaagtttttaga

SEQ ID NO: 220262 - DNA, 33 bp, Homo sapien
cttagggatattgtgggcaggtaagtttttaga

SEQ ID NO: 220263 - DNA, 33 bp, Homo sapien
tacttcttatccttaaagtttcttggatgactt

SEQ ID NO: 220264 - DNA, 33 bp, Homo sapien
tacttcttatccttaaggtttcttggatgactt

SEQ ID NO: 220265 - DNA, 33 bp, Homo sapien
gtggcatctcagaaaaaggaacaacctacactg

SEQ ID NO: 220266 - DNA, 33 bp, Homo sapien
gtggcatctcagaaaagggaacaacctacactg

SEQ ID NO: 220267 - DNA, 33 bp, Homo sapien
tatatggtgtagtataaagacattgccatatta

SEQ ID NO: 220268 - DNA, 33 bp, Homo sapien
tatatggtgtagtatacagacattgccatatta

SEQ ID NO: 220269 - DNA, 33 bp, Homo sapien
ggtgaaagtaactttaccatattcacagagaaa

SEQ ID NO: 220270 - DNA, 33 bp, Homo sapien
ggtgaaagtaactttatcatattcacagagaaa

SEQ ID NO: 220271 - DNA, 33 bp, Homo sapien
gtcatacagtggtcaccgacaagaaggcattat

SEQ ID NO: 220272 - DNA, 33 bp, Homo sapien
gtcatacagtggtcactgacaagaaggcattat

SEQ ID NO: 220273 - DNA, 33 bp, Homo sapien
ctccttaacagcctaaacatttccactcaggtt

SEQ ID NO: 220274 - DNA, 33 bp, Homo sapien
ctccttaacagcctaatcatttccactcaggtt

SEQ ID NO: 220275 - DNA, 33 bp, Homo sapien
acgaatatgtggaggacagagataaatgcataa

SEQ ID NO: 220276 - DNA, 33 bp, Homo sapien
acgaatatgtggaggagagagataaatgcataa

SEQ ID NO: 220277 - DNA, 33 bp, Homo sapien
tagacaggcattcttacgtgattcaaaagttaa

SEQ ID NO: 220278 - DNA, 33 bp, Homo sapien
tagacaggcattcttatgtgattcaaaagttaa

SEQ ID NO: 220279 - DNA, 33 bp, Homo sapien
caagccatggtttcaaaatttcagtaaacagta

SEQ ID NO: 220280 - DNA, 33 bp, Homo sapien
caagccatggtttcaacatttcagtaaacagta

SEQ ID NO: 220281 - DNA, 33 bp, Homo sapien
gatctgagtaaatgacagtaccacaagcagaat

SEQ ID NO: 220282 - DNA, 33 bp, Homo sapien
gatctgagtaaatgacggtaccacaagcagaat

SEQ ID NO: 220283 - DNA, 33 bp, Homo sapien
actcactcaataggtgccaatgaaaagagaatg

SEQ ID NO: 220284 - DNA, 33 bp, Homo sapien
actcactcaataggtgtcaatgaaaagagaatg

SEQ ID NO: 220285 - DNA, 33 bp, Homo sapien
agcttagcttgtccagcatagacacactctcag

SEQ ID NO: 220286 - DNA, 33 bp, Homo sapien
agcttagcttgtccaggatagacacactctcag

SEQ ID NO: 220287 - DNA, 33 bp, Homo sapien
agaaatttcattacgagtcattaccaaaaaagc

SEQ ID NO: 220288 - DNA, 33 bp, Homo sapien
agaaatttcattacgattcattaccaaaaaagc

SEQ ID NO: 220289 - DNA, 33 bp, Homo sapien
atagaaacattacaaccgttctgctttgttgtt

SEQ ID NO: 220290 - DNA, 33 bp, Homo sapien
atagaaacattacaactgttctgctttgttgtt

SEQ ID NO: 220291 - DNA, 33 bp, Homo sapien
ctggtatttgaaccacaggatgattctgacaaa

SEQ ID NO: 220292 - DNA, 33 bp, Homo sapien
ctggtatttgaaccaccggatgattctgacaaa

SEQ ID NO: 220293 - DNA, 33 bp, Homo sapien
gacctctcttccctcgcaatggtgtctttactt

SEQ ID NO: 220294 - DNA, 33 bp, Homo sapien
gacctctcttccctcggaatggtgtctttactt

SEQ ID NO: 220295 - DNA, 33 bp, Homo sapien
gaatattttacatgcacgtgcaaaggtacgcat

SEQ ID NO: 220296 - DNA, 33 bp, Homo sapien
gaatattttacatgcatgtgcaaaggtacgcat

SEQ ID NO: 220297 - DNA, 33 bp, Homo sapien
gtatgttctaccgtacacactaataggagacat

SEQ ID NO: 220298 - DNA, 33 bp, Homo sapien
gtatgttctaccgtacgcactaataggagacat

SEQ ID NO: 220299 - DNA, 33 bp, Homo sapien
ctgtagtaggggtcccaatgacagcatacatca

SEQ ID NO: 220300 - DNA, 33 bp, Homo sapien
ctgtagtaggggtcccgatgacagcatacatca

SEQ ID NO: 220301 - DNA, 33 bp, Homo sapien
atcaaagataaaactgcataaaacaggctatat

SEQ ID NO: 220302 - DNA, 33 bp, Homo sapien
atcaaagataaaactggataaaacaggctatat

SEQ ID NO: 220303 - DNA, 33 bp, Homo sapien
acctagtttgcgacctaaaaaatgtaatgtcta

SEQ ID NO: 220304 - DNA, 33 bp, Homo sapien
acctagtttgcgacctcaaaaatgtaatgtcta

SEQ ID NO: 220305 - DNA, 33 bp, Homo sapien
agtgaaagactatcaacaaaacctagagcactg

SEQ ID NO: 220306 - DNA, 33 bp, Homo sapien
agtgaaagactatcaataaaacctagagcactg

SEQ ID NO: 220307 - DNA, 33 bp, Homo sapien
ctactatttgaggagaaatatgaactcactttt

SEQ ID NO: 220308 - DNA, 33 bp, Homo sapien
ctactatttgaggagagatatgaactcactttt

SEQ ID NO: 220309 - DNA, 33 bp, Homo sapien
gaaaggacaggacccactgaaaaagatagcctc

SEQ ID NO: 220310 - DNA, 33 bp, Homo sapien
gaaaggacaggacccattgaaaaagatagcctc

SEQ ID NO: 220311 - DNA, 33 bp, Homo sapien
atgcatacatttctctcaatagaccagaaatct

SEQ ID NO: 220312 - DNA, 33 bp, Homo sapien
atgcatacatttctctgaatagaccagaaatct

SEQ ID NO: 220313 - DNA, 33 bp, Homo sapien
tggtcaagatgtgaagaccttttaaatgatagc

SEQ ID NO: 220314 - DNA, 33 bp, Homo sapien
tggtcaagatgtgaagcccttttaaatgatagc

SEQ ID NO: 220315 - DNA, 33 bp, Homo sapien
tataatgactctggagaacagaactgactcatt

SEQ ID NO: 220316 - DNA, 33 bp, Homo sapien
tataatgactctggaggacagaactgactcatt

SEQ ID NO: 220317 - DNA, 33 bp, Homo sapien
gaggctgtagagaaaacgacatgtttatgcact

SEQ ID NO: 220318 - DNA, 33 bp, Homo sapien
gaggctgtagagaaaatgacatgtttatgcact

SEQ ID NO: 220319 - DNA, 33 bp, Homo sapien
atctgctagtttagtacctagaccttctacatg

SEQ ID NO: 220320 - DNA, 33 bp, Homo sapien
atctgctagtttagtatctagaccttctacatg

SEQ ID NO: 220321 - DNA, 33 bp, Homo sapien
ccagattcaagggaagaaagctattcaaggctg

SEQ ID NO: 220322 - DNA, 33 bp, Homo sapien
ccagattcaagggaaggaagctattcaaggctg

SEQ ID NO: 220323 - DNA, 33 bp, Homo sapien
gaatgtaggaggaaaacagaaaagatctggaat

SEQ ID NO: 220324 - DNA, 33 bp, Homo sapien
gaatgtaggaggaaaatagaaaagatctggaat

SEQ ID NO: 220325 - DNA, 33 bp, Homo sapien
ttctagcctccagaaccggaagaaaataaattt

SEQ ID NO: 220326 - DNA, 33 bp, Homo sapien
ttctagcctccagaactggaagaaaataaattt

SEQ ID NO: 220327 - DNA, 33 bp, Homo sapien
tcagaaaatagagcaaaaaaaagtagcataatg

SEQ ID NO: 220328 - DNA, 33 bp, Homo sapien
tcagaaaatagagcaagaaaaagtagcataatg

SEQ ID NO: 220329 - DNA, 33 bp, Homo sapien
aatgaagagtgaaagacattgatagactcatga

SEQ ID NO: 220330 - DNA, 33 bp, Homo sapien
aatgaagagtgaaagagattgatagactcatga

SEQ ID NO: 220331 - DNA, 33 bp, Homo sapien
ggcagaaactgaaaacaaattactataaccact

SEQ ID NO: 220332 - DNA, 33 bp, Homo sapien
ggcagaaactgaaaacgaattactataaccact

SEQ ID NO: 220333 - DNA, 33 bp, Homo sapien
aagactgatattccccaaactatattctattga

SEQ ID NO: 220334 - DNA, 33 bp, Homo sapien
aagactgatattccccgaactatattctattga

SEQ ID NO: 220335 - DNA, 33 bp, Homo sapien
tgtcttagttactgataacagattagtggagga

SEQ ID NO: 220336 - DNA, 33 bp, Homo sapien
tgtcttagttactgatgacagattagtggagga

SEQ ID NO: 220337 - DNA, 33 bp, Homo sapien
attttttaatgattccacactttaatagatttt

SEQ ID NO: 220338 - DNA, 33 bp, Homo sapien
attttttaatgattcctcactttaatagatttt

SEQ ID NO: 220339 - DNA, 33 bp, Homo sapien
tagggataaaatggaacgactgaggactgaatt

SEQ ID NO: 220340 - DNA, 33 bp, Homo sapien
tagggataaaatggaatgactgaggactgaatt

SEQ ID NO: 220341 - DNA, 33 bp, Homo sapien
tattactaatttcagcacaggccatctaagaag

SEQ ID NO: 220342 - DNA, 33 bp, Homo sapien
tattactaatttcagcgcaggccatctaagaag

SEQ ID NO: 220343 - DNA, 33 bp, Homo sapien
ggattgactgtggaacaatatataatgtcttcg

SEQ ID NO: 220344 - DNA, 33 bp, Homo sapien
ggattgactgtggaaccatatataatgtcttcg

SEQ ID NO: 220345 - DNA, 33 bp, Homo sapien
tgatacagtaattgcacgtaagatacagttaag

SEQ ID NO: 220346 - DNA, 33 bp, Homo sapien
tgatacagtaattgcatgtaagatacagttaag

SEQ ID NO: 220347 - DNA, 33 bp, Homo sapien
agggttttcctcatacactaaccaagcaattct

SEQ ID NO: 220348 - DNA, 33 bp, Homo sapien
agggttttcctcatacgctaaccaagcaattct

SEQ ID NO: 220349 - DNA, 33 bp, Homo sapien
gggaagagaggttgaaagttaagttgatcacca

SEQ ID NO: 220350 - DNA, 33 bp, Homo sapien
gggaagagaggttgaaggttaagttgatcacca

SEQ ID NO: 220351 - DNA, 33 bp, Homo sapien
aatttcttgctgaaagaaggacataatgtacta

SEQ ID NO: 220352 - DNA, 33 bp, Homo sapien
aatttcttgctgaaaggaggacataatgtacta

SEQ ID NO: 220353 - DNA, 33 bp, Homo sapien
ttctaaaatatgattcactaaaactgatttgaa

SEQ ID NO: 220354 - DNA, 33 bp, Homo sapien
ttctaaaatatgattctctaaaactgatttgaa

SEQ ID NO: 220355 - DNA, 33 bp, Homo sapien
ctgtaaatagtttgtaggtgaaaatcactgctg

SEQ ID NO: 220356 - DNA, 33 bp, Homo sapien
ctgtaaatagtttgtatgtgaaaatcactgctg

SEQ ID NO: 220357 - DNA, 33 bp, Homo sapien
acttaaatatgcacacagtagatagaccctttt

SEQ ID NO: 220358 - DNA, 33 bp, Homo sapien
acttaaatatgcacacggtagatagaccctttt

SEQ ID NO: 220359 - DNA, 33 bp, Homo sapien
gatagcttgttttaagaagggatgagatgtttt

SEQ ID NO: 220360 - DNA, 33 bp, Homo sapien
gatagcttgttttaaggagggatgagatgtttt

SEQ ID NO: 220361 - DNA, 33 bp, Homo sapien
tacctgggtgataggagggatcattcatacttc

SEQ ID NO: 220362 - DNA, 33 bp, Homo sapien
tacctgggtgataggatggatcattcatacttc

SEQ ID NO: 220363 - DNA, 33 bp, Homo sapien
cattatcggtctccacagaatccttgttttctt

SEQ ID NO: 220364 - DNA, 33 bp, Homo sapien
cattatcggtctccactgaatccttgttttctt

SEQ ID NO: 220365 - DNA, 33 bp, Homo sapien
atgtggtacagtgaaaaatgtgaataattctca

SEQ ID NO: 220366 - DNA, 33 bp, Homo sapien
atgtggtacagtgaaatatgtgaataattctca

SEQ ID NO: 220367 - DNA, 33 bp, Homo sapien
agctggtgatataggggcattactcatagatat

SEQ ID NO: 220368 - DNA, 33 bp, Homo sapien
agctggtgatatagggtcattactcatagatat

SEQ ID NO: 220369 - DNA, 33 bp, Homo sapien
tgtaggtagaggattacaatgttgaaaggaaca

SEQ ID NO: 220370 - DNA, 33 bp, Homo sapien
tgtaggtagaggattataatgttgaaaggaaca

SEQ ID NO: 220371 - DNA, 33 bp, Homo sapien
caattttttgtcttccaccttaagaacactttt

SEQ ID NO: 220372 - DNA, 33 bp, Homo sapien
caattttttgtcttccgccttaagaacactttt

SEQ ID NO: 220373 - DNA, 33 bp, Homo sapien
atttcttgtataaaccaagacctctcaaaccaa

SEQ ID NO: 220374 - DNA, 33 bp, Homo sapien
atttcttgtataaaccgagacctctcaaaccaa

SEQ ID NO: 220375 - DNA, 33 bp, Homo sapien
tgcaagtttggatttaactgagagcacagagag

SEQ ID NO: 220376 - DNA, 33 bp, Homo sapien
tgcaagtttggatttagctgagagcacagagag

SEQ ID NO: 220377 - DNA, 33 bp, Homo sapien
gcaccagttaggtaggacaatggagatccatta

SEQ ID NO: 220378 - DNA, 33 bp, Homo sapien
gcaccagttaggtaggtcaatggagatccatta

SEQ ID NO: 220379 - DNA, 33 bp, Homo sapien
atcatgggcttagaaacactaaacagcacttca

SEQ ID NO: 220380 - DNA, 33 bp, Homo sapien
atcatgggcttagaaatactaaacagcacttca

SEQ ID NO: 220381 - DNA, 33 bp, Homo sapien
tagaataaactggataactatgaaactatgggc

SEQ ID NO: 220382 - DNA, 33 bp, Homo sapien
tagaataaactggatacctatgaaactatgggc

SEQ ID NO: 220383 - DNA, 33 bp, Homo sapien
ggtaaagaacacaaagacctgaaagtcacacag

SEQ ID NO: 220384 - DNA, 33 bp, Homo sapien
ggtaaagaacacaaaggcctgaaagtcacacag

SEQ ID NO: 220385 - DNA, 33 bp, Homo sapien
ttgccccacatttggacgagccagtaagaaaat

SEQ ID NO: 220386 - DNA, 33 bp, Homo sapien
ttgccccacatttggatgagccagtaagaaaat

SEQ ID NO: 220387 - DNA, 33 bp, Homo sapien
tttctggagattcaggaatcaaaggatagatcc

SEQ ID NO: 220388 - DNA, 33 bp, Homo sapien
tttctggagattcagggatcaaaggatagatcc

SEQ ID NO: 220389 - DNA, 33 bp, Homo sapien
ttcactcttgattgagaaaaagtgcaaaagcaa

SEQ ID NO: 220390 - DNA, 33 bp, Homo sapien
ttcactcttgattgaggaaaagtgcaaaagcaa

SEQ ID NO: 220391 - DNA, 33 bp, Homo sapien
ccttcataataactacactgaatggaccagata

SEQ ID NO: 220392 - DNA, 33 bp, Homo sapien
ccttcataataactacgctgaatggaccagata

SEQ ID NO: 220393 - DNA, 33 bp, Homo sapien
ccacctgaaactagaaaactaaagtactctggc

SEQ ID NO: 220394 - DNA, 33 bp, Homo sapien
ccacctgaaactagaagactaaagtactctggc

SEQ ID NO: 220395 - DNA, 33 bp, Homo sapien
cttaaaaatctcaccaatgatttaaaaatgaag

SEQ ID NO: 220396 - DNA, 33 bp, Homo sapien
cttaaaaatctcaccattgatttaaaaatgaag

SEQ ID NO: 220397 - DNA, 33 bp, Homo sapien
tattgccctccactacgcaaacattttatgtct

SEQ ID NO: 220398 - DNA, 33 bp, Homo sapien
tattgccctccactactcaaacattttatgtct

SEQ ID NO: 220399 - DNA, 33 bp, Homo sapien
ggtcagtcatgtcagtcaatctcttgctcattt

SEQ ID NO: 220400 - DNA, 33 bp, Homo sapien
ggtcagtcatgtcagttaatctcttgctcattt

SEQ ID NO: 220401 - DNA, 33 bp, Homo sapien
cccttagcacaatgaaggtccttagtaattctg

SEQ ID NO: 220402 - DNA, 33 bp, Homo sapien
cccttagcacaatgaatgtccttagtaattctg

SEQ ID NO: 220403 - DNA, 33 bp, Homo sapien
aaaacatacttatgagcccttactattgactga

SEQ ID NO: 220404 - DNA, 33 bp, Homo sapien
aaaacatacttatgagtccttactattgactga

SEQ ID NO: 220405 - DNA, 33 bp, Homo sapien
tgaataagatgtaataaaagtccaaggataatg

SEQ ID NO: 220406 - DNA, 33 bp, Homo sapien
tgaataagatgtaatataagtccaaggataatg

SEQ ID NO: 220407 - DNA, 33 bp, Homo sapien
tagcagaatctggggacgcctcagtgttggcga

SEQ ID NO: 220408 - DNA, 33 bp, Homo sapien
tagcagaatctggggatgcctcagtgttggcga

SEQ ID NO: 220409 - DNA, 33 bp, Homo sapien
tttgagtctcaaaatcaaaaagtatttctctca

SEQ ID NO: 220410 - DNA, 33 bp, Homo sapien
tttgagtctcaaaatcgaaaagtatttctctca

SEQ ID NO: 220411 - DNA, 33 bp, Homo sapien
ttaggactctgaattccaggctatattgtctgt

SEQ ID NO: 220412 - DNA, 33 bp, Homo sapien
ttaggactctgaattctaggctatattgtctgt

SEQ ID NO: 220413 - DNA, 33 bp, Homo sapien
gatgaagtaggcagtgcagtttttgccctacca

SEQ ID NO: 220414 - DNA, 33 bp, Homo sapien
gatgaagtaggcagtgtagtttttgccctacca

SEQ ID NO: 220415 - DNA, 33 bp, Homo sapien
gcaagcactttccaaacccatttgaccacaaaa

SEQ ID NO: 220416 - DNA, 33 bp, Homo sapien
gcaagcactttccaaatccatttgaccacaaaa

SEQ ID NO: 220417 - DNA, 33 bp, Homo sapien
atgaaaaatgaagtgcaaaattttctattgcac

SEQ ID NO: 220418 - DNA, 33 bp, Homo sapien
atgaaaaatgaagtgctaaattttctattgcac

SEQ ID NO: 220419 - DNA, 33 bp, Homo sapien
agtggaaaatgatcaaagtgaactgaatatata

SEQ ID NO: 220420 - DNA, 33 bp, Homo sapien
agtggaaaatgatcaaggtgaactgaatatata

SEQ ID NO: 220421 - DNA, 33 bp, Homo sapien
gtacttctagacctacaaaaggactcagacagc

SEQ ID NO: 220422 - DNA, 33 bp, Homo sapien
gtacttctagacctacgaaaggactcagacagc

SEQ ID NO: 220423 - DNA, 33 bp, Homo sapien
tcaaacaatactcaaaaggttcatgtttagtat

SEQ ID NO: 220424 - DNA, 33 bp, Homo sapien
tcaaacaatactcaaacggttcatgtttagtat

SEQ ID NO: 220425 - DNA, 33 bp, Homo sapien
cttttagagcaaaggtaaagtgggatggtttct

SEQ ID NO: 220426 - DNA, 33 bp, Homo sapien
cttttagagcaaaggtgaagtgggatggtttct

SEQ ID NO: 220427 - DNA, 33 bp, Homo sapien
ctgatgaaatgtggaaatgtacagtggcaagtg

SEQ ID NO: 220428 - DNA, 33 bp, Homo sapien
ctgatgaaatgtggaagtgtacagtggcaagtg

SEQ ID NO: 220429 - DNA, 33 bp, Homo sapien
tggatccacctggttaagacatccagctttaga

SEQ ID NO: 220430 - DNA, 33 bp, Homo sapien
tggatccacctggttaggacatccagctttaga

SEQ ID NO: 220431 - DNA, 33 bp, Homo sapien
atccctgttctgctcccgaaaaacactgatcac

SEQ ID NO: 220432 - DNA, 33 bp, Homo sapien
atccctgttctgctcctgaaaaacactgatcac

SEQ ID NO: 220433 - DNA, 33 bp, Homo sapien
taatattaaaatctacaagtttctattaaattt

SEQ ID NO: 220434 - DNA, 33 bp, Homo sapien
taatattaaaatctaccagtttctattaaattt

SEQ ID NO: 220435 - DNA, 33 bp, Homo sapien
agtaatggattcttccacatggtttctgcctaa

SEQ ID NO: 220436 - DNA, 33 bp, Homo sapien
agtaatggattcttccgcatggtttctgcctaa

SEQ ID NO: 220437 - DNA, 33 bp, Homo sapien
gggggaggagttgggacgaaggtatcaataaag

SEQ ID NO: 220438 - DNA, 33 bp, Homo sapien
gggggaggagttgggatgaaggtatcaataaag

SEQ ID NO: 220439 - DNA, 33 bp, Homo sapien
gcctggggctggagaacgaagctttttaagttt

SEQ ID NO: 220440 - DNA, 33 bp, Homo sapien
gcctggggctggagaatgaagctttttaagttt

SEQ ID NO: 220441 - DNA, 33 bp, Homo sapien
gccaaaagggaatgagcatacaaagtgctggcc

SEQ ID NO: 220442 - DNA, 33 bp, Homo sapien
gccaaaagggaatgaggatacaaagtgctggcc

SEQ ID NO: 220443 - DNA, 33 bp, Homo sapien
ctttgatgaacttaaaagtgaagtgaagacaag

SEQ ID NO: 220444 - DNA, 33 bp, Homo sapien
ctttgatgaacttaaacgtgaagtgaagacaag

SEQ ID NO: 220445 - DNA, 33 bp, Homo sapien
tagactatgtaaatcaagaacccaagatgtcaa

SEQ ID NO: 220446 - DNA, 33 bp, Homo sapien
tagactatgtaaatcaggaacccaagatgtcaa

SEQ ID NO: 220447 - DNA, 33 bp, Homo sapien
tccatgaaaataggaaatatgtctgtttcttta

SEQ ID NO: 220448 - DNA, 33 bp, Homo sapien
tccatgaaaataggaagtatgtctgtttcttta

SEQ ID NO: 220449 - DNA, 33 bp, Homo sapien
catctcaaccatcagaaacaatcacagagggag

SEQ ID NO: 220450 - DNA, 33 bp, Homo sapien
catctcaaccatcagagacaatcacagagggag

SEQ ID NO: 220451 - DNA, 33 bp, Homo sapien
tctctgcttgattcaaaatttttcacacaacca

SEQ ID NO: 220452 - DNA, 33 bp, Homo sapien
tctctgcttgattcaagatttttcacacaacca

SEQ ID NO: 220453 - DNA, 33 bp, Homo sapien
gtagtcctatgaaaaaggctgttctccagtttt

SEQ ID NO: 220454 - DNA, 33 bp, Homo sapien
gtagtcctatgaaaaatgctgttctccagtttt

SEQ ID NO: 220455 - DNA, 33 bp, Homo sapien
aaaaaaagagctcgtacggccaagacaatccta

SEQ ID NO: 220456 - DNA, 33 bp, Homo sapien
aaaaaaagagctcgtatggccaagacaatccta

SEQ ID NO: 220457 - DNA, 33 bp, Homo sapien
catccagctcagtgtagaagtggttgccctatc

SEQ ID NO: 220458 - DNA, 33 bp, Homo sapien
catccagctcagtgtataagtggttgccctatc

SEQ ID NO: 220459 - DNA, 33 bp, Homo sapien
tttaattttccctgagaccctgctgagctcctt

SEQ ID NO: 220460 - DNA, 33 bp, Homo sapien
tttaattttccctgaggccctgctgagctcctt

SEQ ID NO: 220461 - DNA, 33 bp, Homo sapien
aggaacaactttatggcacaattcaaactcctg

SEQ ID NO: 220462 - DNA, 33 bp, Homo sapien
aggaacaactttatggtacaattcaaactcctg

SEQ ID NO: 220463 - DNA, 33 bp, Homo sapien
tatgcttaaatccctgcaatagcgtagtgtagt

SEQ ID NO: 220464 - DNA, 33 bp, Homo sapien
tatgcttaaatccctgtaatagcgtagtgtagt

SEQ ID NO: 220465 - DNA, 33 bp, Homo sapien
taagcaagacagcacactatttcatttatcaaa

SEQ ID NO: 220466 - DNA, 33 bp, Homo sapien
taagcaagacagcacagtatttcatttatcaaa

SEQ ID NO: 220467 - DNA, 33 bp, Homo sapien
acaaaagaaatcagaactataactgtggtttta

SEQ ID NO: 220468 - DNA, 33 bp, Homo sapien
acaaaagaaatcagaattataactgtggtttta

SEQ ID NO: 220469 - DNA, 33 bp, Homo sapien
gggactggtgaatgtcccgatgtgacagcctcg

SEQ ID NO: 220470 - DNA, 33 bp, Homo sapien
gggactggtgaatgtctcgatgtgacagcctcg

SEQ ID NO: 220471 - DNA, 33 bp, Homo sapien
taagtgacacatttcacgagacaaccagatgtc

SEQ ID NO: 220472 - DNA, 33 bp, Homo sapien
taagtgacacatttcatgagacaaccagatgtc

SEQ ID NO: 220473 - DNA, 33 bp, Homo sapien
tcactttagagcaagaatccatagaatggtggg

SEQ ID NO: 220474 - DNA, 33 bp, Homo sapien
tcactttagagcaagagtccatagaatggtggg

SEQ ID NO: 220475 - DNA, 33 bp, Homo sapien
tgccctctgtgtcatacgttgctagaaaagact

SEQ ID NO: 220476 - DNA, 33 bp, Homo sapien
tgccctctgtgtcataggttgctagaaaagact

SEQ ID NO: 220477 - DNA, 33 bp, Homo sapien
tgggctagtctagtaaccttgaatttggttaac

SEQ ID NO: 220478 - DNA, 33 bp, Homo sapien
tgggctagtctagtaatcttgaatttggttaac

SEQ ID NO: 220479 - DNA, 33 bp, Homo sapien
tcttgtctgccagcgtcaatatttttttcctat

SEQ ID NO: 220480 - DNA, 33 bp, Homo sapien
tcttgtctgccagcgtgaatatttttttcctat

SEQ ID NO: 220481 - DNA, 33 bp, Homo sapien
gcttcaatatatatggaagcaaccgaaaaacac

SEQ ID NO: 220482 - DNA, 33 bp, Homo sapien
gcttcaatatatatggtagcaaccgaaaaacac

SEQ ID NO: 220483 - DNA, 33 bp, Homo sapien
tgaggagtttctatcaaaggctatgaagctgga

SEQ ID NO: 220484 - DNA, 33 bp, Homo sapien
tgaggagtttctatcagaggctatgaagctgga

SEQ ID NO: 220485 - DNA, 33 bp, Homo sapien
aactaataggccaagagccttcattatggagct

SEQ ID NO: 220486 - DNA, 33 bp, Homo sapien
aactaataggccaagatccttcattatggagct

SEQ ID NO: 220487 - DNA, 33 bp, Homo sapien
cctagcaatgcttacacacacattttgaaacca

SEQ ID NO: 220488 - DNA, 33 bp, Homo sapien
cctagcaatgcttacatacacattttgaaacca

SEQ ID NO: 220489 - DNA, 33 bp, Homo sapien
caaagataggtatctgcaagtcaaacaacagaa

SEQ ID NO: 220490 - DNA, 33 bp, Homo sapien
caaagataggtatctgtaagtcaaacaacagaa

SEQ ID NO: 220491 - DNA, 33 bp, Homo sapien
aagcaaaagtaatccacggtgttaatagatgcc

SEQ ID NO: 220492 - DNA, 33 bp, Homo sapien
aagcaaaagtaatccatggtgttaatagatgcc

SEQ ID NO: 220493 - DNA, 33 bp, Homo sapien
aaaaatgttaattgaagtccttttgcgtaccag

SEQ ID NO: 220494 - DNA, 33 bp, Homo sapien
aaaaatgttaattgaattccttttgcgtaccag

SEQ ID NO: 220495 - DNA, 33 bp, Homo sapien
acccacttagggataaagcagggaattcaatgg

SEQ ID NO: 220496 - DNA, 33 bp, Homo sapien
acccacttagggataacgcagggaattcaatgg

SEQ ID NO: 220497 - DNA, 33 bp, Homo sapien
tgcaaccaacagactgaagtcctgatcctttca

SEQ ID NO: 220498 - DNA, 33 bp, Homo sapien
tgcaaccaacagactggagtcctgatcctttca

SEQ ID NO: 220499 - DNA, 33 bp, Homo sapien
catcaaatgttttacaaatttttccacttaatt

SEQ ID NO: 220500 - DNA, 33 bp, Homo sapien
catcaaatgttttacagatttttccacttaatt

SEQ ID NO: 220501 - DNA, 33 bp, Homo sapien
gaaacaaatcaatatccgaaaatatgcagccat

SEQ ID NO: 220502 - DNA, 33 bp, Homo sapien
gaaacaaatcaatatctgaaaatatgcagccat

SEQ ID NO: 220503 - DNA, 33 bp, Homo sapien
tgaaagctaatttgaaatgacataaattgattt

SEQ ID NO: 220504 - DNA, 33 bp, Homo sapien
tgaaagctaatttgaagtgacataaattgattt

SEQ ID NO: 220505 - DNA, 33 bp, Homo sapien
aacttctcatcggaaaacgtacaaaacagaaga

SEQ ID NO: 220506 - DNA, 33 bp, Homo sapien
aacttctcatcggaaaccgtacaaaacagaaga

SEQ ID NO: 220507 - DNA, 33 bp, Homo sapien
cttcatttttgaaggagacttttgctgggtgta

SEQ ID NO: 220508 - DNA, 33 bp, Homo sapien
cttcatttttgaaggatacttttgctgggtgta

SEQ ID NO: 220509 - DNA, 33 bp, Homo sapien
cagactaagacagataccatacttccttcagta

SEQ ID NO: 220510 - DNA, 33 bp, Homo sapien
cagactaagacagatatcatacttccttcagta

SEQ ID NO: 220511 - DNA, 33 bp, Homo sapien
accgttctggaggttacaagtttgtgatgagga

SEQ ID NO: 220512 - DNA, 33 bp, Homo sapien
accgttctggaggttagaagtttgtgatgagga

SEQ ID NO: 220513 - DNA, 33 bp, Homo sapien
gactaaaacaagcctacatagtttgtgacccat

SEQ ID NO: 220514 - DNA, 33 bp, Homo sapien
gactaaaacaagcctagatagtttgtgacccat

SEQ ID NO: 220515 - DNA, 33 bp, Homo sapien
agccctacaatattggaatttgcgatttttcac

SEQ ID NO: 220516 - DNA, 33 bp, Homo sapien
agccctacaatattgggatttgcgatttttcac

SEQ ID NO: 220517 - DNA, 33 bp, Homo sapien
aaggatttgctgttcacgaaagttacttctgaa

SEQ ID NO: 220518 - DNA, 33 bp, Homo sapien
aaggatttgctgttcaggaaagttacttctgaa

SEQ ID NO: 220519 - DNA, 33 bp, Homo sapien
ccaaagccatgggtctcaattaatgtgcgctca

SEQ ID NO: 220520 - DNA, 33 bp, Homo sapien
ccaaagccatgggtcttaattaatgtgcgctca

SEQ ID NO: 220521 - DNA, 33 bp, Homo sapien
aatagtaaatattatgaaacacatctgaagagc

SEQ ID NO: 220522 - DNA, 33 bp, Homo sapien
aatagtaaatattatggaacacatctgaagagc

SEQ ID NO: 220523 - DNA, 33 bp, Homo sapien
ttacatttacatttaccactaattccctgagct

SEQ ID NO: 220524 - DNA, 33 bp, Homo sapien
ttacatttacatttactactaattccctgagct

SEQ ID NO: 220525 - DNA, 33 bp, Homo sapien
tttatagttgaaattagtaagtgaatggagaag

SEQ ID NO: 220526 - DNA, 33 bp, Homo sapien
tttatagttgaaattattaagtgaatggagaag

SEQ ID NO: 220527 - DNA, 33 bp, Homo sapien
caaatctatagaggcccaaaatagatgagcggt

SEQ ID NO: 220528 - DNA, 33 bp, Homo sapien
caaatctatagaggcctaaaatagatgagcggt

SEQ ID NO: 220529 - DNA, 33 bp, Homo sapien
gcccagccaaggtaccaaattgagaaaaataac

SEQ ID NO: 220530 - DNA, 33 bp, Homo sapien
gcccagccaaggtaccgaattgagaaaaataac

SEQ ID NO: 220531 - DNA, 33 bp, Homo sapien
acagttgtactgaataggaagtgctgatcaaaa

SEQ ID NO: 220532 - DNA, 33 bp, Homo sapien
acagttgtactgaatatgaagtgctgatcaaaa

SEQ ID NO: 220533 - DNA, 33 bp, Homo sapien
acttacatgttgaaggaaaaaggttgatctcat

SEQ ID NO: 220534 - DNA, 33 bp, Homo sapien
acttacatgttgaaggcaaaaggttgatctcat

SEQ ID NO: 220535 - DNA, 33 bp, Homo sapien
attacactgagtcctacagcagacctggagtgc

SEQ ID NO: 220536 - DNA, 33 bp, Homo sapien
attacactgagtcctagagcagacctggagtgc

SEQ ID NO: 220537 - DNA, 33 bp, Homo sapien
ccaccaagaaccaaaaataggcaattgtacgag

SEQ ID NO: 220538 - DNA, 33 bp, Homo sapien
ccaccaagaaccaaaactaggcaattgtacgag

SEQ ID NO: 220539 - DNA, 33 bp, Homo sapien
ggttaccacgaacttcactgggctaaacttggg

SEQ ID NO: 220540 - DNA, 33 bp, Homo sapien
ggttaccacgaacttcgctgggctaaacttggg

SEQ ID NO: 220541 - DNA, 33 bp, Homo sapien
ctagtaatcctttgacaatattcaaatggctat

SEQ ID NO: 220542 - DNA, 33 bp, Homo sapien
ctagtaatcctttgacgatattcaaatggctat

SEQ ID NO: 220543 - DNA, 33 bp, Homo sapien
aaaaagcacaatcagtaacaataactaagtcct

SEQ ID NO: 220544 - DNA, 33 bp, Homo sapien
aaaaagcacaatcagtcacaataactaagtcct

SEQ ID NO: 220545 - DNA, 33 bp, Homo sapien
ctctccctttctcaaggatgttgaaaggattgg

SEQ ID NO: 220546 - DNA, 33 bp, Homo sapien
ctctccctttctcaagtatgttgaaaggattgg

SEQ ID NO: 220547 - DNA, 33 bp, Homo sapien
cccaaactcctttccacagaggtgtacttgaga

SEQ ID NO: 220548 - DNA, 33 bp, Homo sapien
cccaaactcctttccatagaggtgtacttgaga

SEQ ID NO: 220549 - DNA, 33 bp, Homo sapien
tattggtacatacagaactgcatcagtcttttt

SEQ ID NO: 220550 - DNA, 33 bp, Homo sapien
tattggtacatacagagctgcatcagtcttttt

SEQ ID NO: 220551 - DNA, 33 bp, Homo sapien
tcaacatcttttcccccgattcaccgtagtata

SEQ ID NO: 220552 - DNA, 33 bp, Homo sapien
tcaacatcttttcccctgattcaccgtagtata

SEQ ID NO: 220553 - DNA, 33 bp, Homo sapien
gataaagacattccaaattaattctagtttcca

SEQ ID NO: 220554 - DNA, 33 bp, Homo sapien
gataaagacattccaacttaattctagtttcca

SEQ ID NO: 220555 - DNA, 33 bp, Homo sapien
tttgcctgacaaaaataatattccaatattccc

SEQ ID NO: 220556 - DNA, 33 bp, Homo sapien
tttgcctgacaaaaatgatattccaatattccc

SEQ ID NO: 220557 - DNA, 33 bp, Homo sapien
tgattgttaaaaacgaaatcatcatgtgactta

SEQ ID NO: 220558 - DNA, 33 bp, Homo sapien
tgattgttaaaaacgagatcatcatgtgactta

SEQ ID NO: 220559 - DNA, 33 bp, Homo sapien
atgaaaacaaagaatcagaagataagtgtgaag

SEQ ID NO: 220560 - DNA, 33 bp, Homo sapien
atgaaaacaaagaatcggaagataagtgtgaag

SEQ ID NO: 220561 - DNA, 33 bp, Homo sapien
gttcttttgaagatgacaacatccgttccttat

SEQ ID NO: 220562 - DNA, 33 bp, Homo sapien
gttcttttgaagatgataacatccgttccttat

SEQ ID NO: 220563 - DNA, 33 bp, Homo sapien
aacttagccaggaacaatgtaataaaaataaca

SEQ ID NO: 220564 - DNA, 33 bp, Homo sapien
aacttagccaggaacagtgtaataaaaataaca

SEQ ID NO: 220565 - DNA, 33 bp, Homo sapien
taaagcaaatgcttaaaagacaaaactttattt

SEQ ID NO: 220566 - DNA, 33 bp, Homo sapien
taaagcaaatgcttaagagacaaaactttattt

SEQ ID NO: 220567 - DNA, 33 bp, Homo sapien
taaatcattggaggaaaataagtatcaaagggt

SEQ ID NO: 220568 - DNA, 33 bp, Homo sapien
taaatcattggaggaacataagtatcaaagggt

SEQ ID NO: 220569 - DNA, 33 bp, Homo sapien
atgatgtatgtggaagaagtgctattgttgaac

SEQ ID NO: 220570 - DNA, 33 bp, Homo sapien
atgatgtatgtggaaggagtgctattgttgaac

SEQ ID NO: 220571 - DNA, 33 bp, Homo sapien
gattcaggatttttggcaggattactgcatggg

SEQ ID NO: 220572 - DNA, 33 bp, Homo sapien
gattcaggatttttgggaggattactgcatggg

SEQ ID NO: 220573 - DNA, 33 bp, Homo sapien
gactaattgatgcaagaaggtctttaaggactc

SEQ ID NO: 220574 - DNA, 33 bp, Homo sapien
gactaattgatgcaagcaggtctttaaggactc

SEQ ID NO: 220575 - DNA, 33 bp, Homo sapien
tcagttattcactccccacatttaactgtaaaa

SEQ ID NO: 220576 - DNA, 33 bp, Homo sapien
tcagttattcactcccgacatttaactgtaaaa

SEQ ID NO: 220577 - DNA, 33 bp, Homo sapien
tggcataatatttcaaagtttatccactgtagc

SEQ ID NO: 220578 - DNA, 33 bp, Homo sapien
tggcataatatttcaaggtttatccactgtagc

SEQ ID NO: 220579 - DNA, 33 bp, Homo sapien
atctctctgggaatgacctgaagtgctccctac

SEQ ID NO: 220580 - DNA, 33 bp, Homo sapien
atctctctgggaatgagctgaagtgctccctac

SEQ ID NO: 220581 - DNA, 33 bp, Homo sapien
tatctgtgagtatggtcaagagagacttcatag

SEQ ID NO: 220582 - DNA, 33 bp, Homo sapien
tatctgtgagtatggtgaagagagacttcatag

SEQ ID NO: 220583 - DNA, 33 bp, Homo sapien
tcttagctcaatgttgaaaaatataaatagcac

SEQ ID NO: 220584 - DNA, 33 bp, Homo sapien
tcttagctcaatgttggaaaatataaatagcac

SEQ ID NO: 220585 - DNA, 33 bp, Homo sapien
taggaagaggaataagaaagtagaacctttgta

SEQ ID NO: 220586 - DNA, 33 bp, Homo sapien
taggaagaggaataaggaagtagaacctttgta

SEQ ID NO: 220587 - DNA, 33 bp, Homo sapien
tgactgactgacttatcaaaaacacataacata

SEQ ID NO: 220588 - DNA, 33 bp, Homo sapien
tgactgactgacttatgaaaaacacataacata

SEQ ID NO: 220589 - DNA, 33 bp, Homo sapien
caaaggcatacataaacccctcacattgaaaca

SEQ ID NO: 220590 - DNA, 33 bp, Homo sapien
caaaggcatacataaatccctcacattgaaaca

SEQ ID NO: 220591 - DNA, 33 bp, Homo sapien
agtacatatattgaaagggaaatgcctggatgt

SEQ ID NO: 220592 - DNA, 33 bp, Homo sapien
agtacatatattgaaatggaaatgcctggatgt

SEQ ID NO: 220593 - DNA, 33 bp, Homo sapien
acattttcatgagtgactaagttaatgaaacaa

SEQ ID NO: 220594 - DNA, 33 bp, Homo sapien
acattttcatgagtgagtaagttaatgaaacaa

SEQ ID NO: 220595 - DNA, 33 bp, Homo sapien
tatagctaaggacaaacaagataattaaatgat

SEQ ID NO: 220596 - DNA, 33 bp, Homo sapien
tatagctaaggacaaagaagataattaaatgat

SEQ ID NO: 220597 - DNA, 33 bp, Homo sapien
tggagaatattgaataaggagaaaaattacatg

SEQ ID NO: 220598 - DNA, 33 bp, Homo sapien
tggagaatattgaatatggagaaaaattacatg

SEQ ID NO: 220599 - DNA, 33 bp, Homo sapien
ctattagagtagcccaaaaaagagatggtggct

SEQ ID NO: 220600 - DNA, 33 bp, Homo sapien
ctattagagtagcccagaaaagagatggtggct

SEQ ID NO: 220601 - DNA, 33 bp, Homo sapien
gtactaccttgaccaaaatctttaaatccattc

SEQ ID NO: 220602 - DNA, 33 bp, Homo sapien
gtactaccttgaccaagatctttaaatccattc

SEQ ID NO: 220603 - DNA, 33 bp, Homo sapien
gaggctaaggtgggggaaccacttcaacctggg

SEQ ID NO: 220604 - DNA, 33 bp, Homo sapien
gaggctaaggtggggggaccacttcaacctggg

SEQ ID NO: 220605 - DNA, 33 bp, Homo sapien
tattggaaaagcaacgccaggtgtcaaatagca

SEQ ID NO: 220606 - DNA, 33 bp, Homo sapien
tattggaaaagcaacgtcaggtgtcaaatagca

SEQ ID NO: 220607 - DNA, 33 bp, Homo sapien
ttagaaatctaacgtcgactgaatatttgtata

SEQ ID NO: 220608 - DNA, 33 bp, Homo sapien
ttagaaatctaacgtctactgaatatttgtata

SEQ ID NO: 220609 - DNA, 33 bp, Homo sapien
aacctagaaagatggaaagaaacagcacagtta

SEQ ID NO: 220610 - DNA, 33 bp, Homo sapien
aacctagaaagatggacagaaacagcacagtta

SEQ ID NO: 220611 - DNA, 33 bp, Homo sapien
tcagctggttctgcaaataccgggaaaagtgta

SEQ ID NO: 220612 - DNA, 33 bp, Homo sapien
tcagctggttctgcaagtaccgggaaaagtgta

SEQ ID NO: 220613 - DNA, 33 bp, Homo sapien
actgaagtcttcattaacttttactattggaca

SEQ ID NO: 220614 - DNA, 33 bp, Homo sapien
actgaagtcttcattaccttttactattggaca

SEQ ID NO: 220615 - DNA, 33 bp, Homo sapien
ggcatgaggagtactaaatatccaagtgtcaat

SEQ ID NO: 220616 - DNA, 33 bp, Homo sapien
ggcatgaggagtactacatatccaagtgtcaat

SEQ ID NO: 220617 - DNA, 33 bp, Homo sapien
ctaatccagatggtaaagtgcgagattgggtga

SEQ ID NO: 220618 - DNA, 33 bp, Homo sapien
ctaatccagatggtaacgtgcgagattgggtga

SEQ ID NO: 220619 - DNA, 33 bp, Homo sapien
ccaaatctgcaaattacagaaatcacttagctt

SEQ ID NO: 220620 - DNA, 33 bp, Homo sapien
ccaaatctgcaaattatagaaatcacttagctt

SEQ ID NO: 220621 - DNA, 33 bp, Homo sapien
tctgctggggtggtcacacaggagttcagcagc

SEQ ID NO: 220622 - DNA, 33 bp, Homo sapien
tctgctggggtggtcagacaggagttcagcagc

SEQ ID NO: 220623 - DNA, 33 bp, Homo sapien
ctctctcactcgctcacgcactcttgcactctc

SEQ ID NO: 220624 - DNA, 33 bp, Homo sapien
ctctctcactcgctcatgcactcttgcactctc

SEQ ID NO: 220625 - DNA, 33 bp, Homo sapien
ttgaagcacaggtgtagctggcactatgatgga

SEQ ID NO: 220626 - DNA, 33 bp, Homo sapien
ttgaagcacaggtgtatctggcactatgatgga

SEQ ID NO: 220627 - DNA, 33 bp, Homo sapien
ttctatagagacggaaatacaatccatccaggg

SEQ ID NO: 220628 - DNA, 33 bp, Homo sapien
ttctatagagacggaagtacaatccatccaggg

SEQ ID NO: 220629 - DNA, 33 bp, Homo sapien
gcggtctcctgtcggcaacggaggcattcaggc

SEQ ID NO: 220630 - DNA, 33 bp, Homo sapien
gcggtctcctgtcggccacggaggcattcaggc

SEQ ID NO: 220631 - DNA, 33 bp, Homo sapien
atgagactatagcacaaaagaccacagaagctt

SEQ ID NO: 220632 - DNA, 33 bp, Homo sapien
atgagactatagcacagaagaccacagaagctt

SEQ ID NO: 220633 - DNA, 33 bp, Homo sapien
ggaaggaaatcagtcaccacagaatatctacac

SEQ ID NO: 220634 - DNA, 33 bp, Homo sapien
ggaaggaaatcagtcatcacagaatatctacac

SEQ ID NO: 220635 - DNA, 33 bp, Homo sapien
tacctatgttagcatacagaaaggaaaattaca

SEQ ID NO: 220636 - DNA, 33 bp, Homo sapien
tacctatgttagcatatagaaaggaaaattaca

SEQ ID NO: 220637 - DNA, 33 bp, Homo sapien
atgcaataaaagaaaacgtaatgccatgatctc

SEQ ID NO: 220638 - DNA, 33 bp, Homo sapien
atgcaataaaagaaaaggtaatgccatgatctc

SEQ ID NO: 220639 - DNA, 33 bp, Homo sapien
ggggtcaggataataaccacatttaggggtgtg

SEQ ID NO: 220640 - DNA, 33 bp, Homo sapien
ggggtcaggataataatcacatttaggggtgtg

SEQ ID NO: 220641 - DNA, 33 bp, Homo sapien
agaagaagaggtgatacggaaaattcctcagct

SEQ ID NO: 220642 - DNA, 33 bp, Homo sapien
agaagaagaggtgatatggaaaattcctcagct

SEQ ID NO: 220643 - DNA, 33 bp, Homo sapien
gaactttcctggaggcagagtgaatatttttaa

SEQ ID NO: 220644 - DNA, 33 bp, Homo sapien
gaactttcctggaggctgagtgaatatttttaa

SEQ ID NO: 220645 - DNA, 33 bp, Homo sapien
acatggcattaaatcacgatacagaggcagatt

SEQ ID NO: 220646 - DNA, 33 bp, Homo sapien
acatggcattaaatcaggatacagaggcagatt

SEQ ID NO: 220647 - DNA, 33 bp, Homo sapien
agacagtggtatcttaaatgggacaggagcagg

SEQ ID NO: 220648 - DNA, 33 bp, Homo sapien
agacagtggtatcttagatgggacaggagcagg

SEQ ID NO: 220649 - DNA, 33 bp, Homo sapien
aagatagtcagctaaccactcgctctaaagcaa

SEQ ID NO: 220650 - DNA, 33 bp, Homo sapien
aagatagtcagctaactactcgctctaaagcaa

SEQ ID NO: 220651 - DNA, 33 bp, Homo sapien
gttggtcaaagaaaataacaggttttggctagg

SEQ ID NO: 220652 - DNA, 33 bp, Homo sapien
gttggtcaaagaaaatgacaggttttggctagg

SEQ ID NO: 220653 - DNA, 33 bp, Homo sapien
tggaatagatgttacccggccttctgggagcag

SEQ ID NO: 220654 - DNA, 33 bp, Homo sapien
tggaatagatgttacctggccttctgggagcag

SEQ ID NO: 220655 - DNA, 33 bp, Homo sapien
cccccaatacagaaaccaattcacaggtcccag

SEQ ID NO: 220656 - DNA, 33 bp, Homo sapien
cccccaatacagaaacgaattcacaggtcccag

SEQ ID NO: 220657 - DNA, 33 bp, Homo sapien
tacagagtaataaagcccacattttagcaaaat

SEQ ID NO: 220658 - DNA, 33 bp, Homo sapien
tacagagtaataaagctcacattttagcaaaat

SEQ ID NO: 220659 - DNA, 33 bp, Homo sapien
atcaatagtagcctcacgctgtgtcacaatgcc

SEQ ID NO: 220660 - DNA, 33 bp, Homo sapien
atcaatagtagcctcatgctgtgtcacaatgcc

SEQ ID NO: 220661 - DNA, 33 bp, Homo sapien
gaatagtgaactgttaagtgagagcagaataaa

SEQ ID NO: 220662 - DNA, 33 bp, Homo sapien
gaatagtgaactgttatgtgagagcagaataaa

SEQ ID NO: 220663 - DNA, 33 bp, Homo sapien
tgagcctgtcattagccagtctccaacccctga

SEQ ID NO: 220664 - DNA, 33 bp, Homo sapien
tgagcctgtcattagctagtctccaacccctga

SEQ ID NO: 220665 - DNA, 33 bp, Homo sapien
cgagcccattatagaaaaggtttgctcaacccc

SEQ ID NO: 220666 - DNA, 33 bp, Homo sapien
cgagcccattatagaagaggtttgctcaacccc

SEQ ID NO: 220667 - DNA, 33 bp, Homo sapien
atcttgagtacggtaccactggctgtgagttca

SEQ ID NO: 220668 - DNA, 33 bp, Homo sapien
atcttgagtacggtactactggctgtgagttca

SEQ ID NO: 220669 - DNA, 33 bp, Homo sapien
gctatttaatcactaaaagaggtagcaaaaata

SEQ ID NO: 220670 - DNA, 33 bp, Homo sapien
gctatttaatcactaacagaggtagcaaaaata

SEQ ID NO: 220671 - DNA, 33 bp, Homo sapien
taaagttgttattgaacggttctggggaatgcc

SEQ ID NO: 220672 - DNA, 33 bp, Homo sapien
taaagttgttattgaatggttctggggaatgcc

SEQ ID NO: 220673 - DNA, 33 bp, Homo sapien
cgcttctagggtcagactatccgcacacgagta

SEQ ID NO: 220674 - DNA, 33 bp, Homo sapien
cgcttctagggtcagattatccgcacacgagta

SEQ ID NO: 220675 - DNA, 33 bp, Homo sapien
actccgaaatgcagggaaagtcctaagagaatt

SEQ ID NO: 220676 - DNA, 33 bp, Homo sapien
actccgaaatgcaggggaagtcctaagagaatt

SEQ ID NO: 220677 - DNA, 33 bp, Homo sapien
agagaagcaaaacataccctcaaagcaagccca

SEQ ID NO: 220678 - DNA, 33 bp, Homo sapien
agagaagcaaaacatatcctcaaagcaagccca

SEQ ID NO: 220679 - DNA, 33 bp, Homo sapien
aatcagtgtttccaaactagtctaccagcagag

SEQ ID NO: 220680 - DNA, 33 bp, Homo sapien
aatcagtgtttccaaagtagtctaccagcagag

SEQ ID NO: 220681 - DNA, 33 bp, Homo sapien
gaacaaggtcaatgaacggacctggtcctatat

SEQ ID NO: 220682 - DNA, 33 bp, Homo sapien
gaacaaggtcaatgaatggacctggtcctatat

SEQ ID NO: 220683 - DNA, 33 bp, Homo sapien
cgtcaattcggtaagaagtcaagattcaggaac

SEQ ID NO: 220684 - DNA, 33 bp, Homo sapien
cgtcaattcggtaagaggtcaagattcaggaac

SEQ ID NO: 220685 - DNA, 33 bp, Homo sapien
aaatctgggcatgccaacttttaacactgttac

SEQ ID NO: 220686 - DNA, 33 bp, Homo sapien
aaatctgggcatgccagcttttaacactgttac

SEQ ID NO: 220687 - DNA, 33 bp, Homo sapien
aacagcatgagaactcaagtatgtattagaatt

SEQ ID NO: 220688 - DNA, 33 bp, Homo sapien
aacagcatgagaactcgagtatgtattagaatt

SEQ ID NO: 220689 - DNA, 33 bp, Homo sapien
ctctcattattataccagctataacttatggag

SEQ ID NO: 220690 - DNA, 33 bp, Homo sapien
ctctcattattatacctgctataacttatggag

SEQ ID NO: 220691 - DNA, 33 bp, Homo sapien
cctttgtaaaatgggaaaataagatccacctta

SEQ ID NO: 220692 - DNA, 33 bp, Homo sapien
cctttgtaaaatgggacaataagatccacctta

SEQ ID NO: 220693 - DNA, 33 bp, Homo sapien
ataggaagctctacttcaaaaacaaatagtcat

SEQ ID NO: 220694 - DNA, 33 bp, Homo sapien
ataggaagctctactttaaaaacaaatagtcat

SEQ ID NO: 220695 - DNA, 33 bp, Homo sapien
ctgattctacttaagaacaaacagaacatgtta

SEQ ID NO: 220696 - DNA, 33 bp, Homo sapien
ctgattctacttaagagcaaacagaacatgtta

SEQ ID NO: 220697 - DNA, 33 bp, Homo sapien
ctatttgtagaataagacaacagcacttgctat

SEQ ID NO: 220698 - DNA, 33 bp, Homo sapien
ctatttgtagaataaggcaacagcacttgctat

SEQ ID NO: 220699 - DNA, 33 bp, Homo sapien
tggaaagcctcttaaaatacacagaagcctcaa

SEQ ID NO: 220700 - DNA, 33 bp, Homo sapien
tggaaagcctcttaaactacacagaagcctcaa

SEQ ID NO: 220701 - DNA, 33 bp, Homo sapien
catgggtgcttgatacacaaccttgaagacttt

SEQ ID NO: 220702 - DNA, 33 bp, Homo sapien
catgggtgcttgatacgcaaccttgaagacttt

SEQ ID NO: 220703 - DNA, 33 bp, Homo sapien
tatgtctgtgttattacggaagagcttgaaaaa

SEQ ID NO: 220704 - DNA, 33 bp, Homo sapien
tatgtctgtgttattatggaagagcttgaaaaa

SEQ ID NO: 220705 - DNA, 33 bp, Homo sapien
agcatataatggataaatgttcagatttaattt

SEQ ID NO: 220706 - DNA, 33 bp, Homo sapien
agcatataatggataagtgttcagatttaattt

SEQ ID NO: 220707 - DNA, 33 bp, Homo sapien
gtttgaaaatggttacaaatacaatacagttaa

SEQ ID NO: 220708 - DNA, 33 bp, Homo sapien
gtttgaaaatggttacgaatacaatacagttaa

SEQ ID NO: 220709 - DNA, 33 bp, Homo sapien
catagtctcttgattccatctggtaattctccc

SEQ ID NO: 220710 - DNA, 33 bp, Homo sapien
catagtctcttgattctatctggtaattctccc

SEQ ID NO: 220711 - DNA, 33 bp, Homo sapien
tgcttctgttgttaatcataataataatagcca

SEQ ID NO: 220712 - DNA, 33 bp, Homo sapien
tgcttctgttgttaatgataataataatagcca

SEQ ID NO: 220713 - DNA, 33 bp, Homo sapien
ggttagtttcaggacaagggactgtgagttcag

SEQ ID NO: 220714 - DNA, 33 bp, Homo sapien
ggttagtttcaggacacgggactgtgagttcag

SEQ ID NO: 220715 - DNA, 33 bp, Homo sapien
tctttgccctataatacgacatttgggagacta

SEQ ID NO: 220716 - DNA, 33 bp, Homo sapien
tctttgccctataatatgacatttgggagacta

SEQ ID NO: 220717 - DNA, 33 bp, Homo sapien
tgaaaatcagacagccaaccttttggaagagag

SEQ ID NO: 220718 - DNA, 33 bp, Homo sapien
tgaaaatcagacagccgaccttttggaagagag

SEQ ID NO: 220719 - DNA, 33 bp, Homo sapien
aatgtgctaaccaataactctctgtacactgga

SEQ ID NO: 220720 - DNA, 33 bp, Homo sapien
aatgtgctaaccaatagctctctgtacactgga

SEQ ID NO: 220721 - DNA, 33 bp, Homo sapien
ctctaatgttgaaatacgtgttataatgtatgt

SEQ ID NO: 220722 - DNA, 33 bp, Homo sapien
ctctaatgttgaaatatgtgttataatgtatgt

SEQ ID NO: 220723 - DNA, 33 bp, Homo sapien
agaaaaatggaagggccgagactggaaaataga

SEQ ID NO: 220724 - DNA, 33 bp, Homo sapien
agaaaaatggaagggctgagactggaaaataga

SEQ ID NO: 220725 - DNA, 33 bp, Homo sapien
acccatcgttcagccaaatacttaatgacctgt

SEQ ID NO: 220726 - DNA, 33 bp, Homo sapien
acccatcgttcagccagatacttaatgacctgt

SEQ ID NO: 220727 - DNA, 33 bp, Homo sapien
tgtgtgtgatgcagaaacccttcctctaattta

SEQ ID NO: 220728 - DNA, 33 bp, Homo sapien
tgtgtgtgatgcagaatcccttcctctaattta

SEQ ID NO: 220729 - DNA, 33 bp, Homo sapien
cagcccactcccaggactcaggaacgctgatgt

SEQ ID NO: 220730 - DNA, 33 bp, Homo sapien
cagcccactcccaggattcaggaacgctgatgt

SEQ ID NO: 220731 - DNA, 33 bp, Homo sapien
atgcaaaaagatgccaatatgcaaatttcaaaa

SEQ ID NO: 220732 - DNA, 33 bp, Homo sapien
atgcaaaaagatgccagtatgcaaatttcaaaa

SEQ ID NO: 220733 - DNA, 33 bp, Homo sapien
gattattatccaaacaaaaatattcttgtactt

SEQ ID NO: 220734 - DNA, 33 bp, Homo sapien
gattattatccaaacagaaatattcttgtactt

SEQ ID NO: 220735 - DNA, 33 bp, Homo sapien
tggtactcacggccaacgatcccacttccccct

SEQ ID NO: 220736 - DNA, 33 bp, Homo sapien
tggtactcacggccaatgatcccacttccccct

SEQ ID NO: 220737 - DNA, 33 bp, Homo sapien
ttaaatacatgaaaagcagttgtagttggaaga

SEQ ID NO: 220738 - DNA, 33 bp, Homo sapien
ttaaatacatgaaaagtagttgtagttggaaga

SEQ ID NO: 220739 - DNA, 33 bp, Homo sapien
cccatggatcaggtcccagattctcttatctgt

SEQ ID NO: 220740 - DNA, 33 bp, Homo sapien
cccatggatcaggtcctagattctcttatctgt

SEQ ID NO: 220741 - DNA, 33 bp, Homo sapien
gaatgacaaccagagaaccagcaaaatgaggta

SEQ ID NO: 220742 - DNA, 33 bp, Homo sapien
gaatgacaaccagagagccagcaaaatgaggta

SEQ ID NO: 220743 - DNA, 33 bp, Homo sapien
ggaaggattagcatgacattaaagctaaaacaa

SEQ ID NO: 220744 - DNA, 33 bp, Homo sapien
ggaaggattagcatgatattaaagctaaaacaa

SEQ ID NO: 220745 - DNA, 33 bp, Homo sapien
agaaatctcaacaggaagcctctaaataatctt

SEQ ID NO: 220746 - DNA, 33 bp, Homo sapien
agaaatctcaacaggatgcctctaaataatctt

SEQ ID NO: 220747 - DNA, 33 bp, Homo sapien
aaaagtctttacaaaaatcatattgtgtgaaat

SEQ ID NO: 220748 - DNA, 33 bp, Homo sapien
aaaagtctttacaaaactcatattgtgtgaaat

SEQ ID NO: 220749 - DNA, 33 bp, Homo sapien
tttgaaacctaaataacagactcagcaattgag

SEQ ID NO: 220750 - DNA, 33 bp, Homo sapien
tttgaaacctaaataagagactcagcaattgag

SEQ ID NO: 220751 - DNA, 33 bp, Homo sapien
aaggacctgcaaaccacgttgggtgatgaacat

SEQ ID NO: 220752 - DNA, 33 bp, Homo sapien
aaggacctgcaaaccatgttgggtgatgaacat

SEQ ID NO: 220753 - DNA, 33 bp, Homo sapien
tcctgaagattctgaaatattccaaaggattag

SEQ ID NO: 220754 - DNA, 33 bp, Homo sapien
tcctgaagattctgaactattccaaaggattag

SEQ ID NO: 220755 - DNA, 33 bp, Homo sapien
gactgtatcaggagaacgtattcagagttccca

SEQ ID NO: 220756 - DNA, 33 bp, Homo sapien
gactgtatcaggagaatgtattcagagttccca

SEQ ID NO: 220757 - DNA, 33 bp, Homo sapien
cttctttttacctatcgccactagtgtcactga

SEQ ID NO: 220758 - DNA, 33 bp, Homo sapien
cttctttttacctatctccactagtgtcactga

SEQ ID NO: 220759 - DNA, 33 bp, Homo sapien
gggaaggagcgttgcacggaagggctgccttag

SEQ ID NO: 220760 - DNA, 33 bp, Homo sapien
gggaaggagcgttgcatggaagggctgccttag

SEQ ID NO: 220761 - DNA, 33 bp, Homo sapien
tttcagcagcaattgaacttttctgtcttacat

SEQ ID NO: 220762 - DNA, 33 bp, Homo sapien
tttcagcagcaattgatcttttctgtcttacat

SEQ ID NO: 220763 - DNA, 33 bp, Homo sapien
acattttcatgcttccacatagtacagaagtct

SEQ ID NO: 220764 - DNA, 33 bp, Homo sapien
acattttcatgcttccgcatagtacagaagtct

SEQ ID NO: 220765 - DNA, 33 bp, Homo sapien
tgtggtagtgaaatttaaaagaaagatgctaat

SEQ ID NO: 220766 - DNA, 33 bp, Homo sapien
tgtggtagtgaaatttgaaagaaagatgctaat

SEQ ID NO: 220767 - DNA, 33 bp, Homo sapien
cttgtcagagtagaagaactgccttagaaccgc

SEQ ID NO: 220768 - DNA, 33 bp, Homo sapien
cttgtcagagtagaagcactgccttagaaccgc

SEQ ID NO: 220769 - DNA, 33 bp, Homo sapien
gtatttgctgaaaggacagagaggagaaggctg

SEQ ID NO: 220770 - DNA, 33 bp, Homo sapien
gtatttgctgaaaggatagagaggagaaggctg

SEQ ID NO: 220771 - DNA, 33 bp, Homo sapien
ggttctcctattctcaacaacacagagttttgt

SEQ ID NO: 220772 - DNA, 33 bp, Homo sapien
ggttctcctattctcatcaacacagagttttgt

SEQ ID NO: 220773 - DNA, 33 bp, Homo sapien
tcacatttacctgagccacctaggttcccaaat

SEQ ID NO: 220774 - DNA, 33 bp, Homo sapien
tcacatttacctgagcgacctaggttcccaaat

SEQ ID NO: 220775 - DNA, 33 bp, Homo sapien
gatccacacagtccaaatggagcaggcagctgc

SEQ ID NO: 220776 - DNA, 33 bp, Homo sapien
gatccacacagtccaagtggagcaggcagctgc

SEQ ID NO: 220777 - DNA, 33 bp, Homo sapien
ccttgatctgcttaaaattacagtaatatcact

SEQ ID NO: 220778 - DNA, 33 bp, Homo sapien
ccttgatctgcttaaagttacagtaatatcact

SEQ ID NO: 220779 - DNA, 33 bp, Homo sapien
gaagcagttacaggacacagatcaaatagagaa

SEQ ID NO: 220780 - DNA, 33 bp, Homo sapien
gaagcagttacaggacgcagatcaaatagagaa

SEQ ID NO: 220781 - DNA, 33 bp, Homo sapien
acttaaactcaagtaaaagctaaagggttgaag

SEQ ID NO: 220782 - DNA, 33 bp, Homo sapien
acttaaactcaagtaagagctaaagggttgaag

SEQ ID NO: 220783 - DNA, 33 bp, Homo sapien
cctcagtgttgaatcaaatcaatttaggtattg

SEQ ID NO: 220784 - DNA, 33 bp, Homo sapien
cctcagtgttgaatcagatcaatttaggtattg

SEQ ID NO: 220785 - DNA, 33 bp, Homo sapien
caacactgaggttggaaaagctatttcttattt

SEQ ID NO: 220786 - DNA, 33 bp, Homo sapien
caacactgaggttggagaagctatttcttattt

SEQ ID NO: 220787 - DNA, 33 bp, Homo sapien
tttgtcttgaataatcagaaagcctcttatctg

SEQ ID NO: 220788 - DNA, 33 bp, Homo sapien
tttgtcttgaataatcggaaagcctcttatctg

SEQ ID NO: 220789 - DNA, 33 bp, Homo sapien
ttcatcacacagaaagcagtcggctcagaactg

SEQ ID NO: 220790 - DNA, 33 bp, Homo sapien
ttcatcacacagaaagtagtcggctcagaactg

SEQ ID NO: 220791 - DNA, 33 bp, Homo sapien
agatagtttctgagataagacagaggacaagat

SEQ ID NO: 220792 - DNA, 33 bp, Homo sapien
agatagtttctgagatgagacagaggacaagat

SEQ ID NO: 220793 - DNA, 33 bp, Homo sapien
cccctgtcttcctgcaaggcataacttcacaaa

SEQ ID NO: 220794 - DNA, 33 bp, Homo sapien
cccctgtcttcctgcagggcataacttcacaaa

SEQ ID NO: 220795 - DNA, 33 bp, Homo sapien
cagacaatacatttgagaaattttcctatgaca

SEQ ID NO: 220796 - DNA, 33 bp, Homo sapien
cagacaatacatttgataaattttcctatgaca

SEQ ID NO: 220797 - DNA, 33 bp, Homo sapien
ccattaagaagccccactgaaatacctcctcac

SEQ ID NO: 220798 - DNA, 33 bp, Homo sapien
ccattaagaagccccattgaaatacctcctcac

SEQ ID NO: 220799 - DNA, 33 bp, Homo sapien
gtttcatgccagaaaacttgacagctgctactc

SEQ ID NO: 220800 - DNA, 33 bp, Homo sapien
gtttcatgccagaaaatttgacagctgctactc

SEQ ID NO: 220801 - DNA, 33 bp, Homo sapien
cagcacatgtgtcctgaagaaatgacgaccagt

SEQ ID NO: 220802 - DNA, 33 bp, Homo sapien
cagcacatgtgtcctgcagaaatgacgaccagt

SEQ ID NO: 220803 - DNA, 33 bp, Homo sapien
tattgtaattaaagtaacaagagactctcctat

SEQ ID NO: 220804 - DNA, 33 bp, Homo sapien
tattgtaattaaagtagcaagagactctcctat

SEQ ID NO: 220805 - DNA, 33 bp, Homo sapien
gtttgctggaccaaaccgaacagactgcagtac

SEQ ID NO: 220806 - DNA, 33 bp, Homo sapien
gtttgctggaccaaactgaacagactgcagtac

SEQ ID NO: 220807 - DNA, 33 bp, Homo sapien
aaaagaatcgaaagcaacatcttgaagagagat

SEQ ID NO: 220808 - DNA, 33 bp, Homo sapien
aaaagaatcgaaagcagcatcttgaagagagat

SEQ ID NO: 220809 - DNA, 33 bp, Homo sapien
tatctttcagctatcaatcttccaccttaacct

SEQ ID NO: 220810 - DNA, 33 bp, Homo sapien
tatctttcagctatcagtcttccaccttaacct

SEQ ID NO: 220811 - DNA, 33 bp, Homo sapien
atgagaataagtctaactggagtcagagccaag

SEQ ID NO: 220812 - DNA, 33 bp, Homo sapien
atgagaataagtctaattggagtcagagccaag

SEQ ID NO: 220813 - DNA, 33 bp, Homo sapien
agggaagcatcatgaaaaagtaaagtgttcttc

SEQ ID NO: 220814 - DNA, 33 bp, Homo sapien
agggaagcatcatgaagaagtaaagtgttcttc

SEQ ID NO: 220815 - DNA, 33 bp, Homo sapien
aatgaaatgggaaaaactgggagccagcctcaa

SEQ ID NO: 220816 - DNA, 33 bp, Homo sapien
aatgaaatgggaaaaagtgggagccagcctcaa

SEQ ID NO: 220817 - DNA, 33 bp, Homo sapien
aaattcactagaccacaaaataaatactgcctg

SEQ ID NO: 220818 - DNA, 33 bp, Homo sapien
aaattcactagaccacgaaataaatactgcctg

SEQ ID NO: 220819 - DNA, 33 bp, Homo sapien
taacaataagcaaaaaaacagtgcactctgctc

SEQ ID NO: 220820 - DNA, 33 bp, Homo sapien
taacaataagcaaaaagacagtgcactctgctc

SEQ ID NO: 220821 - DNA, 33 bp, Homo sapien
acactattctggacaccgagaatataacaataa

SEQ ID NO: 220822 - DNA, 33 bp, Homo sapien
acactattctggacactgagaatataacaataa

SEQ ID NO: 220823 - DNA, 33 bp, Homo sapien
tctgctaggtgctttaggcaatatttttattca

SEQ ID NO: 220824 - DNA, 33 bp, Homo sapien
tctgctaggtgctttatgcaatatttttattca

SEQ ID NO: 220825 - DNA, 33 bp, Homo sapien
ttaccttcagatggatcaggttgaaattggaca

SEQ ID NO: 220826 - DNA, 33 bp, Homo sapien
ttaccttcagatggattaggttgaaattggaca

SEQ ID NO: 220827 - DNA, 33 bp, Homo sapien
atccatctgaaggtaaaaattttaggccatgaa

SEQ ID NO: 220828 - DNA, 33 bp, Homo sapien
atccatctgaaggtaacaattttaggccatgaa

SEQ ID NO: 220829 - DNA, 33 bp, Homo sapien
tgcttccctgctcaaacgctgccatcagcaaca

SEQ ID NO: 220830 - DNA, 33 bp, Homo sapien
tgcttccctgctcaaatgctgccatcagcaaca

SEQ ID NO: 220831 - DNA, 33 bp, Homo sapien
gtttcaagaatttggaagttgatatctttgcaa

SEQ ID NO: 220832 - DNA, 33 bp, Homo sapien
gtttcaagaatttggatgttgatatctttgcaa

SEQ ID NO: 220833 - DNA, 33 bp, Homo sapien
caccatctcacaaaacaattctacattttgccc

SEQ ID NO: 220834 - DNA, 33 bp, Homo sapien
caccatctcacaaaacgattctacattttgccc

SEQ ID NO: 220835 - DNA, 33 bp, Homo sapien
atttgcaccaaaaaagcccctatgtgtagaaat

SEQ ID NO: 220836 - DNA, 33 bp, Homo sapien
atttgcaccaaaaaagtccctatgtgtagaaat

SEQ ID NO: 220837 - DNA, 33 bp, Homo sapien
tgggcggtctttaaaacgtctgcttgtgtgtgt

SEQ ID NO: 220838 - DNA, 33 bp, Homo sapien
tgggcggtctttaaaatgtctgcttgtgtgtgt

SEQ ID NO: 220839 - DNA, 33 bp, Homo sapien
tgataatctggactcgaaagtagatggtattct

SEQ ID NO: 220840 - DNA, 33 bp, Homo sapien
tgataatctggactcggaagtagatggtattct

SEQ ID NO: 220841 - DNA, 33 bp, Homo sapien
aatgtctcctgaaggacaaaattgcccctggtt

SEQ ID NO: 220842 - DNA, 33 bp, Homo sapien
aatgtctcctgaaggataaaattgcccctggtt

SEQ ID NO: 220843 - DNA, 33 bp, Homo sapien
ctcagatctattttaacgccaagagagcactgc

SEQ ID NO: 220844 - DNA, 33 bp, Homo sapien
ctcagatctattttaatgccaagagagcactgc

SEQ ID NO: 220845 - DNA, 33 bp, Homo sapien
tcagggcaggaaacctcaagttgtccccttcct

SEQ ID NO: 220846 - DNA, 33 bp, Homo sapien
tcagggcaggaaacctgaagttgtccccttcct

SEQ ID NO: 220847 - DNA, 33 bp, Homo sapien
tttaaaccaaatgcaaagagacagcatatttaa

SEQ ID NO: 220848 - DNA, 33 bp, Homo sapien
tttaaaccaaatgcaaggagacagcatatttaa

SEQ ID NO: 220849 - DNA, 33 bp, Homo sapien
agcccctttgtcagaaagtagtcaagagggaaa

SEQ ID NO: 220850 - DNA, 33 bp, Homo sapien
agcccctttgtcagaaggtagtcaagagggaaa

SEQ ID NO: 220851 - DNA, 33 bp, Homo sapien
tgtatatatgggccgaagttagcttgaaagttc

SEQ ID NO: 220852 - DNA, 33 bp, Homo sapien
tgtatatatgggccgaggttagcttgaaagttc

SEQ ID NO: 220853 - DNA, 33 bp, Homo sapien
gaactgaaaaagtacaccctgaaaagtacactc

SEQ ID NO: 220854 - DNA, 33 bp, Homo sapien
gaactgaaaaagtacagcctgaaaagtacactc

SEQ ID NO: 220855 - DNA, 33 bp, Homo sapien
taactgaaattcaaaagattgtgttcctcgatt

SEQ ID NO: 220856 - DNA, 33 bp, Homo sapien
taactgaaattcaaaatattgtgttcctcgatt

SEQ ID NO: 220857 - DNA, 33 bp, Homo sapien
ggaaaatatgtggggagaaaagcatgagagaat

SEQ ID NO: 220858 - DNA, 33 bp, Homo sapien
ggaaaatatgtggggataaaagcatgagagaat

SEQ ID NO: 220859 - DNA, 33 bp, Homo sapien
gagagaatatagataactggtatcaatgagtaa

SEQ ID NO: 220860 - DNA, 33 bp, Homo sapien
gagagaatatagataattggtatcaatgagtaa

SEQ ID NO: 220861 - DNA, 33 bp, Homo sapien
ttattttcttcagtaaagtgttctcgttgcaga

SEQ ID NO: 220862 - DNA, 33 bp, Homo sapien
ttattttcttcagtaaggtgttctcgttgcaga

SEQ ID NO: 220863 - DNA, 33 bp, Homo sapien
actcccacagataaaaccttctagccaaacaac

SEQ ID NO: 220864 - DNA, 33 bp, Homo sapien
actcccacagataaaatcttctagccaaacaac

SEQ ID NO: 220865 - DNA, 33 bp, Homo sapien
agtttcaagcatcccactctgacaaccatttcc

SEQ ID NO: 220866 - DNA, 33 bp, Homo sapien
agtttcaagcatcccattctgacaaccatttcc

SEQ ID NO: 220867 - DNA, 33 bp, Homo sapien
tgttgattaaatagaacactgccaatggtggca

SEQ ID NO: 220868 - DNA, 33 bp, Homo sapien
tgttgattaaatagaatactgccaatggtggca

SEQ ID NO: 220869 - DNA, 33 bp, Homo sapien
gtattacattagaaacaagtatatgcatctaaa

SEQ ID NO: 220870 - DNA, 33 bp, Homo sapien
gtattacattagaaacgagtatatgcatctaaa

SEQ ID NO: 220871 - DNA, 33 bp, Homo sapien
ggtggagactgtgtaaactttgataactggaga

SEQ ID NO: 220872 - DNA, 33 bp, Homo sapien
ggtggagactgtgtaacctttgataactggaga

SEQ ID NO: 220873 - DNA, 33 bp, Homo sapien
aagaaactaacaaaagaagcattgttaagaacc

SEQ ID NO: 220874 - DNA, 33 bp, Homo sapien
aagaaactaacaaaagtagcattgttaagaacc

SEQ ID NO: 220875 - DNA, 33 bp, Homo sapien
acattggccaacatccactaaaataaataaaca

SEQ ID NO: 220876 - DNA, 33 bp, Homo sapien
acattggccaacatccgctaaaataaataaaca

SEQ ID NO: 220877 - DNA, 33 bp, Homo sapien
ctatgagactaaaataagataaggcatgataag

SEQ ID NO: 220878 - DNA, 33 bp, Homo sapien
ctatgagactaaaataggataaggcatgataag

SEQ ID NO: 220879 - DNA, 33 bp, Homo sapien
agataaaggctgaatcagagcagagacttaagg

SEQ ID NO: 220880 - DNA, 33 bp, Homo sapien
agataaaggctgaatcggagcagagacttaagg

SEQ ID NO: 220881 - DNA, 33 bp, Homo sapien
actagctttttcatacacaattttcaagagaaa

SEQ ID NO: 220882 - DNA, 33 bp, Homo sapien
actagctttttcatacgcaattttcaagagaaa

SEQ ID NO: 220883 - DNA, 33 bp, Homo sapien
agtacaaatctctgaaacatataatacaacatc

SEQ ID NO: 220884 - DNA, 33 bp, Homo sapien
agtacaaatctctgaatcatataatacaacatc

SEQ ID NO: 220885 - DNA, 33 bp, Homo sapien
gtttgaataacaaatgaaatagcaaatctctcc

SEQ ID NO: 220886 - DNA, 33 bp, Homo sapien
gtttgaataacaaatgcaatagcaaatctctcc

SEQ ID NO: 220887 - DNA, 33 bp, Homo sapien
gagtctgagatgtcccaccctaacaccaaatga

SEQ ID NO: 220888 - DNA, 33 bp, Homo sapien
gagtctgagatgtcccgccctaacaccaaatga

SEQ ID NO: 220889 - DNA, 33 bp, Homo sapien
gtggaggaaattcccaaatgtcatgtggttcat

SEQ ID NO: 220890 - DNA, 33 bp, Homo sapien
gtggaggaaattcccagatgtcatgtggttcat

SEQ ID NO: 220891 - DNA, 33 bp, Homo sapien
actttcatctgtttaacatattgccaaaatatc

SEQ ID NO: 220892 - DNA, 33 bp, Homo sapien
actttcatctgtttaatatattgccaaaatatc

SEQ ID NO: 220893 - DNA, 33 bp, Homo sapien
catgctgatattccaaattctattgccacttgg

SEQ ID NO: 220894 - DNA, 33 bp, Homo sapien
catgctgatattccaagttctattgccacttgg

SEQ ID NO: 220895 - DNA, 33 bp, Homo sapien
tgtttatttttcaaaacccaggtaacaaatctc

SEQ ID NO: 220896 - DNA, 33 bp, Homo sapien
tgtttatttttcaaaatccaggtaacaaatctc

SEQ ID NO: 220897 - DNA, 33 bp, Homo sapien
gccgaaagttagcatcgccagcaatttcatgtg

SEQ ID NO: 220898 - DNA, 33 bp, Homo sapien
gccgaaagttagcatctccagcaatttcatgtg

SEQ ID NO: 220899 - DNA, 33 bp, Homo sapien
aaaaaaatgtagaacacaatacctgccctcttt

SEQ ID NO: 220900 - DNA, 33 bp, Homo sapien
aaaaaaatgtagaacataatacctgccctcttt

SEQ ID NO: 220901 - DNA, 33 bp, Homo sapien
atagtcatatagttgccatcttttttttagtta

SEQ ID NO: 220902 - DNA, 33 bp, Homo sapien
atagtcatatagttgctatcttttttttagtta

SEQ ID NO: 220903 - DNA, 33 bp, Homo sapien
attatattttgagataagcatgatttgagggta

SEQ ID NO: 220904 - DNA, 33 bp, Homo sapien
attatattttgagatacgcatgatttgagggta

SEQ ID NO: 220905 - DNA, 33 bp, Homo sapien
catgtacataagtatccactgtttagcacctac

SEQ ID NO: 220906 - DNA, 33 bp, Homo sapien
catgtacataagtatctactgtttagcacctac

SEQ ID NO: 220907 - DNA, 33 bp, Homo sapien
cccaattatctcttcaaatgcagaattaattgt

SEQ ID NO: 220908 - DNA, 33 bp, Homo sapien
cccaattatctcttcagatgcagaattaattgt

SEQ ID NO: 220909 - DNA, 33 bp, Homo sapien
gctcttgggaattgtcaaggtagatgaaatctg

SEQ ID NO: 220910 - DNA, 33 bp, Homo sapien
gctcttgggaattgtcgaggtagatgaaatctg

SEQ ID NO: 220911 - DNA, 33 bp, Homo sapien
ggaactgcgatttgtaactgggactcagaagag

SEQ ID NO: 220912 - DNA, 33 bp, Homo sapien
ggaactgcgatttgtagctgggactcagaagag

SEQ ID NO: 220913 - DNA, 33 bp, Homo sapien
catttatctccagagcggaactcttgacctaca

SEQ ID NO: 220914 - DNA, 33 bp, Homo sapien
catttatctccagagctgaactcttgacctaca

SEQ ID NO: 220915 - DNA, 33 bp, Homo sapien
cacaattcctagattaactgtcctttcgtttgc

SEQ ID NO: 220916 - DNA, 33 bp, Homo sapien
cacaattcctagattagctgtcctttcgtttgc

SEQ ID NO: 220917 - DNA, 33 bp, Homo sapien
ttgaaaatatgaattgaactgcaaaagctagac

SEQ ID NO: 220918 - DNA, 33 bp, Homo sapien
ttgaaaatatgaattgtactgcaaaagctagac

SEQ ID NO: 220919 - DNA, 33 bp, Homo sapien
gattgtcttttgctgaatagaggaatggcaaag

SEQ ID NO: 220920 - DNA, 33 bp, Homo sapien
gattgtcttttgctgagtagaggaatggcaaag

SEQ ID NO: 220921 - DNA, 33 bp, Homo sapien
acaaaggccagtggcaaagacccttattttaag

SEQ ID NO: 220922 - DNA, 33 bp, Homo sapien
acaaaggccagtggcacagacccttattttaag

SEQ ID NO: 220923 - DNA, 33 bp, Homo sapien
acctctccacagtagacgctttgaataggcaca

SEQ ID NO: 220924 - DNA, 33 bp, Homo sapien
acctctccacagtagatgctttgaataggcaca

SEQ ID NO: 220925 - DNA, 33 bp, Homo sapien
ctgaccatacaaccaaacaatccctggctagac

SEQ ID NO: 220926 - DNA, 33 bp, Homo sapien
ctgaccatacaaccaagcaatccctggctagac

SEQ ID NO: 220927 - DNA, 33 bp, Homo sapien
ttttcacagcccataaatccatcacaccagatt

SEQ ID NO: 220928 - DNA, 33 bp, Homo sapien
ttttcacagcccataagtccatcacaccagatt

SEQ ID NO: 220929 - DNA, 33 bp, Homo sapien
aatactgaacttgctacaggcagcaactacgct

SEQ ID NO: 220930 - DNA, 33 bp, Homo sapien
aatactgaacttgctataggcagcaactacgct

SEQ ID NO: 220931 - DNA, 33 bp, Homo sapien
agtgctgcgtgtttaagtggctatttcctatat

SEQ ID NO: 220932 - DNA, 33 bp, Homo sapien
agtgctgcgtgtttaattggctatttcctatat

SEQ ID NO: 220933 - DNA, 33 bp, Homo sapien
gacactgtgtggatcaaagatgaacaacccatc

SEQ ID NO: 220934 - DNA, 33 bp, Homo sapien
gacactgtgtggatcagagatgaacaacccatc

SEQ ID NO: 220935 - DNA, 33 bp, Homo sapien
ggcatctttgccaaggaacttagttaccatcgt

SEQ ID NO: 220936 - DNA, 33 bp, Homo sapien
ggcatctttgccaaggtacttagttaccatcgt

SEQ ID NO: 220937 - DNA, 33 bp, Homo sapien
tgacaaaaatcctggagatcttttctgagacat

SEQ ID NO: 220938 - DNA, 33 bp, Homo sapien
tgacaaaaatcctggatatcttttctgagacat

SEQ ID NO: 220939 - DNA, 33 bp, Homo sapien
gagacgtatgcttcacaaatacagagcagtaac

SEQ ID NO: 220940 - DNA, 33 bp, Homo sapien
gagacgtatgcttcacgaatacagagcagtaac

SEQ ID NO: 220941 - DNA, 33 bp, Homo sapien
ttcagtcagggagctccaaggttttattgcctg

SEQ ID NO: 220942 - DNA, 33 bp, Homo sapien
ttcagtcagggagctctaaggttttattgcctg

SEQ ID NO: 220943 - DNA, 33 bp, Homo sapien
tatttatatgactctccaccacactcaaatgac

SEQ ID NO: 220944 - DNA, 33 bp, Homo sapien
tatttatatgactctctaccacactcaaatgac

SEQ ID NO: 220945 - DNA, 33 bp, Homo sapien
tatactgttgcctctaacaggctatactgtaag

SEQ ID NO: 220946 - DNA, 33 bp, Homo sapien
tatactgttgcctctagcaggctatactgtaag

SEQ ID NO: 220947 - DNA, 33 bp, Homo sapien
gaattagaaaaaactacgctgaatttcatatgc

SEQ ID NO: 220948 - DNA, 33 bp, Homo sapien
gaattagaaaaaactatgctgaatttcatatgc

SEQ ID NO: 220949 - DNA, 33 bp, Homo sapien
atctatatgccgtaagaagaataaaaaaagctt

SEQ ID NO: 220950 - DNA, 33 bp, Homo sapien
atctatatgccgtaaggagaataaaaaaagctt

SEQ ID NO: 220951 - DNA, 33 bp, Homo sapien
agaaaagacaagcatcaaggaacacaacacaat

SEQ ID NO: 220952 - DNA, 33 bp, Homo sapien
agaaaagacaagcatccaggaacacaacacaat

SEQ ID NO: 220953 - DNA, 33 bp, Homo sapien
tgagttcattgttcctaaatgccatctgaaacc

SEQ ID NO: 220954 - DNA, 33 bp, Homo sapien
tgagttcattgttcctgaatgccatctgaaacc

SEQ ID NO: 220955 - DNA, 33 bp, Homo sapien
aaggattttattaagccgcaggaattaaccaat

SEQ ID NO: 220956 - DNA, 33 bp, Homo sapien
aaggattttattaagctgcaggaattaaccaat

SEQ ID NO: 220957 - DNA, 33 bp, Homo sapien
tccatattcttgccaaacatgaacctttacatt

SEQ ID NO: 220958 - DNA, 33 bp, Homo sapien
tccatattcttgccaaccatgaacctttacatt

SEQ ID NO: 220959 - DNA, 33 bp, Homo sapien
gttcagatgacacatcagagttgaatccagcgt

SEQ ID NO: 220960 - DNA, 33 bp, Homo sapien
gttcagatgacacatcggagttgaatccagcgt

SEQ ID NO: 220961 - DNA, 33 bp, Homo sapien
attcatcaaagcatgaacaattcaagattactc

SEQ ID NO: 220962 - DNA, 33 bp, Homo sapien
attcatcaaagcatgagcaattcaagattactc

SEQ ID NO: 220963 - DNA, 33 bp, Homo sapien
ctttctgttgatcctaaagagcaaatgaaatca

SEQ ID NO: 220964 - DNA, 33 bp, Homo sapien
ctttctgttgatcctagagagcaaatgaaatca

SEQ ID NO: 220965 - DNA, 33 bp, Homo sapien
agagtgatagtgagataagtcctgcccatttat

SEQ ID NO: 220966 - DNA, 33 bp, Homo sapien
agagtgatagtgagattagtcctgcccatttat

SEQ ID NO: 220967 - DNA, 33 bp, Homo sapien
tgtgggtgaggattcacgtacagcatagcactg

SEQ ID NO: 220968 - DNA, 33 bp, Homo sapien
tgtgggtgaggattcatgtacagcatagcactg

SEQ ID NO: 220969 - DNA, 33 bp, Homo sapien
agagtatttcagcccaaatgccgacatatgagt

SEQ ID NO: 220970 - DNA, 33 bp, Homo sapien
agagtatttcagcccagatgccgacatatgagt

SEQ ID NO: 220971 - DNA, 33 bp, Homo sapien
tgcagtcacccctgcactagaagtttagtgatc

SEQ ID NO: 220972 - DNA, 33 bp, Homo sapien
tgcagtcacccctgcattagaagtttagtgatc

SEQ ID NO: 220973 - DNA, 33 bp, Homo sapien
taattcataggaagacgcaggttagtccaaacc

SEQ ID NO: 220974 - DNA, 33 bp, Homo sapien
taattcataggaagactcaggttagtccaaacc

SEQ ID NO: 220975 - DNA, 33 bp, Homo sapien
gggaaaagtatcaaaaagacttaatttgcagta

SEQ ID NO: 220976 - DNA, 33 bp, Homo sapien
gggaaaagtatcaaaaggacttaatttgcagta

SEQ ID NO: 220977 - DNA, 33 bp, Homo sapien
agtctgttgaaaaccccagaataatgttcagtc

SEQ ID NO: 220978 - DNA, 33 bp, Homo sapien
agtctgttgaaaaccctagaataatgttcagtc

SEQ ID NO: 220979 - DNA, 33 bp, Homo sapien
tcacgtattccctttaaccacaatagtcactct

SEQ ID NO: 220980 - DNA, 33 bp, Homo sapien
tcacgtattccctttatccacaatagtcactct

SEQ ID NO: 220981 - DNA, 33 bp, Homo sapien
atgacaaagtcaacaacgtccaatttggccatc

SEQ ID NO: 220982 - DNA, 33 bp, Homo sapien
atgacaaagtcaacaatgtccaatttggccatc

SEQ ID NO: 220983 - DNA, 33 bp, Homo sapien
atcagtgacttgaggcaacaactgtaagccagg

SEQ ID NO: 220984 - DNA, 33 bp, Homo sapien
atcagtgacttgaggccacaactgtaagccagg

SEQ ID NO: 220985 - DNA, 33 bp, Homo sapien
aatcccaatagtgctcaagctttgcattaagct

SEQ ID NO: 220986 - DNA, 33 bp, Homo sapien
aatcccaatagtgctcgagctttgcattaagct

SEQ ID NO: 220987 - DNA, 33 bp, Homo sapien
tgatatgtctctcaaacttgttcaaagccaaag

SEQ ID NO: 220988 - DNA, 33 bp, Homo sapien
tgatatgtctctcaaagttgttcaaagccaaag

SEQ ID NO: 220989 - DNA, 33 bp, Homo sapien
tagtgataattggtataagtcatataagctgag

SEQ ID NO: 220990 - DNA, 33 bp, Homo sapien
tagtgataattggtatcagtcatataagctgag

SEQ ID NO: 220991 - DNA, 33 bp, Homo sapien
taccagcagccacgataatccattaaaattctt

SEQ ID NO: 220992 - DNA, 33 bp, Homo sapien
taccagcagccacgatcatccattaaaattctt

SEQ ID NO: 220993 - DNA, 33 bp, Homo sapien
cataccagtattcaaacgaagtcctacatctgc

SEQ ID NO: 220994 - DNA, 33 bp, Homo sapien
cataccagtattcaaatgaagtcctacatctgc

SEQ ID NO: 220995 - DNA, 33 bp, Homo sapien
tcacagataactatatcacatcaatctcctggt

SEQ ID NO: 220996 - DNA, 33 bp, Homo sapien
tcacagataactatattacatcaatctcctggt

SEQ ID NO: 220997 - DNA, 33 bp, Homo sapien
gatatgaattttgacacgattcaacccagtaca

SEQ ID NO: 220998 - DNA, 33 bp, Homo sapien
gatatgaattttgacatgattcaacccagtaca

SEQ ID NO: 220999 - DNA, 33 bp, Homo sapien
cctcttcttgtattgcaccttcagtattgggat

SEQ ID NO: 221000 - DNA, 33 bp, Homo sapien
cctcttcttgtattgcgccttcagtattgggat

SEQ ID NO: 221001 - DNA, 33 bp, Homo sapien
aaaaagcactagaaaaatctgaccctgggctgc

SEQ ID NO: 221002 - DNA, 33 bp, Homo sapien
aaaaagcactagaaaagtctgaccctgggctgc

SEQ ID NO: 221003 - DNA, 33 bp, Homo sapien
tcttgactgtcttgtgaaaagtagcttcttgtc

SEQ ID NO: 221004 - DNA, 33 bp, Homo sapien
tcttgactgtcttgtggaaagtagcttcttgtc

SEQ ID NO: 221005 - DNA, 33 bp, Homo sapien
ctcaaaacactgaatacataacaggtgaggtat

SEQ ID NO: 221006 - DNA, 33 bp, Homo sapien
ctcaaaacactgaatatataacaggtgaggtat

SEQ ID NO: 221007 - DNA, 33 bp, Homo sapien
gtacaccaagagcaaaccccaatgtaaagtgtg

SEQ ID NO: 221008 - DNA, 33 bp, Homo sapien
gtacaccaagagcaaatcccaatgtaaagtgtg

SEQ ID NO: 221009 - DNA, 33 bp, Homo sapien
agccatcctgtaacaacctcttcttactcatta

SEQ ID NO: 221010 - DNA, 33 bp, Homo sapien
agccatcctgtaacaatctcttcttactcatta

SEQ ID NO: 221011 - DNA, 33 bp, Homo sapien
tcatccaaccacaataccttatttcactgtatc

SEQ ID NO: 221012 - DNA, 33 bp, Homo sapien
tcatccaaccacaatatcttatttcactgtatc

SEQ ID NO: 221013 - DNA, 33 bp, Homo sapien
tggccaaagggatgccccatactcagttttaac

SEQ ID NO: 221014 - DNA, 33 bp, Homo sapien
tggccaaagggatgcctcatactcagttttaac

SEQ ID NO: 221015 - DNA, 33 bp, Homo sapien
actgagccaattgttcacaactctttttcctag

SEQ ID NO: 221016 - DNA, 33 bp, Homo sapien
actgagccaattgttcgcaactctttttcctag

SEQ ID NO: 221017 - DNA, 33 bp, Homo sapien
tgatgcacaatattcaatgaaggacaagaaaat

SEQ ID NO: 221018 - DNA, 33 bp, Homo sapien
tgatgcacaatattcagtgaaggacaagaaaat

SEQ ID NO: 221019 - DNA, 33 bp, Homo sapien
ccatactacctttctcaagactcagtactggct

SEQ ID NO: 221020 - DNA, 33 bp, Homo sapien
ccatactacctttctctagactcagtactggct

SEQ ID NO: 221021 - DNA, 33 bp, Homo sapien
cactactaatttgccacgtggaatgacattggc

SEQ ID NO: 221022 - DNA, 33 bp, Homo sapien
cactactaatttgccatgtggaatgacattggc

SEQ ID NO: 221023 - DNA, 33 bp, Homo sapien
ggtagcaccctgccaaaagcaacaatagctaca

SEQ ID NO: 221024 - DNA, 33 bp, Homo sapien
ggtagcaccctgccaagagcaacaatagctaca

SEQ ID NO: 221025 - DNA, 33 bp, Homo sapien
acagataaaacagccccgaatctgtgggtaaaa

SEQ ID NO: 221026 - DNA, 33 bp, Homo sapien
acagataaaacagccctgaatctgtgggtaaaa

SEQ ID NO: 221027 - DNA, 33 bp, Homo sapien
tgcctggattgggaagcaatgagctgtaggtcc

SEQ ID NO: 221028 - DNA, 33 bp, Homo sapien
tgcctggattgggaagtaatgagctgtaggtcc

SEQ ID NO: 221029 - DNA, 33 bp, Homo sapien
gattttcacatagtgaggttgcataaaatgagg

SEQ ID NO: 221030 - DNA, 33 bp, Homo sapien
gattttcacatagtgatgttgcataaaatgagg

SEQ ID NO: 221031 - DNA, 33 bp, Homo sapien
ataaaactatattcagaacgctgcaatcaattt

SEQ ID NO: 221032 - DNA, 33 bp, Homo sapien
ataaaactatattcaggacgctgcaatcaattt

SEQ ID NO: 221033 - DNA, 33 bp, Homo sapien
gttggtggcatagctccaatccaagtctgaaag

SEQ ID NO: 221034 - DNA, 33 bp, Homo sapien
gttggtggcatagctctaatccaagtctgaaag

SEQ ID NO: 221035 - DNA, 33 bp, Homo sapien
ctgtgttattgtagaacgttaatgcttaggaga

SEQ ID NO: 221036 - DNA, 33 bp, Homo sapien
ctgtgttattgtagaatgttaatgcttaggaga

SEQ ID NO: 221037 - DNA, 33 bp, Homo sapien
atccatttccacataacagctttgaggtgcatt

SEQ ID NO: 221038 - DNA, 33 bp, Homo sapien
atccatttccacataatagctttgaggtgcatt

SEQ ID NO: 221039 - DNA, 33 bp, Homo sapien
gttgaaccgatcaaaccttaaccgtctggtttc

SEQ ID NO: 221040 - DNA, 33 bp, Homo sapien
gttgaaccgatcaaactttaaccgtctggtttc

SEQ ID NO: 221041 - DNA, 33 bp, Homo sapien
caaagattagtcccaaaatgtgcaaaccaaata

SEQ ID NO: 221042 - DNA, 33 bp, Homo sapien
caaagattagtcccaagatgtgcaaaccaaata

SEQ ID NO: 221043 - DNA, 33 bp, Homo sapien
cttctgcttaatgagacgaggaaactcttattt

SEQ ID NO: 221044 - DNA, 33 bp, Homo sapien
cttctgcttaatgagatgaggaaactcttattt

SEQ ID NO: 221045 - DNA, 33 bp, Homo sapien
gtgctaaagtggattgaaaaatgtgtttagtaa

SEQ ID NO: 221046 - DNA, 33 bp, Homo sapien
gtgctaaagtggattggaaaatgtgtttagtaa

SEQ ID NO: 221047 - DNA, 33 bp, Homo sapien
gtacttgaaaataagaatatcttgattagaaaa

SEQ ID NO: 221048 - DNA, 33 bp, Homo sapien
gtacttgaaaataagattatcttgattagaaaa

SEQ ID NO: 221049 - DNA, 33 bp, Homo sapien
ctttgttattaaatcaacctcactgattatttt

SEQ ID NO: 221050 - DNA, 33 bp, Homo sapien
ctttgttattaaatcagcctcactgattatttt

SEQ ID NO: 221051 - DNA, 33 bp, Homo sapien
ttttatgctgtttatacatctttactgcttttt

SEQ ID NO: 221052 - DNA, 33 bp, Homo sapien
ttttatgctgtttatatatctttactgcttttt

SEQ ID NO: 221053 - DNA, 33 bp, Homo sapien
taataaaattagataaaaggcagagtctacaca

SEQ ID NO: 221054 - DNA, 33 bp, Homo sapien
taataaaattagataataggcagagtctacaca

SEQ ID NO: 221055 - DNA, 33 bp, Homo sapien
aggaaacttttagggacgatgcctatgtttgtt

SEQ ID NO: 221056 - DNA, 33 bp, Homo sapien
aggaaacttttagggatgatgcctatgtttgtt

SEQ ID NO: 221057 - DNA, 33 bp, Homo sapien
aggaagaggatgcagcaattacaaaatggcagg

SEQ ID NO: 221058 - DNA, 33 bp, Homo sapien
aggaagaggatgcagcgattacaaaatggcagg

SEQ ID NO: 221059 - DNA, 33 bp, Homo sapien
caccaaattatatagaccagctttttgtcacta

SEQ ID NO: 221060 - DNA, 33 bp, Homo sapien
caccaaattatatagatcagctttttgtcacta

SEQ ID NO: 221061 - DNA, 33 bp, Homo sapien
cagattaataaaatcaatcgttaaacactaaaa

SEQ ID NO: 221062 - DNA, 33 bp, Homo sapien
cagattaataaaatcagtcgttaaacactaaaa

SEQ ID NO: 221063 - DNA, 33 bp, Homo sapien
taaactataatacaaaagtcacatatcaacttg

SEQ ID NO: 221064 - DNA, 33 bp, Homo sapien
taaactataatacaaacgtcacatatcaacttg

SEQ ID NO: 221065 - DNA, 33 bp, Homo sapien
caaatactttagcaacaatttttcaagttgata

SEQ ID NO: 221066 - DNA, 33 bp, Homo sapien
caaatactttagcaacgatttttcaagttgata

SEQ ID NO: 221067 - DNA, 33 bp, Homo sapien
tgttagcatttgtataacatttgtgaagaaatg

SEQ ID NO: 221068 - DNA, 33 bp, Homo sapien
tgttagcatttgtatatcatttgtgaagaaatg

SEQ ID NO: 221069 - DNA, 33 bp, Homo sapien
ggctgtaaagtatagccaggtctttagagtctt

SEQ ID NO: 221070 - DNA, 33 bp, Homo sapien
ggctgtaaagtatagctaggtctttagagtctt

SEQ ID NO: 221071 - DNA, 33 bp, Homo sapien
tgtgtgctcatgctaacggattcacctagaaaa

SEQ ID NO: 221072 - DNA, 33 bp, Homo sapien
tgtgtgctcatgctaatggattcacctagaaaa

SEQ ID NO: 221073 - DNA, 33 bp, Homo sapien
aatctgctctttaataagggatgtctagtgggt

SEQ ID NO: 221074 - DNA, 33 bp, Homo sapien
aatctgctctttaatacgggatgtctagtgggt

SEQ ID NO: 221075 - DNA, 33 bp, Homo sapien
tgtatatatccatgaacgtcataagtcgaatgg

SEQ ID NO: 221076 - DNA, 33 bp, Homo sapien
tgtatatatccatgaatgtcataagtcgaatgg

SEQ ID NO: 221077 - DNA, 33 bp, Homo sapien
tgaccacaggttcatacaaattatttacaacac

SEQ ID NO: 221078 - DNA, 33 bp, Homo sapien
tgaccacaggttcatagaaattatttacaacac

SEQ ID NO: 221079 - DNA, 33 bp, Homo sapien
atcaatgttttaatgcaaagtgtttctaatatt

SEQ ID NO: 221080 - DNA, 33 bp, Homo sapien
atcaatgttttaatgcgaagtgtttctaatatt

SEQ ID NO: 221081 - DNA, 33 bp, Homo sapien
tgaagcatttctgggaagtgaactcttagttga

SEQ ID NO: 221082 - DNA, 33 bp, Homo sapien
tgaagcatttctgggaggtgaactcttagttga

SEQ ID NO: 221083 - DNA, 33 bp, Homo sapien
atattgatcagtggtaaacagtacaggaggtga

SEQ ID NO: 221084 - DNA, 33 bp, Homo sapien
atattgatcagtggtagacagtacaggaggtga

SEQ ID NO: 221085 - DNA, 33 bp, Homo sapien
aatgaatagacaaaaccagatttatgatgttct

SEQ ID NO: 221086 - DNA, 33 bp, Homo sapien
aatgaatagacaaaactagatttatgatgttct

SEQ ID NO: 221087 - DNA, 33 bp, Homo sapien
gggctgtttggtattacagtgagaaattcctta

SEQ ID NO: 221088 - DNA, 33 bp, Homo sapien
gggctgtttggtattatagtgagaaattcctta

SEQ ID NO: 221089 - DNA, 33 bp, Homo sapien
aaatataaaattttgacctttggcttgaaaggc

SEQ ID NO: 221090 - DNA, 33 bp, Homo sapien
aaatataaaattttgatctttggcttgaaaggc

SEQ ID NO: 221091 - DNA, 33 bp, Homo sapien
ggattaagtccagaataatctttcaattttaag

SEQ ID NO: 221092 - DNA, 33 bp, Homo sapien
ggattaagtccagaatgatctttcaattttaag

SEQ ID NO: 221093 - DNA, 33 bp, Homo sapien
cattaaaatcagggagccaatttcaaatgcaac

SEQ ID NO: 221094 - DNA, 33 bp, Homo sapien
cattaaaatcagggagtcaatttcaaatgcaac

SEQ ID NO: 221095 - DNA, 33 bp, Homo sapien
ttcttacttcaggtgagacatacattttaaact

SEQ ID NO: 221096 - DNA, 33 bp, Homo sapien
ttcttacttcaggtgatacatacattttaaact

SEQ ID NO: 221097 - DNA, 33 bp, Homo sapien
gtgggggttctggaaccgatgacccatggaaac

SEQ ID NO: 221098 - DNA, 33 bp, Homo sapien
gtgggggttctggaactgatgacccatggaaac

SEQ ID NO: 221099 - DNA, 33 bp, Homo sapien
tgcacatacatctatacaggatctgaatgaaaa

SEQ ID NO: 221100 - DNA, 33 bp, Homo sapien
tgcacatacatctatataggatctgaatgaaaa

SEQ ID NO: 221101 - DNA, 33 bp, Homo sapien
ggtttacttttgtttccatgtgagcatatgcgt

SEQ ID NO: 221102 - DNA, 33 bp, Homo sapien
ggtttacttttgtttcgatgtgagcatatgcgt

SEQ ID NO: 221103 - DNA, 33 bp, Homo sapien
aatgaatggaactttaagatgggcatttacagt

SEQ ID NO: 221104 - DNA, 33 bp, Homo sapien
aatgaatggaactttaggatgggcatttacagt

SEQ ID NO: 221105 - DNA, 33 bp, Homo sapien
tcaggatagtcaacaagcaatgtttgtcactaa

SEQ ID NO: 221106 - DNA, 33 bp, Homo sapien
tcaggatagtcaacaatcaatgtttgtcactaa

SEQ ID NO: 221107 - DNA, 33 bp, Homo sapien
attccaagtaaaaagaacttataacatctcaaa

SEQ ID NO: 221108 - DNA, 33 bp, Homo sapien
attccaagtaaaaagaccttataacatctcaaa

SEQ ID NO: 221109 - DNA, 33 bp, Homo sapien
aatactgtttggtatgaagcggcacatgagctt

SEQ ID NO: 221110 - DNA, 33 bp, Homo sapien
aatactgtttggtatggagcggcacatgagctt

SEQ ID NO: 221111 - DNA, 33 bp, Homo sapien
ttggagcatttggaacaagtaacgtaaaattta

SEQ ID NO: 221112 - DNA, 33 bp, Homo sapien
ttggagcatttggaacgagtaacgtaaaattta

SEQ ID NO: 221113 - DNA, 33 bp, Homo sapien
cttctattcttattgccagctcaagatggcaga

SEQ ID NO: 221114 - DNA, 33 bp, Homo sapien
cttctattcttattgcgagctcaagatggcaga

SEQ ID NO: 221115 - DNA, 33 bp, Homo sapien
tataaagtagctaattaaatgtcccaccttctg

SEQ ID NO: 221116 - DNA, 33 bp, Homo sapien
tataaagtagctaattcaatgtcccaccttctg

SEQ ID NO: 221117 - DNA, 33 bp, Homo sapien
actaagacattaaaatcagaatcaatttgagta

SEQ ID NO: 221118 - DNA, 33 bp, Homo sapien
actaagacattaaaatgagaatcaatttgagta

SEQ ID NO: 221119 - DNA, 33 bp, Homo sapien
ttactttgtaattttacctcaccacattttttt

SEQ ID NO: 221120 - DNA, 33 bp, Homo sapien
ttactttgtaattttatctcaccacattttttt

SEQ ID NO: 221121 - DNA, 33 bp, Homo sapien
cagactcaaagcagcccagcaaaaggcaaaaga

SEQ ID NO: 221122 - DNA, 33 bp, Homo sapien
cagactcaaagcagcctagcaaaaggcaaaaga

SEQ ID NO: 221123 - DNA, 33 bp, Homo sapien
tatctggttcaagagacagtgaaaaatacagcc

SEQ ID NO: 221124 - DNA, 33 bp, Homo sapien
tatctggttcaagagagagtgaaaaatacagcc

SEQ ID NO: 221125 - DNA, 33 bp, Homo sapien
atactctagatttcccaacaatttcatagtgaa

SEQ ID NO: 221126 - DNA, 33 bp, Homo sapien
atactctagatttcccgacaatttcatagtgaa

SEQ ID NO: 221127 - DNA, 33 bp, Homo sapien
gatgccaggataaacgaaaatgctccaaagaca

SEQ ID NO: 221128 - DNA, 33 bp, Homo sapien
gatgccaggataaacggaaatgctccaaagaca

SEQ ID NO: 221129 - DNA, 33 bp, Homo sapien
catgtattcgactgaaccataggaaattgccat

SEQ ID NO: 221130 - DNA, 33 bp, Homo sapien
catgtattcgactgaatcataggaaattgccat

SEQ ID NO: 221131 - DNA, 33 bp, Homo sapien
aaaaacactgcttagaataaagataaagccagc

SEQ ID NO: 221132 - DNA, 33 bp, Homo sapien
aaaaacactgcttagagtaaagataaagccagc

SEQ ID NO: 221133 - DNA, 33 bp, Homo sapien
tcttcatgccagtgaacgattacaccggaaaca

SEQ ID NO: 221134 - DNA, 33 bp, Homo sapien
tcttcatgccagtgaatgattacaccggaaaca

SEQ ID NO: 221135 - DNA, 33 bp, Homo sapien
ctagatgtgagacacgcaatcaaaagaggtcat

SEQ ID NO: 221136 - DNA, 33 bp, Homo sapien
ctagatgtgagacacggaatcaaaagaggtcat

SEQ ID NO: 221137 - DNA, 33 bp, Homo sapien
gaataattgagcaagtcaacacagtccctgtca

SEQ ID NO: 221138 - DNA, 33 bp, Homo sapien
gaataattgagcaagttaacacagtccctgtca

SEQ ID NO: 221139 - DNA, 33 bp, Homo sapien
gtatgagtacaaagtacaatggctctgtgcttt

SEQ ID NO: 221140 - DNA, 33 bp, Homo sapien
gtatgagtacaaagtataatggctctgtgcttt

SEQ ID NO: 221141 - DNA, 33 bp, Homo sapien
cctatgttctcattcaatctttgaggctggtta

SEQ ID NO: 221142 - DNA, 33 bp, Homo sapien
cctatgttctcattcagtctttgaggctggtta

SEQ ID NO: 221143 - DNA, 33 bp, Homo sapien
tacaggagaaggtataagttagacatttagaaa

SEQ ID NO: 221144 - DNA, 33 bp, Homo sapien
tacaggagaaggtatacgttagacatttagaaa

SEQ ID NO: 221145 - DNA, 33 bp, Homo sapien
ttattttgctgaaaacagtgtatccagcagcta

SEQ ID NO: 221146 - DNA, 33 bp, Homo sapien
ttattttgctgaaaaccgtgtatccagcagcta

SEQ ID NO: 221147 - DNA, 33 bp, Homo sapien
ttctgtgtgatcattacagaaagtaacttctaa

SEQ ID NO: 221148 - DNA, 33 bp, Homo sapien
ttctgtgtgatcattagagaaagtaacttctaa

SEQ ID NO: 221149 - DNA, 33 bp, Homo sapien
tgtgattatggtgaaaccagaattccggcagcc

SEQ ID NO: 221150 - DNA, 33 bp, Homo sapien
tgtgattatggtgaaatcagaattccggcagcc

SEQ ID NO: 221151 - DNA, 33 bp, Homo sapien
tatcaaggagcaaaaaatctcaacttcctttct

SEQ ID NO: 221152 - DNA, 33 bp, Homo sapien
tatcaaggagcaaaaattctcaacttcctttct

SEQ ID NO: 221153 - DNA, 33 bp, Homo sapien
aatacatttcctctataagcattatctatgagt

SEQ ID NO: 221154 - DNA, 33 bp, Homo sapien
aatacatttcctctatcagcattatctatgagt

SEQ ID NO: 221155 - DNA, 33 bp, Homo sapien
ttgttccttctacaaaacctaaactagtaggct

SEQ ID NO: 221156 - DNA, 33 bp, Homo sapien
ttgttccttctacaaagcctaaactagtaggct

SEQ ID NO: 221157 - DNA, 33 bp, Homo sapien
tttatgtcactataaactaagattatctcaagg

SEQ ID NO: 221158 - DNA, 33 bp, Homo sapien
tttatgtcactataaattaagattatctcaagg

SEQ ID NO: 221159 - DNA, 33 bp, Homo sapien
tctcatctcctttaagacagctaatttggtaac

SEQ ID NO: 221160 - DNA, 33 bp, Homo sapien
tctcatctcctttaaggcagctaatttggtaac

SEQ ID NO: 221161 - DNA, 33 bp, Homo sapien
tgaaagacacatttacaaaactagaaaatgcag

SEQ ID NO: 221162 - DNA, 33 bp, Homo sapien
tgaaagacacatttacgaaactagaaaatgcag

SEQ ID NO: 221163 - DNA, 33 bp, Homo sapien
gattgtatacctagaccatcttacagactcctc

SEQ ID NO: 221164 - DNA, 33 bp, Homo sapien
gattgtatacctagactatcttacagactcctc

SEQ ID NO: 221165 - DNA, 33 bp, Homo sapien
ctgcaaaaatacctaactatccatcaactgatg

SEQ ID NO: 221166 - DNA, 33 bp, Homo sapien
ctgcaaaaatacctaagtatccatcaactgatg

SEQ ID NO: 221167 - DNA, 33 bp, Homo sapien
tttaactatgacatgaatactaccacaaactaa

SEQ ID NO: 221168 - DNA, 33 bp, Homo sapien
tttaactatgacatgactactaccacaaactaa

SEQ ID NO: 221169 - DNA, 33 bp, Homo sapien
ataataaccatatttgaagttggaaatatgcaa

SEQ ID NO: 221170 - DNA, 33 bp, Homo sapien
ataataaccatatttggagttggaaatatgcaa

SEQ ID NO: 221171 - DNA, 33 bp, Homo sapien
tggttattatttttaaagtttagcatcaccaga

SEQ ID NO: 221172 - DNA, 33 bp, Homo sapien
tggttattatttttaacgtttagcatcaccaga

SEQ ID NO: 221173 - DNA, 33 bp, Homo sapien
tagaagtatcactaccagagccctcactctatc

SEQ ID NO: 221174 - DNA, 33 bp, Homo sapien
tagaagtatcactaccggagccctcactctatc

SEQ ID NO: 221175 - DNA, 33 bp, Homo sapien
cttagggagatagatgcagcaaagttgaggaaa

SEQ ID NO: 221176 - DNA, 33 bp, Homo sapien
cttagggagatagatggagcaaagttgaggaaa

SEQ ID NO: 221177 - DNA, 33 bp, Homo sapien
tccagaaaatgataagcacatgcattggtctgt

SEQ ID NO: 221178 - DNA, 33 bp, Homo sapien
tccagaaaatgataagtacatgcattggtctgt

SEQ ID NO: 221179 - DNA, 33 bp, Homo sapien
ggaataaacacaggaccaattttggaatagttt

SEQ ID NO: 221180 - DNA, 33 bp, Homo sapien
ggaataaacacaggactaattttggaatagttt

SEQ ID NO: 221181 - DNA, 33 bp, Homo sapien
aagaaatgcccaacatcactaatcgttagagaa

SEQ ID NO: 221182 - DNA, 33 bp, Homo sapien
aagaaatgcccaacatgactaatcgttagagaa

SEQ ID NO: 221183 - DNA, 33 bp, Homo sapien
atgatttgcaatgtgggactacaagcggccctc

SEQ ID NO: 221184 - DNA, 33 bp, Homo sapien
atgatttgcaatgtggtactacaagcggccctc

SEQ ID NO: 221185 - DNA, 33 bp, Homo sapien
gttgctaagtaatggaagtagaaataaaaacaa

SEQ ID NO: 221186 - DNA, 33 bp, Homo sapien
gttgctaagtaatggaggtagaaataaaaacaa

SEQ ID NO: 221187 - DNA, 33 bp, Homo sapien
gtgctttgaatagtggccatttatgtagggtat

SEQ ID NO: 221188 - DNA, 33 bp, Homo sapien
gtgctttgaatagtggtcatttatgtagggtat

SEQ ID NO: 221189 - DNA, 33 bp, Homo sapien
gcataaaacacttgaaaattacaaacattgaat

SEQ ID NO: 221190 - DNA, 33 bp, Homo sapien
gcataaaacacttgaagattacaaacattgaat

SEQ ID NO: 221191 - DNA, 33 bp, Homo sapien
ttttcccttgcatttgcactctgtgaatgcagc

SEQ ID NO: 221192 - DNA, 33 bp, Homo sapien
ttttcccttgcatttgtactctgtgaatgcagc

SEQ ID NO: 221193 - DNA, 33 bp, Homo sapien
ccttttcataagcaaaacatcatgtggctaagc

SEQ ID NO: 221194 - DNA, 33 bp, Homo sapien
ccttttcataagcaaagcatcatgtggctaagc

SEQ ID NO: 221195 - DNA, 33 bp, Homo sapien
gaatatatctgatatccatttgagagcctgaca

SEQ ID NO: 221196 - DNA, 33 bp, Homo sapien
gaatatatctgatatctatttgagagcctgaca

SEQ ID NO: 221197 - DNA, 33 bp, Homo sapien
gagtgcttttttctgtcaagcgtaattagtgca

SEQ ID NO: 221198 - DNA, 33 bp, Homo sapien
gagtgcttttttctgtgaagcgtaattagtgca

SEQ ID NO: 221199 - DNA, 33 bp, Homo sapien
gtctataaaataaaaggcaaagctataaatata

SEQ ID NO: 221200 - DNA, 33 bp, Homo sapien
gtctataaaataaaagtcaaagctataaatata

SEQ ID NO: 221201 - DNA, 33 bp, Homo sapien
aaaagacattgttttgaaacctgagtacatgga

SEQ ID NO: 221202 - DNA, 33 bp, Homo sapien
aaaagacattgttttgcaacctgagtacatgga

SEQ ID NO: 221203 - DNA, 33 bp, Homo sapien
ccagagatcctggacactgagccagagtcagtg

SEQ ID NO: 221204 - DNA, 33 bp, Homo sapien
ccagagatcctggacattgagccagagtcagtg

SEQ ID NO: 221205 - DNA, 33 bp, Homo sapien
aaactttgaggaatgaaataattaaggaaggag

SEQ ID NO: 221206 - DNA, 33 bp, Homo sapien
aaactttgaggaatgacataattaaggaaggag

SEQ ID NO: 221207 - DNA, 33 bp, Homo sapien
aataagtggctgggtaagagtttgatttttctc

SEQ ID NO: 221208 - DNA, 33 bp, Homo sapien
aataagtggctgggtaggagtttgatttttctc

SEQ ID NO: 221209 - DNA, 33 bp, Homo sapien
tgacagagaatgataacgtagaagtccccgaag

SEQ ID NO: 221210 - DNA, 33 bp, Homo sapien
tgacagagaatgataatgtagaagtccccgaag

SEQ ID NO: 221211 - DNA, 33 bp, Homo sapien
tgctagattgggataaagagaccagtcaagaaa

SEQ ID NO: 221212 - DNA, 33 bp, Homo sapien
tgctagattgggataaggagaccagtcaagaaa

SEQ ID NO: 221213 - DNA, 33 bp, Homo sapien
ccagttgtagacacacaaacaagcctcacaatc

SEQ ID NO: 221214 - DNA, 33 bp, Homo sapien
ccagttgtagacacacgaacaagcctcacaatc

SEQ ID NO: 221215 - DNA, 33 bp, Homo sapien
cattaatacctgttgacgcaaaggcaaaactaa

SEQ ID NO: 221216 - DNA, 33 bp, Homo sapien
cattaatacctgttgatgcaaaggcaaaactaa

SEQ ID NO: 221217 - DNA, 33 bp, Homo sapien
tccataactccaataccccataaaggccttcac

SEQ ID NO: 221218 - DNA, 33 bp, Homo sapien
tccataactccaatactccataaaggccttcac

SEQ ID NO: 221219 - DNA, 33 bp, Homo sapien
atatggatttgatcagcattgttttatgatgca

SEQ ID NO: 221220 - DNA, 33 bp, Homo sapien
atatggatttgatcagtattgttttatgatgca

SEQ ID NO: 221221 - DNA, 33 bp, Homo sapien
ggattaccttttattcacatcctctccaacatg

SEQ ID NO: 221222 - DNA, 33 bp, Homo sapien
ggattaccttttattcccatcctctccaacatg

SEQ ID NO: 221223 - DNA, 33 bp, Homo sapien
cattcacgatgaaaacccacaaatttggtatag

SEQ ID NO: 221224 - DNA, 33 bp, Homo sapien
cattcacgatgaaaactcacaaatttggtatag

SEQ ID NO: 221225 - DNA, 33 bp, Homo sapien
catcaacagtgtaaaagcatccctgtttctcca

SEQ ID NO: 221226 - DNA, 33 bp, Homo sapien
catcaacagtgtaaaatcatccctgtttctcca

SEQ ID NO: 221227 - DNA, 33 bp, Homo sapien
atatgcataatgaatacactagaaagacaagaa

SEQ ID NO: 221228 - DNA, 33 bp, Homo sapien
atatgcataatgaatatactagaaagacaagaa

SEQ ID NO: 221229 - DNA, 33 bp, Homo sapien
gtcatgtccacctttcaacaaaaggttacaatg

SEQ ID NO: 221230 - DNA, 33 bp, Homo sapien
gtcatgtccacctttcgacaaaaggttacaatg

SEQ ID NO: 221231 - DNA, 33 bp, Homo sapien
ttgcctacatataatacacttgtctcatcttcc

SEQ ID NO: 221232 - DNA, 33 bp, Homo sapien
ttgcctacatataatatacttgtctcatcttcc

SEQ ID NO: 221233 - DNA, 33 bp, Homo sapien
agatattaccagatcacaaaccattctggagct

SEQ ID NO: 221234 - DNA, 33 bp, Homo sapien
agatattaccagatcataaaccattctggagct

SEQ ID NO: 221235 - DNA, 33 bp, Homo sapien
gaccaaacacttaccagatcactcttcacgcac

SEQ ID NO: 221236 - DNA, 33 bp, Homo sapien
gaccaaacacttaccatatcactcttcacgcac

SEQ ID NO: 221237 - DNA, 33 bp, Homo sapien
ttttcattaattctgaacaaatagatcaaataa

SEQ ID NO: 221238 - DNA, 33 bp, Homo sapien
ttttcattaattctgaccaaatagatcaaataa

SEQ ID NO: 221239 - DNA, 33 bp, Homo sapien
agatttatgagggggcaaacatctgtaatttat

SEQ ID NO: 221240 - DNA, 33 bp, Homo sapien
agatttatgagggggcgaacatctgtaatttat

SEQ ID NO: 221241 - DNA, 33 bp, Homo sapien
ttttcctggttggccacacatgctgtcacacct

SEQ ID NO: 221242 - DNA, 33 bp, Homo sapien
ttttcctggttggccatacatgctgtcacacct

SEQ ID NO: 221243 - DNA, 33 bp, Homo sapien
tactttctttataataaattaccaagcaagaat

SEQ ID NO: 221244 - DNA, 33 bp, Homo sapien
tactttctttataatacattaccaagcaagaat

SEQ ID NO: 221245 - DNA, 33 bp, Homo sapien
aaccctaatcactccactcaagtgtataaacat

SEQ ID NO: 221246 - DNA, 33 bp, Homo sapien
aaccctaatcactccattcaagtgtataaacat

SEQ ID NO: 221247 - DNA, 33 bp, Homo sapien
ctgcacatgacattccaatcaggtatgagtctt

SEQ ID NO: 221248 - DNA, 33 bp, Homo sapien
ctgcacatgacattcctatcaggtatgagtctt

SEQ ID NO: 221249 - DNA, 33 bp, Homo sapien
aataaagaaaagcaaacaatgtggctagttgaa

SEQ ID NO: 221250 - DNA, 33 bp, Homo sapien
aataaagaaaagcaaataatgtggctagttgaa

SEQ ID NO: 221251 - DNA, 33 bp, Homo sapien
aatcaaaattattaacaggctcagggaaaatgc

SEQ ID NO: 221252 - DNA, 33 bp, Homo sapien
aatcaaaattattaactggctcagggaaaatgc

SEQ ID NO: 221253 - DNA, 33 bp, Homo sapien
ggaacatggataaacaagtgatggtatagttac

SEQ ID NO: 221254 - DNA, 33 bp, Homo sapien
ggaacatggataaacaggtgatggtatagttac

SEQ ID NO: 221255 - DNA, 33 bp, Homo sapien
agcatggtgttttatacctgaccatgtttattc

SEQ ID NO: 221256 - DNA, 33 bp, Homo sapien
agcatggtgttttatatctgaccatgtttattc

SEQ ID NO: 221257 - DNA, 33 bp, Homo sapien
ttcctgcagctaaaaaactatatcttctttcct

SEQ ID NO: 221258 - DNA, 33 bp, Homo sapien
ttcctgcagctaaaaagctatatcttctttcct

SEQ ID NO: 221259 - DNA, 33 bp, Homo sapien
agtcacacaattggcccggatgtgtagtctctg

SEQ ID NO: 221260 - DNA, 33 bp, Homo sapien
agtcacacaattggccgggatgtgtagtctctg

SEQ ID NO: 221261 - DNA, 33 bp, Homo sapien
acacaggtgagtgaacaagatactatcataaga

SEQ ID NO: 221262 - DNA, 33 bp, Homo sapien
acacaggtgagtgaacgagatactatcataaga

SEQ ID NO: 221263 - DNA, 33 bp, Homo sapien
gagttttgctgagttaagagggtagatattgga

SEQ ID NO: 221264 - DNA, 33 bp, Homo sapien
gagttttgctgagttaggagggtagatattgga

SEQ ID NO: 221265 - DNA, 33 bp, Homo sapien
tacagcctaagccagaagtatgaagtctttcct

SEQ ID NO: 221266 - DNA, 33 bp, Homo sapien
tacagcctaagccagatgtatgaagtctttcct

SEQ ID NO: 221267 - DNA, 33 bp, Homo sapien
atttctctcttccatactatcctctccctttta

SEQ ID NO: 221268 - DNA, 33 bp, Homo sapien
atttctctcttccatagtatcctctccctttta

SEQ ID NO: 221269 - DNA, 33 bp, Homo sapien
ctcctcctccctgtacccaacaaatttctctat

SEQ ID NO: 221270 - DNA, 33 bp, Homo sapien
ctcctcctccctgtacgcaacaaatttctctat

SEQ ID NO: 221271 - DNA, 33 bp, Homo sapien
aaaaagactttatggacgctgtgattttaaaat

SEQ ID NO: 221272 - DNA, 33 bp, Homo sapien
aaaaagactttatggaggctgtgattttaaaat

SEQ ID NO: 221273 - DNA, 33 bp, Homo sapien
catgtcatgtggggtaagatggtttaaatgcct

SEQ ID NO: 221274 - DNA, 33 bp, Homo sapien
catgtcatgtggggtaggatggtttaaatgcct

SEQ ID NO: 221275 - DNA, 33 bp, Homo sapien
caacgctctaattaccaaaaggctctcaattaa

SEQ ID NO: 221276 - DNA, 33 bp, Homo sapien
caacgctctaattacccaaaggctctcaattaa

SEQ ID NO: 221277 - DNA, 33 bp, Homo sapien
tatttgctggttctcaaacttgccatgttatct

SEQ ID NO: 221278 - DNA, 33 bp, Homo sapien
tatttgctggttctcagacttgccatgttatct

SEQ ID NO: 221279 - DNA, 33 bp, Homo sapien
tattatatagaatgccactatccctttcattta

SEQ ID NO: 221280 - DNA, 33 bp, Homo sapien
tattatatagaatgcctctatccctttcattta

SEQ ID NO: 221281 - DNA, 33 bp, Homo sapien
tgcatgcattttcctacgatactgttttgatct

SEQ ID NO: 221282 - DNA, 33 bp, Homo sapien
tgcatgcattttcctatgatactgttttgatct

SEQ ID NO: 221283 - DNA, 33 bp, Homo sapien
gataaaactgttcatacgtgtatccattatcta

SEQ ID NO: 221284 - DNA, 33 bp, Homo sapien
gataaaactgttcatatgtgtatccattatcta

SEQ ID NO: 221285 - DNA, 33 bp, Homo sapien
tgtgcagtactgataacgccaagaatgcagtgt

SEQ ID NO: 221286 - DNA, 33 bp, Homo sapien
tgtgcagtactgataatgccaagaatgcagtgt

SEQ ID NO: 221287 - DNA, 33 bp, Homo sapien
tgatcctaaataagtacaacttctgctgaactt

SEQ ID NO: 221288 - DNA, 33 bp, Homo sapien
tgatcctaaataagtataacttctgctgaactt

SEQ ID NO: 221289 - DNA, 33 bp, Homo sapien
atagttgtatggctaacggatggcatatctgat

SEQ ID NO: 221290 - DNA, 33 bp, Homo sapien
atagttgtatggctaatggatggcatatctgat

SEQ ID NO: 221291 - DNA, 33 bp, Homo sapien
aaaaaaaagaatccaacgcctgaggatctaaag

SEQ ID NO: 221292 - DNA, 33 bp, Homo sapien
aaaaaaaagaatccaatgcctgaggatctaaag

SEQ ID NO: 221293 - DNA, 33 bp, Homo sapien
ttcctatccagtcaaccgtagtgagggaggagt

SEQ ID NO: 221294 - DNA, 33 bp, Homo sapien
ttcctatccagtcaactgtagtgagggaggagt

SEQ ID NO: 221295 - DNA, 33 bp, Homo sapien
cttttgcaaccccaaaggctttgaataaaacat

SEQ ID NO: 221296 - DNA, 33 bp, Homo sapien
cttttgcaaccccaaatgctttgaataaaacat

SEQ ID NO: 221297 - DNA, 33 bp, Homo sapien
taaatctgtgaaaatacgctgtttgatcaattg

SEQ ID NO: 221298 - DNA, 33 bp, Homo sapien
taaatctgtgaaaatatgctgtttgatcaattg

SEQ ID NO: 221299 - DNA, 33 bp, Homo sapien
ctcccccatcagcctaaaaagttctgggattac

SEQ ID NO: 221300 - DNA, 33 bp, Homo sapien
ctcccccatcagcctacaaagttctgggattac

SEQ ID NO: 221301 - DNA, 33 bp, Homo sapien
agtgctattgagtacacaaaggagtcactgagg

SEQ ID NO: 221302 - DNA, 33 bp, Homo sapien
agtgctattgagtacataaaggagtcactgagg

SEQ ID NO: 221303 - DNA, 33 bp, Homo sapien
actaatattctctgtacgcaagaaaactttttt

SEQ ID NO: 221304 - DNA, 33 bp, Homo sapien
actaatattctctgtatgcaagaaaactttttt

SEQ ID NO: 221305 - DNA, 33 bp, Homo sapien
ggcagctgcagttgcaaggcatcagatgagttt

SEQ ID NO: 221306 - DNA, 33 bp, Homo sapien
ggcagctgcagttgcagggcatcagatgagttt

SEQ ID NO: 221307 - DNA, 33 bp, Homo sapien
aactttctgctattacccattatggttttaaga

SEQ ID NO: 221308 - DNA, 33 bp, Homo sapien
aactttctgctattactcattatggttttaaga

SEQ ID NO: 221309 - DNA, 33 bp, Homo sapien
tggaagctcattcatgaactgtctatgggtcct

SEQ ID NO: 221310 - DNA, 33 bp, Homo sapien
tggaagctcattcatggactgtctatgggtcct

SEQ ID NO: 221311 - DNA, 33 bp, Homo sapien
atgttagatttaaatacaatgccagttggacat

SEQ ID NO: 221312 - DNA, 33 bp, Homo sapien
atgttagatttaaatagaatgccagttggacat

SEQ ID NO: 221313 - DNA, 33 bp, Homo sapien
ataaaagaataaaggaaaattttggcatatttt

SEQ ID NO: 221314 - DNA, 33 bp, Homo sapien
ataaaagaataaaggagaattttggcatatttt

SEQ ID NO: 221315 - DNA, 33 bp, Homo sapien
aatacatcaatataaacggaaaagcccatgaga

SEQ ID NO: 221316 - DNA, 33 bp, Homo sapien
aatacatcaatataaatggaaaagcccatgaga

SEQ ID NO: 221317 - DNA, 33 bp, Homo sapien
ctggtgcatctgagggcagacaaagtatcacag

SEQ ID NO: 221318 - DNA, 33 bp, Homo sapien
ctggtgcatctgagggtagacaaagtatcacag

SEQ ID NO: 221319 - DNA, 33 bp, Homo sapien
atacatggggttatagcatcacggtttccattt

SEQ ID NO: 221320 - DNA, 33 bp, Homo sapien
atacatggggttataggatcacggtttccattt

SEQ ID NO: 221321 - DNA, 33 bp, Homo sapien
cagttaatattcccatcatgagtcattacctct

SEQ ID NO: 221322 - DNA, 33 bp, Homo sapien
cagttaatattcccatgatgagtcattacctct

SEQ ID NO: 221323 - DNA, 33 bp, Homo sapien
gggattccctgttccacctctttgttcttcatt

SEQ ID NO: 221324 - DNA, 33 bp, Homo sapien
gggattccctgttccatctctttgttcttcatt

SEQ ID NO: 221325 - DNA, 33 bp, Homo sapien
aaatatggtggtacaacaaagtaataaaatcat

SEQ ID NO: 221326 - DNA, 33 bp, Homo sapien
aaatatggtggtacaataaagtaataaaatcat

SEQ ID NO: 221327 - DNA, 33 bp, Homo sapien
atatctacctggcttacgtttagccctttcaat

SEQ ID NO: 221328 - DNA, 33 bp, Homo sapien
atatctacctggcttatgtttagccctttcaat

SEQ ID NO: 221329 - DNA, 33 bp, Homo sapien
agaattatgaaccccaatattgcagcccaagat

SEQ ID NO: 221330 - DNA, 33 bp, Homo sapien
agaattatgaaccccactattgcagcccaagat

SEQ ID NO: 221331 - DNA, 33 bp, Homo sapien
ttttgtttcatttttagaacatctcttgcaggg

SEQ ID NO: 221332 - DNA, 33 bp, Homo sapien
ttttgtttcatttttataacatctcttgcaggg

SEQ ID NO: 221333 - DNA, 33 bp, Homo sapien
atcacataccaaatccacttttctgtcttaatt

SEQ ID NO: 221334 - DNA, 33 bp, Homo sapien
atcacataccaaatccgcttttctgtcttaatt

SEQ ID NO: 221335 - DNA, 33 bp, Homo sapien
aaattaaagaagagccaataaaggagaccaaaa

SEQ ID NO: 221336 - DNA, 33 bp, Homo sapien
aaattaaagaagagccgataaaggagaccaaaa

SEQ ID NO: 221337 - DNA, 33 bp, Homo sapien
acctttgcttctcttggataggccaagaatcca

SEQ ID NO: 221338 - DNA, 33 bp, Homo sapien
acctttgcttctcttgtataggccaagaatcca

SEQ ID NO: 221339 - DNA, 33 bp, Homo sapien
ctttaataaataggaaagtcttatgccatagta

SEQ ID NO: 221340 - DNA, 33 bp, Homo sapien
ctttaataaataggaatgtcttatgccatagta

SEQ ID NO: 221341 - DNA, 33 bp, Homo sapien
tggttcaagaagtaggacattgacacattttgt

SEQ ID NO: 221342 - DNA, 33 bp, Homo sapien
tggttcaagaagtaggtcattgacacattttgt

SEQ ID NO: 221343 - DNA, 33 bp, Homo sapien
ttgagccttatcttgaaattttctgagcagagc

SEQ ID NO: 221344 - DNA, 33 bp, Homo sapien
ttgagccttatcttgacattttctgagcagagc

SEQ ID NO: 221345 - DNA, 33 bp, Homo sapien
agacagagtaatccacagacaggtggctctaat

SEQ ID NO: 221346 - DNA, 33 bp, Homo sapien
agacagagtaatccacggacaggtggctctaat

SEQ ID NO: 221347 - DNA, 33 bp, Homo sapien
ttataaaaagaaaaaacagtgaagtgctcattg

SEQ ID NO: 221348 - DNA, 33 bp, Homo sapien
ttataaaaagaaaaaatagtgaagtgctcattg

SEQ ID NO: 221349 - DNA, 33 bp, Homo sapien
tctccaagaaaaaacaataacgtgccactactc

SEQ ID NO: 221350 - DNA, 33 bp, Homo sapien
tctccaagaaaaaacagtaacgtgccactactc

SEQ ID NO: 221351 - DNA, 33 bp, Homo sapien
ctacaaagaacagcatcaagtatttcaatggtt

SEQ ID NO: 221352 - DNA, 33 bp, Homo sapien
ctacaaagaacagcatgaagtatttcaatggtt

SEQ ID NO: 221353 - DNA, 33 bp, Homo sapien
gcctctgatttcaccacgctgcactgtatccat

SEQ ID NO: 221354 - DNA, 33 bp, Homo sapien
gcctctgatttcaccatgctgcactgtatccat

SEQ ID NO: 221355 - DNA, 33 bp, Homo sapien
ttttgtttattagcaacagttacatggtccaaa

SEQ ID NO: 221356 - DNA, 33 bp, Homo sapien
ttttgtttattagcaatagttacatggtccaaa

SEQ ID NO: 221357 - DNA, 33 bp, Homo sapien
aatgttcacttatttgaaacagaggtcttcagg

SEQ ID NO: 221358 - DNA, 33 bp, Homo sapien
aatgttcacttatttgcaacagaggtcttcagg

SEQ ID NO: 221359 - DNA, 33 bp, Homo sapien
gattgaaagatgaagccgatgactgtaggccag

SEQ ID NO: 221360 - DNA, 33 bp, Homo sapien
gattgaaagatgaagctgatgactgtaggccag

SEQ ID NO: 221361 - DNA, 33 bp, Homo sapien
gttaatctgtgggtcacccccgttgaatggatt

SEQ ID NO: 221362 - DNA, 33 bp, Homo sapien
gttaatctgtgggtcatccccgttgaatggatt

SEQ ID NO: 221363 - DNA, 33 bp, Homo sapien
taaagaggaggaaaacccatggatttaactatt

SEQ ID NO: 221364 - DNA, 33 bp, Homo sapien
taaagaggaggaaaactcatggatttaactatt

SEQ ID NO: 221365 - DNA, 33 bp, Homo sapien
ctgtcttcatgtggaacgagcagatgtcagtta

SEQ ID NO: 221366 - DNA, 33 bp, Homo sapien
ctgtcttcatgtggaatgagcagatgtcagtta

SEQ ID NO: 221367 - DNA, 33 bp, Homo sapien
acgtgagatcagaaaaaacaatgaactgtagac

SEQ ID NO: 221368 - DNA, 33 bp, Homo sapien
acgtgagatcagaaaagacaatgaactgtagac

SEQ ID NO: 221369 - DNA, 33 bp, Homo sapien
acagatggtatttcaaatcttctgtcaattaca

SEQ ID NO: 221370 - DNA, 33 bp, Homo sapien
acagatggtatttcaagtcttctgtcaattaca

SEQ ID NO: 221371 - DNA, 33 bp, Homo sapien
gagttcagagttttcacaggcttcaaagaagag

SEQ ID NO: 221372 - DNA, 33 bp, Homo sapien
gagttcagagttttcataggcttcaaagaagag

SEQ ID NO: 221373 - DNA, 33 bp, Homo sapien
ttggcaacacacttggaaatgtttcaaaatgaa

SEQ ID NO: 221374 - DNA, 33 bp, Homo sapien
ttggcaacacacttgggaatgtttcaaaatgaa

SEQ ID NO: 221375 - DNA, 33 bp, Homo sapien
tcaagaacttttgcaccctgacctggacaccac

SEQ ID NO: 221376 - DNA, 33 bp, Homo sapien
tcaagaacttttgcacgctgacctggacaccac

SEQ ID NO: 221377 - DNA, 33 bp, Homo sapien
tgcaatttttcaacaagttctttgatctgcgtc

SEQ ID NO: 221378 - DNA, 33 bp, Homo sapien
tgcaatttttcaacaatttctttgatctgcgtc

SEQ ID NO: 221379 - DNA, 33 bp, Homo sapien
tatttcatttcatactaagaagatgttataaag

SEQ ID NO: 221380 - DNA, 33 bp, Homo sapien
tatttcatttcatacttagaagatgttataaag

SEQ ID NO: 221381 - DNA, 33 bp, Homo sapien
ttctccatagtggtaaatgctgatttttttaga

SEQ ID NO: 221382 - DNA, 33 bp, Homo sapien
ttctccatagtggtaagtgctgatttttttaga

SEQ ID NO: 221383 - DNA, 33 bp, Homo sapien
acacaattgtaaggcacctcaaatagaagatat

SEQ ID NO: 221384 - DNA, 33 bp, Homo sapien
acacaattgtaaggcatctcaaatagaagatat

SEQ ID NO: 221385 - DNA, 33 bp, Homo sapien
aaaacctataactggactacatttatcagaatt

SEQ ID NO: 221386 - DNA, 33 bp, Homo sapien
aaaacctataactggattacatttatcagaatt

SEQ ID NO: 221387 - DNA, 33 bp, Homo sapien
agtgtaaaaatatgacagtacatacgtatgaaa

SEQ ID NO: 221388 - DNA, 33 bp, Homo sapien
agtgtaaaaatatgacggtacatacgtatgaaa

SEQ ID NO: 221389 - DNA, 33 bp, Homo sapien
aacctactaaatgcaagggttagaaattgaacc

SEQ ID NO: 221390 - DNA, 33 bp, Homo sapien
aacctactaaatgcaatggttagaaattgaacc

SEQ ID NO: 221391 - DNA, 33 bp, Homo sapien
ctaagggattagttgacggaaaactagggagtt

SEQ ID NO: 221392 - DNA, 33 bp, Homo sapien
ctaagggattagttgatggaaaactagggagtt

SEQ ID NO: 221393 - DNA, 33 bp, Homo sapien
ttctagaacaacctaccacttactttagagctt

SEQ ID NO: 221394 - DNA, 33 bp, Homo sapien
ttctagaacaacctactacttactttagagctt

SEQ ID NO: 221395 - DNA, 33 bp, Homo sapien
accccaatggcaggaagaaattactagaaaaca

SEQ ID NO: 221396 - DNA, 33 bp, Homo sapien
accccaatggcaggaataaattactagaaaaca

SEQ ID NO: 221397 - DNA, 33 bp, Homo sapien
atagtatgtgaaaacaataaaaactttggaacc

SEQ ID NO: 221398 - DNA, 33 bp, Homo sapien
atagtatgtgaaaacattaaaaactttggaacc

SEQ ID NO: 221399 - DNA, 33 bp, Homo sapien
ccaggctcatctagtaaaagtgtgaaacatctg

SEQ ID NO: 221400 - DNA, 33 bp, Homo sapien
ccaggctcatctagtagaagtgtgaaacatctg

SEQ ID NO: 221401 - DNA, 33 bp, Homo sapien
gatttgccatttgaagaaattgagctagaaaac

SEQ ID NO: 221402 - DNA, 33 bp, Homo sapien
gatttgccatttgaaggaattgagctagaaaac

SEQ ID NO: 221403 - DNA, 33 bp, Homo sapien
tcactaccgtgtaaacgctcaagaatttaaatg

SEQ ID NO: 221404 - DNA, 33 bp, Homo sapien
tcactaccgtgtaaactctcaagaatttaaatg

SEQ ID NO: 221405 - DNA, 33 bp, Homo sapien
tggggttctcttttaggcctgcaaatctgtttt

SEQ ID NO: 221406 - DNA, 33 bp, Homo sapien
tggggttctcttttagtcctgcaaatctgtttt

SEQ ID NO: 221407 - DNA, 33 bp, Homo sapien
atgttcagatagaagacgatcaaagtcattgaa

SEQ ID NO: 221408 - DNA, 33 bp, Homo sapien
atgttcagatagaagatgatcaaagtcattgaa

SEQ ID NO: 221409 - DNA, 33 bp, Homo sapien
tttattgatgtagccccagtctagaaaagtgct

SEQ ID NO: 221410 - DNA, 33 bp, Homo sapien
tttattgatgtagcccgagtctagaaaagtgct

SEQ ID NO: 221411 - DNA, 33 bp, Homo sapien
agaagagatgacaaacaagaacagctgtaggcc

SEQ ID NO: 221412 - DNA, 33 bp, Homo sapien
agaagagatgacaaactagaacagctgtaggcc

SEQ ID NO: 221413 - DNA, 33 bp, Homo sapien
caatatactgacttcactcaatattagcacata

SEQ ID NO: 221414 - DNA, 33 bp, Homo sapien
caatatactgacttcattcaatattagcacata

SEQ ID NO: 221415 - DNA, 33 bp, Homo sapien
ttattagggatacaagaccaaaatagaaaaata

SEQ ID NO: 221416 - DNA, 33 bp, Homo sapien
ttattagggatacaaggccaaaatagaaaaata

SEQ ID NO: 221417 - DNA, 33 bp, Homo sapien
gagactcaaagagttaagcacatttctcccagc

SEQ ID NO: 221418 - DNA, 33 bp, Homo sapien
gagactcaaagagttatgcacatttctcccagc

SEQ ID NO: 221419 - DNA, 33 bp, Homo sapien
agacagtcattaaagggatgcattccataaaga

SEQ ID NO: 221420 - DNA, 33 bp, Homo sapien
agacagtcattaaaggtatgcattccataaaga

SEQ ID NO: 221421 - DNA, 33 bp, Homo sapien
gaaggttataaaggaacagtggctgaaattgtt

SEQ ID NO: 221422 - DNA, 33 bp, Homo sapien
gaaggttataaaggaagagtggctgaaattgtt

SEQ ID NO: 221423 - DNA, 33 bp, Homo sapien
tttcaaggccactgttcaaagctatactcaaat

SEQ ID NO: 221424 - DNA, 33 bp, Homo sapien
tttcaaggccactgttgaaagctatactcaaat

SEQ ID NO: 221425 - DNA, 33 bp, Homo sapien
atgcacattttttccactcccagaaaatctgcc

SEQ ID NO: 221426 - DNA, 33 bp, Homo sapien
atgcacattttttccattcccagaaaatctgcc

SEQ ID NO: 221427 - DNA, 33 bp, Homo sapien
ggctttcatattgcaacggagcctaaatagtgg

SEQ ID NO: 221428 - DNA, 33 bp, Homo sapien
ggctttcatattgcaagggagcctaaatagtgg

SEQ ID NO: 221429 - DNA, 33 bp, Homo sapien
actgaatgatagttgccctagaatagaattata

SEQ ID NO: 221430 - DNA, 33 bp, Homo sapien
actgaatgatagttgctctagaatagaattata

SEQ ID NO: 221431 - DNA, 33 bp, Homo sapien
aaatgaatttgggttacgtaaaggaagacaaaa

SEQ ID NO: 221432 - DNA, 33 bp, Homo sapien
aaatgaatttgggttatgtaaaggaagacaaaa

SEQ ID NO: 221433 - DNA, 33 bp, Homo sapien
tcatgttttactggcaaattgaactatatactg

SEQ ID NO: 221434 - DNA, 33 bp, Homo sapien
tcatgttttactggcatattgaactatatactg

SEQ ID NO: 221435 - DNA, 33 bp, Homo sapien
tctctgaaactctatcaccatgtaagtgtggtc

SEQ ID NO: 221436 - DNA, 33 bp, Homo sapien
tctctgaaactctatcgccatgtaagtgtggtc

SEQ ID NO: 221437 - DNA, 33 bp, Homo sapien
gaggggaaacctaaaacttgtatgttctttctc

SEQ ID NO: 221438 - DNA, 33 bp, Homo sapien
gaggggaaacctaaaagttgtatgttctttctc

SEQ ID NO: 221439 - DNA, 33 bp, Homo sapien
ccaggcagaattgctaccactatttatttagaa

SEQ ID NO: 221440 - DNA, 33 bp, Homo sapien
ccaggcagaattgctatcactatttatttagaa

SEQ ID NO: 221441 - DNA, 33 bp, Homo sapien
aatatgtgggaattaaagcataacaagtccaat

SEQ ID NO: 221442 - DNA, 33 bp, Homo sapien
aatatgtgggaattaaggcataacaagtccaat

SEQ ID NO: 221443 - DNA, 33 bp, Homo sapien
gcagacatttaatacaacacagataacatgcac

SEQ ID NO: 221444 - DNA, 33 bp, Homo sapien
gcagacatttaatacagcacagataacatgcac

SEQ ID NO: 221445 - DNA, 33 bp, Homo sapien
tatagcagttgaaatgaagtgatgtaaaaattc

SEQ ID NO: 221446 - DNA, 33 bp, Homo sapien
tatagcagttgaaatggagtgatgtaaaaattc

SEQ ID NO: 221447 - DNA, 33 bp, Homo sapien
ctgtagaggaacaagaaactcctgacactgggg

SEQ ID NO: 221448 - DNA, 33 bp, Homo sapien
ctgtagaggaacaagagactcctgacactgggg

SEQ ID NO: 221449 - DNA, 33 bp, Homo sapien
ttttcctaccaatagaaaacctaggatcgactg

SEQ ID NO: 221450 - DNA, 33 bp, Homo sapien
ttttcctaccaatagagaacctaggatcgactg

SEQ ID NO: 221451 - DNA, 33 bp, Homo sapien
tccttgaggagaggaaatgttttatcaattttt

SEQ ID NO: 221452 - DNA, 33 bp, Homo sapien
tccttgaggagaggaagtgttttatcaattttt

SEQ ID NO: 221453 - DNA, 33 bp, Homo sapien
actcccaaagctcaagaagatgttaaatctagt

SEQ ID NO: 221454 - DNA, 33 bp, Homo sapien
actcccaaagctcaaggagatgttaaatctagt

SEQ ID NO: 221455 - DNA, 33 bp, Homo sapien
atttttatgtggcgcaaagtatgaatcaaatag

SEQ ID NO: 221456 - DNA, 33 bp, Homo sapien
atttttatgtggcgcacagtatgaatcaaatag

SEQ ID NO: 221457 - DNA, 33 bp, Homo sapien
tctgtttcattaatccaaaactgtttcctttaa

SEQ ID NO: 221458 - DNA, 33 bp, Homo sapien
tctgtttcattaatccgaaactgtttcctttaa

SEQ ID NO: 221459 - DNA, 33 bp, Homo sapien
atgaaaactgttcagaactaagcgtattgtcag

SEQ ID NO: 221460 - DNA, 33 bp, Homo sapien
atgaaaactgttcagagctaagcgtattgtcag

SEQ ID NO: 221461 - DNA, 33 bp, Homo sapien
tagagagcaaagctaaatcgaaaaggtaataaa

SEQ ID NO: 221462 - DNA, 33 bp, Homo sapien
tagagagcaaagctaagtcgaaaaggtaataaa

SEQ ID NO: 221463 - DNA, 33 bp, Homo sapien
gattgatttaagtggaagattagacaatgggaa

SEQ ID NO: 221464 - DNA, 33 bp, Homo sapien
gattgatttaagtggaggattagacaatgggaa

SEQ ID NO: 221465 - DNA, 33 bp, Homo sapien
caaccacagtgagtaccgaaactatatttgtat

SEQ ID NO: 221466 - DNA, 33 bp, Homo sapien
caaccacagtgagtactgaaactatatttgtat

SEQ ID NO: 221467 - DNA, 33 bp, Homo sapien
tttcaagactctattactaatacaatgcttcca

SEQ ID NO: 221468 - DNA, 33 bp, Homo sapien
tttcaagactctattattaatacaatgcttcca

SEQ ID NO: 221469 - DNA, 33 bp, Homo sapien
ctcatgggactggacacacctaggtttggcttt

SEQ ID NO: 221470 - DNA, 33 bp, Homo sapien
ctcatgggactggacagacctaggtttggcttt

SEQ ID NO: 221471 - DNA, 33 bp, Homo sapien
atgagggatcaacagtgaattaattccatgtca

SEQ ID NO: 221472 - DNA, 33 bp, Homo sapien
atgagggatcaacagttaattaattccatgtca

SEQ ID NO: 221473 - DNA, 33 bp, Homo sapien
tgtctggattgaagaactagagaaataaattgg

SEQ ID NO: 221474 - DNA, 33 bp, Homo sapien
tgtctggattgaagaagtagagaaataaattgg

SEQ ID NO: 221475 - DNA, 33 bp, Homo sapien
acgtctactttctaaagcaacttctttcgtcat

SEQ ID NO: 221476 - DNA, 33 bp, Homo sapien
acgtctactttctaaatcaacttctttcgtcat

SEQ ID NO: 221477 - DNA, 33 bp, Homo sapien
caaaggaaaaagatagcaaatccacagatgcag

SEQ ID NO: 221478 - DNA, 33 bp, Homo sapien
caaaggaaaaagataggaaatccacagatgcag

SEQ ID NO: 221479 - DNA, 33 bp, Homo sapien
tttttgaccattaaaaaaaatctcttttcaaat

SEQ ID NO: 221480 - DNA, 33 bp, Homo sapien
tttttgaccattaaaacaaatctcttttcaaat

SEQ ID NO: 221481 - DNA, 33 bp, Homo sapien
ccccaactgtctttcaccttagtctttcctttc

SEQ ID NO: 221482 - DNA, 33 bp, Homo sapien
ccccaactgtctttcatcttagtctttcctttc

SEQ ID NO: 221483 - DNA, 33 bp, Homo sapien
aaggtgacatttacatcaagctctgaggcatgc

SEQ ID NO: 221484 - DNA, 33 bp, Homo sapien
aaggtgacatttacattaagctctgaggcatgc

SEQ ID NO: 221485 - DNA, 33 bp, Homo sapien
tctatgagtcgatggcagagcatgaacagggaa

SEQ ID NO: 221486 - DNA, 33 bp, Homo sapien
tctatgagtcgatggcggagcatgaacagggaa

SEQ ID NO: 221487 - DNA, 33 bp, Homo sapien
tgtatctctgtttggaagtttctgttaccacat

SEQ ID NO: 221488 - DNA, 33 bp, Homo sapien
tgtatctctgtttggaggtttctgttaccacat

SEQ ID NO: 221489 - DNA, 33 bp, Homo sapien
gtcaggttactgccacgaaataaaaactatgga

SEQ ID NO: 221490 - DNA, 33 bp, Homo sapien
gtcaggttactgccactaaataaaaactatgga

SEQ ID NO: 221491 - DNA, 33 bp, Homo sapien
tgcagtctcattttgaaggggtcacatatggct

SEQ ID NO: 221492 - DNA, 33 bp, Homo sapien
tgcagtctcattttgatggggtcacatatggct

SEQ ID NO: 221493 - DNA, 33 bp, Homo sapien
tgctcacaggtgtctccagtgatgtttatgtga

SEQ ID NO: 221494 - DNA, 33 bp, Homo sapien
tgctcacaggtgtctctagtgatgtttatgtga

SEQ ID NO: 221495 - DNA, 33 bp, Homo sapien
taaagctaggggttcccgcagcaaggaagtgat

SEQ ID NO: 221496 - DNA, 33 bp, Homo sapien
taaagctaggggttcctgcagcaaggaagtgat

SEQ ID NO: 221497 - DNA, 33 bp, Homo sapien
tacttctaataagatcaattacttttctctgtc

SEQ ID NO: 221498 - DNA, 33 bp, Homo sapien
tacttctaataagatccattacttttctctgtc

SEQ ID NO: 221499 - DNA, 33 bp, Homo sapien
agatattaaggacctgaactcaacattggatca

SEQ ID NO: 221500 - DNA, 33 bp, Homo sapien
agatattaaggacctggactcaacattggatca

SEQ ID NO: 221501 - DNA, 33 bp, Homo sapien
attggtggtgacataaataggcaaggaatagaa

SEQ ID NO: 221502 - DNA, 33 bp, Homo sapien
attggtggtgacataagtaggcaaggaatagaa

SEQ ID NO: 221503 - DNA, 33 bp, Homo sapien
aggtatggtagcacaagactggttgttctgtac

SEQ ID NO: 221504 - DNA, 33 bp, Homo sapien
aggtatggtagcacaatactggttgttctgtac

SEQ ID NO: 221505 - DNA, 33 bp, Homo sapien
gtatagtagatacccaaaacttacttatcttgc

SEQ ID NO: 221506 - DNA, 33 bp, Homo sapien
gtatagtagatacccagaacttacttatcttgc

SEQ ID NO: 221507 - DNA, 33 bp, Homo sapien
cctggaacagagactagctcatttgttgctgca

SEQ ID NO: 221508 - DNA, 33 bp, Homo sapien
cctggaacagagactatctcatttgttgctgca

SEQ ID NO: 221509 - DNA, 33 bp, Homo sapien
ggactgatgacctactaagattgccatttgggt

SEQ ID NO: 221510 - DNA, 33 bp, Homo sapien
ggactgatgacctactgagattgccatttgggt

SEQ ID NO: 221511 - DNA, 33 bp, Homo sapien
aagaaaaggttaatgccgcagatattacaaatg

SEQ ID NO: 221512 - DNA, 33 bp, Homo sapien
aagaaaaggttaatgctgcagatattacaaatg

SEQ ID NO: 221513 - DNA, 33 bp, Homo sapien
aaatacagcttattagcaatctattcatttatt

SEQ ID NO: 221514 - DNA, 33 bp, Homo sapien
aaatacagcttattaggaatctattcatttatt

SEQ ID NO: 221515 - DNA, 33 bp, Homo sapien
tgcatttgctatgaaaggagggccttattggta

SEQ ID NO: 221516 - DNA, 33 bp, Homo sapien
tgcatttgctatgaaatgagggccttattggta

SEQ ID NO: 221517 - DNA, 33 bp, Homo sapien
atgtttcgtgatacaacaagcctcatctgaaaa

SEQ ID NO: 221518 - DNA, 33 bp, Homo sapien
atgtttcgtgatacaataagcctcatctgaaaa

SEQ ID NO: 221519 - DNA, 33 bp, Homo sapien
caccaacaaatcttccgcttcctttagatctca

SEQ ID NO: 221520 - DNA, 33 bp, Homo sapien
caccaacaaatcttcctcttcctttagatctca

SEQ ID NO: 221521 - DNA, 33 bp, Homo sapien
ggggatttgatctactcagggatgcctgaatgc

SEQ ID NO: 221522 - DNA, 33 bp, Homo sapien
ggggatttgatctacttagggatgcctgaatgc

SEQ ID NO: 221523 - DNA, 33 bp, Homo sapien
aagcaatcaagcacaacgattcaaaattgaaac

SEQ ID NO: 221524 - DNA, 33 bp, Homo sapien
aagcaatcaagcacaatgattcaaaattgaaac

SEQ ID NO: 221525 - DNA, 33 bp, Homo sapien
gaaacatacataagcacactttcagatctaaca

SEQ ID NO: 221526 - DNA, 33 bp, Homo sapien
gaaacatacataagcatactttcagatctaaca

SEQ ID NO: 221527 - DNA, 33 bp, Homo sapien
acctctttctatccccactcctttctgtcttct

SEQ ID NO: 221528 - DNA, 33 bp, Homo sapien
acctctttctatccccgctcctttctgtcttct

SEQ ID NO: 221529 - DNA, 33 bp, Homo sapien
gcctcaaaatttggaacactctgctacaaactg

SEQ ID NO: 221530 - DNA, 33 bp, Homo sapien
gcctcaaaatttggaatactctgctacaaactg

SEQ ID NO: 221531 - DNA, 33 bp, Homo sapien
catgccatagaaacataagaggactactgcagt

SEQ ID NO: 221532 - DNA, 33 bp, Homo sapien
catgccatagaaacatgagaggactactgcagt

SEQ ID NO: 221533 - DNA, 33 bp, Homo sapien
tagtgatgacctcagaaaatcaggttattcttc

SEQ ID NO: 221534 - DNA, 33 bp, Homo sapien
tagtgatgacctcagagaatcaggttattcttc

SEQ ID NO: 221535 - DNA, 33 bp, Homo sapien
atgtaaagtatagtacagcagttccctcttacc

SEQ ID NO: 221536 - DNA, 33 bp, Homo sapien
atgtaaagtatagtaccgcagttccctcttacc

SEQ ID NO: 221537 - DNA, 33 bp, Homo sapien
ttaaactacaccttcaatcttggttattgcatg

SEQ ID NO: 221538 - DNA, 33 bp, Homo sapien
ttaaactacaccttcagtcttggttattgcatg

SEQ ID NO: 221539 - DNA, 33 bp, Homo sapien
tgcaattcgaagtgccacagttaatctataaat

SEQ ID NO: 221540 - DNA, 33 bp, Homo sapien
tgcaattcgaagtgccgcagttaatctataaat

SEQ ID NO: 221541 - DNA, 33 bp, Homo sapien
ccatcttaggaaacaaaatgtactctattgatg

SEQ ID NO: 221542 - DNA, 33 bp, Homo sapien
ccatcttaggaaacaagatgtactctattgatg

SEQ ID NO: 221543 - DNA, 33 bp, Homo sapien
aataagagatactgcaagattgccattctggaa

SEQ ID NO: 221544 - DNA, 33 bp, Homo sapien
aataagagatactgcaggattgccattctggaa

SEQ ID NO: 221545 - DNA, 33 bp, Homo sapien
catgtggcagcaaggaagcacacgtgaaagaca

SEQ ID NO: 221546 - DNA, 33 bp, Homo sapien
catgtggcagcaaggaggcacacgtgaaagaca

SEQ ID NO: 221547 - DNA, 33 bp, Homo sapien
taaagaaagttggcatcagaatcaatccccatt

SEQ ID NO: 221548 - DNA, 33 bp, Homo sapien
taaagaaagttggcattagaatcaatccccatt

SEQ ID NO: 221549 - DNA, 33 bp, Homo sapien
gagtaagctacaaaaaactgtgaattaatagca

SEQ ID NO: 221550 - DNA, 33 bp, Homo sapien
gagtaagctacaaaaacctgtgaattaatagca

SEQ ID NO: 221551 - DNA, 33 bp, Homo sapien
tgagtgctgttagatgaaataaagattagtctc

SEQ ID NO: 221552 - DNA, 33 bp, Homo sapien
tgagtgctgttagatggaataaagattagtctc

SEQ ID NO: 221553 - DNA, 33 bp, Homo sapien
ggagtgtaataataaccgtgtcttagcaacaga

SEQ ID NO: 221554 - DNA, 33 bp, Homo sapien
ggagtgtaataataacggtgtcttagcaacaga

SEQ ID NO: 221555 - DNA, 33 bp, Homo sapien
ctgggacaaaggtaaactagggtttgactaata

SEQ ID NO: 221556 - DNA, 33 bp, Homo sapien
ctgggacaaaggtaaattagggtttgactaata

SEQ ID NO: 221557 - DNA, 33 bp, Homo sapien
tatcaggaaattgtggcatatatcagccttttt

SEQ ID NO: 221558 - DNA, 33 bp, Homo sapien
tatcaggaaattgtggtatatatcagccttttt

SEQ ID NO: 221559 - DNA, 33 bp, Homo sapien
agtcaacaatcagacaatcctaccatctggcca

SEQ ID NO: 221560 - DNA, 33 bp, Homo sapien
agtcaacaatcagacagtcctaccatctggcca

SEQ ID NO: 221561 - DNA, 33 bp, Homo sapien
agctactcttctagcaccatgttttgttttgtt

SEQ ID NO: 221562 - DNA, 33 bp, Homo sapien
agctactcttctagcatcatgttttgttttgtt

SEQ ID NO: 221563 - DNA, 33 bp, Homo sapien
tggaaatcacaaaaaaattcttcattgtaatgc

SEQ ID NO: 221564 - DNA, 33 bp, Homo sapien
tggaaatcacaaaaaacttcttcattgtaatgc

SEQ ID NO: 221565 - DNA, 33 bp, Homo sapien
attttcaaaaggacaaaactgacaataaaagaa

SEQ ID NO: 221566 - DNA, 33 bp, Homo sapien
attttcaaaaggacaagactgacaataaaagaa

SEQ ID NO: 221567 - DNA, 33 bp, Homo sapien
ctttgaaggagaaagaaatacagtctattcctc

SEQ ID NO: 221568 - DNA, 33 bp, Homo sapien
ctttgaaggagaaagagatacagtctattcctc

SEQ ID NO: 221569 - DNA, 33 bp, Homo sapien
tatttaataaggctcaatctctagtcttacagt

SEQ ID NO: 221570 - DNA, 33 bp, Homo sapien
tatttaataaggctcagtctctagtcttacagt

SEQ ID NO: 221571 - DNA, 33 bp, Homo sapien
gacttggcaatcgactgaaatagtttggaggag

SEQ ID NO: 221572 - DNA, 33 bp, Homo sapien
gacttggcaatcgacttaaatagtttggaggag

SEQ ID NO: 221573 - DNA, 33 bp, Homo sapien
gccaaggagtaaaaaggccagggtgcaggatag

SEQ ID NO: 221574 - DNA, 33 bp, Homo sapien
gccaaggagtaaaaagtccagggtgcaggatag

SEQ ID NO: 221575 - DNA, 33 bp, Homo sapien
catggaattaacataactgtccatcaatccagc

SEQ ID NO: 221576 - DNA, 33 bp, Homo sapien
catggaattaacataagtgtccatcaatccagc

SEQ ID NO: 221577 - DNA, 33 bp, Homo sapien
gaaataagtgttttaccaccaaatatcttttct

SEQ ID NO: 221578 - DNA, 33 bp, Homo sapien
gaaataagtgttttactaccaaatatcttttct

SEQ ID NO: 221579 - DNA, 33 bp, Homo sapien
aaggtgtgttgttttacgtatcagatgcgctgt

SEQ ID NO: 221580 - DNA, 33 bp, Homo sapien
aaggtgtgttgttttatgtatcagatgcgctgt

SEQ ID NO: 221581 - DNA, 33 bp, Homo sapien
atttatattcagataacgagctggagttgaagt

SEQ ID NO: 221582 - DNA, 33 bp, Homo sapien
atttatattcagataatgagctggagttgaagt

SEQ ID NO: 221583 - DNA, 33 bp, Homo sapien
caagacatcatagacacgtgtaactattggttt

SEQ ID NO: 221584 - DNA, 33 bp, Homo sapien
caagacatcatagacatgtgtaactattggttt

SEQ ID NO: 221585 - DNA, 33 bp, Homo sapien
tggtctgctcactgatcactcacttccagcttt

SEQ ID NO: 221586 - DNA, 33 bp, Homo sapien
tggtctgctcactgattactcacttccagcttt

SEQ ID NO: 221587 - DNA, 33 bp, Homo sapien
atcgacttgactaggccaatacagtcttatgag

SEQ ID NO: 221588 - DNA, 33 bp, Homo sapien
atcgacttgactaggctaatacagtcttatgag

SEQ ID NO: 221589 - DNA, 33 bp, Homo sapien
tccattatttattgaacgatctagaacccagtt

SEQ ID NO: 221590 - DNA, 33 bp, Homo sapien
tccattatttattgaatgatctagaacccagtt

SEQ ID NO: 221591 - DNA, 33 bp, Homo sapien
taaattgagtagaagacggaatgtggtatagtg

SEQ ID NO: 221592 - DNA, 33 bp, Homo sapien
taaattgagtagaagatggaatgtggtatagtg

SEQ ID NO: 221593 - DNA, 33 bp, Homo sapien
atgagatggaagtccaagctcctcattgtatgg

SEQ ID NO: 221594 - DNA, 33 bp, Homo sapien
atgagatggaagtccaggctcctcattgtatgg

SEQ ID NO: 221595 - DNA, 33 bp, Homo sapien
taaaatgactatacgaacaatcagttataagtt

SEQ ID NO: 221596 - DNA, 33 bp, Homo sapien
taaaatgactatacgagcaatcagttataagtt

SEQ ID NO: 221597 - DNA, 33 bp, Homo sapien
aagtgagtttcttaccaacagaatatggtcatg

SEQ ID NO: 221598 - DNA, 33 bp, Homo sapien
aagtgagtttcttaccgacagaatatggtcatg

SEQ ID NO: 221599 - DNA, 33 bp, Homo sapien
gtggtatgttctataaatgttgagtggatcctg

SEQ ID NO: 221600 - DNA, 33 bp, Homo sapien
gtggtatgttctataagtgttgagtggatcctg

SEQ ID NO: 221601 - DNA, 33 bp, Homo sapien
aggtaaaaattgaaaactggacaccatcagaaa

SEQ ID NO: 221602 - DNA, 33 bp, Homo sapien
aggtaaaaattgaaaattggacaccatcagaaa

SEQ ID NO: 221603 - DNA, 33 bp, Homo sapien
agagcctagtcaaatacaagcgtagaggaagca

SEQ ID NO: 221604 - DNA, 33 bp, Homo sapien
agagcctagtcaaatataagcgtagaggaagca

SEQ ID NO: 221605 - DNA, 33 bp, Homo sapien
cagcccatcgtcctaaatattatcctgacaaat

SEQ ID NO: 221606 - DNA, 33 bp, Homo sapien
cagcccatcgtcctaactattatcctgacaaat

SEQ ID NO: 221607 - DNA, 33 bp, Homo sapien
acatatggattaatggacatgctctggattcta

SEQ ID NO: 221608 - DNA, 33 bp, Homo sapien
acatatggattaatgggcatgctctggattcta

SEQ ID NO: 221609 - DNA, 33 bp, Homo sapien
ttaaacttgcaaactccattacatctgtcatga

SEQ ID NO: 221610 - DNA, 33 bp, Homo sapien
ttaaacttgcaaactctattacatctgtcatga

SEQ ID NO: 221611 - DNA, 33 bp, Homo sapien
aattctgacatttagccataaccccattaatgc

SEQ ID NO: 221612 - DNA, 33 bp, Homo sapien
aattctgacatttagcgataaccccattaatgc

SEQ ID NO: 221613 - DNA, 33 bp, Homo sapien
tctataatcacactgacggaaaagcctactccc

SEQ ID NO: 221614 - DNA, 33 bp, Homo sapien
tctataatcacactgatggaaaagcctactccc

SEQ ID NO: 221615 - DNA, 33 bp, Homo sapien
ttaaaactcagtagaccgatgcacaccttgtac

SEQ ID NO: 221616 - DNA, 33 bp, Homo sapien
ttaaaactcagtagactgatgcacaccttgtac

SEQ ID NO: 221617 - DNA, 33 bp, Homo sapien
aatatctgagactgaacaatttataaaagactg

SEQ ID NO: 221618 - DNA, 33 bp, Homo sapien
aatatctgagactgaataatttataaaagactg

SEQ ID NO: 221619 - DNA, 33 bp, Homo sapien
aattcaaagtatttgaccacttgtaactttaga

SEQ ID NO: 221620 - DNA, 33 bp, Homo sapien
aattcaaagtatttgagcacttgtaactttaga

SEQ ID NO: 221621 - DNA, 33 bp, Homo sapien
aagctgtccaacagaaaagtgtcatggaaacat

SEQ ID NO: 221622 - DNA, 33 bp, Homo sapien
aagctgtccaacagaatagtgtcatggaaacat

SEQ ID NO: 221623 - DNA, 33 bp, Homo sapien
aagtattgcgaattcaacatttagcagagacac

SEQ ID NO: 221624 - DNA, 33 bp, Homo sapien
aagtattgcgaattcagcatttagcagagacac

SEQ ID NO: 221625 - DNA, 33 bp, Homo sapien
agaaggaccctctcaggataatttggagttatt

SEQ ID NO: 221626 - DNA, 33 bp, Homo sapien
agaaggaccctctcagtataatttggagttatt

SEQ ID NO: 221627 - DNA, 33 bp, Homo sapien
aaaagtagtgtctctacgttaacaataaactgg

SEQ ID NO: 221628 - DNA, 33 bp, Homo sapien
aaaagtagtgtctctatgttaacaataaactgg

SEQ ID NO: 221629 - DNA, 33 bp, Homo sapien
cagttccttcaatgtcaatacctaaccaatgct

SEQ ID NO: 221630 - DNA, 33 bp, Homo sapien
cagttccttcaatgtctatacctaaccaatgct

SEQ ID NO: 221631 - DNA, 33 bp, Homo sapien
gttacctttgcctactaaagtccatggtctatt

SEQ ID NO: 221632 - DNA, 33 bp, Homo sapien
gttacctttgcctacttaagtccatggtctatt

SEQ ID NO: 221633 - DNA, 33 bp, Homo sapien
ctaagcttattttcaacttaacaacttgtaaaa

SEQ ID NO: 221634 - DNA, 33 bp, Homo sapien
ctaagcttattttcaatttaacaacttgtaaaa

SEQ ID NO: 221635 - DNA, 33 bp, Homo sapien
tggaggtgacctgaaaaaaacatagacgtgatt

SEQ ID NO: 221636 - DNA, 33 bp, Homo sapien
tggaggtgacctgaaagaaacatagacgtgatt

SEQ ID NO: 221637 - DNA, 33 bp, Homo sapien
ggccttaggtatcatcactggtatagtccagac

SEQ ID NO: 221638 - DNA, 33 bp, Homo sapien
ggccttaggtatcatctctggtatagtccagac

SEQ ID NO: 221639 - DNA, 33 bp, Homo sapien
ttcaataatacaacaacgacaataacatggaag

SEQ ID NO: 221640 - DNA, 33 bp, Homo sapien
ttcaataatacaacaatgacaataacatggaag

SEQ ID NO: 221641 - DNA, 33 bp, Homo sapien
gtgtacacctcggtcacggaattcctttaagaa

SEQ ID NO: 221642 - DNA, 33 bp, Homo sapien
gtgtacacctcggtcatggaattcctttaagaa

SEQ ID NO: 221643 - DNA, 33 bp, Homo sapien
aaagcagtagattaaccaagtggaagaccagag

SEQ ID NO: 221644 - DNA, 33 bp, Homo sapien
aaagcagtagattaactaagtggaagaccagag

SEQ ID NO: 221645 - DNA, 33 bp, Homo sapien
aggtgcagagaagtccgagagtaaatacatcct

SEQ ID NO: 221646 - DNA, 33 bp, Homo sapien
aggtgcagagaagtcctagagtaaatacatcct

SEQ ID NO: 221647 - DNA, 33 bp, Homo sapien
aattaacacaaattaccgagcaatagtggtggt

SEQ ID NO: 221648 - DNA, 33 bp, Homo sapien
aattaacacaaattactgagcaatagtggtggt

SEQ ID NO: 221649 - DNA, 33 bp, Homo sapien
tagtattggccatttcaaaaaacaccttctgga

SEQ ID NO: 221650 - DNA, 33 bp, Homo sapien
tagtattggccatttccaaaaacaccttctgga

SEQ ID NO: 221651 - DNA, 33 bp, Homo sapien
aatgtataatttagccacactttattctttact

SEQ ID NO: 221652 - DNA, 33 bp, Homo sapien
aatgtataatttagccgcactttattctttact

SEQ ID NO: 221653 - DNA, 33 bp, Homo sapien
ccttttcaaaaaattacgcaattcaatgtgtgt

SEQ ID NO: 221654 - DNA, 33 bp, Homo sapien
ccttttcaaaaaattatgcaattcaatgtgtgt

SEQ ID NO: 221655 - DNA, 33 bp, Homo sapien
tataatacggtacaaaaaagcacagttctgatg

SEQ ID NO: 221656 - DNA, 33 bp, Homo sapien
tataatacggtacaaagaagcacagttctgatg

SEQ ID NO: 221657 - DNA, 33 bp, Homo sapien
aagctgtttcaacaaactgaggaggagggaatc

SEQ ID NO: 221658 - DNA, 33 bp, Homo sapien
aagctgtttcaacaaattgaggaggagggaatc

SEQ ID NO: 221659 - DNA, 33 bp, Homo sapien
tttctccaactgagaaaggaatgaaagatcaca

SEQ ID NO: 221660 - DNA, 33 bp, Homo sapien
tttctccaactgagaagggaatgaaagatcaca

SEQ ID NO: 221661 - DNA, 33 bp, Homo sapien
aactatctattgggtacgacgttgatgtgggtt

SEQ ID NO: 221662 - DNA, 33 bp, Homo sapien
aactatctattgggtatgacgttgatgtgggtt

SEQ ID NO: 221663 - DNA, 33 bp, Homo sapien
ttttatgtgtatgaagaccaatttatccatttg

SEQ ID NO: 221664 - DNA, 33 bp, Homo sapien
ttttatgtgtatgaagtccaatttatccatttg

SEQ ID NO: 221665 - DNA, 33 bp, Homo sapien
aaacaaaaattgtgcagaatataacaaaattcc

SEQ ID NO: 221666 - DNA, 33 bp, Homo sapien
aaacaaaaattgtgcataatataacaaaattcc

SEQ ID NO: 221667 - DNA, 33 bp, Homo sapien
ttaaagtacagagtgaaaaaatgaagctatgaa

SEQ ID NO: 221668 - DNA, 33 bp, Homo sapien
ttaaagtacagagtgacaaaatgaagctatgaa

SEQ ID NO: 221669 - DNA, 33 bp, Homo sapien
taaatggttccacagacaggttcaagaatgttt

SEQ ID NO: 221670 - DNA, 33 bp, Homo sapien
taaatggttccacagagaggttcaagaatgttt

SEQ ID NO: 221671 - DNA, 33 bp, Homo sapien
agttgagaacagcagtaacacatcagagtggta

SEQ ID NO: 221672 - DNA, 33 bp, Homo sapien
agttgagaacagcagttacacatcagagtggta

SEQ ID NO: 221673 - DNA, 33 bp, Homo sapien
agagaccaactggcaacagtctattattaaaat

SEQ ID NO: 221674 - DNA, 33 bp, Homo sapien
agagaccaactggcaatagtctattattaaaat

SEQ ID NO: 221675 - DNA, 33 bp, Homo sapien
ggctcaggacatgacacattttttgtgggggtg

SEQ ID NO: 221676 - DNA, 33 bp, Homo sapien
ggctcaggacatgacatattttttgtgggggtg

SEQ ID NO: 221677 - DNA, 33 bp, Homo sapien
cagctggaaaaagcagactcctggatgcatcag

SEQ ID NO: 221678 - DNA, 33 bp, Homo sapien
cagctggaaaaagcagcctcctggatgcatcag

SEQ ID NO: 221679 - DNA, 33 bp, Homo sapien
tgttatttacacctaaagcagaaacatcaagtc

SEQ ID NO: 221680 - DNA, 33 bp, Homo sapien
tgttatttacacctaaggcagaaacatcaagtc

SEQ ID NO: 221681 - DNA, 33 bp, Homo sapien
gaaacagggaatagaacagagatagctaaaggg

SEQ ID NO: 221682 - DNA, 33 bp, Homo sapien
gaaacagggaatagaatagagatagctaaaggg

SEQ ID NO: 221683 - DNA, 33 bp, Homo sapien
gggaggcaaattaggaagtcctagtcagagaga

SEQ ID NO: 221684 - DNA, 33 bp, Homo sapien
gggaggcaaattaggaggtcctagtcagagaga

SEQ ID NO: 221685 - DNA, 33 bp, Homo sapien
ataataataaacatacactgaacaccactgtta

SEQ ID NO: 221686 - DNA, 33 bp, Homo sapien
ataataataaacatacgctgaacaccactgtta

SEQ ID NO: 221687 - DNA, 33 bp, Homo sapien
aaacatggacagtggaaacgaattatttgtcca

SEQ ID NO: 221688 - DNA, 33 bp, Homo sapien
aaacatggacagtggagacgaattatttgtcca

SEQ ID NO: 221689 - DNA, 33 bp, Homo sapien
tgaagaagagccaaaacgaatagaatcttggga

SEQ ID NO: 221690 - DNA, 33 bp, Homo sapien
tgaagaagagccaaaatgaatagaatcttggga

SEQ ID NO: 221691 - DNA, 33 bp, Homo sapien
ctaacttgggagtggaacacaaaatctgatttt

SEQ ID NO: 221692 - DNA, 33 bp, Homo sapien
ctaacttgggagtggaccacaaaatctgatttt

SEQ ID NO: 221693 - DNA, 33 bp, Homo sapien
gtgaatatcaaaaaaaagcaggtcacacttttt

SEQ ID NO: 221694 - DNA, 33 bp, Homo sapien
gtgaatatcaaaaaaaggcaggtcacacttttt

SEQ ID NO: 221695 - DNA, 33 bp, Homo sapien
tctttacctgtgcaaaatgtgcccagctaaaat

SEQ ID NO: 221696 - DNA, 33 bp, Homo sapien
tctttacctgtgcaaagtgtgcccagctaaaat

SEQ ID NO: 221697 - DNA, 33 bp, Homo sapien
tgaaacaacacacagacggaaggagagcttaga

SEQ ID NO: 221698 - DNA, 33 bp, Homo sapien
tgaaacaacacacagagggaaggagagcttaga

SEQ ID NO: 221699 - DNA, 33 bp, Homo sapien
tttgtaatgaacacacaaacacacgagtgtaaa

SEQ ID NO: 221700 - DNA, 33 bp, Homo sapien
tttgtaatgaacacacgaacacacgagtgtaaa

SEQ ID NO: 221701 - DNA, 33 bp, Homo sapien
tgttaaccatgtcttacgatttcctttggtctg

SEQ ID NO: 221702 - DNA, 33 bp, Homo sapien
tgttaaccatgtcttatgatttcctttggtctg

SEQ ID NO: 221703 - DNA, 33 bp, Homo sapien
aataccaaaagatgtacattttccttgatctag

SEQ ID NO: 221704 - DNA, 33 bp, Homo sapien
aataccaaaagatgtatattttccttgatctag

SEQ ID NO: 221705 - DNA, 33 bp, Homo sapien
ttagatattgaaaatcccttgcccatataaata

SEQ ID NO: 221706 - DNA, 33 bp, Homo sapien
ttagatattgaaaatctcttgcccatataaata

SEQ ID NO: 221707 - DNA, 33 bp, Homo sapien
aaagacagtttttaacagatgcccattaaaatg

SEQ ID NO: 221708 - DNA, 33 bp, Homo sapien
aaagacagtttttaacggatgcccattaaaatg

SEQ ID NO: 221709 - DNA, 33 bp, Homo sapien
atccttgcaaaatgacaaattagttcccagtag

SEQ ID NO: 221710 - DNA, 33 bp, Homo sapien
atccttgcaaaatgacgaattagttcccagtag

SEQ ID NO: 221711 - DNA, 33 bp, Homo sapien
agccaaaccatatcagaaatgttcatcagcaaa

SEQ ID NO: 221712 - DNA, 33 bp, Homo sapien
agccaaaccatatcaggaatgttcatcagcaaa

SEQ ID NO: 221713 - DNA, 33 bp, Homo sapien
ggcatcttcatttttaaagactcatgcactcag

SEQ ID NO: 221714 - DNA, 33 bp, Homo sapien
ggcatcttcatttttagagactcatgcactcag

SEQ ID NO: 221715 - DNA, 33 bp, Homo sapien
gcttctaattacaagcggaatactcatgaagga

SEQ ID NO: 221716 - DNA, 33 bp, Homo sapien
gcttctaattacaagctgaatactcatgaagga

SEQ ID NO: 221717 - DNA, 33 bp, Homo sapien
attctcttgctctgggaacactagtgggcattt

SEQ ID NO: 221718 - DNA, 33 bp, Homo sapien
attctcttgctctgggcacactagtgggcattt

SEQ ID NO: 221719 - DNA, 33 bp, Homo sapien
ggaacattgtctttggcagaggcaaattgaaac

SEQ ID NO: 221720 - DNA, 33 bp, Homo sapien
ggaacattgtctttggtagaggcaaattgaaac

SEQ ID NO: 221721 - DNA, 33 bp, Homo sapien
cccctggatattgggaactgtatcacagggtgg

SEQ ID NO: 221722 - DNA, 33 bp, Homo sapien
cccctggatattgggagctgtatcacagggtgg

SEQ ID NO: 221723 - DNA, 33 bp, Homo sapien
tcgcagggaatgtacaccctacccccagtgata

SEQ ID NO: 221724 - DNA, 33 bp, Homo sapien
tcgcagggaatgtacatcctacccccagtgata

SEQ ID NO: 221725 - DNA, 33 bp, Homo sapien
aaaaaaaaaaacctgaagatcagacagattcac

SEQ ID NO: 221726 - DNA, 33 bp, Homo sapien
aaaaaaaaaaacctgaggatcagacagattcac

SEQ ID NO: 221727 - DNA, 33 bp, Homo sapien
cccagattcatagagcaagctttacctacaaag

SEQ ID NO: 221728 - DNA, 33 bp, Homo sapien
cccagattcatagagcgagctttacctacaaag

SEQ ID NO: 221729 - DNA, 33 bp, Homo sapien
cacaaaaaaagggcaaaaggcagctgccaaatt

SEQ ID NO: 221730 - DNA, 33 bp, Homo sapien
cacaaaaaaagggcaagaggcagctgccaaatt

SEQ ID NO: 221731 - DNA, 33 bp, Homo sapien
ggtagatttagatcaacgctttgggtaatttct

SEQ ID NO: 221732 - DNA, 33 bp, Homo sapien
ggtagatttagatcaatgctttgggtaatttct

SEQ ID NO: 221733 - DNA, 33 bp, Homo sapien
aaactgattcaaagaaataacaactgacagctt

SEQ ID NO: 221734 - DNA, 33 bp, Homo sapien
aaactgattcaaagaactaacaactgacagctt

SEQ ID NO: 221735 - DNA, 33 bp, Homo sapien
tgttgttaacatagaaagcagtgaataatttct

SEQ ID NO: 221736 - DNA, 33 bp, Homo sapien
tgttgttaacatagaaggcagtgaataatttct

SEQ ID NO: 221737 - DNA, 33 bp, Homo sapien
tcatatgaaagctcacagaatctaaaattacaa

SEQ ID NO: 221738 - DNA, 33 bp, Homo sapien
tcatatgaaagctcacggaatctaaaattacaa

SEQ ID NO: 221739 - DNA, 33 bp, Homo sapien
tcctcctgacacaaaactgatggaatcgcttct

SEQ ID NO: 221740 - DNA, 33 bp, Homo sapien
tcctcctgacacaaaattgatggaatcgcttct

SEQ ID NO: 221741 - DNA, 33 bp, Homo sapien
atatctgtctaggaccactggaaagcaaatgga

SEQ ID NO: 221742 - DNA, 33 bp, Homo sapien
atatctgtctaggaccgctggaaagcaaatgga

SEQ ID NO: 221743 - DNA, 33 bp, Homo sapien
ccactatgaagagtctaaaagctcctaaagact

SEQ ID NO: 221744 - DNA, 33 bp, Homo sapien
ccactatgaagagtctcaaagctcctaaagact

SEQ ID NO: 221745 - DNA, 33 bp, Homo sapien
gggatatcatcaggagaaatactttatgtaaat

SEQ ID NO: 221746 - DNA, 33 bp, Homo sapien
gggatatcatcaggagtaatactttatgtaaat

SEQ ID NO: 221747 - DNA, 33 bp, Homo sapien
tcaagatggattaaagacttaagttagacctaa

SEQ ID NO: 221748 - DNA, 33 bp, Homo sapien
tcaagatggattaaagtcttaagttagacctaa

SEQ ID NO: 221749 - DNA, 33 bp, Homo sapien
atcaattcaacaagaacaactaactctcttaaa

SEQ ID NO: 221750 - DNA, 33 bp, Homo sapien
atcaattcaacaagaagaactaactctcttaaa

SEQ ID NO: 221751 - DNA, 33 bp, Homo sapien
gaatcattttaacaaacggttgtgctactaaat

SEQ ID NO: 221752 - DNA, 33 bp, Homo sapien
gaatcattttaacaaagggttgtgctactaaat

SEQ ID NO: 221753 - DNA, 33 bp, Homo sapien
ttaaagatttgtggaaaccttcacacaacaggg

SEQ ID NO: 221754 - DNA, 33 bp, Homo sapien
ttaaagatttgtggaagccttcacacaacaggg

SEQ ID NO: 221755 - DNA, 33 bp, Homo sapien
ggcagagatgaccaaagatgaagaattcacagt

SEQ ID NO: 221756 - DNA, 33 bp, Homo sapien
ggcagagatgaccaaatatgaagaattcacagt

SEQ ID NO: 221757 - DNA, 33 bp, Homo sapien
cccacaccacaagttgcatcccttctgtgtgct

SEQ ID NO: 221758 - DNA, 33 bp, Homo sapien
cccacaccacaagttggatcccttctgtgtgct

SEQ ID NO: 221759 - DNA, 33 bp, Homo sapien
agctctgatttgcaaacatcatcttgtttaccc

SEQ ID NO: 221760 - DNA, 33 bp, Homo sapien
agctctgatttgcaaatatcatcttgtttaccc

SEQ ID NO: 221761 - DNA, 33 bp, Homo sapien
cttggctaatgcctgtcaactggaaattatgct

SEQ ID NO: 221762 - DNA, 33 bp, Homo sapien
cttggctaatgcctgtgaactggaaattatgct

SEQ ID NO: 221763 - DNA, 33 bp, Homo sapien
ttttttgtggtacagtaaatcttgcttctaaga

SEQ ID NO: 221764 - DNA, 33 bp, Homo sapien
ttttttgtggtacagtgaatcttgcttctaaga

SEQ ID NO: 221765 - DNA, 33 bp, Homo sapien
tttcaccaaggatatacggtctaagccaatctg

SEQ ID NO: 221766 - DNA, 33 bp, Homo sapien
tttcaccaaggatatagggtctaagccaatctg

SEQ ID NO: 221767 - DNA, 33 bp, Homo sapien
cttctgagttctagacaccgtaccctcctccct

SEQ ID NO: 221768 - DNA, 33 bp, Homo sapien
cttctgagttctagacgccgtaccctcctccct

SEQ ID NO: 221769 - DNA, 33 bp, Homo sapien
agatgctctcctatcaatcacagaaactgtttc

SEQ ID NO: 221770 - DNA, 33 bp, Homo sapien
agatgctctcctatcagtcacagaaactgtttc

SEQ ID NO: 221771 - DNA, 33 bp, Homo sapien
aagagggtgtggaataaaggaagacagtgagag

SEQ ID NO: 221772 - DNA, 33 bp, Homo sapien
aagagggtgtggaatagaggaagacagtgagag

SEQ ID NO: 221773 - DNA, 33 bp, Homo sapien
cttcatctgtgaaaacaagggacaaaaatagga

SEQ ID NO: 221774 - DNA, 33 bp, Homo sapien
cttcatctgtgaaaacgagggacaaaaatagga

SEQ ID NO: 221775 - DNA, 33 bp, Homo sapien
tggtagccactagtcaaaaatggctattgagct

SEQ ID NO: 221776 - DNA, 33 bp, Homo sapien
tggtagccactagtcacaaatggctattgagct

SEQ ID NO: 221777 - DNA, 33 bp, Homo sapien
acaccagagctctgaacgcacagtccctgcaat

SEQ ID NO: 221778 - DNA, 33 bp, Homo sapien
acaccagagctctgaatgcacagtccctgcaat

SEQ ID NO: 221779 - DNA, 33 bp, Homo sapien
gacattcaggtggagaagtcagtatgcagtggg

SEQ ID NO: 221780 - DNA, 33 bp, Homo sapien
gacattcaggtggagaggtcagtatgcagtggg

SEQ ID NO: 221781 - DNA, 33 bp, Homo sapien
attaatttggcaaaagcactctgaaaaggggga

SEQ ID NO: 221782 - DNA, 33 bp, Homo sapien
attaatttggcaaaaggactctgaaaaggggga

SEQ ID NO: 221783 - DNA, 33 bp, Homo sapien
gtgagtgtaaaatgaaagtcctgagtaagtgag

SEQ ID NO: 221784 - DNA, 33 bp, Homo sapien
gtgagtgtaaaatgaaggtcctgagtaagtgag

SEQ ID NO: 221785 - DNA, 33 bp, Homo sapien
ttttaagatagctaaaatgtttctcagtcaccg

SEQ ID NO: 221786 - DNA, 33 bp, Homo sapien
ttttaagatagctaaattgtttctcagtcaccg

SEQ ID NO: 221787 - DNA, 33 bp, Homo sapien
ttataatctgattataggccacattttataaac

SEQ ID NO: 221788 - DNA, 33 bp, Homo sapien
ttataatctgattatatgccacattttataaac

SEQ ID NO: 221789 - DNA, 33 bp, Homo sapien
agcaaaggattgtgacaattcctaccagttgat

SEQ ID NO: 221790 - DNA, 33 bp, Homo sapien
agcaaaggattgtgacgattcctaccagttgat

SEQ ID NO: 221791 - DNA, 33 bp, Homo sapien
atatgtaacaaataacagaactggcctaaataa

SEQ ID NO: 221792 - DNA, 33 bp, Homo sapien
atatgtaacaaataacggaactggcctaaataa

SEQ ID NO: 221793 - DNA, 33 bp, Homo sapien
tggaggaaaacctcaccgacttggcaacatttg

SEQ ID NO: 221794 - DNA, 33 bp, Homo sapien
tggaggaaaacctcactgacttggcaacatttg

SEQ ID NO: 221795 - DNA, 33 bp, Homo sapien
acatttaatgttagtgaactgatctgatgagga

SEQ ID NO: 221796 - DNA, 33 bp, Homo sapien
acatttaatgttagtggactgatctgatgagga

SEQ ID NO: 221797 - DNA, 33 bp, Homo sapien
tatttgtgaattgccacgccaaaagaaaataac

SEQ ID NO: 221798 - DNA, 33 bp, Homo sapien
tatttgtgaattgccatgccaaaagaaaataac

SEQ ID NO: 221799 - DNA, 33 bp, Homo sapien
tcctcaccttctggaaagggtggaaataccatc

SEQ ID NO: 221800 - DNA, 33 bp, Homo sapien
tcctcaccttctggaaggggtggaaataccatc

SEQ ID NO: 221801 - DNA, 33 bp, Homo sapien
cagatttgtgaaaacacgatgattatggtgctt

SEQ ID NO: 221802 - DNA, 33 bp, Homo sapien
cagatttgtgaaaacatgatgattatggtgctt

SEQ ID NO: 221803 - DNA, 33 bp, Homo sapien
cagaggaggggaccacagtgatgagtcctgaga

SEQ ID NO: 221804 - DNA, 33 bp, Homo sapien
cagaggaggggaccactgtgatgagtcctgaga

SEQ ID NO: 221805 - DNA, 33 bp, Homo sapien
cagggaacgactcagaagtatgcagtgtgggaa

SEQ ID NO: 221806 - DNA, 33 bp, Homo sapien
cagggaacgactcagacgtatgcagtgtgggaa

SEQ ID NO: 221807 - DNA, 33 bp, Homo sapien
gttaacctgacctataaaaactataacttcggc

SEQ ID NO: 221808 - DNA, 33 bp, Homo sapien
gttaacctgacctatacaaactataacttcggc

SEQ ID NO: 221809 - DNA, 33 bp, Homo sapien
tgccaccaggctttaacctggaaatgcaagggt

SEQ ID NO: 221810 - DNA, 33 bp, Homo sapien
tgccaccaggctttaagctggaaatgcaagggt

SEQ ID NO: 221811 - DNA, 33 bp, Homo sapien
attccctacctcagaaatagatgaaagaactct

SEQ ID NO: 221812 - DNA, 33 bp, Homo sapien
attccctacctcagaagtagatgaaagaactct

SEQ ID NO: 221813 - DNA, 33 bp, Homo sapien
acatctcaaaattctccccatccttacctcacc

SEQ ID NO: 221814 - DNA, 33 bp, Homo sapien
acatctcaaaattctctccatccttacctcacc

SEQ ID NO: 221815 - DNA, 33 bp, Homo sapien
gattcaaggagtttgacagcagttctcacaata

SEQ ID NO: 221816 - DNA, 33 bp, Homo sapien
gattcaaggagtttgatagcagttctcacaata

SEQ ID NO: 221817 - DNA, 33 bp, Homo sapien
ttaggtgactgacagcaatttatcactctgact

SEQ ID NO: 221818 - DNA, 33 bp, Homo sapien
ttaggtgactgacagcgatttatcactctgact

SEQ ID NO: 221819 - DNA, 33 bp, Homo sapien
tcacacagaggccaacacaaaaggccattgaaa

SEQ ID NO: 221820 - DNA, 33 bp, Homo sapien
tcacacagaggccaacgcaaaaggccattgaaa

SEQ ID NO: 221821 - DNA, 33 bp, Homo sapien
atcaaaacactgcatcaagcaaactcccaaact

SEQ ID NO: 221822 - DNA, 33 bp, Homo sapien
atcaaaacactgcatcgagcaaactcccaaact

SEQ ID NO: 221823 - DNA, 33 bp, Homo sapien
gttgaaaatgatgaaaaaagggaagattcttat

SEQ ID NO: 221824 - DNA, 33 bp, Homo sapien
gttgaaaatgatgaaagaagggaagattcttat

SEQ ID NO: 221825 - DNA, 33 bp, Homo sapien
gagtttacgttttgcaagatgaaaagagttctg

SEQ ID NO: 221826 - DNA, 33 bp, Homo sapien
gagtttacgttttgcaggatgaaaagagttctg

SEQ ID NO: 221827 - DNA, 33 bp, Homo sapien
ccagggtcccaggcaaaagcaaatacacatcct

SEQ ID NO: 221828 - DNA, 33 bp, Homo sapien
ccagggtcccaggcaagagcaaatacacatcct

SEQ ID NO: 221829 - DNA, 33 bp, Homo sapien
gagaaccaaccttctaacctgagtggatctaaa

SEQ ID NO: 221830 - DNA, 33 bp, Homo sapien
gagaaccaaccttctaccctgagtggatctaaa

SEQ ID NO: 221831 - DNA, 33 bp, Homo sapien
cacggatgtcctccagaatgttctgtcctctgg

SEQ ID NO: 221832 - DNA, 33 bp, Homo sapien
cacggatgtcctccaggatgttctgtcctctgg

SEQ ID NO: 221833 - DNA, 33 bp, Homo sapien
acagttatttactacaatgtaactctgttgtgc

SEQ ID NO: 221834 - DNA, 33 bp, Homo sapien
acagttatttactacagtgtaactctgttgtgc

SEQ ID NO: 221835 - DNA, 33 bp, Homo sapien
tttgctgttggggcaaatatctacttcacagag

SEQ ID NO: 221836 - DNA, 33 bp, Homo sapien
tttgctgttggggcaagtatctacttcacagag

SEQ ID NO: 221837 - DNA, 33 bp, Homo sapien
gctgttctattctacacagcggatctatgacaa

SEQ ID NO: 221838 - DNA, 33 bp, Homo sapien
gctgttctattctacatagcggatctatgacaa

SEQ ID NO: 221839 - DNA, 33 bp, Homo sapien
tgggtttaatgaaccacggccgtaggcaatgaa

SEQ ID NO: 221840 - DNA, 33 bp, Homo sapien
tgggtttaatgaaccagggccgtaggcaatgaa

SEQ ID NO: 221841 - DNA, 33 bp, Homo sapien
gctctaaagaaacagcacttgcctgggcttggc

SEQ ID NO: 221842 - DNA, 33 bp, Homo sapien
gctctaaagaaacagcgcttgcctgggcttggc

SEQ ID NO: 221843 - DNA, 33 bp, Homo sapien
aagatcacatgtgttacaccttaacgaaaaact

SEQ ID NO: 221844 - DNA, 33 bp, Homo sapien
aagatcacatgtgttataccttaacgaaaaact

SEQ ID NO: 221845 - DNA, 33 bp, Homo sapien
acttggttgtcaggtaagtaagcaagaaattct

SEQ ID NO: 221846 - DNA, 33 bp, Homo sapien
acttggttgtcaggtaggtaagcaagaaattct

SEQ ID NO: 221847 - DNA, 33 bp, Homo sapien
ttgaagacagtgctcaaagtaagtgcaaagagg

SEQ ID NO: 221848 - DNA, 33 bp, Homo sapien
ttgaagacagtgctcagagtaagtgcaaagagg

SEQ ID NO: 221849 - DNA, 33 bp, Homo sapien
tccacaatgattttcaactctcctgggtattca

SEQ ID NO: 221850 - DNA, 33 bp, Homo sapien
tccacaatgattttcacctctcctgggtattca

SEQ ID NO: 221851 - DNA, 33 bp, Homo sapien
tgatatatcttctggaccaccccactgtaaata

SEQ ID NO: 221852 - DNA, 33 bp, Homo sapien
tgatatatcttctggatcaccccactgtaaata

SEQ ID NO: 221853 - DNA, 33 bp, Homo sapien
agctctgttctgtggcactttagttatgttaag

SEQ ID NO: 221854 - DNA, 33 bp, Homo sapien
agctctgttctgtggcgctttagttatgttaag

SEQ ID NO: 221855 - DNA, 33 bp, Homo sapien
gtgtccaagtgactcacagtatgttcctaattt

SEQ ID NO: 221856 - DNA, 33 bp, Homo sapien
gtgtccaagtgactcatagtatgttcctaattt

SEQ ID NO: 221857 - DNA, 33 bp, Homo sapien
tgattgttttacatacaaaaggtgtacttgcag

SEQ ID NO: 221858 - DNA, 33 bp, Homo sapien
tgattgttttacatacgaaaggtgtacttgcag

SEQ ID NO: 221859 - DNA, 33 bp, Homo sapien
aattcctgttttttccccatacatttaggtgaa

SEQ ID NO: 221860 - DNA, 33 bp, Homo sapien
aattcctgttttttcctcatacatttaggtgaa

SEQ ID NO: 221861 - DNA, 33 bp, Homo sapien
gaatgttaattcccagaaggaaaaaataagatg

SEQ ID NO: 221862 - DNA, 33 bp, Homo sapien
gaatgttaattcccaggaggaaaaaataagatg

SEQ ID NO: 221863 - DNA, 33 bp, Homo sapien
ttttattccctgtccagtagaaacgatttactt

SEQ ID NO: 221864 - DNA, 33 bp, Homo sapien
ttttattccctgtccattagaaacgatttactt

SEQ ID NO: 221865 - DNA, 33 bp, Homo sapien
tgttctgtattctccaactggtccacccctaaa

SEQ ID NO: 221866 - DNA, 33 bp, Homo sapien
tgttctgtattctccacctggtccacccctaaa

SEQ ID NO: 221867 - DNA, 33 bp, Homo sapien
atatatatcaaacaaccaacaaaatgaacacct

SEQ ID NO: 221868 - DNA, 33 bp, Homo sapien
atatatatcaaacaacgaacaaaatgaacacct

SEQ ID NO: 221869 - DNA, 33 bp, Homo sapien
acagagtagccataataaactaaatactagcta

SEQ ID NO: 221870 - DNA, 33 bp, Homo sapien
acagagtagccataatgaactaaatactagcta

SEQ ID NO: 221871 - DNA, 33 bp, Homo sapien
gggggttggataattcactggtggcaaggagca

SEQ ID NO: 221872 - DNA, 33 bp, Homo sapien
gggggttggataattcgctggtggcaaggagca

SEQ ID NO: 221873 - DNA, 33 bp, Homo sapien
ggactggataggagaaggtagctcggagaaagt

SEQ ID NO: 221874 - DNA, 33 bp, Homo sapien
ggactggataggagaatgtagctcggagaaagt

SEQ ID NO: 221875 - DNA, 33 bp, Homo sapien
agatggaagatgatgaaagaagatgatggtttg

SEQ ID NO: 221876 - DNA, 33 bp, Homo sapien
agatggaagatgatgagagaagatgatggtttg

SEQ ID NO: 221877 - DNA, 33 bp, Homo sapien
ttttctgtttaaaatacctctggctgaaactta

SEQ ID NO: 221878 - DNA, 33 bp, Homo sapien
ttttctgtttaaaatagctctggctgaaactta

SEQ ID NO: 221879 - DNA, 33 bp, Homo sapien
gactctcagctgcaaaattgtaatcagctgtga

SEQ ID NO: 221880 - DNA, 33 bp, Homo sapien
gactctcagctgcaaagttgtaatcagctgtga

SEQ ID NO: 221881 - DNA, 33 bp, Homo sapien
ctcacagtcattctggaaaaaggcagatctgtg

SEQ ID NO: 221882 - DNA, 33 bp, Homo sapien
ctcacagtcattctggcaaaaggcagatctgtg

SEQ ID NO: 221883 - DNA, 33 bp, Homo sapien
acaaaaccctacagcaaggactcattaagtaag

SEQ ID NO: 221884 - DNA, 33 bp, Homo sapien
acaaaaccctacagcagggactcattaagtaag

SEQ ID NO: 221885 - DNA, 33 bp, Homo sapien
aaagtttcttggtaagcagatgcttggaagcag

SEQ ID NO: 221886 - DNA, 33 bp, Homo sapien
aaagtttcttggtaagtagatgcttggaagcag

SEQ ID NO: 221887 - DNA, 33 bp, Homo sapien
ctgagacaaagaaagcgcttcctctccacaaac

SEQ ID NO: 221888 - DNA, 33 bp, Homo sapien
ctgagacaaagaaagctcttcctctccacaaac

SEQ ID NO: 221889 - DNA, 33 bp, Homo sapien
gggtttgtttaaatgaagaagtgaaatgaatat

SEQ ID NO: 221890 - DNA, 33 bp, Homo sapien
gggtttgtttaaatgaggaagtgaaatgaatat

SEQ ID NO: 221891 - DNA, 33 bp, Homo sapien
tgcaaatatgtcttccactcaaagaacatatgc

SEQ ID NO: 221892 - DNA, 33 bp, Homo sapien
tgcaaatatgtcttccgctcaaagaacatatgc

SEQ ID NO: 221893 - DNA, 33 bp, Homo sapien
tatgatcattgagttaagcttttatttgtctgc

SEQ ID NO: 221894 - DNA, 33 bp, Homo sapien
tatgatcattgagttaggcttttatttgtctgc

SEQ ID NO: 221895 - DNA, 33 bp, Homo sapien
atgggaagagctccaacgtcagagtatttagtg

SEQ ID NO: 221896 - DNA, 33 bp, Homo sapien
atgggaagagctccaatgtcagagtatttagtg

SEQ ID NO: 221897 - DNA, 33 bp, Homo sapien
cagaacaaaggaaagagcaaaggcaattccttg

SEQ ID NO: 221898 - DNA, 33 bp, Homo sapien
cagaacaaaggaaagatcaaaggcaattccttg

SEQ ID NO: 221899 - DNA, 33 bp, Homo sapien
ggctgtagaacacctgcaatacttttatgctca

SEQ ID NO: 221900 - DNA, 33 bp, Homo sapien
ggctgtagaacacctggaatacttttatgctca

SEQ ID NO: 221901 - DNA, 33 bp, Homo sapien
aacttatcacacttcccgaacttgcatattcta

SEQ ID NO: 221902 - DNA, 33 bp, Homo sapien
aacttatcacacttcctgaacttgcatattcta

SEQ ID NO: 221903 - DNA, 33 bp, Homo sapien
gtgctcacaccacatacgttaatttgcctgcag

SEQ ID NO: 221904 - DNA, 33 bp, Homo sapien
gtgctcacaccacataggttaatttgcctgcag

SEQ ID NO: 221905 - DNA, 33 bp, Homo sapien
gaaagtgatccaaaaggcactgtctgaggagga

SEQ ID NO: 221906 - DNA, 33 bp, Homo sapien
gaaagtgatccaaaagtcactgtctgaggagga

SEQ ID NO: 221907 - DNA, 33 bp, Homo sapien
cctcctcagtctgtcacgcccttttctctctgg

SEQ ID NO: 221908 - DNA, 33 bp, Homo sapien
cctcctcagtctgtcaggcccttttctctctgg

SEQ ID NO: 221909 - DNA, 33 bp, Homo sapien
agtgagctgtggcggacgattaacaagagacca

SEQ ID NO: 221910 - DNA, 33 bp, Homo sapien
agtgagctgtggcggatgattaacaagagacca

SEQ ID NO: 221911 - DNA, 33 bp, Homo sapien
ccaatgcaattacccacctattgttctttcaag

SEQ ID NO: 221912 - DNA, 33 bp, Homo sapien
ccaatgcaattacccatctattgttctttcaag

SEQ ID NO: 221913 - DNA, 33 bp, Homo sapien
tttgcaaaataaaaacagttctggatattgatt

SEQ ID NO: 221914 - DNA, 33 bp, Homo sapien
tttgcaaaataaaaaccgttctggatattgatt

SEQ ID NO: 221915 - DNA, 33 bp, Homo sapien
gaactgataagtcacaatgcaatgtggcaagaa

SEQ ID NO: 221916 - DNA, 33 bp, Homo sapien
gaactgataagtcacagtgcaatgtggcaagaa

SEQ ID NO: 221917 - DNA, 33 bp, Homo sapien
catgtccaaatgactacctacagttcaaactgc

SEQ ID NO: 221918 - DNA, 33 bp, Homo sapien
catgtccaaatgactatctacagttcaaactgc

SEQ ID NO: 221919 - DNA, 33 bp, Homo sapien
ggagggaatcaaagtacagatatttattggagg

SEQ ID NO: 221920 - DNA, 33 bp, Homo sapien
ggagggaatcaaagtatagatatttattggagg

SEQ ID NO: 221921 - DNA, 33 bp, Homo sapien
cccagattgaattcgcccttttatttttgcttt

SEQ ID NO: 221922 - DNA, 33 bp, Homo sapien
cccagattgaattcgctcttttatttttgcttt

SEQ ID NO: 221923 - DNA, 33 bp, Homo sapien
acagcatgaaccacgtgaattaatacaatatac

SEQ ID NO: 221924 - DNA, 33 bp, Homo sapien
acagcatgaaccacgttaattaatacaatatac

SEQ ID NO: 221925 - DNA, 33 bp, Homo sapien
attatgtttttctagaagttggaatgcaaatgg

SEQ ID NO: 221926 - DNA, 33 bp, Homo sapien
attatgtttttctagaggttggaatgcaaatgg

SEQ ID NO: 221927 - DNA, 33 bp, Homo sapien
atacctaagtaaagcacagaggtgaagaaagaa

SEQ ID NO: 221928 - DNA, 33 bp, Homo sapien
atacctaagtaaagcatagaggtgaagaaagaa

SEQ ID NO: 221929 - DNA, 33 bp, Homo sapien
aacttggaaaacatataaagcaacatttaaaaa

SEQ ID NO: 221930 - DNA, 33 bp, Homo sapien
aacttggaaaacatatgaagcaacatttaaaaa

SEQ ID NO: 221931 - DNA, 33 bp, Homo sapien
ctcactgacatctctcactaatccttcctccat

SEQ ID NO: 221932 - DNA, 33 bp, Homo sapien
ctcactgacatctctcgctaatccttcctccat

SEQ ID NO: 221933 - DNA, 33 bp, Homo sapien
tctctcttctcagcagaatcaaaggtaggcata

SEQ ID NO: 221934 - DNA, 33 bp, Homo sapien
tctctcttctcagcagtatcaaaggtaggcata

SEQ ID NO: 221935 - DNA, 33 bp, Homo sapien
gtcactggaaggtgtacataggcttttgccata

SEQ ID NO: 221936 - DNA, 33 bp, Homo sapien
gtcactggaaggtgtatataggcttttgccata

SEQ ID NO: 221937 - DNA, 33 bp, Homo sapien
gtctatgagaacaaaaagaaaggaacaactttt

SEQ ID NO: 221938 - DNA, 33 bp, Homo sapien
gtctatgagaacaaaaggaaaggaacaactttt

SEQ ID NO: 221939 - DNA, 33 bp, Homo sapien
ggaatccttcagataccaaaccgaggaaagaac

SEQ ID NO: 221940 - DNA, 33 bp, Homo sapien
ggaatccttcagatactaaaccgaggaaagaac

SEQ ID NO: 221941 - DNA, 33 bp, Homo sapien
tagggaagaaagcctacggtggttatggaggga

SEQ ID NO: 221942 - DNA, 33 bp, Homo sapien
tagggaagaaagcctatggtggttatggaggga

SEQ ID NO: 221943 - DNA, 33 bp, Homo sapien
gagttcccaaccatgacgggatgtgggtagaac

SEQ ID NO: 221944 - DNA, 33 bp, Homo sapien
gagttcccaaccatgatgggatgtgggtagaac

SEQ ID NO: 221945 - DNA, 33 bp, Homo sapien
gcataaatctttcaaaattgaggaaaacaatat

SEQ ID NO: 221946 - DNA, 33 bp, Homo sapien
gcataaatctttcaaatttgaggaaaacaatat

SEQ ID NO: 221947 - DNA, 33 bp, Homo sapien
gattttgcatttcataagaattctgccactttt

SEQ ID NO: 221948 - DNA, 33 bp, Homo sapien
gattttgcatttcataggaattctgccactttt

SEQ ID NO: 221949 - DNA, 33 bp, Homo sapien
aatctgtgagtgactaaatgaaataccatacac

SEQ ID NO: 221950 - DNA, 33 bp, Homo sapien
aatctgtgagtgactagatgaaataccatacac

SEQ ID NO: 221951 - DNA, 33 bp, Homo sapien
aatcacctctggattccatcatggcatctgggt

SEQ ID NO: 221952 - DNA, 33 bp, Homo sapien
aatcacctctggattctatcatggcatctgggt

SEQ ID NO: 221953 - DNA, 33 bp, Homo sapien
acacacatggtagtgaaaaacattgaaaacatt

SEQ ID NO: 221954 - DNA, 33 bp, Homo sapien
acacacatggtagtgagaaacattgaaaacatt

SEQ ID NO: 221955 - DNA, 33 bp, Homo sapien
gtctctgcaaaaaataaaaacatccaggtgtgg

SEQ ID NO: 221956 - DNA, 33 bp, Homo sapien
gtctctgcaaaaaatagaaacatccaggtgtgg

SEQ ID NO: 221957 - DNA, 33 bp, Homo sapien
gtttgatggtaagcaaaatagtttcatggtctc

SEQ ID NO: 221958 - DNA, 33 bp, Homo sapien
gtttgatggtaagcaagatagtttcatggtctc

SEQ ID NO: 221959 - DNA, 33 bp, Homo sapien
cttctagaacagtggaaagaagaaaggttaatg

SEQ ID NO: 221960 - DNA, 33 bp, Homo sapien
cttctagaacagtggagagaagaaaggttaatg

SEQ ID NO: 221961 - DNA, 33 bp, Homo sapien
tgcaggttctgctgcaagctatttgctgccttc

SEQ ID NO: 221962 - DNA, 33 bp, Homo sapien
tgcaggttctgctgcaggctatttgctgccttc

SEQ ID NO: 221963 - DNA, 33 bp, Homo sapien
gggcattcaccctctaagaatgatggcagaaca

SEQ ID NO: 221964 - DNA, 33 bp, Homo sapien
gggcattcaccctctaggaatgatggcagaaca

SEQ ID NO: 221965 - DNA, 33 bp, Homo sapien
aaaccttaagtccaaaataactgaaaactgtgt

SEQ ID NO: 221966 - DNA, 33 bp, Homo sapien
aaaccttaagtccaaagtaactgaaaactgtgt

SEQ ID NO: 221967 - DNA, 33 bp, Homo sapien
tcaagggatagcctgaagttaaaatctttttaa

SEQ ID NO: 221968 - DNA, 33 bp, Homo sapien
tcaagggatagcctgacgttaaaatctttttaa

SEQ ID NO: 221969 - DNA, 33 bp, Homo sapien
ctgggtacctcaagccgcggggaatcagaagta

SEQ ID NO: 221970 - DNA, 33 bp, Homo sapien
ctgggtacctcaagcctcggggaatcagaagta

SEQ ID NO: 221971 - DNA, 33 bp, Homo sapien
aatgaactctttatagacctcaacaagcaatta

SEQ ID NO: 221972 - DNA, 33 bp, Homo sapien
aatgaactctttatagtcctcaacaagcaatta

SEQ ID NO: 221973 - DNA, 33 bp, Homo sapien
ttagctcttcaagggaactctatgctgtttccc

SEQ ID NO: 221974 - DNA, 33 bp, Homo sapien
ttagctcttcaagggatctctatgctgtttccc

SEQ ID NO: 221975 - DNA, 33 bp, Homo sapien
tgatctgttatagaaccctggttttttttgtgt

SEQ ID NO: 221976 - DNA, 33 bp, Homo sapien
tgatctgttatagaactctggttttttttgtgt

SEQ ID NO: 221977 - DNA, 33 bp, Homo sapien
ctggttgtagaagctacgtacttggtgtgtgga

SEQ ID NO: 221978 - DNA, 33 bp, Homo sapien
ctggttgtagaagctatgtacttggtgtgtgga

SEQ ID NO: 221979 - DNA, 33 bp, Homo sapien
cggcaagtggaaagtaagctatatttgtgagca

SEQ ID NO: 221980 - DNA, 33 bp, Homo sapien
cggcaagtggaaagtatgctatatttgtgagca

SEQ ID NO: 221981 - DNA, 33 bp, Homo sapien
taatccaacacagaacaggaactgatttaggga

SEQ ID NO: 221982 - DNA, 33 bp, Homo sapien
taatccaacacagaactggaactgatttaggga

SEQ ID NO: 221983 - DNA, 33 bp, Homo sapien
aacaggaaaagtgaaaaaatccacagactcttt

SEQ ID NO: 221984 - DNA, 33 bp, Homo sapien
aacaggaaaagtgaaagaatccacagactcttt

SEQ ID NO: 221985 - DNA, 33 bp, Homo sapien
gaccttgctcctctgaaagatctaagaagagtt

SEQ ID NO: 221986 - DNA, 33 bp, Homo sapien
gaccttgctcctctgacagatctaagaagagtt

SEQ ID NO: 221987 - DNA, 33 bp, Homo sapien
taccctaaaaaactgcagagaatgtggagttat

SEQ ID NO: 221988 - DNA, 33 bp, Homo sapien
taccctaaaaaactgcggagaatgtggagttat

SEQ ID NO: 221989 - DNA, 33 bp, Homo sapien
agtaggtattaaaataaggcagtgtcagctggg

SEQ ID NO: 221990 - DNA, 33 bp, Homo sapien
agtaggtattaaaatagggcagtgtcagctggg

SEQ ID NO: 221991 - DNA, 33 bp, Homo sapien
aaaataatgatatgacaataaggagttgttaag

SEQ ID NO: 221992 - DNA, 33 bp, Homo sapien
aaaataatgatatgacgataaggagttgttaag

SEQ ID NO: 221993 - DNA, 33 bp, Homo sapien
agaaagagcctgctgcaaaatatctatgtccag

SEQ ID NO: 221994 - DNA, 33 bp, Homo sapien
agaaagagcctgctgcgaaatatctatgtccag

SEQ ID NO: 221995 - DNA, 33 bp, Homo sapien
ggtctgacttatggaacgcacagtggtctcagc

SEQ ID NO: 221996 - DNA, 33 bp, Homo sapien
ggtctgacttatggaatgcacagtggtctcagc

SEQ ID NO: 221997 - DNA, 33 bp, Homo sapien
tcatgtacaaatggaaacctatcaggctaacag

SEQ ID NO: 221998 - DNA, 33 bp, Homo sapien
tcatgtacaaatggaaccctatcaggctaacag

SEQ ID NO: 221999 - DNA, 33 bp, Homo sapien
gttaaaactacataaaatctcttctagataagc

SEQ ID NO: 222000 - DNA, 33 bp, Homo sapien
gttaaaactacataaagtctcttctagataagc

SEQ ID NO: 222001 - DNA, 33 bp, Homo sapien
tactagtatacccacaactgttctcttttagtt

SEQ ID NO: 222002 - DNA, 33 bp, Homo sapien
tactagtatacccacagctgttctcttttagtt

SEQ ID NO: 222003 - DNA, 33 bp, Homo sapien
gatgcagtgctctgtaagtctctgaggtctaat

SEQ ID NO: 222004 - DNA, 33 bp, Homo sapien
gatgcagtgctctgtatgtctctgaggtctaat

SEQ ID NO: 222005 - DNA, 33 bp, Homo sapien
gtgctggcatgaggataaatagagaccaatgga

SEQ ID NO: 222006 - DNA, 33 bp, Homo sapien
gtgctggcatgaggatgaatagagaccaatgga

SEQ ID NO: 222007 - DNA, 33 bp, Homo sapien
gacttctcctccattacgctaccaaagccaggc

SEQ ID NO: 222008 - DNA, 33 bp, Homo sapien
gacttctcctccattatgctaccaaagccaggc

SEQ ID NO: 222009 - DNA, 33 bp, Homo sapien
ggcctcaatatagtgtaaaagagttgtatgatt

SEQ ID NO: 222010 - DNA, 33 bp, Homo sapien
ggcctcaatatagtgtgaaagagttgtatgatt

SEQ ID NO: 222011 - DNA, 33 bp, Homo sapien
ctagtgtttgtctgaaaaagtgtgggctatttt

SEQ ID NO: 222012 - DNA, 33 bp, Homo sapien
ctagtgtttgtctgaataagtgtgggctatttt

SEQ ID NO: 222013 - DNA, 33 bp, Homo sapien
caagcatataattagacaagggggacattgttg

SEQ ID NO: 222014 - DNA, 33 bp, Homo sapien
caagcatataattagataagggggacattgttg

SEQ ID NO: 222015 - DNA, 33 bp, Homo sapien
ggggctaatggctaaaacattttatgaagcttt

SEQ ID NO: 222016 - DNA, 33 bp, Homo sapien
ggggctaatggctaaaccattttatgaagcttt

SEQ ID NO: 222017 - DNA, 33 bp, Homo sapien
agatgtcttaaaattaaataaaccatggcctta

SEQ ID NO: 222018 - DNA, 33 bp, Homo sapien
agatgtcttaaaattacataaaccatggcctta

SEQ ID NO: 222019 - DNA, 33 bp, Homo sapien
attataggagagatgcccttgcttacctagtgt

SEQ ID NO: 222020 - DNA, 33 bp, Homo sapien
attataggagagatgctcttgcttacctagtgt

SEQ ID NO: 222021 - DNA, 33 bp, Homo sapien
acacacttccagaaaacgattcataaaataaca

SEQ ID NO: 222022 - DNA, 33 bp, Homo sapien
acacacttccagaaaatgattcataaaataaca

SEQ ID NO: 222023 - DNA, 33 bp, Homo sapien
cttcatgccttagagaaaccatttcaaattttg

SEQ ID NO: 222024 - DNA, 33 bp, Homo sapien
cttcatgccttagagagaccatttcaaattttg

SEQ ID NO: 222025 - DNA, 33 bp, Homo sapien
atctaccaagctattccactcaaagcttcaggg

SEQ ID NO: 222026 - DNA, 33 bp, Homo sapien
atctaccaagctattctactcaaagcttcaggg

SEQ ID NO: 222027 - DNA, 33 bp, Homo sapien
catgtgaatagagggagagagtcacaaacatac

SEQ ID NO: 222028 - DNA, 33 bp, Homo sapien
catgtgaatagagggatagagtcacaaacatac

SEQ ID NO: 222029 - DNA, 33 bp, Homo sapien
actctgcagtgtttcaaagaggctgtctacagg

SEQ ID NO: 222030 - DNA, 33 bp, Homo sapien
actctgcagtgtttcagagaggctgtctacagg

SEQ ID NO: 222031 - DNA, 33 bp, Homo sapien
taagatacagaagcaaaaatcctgaggtgactg

SEQ ID NO: 222032 - DNA, 33 bp, Homo sapien
taagatacagaagcaagaatcctgaggtgactg

SEQ ID NO: 222033 - DNA, 33 bp, Homo sapien
cacatgacccgctaacaattcttctatctttta

SEQ ID NO: 222034 - DNA, 33 bp, Homo sapien
cacatgacccgctaacgattcttctatctttta

SEQ ID NO: 222035 - DNA, 33 bp, Homo sapien
gaagccagacagacgtcacagagtaaaaaataa

SEQ ID NO: 222036 - DNA, 33 bp, Homo sapien
gaagccagacagacgttacagagtaaaaaataa

SEQ ID NO: 222037 - DNA, 33 bp, Homo sapien
aattggaggccaaaaagtaagtcagtaagagct

SEQ ID NO: 222038 - DNA, 33 bp, Homo sapien
aattggaggccaaaaattaagtcagtaagagct

SEQ ID NO: 222039 - DNA, 33 bp, Homo sapien
ttatttctacatataaaacagctcagtaggtgc

SEQ ID NO: 222040 - DNA, 33 bp, Homo sapien
ttatttctacatataagacagctcagtaggtgc

SEQ ID NO: 222041 - DNA, 33 bp, Homo sapien
ctggctctgcaacttgaaaactatgtgctcctg

SEQ ID NO: 222042 - DNA, 33 bp, Homo sapien
ctggctctgcaacttgcaaactatgtgctcctg

SEQ ID NO: 222043 - DNA, 33 bp, Homo sapien
taaaatatttgttcaacaactggcaaagaagaa

SEQ ID NO: 222044 - DNA, 33 bp, Homo sapien
taaaatatttgttcaataactggcaaagaagaa

SEQ ID NO: 222045 - DNA, 33 bp, Homo sapien
agtgtgcttaaaattcgatgtggattgctgggt

SEQ ID NO: 222046 - DNA, 33 bp, Homo sapien
agtgtgcttaaaattctatgtggattgctgggt

SEQ ID NO: 222047 - DNA, 33 bp, Homo sapien
caaatcttgattgtacgaagctcccaccactta

SEQ ID NO: 222048 - DNA, 33 bp, Homo sapien
caaatcttgattgtactaagctcccaccactta

SEQ ID NO: 222049 - DNA, 33 bp, Homo sapien
tcacttaacagaccgacaggagcaaaataaaaa

SEQ ID NO: 222050 - DNA, 33 bp, Homo sapien
tcacttaacagaccgataggagcaaaataaaaa

SEQ ID NO: 222051 - DNA, 33 bp, Homo sapien
ctgtcattctcctacaatcaaacatctatagag

SEQ ID NO: 222052 - DNA, 33 bp, Homo sapien
ctgtcattctcctacagtcaaacatctatagag

SEQ ID NO: 222053 - DNA, 33 bp, Homo sapien
ccagactcaagggaggaaacataaagccttatt

SEQ ID NO: 222054 - DNA, 33 bp, Homo sapien
ccagactcaagggagggaacataaagccttatt

SEQ ID NO: 222055 - DNA, 33 bp, Homo sapien
agaagaatcatccaaaactcctaaaaaatgttg

SEQ ID NO: 222056 - DNA, 33 bp, Homo sapien
agaagaatcatccaaatctcctaaaaaatgttg

SEQ ID NO: 222057 - DNA, 33 bp, Homo sapien
gagaatggccttgcctaaagacacagagatatg

SEQ ID NO: 222058 - DNA, 33 bp, Homo sapien
gagaatggccttgcctgaagacacagagatatg

SEQ ID NO: 222059 - DNA, 33 bp, Homo sapien
tagatgaagacattgaagtaatgggcacaagat

SEQ ID NO: 222060 - DNA, 33 bp, Homo sapien
tagatgaagacattgaggtaatgggcacaagat

SEQ ID NO: 222061 - DNA, 33 bp, Homo sapien
tattacatttgagaaagaaagggcttctacaaa

SEQ ID NO: 222062 - DNA, 33 bp, Homo sapien
tattacatttgagaaataaagggcttctacaaa

SEQ ID NO: 222063 - DNA, 33 bp, Homo sapien
gatcttaaaatcatagcattttgcaacctgatt

SEQ ID NO: 222064 - DNA, 33 bp, Homo sapien
gatcttaaaatcatagtattttgcaacctgatt

SEQ ID NO: 222065 - DNA, 33 bp, Homo sapien
tctatatgtattaatacgaaaatgaccagattt

SEQ ID NO: 222066 - DNA, 33 bp, Homo sapien
tctatatgtattaatatgaaaatgaccagattt

SEQ ID NO: 222067 - DNA, 33 bp, Homo sapien
aaaagaatcactgtgaaggttctcatcaaccag

SEQ ID NO: 222068 - DNA, 33 bp, Homo sapien
aaaagaatcactgtgacggttctcatcaaccag

SEQ ID NO: 222069 - DNA, 33 bp, Homo sapien
tatttgataataagacaaaaagttgtagttaat

SEQ ID NO: 222070 - DNA, 33 bp, Homo sapien
tatttgataataagaccaaaagttgtagttaat

SEQ ID NO: 222071 - DNA, 33 bp, Homo sapien
atgcataaatgatccaaaaaataccagaaaggt

SEQ ID NO: 222072 - DNA, 33 bp, Homo sapien
atgcataaatgatccagaaaataccagaaaggt

SEQ ID NO: 222073 - DNA, 33 bp, Homo sapien
ccttcaaaacaaagaagatacagaccatcattt

SEQ ID NO: 222074 - DNA, 33 bp, Homo sapien
ccttcaaaacaaagaatatacagaccatcattt

SEQ ID NO: 222075 - DNA, 33 bp, Homo sapien
gttacctcgggctgagacatgataatattttat

SEQ ID NO: 222076 - DNA, 33 bp, Homo sapien
gttacctcgggctgaggcatgataatattttat

SEQ ID NO: 222077 - DNA, 33 bp, Homo sapien
ataggagccaaaagtcagacaaacagaagaagg

SEQ ID NO: 222078 - DNA, 33 bp, Homo sapien
ataggagccaaaagtcggacaaacagaagaagg

SEQ ID NO: 222079 - DNA, 33 bp, Homo sapien
taccaccaagctctccagcagtcatggacttat

SEQ ID NO: 222080 - DNA, 33 bp, Homo sapien
taccaccaagctctccggcagtcatggacttat

SEQ ID NO: 222081 - DNA, 33 bp, Homo sapien
gacaccatgtttcaggccaatctggtcacctgt

SEQ ID NO: 222082 - DNA, 33 bp, Homo sapien
gacaccatgtttcaggtcaatctggtcacctgt

SEQ ID NO: 222083 - DNA, 33 bp, Homo sapien
attgctataaagtaacaaggaaaatagaaagta

SEQ ID NO: 222084 - DNA, 33 bp, Homo sapien
attgctataaagtaacgaggaaaatagaaagta

SEQ ID NO: 222085 - DNA, 33 bp, Homo sapien
agagagtttgtagctgaaaaagaatagggatag

SEQ ID NO: 222086 - DNA, 33 bp, Homo sapien
agagagtttgtagctgcaaaagaatagggatag

SEQ ID NO: 222087 - DNA, 33 bp, Homo sapien
aggatttgggaattaaagcttcaggggtgatca

SEQ ID NO: 222088 - DNA, 33 bp, Homo sapien
aggatttgggaattaaggcttcaggggtgatca

SEQ ID NO: 222089 - DNA, 33 bp, Homo sapien
tggagggatgggagaaaattctgatatgatatt

SEQ ID NO: 222090 - DNA, 33 bp, Homo sapien
tggagggatgggagaagattctgatatgatatt

SEQ ID NO: 222091 - DNA, 33 bp, Homo sapien
atactttccctcttaaatcaagcccccgtactt

SEQ ID NO: 222092 - DNA, 33 bp, Homo sapien
atactttccctcttaagtcaagcccccgtactt

SEQ ID NO: 222093 - DNA, 33 bp, Homo sapien
aacacaattgtgccaaatgtagctgcaacattt

SEQ ID NO: 222094 - DNA, 33 bp, Homo sapien
aacacaattgtgccaagtgtagctgcaacattt

SEQ ID NO: 222095 - DNA, 33 bp, Homo sapien
cttaatttttgttgcacgttccacttttgtgtt

SEQ ID NO: 222096 - DNA, 33 bp, Homo sapien
cttaatttttgttgcatgttccacttttgtgtt

SEQ ID NO: 222097 - DNA, 33 bp, Homo sapien
tttgctaataaataccaagttctccagggttag

SEQ ID NO: 222098 - DNA, 33 bp, Homo sapien
tttgctaataaataccgagttctccagggttag

SEQ ID NO: 222099 - DNA, 33 bp, Homo sapien
agagcatgattatgcccctaattgtccgggtag

SEQ ID NO: 222100 - DNA, 33 bp, Homo sapien
agagcatgattatgccgctaattgtccgggtag

SEQ ID NO: 222101 - DNA, 33 bp, Homo sapien
tcacctcaccactgacactcgtgtgacatttga

SEQ ID NO: 222102 - DNA, 33 bp, Homo sapien
tcacctcaccactgactctcgtgtgacatttga

SEQ ID NO: 222103 - DNA, 33 bp, Homo sapien
ttatttttagttggaacaagattaagagagatg

SEQ ID NO: 222104 - DNA, 33 bp, Homo sapien
ttatttttagttggaataagattaagagagatg

SEQ ID NO: 222105 - DNA, 33 bp, Homo sapien
cagacattccttcagcacctgctatatgcaagt

SEQ ID NO: 222106 - DNA, 33 bp, Homo sapien
cagacattccttcagcgcctgctatatgcaagt

SEQ ID NO: 222107 - DNA, 33 bp, Homo sapien
gccttgcctcccaccggaatttcctagtctgaa

SEQ ID NO: 222108 - DNA, 33 bp, Homo sapien
gccttgcctcccaccgtaatttcctagtctgaa

SEQ ID NO: 222109 - DNA, 33 bp, Homo sapien
tcaacagaagactatcaattctaaatctcatta

SEQ ID NO: 222110 - DNA, 33 bp, Homo sapien
tcaacagaagactatcgattctaaatctcatta

SEQ ID NO: 222111 - DNA, 33 bp, Homo sapien
atggccttcccttggcactttaatatatcattc

SEQ ID NO: 222112 - DNA, 33 bp, Homo sapien
atggccttcccttggctctttaatatatcattc

SEQ ID NO: 222113 - DNA, 33 bp, Homo sapien
tcgatgagtctttttaagtatgtatgtgagtag

SEQ ID NO: 222114 - DNA, 33 bp, Homo sapien
tcgatgagtctttttacgtatgtatgtgagtag

SEQ ID NO: 222115 - DNA, 33 bp, Homo sapien
tgtcacaaggacaaaaagccaaacaccacatgt

SEQ ID NO: 222116 - DNA, 33 bp, Homo sapien
tgtcacaaggacaaaaggccaaacaccacatgt

SEQ ID NO: 222117 - DNA, 33 bp, Homo sapien
ttcaagcctactctctgaatcctatactacact

SEQ ID NO: 222118 - DNA, 33 bp, Homo sapien
ttcaagcctactctcttaatcctatactacact

SEQ ID NO: 222119 - DNA, 33 bp, Homo sapien
aagtgattttgtggcactgaaatccctttttca

SEQ ID NO: 222120 - DNA, 33 bp, Homo sapien
aagtgattttgtggcagtgaaatccctttttca

SEQ ID NO: 222121 - DNA, 33 bp, Homo sapien
agtcacaaatatcctcagaaaaatatacacatc

SEQ ID NO: 222122 - DNA, 33 bp, Homo sapien
agtcacaaatatcctctgaaaaatatacacatc

SEQ ID NO: 222123 - DNA, 33 bp, Homo sapien
tcatctagcacacaaaattaaaaagttattcct

SEQ ID NO: 222124 - DNA, 33 bp, Homo sapien
tcatctagcacacaaagttaaaaagttattcct

SEQ ID NO: 222125 - DNA, 33 bp, Homo sapien
ttatgtatatcctctaagcctttttctttttag

SEQ ID NO: 222126 - DNA, 33 bp, Homo sapien
ttatgtatatcctctatgcctttttctttttag

SEQ ID NO: 222127 - DNA, 33 bp, Homo sapien
tagaactatcacctgaaaaatgatgcaagtttt

SEQ ID NO: 222128 - DNA, 33 bp, Homo sapien
tagaactatcacctgagaaatgatgcaagtttt

SEQ ID NO: 222129 - DNA, 33 bp, Homo sapien
gtttatattgagaacaatgagcaacatatattg

SEQ ID NO: 222130 - DNA, 33 bp, Homo sapien
gtttatattgagaacactgagcaacatatattg

SEQ ID NO: 222131 - DNA, 33 bp, Homo sapien
taagacttcctttttaaaattgtgtgtggcttt

SEQ ID NO: 222132 - DNA, 33 bp, Homo sapien
taagacttcctttttacaattgtgtgtggcttt

SEQ ID NO: 222133 - DNA, 33 bp, Homo sapien
cagcatcttccaaataccagtcatttgagtaac

SEQ ID NO: 222134 - DNA, 33 bp, Homo sapien
cagcatcttccaaatatcagtcatttgagtaac

SEQ ID NO: 222135 - DNA, 33 bp, Homo sapien
aagtctcttaaggcccagacctagaagtcacag

SEQ ID NO: 222136 - DNA, 33 bp, Homo sapien
aagtctcttaaggcccggacctagaagtcacag

SEQ ID NO: 222137 - DNA, 33 bp, Homo sapien
aatcaagtaacaagacaagtctggattcaaggg

SEQ ID NO: 222138 - DNA, 33 bp, Homo sapien
aatcaagtaacaagacgagtctggattcaaggg

SEQ ID NO: 222139 - DNA, 33 bp, Homo sapien
ttagatgttaggtgaaaacagcatcttccaaat

SEQ ID NO: 222140 - DNA, 33 bp, Homo sapien
ttagatgttaggtgaagacagcatcttccaaat

SEQ ID NO: 222141 - DNA, 33 bp, Homo sapien
acaaagcctcctgccactgctctgagactttcc

SEQ ID NO: 222142 - DNA, 33 bp, Homo sapien
acaaagcctcctgccagtgctctgagactttcc

SEQ ID NO: 222143 - DNA, 33 bp, Homo sapien
taaaaataatccctgtaaagttatgcgctgctt

SEQ ID NO: 222144 - DNA, 33 bp, Homo sapien
taaaaataatccctgtgaagttatgcgctgctt

SEQ ID NO: 222145 - DNA, 33 bp, Homo sapien
tagtaatcgtaaaacaagcactgtgcaaagtgc

SEQ ID NO: 222146 - DNA, 33 bp, Homo sapien
tagtaatcgtaaaacaggcactgtgcaaagtgc

SEQ ID NO: 222147 - DNA, 33 bp, Homo sapien
tgctttgtgacacttacgaatgggtgcacctat

SEQ ID NO: 222148 - DNA, 33 bp, Homo sapien
tgctttgtgacacttatgaatgggtgcacctat

SEQ ID NO: 222149 - DNA, 33 bp, Homo sapien
atacttcgattgtatacgcaagcgtactgaaat

SEQ ID NO: 222150 - DNA, 33 bp, Homo sapien
atacttcgattgtatatgcaagcgtactgaaat

SEQ ID NO: 222151 - DNA, 33 bp, Homo sapien
ttcagactaccctttcaaaaagcattctcagga

SEQ ID NO: 222152 - DNA, 33 bp, Homo sapien
ttcagactaccctttccaaaagcattctcagga

SEQ ID NO: 222153 - DNA, 33 bp, Homo sapien
ctctatgcccattaaagtcttttatgcccccaa

SEQ ID NO: 222154 - DNA, 33 bp, Homo sapien
ctctatgcccattaaattcttttatgcccccaa

SEQ ID NO: 222155 - DNA, 33 bp, Homo sapien
ctatttgaccagaagaaaattatagagcagagg

SEQ ID NO: 222156 - DNA, 33 bp, Homo sapien
ctatttgaccagaagagaattatagagcagagg

SEQ ID NO: 222157 - DNA, 33 bp, Homo sapien
ccttcttgaatctagcaaaaaaagtacaattaa

SEQ ID NO: 222158 - DNA, 33 bp, Homo sapien
ccttcttgaatctagcgaaaaaagtacaattaa

SEQ ID NO: 222159 - DNA, 33 bp, Homo sapien
ctacactcagctggtccatgttactttcctacc

SEQ ID NO: 222160 - DNA, 33 bp, Homo sapien
ctacactcagctggtcgatgttactttcctacc

SEQ ID NO: 222161 - DNA, 33 bp, Homo sapien
tgcagtggttcaatggaagatcattttttattt

SEQ ID NO: 222162 - DNA, 33 bp, Homo sapien
tgcagtggttcaatgggagatcattttttattt

SEQ ID NO: 222163 - DNA, 33 bp, Homo sapien
tgtagaagcaagtcctaacttttgaactttggc

SEQ ID NO: 222164 - DNA, 33 bp, Homo sapien
tgtagaagcaagtcctgacttttgaactttggc

SEQ ID NO: 222165 - DNA, 33 bp, Homo sapien
aagagtattggttaataagattgttgagaaagt

SEQ ID NO: 222166 - DNA, 33 bp, Homo sapien
aagagtattggttaatgagattgttgagaaagt

SEQ ID NO: 222167 - DNA, 33 bp, Homo sapien
accagctccttacctcaactgcatgaagctgga

SEQ ID NO: 222168 - DNA, 33 bp, Homo sapien
accagctccttacctcgactgcatgaagctgga

SEQ ID NO: 222169 - DNA, 33 bp, Homo sapien
cacttacagcaatacaaggacatagtttctgac

SEQ ID NO: 222170 - DNA, 33 bp, Homo sapien
cacttacagcaatacagggacatagtttctgac

SEQ ID NO: 222171 - DNA, 33 bp, Homo sapien
ggtggtagcttgattacgacaaagtctcctggt

SEQ ID NO: 222172 - DNA, 33 bp, Homo sapien
ggtggtagcttgattatgacaaagtctcctggt

SEQ ID NO: 222173 - DNA, 33 bp, Homo sapien
tcaagagagaggctaacgatgacccatgagact

SEQ ID NO: 222174 - DNA, 33 bp, Homo sapien
tcaagagagaggctaatgatgacccatgagact

SEQ ID NO: 222175 - DNA, 33 bp, Homo sapien
tatctttcttccagcactaaatatctcaggaaa

SEQ ID NO: 222176 - DNA, 33 bp, Homo sapien
tatctttcttccagcattaaatatctcaggaaa

SEQ ID NO: 222177 - DNA, 33 bp, Homo sapien
aagataaccagtcaaacggtgacagtaaaaaaa

SEQ ID NO: 222178 - DNA, 33 bp, Homo sapien
aagataaccagtcaaatggtgacagtaaaaaaa

SEQ ID NO: 222179 - DNA, 33 bp, Homo sapien
attattcaaagcagagaaaattgctgcctgaag

SEQ ID NO: 222180 - DNA, 33 bp, Homo sapien
attattcaaagcagagtaaattgctgcctgaag

SEQ ID NO: 222181 - DNA, 33 bp, Homo sapien
agaacaatggtacgaacaagaggccatagaaca

SEQ ID NO: 222182 - DNA, 33 bp, Homo sapien
agaacaatggtacgaataagaggccatagaaca

SEQ ID NO: 222183 - DNA, 33 bp, Homo sapien
ctgttgctattgttccagagtggtgtaaatatc

SEQ ID NO: 222184 - DNA, 33 bp, Homo sapien
ctgttgctattgttccggagtggtgtaaatatc

SEQ ID NO: 222185 - DNA, 33 bp, Homo sapien
ctttccccatccagcaagctatgttcaatgtgt

SEQ ID NO: 222186 - DNA, 33 bp, Homo sapien
ctttccccatccagcacgctatgttcaatgtgt

SEQ ID NO: 222187 - DNA, 33 bp, Homo sapien
agatgtagatggataccggctataatggtagca

SEQ ID NO: 222188 - DNA, 33 bp, Homo sapien
agatgtagatggatactggctataatggtagca

SEQ ID NO: 222189 - DNA, 33 bp, Homo sapien
ctgcttgtgagcacaaccatagtggtgaatgcc

SEQ ID NO: 222190 - DNA, 33 bp, Homo sapien
ctgcttgtgagcacaatcatagtggtgaatgcc

SEQ ID NO: 222191 - DNA, 33 bp, Homo sapien
aaacaaaactgaattacaatcttcatagtaatt

SEQ ID NO: 222192 - DNA, 33 bp, Homo sapien
aaacaaaactgaattagaatcttcatagtaatt

SEQ ID NO: 222193 - DNA, 33 bp, Homo sapien
cttaacatattttaacacatcttcaccaacttc

SEQ ID NO: 222194 - DNA, 33 bp, Homo sapien
cttaacatattttaacgcatcttcaccaacttc

SEQ ID NO: 222195 - DNA, 33 bp, Homo sapien
aaaaacgataatacaccatcaccaagtgaaact

SEQ ID NO: 222196 - DNA, 33 bp, Homo sapien
aaaaacgataatacacgatcaccaagtgaaact

SEQ ID NO: 222197 - DNA, 33 bp, Homo sapien
aattattttgcagttacgtgagagtatgtgcct

SEQ ID NO: 222198 - DNA, 33 bp, Homo sapien
aattattttgcagttatgtgagagtatgtgcct

SEQ ID NO: 222199 - DNA, 33 bp, Homo sapien
tgaagataatatctcacgggaggttgctcagga

SEQ ID NO: 222200 - DNA, 33 bp, Homo sapien
tgaagataatatctcaggggaggttgctcagga

SEQ ID NO: 222201 - DNA, 33 bp, Homo sapien
ctctagagagaaaacaatgtgcctatctcttct

SEQ ID NO: 222202 - DNA, 33 bp, Homo sapien
ctctagagagaaaacagtgtgcctatctcttct

SEQ ID NO: 222203 - DNA, 33 bp, Homo sapien
gaggatgcaagccataaaccatcaagaaacagc

SEQ ID NO: 222204 - DNA, 33 bp, Homo sapien
gaggatgcaagccatagaccatcaagaaacagc

SEQ ID NO: 222205 - DNA, 33 bp, Homo sapien
gtaaagaaatgacctaaagttgtaacatttaaa

SEQ ID NO: 222206 - DNA, 33 bp, Homo sapien
gtaaagaaatgacctatagttgtaacatttaaa

SEQ ID NO: 222207 - DNA, 33 bp, Homo sapien
ggaacttcttatagacaggttaaatggttgtga

SEQ ID NO: 222208 - DNA, 33 bp, Homo sapien
ggaacttcttatagactggttaaatggttgtga

SEQ ID NO: 222209 - DNA, 33 bp, Homo sapien
ctcccctactccctccaccattgtcactaagat

SEQ ID NO: 222210 - DNA, 33 bp, Homo sapien
ctcccctactccctccgccattgtcactaagat

SEQ ID NO: 222211 - DNA, 33 bp, Homo sapien
actatacaagatcagaccattggcaccatttta

SEQ ID NO: 222212 - DNA, 33 bp, Homo sapien
actatacaagatcagagcattggcaccatttta

SEQ ID NO: 222213 - DNA, 33 bp, Homo sapien
aaccactcttggtaccaaaatctgtattattca

SEQ ID NO: 222214 - DNA, 33 bp, Homo sapien
aaccactcttggtaccgaaatctgtattattca

SEQ ID NO: 222215 - DNA, 33 bp, Homo sapien
cagatgacctattgtaagaccttgtgatcatgt

SEQ ID NO: 222216 - DNA, 33 bp, Homo sapien
cagatgacctattgtaggaccttgtgatcatgt

SEQ ID NO: 222217 - DNA, 33 bp, Homo sapien
tgacaaactgacaaaaataagcagtggataagg

SEQ ID NO: 222218 - DNA, 33 bp, Homo sapien
tgacaaactgacaaaagtaagcagtggataagg

SEQ ID NO: 222219 - DNA, 33 bp, Homo sapien
tacagaatgggaaaaaatattcacaaaccatgt

SEQ ID NO: 222220 - DNA, 33 bp, Homo sapien
tacagaatgggaaaaagtattcacaaaccatgt

SEQ ID NO: 222221 - DNA, 33 bp, Homo sapien
gcatagtttgaagttggataacatgatgcctcc

SEQ ID NO: 222222 - DNA, 33 bp, Homo sapien
gcatagtttgaagttgtataacatgatgcctcc

SEQ ID NO: 222223 - DNA, 33 bp, Homo sapien
cggagaaaaatgcaaacggtgtcaaatatttcc

SEQ ID NO: 222224 - DNA, 33 bp, Homo sapien
cggagaaaaatgcaaatggtgtcaaatatttcc

SEQ ID NO: 222225 - DNA, 33 bp, Homo sapien
taattaacataaagatcaaacaggctcctaaca

SEQ ID NO: 222226 - DNA, 33 bp, Homo sapien
taattaacataaagatgaaacaggctcctaaca

SEQ ID NO: 222227 - DNA, 33 bp, Homo sapien
taatgagatgactttaaatgaggaaaagaacct

SEQ ID NO: 222228 - DNA, 33 bp, Homo sapien
taatgagatgactttagatgaggaaaagaacct

SEQ ID NO: 222229 - DNA, 33 bp, Homo sapien
ttttgttcggaagaaacgatgtcagctggacta

SEQ ID NO: 222230 - DNA, 33 bp, Homo sapien
ttttgttcggaagaaatgatgtcagctggacta

SEQ ID NO: 222231 - DNA, 33 bp, Homo sapien
tactcattagaagcccagaccgctcacttaccc

SEQ ID NO: 222232 - DNA, 33 bp, Homo sapien
tactcattagaagcccggaccgctcacttaccc

SEQ ID NO: 222233 - DNA, 33 bp, Homo sapien
aattcaggcaactccaaagacatggatatggaa

SEQ ID NO: 222234 - DNA, 33 bp, Homo sapien
aattcaggcaactccagagacatggatatggaa

SEQ ID NO: 222235 - DNA, 33 bp, Homo sapien
cgtctctactggaccactactgtgtctaaattg

SEQ ID NO: 222236 - DNA, 33 bp, Homo sapien
cgtctctactggaccattactgtgtctaaattg

SEQ ID NO: 222237 - DNA, 33 bp, Homo sapien
aaaaaagaaatcttaaaacatggcagcagtctt

SEQ ID NO: 222238 - DNA, 33 bp, Homo sapien
aaaaaagaaatcttaagacatggcagcagtctt

SEQ ID NO: 222239 - DNA, 33 bp, Homo sapien
tttctagttattgctaatagagacactggtaga

SEQ ID NO: 222240 - DNA, 33 bp, Homo sapien
tttctagttattgctagtagagacactggtaga

SEQ ID NO: 222241 - DNA, 33 bp, Homo sapien
ggatcctgaagccaaaattaagaatagtaacaa

SEQ ID NO: 222242 - DNA, 33 bp, Homo sapien
ggatcctgaagccaaagttaagaatagtaacaa

SEQ ID NO: 222243 - DNA, 33 bp, Homo sapien
cgaaactgggtataaaccctggctgcattaact

SEQ ID NO: 222244 - DNA, 33 bp, Homo sapien
cgaaactgggtataaatcctggctgcattaact

SEQ ID NO: 222245 - DNA, 33 bp, Homo sapien
attacagtgtttgccaacaatattcttttctat

SEQ ID NO: 222246 - DNA, 33 bp, Homo sapien
attacagtgtttgccagcaatattcttttctat

SEQ ID NO: 222247 - DNA, 33 bp, Homo sapien
tttaaagaattgtctccgacttcaatacctaat

SEQ ID NO: 222248 - DNA, 33 bp, Homo sapien
tttaaagaattgtctctgacttcaatacctaat

SEQ ID NO: 222249 - DNA, 33 bp, Homo sapien
atcagtgcatggattaactggcagcaagaatgg

SEQ ID NO: 222250 - DNA, 33 bp, Homo sapien
atcagtgcatggattagctggcagcaagaatgg

SEQ ID NO: 222251 - DNA, 33 bp, Homo sapien
tgtacactgttggtgcagatataaattagtaca

SEQ ID NO: 222252 - DNA, 33 bp, Homo sapien
tgtacactgttggtgcggatataaattagtaca

SEQ ID NO: 222253 - DNA, 33 bp, Homo sapien
tcggaagttccctgccaatctatgctcagacac

SEQ ID NO: 222254 - DNA, 33 bp, Homo sapien
tcggaagttccctgcctatctatgctcagacac

SEQ ID NO: 222255 - DNA, 33 bp, Homo sapien
ggagattccgacagaaaccaagcatcatttttc

SEQ ID NO: 222256 - DNA, 33 bp, Homo sapien
ggagattccgacagaacccaagcatcatttttc

SEQ ID NO: 222257 - DNA, 33 bp, Homo sapien
gaagctctagtttctcccaacttattgatgtgt

SEQ ID NO: 222258 - DNA, 33 bp, Homo sapien
gaagctctagtttctctcaacttattgatgtgt

SEQ ID NO: 222259 - DNA, 33 bp, Homo sapien
ttggagggcttgttaaccacagatcgctgggct

SEQ ID NO: 222260 - DNA, 33 bp, Homo sapien
ttggagggcttgttaatcacagatcgctgggct

SEQ ID NO: 222261 - DNA, 33 bp, Homo sapien
gaaacgtaccttttaacagagattcagttactt

SEQ ID NO: 222262 - DNA, 33 bp, Homo sapien
gaaacgtaccttttaatagagattcagttactt

SEQ ID NO: 222263 - DNA, 33 bp, Homo sapien
gtttctgtttcaccaccgatttctcagagctta

SEQ ID NO: 222264 - DNA, 33 bp, Homo sapien
gtttctgtttcaccactgatttctcagagctta

SEQ ID NO: 222265 - DNA, 33 bp, Homo sapien
atagaaaaagagttaaagtaagcagcagaagag

SEQ ID NO: 222266 - DNA, 33 bp, Homo sapien
atagaaaaagagttaaggtaagcagcagaagag

SEQ ID NO: 222267 - DNA, 33 bp, Homo sapien
gtcaatggaagttttcacaaagtctctctacac

SEQ ID NO: 222268 - DNA, 33 bp, Homo sapien
gtcaatggaagttttctcaaagtctctctacac

SEQ ID NO: 222269 - DNA, 33 bp, Homo sapien
caggacaaaatgtagcaacaacaaaaaatgtgc

SEQ ID NO: 222270 - DNA, 33 bp, Homo sapien
caggacaaaatgtagccacaacaaaaaatgtgc

SEQ ID NO: 222271 - DNA, 33 bp, Homo sapien
gaattatggtgttctgaaatcacaaaactacca

SEQ ID NO: 222272 - DNA, 33 bp, Homo sapien
gaattatggtgttctggaatcacaaaactacca

SEQ ID NO: 222273 - DNA, 33 bp, Homo sapien
agttggagggcactcaacctagtgagacacaag

SEQ ID NO: 222274 - DNA, 33 bp, Homo sapien
agttggagggcactcagcctagtgagacacaag

SEQ ID NO: 222275 - DNA, 33 bp, Homo sapien
tatagcgccccaaaccaactaagtcaaccatta

SEQ ID NO: 222276 - DNA, 33 bp, Homo sapien
tatagcgccccaaaccgactaagtcaaccatta

SEQ ID NO: 222277 - DNA, 33 bp, Homo sapien
ggaaagggcactagtaaaggtctaagaatagaa

SEQ ID NO: 222278 - DNA, 33 bp, Homo sapien
ggaaagggcactagtagaggtctaagaatagaa

SEQ ID NO: 222279 - DNA, 33 bp, Homo sapien
gaagcatccttctaagacactctggttcttcct

SEQ ID NO: 222280 - DNA, 33 bp, Homo sapien
gaagcatccttctaagccactctggttcttcct

SEQ ID NO: 222281 - DNA, 33 bp, Homo sapien
gaggtggaggcacaataagtaatcaaacagtag

SEQ ID NO: 222282 - DNA, 33 bp, Homo sapien
gaggtggaggcacaatgagtaatcaaacagtag

SEQ ID NO: 222283 - DNA, 33 bp, Homo sapien
tgattggctgatagaaactccttatgtaaaaga

SEQ ID NO: 222284 - DNA, 33 bp, Homo sapien
tgattggctgatagaacctccttatgtaaaaga

SEQ ID NO: 222285 - DNA, 33 bp, Homo sapien
agtttctatgaccataacttgcatacttctcag

SEQ ID NO: 222286 - DNA, 33 bp, Homo sapien
agtttctatgaccatagcttgcatacttctcag

SEQ ID NO: 222287 - DNA, 33 bp, Homo sapien
tctgttcccacatgccaggaatgaagcaggtta

SEQ ID NO: 222288 - DNA, 33 bp, Homo sapien
tctgttcccacatgccgggaatgaagcaggtta

SEQ ID NO: 222289 - DNA, 33 bp, Homo sapien
atgctctatatgtaaacgatcagctttaaaatg

SEQ ID NO: 222290 - DNA, 33 bp, Homo sapien
atgctctatatgtaaatgatcagctttaaaatg

SEQ ID NO: 222291 - DNA, 33 bp, Homo sapien
ccactttgccacaagtaacccttcttgccccac

SEQ ID NO: 222292 - DNA, 33 bp, Homo sapien
ccactttgccacaagtgacccttcttgccccac

SEQ ID NO: 222293 - DNA, 33 bp, Homo sapien
atttaatgtatgtttacatctgaatagccacat

SEQ ID NO: 222294 - DNA, 33 bp, Homo sapien
atttaatgtatgtttatatctgaatagccacat

SEQ ID NO: 222295 - DNA, 33 bp, Homo sapien
aatgctgacacaagtaacctaatgtcccacggc

SEQ ID NO: 222296 - DNA, 33 bp, Homo sapien
aatgctgacacaagtagcctaatgtcccacggc

SEQ ID NO: 222297 - DNA, 33 bp, Homo sapien
tagacccgtctgcaacaggacagcagagaaatg

SEQ ID NO: 222298 - DNA, 33 bp, Homo sapien
tagacccgtctgcaaccggacagcagagaaatg

SEQ ID NO: 222299 - DNA, 33 bp, Homo sapien
taactctcaaagagcaatctcactttccttatt

SEQ ID NO: 222300 - DNA, 33 bp, Homo sapien
taactctcaaagagcattctcactttccttatt

SEQ ID NO: 222301 - DNA, 33 bp, Homo sapien
tcaggagagttggttacgtgaaaagaatgtgca

SEQ ID NO: 222302 - DNA, 33 bp, Homo sapien
tcaggagagttggttatgtgaaaagaatgtgca

SEQ ID NO: 222303 - DNA, 33 bp, Homo sapien
gcctcttttcttaaacacaccattcacatgcat

SEQ ID NO: 222304 - DNA, 33 bp, Homo sapien
gcctcttttcttaaacgcaccattcacatgcat

SEQ ID NO: 222305 - DNA, 33 bp, Homo sapien
tgtgcacaaagctgccaggaagaagtgttacgg

SEQ ID NO: 222306 - DNA, 33 bp, Homo sapien
tgtgcacaaagctgccgggaagaagtgttacgg

SEQ ID NO: 222307 - DNA, 33 bp, Homo sapien
cactcctcaaggctgaaatgattaagatccata

SEQ ID NO: 222308 - DNA, 33 bp, Homo sapien
cactcctcaaggctgagatgattaagatccata

SEQ ID NO: 222309 - DNA, 33 bp, Homo sapien
gcattaggatgtgaaacgaaacttccttgccct

SEQ ID NO: 222310 - DNA, 33 bp, Homo sapien
gcattaggatgtgaaatgaaacttccttgccct

SEQ ID NO: 222311 - DNA, 33 bp, Homo sapien
cagacttaaggaaatacatagtcaactgttgag

SEQ ID NO: 222312 - DNA, 33 bp, Homo sapien
cagacttaaggaaatatatagtcaactgttgag

SEQ ID NO: 222313 - DNA, 33 bp, Homo sapien
actttatctctccaacagtaaaaataaattagc

SEQ ID NO: 222314 - DNA, 33 bp, Homo sapien
actttatctctccaaccgtaaaaataaattagc

SEQ ID NO: 222315 - DNA, 33 bp, Homo sapien
tggattccccattggcactggtacttgtccctg

SEQ ID NO: 222316 - DNA, 33 bp, Homo sapien
tggattccccattggccctggtacttgtccctg

SEQ ID NO: 222317 - DNA, 33 bp, Homo sapien
agatgtgtaaatgctgcagacactaggaagcta

SEQ ID NO: 222318 - DNA, 33 bp, Homo sapien
agatgtgtaaatgctgtagacactaggaagcta

SEQ ID NO: 222319 - DNA, 33 bp, Homo sapien
aacaggttctataaaacaatgagagagtgtaat

SEQ ID NO: 222320 - DNA, 33 bp, Homo sapien
aacaggttctataaaataatgagagagtgtaat

SEQ ID NO: 222321 - DNA, 33 bp, Homo sapien
atgggatacttggcaacgcctggagatattttg

SEQ ID NO: 222322 - DNA, 33 bp, Homo sapien
atgggatacttggcaatgcctggagatattttg

SEQ ID NO: 222323 - DNA, 33 bp, Homo sapien
cagctattcaatgaacgcagcgatgctgtcaga

SEQ ID NO: 222324 - DNA, 33 bp, Homo sapien
cagctattcaatgaactcagcgatgctgtcaga

SEQ ID NO: 222325 - DNA, 33 bp, Homo sapien
tcctggacgtgaagtacggtgtggagagtgatt

SEQ ID NO: 222326 - DNA, 33 bp, Homo sapien
tcctggacgtgaagtagggtgtggagagtgatt

SEQ ID NO: 222327 - DNA, 33 bp, Homo sapien
ttgtgtacattaaaggccaggagaaagaagttg

SEQ ID NO: 222328 - DNA, 33 bp, Homo sapien
ttgtgtacattaaaggtcaggagaaagaagttg

SEQ ID NO: 222329 - DNA, 33 bp, Homo sapien
ctaggtaccttttaaactgggacatggttttgg

SEQ ID NO: 222330 - DNA, 33 bp, Homo sapien
ctaggtaccttttaaagtgggacatggttttgg

SEQ ID NO: 222331 - DNA, 33 bp, Homo sapien
tttaaccaccattgccactcttgctattgccat

SEQ ID NO: 222332 - DNA, 33 bp, Homo sapien
tttaaccaccattgccgctcttgctattgccat

SEQ ID NO: 222333 - DNA, 33 bp, Homo sapien
caaaggtagagaaaataaagcatagaaaattgg

SEQ ID NO: 222334 - DNA, 33 bp, Homo sapien
caaaggtagagaaaatcaagcatagaaaattgg

SEQ ID NO: 222335 - DNA, 33 bp, Homo sapien
atttcctattcaagaaaccactagatggcccta

SEQ ID NO: 222336 - DNA, 33 bp, Homo sapien
atttcctattcaagaagccactagatggcccta

SEQ ID NO: 222337 - DNA, 33 bp, Homo sapien
tcttctacccatttgaacaactactgtcctctc

SEQ ID NO: 222338 - DNA, 33 bp, Homo sapien
tcttctacccatttgagcaactactgtcctctc

SEQ ID NO: 222339 - DNA, 33 bp, Homo sapien
tgaatgcaaagtcatacatccatgaagccagag

SEQ ID NO: 222340 - DNA, 33 bp, Homo sapien
tgaatgcaaagtcatatatccatgaagccagag

SEQ ID NO: 222341 - DNA, 33 bp, Homo sapien
gacccaaatcccccacactaaatcacatttctg

SEQ ID NO: 222342 - DNA, 33 bp, Homo sapien
gacccaaatcccccacgctaaatcacatttctg

SEQ ID NO: 222343 - DNA, 33 bp, Homo sapien
caggtaacaataacacagaacaaaataatagaa

SEQ ID NO: 222344 - DNA, 33 bp, Homo sapien
caggtaacaataacacggaacaaaataatagaa

SEQ ID NO: 222345 - DNA, 33 bp, Homo sapien
agttttaattgatgaccaaaatttttgccattt

SEQ ID NO: 222346 - DNA, 33 bp, Homo sapien
agttttaattgatgactaaaatttttgccattt

SEQ ID NO: 222347 - DNA, 33 bp, Homo sapien
aattatcataatatggaagttattttgcacatg

SEQ ID NO: 222348 - DNA, 33 bp, Homo sapien
aattatcataatatggtagttattttgcacatg

SEQ ID NO: 222349 - DNA, 33 bp, Homo sapien
ttgcagcaagaaagctaaataactcaatatgaa

SEQ ID NO: 222350 - DNA, 33 bp, Homo sapien
ttgcagcaagaaagctgaataactcaatatgaa

SEQ ID NO: 222351 - DNA, 33 bp, Homo sapien
gcagaaattatgtgcaccacctttagtcttggc

SEQ ID NO: 222352 - DNA, 33 bp, Homo sapien
gcagaaattatgtgcatcacctttagtcttggc

SEQ ID NO: 222353 - DNA, 33 bp, Homo sapien
tactggacactgtctcaccttctcttcatttgg

SEQ ID NO: 222354 - DNA, 33 bp, Homo sapien
tactggacactgtctctccttctcttcatttgg

SEQ ID NO: 222355 - DNA, 33 bp, Homo sapien
aatccattctcatgacaacaatctaattggtga

SEQ ID NO: 222356 - DNA, 33 bp, Homo sapien
aatccattctcatgacgacaatctaattggtga

SEQ ID NO: 222357 - DNA, 33 bp, Homo sapien
ctgtgttactcctaaaagtgttgccatttcagt

SEQ ID NO: 222358 - DNA, 33 bp, Homo sapien
ctgtgttactcctaaaggtgttgccatttcagt

SEQ ID NO: 222359 - DNA, 33 bp, Homo sapien
atggaaaaatgtccacagaatttggcaccaagt

SEQ ID NO: 222360 - DNA, 33 bp, Homo sapien
atggaaaaatgtccactgaatttggcaccaagt

SEQ ID NO: 222361 - DNA, 33 bp, Homo sapien
atgtctacttcacaggaatagcttacctcttca

SEQ ID NO: 222362 - DNA, 33 bp, Homo sapien
atgtctacttcacagggatagcttacctcttca

SEQ ID NO: 222363 - DNA, 33 bp, Homo sapien
aggtgaagacaactataaaagatgacactgggc

SEQ ID NO: 222364 - DNA, 33 bp, Homo sapien
aggtgaagacaactatgaaagatgacactgggc

SEQ ID NO: 222365 - DNA, 33 bp, Homo sapien
tggacaatatccttcacagccaaagatgttaca

SEQ ID NO: 222366 - DNA, 33 bp, Homo sapien
tggacaatatccttcagagccaaagatgttaca

SEQ ID NO: 222367 - DNA, 33 bp, Homo sapien
ccttcaggtactaccacatccaggactcaaata

SEQ ID NO: 222368 - DNA, 33 bp, Homo sapien
ccttcaggtactaccagatccaggactcaaata

SEQ ID NO: 222369 - DNA, 33 bp, Homo sapien
aaacaaaaaactgtccagcctatgtcaatgaag

SEQ ID NO: 222370 - DNA, 33 bp, Homo sapien
aaacaaaaaactgtccggcctatgtcaatgaag

SEQ ID NO: 222371 - DNA, 33 bp, Homo sapien
tctccatggtgctctccctcagctgctgcagac

SEQ ID NO: 222372 - DNA, 33 bp, Homo sapien
tctccatggtgctctctctcagctgctgcagac

SEQ ID NO: 222373 - DNA, 33 bp, Homo sapien
tgaagagcatgaggaaaacaggaaattactatt

SEQ ID NO: 222374 - DNA, 33 bp, Homo sapien
tgaagagcatgaggaagacaggaaattactatt

SEQ ID NO: 222375 - DNA, 33 bp, Homo sapien
ttagcaatgactcatgatgtaaaattggaatgt

SEQ ID NO: 222376 - DNA, 33 bp, Homo sapien
ttagcaatgactcatgctgtaaaattggaatgt

SEQ ID NO: 222377 - DNA, 33 bp, Homo sapien
acctgttcattaaaacacatggcctaccaaaat

SEQ ID NO: 222378 - DNA, 33 bp, Homo sapien
acctgttcattaaaacgcatggcctaccaaaat

SEQ ID NO: 222379 - DNA, 33 bp, Homo sapien
tggcctaccaaaattaaatcttaacatcattag

SEQ ID NO: 222380 - DNA, 33 bp, Homo sapien
tggcctaccaaaattatatcttaacatcattag

SEQ ID NO: 222381 - DNA, 33 bp, Homo sapien
tcattgccctgaaggaaagaatctgctctgaaa

SEQ ID NO: 222382 - DNA, 33 bp, Homo sapien
tcattgccctgaaggagagaatctgctctgaaa

SEQ ID NO: 222383 - DNA, 33 bp, Homo sapien
agggagacacattggccgcaattacaaatgaag

SEQ ID NO: 222384 - DNA, 33 bp, Homo sapien
agggagacacattggctgcaattacaaatgaag

SEQ ID NO: 222385 - DNA, 33 bp, Homo sapien
tggttcagaagattcaatactattaagatgtct

SEQ ID NO: 222386 - DNA, 33 bp, Homo sapien
tggttcagaagattcagtactattaagatgtct

SEQ ID NO: 222387 - DNA, 33 bp, Homo sapien
ttctttgggcagaactcaagacattttgccaag

SEQ ID NO: 222388 - DNA, 33 bp, Homo sapien
ttctttgggcagaacttaagacattttgccaag

SEQ ID NO: 222389 - DNA, 33 bp, Homo sapien
ttcattactggccaggacatctgcctttcactt

SEQ ID NO: 222390 - DNA, 33 bp, Homo sapien
ttcattactggccaggtcatctgcctttcactt

SEQ ID NO: 222391 - DNA, 33 bp, Homo sapien
tgtcagttagaaggaaaactggagggatactat

SEQ ID NO: 222392 - DNA, 33 bp, Homo sapien
tgtcagttagaaggaagactggagggatactat

SEQ ID NO: 222393 - DNA, 33 bp, Homo sapien
atggtgataatggtgacctcataacactgatac

SEQ ID NO: 222394 - DNA, 33 bp, Homo sapien
atggtgataatggtgatctcataacactgatac

SEQ ID NO: 222395 - DNA, 33 bp, Homo sapien
accatccatatttccactgatgtctgtttacca

SEQ ID NO: 222396 - DNA, 33 bp, Homo sapien
accatccatatttccattgatgtctgtttacca

SEQ ID NO: 222397 - DNA, 33 bp, Homo sapien
acagatagaatatggacggtaaatagaatatgg

SEQ ID NO: 222398 - DNA, 33 bp, Homo sapien
acagatagaatatggatggtaaatagaatatgg

SEQ ID NO: 222399 - DNA, 33 bp, Homo sapien
atttaactccagaaaactgaagcaacacaaata

SEQ ID NO: 222400 - DNA, 33 bp, Homo sapien
atttaactccagaaaagtgaagcaacacaaata

SEQ ID NO: 222401 - DNA, 33 bp, Homo sapien
ttattttggagcactaagatttaattgtctgcc

SEQ ID NO: 222402 - DNA, 33 bp, Homo sapien
ttattttggagcactaggatttaattgtctgcc

SEQ ID NO: 222403 - DNA, 33 bp, Homo sapien
ccagggtaaaactctcaagcagtacctgggcag

SEQ ID NO: 222404 - DNA, 33 bp, Homo sapien
ccagggtaaaactctcgagcagtacctgggcag

SEQ ID NO: 222405 - DNA, 33 bp, Homo sapien
aaaactgtcatattcactaattttaggcatggg

SEQ ID NO: 222406 - DNA, 33 bp, Homo sapien
aaaactgtcatattcattaattttaggcatggg

SEQ ID NO: 222407 - DNA, 33 bp, Homo sapien
ttcatggatataaagacactgtgcaagttaata

SEQ ID NO: 222408 - DNA, 33 bp, Homo sapien
ttcatggatataaagatactgtgcaagttaata

SEQ ID NO: 222409 - DNA, 33 bp, Homo sapien
gatggggaatgggtctaaagtttccaagcttct

SEQ ID NO: 222410 - DNA, 33 bp, Homo sapien
gatggggaatgggtctgaagtttccaagcttct

SEQ ID NO: 222411 - DNA, 33 bp, Homo sapien
tagtgaaaaggaagcaccaggaaattggaaatc

SEQ ID NO: 222412 - DNA, 33 bp, Homo sapien
tagtgaaaaggaagcatcaggaaattggaaatc

SEQ ID NO: 222413 - DNA, 33 bp, Homo sapien
taggtagtttcaggaccatactgcttctcagag

SEQ ID NO: 222414 - DNA, 33 bp, Homo sapien
taggtagtttcaggacgatactgcttctcagag

SEQ ID NO: 222415 - DNA, 33 bp, Homo sapien
catgcctgttttttacagagaatgagtgaaatg

SEQ ID NO: 222416 - DNA, 33 bp, Homo sapien
catgcctgttttttacggagaatgagtgaaatg

SEQ ID NO: 222417 - DNA, 33 bp, Homo sapien
gtgggggcattttgcaataagaagcaacaggag

SEQ ID NO: 222418 - DNA, 33 bp, Homo sapien
gtgggggcattttgcagtaagaagcaacaggag

SEQ ID NO: 222419 - DNA, 33 bp, Homo sapien
agtagtttacaagatccctgaacaccattcaag

SEQ ID NO: 222420 - DNA, 33 bp, Homo sapien
agtagtttacaagatctctgaacaccattcaag

SEQ ID NO: 222421 - DNA, 33 bp, Homo sapien
ctggttggttcataaaagggagcaagtgaaagc

SEQ ID NO: 222422 - DNA, 33 bp, Homo sapien
ctggttggttcataaatgggagcaagtgaaagc

SEQ ID NO: 222423 - DNA, 33 bp, Homo sapien
ttgtacgagaaacacaaggttctttatgcctac

SEQ ID NO: 222424 - DNA, 33 bp, Homo sapien
ttgtacgagaaacacagggttctttatgcctac

SEQ ID NO: 222425 - DNA, 33 bp, Homo sapien
gcctgccacgcagaaaccagtaagcatgagtta

SEQ ID NO: 222426 - DNA, 33 bp, Homo sapien
gcctgccacgcagaaagcagtaagcatgagtta

SEQ ID NO: 222427 - DNA, 33 bp, Homo sapien
cttctgccagctttacaactccatacatttaat

SEQ ID NO: 222428 - DNA, 33 bp, Homo sapien
cttctgccagctttacgactccatacatttaat

SEQ ID NO: 222429 - DNA, 33 bp, Homo sapien
cactttactctcatcccaggcaaattgggggaa

SEQ ID NO: 222430 - DNA, 33 bp, Homo sapien
cactttactctcatcctaggcaaattgggggaa

SEQ ID NO: 222431 - DNA, 33 bp, Homo sapien
gccttgctcttgccctcactaagctgcattctg

SEQ ID NO: 222432 - DNA, 33 bp, Homo sapien
gccttgctcttgcccttactaagctgcattctg

SEQ ID NO: 222433 - DNA, 33 bp, Homo sapien
gattttagcaaacaatcagatgttaccaaaatc

SEQ ID NO: 222434 - DNA, 33 bp, Homo sapien
gattttagcaaacaattagatgttaccaaaatc

SEQ ID NO: 222435 - DNA, 33 bp, Homo sapien
ttaatgttgctaaataataagttaaatgcttca

SEQ ID NO: 222436 - DNA, 33 bp, Homo sapien
ttaatgttgctaaatagtaagttaaatgcttca

SEQ ID NO: 222437 - DNA, 33 bp, Homo sapien
ggtaatcccttcagagaagcataggtgctattt

SEQ ID NO: 222438 - DNA, 33 bp, Homo sapien
ggtaatcccttcagaggagcataggtgctattt

SEQ ID NO: 222439 - DNA, 33 bp, Homo sapien
ctcagtaacaggaatccagggttgagtcagcag

SEQ ID NO: 222440 - DNA, 33 bp, Homo sapien
ctcagtaacaggaatctagggttgagtcagcag

SEQ ID NO: 222441 - DNA, 33 bp, Homo sapien
gatgaaaaacaagggcaattggagagctaataa

SEQ ID NO: 222442 - DNA, 33 bp, Homo sapien
gatgaaaaacaagggcgattggagagctaataa

SEQ ID NO: 222443 - DNA, 33 bp, Homo sapien
gaatcctgcattctaaacctcaacagtggagca

SEQ ID NO: 222444 - DNA, 33 bp, Homo sapien
gaatcctgcattctaaccctcaacagtggagca

SEQ ID NO: 222445 - DNA, 33 bp, Homo sapien
taaaaaaaattgaaaaatcctgctctggagttt

SEQ ID NO: 222446 - DNA, 33 bp, Homo sapien
taaaaaaaattgaaaagtcctgctctggagttt

SEQ ID NO: 222447 - DNA, 33 bp, Homo sapien
caggtatttttgtagcaccataatttctggttc

SEQ ID NO: 222448 - DNA, 33 bp, Homo sapien
caggtatttttgtagctccataatttctggttc

SEQ ID NO: 222449 - DNA, 33 bp, Homo sapien
atctgaagaaagagagaaattgaagcacatgag

SEQ ID NO: 222450 - DNA, 33 bp, Homo sapien
atctgaagaaagagaggaattgaagcacatgag

SEQ ID NO: 222451 - DNA, 33 bp, Homo sapien
aatacattatgtcctaacaacttaacatataat

SEQ ID NO: 222452 - DNA, 33 bp, Homo sapien
aatacattatgtcctaccaacttaacatataat

SEQ ID NO: 222453 - DNA, 33 bp, Homo sapien
aggagcttaaatctgacagagaagacatagcat

SEQ ID NO: 222454 - DNA, 33 bp, Homo sapien
aggagcttaaatctgatagagaagacatagcat

SEQ ID NO: 222455 - DNA, 33 bp, Homo sapien
aacaactggaagtcaaccttactgacactgaag

SEQ ID NO: 222456 - DNA, 33 bp, Homo sapien
aacaactggaagtcaatcttactgacactgaag

SEQ ID NO: 222457 - DNA, 33 bp, Homo sapien
aaggtcataccactgaagcaatgactttattat

SEQ ID NO: 222458 - DNA, 33 bp, Homo sapien
aaggtcataccactgatgcaatgactttattat

SEQ ID NO: 222459 - DNA, 33 bp, Homo sapien
ggtcctttcctcctcaaagagttctcagtgagc

SEQ ID NO: 222460 - DNA, 33 bp, Homo sapien
ggtcctttcctcctcagagagttctcagtgagc

SEQ ID NO: 222461 - DNA, 33 bp, Homo sapien
gggaaaacaagactgaacactgaaaacttagca

SEQ ID NO: 222462 - DNA, 33 bp, Homo sapien
gggaaaacaagactgagcactgaaaacttagca

SEQ ID NO: 222463 - DNA, 33 bp, Homo sapien
ctagtcactgtcccacaatttattgccccttat

SEQ ID NO: 222464 - DNA, 33 bp, Homo sapien
ctagtcactgtcccacgatttattgccccttat

SEQ ID NO: 222465 - DNA, 33 bp, Homo sapien
ttgcctcgtcatatccccacaatttgtcattct

SEQ ID NO: 222466 - DNA, 33 bp, Homo sapien
ttgcctcgtcatatcctcacaatttgtcattct

SEQ ID NO: 222467 - DNA, 33 bp, Homo sapien
tggtgaaagagacagaataatgaggggtgctga

SEQ ID NO: 222468 - DNA, 33 bp, Homo sapien
tggtgaaagagacagagtaatgaggggtgctga

SEQ ID NO: 222469 - DNA, 33 bp, Homo sapien
acattgacaaagtacaaggttagaaatacaaac

SEQ ID NO: 222470 - DNA, 33 bp, Homo sapien
acattgacaaagtacagggttagaaatacaaac

SEQ ID NO: 222471 - DNA, 33 bp, Homo sapien
cctacaagctcccccaatacaaacatacaaaat

SEQ ID NO: 222472 - DNA, 33 bp, Homo sapien
cctacaagctcccccagtacaaacatacaaaat

SEQ ID NO: 222473 - DNA, 33 bp, Homo sapien
gctgtagctaatggcaaccataaggtatgtaag

SEQ ID NO: 222474 - DNA, 33 bp, Homo sapien
gctgtagctaatggcagccataaggtatgtaag

SEQ ID NO: 222475 - DNA, 33 bp, Homo sapien
tttcttaaggtcagcaccagagctacttaataa

SEQ ID NO: 222476 - DNA, 33 bp, Homo sapien
tttcttaaggtcagcatcagagctacttaataa

SEQ ID NO: 222477 - DNA, 33 bp, Homo sapien
aaaagatgggaaacaacctcactgctctttgac

SEQ ID NO: 222478 - DNA, 33 bp, Homo sapien
aaaagatgggaaacaatctcactgctctttgac

SEQ ID NO: 222479 - DNA, 33 bp, Homo sapien
gactgtgtttggaatgccaatatacctgtggag

SEQ ID NO: 222480 - DNA, 33 bp, Homo sapien
gactgtgtttggaatggcaatatacctgtggag

SEQ ID NO: 222481 - DNA, 33 bp, Homo sapien
cgtggtcacatggtgaaggcattattcaaagag

SEQ ID NO: 222482 - DNA, 33 bp, Homo sapien
cgtggtcacatggtgacggcattattcaaagag

SEQ ID NO: 222483 - DNA, 33 bp, Homo sapien
agcttcatctccttctgaccaccaaagaggact

SEQ ID NO: 222484 - DNA, 33 bp, Homo sapien
agcttcatctccttcttaccaccaaagaggact

SEQ ID NO: 222485 - DNA, 33 bp, Homo sapien
atgattccatttgcataacattcttaaaataac

SEQ ID NO: 222486 - DNA, 33 bp, Homo sapien
atgattccatttgcatgacattcttaaaataac

SEQ ID NO: 222487 - DNA, 33 bp, Homo sapien
ctttttattaagatgtaacagttaggtcaaggt

SEQ ID NO: 222488 - DNA, 33 bp, Homo sapien
ctttttattaagatgtgacagttaggtcaaggt

SEQ ID NO: 222489 - DNA, 33 bp, Homo sapien
tattagataaacaatacaatgtggttgttgagg

SEQ ID NO: 222490 - DNA, 33 bp, Homo sapien
tattagataaacaatataatgtggttgttgagg

SEQ ID NO: 222491 - DNA, 33 bp, Homo sapien
ccccatgaagtaagtcacaaggcatcattatct

SEQ ID NO: 222492 - DNA, 33 bp, Homo sapien
ccccatgaagtaagtcgcaaggcatcattatct

SEQ ID NO: 222493 - DNA, 33 bp, Homo sapien
tggcttcaagtcaacactgagctgaggtttggc

SEQ ID NO: 222494 - DNA, 33 bp, Homo sapien
tggcttcaagtcaacattgagctgaggtttggc

SEQ ID NO: 222495 - DNA, 33 bp, Homo sapien
tatctcgactcagactaagcccaacaactacat

SEQ ID NO: 222496 - DNA, 33 bp, Homo sapien
tatctcgactcagacttagcccaacaactacat

SEQ ID NO: 222497 - DNA, 33 bp, Homo sapien
ccattgccaattgtggaaaatgctagtaaattt

SEQ ID NO: 222498 - DNA, 33 bp, Homo sapien
ccattgccaattgtgggaaatgctagtaaattt

SEQ ID NO: 222499 - DNA, 33 bp, Homo sapien
tctccacaattctatacgcagtgtgaatatctt

SEQ ID NO: 222500 - DNA, 33 bp, Homo sapien
tctccacaattctatatgcagtgtgaatatctt

SEQ ID NO: 222501 - DNA, 33 bp, Homo sapien
tctctgcatcctaaccagcatttgttgttgttt

SEQ ID NO: 222502 - DNA, 33 bp, Homo sapien
tctctgcatcctaacctgcatttgttgttgttt

SEQ ID NO: 222503 - DNA, 33 bp, Homo sapien
ctgtgtgattaagcggaactgagaggcctattt

SEQ ID NO: 222504 - DNA, 33 bp, Homo sapien
ctgtgtgattaagcggcactgagaggcctattt

SEQ ID NO: 222505 - DNA, 33 bp, Homo sapien
attaaccacatactgacgtagcactgctatcag

SEQ ID NO: 222506 - DNA, 33 bp, Homo sapien
attaaccacatactgatgtagcactgctatcag

SEQ ID NO: 222507 - DNA, 33 bp, Homo sapien
atctaaactaaactcacagcacatttattttga

SEQ ID NO: 222508 - DNA, 33 bp, Homo sapien
atctaaactaaactcatagcacatttattttga

SEQ ID NO: 222509 - DNA, 33 bp, Homo sapien
aaaaggaaactgcaacaatgaacagatcagaat

SEQ ID NO: 222510 - DNA, 33 bp, Homo sapien
aaaaggaaactgcaacgatgaacagatcagaat

SEQ ID NO: 222511 - DNA, 33 bp, Homo sapien
tttatggtgattaaaagttgctgtggggttttt

SEQ ID NO: 222512 - DNA, 33 bp, Homo sapien
tttatggtgattaaaatttgctgtggggttttt

SEQ ID NO: 222513 - DNA, 33 bp, Homo sapien
tcagccatctgtgaccagaagcttccccattct

SEQ ID NO: 222514 - DNA, 33 bp, Homo sapien
tcagccatctgtgaccggaagcttccccattct

SEQ ID NO: 222515 - DNA, 33 bp, Homo sapien
tcgtttccttttcctcactggtaggagagagaa

SEQ ID NO: 222516 - DNA, 33 bp, Homo sapien
tcgtttccttttcctcgctggtaggagagagaa

SEQ ID NO: 222517 - DNA, 33 bp, Homo sapien
tccaatccatgagcacacaatgtttttctattt

SEQ ID NO: 222518 - DNA, 33 bp, Homo sapien
tccaatccatgagcacgcaatgtttttctattt

SEQ ID NO: 222519 - DNA, 33 bp, Homo sapien
ttttaaactgtactataagcctacagcaaccaa

SEQ ID NO: 222520 - DNA, 33 bp, Homo sapien
ttttaaactgtactatgagcctacagcaaccaa

SEQ ID NO: 222521 - DNA, 33 bp, Homo sapien
aaatggtgctgggatacctggcctgccatgtgc

SEQ ID NO: 222522 - DNA, 33 bp, Homo sapien
aaatggtgctgggatatctggcctgccatgtgc

SEQ ID NO: 222523 - DNA, 33 bp, Homo sapien
aggctgccatcttatgcagacttacagaaaaag

SEQ ID NO: 222524 - DNA, 33 bp, Homo sapien
aggctgccatcttatgtagacttacagaaaaag

SEQ ID NO: 222525 - DNA, 33 bp, Homo sapien
ggtttggccatttggacggaaggaccttgggca

SEQ ID NO: 222526 - DNA, 33 bp, Homo sapien
ggtttggccatttggatggaaggaccttgggca

SEQ ID NO: 222527 - DNA, 33 bp, Homo sapien
gaaccaagaagttaagacacaacacagagtttc

SEQ ID NO: 222528 - DNA, 33 bp, Homo sapien
gaaccaagaagttaagtcacaacacagagtttc

SEQ ID NO: 222529 - DNA, 33 bp, Homo sapien
agtcatcctttactcacgtataatgtgccaggc

SEQ ID NO: 222530 - DNA, 33 bp, Homo sapien
agtcatcctttactcatgtataatgtgccaggc

SEQ ID NO: 222531 - DNA, 33 bp, Homo sapien
tatacagcattactaaaattgtcctcaagtaga

SEQ ID NO: 222532 - DNA, 33 bp, Homo sapien
tatacagcattactaatattgtcctcaagtaga

SEQ ID NO: 222533 - DNA, 33 bp, Homo sapien
gaaaatgtttgtaaaccattaagaacatcaaag

SEQ ID NO: 222534 - DNA, 33 bp, Homo sapien
gaaaatgtttgtaaactattaagaacatcaaag

SEQ ID NO: 222535 - DNA, 33 bp, Homo sapien
tcagaaataaagccaccatctacagccatctgt

SEQ ID NO: 222536 - DNA, 33 bp, Homo sapien
tcagaaataaagccactatctacagccatctgt

SEQ ID NO: 222537 - DNA, 33 bp, Homo sapien
catatgacaaactaaagattatgctatatcaat

SEQ ID NO: 222538 - DNA, 33 bp, Homo sapien
catatgacaaactaaatattatgctatatcaat

SEQ ID NO: 222539 - DNA, 33 bp, Homo sapien
ctgaggggctaaaaatgagatatattgtggtgc

SEQ ID NO: 222540 - DNA, 33 bp, Homo sapien
ctgaggggctaaaaattagatatattgtggtgc

SEQ ID NO: 222541 - DNA, 33 bp, Homo sapien
agactgttttctttcccatgactattcattcca

SEQ ID NO: 222542 - DNA, 33 bp, Homo sapien
agactgttttctttcctatgactattcattcca

SEQ ID NO: 222543 - DNA, 33 bp, Homo sapien
tccatctgtgacaaaaattctgtgtcctggttt

SEQ ID NO: 222544 - DNA, 33 bp, Homo sapien
tccatctgtgacaaaagttctgtgtcctggttt

SEQ ID NO: 222545 - DNA, 33 bp, Homo sapien
acaggagaaagtatcaatagaacaggacatgtt

SEQ ID NO: 222546 - DNA, 33 bp, Homo sapien
acaggagaaagtatcagtagaacaggacatgtt

SEQ ID NO: 222547 - DNA, 33 bp, Homo sapien
gttatactctaagactaaaactcactgagggta

SEQ ID NO: 222548 - DNA, 33 bp, Homo sapien
gttatactctaagactgaaactcactgagggta

SEQ ID NO: 222549 - DNA, 33 bp, Homo sapien
aaaaaagcatgcccacaacttgcaaagtacctc

SEQ ID NO: 222550 - DNA, 33 bp, Homo sapien
aaaaaagcatgcccacgacttgcaaagtacctc

SEQ ID NO: 222551 - DNA, 33 bp, Homo sapien
caaggatgtgcaaggaagttaatgctgttttcg

SEQ ID NO: 222552 - DNA, 33 bp, Homo sapien
caaggatgtgcaaggaggttaatgctgttttcg

SEQ ID NO: 222553 - DNA, 33 bp, Homo sapien
aagtggtttcttgacacggaatgtactgaagtg

SEQ ID NO: 222554 - DNA, 33 bp, Homo sapien
aagtggtttcttgacatggaatgtactgaagtg

SEQ ID NO: 222555 - DNA, 33 bp, Homo sapien
aaatgacattgtgctacagttgcttaggaccca

SEQ ID NO: 222556 - DNA, 33 bp, Homo sapien
aaatgacattgtgctatagttgcttaggaccca

SEQ ID NO: 222557 - DNA, 33 bp, Homo sapien
tgtagagatgcagggaccgttgagcccgagggc

SEQ ID NO: 222558 - DNA, 33 bp, Homo sapien
tgtagagatgcagggagcgttgagcccgagggc

SEQ ID NO: 222559 - DNA, 33 bp, Homo sapien
ctacaccctaagccacggatgacaccacagaca

SEQ ID NO: 222560 - DNA, 33 bp, Homo sapien
ctacaccctaagccactgatgacaccacagaca

SEQ ID NO: 222561 - DNA, 33 bp, Homo sapien
aaacaaaatgtccttcactaggtatatggataa

SEQ ID NO: 222562 - DNA, 33 bp, Homo sapien
aaacaaaatgtccttccctaggtatatggataa

SEQ ID NO: 222563 - DNA, 33 bp, Homo sapien
caggaagatgtgaagcgctttacactgcaggat

SEQ ID NO: 222564 - DNA, 33 bp, Homo sapien
caggaagatgtgaagctctttacactgcaggat

SEQ ID NO: 222565 - DNA, 33 bp, Homo sapien
tgtataatcacaaccaaacaccattacctaaaa

SEQ ID NO: 222566 - DNA, 33 bp, Homo sapien
tgtataatcacaaccagacaccattacctaaaa

SEQ ID NO: 222567 - DNA, 33 bp, Homo sapien
tgccacagtctccaaaccaggcctgggaaaatg

SEQ ID NO: 222568 - DNA, 33 bp, Homo sapien
tgccacagtctccaaatcaggcctgggaaaatg

SEQ ID NO: 222569 - DNA, 33 bp, Homo sapien
cactctcctcctgcaccagacctgtgatcgggt

SEQ ID NO: 222570 - DNA, 33 bp, Homo sapien
cactctcctcctgcactagacctgtgatcgggt

SEQ ID NO: 222571 - DNA, 33 bp, Homo sapien
agatcattaagacaaaaacatacttgctacctt

SEQ ID NO: 222572 - DNA, 33 bp, Homo sapien
agatcattaagacaaagacatacttgctacctt

SEQ ID NO: 222573 - DNA, 33 bp, Homo sapien
tataatagtttacaaaagattttcacaccaatt

SEQ ID NO: 222574 - DNA, 33 bp, Homo sapien
tataatagtttacaaaggattttcacaccaatt

SEQ ID NO: 222575 - DNA, 33 bp, Homo sapien
ctagccatggtaaaatcagaactcattgctttg

SEQ ID NO: 222576 - DNA, 33 bp, Homo sapien
ctagccatggtaaaattagaactcattgctttg

SEQ ID NO: 222577 - DNA, 33 bp, Homo sapien
atgctcacaaaattgaaagaaaggtgaaagaac

SEQ ID NO: 222578 - DNA, 33 bp, Homo sapien
atgctcacaaaattgagagaaaggtgaaagaac

SEQ ID NO: 222579 - DNA, 33 bp, Homo sapien
ggaatgagcagcttctcaacgtttatatgtcat

SEQ ID NO: 222580 - DNA, 33 bp, Homo sapien
ggaatgagcagcttcttaacgtttatatgtcat

SEQ ID NO: 222581 - DNA, 33 bp, Homo sapien
gtattgcaaagaaggacaaaatgttcacattca

SEQ ID NO: 222582 - DNA, 33 bp, Homo sapien
gtattgcaaagaaggataaaatgttcacattca

SEQ ID NO: 222583 - DNA, 33 bp, Homo sapien
gagaaggaaaagagaacaaataggagtgcaggg

SEQ ID NO: 222584 - DNA, 33 bp, Homo sapien
gagaaggaaaagagaataaataggagtgcaggg

SEQ ID NO: 222585 - DNA, 33 bp, Homo sapien
tcaaaagcaagttagcgacttcctagatacaat

SEQ ID NO: 222586 - DNA, 33 bp, Homo sapien
tcaaaagcaagttagctacttcctagatacaat

SEQ ID NO: 222587 - DNA, 33 bp, Homo sapien
gatgttgcacattacaggagaattgttatagat

SEQ ID NO: 222588 - DNA, 33 bp, Homo sapien
gatgttgcacattacatgagaattgttatagat

SEQ ID NO: 222589 - DNA, 33 bp, Homo sapien
ggccagcattactccaatagcaaaagcagacaa

SEQ ID NO: 222590 - DNA, 33 bp, Homo sapien
ggccagcattactccagtagcaaaagcagacaa

SEQ ID NO: 222591 - DNA, 33 bp, Homo sapien
gcagaaatcatggtgaagacacaggaaacatga

SEQ ID NO: 222592 - DNA, 33 bp, Homo sapien
gcagaaatcatggtgaggacacaggaaacatga

SEQ ID NO: 222593 - DNA, 33 bp, Homo sapien
tattctctctttagcccgcaaatttccactaca

SEQ ID NO: 222594 - DNA, 33 bp, Homo sapien
tattctctctttagcctgcaaatttccactaca

SEQ ID NO: 222595 - DNA, 33 bp, Homo sapien
aaaagcttatttctcacccacaaaacatgtcca

SEQ ID NO: 222596 - DNA, 33 bp, Homo sapien
aaaagcttatttctcatccacaaaacatgtcca

SEQ ID NO: 222597 - DNA, 33 bp, Homo sapien
acaactgcaaagcaaacgtcatcatatctccta

SEQ ID NO: 222598 - DNA, 33 bp, Homo sapien
acaactgcaaagcaaatgtcatcatatctccta

SEQ ID NO: 222599 - DNA, 33 bp, Homo sapien
tcctacagaaatccacacaattattaaaagacc

SEQ ID NO: 222600 - DNA, 33 bp, Homo sapien
tcctacagaaatccacgcaattattaaaagacc

SEQ ID NO: 222601 - DNA, 33 bp, Homo sapien
tttagatttggccaacaaaatgatatttgggag

SEQ ID NO: 222602 - DNA, 33 bp, Homo sapien
tttagatttggccaacgaaatgatatttgggag

SEQ ID NO: 222603 - DNA, 33 bp, Homo sapien
gcttcacttgggaatcagagtcattcaaccttt

SEQ ID NO: 222604 - DNA, 33 bp, Homo sapien
gcttcacttgggaatcggagtcattcaaccttt

SEQ ID NO: 222605 - DNA, 33 bp, Homo sapien
tggggttgttgtattaaatgaactaatgtatgc

SEQ ID NO: 222606 - DNA, 33 bp, Homo sapien
tggggttgttgtattagatgaactaatgtatgc

SEQ ID NO: 222607 - DNA, 33 bp, Homo sapien
aaactgaaagagctctcaacggcccaagctgta

SEQ ID NO: 222608 - DNA, 33 bp, Homo sapien
aaactgaaagagctctgaacggcccaagctgta

SEQ ID NO: 222609 - DNA, 33 bp, Homo sapien
ccgaaggctggtctgacggatagtgaatagtaa

SEQ ID NO: 222610 - DNA, 33 bp, Homo sapien
ccgaaggctggtctgatggatagtgaatagtaa

SEQ ID NO: 222611 - DNA, 33 bp, Homo sapien
acttaacaaacaccaacagtctgctgtgttaag

SEQ ID NO: 222612 - DNA, 33 bp, Homo sapien
acttaacaaacaccaagagtctgctgtgttaag

SEQ ID NO: 222613 - DNA, 33 bp, Homo sapien
tggatgagaattttgaaggtctcaaggagcctg

SEQ ID NO: 222614 - DNA, 33 bp, Homo sapien
tggatgagaattttgacggtctcaaggagcctg

SEQ ID NO: 222615 - DNA, 33 bp, Homo sapien
aaattatcacccattcaataaggactctgtcac

SEQ ID NO: 222616 - DNA, 33 bp, Homo sapien
aaattatcacccattcgataaggactctgtcac

SEQ ID NO: 222617 - DNA, 33 bp, Homo sapien
tctattaggtcggttcgaaagtaatcgtggttt

SEQ ID NO: 222618 - DNA, 33 bp, Homo sapien
tctattaggtcggttctaaagtaatcgtggttt

SEQ ID NO: 222619 - DNA, 33 bp, Homo sapien
attgttctctcttagccatttcccccccaattt

SEQ ID NO: 222620 - DNA, 33 bp, Homo sapien
attgttctctcttagctatttcccccccaattt

SEQ ID NO: 222621 - DNA, 33 bp, Homo sapien
tagtcaagataaagtaacctgtacatagtaatc

SEQ ID NO: 222622 - DNA, 33 bp, Homo sapien
tagtcaagataaagtagcctgtacatagtaatc

SEQ ID NO: 222623 - DNA, 33 bp, Homo sapien
tttgtttggaagctccagcctagagtgaagatt

SEQ ID NO: 222624 - DNA, 33 bp, Homo sapien
tttgtttggaagctccggcctagagtgaagatt

SEQ ID NO: 222625 - DNA, 33 bp, Homo sapien
tgtacagccatcaccacgatctaaatttagaac

SEQ ID NO: 222626 - DNA, 33 bp, Homo sapien
tgtacagccatcaccatgatctaaatttagaac

SEQ ID NO: 222627 - DNA, 33 bp, Homo sapien
ccagtcccaggcaggaccaggagatgaacaatc

SEQ ID NO: 222628 - DNA, 33 bp, Homo sapien
ccagtcccaggcaggatcaggagatgaacaatc

SEQ ID NO: 222629 - DNA, 33 bp, Homo sapien
ttaagatagcccctctcacatgtctggtagttc

SEQ ID NO: 222630 - DNA, 33 bp, Homo sapien
ttaagatagcccctctgacatgtctggtagttc

SEQ ID NO: 222631 - DNA, 33 bp, Homo sapien
tcagagtaatttcccgacattgttttgactttc

SEQ ID NO: 222632 - DNA, 33 bp, Homo sapien
tcagagtaatttcccgtcattgttttgactttc

SEQ ID NO: 222633 - DNA, 33 bp, Homo sapien
cgactccctgagggacagaatgcaccagaggtt

SEQ ID NO: 222634 - DNA, 33 bp, Homo sapien
cgactccctgagggaccgaatgcaccagaggtt

SEQ ID NO: 222635 - DNA, 33 bp, Homo sapien
tgcctcctctgactgacaaacacaatttgttaa

SEQ ID NO: 222636 - DNA, 33 bp, Homo sapien
tgcctcctctgactgataaacacaatttgttaa

SEQ ID NO: 222637 - DNA, 33 bp, Homo sapien
tacttgataaaatgaagacacctggtaggactc

SEQ ID NO: 222638 - DNA, 33 bp, Homo sapien
tacttgataaaatgaatacacctggtaggactc

SEQ ID NO: 222639 - DNA, 33 bp, Homo sapien
caaacttatatttaacagtatggatcatagagc

SEQ ID NO: 222640 - DNA, 33 bp, Homo sapien
caaacttatatttaactgtatggatcatagagc

SEQ ID NO: 222641 - DNA, 33 bp, Homo sapien
attaccagactgttcaactgtcaaccactacac

SEQ ID NO: 222642 - DNA, 33 bp, Homo sapien
attaccagactgttcagctgtcaaccactacac

SEQ ID NO: 222643 - DNA, 33 bp, Homo sapien
tacatttctgaaacaacgaatgaaatctaaatg

SEQ ID NO: 222644 - DNA, 33 bp, Homo sapien
tacatttctgaaacaatgaatgaaatctaaatg

SEQ ID NO: 222645 - DNA, 33 bp, Homo sapien
aagagagagagggggaaggtattatgttctttt

SEQ ID NO: 222646 - DNA, 33 bp, Homo sapien
aagagagagagggggatggtattatgttctttt

SEQ ID NO: 222647 - DNA, 33 bp, Homo sapien
ttcccagacctatgccaatcttctgtgtcctcc

SEQ ID NO: 222648 - DNA, 33 bp, Homo sapien
ttcccagacctatgcctatcttctgtgtcctcc

SEQ ID NO: 222649 - DNA, 33 bp, Homo sapien
aattagagttgcaagacggaagaagtgaacctg

SEQ ID NO: 222650 - DNA, 33 bp, Homo sapien
aattagagttgcaagagggaagaagtgaacctg

SEQ ID NO: 222651 - DNA, 33 bp, Homo sapien
agagagatagcacatcaataaggtcaaagagac

SEQ ID NO: 222652 - DNA, 33 bp, Homo sapien
agagagatagcacatcgataaggtcaaagagac

SEQ ID NO: 222653 - DNA, 33 bp, Homo sapien
tcttttcctatagatacggcttcctgtaagctg

SEQ ID NO: 222654 - DNA, 33 bp, Homo sapien
tcttttcctatagatatggcttcctgtaagctg

SEQ ID NO: 222655 - DNA, 33 bp, Homo sapien
ggatgttcagaaaataacagtatgcatgtggca

SEQ ID NO: 222656 - DNA, 33 bp, Homo sapien
ggatgttcagaaaatagcagtatgcatgtggca

SEQ ID NO: 222657 - DNA, 33 bp, Homo sapien
gctagtctgacttagacgctcatattcttcctc

SEQ ID NO: 222658 - DNA, 33 bp, Homo sapien
gctagtctgacttagatgctcatattcttcctc

SEQ ID NO: 222659 - DNA, 33 bp, Homo sapien
tgattgtaaggtttcaataaggacaccaaattt

SEQ ID NO: 222660 - DNA, 33 bp, Homo sapien
tgattgtaaggtttcagtaaggacaccaaattt

SEQ ID NO: 222661 - DNA, 33 bp, Homo sapien
gacatctatttatgaactggtttactgaacatt

SEQ ID NO: 222662 - DNA, 33 bp, Homo sapien
gacatctatttatgaattggtttactgaacatt

SEQ ID NO: 222663 - DNA, 33 bp, Homo sapien
acatacagcaggagctcaatcaatatctgttga

SEQ ID NO: 222664 - DNA, 33 bp, Homo sapien
acatacagcaggagctgaatcaatatctgttga

SEQ ID NO: 222665 - DNA, 33 bp, Homo sapien
tccctccattcccccaagaaatgctcaatttct

SEQ ID NO: 222666 - DNA, 33 bp, Homo sapien
tccctccattcccccatgaaatgctcaatttct

SEQ ID NO: 222667 - DNA, 33 bp, Homo sapien
atctggggccttctaaaggtacagatgtgtagg

SEQ ID NO: 222668 - DNA, 33 bp, Homo sapien
atctggggccttctaacggtacagatgtgtagg

SEQ ID NO: 222669 - DNA, 33 bp, Homo sapien
ttccccatgtgattcacattcttgcctctcagt

SEQ ID NO: 222670 - DNA, 33 bp, Homo sapien
ttccccatgtgattcatattcttgcctctcagt

SEQ ID NO: 222671 - DNA, 33 bp, Homo sapien
cttatgggatttctaaatggaaaacccctggaa

SEQ ID NO: 222672 - DNA, 33 bp, Homo sapien
cttatgggatttctaagtggaaaacccctggaa

SEQ ID NO: 222673 - DNA, 33 bp, Homo sapien
atttagccatgcgctcgacatgtggctgattta

SEQ ID NO: 222674 - DNA, 33 bp, Homo sapien
atttagccatgcgctctacatgtggctgattta

SEQ ID NO: 222675 - DNA, 33 bp, Homo sapien
tcactcccttcaccccaacttacactcctctcc

SEQ ID NO: 222676 - DNA, 33 bp, Homo sapien
tcactcccttcacccccacttacactcctctcc

SEQ ID NO: 222677 - DNA, 33 bp, Homo sapien
taaaggtaaaatctgccaagtatgatgcccttg

SEQ ID NO: 222678 - DNA, 33 bp, Homo sapien
taaaggtaaaatctgctaagtatgatgcccttg

SEQ ID NO: 222679 - DNA, 33 bp, Homo sapien
gtgcctgagacctgcaatgaatcaatatgtaaa

SEQ ID NO: 222680 - DNA, 33 bp, Homo sapien
gtgcctgagacctgcagtgaatcaatatgtaaa

SEQ ID NO: 222681 - DNA, 33 bp, Homo sapien
ccacagccccagaaaacaggtggttccttttgg

SEQ ID NO: 222682 - DNA, 33 bp, Homo sapien
ccacagccccagaaaataggtggttccttttgg

SEQ ID NO: 222683 - DNA, 33 bp, Homo sapien
gcttagccccattgcaacttttagcttccccca

SEQ ID NO: 222684 - DNA, 33 bp, Homo sapien
gcttagccccattgcagcttttagcttccccca

SEQ ID NO: 222685 - DNA, 33 bp, Homo sapien
aaggcaggcagagtcaaggtgaagcctgaagca

SEQ ID NO: 222686 - DNA, 33 bp, Homo sapien
aaggcaggcagagtcagggtgaagcctgaagca

SEQ ID NO: 222687 - DNA, 33 bp, Homo sapien
gactcccagaagaagacagaaggttaagctcac

SEQ ID NO: 222688 - DNA, 33 bp, Homo sapien
gactcccagaagaagatagaaggttaagctcac

SEQ ID NO: 222689 - DNA, 33 bp, Homo sapien
acaaggcctatagtaactacgtgaaaataaaag

SEQ ID NO: 222690 - DNA, 33 bp, Homo sapien
acaaggcctatagtaagtacgtgaaaataaaag

SEQ ID NO: 222691 - DNA, 33 bp, Homo sapien
ttttattcttttgcaggattagacccaagcata

SEQ ID NO: 222692 - DNA, 33 bp, Homo sapien
ttttattcttttgcagtattagacccaagcata

SEQ ID NO: 222693 - DNA, 33 bp, Homo sapien
acatccagttacttcacctgtctaccctgctat

SEQ ID NO: 222694 - DNA, 33 bp, Homo sapien
acatccagttacttcagctgtctaccctgctat

SEQ ID NO: 222695 - DNA, 33 bp, Homo sapien
ctgattgctcagttccagatgcttccgtgcttc

SEQ ID NO: 222696 - DNA, 33 bp, Homo sapien
ctgattgctcagttccggatgcttccgtgcttc

SEQ ID NO: 222697 - DNA, 33 bp, Homo sapien
ctatgttagtagtgaacgcctgctctccctgga

SEQ ID NO: 222698 - DNA, 33 bp, Homo sapien
ctatgttagtagtgaatgcctgctctccctgga

SEQ ID NO: 222699 - DNA, 33 bp, Homo sapien
ggtaccctgcatctgacgtcaccgaatgctgga

SEQ ID NO: 222700 - DNA, 33 bp, Homo sapien
ggtaccctgcatctgatgtcaccgaatgctgga

SEQ ID NO: 222701 - DNA, 33 bp, Homo sapien
gagggtgcctttctaacgcatagttcctccctc

SEQ ID NO: 222702 - DNA, 33 bp, Homo sapien
gagggtgcctttctaatgcatagttcctccctc

SEQ ID NO: 222703 - DNA, 33 bp, Homo sapien
tccagactaaatagagcagcttagcttgagatt

SEQ ID NO: 222704 - DNA, 33 bp, Homo sapien
tccagactaaatagagtagcttagcttgagatt

SEQ ID NO: 222705 - DNA, 33 bp, Homo sapien
gggtatcaggctcctcacttaggcagtagtgga

SEQ ID NO: 222706 - DNA, 33 bp, Homo sapien
gggtatcaggctcctcgcttaggcagtagtgga

SEQ ID NO: 222707 - DNA, 33 bp, Homo sapien
acagcacaggatagagaagacatgagtaggaga

SEQ ID NO: 222708 - DNA, 33 bp, Homo sapien
acagcacaggatagaggagacatgagtaggaga

SEQ ID NO: 222709 - DNA, 33 bp, Homo sapien
atggaaatgcactccgcaccacggggcttgctc

SEQ ID NO: 222710 - DNA, 33 bp, Homo sapien
atggaaatgcactccggaccacggggcttgctc

SEQ ID NO: 222711 - DNA, 33 bp, Homo sapien
tccagaaactggcacacccaatcagtccttgcc

SEQ ID NO: 222712 - DNA, 33 bp, Homo sapien
tccagaaactggcacatccaatcagtccttgcc

SEQ ID NO: 222713 - DNA, 33 bp, Homo sapien
tccgcttttgtgacaaataccctaggccacctc

SEQ ID NO: 222714 - DNA, 33 bp, Homo sapien
tccgcttttgtgacaagtaccctaggccacctc

SEQ ID NO: 222715 - DNA, 33 bp, Homo sapien
cccaccccacataggaatagcctgactgagggg

SEQ ID NO: 222716 - DNA, 33 bp, Homo sapien
cccaccccacataggagtagcctgactgagggg

SEQ ID NO: 222717 - DNA, 33 bp, Homo sapien
gcacagtacgatgatcaccacttcttgtgacct

SEQ ID NO: 222718 - DNA, 33 bp, Homo sapien
gcacagtacgatgatcgccacttcttgtgacct

SEQ ID NO: 222719 - DNA, 33 bp, Homo sapien
tcttttggactccaatcacatggctgttccaca

SEQ ID NO: 222720 - DNA, 33 bp, Homo sapien
tcttttggactccaattacatggctgttccaca

SEQ ID NO: 222721 - DNA, 33 bp, Homo sapien
ggaaaggctgtaagaacgcgagaagctgagggg

SEQ ID NO: 222722 - DNA, 33 bp, Homo sapien
ggaaaggctgtaagaaggcgagaagctgagggg

SEQ ID NO: 222723 - DNA, 33 bp, Homo sapien
acagcctgcagccttaaacatatttgaacaagt

SEQ ID NO: 222724 - DNA, 33 bp, Homo sapien
acagcctgcagccttacacatatttgaacaagt

SEQ ID NO: 222725 - DNA, 33 bp, Homo sapien
tgggcttcagaatccacgctctcaaccaataca

SEQ ID NO: 222726 - DNA, 33 bp, Homo sapien
tgggcttcagaatccatgctctcaaccaataca

SEQ ID NO: 222727 - DNA, 33 bp, Homo sapien
gattcctgagccaagtaaagtaaagtggccaca

SEQ ID NO: 222728 - DNA, 33 bp, Homo sapien
gattcctgagccaagttaagtaaagtggccaca

SEQ ID NO: 222729 - DNA, 33 bp, Homo sapien
ctctcaggcccctgccaacttcaaaattaccag

SEQ ID NO: 222730 - DNA, 33 bp, Homo sapien
ctctcaggcccctgccgacttcaaaattaccag

SEQ ID NO: 222731 - DNA, 33 bp, Homo sapien
ctcctgctccatgatacctaccagaactgagag

SEQ ID NO: 222732 - DNA, 33 bp, Homo sapien
ctcctgctccatgatatctaccagaactgagag

SEQ ID NO: 222733 - DNA, 33 bp, Homo sapien
cctcagtttcttcacaaaatggtaacaataata

SEQ ID NO: 222734 - DNA, 33 bp, Homo sapien
cctcagtttcttcacagaatggtaacaataata

SEQ ID NO: 222735 - DNA, 33 bp, Homo sapien
ataggacatgtccataaggggtgttttcttcac

SEQ ID NO: 222736 - DNA, 33 bp, Homo sapien
ataggacatgtccatagggggtgttttcttcac

SEQ ID NO: 222737 - DNA, 33 bp, Homo sapien
tcctgggagtagagcacagtttggtccagcacc

SEQ ID NO: 222738 - DNA, 33 bp, Homo sapien
tcctgggagtagagcagagtttggtccagcacc

SEQ ID NO: 222739 - DNA, 33 bp, Homo sapien
gtagaatcgatgatgaccttttctccccgttca

SEQ ID NO: 222740 - DNA, 33 bp, Homo sapien
gtagaatcgatgatgatcttttctccccgttca

SEQ ID NO: 222741 - DNA, 33 bp, Homo sapien
agttttgtaccctgcccgcaagaaacctcaaat

SEQ ID NO: 222742 - DNA, 33 bp, Homo sapien
agttttgtaccctgcctgcaagaaacctcaaat

SEQ ID NO: 222743 - DNA, 33 bp, Homo sapien
ccacagacaggcctgcacattcccaatactcag

SEQ ID NO: 222744 - DNA, 33 bp, Homo sapien
ccacagacaggcctgcgcattcccaatactcag

SEQ ID NO: 222745 - DNA, 33 bp, Homo sapien
actcagagaccaagcagccagagctatggggca

SEQ ID NO: 222746 - DNA, 33 bp, Homo sapien
actcagagaccaagcatccagagctatggggca

SEQ ID NO: 222747 - DNA, 33 bp, Homo sapien
gccctgccttttcctcaccattgttcagacaag

SEQ ID NO: 222748 - DNA, 33 bp, Homo sapien
gccctgccttttcctcgccattgttcagacaag

SEQ ID NO: 222749 - DNA, 33 bp, Homo sapien
accttggaagaacttacatggtccaaatctctc

SEQ ID NO: 222750 - DNA, 33 bp, Homo sapien
accttggaagaacttatatggtccaaatctctc

SEQ ID NO: 222751 - DNA, 33 bp, Homo sapien
agccattgacctagaacaagagtaaacaggttc

SEQ ID NO: 222752 - DNA, 33 bp, Homo sapien
agccattgacctagaataagagtaaacaggttc

SEQ ID NO: 222753 - DNA, 33 bp, Homo sapien
taatagtataagcaaaaagcaagaactcagtta

SEQ ID NO: 222754 - DNA, 33 bp, Homo sapien
taatagtataagcaaacagcaagaactcagtta

SEQ ID NO: 222755 - DNA, 33 bp, Homo sapien
agagatggattgaagacagcttggtcccaccaa

SEQ ID NO: 222756 - DNA, 33 bp, Homo sapien
agagatggattgaagagagcttggtcccaccaa

SEQ ID NO: 222757 - DNA, 33 bp, Homo sapien
taggctgggcaccaaacgattcctacttctcct

SEQ ID NO: 222758 - DNA, 33 bp, Homo sapien
taggctgggcaccaaatgattcctacttctcct

SEQ ID NO: 222759 - DNA, 33 bp, Homo sapien
gagcaaactttctataacctgaacactgacccc

SEQ ID NO: 222760 - DNA, 33 bp, Homo sapien
gagcaaactttctataccctgaacactgacccc

SEQ ID NO: 222761 - DNA, 33 bp, Homo sapien
gcagctctgtctggagaagccaaagaccgaacc

SEQ ID NO: 222762 - DNA, 33 bp, Homo sapien
gcagctctgtctggaggagccaaagaccgaacc

SEQ ID NO: 222763 - DNA, 33 bp, Homo sapien
gtccaagggcagcaaccacagatgcatagcagt

SEQ ID NO: 222764 - DNA, 33 bp, Homo sapien
gtccaagggcagcaactacagatgcatagcagt

SEQ ID NO: 222765 - DNA, 33 bp, Homo sapien
aagagacagacggaacaaaagcccacagctttg

SEQ ID NO: 222766 - DNA, 33 bp, Homo sapien
aagagacagacggaacgaaagcccacagctttg

SEQ ID NO: 222767 - DNA, 33 bp, Homo sapien
gagcctgacagtagacaggatcagacgcagcag

SEQ ID NO: 222768 - DNA, 33 bp, Homo sapien
gagcctgacagtagacgggatcagacgcagcag

SEQ ID NO: 222769 - DNA, 33 bp, Homo sapien
ataataattgtacatacggaatacagagtgata

SEQ ID NO: 222770 - DNA, 33 bp, Homo sapien
ataataattgtacatatggaatacagagtgata

SEQ ID NO: 222771 - DNA, 33 bp, Homo sapien
ctagtacctggcacaccgtaggctcttggccca

SEQ ID NO: 222772 - DNA, 33 bp, Homo sapien
ctagtacctggcacactgtaggctcttggccca

SEQ ID NO: 222773 - DNA, 33 bp, Homo sapien
tgactgctgcacaggcaacagcgagtttctagc

SEQ ID NO: 222774 - DNA, 33 bp, Homo sapien
tgactgctgcacaggcgacagcgagtttctagc

SEQ ID NO: 222775 - DNA, 33 bp, Homo sapien
ctttagccagggaagacattgctattcgcctct

SEQ ID NO: 222776 - DNA, 33 bp, Homo sapien
ctttagccagggaagatattgctattcgcctct

SEQ ID NO: 222777 - DNA, 33 bp, Homo sapien
ccgctagctttcccaccatgctttgggcaaggg

SEQ ID NO: 222778 - DNA, 33 bp, Homo sapien
ccgctagctttcccacgatgctttgggcaaggg

SEQ ID NO: 222779 - DNA, 33 bp, Homo sapien
catgaagagtaaaaaacaccgttccattgtaca

SEQ ID NO: 222780 - DNA, 33 bp, Homo sapien
catgaagagtaaaaaataccgttccattgtaca

SEQ ID NO: 222781 - DNA, 33 bp, Homo sapien
agtaaactaggtcacaataaaaacttatttctt

SEQ ID NO: 222782 - DNA, 33 bp, Homo sapien
agtaaactaggtcacagtaaaaacttatttctt

SEQ ID NO: 222783 - DNA, 33 bp, Homo sapien
gtctgctggcatggtaaagtagagcctagaggc

SEQ ID NO: 222784 - DNA, 33 bp, Homo sapien
gtctgctggcatggtagagtagagcctagaggc

SEQ ID NO: 222785 - DNA, 33 bp, Homo sapien
ccaaatttatatgctacgtgattaaagaaaaaa

SEQ ID NO: 222786 - DNA, 33 bp, Homo sapien
ccaaatttatatgctatgtgattaaagaaaaaa

SEQ ID NO: 222787 - DNA, 33 bp, Homo sapien
taaaattgtacttagaaggatgtgtataatact

SEQ ID NO: 222788 - DNA, 33 bp, Homo sapien
taaaattgtacttagagggatgtgtataatact

SEQ ID NO: 222789 - DNA, 33 bp, Homo sapien
gaccaggcagaaatggccagtccagcccacaat

SEQ ID NO: 222790 - DNA, 33 bp, Homo sapien
gaccaggcagaaatggtcagtccagcccacaat

SEQ ID NO: 222791 - DNA, 33 bp, Homo sapien
catggtgtctgtagcacgatttgggtcactgaa

SEQ ID NO: 222792 - DNA, 33 bp, Homo sapien
catggtgtctgtagcaggatttgggtcactgaa

SEQ ID NO: 222793 - DNA, 33 bp, Homo sapien
ttccaggatccttttaacccccctggatctcag

SEQ ID NO: 222794 - DNA, 33 bp, Homo sapien
ttccaggatccttttatcccccctggatctcag

SEQ ID NO: 222795 - DNA, 33 bp, Homo sapien
agtccccttcatcatacccttcaaatcactccc

SEQ ID NO: 222796 - DNA, 33 bp, Homo sapien
agtccccttcatcatatccttcaaatcactccc

SEQ ID NO: 222797 - DNA, 33 bp, Homo sapien
ataacgcatttgaaagacctctacatcgtaaag

SEQ ID NO: 222798 - DNA, 33 bp, Homo sapien
ataacgcatttgaaagtcctctacatcgtaaag

SEQ ID NO: 222799 - DNA, 33 bp, Homo sapien
aatgtctgagtacataccatttcaacaaagctg

SEQ ID NO: 222800 - DNA, 33 bp, Homo sapien
aatgtctgagtacatatcatttcaacaaagctg

SEQ ID NO: 222801 - DNA, 33 bp, Homo sapien
caagcactttgttgaacgaacaccatgatgggc

SEQ ID NO: 222802 - DNA, 33 bp, Homo sapien
caagcactttgttgaatgaacaccatgatgggc

SEQ ID NO: 222803 - DNA, 33 bp, Homo sapien
ccaacaccttgtgttacagacagcagtccttgt

SEQ ID NO: 222804 - DNA, 33 bp, Homo sapien
ccaacaccttgtgttatagacagcagtccttgt

SEQ ID NO: 222805 - DNA, 33 bp, Homo sapien
atcctctctctacttaactcctccagccccact

SEQ ID NO: 222806 - DNA, 33 bp, Homo sapien
atcctctctctacttacctcctccagccccact

SEQ ID NO: 222807 - DNA, 33 bp, Homo sapien
ttcaaggaacgagaaacggagactgcatcccag

SEQ ID NO: 222808 - DNA, 33 bp, Homo sapien
ttcaaggaacgagaaatggagactgcatcccag

SEQ ID NO: 222809 - DNA, 33 bp, Homo sapien
ttaatgcatccatgaaatcctctcttacctgga

SEQ ID NO: 222810 - DNA, 33 bp, Homo sapien
ttaatgcatccatgaagtcctctcttacctgga

SEQ ID NO: 222811 - DNA, 33 bp, Homo sapien
gaacataatcaaactagcttggaggggaacctg

SEQ ID NO: 222812 - DNA, 33 bp, Homo sapien
gaacataatcaaactatcttggaggggaacctg

SEQ ID NO: 222813 - DNA, 33 bp, Homo sapien
cttgaactgtctctcacgaattcctgggcttat

SEQ ID NO: 222814 - DNA, 33 bp, Homo sapien
cttgaactgtctctcatgaattcctgggcttat

SEQ ID NO: 222815 - DNA, 33 bp, Homo sapien
aggcatccacagttctcaatctccttctaggct

SEQ ID NO: 222816 - DNA, 33 bp, Homo sapien
aggcatccacagttctgaatctccttctaggct

SEQ ID NO: 222817 - DNA, 33 bp, Homo sapien
ccagggaacctataagccaaaagctgagatcta

SEQ ID NO: 222818 - DNA, 33 bp, Homo sapien
ccagggaacctataagtcaaaagctgagatcta

SEQ ID NO: 222819 - DNA, 33 bp, Homo sapien
tacacctacaataataatatataccccaccaga

SEQ ID NO: 222820 - DNA, 33 bp, Homo sapien
tacacctacaataatactatataccccaccaga

SEQ ID NO: 222821 - DNA, 33 bp, Homo sapien
gctggcagggcactaaggtgtcatagagctgtg

SEQ ID NO: 222822 - DNA, 33 bp, Homo sapien
gctggcagggcactaatgtgtcatagagctgtg

SEQ ID NO: 222823 - DNA, 33 bp, Homo sapien
gaaccctctggcggaaacttccaggcccagctc

SEQ ID NO: 222824 - DNA, 33 bp, Homo sapien
gaaccctctggcggaaccttccaggcccagctc

SEQ ID NO: 222825 - DNA, 33 bp, Homo sapien
ggtgccataagggaacagaagcgatcacaaggg

SEQ ID NO: 222826 - DNA, 33 bp, Homo sapien
ggtgccataagggaacggaagcgatcacaaggg

SEQ ID NO: 222827 - DNA, 33 bp, Homo sapien
aagttgaagaaaagagaaaatgatttaagcttt

SEQ ID NO: 222828 - DNA, 33 bp, Homo sapien
aagttgaagaaaagaggaaatgatttaagcttt

SEQ ID NO: 222829 - DNA, 33 bp, Homo sapien
atgtgagtatacacgaatagacaaatgaggagc

SEQ ID NO: 222830 - DNA, 33 bp, Homo sapien
atgtgagtatacacgagtagacaaatgaggagc

SEQ ID NO: 222831 - DNA, 33 bp, Homo sapien
agagatcatagtgggacgcagcagatagcacag

SEQ ID NO: 222832 - DNA, 33 bp, Homo sapien
agagatcatagtgggatgcagcagatagcacag

SEQ ID NO: 222833 - DNA, 33 bp, Homo sapien
ctgtaagtatctgcaagtctttttgcctccatc

SEQ ID NO: 222834 - DNA, 33 bp, Homo sapien
ctgtaagtatctgcaattctttttgcctccatc

SEQ ID NO: 222835 - DNA, 33 bp, Homo sapien
gtatttccctggaagacgagtgaccactgtcct

SEQ ID NO: 222836 - DNA, 33 bp, Homo sapien
gtatttccctggaagatgagtgaccactgtcct

SEQ ID NO: 222837 - DNA, 33 bp, Homo sapien
gaggtcaacaacccacaagacaggtggaactct

SEQ ID NO: 222838 - DNA, 33 bp, Homo sapien
gaggtcaacaacccacgagacaggtggaactct

SEQ ID NO: 222839 - DNA, 33 bp, Homo sapien
gtattaagttatggcccctgctctcaaggaggc

SEQ ID NO: 222840 - DNA, 33 bp, Homo sapien
gtattaagttatggcctctgctctcaaggaggc

SEQ ID NO: 222841 - DNA, 33 bp, Homo sapien
gccagggtcgtatggaactttccgtggaccaag

SEQ ID NO: 222842 - DNA, 33 bp, Homo sapien
gccagggtcgtatggagctttccgtggaccaag

SEQ ID NO: 222843 - DNA, 33 bp, Homo sapien
caagcctgtgtcaggaagagctattttcagtga

SEQ ID NO: 222844 - DNA, 33 bp, Homo sapien
caagcctgtgtcaggaggagctattttcagtga

SEQ ID NO: 222845 - DNA, 33 bp, Homo sapien
gcctttgtccaaagacgatcaccatataaacac

SEQ ID NO: 222846 - DNA, 33 bp, Homo sapien
gcctttgtccaaagactatcaccatataaacac

SEQ ID NO: 222847 - DNA, 33 bp, Homo sapien
agtctatcaataggcaacttgtacatcgataca

SEQ ID NO: 222848 - DNA, 33 bp, Homo sapien
agtctatcaataggcagcttgtacatcgataca

SEQ ID NO: 222849 - DNA, 33 bp, Homo sapien
gcaaagcatatgaaccaacagttcccagaaaat

SEQ ID NO: 222850 - DNA, 33 bp, Homo sapien
gcaaagcatatgaaccgacagttcccagaaaat

SEQ ID NO: 222851 - DNA, 33 bp, Homo sapien
ggagctgcactatttgaatcttcttggagtaga

SEQ ID NO: 222852 - DNA, 33 bp, Homo sapien
ggagctgcactatttggatcttcttggagtaga

SEQ ID NO: 222853 - DNA, 33 bp, Homo sapien
tggaaagttggagagcacttattcctgggctat

SEQ ID NO: 222854 - DNA, 33 bp, Homo sapien
tggaaagttggagagcgcttattcctgggctat

SEQ ID NO: 222855 - DNA, 33 bp, Homo sapien
agagacagaaaggcgagaggcagctcagagagg

SEQ ID NO: 222856 - DNA, 33 bp, Homo sapien
agagacagaaaggcgataggcagctcagagagg

SEQ ID NO: 222857 - DNA, 33 bp, Homo sapien
gttttttcattctaccaggggctgaccttagtt

SEQ ID NO: 222858 - DNA, 33 bp, Homo sapien
gttttttcattctaccgggggctgaccttagtt

SEQ ID NO: 222859 - DNA, 33 bp, Homo sapien
tggaagcatatctgaacaggttctccaagttgt

SEQ ID NO: 222860 - DNA, 33 bp, Homo sapien
tggaagcatatctgaagaggttctccaagttgt

SEQ ID NO: 222861 - DNA, 33 bp, Homo sapien
tctttgtaagtgatgcagatatggccattagag

SEQ ID NO: 222862 - DNA, 33 bp, Homo sapien
tctttgtaagtgatgcggatatggccattagag

SEQ ID NO: 222863 - DNA, 33 bp, Homo sapien
caggcaagttatttgaaccctctggacttcagt

SEQ ID NO: 222864 - DNA, 33 bp, Homo sapien
caggcaagttatttgacccctctggacttcagt

SEQ ID NO: 222865 - DNA, 33 bp, Homo sapien
ggataaggcaatctccagaagtaaggaattgat

SEQ ID NO: 222866 - DNA, 33 bp, Homo sapien
ggataaggcaatctcccgaagtaaggaattgat

SEQ ID NO: 222867 - DNA, 33 bp, Homo sapien
tcctctcccgttgtaccgcattctttccagcat

SEQ ID NO: 222868 - DNA, 33 bp, Homo sapien
tcctctcccgttgtactgcattctttccagcat

SEQ ID NO: 222869 - DNA, 33 bp, Homo sapien
tgcattaggatagtaactgctcccattagggca

SEQ ID NO: 222870 - DNA, 33 bp, Homo sapien
tgcattaggatagtaattgctcccattagggca

SEQ ID NO: 222871 - DNA, 33 bp, Homo sapien
tttgataccttcaatgcagtgattgataaaatc

SEQ ID NO: 222872 - DNA, 33 bp, Homo sapien
tttgataccttcaatggagtgattgataaaatc

SEQ ID NO: 222873 - DNA, 33 bp, Homo sapien
ttcaacatccaacagactcatttctctaaatca

SEQ ID NO: 222874 - DNA, 33 bp, Homo sapien
ttcaacatccaacagattcatttctctaaatca

SEQ ID NO: 222875 - DNA, 33 bp, Homo sapien
atttatggctgccttcagaaacctagaggcagt

SEQ ID NO: 222876 - DNA, 33 bp, Homo sapien
atttatggctgccttcggaaacctagaggcagt

SEQ ID NO: 222877 - DNA, 33 bp, Homo sapien
tgaaaaggaacgtgaccaaatgtagaccactct

SEQ ID NO: 222878 - DNA, 33 bp, Homo sapien
tgaaaaggaacgtgacgaaatgtagaccactct

SEQ ID NO: 222879 - DNA, 33 bp, Homo sapien
aaagctctatataccaatgcttttaagtcatgt

SEQ ID NO: 222880 - DNA, 33 bp, Homo sapien
aaagctctatataccagtgcttttaagtcatgt

SEQ ID NO: 222881 - DNA, 33 bp, Homo sapien
cagttataccattgaaactgcctcaacaggaat

SEQ ID NO: 222882 - DNA, 33 bp, Homo sapien
cagttataccattgaagctgcctcaacaggaat

SEQ ID NO: 222883 - DNA, 33 bp, Homo sapien
gatacctttgttactacagaagagctagaatag

SEQ ID NO: 222884 - DNA, 33 bp, Homo sapien
gatacctttgttactatagaagagctagaatag

SEQ ID NO: 222885 - DNA, 33 bp, Homo sapien
ccagtatattattgggcaaatagcgggaactca

SEQ ID NO: 222886 - DNA, 33 bp, Homo sapien
ccagtatattattgggtaaatagcgggaactca

SEQ ID NO: 222887 - DNA, 33 bp, Homo sapien
cttgggttcctgtgaaagaatacacatctccac

SEQ ID NO: 222888 - DNA, 33 bp, Homo sapien
cttgggttcctgtgaatgaatacacatctccac

SEQ ID NO: 222889 - DNA, 33 bp, Homo sapien
tatggatacaaaaatacgtcctcttgtgtgttc

SEQ ID NO: 222890 - DNA, 33 bp, Homo sapien
tatggatacaaaaatatgtcctcttgtgtgttc

SEQ ID NO: 222891 - DNA, 33 bp, Homo sapien
gatgcacagagttataaaatgaagaagagcttt

SEQ ID NO: 222892 - DNA, 33 bp, Homo sapien
gatgcacagagttatacaatgaagaagagcttt

SEQ ID NO: 222893 - DNA, 33 bp, Homo sapien
agggctctgctgctctgagacccaagttaaatc

SEQ ID NO: 222894 - DNA, 33 bp, Homo sapien
agggctctgctgctcttagacccaagttaaatc

SEQ ID NO: 222895 - DNA, 33 bp, Homo sapien
agttttctgttttgccgccttgcctccatagaa

SEQ ID NO: 222896 - DNA, 33 bp, Homo sapien
agttttctgttttgcctccttgcctccatagaa

SEQ ID NO: 222897 - DNA, 33 bp, Homo sapien
cgagaaggacgactccaagctgcctacaacctg

SEQ ID NO: 222898 - DNA, 33 bp, Homo sapien
cgagaaggacgactccgagctgcctacaacctg

SEQ ID NO: 222899 - DNA, 33 bp, Homo sapien; identical to SEQ ID NO: 222897

SEQ ID NO: 222900 - DNA, 33 bp, Homo sapien; identical to SEQ ID NO: 222898

SEQ ID NO: 222901 - DNA, 33 bp, Homo sapien
atgacttctgtggcaccgatatgaccattggca

SEQ ID NO: 222902 - DNA, 33 bp, Homo sapien
atgacttctgtggcactgatatgaccattggca

SEQ ID NO: 222903 - DNA, 33 bp, Homo sapien; identical to SEQ ID NO: 222901

SEQ ID NO: 222904 - DNA, 33 bp, Homo sapien; identical to SEQ ID NO: 222902

SEQ ID NO: 222905 - DNA, 33 bp, Homo sapien
gaccttttatcaactacgaggactaggagaact

SEQ ID NO: 222906 - DNA, 33 bp, Homo sapien
gaccttttatcaactatgaggactaggagaact

SEQ ID NO: 222907 - DNA, 33 bp, Homo sapien
aagtcatctaaaatcaataacaacttgatctaa

SEQ ID NO: 222908 - DNA, 33 bp, Homo sapien
aagtcatctaaaatcagtaacaacttgatctaa

SEQ ID NO: 222909 - DNA, 33 bp, Homo sapien
gtgctggtattgacagaagagtccttgcgatat

SEQ ID NO: 222910 - DNA, 33 bp, Homo sapien
gtgctggtattgacaggagagtccttgcgatat

SEQ ID NO: 222911 - DNA, 33 bp, Homo sapien
atgagatatttggtaacctccttgaacaaatat

SEQ ID NO: 222912 - DNA, 33 bp, Homo sapien
atgagatatttggtaagctccttgaacaaatat

SEQ ID NO: 222913 - DNA, 33 bp, Homo sapien
agatagagaagaactacgtaaaggtgagtgttt

SEQ ID NO: 222914 - DNA, 33 bp, Homo sapien
agatagagaagaactatgtaaaggtgagtgttt

SEQ ID NO: 222915 - DNA, 33 bp, Homo sapien
gagaggctgttgctaaggatcccagagttgagc

SEQ ID NO: 222916 - DNA, 33 bp, Homo sapien
gagaggctgttgctaatgatcccagagttgagc

SEQ ID NO: 222917 - DNA, 33 bp, Homo sapien
agagagactccctcgacgaaggatttgtagggt

SEQ ID NO: 222918 - DNA, 33 bp, Homo sapien
agagagactccctcgaggaaggatttgtagggt

SEQ ID NO: 222919 - DNA, 33 bp, Homo sapien
caggagaacccgtgaactgtgtaaataaaattc

SEQ ID NO: 222920 - DNA, 33 bp, Homo sapien
caggagaacccgtgaattgtgtaaataaaattc

SEQ ID NO: 222921 - DNA, 33 bp, Homo sapien
ttaacaccaaggaaagaattgagaaggaataca

SEQ ID NO: 222922 - DNA, 33 bp, Homo sapien
ttaacaccaaggaaagcattgagaaggaataca

SEQ ID NO: 222923 - DNA, 33 bp, Homo sapien
caaccttattcagtcacctgcgcccagcatctc

SEQ ID NO: 222924 - DNA, 33 bp, Homo sapien
caaccttattcagtcatctgcgcccagcatctc

SEQ ID NO: 222925 - DNA, 33 bp, Homo sapien
aagatgaaaacatgtacagcttcatagaagtaa

SEQ ID NO: 222926 - DNA, 33 bp, Homo sapien
aagatgaaaacatgtatagcttcatagaagtaa

SEQ ID NO: 222927 - DNA, 33 bp, Homo sapien
ggtgccacctgtcgggaaatagggacattacaa

SEQ ID NO: 222928 - DNA, 33 bp, Homo sapien
ggtgccacctgtcggggaatagggacattacaa

SEQ ID NO: 222929 - DNA, 33 bp, Homo sapien
actcccttcagacatccgagttacatacaaaat

SEQ ID NO: 222930 - DNA, 33 bp, Homo sapien
actcccttcagacatctgagttacatacaaaat

SEQ ID NO: 222931 - DNA, 33 bp, Homo sapien
ctaaagaaaaataataaaacagcatagctcctg

SEQ ID NO: 222932 - DNA, 33 bp, Homo sapien
ctaaagaaaaataatagaacagcatagctcctg

SEQ ID NO: 222933 - DNA, 33 bp, Homo sapien
gagtatatttcattccaagagcccttccgcaga

SEQ ID NO: 222934 - DNA, 33 bp, Homo sapien
gagtatatttcattccgagagcccttccgcaga

SEQ ID NO: 222935 - DNA, 33 bp, Homo sapien
acagatggccgaggaaaaagtacatggggctgt

SEQ ID NO: 222936 - DNA, 33 bp, Homo sapien
acagatggccgaggaagaagtacatggggctgt

SEQ ID NO: 222937 - DNA, 33 bp, Homo sapien
tatcctccagtaggaccaagtaattcctcaggt

SEQ ID NO: 222938 - DNA, 33 bp, Homo sapien
tatcctccagtaggactaagtaattcctcaggt

SEQ ID NO: 222939 - DNA, 33 bp, Homo sapien
tctctaatagtatagaggtcaaagaacaaagtc

SEQ ID NO: 222940 - DNA, 33 bp, Homo sapien
tctctaatagtatagatgtcaaagaacaaagtc

SEQ ID NO: 222941 - DNA, 33 bp, Homo sapien
caaaatcaatgcacaaaactcagtaacacctct

SEQ ID NO: 222942 - DNA, 33 bp, Homo sapien
caaaatcaatgcacaagactcagtaacacctct

SEQ ID NO: 222943 - DNA, 33 bp, Homo sapien
gaattttgtcaataaaatgctctggatcacaga

SEQ ID NO: 222944 - DNA, 33 bp, Homo sapien
gaattttgtcaataaagtgctctggatcacaga

SEQ ID NO: 222945 - DNA, 33 bp, Homo sapien
tttgcttttctcaggcacttttgagtggatata

SEQ ID NO: 222946 - DNA, 33 bp, Homo sapien
tttgcttttctcaggcgcttttgagtggatata

SEQ ID NO: 222947 - DNA, 33 bp, Homo sapien
gtttgtacataagacacaaaagctaggcatcag

SEQ ID NO: 222948 - DNA, 33 bp, Homo sapien
gtttgtacataagacagaaaagctaggcatcag

SEQ ID NO: 222949 - DNA, 33 bp, Homo sapien
taatcaagaagaaccacgacacatcagtggact

SEQ ID NO: 222950 - DNA, 33 bp, Homo sapien
taatcaagaagaaccatgacacatcagtggact

SEQ ID NO: 222951 - DNA, 33 bp, Homo sapien
acttcatcaatcttatcagacaaaaacttctaa

SEQ ID NO: 222952 - DNA, 33 bp, Homo sapien
acttcatcaatcttatgagacaaaaacttctaa

SEQ ID NO: 222953 - DNA, 33 bp, Homo sapien
caaattggtaaagagtcaaactgtcgctgtttg

SEQ ID NO: 222954 - DNA, 33 bp, Homo sapien
caaattggtaaagagtgaaactgtcgctgtttg

SEQ ID NO: 222955 - DNA, 33 bp, Homo sapien
gccacttatcatgcagcatcatttgagagggtg

SEQ ID NO: 222956 - DNA, 33 bp, Homo sapien
gccacttatcatgcagtatcatttgagagggtg

SEQ ID NO: 222957 - DNA, 33 bp, Homo sapien
tttaagaaattgctgaaaatttgacaaaactaa

SEQ ID NO: 222958 - DNA, 33 bp, Homo sapien
tttaagaaattgctgataatttgacaaaactaa

SEQ ID NO: 222959 - DNA, 33 bp, Homo sapien
taaacttagttgataaagtagagcaggatttga

SEQ ID NO: 222960 - DNA, 33 bp, Homo sapien
taaacttagttgataaggtagagcaggatttga

SEQ ID NO: 222961 - DNA, 33 bp, Homo sapien
aaccagaaaggcaaaaaccaaataggaaacaga

SEQ ID NO: 222962 - DNA, 33 bp, Homo sapien
aaccagaaaggcaaaagccaaataggaaacaga

SEQ ID NO: 222963 - DNA, 33 bp, Homo sapien
ttcctgtctgtgatcaatgaaaggcatcttcta

SEQ ID NO: 222964 - DNA, 33 bp, Homo sapien
ttcctgtctgtgatcagtgaaaggcatcttcta

SEQ ID NO: 222965 - DNA, 33 bp, Homo sapien
agccagacaacagagaatacttacctatgtaat

SEQ ID NO: 222966 - DNA, 33 bp, Homo sapien
agccagacaacagagagtacttacctatgtaat

SEQ ID NO: 222967 - DNA, 33 bp, Homo sapien
tgcaactagtagatgaccttgaggattctagct

SEQ ID NO: 222968 - DNA, 33 bp, Homo sapien
tgcaactagtagatgagcttgaggattctagct

SEQ ID NO: 222969 - DNA, 33 bp, Homo sapien
tacagattagctactagaggggttcccagcccc

SEQ ID NO: 222970 - DNA, 33 bp, Homo sapien
tacagattagctactataggggttcccagcccc

SEQ ID NO: 222971 - DNA, 33 bp, Homo sapien
atcatcgccatctctgcagtccttgtaatgtga

SEQ ID NO: 222972 - DNA, 33 bp, Homo sapien
atcatcgccatctctgtagtccttgtaatgtga

SEQ ID NO: 222973 - DNA, 33 bp, Homo sapien
gaatgaaatcttctaactccatcattccagagg

SEQ ID NO: 222974 - DNA, 33 bp, Homo sapien
gaatgaaatcttctaattccatcattccagagg

SEQ ID NO: 222975 - DNA, 33 bp, Homo sapien
agcccaattttcacaacgtcgtctgagttccac

SEQ ID NO: 222976 - DNA, 33 bp, Homo sapien
agcccaattttcacaatgtcgtctgagttccac

SEQ ID NO: 222977 - DNA, 33 bp, Homo sapien
ttcataagcaactctcaatatttcagtgttcta

SEQ ID NO: 222978 - DNA, 33 bp, Homo sapien
ttcataagcaactctcgatatttcagtgttcta

SEQ ID NO: 222979 - DNA, 33 bp, Homo sapien
acttattgtaagagaaagctgctgaagtttaga

SEQ ID NO: 222980 - DNA, 33 bp, Homo sapien
acttattgtaagagaaggctgctgaagtttaga

SEQ ID NO: 222981 - DNA, 33 bp, Homo sapien
gtaaagtgaacagaagaaagatggaataagcag

SEQ ID NO: 222982 - DNA, 33 bp, Homo sapien
gtaaagtgaacagaaggaagatggaataagcag

SEQ ID NO: 222983 - DNA, 33 bp, Homo sapien
ttacaaagcacctaaactggttcagaagttata

SEQ ID NO: 222984 - DNA, 33 bp, Homo sapien
ttacaaagcacctaaattggttcagaagttata

SEQ ID NO: 222985 - DNA, 33 bp, Homo sapien
cctatcctatgccaggccctatgctggatgctt

SEQ ID NO: 222986 - DNA, 33 bp, Homo sapien
cctatcctatgccaggtcctatgctggatgctt

SEQ ID NO: 222987 - DNA, 33 bp, Homo sapien
gctgaattttgtcaagaaaaccattatgccatg

SEQ ID NO: 222988 - DNA, 33 bp, Homo sapien
gctgaattttgtcaagcaaaccattatgccatg

SEQ ID NO: 222989 - DNA, 33 bp, Homo sapien
aggcttaagggtcacaacttctgtatctatgcc

SEQ ID NO: 222990 - DNA, 33 bp, Homo sapien
aggcttaagggtcacatcttctgtatctatgcc

SEQ ID NO: 222991 - DNA, 33 bp, Homo sapien
atcttggaattttcacactaagaacattgctaa

SEQ ID NO: 222992 - DNA, 33 bp, Homo sapien
atcttggaattttcacgctaagaacattgctaa

SEQ ID NO: 222993 - DNA, 33 bp, Homo sapien
tatgaaacggtcttcacgcttccctctgtcctg

SEQ ID NO: 222994 - DNA, 33 bp, Homo sapien
tatgaaacggtcttcatgcttccctctgtcctg

SEQ ID NO: 222995 - DNA, 33 bp, Homo sapien
caagggccagcctggcacatggataccaagtag

SEQ ID NO: 222996 - DNA, 33 bp, Homo sapien
caagggccagcctggcgcatggataccaagtag

SEQ ID NO: 222997 - DNA, 33 bp, Homo sapien
ccccagcaacttagggaccagattactctcttt

SEQ ID NO: 222998 - DNA, 33 bp, Homo sapien
ccccagcaacttagggcccagattactctcttt

SEQ ID NO: 222999 - DNA, 33 bp, Homo sapien
ggcaatataatatcagaattttagctaggatgg

SEQ ID NO: 223000 - DNA, 33 bp, Homo sapien
ggcaatataatatcaggattttagctaggatgg

SEQ ID NO: 223001 - DNA, 33 bp, Homo sapien
aggatgaactcggagacaatgctgtggttcctc

SEQ ID NO: 223002 - DNA, 33 bp, Homo sapien
aggatgaactcggagataatgctgtggttcctc

SEQ ID NO: 223003 - DNA, 33 bp, Homo sapien
tagaccatgagagagccaatggcagaggaagga

SEQ ID NO: 223004 - DNA, 33 bp, Homo sapien
tagaccatgagagagctaatggcagaggaagga

SEQ ID NO: 223005 - DNA, 33 bp, Homo sapien
catcttcagaccttacagctaggacactactgc

SEQ ID NO: 223006 - DNA, 33 bp, Homo sapien
catcttcagaccttacggctaggacactactgc

SEQ ID NO: 223007 - DNA, 33 bp, Homo sapien
tggtgagaagaaaagcacttattcagtggagaa

SEQ ID NO: 223008 - DNA, 33 bp, Homo sapien
tggtgagaagaaaagcgcttattcagtggagaa

SEQ ID NO: 223009 - DNA, 33 bp, Homo sapien
tgctcagaatggttaactggacctcaagcctga

SEQ ID NO: 223010 - DNA, 33 bp, Homo sapien
tgctcagaatggttaattggacctcaagcctga

SEQ ID NO: 223011 - DNA, 33 bp, Homo sapien
tggtatttaggaataaaagcttcagttgtgctg

SEQ ID NO: 223012 - DNA, 33 bp, Homo sapien
tggtatttaggaataagagcttcagttgtgctg

SEQ ID NO: 223013 - DNA, 33 bp, Homo sapien
ggatgtgctgcaaagaaagaatgatataaacct

SEQ ID NO: 223014 - DNA, 33 bp, Homo sapien
ggatgtgctgcaaagacagaatgatataaacct

SEQ ID NO: 223015 - DNA, 33 bp, Homo sapien
tatggaagataaatggccaaaggggtagagtgt

SEQ ID NO: 223016 - DNA, 33 bp, Homo sapien
tatggaagataaatggtcaaaggggtagagtgt

SEQ ID NO: 223017 - DNA, 33 bp, Homo sapien
attcatggctgggtaacacagtaggtggatatt

SEQ ID NO: 223018 - DNA, 33 bp, Homo sapien
attcatggctgggtaatacagtaggtggatatt

SEQ ID NO: 223019 - DNA, 33 bp, Homo sapien
ggcttgaattctgagacctgaggttctatacct

SEQ ID NO: 223020 - DNA, 33 bp, Homo sapien
ggcttgaattctgagatctgaggttctatacct

SEQ ID NO: 223021 - DNA, 33 bp, Homo sapien
tggatctcacagtggaagccatagttcctagtt

SEQ ID NO: 223022 - DNA, 33 bp, Homo sapien
tggatctcacagtggaggccatagttcctagtt

SEQ ID NO: 223023 - DNA, 33 bp, Homo sapien
tcctccctatgtctaacttaaatctgtgttgca

SEQ ID NO: 223024 - DNA, 33 bp, Homo sapien
tcctccctatgtctaatttaaatctgtgttgca

SEQ ID NO: 223025 - DNA, 33 bp, Homo sapien
ctcaaacatatttccaaaagtaaatttttgttt

SEQ ID NO: 223026 - DNA, 33 bp, Homo sapien
ctcaaacatatttccagaagtaaatttttgttt

SEQ ID NO: 223027 - DNA, 33 bp, Homo sapien
ctccccacctcttagcccaggaatgaaggcatg

SEQ ID NO: 223028 - DNA, 33 bp, Homo sapien
ctccccacctcttagctcaggaatgaaggcatg

SEQ ID NO: 223029 - DNA, 33 bp, Homo sapien
aactagaatacagttcccatgtacaggtgcttt

SEQ ID NO: 223030 - DNA, 33 bp, Homo sapien
aactagaatacagttctcatgtacaggtgcttt

SEQ ID NO: 223031 - DNA, 33 bp, Homo sapien
cttcgtattgtgactacagaacataaaagctgt

SEQ ID NO: 223032 - DNA, 33 bp, Homo sapien
cttcgtattgtgactatagaacataaaagctgt

SEQ ID NO: 223033 - DNA, 33 bp, Homo sapien
ggctgagtttctagataaagatttaattagtaa

SEQ ID NO: 223034 - DNA, 33 bp, Homo sapien
ggctgagtttctagattaagatttaattagtaa

SEQ ID NO: 223035 - DNA, 33 bp, Homo sapien
tgagctctcttcatatgaattacactgttacaa

SEQ ID NO: 223036 - DNA, 33 bp, Homo sapien
tgagctctcttcatattaattacactgttacaa

SEQ ID NO: 223037 - DNA, 33 bp, Homo sapien
aaatatttcattacacagaaacattcatgatat

SEQ ID NO: 223038 - DNA, 33 bp, Homo sapien
aaatatttcattacacggaaacattcatgatat

SEQ ID NO: 223039 - DNA, 33 bp, Homo sapien
cactgcttactataccacccttcagtaaaaaga

SEQ ID NO: 223040 - DNA, 33 bp, Homo sapien
cactgcttactataccgcccttcagtaaaaaga

SEQ ID NO: 223041 - DNA, 33 bp, Homo sapien
ctgtcttgtaggaggaaacttcaggcctcttaa

SEQ ID NO: 223042 - DNA, 33 bp, Homo sapien
ctgtcttgtaggaggagacttcaggcctcttaa

SEQ ID NO: 223043 - DNA, 33 bp, Homo sapien
gacacaacaacaacaaaacttcaggccactatc

SEQ ID NO: 223044 - DNA, 33 bp, Homo sapien
gacacaacaacaacaacacttcaggccactatc

SEQ ID NO: 223045 - DNA, 33 bp, Homo sapien
atattccttcaaagcccagtttgctgagggttt

SEQ ID NO: 223046 - DNA, 33 bp, Homo sapien
atattccttcaaagcctagtttgctgagggttt

SEQ ID NO: 223047 - DNA, 33 bp, Homo sapien
gaatatacttcagaataataacagtcatttatg

SEQ ID NO: 223048 - DNA, 33 bp, Homo sapien
gaatatacttcagaatgataacagtcatttatg

SEQ ID NO: 223049 - DNA, 33 bp, Homo sapien
tctcttgctgccaccactcttaagccttggctt

SEQ ID NO: 223050 - DNA, 33 bp, Homo sapien
tctcttgctgccaccattcttaagccttggctt

SEQ ID NO: 223051 - DNA, 33 bp, Homo sapien
agacaaaaatgatgaactacctagtgtctttac

SEQ ID NO: 223052 - DNA, 33 bp, Homo sapien
agacaaaaatgatgaattacctagtgtctttac

SEQ ID NO: 223053 - DNA, 33 bp, Homo sapien
aacacagaagtaacttcaagtaaggagaaatgt

SEQ ID NO: 223054 - DNA, 33 bp, Homo sapien
aacacagaagtaacttgaagtaaggagaaatgt

SEQ ID NO: 223055 - DNA, 33 bp, Homo sapien
cagggacccaaaatgacgttgcttacaaatcta

SEQ ID NO: 223056 - DNA, 33 bp, Homo sapien
cagggacccaaaatgatgttgcttacaaatcta

SEQ ID NO: 223057 - DNA, 33 bp, Homo sapien
cagcatgagtgatgcacaagatgggtgatttct

SEQ ID NO: 223058 - DNA, 33 bp, Homo sapien
cagcatgagtgatgcagaagatgggtgatttct

SEQ ID NO: 223059 - DNA, 33 bp, Homo sapien
atggttaacaaagcgaagagaagcaccactcaa

SEQ ID NO: 223060 - DNA, 33 bp, Homo sapien
atggttaacaaagcgaggagaagcaccactcaa

SEQ ID NO: 223061 - DNA, 33 bp, Homo sapien
ccttctttctaaggggaagacaatatccttcct

SEQ ID NO: 223062 - DNA, 33 bp, Homo sapien
ccttctttctaagggggagacaatatccttcct

SEQ ID NO: 223063 - DNA, 33 bp, Homo sapien
aacagtggatgacacacggcctgaaaccggtca

SEQ ID NO: 223064 - DNA, 33 bp, Homo sapien
aacagtggatgacacatggcctgaaaccggtca

SEQ ID NO: 223065 - DNA, 33 bp, Homo sapien
aggggtcagaacaggtcaataagagcaccggag

SEQ ID NO: 223066 - DNA, 33 bp, Homo sapien
aggggtcagaacaggtgaataagagcaccggag

SEQ ID NO: 223067 - DNA, 33 bp, Homo sapien
gtgcacagaccaatgtaaaaaaagctgtggggg

SEQ ID NO: 223068 - DNA, 33 bp, Homo sapien
gtgcacagaccaatgtgaaaaaagctgtggggg

SEQ ID NO: 223069 - DNA, 33 bp, Homo sapien
cccattgaggaaatacaaaagatcttagagaga

SEQ ID NO: 223070 - DNA, 33 bp, Homo sapien
cccattgaggaaatacgaaagatcttagagaga

SEQ ID NO: 223071 - DNA, 33 bp, Homo sapien
gttttgaagaggaaaaactataaaatcagaggg

SEQ ID NO: 223072 - DNA, 33 bp, Homo sapien
gttttgaagaggaaaagctataaaatcagaggg

SEQ ID NO: 223073 - DNA, 33 bp, Homo sapien
tgtgcctcgcatgcaacgtgtgtttaaataacc

SEQ ID NO: 223074 - DNA, 33 bp, Homo sapien
tgtgcctcgcatgcaatgtgtgtttaaataacc

SEQ ID NO: 223075 - DNA, 33 bp, Homo sapien
taggtttggcatggagaaaaatgaagaaagata

SEQ ID NO: 223076 - DNA, 33 bp, Homo sapien
taggtttggcatggaggaaaatgaagaaagata

SEQ ID NO: 223077 - DNA, 33 bp, Homo sapien
atgatttctgtaacacagagggtatggcaaggg

SEQ ID NO: 223078 - DNA, 33 bp, Homo sapien
atgatttctgtaacacggagggtatggcaaggg

SEQ ID NO: 223079 - DNA, 33 bp, Homo sapien
ttcttctggagaatgacagccagacatgttagc

SEQ ID NO: 223080 - DNA, 33 bp, Homo sapien
ttcttctggagaatgagagccagacatgttagc

SEQ ID NO: 223081 - DNA, 33 bp, Homo sapien
gctaggcatgatggtacgtaagtcccagattta

SEQ ID NO: 223082 - DNA, 33 bp, Homo sapien
gctaggcatgatggtatgtaagtcccagattta

SEQ ID NO: 223083 - DNA, 33 bp, Homo sapien
ttgctgtagttctccaaatgggctcttagaaca

SEQ ID NO: 223084 - DNA, 33 bp, Homo sapien
ttgctgtagttctccagatgggctcttagaaca

SEQ ID NO: 223085 - DNA, 33 bp, Homo sapien
agaaattgctgaagacacagtggatattttggc

SEQ ID NO: 223086 - DNA, 33 bp, Homo sapien
agaaattgctgaagacccagtggatattttggc

SEQ ID NO: 223087 - DNA, 33 bp, Homo sapien
atcattaacagttatacgccaggaatggtgaat

SEQ ID NO: 223088 - DNA, 33 bp, Homo sapien
atcattaacagttataggccaggaatggtgaat

SEQ ID NO: 223089 - DNA, 33 bp, Homo sapien
tatcttatatagtccacaccttgagttttatgt

SEQ ID NO: 223090 - DNA, 33 bp, Homo sapien
tatcttatatagtccagaccttgagttttatgt

SEQ ID NO: 223091 - DNA, 33 bp, Homo sapien
agtgtcactgtctttcacctccacatcttgtcc

SEQ ID NO: 223092 - DNA, 33 bp, Homo sapien
agtgtcactgtctttcgcctccacatcttgtcc

SEQ ID NO: 223093 - DNA, 33 bp, Homo sapien
tggttctagatggccaaacttgctgctttgaag

SEQ ID NO: 223094 - DNA, 33 bp, Homo sapien
tggttctagatggccagacttgctgctttgaag

SEQ ID NO: 223095 - DNA, 33 bp, Homo sapien
catgccctctcaaacaaaaaaatcaacttaaaa

SEQ ID NO: 223096 - DNA, 33 bp, Homo sapien
catgccctctcaaacagaaaaatcaacttaaaa

SEQ ID NO: 223097 - DNA, 33 bp, Homo sapien
tagcacaatgccttgaactatttggcaatattg

SEQ ID NO: 223098 - DNA, 33 bp, Homo sapien
tagcacaatgccttgatctatttggcaatattg

SEQ ID NO: 223099 - DNA, 33 bp, Homo sapien
tactagtgcaaaggccagactacacggcacaaa

SEQ ID NO: 223100 - DNA, 33 bp, Homo sapien
tactagtgcaaaggccggactacacggcacaaa

SEQ ID NO: 223101 - DNA, 33 bp, Homo sapien
tggcttcttttctataaatagctatgtgtgcat

SEQ ID NO: 223102 - DNA, 33 bp, Homo sapien
tggcttcttttctatagatagctatgtgtgcat

SEQ ID NO: 223103 - DNA, 33 bp, Homo sapien
tctgcctggcccttacagacaactgagtttgaa

SEQ ID NO: 223104 - DNA, 33 bp, Homo sapien
tctgcctggcccttacggacaactgagtttgaa

SEQ ID NO: 223105 - DNA, 33 bp, Homo sapien
acactgttcattgaccagagtcacagagaaaat

SEQ ID NO: 223106 - DNA, 33 bp, Homo sapien
acactgttcattgaccggagtcacagagaaaat

SEQ ID NO: 223107 - DNA, 33 bp, Homo sapien
aatatctgccttcacacagttgttaaagttcaa

SEQ ID NO: 223108 - DNA, 33 bp, Homo sapien
aatatctgccttcacagagttgttaaagttcaa

SEQ ID NO: 223109 - DNA, 33 bp, Homo sapien
gagaagcacagtaagaagcaatggtgggcccaa

SEQ ID NO: 223110 - DNA, 33 bp, Homo sapien
gagaagcacagtaagaggcaatggtgggcccaa

SEQ ID NO: 223111 - DNA, 33 bp, Homo sapien
cattcccgcaatgcaaatgaaacagctcttgtc

SEQ ID NO: 223112 - DNA, 33 bp, Homo sapien
cattcccgcaatgcaactgaaacagctcttgtc

SEQ ID NO: 223113 - DNA, 33 bp, Homo sapien
caaaatcccatggaccccttactggtaggcatg

SEQ ID NO: 223114 - DNA, 33 bp, Homo sapien
caaaatcccatggacctcttactggtaggcatg

SEQ ID NO: 223115 - DNA, 33 bp, Homo sapien
cagtggacagcgcactcaagaaggtaagactag

SEQ ID NO: 223116 - DNA, 33 bp, Homo sapien
cagtggacagcgcactgaagaaggtaagactag

SEQ ID NO: 223117 - DNA, 33 bp, Homo sapien
taagcctgctgtaggacacccaaacagggccaa

SEQ ID NO: 223118 - DNA, 33 bp, Homo sapien
taagcctgctgtaggagacccaaacagggccaa

SEQ ID NO: 223119 - DNA, 33 bp, Homo sapien
ggacctcaggagcaccagagtgagttgggaaat

SEQ ID NO: 223120 - DNA, 33 bp, Homo sapien
ggacctcaggagcaccggagtgagttgggaaat

SEQ ID NO: 223121 - DNA, 33 bp, Homo sapien
ttctcctctctccagccatattgaactttttaa

SEQ ID NO: 223122 - DNA, 33 bp, Homo sapien
ttctcctctctccagctatattgaactttttaa

SEQ ID NO: 223123 - DNA, 33 bp, Homo sapien
aaatcactcaacctcacactgtgcttttttttt

SEQ ID NO: 223124 - DNA, 33 bp, Homo sapien
aaatcactcaacctcagactgtgcttttttttt

SEQ ID NO: 223125 - DNA, 33 bp, Homo sapien
gactgtcagttagtagccatgtaaccttgagtg

SEQ ID NO: 223126 - DNA, 33 bp, Homo sapien
gactgtcagttagtagtcatgtaaccttgagtg

SEQ ID NO: 223127 - DNA, 33 bp, Homo sapien
ctctgctgaatcaatcaccagctcttcaataat

SEQ ID NO: 223128 - DNA, 33 bp, Homo sapien
ctctgctgaatcaatcgccagctcttcaataat

SEQ ID NO: 223129 - DNA, 33 bp, Homo sapien
cacaccttcatttcaacgtcagaaggctcagtt

SEQ ID NO: 223130 - DNA, 33 bp, Homo sapien
cacaccttcatttcaatgtcagaaggctcagtt

SEQ ID NO: 223131 - DNA, 33 bp, Homo sapien
ctgctgcccaaagacacgactccctacactaag

SEQ ID NO: 223132 - DNA, 33 bp, Homo sapien
ctgctgcccaaagacatgactccctacactaag

SEQ ID NO: 223133 - DNA, 33 bp, Homo sapien
gacccctctggagacactacttccagaacaccc

SEQ ID NO: 223134 - DNA, 33 bp, Homo sapien
gacccctctggagacattacttccagaacaccc

SEQ ID NO: 223135 - DNA, 33 bp, Homo sapien
acctgataatcgttaacctagcagcctgaaggc

SEQ ID NO: 223136 - DNA, 33 bp, Homo sapien
acctgataatcgttaagctagcagcctgaaggc

SEQ ID NO: 223137 - DNA, 33 bp, Homo sapien
tggtgacgatctcccccagtttcagcttgtata

SEQ ID NO: 223138 - DNA, 33 bp, Homo sapien
tggtgacgatctccccgagtttcagcttgtata

SEQ ID NO: 223139 - DNA, 33 bp, Homo sapien
ttgatcctagacaaagcaaatgtaaaatcatac

SEQ ID NO: 223140 - DNA, 33 bp, Homo sapien
ttgatcctagacaaaggaaatgtaaaatcatac

SEQ ID NO: 223141 - DNA, 33 bp, Homo sapien
tttggtgtggaagaaaaatggagttgcaaaaat

SEQ ID NO: 223142 - DNA, 33 bp, Homo sapien
tttggtgtggaagaaagatggagttgcaaaaat

SEQ ID NO: 223143 - DNA, 33 bp, Homo sapien
agaataatctggagaccataaagagagggagac

SEQ ID NO: 223144 - DNA, 33 bp, Homo sapien
agaataatctggagactataaagagagggagac

SEQ ID NO: 223145 - DNA, 33 bp, Homo sapien
tactgactgagacctaaaataagggcatctagg

SEQ ID NO: 223146 - DNA, 33 bp, Homo sapien
tactgactgagacctacaataagggcatctagg

SEQ ID NO: 223147 - DNA, 33 bp, Homo sapien
aaaggagagcagactgcaaagagtggaagtgag

SEQ ID NO: 223148 - DNA, 33 bp, Homo sapien
aaaggagagcagactggaaagagtggaagtgag

SEQ ID NO: 223149 - DNA, 33 bp, Homo sapien
cagcagtataagggaacgaacacatggctcttc

SEQ ID NO: 223150 - DNA, 33 bp, Homo sapien
cagcagtataagggaatgaacacatggctcttc

SEQ ID NO: 223151 - DNA, 33 bp, Homo sapien
aatctggagttgaggcacatagagagtcaatag

SEQ ID NO: 223152 - DNA, 33 bp, Homo sapien
aatctggagttgaggcgcatagagagtcaatag

SEQ ID NO: 223153 - DNA, 33 bp, Homo sapien
tagtggggagaaattcacaaggaagagagtggt

SEQ ID NO: 223154 - DNA, 33 bp, Homo sapien
tagtggggagaaattcgcaaggaagagagtggt

SEQ ID NO: 223155 - DNA, 33 bp, Homo sapien
ctctgccactcaatccgatccctagttcccgag

SEQ ID NO: 223156 - DNA, 33 bp, Homo sapien
ctctgccactcaatcctatccctagttcccgag

SEQ ID NO: 223157 - DNA, 33 bp, Homo sapien
tggccatgatcatttgcagacctgtggtgtcac

SEQ ID NO: 223158 - DNA, 33 bp, Homo sapien
tggccatgatcatttgtagacctgtggtgtcac

SEQ ID NO: 223159 - DNA, 33 bp, Homo sapien
aacggccattttaatgaaagacactggggacat

SEQ ID NO: 223160 - DNA, 33 bp, Homo sapien
aacggccattttaatggaagacactggggacat

SEQ ID NO: 223161 - DNA, 33 bp, Homo sapien
tagtgactcagtgaaggaaatgagaaaaagtga

SEQ ID NO: 223162 - DNA, 33 bp, Homo sapien
tagtgactcagtgaagtaaatgagaaaaagtga

SEQ ID NO: 223163 - DNA, 33 bp, Homo sapien
tagctacatattgttaaacttccagtcttctgc

SEQ ID NO: 223164 - DNA, 33 bp, Homo sapien
tagctacatattgttacacttccagtcttctgc

SEQ ID NO: 223165 - DNA, 33 bp, Homo sapien
gcagaggtttagttaaaggaagtttgaggctct

SEQ ID NO: 223166 - DNA, 33 bp, Homo sapien
gcagaggtttagttaacggaagtttgaggctct

SEQ ID NO: 223167 - DNA, 33 bp, Homo sapien
taggtagacattgttacgcccattttgtaggat

SEQ ID NO: 223168 - DNA, 33 bp, Homo sapien
taggtagacattgttatgcccattttgtaggat

SEQ ID NO: 223169 - DNA, 33 bp, Homo sapien
ttttcctgtgctttccagatttgaaatctacgt

SEQ ID NO: 223170 - DNA, 33 bp, Homo sapien
ttttcctgtgctttccggatttgaaatctacgt

SEQ ID NO: 223171 - DNA, 33 bp, Homo sapien
tccttactccatttaccagatggaagcctgccc

SEQ ID NO: 223172 - DNA, 33 bp, Homo sapien
tccttactccatttactagatggaagcctgccc

SEQ ID NO: 223173 - DNA, 33 bp, Homo sapien
aggctctacttggaaaacctttaagctcttttc

SEQ ID NO: 223174 - DNA, 33 bp, Homo sapien
aggctctacttggaaaccctttaagctcttttc

SEQ ID NO: 223175 - DNA, 33 bp, Homo sapien
caacagacagctagcaaattctaagaactcaat

SEQ ID NO: 223176 - DNA, 33 bp, Homo sapien
caacagacagctagcacattctaagaactcaat

SEQ ID NO: 223177 - DNA, 33 bp, Homo sapien
tatatatgagataacaataacatcctccacagg

SEQ ID NO: 223178 - DNA, 33 bp, Homo sapien
tatatatgagataacagtaacatcctccacagg

SEQ ID NO: 223179 - DNA, 33 bp, Homo sapien
atctctttcaggaaaaccatcataagctcatct

SEQ ID NO: 223180 - DNA, 33 bp, Homo sapien
atctctttcaggaaaatcatcataagctcatct

SEQ ID NO: 223181 - DNA, 33 bp, Homo sapien
aaactagtaagacgaaattattgggtatcgaac

SEQ ID NO: 223182 - DNA, 33 bp, Homo sapien
aaactagtaagacgaagttattgggtatcgaac

SEQ ID NO: 223183 - DNA, 33 bp, Homo sapien
gctgaatttggtttgcagacgacttttgtatca

SEQ ID NO: 223184 - DNA, 33 bp, Homo sapien
gctgaatttggtttgcggacgacttttgtatca

SEQ ID NO: 223185 - DNA, 33 bp, Homo sapien
cttcacagtttccacaataccctgggaggtgat

SEQ ID NO: 223186 - DNA, 33 bp, Homo sapien
cttcacagtttccacagtaccctgggaggtgat

SEQ ID NO: 223187 - DNA, 33 bp, Homo sapien
cgatcatattttaccaatgaggaaagcaaggcc

SEQ ID NO: 223188 - DNA, 33 bp, Homo sapien
cgatcatattttaccagtgaggaaagcaaggcc

SEQ ID NO: 223189 - DNA, 33 bp, Homo sapien
tccccttctattaatacctccaacttcatggct

SEQ ID NO: 223190 - DNA, 33 bp, Homo sapien
tccccttctattaatatctccaacttcatggct

SEQ ID NO: 223191 - DNA, 33 bp, Homo sapien
agtaggatttgaatcaggttacgttattttcta

SEQ ID NO: 223192 - DNA, 33 bp, Homo sapien
agtaggatttgaatcatgttacgttattttcta

SEQ ID NO: 223193 - DNA, 33 bp, Homo sapien
actgagccattgccaactggtaaagaaatgaaa

SEQ ID NO: 223194 - DNA, 33 bp, Homo sapien
actgagccattgccaattggtaaagaaatgaaa

SEQ ID NO: 223195 - DNA, 33 bp, Homo sapien
tggtgatcaagtcttacaattatgggagagttt

SEQ ID NO: 223196 - DNA, 33 bp, Homo sapien
tggtgatcaagtcttagaattatgggagagttt

SEQ ID NO: 223197 - DNA, 33 bp, Homo sapien
gcccaggtatgagttccataatccttataatgc

SEQ ID NO: 223198 - DNA, 33 bp, Homo sapien
gcccaggtatgagttctataatccttataatgc

SEQ ID NO: 223199 - DNA, 33 bp, Homo sapien
ctgggtcagacgatagcaaggatccctgtaagg

SEQ ID NO: 223200 - DNA, 33 bp, Homo sapien
ctgggtcagacgatagtaaggatccctgtaagg

SEQ ID NO: 223201 - DNA, 33 bp, Homo sapien
cagtgagagaacaacaacactccacaggtctaa

SEQ ID NO: 223202 - DNA, 33 bp, Homo sapien
cagtgagagaacaacaccactccacaggtctaa

SEQ ID NO: 223203 - DNA, 33 bp, Homo sapien
tctctaattaataatcaccacctgtagtgccca

SEQ ID NO: 223204 - DNA, 33 bp, Homo sapien
tctctaattaataatcgccacctgtagtgccca

SEQ ID NO: 223205 - DNA, 33 bp, Homo sapien
gccatttggagccacaaagcaccggccgtccat

SEQ ID NO: 223206 - DNA, 33 bp, Homo sapien
gccatttggagccacagagcaccggccgtccat

SEQ ID NO: 223207 - DNA, 33 bp, Homo sapien
ttctaggtggtccagcgctcgctgtgccctgat

SEQ ID NO: 223208 - DNA, 33 bp, Homo sapien
ttctaggtggtccagctctcgctgtgccctgat

SEQ ID NO: 223209 - DNA, 33 bp, Homo sapien
cttccggttcgtcttgacaacgtgtgtgaaggg

SEQ ID NO: 223210 - DNA, 33 bp, Homo sapien
cttccggttcgtcttggcaacgtgtgtgaaggg

SEQ ID NO: 223211 - DNA, 33 bp, Homo sapien
gtaccccaccttattgcatgactggttgcctat

SEQ ID NO: 223212 - DNA, 33 bp, Homo sapien
gtaccccaccttattgtatgactggttgcctat

SEQ ID NO: 223213 - DNA, 33 bp, Homo sapien
agcacagccaggtttacaggacacagcttgtca

SEQ ID NO: 223214 - DNA, 33 bp, Homo sapien
agcacagccaggtttataggacacagcttgtca

SEQ ID NO: 223215 - DNA, 33 bp, Homo sapien
gtctcagttactccccaacctgtaactctacta

SEQ ID NO: 223216 - DNA, 33 bp, Homo sapien
gtctcagttactcccccacctgtaactctacta

SEQ ID NO: 223217 - DNA, 33 bp, Homo sapien
gcttggtgctgttcaaaatgaatcccgtttctc

SEQ ID NO: 223218 - DNA, 33 bp, Homo sapien
gcttggtgctgttcaacatgaatcccgtttctc

SEQ ID NO: 223219 - DNA, 33 bp, Homo sapien
gagagatgtctcttcaaaaagatctgtggaaga

SEQ ID NO: 223220 - DNA, 33 bp, Homo sapien
gagagatgtctcttcagaaagatctgtggaaga

SEQ ID NO: 223221 - DNA, 33 bp, Homo sapien
ggaaaggaataagggaagtttaacagcaccaga

SEQ ID NO: 223222 - DNA, 33 bp, Homo sapien
ggaaaggaataagggaggtttaacagcaccaga

SEQ ID NO: 223223 - DNA, 33 bp, Homo sapien
tgaaatgcagcagaaaagaaaaggaataaacat

SEQ ID NO: 223224 - DNA, 33 bp, Homo sapien
tgaaatgcagcagaaaggaaaaggaataaacat

SEQ ID NO: 223225 - DNA, 33 bp, Homo sapien
ggaaggagccagtaacaagggtgacttggagct

SEQ ID NO: 223226 - DNA, 33 bp, Homo sapien
ggaaggagccagtaacgagggtgacttggagct

SEQ ID NO: 223227 - DNA, 33 bp, Homo sapien
cagcctgaaccctagtaaagacctgagtcggac

SEQ ID NO: 223228 - DNA, 33 bp, Homo sapien
cagcctgaaccctagtcaagacctgagtcggac

SEQ ID NO: 223229 - DNA, 33 bp, Homo sapien
gtcaataacacttggccagaaggacaggcaacc

SEQ ID NO: 223230 - DNA, 33 bp, Homo sapien
gtcaataacacttggctagaaggacaggcaacc

SEQ ID NO: 223231 - DNA, 33 bp, Homo sapien
gattcccattcagaggaagatattcaggcccct

SEQ ID NO: 223232 - DNA, 33 bp, Homo sapien
gattcccattcagagggagatattcaggcccct

SEQ ID NO: 223233 - DNA, 33 bp, Homo sapien
cctggttattggttcaaataaaataatgctgct

SEQ ID NO: 223234 - DNA, 33 bp, Homo sapien
cctggttattggttcagataaaataatgctgct

SEQ ID NO: 223235 - DNA, 33 bp, Homo sapien
tgtcaacagtagttctcaatcttttgggtaaca

SEQ ID NO: 223236 - DNA, 33 bp, Homo sapien
tgtcaacagtagttctgaatcttttgggtaaca

SEQ ID NO: 223237 - DNA, 33 bp, Homo sapien
ccatcaagtgaaggtaactttgtttgcttaccc

SEQ ID NO: 223238 - DNA, 33 bp, Homo sapien
ccatcaagtgaaggtacctttgtttgcttaccc

SEQ ID NO: 223239 - DNA, 33 bp, Homo sapien
gttactataattccacaggtctttgcaacctgt

SEQ ID NO: 223240 - DNA, 33 bp, Homo sapien
gttactataattccacgggtctttgcaacctgt

SEQ ID NO: 223241 - DNA, 33 bp, Homo sapien
attatgatcacaaatgcaagtcttacccagaga

SEQ ID NO: 223242 - DNA, 33 bp, Homo sapien
attatgatcacaaatggaagtcttacccagaga

SEQ ID NO: 223243 - DNA, 33 bp, Homo sapien
ttcttagaaccccgtcaacgcagcagcacctga

SEQ ID NO: 223244 - DNA, 33 bp, Homo sapien
ttcttagaaccccgtcgacgcagcagcacctga

SEQ ID NO: 223245 - DNA, 33 bp, Homo sapien
acatttgtttacaatacgagaactgaaacaaga

SEQ ID NO: 223246 - DNA, 33 bp, Homo sapien
acatttgtttacaatatgagaactgaaacaaga

SEQ ID NO: 223247 - DNA, 33 bp, Homo sapien
cgagtgtttgaacccaataaaggtctcttgcaa

SEQ ID NO: 223248 - DNA, 33 bp, Homo sapien
cgagtgtttgaacccagtaaaggtctcttgcaa

SEQ ID NO: 223249 - DNA, 33 bp, Homo sapien
gacttttttatccacaagcccacaaagatgcag

SEQ ID NO: 223250 - DNA, 33 bp, Homo sapien
gacttttttatccacaggcccacaaagatgcag

SEQ ID NO: 223251 - DNA, 33 bp, Homo sapien
aggcctgggtctacaacgaatatgacaagcgga

SEQ ID NO: 223252 - DNA, 33 bp, Homo sapien
aggcctgggtctacaatgaatatgacaagcgga

SEQ ID NO: 223253 - DNA, 33 bp, Homo sapien
tcaccctttgtgaccaatgcactaaattctgac

SEQ ID NO: 223254 - DNA, 33 bp, Homo sapien
tcaccctttgtgaccagtgcactaaattctgac

SEQ ID NO: 223255 - DNA, 33 bp, Homo sapien
ccaaggtgacgccttgcatttgcaaacaccaga

SEQ ID NO: 223256 - DNA, 33 bp, Homo sapien
ccaaggtgacgccttgtatttgcaaacaccaga

SEQ ID NO: 223257 - DNA, 33 bp, Homo sapien
gatgatttataaagtacaccagaggaagtgttt

SEQ ID NO: 223258 - DNA, 33 bp, Homo sapien
gatgatttataaagtataccagaggaagtgttt

SEQ ID NO: 223259 - DNA, 33 bp, Homo sapien
taaaatctcacttcacacttactgggtggctgg

SEQ ID NO: 223260 - DNA, 33 bp, Homo sapien
taaaatctcacttcacgcttactgggtggctgg

SEQ ID NO: 223261 - DNA, 33 bp, Homo sapien
tgcatgaatctcaggaacagaatcccaaaagcc

SEQ ID NO: 223262 - DNA, 33 bp, Homo sapien
tgcatgaatctcaggagcagaatcccaaaagcc

SEQ ID NO: 223263 - DNA, 33 bp, Homo sapien
gcattgtagtgactgccccagaaatgtaggttc

SEQ ID NO: 223264 - DNA, 33 bp, Homo sapien
gcattgtagtgactgctccagaaatgtaggttc

SEQ ID NO: 223265 - DNA, 33 bp, Homo sapien
tctgctcacggtcccacgcagataatttgctct

SEQ ID NO: 223266 - DNA, 33 bp, Homo sapien
tctgctcacggtcccatgcagataatttgctct

SEQ ID NO: 223267 - DNA, 33 bp, Homo sapien
ctcactgcttctggaaacttaatctgttctttt

SEQ ID NO: 223268 - DNA, 33 bp, Homo sapien
ctcactgcttctggaatcttaatctgttctttt

SEQ ID NO: 223269 - DNA, 33 bp, Homo sapien
cggctcgcttcaccagaactggatctatgtcgc

SEQ ID NO: 223270 - DNA, 33 bp, Homo sapien
cggctcgcttcaccaggactggatctatgtcgc

SEQ ID NO: 223271 - DNA, 33 bp, Homo sapien
ttgcacagcagggtgaccttgtggaattcatta

SEQ ID NO: 223272 - DNA, 33 bp, Homo sapien
ttgcacagcagggtgatcttgtggaattcatta

SEQ ID NO: 223273 - DNA, 33 bp, Homo sapien
tatttcttcatgataagattcaggctttgcttc

SEQ ID NO: 223274 - DNA, 33 bp, Homo sapien
tatttcttcatgataatattcaggctttgcttc

SEQ ID NO: 223275 - DNA, 33 bp, Homo sapien
tgcttggttggtttcccagagcctggtcacccc

SEQ ID NO: 223276 - DNA, 33 bp, Homo sapien
tgcttggttggtttcctagagcctggtcacccc

SEQ ID NO: 223277 - DNA, 33 bp, Homo sapien
tttgactcacaggcatcaggtggcagtgatggg

SEQ ID NO: 223278 - DNA, 33 bp, Homo sapien
tttgactcacaggcatgaggtggcagtgatggg

SEQ ID NO: 223279 - DNA, 33 bp, Homo sapien
cctatccagaatctgaaaacttatctctgccct

SEQ ID NO: 223280 - DNA, 33 bp, Homo sapien
cctatccagaatctgacaacttatctctgccct

SEQ ID NO: 223281 - DNA, 33 bp, Homo sapien
gtgaggcccgggataacagcgatcctggtggga

SEQ ID NO: 223282 - DNA, 33 bp, Homo sapien
gtgaggcccgggataagagcgatcctggtggga

SEQ ID NO: 223283 - DNA, 33 bp, Homo sapien
aatttaataggctagaccaacagtaaagtaact

SEQ ID NO: 223284 - DNA, 33 bp, Homo sapien
aatttaataggctagagcaacagtaaagtaact

SEQ ID NO: 223285 - DNA, 33 bp, Homo sapien
atataaaaattcacccaacaggtgccacttcct

SEQ ID NO: 223286 - DNA, 33 bp, Homo sapien
atataaaaattcacccgacaggtgccacttcct

SEQ ID NO: 223287 - DNA, 33 bp, Homo sapien
cagcgttcccaggagacaagtggcttaagcaaa

SEQ ID NO: 223288 - DNA, 33 bp, Homo sapien
cagcgttcccaggagagaagtggcttaagcaaa

SEQ ID NO: 223289 - DNA, 33 bp, Homo sapien
ctttcttgacctaatccgagcccgtagcttccc

SEQ ID NO: 223290 - DNA, 33 bp, Homo sapien
ctttcttgacctaatctgagcccgtagcttccc

SEQ ID NO: 223291 - DNA, 33 bp, Homo sapien
ttcttaagaaacttgaacttgagtgaagggcag

SEQ ID NO: 223292 - DNA, 33 bp, Homo sapien
ttcttaagaaacttgagcttgagtgaagggcag

SEQ ID NO: 223293 - DNA, 33 bp, Homo sapien
tcccttttcataatgggatcattctcccaggga

SEQ ID NO: 223294 - DNA, 33 bp, Homo sapien
tcccttttcataatggtatcattctcccaggga

SEQ ID NO: 223295 - DNA, 33 bp, Homo sapien
cttctcattttacagacgtggaagcacaaggcc

SEQ ID NO: 223296 - DNA, 33 bp, Homo sapien
cttctcattttacagatgtggaagcacaaggcc

SEQ ID NO: 223297 - DNA, 33 bp, Homo sapien
agaatgcatttgaccccgcgtaggcaccatcag

SEQ ID NO: 223298 - DNA, 33 bp, Homo sapien
agaatgcatttgaccctgcgtaggcaccatcag

SEQ ID NO: 223299 - DNA, 33 bp, Homo sapien
tacatttccgtttctccaccagatggaaagtgc

SEQ ID NO: 223300 - DNA, 33 bp, Homo sapien
tacatttccgtttctctaccagatggaaagtgc

SEQ ID NO: 223301 - DNA, 33 bp, Homo sapien
acactgatgtgtgtacaacagtgaccacaacag

SEQ ID NO: 223302 - DNA, 33 bp, Homo sapien
acactgatgtgtgtaccacagtgaccacaacag

SEQ ID NO: 223303 - DNA, 33 bp, Homo sapien
tgtgctgagccctgtcaaaatgtcatctcactg

SEQ ID NO: 223304 - DNA, 33 bp, Homo sapien
tgtgctgagccctgtccaaatgtcatctcactg

SEQ ID NO: 223305 - DNA, 33 bp, Homo sapien
agcacagtactgataaccttcaatcatatatgg

SEQ ID NO: 223306 - DNA, 33 bp, Homo sapien
agcacagtactgataatcttcaatcatatatgg

SEQ ID NO: 223307 - DNA, 33 bp, Homo sapien
gttgtgtttccagctccaaaactaggtaaagag

SEQ ID NO: 223308 - DNA, 33 bp, Homo sapien
gttgtgtttccagctctaaaactaggtaaagag

SEQ ID NO: 223309 - DNA, 33 bp, Homo sapien
tatctgctcaccaagaataagacagaaaacaat

SEQ ID NO: 223310 - DNA, 33 bp, Homo sapien
tatctgctcaccaagagtaagacagaaaacaat

SEQ ID NO: 223311 - DNA, 33 bp, Homo sapien
gcagtgttgtctcccacgtggcagttgtacaac

SEQ ID NO: 223312 - DNA, 33 bp, Homo sapien
gcagtgttgtctcccatgtggcagttgtacaac

SEQ ID NO: 223313 - DNA, 33 bp, Homo sapien
ggtgtaattttgtccaatagtcaatacattgct

SEQ ID NO: 223314 - DNA, 33 bp, Homo sapien
ggtgtaattttgtccagtagtcaatacattgct

SEQ ID NO: 223315 - DNA, 33 bp, Homo sapien
aaacagtttaaaatgcacatgtcattagtgtgc

SEQ ID NO: 223316 - DNA, 33 bp, Homo sapien
aaacagtttaaaatgcgcatgtcattagtgtgc

SEQ ID NO: 223317 - DNA, 33 bp, Homo sapien
ctgtcacattgttcccaaaattgctactctttc

SEQ ID NO: 223318 - DNA, 33 bp, Homo sapien
ctgtcacattgttcccgaaattgctactctttc

SEQ ID NO: 223319 - DNA, 33 bp, Homo sapien
tttgtttatagattgacggacatttaaattgtt

SEQ ID NO: 223320 - DNA, 33 bp, Homo sapien
tttgtttatagattgatggacatttaaattgtt

SEQ ID NO: 223321 - DNA, 33 bp, Homo sapien
ttctgggaccccaacaaatgagtgtgcaaagac

SEQ ID NO: 223322 - DNA, 33 bp, Homo sapien
ttctgggaccccaacacatgagtgtgcaaagac

SEQ ID NO: 223323 - DNA, 33 bp, Homo sapien
ggtgatggagtcaacccggggcggctgaggaag

SEQ ID NO: 223324 - DNA, 33 bp, Homo sapien
ggtgatggagtcaacctggggcggctgaggaag

SEQ ID NO: 223325 - DNA, 33 bp, Homo sapien
ggctcttcctgcacgacggtcagggtggaagaa

SEQ ID NO: 223326 - DNA, 33 bp, Homo sapien
ggctcttcctgcacgatggtcagggtggaagaa

SEQ ID NO: 223327 - DNA, 33 bp, Homo sapien
gcctacattacagtgaagacagggctatacctc

SEQ ID NO: 223328 - DNA, 33 bp, Homo sapien
gcctacattacagtgaggacagggctatacctc

SEQ ID NO: 223329 - DNA, 33 bp, Homo sapien
tttgctttggccatcaacgaaaggaggtaaggg

SEQ ID NO: 223330 - DNA, 33 bp, Homo sapien
tttgctttggccatcagcgaaaggaggtaaggg

SEQ ID NO: 223331 - DNA, 33 bp, Homo sapien
ccctgaatgtgtgccccatcttttctcccacct

SEQ ID NO: 223332 - DNA, 33 bp, Homo sapien
ccctgaatgtgtgccctatcttttctcccacct

SEQ ID NO: 223333 - DNA, 33 bp, Homo sapien
acacctttttgaaagaccaaggtgcagagaaac

SEQ ID NO: 223334 - DNA, 33 bp, Homo sapien
acacctttttgaaagatcaaggtgcagagaaac

SEQ ID NO: 223335 - DNA, 33 bp, Homo sapien
aatgcagatgtgaatacagtcgactttaccaag

SEQ ID NO: 223336 - DNA, 33 bp, Homo sapien
aatgcagatgtgaatatagtcgactttaccaag

SEQ ID NO: 223337 - DNA, 33 bp, Homo sapien
tgggcaactgaagccgaaaagaaaggaagtctc

SEQ ID NO: 223338 - DNA, 33 bp, Homo sapien
tgggcaactgaagccggaaagaaaggaagtctc

SEQ ID NO: 223339 - DNA, 33 bp, Homo sapien
gtgtcggggaacaggacgaagttgtagatcagt

SEQ ID NO: 223340 - DNA, 33 bp, Homo sapien
gtgtcggggaacaggatgaagttgtagatcagt

SEQ ID NO: 223341 - DNA, 33 bp, Homo sapien
tgtgagtagtatctgcactgatattacagaacg

SEQ ID NO: 223342 - DNA, 33 bp, Homo sapien
tgtgagtagtatctgcgctgatattacagaacg

SEQ ID NO: 223343 - DNA, 33 bp, Homo sapien
ttcctggtgacgtcaaactgtcttccacctgac

SEQ ID NO: 223344 - DNA, 33 bp, Homo sapien
ttcctggtgacgtcaagctgtcttccacctgac

SEQ ID NO: 223345 - DNA, 33 bp, Homo sapien
tatgtttatcttcttaagtacgagatttcttta

SEQ ID NO: 223346 - DNA, 33 bp, Homo sapien
tatgtttatcttcttaggtacgagatttcttta

SEQ ID NO: 223347 - DNA, 33 bp, Homo sapien
ggagcatacaagaagcactgtggtttaaaggaa

SEQ ID NO: 223348 - DNA, 33 bp, Homo sapien
ggagcatacaagaagcgctgtggtttaaaggaa

SEQ ID NO: 223349 - DNA, 33 bp, Homo sapien
gggtggagagaggagacgggagcagagcccatt

SEQ ID NO: 223350 - DNA, 33 bp, Homo sapien
gggtggagagaggagatgggagcagagcccatt

SEQ ID NO: 223351 - DNA, 33 bp, Homo sapien
acccactggattcctgaaactgcaatgggctct

SEQ ID NO: 223352 - DNA, 33 bp, Homo sapien
acccactggattcctgcaactgcaatgggctct

SEQ ID NO: 223353 - DNA, 33 bp, Homo sapien
tacattcacactcccccgcagacacacacagag

SEQ ID NO: 223354 - DNA, 33 bp, Homo sapien
tacattcacactcccctgcagacacacacagag

SEQ ID NO: 223355 - DNA, 33 bp, Homo sapien
attccagagagagaacagagtgtatgcaaaggc

SEQ ID NO: 223356 - DNA, 33 bp, Homo sapien
attccagagagagaactgagtgtatgcaaaggc

SEQ ID NO: 223357 - DNA, 33 bp, Homo sapien
accatgtgctaattctcaccaagcctccccatg

SEQ ID NO: 223358 - DNA, 33 bp, Homo sapien
accatgtgctaattcttaccaagcctccccatg

SEQ ID NO: 223359 - DNA, 33 bp, Homo sapien
atggagagaactaggaaagtgaggagaacccca

SEQ ID NO: 223360 - DNA, 33 bp, Homo sapien
atggagagaactaggagagtgaggagaacccca

SEQ ID NO: 223361 - DNA, 33 bp, Homo sapien
tctctgggtcctctcccctctgtagagaccagg

SEQ ID NO: 223362 - DNA, 33 bp, Homo sapien
tctctgggtcctctcctctctgtagagaccagg

SEQ ID NO: 223363 - DNA, 33 bp, Homo sapien
aacatgggcttcaaaacgttgtgcaatcaggca

SEQ ID NO: 223364 - DNA, 33 bp, Homo sapien
aacatgggcttcaaaatgttgtgcaatcaggca

SEQ ID NO: 223365 - DNA, 33 bp, Homo sapien
tttctttgccagtgtaactgcagccccttaacc

SEQ ID NO: 223366 - DNA, 33 bp, Homo sapien
tttctttgccagtgtagctgcagccccttaacc

SEQ ID NO: 223367 - DNA, 33 bp, Homo sapien
tgaaagtaaagctcagaattcgctggtttagag

SEQ ID NO: 223368 - DNA, 33 bp, Homo sapien
tgaaagtaaagctcaggattcgctggtttagag

SEQ ID NO: 223369 - DNA, 33 bp, Homo sapien
tttgaaaaccatcaacactctagtcctgttgac

SEQ ID NO: 223370 - DNA, 33 bp, Homo sapien
tttgaaaaccatcaacgctctagtcctgttgac

SEQ ID NO: 223371 - DNA, 33 bp, Homo sapien
gtaatcagctcaggaacgggctctacccagaga

SEQ ID NO: 223372 - DNA, 33 bp, Homo sapien
gtaatcagctcaggaatgggctctacccagaga

SEQ ID NO: 223373 - DNA, 33 bp, Homo sapien
tcctgcattattctctaagaatcttaccccacc

SEQ ID NO: 223374 - DNA, 33 bp, Homo sapien
tcctgcattattctctgagaatcttaccccacc

SEQ ID NO: 223375 - DNA, 33 bp, Homo sapien
cacctcgcccggccaacggaaactattctatat

SEQ ID NO: 223376 - DNA, 33 bp, Homo sapien
cacctcgcccggccaatggaaactattctatat

SEQ ID NO: 223377 - DNA, 33 bp, Homo sapien
gctatcataccttgtccctcagctagtcaatgg

SEQ ID NO: 223378 - DNA, 33 bp, Homo sapien
gctatcataccttgtcgctcagctagtcaatgg

SEQ ID NO: 223379 - DNA, 33 bp, Homo sapien
cataggaatctcaggaatcaaaaaggaaattat

SEQ ID NO: 223380 - DNA, 33 bp, Homo sapien
cataggaatctcaggagtcaaaaaggaaattat

SEQ ID NO: 223381 - DNA, 33 bp, Homo sapien
attttgcttctgtctagatagtgtcaattattg

SEQ ID NO: 223382 - DNA, 33 bp, Homo sapien
attttgcttctgtctatatagtgtcaattattg

SEQ ID NO: 223383 - DNA, 33 bp, Homo sapien
ataagttttgcaagaaagtcaagcgtgactagc

SEQ ID NO: 223384 - DNA, 33 bp, Homo sapien
ataagttttgcaagaacgtcaagcgtgactagc

SEQ ID NO: 223385 - DNA, 33 bp, Homo sapien
gcacacagaacaccccaagcatacaacattctt

SEQ ID NO: 223386 - DNA, 33 bp, Homo sapien
gcacacagaacaccccgagcatacaacattctt

SEQ ID NO: 223387 - DNA, 33 bp, Homo sapien
gcatttcttttgacgacaggttacattaatcca

SEQ ID NO: 223388 - DNA, 33 bp, Homo sapien
gcatttcttttgacgataggttacattaatcca

SEQ ID NO: 223389 - DNA, 33 bp, Homo sapien
ttttgtaatgccatccaaattaaggaattattg

SEQ ID NO: 223390 - DNA, 33 bp, Homo sapien
ttttgtaatgccatccgaattaaggaattattg

SEQ ID NO: 223391 - DNA, 33 bp, Homo sapien
aaacaaaaaacccagaagatgacaacagctgca

SEQ ID NO: 223392 - DNA, 33 bp, Homo sapien
aaacaaaaaacccagacgatgacaacagctgca

SEQ ID NO: 223393 - DNA, 33 bp, Homo sapien
agaatttcagaattcacgaggcatttggagtag

SEQ ID NO: 223394 - DNA, 33 bp, Homo sapien
agaatttcagaattcatgaggcatttggagtag

SEQ ID NO: 223395 - DNA, 33 bp, Homo sapien
agcaagtcctgaaaaaaagcacatcatctaaaa

SEQ ID NO: 223396 - DNA, 33 bp, Homo sapien
agcaagtcctgaaaaacagcacatcatctaaaa

SEQ ID NO: 223397 - DNA, 33 bp, Homo sapien
gacctcaatcaacaaaaagaatagtaaggacca

SEQ ID NO: 223398 - DNA, 33 bp, Homo sapien
gacctcaatcaacaaagagaatagtaaggacca

SEQ ID NO: 223399 - DNA, 33 bp, Homo sapien
gtgagacaactctgacaggggattctgacttga

SEQ ID NO: 223400 - DNA, 33 bp, Homo sapien
gtgagacaactctgacgggggattctgacttga

SEQ ID NO: 223401 - DNA, 33 bp, Homo sapien
actttataaattgtgacgcagtatgcaactgta

SEQ ID NO: 223402 - DNA, 33 bp, Homo sapien
actttataaattgtgatgcagtatgcaactgta

SEQ ID NO: 223403 - DNA, 33 bp, Homo sapien
gtgcctcaaagaaccaataaaagtcagtaagac

SEQ ID NO: 223404 - DNA, 33 bp, Homo sapien
gtgcctcaaagaaccagtaaaagtcagtaagac

SEQ ID NO: 223405 - DNA, 33 bp, Homo sapien
taaagataacgtatcactgaagaaaggtgattt

SEQ ID NO: 223406 - DNA, 33 bp, Homo sapien
taaagataacgtatcattgaagaaaggtgattt

SEQ ID NO: 223407 - DNA, 33 bp, Homo sapien
acattatatctaacccaaaacttgtaactaaaa

SEQ ID NO: 223408 - DNA, 33 bp, Homo sapien
acattatatctaaccccaaacttgtaactaaaa

SEQ ID NO: 223409 - DNA, 33 bp, Homo sapien
tccactttctttctcaaattcctgtctctcttt

SEQ ID NO: 223410 - DNA, 33 bp, Homo sapien
tccactttctttctcagattcctgtctctcttt

SEQ ID NO: 223411 - DNA, 33 bp, Homo sapien
tattgtggatattaacacttagtggatatacaa

SEQ ID NO: 223412 - DNA, 33 bp, Homo sapien
tattgtggatattaacccttagtggatatacaa

SEQ ID NO: 223413 - DNA, 33 bp, Homo sapien
gtgttttttagtgcaacgtgaggtttcatcgtg

SEQ ID NO: 223414 - DNA, 33 bp, Homo sapien
gtgttttttagtgcaatgtgaggtttcatcgtg

SEQ ID NO: 223415 - DNA, 33 bp, Homo sapien
tttttctgtatataccaaggcgataaatggttc

SEQ ID NO: 223416 - DNA, 33 bp, Homo sapien
tttttctgtatataccgaggcgataaatggttc

SEQ ID NO: 223417 - DNA, 33 bp, Homo sapien
tgatccctttcttttaagactgctgaggagtta

SEQ ID NO: 223418 - DNA, 33 bp, Homo sapien
tgatccctttcttttaggactgctgaggagtta

SEQ ID NO: 223419 - DNA, 33 bp, Homo sapien
tgctttactaaaccaacttgcttgtggatcatc

SEQ ID NO: 223420 - DNA, 33 bp, Homo sapien
tgctttactaaaccaagttgcttgtggatcatc

SEQ ID NO: 223421 - DNA, 33 bp, Homo sapien
tctactgaagtcaatacagttggtcttgctctg

SEQ ID NO: 223422 - DNA, 33 bp, Homo sapien
tctactgaagtcaatatagttggtcttgctctg

SEQ ID NO: 223423 - DNA, 33 bp, Homo sapien
taccatactatagttacgcaaggtgatactaca

SEQ ID NO: 223424 - DNA, 33 bp, Homo sapien
taccatactatagttatgcaaggtgatactaca

SEQ ID NO: 223425 - DNA, 33 bp, Homo sapien
gtattttattctctcaacagtctcttctgcaga

SEQ ID NO: 223426 - DNA, 33 bp, Homo sapien
gtattttattctctcagcagtctcttctgcaga

SEQ ID NO: 223427 - DNA, 33 bp, Homo sapien
tctgttcactaatcacaacttctgcatggatgg

SEQ ID NO: 223428 - DNA, 33 bp, Homo sapien
tctgttcactaatcaccacttctgcatggatgg

SEQ ID NO: 223429 - DNA, 33 bp, Homo sapien
gagggccagaggagtcactaacaaagagttact

SEQ ID NO: 223430 - DNA, 33 bp, Homo sapien
gagggccagaggagtcgctaacaaagagttact

SEQ ID NO: 223431 - DNA, 33 bp, Homo sapien
attctaaattttttagccattagtcaactagtt

SEQ ID NO: 223432 - DNA, 33 bp, Homo sapien
attctaaattttttagtcattagtcaactagtt

SEQ ID NO: 223433 - DNA, 33 bp, Homo sapien
agttctttctgtggaaatgagtacaactgaata

SEQ ID NO: 223434 - DNA, 33 bp, Homo sapien
agttctttctgtggaattgagtacaactgaata

SEQ ID NO: 223435 - DNA, 33 bp, Homo sapien
aggtgtcagcctgtgcgcttgggctgttttcct

SEQ ID NO: 223436 - DNA, 33 bp, Homo sapien
aggtgtcagcctgtgctcttgggctgttttcct

SEQ ID NO: 223437 - DNA, 33 bp, Homo sapien
ataaaaacagctggcactgacgtaacaaacata

SEQ ID NO: 223438 - DNA, 33 bp, Homo sapien
ataaaaacagctggcattgacgtaacaaacata

SEQ ID NO: 223439 - DNA, 33 bp, Homo sapien
tgatccaattaatatcactagaacactctgggt

SEQ ID NO: 223440 - DNA, 33 bp, Homo sapien
tgatccaattaatatcgctagaacactctgggt

SEQ ID NO: 223441 - DNA, 33 bp, Homo sapien
ggatatggcaaaggtggagaatggaagagaaga

SEQ ID NO: 223442 - DNA, 33 bp, Homo sapien
ggatatggcaaaggtgtagaatggaagagaaga

SEQ ID NO: 223443 - DNA, 33 bp, Homo sapien
ctctggcttctggatacgtggctgtatttgggg

SEQ ID NO: 223444 - DNA, 33 bp, Homo sapien
ctctggcttctggatatgtggctgtatttgggg

SEQ ID NO: 223445 - DNA, 33 bp, Homo sapien
ccaataatcttcctaagaaataaaatggtgggc

SEQ ID NO: 223446 - DNA, 33 bp, Homo sapien
ccaataatcttcctaataaataaaatggtgggc

SEQ ID NO: 223447 - DNA, 33 bp, Homo sapien
acaatatacacaaatacgcaacccaagataact

SEQ ID NO: 223448 - DNA, 33 bp, Homo sapien
acaatatacacaaatatgcaacccaagataact

SEQ ID NO: 223449 - DNA, 33 bp, Homo sapien
acactatagcaggagagatgacagttacacaaa

SEQ ID NO: 223450 - DNA, 33 bp, Homo sapien
acactatagcaggagatatgacagttacacaaa

SEQ ID NO: 223451 - DNA, 33 bp, Homo sapien
aaaaggtgattttcaacattctatatccaagcc

SEQ ID NO: 223452 - DNA, 33 bp, Homo sapien
aaaaggtgattttcaatattctatatccaagcc

SEQ ID NO: 223453 - DNA, 33 bp, Homo sapien
caacagattacaaaacaaatcaagccacccaac

SEQ ID NO: 223454 - DNA, 33 bp, Homo sapien
caacagattacaaaacgaatcaagccacccaac

SEQ ID NO: 223455 - DNA, 33 bp, Homo sapien
tcccagctactcacacaagtttgaggtgagagg

SEQ ID NO: 223456 - DNA, 33 bp, Homo sapien
tcccagctactcacacgagtttgaggtgagagg

SEQ ID NO: 223457 - DNA, 33 bp, Homo sapien
agaccttgagaatgctcagaaggagtggaaacc

SEQ ID NO: 223458 - DNA, 33 bp, Homo sapien
agaccttgagaatgcttagaaggagtggaaacc

SEQ ID NO: 223459 - DNA, 33 bp, Homo sapien
cctgaggggaattcaccaactctagaaacaaat

SEQ ID NO: 223460 - DNA, 33 bp, Homo sapien
cctgaggggaattcacgaactctagaaacaaat

SEQ ID NO: 223461 - DNA, 33 bp, Homo sapien
aaaaaatcagagagtaagttttgttgctgtttt

SEQ ID NO: 223462 - DNA, 33 bp, Homo sapien
aaaaaatcagagagtatgttttgttgctgtttt

SEQ ID NO: 223463 - DNA, 33 bp, Homo sapien
ttttgcataccttatcaaacctttctgcaaaat

SEQ ID NO: 223464 - DNA, 33 bp, Homo sapien
ttttgcataccttatcgaacctttctgcaaaat

SEQ ID NO: 223465 - DNA, 33 bp, Homo sapien
gacctcctgtaagaaacagggacatttcgattt

SEQ ID NO: 223466 - DNA, 33 bp, Homo sapien
gacctcctgtaagaaagagggacatttcgattt

SEQ ID NO: 223467 - DNA, 33 bp, Homo sapien
cagtgagatgaacaggaaaggtacctaattctg

SEQ ID NO: 223468 - DNA, 33 bp, Homo sapien
cagtgagatgaacaggcaaggtacctaattctg

SEQ ID NO: 223469 - DNA, 33 bp, Homo sapien
tgtgaataccaagacactcaaatctaattcaag

SEQ ID NO: 223470 - DNA, 33 bp, Homo sapien
tgtgaataccaagacagtcaaatctaattcaag

SEQ ID NO: 223471 - DNA, 33 bp, Homo sapien
gaatgttaattgtgacagatggagctaacccct

SEQ ID NO: 223472 - DNA, 33 bp, Homo sapien
gaatgttaattgtgactgatggagctaacccct

SEQ ID NO: 223473 - DNA, 33 bp, Homo sapien
tttcctctggctacaacaccaaaaaaattctcc

SEQ ID NO: 223474 - DNA, 33 bp, Homo sapien
tttcctctggctacaataccaaaaaaattctcc

SEQ ID NO: 223475 - DNA, 33 bp, Homo sapien
ttaagtaaaaataccaaacaggaatgctaaaca

SEQ ID NO: 223476 - DNA, 33 bp, Homo sapien
ttaagtaaaaataccagacaggaatgctaaaca

SEQ ID NO: 223477 - DNA, 33 bp, Homo sapien
ggatacattttagggacgagagaaattcaggtg

SEQ ID NO: 223478 - DNA, 33 bp, Homo sapien
ggatacattttagggatgagagaaattcaggtg

SEQ ID NO: 223479 - DNA, 33 bp, Homo sapien
gatataaagctctaagaatcagtcttgttccta

SEQ ID NO: 223480 - DNA, 33 bp, Homo sapien
gatataaagctctaagcatcagtcttgttccta

SEQ ID NO: 223481 - DNA, 33 bp, Homo sapien
gttacccatattctgcccccttcaaactccctt

SEQ ID NO: 223482 - DNA, 33 bp, Homo sapien
gttacccatattctgctcccttcaaactccctt

SEQ ID NO: 223483 - DNA, 33 bp, Homo sapien
ttcaaggcagtaagaacggagaagagaggccat

SEQ ID NO: 223484 - DNA, 33 bp, Homo sapien
ttcaaggcagtaagaatggagaagagaggccat

SEQ ID NO: 223485 - DNA, 33 bp, Homo sapien
aaaactctctcatcaacgctaccagggactccc

SEQ ID NO: 223486 - DNA, 33 bp, Homo sapien
aaaactctctcatcaaggctaccagggactccc

SEQ ID NO: 223487 - DNA, 33 bp, Homo sapien
tgcagttgcagataaaacctctggagaggggcc

SEQ ID NO: 223488 - DNA, 33 bp, Homo sapien
tgcagttgcagataaagcctctggagaggggcc

SEQ ID NO: 223489 - DNA, 33 bp, Homo sapien
tagattctgaaattgaatacaactaattcattt

SEQ ID NO: 223490 - DNA, 33 bp, Homo sapien
tagattctgaaattgagtacaactaattcattt

SEQ ID NO: 223491 - DNA, 33 bp, Homo sapien
cctttctttgctcccacagaacagtactttgta

SEQ ID NO: 223492 - DNA, 33 bp, Homo sapien
cctttctttgctcccatagaacagtactttgta

SEQ ID NO: 223493 - DNA, 33 bp, Homo sapien
taatatacagcaattacgtacggaactacatag

SEQ ID NO: 223494 - DNA, 33 bp, Homo sapien
taatatacagcaattatgtacggaactacatag

SEQ ID NO: 223495 - DNA, 33 bp, Homo sapien
ttcccccagatccttacgtggctactctgctta

SEQ ID NO: 223496 - DNA, 33 bp, Homo sapien
ttcccccagatccttatgtggctactctgctta

SEQ ID NO: 223497 - DNA, 33 bp, Homo sapien
cacaaacactatttaccaaaacaggtatgaatg

SEQ ID NO: 223498 - DNA, 33 bp, Homo sapien
cacaaacactatttactaaaacaggtatgaatg

SEQ ID NO: 223499 - DNA, 33 bp, Homo sapien
tgtgggctttttgccactcctttgaattagtgt

SEQ ID NO: 223500 - DNA, 33 bp, Homo sapien
tgtgggctttttgccattcctttgaattagtgt

SEQ ID NO: 223501 - DNA, 33 bp, Homo sapien
ttcagctacttctctgccacaaactgtggtgat

SEQ ID NO: 223502 - DNA, 33 bp, Homo sapien
ttcagctacttctctggcacaaactgtggtgat

SEQ ID NO: 223503 - DNA, 33 bp, Homo sapien
tatggttttttccattaaaatgtttctgtgcat

SEQ ID NO: 223504 - DNA, 33 bp, Homo sapien
tatggttttttccattgaaatgtttctgtgcat

SEQ ID NO: 223505 - DNA, 33 bp, Homo sapien
tcttctttctgcgacactctcgagcagcttctc

SEQ ID NO: 223506 - DNA, 33 bp, Homo sapien
tcttctttctgcgacattctcgagcagcttctc

SEQ ID NO: 223507 - DNA, 33 bp, Homo sapien
aaataccagtctcaagaatgacattaagaccta

SEQ ID NO: 223508 - DNA, 33 bp, Homo sapien
aaataccagtctcaaggatgacattaagaccta

SEQ ID NO: 223509 - DNA, 33 bp, Homo sapien
gccctccagtgaactacattagactgtggggat

SEQ ID NO: 223510 - DNA, 33 bp, Homo sapien
gccctccagtgaactagattagactgtggggat

SEQ ID NO: 223511 - DNA, 33 bp, Homo sapien
taaatcaccatacctacgttcctcactaaattt

SEQ ID NO: 223512 - DNA, 33 bp, Homo sapien
taaatcaccatacctatgttcctcactaaattt

SEQ ID NO: 223513 - DNA, 33 bp, Homo sapien
tggtggctatggtgaaagactccttgtgtttga

SEQ ID NO: 223514 - DNA, 33 bp, Homo sapien
tggtggctatggtgaacgactccttgtgtttga

SEQ ID NO: 223515 - DNA, 33 bp, Homo sapien
cagttttatgcattcacgaagagacgttttgaa

SEQ ID NO: 223516 - DNA, 33 bp, Homo sapien
cagttttatgcattcatgaagagacgttttgaa

SEQ ID NO: 223517 - DNA, 33 bp, Homo sapien; identical to SEQ ID NO: 223515

SEQ ID NO: 223518 - DNA, 33 bp, Homo sapien; identical to SEQ ID NO: 223516

SEQ ID NO: 223519 - DNA, 33 bp, Homo sapien
ccctaaaagcttgctacctatactttctggagg

SEQ ID NO: 223520 - DNA, 33 bp, Homo sapien
ccctaaaagcttgctatctatactttctggagg

SEQ ID NO: 223521 - DNA, 33 bp, Homo sapien
gtgggagagagtaaataaattgcagttagataa

SEQ ID NO: 223522 - DNA, 33 bp, Homo sapien
gtgggagagagtaaatgaattgcagttagataa

SEQ ID NO: 223523 - DNA, 33 bp, Homo sapien
ttagataaccacagaaatgaatgtaaagaacct

SEQ ID NO: 223524 - DNA, 33 bp, Homo sapien
ttagataaccacagaagtgaatgtaaagaacct

SEQ ID NO: 223525 - DNA, 33 bp, Homo sapien
cccgtcatccttatcacgttggctatgggttta

SEQ ID NO: 223526 - DNA, 33 bp, Homo sapien
cccgtcatccttatcatgttggctatgggttta

SEQ ID NO: 223527 - DNA, 33 bp, Homo sapien
ccactgcactaaagacactaggtacgtattcag

SEQ ID NO: 223528 - DNA, 33 bp, Homo sapien
ccactgcactaaagacgctaggtacgtattcag

SEQ ID NO: 223529 - DNA, 33 bp, Homo sapien
gaggctttttcgtacaaccagtcctaactcaca

SEQ ID NO: 223530 - DNA, 33 bp, Homo sapien
gaggctttttcgtacagccagtcctaactcaca

SEQ ID NO: 223531 - DNA, 33 bp, Homo sapien
gtcccccaggattagaccttatagcccaggcat

SEQ ID NO: 223532 - DNA, 33 bp, Homo sapien
gtcccccaggattagagcttatagcccaggcat

SEQ ID NO: 223533 - DNA, 33 bp, Homo sapien
tgatgagaaggagcaacatagcaagtggggagg

SEQ ID NO: 223534 - DNA, 33 bp, Homo sapien
tgatgagaaggagcaagatagcaagtggggagg

SEQ ID NO: 223535 - DNA, 33 bp, Homo sapien
tacacagagtgaaacacagtcaggcatcactta

SEQ ID NO: 223536 - DNA, 33 bp, Homo sapien
tacacagagtgaaacagagtcaggcatcactta

SEQ ID NO: 223537 - DNA, 33 bp, Homo sapien
ctcaagcaatctagccgcttcggtctcctgagt

SEQ ID NO: 223538 - DNA, 33 bp, Homo sapien
ctcaagcaatctagcctcttcggtctcctgagt

SEQ ID NO: 223539 - DNA, 33 bp, Homo sapien
cgtcacaccgagtcctcaacctatgtattctcc

SEQ ID NO: 223540 - DNA, 33 bp, Homo sapien
cgtcacaccgagtccttaacctatgtattctcc

SEQ ID NO: 223541 - DNA, 33 bp, Homo sapien
gtaggttatactcctgaaaaaaagtcataaatt

SEQ ID NO: 223542 - DNA, 33 bp, Homo sapien
gtaggttatactcctggaaaaaagtcataaatt

SEQ ID NO: 223543 - DNA, 33 bp, Homo sapien
catattccttcctgtaaatgcaaggtgccaccc

SEQ ID NO: 223544 - DNA, 33 bp, Homo sapien
catattccttcctgtagatgcaaggtgccaccc

SEQ ID NO: 223545 - DNA, 33 bp, Homo sapien
cccaggtgattgagggaaaaaccacaatgggta

SEQ ID NO: 223546 - DNA, 33 bp, Homo sapien
cccaggtgattgaggggaaaaccacaatgggta

SEQ ID NO: 223547 - DNA, 33 bp, Homo sapien
cctcaaaagaatgtaacaatatctgatggggat

SEQ ID NO: 223548 - DNA, 33 bp, Homo sapien
cctcaaaagaatgtaagaatatctgatggggat

SEQ ID NO: 223549 - DNA, 33 bp, Homo sapien
aatagctgctactaaccagtcctcctcacaccc

SEQ ID NO: 223550 - DNA, 33 bp, Homo sapien
aatagctgctactaactagtcctcctcacaccc

SEQ ID NO: 223551 - DNA, 33 bp, Homo sapien
tatttccagtttgtgcaattacaaattctactt

SEQ ID NO: 223552 - DNA, 33 bp, Homo sapien
tatttccagtttgtgctattacaaattctactt

SEQ ID NO: 223553 - DNA, 33 bp, Homo sapien
gaagaagagccagcaaaagtgatagcaatgttg

SEQ ID NO: 223554 - DNA, 33 bp, Homo sapien
gaagaagagccagcaagagtgatagcaatgttg

SEQ ID NO: 223555 - DNA, 33 bp, Homo sapien
tgtcatctccccagaactggaacctccttaatc

SEQ ID NO: 223556 - DNA, 33 bp, Homo sapien
tgtcatctccccagaattggaacctccttaatc

SEQ ID NO: 223557 - DNA, 33 bp, Homo sapien
ttgacagtgaagggaggatgagaaagcagtaac

SEQ ID NO: 223558 - DNA, 33 bp, Homo sapien
ttgacagtgaagggagtatgagaaagcagtaac

SEQ ID NO: 223559 - DNA, 33 bp, Homo sapien
caggaatggaacatacaccttgtccctttctga

SEQ ID NO: 223560 - DNA, 33 bp, Homo sapien
caggaatggaacatacgccttgtccctttctga

SEQ ID NO: 223561 - DNA, 33 bp, Homo sapien
tgattctttcttgatacgtgaataatgacactt

SEQ ID NO: 223562 - DNA, 33 bp, Homo sapien
tgattctttcttgatatgtgaataatgacactt

SEQ ID NO: 223563 - DNA, 33 bp, Homo sapien
ggtcctatgcaggtaacttacaaaacatttttt

SEQ ID NO: 223564 - DNA, 33 bp, Homo sapien
ggtcctatgcaggtaatttacaaaacatttttt

SEQ ID NO: 223565 - DNA, 33 bp, Homo sapien
actggctctgaaacaaagaactcatcaactaaa

SEQ ID NO: 223566 - DNA, 33 bp, Homo sapien
actggctctgaaacaaggaactcatcaactaaa

SEQ ID NO: 223567 - DNA, 33 bp, Homo sapien
ttcagagccagttacacagaatcttggttgtca

SEQ ID NO: 223568 - DNA, 33 bp, Homo sapien
ttcagagccagttacatagaatcttggttgtca

SEQ ID NO: 223569 - DNA, 33 bp, Homo sapien
caaaagagacatcctgcatgagatttagaaggt

SEQ ID NO: 223570 - DNA, 33 bp, Homo sapien
caaaagagacatcctgtatgagatttagaaggt

SEQ ID NO: 223571 - DNA, 33 bp, Homo sapien
atgataggtaaatggaagtggggaatagaaaaa

SEQ ID NO: 223572 - DNA, 33 bp, Homo sapien
atgataggtaaatggacgtggggaatagaaaaa

SEQ ID NO: 223573 - DNA, 33 bp, Homo sapien
gatactattcctataaacttaatcaggtggtca

SEQ ID NO: 223574 - DNA, 33 bp, Homo sapien
gatactattcctataatcttaatcaggtggtca

SEQ ID NO: 223575 - DNA, 33 bp, Homo sapien
gcctttaaatctaaacagatcagagaaccaatt

SEQ ID NO: 223576 - DNA, 33 bp, Homo sapien
gcctttaaatctaaacggatcagagaaccaatt

SEQ ID NO: 223577 - DNA, 33 bp, Homo sapien
tgataggttctctgaaatggttctgggttatcc

SEQ ID NO: 223578 - DNA, 33 bp, Homo sapien
tgataggttctctgaagtggttctgggttatcc

SEQ ID NO: 223579 - DNA, 33 bp, Homo sapien
acacccagcctaaatcactttttatatatcact

SEQ ID NO: 223580 - DNA, 33 bp, Homo sapien
acacccagcctaaatcgctttttatatatcact

SEQ ID NO: 223581 - DNA, 33 bp, Homo sapien
attattgtaagtatgacgttttgtttttgtttt

SEQ ID NO: 223582 - DNA, 33 bp, Homo sapien
attattgtaagtatgatgttttgtttttgtttt

SEQ ID NO: 223583 - DNA, 33 bp, Homo sapien
tttaatgagttccaagaatgtcagcaaatgttc

SEQ ID NO: 223584 - DNA, 33 bp, Homo sapien
tttaatgagttccaaggatgtcagcaaatgttc

SEQ ID NO: 223585 - DNA, 33 bp, Homo sapien
ttgcctgtgagtttagacggatgatatgtatgg

SEQ ID NO: 223586 - DNA, 33 bp, Homo sapien
ttgcctgtgagtttaggcggatgatatgtatgg

SEQ ID NO: 223587 - DNA, 33 bp, Homo sapien
tttggggagaattaagacatggatagggtgtca

SEQ ID NO: 223588 - DNA, 33 bp, Homo sapien
tttggggagaattaagtcatggatagggtgtca

SEQ ID NO: 223589 - DNA, 33 bp, Homo sapien
actattttaccgcaaacacatgtttaacattta

SEQ ID NO: 223590 - DNA, 33 bp, Homo sapien
actattttaccgcaaatacatgtttaacattta

SEQ ID NO: 223591 - DNA, 33 bp, Homo sapien
taatgctaatgtggtacgacactgtagaaaaca

SEQ ID NO: 223592 - DNA, 33 bp, Homo sapien
taatgctaatgtggtatgacactgtagaaaaca

SEQ ID NO: 223593 - DNA, 33 bp, Homo sapien
ggctacaagtaagaccaagtgattcgattgtga

SEQ ID NO: 223594 - DNA, 33 bp, Homo sapien
ggctacaagtaagaccgagtgattcgattgtga

SEQ ID NO: 223595 - DNA, 33 bp, Homo sapien
acagtgtgctttgcaacggttaagtccacagct

SEQ ID NO: 223596 - DNA, 33 bp, Homo sapien
acagtgtgctttgcaatggttaagtccacagct

SEQ ID NO: 223597 - DNA, 33 bp, Homo sapien
acaaactacagaatgaatatgcaagttttattt

SEQ ID NO: 223598 - DNA, 33 bp, Homo sapien
acaaactacagaatgagtatgcaagttttattt

SEQ ID NO: 223599 - DNA, 33 bp, Homo sapien
taggctcaagtccggacctcattccagaagctt

SEQ ID NO: 223600 - DNA, 33 bp, Homo sapien
taggctcaagtccggatctcattccagaagctt

SEQ ID NO: 223601 - DNA, 33 bp, Homo sapien
tcttgccttaggcaaccgtaagaaaggcccaaa

SEQ ID NO: 223602 - DNA, 33 bp, Homo sapien
tcttgccttaggcaacggtaagaaaggcccaaa

SEQ ID NO: 223603 - DNA, 33 bp, Homo sapien
aactttaccaggtttcaaagagcagaaagaggc

SEQ ID NO: 223604 - DNA, 33 bp, Homo sapien
aactttaccaggtttcgaagagcagaaagaggc

SEQ ID NO: 223605 - DNA, 33 bp, Homo sapien
aagaataaatggcagcaagtaagtgagacatgg

SEQ ID NO: 223606 - DNA, 33 bp, Homo sapien
aagaataaatggcagccagtaagtgagacatgg

SEQ ID NO: 223607 - DNA, 33 bp, Homo sapien
ttgtttagttttggaacaagagagttcaagact

SEQ ID NO: 223608 - DNA, 33 bp, Homo sapien
ttgtttagttttggaataagagagttcaagact

SEQ ID NO: 223609 - DNA, 33 bp, Homo sapien
acaggtgcccacaaccacgcctgtctaattttt

SEQ ID NO: 223610 - DNA, 33 bp, Homo sapien
acaggtgcccacaacctcgcctgtctaattttt

SEQ ID NO: 223611 - DNA, 33 bp, Homo sapien; identical to SEQ ID NO: 223609

SEQ ID NO: 223612 - DNA, 33 bp, Homo sapien; identical to SEQ ID NO: 223610

SEQ ID NO: 223613 - DNA, 33 bp, Homo sapien
ctccatgttgtatgtaaccagagagagctttta

SEQ ID NO: 223614 - DNA, 33 bp, Homo sapien
ctccatgttgtatgtagccagagagagctttta

SEQ ID NO: 223615 - DNA, 33 bp, Homo sapien
aggccaggcaggaaaggaactcagggtatgcct

SEQ ID NO: 223616 - DNA, 33 bp, Homo sapien
aggccaggcaggaaagtaactcagggtatgcct

SEQ ID NO: 223617 - DNA, 33 bp, Homo sapien
aagattgtgtacaggacatagaagcgggggaaa

SEQ ID NO: 223618 - DNA, 33 bp, Homo sapien
aagattgtgtacaggatatagaagcgggggaaa

SEQ ID NO: 223619 - DNA, 33 bp, Homo sapien
acctaacagtattataagttggtgcaaaagtaa

SEQ ID NO: 223620 - DNA, 33 bp, Homo sapien
acctaacagtattataggttggtgcaaaagtaa

SEQ ID NO: 223621 - DNA, 33 bp, Homo sapien
gacctcagctctccataagacaagtgccagaga

SEQ ID NO: 223622 - DNA, 33 bp, Homo sapien
gacctcagctctccatgagacaagtgccagaga

SEQ ID NO: 223623 - DNA, 33 bp, Homo sapien
tgtttggtggttttaaaacatgacctcaaattc

SEQ ID NO: 223624 - DNA, 33 bp, Homo sapien
tgtttggtggttttaagacatgacctcaaattc

SEQ ID NO: 223625 - DNA, 33 bp, Homo sapien
tccttatgtggacccagtatgtaaaaggcaact

SEQ ID NO: 223626 - DNA, 33 bp, Homo sapien
tccttatgtggacccattatgtaaaaggcaact

SEQ ID NO: 223627 - DNA, 33 bp, Homo sapien
taccagaagaatcccaacgcgactggtgtttag

SEQ ID NO: 223628 - DNA, 33 bp, Homo sapien
taccagaagaatcccagcgcgactggtgtttag

SEQ ID NO: 223629 - DNA, 33 bp, Homo sapien
ctgttttcaccagccaaaaattttctaacagca

SEQ ID NO: 223630 - DNA, 33 bp, Homo sapien
ctgttttcaccagccacaaattttctaacagca

SEQ ID NO: 223631 - DNA, 33 bp, Homo sapien
agcccagaaaagacaacggagagtgaaggctag

SEQ ID NO: 223632 - DNA, 33 bp, Homo sapien
agcccagaaaagacaatggagagtgaaggctag

SEQ ID NO: 223633 - DNA, 33 bp, Homo sapien
gtagacatacagctctcagagaaagaaaggaat

SEQ ID NO: 223634 - DNA, 33 bp, Homo sapien
gtagacatacagctcttagagaaagaaaggaat

SEQ ID NO: 223635 - DNA, 33 bp, Homo sapien
cttttggagaaaataacgcaactctctttaaag

SEQ ID NO: 223636 - DNA, 33 bp, Homo sapien
cttttggagaaaataatgcaactctctttaaag

SEQ ID NO: 223637 - DNA, 33 bp, Homo sapien
tcaccagaattaaagaataacctaatcacaaat

SEQ ID NO: 223638 - DNA, 33 bp, Homo sapien
tcaccagaattaaagagtaacctaatcacaaat

SEQ ID NO: 223639 - DNA, 33 bp, Homo sapien
aactgagtggccctcaaaattgttcaatgatta

SEQ ID NO: 223640 - DNA, 33 bp, Homo sapien
aactgagtggccctcagaattgttcaatgatta

SEQ ID NO: 223641 - DNA, 33 bp, Homo sapien
gtaaaattcatatacaatgagatgcaaaaataa

SEQ ID NO: 223642 - DNA, 33 bp, Homo sapien
gtaaaattcatatacagtgagatgcaaaaataa

SEQ ID NO: 223643 - DNA, 33 bp, Homo sapien
gctcgctttgatgctgcagaagttatcactcag

SEQ ID NO: 223644 - DNA, 33 bp, Homo sapien
gctcgctttgatgctggagaagttatcactcag

SEQ ID NO: 223645 - DNA, 33 bp, Homo sapien; identical to SEQ ID NO: 223643

SEQ ID NO: 223646 - DNA, 33 bp, Homo sapien; identical to SEQ ID NO: 223644

SEQ ID NO: 223647 - DNA, 33 bp, Homo sapien
gacgtgcaggacaagcaagactgaagaataggt

SEQ ID NO: 223648 - DNA, 33 bp, Homo sapien
gacgtgcaggacaagctagactgaagaataggt

SEQ ID NO: 223649 - DNA, 33 bp, Homo sapien
tgaagaagaactgcacagtcaatccacagattc

SEQ ID NO: 223650 - DNA, 33 bp, Homo sapien
tgaagaagaactgcacggtcaatccacagattc

SEQ ID NO: 223651 - DNA, 33 bp, Homo sapien
gaaagactatcaaatgacaggtatctctctcag

SEQ ID NO: 223652 - DNA, 33 bp, Homo sapien
gaaagactatcaaatggcaggtatctctctcag

SEQ ID NO: 223653 - DNA, 33 bp, Homo sapien
ctgtctatacaaaaaaataacacattcctgtag

SEQ ID NO: 223654 - DNA, 33 bp, Homo sapien
ctgtctatacaaaaaagtaacacattcctgtag

SEQ ID NO: 223655 - DNA, 33 bp, Homo sapien
ttttacttcagtgaggaaagtctactttgaatt

SEQ ID NO: 223656 - DNA, 33 bp, Homo sapien
ttttacttcagtgaggtaagtctactttgaatt

SEQ ID NO: 223657 - DNA, 33 bp, Homo sapien
tttgtgtttcccaaaaattcctataatgaaact

SEQ ID NO: 223658 - DNA, 33 bp, Homo sapien
tttgtgtttcccaaaagttcctataatgaaact

SEQ ID NO: 223659 - DNA, 33 bp, Homo sapien
ggactccatggtcctactaaatatgccctaata

SEQ ID NO: 223660 - DNA, 33 bp, Homo sapien
ggactccatggtcctattaaatatgccctaata

SEQ ID NO: 223661 - DNA, 33 bp, Homo sapien
taccaggtcacagaagcatcactttgaggacca

SEQ ID NO: 223662 - DNA, 33 bp, Homo sapien
taccaggtcacagaagtatcactttgaggacca

SEQ ID NO: 223663 - DNA, 33 bp, Homo sapien
tcacttaacacaaaaacctcaagagtaggcatt

SEQ ID NO: 223664 - DNA, 33 bp, Homo sapien
tcacttaacacaaaaatctcaagagtaggcatt

SEQ ID NO: 223665 - DNA, 33 bp, Homo sapien
cagccatgttcaactacgcggaagctttctgag

SEQ ID NO: 223666 - DNA, 33 bp, Homo sapien
cagccatgttcaactatgcggaagctttctgag

SEQ ID NO: 223667 - DNA, 33 bp, Homo sapien
ttgatggtgagggtgcaagcctttggcagttct

SEQ ID NO: 223668 - DNA, 33 bp, Homo sapien
ttgatggtgagggtgcgagcctttggcagttct

SEQ ID NO: 223669 - DNA, 33 bp, Homo sapien
ctctccatccggagccgcttcctttctcgccgc

SEQ ID NO: 223670 - DNA, 33 bp, Homo sapien
ctctccatccggagcctcttcctttctcgccgc

SEQ ID NO: 223671 - DNA, 33 bp, Homo sapien
gcacacctgaagtggaaaattttactaaattgt

SEQ ID NO: 223672 - DNA, 33 bp, Homo sapien
gcacacctgaagtggagaattttactaaattgt

SEQ ID NO: 223673 - DNA, 33 bp, Homo sapien
cttttataatttgaagaacaactctcctctcag

SEQ ID NO: 223674 - DNA, 33 bp, Homo sapien
cttttataatttgaaggacaactctcctctcag

SEQ ID NO: 223675 - DNA, 33 bp, Homo sapien
gaaaaaggagtaacagaattagattttggaaaa

SEQ ID NO: 223676 - DNA, 33 bp, Homo sapien
gaaaaaggagtaacaggattagattttggaaaa

SEQ ID NO: 223677 - DNA, 33 bp, Homo sapien
tgagcacaagagaggaagatatgaaactgaaag

SEQ ID NO: 223678 - DNA, 33 bp, Homo sapien
tgagcacaagagaggaggatatgaaactgaaag

SEQ ID NO: 223679 - DNA, 33 bp, Homo sapien
gggcacggagataccacgaagtcccagttcatt

SEQ ID NO: 223680 - DNA, 33 bp, Homo sapien
gggcacggagataccatgaagtcccagttcatt

SEQ ID NO: 223681 - DNA, 33 bp, Homo sapien
taagcttatctcagctaactcctcggaggtact

SEQ ID NO: 223682 - DNA, 33 bp, Homo sapien
taagcttatctcagctgactcctcggaggtact

SEQ ID NO: 223683 - DNA, 33 bp, Homo sapien
aacaacaagaatcaaccataacatctatcaagt

SEQ ID NO: 223684 - DNA, 33 bp, Homo sapien
aacaacaagaatcaactataacatctatcaagt

SEQ ID NO: 223685 - DNA, 33 bp, Homo sapien
gctcttatttcatcatgagagaaaagccaaaat

SEQ ID NO: 223686 - DNA, 33 bp, Homo sapien
gctcttatttcatcattagagaaaagccaaaat

SEQ ID NO: 223687 - DNA, 33 bp, Homo sapien
ctggttcagcctccagaagaaatggccttgaga

SEQ ID NO: 223688 - DNA, 33 bp, Homo sapien
ctggttcagcctccaggagaaatggccttgaga

SEQ ID NO: 223689 - DNA, 33 bp, Homo sapien
tagatccacatagaccactaggtcaagagaaga

SEQ ID NO: 223690 - DNA, 33 bp, Homo sapien
tagatccacatagaccgctaggtcaagagaaga

SEQ ID NO: 223691 - DNA, 33 bp, Homo sapien
ttagatcaacattcggcatttactatgattata

SEQ ID NO: 223692 - DNA, 33 bp, Homo sapien
ttagatcaacattcggtatttactatgattata

SEQ ID NO: 223693 - DNA, 33 bp, Homo sapien
tgtgccaatgtaggcaacttactcttggtcttg

SEQ ID NO: 223694 - DNA, 33 bp, Homo sapien
tgtgccaatgtaggcatcttactcttggtcttg

SEQ ID NO: 223695 - DNA, 33 bp, Homo sapien
tcgagaacctagacaactggagagctgcttgtt

SEQ ID NO: 223696 - DNA, 33 bp, Homo sapien
tcgagaacctagacaattggagagctgcttgtt

SEQ ID NO: 223697 - DNA, 33 bp, Homo sapien
aaacctttatttccaccgagacctctcatccaa

SEQ ID NO: 223698 - DNA, 33 bp, Homo sapien
aaacctttatttccactgagacctctcatccaa

SEQ ID NO: 223699 - DNA, 33 bp, Homo sapien
ctgaaatgaagtcacaatacagatgaaacactt

SEQ ID NO: 223700 - DNA, 33 bp, Homo sapien
ctgaaatgaagtcacagtacagatgaaacactt

SEQ ID NO: 223701 - DNA, 33 bp, Homo sapien
aaacctttaagtccaccagcagaatgaataaat

SEQ ID NO: 223702 - DNA, 33 bp, Homo sapien
aaacctttaagtccactagcagaatgaataaat

SEQ ID NO: 223703 - DNA, 33 bp, Homo sapien
acctgggcacaaattccagttcttcctcttcta

SEQ ID NO: 223704 - DNA, 33 bp, Homo sapien
acctgggcacaaattctagttcttcctcttcta

SEQ ID NO: 223705 - DNA, 33 bp, Homo sapien
aaatcttattggagaacgagaactgatagcact

SEQ ID NO: 223706 - DNA, 33 bp, Homo sapien
aaatcttattggagaatgagaactgatagcact

SEQ ID NO: 223707 - DNA, 33 bp, Homo sapien
aaagtagcagggaagacgaagcctgcaggacgg

SEQ ID NO: 223708 - DNA, 33 bp, Homo sapien
aaagtagcagggaagatgaagcctgcaggacgg

SEQ ID NO: 223709 - DNA, 33 bp, Homo sapien
tctgttcacagtatgaatacagaggacttgaga

SEQ ID NO: 223710 - DNA, 33 bp, Homo sapien
tctgttcacagtatgagtacagaggacttgaga

SEQ ID NO: 223711 - DNA, 33 bp, Homo sapien
ctcagcaaacataactcacattccattcatgga

SEQ ID NO: 223712 - DNA, 33 bp, Homo sapien
ctcagcaaacataacttacattccattcatgga

SEQ ID NO: 223713 - DNA, 33 bp, Homo sapien
ggaggctgaggctgcactgaagagttgatatgg

SEQ ID NO: 223714 - DNA, 33 bp, Homo sapien
ggaggctgaggctgcattgaagagttgatatgg

SEQ ID NO: 223715 - DNA, 33 bp, Homo sapien
gattaggtaataggtacaaactgctcagaacag

SEQ ID NO: 223716 - DNA, 33 bp, Homo sapien
gattaggtaataggtataaactgctcagaacag

SEQ ID NO: 223717 - DNA, 33 bp, Homo sapien
aggatgtcaaactttcgctctttgcagatgaca

SEQ ID NO: 223718 - DNA, 33 bp, Homo sapien
aggatgtcaaactttctctctttgcagatgaca

SEQ ID NO: 223719 - DNA, 33 bp, Homo sapien
tcaaaataatactgtacgtcctagccagagcaa

SEQ ID NO: 223720 - DNA, 33 bp, Homo sapien
tcaaaataatactgtatgtcctagccagagcaa

SEQ ID NO: 223721 - DNA, 33 bp, Homo sapien
atgtccactttcaccactatttttttgaggtag

SEQ ID NO: 223722 - DNA, 33 bp, Homo sapien
atgtccactttcaccattatttttttgaggtag

SEQ ID NO: 223723 - DNA, 33 bp, Homo sapien
gggcatgatcaggatacgattactgtctccagt

SEQ ID NO: 223724 - DNA, 33 bp, Homo sapien
gggcatgatcaggataggattactgtctccagt

SEQ ID NO: 223725 - DNA, 33 bp, Homo sapien
tccacagattttataacgtctccagggagttca

SEQ ID NO: 223726 - DNA, 33 bp, Homo sapien
tccacagattttataatgtctccagggagttca

SEQ ID NO: 223727 - DNA, 33 bp, Homo sapien
agagccatgtgtttgaacttttccaaccagggt

SEQ ID NO: 223728 - DNA, 33 bp, Homo sapien
agagccatgtgtttgagcttttccaaccagggt

SEQ ID NO: 223729 - DNA, 33 bp, Homo sapien
ctcttgatcacataaccctttatttacttaaca

SEQ ID NO: 223730 - DNA, 33 bp, Homo sapien
ctcttgatcacataactctttatttacttaaca

SEQ ID NO: 223731 - DNA, 33 bp, Homo sapien
tccacaatttgatcacagccttttattttattt

SEQ ID NO: 223732 - DNA, 33 bp, Homo sapien
tccacaatttgatcacggccttttattttattt

SEQ ID NO: 223733 - DNA, 33 bp, Homo sapien
ttgtccttttgatgggaagaacggaagctgtag

SEQ ID NO: 223734 - DNA, 33 bp, Homo sapien
ttgtccttttgatggggagaacggaagctgtag

SEQ ID NO: 223735 - DNA, 33 bp, Homo sapien
ttttcaaaaaagtctacgtacaaaggaccatct

SEQ ID NO: 223736 - DNA, 33 bp, Homo sapien
ttttcaaaaaagtctatgtacaaaggaccatct

SEQ ID NO: 223737 - DNA, 33 bp, Homo sapien
ctgcttgggtaggcaaatgtgtacccttcagca

SEQ ID NO: 223738 - DNA, 33 bp, Homo sapien
ctgcttgggtaggcaagtgtgtacccttcagca

SEQ ID NO: 223739 - DNA, 33 bp, Homo sapien
tatcccatgttatttcaccaatcccatgctcca

SEQ ID NO: 223740 - DNA, 33 bp, Homo sapien
tatcccatgttatttcgccaatcccatgctcca

SEQ ID NO: 223741 - DNA, 33 bp, Homo sapien
ctgactgtaggcttccggaagtggttgtagaat

SEQ ID NO: 223742 - DNA, 33 bp, Homo sapien
ctgactgtaggcttcctgaagtggttgtagaat

SEQ ID NO: 223743 - DNA, 33 bp, Homo sapien
atatcatttggatacactgacaaaccacattaa

SEQ ID NO: 223744 - DNA, 33 bp, Homo sapien
atatcatttggatacattgacaaaccacattaa

SEQ ID NO: 223745 - DNA, 33 bp, Homo sapien
ccaggtggagaactccagatgtcctgatgagcc

SEQ ID NO: 223746 - DNA, 33 bp, Homo sapien
ccaggtggagaactccggatgtcctgatgagcc

SEQ ID NO: 223747 - DNA, 33 bp, Homo sapien
tgtttcattcgactgaataatttgaaatacaaa

SEQ ID NO: 223748 - DNA, 33 bp, Homo sapien
tgtttcattcgactgagtaatttgaaatacaaa

SEQ ID NO: 223749 - DNA, 33 bp, Homo sapien
atgtggtgaattgtgaacaatcaggattctggt

SEQ ID NO: 223750 - DNA, 33 bp, Homo sapien
atgtggtgaattgtgagcaatcaggattctggt

SEQ ID NO: 223751 - DNA, 33 bp, Homo sapien
tttgtctcattttaggcatcattcttttgtggt

SEQ ID NO: 223752 - DNA, 33 bp, Homo sapien
tttgtctcattttaggtatcattcttttgtggt

SEQ ID NO: 223753 - DNA, 33 bp, Homo sapien
acttacttaatatgtaactcccgtgactgccat

SEQ ID NO: 223754 - DNA, 33 bp, Homo sapien
acttacttaatatgtacctcccgtgactgccat

SEQ ID NO: 223755 - DNA, 33 bp, Homo sapien
gtggtatcatcagagaagagctcaaagagaagg

SEQ ID NO: 223756 - DNA, 33 bp, Homo sapien
gtggtatcatcagagacgagctcaaagagaagg

SEQ ID NO: 223757 - DNA, 33 bp, Homo sapien
ctccaaacacacagaccgcgttgctgtttcctt

SEQ ID NO: 223758 - DNA, 33 bp, Homo sapien
ctccaaacacacagactgcgttgctgtttcctt

SEQ ID NO: 223759 - DNA, 33 bp, Homo sapien
gaagtttgcttttctaaatgacaaggtatgagg

SEQ ID NO: 223760 - DNA, 33 bp, Homo sapien
gaagtttgcttttctacatgacaaggtatgagg

SEQ ID NO: 223761 - DNA, 33 bp, Homo sapien
ccttcataattcttctaaagtcactgagtacgc

SEQ ID NO: 223762 - DNA, 33 bp, Homo sapien
ccttcataattcttcttaagtcactgagtacgc

SEQ ID NO: 223763 - DNA, 33 bp, Homo sapien
gaaattcttgggtttgcaggatggtagataaga

SEQ ID NO: 223764 - DNA, 33 bp, Homo sapien
gaaattcttgggtttgtaggatggtagataaga

SEQ ID NO: 223765 - DNA, 33 bp, Homo sapien
tttgcttttaagtccaagaaggaaattagtccc

SEQ ID NO: 223766 - DNA, 33 bp, Homo sapien
tttgcttttaagtccaggaaggaaattagtccc

SEQ ID NO: 223767 - DNA, 33 bp, Homo sapien
gatgacaagatgccaaatgctgagggaaatgaa

SEQ ID NO: 223768 - DNA, 33 bp, Homo sapien
gatgacaagatgccaagtgctgagggaaatgaa

SEQ ID NO: 223769 - DNA, 33 bp, Homo sapien
cttggtgtgcattggaaggcatccagctatccc

SEQ ID NO: 223770 - DNA, 33 bp, Homo sapien
cttggtgtgcattggagggcatccagctatccc

SEQ ID NO: 223771 - DNA, 33 bp, Homo sapien
ccaatagttgcctggacgacttcatgggtcagt

SEQ ID NO: 223772 - DNA, 33 bp, Homo sapien
ccaatagttgcctggatgacttcatgggtcagt

SEQ ID NO: 223773 - DNA, 33 bp, Homo sapien
caacattcacagatgaacaatgggaaatcctgc

SEQ ID NO: 223774 - DNA, 33 bp, Homo sapien
caacattcacagatgagcaatgggaaatcctgc

SEQ ID NO: 223775 - DNA, 33 bp, Homo sapien
actctttcaccacagtgaccagccacagaccta

SEQ ID NO: 223776 - DNA, 33 bp, Homo sapien
actctttcaccacagttaccagccacagaccta

SEQ ID NO: 223777 - DNA, 33 bp, Homo sapien
agcagcaaaatggttacggaagatgggcccaac

SEQ ID NO: 223778 - DNA, 33 bp, Homo sapien
agcagcaaaatggttatggaagatgggcccaac

SEQ ID NO: 223779 - DNA, 33 bp, Homo sapien
agctgtgtctgtgaccaagtgataagatgaatg

SEQ ID NO: 223780 - DNA, 33 bp, Homo sapien
agctgtgtctgtgaccgagtgataagatgaatg

SEQ ID NO: 223781 - DNA, 33 bp, Homo sapien
ctcttaccttgtcatcactggacctccctgggt

SEQ ID NO: 223782 - DNA, 33 bp, Homo sapien
ctcttaccttgtcatcgctggacctccctgggt

SEQ ID NO: 223783 - DNA, 33 bp, Homo sapien
gacagataaatacggaagaagtgacgtttaaaa

SEQ ID NO: 223784 - DNA, 33 bp, Homo sapien
gacagataaatacggacgaagtgacgtttaaaa

SEQ ID NO: 223785 - DNA, 33 bp, Homo sapien
gattgggggttgagggaattctcaaaagtgggt

SEQ ID NO: 223786 - DNA, 33 bp, Homo sapien
gattgggggttgaggggattctcaaaagtgggt

SEQ ID NO: 223787 - DNA, 33 bp, Homo sapien
tctcttgtttctactacaatacaggagttttgt

SEQ ID NO: 223788 - DNA, 33 bp, Homo sapien
tctcttgtttctactataatacaggagttttgt

SEQ ID NO: 223789 - DNA, 33 bp, Homo sapien
cagtagaaaatctaaaggactctacaaaaagct

SEQ ID NO: 223790 - DNA, 33 bp, Homo sapien
cagtagaaaatctaaatgactctacaaaaagct

SEQ ID NO: 223791 - DNA, 33 bp, Homo sapien
ctaaaccccagtgatacgtaatctatctataca

SEQ ID NO: 223792 - DNA, 33 bp, Homo sapien
ctaaaccccagtgatatgtaatctatctataca

SEQ ID NO: 223793 - DNA, 33 bp, Homo sapien
gattcagtcaagagtactacattgcattgtcat

SEQ ID NO: 223794 - DNA, 33 bp, Homo sapien
gattcagtcaagagtattacattgcattgtcat

SEQ ID NO: 223795 - DNA, 33 bp, Homo sapien
gacacagacctttaagacattgtaggtttagtt

SEQ ID NO: 223796 - DNA, 33 bp, Homo sapien
gacacagacctttaaggcattgtaggtttagtt

SEQ ID NO: 223797 - DNA, 33 bp, Homo sapien
tgatgcctcaggcttcaagtgtactcatcatga

SEQ ID NO: 223798 - DNA, 33 bp, Homo sapien
tgatgcctcaggcttcgagtgtactcatcatga

SEQ ID NO: 223799 - DNA, 33 bp, Homo sapien
atgtgaactttgagcaaacagaaactaagaaac

SEQ ID NO: 223800 - DNA, 33 bp, Homo sapien
atgtgaactttgagcatacagaaactaagaaac

SEQ ID NO: 223801 - DNA, 33 bp, Homo sapien
ttcctctgttgcacatcaaacttgaaggcagtt

SEQ ID NO: 223802 - DNA, 33 bp, Homo sapien
ttcctctgttgcacattaaacttgaaggcagtt

SEQ ID NO: 223803 - DNA, 33 bp, Homo sapien
ttatgaagctatacagacattgcatttttctat

SEQ ID NO: 223804 - DNA, 33 bp, Homo sapien
ttatgaagctatacagtcattgcatttttctat

SEQ ID NO: 223805 - DNA, 33 bp, Homo sapien
tacgtctcactccaccaaatttacccaaagctg

SEQ ID NO: 223806 - DNA, 33 bp, Homo sapien
tacgtctcactccacccaatttacccaaagctg

SEQ ID NO: 223807 - DNA, 33 bp, Homo sapien
aaaagtggattttgaaaagtggattaaattgct

SEQ ID NO: 223808 - DNA, 33 bp, Homo sapien
aaaagtggattttgaagagtggattaaattgct

SEQ ID NO: 223809 - DNA, 33 bp, Homo sapien
atgatgtctaaggctaccaaattataattttct

SEQ ID NO: 223810 - DNA, 33 bp, Homo sapien
atgatgtctaaggctatcaaattataattttct

SEQ ID NO: 223811 - DNA, 33 bp, Homo sapien
catttctcagaacgtacccccatcgttaagtga

SEQ ID NO: 223812 - DNA, 33 bp, Homo sapien
catttctcagaacgtatccccatcgttaagtga

SEQ ID NO: 223813 - DNA, 33 bp, Homo sapien
tgaaatctgtagtttagaagcaacacacttctg

SEQ ID NO: 223814 - DNA, 33 bp, Homo sapien
tgaaatctgtagtttataagcaacacacttctg

SEQ ID NO: 223815 - DNA, 33 bp, Homo sapien
cttacattacatgaaaatgctttgtaaacagag

SEQ ID NO: 223816 - DNA, 33 bp, Homo sapien
cttacattacatgaaagtgctttgtaaacagag

SEQ ID NO: 223817 - DNA, 33 bp, Homo sapien
tatcccaaatgacaaacggctagaagttcctct

SEQ ID NO: 223818 - DNA, 33 bp, Homo sapien
tatcccaaatgacaaatggctagaagttcctct

SEQ ID NO: 223819 - DNA, 33 bp, Homo sapien
ttgtaccaaatgaaccaggctgaaaacagctaa

SEQ ID NO: 223820 - DNA, 33 bp, Homo sapien
ttgtaccaaatgaaccgggctgaaaacagctaa

SEQ ID NO: 223821 - DNA, 33 bp, Homo sapien
atttaaatattatgaaactgtcaggctcacagt

SEQ ID NO: 223822 - DNA, 33 bp, Homo sapien
atttaaatattatgaagctgtcaggctcacagt

SEQ ID NO: 223823 - DNA, 33 bp, Homo sapien
ctagtaacaatcactaaatcctagccccaagag

SEQ ID NO: 223824 - DNA, 33 bp, Homo sapien
ctagtaacaatcactacatcctagccccaagag

SEQ ID NO: 223825 - DNA, 33 bp, Homo sapien
agattgcttggattcaatcctaactctactgct

SEQ ID NO: 223826 - DNA, 33 bp, Homo sapien
agattgcttggattcagtcctaactctactgct

SEQ ID NO: 223827 - DNA, 33 bp, Homo sapien
gagacagagatcgctagtacataatgataaagg

SEQ ID NO: 223828 - DNA, 33 bp, Homo sapien
gagacagagatcgctattacataatgataaagg

SEQ ID NO: 223829 - DNA, 33 bp, Homo sapien
gaaagtgttattgtcaaacaagatctcacatga

SEQ ID NO: 223830 - DNA, 33 bp, Homo sapien
gaaagtgttattgtcagacaagatctcacatga

SEQ ID NO: 223831 - DNA, 33 bp, Homo sapien
tggttatgtaggagaacgtacttgtgtataaaa

SEQ ID NO: 223832 - DNA, 33 bp, Homo sapien
tggttatgtaggagaatgtacttgtgtataaaa

SEQ ID NO: 223833 - DNA, 33 bp, Homo sapien
gagactatcttcttcacgttgtatctaccagtt

SEQ ID NO: 223834 - DNA, 33 bp, Homo sapien
gagactatcttcttcatgttgtatctaccagtt

SEQ ID NO: 223835 - DNA, 33 bp, Homo sapien
tcaagatatcacttacacttatgtttacggaca

SEQ ID NO: 223836 - DNA, 33 bp, Homo sapien
tcaagatatcacttacgcttatgtttacggaca

SEQ ID NO: 223837 - DNA, 33 bp, Homo sapien
ttatcagagagttcaagatttaccaggtgttac

SEQ ID NO: 223838 - DNA, 33 bp, Homo sapien
ttatcagagagttcaatatttaccaggtgttac

SEQ ID NO: 223839 - DNA, 33 bp, Homo sapien
tttcactcacaaaaaaaggccaagtcccaggct

SEQ ID NO: 223840 - DNA, 33 bp, Homo sapien
tttcactcacaaaaaatggccaagtcccaggct

SEQ ID NO: 223841 - DNA, 33 bp, Homo sapien
actgggatggtggaatcagttctccaagtaaat

SEQ ID NO: 223842 - DNA, 33 bp, Homo sapien
actgggatggtggaattagttctccaagtaaat

SEQ ID NO: 223843 - DNA, 33 bp, Homo sapien
tgatccagaagtgacacaggtgggtccaggatc

SEQ ID NO: 223844 - DNA, 33 bp, Homo sapien
tgatccagaagtgacagaggtgggtccaggatc

SEQ ID NO: 223845 - DNA, 33 bp, Homo sapien
agaaagctggagctctaagacttaaagaatggg

SEQ ID NO: 223846 - DNA, 33 bp, Homo sapien
agaaagctggagctctgagacttaaagaatggg

SEQ ID NO: 223847 - DNA, 33 bp, Homo sapien
tcaccaaagtggattaccaactttataacaaaa

SEQ ID NO: 223848 - DNA, 33 bp, Homo sapien
tcaccaaagtggattatcaactttataacaaaa

SEQ ID NO: 223849 - DNA, 33 bp, Homo sapien
ctccctttataggcaccgtctaatgactgactc

SEQ ID NO: 223850 - DNA, 33 bp, Homo sapien
ctccctttataggcactgtctaatgactgactc

SEQ ID NO: 223851 - DNA, 33 bp, Homo sapien
ggtggtattttcgccacgtacatccttaccttc

SEQ ID NO: 223852 - DNA, 33 bp, Homo sapien
ggtggtattttcgccatgtacatccttaccttc

SEQ ID NO: 223853 - DNA, 33 bp, Homo sapien
ttttaagaactcaaagaattgtagccggtatgg

SEQ ID NO: 223854 - DNA, 33 bp, Homo sapien
ttttaagaactcaaaggattgtagccggtatgg

SEQ ID NO: 223855 - DNA, 33 bp, Homo sapien
agggggatagctgggcaaagtatggaggctgga

SEQ ID NO: 223856 - DNA, 33 bp, Homo sapien
agggggatagctgggccaagtatggaggctgga

SEQ ID NO: 223857 - DNA, 33 bp, Homo sapien
ctctgacttcatcaggcagaagccaaaaccaag

SEQ ID NO: 223858 - DNA, 33 bp, Homo sapien
ctctgacttcatcaggtagaagccaaaaccaag

SEQ ID NO: 223859 - DNA, 33 bp, Homo sapien
taggatgtggaccacaaatttgtctctgagctt

SEQ ID NO: 223860 - DNA, 33 bp, Homo sapien
taggatgtggaccacagatttgtctctgagctt

SEQ ID NO: 223861 - DNA, 33 bp, Homo sapien
agcttcatacccacgaagtctcctctactccac

SEQ ID NO: 223862 - DNA, 33 bp, Homo sapien
agcttcatacccacgatgtctcctctactccac

SEQ ID NO: 223863 - DNA, 33 bp, Homo sapien
ttttgagaacaggtcacaggttttccagactgc

SEQ ID NO: 223864 - DNA, 33 bp, Homo sapien
ttttgagaacaggtcataggttttccagactgc

SEQ ID NO: 223865 - DNA, 33 bp, Homo sapien
tcttactcttcatgaacgtataccagctttgcc

SEQ ID NO: 223866 - DNA, 33 bp, Homo sapien
tcttactcttcatgaatgtataccagctttgcc

SEQ ID NO: 223867 - DNA, 33 bp, Homo sapien
acacactgagtcttgcggagcacacaccctccc

SEQ ID NO: 223868 - DNA, 33 bp, Homo sapien
acacactgagtcttgctgagcacacaccctccc

SEQ ID NO: 223869 - DNA, 33 bp, Homo sapien
ggtcctttcctctccaagtaacttcatctctta

SEQ ID NO: 223870 - DNA, 33 bp, Homo sapien
ggtcctttcctctccaggtaacttcatctctta

SEQ ID NO: 223871 - DNA, 33 bp, Homo sapien
tgttagagacagaggaacaagattcagggtgag

SEQ ID NO: 223872 - DNA, 33 bp, Homo sapien
tgttagagacagaggatcaagattcagggtgag

SEQ ID NO: 223873 - DNA, 33 bp, Homo sapien
ggacaggagtcttttccattgtgcagggaagta

SEQ ID NO: 223874 - DNA, 33 bp, Homo sapien
ggacaggagtcttttcgattgtgcagggaagta

SEQ ID NO: 223875 - DNA, 33 bp, Homo sapien
aaccaagaagcactcaatacatgctccatacat

SEQ ID NO: 223876 - DNA, 33 bp, Homo sapien
aaccaagaagcactcagtacatgctccatacat

SEQ ID NO: 223877 - DNA, 33 bp, Homo sapien
ggaagatggagagacacggcagctgagtaattt

SEQ ID NO: 223878 - DNA, 33 bp, Homo sapien
ggaagatggagagacatggcagctgagtaattt

SEQ ID NO: 223879 - DNA, 33 bp, Homo sapien
aggagggcgctctacaccctttcttttgtctta

SEQ ID NO: 223880 - DNA, 33 bp, Homo sapien
aggagggcgctctacagcctttcttttgtctta

SEQ ID NO: 223881 - DNA, 33 bp, Homo sapien
attagaaagtcaaaacaccctgtgcggaattcc

SEQ ID NO: 223882 - DNA, 33 bp, Homo sapien
attagaaagtcaaaacgccctgtgcggaattcc

SEQ ID NO: 223883 - DNA, 33 bp, Homo sapien
gcactgaaatgttatcaagaccccaaccatgcc

SEQ ID NO: 223884 - DNA, 33 bp, Homo sapien
gcactgaaatgttatccagaccccaaccatgcc

SEQ ID NO: 223885 - DNA, 33 bp, Homo sapien
tctaagtatttagaacagtatctagagctaaat

SEQ ID NO: 223886 - DNA, 33 bp, Homo sapien
tctaagtatttagaactgtatctagagctaaat

SEQ ID NO: 223887 - DNA, 33 bp, Homo sapien
atgcctgataataataacaccaaatgtttactg

SEQ ID NO: 223888 - DNA, 33 bp, Homo sapien
atgcctgataataatatcaccaaatgtttactg

SEQ ID NO: 223889 - DNA, 33 bp, Homo sapien
gaatagatgagactgaagaagttagctgtgata

SEQ ID NO: 223890 - DNA, 33 bp, Homo sapien
gaatagatgagactgaggaagttagctgtgata

SEQ ID NO: 223891 - DNA, 33 bp, Homo sapien
ggtggaagacacacataagatgccggcctgggg

SEQ ID NO: 223892 - DNA, 33 bp, Homo sapien
ggtggaagacacacatgagatgccggcctgggg

SEQ ID NO: 223893 - DNA, 33 bp, Homo sapien
tctccaggtacgagaactgtaatttcgaccctg

SEQ ID NO: 223894 - DNA, 33 bp, Homo sapien
tctccaggtacgagaagtgtaatttcgaccctg

SEQ ID NO: 223895 - DNA, 33 bp, Homo sapien
accttgtcctgggatcagaaggcacttcacaca

SEQ ID NO: 223896 - DNA, 33 bp, Homo sapien
accttgtcctgggatccgaaggcacttcacaca

SEQ ID NO: 223897 - DNA, 33 bp, Homo sapien
cagacaagtagacaaacagacaagtagaacatg

SEQ ID NO: 223898 - DNA, 33 bp, Homo sapien
cagacaagtagacaaatagacaagtagaacatg

SEQ ID NO: 223899 - DNA, 33 bp, Homo sapien
aggaccagcgtagggacgaagaaaggtggacag

SEQ ID NO: 223900 - DNA, 33 bp, Homo sapien
aggaccagcgtagggatgaagaaaggtggacag

SEQ ID NO: 223901 - DNA, 33 bp, Homo sapien
atgttacagatgaggaacccaaaggtcagagag

SEQ ID NO: 223902 - DNA, 33 bp, Homo sapien
atgttacagatgaggatcccaaaggtcagagag

SEQ ID NO: 223903 - DNA, 33 bp, Homo sapien
cttccttttaggtcccacgctacatagagactg

SEQ ID NO: 223904 - DNA, 33 bp, Homo sapien
cttccttttaggtcccgcgctacatagagactg

SEQ ID NO: 223905 - DNA, 33 bp, Homo sapien
cataatcatctaaaaacgttcttagaggaaaat

SEQ ID NO: 223906 - DNA, 33 bp, Homo sapien
cataatcatctaaaaaggttcttagaggaaaat

SEQ ID NO: 223907 - DNA, 33 bp, Homo sapien
gctttcatctgactataacttttttctagatat

SEQ ID NO: 223908 - DNA, 33 bp, Homo sapien
gctttcatctgactatcacttttttctagatat

SEQ ID NO: 223909 - DNA, 33 bp, Homo sapien
gaatgaaaagacaatgaacaggagaaaatatac

SEQ ID NO: 223910 - DNA, 33 bp, Homo sapien
gaatgaaaagacaatggacaggagaaaatatac

SEQ ID NO: 223911 - DNA, 33 bp, Homo sapien
cttctccagagcaagaacccaaaaggaaacgaa

SEQ ID NO: 223912 - DNA, 33 bp, Homo sapien
cttctccagagcaagatcccaaaaggaaacgaa

SEQ ID NO: 223913 - DNA, 33 bp, Homo sapien
gtagttggagaggaccacatcaagaagaacgaa

SEQ ID NO: 223914 - DNA, 33 bp, Homo sapien
gtagttggagaggaccgcatcaagaagaacgaa

SEQ ID NO: 223915 - DNA, 33 bp, Homo sapien
tcagaacaggtgcatacagtgaagagagaaaat

SEQ ID NO: 223916 - DNA, 33 bp, Homo sapien
tcagaacaggtgcatatagtgaagagagaaaat

SEQ ID NO: 223917 - DNA, 33 bp, Homo sapien
agcatctcagcctagcaagggtagtcattctcc

SEQ ID NO: 223918 - DNA, 33 bp, Homo sapien
agcatctcagcctagcgagggtagtcattctcc

SEQ ID NO: 223919 - DNA, 33 bp, Homo sapien
tgcactcctgtcccaaactcacagcaaacgcgt

SEQ ID NO: 223920 - DNA, 33 bp, Homo sapien
tgcactcctgtcccaacctcacagcaaacgcgt

SEQ ID NO: 223921 - DNA, 33 bp, Homo sapien
ctctcccaggttcaaggattaggtcaatttgca

SEQ ID NO: 223922 - DNA, 33 bp, Homo sapien
ctctcccaggttcaagtattaggtcaatttgca

SEQ ID NO: 223923 - DNA, 33 bp, Homo sapien
ggaaaagcctaagagaaagaaaagcaaaacttt

SEQ ID NO: 223924 - DNA, 33 bp, Homo sapien
ggaaaagcctaagagagagaaaagcaaaacttt

SEQ ID NO: 223925 - DNA, 33 bp, Homo sapien
ataaaaaacagaaagcaacacattcagagtgaa

SEQ ID NO: 223926 - DNA, 33 bp, Homo sapien
ataaaaaacagaaagcgacacattcagagtgaa

SEQ ID NO: 223927 - DNA, 33 bp, Homo sapien
atacagtccacctccccgacactccactctctg

SEQ ID NO: 223928 - DNA, 33 bp, Homo sapien
atacagtccacctccctgacactccactctctg

SEQ ID NO: 223929 - DNA, 33 bp, Homo sapien
atgcaaaggtgaaaagcaaggatttagaaatca

SEQ ID NO: 223930 - DNA, 33 bp, Homo sapien
atgcaaaggtgaaaaggaaggatttagaaatca

SEQ ID NO: 223931 - DNA, 33 bp, Homo sapien
ctctcggctctttcaccctgggctcttttcatt

SEQ ID NO: 223932 - DNA, 33 bp, Homo sapien
ctctcggctctttcactctgggctcttttcatt

SEQ ID NO: 223933 - DNA, 33 bp, Homo sapien
gcctctcaggttcaaacctatcaggaaagaggg

SEQ ID NO: 223934 - DNA, 33 bp, Homo sapien
gcctctcaggttcaaagctatcaggaaagaggg

SEQ ID NO: 223935 - DNA, 33 bp, Homo sapien
cccactgcagggtgaaaaacagacttattagaa

SEQ ID NO: 223936 - DNA, 33 bp, Homo sapien
cccactgcagggtgaagaacagacttattagaa

SEQ ID NO: 223937 - DNA, 33 bp, Homo sapien
gaagatgccatcctataagcagtggacaccaca

SEQ ID NO: 223938 - DNA, 33 bp, Homo sapien
gaagatgccatcctatgagcagtggacaccaca

SEQ ID NO: 223939 - DNA, 33 bp, Homo sapien
gggagggcgttccaaaagctatgaaaacattgg

SEQ ID NO: 223940 - DNA, 33 bp, Homo sapien
gggagggcgttccaaaggctatgaaaacattgg

SEQ ID NO: 223941 - DNA, 33 bp, Homo sapien
tggcttggcctccaaacgcacttgtggctgacc

SEQ ID NO: 223942 - DNA, 33 bp, Homo sapien
tggcttggcctccaaatgcacttgtggctgacc

SEQ ID NO: 223943 - DNA, 33 bp, Homo sapien
tgtcacagggagagtacgccatgtgtatgcaac

SEQ ID NO: 223944 - DNA, 33 bp, Homo sapien
tgtcacagggagagtatgccatgtgtatgcaac

SEQ ID NO: 223945 - DNA, 33 bp, Homo sapien; identical to SEQ ID NO: 223943

SEQ ID NO: 223946 - DNA, 33 bp, Homo sapien; identical to SEQ ID NO: 223944

SEQ ID NO: 223947 - DNA, 33 bp, Homo sapien
gatagtacgaaaaataccacagggtgtacctgg

SEQ ID NO: 223948 - DNA, 33 bp, Homo sapien
gatagtacgaaaaatatcacagggtgtacctgg

SEQ ID NO: 223949 - DNA, 33 bp, Homo sapien; identical to SEQ ID NO: 223947

SEQ ID NO: 223950 - DNA, 33 bp, Homo sapien; identical to SEQ ID NO: 223948

SEQ ID NO: 223951 - DNA, 33 bp, Homo sapien; identical to SEQ ID NO: 223947

SEQ ID NO: 223952 - DNA, 33 bp, Homo sapien; identical to SEQ ID NO: 223948

SEQ ID NO: 223953 - DNA, 33 bp, Homo sapien
gtctctgtcaccactgcatatgtcctctggttt

SEQ ID NO: 223954 - DNA, 33 bp, Homo sapien
gtctctgtcaccactgtatatgtcctctggttt

SEQ ID NO: 223955 - DNA, 33 bp, Homo sapien
ctctcaaaaccaaagaatcagcatatactcaat

SEQ ID NO: 223956 - DNA, 33 bp, Homo sapien
ctctcaaaaccaaagagtcagcatatactcaat

SEQ ID NO: 223957 - DNA, 33 bp, Homo sapien
attttgattgtggtgacggtatcacagtgtatg

SEQ ID NO: 223958 - DNA, 33 bp, Homo sapien
attttgattgtggtgatggtatcacagtgtatg

SEQ ID NO: 223959 - DNA, 33 bp, Homo sapien
gtgaccttatcaggaccccggaaaaggagaggg

SEQ ID NO: 223960 - DNA, 33 bp, Homo sapien
gtgaccttatcaggactccggaaaaggagaggg

SEQ ID NO: 223961 - DNA, 33 bp, Homo sapien
ctaaaatactactgtgaacaaagcccagatccc

SEQ ID NO: 223962 - DNA, 33 bp, Homo sapien
ctaaaatactactgtggacaaagcccagatccc

SEQ ID NO: 223963 - DNA, 33 bp, Homo sapien
ctctgctggccgtgacaagacagtgcttcttcg

SEQ ID NO: 223964 - DNA, 33 bp, Homo sapien
ctctgctggccgtgacgagacagtgcttcttcg

SEQ ID NO: 223965 - DNA, 33 bp, Homo sapien
tgaaggaaactccagaaagggacgtgacttgcc

SEQ ID NO: 223966 - DNA, 33 bp, Homo sapien
tgaaggaaactccagagagggacgtgacttgcc

SEQ ID NO: 223967 - DNA, 33 bp, Homo sapien
ttcttggcgcactaccagacactgggggacaca

SEQ ID NO: 223968 - DNA, 33 bp, Homo sapien
ttcttggcgcactaccggacactgggggacaca

SEQ ID NO: 223969 - DNA, 33 bp, Homo sapien
ctggtgaccaaagttacggtgcttggccactct

SEQ ID NO: 223970 - DNA, 33 bp, Homo sapien
ctggtgaccaaagttatggtgcttggccactct

SEQ ID NO: 223971 - DNA, 33 bp, Homo sapien
ggccaacatgtcctggaaaatgagatgaatgaa

SEQ ID NO: 223972 - DNA, 33 bp, Homo sapien
ggccaacatgtcctggcaaatgagatgaatgaa

SEQ ID NO: 223973 - DNA, 33 bp, Homo sapien
ccccataacagtcacaatctaccctgacgtggg

SEQ ID NO: 223974 - DNA, 33 bp, Homo sapien
ccccataacagtcacactctaccctgacgtggg

SEQ ID NO: 223975 - DNA, 33 bp, Homo sapien
gagacataactggaagaaggctgggcataacca

SEQ ID NO: 223976 - DNA, 33 bp, Homo sapien
gagacataactggaaggaggctgggcataacca

SEQ ID NO: 223977 - DNA, 33 bp, Homo sapien
gggggcttttttctaactggcacaaaggctgga

SEQ ID NO: 223978 - DNA, 33 bp, Homo sapien
gggggcttttttctaattggcacaaaggctgga

SEQ ID NO: 223979 - DNA, 33 bp, Homo sapien
aagcccccttcctcaccggctgtttgacctggt

SEQ ID NO: 223980 - DNA, 33 bp, Homo sapien
aagcccccttcctcacgggctgtttgacctggt

SEQ ID NO: 223981 - DNA, 33 bp, Homo sapien
tagtgtgtgtatagaacttccagttacaaagtg

SEQ ID NO: 223982 - DNA, 33 bp, Homo sapien
tagtgtgtgtatagaatttccagttacaaagtg

SEQ ID NO: 223983 - DNA, 33 bp, Homo sapien
gaagctgggtctctccagaggggcggtcagatg

SEQ ID NO: 223984 - DNA, 33 bp, Homo sapien
gaagctgggtctctccggaggggcggtcagatg

SEQ ID NO: 223985 - DNA, 33 bp, Homo sapien
agagatgcccgaggtcaaagatggctgagtcct

SEQ ID NO: 223986 - DNA, 33 bp, Homo sapien
agagatgcccgaggtcgaagatggctgagtcct

SEQ ID NO: 223987 - DNA, 33 bp, Homo sapien
agctctctgtgactcaggttgaaagacttccct

SEQ ID NO: 223988 - DNA, 33 bp, Homo sapien
agctctctgtgactcatgttgaaagacttccct

SEQ ID NO: 223989 - DNA, 33 bp, Homo sapien
catcagccattcctgcaagagggcacccctggc

SEQ ID NO: 223990 - DNA, 33 bp, Homo sapien
catcagccattcctgcgagagggcacccctggc

SEQ ID NO: 223991 - DNA, 33 bp, Homo sapien
gctaattcctgcaaagaatctgggacatatctg

SEQ ID NO: 223992 - DNA, 33 bp, Homo sapien
gctaattcctgcaaagcatctgggacatatctg

SEQ ID NO: 223993 - DNA, 33 bp, Homo sapien
actacagtttgaggaacgtttgttgaactaaac

SEQ ID NO: 223994 - DNA, 33 bp, Homo sapien
actacagtttgaggaatgtttgttgaactaaac

SEQ ID NO: 223995 - DNA, 33 bp, Homo sapien
agcatgggtgtcccccaatctctggcagctagc

SEQ ID NO: 223996 - DNA, 33 bp, Homo sapien
agcatgggtgtccccccatctctggcagctagc

SEQ ID NO: 223997 - DNA, 33 bp, Homo sapien
agattgaaagccagaaaagaatatgaagaaatg

SEQ ID NO: 223998 - DNA, 33 bp, Homo sapien
agattgaaagccagaagagaatatgaagaaatg

SEQ ID NO: 223999 - DNA, 33 bp, Homo sapien
gtgaggagagaaaaccagcccagtgcattacag

SEQ ID NO: 224000 - DNA, 33 bp, Homo sapien
gtgaggagagaaaaccggcccagtgcattacag

SEQ ID NO: 224001 - DNA, 33 bp, Homo sapien
ccaggagggagattacagaggcgccaagcccag

SEQ ID NO: 224002 - DNA, 33 bp, Homo sapien
ccaggagggagattacggaggcgccaagcccag

SEQ ID NO: 224003 - DNA, 33 bp, Homo sapien
cctctccaggaaacacacccctcacgtgttgat

SEQ ID NO: 224004 - DNA, 33 bp, Homo sapien
cctctccaggaaacacgcccctcacgtgttgat

SEQ ID NO: 224005 - DNA, 33 bp, Homo sapien
tattccaatctggaaaactccacccttactttc

SEQ ID NO: 224006 - DNA, 33 bp, Homo sapien
tattccaatctggaaacctccacccttactttc

SEQ ID NO: 224007 - DNA, 33 bp, Homo sapien
gaatcctcctctaaaccgtaacctctctgcagg

SEQ ID NO: 224008 - DNA, 33 bp, Homo sapien
gaatcctcctctaaactgtaacctctctgcagg

SEQ ID NO: 224009 - DNA, 33 bp, Homo sapien
ggaatgaatgaagaaacggtgaggctgggtgag

SEQ ID NO: 224010 - DNA, 33 bp, Homo sapien
ggaatgaatgaagaaatggtgaggctgggtgag

SEQ ID NO: 224011 - DNA, 33 bp, Homo sapien
tagagttgctggtttcaaatattaaagcttaaa

SEQ ID NO: 224012 - DNA, 33 bp, Homo sapien
tagagttgctggtttcgaatattaaagcttaaa

SEQ ID NO: 224013 - DNA, 33 bp, Homo sapien
ggcaacatggaaataacgagacctttaatgaaa

SEQ ID NO: 224014 - DNA, 33 bp, Homo sapien
ggcaacatggaaataatgagacctttaatgaaa

SEQ ID NO: 224015 - DNA, 33 bp, Homo sapien
catcattcctggtatacagcaggtaccctttaa

SEQ ID NO: 224016 - DNA, 33 bp, Homo sapien
catcattcctggtatatagcaggtaccctttaa

SEQ ID NO: 224017 - DNA, 33 bp, Homo sapien
tgcattatacgactcactcagaaagccaaaacc

SEQ ID NO: 224018 - DNA, 33 bp, Homo sapien
tgcattatacgactcattcagaaagccaaaacc

SEQ ID NO: 224019 - DNA, 33 bp, Homo sapien
cattttccctgagccaatgagacttacccatgt

SEQ ID NO: 224020 - DNA, 33 bp, Homo sapien
cattttccctgagccagtgagacttacccatgt

SEQ ID NO: 224021 - DNA, 33 bp, Homo sapien
tgatgcaatagcccacaaaatccccaaaagatc

SEQ ID NO: 224022 - DNA, 33 bp, Homo sapien
tgatgcaatagcccacgaaatccccaaaagatc

SEQ ID NO: 224023 - DNA, 33 bp, Homo sapien
tatactgctacttctcaacttttcaggtttgag

SEQ ID NO: 224024 - DNA, 33 bp, Homo sapien
tatactgctacttctcgacttttcaggtttgag

SEQ ID NO: 224025 - DNA, 33 bp, Homo sapien
gctgccagggagaacacgcaccaggtggccgat

SEQ ID NO: 224026 - DNA, 33 bp, Homo sapien
gctgccagggagaacatgcaccaggtggccgat

SEQ ID NO: 224027 - DNA, 33 bp, Homo sapien
ttcagttaaagcacaacgacttccagtgaggct

SEQ ID NO: 224028 - DNA, 33 bp, Homo sapien
ttcagttaaagcacaaggacttccagtgaggct

SEQ ID NO: 224029 - DNA, 33 bp, Homo sapien
gaagatgaaattaaccaccgcacagctgctgag

SEQ ID NO: 224030 - DNA, 33 bp, Homo sapien
gaagatgaaattaaccgccgcacagctgctgag

SEQ ID NO: 224031 - DNA, 33 bp, Homo sapien
acatgggacaaaggaccacaggatcctctcacc

SEQ ID NO: 224032 - DNA, 33 bp, Homo sapien
acatgggacaaaggactacaggatcctctcacc

SEQ ID NO: 224033 - DNA, 33 bp, Homo sapien
aaatctccctctataacctccatcctttgctct

SEQ ID NO: 224034 - DNA, 33 bp, Homo sapien
aaatctccctctataatctccatcctttgctct

SEQ ID NO: 224035 - DNA, 33 bp, Homo sapien
acctgggctctgtggcaagggtggccaaccttt

SEQ ID NO: 224036 - DNA, 33 bp, Homo sapien
acctgggctctgtggcgagggtggccaaccttt

SEQ ID NO: 224037 - DNA, 33 bp, Homo sapien
taaaaaatcacacacacgaaaatctcgtaagtt

SEQ ID NO: 224038 - DNA, 33 bp, Homo sapien
taaaaaatcacacacatgaaaatctcgtaagtt

SEQ ID NO: 224039 - DNA, 33 bp, Homo sapien
ggttctgggcaggcaaactttttcttagagctt

SEQ ID NO: 224040 - DNA, 33 bp, Homo sapien
ggttctgggcaggcaagctttttcttagagctt

SEQ ID NO: 224041 - DNA, 33 bp, Homo sapien
cacaagtctaatttaaatcttccatgctccagg

SEQ ID NO: 224042 - DNA, 33 bp, Homo sapien
cacaagtctaatttaattcttccatgctccagg

SEQ ID NO: 224043 - DNA, 33 bp, Homo sapien
gaagaaatgctgccaacgtttcagaattgcctg

SEQ ID NO: 224044 - DNA, 33 bp, Homo sapien
gaagaaatgctgccaatgtttcagaattgcctg

SEQ ID NO: 224045 - DNA, 33 bp, Homo sapien
ggagaaatgactgtgaaatttcccaagctcata

SEQ ID NO: 224046 - DNA, 33 bp, Homo sapien
ggagaaatgactgtgagatttcccaagctcata

SEQ ID NO: 224047 - DNA, 33 bp, Homo sapien
ctctgtccattacctgaatatgtccagtctgcc

SEQ ID NO: 224048 - DNA, 33 bp, Homo sapien
ctctgtccattacctggatatgtccagtctgcc

SEQ ID NO: 224049 - DNA, 33 bp, Homo sapien
atgttaattatccttacagtgatctacagagtt

SEQ ID NO: 224050 - DNA, 33 bp, Homo sapien
atgttaattatccttagagtgatctacagagtt

SEQ ID NO: 224051 - DNA, 33 bp, Homo sapien
aaatgtaatactgagcaagaaaaacaaaacaca

SEQ ID NO: 224052 - DNA, 33 bp, Homo sapien
aaatgtaatactgagcgagaaaaacaaaacaca

SEQ ID NO: 224053 - DNA, 33 bp, Homo sapien
agcagaagggcactataaggtgtgagtcctctg

SEQ ID NO: 224054 - DNA, 33 bp, Homo sapien
agcagaagggcactatgaggtgtgagtcctctg

SEQ ID NO: 224055 - DNA, 33 bp, Homo sapien
tgacatgtttaaatacaacggagtgtgaggcag

SEQ ID NO: 224056 - DNA, 33 bp, Homo sapien
tgacatgtttaaatacgacggagtgtgaggcag

SEQ ID NO: 224057 - DNA, 33 bp, Homo sapien
tattcctcctgccctacggtcactctcactcca

SEQ ID NO: 224058 - DNA, 33 bp, Homo sapien
tattcctcctgccctatggtcactctcactcca

SEQ ID NO: 224059 - DNA, 33 bp, Homo sapien
atcctttaactcatcaacttatgaggtggttgc

SEQ ID NO: 224060 - DNA, 33 bp, Homo sapien
atcctttaactcatcagcttatgaggtggttgc

SEQ ID NO: 224061 - DNA, 33 bp, Homo sapien
ctggtagagcatatccaaattcatgagaaaggc

SEQ ID NO: 224062 - DNA, 33 bp, Homo sapien
ctggtagagcatatccgaattcatgagaaaggc

SEQ ID NO: 224063 - DNA, 33 bp, Homo sapien
tctctagctgtgtaaactcaggcaattacttag

SEQ ID NO: 224064 - DNA, 33 bp, Homo sapien
tctctagctgtgtaaattcaggcaattacttag

SEQ ID NO: 224065 - DNA, 33 bp, Homo sapien
ggagggaaagccttaaactatttcccaggagag

SEQ ID NO: 224066 - DNA, 33 bp, Homo sapien
ggagggaaagccttaacctatttcccaggagag

SEQ ID NO: 224067 - DNA, 33 bp, Homo sapien
gaaggtctgggatgagcaccactgttatgcatc

SEQ ID NO: 224068 - DNA, 33 bp, Homo sapien
gaaggtctgggatgagtaccactgttatgcatc

SEQ ID NO: 224069 - DNA, 33 bp, Homo sapien
taaagtgaccatatgacgagatttccaccaaac

SEQ ID NO: 224070 - DNA, 33 bp, Homo sapien
taaagtgaccatatgatgagatttccaccaaac

SEQ ID NO: 224071 - DNA, 33 bp, Homo sapien
tcaggcaagaccaatgcatacagcaaaaaaaac

SEQ ID NO: 224072 - DNA, 33 bp, Homo sapien
tcaggcaagaccaatgtatacagcaaaaaaaac

SEQ ID NO: 224073 - DNA, 33 bp, Homo sapien
tgacatcataacagtgcagcattctcagcctct

SEQ ID NO: 224074 - DNA, 33 bp, Homo sapien
tgacatcataacagtgtagcattctcagcctct

SEQ ID NO: 224075 - DNA, 33 bp, Homo sapien
tctgtgaagcatggaaagcctcatgaattggcc

SEQ ID NO: 224076 - DNA, 33 bp, Homo sapien
tctgtgaagcatggaaggcctcatgaattggcc

SEQ ID NO: 224077 - DNA, 33 bp, Homo sapien
ttccaccagcagatcaaggaaacaatgctctct

SEQ ID NO: 224078 - DNA, 33 bp, Homo sapien
ttccaccagcagatcagggaaacaatgctctct

SEQ ID NO: 224079 - DNA, 33 bp, Homo sapien
tggcctcagagctcaaccacgtgcaggaggtgc

SEQ ID NO: 224080 - DNA, 33 bp, Homo sapien
tggcctcagagctcaatcacgtgcaggaggtgc

SEQ ID NO: 224081 - DNA, 33 bp, Homo sapien
gcagttctaccaaaaccgcgagtgctgccagag

SEQ ID NO: 224082 - DNA, 33 bp, Homo sapien
gcagttctaccaaaactgcgagtgctgccagag

SEQ ID NO: 224083 - DNA, 33 bp, Homo sapien; identical to SEQ ID NO: 224081

SEQ ID NO: 224084 - DNA, 33 bp, Homo sapien; identical to SEQ ID NO: 224082

SEQ ID NO: 224085 - DNA, 33 bp, Homo sapien
aactccgatcttctgcgctgcagggggtgtctt

SEQ ID NO: 224086 - DNA, 33 bp, Homo sapien
aactccgatcttctgctctgcagggggtgtctt

SEQ ID NO: 224087 - DNA, 33 bp, Homo sapien
gggggtgtcttctctcactttgacaattatagg

SEQ ID NO: 224088 - DNA, 33 bp, Homo sapien
gggggtgtcttctctccctttgacaattatagg

SEQ ID NO: 224089 - DNA, 33 bp, Homo sapien
actgaatccaggcaaccaccatgtggcagtgat

SEQ ID NO: 224090 - DNA, 33 bp, Homo sapien
actgaatccaggcaactaccatgtggcagtgat

SEQ ID NO: 224091 - DNA, 33 bp, Homo sapien
gaatcagtttcttccaagtcccagatggtgtcc

SEQ ID NO: 224092 - DNA, 33 bp, Homo sapien
gaatcagtttcttccatgtcccagatggtgtcc

SEQ ID NO: 224093 - DNA, 33 bp, Homo sapien
tcccatcagcaatgacacctggaactctgaagc

SEQ ID NO: 224094 - DNA, 33 bp, Homo sapien
tcccatcagcaatgacgcctggaactctgaagc

SEQ ID NO: 224095 - DNA, 33 bp, Homo sapien
gtgacaaaagtcagagcatcagagtgtcagaaa

SEQ ID NO: 224096 - DNA, 33 bp, Homo sapien
gtgacaaaagtcagagtatcagagtgtcagaaa

SEQ ID NO: 224097 - DNA, 33 bp, Homo sapien
ttggatccttgaggacaggggctgtgtattaaa

SEQ ID NO: 224098 - DNA, 33 bp, Homo sapien
ttggatccttgaggacgggggctgtgtattaaa

SEQ ID NO: 224099 - DNA, 33 bp, Homo sapien
aaccacggtatccaccaccctgtgaacacgtct

SEQ ID NO: 224100 - DNA, 33 bp, Homo sapien
aaccacggtatccaccgccctgtgaacacgtct

SEQ ID NO: 224101 - DNA, 33 bp, Homo sapien
ttcttttcttggccaggaattctagtattttac

SEQ ID NO: 224102 - DNA, 33 bp, Homo sapien
ttcttttcttggccagtaattctagtattttac

SEQ ID NO: 224103 - DNA, 33 bp, Homo sapien
gatgcctggaaagcaccgagcacattctgccca

SEQ ID NO: 224104 - DNA, 33 bp, Homo sapien
gatgcctggaaagcactgagcacattctgccca

SEQ ID NO: 224105 - DNA, 33 bp, Homo sapien
cacatacttgatacaaattagtgttttctgtgc

SEQ ID NO: 224106 - DNA, 33 bp, Homo sapien
cacatacttgatacaacttagtgttttctgtgc

SEQ ID NO: 224107 - DNA, 33 bp, Homo sapien
ttctcctgtcaacagtaaagaattttcaattct

SEQ ID NO: 224108 - DNA, 33 bp, Homo sapien
ttctcctgtcaacagtgaagaattttcaattct

SEQ ID NO: 224109 - DNA, 33 bp, Homo sapien
atgttcaaagatgcccagctctgttgaaaggaa

SEQ ID NO: 224110 - DNA, 33 bp, Homo sapien
atgttcaaagatgcccggctctgttgaaaggaa

SEQ ID NO: 224111 - DNA, 33 bp, Homo sapien
aggtaaagaatcgcaacatcagaacttggttcc

SEQ ID NO: 224112 - DNA, 33 bp, Homo sapien
aggtaaagaatcgcaatatcagaacttggttcc

SEQ ID NO: 224113 - DNA, 33 bp, Homo sapien
agtagtgtcaagtgagaaaagaacaaactttta

SEQ ID NO: 224114 - DNA, 33 bp, Homo sapien
agtagtgtcaagtgagcaaagaacaaactttta

SEQ ID NO: 224115 - DNA, 33 bp, Homo sapien
ctgcttatctttgttgcagagacaagtttaacc

SEQ ID NO: 224116 - DNA, 33 bp, Homo sapien
ctgcttatctttgttggagagacaagtttaacc

SEQ ID NO: 224117 - DNA, 33 bp, Homo sapien
gaaagaagaaagaaaccggctaagggaaatcag

SEQ ID NO: 224118 - DNA, 33 bp, Homo sapien
gaaagaagaaagaaactggctaagggaaatcag

SEQ ID NO: 224119 - DNA, 33 bp, Homo sapien
tagagaccagcacgagacaggcccctccagagc

SEQ ID NO: 224120 - DNA, 33 bp, Homo sapien
tagagaccagcacgagtcaggcccctccagagc

SEQ ID NO: 224121 - DNA, 33 bp, Homo sapien
gtttctattttgcttcccttgtttagtgtgtcc

SEQ ID NO: 224122 - DNA, 33 bp, Homo sapien
gtttctattttgcttcgcttgtttagtgtgtcc

SEQ ID NO: 224123 - DNA, 33 bp, Homo sapien
gactttgtgttgctccccttgaaggcagaagtc

SEQ ID NO: 224124 - DNA, 33 bp, Homo sapien
gactttgtgttgctcctcttgaaggcagaagtc

SEQ ID NO: 224125 - DNA, 33 bp, Homo sapien
aggatgggcttggtggaaacctcgtgggacata

SEQ ID NO: 224126 - DNA, 33 bp, Homo sapien
aggatgggcttggtgggaacctcgtgggacata

SEQ ID NO: 224127 - DNA, 33 bp, Homo sapien
aactggttcctctcaaaggagagagcagcattc

SEQ ID NO: 224128 - DNA, 33 bp, Homo sapien
aactggttcctctcaacggagagagcagcattc

SEQ ID NO: 224129 - DNA, 33 bp, Homo sapien
gtgatttcttctccaaacctaacctcttgggag

SEQ ID NO: 224130 - DNA, 33 bp, Homo sapien
gtgatttcttctccaaccctaacctcttgggag

SEQ ID NO: 224131 - DNA, 33 bp, Homo sapien
catggtatgtacatttaaaaattgctgttgtac

SEQ ID NO: 224132 - DNA, 33 bp, Homo sapien
catggtatgtacatttgaaaattgctgttgtac

SEQ ID NO: 224133 - DNA, 33 bp, Homo sapien
gctgctcctgggctacaatctcacaggcaggag

SEQ ID NO: 224134 - DNA, 33 bp, Homo sapien
gctgctcctgggctacgatctcacaggcaggag

SEQ ID NO: 224135 - DNA, 33 bp, Homo sapien
gggtgagccggggtgacggcatacacataaatc

SEQ ID NO: 224136 - DNA, 33 bp, Homo sapien
gggtgagccggggtgatggcatacacataaatc

SEQ ID NO: 224137 - DNA, 33 bp, Homo sapien
tttcctgagaagataggatcagaaggggatttg

SEQ ID NO: 224138 - DNA, 33 bp, Homo sapien
tttcctgagaagatagtatcagaaggggatttg

SEQ ID NO: 224139 - DNA, 33 bp, Homo sapien
ctattatcaaacttccaaattcttgtggatctg

SEQ ID NO: 224140 - DNA, 33 bp, Homo sapien
ctattatcaaacttccgaattcttgtggatctg

SEQ ID NO: 224141 - DNA, 33 bp, Homo sapien
aggggaatacaaataactagtaagtgtatgagg

SEQ ID NO: 224142 - DNA, 33 bp, Homo sapien
aggggaatacaaataagtagtaagtgtatgagg

SEQ ID NO: 224143 - DNA, 33 bp, Homo sapien
gtaccttgtaaacgaacaacggtatatacaagt

SEQ ID NO: 224144 - DNA, 33 bp, Homo sapien
gtaccttgtaaacgaataacggtatatacaagt

SEQ ID NO: 224145 - DNA, 33 bp, Homo sapien
ctccagggtcccttcacgttcctactcagagct

SEQ ID NO: 224146 - DNA, 33 bp, Homo sapien
ctccagggtcccttcaggttcctactcagagct

SEQ ID NO: 224147 - DNA, 33 bp, Homo sapien
cattctctgcctggaagatttcagtccagctct

SEQ ID NO: 224148 - DNA, 33 bp, Homo sapien
cattctctgcctggaatatttcagtccagctct

SEQ ID NO: 224149 - DNA, 33 bp, Homo sapien
gttttacagctgaagacgctgaggtacaaagag

SEQ ID NO: 224150 - DNA, 33 bp, Homo sapien
gttttacagctgaagatgctgaggtacaaagag

SEQ ID NO: 224151 - DNA, 33 bp, Homo sapien
tgggggtgataatacccgcctgaaaggattatt

SEQ ID NO: 224152 - DNA, 33 bp, Homo sapien
tgggggtgataatacctgcctgaaaggattatt

SEQ ID NO: 224153 - DNA, 33 bp, Homo sapien
cgtgggtctctgcaggcaacttgtaaatctcta

SEQ ID NO: 224154 - DNA, 33 bp, Homo sapien
cgtgggtctctgcaggtaacttgtaaatctcta

SEQ ID NO: 224155 - DNA, 33 bp, Homo sapien
agctttactaagttacccagctagtccagaatt

SEQ ID NO: 224156 - DNA, 33 bp, Homo sapien
agctttactaagttactcagctagtccagaatt

SEQ ID NO: 224157 - DNA, 33 bp, Homo sapien
ggacagatcgtaccacagggcggttaatacaag

SEQ ID NO: 224158 - DNA, 33 bp, Homo sapien
ggacagatcgtaccacggggcggttaatacaag

SEQ ID NO: 224159 - DNA, 33 bp, Homo sapien
aggatgggttgaagcacagtgggttgagaattg

SEQ ID NO: 224160 - DNA, 33 bp, Homo sapien
aggatgggttgaagcagagtgggttgagaattg

SEQ ID NO: 224161 - DNA, 33 bp, Homo sapien
gattccttgagactgacggttgcttggggacag

SEQ ID NO: 224162 - DNA, 33 bp, Homo sapien
gattccttgagactgatggttgcttggggacag

SEQ ID NO: 224163 - DNA, 33 bp, Homo sapien
taaagagcaaagcaaacgtgcccacagcaaatt

SEQ ID NO: 224164 - DNA, 33 bp, Homo sapien
taaagagcaaagcaaaggtgcccacagcaaatt

SEQ ID NO: 224165 - DNA, 33 bp, Homo sapien
ttaaggaagaagagccaatgagcttcctcagag

SEQ ID NO: 224166 - DNA, 33 bp, Homo sapien
ttaaggaagaagagccgatgagcttcctcagag

SEQ ID NO: 224167 - DNA, 33 bp, Homo sapien
ctgctcaaacacccaactccccattttgcttgg

SEQ ID NO: 224168 - DNA, 33 bp, Homo sapien
ctgctcaaacacccaattccccattttgcttgg

SEQ ID NO: 224169 - DNA, 33 bp, Homo sapien
ttggatgacaggggagaatttgggtggaagaga

SEQ ID NO: 224170 - DNA, 33 bp, Homo sapien
ttggatgacaggggagcatttgggtggaagaga

SEQ ID NO: 224171 - DNA, 33 bp, Homo sapien
caaagtaaactccatgcaagcagagattttgtc

SEQ ID NO: 224172 - DNA, 33 bp, Homo sapien
caaagtaaactccatggaagcagagattttgtc

SEQ ID NO: 224173 - DNA, 33 bp, Homo sapien
ttctctgcttctgccacgactgaactgctgcca

SEQ ID NO: 224174 - DNA, 33 bp, Homo sapien
ttctctgcttctgccatgactgaactgctgcca

SEQ ID NO: 224175 - DNA, 33 bp, Homo sapien
gactgtcatttatatacggctaaagtcaagttg

SEQ ID NO: 224176 - DNA, 33 bp, Homo sapien
gactgtcatttatatatggctaaagtcaagttg

SEQ ID NO: 224177 - DNA, 33 bp, Homo sapien
gtttgaaatctggttcactttgtaagttctggc

SEQ ID NO: 224178 - DNA, 33 bp, Homo sapien
gtttgaaatctggttcgctttgtaagttctggc

SEQ ID NO: 224179 - DNA, 33 bp, Homo sapien
ccaccatcaacctaacactggaaggatccctgg

SEQ ID NO: 224180 - DNA, 33 bp, Homo sapien
ccaccatcaacctaaccctggaaggatccctgg

SEQ ID NO: 224181 - DNA, 33 bp, Homo sapien
tcccaggcactggagaccctgtagtttgatgtc

SEQ ID NO: 224182 - DNA, 33 bp, Homo sapien
tcccaggcactggagatcctgtagtttgatgtc

SEQ ID NO: 224183 - DNA, 33 bp, Homo sapien
cttcctgtgtactgacaagaagactgaaaaatt

SEQ ID NO: 224184 - DNA, 33 bp, Homo sapien
cttcctgtgtactgaccagaagactgaaaaatt

SEQ ID NO: 224185 - DNA, 33 bp, Homo sapien
gtgacatttctagatcccagtctttaaattggt

SEQ ID NO: 224186 - DNA, 33 bp, Homo sapien
gtgacatttctagatctcagtctttaaattggt

SEQ ID NO: 224187 - DNA, 33 bp, Homo sapien
tctgggactactcacaccaagacagtggagaca

SEQ ID NO: 224188 - DNA, 33 bp, Homo sapien
tctgggactactcacatcaagacagtggagaca

SEQ ID NO: 224189 - DNA, 33 bp, Homo sapien
atccacatgctgggaaagagagaaggaaatgat

SEQ ID NO: 224190 - DNA, 33 bp, Homo sapien
atccacatgctgggaaggagagaaggaaatgat

SEQ ID NO: 224191 - DNA, 33 bp, Homo sapien
cagagggtggaagcaccgccgccaaatctccag

SEQ ID NO: 224192 - DNA, 33 bp, Homo sapien
cagagggtggaagcactgccgccaaatctccag

SEQ ID NO: 224193 - DNA, 33 bp, Homo sapien
cagaaccaaatagaacactgcttttatttaggg

SEQ ID NO: 224194 - DNA, 33 bp, Homo sapien
cagaaccaaatagaaccctgcttttatttaggg

SEQ ID NO: 224195 - DNA, 33 bp, Homo sapien
atgttagactgtgataccaagtgctaggaagca

SEQ ID NO: 224196 - DNA, 33 bp, Homo sapien
atgttagactgtgatatcaagtgctaggaagca

SEQ ID NO: 224197 - DNA, 33 bp, Homo sapien
ctaaaatgattggaaactctgaggtcacagtgt

SEQ ID NO: 224198 - DNA, 33 bp, Homo sapien
ctaaaatgattggaaattctgaggtcacagtgt

SEQ ID NO: 224199 - DNA, 33 bp, Homo sapien
aggagggttaaggtccagcctgttgtagggagg

SEQ ID NO: 224200 - DNA, 33 bp, Homo sapien
aggagggttaaggtccggcctgttgtagggagg

SEQ ID NO: 224201 - DNA, 33 bp, Homo sapien
tgtggcatagtaactacctcattgtgtggtcag

SEQ ID NO: 224202 - DNA, 33 bp, Homo sapien
tgtggcatagtaactatctcattgtgtggtcag

SEQ ID NO: 224203 - DNA, 33 bp, Homo sapien
ggaaggccacttggcccaaaatgtttgcaagaa

SEQ ID NO: 224204 - DNA, 33 bp, Homo sapien
ggaaggccacttggcctaaaatgtttgcaagaa

SEQ ID NO: 224205 - DNA, 33 bp, Homo sapien
atccaggagagagaacaagtcacaaatacagag

SEQ ID NO: 224206 - DNA, 33 bp, Homo sapien
atccaggagagagaacgagtcacaaatacagag

SEQ ID NO: 224207 - DNA, 33 bp, Homo sapien
aaggcaaacaagataaaagccatgtcctctcag

SEQ ID NO: 224208 - DNA, 33 bp, Homo sapien
aaggcaaacaagataagagccatgtcctctcag

SEQ ID NO: 224209 - DNA, 33 bp, Homo sapien
tatttatgattaggtacgtgtagtgatacagac

SEQ ID NO: 224210 - DNA, 33 bp, Homo sapien
tatttatgattaggtatgtgtagtgatacagac

SEQ ID NO: 224211 - DNA, 33 bp, Homo sapien
ttaaatgcatgtgtcacctgtttggtgtctggc

SEQ ID NO: 224212 - DNA, 33 bp, Homo sapien
ttaaatgcatgtgtcatctgtttggtgtctggc

SEQ ID NO: 224213 - DNA, 33 bp, Homo sapien
ttccagtggctatggaagcggcagcagcattgg

SEQ ID NO: 224214 - DNA, 33 bp, Homo sapien
ttccagtggctatggacgcggcagcagcattgg

SEQ ID NO: 224215 - DNA, 33 bp, Homo sapien
ccgtttgcaagctggaacactgtaaggacagga

SEQ ID NO: 224216 - DNA, 33 bp, Homo sapien
ccgtttgcaagctggagcactgtaaggacagga

SEQ ID NO: 224217 - DNA, 33 bp, Homo sapien
ttctgggcgctacccccccaaaggcagagacct

SEQ ID NO: 224218 - DNA, 33 bp, Homo sapien
ttctgggcgctacccctccaaaggcagagacct

SEQ ID NO: 224219 - DNA, 33 bp, Homo sapien
ttgtaaaggactcagcaaacactgcctcatttc

SEQ ID NO: 224220 - DNA, 33 bp, Homo sapien
ttgtaaaggactcagcgaacactgcctcatttc

SEQ ID NO: 224221 - DNA, 33 bp, Homo sapien
cctcctgaggaccaagaattcctagctctccag

SEQ ID NO: 224222 - DNA, 33 bp, Homo sapien
cctcctgaggaccaaggattcctagctctccag

SEQ ID NO: 224223 - DNA, 33 bp, Homo sapien
tcaaggattgttaacaacttcttcgctttctga

SEQ ID NO: 224224 - DNA, 33 bp, Homo sapien
tcaaggattgttaacaccttcttcgctttctga

SEQ ID NO: 224225 - DNA, 33 bp, Homo sapien
ggggtcagagaggagaaaagaactgtcgaaggc

SEQ ID NO: 224226 - DNA, 33 bp, Homo sapien
ggggtcagagaggagagaagaactgtcgaaggc

SEQ ID NO: 224227 - DNA, 33 bp, Homo sapien
gaatggccaagatacaactggaattcttcagtc

SEQ ID NO: 224228 - DNA, 33 bp, Homo sapien
gaatggccaagatacacctggaattcttcagtc

SEQ ID NO: 224229 - DNA, 33 bp, Homo sapien
ggataagacctgattaaccagtttctagaataa

SEQ ID NO: 224230 - DNA, 33 bp, Homo sapien
ggataagacctgattagccagtttctagaataa

SEQ ID NO: 224231 - DNA, 33 bp, Homo sapien
tgtcaaaattatcatgaaagtttacagttaaaa

SEQ ID NO: 224232 - DNA, 33 bp, Homo sapien
tgtcaaaattatcatggaagtttacagttaaaa

SEQ ID NO: 224233 - DNA, 33 bp, Homo sapien
aaaccatttttgatgaccttacatggatgccac

SEQ ID NO: 224234 - DNA, 33 bp, Homo sapien
aaaccatttttgatgatcttacatggatgccac

SEQ ID NO: 224235 - DNA, 33 bp, Homo sapien
ctcgtactgcagcccaaaggtggagagagagac

SEQ ID NO: 224236 - DNA, 33 bp, Homo sapien
ctcgtactgcagcccagaggtggagagagagac

SEQ ID NO: 224237 - DNA, 33 bp, Homo sapien
ctctccatatataagcggctactggagtccgat

SEQ ID NO: 224238 - DNA, 33 bp, Homo sapien
ctctccatatataagctgctactggagtccgat

SEQ ID NO: 224239 - DNA, 33 bp, Homo sapien
tgcctgactaaaggaaacgaaaaatgcaatctc

SEQ ID NO: 224240 - DNA, 33 bp, Homo sapien
tgcctgactaaaggaagcgaaaaatgcaatctc

SEQ ID NO: 224241 - DNA, 33 bp, Homo sapien
ccttcatttctaagcaggactttgttgttatct

SEQ ID NO: 224242 - DNA, 33 bp, Homo sapien
ccttcatttctaagcatgactttgttgttatct

SEQ ID NO: 224243 - DNA, 33 bp, Homo sapien
tttctttgcctcacaacaaaatgctactagttg

SEQ ID NO: 224244 - DNA, 33 bp, Homo sapien
tttctttgcctcacaataaaatgctactagttg

SEQ ID NO: 224245 - DNA, 33 bp, Homo sapien
tggttcctgactttggcattgtatctaaaatgt

SEQ ID NO: 224246 - DNA, 33 bp, Homo sapien
tggttcctgactttggtattgtatctaaaatgt

SEQ ID NO: 224247 - DNA, 33 bp, Homo sapien
actattatccaaactgcacaaagaactcttaaa

SEQ ID NO: 224248 - DNA, 33 bp, Homo sapien
actattatccaaactgtacaaagaactcttaaa

SEQ ID NO: 224249 - DNA, 33 bp, Homo sapien
accgagtctgtttaccagaagagacagttatat

SEQ ID NO: 224250 - DNA, 33 bp, Homo sapien
accgagtctgtttaccggaagagacagttatat

SEQ ID NO: 224251 - DNA, 33 bp, Homo sapien
cattttttgctagaccaatcaggcagtcattag

SEQ ID NO: 224252 - DNA, 33 bp, Homo sapien
cattttttgctagacccatcaggcagtcattag

SEQ ID NO: 224253 - DNA, 33 bp, Homo sapien
tttcctccttgacttgcacataagttccccaaa

SEQ ID NO: 224254 - DNA, 33 bp, Homo sapien
tttcctccttgacttggacataagttccccaaa

SEQ ID NO: 224255 - DNA, 33 bp, Homo sapien
tgcactattagagtagacatttggggaacttat

SEQ ID NO: 224256 - DNA, 33 bp, Homo sapien
tgcactattagagtaggcatttggggaacttat

SEQ ID NO: 224257 - DNA, 33 bp, Homo sapien
gccatcagagagtggaataggttaattctcccc

SEQ ID NO: 224258 - DNA, 33 bp, Homo sapien
gccatcagagagtggagtaggttaattctcccc

SEQ ID NO: 224259 - DNA, 33 bp, Homo sapien
ggctccaccacccagaccaaagccaatgccggc

SEQ ID NO: 224260 - DNA, 33 bp, Homo sapien
ggctccaccacccagatcaaagccaatgccggc

SEQ ID NO: 224261 - DNA, 33 bp, Homo sapien
gagatcacacctggatcagaaaagttatgaaat

SEQ ID NO: 224262 - DNA, 33 bp, Homo sapien
gagatcacacctggattagaaaagttatgaaat

SEQ ID NO: 224263 - DNA, 33 bp, Homo sapien; identical to SEQ ID NO: 224261

SEQ ID NO: 224264 - DNA, 33 bp, Homo sapien; identical to SEQ ID NO: 224262

SEQ ID NO: 224265 - DNA, 33 bp, Homo sapien
tctctactttgccttccaaatctatttttttct

SEQ ID NO: 224266 - DNA, 33 bp, Homo sapien
tctctactttgccttcgaaatctatttttttct

SEQ ID NO: 224267 - DNA, 33 bp, Homo sapien
agttggtcttcgtttcaattgttctttattgtc

SEQ ID NO: 224268 - DNA, 33 bp, Homo sapien
agttggtcttcgtttcgattgttctttattgtc

SEQ ID NO: 224269 - DNA, 33 bp, Homo sapien
atcattttgttggtaaagcaaagaaagtagaga

SEQ ID NO: 224270 - DNA, 33 bp, Homo sapien
atcattttgttggtaaggcaaagaaagtagaga

SEQ ID NO: 224271 - DNA, 33 bp, Homo sapien
agctgtggctaaaaaaggtcaaggtacagctca

SEQ ID NO: 224272 - DNA, 33 bp, Homo sapien
agctgtggctaaaaaatgtcaaggtacagctca

SEQ ID NO: 224273 - DNA, 33 bp, Homo sapien
atgaacacagttggataccaatacagcaggatc

SEQ ID NO: 224274 - DNA, 33 bp, Homo sapien
atgaacacagttggatgccaatacagcaggatc

SEQ ID NO: 224275 - DNA, 33 bp, Homo sapien
catgtcatgaagtggaactaaaggcttctcctc

SEQ ID NO: 224276 - DNA, 33 bp, Homo sapien
catgtcatgaagtggacctaaaggcttctcctc

SEQ ID NO: 224277 - DNA, 33 bp, Homo sapien
tcaacttcacttccgacatttacagagataccc

SEQ ID NO: 224278 - DNA, 33 bp, Homo sapien
tcaacttcacttccgatatttacagagataccc

SEQ ID NO: 224279 - DNA, 33 bp, Homo sapien; identical to SEQ ID NO: 224277

SEQ ID NO: 224280 - DNA, 33 bp, Homo sapien; identical to SEQ ID NO: 224278

SEQ ID NO: 224281 - DNA, 33 bp, Homo sapien
agagtgtaatttaccaacccgtgtactcctggc

SEQ ID NO: 224282 - DNA, 33 bp, Homo sapien
agagtgtaatttaccagcccgtgtactcctggc

SEQ ID NO: 224283 - DNA, 33 bp, Homo sapien
tacagtgtaaagactcaactcctctgtccctct

SEQ ID NO: 224284 - DNA, 33 bp, Homo sapien
tacagtgtaaagactctactcctctgtccctct

SEQ ID NO: 224285 - DNA, 33 bp, Homo sapien
actgctctccctcttacggagtcaggttcccct

SEQ ID NO: 224286 - DNA, 33 bp, Homo sapien
actgctctccctcttatggagtcaggttcccct

SEQ ID NO: 224287 - DNA, 33 bp, Homo sapien
gtatctccttttgctaaatttatatgacattct

SEQ ID NO: 224288 - DNA, 33 bp, Homo sapien
gtatctccttttgctagatttatatgacattct

SEQ ID NO: 224289 - DNA, 33 bp, Homo sapien
aggaactcatctgtagaaatgagtaagcaaact

SEQ ID NO: 224290 - DNA, 33 bp, Homo sapien
aggaactcatctgtaggaatgagtaagcaaact

SEQ ID NO: 224291 - DNA, 33 bp, Homo sapien
taaatacctagaaattcaattgtgacatcaagg

SEQ ID NO: 224292 - DNA, 33 bp, Homo sapien
taaatacctagaaattgaattgtgacatcaagg

SEQ ID NO: 224293 - DNA, 33 bp, Homo sapien
ttaccagagtagtaacacatgagcagaaatctc

SEQ ID NO: 224294 - DNA, 33 bp, Homo sapien
ttaccagagtagtaacccatgagcagaaatctc

SEQ ID NO: 224295 - DNA, 33 bp, Homo sapien
cagcttttggggcttacacaacattggtgatcg

SEQ ID NO: 224296 - DNA, 33 bp, Homo sapien
cagcttttggggcttatacaacattggtgatcg

SEQ ID NO: 224297 - DNA, 33 bp, Homo sapien
cctccgggttataggaaaaaacacacatggcac

SEQ ID NO: 224298 - DNA, 33 bp, Homo sapien
cctccgggttataggagaaaacacacatggcac

SEQ ID NO: 224299 - DNA, 33 bp, Homo sapien
tttataaattggtttgacaaaatgggacaccat

SEQ ID NO: 224300 - DNA, 33 bp, Homo sapien
tttataaattggtttggcaaaatgggacaccat

SEQ ID NO: 224301 - DNA, 33 bp, Homo sapien
gtcctgttttaatttacactggggcatattaac

SEQ ID NO: 224302 - DNA, 33 bp, Homo sapien
gtcctgttttaatttatactggggcatattaac

SEQ ID NO: 224303 - DNA, 33 bp, Homo sapien
aatgcccgttgcaacaccttctcagtcacaact

SEQ ID NO: 224304 - DNA, 33 bp, Homo sapien
aatgcccgttgcaacagcttctcagtcacaact

SEQ ID NO: 224305 - DNA, 33 bp, Homo sapien
atgttatcccattctccctgtgaatcatcaaaa

SEQ ID NO: 224306 - DNA, 33 bp, Homo sapien
atgttatcccattctctctgtgaatcatcaaaa

SEQ ID NO: 224307 - DNA, 33 bp, Homo sapien
cagcttggtggctcaaataatttctttagtctt

SEQ ID NO: 224308 - DNA, 33 bp, Homo sapien
cagcttggtggctcaagtaatttctttagtctt

SEQ ID NO: 224309 - DNA, 33 bp, Homo sapien
agattagaagctcctgaaggtatgtgtttgtgg

SEQ ID NO: 224310 - DNA, 33 bp, Homo sapien
agattagaagctcctgcaggtatgtgtttgtgg

SEQ ID NO: 224311 - DNA, 33 bp, Homo sapien
tcacatctgttctccaaaaagcaaccaaatgtg

SEQ ID NO: 224312 - DNA, 33 bp, Homo sapien
tcacatctgttctccagaaagcaaccaaatgtg

SEQ ID NO: 224313 - DNA, 33 bp, Homo sapien
cacagtctcacatagacggtgggactggggcca

SEQ ID NO: 224314 - DNA, 33 bp, Homo sapien
cacagtctcacatagatggtgggactggggcca

SEQ ID NO: 224315 - DNA, 33 bp, Homo sapien
actccagtggctgataataaggagttagaattc

SEQ ID NO: 224316 - DNA, 33 bp, Homo sapien
actccagtggctgatagtaaggagttagaattc

SEQ ID NO: 224317 - DNA, 33 bp, Homo sapien
tggaggcccagctaagcactgtgaggctctggg

SEQ ID NO: 224318 - DNA, 33 bp, Homo sapien
tggaggcccagctaagtactgtgaggctctggg

SEQ ID NO: 224319 - DNA, 33 bp, Homo sapien
ccttcacagactatccagaggttgaggcctctg

SEQ ID NO: 224320 - DNA, 33 bp, Homo sapien
ccttcacagactatccggaggttgaggcctctg

SEQ ID NO: 224321 - DNA, 33 bp, Homo sapien
tttcaactcacaatgaagaagaacacgctggcc

SEQ ID NO: 224322 - DNA, 33 bp, Homo sapien
tttcaactcacaatgacgaagaacacgctggcc

SEQ ID NO: 224323 - DNA, 33 bp, Homo sapien
ggtggtccctgaatgaccgtagcttgggaaata

SEQ ID NO: 224324 - DNA, 33 bp, Homo sapien
ggtggtccctgaatgagcgtagcttgggaaata

SEQ ID NO: 224325 - DNA, 33 bp, Homo sapien
tcacttggctgtatcaagtttataataaagagt

SEQ ID NO: 224326 - DNA, 33 bp, Homo sapien
tcacttggctgtatcaggtttataataaagagt

SEQ ID NO: 224327 - DNA, 33 bp, Homo sapien
ccagcccttttctcaccgctcagaggcctggcc

SEQ ID NO: 224328 - DNA, 33 bp, Homo sapien
ccagcccttttctcactgctcagaggcctggcc

SEQ ID NO: 224329 - DNA, 33 bp, Homo sapien
aaccccattactctatcaggcattcttgttccc

SEQ ID NO: 224330 - DNA, 33 bp, Homo sapien
aaccccattactctattaggcattcttgttccc

SEQ ID NO: 224331 - DNA, 33 bp, Homo sapien
gtatgcccaggaagaacgagcaaatctgcatag

SEQ ID NO: 224332 - DNA, 33 bp, Homo sapien
gtatgcccaggaagaatgagcaaatctgcatag

SEQ ID NO: 224333 - DNA, 33 bp, Homo sapien
gaaatgaatgacagcaatactcttgagttgttt

SEQ ID NO: 224334 - DNA, 33 bp, Homo sapien
gaaatgaatgacagcagtactcttgagttgttt

SEQ ID NO: 224335 - DNA, 33 bp, Homo sapien
agtgcttggcaaataacggttgctcccggggtg

SEQ ID NO: 224336 - DNA, 33 bp, Homo sapien
agtgcttggcaaataatggttgctcccggggtg

SEQ ID NO: 224337 - DNA, 33 bp, Homo sapien
cgcaagtctgatgcggaagatggttggctaact

SEQ ID NO: 224338 - DNA, 33 bp, Homo sapien
cgcaagtctgatgcgggagatggttggctaact

SEQ ID NO: 224339 - DNA, 33 bp, Homo sapien
gcacagctactgcttgaataaggttgtcttccc

SEQ ID NO: 224340 - DNA, 33 bp, Homo sapien
gcacagctactgcttgtataaggttgtcttccc

SEQ ID NO: 224341 - DNA, 33 bp, Homo sapien
aaaaggcctgtgagagacagtctcgcccagagt

SEQ ID NO: 224342 - DNA, 33 bp, Homo sapien
aaaaggcctgtgagagccagtctcgcccagagt

SEQ ID NO: 224343 - DNA, 33 bp, Homo sapien
aggaggctctcattgacggtaacctggtggatg

SEQ ID NO: 224344 - DNA, 33 bp, Homo sapien
aggaggctctcattgatggtaacctggtggatg

SEQ ID NO: 224345 - DNA, 33 bp, Homo sapien
gaaccaaacatcccacaattccagctttcgtgg

SEQ ID NO: 224346 - DNA, 33 bp, Homo sapien
gaaccaaacatcccacgattccagctttcgtgg

SEQ ID NO: 224347 - DNA, 33 bp, Homo sapien
gtaggaggcactttacaaacattatctcagatt

SEQ ID NO: 224348 - DNA, 33 bp, Homo sapien
gtaggaggcactttacgaacattatctcagatt

SEQ ID NO: 224349 - DNA, 33 bp, Homo sapien
gcaatcatgaataaaggacgactttgcgggggg

SEQ ID NO: 224350 - DNA, 33 bp, Homo sapien
gcaatcatgaataaagtacgactttgcgggggg

SEQ ID NO: 224351 - DNA, 33 bp, Homo sapien
caagcacttaattagccgagagagagccagtgg

SEQ ID NO: 224352 - DNA, 33 bp, Homo sapien
caagcacttaattagctgagagagagccagtgg

SEQ ID NO: 224353 - DNA, 33 bp, Homo sapien
atgaactgagagcctactacgggccggacttcg

SEQ ID NO: 224354 - DNA, 33 bp, Homo sapien
atgaactgagagcctattacgggccggacttcg

SEQ ID NO: 224355 - DNA, 33 bp, Homo sapien
gggacgttgtcatttgcagaaagggttggtgga

SEQ ID NO: 224356 - DNA, 33 bp, Homo sapien
gggacgttgtcatttggagaaagggttggtgga

SEQ ID NO: 224357 - DNA, 33 bp, Homo sapien
gttcctctctgttgcaggtgaaagaagtgaggt

SEQ ID NO: 224358 - DNA, 33 bp, Homo sapien
gttcctctctgttgcatgtgaaagaagtgaggt

SEQ ID NO: 224359 - DNA, 33 bp, Homo sapien
actcactggacaaagaaatcaagttcctcaagt

SEQ ID NO: 224360 - DNA, 33 bp, Homo sapien
actcactggacaaagacatcaagttcctcaagt

SEQ ID NO: 224361 - DNA, 33 bp, Homo sapien
ctgctggcagatatgaagtggagattaaccggc

SEQ ID NO: 224362 - DNA, 33 bp, Homo sapien
ctgctggcagatatgaggtggagattaaccggc

SEQ ID NO: 224363 - DNA, 33 bp, Homo sapien
ttcctagagtaggacaaataatcttatccagga

SEQ ID NO: 224364 - DNA, 33 bp, Homo sapien
ttcctagagtaggacagataatcttatccagga

SEQ ID NO: 224365 - DNA, 33 bp, Homo sapien
gaagtattccttatggcagtagtagcaatagtg

SEQ ID NO: 224366 - DNA, 33 bp, Homo sapien
gaagtattccttatggtagtagtagcaatagtg

SEQ ID NO: 224367 - DNA, 33 bp, Homo sapien
catgcactttgaaaccagacgcacttgaattcc

SEQ ID NO: 224368 - DNA, 33 bp, Homo sapien
catgcactttgaaaccggacgcacttgaattcc

SEQ ID NO: 224369 - DNA, 33 bp, Homo sapien
agcccaccttccctggaaaaaagagctggatat

SEQ ID NO: 224370 - DNA, 33 bp, Homo sapien
agcccaccttccctgggaaaaagagctggatat

SEQ ID NO: 224371 - DNA, 33 bp, Homo sapien
ccatgatagatacagacgttagagcttcctcat

SEQ ID NO: 224372 - DNA, 33 bp, Homo sapien
ccatgatagatacagatgttagagcttcctcat

SEQ ID NO: 224373 - DNA, 33 bp, Homo sapien
ccttgctctttagggcaatctcctcgtactggg

SEQ ID NO: 224374 - DNA, 33 bp, Homo sapien
ccttgctctttagggcgatctcctcgtactggg

SEQ ID NO: 224375 - DNA, 33 bp, Homo sapien
tgagatgtcatgcagactctactgtccctctcc

SEQ ID NO: 224376 - DNA, 33 bp, Homo sapien
tgagatgtcatgcagattctactgtccctctcc

SEQ ID NO: 224377 - DNA, 33 bp, Homo sapien
gactccaattttcatcccactttccccacataa

SEQ ID NO: 224378 - DNA, 33 bp, Homo sapien
gactccaattttcatctcactttccccacataa

SEQ ID NO: 224379 - DNA, 33 bp, Homo sapien
agagcctatgagaaaaacttcagcgtatacaat

SEQ ID NO: 224380 - DNA, 33 bp, Homo sapien
agagcctatgagaaaagcttcagcgtatacaat

SEQ ID NO: 224381 - DNA, 33 bp, Homo sapien
tttaaaactgattttaacacccatctcttccac

SEQ ID NO: 224382 - DNA, 33 bp, Homo sapien
tttaaaactgattttatcacccatctcttccac

SEQ ID NO: 224383 - DNA, 33 bp, Homo sapien
gcacaaagccactccaatctgaaaggcccagag

SEQ ID NO: 224384 - DNA, 33 bp, Homo sapien
gcacaaagccactccagtctgaaaggcccagag

SEQ ID NO: 224385 - DNA, 33 bp, Homo sapien
ttctgcccctcaagctaaaagataggtgagaag

SEQ ID NO: 224386 - DNA, 33 bp, Homo sapien
ttctgcccctcaagctgaaagataggtgagaag

SEQ ID NO: 224387 - DNA, 33 bp, Homo sapien
aggtctgcatggaagaaacacagcagctattcc

SEQ ID NO: 224388 - DNA, 33 bp, Homo sapien
aggtctgcatggaagacacacagcagctattcc

SEQ ID NO: 224389 - DNA, 33 bp, Homo sapien
agagacaacttccctaataccccaatttctgga

SEQ ID NO: 224390 - DNA, 33 bp, Homo sapien
agagacaacttccctattaccccaatttctgga

SEQ ID NO: 224391 - DNA, 33 bp, Homo sapien
ttgtcagtcaatcctacgtaaaaattctcctct

SEQ ID NO: 224392 - DNA, 33 bp, Homo sapien
ttgtcagtcaatcctatgtaaaaattctcctct

SEQ ID NO: 224393 - DNA, 33 bp, Homo sapien
ctttactacaaaagaccgatgaaaccactctag

SEQ ID NO: 224394 - DNA, 33 bp, Homo sapien
ctttactacaaaagacggatgaaaccactctag

SEQ ID NO: 224395 - DNA, 33 bp, Homo sapien
atactaaatatctaacagtacaagtcaaacatg

SEQ ID NO: 224396 - DNA, 33 bp, Homo sapien
atactaaatatctaacggtacaagtcaaacatg

SEQ ID NO: 224397 - DNA, 33 bp, Homo sapien
gccttaccccctcgtacagacacttgaagaact

SEQ ID NO: 224398 - DNA, 33 bp, Homo sapien
gccttaccccctcgtatagacacttgaagaact

SEQ ID NO: 224399 - DNA, 33 bp, Homo sapien
attgttcactacccccagattgccatcctgcaa

SEQ ID NO: 224400 - DNA, 33 bp, Homo sapien
attgttcactacccccggattgccatcctgcaa

SEQ ID NO: 224401 - DNA, 33 bp, Homo sapien
agaagcaaatccatcacaagggccatacttcag

SEQ ID NO: 224402 - DNA, 33 bp, Homo sapien
agaagcaaatccatcataagggccatacttcag

SEQ ID NO: 224403 - DNA, 33 bp, Homo sapien
gggagaaggtgactgacaccaaaggcccactga

SEQ ID NO: 224404 - DNA, 33 bp, Homo sapien
gggagaaggtgactgataccaaaggcccactga

SEQ ID NO: 224405 - DNA, 33 bp, Homo sapien
catctccacattgccacagaagacaaaaaggtg

SEQ ID NO: 224406 - DNA, 33 bp, Homo sapien
catctccacattgccatagaagacaaaaaggtg

SEQ ID NO: 224407 - DNA, 33 bp, Homo sapien
ctgtgcggtcaggatccaaccttcccttttcct

SEQ ID NO: 224408 - DNA, 33 bp, Homo sapien
ctgtgcggtcaggatctaaccttcccttttcct

SEQ ID NO: 224409 - DNA, 33 bp, Homo sapien
gtcaccaacaacatgaactgctctacataggtg

SEQ ID NO: 224410 - DNA, 33 bp, Homo sapien
gtcaccaacaacatgagctgctctacataggtg

SEQ ID NO: 224411 - DNA, 33 bp, Homo sapien
tctagattgcctgttcacatgaaaacagaataa

SEQ ID NO: 224412 - DNA, 33 bp, Homo sapien
tctagattgcctgttcgcatgaaaacagaataa

SEQ ID NO: 224413 - DNA, 33 bp, Homo sapien
gtgcagcagaccatcaatgacactagcgtgggg

SEQ ID NO: 224414 - DNA, 33 bp, Homo sapien
gtgcagcagaccatcagtgacactagcgtgggg

SEQ ID NO: 224415 - DNA, 33 bp, Homo sapien
ttttggtttgcataagaccagtaatttttatta

SEQ ID NO: 224416 - DNA, 33 bp, Homo sapien
ttttggtttgcataagcccagtaatttttatta

SEQ ID NO: 224417 - DNA, 33 bp, Homo sapien
ataatctcctttaatccccacaacagtactatg

SEQ ID NO: 224418 - DNA, 33 bp, Homo sapien
ataatctcctttaatctccacaacagtactatg

SEQ ID NO: 224419 - DNA, 33 bp, Homo sapien
tacctcctctccaacactgggcattgccagtct

SEQ ID NO: 224420 - DNA, 33 bp, Homo sapien
tacctcctctccaacattgggcattgccagtct

SEQ ID NO: 224421 - DNA, 33 bp, Homo sapien
ataactttatatccagacactggcagataggtg

SEQ ID NO: 224422 - DNA, 33 bp, Homo sapien
ataactttatatccaggcactggcagataggtg

SEQ ID NO: 224423 - DNA, 33 bp, Homo sapien
caactaaggactctccaaggttttaaagctggg

SEQ ID NO: 224424 - DNA, 33 bp, Homo sapien
caactaaggactctccgaggttttaaagctggg

SEQ ID NO: 224425 - DNA, 33 bp, Homo sapien
tatgaattgcaaatgaagtttattatgaagacc

SEQ ID NO: 224426 - DNA, 33 bp, Homo sapien
tatgaattgcaaatgaggtttattatgaagacc

SEQ ID NO: 224427 - DNA, 33 bp, Homo sapien
cccccttccatttatgcacaaccttgcatgtca

SEQ ID NO: 224428 - DNA, 33 bp, Homo sapien
cccccttccatttatgtacaaccttgcatgtca

SEQ ID NO: 224429 - DNA, 33 bp, Homo sapien
ggcaggccctcctgacaactgagaactgacatt

SEQ ID NO: 224430 - DNA, 33 bp, Homo sapien
ggcaggccctcctgacgactgagaactgacatt

SEQ ID NO: 224431 - DNA, 33 bp, Homo sapien
gggaaggagagactaaactcactggctggagga

SEQ ID NO: 224432 - DNA, 33 bp, Homo sapien
gggaaggagagactaagctcactggctggagga

SEQ ID NO: 224433 - DNA, 33 bp, Homo sapien
agctgtttgattttcaggtgctctggccaaact

SEQ ID NO: 224434 - DNA, 33 bp, Homo sapien
agctgtttgattttcatgtgctctggccaaact

SEQ ID NO: 224435 - DNA, 33 bp, Homo sapien
cctacacatgttggttaaacaagacagctgtct

SEQ ID NO: 224436 - DNA, 33 bp, Homo sapien
cctacacatgttggttgaacaagacagctgtct

SEQ ID NO: 224437 - DNA, 33 bp, Homo sapien
actgtactgtatctatcaataccataagcttac

SEQ ID NO: 224438 - DNA, 33 bp, Homo sapien
actgtactgtatctatgaataccataagcttac

SEQ ID NO: 224439 - DNA, 33 bp, Homo sapien
attgcttgagatcaaccatggtaggtatattta

SEQ ID NO: 224440 - DNA, 33 bp, Homo sapien
attgcttgagatcaactatggtaggtatattta

SEQ ID NO: 224441 - DNA, 33 bp, Homo sapien
gcccagacacctacagacatagagaagattctc

SEQ ID NO: 224442 - DNA, 33 bp, Homo sapien
gcccagacacctacagccatagagaagattctc

SEQ ID NO: 224443 - DNA, 33 bp, Homo sapien
tttaatcatcctgttccatatttggtgacctta

SEQ ID NO: 224444 - DNA, 33 bp, Homo sapien
tttaatcatcctgttctatatttggtgacctta

SEQ ID NO: 224445 - DNA, 33 bp, Homo sapien
tgagcaaagggccgtcaaaattcagccacagcc

SEQ ID NO: 224446 - DNA, 33 bp, Homo sapien
tgagcaaagggccgtcgaaattcagccacagcc

SEQ ID NO: 224447 - DNA, 33 bp, Homo sapien
cttgctgaagtcaagaatcccagggcatcccta

SEQ ID NO: 224448 - DNA, 33 bp, Homo sapien
cttgctgaagtcaagagtcccagggcatcccta

SEQ ID NO: 224449 - DNA, 33 bp, Homo sapien
aggagctgatgaacacaaagctggccctggatc

SEQ ID NO: 224450 - DNA, 33 bp, Homo sapien
aggagctgatgaacaccaagctggccctggatc

SEQ ID NO: 224451 - DNA, 33 bp, Homo sapien
aagtctgtaagggttgaaggagccttgactcag

SEQ ID NO: 224452 - DNA, 33 bp, Homo sapien
aagtctgtaagggttgtaggagccttgactcag

SEQ ID NO: 224453 - DNA, 33 bp, Homo sapien
ggagagtttttaagccggaacccacaacgattc

SEQ ID NO: 224454 - DNA, 33 bp, Homo sapien
ggagagtttttaagcctgaacccacaacgattc

SEQ ID NO: 224455 - DNA, 33 bp, Homo sapien
cctgccctggagagaacgtgccttcatgatgtc

SEQ ID NO: 224456 - DNA, 33 bp, Homo sapien
cctgccctggagagaatgtgccttcatgatgtc

SEQ ID NO: 224457 - DNA, 33 bp, Homo sapien
atatcaggaaaattcaaaattggatttgaaatt

SEQ ID NO: 224458 - DNA, 33 bp, Homo sapien
atatcaggaaaattcagaattggatttgaaatt

SEQ ID NO: 224459 - DNA, 33 bp, Homo sapien
gcttggtagctcacaaaggcaaggtgagaatag

SEQ ID NO: 224460 - DNA, 33 bp, Homo sapien
gcttggtagctcacaagggcaaggtgagaatag

SEQ ID NO: 224461 - DNA, 33 bp, Homo sapien
agacagacaccagcaacagaaaacaggtagcaa

SEQ ID NO: 224462 - DNA, 33 bp, Homo sapien
agacagacaccagcaatagaaaacaggtagcaa

SEQ ID NO: 224463 - DNA, 33 bp, Homo sapien
gtgccacagtgatggcaagggagaggagtagca

SEQ ID NO: 224464 - DNA, 33 bp, Homo sapien
gtgccacagtgatggcgagggagaggagtagca

SEQ ID NO: 224465 - DNA, 33 bp, Homo sapien
gacactaacatctacacgcagcaactatgctgt

SEQ ID NO: 224466 - DNA, 33 bp, Homo sapien
gacactaacatctacaggcagcaactatgctgt

SEQ ID NO: 224467 - DNA, 33 bp, Homo sapien
aatgccttcatctctcactcaagcaggcagcag

SEQ ID NO: 224468 - DNA, 33 bp, Homo sapien
aatgccttcatctctcgctcaagcaggcagcag

SEQ ID NO: 224469 - DNA, 33 bp, Homo sapien
tctcactttcagctcaccccagtgaaaacaaca

SEQ ID NO: 224470 - DNA, 33 bp, Homo sapien
tctcactttcagctcatcccagtgaaaacaaca

SEQ ID NO: 224471 - DNA, 33 bp, Homo sapien
catggactcagaactaacacataggatgaggtg

SEQ ID NO: 224472 - DNA, 33 bp, Homo sapien
catggactcagaactaccacataggatgaggtg

SEQ ID NO: 224473 - DNA, 33 bp, Homo sapien
atgaaatcaacaagagaactggcagcgagaatg

SEQ ID NO: 224474 - DNA, 33 bp, Homo sapien
atgaaatcaacaagaggactggcagcgagaatg

SEQ ID NO: 224475 - DNA, 33 bp, Homo sapien
cacaactgcaggaggcactgttttgtatgtggc

SEQ ID NO: 224476 - DNA, 33 bp, Homo sapien
cacaactgcaggaggcgctgttttgtatgtggc

SEQ ID NO: 224477 - DNA, 33 bp, Homo sapien
atttagttctcagtccacgtttagttcaatgag

SEQ ID NO: 224478 - DNA, 33 bp, Homo sapien
atttagttctcagtccgcgtttagttcaatgag

SEQ ID NO: 224479 - DNA, 33 bp, Homo sapien
acctacatgtattgcaaaagagatggggtcgtt

SEQ ID NO: 224480 - DNA, 33 bp, Homo sapien
acctacatgtattgcagaagagatggggtcgtt

SEQ ID NO: 224481 - DNA, 33 bp, Homo sapien
ctagtgagcattttaccaggaaggccaccatgc

SEQ ID NO: 224482 - DNA, 33 bp, Homo sapien
ctagtgagcattttacgaggaaggccaccatgc

SEQ ID NO: 224483 - DNA, 33 bp, Homo sapien
ctccatttggcagttacctcatcttcccactgg

SEQ ID NO: 224484 - DNA, 33 bp, Homo sapien
ctccatttggcagttatctcatcttcccactgg

SEQ ID NO: 224485 - DNA, 33 bp, Homo sapien
agtggaagagaatgaactcggtggagagagaga

SEQ ID NO: 224486 - DNA, 33 bp, Homo sapien
agtggaagagaatgaattcggtggagagagaga

SEQ ID NO: 224487 - DNA, 33 bp, Homo sapien
gacacgctcatcacaaatccctgcccagggcac

SEQ ID NO: 224488 - DNA, 33 bp, Homo sapien
gacacgctcatcacaattccctgcccagggcac

SEQ ID NO: 224489 - DNA, 33 bp, Homo sapien
ctccatgctgatctctgaaatgaaagactctgc

SEQ ID NO: 224490 - DNA, 33 bp, Homo sapien
ctccatgctgatctcttaaatgaaagactctgc

SEQ ID NO: 224491 - DNA, 33 bp, Homo sapien
tgctcacatatggggcggatcctgactccaaaa

SEQ ID NO: 224492 - DNA, 33 bp, Homo sapien
tgctcacatatggggctgatcctgactccaaaa

SEQ ID NO: 224493 - DNA, 33 bp, Homo sapien
gttttgttttgtttaaatggagtctcactctat

SEQ ID NO: 224494 - DNA, 33 bp, Homo sapien
gttttgttttgtttaagtggagtctcactctat

SEQ ID NO: 224495 - DNA, 33 bp, Homo sapien
ccatcagcttgcataaccacacccttgatcctg

SEQ ID NO: 224496 - DNA, 33 bp, Homo sapien
ccatcagcttgcataatcacacccttgatcctg

SEQ ID NO: 224497 - DNA, 33 bp, Homo sapien
aaaggagtacattctacatgatggcattcctat

SEQ ID NO: 224498 - DNA, 33 bp, Homo sapien
aaaggagtacattctatatgatggcattcctat

SEQ ID NO: 224499 - DNA, 33 bp, Homo sapien
attgcccatttggataactctttggtcccgtct

SEQ ID NO: 224500 - DNA, 33 bp, Homo sapien
attgcccatttggatacctctttggtcccgtct

SEQ ID NO: 224501 - DNA, 33 bp, Homo sapien
agacacggagtgcatacgtgattccccaagggc

SEQ ID NO: 224502 - DNA, 33 bp, Homo sapien
agacacggagtgcataggtgattccccaagggc

SEQ ID NO: 224503 - DNA, 33 bp, Homo sapien
atactcctgcagacacaaagacaattctgctta

SEQ ID NO: 224504 - DNA, 33 bp, Homo sapien
atactcctgcagacacgaagacaattctgctta

SEQ ID NO: 224505 - DNA, 33 bp, Homo sapien
acctcaagagcagtcacgtttctgtggagacct

SEQ ID NO: 224506 - DNA, 33 bp, Homo sapien
acctcaagagcagtcatgtttctgtggagacct

SEQ ID NO: 224507 - DNA, 33 bp, Homo sapien
ggcccagtgcaatcccaaagcaaagaagggcag

SEQ ID NO: 224508 - DNA, 33 bp, Homo sapien
ggcccagtgcaatcccgaagcaaagaagggcag

SEQ ID NO: 224509 - DNA, 33 bp, Homo sapien
aaaaacacttaggctccctacaatggatgggct

SEQ ID NO: 224510 - DNA, 33 bp, Homo sapien
aaaaacacttaggctctctacaatggatgggct

SEQ ID NO: 224511 - DNA, 33 bp, Homo sapien
gaaaatcacctaattacagcaaatgccctgatg

SEQ ID NO: 224512 - DNA, 33 bp, Homo sapien
gaaaatcacctaattatagcaaatgccctgatg

SEQ ID NO: 224513 - DNA, 33 bp, Homo sapien
gaggatggagagatgaaggaggaccagctgcag

SEQ ID NO: 224514 - DNA, 33 bp, Homo sapien
gaggatggagagatgagggaggaccagctgcag

SEQ ID NO: 224515 - DNA, 33 bp, Homo sapien
ccaccgcgcctggcgacaaattcttttaaatat

SEQ ID NO: 224516 - DNA, 33 bp, Homo sapien
ccaccgcgcctggcgataaattcttttaaatat

SEQ ID NO: 224517 - DNA, 33 bp, Homo sapien
accttatcgcccttaacaagataaacattaatt

SEQ ID NO: 224518 - DNA, 33 bp, Homo sapien
accttatcgcccttaagaagataaacattaatt

SEQ ID NO: 224519 - DNA, 33 bp, Homo sapien
gctccaccatctagagacatggaatgggtagaa

SEQ ID NO: 224520 - DNA, 33 bp, Homo sapien
gctccaccatctagaggcatggaatgggtagaa

SEQ ID NO: 224521 - DNA, 33 bp, Homo sapien
cacccacctcaacaataaactcatcttatttca

SEQ ID NO: 224522 - DNA, 33 bp, Homo sapien
cacccacctcaacaatgaactcatcttatttca

SEQ ID NO: 224523 - DNA, 33 bp, Homo sapien
cttctgaagtcacttccagtcttgagagtctta

SEQ ID NO: 224524 - DNA, 33 bp, Homo sapien
cttctgaagtcacttctagtcttgagagtctta

SEQ ID NO: 224525 - DNA, 33 bp, Homo sapien
aaatataatactctaaccaccaatgacaaatac

SEQ ID NO: 224526 - DNA, 33 bp, Homo sapien
aaatataatactctaatcaccaatgacaaatac

SEQ ID NO: 224527 - DNA, 33 bp, Homo sapien
atgcttgtcactcccacgctatattaataacat

SEQ ID NO: 224528 - DNA, 33 bp, Homo sapien
atgcttgtcactcccatgctatattaataacat

SEQ ID NO: 224529 - DNA, 33 bp, Homo sapien
cagatgtggaaaaggaagtatagagacgtgaag

SEQ ID NO: 224530 - DNA, 33 bp, Homo sapien
cagatgtggaaaaggaggtatagagacgtgaag

SEQ ID NO: 224531 - DNA, 33 bp, Homo sapien
ctccctgtgctctttaaaggtccaggagtaggc

SEQ ID NO: 224532 - DNA, 33 bp, Homo sapien
ctccctgtgctctttagaggtccaggagtaggc

SEQ ID NO: 224533 - DNA, 33 bp, Homo sapien
gtcgtcctggcatttccagctatcagcagagag

SEQ ID NO: 224534 - DNA, 33 bp, Homo sapien
gtcgtcctggcatttctagctatcagcagagag

SEQ ID NO: 224535 - DNA, 33 bp, Homo sapien
tcaggatcggatcaagaccaccgttgccagaag

SEQ ID NO: 224536 - DNA, 33 bp, Homo sapien
tcaggatcggatcaaggccaccgttgccagaag

SEQ ID NO: 224537 - DNA, 33 bp, Homo sapien
atggtttcaaggaacaacagcattacagcactg

SEQ ID NO: 224538 - DNA, 33 bp, Homo sapien
atggtttcaaggaacatcagcattacagcactg

SEQ ID NO: 224539 - DNA, 33 bp, Homo sapien
agaggagatggagccaagaaagtgaggaatggt

SEQ ID NO: 224540 - DNA, 33 bp, Homo sapien
agaggagatggagccaggaaagtgaggaatggt

SEQ ID NO: 224541 - DNA, 33 bp, Homo sapien
cccttgtccacctgacaacagatgccatgatga

SEQ ID NO: 224542 - DNA, 33 bp, Homo sapien
cccttgtccacctgactacagatgccatgatga

SEQ ID NO: 224543 - DNA, 33 bp, Homo sapien
ctggagagcaggtatacagaagttgtggtgtca

SEQ ID NO: 224544 - DNA, 33 bp, Homo sapien
ctggagagcaggtatagagaagttgtggtgtca

SEQ ID NO: 224545 - DNA, 33 bp, Homo sapien
gtcttagcaaaggataacacttgtgtaaagtaa

SEQ ID NO: 224546 - DNA, 33 bp, Homo sapien
gtcttagcaaaggatagcacttgtgtaaagtaa

SEQ ID NO: 224547 - DNA, 33 bp, Homo sapien
tcatgagtttcagcataagaagaatctagcgct

SEQ ID NO: 224548 - DNA, 33 bp, Homo sapien
tcatgagtttcagcatgagaagaatctagcgct

SEQ ID NO: 224549 - DNA, 33 bp, Homo sapien
gaccagtgaggcacaaatgaaggttttctagcg

SEQ ID NO: 224550 - DNA, 33 bp, Homo sapien
gaccagtgaggcacaagtgaaggttttctagcg

SEQ ID NO: 224551 - DNA, 33 bp, Homo sapien
gtgcctttccaggaacaccttgccctaggctat

SEQ ID NO: 224552 - DNA, 33 bp, Homo sapien
gtgcctttccaggaacgccttgccctaggctat

SEQ ID NO: 224553 - DNA, 33 bp, Homo sapien
agggagataaccattaaatctgactgcccgaga

SEQ ID NO: 224554 - DNA, 33 bp, Homo sapien
agggagataaccattagatctgactgcccgaga

SEQ ID NO: 224555 - DNA, 33 bp, Homo sapien
aatctctgagcataaaattgtgaagatttcatg

SEQ ID NO: 224556 - DNA, 33 bp, Homo sapien
aatctctgagcataaagttgtgaagatttcatg

SEQ ID NO: 224557 - DNA, 33 bp, Homo sapien
ctctgcttttcctgaaacaccttcttgtattca

SEQ ID NO: 224558 - DNA, 33 bp, Homo sapien
ctctgcttttcctgaagcaccttcttgtattca

SEQ ID NO: 224559 - DNA, 33 bp, Homo sapien
agattgtgtcaagcaacccacctggaagacccc

SEQ ID NO: 224560 - DNA, 33 bp, Homo sapien
agattgtgtcaagcaatccacctggaagacccc

SEQ ID NO: 224561 - DNA, 33 bp, Homo sapien
ggatggaataacaagacggcatctgtacatttg

SEQ ID NO: 224562 - DNA, 33 bp, Homo sapien
ggatggaataacaagagggcatctgtacatttg

SEQ ID NO: 224563 - DNA, 33 bp, Homo sapien
aacaacatactcctggacagacctatcacggga

SEQ ID NO: 224564 - DNA, 33 bp, Homo sapien
aacaacatactcctgggcagacctatcacggga

SEQ ID NO: 224565 - DNA, 33 bp, Homo sapien
ttccactgtggctcacagagatgctacctgcac

SEQ ID NO: 224566 - DNA, 33 bp, Homo sapien
ttccactgtggctcacggagatgctacctgcac

SEQ ID NO: 224567 - DNA, 33 bp, Homo sapien
ctttagcatttgataaacacttgctaagacttt

SEQ ID NO: 224568 - DNA, 33 bp, Homo sapien
ctttagcatttgataaccacttgctaagacttt

SEQ ID NO: 224569 - DNA, 33 bp, Homo sapien
actatgtgcaatgtatgaggaaagttctttggc

SEQ ID NO: 224570 - DNA, 33 bp, Homo sapien
actatgtgcaatgtattaggaaagttctttggc

SEQ ID NO: 224571 - DNA, 33 bp, Homo sapien
caacaaacgcactgccacagagaatgagtttgt

SEQ ID NO: 224572 - DNA, 33 bp, Homo sapien
caacaaacgcactgccgcagagaatgagtttgt

SEQ ID NO: 224573 - DNA, 33 bp, Homo sapien
ccagtgaaatgtgtgcgctcattgggcatttct

SEQ ID NO: 224574 - DNA, 33 bp, Homo sapien
ccagtgaaatgtgtgctctcattgggcatttct

SEQ ID NO: 224575 - DNA, 33 bp, Homo sapien
ctttgggaaacttaaactctttgagtctcagtt

SEQ ID NO: 224576 - DNA, 33 bp, Homo sapien
ctttgggaaacttaaattctttgagtctcagtt

SEQ ID NO: 224577 - DNA, 33 bp, Homo sapien
ttcctacattagcagacgagatttctacagcta

SEQ ID NO: 224578 - DNA, 33 bp, Homo sapien
ttcctacattagcagatgagatttctacagcta

SEQ ID NO: 224579 - DNA, 33 bp, Homo sapien
ggtttggtttctggctcaaaactatggaaagtc

SEQ ID NO: 224580 - DNA, 33 bp, Homo sapien
ggtttggtttctggcttaaaactatggaaagtc

SEQ ID NO: 224581 - DNA, 33 bp, Homo sapien
tgttctaagagcttgcagactcactggttcact

SEQ ID NO: 224582 - DNA, 33 bp, Homo sapien
tgttctaagagcttgcggactcactggttcact

SEQ ID NO: 224583 - DNA, 33 bp, Homo sapien
aaagtgcgggctgctgaaagcccagggatggaa

SEQ ID NO: 224584 - DNA, 33 bp, Homo sapien
aaagtgcgggctgctggaagcccagggatggaa

SEQ ID NO: 224585 - DNA, 33 bp, Homo sapien
tgtccaggtccagggaacgattattgtccatgg

SEQ ID NO: 224586 - DNA, 33 bp, Homo sapien
tgtccaggtccagggagcgattattgtccatgg

SEQ ID NO: 224587 - DNA, 33 bp, Homo sapien
ctcaaaggcaatgaacaaaacccagggctagac

SEQ ID NO: 224588 - DNA, 33 bp, Homo sapien
ctcaaaggcaatgaaccaaacccagggctagac

SEQ ID NO: 224589 - DNA, 33 bp, Homo sapien
cattagctcaagcccaatagaagtcagatatga

SEQ ID NO: 224590 - DNA, 33 bp, Homo sapien
cattagctcaagcccagtagaagtcagatatga

SEQ ID NO: 224591 - DNA, 33 bp, Homo sapien
agagggccttcctagacgccttcagagcctgag

SEQ ID NO: 224592 - DNA, 33 bp, Homo sapien
agagggccttcctagatgccttcagagcctgag

SEQ ID NO: 224593 - DNA, 33 bp, Homo sapien
ctgttgctctaagaaccgcacctgtgttgataa

SEQ ID NO: 224594 - DNA, 33 bp, Homo sapien
ctgttgctctaagaactgcacctgtgttgataa

SEQ ID NO: 224595 - DNA, 33 bp, Homo sapien
ttgccacttctcaggacagagtgagctagtgat

SEQ ID NO: 224596 - DNA, 33 bp, Homo sapien
ttgccacttctcaggatagagtgagctagtgat

SEQ ID NO: 224597 - DNA, 33 bp, Homo sapien
ttggatggtgtattaggccattattacgctgct

SEQ ID NO: 224598 - DNA, 33 bp, Homo sapien
ttggatggtgtattagtccattattacgctgct

SEQ ID NO: 224599 - DNA, 33 bp, Homo sapien
cctctccactgaacaaagcatgctgtctgcccc

SEQ ID NO: 224600 - DNA, 33 bp, Homo sapien
cctctccactgaacaaggcatgctgtctgcccc

SEQ ID NO: 224601 - DNA, 33 bp, Homo sapien
gtgttgttgaaagtgacggtaaaggtcagccac

SEQ ID NO: 224602 - DNA, 33 bp, Homo sapien
gtgttgttgaaagtgatggtaaaggtcagccac

SEQ ID NO: 224603 - DNA, 33 bp, Homo sapien
cttcagtggggtcagcagattctggttgatggt

SEQ ID NO: 224604 - DNA, 33 bp, Homo sapien
cttcagtggggtcagcggattctggttgatggt

SEQ ID NO: 224605 - DNA, 33 bp, Homo sapien
tccatgaccattatacacagggaccttgcaaaa

SEQ ID NO: 224606 - DNA, 33 bp, Homo sapien
tccatgaccattatacccagggaccttgcaaaa

SEQ ID NO: 224607 - DNA, 33 bp, Homo sapien
aagatcaaacaataaacgggtcctttatgacag

SEQ ID NO: 224608 - DNA, 33 bp, Homo sapien
aagatcaaacaataaatgggtcctttatgacag

SEQ ID NO: 224609 - DNA, 33 bp, Homo sapien
tcgcattcaacctttaccatcaagccacatcga

SEQ ID NO: 224610 - DNA, 33 bp, Homo sapien
tcgcattcaacctttagcatcaagccacatcga

SEQ ID NO: 224611 - DNA, 33 bp, Homo sapien
acggaaaatggcaaacactacagaacagactta

SEQ ID NO: 224612 - DNA, 33 bp, Homo sapien
acggaaaatggcaaacgctacagaacagactta

SEQ ID NO: 224613 - DNA, 33 bp, Homo sapien
aggtgctggggcaacacagaacaataccagatt

SEQ ID NO: 224614 - DNA, 33 bp, Homo sapien
aggtgctggggcaacatagaacaataccagatt

SEQ ID NO: 224615 - DNA, 33 bp, Homo sapien
tgccctggtgtttcccccgacaatgaaccctcg

SEQ ID NO: 224616 - DNA, 33 bp, Homo sapien
tgccctggtgtttccctcgacaatgaaccctcg

SEQ ID NO: 224617 - DNA, 33 bp, Homo sapien
tacagatagggccataaggttggagagatccga

SEQ ID NO: 224618 - DNA, 33 bp, Homo sapien
tacagatagggccatagggttggagagatccga

SEQ ID NO: 224619 - DNA, 33 bp, Homo sapien
gttgctgactgtggacagagaacttctgccgtc

SEQ ID NO: 224620 - DNA, 33 bp, Homo sapien
gttgctgactgtggaccgagaacttctgccgtc

SEQ ID NO: 224621 - DNA, 33 bp, Homo sapien
aacaattttcatggaactgtaacatacatagag

SEQ ID NO: 224622 - DNA, 33 bp, Homo sapien
aacaattttcatggaagtgtaacatacatagag

SEQ ID NO: 224623 - DNA, 33 bp, Homo sapien
ggtgtgacctatgcacgggctttgtatggaaaa

SEQ ID NO: 224624 - DNA, 33 bp, Homo sapien
ggtgtgacctatgcactggctttgtatggaaaa

SEQ ID NO: 224625 - DNA, 33 bp, Homo sapien
ccgcatggatcagaacaaagggctctaaacctg

SEQ ID NO: 224626 - DNA, 33 bp, Homo sapien
ccgcatggatcagaacgaagggctctaaacctg

SEQ ID NO: 224627 - DNA, 33 bp, Homo sapien
agttgaatctcagttccatctatctgcctatat

SEQ ID NO: 224628 - DNA, 33 bp, Homo sapien
agttgaatctcagttctatctatctgcctatat

SEQ ID NO: 224629 - DNA, 33 bp, Homo sapien
tctgtaagtgtggttacgacaaaattaataaga

SEQ ID NO: 224630 - DNA, 33 bp, Homo sapien
tctgtaagtgtggttatgacaaaattaataaga

SEQ ID NO: 224631 - DNA, 33 bp, Homo sapien
acaaaattaataagaaatgagctgccttgacag

SEQ ID NO: 224632 - DNA, 33 bp, Homo sapien
acaaaattaataagaagtgagctgccttgacag

SEQ ID NO: 224633 - DNA, 33 bp, Homo sapien
taaggtgatgcacgtaaagatgttttgcaaact

SEQ ID NO: 224634 - DNA, 33 bp, Homo sapien
taaggtgatgcacgtagagatgttttgcaaact

SEQ ID NO: 224635 - DNA, 33 bp, Homo sapien
gggatggaaaagccagaatgccttagtccctga

SEQ ID NO: 224636 - DNA, 33 bp, Homo sapien
gggatggaaaagccaggatgccttagtccctga

SEQ ID NO: 224637 - DNA, 33 bp, Homo sapien
acaaactcatttatgtaaacatttgggtgcaca

SEQ ID NO: 224638 - DNA, 33 bp, Homo sapien
acaaactcatttatgtcaacatttgggtgcaca

SEQ ID NO: 224639 - DNA, 33 bp, Homo sapien
cgtctcaggtttaccacgtcaacattgacacat

SEQ ID NO: 224640 - DNA, 33 bp, Homo sapien
cgtctcaggtttaccatgtcaacattgacacat

SEQ ID NO: 224641 - DNA, 33 bp, Homo sapien
ggccctctgttgtgggaagtgcagtcctatcta

SEQ ID NO: 224642 - DNA, 33 bp, Homo sapien
ggccctctgttgtgggcagtgcagtcctatcta

SEQ ID NO: 224643 - DNA, 33 bp, Homo sapien
tgcctgatacagaagacaaagttgcataggact

SEQ ID NO: 224644 - DNA, 33 bp, Homo sapien
tgcctgatacagaagagaaagttgcataggact

SEQ ID NO: 224645 - DNA, 33 bp, Homo sapien
agatgctccagagtaaatgtatagaccctcccc

SEQ ID NO: 224646 - DNA, 33 bp, Homo sapien
agatgctccagagtaactgtatagaccctcccc

SEQ ID NO: 224647 - DNA, 33 bp, Homo sapien
tgtccattaagagatgcaataatgtcaataact

SEQ ID NO: 224648 - DNA, 33 bp, Homo sapien
tgtccattaagagatgtaataatgtcaataact

SEQ ID NO: 224649 - DNA, 33 bp, Homo sapien
cgcagctcagctaaagaaaagacctgctaccca

SEQ ID NO: 224650 - DNA, 33 bp, Homo sapien
cgcagctcagctaaaggaaagacctgctaccca

SEQ ID NO: 224651 - DNA, 33 bp, Homo sapien
cccccttgtgggcagaaccgagcctgaaatctg

SEQ ID NO: 224652 - DNA, 33 bp, Homo sapien
cccccttgtgggcagagccgagcctgaaatctg

SEQ ID NO: 224653 - DNA, 33 bp, Homo sapien
tggagtcaacaagctacgtactgccttttactg

SEQ ID NO: 224654 - DNA, 33 bp, Homo sapien
tggagtcaacaagctatgtactgccttttactg

SEQ ID NO: 224655 - DNA, 33 bp, Homo sapien
tgctcttcatcagaacagtcttatttaagaaga

SEQ ID NO: 224656 - DNA, 33 bp, Homo sapien
tgctcttcatcagaacggtcttatttaagaaga

SEQ ID NO: 224657 - DNA, 33 bp, Homo sapien
tccctcctctgtctctcagaagtgtttccaaga

SEQ ID NO: 224658 - DNA, 33 bp, Homo sapien
tccctcctctgtctctgagaagtgtttccaaga

SEQ ID NO: 224659 - DNA, 33 bp, Homo sapien
ctgactgatcattagcagaaatctgaaccagag

SEQ ID NO: 224660 - DNA, 33 bp, Homo sapien
ctgactgatcattagcggaaatctgaaccagag

SEQ ID NO: 224661 - DNA, 33 bp, Homo sapien
cccatccttacctatacgggtgcttactcaggg

SEQ ID NO: 224662 - DNA, 33 bp, Homo sapien
cccatccttacctatatgggtgcttactcaggg

SEQ ID NO: 224663 - DNA, 33 bp, Homo sapien
ttctgatataccaaacggtaagataacaaactg

SEQ ID NO: 224664 - DNA, 33 bp, Homo sapien
ttctgatataccaaactgtaagataacaaactg

SEQ ID NO: 224665 - DNA, 33 bp, Homo sapien
attgttcctgctagcacgtctggtcatgaggct

SEQ ID NO: 224666 - DNA, 33 bp, Homo sapien
attgttcctgctagcatgtctggtcatgaggct

SEQ ID NO: 224667 - DNA, 33 bp, Homo sapien
taggcctttgagaccccgactggacagagccac

SEQ ID NO: 224668 - DNA, 33 bp, Homo sapien
taggcctttgagaccctgactggacagagccac

SEQ ID NO: 224669 - DNA, 33 bp, Homo sapien
ggttgtgaaagcctagaaacactgcgcttgtgc

SEQ ID NO: 224670 - DNA, 33 bp, Homo sapien
ggttgtgaaagcctaggaacactgcgcttgtgc

SEQ ID NO: 224671 - DNA, 33 bp, Homo sapien
aactaatctcaaacaacgtttcccaaactgcct

SEQ ID NO: 224672 - DNA, 33 bp, Homo sapien
aactaatctcaaacaatgtttcccaaactgcct

SEQ ID NO: 224673 - DNA, 33 bp, Homo sapien
atttacagtttttcaacgtataggtggatatca

SEQ ID NO: 224674 - DNA, 33 bp, Homo sapien
atttacagtttttcaatgtataggtggatatca

SEQ ID NO: 224675 - DNA, 33 bp, Homo sapien
atgtttgcggcccaaggagactgttgtggctgg

SEQ ID NO: 224676 - DNA, 33 bp, Homo sapien
atgtttgcggcccaagtagactgttgtggctgg

SEQ ID NO: 224677 - DNA, 33 bp, Homo sapien
ctgaagtagaggtgaaggaagtagaaatgtgag

SEQ ID NO: 224678 - DNA, 33 bp, Homo sapien
ctgaagtagaggtgaatgaagtagaaatgtgag

SEQ ID NO: 224679 - DNA, 33 bp, Homo sapien
agctttgggaattgataagtcactaaggaaaac

SEQ ID NO: 224680 - DNA, 33 bp, Homo sapien
agctttgggaattgatgagtcactaaggaaaac

SEQ ID NO: 224681 - DNA, 33 bp, Homo sapien
tgaccaggagatatgaaagatatagccaggtca

SEQ ID NO: 224682 - DNA, 33 bp, Homo sapien
tgaccaggagatatgacagatatagccaggtca

SEQ ID NO: 224683 - DNA, 33 bp, Homo sapien
ttcctgaaaagatgaacgagattgagaaacctt

SEQ ID NO: 224684 - DNA, 33 bp, Homo sapien
ttcctgaaaagatgaatgagattgagaaacctt

SEQ ID NO: 224685 - DNA, 33 bp, Homo sapien
cagtagtggttaaatacacctggagtaagaggg

SEQ ID NO: 224686 - DNA, 33 bp, Homo sapien
cagtagtggttaaatatacctggagtaagaggg

SEQ ID NO: 224687 - DNA, 33 bp, Homo sapien
atataatgaatataaaatagctggcacacagta

SEQ ID NO: 224688 - DNA, 33 bp, Homo sapien
atataatgaatataaagtagctggcacacagta

SEQ ID NO: 224689 - DNA, 33 bp, Homo sapien
atttcttgaaattcaccgaggaaataattggat

SEQ ID NO: 224690 - DNA, 33 bp, Homo sapien
atttcttgaaattcactgaggaaataattggat

SEQ ID NO: 224691 - DNA, 33 bp, Homo sapien
accattaatagaaacacggtaagctatcagtcc

SEQ ID NO: 224692 - DNA, 33 bp, Homo sapien
accattaatagaaacatggtaagctatcagtcc

SEQ ID NO: 224693 - DNA, 33 bp, Homo sapien
agtcctaaactttgtgccaatggctttatatcc

SEQ ID NO: 224694 - DNA, 33 bp, Homo sapien
agtcctaaactttgtggcaatggctttatatcc

SEQ ID NO: 224695 - DNA, 33 bp, Homo sapien
agaacgtagttttttcactgggcgcagtggccc

SEQ ID NO: 224696 - DNA, 33 bp, Homo sapien
agaacgtagttttttcgctgggcgcagtggccc

SEQ ID NO: 224697 - DNA, 33 bp, Homo sapien
agccttcaacacttacagaagctggattttcct

SEQ ID NO: 224698 - DNA, 33 bp, Homo sapien
agccttcaacacttacggaagctggattttcct

SEQ ID NO: 224699 - DNA, 33 bp, Homo sapien
tctacaccttgcagaacggatgagaacaaagga

SEQ ID NO: 224700 - DNA, 33 bp, Homo sapien
tctacaccttgcagaagggatgagaacaaagga

SEQ ID NO: 224701 - DNA, 33 bp, Homo sapien
gacaaaataaaactcaacatctcctgaagacct

SEQ ID NO: 224702 - DNA, 33 bp, Homo sapien
gacaaaataaaactcaccatctcctgaagacct

SEQ ID NO: 224703 - DNA, 33 bp, Homo sapien; identical to SEQ ID NO: 224701

SEQ ID NO: 224704 - DNA, 33 bp, Homo sapien; identical to SEQ ID NO: 224702

SEQ ID NO: 224705 - DNA, 33 bp, Homo sapien
gcaacctacttcaaaaaggctaacttgaggctg

SEQ ID NO: 224706 - DNA, 33 bp, Homo sapien
gcaacctacttcaaaagggctaacttgaggctg

SEQ ID NO: 224707 - DNA, 33 bp, Homo sapien
actatccccacattgacagtaggaatcaagcct

SEQ ID NO: 224708 - DNA, 33 bp, Homo sapien
actatccccacattgagagtaggaatcaagcct

SEQ ID NO: 224709 - DNA, 33 bp, Homo sapien
tgctaagctgacagcaaaggactctcaacgaag

SEQ ID NO: 224710 - DNA, 33 bp, Homo sapien
tgctaagctgacagcagaggactctcaacgaag

SEQ ID NO: 224711 - DNA, 33 bp, Homo sapien
cctgggaataaatagacgaggagatcagtcata

SEQ ID NO: 224712 - DNA, 33 bp, Homo sapien
cctgggaataaatagatgaggagatcagtcata

SEQ ID NO: 224713 - DNA, 33 bp, Homo sapien
aggtaggaaaagacctcagctgctcgggaaaga

SEQ ID NO: 224714 - DNA, 33 bp, Homo sapien
aggtaggaaaagaccttagctgctcgggaaaga

SEQ ID NO: 224715 - DNA, 33 bp, Homo sapien
cctgctcaggcaccacagaggatctaggtctct

SEQ ID NO: 224716 - DNA, 33 bp, Homo sapien
cctgctcaggcaccaccgaggatctaggtctct

SEQ ID NO: 224717 - DNA, 33 bp, Homo sapien
ccagtgaaaggacagaaatgaccaaagagaggt

SEQ ID NO: 224718 - DNA, 33 bp, Homo sapien
ccagtgaaaggacagagatgaccaaagagaggt

SEQ ID NO: 224719 - DNA, 33 bp, Homo sapien
gtggtcacttcccataacaccttaactgcccct

SEQ ID NO: 224720 - DNA, 33 bp, Homo sapien
gtggtcacttcccatatcaccttaactgcccct

SEQ ID NO: 224721 - DNA, 33 bp, Homo sapien
aggtacttgtacagtgcataggtgaggcttgta

SEQ ID NO: 224722 - DNA, 33 bp, Homo sapien
aggtacttgtacagtgtataggtgaggcttgta

SEQ ID NO: 224723 - DNA, 33 bp, Homo sapien
tagctatcacttataaacaagaaaatgcagtat

SEQ ID NO: 224724 - DNA, 33 bp, Homo sapien
tagctatcacttataagcaagaaaatgcagtat

SEQ ID NO: 224725 - DNA, 33 bp, Homo sapien
cagtctgcaaagagaccggttagaccctcagtg

SEQ ID NO: 224726 - DNA, 33 bp, Homo sapien
cagtctgcaaagagactggttagaccctcagtg

SEQ ID NO: 224727 - DNA, 33 bp, Homo sapien
cagtgtttcctgtgagcagggatcaaaggcaca

SEQ ID NO: 224728 - DNA, 33 bp, Homo sapien
cagtgtttcctgtgaggagggatcaaaggcaca

SEQ ID NO: 224729 - DNA, 33 bp, Homo sapien
gaacttccagctaaaggcctttcttccacaacc

SEQ ID NO: 224730 - DNA, 33 bp, Homo sapien
gaacttccagctaaagtcctttcttccacaacc

SEQ ID NO: 224731 - DNA, 33 bp, Homo sapien
atgacagcagaagagacggtgttaaagagccag

SEQ ID NO: 224732 - DNA, 33 bp, Homo sapien
atgacagcagaagagatggtgttaaagagccag

SEQ ID NO: 224733 - DNA, 33 bp, Homo sapien
atgggtaggattatcaagacagtcctgggtaaa

SEQ ID NO: 224734 - DNA, 33 bp, Homo sapien
atgggtaggattatcaggacagtcctgggtaaa

SEQ ID NO: 224735 - DNA, 33 bp, Homo sapien
atgcagattaagattaaggtcattggactttgc

SEQ ID NO: 224736 - DNA, 33 bp, Homo sapien
atgcagattaagattagggtcattggactttgc

SEQ ID NO: 224737 - DNA, 33 bp, Homo sapien
agtggaagctggacacactatgtgacttgtatg

SEQ ID NO: 224738 - DNA, 33 bp, Homo sapien
agtggaagctggacaccctatgtgacttgtatg

SEQ ID NO: 224739 - DNA, 33 bp, Homo sapien; identical to SEQ ID NO: 224737

SEQ ID NO: 224740 - DNA, 33 bp, Homo sapien; identical to SEQ ID NO: 224738

SEQ ID NO: 224741 - DNA, 33 bp, Homo sapien
atgctattgaaaaaaaattgagtcaggcatagt

SEQ ID NO: 224742 - DNA, 33 bp, Homo sapien
atgctattgaaaaaaatttgagtcaggcatagt

SEQ ID NO: 224743 - DNA, 33 bp, Homo sapien
catagggacagatcatcagttgctcacagtgtg

SEQ ID NO: 224744 - DNA, 33 bp, Homo sapien
catagggacagatcattagttgctcacagtgtg

SEQ ID NO: 224745 - DNA, 33 bp, Homo sapien
ctctaacccatacaccagaatcttttgatattt

SEQ ID NO: 224746 - DNA, 33 bp, Homo sapien
ctctaacccatacaccggaatcttttgatattt

SEQ ID NO: 224747 - DNA, 33 bp, Homo sapien
tgcttcataactgttaccatccctattttacag

SEQ ID NO: 224748 - DNA, 33 bp, Homo sapien
tgcttcataactgttatcatccctattttacag

SEQ ID NO: 224749 - DNA, 33 bp, Homo sapien
aatccctagcagaggacgtgcaggataactaga

SEQ ID NO: 224750 - DNA, 33 bp, Homo sapien
aatccctagcagaggatgtgcaggataactaga

SEQ ID NO: 224751 - DNA, 33 bp, Homo sapien
aatctagaacacactaagattcacaaacataga

SEQ ID NO: 224752 - DNA, 33 bp, Homo sapien
aatctagaacacactaggattcacaaacataga

SEQ ID NO: 224753 - DNA, 33 bp, Homo sapien
ctctagcattatccccactaccattctctctcc

SEQ ID NO: 224754 - DNA, 33 bp, Homo sapien
ctctagcattatccccgctaccattctctctcc

SEQ ID NO: 224755 - DNA, 33 bp, Homo sapien
aaggcttcaactggggacaagagaaggtgattg

SEQ ID NO: 224756 - DNA, 33 bp, Homo sapien
aaggcttcaactggggccaagagaaggtgattg

SEQ ID NO: 224757 - DNA, 33 bp, Homo sapien
ctccaccagaagtcctcagaccatcattcacct

SEQ ID NO: 224758 - DNA, 33 bp, Homo sapien
ctccaccagaagtccttagaccatcattcacct

SEQ ID NO: 224759 - DNA, 33 bp, Homo sapien
aagaaaaagaagcttgaaacagattagtacagg

SEQ ID NO: 224760 - DNA, 33 bp, Homo sapien
aagaaaaagaagcttggaacagattagtacagg

SEQ ID NO: 224761 - DNA, 33 bp, Homo sapien
aggctcttgaggagataatacggaagctgtaga

SEQ ID NO: 224762 - DNA, 33 bp, Homo sapien
aggctcttgaggagatgatacggaagctgtaga

SEQ ID NO: 224763 - DNA, 33 bp, Homo sapien
gagtcagagccatatccatccttcgggcagcac

SEQ ID NO: 224764 - DNA, 33 bp, Homo sapien
gagtcagagccatatctatccttcgggcagcac

SEQ ID NO: 224765 - DNA, 33 bp, Homo sapien
gaccctctctgagtaaccctatttctagttact

SEQ ID NO: 224766 - DNA, 33 bp, Homo sapien
gaccctctctgagtaatcctatttctagttact

SEQ ID NO: 224767 - DNA, 33 bp, Homo sapien
caaggaagcccagaggccacactccgccttgct

SEQ ID NO: 224768 - DNA, 33 bp, Homo sapien
caaggaagcccagaggtcacactccgccttgct

SEQ ID NO: 224769 - DNA, 33 bp, Homo sapien
tagattccagtcgaggaaatagtgtctgctgtt

SEQ ID NO: 224770 - DNA, 33 bp, Homo sapien
tagattccagtcgaggcaatagtgtctgctgtt

SEQ ID NO: 224771 - DNA, 33 bp, Homo sapien
gcctggacaatatggccagacatcatctctaca

SEQ ID NO: 224772 - DNA, 33 bp, Homo sapien
gcctggacaatatggctagacatcatctctaca

SEQ ID NO: 224773 - DNA, 33 bp, Homo sapien
gctctgcctgccttaacgcagaaggaagcatgg

SEQ ID NO: 224774 - DNA, 33 bp, Homo sapien
gctctgcctgccttaatgcagaaggaagcatgg

SEQ ID NO: 224775 - DNA, 33 bp, Homo sapien
ctggggcacctcttgaacctatctccataataa

SEQ ID NO: 224776 - DNA, 33 bp, Homo sapien
ctggggcacctcttgaccctatctccataataa

SEQ ID NO: 224777 - DNA, 33 bp, Homo sapien
acaggcgaccgactaactacagtttgttaataa

SEQ ID NO: 224778 - DNA, 33 bp, Homo sapien
acaggcgaccgactaattacagtttgttaataa

SEQ ID NO: 224779 - DNA, 33 bp, Homo sapien
ttgctcaagggtagcccattccaatccttttct

SEQ ID NO: 224780 - DNA, 33 bp, Homo sapien
ttgctcaagggtagcctattccaatccttttct

SEQ ID NO: 224781 - DNA, 33 bp, Homo sapien
aacaccagcgcacccacggagaaccaggcccgg

SEQ ID NO: 224782 - DNA, 33 bp, Homo sapien
aacaccagcgcacccatggagaaccaggcccgg

SEQ ID NO: 224783 - DNA, 33 bp, Homo sapien
tccaggttctgccccaaaaagtgaggtaggcct

SEQ ID NO: 224784 - DNA, 33 bp, Homo sapien
tccaggttctgccccacaaagtgaggtaggcct

SEQ ID NO: 224785 - DNA, 33 bp, Homo sapien
cccctacataggaacccgctgtaagttataagc

SEQ ID NO: 224786 - DNA, 33 bp, Homo sapien
cccctacataggaacctgctgtaagttataagc

SEQ ID NO: 224787 - DNA, 33 bp, Homo sapien
cctgtcacagaaataactgaaattcacgcctgt

SEQ ID NO: 224788 - DNA, 33 bp, Homo sapien
cctgtcacagaaataagtgaaattcacgcctgt

SEQ ID NO: 224789 - DNA, 33 bp, Homo sapien
gtgtgatagatgctgactagctgggacatggat

SEQ ID NO: 224790 - DNA, 33 bp, Homo sapien
gtgtgatagatgctgattagctgggacatggat

SEQ ID NO: 224791 - DNA, 33 bp, Homo sapien
tactcatctttgtaaaccaagctctgaagattc

SEQ ID NO: 224792 - DNA, 33 bp, Homo sapien
tactcatctttgtaaatcaagctctgaagattc

SEQ ID NO: 224793 - DNA, 33 bp, Homo sapien
agaacccacaagcccaaacaatcaccttagccc

SEQ ID NO: 224794 - DNA, 33 bp, Homo sapien
agaacccacaagcccagacaatcaccttagccc

SEQ ID NO: 224795 - DNA, 33 bp, Homo sapien
tggttaaagtggtacaaagaatagctaatactt

SEQ ID NO: 224796 - DNA, 33 bp, Homo sapien
tggttaaagtggtacacagaatagctaatactt

SEQ ID NO: 224797 - DNA, 33 bp, Homo sapien
gctacagtcattgttaccttttgtcagcctata

SEQ ID NO: 224798 - DNA, 33 bp, Homo sapien
gctacagtcattgttatcttttgtcagcctata

SEQ ID NO: 224799 - DNA, 33 bp, Homo sapien
gcgtcagtatggtaaagccacaggaggaagcag

SEQ ID NO: 224800 - DNA, 33 bp, Homo sapien
gcgtcagtatggtaaatccacaggaggaagcag

SEQ ID NO: 224801 - DNA, 33 bp, Homo sapien
ccttttatacctagaactgccttttattgggtc

SEQ ID NO: 224802 - DNA, 33 bp, Homo sapien
ccttttatacctagaagtgccttttattgggtc

SEQ ID NO: 224803 - DNA, 33 bp, Homo sapien
attttggaaatagtgccgaagattattacatgg

SEQ ID NO: 224804 - DNA, 33 bp, Homo sapien
attttggaaatagtgctgaagattattacatgg

SEQ ID NO: 224805 - DNA, 33 bp, Homo sapien
ctaggcaagcaggtcacatttaaacagtcacaa

SEQ ID NO: 224806 - DNA, 33 bp, Homo sapien
ctaggcaagcaggtcatatttaaacagtcacaa

SEQ ID NO: 224807 - DNA, 33 bp, Homo sapien
ttaattaaaaaatcacaagtggatgataaagtg

SEQ ID NO: 224808 - DNA, 33 bp, Homo sapien
ttaattaaaaaatcacgagtggatgataaagtg

SEQ ID NO: 224809 - DNA, 33 bp, Homo sapien; identical to SEQ ID NO: 224807

SEQ ID NO: 224810 - DNA, 33 bp, Homo sapien; identical to SEQ ID NO: 224808

SEQ ID NO: 224811 - DNA, 33 bp, Homo sapien
gaggattagactttcccaggacttacctgtcct

SEQ ID NO: 224812 - DNA, 33 bp, Homo sapien
gaggattagactttccgaggacttacctgtcct

SEQ ID NO: 224813 - DNA, 33 bp, Homo sapien
cctaggtccatgtggccatctcagaaacctctt

SEQ ID NO: 224814 - DNA, 33 bp, Homo sapien
cctaggtccatgtggcgatctcagaaacctctt

SEQ ID NO: 224815 - DNA, 33 bp, Homo sapien
agacgccggaggggaccgatctctgtttccgca

SEQ ID NO: 224816 - DNA, 33 bp, Homo sapien
agacgccggaggggactgatctctgtttccgca

SEQ ID NO: 224817 - DNA, 33 bp, Homo sapien
agaacctagagcacaaatctcaaccgaagtaga

SEQ ID NO: 224818 - DNA, 33 bp, Homo sapien
agaacctagagcacaagtctcaaccgaagtaga

SEQ ID NO: 224819 - DNA, 33 bp, Homo sapien
gacaggagttgtcccacattcccttgcagactg

SEQ ID NO: 224820 - DNA, 33 bp, Homo sapien
gacaggagttgtcccatattcccttgcagactg

SEQ ID NO: 224821 - DNA, 33 bp, Homo sapien
gcttttattgaccataagcaaattattcacagt

SEQ ID NO: 224822 - DNA, 33 bp, Homo sapien
gcttttattgaccataggcaaattattcacagt

SEQ ID NO: 224823 - DNA, 33 bp, Homo sapien
attaggtcatttagccaaagttaccaagctggg

SEQ ID NO: 224824 - DNA, 33 bp, Homo sapien
attaggtcatttagccgaagttaccaagctggg

SEQ ID NO: 224825 - DNA, 33 bp, Homo sapien
aaatgtttttgtagacaatatagagctaattat

SEQ ID NO: 224826 - DNA, 33 bp, Homo sapien
aaatgtttttgtagacgatatagagctaattat

SEQ ID NO: 224827 - DNA, 33 bp, Homo sapien
tttgactatagcaaaacgtaccattctttttat

SEQ ID NO: 224828 - DNA, 33 bp, Homo sapien
tttgactatagcaaaatgtaccattctttttat

SEQ ID NO: 224829 - DNA, 33 bp, Homo sapien
cttaaactggatggaaaagtcatgtataactat

SEQ ID NO: 224830 - DNA, 33 bp, Homo sapien
cttaaactggatggaacagtcatgtataactat

SEQ ID NO: 224831 - DNA, 33 bp, Homo sapien
gccatgagtaagggcgcaccaagcacccacagc

SEQ ID NO: 224832 - DNA, 33 bp, Homo sapien
gccatgagtaagggcgtaccaagcacccacagc

SEQ ID NO: 224833 - DNA, 33 bp, Homo sapien
ccagccttggcttttcaaagtgtggagatttac

SEQ ID NO: 224834 - DNA, 33 bp, Homo sapien
ccagccttggcttttccaagtgtggagatttac

SEQ ID NO: 224835 - DNA, 33 bp, Homo sapien
gagagcaagatcaaagccagaaatccaactctg

SEQ ID NO: 224836 - DNA, 33 bp, Homo sapien
gagagcaagatcaaagtcagaaatccaactctg

SEQ ID NO: 224837 - DNA, 33 bp, Homo sapien
gtatgcagcagaaaggacactttttttttttga

SEQ ID NO: 224838 - DNA, 33 bp, Homo sapien
gtatgcagcagaaagggcactttttttttttga

SEQ ID NO: 224839 - DNA, 33 bp, Homo sapien
atcctcaaaacaataaaccaaaagtaatcaacc

SEQ ID NO: 224840 - DNA, 33 bp, Homo sapien
atcctcaaaacaataagccaaaagtaatcaacc

SEQ ID NO: 224841 - DNA, 33 bp, Homo sapien
gaacaagatacagtaaatagagctattaacatt

SEQ ID NO: 224842 - DNA, 33 bp, Homo sapien
gaacaagatacagtaagtagagctattaacatt

SEQ ID NO: 224843 - DNA, 33 bp, Homo sapien
ccttagcgctagaaataaagtccatgtacggac

SEQ ID NO: 224844 - DNA, 33 bp, Homo sapien
ccttagcgctagaaatgaagtccatgtacggac

SEQ ID NO: 224845 - DNA, 33 bp, Homo sapien
agaatgttatcatcagactcacagaaataaaaa

SEQ ID NO: 224846 - DNA, 33 bp, Homo sapien
agaatgttatcatcaggctcacagaaataaaaa

SEQ ID NO: 224847 - DNA, 33 bp, Homo sapien
aactggaaacttttcaagtcatttggtaaatgg

SEQ ID NO: 224848 - DNA, 33 bp, Homo sapien
aactggaaacttttcaggtcatttggtaaatgg

SEQ ID NO: 224849 - DNA, 33 bp, Homo sapien
agcagcattgcatcatcaaatggaagtggtgtg

SEQ ID NO: 224850 - DNA, 33 bp, Homo sapien
agcagcattgcatcattaaatggaagtggtgtg

SEQ ID NO: 224851 - DNA, 33 bp, Homo sapien
atactctaaggctacacataactttgatttgtc

SEQ ID NO: 224852 - DNA, 33 bp, Homo sapien
atactctaaggctacatataactttgatttgtc

SEQ ID NO: 224853 - DNA, 33 bp, Homo sapien
actagtgattccaaagaaaccagcctctctctt

SEQ ID NO: 224854 - DNA, 33 bp, Homo sapien
actagtgattccaaagcaaccagcctctctctt

SEQ ID NO: 224855 - DNA, 33 bp, Homo sapien
agtagggaggtttacccatgtctcacagtcctg

SEQ ID NO: 224856 - DNA, 33 bp, Homo sapien
agtagggaggtttaccgatgtctcacagtcctg

SEQ ID NO: 224857 - DNA, 33 bp, Homo sapien
ttatagtacttgtagaaaaaattcaagggtcca

SEQ ID NO: 224858 - DNA, 33 bp, Homo sapien
ttatagtacttgtagacaaaattcaagggtcca

SEQ ID NO: 224859 - DNA, 33 bp, Homo sapien
acagcaaagattttctcactcaggacccttgct

SEQ ID NO: 224860 - DNA, 33 bp, Homo sapien
acagcaaagattttcttactcaggacccttgct

SEQ ID NO: 224861 - DNA, 33 bp, Homo sapien
gaatgattaaacagtgaataagatagagtcctt

SEQ ID NO: 224862 - DNA, 33 bp, Homo sapien
gaatgattaaacagtgcataagatagagtcctt

SEQ ID NO: 224863 - DNA, 33 bp, Homo sapien
agcctctatggagagagattgtggaagattctt

SEQ ID NO: 224864 - DNA, 33 bp, Homo sapien
agcctctatggagagatattgtggaagattctt

SEQ ID NO: 224865 - DNA, 33 bp, Homo sapien
gccaggatgactaataactccatataattcatc

SEQ ID NO: 224866 - DNA, 33 bp, Homo sapien
gccaggatgactaatagctccatataattcatc

SEQ ID NO: 224867 - DNA, 33 bp, Homo sapien
atacctagttttcaccaagtttcattaattcgg

SEQ ID NO: 224868 - DNA, 33 bp, Homo sapien
atacctagttttcaccgagtttcattaattcgg

SEQ ID NO: 224869 - DNA, 33 bp, Homo sapien
ctgttacctacaggaacgagaaatgtagattgc

SEQ ID NO: 224870 - DNA, 33 bp, Homo sapien
ctgttacctacaggaatgagaaatgtagattgc

SEQ ID NO: 224871 - DNA, 33 bp, Homo sapien
caccaaatactgacgcaagttcctatttgctgc

SEQ ID NO: 224872 - DNA, 33 bp, Homo sapien
caccaaatactgacgcgagttcctatttgctgc

SEQ ID NO: 224873 - DNA, 33 bp, Homo sapien
ctaatgtgaaaggagacgtcagccaagtagcag

SEQ ID NO: 224874 - DNA, 33 bp, Homo sapien
ctaatgtgaaaggagatgtcagccaagtagcag

SEQ ID NO: 224875 - DNA, 33 bp, Homo sapien
gctgaagttaacggcaagctggctgagctcggt

SEQ ID NO: 224876 - DNA, 33 bp, Homo sapien
gctgaagttaacggcaggctggctgagctcggt

SEQ ID NO: 224877 - DNA, 33 bp, Homo sapien
ccttctctttagacacacaggcttctctacaac

SEQ ID NO: 224878 - DNA, 33 bp, Homo sapien
ccttctctttagacacgcaggcttctctacaac

SEQ ID NO: 224879 - DNA, 33 bp, Homo sapien
tccacttccctcaggccgagctccaagtggcac

SEQ ID NO: 224880 - DNA, 33 bp, Homo sapien
tccacttccctcaggctgagctccaagtggcac

SEQ ID NO: 224881 - DNA, 33 bp, Homo sapien
aatcaataatgactgcccttgtctcaaaaagac

SEQ ID NO: 224882 - DNA, 33 bp, Homo sapien
aatcaataatgactgctcttgtctcaaaaagac

SEQ ID NO: 224883 - DNA, 33 bp, Homo sapien
gttgtatgaacttcaaatctgtgttcaagtttt

SEQ ID NO: 224884 - DNA, 33 bp, Homo sapien
gttgtatgaacttcaagtctgtgttcaagtttt

SEQ ID NO: 224885 - DNA, 33 bp, Homo sapien
caactttcacatgtcacaaaatattcttctttt

SEQ ID NO: 224886 - DNA, 33 bp, Homo sapien
caactttcacatgtcataaaatattcttctttt

SEQ ID NO: 224887 - DNA, 33 bp, Homo sapien
ggttctggcatcaaggaaataggtttaaggggt

SEQ ID NO: 224888 - DNA, 33 bp, Homo sapien
ggttctggcatcaaggcaataggtttaaggggt

SEQ ID NO: 224889 - DNA, 33 bp, Homo sapien
tttgtctaactttcaacgaggtctttagttggc

SEQ ID NO: 224890 - DNA, 33 bp, Homo sapien
tttgtctaactttcaaggaggtctttagttggc

SEQ ID NO: 224891 - DNA, 33 bp, Homo sapien
gatgtcacagatgacacaggccgcctgtataac

SEQ ID NO: 224892 - DNA, 33 bp, Homo sapien
gatgtcacagatgacagaggccgcctgtataac

SEQ ID NO: 224893 - DNA, 33 bp, Homo sapien
aggtcctgaattatgccaagctcccttttcaat

SEQ ID NO: 224894 - DNA, 33 bp, Homo sapien
aggtcctgaattatgctaagctcccttttcaat

SEQ ID NO: 224895 - DNA, 33 bp, Homo sapien
cctgactcgagagtgcgctcctatgccctctgc

SEQ ID NO: 224896 - DNA, 33 bp, Homo sapien
cctgactcgagagtgctctcctatgccctctgc

SEQ ID NO: 224897 - DNA, 33 bp, Homo sapien
ctcttaagggataagacggaagatagtttagaa

SEQ ID NO: 224898 - DNA, 33 bp, Homo sapien
ctcttaagggataagatggaagatagtttagaa

SEQ ID NO: 224899 - DNA, 33 bp, Homo sapien
cattacgactgtctcccgacaaaagcagctcat

SEQ ID NO: 224900 - DNA, 33 bp, Homo sapien
cattacgactgtctcctgacaaaagcagctcat

SEQ ID NO: 224901 - DNA, 33 bp, Homo sapien
acaggactttaggtgacctctgggctctgcaga

SEQ ID NO: 224902 - DNA, 33 bp, Homo sapien
acaggactttaggtgatctctgggctctgcaga

SEQ ID NO: 224903 - DNA, 33 bp, Homo sapien
tcctcttccctgcctccagatctctggacctct

SEQ ID NO: 224904 - DNA, 33 bp, Homo sapien
tcctcttccctgcctcgagatctctggacctct

SEQ ID NO: 224905 - DNA, 33 bp, Homo sapien
ttcctactttctgaaccgcaaaagaagcttctc

SEQ ID NO: 224906 - DNA, 33 bp, Homo sapien
ttcctactttctgaactgcaaaagaagcttctc

SEQ ID NO: 224907 - DNA, 33 bp, Homo sapien
agaggattagcagcccgattgagtcaaggcagc

SEQ ID NO: 224908 - DNA, 33 bp, Homo sapien
agaggattagcagccctattgagtcaaggcagc

SEQ ID NO: 224909 - DNA, 33 bp, Homo sapien
ctccctaagtagatgacccacagatagtttcag

SEQ ID NO: 224910 - DNA, 33 bp, Homo sapien
ctccctaagtagatgagccacagatagtttcag

SEQ ID NO: 224911 - DNA, 33 bp, Homo sapien
gaaagtcactgggtctaaatttgacggattatt

SEQ ID NO: 224912 - DNA, 33 bp, Homo sapien
gaaagtcactgggtctgaatttgacggattatt

SEQ ID NO: 224913 - DNA, 33 bp, Homo sapien
aagtaatgaggtttcaatccctgtctccttact

SEQ ID NO: 224914 - DNA, 33 bp, Homo sapien
aagtaatgaggtttcagtccctgtctccttact

SEQ ID NO: 224915 - DNA, 33 bp, Homo sapien
attcaccacacatccaagtagcctttcatttat

SEQ ID NO: 224916 - DNA, 33 bp, Homo sapien
attcaccacacatccacgtagcctttcatttat

SEQ ID NO: 224917 - DNA, 33 bp, Homo sapien
tcagagatttccattcacagggtcaggaagtcc

SEQ ID NO: 224918 - DNA, 33 bp, Homo sapien
tcagagatttccattcgcagggtcaggaagtcc

SEQ ID NO: 224919 - DNA, 33 bp, Homo sapien
cttaccacccctactcagaaggacattaatcca

SEQ ID NO: 224920 - DNA, 33 bp, Homo sapien
cttaccacccctactcggaaggacattaatcca

SEQ ID NO: 224921 - DNA, 33 bp, Homo sapien
tagcatttctcacttacagcgtcttctgacatg

SEQ ID NO: 224922 - DNA, 33 bp, Homo sapien
tagcatttctcacttatagcgtcttctgacatg

SEQ ID NO: 224923 - DNA, 33 bp, Homo sapien
gttaaacaagtactcaataaatacgtgatgaag

SEQ ID NO: 224924 - DNA, 33 bp, Homo sapien
gttaaacaagtactcattaaatacgtgatgaag

SEQ ID NO: 224925 - DNA, 33 bp, Homo sapien
ttaccgcttgagcagaagacctcatgtgtgtct

SEQ ID NO: 224926 - DNA, 33 bp, Homo sapien
ttaccgcttgagcagacgacctcatgtgtgtct

SEQ ID NO: 224927 - DNA, 33 bp, Homo sapien
aatcttggtggaaacactctgcctatccaattc

SEQ ID NO: 224928 - DNA, 33 bp, Homo sapien
aatcttggtggaaacattctgcctatccaattc

SEQ ID NO: 224929 - DNA, 33 bp, Homo sapien
ttcctggattcttgggcaagatacaaatgtgca

SEQ ID NO: 224930 - DNA, 33 bp, Homo sapien
ttcctggattcttggggaagatacaaatgtgca

SEQ ID NO: 224931 - DNA, 33 bp, Homo sapien
taagtcattgaaattaccctcctttttcctctt

SEQ ID NO: 224932 - DNA, 33 bp, Homo sapien
taagtcattgaaattatcctcctttttcctctt

SEQ ID NO: 224933 - DNA, 33 bp, Homo sapien
ggtaagggagagaaaaagtattgttattcttac

SEQ ID NO: 224934 - DNA, 33 bp, Homo sapien
ggtaagggagagaaaatgtattgttattcttac

SEQ ID NO: 224935 - DNA, 33 bp, Homo sapien
gcatccctctttgacactcagttttgtgactct

SEQ ID NO: 224936 - DNA, 33 bp, Homo sapien
gcatccctctttgacagtcagttttgtgactct

SEQ ID NO: 224937 - DNA, 33 bp, Homo sapien
aagagaagataagaaccatgagcagagatgctt

SEQ ID NO: 224938 - DNA, 33 bp, Homo sapien
aagagaagataagaactatgagcagagatgctt

SEQ ID NO: 224939 - DNA, 33 bp, Homo sapien
ctcctctgtttaaaaacctctaatggtatacaa

SEQ ID NO: 224940 - DNA, 33 bp, Homo sapien
ctcctctgtttaaaaatctctaatggtatacaa

SEQ ID NO: 224941 - DNA, 33 bp, Homo sapien
agctgaatgcgatgaccaagagctggctatttt

SEQ ID NO: 224942 - DNA, 33 bp, Homo sapien
agctgaatgcgatgactaagagctggctatttt

SEQ ID NO: 224943 - DNA, 33 bp, Homo sapien
gtacccagagctccagaacaagtgactggtcat

SEQ ID NO: 224944 - DNA, 33 bp, Homo sapien
gtacccagagctccaggacaagtgactggtcat

SEQ ID NO: 224945 - DNA, 33 bp, Homo sapien
cattccatagcaactaaaccaatgtgttattca

SEQ ID NO: 224946 - DNA, 33 bp, Homo sapien
cattccatagcaactagaccaatgtgttattca

SEQ ID NO: 224947 - DNA, 33 bp, Homo sapien
tgttctcctacttcccggatcagtttttctcag

SEQ ID NO: 224948 - DNA, 33 bp, Homo sapien
tgttctcctacttccctgatcagtttttctcag

SEQ ID NO: 224949 - DNA, 33 bp, Homo sapien
agtttagacttgatgggcaatagaaatgctttg

SEQ ID NO: 224950 - DNA, 33 bp, Homo sapien
agtttagacttgatggtcaatagaaatgctttg

SEQ ID NO: 224951 - DNA, 33 bp, Homo sapien
tgcatattagaatcacacaaggagctttttaaa

SEQ ID NO: 224952 - DNA, 33 bp, Homo sapien
tgcatattagaatcacccaaggagctttttaaa

SEQ ID NO: 224953 - DNA, 33 bp, Homo sapien
agctttttcaaagagacggtaccgaatctgtgt

SEQ ID NO: 224954 - DNA, 33 bp, Homo sapien
agctttttcaaagagatggtaccgaatctgtgt

SEQ ID NO: 224955 - DNA, 33 bp, Homo sapien
tatctgtgactgtagacgggattagaaatgaga

SEQ ID NO: 224956 - DNA, 33 bp, Homo sapien
tatctgtgactgtagatgggattagaaatgaga

SEQ ID NO: 224957 - DNA, 33 bp, Homo sapien
aaataagtgcaaataaaacaatgttgaggaact

SEQ ID NO: 224958 - DNA, 33 bp, Homo sapien
aaataagtgcaaataatacaatgttgaggaact

SEQ ID NO: 224959 - DNA, 33 bp, Homo sapien
tacaatttccaccttcccataacctacaaaata

SEQ ID NO: 224960 - DNA, 33 bp, Homo sapien
tacaatttccaccttctcataacctacaaaata

SEQ ID NO: 224961 - DNA, 33 bp, Homo sapien
aagataacactttcaccaacccccatagcctga

SEQ ID NO: 224962 - DNA, 33 bp, Homo sapien
aagataacactttcactaacccccatagcctga

SEQ ID NO: 224963 - DNA, 33 bp, Homo sapien
gatgaaattgctagagaacctaaatgaccaacc

SEQ ID NO: 224964 - DNA, 33 bp, Homo sapien
gatgaaattgctagaggacctaaatgaccaacc

SEQ ID NO: 224965 - DNA, 33 bp, Homo sapien
acttttacacctggcaactatcccttgaccttt

SEQ ID NO: 224966 - DNA, 33 bp, Homo sapien
acttttacacctggcatctatcccttgaccttt

SEQ ID NO: 224967 - DNA, 33 bp, Homo sapien
ttccttcaagtaaggtcactccagaaagttaaa

SEQ ID NO: 224968 - DNA, 33 bp, Homo sapien
ttccttcaagtaaggtgactccagaaagttaaa

SEQ ID NO: 224969 - DNA, 33 bp, Homo sapien
acccatctctgaagcaaacgaggcaaaaaaaaa

SEQ ID NO: 224970 - DNA, 33 bp, Homo sapien
acccatctctgaagcagacgaggcaaaaaaaaa

SEQ ID NO: 224971 - DNA, 33 bp, Homo sapien
agcatcagggatagacacaaagggtgtgtttgt

SEQ ID NO: 224972 - DNA, 33 bp, Homo sapien
agcatcagggatagactcaaagggtgtgtttgt

SEQ ID NO: 224973 - DNA, 33 bp, Homo sapien
taattacatttgtgaaactgtttaatggtggcc

SEQ ID NO: 224974 - DNA, 33 bp, Homo sapien
taattacatttgtgaacctgtttaatggtggcc

SEQ ID NO: 224975 - DNA, 33 bp, Homo sapien
ctcttcttatcactggcagcatcttatcacaat

SEQ ID NO: 224976 - DNA, 33 bp, Homo sapien
ctcttcttatcactggtagcatcttatcacaat

SEQ ID NO: 224977 - DNA, 33 bp, Homo sapien
tgttcttctctactcacataggacttgggaatt

SEQ ID NO: 224978 - DNA, 33 bp, Homo sapien
tgttcttctctactcatataggacttgggaatt

SEQ ID NO: 224979 - DNA, 33 bp, Homo sapien
tactgagtgctaaaggaagatttttaggttgaa

SEQ ID NO: 224980 - DNA, 33 bp, Homo sapien
tactgagtgctaaagggagatttttaggttgaa

SEQ ID NO: 224981 - DNA, 33 bp, Homo sapien
ggcattgatagttaaaattgcataatataaatc

SEQ ID NO: 224982 - DNA, 33 bp, Homo sapien
ggcattgatagttaaagttgcataatataaatc

SEQ ID NO: 224983 - DNA, 33 bp, Homo sapien
aggaagactcaatcaagttagttagttatgttg

SEQ ID NO: 224984 - DNA, 33 bp, Homo sapien
aggaagactcaatcaatttagttagttatgttg

SEQ ID NO: 224985 - DNA, 33 bp, Homo sapien
ctcttcttacaagtcaacaataacaaggcaaac

SEQ ID NO: 224986 - DNA, 33 bp, Homo sapien
ctcttcttacaagtcatcaataacaaggcaaac

SEQ ID NO: 224987 - DNA, 33 bp, Homo sapien
aaattaaagtcacactaagataccactacacac

SEQ ID NO: 224988 - DNA, 33 bp, Homo sapien
aaattaaagtcacactgagataccactacacac

SEQ ID NO: 224989 - DNA, 33 bp, Homo sapien
tttgccactttgaacaatcggttttcatttcct

SEQ ID NO: 224990 - DNA, 33 bp, Homo sapien
tttgccactttgaacagtcggttttcatttcct

SEQ ID NO: 224991 - DNA, 33 bp, Homo sapien
tgaatgattacagagaaacagaataataggagc

SEQ ID NO: 224992 - DNA, 33 bp, Homo sapien
tgaatgattacagagagacagaataataggagc

SEQ ID NO: 224993 - DNA, 33 bp, Homo sapien
gcaagattcaatatgcaaagagtgtgaaaagag

SEQ ID NO: 224994 - DNA, 33 bp, Homo sapien
gcaagattcaatatgcgaagagtgtgaaaagag

SEQ ID NO: 224995 - DNA, 33 bp, Homo sapien
aggtaattaaaacaaaagcaagattcaatatgc

SEQ ID NO: 224996 - DNA, 33 bp, Homo sapien
aggtaattaaaacaaaggcaagattcaatatgc

SEQ ID NO: 224997 - DNA, 33 bp, Homo sapien
aaggtccccagaatacacttttctattaatttt

SEQ ID NO: 224998 - DNA, 33 bp, Homo sapien
aaggtccccagaatacccttttctattaatttt

SEQ ID NO: 224999 - DNA, 33 bp, Homo sapien
catataatgcattttgcacaactccagattgat

SEQ ID NO: 225000 - DNA, 33 bp, Homo sapien
catataatgcattttggacaactccagattgat

SEQ ID NO: 225001 - DNA, 33 bp, Homo sapien
tcttaatacagagcaaagtctgctgatgtagaa

SEQ ID NO: 225002 - DNA, 33 bp, Homo sapien
tcttaatacagagcaaggtctgctgatgtagaa

SEQ ID NO: 225003 - DNA, 33 bp, Homo sapien
tggagggaaatgaatagtagccagaatcgtagg

SEQ ID NO: 225004 - DNA, 33 bp, Homo sapien
tggagggaaatgaatattagccagaatcgtagg

SEQ ID NO: 225005 - DNA, 33 bp, Homo sapien
ggaacactcaccaaccagatttgtgcatgtgtg

SEQ ID NO: 225006 - DNA, 33 bp, Homo sapien
ggaacactcaccaaccggatttgtgcatgtgtg

SEQ ID NO: 225007 - DNA, 33 bp, Homo sapien
ggaaattagcgttaacaacatacaagagagagt

SEQ ID NO: 225008 - DNA, 33 bp, Homo sapien
ggaaattagcgttaacgacatacaagagagagt

SEQ ID NO: 225009 - DNA, 33 bp, Homo sapien
cagcaaaataaaaaagcctgccaataccaagta

SEQ ID NO: 225010 - DNA, 33 bp, Homo sapien
cagcaaaataaaaaaggctgccaataccaagta

SEQ ID NO: 225011 - DNA, 33 bp, Homo sapien
gttcaccaggaagatacagcaattctttacctt

SEQ ID NO: 225012 - DNA, 33 bp, Homo sapien
gttcaccaggaagatatagcaattctttacctt

SEQ ID NO: 225013 - DNA, 33 bp, Homo sapien
cacagaatggctaagactaaaaaaatggaaaaa

SEQ ID NO: 225014 - DNA, 33 bp, Homo sapien
cacagaatggctaagagtaaaaaaatggaaaaa

SEQ ID NO: 225015 - DNA, 33 bp, Homo sapien
caattcaggaaatctacggttttggtagtgagt

SEQ ID NO: 225016 - DNA, 33 bp, Homo sapien
caattcaggaaatctatggttttggtagtgagt

SEQ ID NO: 225017 - DNA, 33 bp, Homo sapien
ggctgggaaccaaagggaaagaaaccatgataa

SEQ ID NO: 225018 - DNA, 33 bp, Homo sapien
ggctgggaaccaaaggtaaagaaaccatgataa

SEQ ID NO: 225019 - DNA, 33 bp, Homo sapien
gttttcttccttttcaggtccacctcaccagcc

SEQ ID NO: 225020 - DNA, 33 bp, Homo sapien
gttttcttccttttcatgtccacctcaccagcc

SEQ ID NO: 225021 - DNA, 33 bp, Homo sapien
atccctgagcttggcacgtggagctggtcgggg

SEQ ID NO: 225022 - DNA, 33 bp, Homo sapien
atccctgagcttggcatgtggagctggtcgggg

SEQ ID NO: 225023 - DNA, 33 bp, Homo sapien
cataaccgaacccacgaaaagacgctgcgcggg

SEQ ID NO: 225024 - DNA, 33 bp, Homo sapien
cataaccgaacccacggaaagacgctgcgcggg

SEQ ID NO: 225025 - DNA, 33 bp, Homo sapien
atccatactccaatcacgctgccaggtccctaa

SEQ ID NO: 225026 - DNA, 33 bp, Homo sapien
atccatactccaatcatgctgccaggtccctaa

SEQ ID NO: 225027 - DNA, 33 bp, Homo sapien
acactggtaagcctaaaaaggacctcagttcct

SEQ ID NO: 225028 - DNA, 33 bp, Homo sapien
acactggtaagcctaacaaggacctcagttcct

SEQ ID NO: 225029 - DNA, 33 bp, Homo sapien
cctagtgtttgtgttaaaagtaagactaagtgt

SEQ ID NO: 225030 - DNA, 33 bp, Homo sapien
cctagtgtttgtgttacaagtaagactaagtgt

SEQ ID NO: 225031 - DNA, 33 bp, Homo sapien
aagtctagacaatagacggctgtttatgacaac

SEQ ID NO: 225032 - DNA, 33 bp, Homo sapien
aagtctagacaatagatggctgtttatgacaac

SEQ ID NO: 225033 - DNA, 33 bp, Homo sapien
gtagcttgtctccataggtaacccctaaaatcc

SEQ ID NO: 225034 - DNA, 33 bp, Homo sapien
gtagcttgtctccatatgtaacccctaaaatcc

SEQ ID NO: 225035 - DNA, 33 bp, Homo sapien
ctgcggctcccaaaccagataaggaggacacaa

SEQ ID NO: 225036 - DNA, 33 bp, Homo sapien
ctgcggctcccaaaccggataaggaggacacaa

SEQ ID NO: 225037 - DNA, 33 bp, Homo sapien
gatcaggactttcaaagagaagtggggataaaa

SEQ ID NO: 225038 - DNA, 33 bp, Homo sapien
gatcaggactttcaaatagaagtggggataaaa

SEQ ID NO: 225039 - DNA, 33 bp, Homo sapien
gcacatgaaatacagcagatggcagggctgaca

SEQ ID NO: 225040 - DNA, 33 bp, Homo sapien
gcacatgaaatacagcggatggcagggctgaca

SEQ ID NO: 225041 - DNA, 33 bp, Homo sapien
tttattacaattaaacagagaagaaaggtatat

SEQ ID NO: 225042 - DNA, 33 bp, Homo sapien
tttattacaattaaacggagaagaaaggtatat

SEQ ID NO: 225043 - DNA, 33 bp, Homo sapien
ctttgtttctataaaacgagcctaaagaaatca

SEQ ID NO: 225044 - DNA, 33 bp, Homo sapien
ctttgtttctataaaatgagcctaaagaaatca

SEQ ID NO: 225045 - DNA, 33 bp, Homo sapien
agtgaaaggaaacagaaatgttgcaatttttaa

SEQ ID NO: 225046 - DNA, 33 bp, Homo sapien
agtgaaaggaaacagacatgttgcaatttttaa

SEQ ID NO: 225047 - DNA, 33 bp, Homo sapien
ctccttcctcttccctcacatacatggtcattc

SEQ ID NO: 225048 - DNA, 33 bp, Homo sapien
ctccttcctcttcccttacatacatggtcattc

SEQ ID NO: 225049 - DNA, 33 bp, Homo sapien
gcagacatataatcgaagcaggaaggacctgca

SEQ ID NO: 225050 - DNA, 33 bp, Homo sapien
gcagacatataatcgaggcaggaaggacctgca

SEQ ID NO: 225051 - DNA, 33 bp, Homo sapien
ggatctgccaataaaaaaagcagaaagagtcct

SEQ ID NO: 225052 - DNA, 33 bp, Homo sapien
ggatctgccaataaaagaagcagaaagagtcct

SEQ ID NO: 225053 - DNA, 33 bp, Homo sapien
aagcaggtgtaaaacacaggaagagggtctgta

SEQ ID NO: 225054 - DNA, 33 bp, Homo sapien
aagcaggtgtaaaacataggaagagggtctgta

SEQ ID NO: 225055 - DNA, 33 bp, Homo sapien
agggaaggcaaggaataaacgaccaggatggag

SEQ ID NO: 225056 - DNA, 33 bp, Homo sapien
agggaaggcaaggaatcaacgaccaggatggag

SEQ ID NO: 225057 - DNA, 33 bp, Homo sapien
aggtgagcttatagcacggatttagatgggaat

SEQ ID NO: 225058 - DNA, 33 bp, Homo sapien
aggtgagcttatagcagggatttagatgggaat

SEQ ID NO: 225059 - DNA, 33 bp, Homo sapien
tcccccagcactgaaacaattctcttcatcctt

SEQ ID NO: 225060 - DNA, 33 bp, Homo sapien
tcccccagcactgaaataattctcttcatcctt

SEQ ID NO: 225061 - DNA, 33 bp, Homo sapien
gcttacttcctctctcacctctaagtctttgtt

SEQ ID NO: 225062 - DNA, 33 bp, Homo sapien
gcttacttcctctctcgcctctaagtctttgtt

SEQ ID NO: 225063 - DNA, 33 bp, Homo sapien
cccctgtcaacctttcgctgtcaacggatattt

SEQ ID NO: 225064 - DNA, 33 bp, Homo sapien
cccctgtcaacctttctctgtcaacggatattt

SEQ ID NO: 225065 - DNA, 33 bp, Homo sapien; identical to SEQ ID NO: 225063

SEQ ID NO: 225066 - DNA, 33 bp, Homo sapien; identical to SEQ ID NO: 225064

SEQ ID NO: 225067 - DNA, 33 bp, Homo sapien
ttgaataaggcaggaacgacctcacagcatcaa

SEQ ID NO: 225068 - DNA, 33 bp, Homo sapien
ttgaataaggcaggaatgacctcacagcatcaa

SEQ ID NO: 225069 - DNA, 33 bp, Homo sapien
gaggctgtctgaagaccgggcagctttgttccg

SEQ ID NO: 225070 - DNA, 33 bp, Homo sapien
gaggctgtctgaagactgggcagctttgttccg

SEQ ID NO: 225071 - DNA, 33 bp, Homo sapien
gggcataaatttctcacggggtccaggactgca

SEQ ID NO: 225072 - DNA, 33 bp, Homo sapien
gggcataaatttctcatggggtccaggactgca

SEQ ID NO: 225073 - DNA, 33 bp, Homo sapien
atggaagctgtctcccagagtaacaggaccatg

SEQ ID NO: 225074 - DNA, 33 bp, Homo sapien
atggaagctgtctcccggagtaacaggaccatg

SEQ ID NO: 225075 - DNA, 33 bp, Homo sapien
cctgtctcaggaatcagagagtgtctggtcatg

SEQ ID NO: 225076 - DNA, 33 bp, Homo sapien
cctgtctcaggaatcatagagtgtctggtcatg

SEQ ID NO: 225077 - DNA, 33 bp, Homo sapien
agatcacagatggagaacggtggggaacagggg

SEQ ID NO: 225078 - DNA, 33 bp, Homo sapien
agatcacagatggagagcggtggggaacagggg

SEQ ID NO: 225079 - DNA, 33 bp, Homo sapien
cgaagccctcattctcagaaggtgatgaactgg

SEQ ID NO: 225080 - DNA, 33 bp, Homo sapien
cgaagccctcattctcggaaggtgatgaactgg

SEQ ID NO: 225081 - DNA, 33 bp, Homo sapien
gaggtagcacctgatacatgcaacctctctact

SEQ ID NO: 225082 - DNA, 33 bp, Homo sapien
gaggtagcacctgatatatgcaacctctctact

SEQ ID NO: 225083 - DNA, 33 bp, Homo sapien
gtcagtgccagagataaaattccaacccaggcc

SEQ ID NO: 225084 - DNA, 33 bp, Homo sapien
gtcagtgccagagatagaattccaacccaggcc

SEQ ID NO: 225085 - DNA, 33 bp, Homo sapien
atggagtgaagctcagaccctctagccggcact

SEQ ID NO: 225086 - DNA, 33 bp, Homo sapien
atggagtgaagctcaggccctctagccggcact

SEQ ID NO: 225087 - DNA, 33 bp, Homo sapien
ggctagggtgagaaaacaggtttatcgagctgt

SEQ ID NO: 225088 - DNA, 33 bp, Homo sapien
ggctagggtgagaaaataggtttatcgagctgt

SEQ ID NO: 225089 - DNA, 33 bp, Homo sapien
ttctactcctgtttcacctctaagaaggttctc

SEQ ID NO: 225090 - DNA, 33 bp, Homo sapien
ttctactcctgtttcatctctaagaaggttctc

SEQ ID NO: 225091 - DNA, 33 bp, Homo sapien
cctgccattacttatacagaacatccacgaaga

SEQ ID NO: 225092 - DNA, 33 bp, Homo sapien
cctgccattacttatatagaacatccacgaaga

SEQ ID NO: 225093 - DNA, 33 bp, Homo sapien
gttgctgggatctgacaaagaacatcagaaaag

SEQ ID NO: 225094 - DNA, 33 bp, Homo sapien
gttgctgggatctgacgaagaacatcagaaaag

SEQ ID NO: 225095 - DNA, 33 bp, Homo sapien
catgtagtcgttgtcacgcatcagatcatttaa

SEQ ID NO: 225096 - DNA, 33 bp, Homo sapien
catgtagtcgttgtcatgcatcagatcatttaa

SEQ ID NO: 225097 - DNA, 33 bp, Homo sapien
caacactctctcaggaacaagctggattcttct

SEQ ID NO: 225098 - DNA, 33 bp, Homo sapien
caacactctctcaggaccaagctggattcttct

SEQ ID NO: 225099 - DNA, 33 bp, Homo sapien
atagtaagttagatgacaagtgttgtggagaat

SEQ ID NO: 225100 - DNA, 33 bp, Homo sapien
atagtaagttagatgataagtgttgtggagaat

SEQ ID NO: 225101 - DNA, 33 bp, Homo sapien
gatctgctcaagttcccagagctaactatgaga

SEQ ID NO: 225102 - DNA, 33 bp, Homo sapien
gatctgctcaagttccgagagctaactatgaga

SEQ ID NO: 225103 - DNA, 33 bp, Homo sapien
ttgagacttagatttgaaggggggctgctgaat

SEQ ID NO: 225104 - DNA, 33 bp, Homo sapien
ttgagacttagatttggaggggggctgctgaat

SEQ ID NO: 225105 - DNA, 33 bp, Homo sapien
tctgaaatactacccagtcagcccccagagtcc

SEQ ID NO: 225106 - DNA, 33 bp, Homo sapien
tctgaaatactacccattcagcccccagagtcc

SEQ ID NO: 225107 - DNA, 33 bp, Homo sapien
tgggaaacaggagttaaagtggaagcaacatta

SEQ ID NO: 225108 - DNA, 33 bp, Homo sapien
tgggaaacaggagttagagtggaagcaacatta

SEQ ID NO: 225109 - DNA, 33 bp, Homo sapien
ggcaatgcagcgaaacaggttggtagccaaaat

SEQ ID NO: 225110 - DNA, 33 bp, Homo sapien
ggcaatgcagcgaaaccggttggtagccaaaat

SEQ ID NO: 225111 - DNA, 33 bp, Homo sapien
cagcagaaaagcgaaaagaggatattagaaggt

SEQ ID NO: 225112 - DNA, 33 bp, Homo sapien
cagcagaaaagcgaaatgaggatattagaaggt

SEQ ID NO: 225113 - DNA, 33 bp, Homo sapien
tgtgtaatgatttccaaaattgaactaattaac

SEQ ID NO: 225114 - DNA, 33 bp, Homo sapien
tgtgtaatgatttccacaattgaactaattaac

SEQ ID NO: 225115 - DNA, 33 bp, Homo sapien
cctacaactttagaaacttgagactgacattct

SEQ ID NO: 225116 - DNA, 33 bp, Homo sapien
cctacaactttagaaatttgagactgacattct

SEQ ID NO: 225117 - DNA, 33 bp, Homo sapien
gcccaggttctggaaccagatatcttgagttca

SEQ ID NO: 225118 - DNA, 33 bp, Homo sapien
gcccaggttctggaactagatatcttgagttca

SEQ ID NO: 225119 - DNA, 33 bp, Homo sapien
attctgtctgataacaacaggtaggcttttcgc

SEQ ID NO: 225120 - DNA, 33 bp, Homo sapien
attctgtctgataacagcaggtaggcttttcgc

SEQ ID NO: 225121 - DNA, 33 bp, Homo sapien
taaaatggaaggcagagtctatattcctaaaat

SEQ ID NO: 225122 - DNA, 33 bp, Homo sapien
taaaatggaaggcagattctatattcctaaaat

SEQ ID NO: 225123 - DNA, 33 bp, Homo sapien
agcagcaagatggcaacacttaacgcatgaaat

SEQ ID NO: 225124 - DNA, 33 bp, Homo sapien
agcagcaagatggcaatacttaacgcatgaaat

SEQ ID NO: 225125 - DNA, 33 bp, Homo sapien
gcattggtaggtaggcaagtctgttgtggggcc

SEQ ID NO: 225126 - DNA, 33 bp, Homo sapien
gcattggtaggtaggcgagtctgttgtggggcc

SEQ ID NO: 225127 - DNA, 33 bp, Homo sapien
aaaggcaacctgggaactaatttaaaaagcatg

SEQ ID NO: 225128 - DNA, 33 bp, Homo sapien
aaaggcaacctgggaattaatttaaaaagcatg

SEQ ID NO: 225129 - DNA, 33 bp, Homo sapien
ggtactagaacttgaacccagagcttttgattt

SEQ ID NO: 225130 - DNA, 33 bp, Homo sapien
ggtactagaacttgaatccagagcttttgattt

SEQ ID NO: 225131 - DNA, 33 bp, Homo sapien
tatttatgatgtcacccggctccccgccacatt

SEQ ID NO: 225132 - DNA, 33 bp, Homo sapien
tatttatgatgtcacctggctccccgccacatt

SEQ ID NO: 225133 - DNA, 33 bp, Homo sapien
ggtagggtttgtatgagaatttgtggaagtatt

SEQ ID NO: 225134 - DNA, 33 bp, Homo sapien
ggtagggtttgtatgataatttgtggaagtatt

SEQ ID NO: 225135 - DNA, 33 bp, Homo sapien
cagaatgagagaatgaactatgcataattcgat

SEQ ID NO: 225136 - DNA, 33 bp, Homo sapien
cagaatgagagaatgagctatgcataattcgat

SEQ ID NO: 225137 - DNA, 33 bp, Homo sapien
atgctgcttgtctgggaatctcactagaaccaa

SEQ ID NO: 225138 - DNA, 33 bp, Homo sapien
atgctgcttgtctggggatctcactagaaccaa

SEQ ID NO: 225139 - DNA, 33 bp, Homo sapien
cttaaaactaggcagcagattccactgtaggtc

SEQ ID NO: 225140 - DNA, 33 bp, Homo sapien
cttaaaactaggcagcggattccactgtaggtc

SEQ ID NO: 225141 - DNA, 33 bp, Homo sapien
taaattggtgtgagaacagggaatggaagggcc

SEQ ID NO: 225142 - DNA, 33 bp, Homo sapien
taaattggtgtgagaatagggaatggaagggcc

SEQ ID NO: 225143 - DNA, 33 bp, Homo sapien
aggtaattaccaataacgggcacagctgcccta

SEQ ID NO: 225144 - DNA, 33 bp, Homo sapien
aggtaattaccaataaggggcacagctgcccta

SEQ ID NO: 225145 - DNA, 33 bp, Homo sapien
cagctaagactcctaacataaaagaattgccaa

SEQ ID NO: 225146 - DNA, 33 bp, Homo sapien
cagctaagactcctaatataaaagaattgccaa

SEQ ID NO: 225147 - DNA, 33 bp, Homo sapien
ctagctacttggagaggcgttagggagaactga

SEQ ID NO: 225148 - DNA, 33 bp, Homo sapien
ctagctacttggagagtcgttagggagaactga

SEQ ID NO: 225149 - DNA, 33 bp, Homo sapien
tcaacaagactccttcaatcacggctcaaacct

SEQ ID NO: 225150 - DNA, 33 bp, Homo sapien
tcaacaagactccttcgatcacggctcaaacct

SEQ ID NO: 225151 - DNA, 33 bp, Homo sapien
tcatgttttacacttacgaattctggggtttgt

SEQ ID NO: 225152 - DNA, 33 bp, Homo sapien
tcatgttttacacttatgaattctggggtttgt

SEQ ID NO: 225153 - DNA, 33 bp, Homo sapien
acatgagctgggaaaagtcttaggaaaaagaga

SEQ ID NO: 225154 - DNA, 33 bp, Homo sapien
acatgagctgggaaaattcttaggaaaaagaga

SEQ ID NO: 225155 - DNA, 33 bp, Homo sapien
aggaccttcctccatccgaacctgcaacactcc

SEQ ID NO: 225156 - DNA, 33 bp, Homo sapien
aggaccttcctccatctgaacctgcaacactcc

SEQ ID NO: 225157 - DNA, 33 bp, Homo sapien
ttatctgtgaagaagaatactttttatggtcta

SEQ ID NO: 225158 - DNA, 33 bp, Homo sapien
ttatctgtgaagaagagtactttttatggtcta

SEQ ID NO: 225159 - DNA, 33 bp, Homo sapien
tctttgcttttggaaacatggagcagttctagg

SEQ ID NO: 225160 - DNA, 33 bp, Homo sapien
tctttgcttttggaaagatggagcagttctagg

SEQ ID NO: 225161 - DNA, 33 bp, Homo sapien
aattatcctgggctgacaggagtaggatgagga

SEQ ID NO: 225162 - DNA, 33 bp, Homo sapien
aattatcctgggctgagaggagtaggatgagga

SEQ ID NO: 225163 - DNA, 33 bp, Homo sapien
tgtgagtcgtctctggacattcctgatacacat

SEQ ID NO: 225164 - DNA, 33 bp, Homo sapien
tgtgagtcgtctctggtcattcctgatacacat

SEQ ID NO: 225165 - DNA, 33 bp, Homo sapien
cccacaaagaggtccacgtcggaaatcacagaa

SEQ ID NO: 225166 - DNA, 33 bp, Homo sapien
cccacaaagaggtccatgtcggaaatcacagaa

SEQ ID NO: 225167 - DNA, 33 bp, Homo sapien
aacatttattacaccacgtttcaccagggggcg

SEQ ID NO: 225168 - DNA, 33 bp, Homo sapien
aacatttattacaccatgtttcaccagggggcg

SEQ ID NO: 225169 - DNA, 33 bp, Homo sapien
caggaatgttcctcaacagctttgcctctttcc

SEQ ID NO: 225170 - DNA, 33 bp, Homo sapien
caggaatgttcctcaatagctttgcctctttcc

SEQ ID NO: 225171 - DNA, 33 bp, Homo sapien
gaggtgggaaggtgaaatcctgtccaagtgtgc

SEQ ID NO: 225172 - DNA, 33 bp, Homo sapien
gaggtgggaaggtgaagtcctgtccaagtgtgc

SEQ ID NO: 225173 - DNA, 33 bp, Homo sapien
gaattcatgcgtgaaacaaatagatctagtcac

SEQ ID NO: 225174 - DNA, 33 bp, Homo sapien
gaattcatgcgtgaaataaatagatctagtcac

SEQ ID NO: 225175 - DNA, 33 bp, Homo sapien
aacatagaatctcagacgtgactagatctattt

SEQ ID NO: 225176 - DNA, 33 bp, Homo sapien
aacatagaatctcagatgtgactagatctattt

SEQ ID NO: 225177 - DNA, 33 bp, Homo sapien
atttgtcttgcttaaccagggaaggttcagttg

SEQ ID NO: 225178 - DNA, 33 bp, Homo sapien
atttgtcttgcttaactagggaaggttcagttg

SEQ ID NO: 225179 - DNA, 33 bp, Homo sapien
gatacacgaaataccacgcaccagctctgcacc

SEQ ID NO: 225180 - DNA, 33 bp, Homo sapien
gatacacgaaataccatgcaccagctctgcacc

SEQ ID NO: 225181 - DNA, 33 bp, Homo sapien
agaaactcagtcatcactgaaattacattctaa

SEQ ID NO: 225182 - DNA, 33 bp, Homo sapien
agaaactcagtcatcattgaaattacattctaa

SEQ ID NO: 225183 - DNA, 33 bp, Homo sapien
aggttgcagaattcccaggatcatatgccctag

SEQ ID NO: 225184 - DNA, 33 bp, Homo sapien
aggttgcagaattcccgggatcatatgccctag

SEQ ID NO: 225185 - DNA, 33 bp, Homo sapien
tggctctaaaattggacaagatggagcagcggg

SEQ ID NO: 225186 - DNA, 33 bp, Homo sapien
tggctctaaaattggataagatggagcagcggg

SEQ ID NO: 225187 - DNA, 33 bp, Homo sapien
agcatgaagaatggaccgtagtggagacagact

SEQ ID NO: 225188 - DNA, 33 bp, Homo sapien
agcatgaagaatggactgtagtggagacagact

SEQ ID NO: 225189 - DNA, 33 bp, Homo sapien
acttttgagtacagaaatggcatgaactttgtg

SEQ ID NO: 225190 - DNA, 33 bp, Homo sapien
acttttgagtacagaagtggcatgaactttgtg

SEQ ID NO: 225191 - DNA, 33 bp, Homo sapien
atctgagtgagtcttgcaaacttgaaaaagcct

SEQ ID NO: 225192 - DNA, 33 bp, Homo sapien
atctgagtgagtcttgtaaacttgaaaaagcct

SEQ ID NO: 225193 - DNA, 33 bp, Homo sapien
tgactcctttctctaacgactctcccatctcta

SEQ ID NO: 225194 - DNA, 33 bp, Homo sapien
tgactcctttctctaatgactctcccatctcta

SEQ ID NO: 225195 - DNA, 33 bp, Homo sapien
tgggttaggcccccaacacttcaggcagcctca

SEQ ID NO: 225196 - DNA, 33 bp, Homo sapien
tgggttaggcccccaagacttcaggcagcctca

SEQ ID NO: 225197 - DNA, 33 bp, Homo sapien
gttatttcaaaagccacaggagttaaacatcag

SEQ ID NO: 225198 - DNA, 33 bp, Homo sapien
gttatttcaaaagccataggagttaaacatcag

SEQ ID NO: 225199 - DNA, 33 bp, Homo sapien
tgaaacagtccacaaaaaagaccaataagcggg

SEQ ID NO: 225200 - DNA, 33 bp, Homo sapien
tgaaacagtccacaaagaagaccaataagcggg

SEQ ID NO: 225201 - DNA, 33 bp, Homo sapien
cacacagctagtaaacaacaaaatcgagtcata

SEQ ID NO: 225202 - DNA, 33 bp, Homo sapien
cacacagctagtaaacgacaaaatcgagtcata

SEQ ID NO: 225203 - DNA, 33 bp, Homo sapien
actctgtcctggtagacaaagcatgctcttcct

SEQ ID NO: 225204 - DNA, 33 bp, Homo sapien
actctgtcctggtagagaaagcatgctcttcct

SEQ ID NO: 225205 - DNA, 33 bp, Homo sapien
ctgactcttttcaccacggaacaccaaagagac

SEQ ID NO: 225206 - DNA, 33 bp, Homo sapien
ctgactcttttcaccatggaacaccaaagagac

SEQ ID NO: 225207 - DNA, 33 bp, Homo sapien
ttgtgcaaatagcaagaactgttcctgagggct

SEQ ID NO: 225208 - DNA, 33 bp, Homo sapien
ttgtgcaaatagcaaggactgttcctgagggct

SEQ ID NO: 225209 - DNA, 33 bp, Homo sapien
acacacagaagatacactgcgtagaaacatact

SEQ ID NO: 225210 - DNA, 33 bp, Homo sapien
acacacagaagatacattgcgtagaaacatact

SEQ ID NO: 225211 - DNA, 33 bp, Homo sapien
tattgagtatagactccacgggcgagaaaggaa

SEQ ID NO: 225212 - DNA, 33 bp, Homo sapien
tattgagtatagactctacgggcgagaaaggaa

SEQ ID NO: 225213 - DNA, 33 bp, Homo sapien
gcagtgcttctgttcacgtaacccttattttac

SEQ ID NO: 225214 - DNA, 33 bp, Homo sapien
gcagtgcttctgttcatgtaacccttattttac

SEQ ID NO: 225215 - DNA, 33 bp, Homo sapien
gggaaattagtacaggaaacagccttaagttcc

SEQ ID NO: 225216 - DNA, 33 bp, Homo sapien
gggaaattagtacagggaacagccttaagttcc

SEQ ID NO: 225217 - DNA, 33 bp, Homo sapien
aagttcttgcatcagaaaggcagccaatgtggt

SEQ ID NO: 225218 - DNA, 33 bp, Homo sapien
aagttcttgcatcagagaggcagccaatgtggt

SEQ ID NO: 225219 - DNA, 33 bp, Homo sapien
tgagggtcataaatcaactcgcctgtccagcca

SEQ ID NO: 225220 - DNA, 33 bp, Homo sapien
tgagggtcataaatcagctcgcctgtccagcca

SEQ ID NO: 225221 - DNA, 33 bp, Homo sapien
gccagtctctcaaacactattataatcgtgggt

SEQ ID NO: 225222 - DNA, 33 bp, Homo sapien
gccagtctctcaaacagtattataatcgtgggt

SEQ ID NO: 225223 - DNA, 33 bp, Homo sapien
cctcctgccttctcagaaatattgctctgttga

SEQ ID NO: 225224 - DNA, 33 bp, Homo sapien
cctcctgccttctcaggaatattgctctgttga

SEQ ID NO: 225225 - DNA, 33 bp, Homo sapien
gacactgaactcaacacgaagtggaaataaagt

SEQ ID NO: 225226 - DNA, 33 bp, Homo sapien
gacactgaactcaacatgaagtggaaataaagt

SEQ ID NO: 225227 - DNA, 33 bp, Homo sapien
tagatccctgaaaacacaatagggcaagtccta

SEQ ID NO: 225228 - DNA, 33 bp, Homo sapien
tagatccctgaaaacagaatagggcaagtccta

SEQ ID NO: 225229 - DNA, 33 bp, Homo sapien
attcctgttaagctcactccccttcaattcctc

SEQ ID NO: 225230 - DNA, 33 bp, Homo sapien
attcctgttaagctcattccccttcaattcctc

SEQ ID NO: 225231 - DNA, 33 bp, Homo sapien
gtgtacttccgggcgacagtgatgccaaaataa

SEQ ID NO: 225232 - DNA, 33 bp, Homo sapien
gtgtacttccgggcgatagtgatgccaaaataa

SEQ ID NO: 225233 - DNA, 33 bp, Homo sapien
cacaaggctcaggctaccttgccaaaagaatcg

SEQ ID NO: 225234 - DNA, 33 bp, Homo sapien
cacaaggctcaggctatcttgccaaaagaatcg

SEQ ID NO: 225235 - DNA, 33 bp, Homo sapien
tacagggtgctgctgacctggtagcggtttttc

SEQ ID NO: 225236 - DNA, 33 bp, Homo sapien
tacagggtgctgctgatctggtagcggtttttc

SEQ ID NO: 225237 - DNA, 33 bp, Homo sapien
agcagttttctgaataccttcctgtcaaaggga

SEQ ID NO: 225238 - DNA, 33 bp, Homo sapien
agcagttttctgaatatcttcctgtcaaaggga

SEQ ID NO: 225239 - DNA, 33 bp, Homo sapien
ataattttgttttctacagctttccagttcttt

SEQ ID NO: 225240 - DNA, 33 bp, Homo sapien
ataattttgttttctagagctttccagttcttt

SEQ ID NO: 225241 - DNA, 33 bp, Homo sapien
gagaagttcttctgaaatgcagtataaaagata

SEQ ID NO: 225242 - DNA, 33 bp, Homo sapien
gagaagttcttctgaattgcagtataaaagata

SEQ ID NO: 225243 - DNA, 33 bp, Homo sapien
tgtccttaggttgtccaagaaggagctgaccct

SEQ ID NO: 225244 - DNA, 33 bp, Homo sapien
tgtccttaggttgtccgagaaggagctgaccct

SEQ ID NO: 225245 - DNA, 33 bp, Homo sapien
cagacaatgagggtaactggcagtggttctttg

SEQ ID NO: 225246 - DNA, 33 bp, Homo sapien
cagacaatgagggtaattggcagtggttctttg

SEQ ID NO: 225247 - DNA, 33 bp, Homo sapien
gattgggtcagacccaaggacttatttcacagc

SEQ ID NO: 225248 - DNA, 33 bp, Homo sapien
gattgggtcagacccatggacttatttcacagc

SEQ ID NO: 225249 - DNA, 33 bp, Homo sapien
gaggtgtcagtaggtaaggagtgactgaacact

SEQ ID NO: 225250 - DNA, 33 bp, Homo sapien
gaggtgtcagtaggtatggagtgactgaacact

SEQ ID NO: 225251 - DNA, 33 bp, Homo sapien
aagaataattggcatcactgaggaagaagagaa

SEQ ID NO: 225252 - DNA, 33 bp, Homo sapien
aagaataattggcatcgctgaggaagaagagaa

SEQ ID NO: 225253 - DNA, 33 bp, Homo sapien; identical to SEQ ID NO: 225251

SEQ ID NO: 225254 - DNA, 33 bp, Homo sapien; identical to SEQ ID NO: 225252

SEQ ID NO: 225255 - DNA, 33 bp, Homo sapien
ccaacaggcagctaaaaattaccccatagcaaa

SEQ ID NO: 225256 - DNA, 33 bp, Homo sapien
ccaacaggcagctaaatattaccccatagcaaa

SEQ ID NO: 225257 - DNA, 33 bp, Homo sapien
tgaaactttaaaggacaccctacagaatacaca

SEQ ID NO: 225258 - DNA, 33 bp, Homo sapien
tgaaactttaaaggactccctacagaatacaca

SEQ ID NO: 225259 - DNA, 33 bp, Homo sapien
ctctccctcaaatacaaccatttccagtcctaa

SEQ ID NO: 225260 - DNA, 33 bp, Homo sapien
ctctccctcaaatacagccatttccagtcctaa

SEQ ID NO: 225261 - DNA, 33 bp, Homo sapien
acagtacctattactgaaaacaataaacaatat

SEQ ID NO: 225262 - DNA, 33 bp, Homo sapien
acagtacctattactggaaacaataaacaatat

SEQ ID NO: 225263 - DNA, 33 bp, Homo sapien
ataaaagacacaaacacaatacccacatcaacc

SEQ ID NO: 225264 - DNA, 33 bp, Homo sapien
ataaaagacacaaacataatacccacatcaacc

SEQ ID NO: 225265 - DNA, 33 bp, Homo sapien
aacttatacctaaaccaagccatatgatttaaa

SEQ ID NO: 225266 - DNA, 33 bp, Homo sapien
aacttatacctaaaccgagccatatgatttaaa

SEQ ID NO: 225267 - DNA, 33 bp, Homo sapien
gtatatgcccaggaaacggaagctccctataaa

SEQ ID NO: 225268 - DNA, 33 bp, Homo sapien
gtatatgcccaggaaatggaagctccctataaa

SEQ ID NO: 225269 - DNA, 33 bp, Homo sapien
gcttctgaagacagtacaaaaatgccagcctcc

SEQ ID NO: 225270 - DNA, 33 bp, Homo sapien
gcttctgaagacagtataaaaatgccagcctcc

SEQ ID NO: 225271 - DNA, 33 bp, Homo sapien
tcttcccttcagggcacaagtgagcttctgaag

SEQ ID NO: 225272 - DNA, 33 bp, Homo sapien
tcttcccttcagggcataagtgagcttctgaag

SEQ ID NO: 225273 - DNA, 33 bp, Homo sapien
atgtagtatctagaggaactgtatcccaggaag

SEQ ID NO: 225274 - DNA, 33 bp, Homo sapien
atgtagtatctagaggcactgtatcccaggaag

SEQ ID NO: 225275 - DNA, 33 bp, Homo sapien
ttcagtggcaataagaataaagagaaaaataat

SEQ ID NO: 225276 - DNA, 33 bp, Homo sapien
ttcagtggcaataagagtaaagagaaaaataat

SEQ ID NO: 225277 - DNA, 33 bp, Homo sapien
gtagttcaagctgcaaagaaaggccatgtgtgg

SEQ ID NO: 225278 - DNA, 33 bp, Homo sapien
gtagttcaagctgcaaggaaaggccatgtgtgg

SEQ ID NO: 225279 - DNA, 33 bp, Homo sapien
aaaactggatcacataagggctcgaaggacaag

SEQ ID NO: 225280 - DNA, 33 bp, Homo sapien
aaaactggatcacatatgggctcgaaggacaag

SEQ ID NO: 225281 - DNA, 33 bp, Homo sapien
agtatgacagaagttacgggtcatgcattgaag

SEQ ID NO: 225282 - DNA, 33 bp, Homo sapien
agtatgacagaagttatgggtcatgcattgaag

SEQ ID NO: 225283 - DNA, 33 bp, Homo sapien
agtggtttgtgtcccaacgtttcctggcattac

SEQ ID NO: 225284 - DNA, 33 bp, Homo sapien
agtggtttgtgtcccagcgtttcctggcattac

SEQ ID NO: 225285 - DNA, 33 bp, Homo sapien
gcttcaaagcctaagagaaggcaaggcgctgac

SEQ ID NO: 225286 - DNA, 33 bp, Homo sapien
gcttcaaagcctaagataaggcaaggcgctgac

SEQ ID NO: 225287 - DNA, 33 bp, Homo sapien
cagcaggaccagctgaaattagaaggaaaagct

SEQ ID NO: 225288 - DNA, 33 bp, Homo sapien
cagcaggaccagctgacattagaaggaaaagct

SEQ ID NO: 225289 - DNA, 33 bp, Homo sapien
tcatggtgtgtgcaacagattggctccaagaca

SEQ ID NO: 225290 - DNA, 33 bp, Homo sapien
tcatggtgtgtgcaacggattggctccaagaca

SEQ ID NO: 225291 - DNA, 33 bp, Homo sapien
gacatttcttagaagacatacacacagctaaca

SEQ ID NO: 225292 - DNA, 33 bp, Homo sapien
gacatttcttagaagatatacacacagctaaca

SEQ ID NO: 225293 - DNA, 33 bp, Homo sapien
aatgctatggtttggacgtggtatctccctgcc

SEQ ID NO: 225294 - DNA, 33 bp, Homo sapien
aatgctatggtttggatgtggtatctccctgcc

SEQ ID NO: 225295 - DNA, 33 bp, Homo sapien
ctgccataaaaatgtcaatgctccctaatgtcc

SEQ ID NO: 225296 - DNA, 33 bp, Homo sapien
ctgccataaaaatgtccatgctccctaatgtcc

SEQ ID NO: 225297 - DNA, 33 bp, Homo sapien
aggaatgacaaaaggacgttctagcaagactac

SEQ ID NO: 225298 - DNA, 33 bp, Homo sapien
aggaatgacaaaaggatgttctagcaagactac

SEQ ID NO: 225299 - DNA, 33 bp, Homo sapien
cttatttaagagacaacggcctagagaaataga

SEQ ID NO: 225300 - DNA, 33 bp, Homo sapien
cttatttaagagacaatggcctagagaaataga

SEQ ID NO: 225301 - DNA, 33 bp, Homo sapien
tttgtcattcttctctaaatgtatccttttctt

SEQ ID NO: 225302 - DNA, 33 bp, Homo sapien
tttgtcattcttctcttaatgtatccttttctt

SEQ ID NO: 225303 - DNA, 33 bp, Homo sapien
cttctggcatttcccaatgaagacgtcttcagc

SEQ ID NO: 225304 - DNA, 33 bp, Homo sapien
cttctggcatttcccagtgaagacgtcttcagc

SEQ ID NO: 225305 - DNA, 33 bp, Homo sapien
tttatttgtgtcaaaacatgatacagacatttt

SEQ ID NO: 225306 - DNA, 33 bp, Homo sapien
tttatttgtgtcaaaatatgatacagacatttt

SEQ ID NO: 225307 - DNA, 33 bp, Homo sapien
tcccacagcatcactaccagtcattggaagaaa

SEQ ID NO: 225308 - DNA, 33 bp, Homo sapien
tcccacagcatcactatcagtcattggaagaaa

SEQ ID NO: 225309 - DNA, 33 bp, Homo sapien
ggggacacacccaaaccgtctcagtacctaaat

SEQ ID NO: 225310 - DNA, 33 bp, Homo sapien
ggggacacacccaaactgtctcagtacctaaat

SEQ ID NO: 225311 - DNA, 33 bp, Homo sapien
agtcctttccatctataagccagtaaaatcaaa

SEQ ID NO: 225312 - DNA, 33 bp, Homo sapien
agtcctttccatctatgagccagtaaaatcaaa

SEQ ID NO: 225313 - DNA, 33 bp, Homo sapien
taaaaatttgcttcccaatctatttaatgtgca

SEQ ID NO: 225314 - DNA, 33 bp, Homo sapien
taaaaatttgcttcccgatctatttaatgtgca

SEQ ID NO: 225315 - DNA, 33 bp, Homo sapien
taggtgaaatcagatcaagaatttacatctcaa

SEQ ID NO: 225316 - DNA, 33 bp, Homo sapien
taggtgaaatcagatcgagaatttacatctcaa

SEQ ID NO: 225317 - DNA, 33 bp, Homo sapien
gttttcctcatggaacactcagagttgcaagaa

SEQ ID NO: 225318 - DNA, 33 bp, Homo sapien
gttttcctcatggaaccctcagagttgcaagaa

SEQ ID NO: 225319 - DNA, 33 bp, Homo sapien
gtggcaaaactcctaaaggtgcctgatactaac

SEQ ID NO: 225320 - DNA, 33 bp, Homo sapien
gtggcaaaactcctaacggtgcctgatactaac

SEQ ID NO: 225321 - DNA, 33 bp, Homo sapien
ttcctagggacaacctcaaccttgacaaaatga

SEQ ID NO: 225322 - DNA, 33 bp, Homo sapien
ttcctagggacaaccttaaccttgacaaaatga

SEQ ID NO: 225323 - DNA, 33 bp, Homo sapien
taaagtaaacaaagagcagaagtcaaatatgca

SEQ ID NO: 225324 - DNA, 33 bp, Homo sapien
taaagtaaacaaagaggagaagtcaaatatgca

SEQ ID NO: 225325 - DNA, 33 bp, Homo sapien
ggagaaagaaacagtacatgctcccctgctgcc

SEQ ID NO: 225326 - DNA, 33 bp, Homo sapien
ggagaaagaaacagtatatgctcccctgctgcc

SEQ ID NO: 225327 - DNA, 33 bp, Homo sapien
attccagaaaatcttccacaacactggagtcct

SEQ ID NO: 225328 - DNA, 33 bp, Homo sapien
attccagaaaatcttctacaacactggagtcct

SEQ ID NO: 225329 - DNA, 33 bp, Homo sapien
gtttcttctttgaagccaattctgtcagaccac

SEQ ID NO: 225330 - DNA, 33 bp, Homo sapien
gtttcttctttgaagcgaattctgtcagaccac

SEQ ID NO: 225331 - DNA, 33 bp, Homo sapien
acactgtactgaaagaatatctagtcatcttgt

SEQ ID NO: 225332 - DNA, 33 bp, Homo sapien
acactgtactgaaagagtatctagtcatcttgt

SEQ ID NO: 225333 - DNA, 33 bp, Homo sapien
ctaaggtaatctctgcccttgcaaaactataaa

SEQ ID NO: 225334 - DNA, 33 bp, Homo sapien
ctaaggtaatctctgctcttgcaaaactataaa

SEQ ID NO: 225335 - DNA, 33 bp, Homo sapien
agttttgtatctaatacggcaatctgttaaatt

SEQ ID NO: 225336 - DNA, 33 bp, Homo sapien
agttttgtatctaatatggcaatctgttaaatt

SEQ ID NO: 225337 - DNA, 33 bp, Homo sapien
catgtatgtcacctctccttgaatgtagagcta

SEQ ID NO: 225338 - DNA, 33 bp, Homo sapien
catgtatgtcacctcttcttgaatgtagagcta

SEQ ID NO: 225339 - DNA, 33 bp, Homo sapien
ttaatcagaatgtctgaagatgggattcaaata

SEQ ID NO: 225340 - DNA, 33 bp, Homo sapien
ttaatcagaatgtctggagatgggattcaaata

SEQ ID NO: 225341 - DNA, 33 bp, Homo sapien
gtacacaatcccctgcaaaacagcaaacatatg

SEQ ID NO: 225342 - DNA, 33 bp, Homo sapien
gtacacaatcccctgccaaacagcaaacatatg

SEQ ID NO: 225343 - DNA, 33 bp, Homo sapien
aatattgaagcaaaacaggagaattacattcat

SEQ ID NO: 225344 - DNA, 33 bp, Homo sapien
aatattgaagcaaaacgggagaattacattcat

SEQ ID NO: 225345 - DNA, 33 bp, Homo sapien
ttttctttccaaagccaaacatcctctggtagc

SEQ ID NO: 225346 - DNA, 33 bp, Homo sapien
ttttctttccaaagcctaacatcctctggtagc

SEQ ID NO: 225347 - DNA, 33 bp, Homo sapien
ggctttggaaagaaaaatggaaactatatggtc

SEQ ID NO: 225348 - DNA, 33 bp, Homo sapien
ggctttggaaagaaaagtggaaactatatggtc

SEQ ID NO: 225349 - DNA, 33 bp, Homo sapien
gcatggaaaagctagaaaaactaaaggacaata

SEQ ID NO: 225350 - DNA, 33 bp, Homo sapien
gcatggaaaagctagagaaactaaaggacaata

SEQ ID NO: 225351 - DNA, 33 bp, Homo sapien
aaagagttaatcaacagacttgcatttgtcttt

SEQ ID NO: 225352 - DNA, 33 bp, Homo sapien
aaagagttaatcaacatacttgcatttgtcttt

SEQ ID NO: 225353 - DNA, 33 bp, Homo sapien
gaatggtggtaatcagaatgtttgcaggtttgg

SEQ ID NO: 225354 - DNA, 33 bp, Homo sapien
gaatggtggtaatcagcatgtttgcaggtttgg

SEQ ID NO: 225355 - DNA, 33 bp, Homo sapien
aacattgatgcatctaatactacaaacttctgg

SEQ ID NO: 225356 - DNA, 33 bp, Homo sapien
aacattgatgcatctagtactacaaacttctgg

SEQ ID NO: 225357 - DNA, 33 bp, Homo sapien
tagaatacaagctccacgaggacagaaattttg

SEQ ID NO: 225358 - DNA, 33 bp, Homo sapien
tagaatacaagctccatgaggacagaaattttg

SEQ ID NO: 225359 - DNA, 33 bp, Homo sapien
tccacctgcaaactgaaaactgttctcttttcc

SEQ ID NO: 225360 - DNA, 33 bp, Homo sapien
tccacctgcaaactgacaactgttctcttttcc

SEQ ID NO: 225361 - DNA, 33 bp, Homo sapien
ttagaaaccatttacaaccacgctaccaacatg

SEQ ID NO: 225362 - DNA, 33 bp, Homo sapien
ttagaaaccatttacagccacgctaccaacatg

SEQ ID NO: 225363 - DNA, 33 bp, Homo sapien
ggtgaatttgaccttaactcactcaagtgtgta

SEQ ID NO: 225364 - DNA, 33 bp, Homo sapien
ggtgaatttgaccttacctcactcaagtgtgta

SEQ ID NO: 225365 - DNA, 33 bp, Homo sapien
ctttctgtgggtatgaactctttcttcagaagc

SEQ ID NO: 225366 - DNA, 33 bp, Homo sapien
ctttctgtgggtatgacctctttcttcagaagc

SEQ ID NO: 225367 - DNA, 33 bp, Homo sapien
ttgtcgaagctgggccaaggccttcacaggtgt

SEQ ID NO: 225368 - DNA, 33 bp, Homo sapien
ttgtcgaagctgggccgaggccttcacaggtgt

SEQ ID NO: 225369 - DNA, 33 bp, Homo sapien
ctcctgtaaggttatccccatttagcagctaac

SEQ ID NO: 225370 - DNA, 33 bp, Homo sapien
ctcctgtaaggttatcgccatttagcagctaac

SEQ ID NO: 225371 - DNA, 33 bp, Homo sapien
tgtcagaaggtgataccgatatccagtgaaatt

SEQ ID NO: 225372 - DNA, 33 bp, Homo sapien
tgtcagaaggtgatactgatatccagtgaaatt

SEQ ID NO: 225373 - DNA, 33 bp, Homo sapien
gaggagtgaaaagcagacaaaatttttagatga

SEQ ID NO: 225374 - DNA, 33 bp, Homo sapien
gaggagtgaaaagcagtcaaaatttttagatga

SEQ ID NO: 225375 - DNA, 33 bp, Homo sapien
tgagaagacaggtatccatgacttaggaagtag

SEQ ID NO: 225376 - DNA, 33 bp, Homo sapien
tgagaagacaggtatctatgacttaggaagtag

SEQ ID NO: 225377 - DNA, 33 bp, Homo sapien
caggctatgggagcagaatgagtgttgccaggc

SEQ ID NO: 225378 - DNA, 33 bp, Homo sapien
caggctatgggagcaggatgagtgttgccaggc

SEQ ID NO: 225379 - DNA, 33 bp, Homo sapien
tgctgtgagatttacacgagaggatgtacagag

SEQ ID NO: 225380 - DNA, 33 bp, Homo sapien
tgctgtgagatttacatgagaggatgtacagag

SEQ ID NO: 225381 - DNA, 33 bp, Homo sapien
aagagcattgggttgaaggtgaggaaacctggt

SEQ ID NO: 225382 - DNA, 33 bp, Homo sapien
aagagcattgggttgagggtgaggaaacctggt

SEQ ID NO: 225383 - DNA, 33 bp, Homo sapien
tacaggaagttcttcacgctgccctggtctatt

SEQ ID NO: 225384 - DNA, 33 bp, Homo sapien
tacaggaagttcttcatgctgccctggtctatt

SEQ ID NO: 225385 - DNA, 33 bp, Homo sapien
gcaccaacctggactcaaactcactttctgtgt

SEQ ID NO: 225386 - DNA, 33 bp, Homo sapien
gcaccaacctggactcgaactcactttctgtgt

SEQ ID NO: 225387 - DNA, 33 bp, Homo sapien
acacatgccttatatgaacatatttctgtcttt

SEQ ID NO: 225388 - DNA, 33 bp, Homo sapien
acacatgccttatatggacatatttctgtcttt

SEQ ID NO: 225389 - DNA, 33 bp, Homo sapien
gtgcctgctctgatacaggtcctaggaaaatgc

SEQ ID NO: 225390 - DNA, 33 bp, Homo sapien
gtgcctgctctgatacgggtcctaggaaaatgc

SEQ ID NO: 225391 - DNA, 33 bp, Homo sapien
tacaaggcataacaaacattatagctaccgaca

SEQ ID NO: 225392 - DNA, 33 bp, Homo sapien
tacaaggcataacaaatattatagctaccgaca

SEQ ID NO: 225393 - DNA, 33 bp, Homo sapien
ccataccttgctcttgaataactcatcctttgg

SEQ ID NO: 225394 - DNA, 33 bp, Homo sapien
ccataccttgctcttggataactcatcctttgg

SEQ ID NO: 225395 - DNA, 33 bp, Homo sapien
ctctgtctttgtctagaatccgcctctcttctc

SEQ ID NO: 225396 - DNA, 33 bp, Homo sapien
ctctgtctttgtctagcatccgcctctcttctc

SEQ ID NO: 225397 - DNA, 33 bp, Homo sapien
ttatagccacatcttaactccaaagaggctata

SEQ ID NO: 225398 - DNA, 33 bp, Homo sapien
ttatagccacatcttatctccaaagaggctata

SEQ ID NO: 225399 - DNA, 33 bp, Homo sapien
tgaagttacccactaaaatggcttgacttatgt

SEQ ID NO: 225400 - DNA, 33 bp, Homo sapien
tgaagttacccactaagatggcttgacttatgt

SEQ ID NO: 225401 - DNA, 33 bp, Homo sapien
ctctctaaggaccaacagttgcacagccacaca

SEQ ID NO: 225402 - DNA, 33 bp, Homo sapien
ctctctaaggaccaaccgttgcacagccacaca

SEQ ID NO: 225403 - DNA, 33 bp, Homo sapien
gagacactgaaagtaaaatgattatcagtagtt

SEQ ID NO: 225404 - DNA, 33 bp, Homo sapien
gagacactgaaagtaagatgattatcagtagtt

SEQ ID NO: 225405 - DNA, 33 bp, Homo sapien
gaaaagctattatcagcatctccttaaaaaggc

SEQ ID NO: 225406 - DNA, 33 bp, Homo sapien
gaaaagctattatcaggatctccttaaaaaggc

SEQ ID NO: 225407 - DNA, 33 bp, Homo sapien
agtgatctccgatgggaaggtgagaaggagaga

SEQ ID NO: 225408 - DNA, 33 bp, Homo sapien
agtgatctccgatggggaggtgagaaggagaga

SEQ ID NO: 225409 - DNA, 33 bp, Homo sapien
ccatccctctgcaaaaagcagctcttaaagaaa

SEQ ID NO: 225410 - DNA, 33 bp, Homo sapien
ccatccctctgcaaaacgcagctcttaaagaaa

SEQ ID NO: 225411 - DNA, 33 bp, Homo sapien
tgctttctctgacagacgtaagggactggacac

SEQ ID NO: 225412 - DNA, 33 bp, Homo sapien
tgctttctctgacagatgtaagggactggacac

SEQ ID NO: 225413 - DNA, 33 bp, Homo sapien
ttagaccacgcgattcccaaaaagctggggata

SEQ ID NO: 225414 - DNA, 33 bp, Homo sapien
ttagaccacgcgattctcaaaaagctggggata

SEQ ID NO: 225415 - DNA, 33 bp, Homo sapien
cacctgtgagaacagacgaagttaaactggagc

SEQ ID NO: 225416 - DNA, 33 bp, Homo sapien
cacctgtgagaacagaggaagttaaactggagc

SEQ ID NO: 225417 - DNA, 33 bp, Homo sapien
tattgacagatcttaaaaagagtccagaggtat

SEQ ID NO: 225418 - DNA, 33 bp, Homo sapien
tattgacagatcttaacaagagtccagaggtat

SEQ ID NO: 225419 - DNA, 33 bp, Homo sapien
ttaactttctgttaaaataacacagctcttcca

SEQ ID NO: 225420 - DNA, 33 bp, Homo sapien
ttaactttctgttaaagtaacacagctcttcca

SEQ ID NO: 225421 - DNA, 33 bp, Homo sapien
gactactttaattcacaaacacactgtttaatc

SEQ ID NO: 225422 - DNA, 33 bp, Homo sapien
gactactttaattcactaacacactgtttaatc

SEQ ID NO: 225423 - DNA, 33 bp, Homo sapien
atgtttcagagaatgacgtggagacattttcca

SEQ ID NO: 225424 - DNA, 33 bp, Homo sapien
atgtttcagagaatgatgtggagacattttcca

SEQ ID NO: 225425 - DNA, 33 bp, Homo sapien
taaacactaaatataactggcataatacatgtg

SEQ ID NO: 225426 - DNA, 33 bp, Homo sapien
taaacactaaatataattggcataatacatgtg

SEQ ID NO: 225427 - DNA, 33 bp, Homo sapien
atgaactgtgttaatccgatccatcattgttta

SEQ ID NO: 225428 - DNA, 33 bp, Homo sapien
atgaactgtgttaatctgatccatcattgttta

SEQ ID NO: 225429 - DNA, 33 bp, Homo sapien
ttcatctttatttggcactactgtttcgagagg

SEQ ID NO: 225430 - DNA, 33 bp, Homo sapien
ttcatctttatttggcgctactgtttcgagagg

SEQ ID NO: 225431 - DNA, 33 bp, Homo sapien
agagatcagtatacaacaactcagaaaagcaat

SEQ ID NO: 225432 - DNA, 33 bp, Homo sapien
agagatcagtatacaagaactcagaaaagcaat

SEQ ID NO: 225433 - DNA, 33 bp, Homo sapien
gaagaagcataaagcaatagaataacataatga

SEQ ID NO: 225434 - DNA, 33 bp, Homo sapien
gaagaagcataaagcagtagaataacataatga

SEQ ID NO: 225435 - DNA, 33 bp, Homo sapien
tgtgtgtgttggatgaaatggagaaaacagaga

SEQ ID NO: 225436 - DNA, 33 bp, Homo sapien
tgtgtgtgttggatgagatggagaaaacagaga

SEQ ID NO: 225437 - DNA, 33 bp, Homo sapien
tagatttatagtggtcaaaaaagtgtacacttc

SEQ ID NO: 225438 - DNA, 33 bp, Homo sapien
tagatttatagtggtcgaaaaagtgtacacttc

SEQ ID NO: 225439 - DNA, 33 bp, Homo sapien
tgcaaaagtgtagttaaagaaaagacaatatga

SEQ ID NO: 225440 - DNA, 33 bp, Homo sapien
tgcaaaagtgtagttagagaaaagacaatatga

SEQ ID NO: 225441 - DNA, 33 bp, Homo sapien
tgtctttttatgcaaaattaggataattaggaa

SEQ ID NO: 225442 - DNA, 33 bp, Homo sapien
tgtctttttatgcaaacttaggataattaggaa

SEQ ID NO: 225443 - DNA, 33 bp, Homo sapien
ggtcatcaactaggaaactctgatgatattagc

SEQ ID NO: 225444 - DNA, 33 bp, Homo sapien
ggtcatcaactaggaatctctgatgatattagc

SEQ ID NO: 225445 - DNA, 33 bp, Homo sapien
gctgctaaaatactgccgaatatccagttgtgt

SEQ ID NO: 225446 - DNA, 33 bp, Homo sapien
gctgctaaaatactgctgaatatccagttgtgt

SEQ ID NO: 225447 - DNA, 33 bp, Homo sapien; identical to SEQ ID NO: 225445

SEQ ID NO: 225448 - DNA, 33 bp, Homo sapien; identical to SEQ ID NO: 225446

SEQ ID NO: 225449 - DNA, 33 bp, Homo sapien
agaagatgataacaacaggagctgagtgatttg

SEQ ID NO: 225450 - DNA, 33 bp, Homo sapien
agaagatgataacaacgggagctgagtgatttg

SEQ ID NO: 225451 - DNA, 33 bp, Homo sapien
tttgtgtgatagattcaaagtaaccatcatgac

SEQ ID NO: 225452 - DNA, 33 bp, Homo sapien
tttgtgtgatagattcgaagtaaccatcatgac

SEQ ID NO: 225453 - DNA, 33 bp, Homo sapien
ttggcttcttgatagaactgtgcaggatttgta

SEQ ID NO: 225454 - DNA, 33 bp, Homo sapien
ttggcttcttgatagacctgtgcaggatttgta

SEQ ID NO: 225455 - DNA, 33 bp, Homo sapien
acaaaaatataagttaccaaactcattgatttc

SEQ ID NO: 225456 - DNA, 33 bp, Homo sapien
acaaaaatataagttagcaaactcattgatttc

SEQ ID NO: 225457 - DNA, 33 bp, Homo sapien
tctcttttatttgttcaatgttaaaggatctta

SEQ ID NO: 225458 - DNA, 33 bp, Homo sapien
tctcttttatttgttccatgttaaaggatctta

SEQ ID NO: 225459 - DNA, 33 bp, Homo sapien
tacaacaaatgtttggaagacaaaatgatcaca

SEQ ID NO: 225460 - DNA, 33 bp, Homo sapien
tacaacaaatgtttggtagacaaaatgatcaca

SEQ ID NO: 225461 - DNA, 33 bp, Homo sapien
atgaaaaaaaaagtttcaaaatgcatggagttc

SEQ ID NO: 225462 - DNA, 33 bp, Homo sapien
atgaaaaaaaaagtttgaaaatgcatggagttc

SEQ ID NO: 225463 - DNA, 33 bp, Homo sapien
tgcttctgtgtatttacctcactgatttgaaaa

SEQ ID NO: 225464 - DNA, 33 bp, Homo sapien
tgcttctgtgtatttatctcactgatttgaaaa

SEQ ID NO: 225465 - DNA, 33 bp, Homo sapien
caggaacaagttattcaaaagattgtccagttt

SEQ ID NO: 225466 - DNA, 33 bp, Homo sapien
caggaacaagttattcgaaagattgtccagttt

SEQ ID NO: 225467 - DNA, 33 bp, Homo sapien
cactcctgaagcaagccagactacaaacccacc

SEQ ID NO: 225468 - DNA, 33 bp, Homo sapien
cactcctgaagcaagcgagactacaaacccacc

SEQ ID NO: 225469 - DNA, 33 bp, Homo sapien
acaaacccacccgaagaaagaacagctctggag

SEQ ID NO: 225470 - DNA, 33 bp, Homo sapien
acaaacccacccgaaggaagaacagctctggag

SEQ ID NO: 225471 - DNA, 33 bp, Homo sapien
atgcccaaggatttcactatctcactaactttt

SEQ ID NO: 225472 - DNA, 33 bp, Homo sapien
atgcccaaggatttcagtatctcactaactttt

SEQ ID NO: 225473 - DNA, 33 bp, Homo sapien
ttattgaatataaaaaatatcagagagcattaa

SEQ ID NO: 225474 - DNA, 33 bp, Homo sapien
ttattgaatataaaaagtatcagagagcattaa

SEQ ID NO: 225475 - DNA, 33 bp, Homo sapien
tcactaatttggaaagaacaatacctaaaatac

SEQ ID NO: 225476 - DNA, 33 bp, Homo sapien
tcactaatttggaaagcacaatacctaaaatac

SEQ ID NO: 225477 - DNA, 33 bp, Homo sapien
acacaacagcagtaaacaaatatgacgtttaat

SEQ ID NO: 225478 - DNA, 33 bp, Homo sapien
acacaacagcagtaaagaaatatgacgtttaat

SEQ ID NO: 225479 - DNA, 33 bp, Homo sapien
ggttgtgaggcaagaaagtggattttagctaaa

SEQ ID NO: 225480 - DNA, 33 bp, Homo sapien
ggttgtgaggcaagaacgtggattttagctaaa

SEQ ID NO: 225481 - DNA, 33 bp, Homo sapien
gttatcctgatctggcccccaaaagagaaaaaa

SEQ ID NO: 225482 - DNA, 33 bp, Homo sapien
gttatcctgatctggcgcccaaaagagaaaaaa

SEQ ID NO: 225483 - DNA, 33 bp, Homo sapien
tgcaggagccaaagtacgcaaaaagaactctgc

SEQ ID NO: 225484 - DNA, 33 bp, Homo sapien
tgcaggagccaaagtaggcaaaaagaactctgc

SEQ ID NO: 225485 - DNA, 33 bp, Homo sapien
ccatggcacacgtttacctgtttttaatcagta

SEQ ID NO: 225486 - DNA, 33 bp, Homo sapien
ccatggcacacgtttagctgtttttaatcagta

SEQ ID NO: 225487 - DNA, 33 bp, Homo sapien
tagaattttgtacactcacacatttttcaccaa

SEQ ID NO: 225488 - DNA, 33 bp, Homo sapien
tagaattttgtacactgacacatttttcaccaa

SEQ ID NO: 225489 - DNA, 33 bp, Homo sapien
ttttcttcagttcaggaaatcatatcacaaaga

SEQ ID NO: 225490 - DNA, 33 bp, Homo sapien
ttttcttcagttcagggaatcatatcacaaaga

SEQ ID NO: 225491 - DNA, 33 bp, Homo sapien
tagttggagaattggcaaggtgtgtttctttag

SEQ ID NO: 225492 - DNA, 33 bp, Homo sapien
tagttggagaattggcgaggtgtgtttctttag

SEQ ID NO: 225493 - DNA, 33 bp, Homo sapien
ttctatcaaatttctgaaactcaaaatgcatat

SEQ ID NO: 225494 - DNA, 33 bp, Homo sapien
ttctatcaaatttctgtaactcaaaatgcatat

SEQ ID NO: 225495 - DNA, 33 bp, Homo sapien
catgtgaatatatccacgtgagcagcattcaga

SEQ ID NO: 225496 - DNA, 33 bp, Homo sapien
catgtgaatatatccatgtgagcagcattcaga

SEQ ID NO: 225497 - DNA, 33 bp, Homo sapien
gagtgaacctaaggaacgtaagtctttataagt

SEQ ID NO: 225498 - DNA, 33 bp, Homo sapien
gagtgaacctaaggaatgtaagtctttataagt

SEQ ID NO: 225499 - DNA, 33 bp, Homo sapien
tcttgagatgcaaatccagtagggtgagagtga

SEQ ID NO: 225500 - DNA, 33 bp, Homo sapien
tcttgagatgcaaatctagtagggtgagagtga

SEQ ID NO: 225501 - DNA, 33 bp, Homo sapien
agaaatggtcttatcacctgttgccatactaac

SEQ ID NO: 225502 - DNA, 33 bp, Homo sapien
agaaatggtcttatcatctgttgccatactaac

SEQ ID NO: 225503 - DNA, 33 bp, Homo sapien
ctaggactaaaataaacaggcagctcattaggt

SEQ ID NO: 225504 - DNA, 33 bp, Homo sapien
ctaggactaaaataaataggcagctcattaggt

SEQ ID NO: 225505 - DNA, 33 bp, Homo sapien
cagttgtgtcactcaaatgttttttgccttcct

SEQ ID NO: 225506 - DNA, 33 bp, Homo sapien
cagttgtgtcactcaagtgttttttgccttcct

SEQ ID NO: 225507 - DNA, 33 bp, Homo sapien
agagacttgttcgacacctttgcccaaaatgct

SEQ ID NO: 225508 - DNA, 33 bp, Homo sapien
agagacttgttcgacagctttgcccaaaatgct

SEQ ID NO: 225509 - DNA, 33 bp, Homo sapien; identical to SEQ ID NO: 225507

SEQ ID NO: 225510 - DNA, 33 bp, Homo sapien; identical to SEQ ID NO: 225508

SEQ ID NO: 225511 - DNA, 33 bp, Homo sapien
gagaatcgtgtaatgcaaacagttgtgaatgaa

SEQ ID NO: 225512 - DNA, 33 bp, Homo sapien
gagaatcgtgtaatgcgaacagttgtgaatgaa

SEQ ID NO: 225513 - DNA, 33 bp, Homo sapien
tttttgaacaattcaaaaatgtggtacaactaa

SEQ ID NO: 225514 - DNA, 33 bp, Homo sapien
tttttgaacaattcaagaatgtggtacaactaa

SEQ ID NO: 225515 - DNA, 33 bp, Homo sapien
ggaagagcaaattaaacgtacagcaagcagagg

SEQ ID NO: 225516 - DNA, 33 bp, Homo sapien
ggaagagcaaattaaatgtacagcaagcagagg

SEQ ID NO: 225517 - DNA, 33 bp, Homo sapien
gagagagacagagaaacaaagagattgcctcac

SEQ ID NO: 225518 - DNA, 33 bp, Homo sapien
gagagagacagagaaataaagagattgcctcac

SEQ ID NO: 225519 - DNA, 33 bp, Homo sapien
actccagacctacaggacattcttatgcattca

SEQ ID NO: 225520 - DNA, 33 bp, Homo sapien
actccagacctacagggcattcttatgcattca

SEQ ID NO: 225521 - DNA, 33 bp, Homo sapien
attcatgatactcaagcaatgcagaggcttgca

SEQ ID NO: 225522 - DNA, 33 bp, Homo sapien
attcatgatactcaagtaatgcagaggcttgca

SEQ ID NO: 225523 - DNA, 33 bp, Homo sapien
ttagacctacagtaatcaagctttaaaagcaac

SEQ ID NO: 225524 - DNA, 33 bp, Homo sapien
ttagacctacagtaatgaagctttaaaagcaac

SEQ ID NO: 225525 - DNA, 33 bp, Homo sapien
attagtcctacaaaggaagtctattccccaggc

SEQ ID NO: 225526 - DNA, 33 bp, Homo sapien
attagtcctacaaaggcagtctattccccaggc

SEQ ID NO: 225527 - DNA, 33 bp, Homo sapien
ggaactgcctccctaacaggtagagacagtact

SEQ ID NO: 225528 - DNA, 33 bp, Homo sapien
ggaactgcctccctaataggtagagacagtact

SEQ ID NO: 225529 - DNA, 33 bp, Homo sapien
gaaaatgccttttttcactgactagcagagggg

SEQ ID NO: 225530 - DNA, 33 bp, Homo sapien
gaaaatgccttttttcgctgactagcagagggg

SEQ ID NO: 225531 - DNA, 33 bp, Homo sapien
taaatttttccattgacgacaacatagaaagat

SEQ ID NO: 225532 - DNA, 33 bp, Homo sapien
taaatttttccattgatgacaacatagaaagat

SEQ ID NO: 225533 - DNA, 33 bp, Homo sapien
gattccttgattttcaactttgtctgatataca

SEQ ID NO: 225534 - DNA, 33 bp, Homo sapien
gattccttgattttcagctttgtctgatataca

SEQ ID NO: 225535 - DNA, 33 bp, Homo sapien
tcctcttctaaggataccaatcatattggaggg

SEQ ID NO: 225536 - DNA, 33 bp, Homo sapien
tcctcttctaaggatatcaatcatattggaggg

SEQ ID NO: 225537 - DNA, 33 bp, Homo sapien
ttttcaaagtgtctgaactaatactggtccaaa

SEQ ID NO: 225538 - DNA, 33 bp, Homo sapien
ttttcaaagtgtctgagctaatactggtccaaa

SEQ ID NO: 225539 - DNA, 33 bp, Homo sapien
ctaaatctctgaagaaaactggaaccagatgag

SEQ ID NO: 225540 - DNA, 33 bp, Homo sapien
ctaaatctctgaagaatactggaaccagatgag

SEQ ID NO: 225541 - DNA, 33 bp, Homo sapien
agtaaaaaccacttccagacattaaatatctct

SEQ ID NO: 225542 - DNA, 33 bp, Homo sapien
agtaaaaaccacttccggacattaaatatctct

SEQ ID NO: 225543 - DNA, 33 bp, Homo sapien
agactactctaccagactaatgagtgtgctgac

SEQ ID NO: 225544 - DNA, 33 bp, Homo sapien
agactactctaccagattaatgagtgtgctgac

SEQ ID NO: 225545 - DNA, 33 bp, Homo sapien
aataccttatacctagacagagtcacagctact

SEQ ID NO: 225546 - DNA, 33 bp, Homo sapien
aataccttatacctagtcagagtcacagctact

SEQ ID NO: 225547 - DNA, 33 bp, Homo sapien
gacaaattttgagtgaaccatgagagtaatctg

SEQ ID NO: 225548 - DNA, 33 bp, Homo sapien
gacaaattttgagtgacccatgagagtaatctg

SEQ ID NO: 225549 - DNA, 33 bp, Homo sapien
gcagacaatgttagcaagagtttctgggccagt

SEQ ID NO: 225550 - DNA, 33 bp, Homo sapien
gcagacaatgttagcaggagtttctgggccagt

SEQ ID NO: 225551 - DNA, 33 bp, Homo sapien
catacgtaagaaatagaaacgagaaaatcacaa

SEQ ID NO: 225552 - DNA, 33 bp, Homo sapien
catacgtaagaaataggaacgagaaaatcacaa

SEQ ID NO: 225553 - DNA, 33 bp, Homo sapien
ggtatagagaattcaaggtaagtctgaagcaac

SEQ ID NO: 225554 - DNA, 33 bp, Homo sapien
ggtatagagaattcaatgtaagtctgaagcaac

SEQ ID NO: 225555 - DNA, 33 bp, Homo sapien
acaaagtcaaaaatgggatttgcatgaaagagg

SEQ ID NO: 225556 - DNA, 33 bp, Homo sapien
acaaagtcaaaaatggtatttgcatgaaagagg

SEQ ID NO: 225557 - DNA, 33 bp, Homo sapien
caaggtaaagaaagaaatagttcagagagcaaa

SEQ ID NO: 225558 - DNA, 33 bp, Homo sapien
caaggtaaagaaagaagtagttcagagagcaaa

SEQ ID NO: 225559 - DNA, 33 bp, Homo sapien
ctaaggcaacttgagccatgaagaagaaaggta

SEQ ID NO: 225560 - DNA, 33 bp, Homo sapien
ctaaggcaacttgagctatgaagaagaaaggta

SEQ ID NO: 225561 - DNA, 33 bp, Homo sapien
attcctccagtcatgacaataagcagaaaatgt

SEQ ID NO: 225562 - DNA, 33 bp, Homo sapien
attcctccagtcatgataataagcagaaaatgt

SEQ ID NO: 225563 - DNA, 33 bp, Homo sapien
gtggttgaattccaaaagtaagtgtcccaaaac

SEQ ID NO: 225564 - DNA, 33 bp, Homo sapien
gtggttgaattccaaaggtaagtgtcccaaaac

SEQ ID NO: 225565 - DNA, 33 bp, Homo sapien
tgaagtcaattctccaagaaaaatacctttaac

SEQ ID NO: 225566 - DNA, 33 bp, Homo sapien
tgaagtcaattctccaggaaaaatacctttaac

SEQ ID NO: 225567 - DNA, 33 bp, Homo sapien
tgttggatgtggccaacgttatttaataataac

SEQ ID NO: 225568 - DNA, 33 bp, Homo sapien
tgttggatgtggccaatgttatttaataataac

SEQ ID NO: 225569 - DNA, 33 bp, Homo sapien
ggtgcttggtacactaagattcagaaattcatg

SEQ ID NO: 225570 - DNA, 33 bp, Homo sapien
ggtgcttggtacactatgattcagaaattcatg

SEQ ID NO: 225571 - DNA, 33 bp, Homo sapien
ggcaacagcttcaaataaaagttgtttttagca

SEQ ID NO: 225572 - DNA, 33 bp, Homo sapien
ggcaacagcttcaaatgaaagttgtttttagca

SEQ ID NO: 225573 - DNA, 33 bp, Homo sapien
agctaacagatgttaccgaggttgtagagaaaa

SEQ ID NO: 225574 - DNA, 33 bp, Homo sapien
agctaacagatgttactgaggttgtagagaaaa

SEQ ID NO: 225575 - DNA, 33 bp, Homo sapien
tatgtatcttcttttgaaacttaaatatccatc

SEQ ID NO: 225576 - DNA, 33 bp, Homo sapien
tatgtatcttcttttgtaacttaaatatccatc

SEQ ID NO: 225577 - DNA, 33 bp, Homo sapien
ttaagtccattgcttaccgtgggctggaggtaa

SEQ ID NO: 225578 - DNA, 33 bp, Homo sapien
ttaagtccattgcttatcgtgggctggaggtaa

SEQ ID NO: 225579 - DNA, 33 bp, Homo sapien
gagtcattgttgcaaaacatgaaaagcacagcc

SEQ ID NO: 225580 - DNA, 33 bp, Homo sapien
gagtcattgttgcaaaccatgaaaagcacagcc

SEQ ID NO: 225581 - DNA, 33 bp, Homo sapien
taattcttcattctctcacccatatattatcta

SEQ ID NO: 225582 - DNA, 33 bp, Homo sapien
taattcttcattctctgacccatatattatcta

SEQ ID NO: 225583 - DNA, 33 bp, Homo sapien
gaatatatgtggcaccaagccattgccatattt

SEQ ID NO: 225584 - DNA, 33 bp, Homo sapien
gaatatatgtggcaccgagccattgccatattt

SEQ ID NO: 225585 - DNA, 33 bp, Homo sapien
taggttgcaaaaattccctcccattttataggt

SEQ ID NO: 225586 - DNA, 33 bp, Homo sapien
taggttgcaaaaattctctcccattttataggt

SEQ ID NO: 225587 - DNA, 33 bp, Homo sapien
cagtggagagttactacagagcaaatgtgtact

SEQ ID NO: 225588 - DNA, 33 bp, Homo sapien
cagtggagagttactatagagcaaatgtgtact

SEQ ID NO: 225589 - DNA, 33 bp, Homo sapien
acagggaatatagagaagtgtttatggaaatat

SEQ ID NO: 225590 - DNA, 33 bp, Homo sapien
acagggaatatagagatgtgtttatggaaatat

SEQ ID NO: 225591 - DNA, 33 bp, Homo sapien
agtctatggtagaaagaaactgcattctgccaa

SEQ ID NO: 225592 - DNA, 33 bp, Homo sapien
agtctatggtagaaaggaactgcattctgccaa

SEQ ID NO: 225593 - DNA, 33 bp, Homo sapien
tacatggcaggaaaccacaacctctagaagcta

SEQ ID NO: 225594 - DNA, 33 bp, Homo sapien
tacatggcaggaaaccgcaacctctagaagcta

SEQ ID NO: 225595 - DNA, 33 bp, Homo sapien
tggtttgcaaaaggccaagaggattggtttaac

SEQ ID NO: 225596 - DNA, 33 bp, Homo sapien
tggtttgcaaaaggcccagaggattggtttaac

SEQ ID NO: 225597 - DNA, 33 bp, Homo sapien
agttgtcattcatttacatcatgttggagcact

SEQ ID NO: 225598 - DNA, 33 bp, Homo sapien
agttgtcattcatttatatcatgttggagcact

SEQ ID NO: 225599 - DNA, 33 bp, Homo sapien
tgattctgttcattaaaataagctttatgtctc

SEQ ID NO: 225600 - DNA, 33 bp, Homo sapien
tgattctgttcattaagataagctttatgtctc

SEQ ID NO: 225601 - DNA, 33 bp, Homo sapien
ttcattgttgaccttcagaaaacctaaaggcaa

SEQ ID NO: 225602 - DNA, 33 bp, Homo sapien
ttcattgttgaccttcggaaaacctaaaggcaa

SEQ ID NO: 225603 - DNA, 33 bp, Homo sapien
ggaacgctctataaaacttttaagtgagatcta

SEQ ID NO: 225604 - DNA, 33 bp, Homo sapien
ggaacgctctataaaagttttaagtgagatcta

SEQ ID NO: 225605 - DNA, 33 bp, Homo sapien
caaaggagcaactgaaataatgagtagagctac

SEQ ID NO: 225606 - DNA, 33 bp, Homo sapien
caaaggagcaactgaagtaatgagtagagctac

SEQ ID NO: 225607 - DNA, 33 bp, Homo sapien
cacaaaatttcaatccaaggagactgagtaaat

SEQ ID NO: 225608 - DNA, 33 bp, Homo sapien
cacaaaatttcaatccgaggagactgagtaaat

SEQ ID NO: 225609 - DNA, 33 bp, Homo sapien
tttgggtaggaagaaaccagattgttgtggatt

SEQ ID NO: 225610 - DNA, 33 bp, Homo sapien
tttgggtaggaagaaatcagattgttgtggatt

SEQ ID NO: 225611 - DNA, 33 bp, Homo sapien
gaaaggaattatcaagacatgctacatatggac

SEQ ID NO: 225612 - DNA, 33 bp, Homo sapien
gaaaggaattatcaaggcatgctacatatggac

SEQ ID NO: 225613 - DNA, 33 bp, Homo sapien
aagttgaaaatctttacggtcaaggacctcttg

SEQ ID NO: 225614 - DNA, 33 bp, Homo sapien
aagttgaaaatctttatggtcaaggacctcttg

SEQ ID NO: 225615 - DNA, 33 bp, Homo sapien
ccacctctccatctcacctgacaatctctcctt

SEQ ID NO: 225616 - DNA, 33 bp, Homo sapien
ccacctctccatctcatctgacaatctctcctt

SEQ ID NO: 225617 - DNA, 33 bp, Homo sapien
gagtctgtgcacctaccgccttgtcaataggaa

SEQ ID NO: 225618 - DNA, 33 bp, Homo sapien
gagtctgtgcacctactgccttgtcaataggaa

SEQ ID NO: 225619 - DNA, 33 bp, Homo sapien
tcaattttctctcgtaaagcaacactttatgaa

SEQ ID NO: 225620 - DNA, 33 bp, Homo sapien
tcaattttctctcgtacagcaacactttatgaa

SEQ ID NO: 225621 - DNA, 33 bp, Homo sapien
tccagctccatccagacaatacttgaattatgg

SEQ ID NO: 225622 - DNA, 33 bp, Homo sapien
tccagctccatccagagaatacttgaattatgg

SEQ ID NO: 225623 - DNA, 33 bp, Homo sapien
ttaatgcaaattaaaactgctgaacaggctgga

SEQ ID NO: 225624 - DNA, 33 bp, Homo sapien
ttaatgcaaattaaaattgctgaacaggctgga

SEQ ID NO: 225625 - DNA, 33 bp, Homo sapien
tgatcagattcactaaagctctcaggcttgtta

SEQ ID NO: 225626 - DNA, 33 bp, Homo sapien
tgatcagattcactaaggctctcaggcttgtta

SEQ ID NO: 225627 - DNA, 33 bp, Homo sapien
atcttctgataaggaaaggaaaatccagagaaa

SEQ ID NO: 225628 - DNA, 33 bp, Homo sapien
atcttctgataaggaagggaaaatccagagaaa

SEQ ID NO: 225629 - DNA, 33 bp, Homo sapien
gatacccagatgaacaaaaagtctgtgagctca

SEQ ID NO: 225630 - DNA, 33 bp, Homo sapien
gatacccagatgaacataaagtctgtgagctca

SEQ ID NO: 225631 - DNA, 33 bp, Homo sapien
gtgttggtggtttagcacagaagacaggctcta

SEQ ID NO: 225632 - DNA, 33 bp, Homo sapien
gtgttggtggtttagcgcagaagacaggctcta

SEQ ID NO: 225633 - DNA, 33 bp, Homo sapien
tgaaaggtaatggggcaatagtgacacaggatt

SEQ ID NO: 225634 - DNA, 33 bp, Homo sapien
tgaaaggtaatggggcgatagtgacacaggatt

SEQ ID NO: 225635 - DNA, 33 bp, Homo sapien
tggtggtcagaggataagttttttgagtttctg

SEQ ID NO: 225636 - DNA, 33 bp, Homo sapien
tggtggtcagaggatacgttttttgagtttctg

SEQ ID NO: 225637 - DNA, 33 bp, Homo sapien
aacactctcttatctcaacttcttaatcctaga

SEQ ID NO: 225638 - DNA, 33 bp, Homo sapien
aacactctcttatctcgacttcttaatcctaga

SEQ ID NO: 225639 - DNA, 33 bp, Homo sapien
agcagaacttgagtaactggcatatgcggattc

SEQ ID NO: 225640 - DNA, 33 bp, Homo sapien
agcagaacttgagtaattggcatatgcggattc

SEQ ID NO: 225641 - DNA, 33 bp, Homo sapien
ggaatcaccattcagcagcacttcagatgatga

SEQ ID NO: 225642 - DNA, 33 bp, Homo sapien
ggaatcaccattcagcggcacttcagatgatga

SEQ ID NO: 225643 - DNA, 33 bp, Homo sapien
ctgttgtttctcctgaaaaggttagtcatggtt

SEQ ID NO: 225644 - DNA, 33 bp, Homo sapien
ctgttgtttctcctgacaaggttagtcatggtt

SEQ ID NO: 225645 - DNA, 33 bp, Homo sapien
catgtggcttggggaacagctaacctgtggtta

SEQ ID NO: 225646 - DNA, 33 bp, Homo sapien
catgtggcttggggaagagctaacctgtggtta

SEQ ID NO: 225647 - DNA, 33 bp, Homo sapien
taataagtgctaggacaaaaggacaagcaacat

SEQ ID NO: 225648 - DNA, 33 bp, Homo sapien
taataagtgctaggaccaaaggacaagcaacat

SEQ ID NO: 225649 - DNA, 33 bp, Homo sapien
cagctagtgtagctgagcacagggccccagata

SEQ ID NO: 225650 - DNA, 33 bp, Homo sapien
cagctagtgtagctgatcacagggccccagata

SEQ ID NO: 225651 - DNA, 33 bp, Homo sapien
atggtggctgtcatcacggagatctcgctcctg

SEQ ID NO: 225652 - DNA, 33 bp, Homo sapien
atggtggctgtcatcatggagatctcgctcctg

SEQ ID NO: 225653 - DNA, 33 bp, Homo sapien
aggtcaaggtagaatgaaagtgattgctgccct

SEQ ID NO: 225654 - DNA, 33 bp, Homo sapien
aggtcaaggtagaatggaagtgattgctgccct

SEQ ID NO: 225655 - DNA, 33 bp, Homo sapien
gtgaaatcttctttgaataattagtctctgctt

SEQ ID NO: 225656 - DNA, 33 bp, Homo sapien
gtgaaatcttctttgagtaattagtctctgctt

SEQ ID NO: 225657 - DNA, 33 bp, Homo sapien
gtgttcctgtggtcaaatgtccttatataaatt

SEQ ID NO: 225658 - DNA, 33 bp, Homo sapien
gtgttcctgtggtcaagtgtccttatataaatt

SEQ ID NO: 225659 - DNA, 33 bp, Homo sapien
gcattaacacattttaaactttccagcaacttt

SEQ ID NO: 225660 - DNA, 33 bp, Homo sapien
gcattaacacattttagactttccagcaacttt

SEQ ID NO: 225661 - DNA, 33 bp, Homo sapien
aatgaagacacaaactcacttttcctcagttta

SEQ ID NO: 225662 - DNA, 33 bp, Homo sapien
aatgaagacacaaacttacttttcctcagttta

SEQ ID NO: 225663 - DNA, 33 bp, Homo sapien
ttgcagagcactgcccaaaacagaaggccccgg

SEQ ID NO: 225664 - DNA, 33 bp, Homo sapien
ttgcagagcactgcccgaaacagaaggccccgg

SEQ ID NO: 225665 - DNA, 33 bp, Homo sapien
accctggtgtccgttaagtccccagccttgagg

SEQ ID NO: 225666 - DNA, 33 bp, Homo sapien
accctggtgtccgttaggtccccagccttgagg

SEQ ID NO: 225667 - DNA, 33 bp, Homo sapien
caatcaaaaaatgaaaaaaggatttgaacggac

SEQ ID NO: 225668 - DNA, 33 bp, Homo sapien
caatcaaaaaatgaaagaaggatttgaacggac

SEQ ID NO: 225669 - DNA, 33 bp, Homo sapien
ttttgattgggttattaaactctttgttgttga

SEQ ID NO: 225670 - DNA, 33 bp, Homo sapien
ttttgattgggttattcaactctttgttgttga

SEQ ID NO: 225671 - DNA, 33 bp, Homo sapien
atatttgcaaattatagctagtaagagccttgt

SEQ ID NO: 225672 - DNA, 33 bp, Homo sapien
atatttgcaaattatatctagtaagagccttgt

SEQ ID NO: 225673 - DNA, 33 bp, Homo sapien
ccacctcaccattgtcaaagagagggacaagag

SEQ ID NO: 225674 - DNA, 33 bp, Homo sapien
ccacctcaccattgtcgaagagagggacaagag

SEQ ID NO: 225675 - DNA, 33 bp, Homo sapien
agatttctcttccccaaggaaaatgtatccacc

SEQ ID NO: 225676 - DNA, 33 bp, Homo sapien
agatttctcttccccagggaaaatgtatccacc

SEQ ID NO: 225677 - DNA, 33 bp, Homo sapien
gtaatacactgtggcaacttcagaaatcagatt

SEQ ID NO: 225678 - DNA, 33 bp, Homo sapien
gtaatacactgtggcagcttcagaaatcagatt

SEQ ID NO: 225679 - DNA, 33 bp, Homo sapien
tccccagagcattggtaaaataatcagtggcaa

SEQ ID NO: 225680 - DNA, 33 bp, Homo sapien
tccccagagcattggtcaaataatcagtggcaa

SEQ ID NO: 225681 - DNA, 33 bp, Homo sapien
atctgacttttcaacagcttcagaaatagttgg

SEQ ID NO: 225682 - DNA, 33 bp, Homo sapien
atctgacttttcaacatcttcagaaatagttgg

SEQ ID NO: 225683 - DNA, 33 bp, Homo sapien
aacacaaggaaactgaaatagtttggatgtttg

SEQ ID NO: 225684 - DNA, 33 bp, Homo sapien
aacacaaggaaactgatatagtttggatgtttg

SEQ ID NO: 225685 - DNA, 33 bp, Homo sapien
ctgggatgttcacagcaatgtccaggaagcagc

SEQ ID NO: 225686 - DNA, 33 bp, Homo sapien
ctgggatgttcacagcgatgtccaggaagcagc

SEQ ID NO: 225687 - DNA, 33 bp, Homo sapien
gggagagagggactaggaggtggtacatgaatg

SEQ ID NO: 225688 - DNA, 33 bp, Homo sapien
gggagagagggactagtaggtggtacatgaatg

SEQ ID NO: 225689 - DNA, 33 bp, Homo sapien
tttcctcctgaggctacacccatgcgtctctag

SEQ ID NO: 225690 - DNA, 33 bp, Homo sapien
tttcctcctgaggctatacccatgcgtctctag

SEQ ID NO: 225691 - DNA, 33 bp, Homo sapien
gaggtatcattccagacatgcaggggactagga

SEQ ID NO: 225692 - DNA, 33 bp, Homo sapien
gaggtatcattccagagatgcaggggactagga

SEQ ID NO: 225693 - DNA, 33 bp, Homo sapien
tgagggcagtcccctgcaggccgttctccgtgc

SEQ ID NO: 225694 - DNA, 33 bp, Homo sapien
tgagggcagtcccctggaggccgttctccgtgc

SEQ ID NO: 225695 - DNA, 33 bp, Homo sapien
ctctaaactcccactccattttctcaactcaac

SEQ ID NO: 225696 - DNA, 33 bp, Homo sapien
ctctaaactcccactctattttctcaactcaac

SEQ ID NO: 225697 - DNA, 33 bp, Homo sapien
tcaagttctttatggacgacttcactgtgatgt

SEQ ID NO: 225698 - DNA, 33 bp, Homo sapien
tcaagttctttatggaggacttcactgtgatgt

SEQ ID NO: 225699 - DNA, 33 bp, Homo sapien
gaatgttttcttctaacgcaatcagcacccatt

SEQ ID NO: 225700 - DNA, 33 bp, Homo sapien
gaatgttttcttctaatgcaatcagcacccatt

SEQ ID NO: 225701 - DNA, 33 bp, Homo sapien
atgaagtctacccttacgtaagctttgtgacca

SEQ ID NO: 225702 - DNA, 33 bp, Homo sapien
atgaagtctacccttatgtaagctttgtgacca

SEQ ID NO: 225703 - DNA, 33 bp, Homo sapien
ataagttgccttgacacctgtgtggtcagtgtc

SEQ ID NO: 225704 - DNA, 33 bp, Homo sapien
ataagttgccttgacatctgtgtggtcagtgtc

SEQ ID NO: 225705 - DNA, 33 bp, Homo sapien
aggaggagcggagagcagaagaaaggagtattc

SEQ ID NO: 225706 - DNA, 33 bp, Homo sapien
aggaggagcggagagctgaagaaaggagtattc

SEQ ID NO: 225707 - DNA, 33 bp, Homo sapien
tgatccaggaggcgacaaagcagtacctgggct

SEQ ID NO: 225708 - DNA, 33 bp, Homo sapien
tgatccaggaggcgaccaagcagtacctgggct

SEQ ID NO: 225709 - DNA, 33 bp, Homo sapien
gggaggaagggcagccagagtactacagccgaa

SEQ ID NO: 225710 - DNA, 33 bp, Homo sapien
gggaggaagggcagccggagtactacagccgaa

SEQ ID NO: 225711 - DNA, 33 bp, Homo sapien
cttaccaaggctgccacgctctaagggccacta

SEQ ID NO: 225712 - DNA, 33 bp, Homo sapien
cttaccaaggctgccatgctctaagggccacta

SEQ ID NO: 225713 - DNA, 33 bp, Homo sapien
catgatcattgctcatgatagcctagaactact

SEQ ID NO: 225714 - DNA, 33 bp, Homo sapien
catgatcattgctcattatagcctagaactact

SEQ ID NO: 225715 - DNA, 33 bp, Homo sapien
agtggcatatcacgtaactgtagttccatctac

SEQ ID NO: 225716 - DNA, 33 bp, Homo sapien
agtggcatatcacgtacctgtagttccatctac

SEQ ID NO: 225717 - DNA, 33 bp, Homo sapien
aaaaaaagaagcaaacactggtagtgaccgttc

SEQ ID NO: 225718 - DNA, 33 bp, Homo sapien
aaaaaaagaagcaaacgctggtagtgaccgttc

SEQ ID NO: 225719 - DNA, 33 bp, Homo sapien
ggaaaaaattaaaaaccagagagctaagatggt

SEQ ID NO: 225720 - DNA, 33 bp, Homo sapien
ggaaaaaattaaaaacgagagagctaagatggt

SEQ ID NO: 225721 - DNA, 33 bp, Homo sapien
ctcctttacaacatccactattgtcatttctcc

SEQ ID NO: 225722 - DNA, 33 bp, Homo sapien
ctcctttacaacatccgctattgtcatttctcc

SEQ ID NO: 225723 - DNA, 33 bp, Homo sapien
tgccctttactccaacaagaatagtaccatact

SEQ ID NO: 225724 - DNA, 33 bp, Homo sapien
tgccctttactccaacgagaatagtaccatact

SEQ ID NO: 225725 - DNA, 33 bp, Homo sapien
ataacaaagagaagatgagagctggaggaatga

SEQ ID NO: 225726 - DNA, 33 bp, Homo sapien
ataacaaagagaagattagagctggaggaatga

SEQ ID NO: 225727 - DNA, 33 bp, Homo sapien
agcactaccctctctcaagttgcctatgccttt

SEQ ID NO: 225728 - DNA, 33 bp, Homo sapien
agcactaccctctctcgagttgcctatgccttt

SEQ ID NO: 225729 - DNA, 33 bp, Homo sapien
gcctgaaataaaagaggcactaaatggaatcat

SEQ ID NO: 225730 - DNA, 33 bp, Homo sapien
gcctgaaataaaagagtcactaaatggaatcat

SEQ ID NO: 225731 - DNA, 33 bp, Homo sapien
ttgtaaggtaatgcaccggggggataaatgcac

SEQ ID NO: 225732 - DNA, 33 bp, Homo sapien
ttgtaaggtaatgcactggggggataaatgcac

SEQ ID NO: 225733 - DNA, 33 bp, Homo sapien
gaaggaaggagggggcaaggagacagatgaagg

SEQ ID NO: 225734 - DNA, 33 bp, Homo sapien
gaaggaaggagggggcgaggagacagatgaagg

SEQ ID NO: 225735 - DNA, 33 bp, Homo sapien
atagttcctttccgctcagagtcaggatgatga

SEQ ID NO: 225736 - DNA, 33 bp, Homo sapien
atagttcctttccgcttagagtcaggatgatga

SEQ ID NO: 225737 - DNA, 33 bp, Homo sapien
atttgatgaaagaatacactgaatcagctcctc

SEQ ID NO: 225738 - DNA, 33 bp, Homo sapien
atttgatgaaagaatagactgaatcagctcctc

SEQ ID NO: 225739 - DNA, 33 bp, Homo sapien
ggggaatgagacaatgaatgtcctctgttgacg

SEQ ID NO: 225740 - DNA, 33 bp, Homo sapien
ggggaatgagacaatggatgtcctctgttgacg

SEQ ID NO: 225741 - DNA, 33 bp, Homo sapien
acctacctctatctaccctgttgcaactacaac

SEQ ID NO: 225742 - DNA, 33 bp, Homo sapien
acctacctctatctactctgttgcaactacaac

SEQ ID NO: 225743 - DNA, 33 bp, Homo sapien
cctgctcctgtgtaccaaaacagccctccctgt

SEQ ID NO: 225744 - DNA, 33 bp, Homo sapien
cctgctcctgtgtaccgaaacagccctccctgt

SEQ ID NO: 225745 - DNA, 33 bp, Homo sapien
aatggagttgagagatgatctacaatttcctag

SEQ ID NO: 225746 - DNA, 33 bp, Homo sapien
aatggagttgagagattatctacaatttcctag

SEQ ID NO: 225747 - DNA, 33 bp, Homo sapien
gactccagtatctcccacactgagggatgaagt

SEQ ID NO: 225748 - DNA, 33 bp, Homo sapien
gactccagtatctcccgcactgagggatgaagt

SEQ ID NO: 225749 - DNA, 33 bp, Homo sapien
ctctgcagtatagtccacagaccagttgcatca

SEQ ID NO: 225750 - DNA, 33 bp, Homo sapien
ctctgcagtatagtccgcagaccagttgcatca

SEQ ID NO: 225751 - DNA, 33 bp, Homo sapien
agcatgctactgtactcaacgctgtaggcaatt

SEQ ID NO: 225752 - DNA, 33 bp, Homo sapien
agcatgctactgtactgaacgctgtaggcaatt

SEQ ID NO: 225753 - DNA, 33 bp, Homo sapien
ggtcactttcccagtaccttgtttcgttttctt

SEQ ID NO: 225754 - DNA, 33 bp, Homo sapien
ggtcactttcccagtatcttgtttcgttttctt

SEQ ID NO: 225755 - DNA, 33 bp, Homo sapien
gggtccgagttctgaaagagaaaaatcttcctt

SEQ ID NO: 225756 - DNA, 33 bp, Homo sapien
gggtccgagttctgaaggagaaaaatcttcctt

SEQ ID NO: 225757 - DNA, 33 bp, Homo sapien
tccctcctataacatacacccctagtctgactt

SEQ ID NO: 225758 - DNA, 33 bp, Homo sapien
tccctcctataacatatacccctagtctgactt

SEQ ID NO: 225759 - DNA, 33 bp, Homo sapien
atggcagatgggctgagaatttgtgtccagccc

SEQ ID NO: 225760 - DNA, 33 bp, Homo sapien
atggcagatgggctgataatttgtgtccagccc

SEQ ID NO: 225761 - DNA, 33 bp, Homo sapien
gagacttttgaatctagagggcagcacttaagg

SEQ ID NO: 225762 - DNA, 33 bp, Homo sapien
gagacttttgaatctatagggcagcacttaagg

SEQ ID NO: 225763 - DNA, 33 bp, Homo sapien
agcccagagctgatcccaagacatggcctccac

SEQ ID NO: 225764 - DNA, 33 bp, Homo sapien
agcccagagctgatcctaagacatggcctccac

SEQ ID NO: 225765 - DNA, 33 bp, Homo sapien
acttgccttcgtctccccgctactactcgccaa

SEQ ID NO: 225766 - DNA, 33 bp, Homo sapien
acttgccttcgtctcctcgctactactcgccaa

SEQ ID NO: 225767 - DNA, 33 bp, Homo sapien
atagccagtttgggaccgaggtgagtctatatc

SEQ ID NO: 225768 - DNA, 33 bp, Homo sapien
atagccagtttgggactgaggtgagtctatatc

SEQ ID NO: 225769 - DNA, 33 bp, Homo sapien
agaactggtcagactcaaggtggctcctctgca

SEQ ID NO: 225770 - DNA, 33 bp, Homo sapien
agaactggtcagactccaggtggctcctctgca

SEQ ID NO: 225771 - DNA, 33 bp, Homo sapien
gccaaacttgagaggagtcacagtctgagtaac

SEQ ID NO: 225772 - DNA, 33 bp, Homo sapien
gccaaacttgagaggattcacagtctgagtaac

SEQ ID NO: 225773 - DNA, 33 bp, Homo sapien
ggccaggtggttatagaaagggatttgtctttc

SEQ ID NO: 225774 - DNA, 33 bp, Homo sapien
ggccaggtggttataggaagggatttgtctttc

SEQ ID NO: 225775 - DNA, 33 bp, Homo sapien
aaaaagaatgccaggaacagtctaccctttgga

SEQ ID NO: 225776 - DNA, 33 bp, Homo sapien
aaaaagaatgccaggaccagtctaccctttgga

SEQ ID NO: 225777 - DNA, 33 bp, Homo sapien
ataccactaccttccaaatgaaggctctagctc

SEQ ID NO: 225778 - DNA, 33 bp, Homo sapien
ataccactaccttccagatgaaggctctagctc

SEQ ID NO: 225779 - DNA, 33 bp, Homo sapien
aggtaatatatagaaaactgcactaaagcatcc

SEQ ID NO: 225780 - DNA, 33 bp, Homo sapien
aggtaatatatagaaagctgcactaaagcatcc

SEQ ID NO: 225781 - DNA, 33 bp, Homo sapien
ttttagttcttcctggcagttatttagccttgc

SEQ ID NO: 225782 - DNA, 33 bp, Homo sapien
ttttagttcttcctggtagttatttagccttgc

SEQ ID NO: 225783 - DNA, 33 bp, Homo sapien
gcagaaaccagatgacagggtatctgatagtat

SEQ ID NO: 225784 - DNA, 33 bp, Homo sapien
gcagaaaccagatgacggggtatctgatagtat

SEQ ID NO: 225785 - DNA, 33 bp, Homo sapien
agagtttactggaagacgaataatgaagggaaa

SEQ ID NO: 225786 - DNA, 33 bp, Homo sapien
agagtttactggaagatgaataatgaagggaaa

SEQ ID NO: 225787 - DNA, 33 bp, Homo sapien
gaatagagtcaatcaacctttaatgttattaca

SEQ ID NO: 225788 - DNA, 33 bp, Homo sapien
gaatagagtcaatcaagctttaatgttattaca

SEQ ID NO: 225789 - DNA, 33 bp, Homo sapien
acaaggcaaaaggggcacaagggaattagcagg

SEQ ID NO: 225790 - DNA, 33 bp, Homo sapien
acaaggcaaaaggggcgcaagggaattagcagg

SEQ ID NO: 225791 - DNA, 33 bp, Homo sapien
agcgaaggcttgccacaatccatgcaaggggat

SEQ ID NO: 225792 - DNA, 33 bp, Homo sapien
agcgaaggcttgccaccatccatgcaaggggat

SEQ ID NO: 225793 - DNA, 33 bp, Homo sapien
atcatggctagctcgcaaaagtggtcttaagcc

SEQ ID NO: 225794 - DNA, 33 bp, Homo sapien
atcatggctagctcgcgaaagtggtcttaagcc

SEQ ID NO: 225795 - DNA, 33 bp, Homo sapien
atgtggctgcagtctccaccaatggcgctctct

SEQ ID NO: 225796 - DNA, 33 bp, Homo sapien
atgtggctgcagtctcgaccaatggcgctctct

SEQ ID NO: 225797 - DNA, 33 bp, Homo sapien
ggtaggttgagggcacaaatctagctctgaaca

SEQ ID NO: 225798 - DNA, 33 bp, Homo sapien
ggtaggttgagggcacgaatctagctctgaaca

SEQ ID NO: 225799 - DNA, 33 bp, Homo sapien
tctgactaggagttaactgactttgtgcatggc

SEQ ID NO: 225800 - DNA, 33 bp, Homo sapien
tctgactaggagttaattgactttgtgcatggc

SEQ ID NO: 225801 - DNA, 33 bp, Homo sapien; identical to SEQ ID NO: 225799

SEQ ID NO: 225802 - DNA, 33 bp, Homo sapien; identical to SEQ ID NO: 225800

SEQ ID NO: 225803 - DNA, 33 bp, Homo sapien
gtccagggtggatggacctcgtgagcccaggag

SEQ ID NO: 225804 - DNA, 33 bp, Homo sapien
gtccagggtggatggatctcgtgagcccaggag

SEQ ID NO: 225805 - DNA, 33 bp, Homo sapien
aatgctagtgaagctacggatgaaaaaaagcag

SEQ ID NO: 225806 - DNA, 33 bp, Homo sapien
aatgctagtgaagctatggatgaaaaaaagcag

SEQ ID NO: 225807 - DNA, 33 bp, Homo sapien
aaaacaaatgaggaaactgagcaattacttaac

SEQ ID NO: 225808 - DNA, 33 bp, Homo sapien
aaaacaaatgaggaaattgagcaattacttaac

SEQ ID NO: 225809 - DNA, 33 bp, Homo sapien
tcctaccttcagattacaattctgcaaagtagg

SEQ ID NO: 225810 - DNA, 33 bp, Homo sapien
tcctaccttcagattataattctgcaaagtagg

SEQ ID NO: 225811 - DNA, 33 bp, Homo sapien
tttacttttgctagtaaggtagactttgggagg

SEQ ID NO: 225812 - DNA, 33 bp, Homo sapien
tttacttttgctagtagggtagactttgggagg

SEQ ID NO: 225813 - DNA, 33 bp, Homo sapien
cagaggacgaaattagacactgctccagagtga

SEQ ID NO: 225814 - DNA, 33 bp, Homo sapien
cagaggacgaaattagccactgctccagagtga

SEQ ID NO: 225815 - DNA, 33 bp, Homo sapien
gaagcctcgtctacccagaggatttagaaagtg

SEQ ID NO: 225816 - DNA, 33 bp, Homo sapien
gaagcctcgtctacccggaggatttagaaagtg

SEQ ID NO: 225817 - DNA, 33 bp, Homo sapien
gctgcagaatcacataatagagattgatcttaa

SEQ ID NO: 225818 - DNA, 33 bp, Homo sapien
gctgcagaatcacatactagagattgatcttaa

SEQ ID NO: 225819 - DNA, 33 bp, Homo sapien
atatcattttctataacggatttaggcatcctt

SEQ ID NO: 225820 - DNA, 33 bp, Homo sapien
atatcattttctataatggatttaggcatcctt

SEQ ID NO: 225821 - DNA, 33 bp, Homo sapien
caaggaagctgctttgcagatagccagtaccga

SEQ ID NO: 225822 - DNA, 33 bp, Homo sapien
caaggaagctgctttgtagatagccagtaccga

SEQ ID NO: 225823 - DNA, 33 bp, Homo sapien
agaagctgctaggatcagatattttcacagggg

SEQ ID NO: 225824 - DNA, 33 bp, Homo sapien
agaagctgctaggatcggatattttcacagggg

SEQ ID NO: 225825 - DNA, 33 bp, Homo sapien
ggctcagagggcccaactggtgaggacaattca

SEQ ID NO: 225826 - DNA, 33 bp, Homo sapien
ggctcagagggcccaattggtgaggacaattca

SEQ ID NO: 225827 - DNA, 33 bp, Homo sapien
gtgacttggaagaaacaactactctggcttctt

SEQ ID NO: 225828 - DNA, 33 bp, Homo sapien
gtgacttggaagaaacgactactctggcttctt

SEQ ID NO: 225829 - DNA, 33 bp, Homo sapien
cctttccaagaaatgcccagaatgagactctga

SEQ ID NO: 225830 - DNA, 33 bp, Homo sapien
cctttccaagaaatgctcagaatgagactctga

SEQ ID NO: 225831 - DNA, 33 bp, Homo sapien
gagctgggtgtttctacagcctgcatgcttggg

SEQ ID NO: 225832 - DNA, 33 bp, Homo sapien
gagctgggtgtttctatagcctgcatgcttggg

SEQ ID NO: 225833 - DNA, 33 bp, Homo sapien
ttatagaatactccaacagcagaatgcacattc

SEQ ID NO: 225834 - DNA, 33 bp, Homo sapien
ttatagaatactccaatagcagaatgcacattc

SEQ ID NO: 225835 - DNA, 33 bp, Homo sapien
ccagggaataggagaaatcaaataagatcagtg

SEQ ID NO: 225836 - DNA, 33 bp, Homo sapien
ccagggaataggagaagtcaaataagatcagtg

SEQ ID NO: 225837 - DNA, 33 bp, Homo sapien
ttgcgaagtgaagaaaagctcaggatgaagaga

SEQ ID NO: 225838 - DNA, 33 bp, Homo sapien
ttgcgaagtgaagaaaggctcaggatgaagaga

SEQ ID NO: 225839 - DNA, 33 bp, Homo sapien; identical to SEQ ID NO: 225837

SEQ ID NO: 225840 - DNA, 33 bp, Homo sapien; identical to SEQ ID NO: 225838

SEQ ID NO: 225841 - DNA, 33 bp, Homo sapien
tagaggcccattcctgcatttgagatagggttg

SEQ ID NO: 225842 - DNA, 33 bp, Homo sapien
tagaggcccattcctgtatttgagatagggttg

SEQ ID NO: 225843 - DNA, 33 bp, Homo sapien
gcctccagggctcttcgcctaaaagtgtcacct

SEQ ID NO: 225844 - DNA, 33 bp, Homo sapien
gcctccagggctcttctcctaaaagtgtcacct

SEQ ID NO: 225845 - DNA, 33 bp, Homo sapien
ttaggcttttctatcccgctcctatggctccag

SEQ ID NO: 225846 - DNA, 33 bp, Homo sapien
ttaggcttttctatcctgctcctatggctccag

SEQ ID NO: 225847 - DNA, 33 bp, Homo sapien
tgacccaggacatctacaaaaagcaagcatgtg

SEQ ID NO: 225848 - DNA, 33 bp, Homo sapien
tgacccaggacatctataaaaagcaagcatgtg

SEQ ID NO: 225849 - DNA, 33 bp, Homo sapien
atggttactggagatacagtgagctagggatct

SEQ ID NO: 225850 - DNA, 33 bp, Homo sapien
atggttactggagatagagtgagctagggatct

SEQ ID NO: 225851 - DNA, 33 bp, Homo sapien
tctctcgctggcgcaacacctccagttctgcaa

SEQ ID NO: 225852 - DNA, 33 bp, Homo sapien
tctctcgctggcgcaatacctccagttctgcaa

SEQ ID NO: 225853 - DNA, 33 bp, Homo sapien
actgtgagtaactgaaatcaaggaaagaaaacc

SEQ ID NO: 225854 - DNA, 33 bp, Homo sapien
actgtgagtaactgaagtcaaggaaagaaaacc

SEQ ID NO: 225855 - DNA, 33 bp, Homo sapien
tcgcctgccttccccaaataatgcagccattat

SEQ ID NO: 225856 - DNA, 33 bp, Homo sapien
tcgcctgccttccccagataatgcagccattat

SEQ ID NO: 225857 - DNA, 33 bp, Homo sapien
gcctcaaatagcggatcagatccttcacgctct

SEQ ID NO: 225858 - DNA, 33 bp, Homo sapien
gcctcaaatagcggatgagatccttcacgctct

SEQ ID NO: 225859 - DNA, 33 bp, Homo sapien
tcagtggaccaaccaacagagaaggaagtggag

SEQ ID NO: 225860 - DNA, 33 bp, Homo sapien
tcagtggaccaaccaatagagaaggaagtggag

SEQ ID NO: 225861 - DNA, 33 bp, Homo sapien
aatgtaagttcctctccatgaaaagaagatagg

SEQ ID NO: 225862 - DNA, 33 bp, Homo sapien
aatgtaagttcctctctatgaaaagaagatagg

SEQ ID NO: 225863 - DNA, 33 bp, Homo sapien
ataaataaaattgttacaccctggctgggcaca

SEQ ID NO: 225864 - DNA, 33 bp, Homo sapien
ataaataaaattgttagaccctggctgggcaca

SEQ ID NO: 225865 - DNA, 33 bp, Homo sapien
gaggaaatggagtgaacagaaactggtacattc

SEQ ID NO: 225866 - DNA, 33 bp, Homo sapien
gaggaaatggagtgaatagaaactggtacattc

SEQ ID NO: 225867 - DNA, 33 bp, Homo sapien
ttttcctagtacactcaagtttgcaaaatgatt

SEQ ID NO: 225868 - DNA, 33 bp, Homo sapien
ttttcctagtacactcgagtttgcaaaatgatt

SEQ ID NO: 225869 - DNA, 33 bp, Homo sapien
aattgaggttatcagaaatgaactctctcaact

SEQ ID NO: 225870 - DNA, 33 bp, Homo sapien
aattgaggttatcagacatgaactctctcaact

SEQ ID NO: 225871 - DNA, 33 bp, Homo sapien
tagtcagtttaacatacgagattgtcaactcaa

SEQ ID NO: 225872 - DNA, 33 bp, Homo sapien
tagtcagtttaacatatgagattgtcaactcaa

SEQ ID NO: 225873 - DNA, 33 bp, Homo sapien
cacacaaagccgataacgtattagaactggaat

SEQ ID NO: 225874 - DNA, 33 bp, Homo sapien
cacacaaagccgataatgtattagaactggaat

SEQ ID NO: 225875 - DNA, 33 bp, Homo sapien
cttcagctctctttggaaggtccatcaagctga

SEQ ID NO: 225876 - DNA, 33 bp, Homo sapien
cttcagctctctttgggaggtccatcaagctga

SEQ ID NO: 225877 - DNA, 33 bp, Homo sapien
ggaaacagccgatcaaagagagggaaaaggata

SEQ ID NO: 225878 - DNA, 33 bp, Homo sapien
ggaaacagccgatcaaggagagggaaaaggata

SEQ ID NO: 225879 - DNA, 33 bp, Homo sapien
taaaaataaaaggctaggctagtagaaaacaat

SEQ ID NO: 225880 - DNA, 33 bp, Homo sapien
taaaaataaaaggctatgctagtagaaaacaat

SEQ ID NO: 225881 - DNA, 33 bp, Homo sapien
cagttcagttttggacaggctaaatgaaatgtt

SEQ ID NO: 225882 - DNA, 33 bp, Homo sapien
cagttcagttttggacgggctaaatgaaatgtt

SEQ ID NO: 225883 - DNA, 33 bp, Homo sapien
ggatttactcttcagccatctggtagagcccca

SEQ ID NO: 225884 - DNA, 33 bp, Homo sapien
ggatttactcttcagcgatctggtagagcccca

SEQ ID NO: 225885 - DNA, 33 bp, Homo sapien
caggactcctacacaccctctgaaactcaggct

SEQ ID NO: 225886 - DNA, 33 bp, Homo sapien
caggactcctacacactctctgaaactcaggct

SEQ ID NO: 225887 - DNA, 33 bp, Homo sapien
ttattattaatgacatcatgcagtacttttatt

SEQ ID NO: 225888 - DNA, 33 bp, Homo sapien
ttattattaatgacattatgcagtacttttatt

SEQ ID NO: 225889 - DNA, 33 bp, Homo sapien
aggaggctgttccacacccacgcatctcctaaa

SEQ ID NO: 225890 - DNA, 33 bp, Homo sapien
aggaggctgttccacatccacgcatctcctaaa

SEQ ID NO: 225891 - DNA, 33 bp, Homo sapien
tctcatttgttcactacagagtaatacaagatt

SEQ ID NO: 225892 - DNA, 33 bp, Homo sapien
tctcatttgttcactatagagtaatacaagatt

SEQ ID NO: 225893 - DNA, 33 bp, Homo sapien
atgtttagaacagctagagtaaagactaggaga

SEQ ID NO: 225894 - DNA, 33 bp, Homo sapien
atgtttagaacagctatagtaaagactaggaga

SEQ ID NO: 225895 - DNA, 33 bp, Homo sapien
ttattagatgcccattaaacagagtagtatatt

SEQ ID NO: 225896 - DNA, 33 bp, Homo sapien
ttattagatgcccattgaacagagtagtatatt

SEQ ID NO: 225897 - DNA, 33 bp, Homo sapien
ctgtctcaacaacaacaaaatgtgatgaggatg

SEQ ID NO: 225898 - DNA, 33 bp, Homo sapien
ctgtctcaacaacaaccaaatgtgatgaggatg

SEQ ID NO: 225899 - DNA, 33 bp, Homo sapien
attcatccagtatatcagagaaaggcaatggct

SEQ ID NO: 225900 - DNA, 33 bp, Homo sapien
attcatccagtatatcggagaaaggcaatggct

SEQ ID NO: 225901 - DNA, 33 bp, Homo sapien
tcagttctaggaaatcacaggagagaccaaaag

SEQ ID NO: 225902 - DNA, 33 bp, Homo sapien
tcagttctaggaaatcccaggagagaccaaaag

SEQ ID NO: 225903 - DNA, 33 bp, Homo sapien
gaatccaatgaaataaaggagcttctaccatct

SEQ ID NO: 225904 - DNA, 33 bp, Homo sapien
gaatccaatgaaataagggagcttctaccatct

SEQ ID NO: 225905 - DNA, 33 bp, Homo sapien
atctgcctttctctgaggtacaaactaaaaggc

SEQ ID NO: 225906 - DNA, 33 bp, Homo sapien
atctgcctttctctgatgtacaaactaaaaggc

SEQ ID NO: 225907 - DNA, 33 bp, Homo sapien
aataaagttttggcaaagatgctgggaacctgg

SEQ ID NO: 225908 - DNA, 33 bp, Homo sapien
aataaagttttggcaaggatgctgggaacctgg

SEQ ID NO: 225909 - DNA, 33 bp, Homo sapien
ggtgattgctacagtaacatgaaggttttctcc

SEQ ID NO: 225910 - DNA, 33 bp, Homo sapien
ggtgattgctacagtagcatgaaggttttctcc

SEQ ID NO: 225911 - DNA, 33 bp, Homo sapien
caaatgtagtagaataaaactaagtacagaaag

SEQ ID NO: 225912 - DNA, 33 bp, Homo sapien
caaatgtagtagaatataactaagtacagaaag

SEQ ID NO: 225913 - DNA, 33 bp, Homo sapien
cttcctgggacaacaccgtactgatgttaactt

SEQ ID NO: 225914 - DNA, 33 bp, Homo sapien
cttcctgggacaacactgtactgatgttaactt

SEQ ID NO: 225915 - DNA, 33 bp, Homo sapien
tacaaagtcacagttcaaaaaatattgttttgc

SEQ ID NO: 225916 - DNA, 33 bp, Homo sapien
tacaaagtcacagttccaaaaatattgttttgc

SEQ ID NO: 225917 - DNA, 33 bp, Homo sapien
ttaggtaaagaaatgaaaaaggtgagaaatgac

SEQ ID NO: 225918 - DNA, 33 bp, Homo sapien
ttaggtaaagaaatgagaaaggtgagaaatgac

SEQ ID NO: 225919 - DNA, 33 bp, Homo sapien
tgtaggagataatgaaaaagaggtagctacatt

SEQ ID NO: 225920 - DNA, 33 bp, Homo sapien
tgtaggagataatgaagaagaggtagctacatt

SEQ ID NO: 225921 - DNA, 33 bp, Homo sapien
tacagaaatggtcttcactgtagggtctgacaa

SEQ ID NO: 225922 - DNA, 33 bp, Homo sapien
tacagaaatggtcttctctgtagggtctgacaa

SEQ ID NO: 225923 - DNA, 33 bp, Homo sapien
tccccactcagttcagaagagttctgcttttcc

SEQ ID NO: 225924 - DNA, 33 bp, Homo sapien
tccccactcagttcaggagagttctgcttttcc

SEQ ID NO: 225925 - DNA, 33 bp, Homo sapien
acgattacaggaaaacactaccaaacataatga

SEQ ID NO: 225926 - DNA, 33 bp, Homo sapien
acgattacaggaaaacgctaccaaacataatga

SEQ ID NO: 225927 - DNA, 33 bp, Homo sapien
taaatggagataccatcaagtctcttgtggggt

SEQ ID NO: 225928 - DNA, 33 bp, Homo sapien
taaatggagataccattaagtctcttgtggggt

SEQ ID NO: 225929 - DNA, 33 bp, Homo sapien
gttggaaaagtctccaagcactttaaggtgtct

SEQ ID NO: 225930 - DNA, 33 bp, Homo sapien
gttggaaaagtctccatgcactttaaggtgtct

SEQ ID NO: 225931 - DNA, 33 bp, Homo sapien
aatgagttttgaggtcaagcctagaaaacacct

SEQ ID NO: 225932 - DNA, 33 bp, Homo sapien
aatgagttttgaggtcgagcctagaaaacacct

SEQ ID NO: 225933 - DNA, 33 bp, Homo sapien
ttccttatatttttaaaatcatgcagtcacaga

SEQ ID NO: 225934 - DNA, 33 bp, Homo sapien
ttccttatatttttaagatcatgcagtcacaga

SEQ ID NO: 225935 - DNA, 33 bp, Homo sapien
ttggttcacctgggcacactcagtttatataac

SEQ ID NO: 225936 - DNA, 33 bp, Homo sapien
ttggttcacctgggcagactcagtttatataac

SEQ ID NO: 225937 - DNA, 33 bp, Homo sapien
ataatacacacatccacctaaagaaaagcctgg

SEQ ID NO: 225938 - DNA, 33 bp, Homo sapien
ataatacacacatccatctaaagaaaagcctgg

SEQ ID NO: 225939 - DNA, 33 bp, Homo sapien
cacaccttattccacccaaaagctttatcaatt

SEQ ID NO: 225940 - DNA, 33 bp, Homo sapien
cacaccttattccaccgaaaagctttatcaatt

SEQ ID NO: 225941 - DNA, 33 bp, Homo sapien
agcctcattatataacccaggtgcagaacttta

SEQ ID NO: 225942 - DNA, 33 bp, Homo sapien
agcctcattatataacgcaggtgcagaacttta

SEQ ID NO: 225943 - DNA, 33 bp, Homo sapien
catcttacatgcaggaacaggaagaaaagagtg

SEQ ID NO: 225944 - DNA, 33 bp, Homo sapien
catcttacatgcaggagcaggaagaaaagagtg

SEQ ID NO: 225945 - DNA, 33 bp, Homo sapien
aatgtagaaattaagaagttacatcgaacactg

SEQ ID NO: 225946 - DNA, 33 bp, Homo sapien
aatgtagaaattaagacgttacatcgaacactg

SEQ ID NO: 225947 - DNA, 33 bp, Homo sapien
cagctttgtcctgggacgttttaatacagccag

SEQ ID NO: 225948 - DNA, 33 bp, Homo sapien
cagctttgtcctgggatgttttaatacagccag

SEQ ID NO: 225949 - DNA, 33 bp, Homo sapien
aatctggctaatgataagctggcaaaaaatttg

SEQ ID NO: 225950 - DNA, 33 bp, Homo sapien
aatctggctaatgatatgctggcaaaaaatttg

SEQ ID NO: 225951 - DNA, 33 bp, Homo sapien
ggcatctgactacccaaagataattgctgttaa

SEQ ID NO: 225952 - DNA, 33 bp, Homo sapien
ggcatctgactacccagagataattgctgttaa

SEQ ID NO: 225953 - DNA, 33 bp, Homo sapien
gcaggtcctcacattcaattccaaccattaccc

SEQ ID NO: 225954 - DNA, 33 bp, Homo sapien
gcaggtcctcacattcgattccaaccattaccc

SEQ ID NO: 225955 - DNA, 33 bp, Homo sapien
gtttccaatatttagcaatcattcacagcactg

SEQ ID NO: 225956 - DNA, 33 bp, Homo sapien
gtttccaatatttagcgatcattcacagcactg

SEQ ID NO: 225957 - DNA, 33 bp, Homo sapien
taccactcagagacaaccagtattaatatgttt

SEQ ID NO: 225958 - DNA, 33 bp, Homo sapien
taccactcagagacaagcagtattaatatgttt

SEQ ID NO: 225959 - DNA, 33 bp, Homo sapien
ggacttggggatagaacgtcagaagaagaaaaa

SEQ ID NO: 225960 - DNA, 33 bp, Homo sapien
ggacttggggatagaaggtcagaagaagaaaaa

SEQ ID NO: 225961 - DNA, 33 bp, Homo sapien
tttgaactcatggaaaagcagagaatacagtgg

SEQ ID NO: 225962 - DNA, 33 bp, Homo sapien
tttgaactcatggaaaggcagagaatacagtgg

SEQ ID NO: 225963 - DNA, 33 bp, Homo sapien
tccctgccttagagataagtgaaatttggaact

SEQ ID NO: 225964 - DNA, 33 bp, Homo sapien
tccctgccttagagatcagtgaaatttggaact

SEQ ID NO: 225965 - DNA, 33 bp, Homo sapien
tttataggagaggacacctgcaggaactaagca

SEQ ID NO: 225966 - DNA, 33 bp, Homo sapien
tttataggagaggacatctgcaggaactaagca

SEQ ID NO: 225967 - DNA, 33 bp, Homo sapien
tgcaggaactaagcaggcagaaaaacacttttc

SEQ ID NO: 225968 - DNA, 33 bp, Homo sapien
tgcaggaactaagcagtcagaaaaacacttttc

SEQ ID NO: 225969 - DNA, 33 bp, Homo sapien
atttaacagtcaaggacgagcttcaactgggag

SEQ ID NO: 225970 - DNA, 33 bp, Homo sapien
atttaacagtcaaggatgagcttcaactgggag

SEQ ID NO: 225971 - DNA, 33 bp, Homo sapien
gtaaatactgcctctaaaccagagcaaatggaa

SEQ ID NO: 225972 - DNA, 33 bp, Homo sapien
gtaaatactgcctctacaccagagcaaatggaa

SEQ ID NO: 225973 - DNA, 33 bp, Homo sapien
gctgcagatcgctgaaactgcaaagaccacctc

SEQ ID NO: 225974 - DNA, 33 bp, Homo sapien
gctgcagatcgctgaacctgcaaagaccacctc

SEQ ID NO: 225975 - DNA, 33 bp, Homo sapien
ggaaagggaacttggacggaattcggaagaagc

SEQ ID NO: 225976 - DNA, 33 bp, Homo sapien
ggaaagggaacttggatggaattcggaagaagc

SEQ ID NO: 225977 - DNA, 33 bp, Homo sapien
tgtcctggagaataacaaagatgattaacagca

SEQ ID NO: 225978 - DNA, 33 bp, Homo sapien
tgtcctggagaataaccaagatgattaacagca

SEQ ID NO: 225979 - DNA, 33 bp, Homo sapien
gtgctctgttgacgtacgacatccagcagacaa

SEQ ID NO: 225980 - DNA, 33 bp, Homo sapien
gtgctctgttgacgtatgacatccagcagacaa

SEQ ID NO: 225981 - DNA, 33 bp, Homo sapien
aagatgacaatcatcacggagagtcacctctgg

SEQ ID NO: 225982 - DNA, 33 bp, Homo sapien
aagatgacaatcatcagggagagtcacctctgg

SEQ ID NO: 225983 - DNA, 33 bp, Homo sapien
caggccatttccatcacggagagagtgtaatag

SEQ ID NO: 225984 - DNA, 33 bp, Homo sapien
caggccatttccatcatggagagagtgtaatag

SEQ ID NO: 225985 - DNA, 33 bp, Homo sapien
ctgggataggcatccaaatggcaagagtgctcc

SEQ ID NO: 225986 - DNA, 33 bp, Homo sapien
ctgggataggcatccagatggcaagagtgctcc

SEQ ID NO: 225987 - DNA, 33 bp, Homo sapien
ttcctcttcaaaataacgagaggttcagattag

SEQ ID NO: 225988 - DNA, 33 bp, Homo sapien
ttcctcttcaaaataatgagaggttcagattag

SEQ ID NO: 225989 - DNA, 33 bp, Homo sapien
ctgccttgctcttgaactggtaggacttagggc

SEQ ID NO: 225990 - DNA, 33 bp, Homo sapien
ctgccttgctcttgaattggtaggacttagggc

SEQ ID NO: 225991 - DNA, 33 bp, Homo sapien
gaaatgacagcaattacatcggtacaaatgctt

SEQ ID NO: 225992 - DNA, 33 bp, Homo sapien
gaaatgacagcaattatatcggtacaaatgctt

SEQ ID NO: 225993 - DNA, 33 bp, Homo sapien
aaacaacatatttgtaaggcaccttttatgtac

SEQ ID NO: 225994 - DNA, 33 bp, Homo sapien
aaacaacatatttgtagggcaccttttatgtac

SEQ ID NO: 225995 - DNA, 33 bp, Homo sapien
acgcagaggcagcttacagtcaccgtgactgag

SEQ ID NO: 225996 - DNA, 33 bp, Homo sapien
acgcagaggcagcttatagtcaccgtgactgag

SEQ ID NO: 225997 - DNA, 33 bp, Homo sapien
actgtagtacaaagacaagtgtaggcaaattgc

SEQ ID NO: 225998 - DNA, 33 bp, Homo sapien
actgtagtacaaagacgagtgtaggcaaattgc

SEQ ID NO: 225999 - DNA, 33 bp, Homo sapien
ggaggtaggactgagacggagaaacagtcttgg

SEQ ID NO: 226000 - DNA, 33 bp, Homo sapien
ggaggtaggactgagatggagaaacagtcttgg

SEQ ID NO: 226001 - DNA, 33 bp, Homo sapien
ggagaatgagtcagaacgtctggggatgatgat

SEQ ID NO: 226002 - DNA, 33 bp, Homo sapien
ggagaatgagtcagaatgtctggggatgatgat

SEQ ID NO: 226003 - DNA, 33 bp, Homo sapien
atcagcaaactgtgccccttattcccaggatca

SEQ ID NO: 226004 - DNA, 33 bp, Homo sapien
atcagcaaactgtgcctcttattcccaggatca

SEQ ID NO: 226005 - DNA, 33 bp, Homo sapien
ttcaattccatcttaaaaaacatttgtattctt

SEQ ID NO: 226006 - DNA, 33 bp, Homo sapien
ttcaattccatcttaagaaacatttgtattctt

SEQ ID NO: 226007 - DNA, 33 bp, Homo sapien
cttaatgttgattttaccttcattcaatgttta

SEQ ID NO: 226008 - DNA, 33 bp, Homo sapien
cttaatgttgattttatcttcattcaatgttta

SEQ ID NO: 226009 - DNA, 33 bp, Homo sapien
ttaggctgacttctcaatctcactaattatacc

SEQ ID NO: 226010 - DNA, 33 bp, Homo sapien
ttaggctgacttctcagtctcactaattatacc

SEQ ID NO: 226011 - DNA, 33 bp, Homo sapien
aaaaaactgagaagaaagaagaactaaggcaga

SEQ ID NO: 226012 - DNA, 33 bp, Homo sapien
aaaaaactgagaagaaggaagaactaaggcaga

SEQ ID NO: 226013 - DNA, 33 bp, Homo sapien
ttaaagagaagaaagaaatgctcatgtgaccag

SEQ ID NO: 226014 - DNA, 33 bp, Homo sapien
ttaaagagaagaaagacatgctcatgtgaccag

SEQ ID NO: 226015 - DNA, 33 bp, Homo sapien
aactggcttttatgcaacttggtccactccaag

SEQ ID NO: 226016 - DNA, 33 bp, Homo sapien
aactggcttttatgcatcttggtccactccaag

SEQ ID NO: 226017 - DNA, 33 bp, Homo sapien
tgccccaggagataggccaagtttcttgggcac

SEQ ID NO: 226018 - DNA, 33 bp, Homo sapien
tgccccaggagataggtcaagtttcttgggcac

SEQ ID NO: 226019 - DNA, 33 bp, Homo sapien
aagatatgaagggctgcaattaactgagtgtct

SEQ ID NO: 226020 - DNA, 33 bp, Homo sapien
aagatatgaagggctgtaattaactgagtgtct

SEQ ID NO: 226021 - DNA, 33 bp, Homo sapien
gttctcaaggaaggatcaggttccagacaagcc

SEQ ID NO: 226022 - DNA, 33 bp, Homo sapien
gttctcaaggaaggatgaggttccagacaagcc

SEQ ID NO: 226023 - DNA, 33 bp, Homo sapien
atagcatgcagcggtaggtagtgagagtgtatc

SEQ ID NO: 226024 - DNA, 33 bp, Homo sapien
atagcatgcagcggtatgtagtgagagtgtatc

SEQ ID NO: 226025 - DNA, 33 bp, Homo sapien
gtccatggcagagaaactccaatgataaagaaa

SEQ ID NO: 226026 - DNA, 33 bp, Homo sapien
gtccatggcagagaaattccaatgataaagaaa

SEQ ID NO: 226027 - DNA, 33 bp, Homo sapien
catagccacctacccacaagcccactgtatggc

SEQ ID NO: 226028 - DNA, 33 bp, Homo sapien
catagccacctacccagaagcccactgtatggc

SEQ ID NO: 226029 - DNA, 33 bp, Homo sapien
aggcatgatgatgtgacaaatagcagaggcatg

SEQ ID NO: 226030 - DNA, 33 bp, Homo sapien
aggcatgatgatgtgagaaatagcagaggcatg

SEQ ID NO: 226031 - DNA, 33 bp, Homo sapien
gttgcctgggagaaaacaggagaagtcagaaat

SEQ ID NO: 226032 - DNA, 33 bp, Homo sapien
gttgcctgggagaaaataggagaagtcagaaat

SEQ ID NO: 226033 - DNA, 33 bp, Homo sapien
gtctaaaaatgtagcacccgaagctaaactcgg

SEQ ID NO: 226034 - DNA, 33 bp, Homo sapien
gtctaaaaatgtagcatccgaagctaaactcgg

SEQ ID NO: 226035 - DNA, 33 bp, Homo sapien
tcaggccatatcctccactttttatgtccactc

SEQ ID NO: 226036 - DNA, 33 bp, Homo sapien
tcaggccatatcctccgctttttatgtccactc

SEQ ID NO: 226037 - DNA, 33 bp, Homo sapien
tcctgggacatcaagaagtggacaggtaacaaa

SEQ ID NO: 226038 - DNA, 33 bp, Homo sapien
tcctgggacatcaagaggtggacaggtaacaaa

SEQ ID NO: 226039 - DNA, 33 bp, Homo sapien
tcctcttccctgtacacggttctgatagatggc

SEQ ID NO: 226040 - DNA, 33 bp, Homo sapien
tcctcttccctgtacatggttctgatagatggc

SEQ ID NO: 226041 - DNA, 33 bp, Homo sapien
aagaacaaaggagataaaactgagaaaattcca

SEQ ID NO: 226042 - DNA, 33 bp, Homo sapien
aagaacaaaggagatacaactgagaaaattcca

SEQ ID NO: 226043 - DNA, 33 bp, Homo sapien
tcccgtgaaatcttacaaactgttcctactgcc

SEQ ID NO: 226044 - DNA, 33 bp, Homo sapien
tcccgtgaaatcttacgaactgttcctactgcc

SEQ ID NO: 226045 - DNA, 33 bp, Homo sapien
tcataactgctctttccaaatagtaccattgtt

SEQ ID NO: 226046 - DNA, 33 bp, Homo sapien
tcataactgctctttcgaaatagtaccattgtt

SEQ ID NO: 226047 - DNA, 33 bp, Homo sapien
aatttaaccaagcagacatcaatttaaccaagt

SEQ ID NO: 226048 - DNA, 33 bp, Homo sapien
aatttaaccaagcagatatcaatttaaccaagt

SEQ ID NO: 226049 - DNA, 33 bp, Homo sapien
tacaaatgtggcaaaacattatcaattggtaaa

SEQ ID NO: 226050 - DNA, 33 bp, Homo sapien
tacaaatgtggcaaaatattatcaattggtaaa

SEQ ID NO: 226051 - DNA, 33 bp, Homo sapien
cttggcaacttacagggcactgtcaaaattttt

SEQ ID NO: 226052 - DNA, 33 bp, Homo sapien
cttggcaacttacaggtcactgtcaaaattttt

SEQ ID NO: 226053 - DNA, 33 bp, Homo sapien
gtcaggttggtcgtgaactcctgatcttaggtg

SEQ ID NO: 226054 - DNA, 33 bp, Homo sapien
gtcaggttggtcgtgagctcctgatcttaggtg

SEQ ID NO: 226055 - DNA, 33 bp, Homo sapien
tagtcatgcaagtgcacagggatagatggactc

SEQ ID NO: 226056 - DNA, 33 bp, Homo sapien
tagtcatgcaagtgcagagggatagatggactc

SEQ ID NO: 226057 - DNA, 33 bp, Homo sapien
gaaaagtggccggttaaattaattcagttcagt

SEQ ID NO: 226058 - DNA, 33 bp, Homo sapien
gaaaagtggccggttagattaattcagttcagt

SEQ ID NO: 226059 - DNA, 33 bp, Homo sapien
agccaagcctagaatcaatcactgtgagatgga

SEQ ID NO: 226060 - DNA, 33 bp, Homo sapien
agccaagcctagaatctatcactgtgagatgga

SEQ ID NO: 226061 - DNA, 33 bp, Homo sapien
gaaatagttggtagaactgacagtcagaaggcc

SEQ ID NO: 226062 - DNA, 33 bp, Homo sapien
gaaatagttggtagaattgacagtcagaaggcc

SEQ ID NO: 226063 - DNA, 33 bp, Homo sapien
ttggcaagtgccgggaagaacccttggaaggtg

SEQ ID NO: 226064 - DNA, 33 bp, Homo sapien
ttggcaagtgccgggaggaacccttggaaggtg

SEQ ID NO: 226065 - DNA, 33 bp, Homo sapien; identical to SEQ ID NO: 226063

SEQ ID NO: 226066 - DNA, 33 bp, Homo sapien; identical to SEQ ID NO: 226064

SEQ ID NO: 226067 - DNA, 33 bp, Homo sapien
ccctgttcctcttccacgactccacctcaagga

SEQ ID NO: 226068 - DNA, 33 bp, Homo sapien
ccctgttcctcttccatgactccacctcaagga

SEQ ID NO: 226069 - DNA, 33 bp, Homo sapien
cctctaaccagccaaaaggctaacctaaaagat

SEQ ID NO: 226070 - DNA, 33 bp, Homo sapien
cctctaaccagccaaagggctaacctaaaagat

SEQ ID NO: 226071 - DNA, 33 bp, Homo sapien
aagtctttctgcacacaaacccacaggaccaca

SEQ ID NO: 226072 - DNA, 33 bp, Homo sapien
aagtctttctgcacacgaacccacaggaccaca

SEQ ID NO: 226073 - DNA, 33 bp, Homo sapien
cccagggtttcaacaccaaggctgaatgatatg

SEQ ID NO: 226074 - DNA, 33 bp, Homo sapien
cccagggtttcaacactaaggctgaatgatatg

SEQ ID NO: 226075 - DNA, 33 bp, Homo sapien
gcctcaagtgagatagaccatgcttattaaata

SEQ ID NO: 226076 - DNA, 33 bp, Homo sapien
gcctcaagtgagataggccatgcttattaaata

SEQ ID NO: 226077 - DNA, 33 bp, Homo sapien
ctcagtaaccattggaagatagagtcccaatac

SEQ ID NO: 226078 - DNA, 33 bp, Homo sapien
ctcagtaaccattggaggatagagtcccaatac

SEQ ID NO: 226079 - DNA, 33 bp, Homo sapien
tagcagctctctatcaccggcatttcacattaa

SEQ ID NO: 226080 - DNA, 33 bp, Homo sapien
tagcagctctctatcagcggcatttcacattaa

SEQ ID NO: 226081 - DNA, 33 bp, Homo sapien
ctatgctgatttacccactgtcttccaaggccc

SEQ ID NO: 226082 - DNA, 33 bp, Homo sapien
ctatgctgatttacccgctgtcttccaaggccc

SEQ ID NO: 226083 - DNA, 33 bp, Homo sapien
atgactgggggcactacaggttgcaaaaggagc

SEQ ID NO: 226084 - DNA, 33 bp, Homo sapien
atgactgggggcactataggttgcaaaaggagc

SEQ ID NO: 226085 - DNA, 33 bp, Homo sapien
agggtagccctttctccccagcaactgaggagt

SEQ ID NO: 226086 - DNA, 33 bp, Homo sapien
agggtagccctttctctccagcaactgaggagt

SEQ ID NO: 226087 - DNA, 33 bp, Homo sapien
agacttgaagagcaaaatgtttaacttccactt

SEQ ID NO: 226088 - DNA, 33 bp, Homo sapien
agacttgaagagcaaagtgtttaacttccactt

SEQ ID NO: 226089 - DNA, 33 bp, Homo sapien
ttccttccatttttccaccctaccaggtcacac

SEQ ID NO: 226090 - DNA, 33 bp, Homo sapien
ttccttccatttttccgccctaccaggtcacac

SEQ ID NO: 226091 - DNA, 33 bp, Homo sapien
ctcgacctcgggaagacagcagccctccagcct

SEQ ID NO: 226092 - DNA, 33 bp, Homo sapien
ctcgacctcgggaagatagcagccctccagcct

SEQ ID NO: 226093 - DNA, 33 bp, Homo sapien
ggcctgatctccaagccgaattcttccagggct

SEQ ID NO: 226094 - DNA, 33 bp, Homo sapien
ggcctgatctccaagctgaattcttccagggct

SEQ ID NO: 226095 - DNA, 33 bp, Homo sapien
caacacataatcccaaaactgtgcccctcatct

SEQ ID NO: 226096 - DNA, 33 bp, Homo sapien
caacacataatcccaagactgtgcccctcatct

SEQ ID NO: 226097 - DNA, 33 bp, Homo sapien
ggctgctgtaagtgacaagttgtagttgcctgt

SEQ ID NO: 226098 - DNA, 33 bp, Homo sapien
ggctgctgtaagtgaccagttgtagttgcctgt

SEQ ID NO: 226099 - DNA, 33 bp, Homo sapien
ccagcacaaaagagacaaaagtaatctccagga

SEQ ID NO: 226100 - DNA, 33 bp, Homo sapien
ccagcacaaaagagacgaaagtaatctccagga

SEQ ID NO: 226101 - DNA, 33 bp, Homo sapien
gaccctggagagaatgaaattgccttcaaagag

SEQ ID NO: 226102 - DNA, 33 bp, Homo sapien
gaccctggagagaatggaattgccttcaaagag

SEQ ID NO: 226103 - DNA, 33 bp, Homo sapien
cctcaaactgattccaataaccattccagaatc

SEQ ID NO: 226104 - DNA, 33 bp, Homo sapien
cctcaaactgattccagtaaccattccagaatc

SEQ ID NO: 226105 - DNA, 33 bp, Homo sapien
caggatgcaagcaacaagtggagataggcacca

SEQ ID NO: 226106 - DNA, 33 bp, Homo sapien
caggatgcaagcaacaggtggagataggcacca

SEQ ID NO: 226107 - DNA, 33 bp, Homo sapien
gatggggacaaacatgaaacttagcagggtagg

SEQ ID NO: 226108 - DNA, 33 bp, Homo sapien
gatggggacaaacatggaacttagcagggtagg

SEQ ID NO: 226109 - DNA, 33 bp, Homo sapien
tgggttctggttgggaataggagagtgattgcc

SEQ ID NO: 226110 - DNA, 33 bp, Homo sapien
tgggttctggttgggagtaggagagtgattgcc

SEQ ID NO: 226111 - DNA, 33 bp, Homo sapien
agcttacatgcaaagacgaaggaccaaccaggt

SEQ ID NO: 226112 - DNA, 33 bp, Homo sapien
agcttacatgcaaagatgaaggaccaaccaggt

SEQ ID NO: 226113 - DNA, 33 bp, Homo sapien
ccactcccgccaatagcaactctgtcacatttc

SEQ ID NO: 226114 - DNA, 33 bp, Homo sapien
ccactcccgccaatagtaactctgtcacatttc

SEQ ID NO: 226115 - DNA, 33 bp, Homo sapien
cctcgtctcccagggactagagaaaagagcagg

SEQ ID NO: 226116 - DNA, 33 bp, Homo sapien
cctcgtctcccagggattagagaaaagagcagg

SEQ ID NO: 226117 - DNA, 33 bp, Homo sapien
tgccactctcctgaacaactgtttcttaccttc

SEQ ID NO: 226118 - DNA, 33 bp, Homo sapien
tgccactctcctgaacgactgtttcttaccttc

SEQ ID NO: 226119 - DNA, 33 bp, Homo sapien
gggcatagaggacaaaatcttggcagcctgaat

SEQ ID NO: 226120 - DNA, 33 bp, Homo sapien
gggcatagaggacaaagtcttggcagcctgaat

SEQ ID NO: 226121 - DNA, 33 bp, Homo sapien
ccctttcagctccaggcaacaagaaacaccgta

SEQ ID NO: 226122 - DNA, 33 bp, Homo sapien
ccctttcagctccaggtaacaagaaacaccgta

SEQ ID NO: 226123 - DNA, 33 bp, Homo sapien
cacctctatgaagccaaatgatataagcgtctc

SEQ ID NO: 226124 - DNA, 33 bp, Homo sapien
cacctctatgaagccacatgatataagcgtctc

SEQ ID NO: 226125 - DNA, 33 bp, Homo sapien
attgtgcttacgtacacggactgcaaagtcagg

SEQ ID NO: 226126 - DNA, 33 bp, Homo sapien
attgtgcttacgtacatggactgcaaagtcagg

SEQ ID NO: 226127 - DNA, 33 bp, Homo sapien
aggatttagggagaagaagagacccagctttgg

SEQ ID NO: 226128 - DNA, 33 bp, Homo sapien
aggatttagggagaaggagagacccagctttgg

SEQ ID NO: 226129 - DNA, 33 bp, Homo sapien
gcgcaagctctggaccagccaactggggaggct

SEQ ID NO: 226130 - DNA, 33 bp, Homo sapien
gcgcaagctctggaccggccaactggggaggct

SEQ ID NO: 226131 - DNA, 33 bp, Homo sapien
ctgcaggtagagacagcagacccaggttttctg

SEQ ID NO: 226132 - DNA, 33 bp, Homo sapien
ctgcaggtagagacagtagacccaggttttctg

SEQ ID NO: 226133 - DNA, 33 bp, Homo sapien
gtgattctttccgaaaaccctggcctagcgggc

SEQ ID NO: 226134 - DNA, 33 bp, Homo sapien
gtgattctttccgaaagccctggcctagcgggc

SEQ ID NO: 226135 - DNA, 33 bp, Homo sapien
agcaggaatcccttaagagcattctcaggatat

SEQ ID NO: 226136 - DNA, 33 bp, Homo sapien
agcaggaatcccttaatagcattctcaggatat

SEQ ID NO: 226137 - DNA, 33 bp, Homo sapien
gcaggccttgggatccagatttataccaggtgc

SEQ ID NO: 226138 - DNA, 33 bp, Homo sapien
gcaggccttgggatccggatttataccaggtgc

SEQ ID NO: 226139 - DNA, 33 bp, Homo sapien
agcattcccggcaacacgatgcacggcccattt

SEQ ID NO: 226140 - DNA, 33 bp, Homo sapien
agcattcccggcaacatgatgcacggcccattt

SEQ ID NO: 226141 - DNA, 33 bp, Homo sapien
aagcactgtataggaacgataaacaccaaattc

SEQ ID NO: 226142 - DNA, 33 bp, Homo sapien
aagcactgtataggaatgataaacaccaaattc

SEQ ID NO: 226143 - DNA, 33 bp, Homo sapien
gcatcctggtttttcacggaaatttcttccttg

SEQ ID NO: 226144 - DNA, 33 bp, Homo sapien
gcatcctggtttttcatggaaatttcttccttg

SEQ ID NO: 226145 - DNA, 33 bp, Homo sapien
caccatagtaattgaaagccttaggttatataa

SEQ ID NO: 226146 - DNA, 33 bp, Homo sapien
caccatagtaattgaaggccttaggttatataa

SEQ ID NO: 226147 - DNA, 33 bp, Homo sapien
gttgacacactatatcacttattagctctgtgg

SEQ ID NO: 226148 - DNA, 33 bp, Homo sapien
gttgacacactatatcgcttattagctctgtgg

SEQ ID NO: 226149 - DNA, 33 bp, Homo sapien
agaagcctgggccgtccccctgtaatgcaacct

SEQ ID NO: 226150 - DNA, 33 bp, Homo sapien
agaagcctgggccgtctccctgtaatgcaacct

SEQ ID NO: 226151 - DNA, 33 bp, Homo sapien
tatatgttgatacaaacgaaaaagtattgatgg

SEQ ID NO: 226152 - DNA, 33 bp, Homo sapien
tatatgttgatacaaatgaaaaagtattgatgg

SEQ ID NO: 226153 - DNA, 33 bp, Homo sapien
ctcacgaccctttagcacatcctaaaagacctc

SEQ ID NO: 226154 - DNA, 33 bp, Homo sapien
ctcacgaccctttagcgcatcctaaaagacctc

SEQ ID NO: 226155 - DNA, 33 bp, Homo sapien
ttaataaatggtgctacacaaagtggatagaca

SEQ ID NO: 226156 - DNA, 33 bp, Homo sapien
ttaataaatggtgctagacaaagtggatagaca

SEQ ID NO: 226157 - DNA, 33 bp, Homo sapien
ctgttggcatctttcaatcgatcacatcactgt

SEQ ID NO: 226158 - DNA, 33 bp, Homo sapien
ctgttggcatctttcagtcgatcacatcactgt

SEQ ID NO: 226159 - DNA, 33 bp, Homo sapien
ggaaaataggattggaaggaaatgtaagcccta

SEQ ID NO: 226160 - DNA, 33 bp, Homo sapien
ggaaaataggattggagggaaatgtaagcccta

SEQ ID NO: 226161 - DNA, 33 bp, Homo sapien
atgagcattgaatgaaaaaggaatgaccaccac

SEQ ID NO: 226162 - DNA, 33 bp, Homo sapien
atgagcattgaatgaacaaggaatgaccaccac

SEQ ID NO: 226163 - DNA, 33 bp, Homo sapien
attccaatgttagtgaatatctccagcttgagc

SEQ ID NO: 226164 - DNA, 33 bp, Homo sapien
attccaatgttagtgagtatctccagcttgagc

SEQ ID NO: 226165 - DNA, 33 bp, Homo sapien
cactgcaaataattccgctggtttaaaatcaat

SEQ ID NO: 226166 - DNA, 33 bp, Homo sapien
cactgcaaataattcctctggtttaaaatcaat

SEQ ID NO: 226167 - DNA, 33 bp, Homo sapien
gcaatttgtttcaaaaaggaactgtataatgtc

SEQ ID NO: 226168 - DNA, 33 bp, Homo sapien
gcaatttgtttcaaaatggaactgtataatgtc

SEQ ID NO: 226169 - DNA, 33 bp, Homo sapien
tgaatacaagtaaatcccagatagaagtcatta

SEQ ID NO: 226170 - DNA, 33 bp, Homo sapien
tgaatacaagtaaatctcagatagaagtcatta

SEQ ID NO: 226171 - DNA, 33 bp, Homo sapien
gactgaacaaagtgacaaaatagagagcatgga

SEQ ID NO: 226172 - DNA, 33 bp, Homo sapien
gactgaacaaagtgaccaaatagagagcatgga

SEQ ID NO: 226173 - DNA, 33 bp, Homo sapien
aaaatgagtctgaagacaggaactttaactgaa

SEQ ID NO: 226174 - DNA, 33 bp, Homo sapien
aaaatgagtctgaagagaggaactttaactgaa

SEQ ID NO: 226175 - DNA, 33 bp, Homo sapien
tatttccttttgtatgcattctgtagctatttt

SEQ ID NO: 226176 - DNA, 33 bp, Homo sapien
tatttccttttgtatgtattctgtagctatttt

SEQ ID NO: 226177 - DNA, 33 bp, Homo sapien
gtgctgtcagttttcacctggtgcttgccttgg

SEQ ID NO: 226178 - DNA, 33 bp, Homo sapien
gtgctgtcagttttcatctggtgcttgccttgg

SEQ ID NO: 226179 - DNA, 33 bp, Homo sapien
cagacaataactgtgaccaataataaatcaatt

SEQ ID NO: 226180 - DNA, 33 bp, Homo sapien
cagacaataactgtgagcaataataaatcaatt

SEQ ID NO: 226181 - DNA, 33 bp, Homo sapien
aatgtgtcaaaggagaagaatcagagaatcctg

SEQ ID NO: 226182 - DNA, 33 bp, Homo sapien
aatgtgtcaaaggagaggaatcagagaatcctg

SEQ ID NO: 226183 - DNA, 33 bp, Homo sapien
attttcagctagaatacattgcttccaaattca

SEQ ID NO: 226184 - DNA, 33 bp, Homo sapien
attttcagctagaatagattgcttccaaattca

SEQ ID NO: 226185 - DNA, 33 bp, Homo sapien
ccaagtacacaggaagaaaaagttgttcaaact

SEQ ID NO: 226186 - DNA, 33 bp, Homo sapien
ccaagtacacaggaaggaaaagttgttcaaact

SEQ ID NO: 226187 - DNA, 33 bp, Homo sapien
cacccagaacttcatacattgtgtctaatacaa

SEQ ID NO: 226188 - DNA, 33 bp, Homo sapien
cacccagaacttcatatattgtgtctaatacaa

SEQ ID NO: 226189 - DNA, 33 bp, Homo sapien
ctttacctgtgtctaaatgtatcaactattcat

SEQ ID NO: 226190 - DNA, 33 bp, Homo sapien
ctttacctgtgtctaagtgtatcaactattcat

SEQ ID NO: 226191 - DNA, 33 bp, Homo sapien
tgagggaatctgaagtcaatttatgtgacaaaa

SEQ ID NO: 226192 - DNA, 33 bp, Homo sapien
tgagggaatctgaagttaatttatgtgacaaaa

SEQ ID NO: 226193 - DNA, 33 bp, Homo sapien
tcaatgagctcagcaccggaaaaaagcagaacc

SEQ ID NO: 226194 - DNA, 33 bp, Homo sapien
tcaatgagctcagcactggaaaaaagcagaacc

SEQ ID NO: 226195 - DNA, 33 bp, Homo sapien
gatgattttatttcaccgtctttcacaagatga

SEQ ID NO: 226196 - DNA, 33 bp, Homo sapien
gatgattttatttcactgtctttcacaagatga

SEQ ID NO: 226197 - DNA, 33 bp, Homo sapien
cctagtcttctgtgagaaaatacctggtccaac

SEQ ID NO: 226198 - DNA, 33 bp, Homo sapien
cctagtcttctgtgaggaaatacctggtccaac

SEQ ID NO: 226199 - DNA, 33 bp, Homo sapien
atgcagctgtaacaaacgatgagttcatgtcct

SEQ ID NO: 226200 - DNA, 33 bp, Homo sapien
atgcagctgtaacaaaggatgagttcatgtcct

SEQ ID NO: 226201 - DNA, 33 bp, Homo sapien
cttgatgatccacctaatactgccagtgggttg

SEQ ID NO: 226202 - DNA, 33 bp, Homo sapien
cttgatgatccacctagtactgccagtgggttg

SEQ ID NO: 226203 - DNA, 33 bp, Homo sapien
cagccaatactggagcacccaaattcataaaac

SEQ ID NO: 226204 - DNA, 33 bp, Homo sapien
cagccaatactggagcgcccaaattcataaaac

SEQ ID NO: 226205 - DNA, 33 bp, Homo sapien
cttatttcagacaaaaaagattttaatgacaat

SEQ ID NO: 226206 - DNA, 33 bp, Homo sapien
cttatttcagacaaaacagattttaatgacaat

SEQ ID NO: 226207 - DNA, 33 bp, Homo sapien
ccccccactgctttgacggtacatgtgtccaca

SEQ ID NO: 226208 - DNA, 33 bp, Homo sapien
ccccccactgctttgatggtacatgtgtccaca

SEQ ID NO: 226209 - DNA, 33 bp, Homo sapien
gttgcattttataaaaagaatgcctggaaatgc

SEQ ID NO: 226210 - DNA, 33 bp, Homo sapien
gttgcattttataaaaggaatgcctggaaatgc

SEQ ID NO: 226211 - DNA, 33 bp, Homo sapien
agattgctgaaccccaaataatgtgtcactaat

SEQ ID NO: 226212 - DNA, 33 bp, Homo sapien
agattgctgaaccccatataatgtgtcactaat

SEQ ID NO: 226213 - DNA, 33 bp, Homo sapien
ctgagcctgcagaaaactcaggtatccttgcca

SEQ ID NO: 226214 - DNA, 33 bp, Homo sapien
ctgagcctgcagaaaagtcaggtatccttgcca

SEQ ID NO: 226215 - DNA, 33 bp, Homo sapien
taatctaatttaggaaatactatcacagtcaat

SEQ ID NO: 226216 - DNA, 33 bp, Homo sapien
taatctaatttaggaattactatcacagtcaat

SEQ ID NO: 226217 - DNA, 33 bp, Homo sapien
gtggggtaggccagtaccaggtgcctctagtta

SEQ ID NO: 226218 - DNA, 33 bp, Homo sapien
gtggggtaggccagtagcaggtgcctctagtta

SEQ ID NO: 226219 - DNA, 33 bp, Homo sapien
atgactcaatttcaagaaaaatctctgtcctct

SEQ ID NO: 226220 - DNA, 33 bp, Homo sapien
atgactcaatttcaagtaaaatctctgtcctct

SEQ ID NO: 226221 - DNA, 33 bp, Homo sapien
tttgttcagtttggcccgaaagaatacaaaata

SEQ ID NO: 226222 - DNA, 33 bp, Homo sapien
tttgttcagtttggcctgaaagaatacaaaata

SEQ ID NO: 226223 - DNA, 33 bp, Homo sapien
aatttagtttccataccggctgggaaggaacat

SEQ ID NO: 226224 - DNA, 33 bp, Homo sapien
aatttagtttccatactggctgggaaggaacat

SEQ ID NO: 226225 - DNA, 33 bp, Homo sapien
caaatactgtaaatcaatgaccaatatacaatg

SEQ ID NO: 226226 - DNA, 33 bp, Homo sapien
caaatactgtaaatcagtgaccaatatacaatg

SEQ ID NO: 226227 - DNA, 33 bp, Homo sapien
cattactatccattcacaactctcactcccaat

SEQ ID NO: 226228 - DNA, 33 bp, Homo sapien
cattactatccattcagaactctcactcccaat

SEQ ID NO: 226229 - DNA, 33 bp, Homo sapien
agcctatctcaactgaacatttggtttaaatga

SEQ ID NO: 226230 - DNA, 33 bp, Homo sapien
agcctatctcaactgagcatttggtttaaatga

SEQ ID NO: 226231 - DNA, 33 bp, Homo sapien
tctggccattttgtaactgagctccacctcact

SEQ ID NO: 226232 - DNA, 33 bp, Homo sapien
tctggccattttgtaattgagctccacctcact

SEQ ID NO: 226233 - DNA, 33 bp, Homo sapien
cagagctgcttctggacgtctcatctaatgagg

SEQ ID NO: 226234 - DNA, 33 bp, Homo sapien
cagagctgcttctggaggtctcatctaatgagg

SEQ ID NO: 226235 - DNA, 33 bp, Homo sapien
tatatctggatagcaacaatactcaactctgat

SEQ ID NO: 226236 - DNA, 33 bp, Homo sapien
tatatctggatagcaataatactcaactctgat

SEQ ID NO: 226237 - DNA, 33 bp, Homo sapien
tcacaatatccacccaagttcaagaggagggac

SEQ ID NO: 226238 - DNA, 33 bp, Homo sapien
tcacaatatccacccacgttcaagaggagggac

SEQ ID NO: 226239 - DNA, 33 bp, Homo sapien
taaagaaaatgtcttcaaatagattcatttata

SEQ ID NO: 226240 - DNA, 33 bp, Homo sapien
taaagaaaatgtcttccaatagattcatttata

SEQ ID NO: 226241 - DNA, 33 bp, Homo sapien
acagagagaggaattacagtgcaagaaagagga

SEQ ID NO: 226242 - DNA, 33 bp, Homo sapien
acagagagaggaattatagtgcaagaaagagga

SEQ ID NO: 226243 - DNA, 33 bp, Homo sapien
ctcagtaaatgggctgcagtggaaatcccgcat

SEQ ID NO: 226244 - DNA, 33 bp, Homo sapien
ctcagtaaatgggctgtagtggaaatcccgcat

SEQ ID NO: 226245 - DNA, 33 bp, Homo sapien
ttataatttgacctcaggtacacttcagtttga

SEQ ID NO: 226246 - DNA, 33 bp, Homo sapien
ttataatttgacctcatgtacacttcagtttga

SEQ ID NO: 226247 - DNA, 33 bp, Homo sapien
gacacagatctcctaagacctctgtaatttcct

SEQ ID NO: 226248 - DNA, 33 bp, Homo sapien
gacacagatctcctaatacctctgtaatttcct

SEQ ID NO: 226249 - DNA, 33 bp, Homo sapien
tcttctcttgaggacccctttgtaacttgaact

SEQ ID NO: 226250 - DNA, 33 bp, Homo sapien
tcttctcttgaggaccgctttgtaacttgaact

SEQ ID NO: 226251 - DNA, 33 bp, Homo sapien
tctcctaatgtgaatacacagtgtttgaggcag

SEQ ID NO: 226252 - DNA, 33 bp, Homo sapien
tctcctaatgtgaatatacagtgtttgaggcag

SEQ ID NO: 226253 - DNA, 33 bp, Homo sapien
aatcaatgtcccactgaatgccaaactaaagat

SEQ ID NO: 226254 - DNA, 33 bp, Homo sapien
aatcaatgtcccactgtatgccaaactaaagat

SEQ ID NO: 226255 - DNA, 33 bp, Homo sapien
cattcagtgatttgaacagtttatgtattacac

SEQ ID NO: 226256 - DNA, 33 bp, Homo sapien
cattcagtgatttgaatagtttatgtattacac

SEQ ID NO: 226257 - DNA, 33 bp, Homo sapien
ttaagtgttgaagctacaaggatgaacaaaata

SEQ ID NO: 226258 - DNA, 33 bp, Homo sapien
ttaagtgttgaagctataaggatgaacaaaata

SEQ ID NO: 226259 - DNA, 33 bp, Homo sapien
cacagcctcatgtctgaaaaattctgttttctt

SEQ ID NO: 226260 - DNA, 33 bp, Homo sapien
cacagcctcatgtctggaaaattctgttttctt

SEQ ID NO: 226261 - DNA, 33 bp, Homo sapien
tgaaatgtaagggaacaccagcatacaggcttc

SEQ ID NO: 226262 - DNA, 33 bp, Homo sapien
tgaaatgtaagggaacgccagcatacaggcttc

SEQ ID NO: 226263 - DNA, 33 bp, Homo sapien
ttcagtgttctttgatcaaaaagcaagagtgtt

SEQ ID NO: 226264 - DNA, 33 bp, Homo sapien
ttcagtgttctttgatgaaaaagcaagagtgtt

SEQ ID NO: 226265 - DNA, 33 bp, Homo sapien
gatggaaagtcaacacgcaaaatttgttagtta

SEQ ID NO: 226266 - DNA, 33 bp, Homo sapien
gatggaaagtcaacactcaaaatttgttagtta

SEQ ID NO: 226267 - DNA, 33 bp, Homo sapien
tttgttagacagcaaagctaactaacaaatttt

SEQ ID NO: 226268 - DNA, 33 bp, Homo sapien
tttgttagacagcaaatctaactaacaaatttt

SEQ ID NO: 226269 - DNA, 33 bp, Homo sapien
ataacaaaagcctagaaaaaactagtgccattg

SEQ ID NO: 226270 - DNA, 33 bp, Homo sapien
ataacaaaagcctagacaaaactagtgccattg

SEQ ID NO: 226271 - DNA, 33 bp, Homo sapien
ttcttgtctgttttacacttgataaatatggtc

SEQ ID NO: 226272 - DNA, 33 bp, Homo sapien
ttcttgtctgttttacgcttgataaatatggtc

SEQ ID NO: 226273 - DNA, 33 bp, Homo sapien
tttgtacattctcatcacctttgaagtccactc

SEQ ID NO: 226274 - DNA, 33 bp, Homo sapien
tttgtacattctcatcgcctttgaagtccactc

SEQ ID NO: 226275 - DNA, 33 bp, Homo sapien
ggcacagtgcggctaactaatttgtctaaggtc

SEQ ID NO: 226276 - DNA, 33 bp, Homo sapien
ggcacagtgcggctaagtaatttgtctaaggtc

SEQ ID NO: 226277 - DNA, 33 bp, Homo sapien
ttttatgatgagatcaccaaaagtaattacaac

SEQ ID NO: 226278 - DNA, 33 bp, Homo sapien
ttttatgatgagatcagcaaaagtaattacaac

SEQ ID NO: 226279 - DNA, 33 bp, Homo sapien
tgaaagagctctactacgagaactacaagacac

SEQ ID NO: 226280 - DNA, 33 bp, Homo sapien
tgaaagagctctactatgagaactacaagacac

SEQ ID NO: 226281 - DNA, 33 bp, Homo sapien
gactcccttaaataagcagacagagctagacat

SEQ ID NO: 226282 - DNA, 33 bp, Homo sapien
gactcccttaaataaggagacagagctagacat

SEQ ID NO: 226283 - DNA, 33 bp, Homo sapien
cttgctacattaggcactcaatagagcccctaa

SEQ ID NO: 226284 - DNA, 33 bp, Homo sapien
cttgctacattaggcattcaatagagcccctaa

SEQ ID NO: 226285 - DNA, 33 bp, Homo sapien
aaccttgggatttaaacagtcgctctcggatga

SEQ ID NO: 226286 - DNA, 33 bp, Homo sapien
aaccttgggatttaaatagtcgctctcggatga

SEQ ID NO: 226287 - DNA, 33 bp, Homo sapien
cagctgaaagtgctaaatcttcatctctgggca

SEQ ID NO: 226288 - DNA, 33 bp, Homo sapien
cagctgaaagtgctaagtcttcatctctgggca

SEQ ID NO: 226289 - DNA, 33 bp, Homo sapien
ggcagggaccacacatcagcatcagcaatacat

SEQ ID NO: 226290 - DNA, 33 bp, Homo sapien
ggcagggaccacacattagcatcagcaatacat

SEQ ID NO: 226291 - DNA, 33 bp, Homo sapien
gcagtattaacaatcagaaaacctgggctcagc

SEQ ID NO: 226292 - DNA, 33 bp, Homo sapien
gcagtattaacaatcataaaacctgggctcagc

SEQ ID NO: 226293 - DNA, 33 bp, Homo sapien
cactgaattgactaacaagaccaaaatgagaaa

SEQ ID NO: 226294 - DNA, 33 bp, Homo sapien
cactgaattgactaacgagaccaaaatgagaaa

SEQ ID NO: 226295 - DNA, 33 bp, Homo sapien
tttggtcccatgaaaacaaaactcattcaactc

SEQ ID NO: 226296 - DNA, 33 bp, Homo sapien
tttggtcccatgaaaataaaactcattcaactc

SEQ ID NO: 226297 - DNA, 33 bp, Homo sapien
actaatgttcacatcacgtaaaaaccatgcctt

SEQ ID NO: 226298 - DNA, 33 bp, Homo sapien
actaatgttcacatcaggtaaaaaccatgcctt

SEQ ID NO: 226299 - DNA, 33 bp, Homo sapien
ctgcatttattagcaaccacttcgcttaatcag

SEQ ID NO: 226300 - DNA, 33 bp, Homo sapien
ctgcatttattagcaagcacttcgcttaatcag

SEQ ID NO: 226301 - DNA, 33 bp, Homo sapien
atgccctaggggttctcacttctgcagaactgg

SEQ ID NO: 226302 - DNA, 33 bp, Homo sapien
atgccctaggggttcttacttctgcagaactgg

SEQ ID NO: 226303 - DNA, 33 bp, Homo sapien
gtcaccacataaagtaagtcaagtttttccttt

SEQ ID NO: 226304 - DNA, 33 bp, Homo sapien
gtcaccacataaagtacgtcaagtttttccttt

SEQ ID NO: 226305 - DNA, 33 bp, Homo sapien
ggccccagcaaaggaagaaaagggctgctgtct

SEQ ID NO: 226306 - DNA, 33 bp, Homo sapien
ggccccagcaaaggaataaaagggctgctgtct

SEQ ID NO: 226307 - DNA, 33 bp, Homo sapien
ttgcctctgagtggaacaaatgagattcttgag

SEQ ID NO: 226308 - DNA, 33 bp, Homo sapien
ttgcctctgagtggaataaatgagattcttgag

SEQ ID NO: 226309 - DNA, 33 bp, Homo sapien
ctctgaggctcttccaactctcacattccaata

SEQ ID NO: 226310 - DNA, 33 bp, Homo sapien
ctctgaggctcttccagctctcacattccaata

SEQ ID NO: 226311 - DNA, 33 bp, Homo sapien
tggctgatgggtagtcagaatcttcaggcaaaa

SEQ ID NO: 226312 - DNA, 33 bp, Homo sapien
tggctgatgggtagtcggaatcttcaggcaaaa

SEQ ID NO: 226313 - DNA, 33 bp, Homo sapien
tcttgttttacttagcactaatcctactgcatt

SEQ ID NO: 226314 - DNA, 33 bp, Homo sapien
tcttgttttacttagcgctaatcctactgcatt

SEQ ID NO: 226315 - DNA, 33 bp, Homo sapien
tgctagagagatttcagagagattaaggggatt

SEQ ID NO: 226316 - DNA, 33 bp, Homo sapien
tgctagagagatttcatagagattaaggggatt

SEQ ID NO: 226317 - DNA, 33 bp, Homo sapien
cctatttcttagtccacgaaaactcttgtccag

SEQ ID NO: 226318 - DNA, 33 bp, Homo sapien
cctatttcttagtccatgaaaactcttgtccag

SEQ ID NO: 226319 - DNA, 33 bp, Homo sapien
gaaaaatacagccactaaattaagacctcaggg

SEQ ID NO: 226320 - DNA, 33 bp, Homo sapien
gaaaaatacagccactgaattaagacctcaggg

SEQ ID NO: 226321 - DNA, 33 bp, Homo sapien
gtgtgctccataatggccataccaatttacatt

SEQ ID NO: 226322 - DNA, 33 bp, Homo sapien
gtgtgctccataatggtcataccaatttacatt

SEQ ID NO: 226323 - DNA, 33 bp, Homo sapien
ttgcagtttcacctcaatagcatgcctgcattt

SEQ ID NO: 226324 - DNA, 33 bp, Homo sapien
ttgcagtttcacctcattagcatgcctgcattt

SEQ ID NO: 226325 - DNA, 33 bp, Homo sapien
gtctagctgcaacaccagagagattttatttct

SEQ ID NO: 226326 - DNA, 33 bp, Homo sapien
gtctagctgcaacaccggagagattttatttct

SEQ ID NO: 226327 - DNA, 33 bp, Homo sapien
ttgtggatatatttgcagatagaaacaataaga

SEQ ID NO: 226328 - DNA, 33 bp, Homo sapien
ttgtggatatatttgcggatagaaacaataaga

SEQ ID NO: 226329 - DNA, 33 bp, Homo sapien
actctttagaaaatgaggacaaggaccttcaca

SEQ ID NO: 226330 - DNA, 33 bp, Homo sapien
actctttagaaaatgatgacaaggaccttcaca

SEQ ID NO: 226331 - DNA, 33 bp, Homo sapien
ttccaaagtctagtagaagaggtagcaaaaaaa

SEQ ID NO: 226332 - DNA, 33 bp, Homo sapien
ttccaaagtctagtaggagaggtagcaaaaaaa

SEQ ID NO: 226333 - DNA, 33 bp, Homo sapien
ataaatgccttactgagtaggcccttgctacca

SEQ ID NO: 226334 - DNA, 33 bp, Homo sapien
ataaatgccttactgattaggcccttgctacca

SEQ ID NO: 226335 - DNA, 33 bp, Homo sapien
atcaaatctacctgaaagcttattatctctgaa

SEQ ID NO: 226336 - DNA, 33 bp, Homo sapien
atcaaatctacctgaaggcttattatctctgaa

SEQ ID NO: 226337 - DNA, 33 bp, Homo sapien
tttcctgatctccataagacttacctgtgccaa

SEQ ID NO: 226338 - DNA, 33 bp, Homo sapien
tttcctgatctccataggacttacctgtgccaa

SEQ ID NO: 226339 - DNA, 33 bp, Homo sapien
gtgcgcagcctagtgtaaactttttgaaaatgg

SEQ ID NO: 226340 - DNA, 33 bp, Homo sapien
gtgcgcagcctagtgtgaactttttgaaaatgg

SEQ ID NO: 226341 - DNA, 33 bp, Homo sapien
tttttttgagatttgcaataactgaaatttagt

SEQ ID NO: 226342 - DNA, 33 bp, Homo sapien
tttttttgagatttgcgataactgaaatttagt

SEQ ID NO: 226343 - DNA, 33 bp, Homo sapien
atatgtttacaagcagcatctaaggagcaatga

SEQ ID NO: 226344 - DNA, 33 bp, Homo sapien
atatgtttacaagcaggatctaaggagcaatga

SEQ ID NO: 226345 - DNA, 33 bp, Homo sapien
gcaccttttttgatgagccacagtttacttaat

SEQ ID NO: 226346 - DNA, 33 bp, Homo sapien
gcaccttttttgatgatccacagtttacttaat

SEQ ID NO: 226347 - DNA, 33 bp, Homo sapien
atgcctggagcaaaacaaaaatggagacgacct

SEQ ID NO: 226348 - DNA, 33 bp, Homo sapien
atgcctggagcaaaacgaaaatggagacgacct

SEQ ID NO: 226349 - DNA, 33 bp, Homo sapien
aattgaagatgaagtacggtattttattcctct

SEQ ID NO: 226350 - DNA, 33 bp, Homo sapien
aattgaagatgaagtatggtattttattcctct

SEQ ID NO: 226351 - DNA, 33 bp, Homo sapien
aaagagaagccaagaagcttgggaagccttttt

SEQ ID NO: 226352 - DNA, 33 bp, Homo sapien
aaagagaagccaagaatcttgggaagccttttt

SEQ ID NO: 226353 - DNA, 33 bp, Homo sapien
gtgattatgatgatcaacctggtttaggaccca

SEQ ID NO: 226354 - DNA, 33 bp, Homo sapien
gtgattatgatgatcatcctggtttaggaccca

SEQ ID NO: 226355 - DNA, 33 bp, Homo sapien
accataacagcacaaaacaaagtttcccaacct

SEQ ID NO: 226356 - DNA, 33 bp, Homo sapien
accataacagcacaaagcaaagtttcccaacct

SEQ ID NO: 226357 - DNA, 33 bp, Homo sapien
agaaataacactgcaacttacatggtgcttgct

SEQ ID NO: 226358 - DNA, 33 bp, Homo sapien
agaaataacactgcaatttacatggtgcttgct

SEQ ID NO: 226359 - DNA, 33 bp, Homo sapien
ttcctctcccatttaccagcgataggagtggag

SEQ ID NO: 226360 - DNA, 33 bp, Homo sapien
ttcctctcccatttactagcgataggagtggag

SEQ ID NO: 226361 - DNA, 33 bp, Homo sapien
ctcatcttcttggcaacgtgtggtagagtaaga

SEQ ID NO: 226362 - DNA, 33 bp, Homo sapien
ctcatcttcttggcaatgtgtggtagagtaaga

SEQ ID NO: 226363 - DNA, 33 bp, Homo sapien
tagggattcaagtacactatcagttttatacaa

SEQ ID NO: 226364 - DNA, 33 bp, Homo sapien
tagggattcaagtacagtatcagttttatacaa

SEQ ID NO: 226365 - DNA, 33 bp, Homo sapien
gtttacacagccaagcgccttgctctcttgact

SEQ ID NO: 226366 - DNA, 33 bp, Homo sapien
gtttacacagccaagctccttgctctcttgact

SEQ ID NO: 226367 - DNA, 33 bp, Homo sapien
tccctcacattccagaaacataagaaacttctc

SEQ ID NO: 226368 - DNA, 33 bp, Homo sapien
tccctcacattccagagacataagaaacttctc

SEQ ID NO: 226369 - DNA, 33 bp, Homo sapien
cacccctacatacaacaactcggctaatcagcc

SEQ ID NO: 226370 - DNA, 33 bp, Homo sapien
cacccctacatacaacgactcggctaatcagcc

SEQ ID NO: 226371 - DNA, 33 bp, Homo sapien
agtgtgatgcttagcccaaaacagtgagggcct

SEQ ID NO: 226372 - DNA, 33 bp, Homo sapien
agtgtgatgcttagcctaaaacagtgagggcct

SEQ ID NO: 226373 - DNA, 33 bp, Homo sapien
atgtttggttaaggaacgaacaggagacctagc

SEQ ID NO: 226374 - DNA, 33 bp, Homo sapien
atgtttggttaaggaatgaacaggagacctagc

SEQ ID NO: 226375 - DNA, 33 bp, Homo sapien
catgttcatccatctaaagctctttccattagc

SEQ ID NO: 226376 - DNA, 33 bp, Homo sapien
catgttcatccatctagagctctttccattagc

SEQ ID NO: 226377 - DNA, 33 bp, Homo sapien
tgacttcactaacatacgcaaagttatttctga

SEQ ID NO: 226378 - DNA, 33 bp, Homo sapien
tgacttcactaacatatgcaaagttatttctga

SEQ ID NO: 226379 - DNA, 33 bp, Homo sapien
aaccaaatcgactacacagcccagtatagtatt

SEQ ID NO: 226380 - DNA, 33 bp, Homo sapien
aaccaaatcgactacatagcccagtatagtatt

SEQ ID NO: 226381 - DNA, 33 bp, Homo sapien
ctctaggaactatacaccaactttaggaagtaa

SEQ ID NO: 226382 - DNA, 33 bp, Homo sapien
ctctaggaactatacatcaactttaggaagtaa

SEQ ID NO: 226383 - DNA, 33 bp, Homo sapien
gcaaaaggtccaagtcagaaaagcaatgcgaag

SEQ ID NO: 226384 - DNA, 33 bp, Homo sapien
gcaaaaggtccaagtcggaaaagcaatgcgaag

SEQ ID NO: 226385 - DNA, 33 bp, Homo sapien
cctctaagttcaaccaagtgagggaaaactgct

SEQ ID NO: 226386 - DNA, 33 bp, Homo sapien
cctctaagttcaaccacgtgagggaaaactgct

SEQ ID NO: 226387 - DNA, 33 bp, Homo sapien
cagtatcgctcataatcagagaaaggcaaagca

SEQ ID NO: 226388 - DNA, 33 bp, Homo sapien
cagtatcgctcataattagagaaaggcaaagca

SEQ ID NO: 226389 - DNA, 33 bp, Homo sapien
cacctctatgcttccgccatttcccttagcaag

SEQ ID NO: 226390 - DNA, 33 bp, Homo sapien
cacctctatgcttccgtcatttcccttagcaag

SEQ ID NO: 226391 - DNA, 33 bp, Homo sapien
tctgattttcttcactaaactcatctactcttc

SEQ ID NO: 226392 - DNA, 33 bp, Homo sapien
tctgattttcttcactgaactcatctactcttc

SEQ ID NO: 226393 - DNA, 33 bp, Homo sapien
cctccttctaaaactcaagctgattcttaagag

SEQ ID NO: 226394 - DNA, 33 bp, Homo sapien
cctccttctaaaactcgagctgattcttaagag

SEQ ID NO: 226395 - DNA, 33 bp, Homo sapien
tcctggaaagttaggcaatgagtccactaaatg

SEQ ID NO: 226396 - DNA, 33 bp, Homo sapien
tcctggaaagttaggcgatgagtccactaaatg

SEQ ID NO: 226397 - DNA, 33 bp, Homo sapien
actgactggaaagcaacgaggatgtagcgaagc

SEQ ID NO: 226398 - DNA, 33 bp, Homo sapien
actgactggaaagcaatgaggatgtagcgaagc

SEQ ID NO: 226399 - DNA, 33 bp, Homo sapien
taactcaagaggatgaaggacaattgagcttta

SEQ ID NO: 226400 - DNA, 33 bp, Homo sapien
taactcaagaggatgacggacaattgagcttta

SEQ ID NO: 226401 - DNA, 33 bp, Homo sapien
ctctaccaagctatttcaaaaatatcaagtctt

SEQ ID NO: 226402 - DNA, 33 bp, Homo sapien
ctctaccaagctatttgaaaaatatcaagtctt

SEQ ID NO: 226403 - DNA, 33 bp, Homo sapien
aaaggccacacagagacagtgtccctgaaatct

SEQ ID NO: 226404 - DNA, 33 bp, Homo sapien
aaaggccacacagagagagtgtccctgaaatct

SEQ ID NO: 226405 - DNA, 33 bp, Homo sapien
atcaattaaacagtaacgaaatgcataattgta

SEQ ID NO: 226406 - DNA, 33 bp, Homo sapien
atcaattaaacagtaatgaaatgcataattgta

SEQ ID NO: 226407 - DNA, 33 bp, Homo sapien
tggatgctgtgttcaaatcatggcaaagtgaga

SEQ ID NO: 226408 - DNA, 33 bp, Homo sapien
tggatgctgtgttcaagtcatggcaaagtgaga

SEQ ID NO: 226409 - DNA, 33 bp, Homo sapien
tagctcagaattatagaccatttggtttttgtg

SEQ ID NO: 226410 - DNA, 33 bp, Homo sapien
tagctcagaattataggccatttggtttttgtg

SEQ ID NO: 226411 - DNA, 33 bp, Homo sapien
catcctgacctgaagtaaactttgggtacacag

SEQ ID NO: 226412 - DNA, 33 bp, Homo sapien
catcctgacctgaagtgaactttgggtacacag

SEQ ID NO: 226413 - DNA, 33 bp, Homo sapien
aattctaccccgacaacctcagcttctgcctat

SEQ ID NO: 226414 - DNA, 33 bp, Homo sapien
aattctaccccgacaatctcagcttctgcctat

SEQ ID NO: 226415 - DNA, 33 bp, Homo sapien
ctagggacaaaagtaactgacagaactagtgaa

SEQ ID NO: 226416 - DNA, 33 bp, Homo sapien
ctagggacaaaagtaattgacagaactagtgaa

SEQ ID NO: 226417 - DNA, 33 bp, Homo sapien
gatctatagagcattacaccaggagtggacctt

SEQ ID NO: 226418 - DNA, 33 bp, Homo sapien
gatctatagagcattagaccaggagtggacctt

SEQ ID NO: 226419 - DNA, 33 bp, Homo sapien
ggctcagaaacaatacccccaaatatggcattt

SEQ ID NO: 226420 - DNA, 33 bp, Homo sapien
ggctcagaaacaatactcccaaatatggcattt

SEQ ID NO: 226421 - DNA, 33 bp, Homo sapien
ctcccccattaactcaacattctctatcttctc

SEQ ID NO: 226422 - DNA, 33 bp, Homo sapien
ctcccccattaactcagcattctctatcttctc

SEQ ID NO: 226423 - DNA, 33 bp, Homo sapien
ctggcactgaagcactaactatcttgaattctg

SEQ ID NO: 226424 - DNA, 33 bp, Homo sapien
ctggcactgaagcactgactatcttgaattctg

SEQ ID NO: 226425 - DNA, 33 bp, Homo sapien
gttctcttcaccttgccgcaaacattcacacac

SEQ ID NO: 226426 - DNA, 33 bp, Homo sapien
gttctcttcaccttgctgcaaacattcacacac

SEQ ID NO: 226427 - DNA, 33 bp, Homo sapien
agtgatttgcttttgacaatcctgtgaggcagg

SEQ ID NO: 226428 - DNA, 33 bp, Homo sapien
agtgatttgcttttgataatcctgtgaggcagg

SEQ ID NO: 226429 - DNA, 33 bp, Homo sapien
ctcgtgaagcctcaacactgacagagaaatcca

SEQ ID NO: 226430 - DNA, 33 bp, Homo sapien
ctcgtgaagcctcaaccctgacagagaaatcca

SEQ ID NO: 226431 - DNA, 33 bp, Homo sapien
gaagaagatctctgtcacagtacaatgtaaatt

SEQ ID NO: 226432 - DNA, 33 bp, Homo sapien
gaagaagatctctgtcgcagtacaatgtaaatt

SEQ ID NO: 226433 - DNA, 33 bp, Homo sapien
aagatgatgttagtagaaagaagaagatctctg

SEQ ID NO: 226434 - DNA, 33 bp, Homo sapien
aagatgatgttagtaggaagaagaagatctctg

SEQ ID NO: 226435 - DNA, 33 bp, Homo sapien
gccatacaaagatgtcgcctcgggcagatgcat

SEQ ID NO: 226436 - DNA, 33 bp, Homo sapien
gccatacaaagatgtctcctcgggcagatgcat

SEQ ID NO: 226437 - DNA, 33 bp, Homo sapien
aaatgagattcataaaaggaaaaacagttctgg

SEQ ID NO: 226438 - DNA, 33 bp, Homo sapien
aaatgagattcataaatggaaaaacagttctgg

SEQ ID NO: 226439 - DNA, 33 bp, Homo sapien
gaatacttatttataaactaatcaaggcataag

SEQ ID NO: 226440 - DNA, 33 bp, Homo sapien
gaatacttatttataacctaatcaaggcataag

SEQ ID NO: 226441 - DNA, 33 bp, Homo sapien
agcttttttactggagaaattttggcttgaaaa

SEQ ID NO: 226442 - DNA, 33 bp, Homo sapien
agcttttttactggaggaattttggcttgaaaa

SEQ ID NO: 226443 - DNA, 33 bp, Homo sapien
aagcagaaaaactcaaatcagggaggaggaatt

SEQ ID NO: 226444 - DNA, 33 bp, Homo sapien
aagcagaaaaactcaagtcagggaggaggaatt

SEQ ID NO: 226445 - DNA, 33 bp, Homo sapien
ctcttctatttgagaccatttctacaagcagaa

SEQ ID NO: 226446 - DNA, 33 bp, Homo sapien
ctcttctatttgagactatttctacaagcagaa

SEQ ID NO: 226447 - DNA, 33 bp, Homo sapien
agtcagtgaagagaggccacctttgattcaaga

SEQ ID NO: 226448 - DNA, 33 bp, Homo sapien
agtcagtgaagagaggtcacctttgattcaaga

SEQ ID NO: 226449 - DNA, 33 bp, Homo sapien
atgtttgtagtagtaacggcatttttgcagtta

SEQ ID NO: 226450 - DNA, 33 bp, Homo sapien
atgtttgtagtagtaatggcatttttgcagtta

SEQ ID NO: 226451 - DNA, 33 bp, Homo sapien
gaagattgttcaggtaaaaaatagagagatagt

SEQ ID NO: 226452 - DNA, 33 bp, Homo sapien
gaagattgttcaggtagaaaatagagagatagt

SEQ ID NO: 226453 - DNA, 33 bp, Homo sapien
tcacaagacaggaaaacgaggaaaggcttggaa

SEQ ID NO: 226454 - DNA, 33 bp, Homo sapien
tcacaagacaggaaaatgaggaaaggcttggaa

SEQ ID NO: 226455 - DNA, 33 bp, Homo sapien
gggctgtatggtgtaacgaatgatgtttttatt

SEQ ID NO: 226456 - DNA, 33 bp, Homo sapien
gggctgtatggtgtaatgaatgatgtttttatt

SEQ ID NO: 226457 - DNA, 33 bp, Homo sapien
ctagctctgagataagcaaataaactacccagt

SEQ ID NO: 226458 - DNA, 33 bp, Homo sapien
ctagctctgagataagtaaataaactacccagt

SEQ ID NO: 226459 - DNA, 33 bp, Homo sapien
ttactcagattgcaagacaggaataaagcaatg

SEQ ID NO: 226460 - DNA, 33 bp, Homo sapien
ttactcagattgcaagtcaggaataaagcaatg

SEQ ID NO: 226461 - DNA, 33 bp, Homo sapien
ttgcaatctgagtaaaattcacaccactagaaa

SEQ ID NO: 226462 - DNA, 33 bp, Homo sapien
ttgcaatctgagtaaagttcacaccactagaaa

SEQ ID NO: 226463 - DNA, 33 bp, Homo sapien
cctcagaggtctcttccaactttagggtctgtg

SEQ ID NO: 226464 - DNA, 33 bp, Homo sapien
cctcagaggtctcttctaactttagggtctgtg

SEQ ID NO: 226465 - DNA, 33 bp, Homo sapien
ttaagaagtagaagaagattgtcaaggatctca

SEQ ID NO: 226466 - DNA, 33 bp, Homo sapien
ttaagaagtagaagaatattgtcaaggatctca

SEQ ID NO: 226467 - DNA, 33 bp, Homo sapien
acatcattttcctgaccaggaaacctcatgttc

SEQ ID NO: 226468 - DNA, 33 bp, Homo sapien
acatcattttcctgactaggaaacctcatgttc

SEQ ID NO: 226469 - DNA, 33 bp, Homo sapien
ttttgcttcttactcaaagctcttaaccctaac

SEQ ID NO: 226470 - DNA, 33 bp, Homo sapien
ttttgcttcttactcacagctcttaaccctaac

SEQ ID NO: 226471 - DNA, 33 bp, Homo sapien
tgatttgacctgtaccagcccagaaatccagag

SEQ ID NO: 226472 - DNA, 33 bp, Homo sapien
tgatttgacctgtaccggcccagaaatccagag

SEQ ID NO: 226473 - DNA, 33 bp, Homo sapien
gtggcctatgcagtaacgtgagaacaaagtatg

SEQ ID NO: 226474 - DNA, 33 bp, Homo sapien
gtggcctatgcagtaatgtgagaacaaagtatg

SEQ ID NO: 226475 - DNA, 33 bp, Homo sapien
cctccatcacgaacaaaaataatagctaacatt

SEQ ID NO: 226476 - DNA, 33 bp, Homo sapien
cctccatcacgaacaacaataatagctaacatt

SEQ ID NO: 226477 - DNA, 33 bp, Homo sapien
tttttatcattccaaaaagaggaaataaaccaa

SEQ ID NO: 226478 - DNA, 33 bp, Homo sapien
tttttatcattccaaagagaggaaataaaccaa

SEQ ID NO: 226479 - DNA, 33 bp, Homo sapien
gtcttcatttctaaaaatacaaactgctgctgt

SEQ ID NO: 226480 - DNA, 33 bp, Homo sapien
gtcttcatttctaaaactacaaactgctgctgt

SEQ ID NO: 226481 - DNA, 33 bp, Homo sapien
aaattgcctctgaacaccgggtcaagttcctaa

SEQ ID NO: 226482 - DNA, 33 bp, Homo sapien
aaattgcctctgaacatcgggtcaagttcctaa

SEQ ID NO: 226483 - DNA, 33 bp, Homo sapien
tttattgctagactcgctttgctaacattttgt

SEQ ID NO: 226484 - DNA, 33 bp, Homo sapien
tttattgctagactcgttttgctaacattttgt

SEQ ID NO: 226485 - DNA, 33 bp, Homo sapien
taaaaattgtagaaataattaggcagagagaaa

SEQ ID NO: 226486 - DNA, 33 bp, Homo sapien
taaaaattgtagaaatgattaggcagagagaaa

SEQ ID NO: 226487 - DNA, 33 bp, Homo sapien
tcttagtgctgctttacgactctggagtgcagc

SEQ ID NO: 226488 - DNA, 33 bp, Homo sapien
tcttagtgctgctttatgactctggagtgcagc

SEQ ID NO: 226489 - DNA, 33 bp, Homo sapien
tcagaggatagattgcgaggatatgaatatgag

SEQ ID NO: 226490 - DNA, 33 bp, Homo sapien
tcagaggatagattgctaggatatgaatatgag

SEQ ID NO: 226491 - DNA, 33 bp, Homo sapien
aaaactataggatagacagaatttttcatttaa

SEQ ID NO: 226492 - DNA, 33 bp, Homo sapien
aaaactataggatagagagaatttttcatttaa

SEQ ID NO: 226493 - DNA, 33 bp, Homo sapien
attagtcatgaaggaacccaacaaatggcattc

SEQ ID NO: 226494 - DNA, 33 bp, Homo sapien
attagtcatgaaggaatccaacaaatggcattc

SEQ ID NO: 226495 - DNA, 33 bp, Homo sapien
gaagactacagtggaaaagagatctcacagtaa

SEQ ID NO: 226496 - DNA, 33 bp, Homo sapien
gaagactacagtggaacagagatctcacagtaa

SEQ ID NO: 226497 - DNA, 33 bp, Homo sapien
ttggtgagggatcgtacggtatgaaaccccctt

SEQ ID NO: 226498 - DNA, 33 bp, Homo sapien
ttggtgagggatcgtatggtatgaaaccccctt

SEQ ID NO: 226499 - DNA, 33 bp, Homo sapien
tgttaaagctgaatgaacaattaaattttccag

SEQ ID NO: 226500 - DNA, 33 bp, Homo sapien
tgttaaagctgaatgagcaattaaattttccag

SEQ ID NO: 226501 - DNA, 33 bp, Homo sapien
agggcataggtagatgaataaacaaaggtcatt

SEQ ID NO: 226502 - DNA, 33 bp, Homo sapien
agggcataggtagatggataaacaaaggtcatt

SEQ ID NO: 226503 - DNA, 33 bp, Homo sapien
agggatgtggattacaatgggagcccaaacatt

SEQ ID NO: 226504 - DNA, 33 bp, Homo sapien
agggatgtggattacattgggagcccaaacatt

SEQ ID NO: 226505 - DNA, 33 bp, Homo sapien
tgggagtgtcaaagtacgtaatgaagctccctg

SEQ ID NO: 226506 - DNA, 33 bp, Homo sapien
tgggagtgtcaaagtatgtaatgaagctccctg

SEQ ID NO: 226507 - DNA, 33 bp, Homo sapien
cccaggtacacaaaacacaaagcagcagggacc

SEQ ID NO: 226508 - DNA, 33 bp, Homo sapien
cccaggtacacaaaacgcaaagcagcagggacc

SEQ ID NO: 226509 - DNA, 33 bp, Homo sapien
tgtgtttgttgcattcacatatacaggtatgtc

SEQ ID NO: 226510 - DNA, 33 bp, Homo sapien
tgtgtttgttgcattcgcatatacaggtatgtc

SEQ ID NO: 226511 - DNA, 33 bp, Homo sapien
tgataatactgcctagccacttatttaatctga

SEQ ID NO: 226512 - DNA, 33 bp, Homo sapien
tgataatactgcctagtcacttatttaatctga

SEQ ID NO: 226513 - DNA, 33 bp, Homo sapien
caagcaaaagtgacaactggtatcattcaatga

SEQ ID NO: 226514 - DNA, 33 bp, Homo sapien
caagcaaaagtgacaagtggtatcattcaatga

SEQ ID NO: 226515 - DNA, 33 bp, Homo sapien
ttctgttcctaacctcaaaactatggagttgtc

SEQ ID NO: 226516 - DNA, 33 bp, Homo sapien
ttctgttcctaacctcgaaactatggagttgtc

SEQ ID NO: 226517 - DNA, 33 bp, Homo sapien
taaagcataggctttaaattcttttgatagtga

SEQ ID NO: 226518 - DNA, 33 bp, Homo sapien
taaagcataggctttagattcttttgatagtga

SEQ ID NO: 226519 - DNA, 33 bp, Homo sapien
ctattgacatgcaaaccaagaattaactcgtaa

SEQ ID NO: 226520 - DNA, 33 bp, Homo sapien
ctattgacatgcaaacgaagaattaactcgtaa

SEQ ID NO: 226521 - DNA, 33 bp, Homo sapien
tagttcttatgttagagagtacagagaataaag

SEQ ID NO: 226522 - DNA, 33 bp, Homo sapien
tagttcttatgttagatagtacagagaataaag

SEQ ID NO: 226523 - DNA, 33 bp, Homo sapien
cacaaggtgcatccaccacacaatagccagagt

SEQ ID NO: 226524 - DNA, 33 bp, Homo sapien
cacaaggtgcatccactacacaatagccagagt

SEQ ID NO: 226525 - DNA, 33 bp, Homo sapien
aaactgaaagagcacactgtaacatggccactg

SEQ ID NO: 226526 - DNA, 33 bp, Homo sapien
aaactgaaagagcacattgtaacatggccactg

SEQ ID NO: 226527 - DNA, 33 bp, Homo sapien
ctggtggtagctatcactgaggtagatggagag

SEQ ID NO: 226528 - DNA, 33 bp, Homo sapien
ctggtggtagctatcagtgaggtagatggagag

SEQ ID NO: 226529 - DNA, 33 bp, Homo sapien
agtgaaagaattgttagaagatttcttgtgtta

SEQ ID NO: 226530 - DNA, 33 bp, Homo sapien
agtgaaagaattgttataagatttcttgtgtta

SEQ ID NO: 226531 - DNA, 33 bp, Homo sapien
catgtctcagcatcacaattttacatgcttata

SEQ ID NO: 226532 - DNA, 33 bp, Homo sapien
catgtctcagcatcacgattttacatgcttata

SEQ ID NO: 226533 - DNA, 33 bp, Homo sapien
cacccctgatcctgtacaagtagttcatgtgtc

SEQ ID NO: 226534 - DNA, 33 bp, Homo sapien
cacccctgatcctgtagaagtagttcatgtgtc

SEQ ID NO: 226535 - DNA, 33 bp, Homo sapien
ttcattttccagcaatgatgcctactttgcagt

SEQ ID NO: 226536 - DNA, 33 bp, Homo sapien
ttcattttccagcaattatgcctactttgcagt

SEQ ID NO: 226537 - DNA, 33 bp, Homo sapien
gactcttggaataaaacgcaatgtatgaacatt

SEQ ID NO: 226538 - DNA, 33 bp, Homo sapien
gactcttggaataaaatgcaatgtatgaacatt

SEQ ID NO: 226539 - DNA, 33 bp, Homo sapien
ttgttgccacaatacaacactgaaaaaaacaca

SEQ ID NO: 226540 - DNA, 33 bp, Homo sapien
ttgttgccacaatacagcactgaaaaaaacaca

SEQ ID NO: 226541 - DNA, 33 bp, Homo sapien
aagggagaggaaggtaaccatgcagaaagacag

SEQ ID NO: 226542 - DNA, 33 bp, Homo sapien
aagggagaggaaggtatccatgcagaaagacag

SEQ ID NO: 226543 - DNA, 33 bp, Homo sapien
caaggatagtgattgaagtatacagctatcttc

SEQ ID NO: 226544 - DNA, 33 bp, Homo sapien
caaggatagtgattgacgtatacagctatcttc

SEQ ID NO: 226545 - DNA, 33 bp, Homo sapien
actgaaatgctggtaactagaggcctgaggtga

SEQ ID NO: 226546 - DNA, 33 bp, Homo sapien
actgaaatgctggtaattagaggcctgaggtga

SEQ ID NO: 226547 - DNA, 33 bp, Homo sapien
caaaggatgttaagaacaatttcataggaaaag

SEQ ID NO: 226548 - DNA, 33 bp, Homo sapien
caaaggatgttaagaataatttcataggaaaag

SEQ ID NO: 226549 - DNA, 33 bp, Homo sapien
ttcatcaattcaacaaaaattatccactgagtg

SEQ ID NO: 226550 - DNA, 33 bp, Homo sapien
ttcatcaattcaacaacaattatccactgagtg

SEQ ID NO: 226551 - DNA, 33 bp, Homo sapien
gtagtaaatcatagaacatatcaactttgtgtt

SEQ ID NO: 226552 - DNA, 33 bp, Homo sapien
gtagtaaatcatagaagatatcaactttgtgtt

SEQ ID NO: 226553 - DNA, 33 bp, Homo sapien
caaggaaatggaagtaaaagtattgttccagtc

SEQ ID NO: 226554 - DNA, 33 bp, Homo sapien
caaggaaatggaagtataagtattgttccagtc

SEQ ID NO: 226555 - DNA, 33 bp, Homo sapien
ggttgagaaaatagacccctttgaggttttgtc

SEQ ID NO: 226556 - DNA, 33 bp, Homo sapien
ggttgagaaaatagactcctttgaggttttgtc

SEQ ID NO: 226557 - DNA, 33 bp, Homo sapien
tacttgctgacaggggcatgttgaatgaatcct

SEQ ID NO: 226558 - DNA, 33 bp, Homo sapien
tacttgctgacagggggatgttgaatgaatcct

SEQ ID NO: 226559 - DNA, 33 bp, Homo sapien
atgggactttctaacactgtagataccaaggcc

SEQ ID NO: 226560 - DNA, 33 bp, Homo sapien
atgggactttctaacattgtagataccaaggcc

SEQ ID NO: 226561 - DNA, 33 bp, Homo sapien
ctacctcttgtttccaataggcagcacctgtat

SEQ ID NO: 226562 - DNA, 33 bp, Homo sapien
ctacctcttgtttccagtaggcagcacctgtat

SEQ ID NO: 226563 - DNA, 33 bp, Homo sapien
aactttttattttacacgagctgtacatcaaag

SEQ ID NO: 226564 - DNA, 33 bp, Homo sapien
aactttttattttacatgagctgtacatcaaag

SEQ ID NO: 226565 - DNA, 33 bp, Homo sapien
ccagtgttcaatagcacgactatagtaagcaat

SEQ ID NO: 226566 - DNA, 33 bp, Homo sapien
ccagtgttcaatagcatgactatagtaagcaat

SEQ ID NO: 226567 - DNA, 33 bp, Homo sapien
tctgtgcatactaaacagttctccaatagtctc

SEQ ID NO: 226568 - DNA, 33 bp, Homo sapien
tctgtgcatactaaacggttctccaatagtctc

SEQ ID NO: 226569 - DNA, 33 bp, Homo sapien
tgtctgctcatatcaacagtattctactttggc

SEQ ID NO: 226570 - DNA, 33 bp, Homo sapien
tgtctgctcatatcaatagtattctactttggc

SEQ ID NO: 226571 - DNA, 33 bp, Homo sapien
gtctctggctaaaagacgacttatgataaataa

SEQ ID NO: 226572 - DNA, 33 bp, Homo sapien
gtctctggctaaaagatgacttatgataaataa

SEQ ID NO: 226573 - DNA, 33 bp, Homo sapien
tagattttgaagaaggaattgtcaatgtaatgt

SEQ ID NO: 226574 - DNA, 33 bp, Homo sapien
tagattttgaagaaggcattgtcaatgtaatgt

SEQ ID NO: 226575 - DNA, 33 bp, Homo sapien
ttctggggacacaaacggatctaaactcatgtc

SEQ ID NO: 226576 - DNA, 33 bp, Homo sapien
ttctggggacacaaactgatctaaactcatgtc

SEQ ID NO: 226577 - DNA, 33 bp, Homo sapien
gtcatttacgtcttcaatcaaacattttgtgac

SEQ ID NO: 226578 - DNA, 33 bp, Homo sapien
gtcatttacgtcttcattcaaacattttgtgac

SEQ ID NO: 226579 - DNA, 33 bp, Homo sapien
acaagtagatcattccaatgataagtaatgtgt

SEQ ID NO: 226580 - DNA, 33 bp, Homo sapien
acaagtagatcattccgatgataagtaatgtgt

SEQ ID NO: 226581 - DNA, 33 bp, Homo sapien
gacacaatcgtatgccaaaggttgtttcctctc

SEQ ID NO: 226582 - DNA, 33 bp, Homo sapien
gacacaatcgtatgccgaaggttgtttcctctc

SEQ ID NO: 226583 - DNA, 33 bp, Homo sapien
tacgtagtgatgccaaattacatctggggagta

SEQ ID NO: 226584 - DNA, 33 bp, Homo sapien
tacgtagtgatgccaagttacatctggggagta

SEQ ID NO: 226585 - DNA, 33 bp, Homo sapien
gacatctgtgcgctgcagagctaagatttccta

SEQ ID NO: 226586 - DNA, 33 bp, Homo sapien
gacatctgtgcgctgcggagctaagatttccta

SEQ ID NO: 226587 - DNA, 33 bp, Homo sapien
catttttcccccaagaagtaacactctcaatca

SEQ ID NO: 226588 - DNA, 33 bp, Homo sapien
catttttcccccaagatgtaacactctcaatca

SEQ ID NO: 226589 - DNA, 33 bp, Homo sapien
tgaaatgatgccaacacataaaaatgataaata

SEQ ID NO: 226590 - DNA, 33 bp, Homo sapien
tgaaatgatgccaacatataaaaatgataaata

SEQ ID NO: 226591 - DNA, 33 bp, Homo sapien
gaaattttaactaagccaaaggcgacagggcac

SEQ ID NO: 226592 - DNA, 33 bp, Homo sapien
gaaattttaactaagctaaaggcgacagggcac

SEQ ID NO: 226593 - DNA, 33 bp, Homo sapien
ttcaagtaaagggagtaaatttggacaacccag

SEQ ID NO: 226594 - DNA, 33 bp, Homo sapien
ttcaagtaaagggagtcaatttggacaacccag

SEQ ID NO: 226595 - DNA, 33 bp, Homo sapien
tatggaaaatagacacagtacaaactcttcctc

SEQ ID NO: 226596 - DNA, 33 bp, Homo sapien
tatggaaaatagacaccgtacaaactcttcctc

SEQ ID NO: 226597 - DNA, 33 bp, Homo sapien
ttgtctttgtatttcaaaaatgcttctttactg

SEQ ID NO: 226598 - DNA, 33 bp, Homo sapien
ttgtctttgtatttcagaaatgcttctttactg

SEQ ID NO: 226599 - DNA, 33 bp, Homo sapien
tgtctaaggtttcccaatacaatcctatgtggc

SEQ ID NO: 226600 - DNA, 33 bp, Homo sapien
tgtctaaggtttcccagtacaatcctatgtggc

SEQ ID NO: 226601 - DNA, 33 bp, Homo sapien
actaggacaaaatacacaccacagagttcactg

SEQ ID NO: 226602 - DNA, 33 bp, Homo sapien
actaggacaaaatacataccacagagttcactg

SEQ ID NO: 226603 - DNA, 33 bp, Homo sapien
agtgtaatgacttccccggctatactcactctg

SEQ ID NO: 226604 - DNA, 33 bp, Homo sapien
agtgtaatgacttccctggctatactcactctg

SEQ ID NO: 226605 - DNA, 33 bp, Homo sapien
gtccccaggtatcaaacctaatgcccactagtt

SEQ ID NO: 226606 - DNA, 33 bp, Homo sapien
gtccccaggtatcaaatctaatgcccactagtt

SEQ ID NO: 226607 - DNA, 33 bp, Homo sapien
aatgaggtcacgtggacgaattgaaagatagtg

SEQ ID NO: 226608 - DNA, 33 bp, Homo sapien
aatgaggtcacgtggatgaattgaaagatagtg

SEQ ID NO: 226609 - DNA, 33 bp, Homo sapien
gtttacttagcccacaatgctcaatccctcgtg

SEQ ID NO: 226610 - DNA, 33 bp, Homo sapien
gtttacttagcccacagtgctcaatccctcgtg

SEQ ID NO: 226611 - DNA, 33 bp, Homo sapien
tgtttctggatttgtcaccgtactcgtttccat

SEQ ID NO: 226612 - DNA, 33 bp, Homo sapien
tgtttctggatttgtcgccgtactcgtttccat

SEQ ID NO: 226613 - DNA, 33 bp, Homo sapien
agaacctagagtaagaaaaagtgacttgaggca

SEQ ID NO: 226614 - DNA, 33 bp, Homo sapien
agaacctagagtaagagaaagtgacttgaggca

SEQ ID NO: 226615 - DNA, 33 bp, Homo sapien
gggggtggttggttagcaggtacagatatacag

SEQ ID NO: 226616 - DNA, 33 bp, Homo sapien
gggggtggttggttagtaggtacagatatacag

SEQ ID NO: 226617 - DNA, 33 bp, Homo sapien
ttaatatattgttggaatcaccttgctaaaaat

SEQ ID NO: 226618 - DNA, 33 bp, Homo sapien
ttaatatattgttggattcaccttgctaaaaat

SEQ ID NO: 226619 - DNA, 33 bp, Homo sapien
gttagcaattcgtctacctgttttcaaggtagc

SEQ ID NO: 226620 - DNA, 33 bp, Homo sapien
gttagcaattcgtctatctgttttcaaggtagc

SEQ ID NO: 226621 - DNA, 33 bp, Homo sapien
agcacttactatatgcaagaaaaacacatttta

SEQ ID NO: 226622 - DNA, 33 bp, Homo sapien
agcacttactatatgcgagaaaaacacatttta

SEQ ID NO: 226623 - DNA, 33 bp, Homo sapien
ttaagggcaaatttgacggagtaataattctct

SEQ ID NO: 226624 - DNA, 33 bp, Homo sapien
ttaagggcaaatttgatggagtaataattctct

SEQ ID NO: 226625 - DNA, 33 bp, Homo sapien
aatcacaaaagctagaaccacagtctctttctc

SEQ ID NO: 226626 - DNA, 33 bp, Homo sapien
aatcacaaaagctagagccacagtctctttctc

SEQ ID NO: 226627 - DNA, 33 bp, Homo sapien
ttctgaaagacagtcaagtaaaacgaccaccaa

SEQ ID NO: 226628 - DNA, 33 bp, Homo sapien
ttctgaaagacagtcaggtaaaacgaccaccaa

SEQ ID NO: 226629 - DNA, 33 bp, Homo sapien
tctcagatggttcacagggttctatgggaaaac

SEQ ID NO: 226630 - DNA, 33 bp, Homo sapien
tctcagatggttcacatggttctatgggaaaac

SEQ ID NO: 226631 - DNA, 33 bp, Homo sapien
ctttttaatatgggggcagtaacagaaggagat

SEQ ID NO: 226632 - DNA, 33 bp, Homo sapien
ctttttaatatgggggtagtaacagaaggagat

SEQ ID NO: 226633 - DNA, 33 bp, Homo sapien
cccatctcaaagataaactcagctaaacatatc

SEQ ID NO: 226634 - DNA, 33 bp, Homo sapien
cccatctcaaagataagctcagctaaacatatc

SEQ ID NO: 226635 - DNA, 33 bp, Homo sapien
cagcattactgtgtcacgttctgcatatttgct

SEQ ID NO: 226636 - DNA, 33 bp, Homo sapien
cagcattactgtgtcatgttctgcatatttgct

SEQ ID NO: 226637 - DNA, 33 bp, Homo sapien
caatctgtaagtatcaaacaaacaaacaaataa

SEQ ID NO: 226638 - DNA, 33 bp, Homo sapien
caatctgtaagtatcagacaaacaaacaaataa

SEQ ID NO: 226639 - DNA, 33 bp, Homo sapien
cttttttagtaatagaacggatccgatttcctt

SEQ ID NO: 226640 - DNA, 33 bp, Homo sapien
cttttttagtaatagatcggatccgatttcctt

SEQ ID NO: 226641 - DNA, 33 bp, Homo sapien
caggcagggtgtaagaagtaagttggagaaaaa

SEQ ID NO: 226642 - DNA, 33 bp, Homo sapien
caggcagggtgtaagaggtaagttggagaaaaa

SEQ ID NO: 226643 - DNA, 33 bp, Homo sapien
ctttcagatgttcagggagtatttcaacaatcc

SEQ ID NO: 226644 - DNA, 33 bp, Homo sapien
ctttcagatgttcaggtagtatttcaacaatcc

SEQ ID NO: 226645 - DNA, 33 bp, Homo sapien
gcactgccatagtcttcaacaccaatgaatatg

SEQ ID NO: 226646 - DNA, 33 bp, Homo sapien
gcactgccatagtctttaacaccaatgaatatg

SEQ ID NO: 226647 - DNA, 33 bp, Homo sapien
gcttcctgttgaataaggtatatctgtcaatag

SEQ ID NO: 226648 - DNA, 33 bp, Homo sapien
gcttcctgttgaataatgtatatctgtcaatag

SEQ ID NO: 226649 - DNA, 33 bp, Homo sapien
gacactaaccagcaaacgagtgttggtgtaaga

SEQ ID NO: 226650 - DNA, 33 bp, Homo sapien
gacactaaccagcaaatgagtgttggtgtaaga

SEQ ID NO: 226651 - DNA, 33 bp, Homo sapien
tcatttctttggtctccatcaaacgaggaccct

SEQ ID NO: 226652 - DNA, 33 bp, Homo sapien
tcatttctttggtctctatcaaacgaggaccct

SEQ ID NO: 226653 - DNA, 33 bp, Homo sapien
gaatcttgccatcccaatcatgaaaagaaactg

SEQ ID NO: 226654 - DNA, 33 bp, Homo sapien
gaatcttgccatcccagtcatgaaaagaaactg

SEQ ID NO: 226655 - DNA, 33 bp, Homo sapien
tgtgggttcaggataaatatcggtaatacaaga

SEQ ID NO: 226656 - DNA, 33 bp, Homo sapien
tgtgggttcaggataagtatcggtaatacaaga

SEQ ID NO: 226657 - DNA, 33 bp, Homo sapien
cagggctctcttctaacgcacaagggcccgtga

SEQ ID NO: 226658 - DNA, 33 bp, Homo sapien
cagggctctcttctaatgcacaagggcccgtga

SEQ ID NO: 226659 - DNA, 33 bp, Homo sapien
tgtatgcctgaacaccaaagtcaccctcagtgg

SEQ ID NO: 226660 - DNA, 33 bp, Homo sapien
tgtatgcctgaacaccgaagtcaccctcagtgg

SEQ ID NO: 226661 - DNA, 33 bp, Homo sapien
tatctcaaaagtaaagcatttcttagtccatca

SEQ ID NO: 226662 - DNA, 33 bp, Homo sapien
tatctcaaaagtaaagtatttcttagtccatca

SEQ ID NO: 226663 - DNA, 33 bp, Homo sapien
atttaaacattgtcttaaaagtagctgacctaa

SEQ ID NO: 226664 - DNA, 33 bp, Homo sapien
atttaaacattgtcttgaaagtagctgacctaa

SEQ ID NO: 226665 - DNA, 33 bp, Homo sapien
ttttggttcaactcaacttctgatcaagggcaa

SEQ ID NO: 226666 - DNA, 33 bp, Homo sapien
ttttggttcaactcaatttctgatcaagggcaa

SEQ ID NO: 226667 - DNA, 33 bp, Homo sapien
gctggaaaatccttaccatgactgtagtgtgtt

SEQ ID NO: 226668 - DNA, 33 bp, Homo sapien
gctggaaaatccttactatgactgtagtgtgtt

SEQ ID NO: 226669 - DNA, 33 bp, Homo sapien
aacctaacaaaagcgaatagagaaactggcaaa

SEQ ID NO: 226670 - DNA, 33 bp, Homo sapien
aacctaacaaaagcgattagagaaactggcaaa

SEQ ID NO: 226671 - DNA, 33 bp, Homo sapien
attatgcaccaaattgccaaagattttcaaagt

SEQ ID NO: 226672 - DNA, 33 bp, Homo sapien
attatgcaccaaattggcaaagattttcaaagt

SEQ ID NO: 226673 - DNA, 33 bp, Homo sapien
ctacctaatatctttacatccttacctcaaaac

SEQ ID NO: 226674 - DNA, 33 bp, Homo sapien
ctacctaatatctttatatccttacctcaaaac

SEQ ID NO: 226675 - DNA, 33 bp, Homo sapien
catgcttctagtcttacggttttggtcaccact

SEQ ID NO: 226676 - DNA, 33 bp, Homo sapien
catgcttctagtcttatggttttggtcaccact

SEQ ID NO: 226677 - DNA, 33 bp, Homo sapien
ttaaatggattctccaagatggaaggtgcaggt

SEQ ID NO: 226678 - DNA, 33 bp, Homo sapien
ttaaatggattctccaggatggaaggtgcaggt

SEQ ID NO: 226679 - DNA, 33 bp, Homo sapien
tttataatgtagaaaacgagctagggaagaaag

SEQ ID NO: 226680 - DNA, 33 bp, Homo sapien
tttataatgtagaaaaggagctagggaagaaag

SEQ ID NO: 226681 - DNA, 33 bp, Homo sapien
ttcgggcacctattgaggaaagtaaggcagtct

SEQ ID NO: 226682 - DNA, 33 bp, Homo sapien
ttcgggcacctattgatgaaagtaaggcagtct

SEQ ID NO: 226683 - DNA, 33 bp, Homo sapien
aacgaggccttgggaaacatctttattgttgaa

SEQ ID NO: 226684 - DNA, 33 bp, Homo sapien
aacgaggccttgggaagcatctttattgttgaa

SEQ ID NO: 226685 - DNA, 33 bp, Homo sapien
aacaggggacagcatgaaaacaccaagtgaaga

SEQ ID NO: 226686 - DNA, 33 bp, Homo sapien
aacaggggacagcatggaaacaccaagtgaaga

SEQ ID NO: 226687 - DNA, 33 bp, Homo sapien
taaaatgacctcttcaatctcaacagagaatat

SEQ ID NO: 226688 - DNA, 33 bp, Homo sapien
taaaatgacctcttcagtctcaacagagaatat

SEQ ID NO: 226689 - DNA, 33 bp, Homo sapien
tgggcatttattcctcgaatttccacaaccagg

SEQ ID NO: 226690 - DNA, 33 bp, Homo sapien
tgggcatttattcctctaatttccacaaccagg

SEQ ID NO: 226691 - DNA, 33 bp, Homo sapien
gcaatgcattacagggaaaattatttatgaaac

SEQ ID NO: 226692 - DNA, 33 bp, Homo sapien
gcaatgcattacaggggaaattatttatgaaac

SEQ ID NO: 226693 - DNA, 33 bp, Homo sapien
ctatttcctttcaacaaaatatttccttatagt

SEQ ID NO: 226694 - DNA, 33 bp, Homo sapien
ctatttcctttcaacagaatatttccttatagt

SEQ ID NO: 226695 - DNA, 33 bp, Homo sapien
tgtgttgttaaaaacacgatccacaaagccata

SEQ ID NO: 226696 - DNA, 33 bp, Homo sapien
tgtgttgttaaaaacatgatccacaaagccata

SEQ ID NO: 226697 - DNA, 33 bp, Homo sapien
tgtttcttaaacatgaactaaagaaatctttgt

SEQ ID NO: 226698 - DNA, 33 bp, Homo sapien
tgtttcttaaacatgagctaaagaaatctttgt

SEQ ID NO: 226699 - DNA, 33 bp, Homo sapien
actcacaccggggccacgcagatgcaattcacc

SEQ ID NO: 226700 - DNA, 33 bp, Homo sapien
actcacaccggggccatgcagatgcaattcacc

SEQ ID NO: 226701 - DNA, 33 bp, Homo sapien
aatatacattatgaagcagacattgcaaagtat

SEQ ID NO: 226702 - DNA, 33 bp, Homo sapien
aatatacattatgaagtagacattgcaaagtat

SEQ ID NO: 226703 - DNA, 33 bp, Homo sapien
ggccacgttattaaaaccaagagagaacataaa

SEQ ID NO: 226704 - DNA, 33 bp, Homo sapien
ggccacgttattaaaatcaagagagaacataaa

SEQ ID NO: 226705 - DNA, 33 bp, Homo sapien
gaaagtaactataaacaagcaatttgaaagtag

SEQ ID NO: 226706 - DNA, 33 bp, Homo sapien
gaaagtaactataaacgagcaatttgaaagtag

SEQ ID NO: 226707 - DNA, 33 bp, Homo sapien
tataatgaaagaagaaatgccttcctctctctc

SEQ ID NO: 226708 - DNA, 33 bp, Homo sapien
tataatgaaagaagaagtgccttcctctctctc

SEQ ID NO: 226709 - DNA, 33 bp, Homo sapien
tctgcctcatcatacaatacaaacatgacccct

SEQ ID NO: 226710 - DNA, 33 bp, Homo sapien
tctgcctcatcatacactacaaacatgacccct

SEQ ID NO: 226711 - DNA, 33 bp, Homo sapien
tcctcataggtagaaactgcaataaaggtcaac

SEQ ID NO: 226712 - DNA, 33 bp, Homo sapien
tcctcataggtagaaattgcaataaaggtcaac

SEQ ID NO: 226713 - DNA, 33 bp, Homo sapien
tgtaactgtgacactgaagcttttagagcacag

SEQ ID NO: 226714 - DNA, 33 bp, Homo sapien
tgtaactgtgacactgcagcttttagagcacag

SEQ ID NO: 226715 - DNA, 33 bp, Homo sapien
caaccataaagaatcaagaacctgcagtgaagg

SEQ ID NO: 226716 - DNA, 33 bp, Homo sapien
caaccataaagaatcaggaacctgcagtgaagg

SEQ ID NO: 226717 - DNA, 33 bp, Homo sapien
tatggttggacatagaagctcccgggaccctgc

SEQ ID NO: 226718 - DNA, 33 bp, Homo sapien
tatggttggacatagaggctcccgggaccctgc

SEQ ID NO: 226719 - DNA, 33 bp, Homo sapien; identical to SEQ ID NO: 226717

SEQ ID NO: 226720 - DNA, 33 bp, Homo sapien; identical to SEQ ID NO: 226718

SEQ ID NO: 226721 - DNA, 33 bp, Homo sapien
atttagctatgaccgccgagttaagattactga

SEQ ID NO: 226722 - DNA, 33 bp, Homo sapien
atttagctatgaccgctgagttaagattactga

SEQ ID NO: 226723 - DNA, 33 bp, Homo sapien
atcgcgtgtgctttccaaagtatattagttgct

SEQ ID NO: 226724 - DNA, 33 bp, Homo sapien
atcgcgtgtgctttccgaagtatattagttgct

SEQ ID NO: 226725 - DNA, 33 bp, Homo sapien
atataactacacttaccgaatttctgacttgtt

SEQ ID NO: 226726 - DNA, 33 bp, Homo sapien
atataactacacttactgaatttctgacttgtt

SEQ ID NO: 226727 - DNA, 33 bp, Homo sapien
tgcaaaggactatgccaacgctgggttttctgt

SEQ ID NO: 226728 - DNA, 33 bp, Homo sapien
tgcaaaggactatgccgacgctgggttttctgt

SEQ ID NO: 226729 - DNA, 33 bp, Homo sapien
actaggaactggcttacgcattaaaaaattatg

SEQ ID NO: 226730 - DNA, 33 bp, Homo sapien
actaggaactggcttatgcattaaaaaattatg

SEQ ID NO: 226731 - DNA, 33 bp, Homo sapien
tagacatctagtttcccgaaaatgtgaaattcg

SEQ ID NO: 226732 - DNA, 33 bp, Homo sapien
tagacatctagtttcctgaaaatgtgaaattcg

SEQ ID NO: 226733 - DNA, 33 bp, Homo sapien
cccttgaggccatttccaggctggttttgctgc

SEQ ID NO: 226734 - DNA, 33 bp, Homo sapien
cccttgaggccatttctaggctggttttgctgc

SEQ ID NO: 226735 - DNA, 33 bp, Homo sapien
cttaactgtttttgccacttacactctttttgc

SEQ ID NO: 226736 - DNA, 33 bp, Homo sapien
cttaactgtttttgcctcttacactctttttgc

SEQ ID NO: 226737 - DNA, 33 bp, Homo sapien
ctatgttcctaggacacaaggcatctatctaca

SEQ ID NO: 226738 - DNA, 33 bp, Homo sapien
ctatgttcctaggacagaaggcatctatctaca

SEQ ID NO: 226739 - DNA, 33 bp, Homo sapien
atctgttccaatcctaaaggaaatgactcagct

SEQ ID NO: 226740 - DNA, 33 bp, Homo sapien
atctgttccaatcctagaggaaatgactcagct

SEQ ID NO: 226741 - DNA, 33 bp, Homo sapien
tggcaataatggttaacgaattgagcaacatca

SEQ ID NO: 226742 - DNA, 33 bp, Homo sapien
tggcaataatggttaatgaattgagcaacatca

SEQ ID NO: 226743 - DNA, 33 bp, Homo sapien
aggagaattataaatacctgccctagtaaactc

SEQ ID NO: 226744 - DNA, 33 bp, Homo sapien
aggagaattataaatatctgccctagtaaactc

SEQ ID NO: 226745 - DNA, 33 bp, Homo sapien
tttgtagagaaaattcaagttcttcaatttagc

SEQ ID NO: 226746 - DNA, 33 bp, Homo sapien
tttgtagagaaaattcgagttcttcaatttagc

SEQ ID NO: 226747 - DNA, 33 bp, Homo sapien
taatcttcctttacccagcacgtgttactcctg

SEQ ID NO: 226748 - DNA, 33 bp, Homo sapien
taatcttcctttacccggcacgtgttactcctg

SEQ ID NO: 226749 - DNA, 33 bp, Homo sapien
aggatttgagtagcaaacaccttctttttgtct

SEQ ID NO: 226750 - DNA, 33 bp, Homo sapien
aggatttgagtagcaatcaccttctttttgtct

SEQ ID NO: 226751 - DNA, 33 bp, Homo sapien
caacctcttttgttggacaggcaatatctctgt

SEQ ID NO: 226752 - DNA, 33 bp, Homo sapien
caacctcttttgttgggcaggcaatatctctgt

SEQ ID NO: 226753 - DNA, 33 bp, Homo sapien
atcaaatttcattataaccatgagcatggctgt

SEQ ID NO: 226754 - DNA, 33 bp, Homo sapien
atcaaatttcattatatccatgagcatggctgt

SEQ ID NO: 226755 - DNA, 33 bp, Homo sapien
acttgctaggtaaaaagatcaagtatgttttct

SEQ ID NO: 226756 - DNA, 33 bp, Homo sapien
acttgctaggtaaaaatatcaagtatgttttct

SEQ ID NO: 226757 - DNA, 33 bp, Homo sapien
actcagattttacacacaattgcttaagaggag

SEQ ID NO: 226758 - DNA, 33 bp, Homo sapien
actcagattttacacagaattgcttaagaggag

SEQ ID NO: 226759 - DNA, 33 bp, Homo sapien
ccacttcttcatcataaatttatcgtgcaactg

SEQ ID NO: 226760 - DNA, 33 bp, Homo sapien
ccacttcttcatcatatatttatcgtgcaactg

SEQ ID NO: 226761 - DNA, 33 bp, Homo sapien
aaggacccggtatgtcaacgacttgagaaacat

SEQ ID NO: 226762 - DNA, 33 bp, Homo sapien
aaggacccggtatgtccacgacttgagaaacat

SEQ ID NO: 226763 - DNA, 33 bp, Homo sapien
tcttagctcagtaatcacctcactgtggccccc

SEQ ID NO: 226764 - DNA, 33 bp, Homo sapien
tcttagctcagtaatcgcctcactgtggccccc

SEQ ID NO: 226765 - DNA, 33 bp, Homo sapien
atctccaagccagatacggaagccaactatgga

SEQ ID NO: 226766 - DNA, 33 bp, Homo sapien
atctccaagccagatatggaagccaactatgga

SEQ ID NO: 226767 - DNA, 33 bp, Homo sapien
acacctagcctctacagtatagcctattgctcc

SEQ ID NO: 226768 - DNA, 33 bp, Homo sapien
acacctagcctctacattatagcctattgctcc

SEQ ID NO: 226769 - DNA, 33 bp, Homo sapien
aggaagtataatgctgacacctacttggcttct

SEQ ID NO: 226770 - DNA, 33 bp, Homo sapien
aggaagtataatgctggcacctacttggcttct

SEQ ID NO: 226771 - DNA, 33 bp, Homo sapien
ggagacattttcctcacggtaatggggattaac

SEQ ID NO: 226772 - DNA, 33 bp, Homo sapien
ggagacattttcctcatggtaatggggattaac

SEQ ID NO: 226773 - DNA, 33 bp, Homo sapien
ttcatccttttaagaacgttctcctcaattgtc

SEQ ID NO: 226774 - DNA, 33 bp, Homo sapien
ttcatccttttaagaatgttctcctcaattgtc

SEQ ID NO: 226775 - DNA, 33 bp, Homo sapien
gcagatggatgtttaaaacttttcaaagtagtt

SEQ ID NO: 226776 - DNA, 33 bp, Homo sapien
gcagatggatgtttaacacttttcaaagtagtt

SEQ ID NO: 226777 - DNA, 33 bp, Homo sapien
gtatttactgagaaaagaagccacattttactg

SEQ ID NO: 226778 - DNA, 33 bp, Homo sapien
gtatttactgagaaaataagccacattttactg

SEQ ID NO: 226779 - DNA, 33 bp, Homo sapien
aatgtattccctggcacctatgagtatctctgg

SEQ ID NO: 226780 - DNA, 33 bp, Homo sapien
aatgtattccctggcatctatgagtatctctgg

SEQ ID NO: 226781 - DNA, 33 bp, Homo sapien
gggcctcaaaaaggaaactatctctcagaaaat

SEQ ID NO: 226782 - DNA, 33 bp, Homo sapien
gggcctcaaaaaggaatctatctctcagaaaat

SEQ ID NO: 226783 - DNA, 33 bp, Homo sapien
ggcttagtaacctctccatctaactcatttctt

SEQ ID NO: 226784 - DNA, 33 bp, Homo sapien
ggcttagtaacctctctatctaactcatttctt

SEQ ID NO: 226785 - DNA, 33 bp, Homo sapien
caaattctagctcttcaacatttgacaatactg

SEQ ID NO: 226786 - DNA, 33 bp, Homo sapien
caaattctagctcttcgacatttgacaatactg

SEQ ID NO: 226787 - DNA, 33 bp, Homo sapien
tgttccaacagttgtaagagtgccacattcatg

SEQ ID NO: 226788 - DNA, 33 bp, Homo sapien
tgttccaacagttgtatgagtgccacattcatg

SEQ ID NO: 226789 - DNA, 33 bp, Homo sapien
gctgaaaaaggcagggccataggtgccaaggga

SEQ ID NO: 226790 - DNA, 33 bp, Homo sapien
gctgaaaaaggcagggtcataggtgccaaggga

SEQ ID NO: 226791 - DNA, 33 bp, Homo sapien
attattgtgagctaaaacactaaagtactaaat

SEQ ID NO: 226792 - DNA, 33 bp, Homo sapien
attattgtgagctaaaccactaaagtactaaat

SEQ ID NO: 226793 - DNA, 33 bp, Homo sapien
atgaacaaatcaatagactaattactaagttag

SEQ ID NO: 226794 - DNA, 33 bp, Homo sapien
atgaacaaatcaataggctaattactaagttag

SEQ ID NO: 226795 - DNA, 33 bp, Homo sapien
aatctcaggcatagtgaataaaactcattccag

SEQ ID NO: 226796 - DNA, 33 bp, Homo sapien
aatctcaggcatagtggataaaactcattccag

SEQ ID NO: 226797 - DNA, 33 bp, Homo sapien
aaggtacaaagtccaaagtggctagagattagt

SEQ ID NO: 226798 - DNA, 33 bp, Homo sapien
aaggtacaaagtccaatgtggctagagattagt

SEQ ID NO: 226799 - DNA, 33 bp, Homo sapien
tcactcttaaccactacgttgtgttgtcttaca

SEQ ID NO: 226800 - DNA, 33 bp, Homo sapien
tcactcttaaccactatgttgtgttgtcttaca

SEQ ID NO: 226801 - DNA, 33 bp, Homo sapien
ccttgtactattctggccactgcattttgagag

SEQ ID NO: 226802 - DNA, 33 bp, Homo sapien
ccttgtactattctggtcactgcattttgagag

SEQ ID NO: 226803 - DNA, 33 bp, Homo sapien
gaaagatccacaggtcgaaagccatctgcaaag

SEQ ID NO: 226804 - DNA, 33 bp, Homo sapien
gaaagatccacaggtctaaagccatctgcaaag

SEQ ID NO: 226805 - DNA, 33 bp, Homo sapien
tcaagctacagttctaagaaattcaggctgaga

SEQ ID NO: 226806 - DNA, 33 bp, Homo sapien
tcaagctacagttctaggaaattcaggctgaga

SEQ ID NO: 226807 - DNA, 33 bp, Homo sapien
atgatccaggaaccaactgtgttttcttgagaa

SEQ ID NO: 226808 - DNA, 33 bp, Homo sapien
atgatccaggaaccaattgtgttttcttgagaa

SEQ ID NO: 226809 - DNA, 33 bp, Homo sapien
ggttccctaccaactacaaaccatacttacaaa

SEQ ID NO: 226810 - DNA, 33 bp, Homo sapien
ggttccctaccaactataaaccatacttacaaa

SEQ ID NO: 226811 - DNA, 33 bp, Homo sapien
caaagtacatgttaaaattgacttactactatg

SEQ ID NO: 226812 - DNA, 33 bp, Homo sapien
caaagtacatgttaaatttgacttactactatg

SEQ ID NO: 226813 - DNA, 33 bp, Homo sapien
cttagtactttaaaacaataccatgccaggtgt

SEQ ID NO: 226814 - DNA, 33 bp, Homo sapien
cttagtactttaaaactataccatgccaggtgt

SEQ ID NO: 226815 - DNA, 33 bp, Homo sapien
aatcccagcattcggcagatttgcatgcacagg

SEQ ID NO: 226816 - DNA, 33 bp, Homo sapien
aatcccagcattcggcggatttgcatgcacagg

SEQ ID NO: 226817 - DNA, 33 bp, Homo sapien
cagagaaactcttgtacatcactagtgcaaaag

SEQ ID NO: 226818 - DNA, 33 bp, Homo sapien
cagagaaactcttgtatatcactagtgcaaaag

SEQ ID NO: 226819 - DNA, 33 bp, Homo sapien
tgatgaacaggaggaagaaattttgagatctat

SEQ ID NO: 226820 - DNA, 33 bp, Homo sapien
tgatgaacaggaggaataaattttgagatctat

SEQ ID NO: 226821 - DNA, 33 bp, Homo sapien
tatagtcagtaatgtacatttcacaataactta

SEQ ID NO: 226822 - DNA, 33 bp, Homo sapien
tatagtcagtaatgtatatttcacaataactta

SEQ ID NO: 226823 - DNA, 33 bp, Homo sapien
ttcgtctgttggttaaatcatgagactaattct

SEQ ID NO: 226824 - DNA, 33 bp, Homo sapien
ttcgtctgttggttaagtcatgagactaattct

SEQ ID NO: 226825 - DNA, 33 bp, Homo sapien
cacatttcaaatgcaccctttttttgtgaaggt

SEQ ID NO: 226826 - DNA, 33 bp, Homo sapien
cacatttcaaatgcactctttttttgtgaaggt

SEQ ID NO: 226827 - DNA, 33 bp, Homo sapien
agaatgaggattggtacgtatgcctgtttcatg

SEQ ID NO: 226828 - DNA, 33 bp, Homo sapien
agaatgaggattggtatgtatgcctgtttcatg

SEQ ID NO: 226829 - DNA, 33 bp, Homo sapien
atgtggattcacattcacactaaaattacctag

SEQ ID NO: 226830 - DNA, 33 bp, Homo sapien
atgtggattcacattcgcactaaaattacctag

SEQ ID NO: 226831 - DNA, 33 bp, Homo sapien
taaagggtgtaaggaacgaagaatgttaaaata

SEQ ID NO: 226832 - DNA, 33 bp, Homo sapien
taaagggtgtaaggaatgaagaatgttaaaata

SEQ ID NO: 226833 - DNA, 33 bp, Homo sapien
gtcttaactcattccaaccttaatccaaaagtc

SEQ ID NO: 226834 - DNA, 33 bp, Homo sapien
gtcttaactcattccagccttaatccaaaagtc

SEQ ID NO: 226835 - DNA, 33 bp, Homo sapien
tgttttccttcaataacgtacagtctcattgat

SEQ ID NO: 226836 - DNA, 33 bp, Homo sapien
tgttttccttcaataatgtacagtctcattgat

SEQ ID NO: 226837 - DNA, 33 bp, Homo sapien
tcaagatcctgaaaataagaaaaaatgtaagtc

SEQ ID NO: 226838 - DNA, 33 bp, Homo sapien
tcaagatcctgaaaatcagaaaaaatgtaagtc

SEQ ID NO: 226839 - DNA, 33 bp, Homo sapien
ccagtccttgacagaaaaacactctcagagaaa

SEQ ID NO: 226840 - DNA, 33 bp, Homo sapien
ccagtccttgacagaagaacactctcagagaaa

SEQ ID NO: 226841 - DNA, 33 bp, Homo sapien
aacaggtgataggagacagcccgtaaataaatg

SEQ ID NO: 226842 - DNA, 33 bp, Homo sapien
aacaggtgataggagagagcccgtaaataaatg

SEQ ID NO: 226843 - DNA, 33 bp, Homo sapien
gatttccaattaccagacaatatgttatgtgct

SEQ ID NO: 226844 - DNA, 33 bp, Homo sapien
gatttccaattaccaggcaatatgttatgtgct

SEQ ID NO: 226845 - DNA, 33 bp, Homo sapien
tttaatggtttattcaaatcagaattaaaatac

SEQ ID NO: 226846 - DNA, 33 bp, Homo sapien
tttaatggtttattcagatcagaattaaaatac

SEQ ID NO: 226847 - DNA, 33 bp, Homo sapien
agcttgtctttggagcaatttggcaatgtactc

SEQ ID NO: 226848 - DNA, 33 bp, Homo sapien
agcttgtctttggagcgatttggcaatgtactc

SEQ ID NO: 226849 - DNA, 33 bp, Homo sapien
cttttccattactaccaactcttaatgtcattt

SEQ ID NO: 226850 - DNA, 33 bp, Homo sapien
cttttccattactacctactcttaatgtcattt

SEQ ID NO: 226851 - DNA, 33 bp, Homo sapien
agttgaactagtttaccgctagcctggtaggtt

SEQ ID NO: 226852 - DNA, 33 bp, Homo sapien
agttgaactagtttactgctagcctggtaggtt

SEQ ID NO: 226853 - DNA, 33 bp, Homo sapien
aattggtatagaatgcactgcacttggaagaca

SEQ ID NO: 226854 - DNA, 33 bp, Homo sapien
aattggtatagaatgcgctgcacttggaagaca

SEQ ID NO: 226855 - DNA, 33 bp, Homo sapien
tctctcaaatataacaatgagtagaaaaaagcg

SEQ ID NO: 226856 - DNA, 33 bp, Homo sapien
tctctcaaatataacactgagtagaaaaaagcg

SEQ ID NO: 226857 - DNA, 33 bp, Homo sapien
ctgcctgtaatgtacacctctcctctttatcta

SEQ ID NO: 226858 - DNA, 33 bp, Homo sapien
ctgcctgtaatgtacatctctcctctttatcta

SEQ ID NO: 226859 - DNA, 33 bp, Homo sapien
tatgtagtgattgcaccgaacctgagcctatct

SEQ ID NO: 226860 - DNA, 33 bp, Homo sapien
tatgtagtgattgcactgaacctgagcctatct

SEQ ID NO: 226861 - DNA, 33 bp, Homo sapien
ttttaacaagaagcaaagacttttagagcataa

SEQ ID NO: 226862 - DNA, 33 bp, Homo sapien
ttttaacaagaagcaaggacttttagagcataa

SEQ ID NO: 226863 - DNA, 33 bp, Homo sapien
tgctctctttatgagggatgacaataaaggaaa

SEQ ID NO: 226864 - DNA, 33 bp, Homo sapien
tgctctctttatgaggtatgacaataaaggaaa

SEQ ID NO: 226865 - DNA, 33 bp, Homo sapien
atttaaaacactgttgaaaaggcctgggaacaa

SEQ ID NO: 226866 - DNA, 33 bp, Homo sapien
atttaaaacactgttggaaaggcctgggaacaa

SEQ ID NO: 226867 - DNA, 33 bp, Homo sapien
caggtatagaagaaatcagtcagagtaaagcag

SEQ ID NO: 226868 - DNA, 33 bp, Homo sapien
caggtatagaagaaatgagtcagagtaaagcag

SEQ ID NO: 226869 - DNA, 33 bp, Homo sapien
catactcagctaaggaaaataatagtcaaaaat

SEQ ID NO: 226870 - DNA, 33 bp, Homo sapien
catactcagctaaggataataatagtcaaaaat

SEQ ID NO: 226871 - DNA, 33 bp, Homo sapien
agttatttccaaaaggacagatttgagtttctt

SEQ ID NO: 226872 - DNA, 33 bp, Homo sapien
agttatttccaaaaggtcagatttgagtttctt

SEQ ID NO: 226873 - DNA, 33 bp, Homo sapien
caatattctgtttagcacacaataagtagattt

SEQ ID NO: 226874 - DNA, 33 bp, Homo sapien
caatattctgtttagcgcacaataagtagattt

SEQ ID NO: 226875 - DNA, 33 bp, Homo sapien
gtcatttctgaataaacataggtcgcagagtaa

SEQ ID NO: 226876 - DNA, 33 bp, Homo sapien
gtcatttctgaataaatataggtcgcagagtaa

SEQ ID NO: 226877 - DNA, 33 bp, Homo sapien
gacctagtgagatagcagctacggtagctaagg

SEQ ID NO: 226878 - DNA, 33 bp, Homo sapien
gacctagtgagatagcggctacggtagctaagg

SEQ ID NO: 226879 - DNA, 33 bp, Homo sapien
aagatacaactcatgaatcaccagaatggcaaa

SEQ ID NO: 226880 - DNA, 33 bp, Homo sapien
aagatacaactcatgagtcaccagaatggcaaa

SEQ ID NO: 226881 - DNA, 33 bp, Homo sapien
caccgggattctaacccaggctaactccagagt

SEQ ID NO: 226882 - DNA, 33 bp, Homo sapien
caccgggattctaacctaggctaactccagagt

SEQ ID NO: 226883 - DNA, 33 bp, Homo sapien
acatcctgtctgatgcactgacatttgggcagt

SEQ ID NO: 226884 - DNA, 33 bp, Homo sapien
acatcctgtctgatgcgctgacatttgggcagt

SEQ ID NO: 226885 - DNA, 33 bp, Homo sapien
tgcccatttcttataaccacagtactctttagg

SEQ ID NO: 226886 - DNA, 33 bp, Homo sapien
tgcccatttcttataatcacagtactctttagg

SEQ ID NO: 226887 - DNA, 33 bp, Homo sapien
tatctttgtgtgagtacgcgtatatgtaatttg

SEQ ID NO: 226888 - DNA, 33 bp, Homo sapien
tatctttgtgtgagtatgcgtatatgtaatttg

SEQ ID NO: 226889 - DNA, 33 bp, Homo sapien
cattacaaatagcaaaaaagtaaagtgagaggt

SEQ ID NO: 226890 - DNA, 33 bp, Homo sapien
cattacaaatagcaaagaagtaaagtgagaggt

SEQ ID NO: 226891 - DNA, 33 bp, Homo sapien
tcattataattatccaaccctgtgtaatcaaag

SEQ ID NO: 226892 - DNA, 33 bp, Homo sapien
tcattataattatccatccctgtgtaatcaaag

SEQ ID NO: 226893 - DNA, 33 bp, Homo sapien
ataactggaagtatacactgtatgatattagga

SEQ ID NO: 226894 - DNA, 33 bp, Homo sapien
ataactggaagtataccctgtatgatattagga

SEQ ID NO: 226895 - DNA, 33 bp, Homo sapien
attacatccaatatcgccgagggtgtacacccc

SEQ ID NO: 226896 - DNA, 33 bp, Homo sapien
attacatccaatatcgtcgagggtgtacacccc

SEQ ID NO: 226897 - DNA, 33 bp, Homo sapien
ttatctacagttgcaacaaggcttcactcaaat

SEQ ID NO: 226898 - DNA, 33 bp, Homo sapien
ttatctacagttgcaagaaggcttcactcaaat

SEQ ID NO: 226899 - DNA, 33 bp, Homo sapien
tccaattccactgtgaaatattcccgaactcat

SEQ ID NO: 226900 - DNA, 33 bp, Homo sapien
tccaattccactgtgagatattcccgaactcat

SEQ ID NO: 226901 - DNA, 33 bp, Homo sapien
aaatggtctgagataaatgggaaaatcagaggt

SEQ ID NO: 226902 - DNA, 33 bp, Homo sapien
aaatggtctgagataagtgggaaaatcagaggt

SEQ ID NO: 226903 - DNA, 33 bp, Homo sapien
agctagccatccaaaccgaccagagaaggtaaa

SEQ ID NO: 226904 - DNA, 33 bp, Homo sapien
agctagccatccaaactgaccagagaaggtaaa

SEQ ID NO: 226905 - DNA, 33 bp, Homo sapien
tgctgtagattgatcacgtttaaaagtaggaac

SEQ ID NO: 226906 - DNA, 33 bp, Homo sapien
tgctgtagattgatcatgtttaaaagtaggaac

SEQ ID NO: 226907 - DNA, 33 bp, Homo sapien
caagagaagaggttgaccagacaacaaagagaa

SEQ ID NO: 226908 - DNA, 33 bp, Homo sapien
caagagaagaggttgatcagacaacaaagagaa

SEQ ID NO: 226909 - DNA, 33 bp, Homo sapien
attgtgaaaattcaaacatccaatatttaaaaa

SEQ ID NO: 226910 - DNA, 33 bp, Homo sapien
attgtgaaaattcaaagatccaatatttaaaaa

SEQ ID NO: 226911 - DNA, 33 bp, Homo sapien
gaacggctttttatagcacagaaagctagcaga

SEQ ID NO: 226912 - DNA, 33 bp, Homo sapien
gaacggctttttataggacagaaagctagcaga

SEQ ID NO: 226913 - DNA, 33 bp, Homo sapien
taaagttctttcaggcaaggaccatttctcatt

SEQ ID NO: 226914 - DNA, 33 bp, Homo sapien
taaagttctttcaggccaggaccatttctcatt

SEQ ID NO: 226915 - DNA, 33 bp, Homo sapien
agtgtagctaagatagcaaaaaccctggaatca

SEQ ID NO: 226916 - DNA, 33 bp, Homo sapien
agtgtagctaagatagtaaaaaccctggaatca

SEQ ID NO: 226917 - DNA, 33 bp, Homo sapien
tttcgtgagtactcacaatgtattaggatctat

SEQ ID NO: 226918 - DNA, 33 bp, Homo sapien
tttcgtgagtactcacgatgtattaggatctat

SEQ ID NO: 226919 - DNA, 33 bp, Homo sapien
aagagccagcatttcactctcataggaatagat

SEQ ID NO: 226920 - DNA, 33 bp, Homo sapien
aagagccagcatttcattctcataggaatagat

SEQ ID NO: 226921 - DNA, 33 bp, Homo sapien
tattttctatctgcaacgatttgtgctgcatga

SEQ ID NO: 226922 - DNA, 33 bp, Homo sapien
tattttctatctgcaatgatttgtgctgcatga

SEQ ID NO: 226923 - DNA, 33 bp, Homo sapien
tgagaacttcttgaaaacagaattacagcctca

SEQ ID NO: 226924 - DNA, 33 bp, Homo sapien
tgagaacttcttgaaagcagaattacagcctca

SEQ ID NO: 226925 - DNA, 33 bp, Homo sapien
taaagccaaacagatcacatcggtgcttgcccc

SEQ ID NO: 226926 - DNA, 33 bp, Homo sapien
taaagccaaacagatcgcatcggtgcttgcccc

SEQ ID NO: 226927 - DNA, 33 bp, Homo sapien
tctgtttggctttaaccactgtgtcatatagct

SEQ ID NO: 226928 - DNA, 33 bp, Homo sapien
tctgtttggctttaactactgtgtcatatagct

SEQ ID NO: 226929 - DNA, 33 bp, Homo sapien
gaatggaatgcctcaggagtaaagaagttctgc

SEQ ID NO: 226930 - DNA, 33 bp, Homo sapien
gaatggaatgcctcagtagtaaagaagttctgc

SEQ ID NO: 226931 - DNA, 33 bp, Homo sapien
ttcagtatttatgatcaaaattattatgcatat

SEQ ID NO: 226932 - DNA, 33 bp, Homo sapien
ttcagtatttatgatccaaattattatgcatat

SEQ ID NO: 226933 - DNA, 33 bp, Homo sapien
attgacttgggaattacctactgcttcatataa

SEQ ID NO: 226934 - DNA, 33 bp, Homo sapien
attgacttgggaattatctactgcttcatataa

SEQ ID NO: 226935 - DNA, 33 bp, Homo sapien
ctggatgtatgtgctccaaattctcattacatg

SEQ ID NO: 226936 - DNA, 33 bp, Homo sapien
ctggatgtatgtgctctaaattctcattacatg

SEQ ID NO: 226937 - DNA, 33 bp, Homo sapien
tttagaacttagtaaacgtgggtggtcaaaata

SEQ ID NO: 226938 - DNA, 33 bp, Homo sapien
tttagaacttagtaaaggtgggtggtcaaaata

SEQ ID NO: 226939 - DNA, 33 bp, Homo sapien
aaatgtgcacaggtaaccaagatgttgtgggag

SEQ ID NO: 226940 - DNA, 33 bp, Homo sapien
aaatgtgcacaggtaatcaagatgttgtgggag

SEQ ID NO: 226941 - DNA, 33 bp, Homo sapien
ttcgtgccaaaacatcagagagactcatttcag

SEQ ID NO: 226942 - DNA, 33 bp, Homo sapien
ttcgtgccaaaacatcggagagactcatttcag

SEQ ID NO: 226943 - DNA, 33 bp, Homo sapien
cttttccattagtgagccactgttgtcagcaag

SEQ ID NO: 226944 - DNA, 33 bp, Homo sapien
cttttccattagtgaggcactgttgtcagcaag

SEQ ID NO: 226945 - DNA, 33 bp, Homo sapien
tggactcgttccacccacttgccctggcaggct

SEQ ID NO: 226946 - DNA, 33 bp, Homo sapien
tggactcgttccacccgcttgccctggcaggct

SEQ ID NO: 226947 - DNA, 33 bp, Homo sapien
aggctatcccactttgcaatcaaaatgtccaag

SEQ ID NO: 226948 - DNA, 33 bp, Homo sapien
aggctatcccactttgtaatcaaaatgtccaag

SEQ ID NO: 226949 - DNA, 33 bp, Homo sapien
catttcggacaagatacactcaaacggcagaat

SEQ ID NO: 226950 - DNA, 33 bp, Homo sapien
catttcggacaagatatactcaaacggcagaat

SEQ ID NO: 226951 - DNA, 33 bp, Homo sapien
aggaataaaatcgaagaagtataattttatgca

SEQ ID NO: 226952 - DNA, 33 bp, Homo sapien
aggaataaaatcgaaggagtataattttatgca

SEQ ID NO: 226953 - DNA, 33 bp, Homo sapien
atatttgaaggcaatacaaaggaaaagatgtag

SEQ ID NO: 226954 - DNA, 33 bp, Homo sapien
atatttgaaggcaatagaaaggaaaagatgtag

SEQ ID NO: 226955 - DNA, 33 bp, Homo sapien
ttctacaccgggttgacggagactgggtcacat

SEQ ID NO: 226956 - DNA, 33 bp, Homo sapien
ttctacaccgggttgatggagactgggtcacat

SEQ ID NO: 226957 - DNA, 33 bp, Homo sapien
ggacttgcagtgtaaactatgtggtcattggtg

SEQ ID NO: 226958 - DNA, 33 bp, Homo sapien
ggacttgcagtgtaaattatgtggtcattggtg

SEQ ID NO: 226959 - DNA, 33 bp, Homo sapien
gacagcgatcccataacaacacgtcaatcaact

SEQ ID NO: 226960 - DNA, 33 bp, Homo sapien
gacagcgatcccataataacacgtcaatcaact

SEQ ID NO: 226961 - DNA, 33 bp, Homo sapien
actggtccttttcaataacaaaaagatatacat

SEQ ID NO: 226962 - DNA, 33 bp, Homo sapien
actggtccttttcaatgacaaaaagatatacat

SEQ ID NO: 226963 - DNA, 33 bp, Homo sapien
ggtatgtctaggaataaagcaatgaacaaagca

SEQ ID NO: 226964 - DNA, 33 bp, Homo sapien
ggtatgtctaggaatacagcaatgaacaaagca

SEQ ID NO: 226965 - DNA, 33 bp, Homo sapien
atctttgttagcactaaatctttgtcacctttg

SEQ ID NO: 226966 - DNA, 33 bp, Homo sapien
atctttgttagcactacatctttgtcacctttg

SEQ ID NO: 226967 - DNA, 33 bp, Homo sapien
acatctccgtctttaaaagtatcatgaagcttt

SEQ ID NO: 226968 - DNA, 33 bp, Homo sapien
acatctccgtctttaagagtatcatgaagcttt

SEQ ID NO: 226969 - DNA, 33 bp, Homo sapien
attttcagatcttataagagtatttgtgcatat

SEQ ID NO: 226970 - DNA, 33 bp, Homo sapien
attttcagatcttataggagtatttgtgcatat

SEQ ID NO: 226971 - DNA, 33 bp, Homo sapien
tggcaaatatctcatacataagcacccaactgg

SEQ ID NO: 226972 - DNA, 33 bp, Homo sapien
tggcaaatatctcatatataagcacccaactgg

SEQ ID NO: 226973 - DNA, 33 bp, Homo sapien
gggtgtctgcttccaacttccaggattttgtgg

SEQ ID NO: 226974 - DNA, 33 bp, Homo sapien
gggtgtctgcttccaatttccaggattttgtgg

SEQ ID NO: 226975 - DNA, 33 bp, Homo sapien
aatttgttttgttcacggtaaaataaggatttt

SEQ ID NO: 226976 - DNA, 33 bp, Homo sapien
aatttgttttgttcactgtaaaataaggatttt

SEQ ID NO: 226977 - DNA, 33 bp, Homo sapien
gcgctggcaaaggcacaggctttgtgtgaggct

SEQ ID NO: 226978 - DNA, 33 bp, Homo sapien
gcgctggcaaaggcaccggctttgtgtgaggct

SEQ ID NO: 226979 - DNA, 33 bp, Homo sapien
gcttcactgagcaacaaaacaactcttaggaga

SEQ ID NO: 226980 - DNA, 33 bp, Homo sapien
gcttcactgagcaacataacaactcttaggaga

SEQ ID NO: 226981 - DNA, 33 bp, Homo sapien
atttaacttctacctcaaagacatagtttttat

SEQ ID NO: 226982 - DNA, 33 bp, Homo sapien
atttaacttctacctcgaagacatagtttttat

SEQ ID NO: 226983 - DNA, 33 bp, Homo sapien
atgatatattgttacacagaactggtagacttc

SEQ ID NO: 226984 - DNA, 33 bp, Homo sapien
atgatatattgttacatagaactggtagacttc

SEQ ID NO: 226985 - DNA, 33 bp, Homo sapien
tgttttaatataatgcaaaagcagcagggctac

SEQ ID NO: 226986 - DNA, 33 bp, Homo sapien
tgttttaatataatgcgaaagcagcagggctac

SEQ ID NO: 226987 - DNA, 33 bp, Homo sapien
tctcatatttccaaccactgataccttttattc

SEQ ID NO: 226988 - DNA, 33 bp, Homo sapien
tctcatatttccaacctctgataccttttattc

SEQ ID NO: 226989 - DNA, 33 bp, Homo sapien
aataaaaattgctagacagtgggtgttaaatca

SEQ ID NO: 226990 - DNA, 33 bp, Homo sapien
aataaaaattgctagagagtgggtgttaaatca

SEQ ID NO: 226991 - DNA, 33 bp, Homo sapien
ctaaaactaattttaaacaccatatccaaatta

SEQ ID NO: 226992 - DNA, 33 bp, Homo sapien
ctaaaactaattttaagcaccatatccaaatta

SEQ ID NO: 226993 - DNA, 33 bp, Homo sapien
caactaaccaatagcacaaagttcttgctttta

SEQ ID NO: 226994 - DNA, 33 bp, Homo sapien
caactaaccaatagcataaagttcttgctttta

SEQ ID NO: 226995 - DNA, 33 bp, Homo sapien
tctctatacattttcaacagctttcattaggat

SEQ ID NO: 226996 - DNA, 33 bp, Homo sapien
tctctatacattttcatcagctttcattaggat

SEQ ID NO: 226997 - DNA, 33 bp, Homo sapien
atcaccttcatccttagactgcttctctttatg

SEQ ID NO: 226998 - DNA, 33 bp, Homo sapien
atcaccttcatccttatactgcttctctttatg

SEQ ID NO: 226999 - DNA, 33 bp, Homo sapien
ttcagtgtaattctgacgaatatgccttttttg

SEQ ID NO: 227000 - DNA, 33 bp, Homo sapien
ttcagtgtaattctgatgaatatgccttttttg

SEQ ID NO: 227001 - DNA, 33 bp, Homo sapien
aaacttcctagtcttccagtgctttcagtgtaa

SEQ ID NO: 227002 - DNA, 33 bp, Homo sapien
aaacttcctagtcttctagtgctttcagtgtaa

SEQ ID NO: 227003 - DNA, 33 bp, Homo sapien
ttcaagagagtgtataaaaagaaaggctccata

SEQ ID NO: 227004 - DNA, 33 bp, Homo sapien
ttcaagagagtgtatacaaagaaaggctccata

SEQ ID NO: 227005 - DNA, 33 bp, Homo sapien
tgaaacagttctgtaaagtggttaagtattcca

SEQ ID NO: 227006 - DNA, 33 bp, Homo sapien
tgaaacagttctgtaaggtggttaagtattcca

SEQ ID NO: 227007 - DNA, 33 bp, Homo sapien
atgtttcaagcaaaaaactcctttttacttagc

SEQ ID NO: 227008 - DNA, 33 bp, Homo sapien
atgtttcaagcaaaaacctcctttttacttagc

SEQ ID NO: 227009 - DNA, 33 bp, Homo sapien
ctgtacatccctcacagtccacatttaatgtat

SEQ ID NO: 227010 - DNA, 33 bp, Homo sapien
ctgtacatccctcacattccacatttaatgtat

SEQ ID NO: 227011 - DNA, 33 bp, Homo sapien
aaatgcaaggcagaagaccagagaatctgaacc

SEQ ID NO: 227012 - DNA, 33 bp, Homo sapien
aaatgcaaggcagaagtccagagaatctgaacc

SEQ ID NO: 227013 - DNA, 33 bp, Homo sapien
attcggaagatgttaacgtcaaagtttcaaatg

SEQ ID NO: 227014 - DNA, 33 bp, Homo sapien
attcggaagatgttaatgtcaaagtttcaaatg

SEQ ID NO: 227015 - DNA, 33 bp, Homo sapien
ttagttagaatcataccgaatgtagtcctttca

SEQ ID NO: 227016 - DNA, 33 bp, Homo sapien
ttagttagaatcatactgaatgtagtcctttca

SEQ ID NO: 227017 - DNA, 33 bp, Homo sapien
ggaagtaaacagcaataagatactacacacgta

SEQ ID NO: 227018 - DNA, 33 bp, Homo sapien
ggaagtaaacagcaatgagatactacacacgta

SEQ ID NO: 227019 - DNA, 33 bp, Homo sapien
tgtggacctcaaaaccaagaactacaaattgca

SEQ ID NO: 227020 - DNA, 33 bp, Homo sapien
tgtggacctcaaaaccgagaactacaaattgca

SEQ ID NO: 227021 - DNA, 33 bp, Homo sapien; identical to SEQ ID NO: 227019

SEQ ID NO: 227022 - DNA, 33 bp, Homo sapien; identical to SEQ ID NO: 227020

SEQ ID NO: 227023 - DNA, 33 bp, Homo sapien
ttatttcatgtacccaagtattacgtttctcaa

SEQ ID NO: 227024 - DNA, 33 bp, Homo sapien
ttatttcatgtacccaggtattacgtttctcaa

SEQ ID NO: 227025 - DNA, 33 bp, Homo sapien
attagaggaaacctaactcatcttcatgttgga

SEQ ID NO: 227026 - DNA, 33 bp, Homo sapien
attagaggaaacctaattcatcttcatgttgga

SEQ ID NO: 227027 - DNA, 33 bp, Homo sapien
agccatcttccacgtgaatgctgtttggaggcc

SEQ ID NO: 227028 - DNA, 33 bp, Homo sapien
agccatcttccacgtggatgctgtttggaggcc

SEQ ID NO: 227029 - DNA, 33 bp, Homo sapien
taatgtctcttgattacgtggcatagatataaa

SEQ ID NO: 227030 - DNA, 33 bp, Homo sapien
taatgtctcttgattatgtggcatagatataaa

SEQ ID NO: 227031 - DNA, 33 bp, Homo sapien
tcttttattttcagtccaggtacagttgatatt

SEQ ID NO: 227032 - DNA, 33 bp, Homo sapien
tcttttattttcagtctaggtacagttgatatt

SEQ ID NO: 227033 - DNA, 33 bp, Homo sapien
gagaagtgaagaaaagcagatttcactcagtct

SEQ ID NO: 227034 - DNA, 33 bp, Homo sapien
gagaagtgaagaaaaggagatttcactcagtct

SEQ ID NO: 227035 - DNA, 33 bp, Homo sapien
cacacagaatagtgagaaagactgatcaataaa

SEQ ID NO: 227036 - DNA, 33 bp, Homo sapien
cacacagaatagtgaggaagactgatcaataaa

SEQ ID NO: 227037 - DNA, 33 bp, Homo sapien
gttactaaatatttaacactgccatctgaaaat

SEQ ID NO: 227038 - DNA, 33 bp, Homo sapien
gttactaaatatttaatactgccatctgaaaat

SEQ ID NO: 227039 - DNA, 33 bp, Homo sapien
tttgcccatttgtttacgcagtttcttcatagt

SEQ ID NO: 227040 - DNA, 33 bp, Homo sapien
tttgcccatttgtttatgcagtttcttcatagt

SEQ ID NO: 227041 - DNA, 33 bp, Homo sapien
gaaatcctaccccaaaaattccctactatcagc

SEQ ID NO: 227042 - DNA, 33 bp, Homo sapien
gaaatcctaccccaaacattccctactatcagc

SEQ ID NO: 227043 - DNA, 33 bp, Homo sapien
acaacacttggttagccgccattgtaaatccac

SEQ ID NO: 227044 - DNA, 33 bp, Homo sapien
acaacacttggttagctgccattgtaaatccac

SEQ ID NO: 227045 - DNA, 33 bp, Homo sapien
tctttgctgaaaatggcccagaatatgatttat

SEQ ID NO: 227046 - DNA, 33 bp, Homo sapien
tctttgctgaaaatggtccagaatatgatttat

SEQ ID NO: 227047 - DNA, 33 bp, Homo sapien
tcatctttgttggcaaaaagctacacaaataaa

SEQ ID NO: 227048 - DNA, 33 bp, Homo sapien
tcatctttgttggcaagaagctacacaaataaa

SEQ ID NO: 227049 - DNA, 33 bp, Homo sapien
accattgcttgtcacaacactgtttgcatacat

SEQ ID NO: 227050 - DNA, 33 bp, Homo sapien
accattgcttgtcacatcactgtttgcatacat

SEQ ID NO: 227051 - DNA, 33 bp, Homo sapien
aaggtggactgggctaaaggaaattgttagtgg

SEQ ID NO: 227052 - DNA, 33 bp, Homo sapien
aaggtggactgggctataggaaattgttagtgg

SEQ ID NO: 227053 - DNA, 33 bp, Homo sapien
gaatgtacactcgaaaatggaattttgaaggag

SEQ ID NO: 227054 - DNA, 33 bp, Homo sapien
gaatgtacactcgaaagtggaattttgaaggag

SEQ ID NO: 227055 - DNA, 33 bp, Homo sapien
agttgcttttggaatgaagaaaggtgattatga

SEQ ID NO: 227056 - DNA, 33 bp, Homo sapien
agttgcttttggaatgtagaaaggtgattatga

SEQ ID NO: 227057 - DNA, 33 bp, Homo sapien
ctcagaattccattcaactaagcattctgggca

SEQ ID NO: 227058 - DNA, 33 bp, Homo sapien
ctcagaattccattcagctaagcattctgggca

SEQ ID NO: 227059 - DNA, 33 bp, Homo sapien
aagaaagatttgatgacgttaacttttctagga

SEQ ID NO: 227060 - DNA, 33 bp, Homo sapien
aagaaagatttgatgatgttaacttttctagga

SEQ ID NO: 227061 - DNA, 33 bp, Homo sapien
gtgtaactgctctgcaccattgcacctttcaga

SEQ ID NO: 227062 - DNA, 33 bp, Homo sapien
gtgtaactgctctgcatcattgcacctttcaga

SEQ ID NO: 227063 - DNA, 33 bp, Homo sapien
gctatgaacatacccaacctgctatggaaagat

SEQ ID NO: 227064 - DNA, 33 bp, Homo sapien
gctatgaacatacccaccctgctatggaaagat

SEQ ID NO: 227065 - DNA, 33 bp, Homo sapien
ccagtaaactttgctacaattacacaaactcta

SEQ ID NO: 227066 - DNA, 33 bp, Homo sapien
ccagtaaactttgctataattacacaaactcta

SEQ ID NO: 227067 - DNA, 33 bp, Homo sapien
atatatgagacttttcactgaaatttcttggtc

SEQ ID NO: 227068 - DNA, 33 bp, Homo sapien
atatatgagacttttcgctgaaatttcttggtc

SEQ ID NO: 227069 - DNA, 33 bp, Homo sapien
tggcagagtccaaagaactgttttcagcctaga

SEQ ID NO: 227070 - DNA, 33 bp, Homo sapien
tggcagagtccaaagacctgttttcagcctaga

SEQ ID NO: 227071 - DNA, 33 bp, Homo sapien
atgatagcagactcccaccactggcaaccgctg

SEQ ID NO: 227072 - DNA, 33 bp, Homo sapien
atgatagcagactcccgccactggcaaccgctg

SEQ ID NO: 227073 - DNA, 33 bp, Homo sapien
gtagtgttgaaagaccagctcacttctctctcc

SEQ ID NO: 227074 - DNA, 33 bp, Homo sapien
gtagtgttgaaagacctgctcacttctctctcc

SEQ ID NO: 227075 - DNA, 33 bp, Homo sapien
ttttgccttttcatgaagagatagttgcactga

SEQ ID NO: 227076 - DNA, 33 bp, Homo sapien
ttttgccttttcatgaggagatagttgcactga

SEQ ID NO: 227077 - DNA, 33 bp, Homo sapien
actaaaaagtttttcactcctgagaatccttca

SEQ ID NO: 227078 - DNA, 33 bp, Homo sapien
actaaaaagtttttcattcctgagaatccttca

SEQ ID NO: 227079 - DNA, 33 bp, Homo sapien
aactacataggcagaaagaagacttcaggggcc

SEQ ID NO: 227080 - DNA, 33 bp, Homo sapien
aactacataggcagaaggaagacttcaggggcc

SEQ ID NO: 227081 - DNA, 33 bp, Homo sapien
gtaagactaccgaatagagtttatgatatttct

SEQ ID NO: 227082 - DNA, 33 bp, Homo sapien
gtaagactaccgaatatagtttatgatatttct

SEQ ID NO: 227083 - DNA, 33 bp, Homo sapien
aacataaaaattaccaatgggaaatctcactgt

SEQ ID NO: 227084 - DNA, 33 bp, Homo sapien
aacataaaaattaccattgggaaatctcactgt

SEQ ID NO: 227085 - DNA, 33 bp, Homo sapien
aaaacatgctcttgggaacactatttctacaga

SEQ ID NO: 227086 - DNA, 33 bp, Homo sapien
aaaacatgctcttggggacactatttctacaga

SEQ ID NO: 227087 - DNA, 33 bp, Homo sapien
tttcagaattcacaaaccctttaataactgcag

SEQ ID NO: 227088 - DNA, 33 bp, Homo sapien
tttcagaattcacaaagcctttaataactgcag

SEQ ID NO: 227089 - DNA, 33 bp, Homo sapien
aatttgttgataataacatcctgaggctactaa

SEQ ID NO: 227090 - DNA, 33 bp, Homo sapien
aatttgttgataataatatcctgaggctactaa

SEQ ID NO: 227091 - DNA, 33 bp, Homo sapien
agaggcctgaatgcaaaaatgaatgggtttttc

SEQ ID NO: 227092 - DNA, 33 bp, Homo sapien
agaggcctgaatgcaacaatgaatgggtttttc

SEQ ID NO: 227093 - DNA, 33 bp, Homo sapien
gaaattccacttacaaaccgtatgcaattttat

SEQ ID NO: 227094 - DNA, 33 bp, Homo sapien
gaaattccacttacaagccgtatgcaattttat

SEQ ID NO: 227095 - DNA, 33 bp, Homo sapien
tcagtgacaaaaagaacattggtgcttttacac

SEQ ID NO: 227096 - DNA, 33 bp, Homo sapien
tcagtgacaaaaagaatattggtgcttttacac

SEQ ID NO: 227097 - DNA, 33 bp, Homo sapien
accatctacataccaacgatttctatattacta

SEQ ID NO: 227098 - DNA, 33 bp, Homo sapien
accatctacataccaatgatttctatattacta

SEQ ID NO: 227099 - DNA, 33 bp, Homo sapien
acttttaagttatttaaagcttgcaataatttg

SEQ ID NO: 227100 - DNA, 33 bp, Homo sapien
acttttaagttatttatagcttgcaataatttg

SEQ ID NO: 227101 - DNA, 33 bp, Homo sapien
atgccttggaactaaacattacatgactagcag

SEQ ID NO: 227102 - DNA, 33 bp, Homo sapien
atgccttggaactaaatattacatgactagcag

SEQ ID NO: 227103 - DNA, 33 bp, Homo sapien
tgataaatgcaaacataaagaaatcatttgttt

SEQ ID NO: 227104 - DNA, 33 bp, Homo sapien
tgataaatgcaaacattaagaaatcatttgttt

SEQ ID NO: 227105 - DNA, 33 bp, Homo sapien
tcagatctctgttgtaggcagcaaatgtaaatc

SEQ ID NO: 227106 - DNA, 33 bp, Homo sapien
tcagatctctgttgtatgcagcaaatgtaaatc

SEQ ID NO: 227107 - DNA, 33 bp, Homo sapien
atttttggatcattaaatgcaaattcagcaatt

SEQ ID NO: 227108 - DNA, 33 bp, Homo sapien
atttttggatcattaagtgcaaattcagcaatt

SEQ ID NO: 227109 - DNA, 33 bp, Homo sapien
aattaagttagagagccctttatgtgcacaacc

SEQ ID NO: 227110 - DNA, 33 bp, Homo sapien
aattaagttagagagcgctttatgtgcacaacc

SEQ ID NO: 227111 - DNA, 33 bp, Homo sapien
tcatcatggtcaaattaaatctctccaagcata

SEQ ID NO: 227112 - DNA, 33 bp, Homo sapien
tcatcatggtcaaattcaatctctccaagcata

SEQ ID NO: 227113 - DNA, 33 bp, Homo sapien
taatttctccatgaccaggaatataggctttta

SEQ ID NO: 227114 - DNA, 33 bp, Homo sapien
taatttctccatgaccgggaatataggctttta

SEQ ID NO: 227115 - DNA, 33 bp, Homo sapien
atggacataagaattaaatcaatcacttgttaa

SEQ ID NO: 227116 - DNA, 33 bp, Homo sapien
atggacataagaattacatcaatcacttgttaa

SEQ ID NO: 227117 - DNA, 33 bp, Homo sapien
gtttacatctagtacgcatttatttccattgtg

SEQ ID NO: 227118 - DNA, 33 bp, Homo sapien
gtttacatctagtacgtatttatttccattgtg

SEQ ID NO: 227119 - DNA, 33 bp, Homo sapien
ctgtaatcctgaattacaaaagtcaacatttaa

SEQ ID NO: 227120 - DNA, 33 bp, Homo sapien
ctgtaatcctgaattagaaaagtcaacatttaa

SEQ ID NO: 227121 - DNA, 33 bp, Homo sapien
tagcaacatgagactaaaagacatcacgttaaa

SEQ ID NO: 227122 - DNA, 33 bp, Homo sapien
tagcaacatgagactagaagacatcacgttaaa

SEQ ID NO: 227123 - DNA, 33 bp, Homo sapien
tccctttgtgagaaaacgaggagaagctctaac

SEQ ID NO: 227124 - DNA, 33 bp, Homo sapien
tccctttgtgagaaaatgaggagaagctctaac

SEQ ID NO: 227125 - DNA, 33 bp, Homo sapien
catcagattcactgctcaatgatcagttttatc

SEQ ID NO: 227126 - DNA, 33 bp, Homo sapien
catcagattcactgcttaatgatcagttttatc

SEQ ID NO: 227127 - DNA, 33 bp, Homo sapien
attaaaattaaaaaaaatgcatccacatgattt

SEQ ID NO: 227128 - DNA, 33 bp, Homo sapien
attaaaattaaaaaaattgcatccacatgattt

SEQ ID NO: 227129 - DNA, 33 bp, Homo sapien
gaccatagcttcagggcataggccgaggctacc

SEQ ID NO: 227130 - DNA, 33 bp, Homo sapien
gaccatagcttcagggtataggccgaggctacc

SEQ ID NO: 227131 - DNA, 33 bp, Homo sapien
agtcacactttacagcaccttgttggttttcct

SEQ ID NO: 227132 - DNA, 33 bp, Homo sapien
agtcacactttacagcgccttgttggttttcct

SEQ ID NO: 227133 - DNA, 33 bp, Homo sapien
aaaccaacctgaggaaactcaacagaggaaaac

SEQ ID NO: 227134 - DNA, 33 bp, Homo sapien
aaaccaacctgaggaagctcaacagaggaaaac

SEQ ID NO: 227135 - DNA, 33 bp, Homo sapien
ttcttaaaacaacctcaatgtcaaagataccat

SEQ ID NO: 227136 - DNA, 33 bp, Homo sapien
ttcttaaaacaacctccatgtcaaagataccat

SEQ ID NO: 227137 - DNA, 33 bp, Homo sapien
catctggaccattataaacatatgcaaagttat

SEQ ID NO: 227138 - DNA, 33 bp, Homo sapien
catctggaccattatacacatatgcaaagttat

SEQ ID NO: 227139 - DNA, 33 bp, Homo sapien
aatgaaatacagacaaaggagaatttgtaaatt

SEQ ID NO: 227140 - DNA, 33 bp, Homo sapien
aatgaaatacagacaagggagaatttgtaaatt

SEQ ID NO: 227141 - DNA, 33 bp, Homo sapien
gaaagattttagttcacaactcatttctggtaa

SEQ ID NO: 227142 - DNA, 33 bp, Homo sapien
gaaagattttagttcataactcatttctggtaa

SEQ ID NO: 227143 - DNA, 33 bp, Homo sapien
tttgaaatacataagcaaaattactgagccaat

SEQ ID NO: 227144 - DNA, 33 bp, Homo sapien
tttgaaatacataagcgaaattactgagccaat

SEQ ID NO: 227145 - DNA, 33 bp, Homo sapien
gccgggcacagcttacagataagtgggtggttt

SEQ ID NO: 227146 - DNA, 33 bp, Homo sapien
gccgggcacagcttacggataagtgggtggttt

SEQ ID NO: 227147 - DNA, 33 bp, Homo sapien
aagctttgttacatgaaaaccaccttgaacaga

SEQ ID NO: 227148 - DNA, 33 bp, Homo sapien
aagctttgttacatgagaaccaccttgaacaga

SEQ ID NO: 227149 - DNA, 33 bp, Homo sapien
tcactcgaattaccccaatgcatgatcattttg

SEQ ID NO: 227150 - DNA, 33 bp, Homo sapien
tcactcgaattacccctatgcatgatcattttg

SEQ ID NO: 227151 - DNA, 33 bp, Homo sapien
aaagtttcaggggaaaagctctgtaatatcctt

SEQ ID NO: 227152 - DNA, 33 bp, Homo sapien
aaagtttcaggggaaatgctctgtaatatcctt

SEQ ID NO: 227153 - DNA, 33 bp, Homo sapien
atgtgtgtgtatgcaaatccaatctccctttct

SEQ ID NO: 227154 - DNA, 33 bp, Homo sapien
atgtgtgtgtatgcaagtccaatctccctttct

SEQ ID NO: 227155 - DNA, 33 bp, Homo sapien
aagactaacaaaactacgtatgcatttcctctt

SEQ ID NO: 227156 - DNA, 33 bp, Homo sapien
aagactaacaaaactatgtatgcatttcctctt

SEQ ID NO: 227157 - DNA, 33 bp, Homo sapien
aaaattcttttgttgcgccattctgaactgtaa

SEQ ID NO: 227158 - DNA, 33 bp, Homo sapien
aaaattcttttgttgctccattctgaactgtaa

SEQ ID NO: 227159 - DNA, 33 bp, Homo sapien
gatgaaaaagtgagtaaacaatgggttggcaaa

SEQ ID NO: 227160 - DNA, 33 bp, Homo sapien
gatgaaaaagtgagtacacaatgggttggcaaa

SEQ ID NO: 227161 - DNA, 33 bp, Homo sapien
cagataaacctgtagacacttgtccatatggaa

SEQ ID NO: 227162 - DNA, 33 bp, Homo sapien
cagataaacctgtagagacttgtccatatggaa

SEQ ID NO: 227163 - DNA, 33 bp, Homo sapien
gtaacaagcaatagaggaaggatactgaaaaag

SEQ ID NO: 227164 - DNA, 33 bp, Homo sapien
gtaacaagcaatagagtaaggatactgaaaaag

SEQ ID NO: 227165 - DNA, 33 bp, Homo sapien
attcgcaaatatgataaatcactgaaagcagaa

SEQ ID NO: 227166 - DNA, 33 bp, Homo sapien
attcgcaaatatgatagatcactgaaagcagaa

SEQ ID NO: 227167 - DNA, 33 bp, Homo sapien
gcaataaacagcacaactaaactcactgtaaat

SEQ ID NO: 227168 - DNA, 33 bp, Homo sapien
gcaataaacagcacaattaaactcactgtaaat

SEQ ID NO: 227169 - DNA, 33 bp, Homo sapien
gccacacctgaataaaacttgcctaatttggac

SEQ ID NO: 227170 - DNA, 33 bp, Homo sapien
gccacacctgaataaagcttgcctaatttggac

SEQ ID NO: 227171 - DNA, 33 bp, Homo sapien
taagaaatcaaaaatgacaagttttcatgttac

SEQ ID NO: 227172 - DNA, 33 bp, Homo sapien
taagaaatcaaaaatgccaagttttcatgttac

SEQ ID NO: 227173 - DNA, 33 bp, Homo sapien
atgagaaatacaaaagccagcaagattatagga

SEQ ID NO: 227174 - DNA, 33 bp, Homo sapien
atgagaaatacaaaaggcagcaagattatagga

SEQ ID NO: 227175 - DNA, 33 bp, Homo sapien
atgatattaacatataacagtgtacttcttaat

SEQ ID NO: 227176 - DNA, 33 bp, Homo sapien
atgatattaacatatagcagtgtacttcttaat

SEQ ID NO: 227177 - DNA, 33 bp, Homo sapien
atcattggattatcaacgagctttgttaaaatg

SEQ ID NO: 227178 - DNA, 33 bp, Homo sapien
atcattggattatcaatgagctttgttaaaatg

SEQ ID NO: 227179 - DNA, 33 bp, Homo sapien
ggaatataatcttgcaatcatcctaagaaacta

SEQ ID NO: 227180 - DNA, 33 bp, Homo sapien
ggaatataatcttgcagtcatcctaagaaacta

SEQ ID NO: 227181 - DNA, 33 bp, Homo sapien
tagaatagcactaaaaaaattccataaaaaatt

SEQ ID NO: 227182 - DNA, 33 bp, Homo sapien
tagaatagcactaaaacaattccataaaaaatt

SEQ ID NO: 227183 - DNA, 33 bp, Homo sapien
ataatggaccaaatgcaacggcagaaaactttc

SEQ ID NO: 227184 - DNA, 33 bp, Homo sapien
ataatggaccaaatgccacggcagaaaactttc

SEQ ID NO: 227185 - DNA, 33 bp, Homo sapien
acaaaaacagacagacaaaacctgggcatggta

SEQ ID NO: 227186 - DNA, 33 bp, Homo sapien
acaaaaacagacagacgaaacctgggcatggta

SEQ ID NO: 227187 - DNA, 33 bp, Homo sapien
atgtaatagcatcaaaatatgaaacattagaga

SEQ ID NO: 227188 - DNA, 33 bp, Homo sapien
atgtaatagcatcaaagtatgaaacattagaga

SEQ ID NO: 227189 - DNA, 33 bp, Homo sapien
tatgattgctaattcacatggttaagtgtatgt

SEQ ID NO: 227190 - DNA, 33 bp, Homo sapien
tatgattgctaattcatatggttaagtgtatgt

SEQ ID NO: 227191 - DNA, 33 bp, Homo sapien
attttacttatcatatgacctcaagctttcccc

SEQ ID NO: 227192 - DNA, 33 bp, Homo sapien
attttacttatcatattacctcaagctttcccc

SEQ ID NO: 227193 - DNA, 33 bp, Homo sapien
gtcctacttctcattacggcaatttcaagcatc

SEQ ID NO: 227194 - DNA, 33 bp, Homo sapien
gtcctacttctcattatggcaatttcaagcatc

SEQ ID NO: 227195 - DNA, 33 bp, Homo sapien
agaaagtgtccctcagcaatctctggaatttct

SEQ ID NO: 227196 - DNA, 33 bp, Homo sapien
agaaagtgtccctcagtaatctctggaatttct

SEQ ID NO: 227197 - DNA, 33 bp, Homo sapien
ttagcaaattacaaaaaagagctagagattgta

SEQ ID NO: 227198 - DNA, 33 bp, Homo sapien
ttagcaaattacaaaagagagctagagattgta

SEQ ID NO: 227199 - DNA, 33 bp, Homo sapien
tatgtctactgaccaccagctactatttctcct

SEQ ID NO: 227200 - DNA, 33 bp, Homo sapien
tatgtctactgaccacgagctactatttctcct

SEQ ID NO: 227201 - DNA, 33 bp, Homo sapien
aactcaaattgtcttacgtcaaagctctgaaaa

SEQ ID NO: 227202 - DNA, 33 bp, Homo sapien
aactcaaattgtcttatgtcaaagctctgaaaa

SEQ ID NO: 227203 - DNA, 33 bp, Homo sapien
catttttatatattgacgagaactctttctaag

SEQ ID NO: 227204 - DNA, 33 bp, Homo sapien
catttttatatattgatgagaactctttctaag

SEQ ID NO: 227205 - DNA, 33 bp, Homo sapien
tagcctcacaaagaacaaaagttatatttgctg

SEQ ID NO: 227206 - DNA, 33 bp, Homo sapien
tagcctcacaaagaacgaaagttatatttgctg

SEQ ID NO: 227207 - DNA, 33 bp, Homo sapien
aatggctaactctttacgtttcaggccttaact

SEQ ID NO: 227208 - DNA, 33 bp, Homo sapien
aatggctaactctttatgtttcaggccttaact

SEQ ID NO: 227209 - DNA, 33 bp, Homo sapien
aaattaaagccctaaactcaaagtcattagact

SEQ ID NO: 227210 - DNA, 33 bp, Homo sapien
aaattaaagccctaaagtcaaagtcattagact

SEQ ID NO: 227211 - DNA, 33 bp, Homo sapien
cagctgattttgttgcactttctcattagcaaa

SEQ ID NO: 227212 - DNA, 33 bp, Homo sapien
cagctgattttgttgcgctttctcattagcaaa

SEQ ID NO: 227213 - DNA, 33 bp, Homo sapien
aagatcatagtactgacatatcgaggaattaga

SEQ ID NO: 227214 - DNA, 33 bp, Homo sapien
aagatcatagtactgatatatcgaggaattaga

SEQ ID NO: 227215 - DNA, 33 bp, Homo sapien
tgtgaagcgccaatcccgaacttcagatcttat

SEQ ID NO: 227216 - DNA, 33 bp, Homo sapien
tgtgaagcgccaatcctgaacttcagatcttat

SEQ ID NO: 227217 - DNA, 33 bp, Homo sapien
aaagagatctgcaaatcaaacaaaacaaatctt

SEQ ID NO: 227218 - DNA, 33 bp, Homo sapien
aaagagatctgcaaatgaaacaaaacaaatctt

SEQ ID NO: 227219 - DNA, 33 bp, Homo sapien
tacacataggcatagaactacagataatactaa

SEQ ID NO: 227220 - DNA, 33 bp, Homo sapien
tacacataggcatagacctacagataatactaa

SEQ ID NO: 227221 - DNA, 33 bp, Homo sapien
ctaatacactgtgtaccgatacctttgagggac

SEQ ID NO: 227222 - DNA, 33 bp, Homo sapien
ctaatacactgtgtactgatacctttgagggac

SEQ ID NO: 227223 - DNA, 33 bp, Homo sapien
gatctcgatacgcgacaatggaaactctcacca

SEQ ID NO: 227224 - DNA, 33 bp, Homo sapien
gatctcgatacgcgacgatggaaactctcacca

SEQ ID NO: 227225 - DNA, 33 bp, Homo sapien
ttgttttgtgtatatcaacagaccatttctaat

SEQ ID NO: 227226 - DNA, 33 bp, Homo sapien
ttgttttgtgtatatcgacagaccatttctaat

SEQ ID NO: 227227 - DNA, 33 bp, Homo sapien
aaaaactctgttaggaagtagcatcgaaaaaca

SEQ ID NO: 227228 - DNA, 33 bp, Homo sapien
aaaaactctgttaggaggtagcatcgaaaaaca

SEQ ID NO: 227229 - DNA, 33 bp, Homo sapien
caaaattgcaaattacaacaacagaagataaca

SEQ ID NO: 227230 - DNA, 33 bp, Homo sapien
caaaattgcaaattacgacaacagaagataaca

SEQ ID NO: 227231 - DNA, 33 bp, Homo sapien
ccagaaaatgacatccaaccttagacagcgttt

SEQ ID NO: 227232 - DNA, 33 bp, Homo sapien
ccagaaaatgacatcccaccttagacagcgttt

SEQ ID NO: 227233 - DNA, 33 bp, Homo sapien
aatcacaggaagtcaaaacttacactgagtcag

SEQ ID NO: 227234 - DNA, 33 bp, Homo sapien
aatcacaggaagtcaatacttacactgagtcag

SEQ ID NO: 227235 - DNA, 33 bp, Homo sapien
tcagtcttaggttttacgatagtaacgttatct

SEQ ID NO: 227236 - DNA, 33 bp, Homo sapien
tcagtcttaggttttatgatagtaacgttatct

SEQ ID NO: 227237 - DNA, 33 bp, Homo sapien
ggttttcattttccaacgtaaggagcttgaaaa

SEQ ID NO: 227238 - DNA, 33 bp, Homo sapien
ggttttcattttccaatgtaaggagcttgaaaa

SEQ ID NO: 227239 - DNA, 33 bp, Homo sapien
ctgatctgagtgaaagaaaatggctcacttcag

SEQ ID NO: 227240 - DNA, 33 bp, Homo sapien
ctgatctgagtgaaaggaaatggctcacttcag

SEQ ID NO: 227241 - DNA, 33 bp, Homo sapien
caggctggagaattccaaaaacgactgagttcc

SEQ ID NO: 227242 - DNA, 33 bp, Homo sapien
caggctggagaattccgaaaacgactgagttcc

SEQ ID NO: 227243 - DNA, 33 bp, Homo sapien
agtattcaaaaaggcacagtccagggaagacaa

SEQ ID NO: 227244 - DNA, 33 bp, Homo sapien
agtattcaaaaaggcagagtccagggaagacaa

SEQ ID NO: 227245 - DNA, 33 bp, Homo sapien
agtacagtgaaaataacgttacggttcaatagt

SEQ ID NO: 227246 - DNA, 33 bp, Homo sapien
agtacagtgaaaataatgttacggttcaatagt

SEQ ID NO: 227247 - DNA, 33 bp, Homo sapien
ttggattaagtgattgcagatttaaagtggccc

SEQ ID NO: 227248 - DNA, 33 bp, Homo sapien
ttggattaagtgattgtagatttaaagtggccc

SEQ ID NO: 227249 - DNA, 33 bp, Homo sapien
aaaataaatgagacaacgaattggaaaatatag

SEQ ID NO: 227250 - DNA, 33 bp, Homo sapien
aaaataaatgagacaatgaattggaaaatatag

SEQ ID NO: 227251 - DNA, 33 bp, Homo sapien
atactggaatggaaaaagagattatccctacag

SEQ ID NO: 227252 - DNA, 33 bp, Homo sapien
atactggaatggaaaaggagattatccctacag

SEQ ID NO: 227253 - DNA, 33 bp, Homo sapien
ttaaggccgtgattgaaatcaaaacaatctaga

SEQ ID NO: 227254 - DNA, 33 bp, Homo sapien
ttaaggccgtgattgacatcaaaacaatctaga

SEQ ID NO: 227255 - DNA, 33 bp, Homo sapien
agaggaataggaagcaagacagaagaagtgatg

SEQ ID NO: 227256 - DNA, 33 bp, Homo sapien
agaggaataggaagcaggacagaagaagtgatg

SEQ ID NO: 227257 - DNA, 33 bp, Homo sapien
tttaaaagacatgaacaaatggtaaatacatac

SEQ ID NO: 227258 - DNA, 33 bp, Homo sapien
tttaaaagacatgaacgaatggtaaatacatac

SEQ ID NO: 227259 - DNA, 33 bp, Homo sapien
ctgtgacctgagtaaacgaaccaatctctttgc

SEQ ID NO: 227260 - DNA, 33 bp, Homo sapien
ctgtgacctgagtaaatgaaccaatctctttgc

SEQ ID NO: 227261 - DNA, 33 bp, Homo sapien
gaagcatgtggtaaaagaagagggggatcaata

SEQ ID NO: 227262 - DNA, 33 bp, Homo sapien
gaagcatgtggtaaaataagagggggatcaata

SEQ ID NO: 227263 - DNA, 33 bp, Homo sapien
taattttgctgataatcacaaaaaagtctatca

SEQ ID NO: 227264 - DNA, 33 bp, Homo sapien
taattttgctgataattacaaaaaagtctatca

SEQ ID NO: 227265 - DNA, 33 bp, Homo sapien
atgtgcatccagaaaaagagcttggctttggcc

SEQ ID NO: 227266 - DNA, 33 bp, Homo sapien
atgtgcatccagaaaaggagcttggctttggcc

SEQ ID NO: 227267 - DNA, 33 bp, Homo sapien
gatatttgctgaatgaacaacagaaaattgtat

SEQ ID NO: 227268 - DNA, 33 bp, Homo sapien
gatatttgctgaatgagcaacagaaaattgtat

SEQ ID NO: 227269 - DNA, 33 bp, Homo sapien
ccatttcttgagttgacaacagggaaagctaga

SEQ ID NO: 227270 - DNA, 33 bp, Homo sapien
ccatttcttgagttgataacagggaaagctaga

SEQ ID NO: 227271 - DNA, 33 bp, Homo sapien
aacaatctactgttccaataattatcttctttg

SEQ ID NO: 227272 - DNA, 33 bp, Homo sapien
aacaatctactgttccgataattatcttctttg

SEQ ID NO: 227273 - DNA, 33 bp, Homo sapien
aaaatttcatatgatactaaccattgtgtttgg

SEQ ID NO: 227274 - DNA, 33 bp, Homo sapien
aaaatttcatatgatattaaccattgtgtttgg

SEQ ID NO: 227275 - DNA, 33 bp, Homo sapien
ttttgttagcttctggaaataagataataaaaa

SEQ ID NO: 227276 - DNA, 33 bp, Homo sapien
ttttgttagcttctgggaataagataataaaaa

SEQ ID NO: 227277 - DNA, 33 bp, Homo sapien
gttgctgtccttccaccaattaaaacagatact

SEQ ID NO: 227278 - DNA, 33 bp, Homo sapien
gttgctgtccttccactaattaaaacagatact

SEQ ID NO: 227279 - DNA, 33 bp, Homo sapien
aaagtcgtgaagaagcaacatataatttggaaa

SEQ ID NO: 227280 - DNA, 33 bp, Homo sapien
aaagtcgtgaagaagcgacatataatttggaaa

SEQ ID NO: 227281 - DNA, 33 bp, Homo sapien
tggaatccattttacaacctcataattctttta

SEQ ID NO: 227282 - DNA, 33 bp, Homo sapien
tggaatccattttacagcctcataattctttta

SEQ ID NO: 227283 - DNA, 33 bp, Homo sapien
tataaaatctgcataccaggatgatacaatttg

SEQ ID NO: 227284 - DNA, 33 bp, Homo sapien
tataaaatctgcatacgaggatgatacaatttg

SEQ ID NO: 227285 - DNA, 33 bp, Homo sapien
agtcctttaaaccagaaaaacacattagaagaa

SEQ ID NO: 227286 - DNA, 33 bp, Homo sapien
agtcctttaaaccagagaaacacattagaagaa

SEQ ID NO: 227287 - DNA, 33 bp, Homo sapien
agggcaaattggttagaagaccaactgtgagag

SEQ ID NO: 227288 - DNA, 33 bp, Homo sapien
agggcaaattggttaggagaccaactgtgagag

SEQ ID NO: 227289 - DNA, 33 bp, Homo sapien
tgtgaatggtttataacaagccagggcaggggt

SEQ ID NO: 227290 - DNA, 33 bp, Homo sapien
tgtgaatggtttataataagccagggcaggggt

SEQ ID NO: 227291 - DNA, 33 bp, Homo sapien
tggtgaggaaaatgaactgcagaatggtggttc

SEQ ID NO: 227292 - DNA, 33 bp, Homo sapien
tggtgaggaaaatgaattgcagaatggtggttc

SEQ ID NO: 227293 - DNA, 33 bp, Homo sapien
tgttaaattgttgtgaccaaaatactgatacta

SEQ ID NO: 227294 - DNA, 33 bp, Homo sapien
tgttaaattgttgtgagcaaaatactgatacta

SEQ ID NO: 227295 - DNA, 33 bp, Homo sapien
cacattttaaggtcaaatcgtcccttcaatgcc

SEQ ID NO: 227296 - DNA, 33 bp, Homo sapien
cacattttaaggtcaattcgtcccttcaatgcc

SEQ ID NO: 227297 - DNA, 33 bp, Homo sapien
gggtttgctctcagtaataaccatcccaggctg

SEQ ID NO: 227298 - DNA, 33 bp, Homo sapien
gggtttgctctcagtagtaaccatcccaggctg

SEQ ID NO: 227299 - DNA, 33 bp, Homo sapien
tctgaccaggaaatcacgaggcttccaaattct

SEQ ID NO: 227300 - DNA, 33 bp, Homo sapien
tctgaccaggaaatcatgaggcttccaaattct

SEQ ID NO: 227301 - DNA, 33 bp, Homo sapien
cagaaagttcttctaacggttcaaacattgtat

SEQ ID NO: 227302 - DNA, 33 bp, Homo sapien
cagaaagttcttctaatggttcaaacattgtat

SEQ ID NO: 227303 - DNA, 33 bp, Homo sapien
aaaaattaagttccacagtgatttacagaataa

SEQ ID NO: 227304 - DNA, 33 bp, Homo sapien
aaaaattaagttccactgtgatttacagaataa

SEQ ID NO: 227305 - DNA, 33 bp, Homo sapien
cctgagacacccttcacagtcgtgctacaggaa

SEQ ID NO: 227306 - DNA, 33 bp, Homo sapien
cctgagacacccttcatagtcgtgctacaggaa

SEQ ID NO: 227307 - DNA, 33 bp, Homo sapien
atacaaacattttcagcccatatttttgagtca

SEQ ID NO: 227308 - DNA, 33 bp, Homo sapien
atacaaacattttcagtccatatttttgagtca

SEQ ID NO: 227309 - DNA, 33 bp, Homo sapien
gaattctggagttatacggcttatcaacatcag

SEQ ID NO: 227310 - DNA, 33 bp, Homo sapien
gaattctggagttatatggcttatcaacatcag

SEQ ID NO: 227311 - DNA, 33 bp, Homo sapien
attttacaaacatatgccaatccatgtacacat

SEQ ID NO: 227312 - DNA, 33 bp, Homo sapien
attttacaaacatatgtcaatccatgtacacat

SEQ ID NO: 227313 - DNA, 33 bp, Homo sapien
aagaactcaactatctcaacaggaaaaaaattg

SEQ ID NO: 227314 - DNA, 33 bp, Homo sapien
aagaactcaactatctgaacaggaaaaaaattg

SEQ ID NO: 227315 - DNA, 33 bp, Homo sapien
gtttagattcagttagaatgtgtataggtgtat

SEQ ID NO: 227316 - DNA, 33 bp, Homo sapien
gtttagattcagttagtatgtgtataggtgtat

SEQ ID NO: 227317 - DNA, 33 bp, Homo sapien
atgtaagttactgcaacatttttaaaggctaat

SEQ ID NO: 227318 - DNA, 33 bp, Homo sapien
atgtaagttactgcaatatttttaaaggctaat

SEQ ID NO: 227319 - DNA, 33 bp, Homo sapien
taacctcaacttgaaagctctatcagaatgatt

SEQ ID NO: 227320 - DNA, 33 bp, Homo sapien
taacctcaacttgaaatctctatcagaatgatt

SEQ ID NO: 227321 - DNA, 33 bp, Homo sapien
tcttctacagtgagtgaaaatttcaaaaaagat

SEQ ID NO: 227322 - DNA, 33 bp, Homo sapien
tcttctacagtgagtgtaaatttcaaaaaagat

SEQ ID NO: 227323 - DNA, 33 bp, Homo sapien
tttatgctatcacgaacattgtccttgttttgt

SEQ ID NO: 227324 - DNA, 33 bp, Homo sapien
tttatgctatcacgaatattgtccttgttttgt

SEQ ID NO: 227325 - DNA, 33 bp, Homo sapien
actgcaaattactgcaaccactataaagaacag

SEQ ID NO: 227326 - DNA, 33 bp, Homo sapien
actgcaaattactgcacccactataaagaacag

SEQ ID NO: 227327 - DNA, 33 bp, Homo sapien
aaagtccactgctaaagccacatagaatttaag

SEQ ID NO: 227328 - DNA, 33 bp, Homo sapien
aaagtccactgctaaatccacatagaatttaag

SEQ ID NO: 227329 - DNA, 33 bp, Homo sapien
aggttcccatcgaaaaattccaaaacagtgtgc

SEQ ID NO: 227330 - DNA, 33 bp, Homo sapien
aggttcccatcgaaaagttccaaaacagtgtgc

SEQ ID NO: 227331 - DNA, 33 bp, Homo sapien
agaatgtggttcgtgccatggacttgccattga

SEQ ID NO: 227332 - DNA, 33 bp, Homo sapien
agaatgtggttcgtgctatggacttgccattga

SEQ ID NO: 227333 - DNA, 33 bp, Homo sapien
taccgatgtgttgtgaaaaaacaatctcagaag

SEQ ID NO: 227334 - DNA, 33 bp, Homo sapien
taccgatgtgttgtgataaaacaatctcagaag

SEQ ID NO: 227335 - DNA, 33 bp, Homo sapien
agcatcatgtgactcacgaaaattgaatcaaaa

SEQ ID NO: 227336 - DNA, 33 bp, Homo sapien
agcatcatgtgactcatgaaaattgaatcaaaa

SEQ ID NO: 227337 - DNA, 33 bp, Homo sapien
agtccatgccaggagccctgatgtacaaaatgt

SEQ ID NO: 227338 - DNA, 33 bp, Homo sapien
agtccatgccaggagctctgatgtacaaaatgt

SEQ ID NO: 227339 - DNA, 33 bp, Homo sapien
tactgttgaaagttaaaatattaggtattaatt

SEQ ID NO: 227340 - DNA, 33 bp, Homo sapien
tactgttgaaagttaacatattaggtattaatt

SEQ ID NO: 227341 - DNA, 33 bp, Homo sapien
gcggccagtgactagaagaacaaggatgagaat

SEQ ID NO: 227342 - DNA, 33 bp, Homo sapien
gcggccagtgactagaggaacaaggatgagaat

SEQ ID NO: 227343 - DNA, 33 bp, Homo sapien
gcagataatttgctcacactaaggataaaaata

SEQ ID NO: 227344 - DNA, 33 bp, Homo sapien
gcagataatttgctcagactaaggataaaaata

SEQ ID NO: 227345 - DNA, 33 bp, Homo sapien
ttaagtggtttctaacaaggggaagatttgaga

SEQ ID NO: 227346 - DNA, 33 bp, Homo sapien
ttaagtggtttctaacgaggggaagatttgaga

SEQ ID NO: 227347 - DNA, 33 bp, Homo sapien
tatttctaagcaactgccaaaagaaggcagctg

SEQ ID NO: 227348 - DNA, 33 bp, Homo sapien
tatttctaagcaactgtcaaaagaaggcagctg

SEQ ID NO: 227349 - DNA, 33 bp, Homo sapien
tgcttgaatactgctaaagataaaaatggcaaa

SEQ ID NO: 227350 - DNA, 33 bp, Homo sapien
tgcttgaatactgctacagataaaaatggcaaa

SEQ ID NO: 227351 - DNA, 33 bp, Homo sapien
ggatatatacttacaacacctgatacaatgtca

SEQ ID NO: 227352 - DNA, 33 bp, Homo sapien
ggatatatacttacaatacctgatacaatgtca

SEQ ID NO: 227353 - DNA, 33 bp, Homo sapien
taactaccatctatcactcactttctgtacatg

SEQ ID NO: 227354 - DNA, 33 bp, Homo sapien
taactaccatctatcattcactttctgtacatg

SEQ ID NO: 227355 - DNA, 33 bp, Homo sapien
tcaagacattgcaaaacagggtggcatagtatt

SEQ ID NO: 227356 - DNA, 33 bp, Homo sapien
tcaagacattgcaaaatagggtggcatagtatt

SEQ ID NO: 227357 - DNA, 33 bp, Homo sapien
ctagcttctctcttaactagcttctttgttgtt

SEQ ID NO: 227358 - DNA, 33 bp, Homo sapien
ctagcttctctcttaattagcttctttgttgtt

SEQ ID NO: 227359 - DNA, 33 bp, Homo sapien
atcactgagacttcacaagtaaagaaaagaagc

SEQ ID NO: 227360 - DNA, 33 bp, Homo sapien
atcactgagacttcacgagtaaagaaaagaagc

SEQ ID NO: 227361 - DNA, 33 bp, Homo sapien
ttgcttaaaattatgaaattgcattacctgaaa

SEQ ID NO: 227362 - DNA, 33 bp, Homo sapien
ttgcttaaaattatgatattgcattacctgaaa

SEQ ID NO: 227363 - DNA, 33 bp, Homo sapien
cttcaagctaccagaaacatcctttccattttg

SEQ ID NO: 227364 - DNA, 33 bp, Homo sapien
cttcaagctaccagaagcatcctttccattttg

SEQ ID NO: 227365 - DNA, 33 bp, Homo sapien
tattataaatctgtataacctttgctaaggtga

SEQ ID NO: 227366 - DNA, 33 bp, Homo sapien
tattataaatctgtattacctttgctaaggtga

SEQ ID NO: 227367 - DNA, 33 bp, Homo sapien
gatcttgaaccacacaaagcttcttcagtgcca

SEQ ID NO: 227368 - DNA, 33 bp, Homo sapien
gatcttgaaccacacagagcttcttcagtgcca

SEQ ID NO: 227369 - DNA, 33 bp, Homo sapien
aatagtgagtgtgaataaggaaacactgaggca

SEQ ID NO: 227370 - DNA, 33 bp, Homo sapien
aatagtgagtgtgaatcaggaaacactgaggca

SEQ ID NO: 227371 - DNA, 33 bp, Homo sapien
ttatatatatataaaacttcccaggctccaatt

SEQ ID NO: 227372 - DNA, 33 bp, Homo sapien
ttatatatatataaaagttcccaggctccaatt

SEQ ID NO: 227373 - DNA, 33 bp, Homo sapien
acttttagtggcttcaaatttctaaaaacagaa

SEQ ID NO: 227374 - DNA, 33 bp, Homo sapien
acttttagtggcttcagatttctaaaaacagaa

SEQ ID NO: 227375 - DNA, 33 bp, Homo sapien
ggtaagcaactaacaaattgtcgtataggtcat

SEQ ID NO: 227376 - DNA, 33 bp, Homo sapien
ggtaagcaactaacaatttgtcgtataggtcat

SEQ ID NO: 227377 - DNA, 33 bp, Homo sapien
attatcatgaatgaagaagaaaaataaagtccc

SEQ ID NO: 227378 - DNA, 33 bp, Homo sapien
attatcatgaatgaaggagaaaaataaagtccc

SEQ ID NO: 227379 - DNA, 33 bp, Homo sapien
ggctcacttcagatcccaggggttatggtctgc

SEQ ID NO: 227380 - DNA, 33 bp, Homo sapien
ggctcacttcagatcctaggggttatggtctgc

SEQ ID NO: 227381 - DNA, 33 bp, Homo sapien
aattggagagaaacataaggtggaatactttcc

SEQ ID NO: 227382 - DNA, 33 bp, Homo sapien
aattggagagaaacatgaggtggaatactttcc

SEQ ID NO: 227383 - DNA, 33 bp, Homo sapien
gaacatccagaaagagaattcccaggttgtgac

SEQ ID NO: 227384 - DNA, 33 bp, Homo sapien
gaacatccagaaagagtattcccaggttgtgac

SEQ ID NO: 227385 - DNA, 33 bp, Homo sapien
ttctcttctcaattccactagctaaaaccctgc

SEQ ID NO: 227386 - DNA, 33 bp, Homo sapien
ttctcttctcaattcccctagctaaaaccctgc

SEQ ID NO: 227387 - DNA, 33 bp, Homo sapien
attcacatttctatcacagacattttgtgaacc

SEQ ID NO: 227388 - DNA, 33 bp, Homo sapien
attcacatttctatcatagacattttgtgaacc

SEQ ID NO: 227389 - DNA, 33 bp, Homo sapien
aaacactaatttagatcaaaaccacatagagat

SEQ ID NO: 227390 - DNA, 33 bp, Homo sapien
aaacactaatttagatgaaaaccacatagagat

SEQ ID NO: 227391 - DNA, 33 bp, Homo sapien
gataatgaaactcaaagatgtgatcagacttat

SEQ ID NO: 227392 - DNA, 33 bp, Homo sapien
gataatgaaactcaaatatgtgatcagacttat

SEQ ID NO: 227393 - DNA, 33 bp, Homo sapien
gtcattatgagaaagacgtcaaattcattaaga

SEQ ID NO: 227394 - DNA, 33 bp, Homo sapien
gtcattatgagaaagaggtcaaattcattaaga

SEQ ID NO: 227395 - DNA, 33 bp, Homo sapien
tgctgtccatggtgaactattagaagtcactct

SEQ ID NO: 227396 - DNA, 33 bp, Homo sapien
tgctgtccatggtgaattattagaagtcactct

SEQ ID NO: 227397 - DNA, 33 bp, Homo sapien
agagacattatttcccagcttcttgaaccattt

SEQ ID NO: 227398 - DNA, 33 bp, Homo sapien
agagacattatttcccggcttcttgaaccattt

SEQ ID NO: 227399 - DNA, 33 bp, Homo sapien
tcttccaacagagagaaaaagctaaaaagtaga

SEQ ID NO: 227400 - DNA, 33 bp, Homo sapien
tcttccaacagagagagaaagctaaaaagtaga

SEQ ID NO: 227401 - DNA, 33 bp, Homo sapien
atatcaaaagttaaacagatcatcatattgctt

SEQ ID NO: 227402 - DNA, 33 bp, Homo sapien
atatcaaaagttaaactgatcatcatattgctt

SEQ ID NO: 227403 - DNA, 33 bp, Homo sapien
ccttagaccctaacaccagacatgccagaataa

SEQ ID NO: 227404 - DNA, 33 bp, Homo sapien
ccttagaccctaacactagacatgccagaataa

SEQ ID NO: 227405 - DNA, 33 bp, Homo sapien
gcgtcacttctccccaaccttaggcagcaaagg

SEQ ID NO: 227406 - DNA, 33 bp, Homo sapien
gcgtcacttctccccagccttaggcagcaaagg

SEQ ID NO: 227407 - DNA, 33 bp, Homo sapien
cccaaactaacagcataaaaaggataatagatc

SEQ ID NO: 227408 - DNA, 33 bp, Homo sapien
cccaaactaacagcatcaaaaggataatagatc

SEQ ID NO: 227409 - DNA, 33 bp, Homo sapien
gactccaactgtgtcacattctgaacaaagcaa

SEQ ID NO: 227410 - DNA, 33 bp, Homo sapien
gactccaactgtgtcatattctgaacaaagcaa

SEQ ID NO: 227411 - DNA, 33 bp, Homo sapien
tacttcctagatacaacgagtttacaggcattg

SEQ ID NO: 227412 - DNA, 33 bp, Homo sapien
tacttcctagatacaatgagtttacaggcattg

SEQ ID NO: 227413 - DNA, 33 bp, Homo sapien
tatgagccttacataaaagagaaatggaacgaa

SEQ ID NO: 227414 - DNA, 33 bp, Homo sapien
tatgagccttacataagagagaaatggaacgaa

SEQ ID NO: 227415 - DNA, 33 bp, Homo sapien
tttccagcatttagcaagcattttccataatta

SEQ ID NO: 227416 - DNA, 33 bp, Homo sapien
tttccagcatttagcaggcattttccataatta

SEQ ID NO: 227417 - DNA, 33 bp, Homo sapien
acagtttttgaccactcagagatgtccatccac

SEQ ID NO: 227418 - DNA, 33 bp, Homo sapien
acagtttttgaccactgagagatgtccatccac

SEQ ID NO: 227419 - DNA, 33 bp, Homo sapien
cattcctccatccagaactaagacctctaggcc

SEQ ID NO: 227420 - DNA, 33 bp, Homo sapien
cattcctccatccagagctaagacctctaggcc

SEQ ID NO: 227421 - DNA, 33 bp, Homo sapien
tcccaaatcgaaaggagcagatctcactgtttg

SEQ ID NO: 227422 - DNA, 33 bp, Homo sapien
tcccaaatcgaaaggatcagatctcactgtttg

SEQ ID NO: 227423 - DNA, 33 bp, Homo sapien
tttttcaggagtctgacagaattttgataaaga

SEQ ID NO: 227424 - DNA, 33 bp, Homo sapien
tttttcaggagtctgatagaattttgataaaga

SEQ ID NO: 227425 - DNA, 33 bp, Homo sapien
attcataccagaaacactgaagtcatacttgaa

SEQ ID NO: 227426 - DNA, 33 bp, Homo sapien
attcataccagaaacattgaagtcatacttgaa

SEQ ID NO: 227427 - DNA, 33 bp, Homo sapien
aaatccagttgcacaaaaaaatggggaaaagtt

SEQ ID NO: 227428 - DNA, 33 bp, Homo sapien
aaatccagttgcacaagaaaatggggaaaagtt

SEQ ID NO: 227429 - DNA, 33 bp, Homo sapien
tttatgttctgagaagcctacagggattgacat

SEQ ID NO: 227430 - DNA, 33 bp, Homo sapien
tttatgttctgagaaggctacagggattgacat

SEQ ID NO: 227431 - DNA, 33 bp, Homo sapien
ttttatcttatcacagaccgtcttaaaataata

SEQ ID NO: 227432 - DNA, 33 bp, Homo sapien
ttttatcttatcacaggccgtcttaaaataata

SEQ ID NO: 227433 - DNA, 33 bp, Homo sapien
ctggtattgaagtacaccttgagtaacattgat

SEQ ID NO: 227434 - DNA, 33 bp, Homo sapien
ctggtattgaagtacatcttgagtaacattgat

SEQ ID NO: 227435 - DNA, 33 bp, Homo sapien
cacgagccagtgttgaagttctgtggcgtttcc

SEQ ID NO: 227436 - DNA, 33 bp, Homo sapien
cacgagccagtgttgaggttctgtggcgtttcc

SEQ ID NO: 227437 - DNA, 33 bp, Homo sapien
ctgttacaaactttacaattctcatgacagtcc

SEQ ID NO: 227438 - DNA, 33 bp, Homo sapien
ctgttacaaactttacgattctcatgacagtcc

SEQ ID NO: 227439 - DNA, 33 bp, Homo sapien
tttagagttcaatttcaaaggatgtcttcattt

SEQ ID NO: 227440 - DNA, 33 bp, Homo sapien
tttagagttcaatttcgaaggatgtcttcattt

SEQ ID NO: 227441 - DNA, 33 bp, Homo sapien
acattcattcattaaagtatttgcttagttcta

SEQ ID NO: 227442 - DNA, 33 bp, Homo sapien
acattcattcattaaattatttgcttagttcta

SEQ ID NO: 227443 - DNA, 33 bp, Homo sapien
gaatgatatcacctggaaaagtgtgagggagat

SEQ ID NO: 227444 - DNA, 33 bp, Homo sapien
gaatgatatcacctgggaaagtgtgagggagat

SEQ ID NO: 227445 - DNA, 33 bp, Homo sapien
aaatttttcaattgatcactctgtgcttgtaat

SEQ ID NO: 227446 - DNA, 33 bp, Homo sapien
aaatttttcaattgattactctgtgcttgtaat

SEQ ID NO: 227447 - DNA, 33 bp, Homo sapien
aagcctcagctaattcaaacatagcaagcagga

SEQ ID NO: 227448 - DNA, 33 bp, Homo sapien
aagcctcagctaattccaacatagcaagcagga

SEQ ID NO: 227449 - DNA, 33 bp, Homo sapien
tttcctcctgtagctcaaatttcctactgtagt

SEQ ID NO: 227450 - DNA, 33 bp, Homo sapien
tttcctcctgtagctcgaatttcctactgtagt

SEQ ID NO: 227451 - DNA, 33 bp, Homo sapien
gatacagctcctacccgcaaaaggtttgccatt

SEQ ID NO: 227452 - DNA, 33 bp, Homo sapien
gatacagctcctaccctcaaaaggtttgccatt

SEQ ID NO: 227453 - DNA, 33 bp, Homo sapien
aaggtatagaaaagtagatctggagttgacaga

SEQ ID NO: 227454 - DNA, 33 bp, Homo sapien
aaggtatagaaaagtatatctggagttgacaga

SEQ ID NO: 227455 - DNA, 33 bp, Homo sapien
atgctatgaccggtacactgcaaattacatttc

SEQ ID NO: 227456 - DNA, 33 bp, Homo sapien
atgctatgaccggtaccctgcaaattacatttc

SEQ ID NO: 227457 - DNA, 33 bp, Homo sapien
aaggccatttcctaggacagctagccaccaaaa

SEQ ID NO: 227458 - DNA, 33 bp, Homo sapien
aaggccatttcctagggcagctagccaccaaaa

SEQ ID NO: 227459 - DNA, 33 bp, Homo sapien
ctgatacctctgagaaatgctatgaagctagct

SEQ ID NO: 227460 - DNA, 33 bp, Homo sapien
ctgatacctctgagaagtgctatgaagctagct

SEQ ID NO: 227461 - DNA, 33 bp, Homo sapien
agaaactctgggcaacaatatacttgacaatca

SEQ ID NO: 227462 - DNA, 33 bp, Homo sapien
agaaactctgggcaaccatatacttgacaatca

SEQ ID NO: 227463 - DNA, 33 bp, Homo sapien
tttctcctacccactggatctgattaagtccta

SEQ ID NO: 227464 - DNA, 33 bp, Homo sapien
tttctcctacccactgtatctgattaagtccta

SEQ ID NO: 227465 - DNA, 33 bp, Homo sapien
tgagagcgtggattccaactcatgatatatctg

SEQ ID NO: 227466 - DNA, 33 bp, Homo sapien
tgagagcgtggattcctactcatgatatatctg

SEQ ID NO: 227467 - DNA, 33 bp, Homo sapien
ttcatcgaaactatgtaaaaatgagatatctaa

SEQ ID NO: 227468 - DNA, 33 bp, Homo sapien
ttcatcgaaactatgtgaaaatgagatatctaa

SEQ ID NO: 227469 - DNA, 33 bp, Homo sapien
ctcctcatcacctttacactgaacaggctgagg

SEQ ID NO: 227470 - DNA, 33 bp, Homo sapien
ctcctcatcacctttatactgaacaggctgagg

SEQ ID NO: 227471 - DNA, 33 bp, Homo sapien
aattaaaatgcaggcaaggcaaattgtaaaaac

SEQ ID NO: 227472 - DNA, 33 bp, Homo sapien
aattaaaatgcaggcacggcaaattgtaaaaac

SEQ ID NO: 227473 - DNA, 33 bp, Homo sapien
agagtaaacagacataatacagggtggcagaaa

SEQ ID NO: 227474 - DNA, 33 bp, Homo sapien
agagtaaacagacatactacagggtggcagaaa

SEQ ID NO: 227475 - DNA, 33 bp, Homo sapien
gtttctagggcactaccatcagcagacagtgaa

SEQ ID NO: 227476 - DNA, 33 bp, Homo sapien
gtttctagggcactacgatcagcagacagtgaa

SEQ ID NO: 227477 - DNA, 33 bp, Homo sapien
gttcatccacttaccaaccctgactctagtagt

SEQ ID NO: 227478 - DNA, 33 bp, Homo sapien
gttcatccacttaccagccctgactctagtagt

SEQ ID NO: 227479 - DNA, 33 bp, Homo sapien
cctccagttgcttctacgttgcttcaaaggaga

SEQ ID NO: 227480 - DNA, 33 bp, Homo sapien
cctccagttgcttctatgttgcttcaaaggaga

SEQ ID NO: 227481 - DNA, 33 bp, Homo sapien
gtattaacattagcccccttgctacttatccaa

SEQ ID NO: 227482 - DNA, 33 bp, Homo sapien
gtattaacattagccctcttgctacttatccaa

SEQ ID NO: 227483 - DNA, 33 bp, Homo sapien
gtttcacaaatgtctacgtcaagggcaaaatac

SEQ ID NO: 227484 - DNA, 33 bp, Homo sapien
gtttcacaaatgtctatgtcaagggcaaaatac

SEQ ID NO: 227485 - DNA, 33 bp, Homo sapien
attggtgtaaatggtaagagttgcatatatcac

SEQ ID NO: 227486 - DNA, 33 bp, Homo sapien
attggtgtaaatggtaggagttgcatatatcac

SEQ ID NO: 227487 - DNA, 33 bp, Homo sapien
atgggcagaagtagcacatagagatttccacca

SEQ ID NO: 227488 - DNA, 33 bp, Homo sapien
atgggcagaagtagcatatagagatttccacca

SEQ ID NO: 227489 - DNA, 33 bp, Homo sapien
atatcagcattcccaaatattaaggatacagtg

SEQ ID NO: 227490 - DNA, 33 bp, Homo sapien
atatcagcattcccaattattaaggatacagtg

SEQ ID NO: 227491 - DNA, 33 bp, Homo sapien
gaccacataaaaagaaaggtttacacagctaaa

SEQ ID NO: 227492 - DNA, 33 bp, Homo sapien
gaccacataaaaagaagggtttacacagctaaa

SEQ ID NO: 227493 - DNA, 33 bp, Homo sapien
actgattatttctgtaacaacaacgtaatatct

SEQ ID NO: 227494 - DNA, 33 bp, Homo sapien
actgattatttctgtatcaacaacgtaatatct

SEQ ID NO: 227495 - DNA, 33 bp, Homo sapien
agataagaattgtgcacgaggcttagtgatcaa

SEQ ID NO: 227496 - DNA, 33 bp, Homo sapien
agataagaattgtgcatgaggcttagtgatcaa

SEQ ID NO: 227497 - DNA, 33 bp, Homo sapien
caaaaattgctggaaaaataatggactgttcta

SEQ ID NO: 227498 - DNA, 33 bp, Homo sapien
caaaaattgctggaaatataatggactgttcta

SEQ ID NO: 227499 - DNA, 33 bp, Homo sapien
ctttcctttggctccactccttcatctctctcg

SEQ ID NO: 227500 - DNA, 33 bp, Homo sapien
ctttcctttggctccattccttcatctctctcg

SEQ ID NO: 227501 - DNA, 33 bp, Homo sapien
ttaatcataaacaatacgggctatggtactgat

SEQ ID NO: 227502 - DNA, 33 bp, Homo sapien
ttaatcataaacaatatgggctatggtactgat

SEQ ID NO: 227503 - DNA, 33 bp, Homo sapien
tgaaaaatgattggaaaaagtctgtgtaactat

SEQ ID NO: 227504 - DNA, 33 bp, Homo sapien
tgaaaaatgattggaacaagtctgtgtaactat

SEQ ID NO: 227505 - DNA, 33 bp, Homo sapien
gaaatccaaattcagcccttgttttctgtccat

SEQ ID NO: 227506 - DNA, 33 bp, Homo sapien
gaaatccaaattcagctcttgttttctgtccat

SEQ ID NO: 227507 - DNA, 33 bp, Homo sapien
acaaagattcataacacacaaggaaagggttag

SEQ ID NO: 227508 - DNA, 33 bp, Homo sapien
acaaagattcataacagacaaggaaagggttag

SEQ ID NO: 227509 - DNA, 33 bp, Homo sapien
cagcaaccattccataccgttagacaaaaccat

SEQ ID NO: 227510 - DNA, 33 bp, Homo sapien
cagcaaccattccatatcgttagacaaaaccat

SEQ ID NO: 227511 - DNA, 33 bp, Homo sapien
aatgaaaggatttataacttggtccagaagctt

SEQ ID NO: 227512 - DNA, 33 bp, Homo sapien
aatgaaaggatttatagcttggtccagaagctt

SEQ ID NO: 227513 - DNA, 33 bp, Homo sapien
gtaaaatttgcaagatcaatgaacagagaaaag

SEQ ID NO: 227514 - DNA, 33 bp, Homo sapien
gtaaaatttgcaagattaatgaacagagaaaag

SEQ ID NO: 227515 - DNA, 33 bp, Homo sapien
cagaatagttatagcacccctggactctatact

SEQ ID NO: 227516 - DNA, 33 bp, Homo sapien
cagaatagttatagcatccctggactctatact

SEQ ID NO: 227517 - DNA, 33 bp, Homo sapien
tctccccagcaaaaaaatattccactaaaaata

SEQ ID NO: 227518 - DNA, 33 bp, Homo sapien
tctccccagcaaaaaattattccactaaaaata

SEQ ID NO: 227519 - DNA, 33 bp, Homo sapien
caggctcagatgtttccaggcaatggaaggaga

SEQ ID NO: 227520 - DNA, 33 bp, Homo sapien
caggctcagatgtttctaggcaatggaaggaga

SEQ ID NO: 227521 - DNA, 33 bp, Homo sapien
tgataaaaagctgttacgaacaatgaggggaga

SEQ ID NO: 227522 - DNA, 33 bp, Homo sapien
tgataaaaagctgttatgaacaatgaggggaga

SEQ ID NO: 227523 - DNA, 33 bp, Homo sapien
atctactgcaagtttacctaatactacattaat

SEQ ID NO: 227524 - DNA, 33 bp, Homo sapien
atctactgcaagtttagctaatactacattaat

SEQ ID NO: 227525 - DNA, 33 bp, Homo sapien
aacatgacactttacactctctccaaacacttt

SEQ ID NO: 227526 - DNA, 33 bp, Homo sapien
aacatgacactttacattctctccaaacacttt

SEQ ID NO: 227527 - DNA, 33 bp, Homo sapien
aggactggttgggagacaaaatgacttaatcat

SEQ ID NO: 227528 - DNA, 33 bp, Homo sapien
aggactggttgggagataaaatgacttaatcat

SEQ ID NO: 227529 - DNA, 33 bp, Homo sapien
cacaggtcactaagaaagcagttcaggactggt

SEQ ID NO: 227530 - DNA, 33 bp, Homo sapien
cacaggtcactaagaaggcagttcaggactggt

SEQ ID NO: 227531 - DNA, 33 bp, Homo sapien
tcagtttcagtcttcaatctttgacatcctttt

SEQ ID NO: 227532 - DNA, 33 bp, Homo sapien
tcagtttcagtcttcagtctttgacatcctttt

SEQ ID NO: 227533 - DNA, 33 bp, Homo sapien
atagatacagattctacggtgccttttttaagg

SEQ ID NO: 227534 - DNA, 33 bp, Homo sapien
atagatacagattctatggtgccttttttaagg

SEQ ID NO: 227535 - DNA, 33 bp, Homo sapien
gagggaaagagacaaaacatagtcacctcacaa

SEQ ID NO: 227536 - DNA, 33 bp, Homo sapien
gagggaaagagacaaaccatagtcacctcacaa

SEQ ID NO: 227537 - DNA, 33 bp, Homo sapien
gtgaatttcactgacacgatcatatagttacct

SEQ ID NO: 227538 - DNA, 33 bp, Homo sapien
gtgaatttcactgacaggatcatatagttacct

SEQ ID NO: 227539 - DNA, 33 bp, Homo sapien
aaggagaaaggacagaaccccctatgcttagag

SEQ ID NO: 227540 - DNA, 33 bp, Homo sapien
aaggagaaaggacagacccccctatgcttagag

SEQ ID NO: 227541 - DNA, 33 bp, Homo sapien
ccataaggatgaaacaacaaaagactggcacta

SEQ ID NO: 227542 - DNA, 33 bp, Homo sapien
ccataaggatgaaacagcaaaagactggcacta

SEQ ID NO: 227543 - DNA, 33 bp, Homo sapien
tatttctgagttattcaagtgactgggaaaagt

SEQ ID NO: 227544 - DNA, 33 bp, Homo sapien
tatttctgagttattcgagtgactgggaaaagt

SEQ ID NO: 227545 - DNA, 33 bp, Homo sapien
cagagactgaaaacaacaattaacgccctctct

SEQ ID NO: 227546 - DNA, 33 bp, Homo sapien
cagagactgaaaacaagaattaacgccctctct

SEQ ID NO: 227547 - DNA, 33 bp, Homo sapien
aagtcacgtcttcacacagtaaatatcaggaat

SEQ ID NO: 227548 - DNA, 33 bp, Homo sapien
aagtcacgtcttcacatagtaaatatcaggaat

SEQ ID NO: 227549 - DNA, 33 bp, Homo sapien
ttgaagtcaggtatcacgttgttctctttgctt

SEQ ID NO: 227550 - DNA, 33 bp, Homo sapien
ttgaagtcaggtatcatgttgttctctttgctt

SEQ ID NO: 227551 - DNA, 33 bp, Homo sapien
tagactatatagaaaaattaactcaatgttggt

SEQ ID NO: 227552 - DNA, 33 bp, Homo sapien
tagactatatagaaaagttaactcaatgttggt

SEQ ID NO: 227553 - DNA, 33 bp, Homo sapien
gaaagaataggtgacactatgaaggtcttgctg

SEQ ID NO: 227554 - DNA, 33 bp, Homo sapien
gaaagaataggtgacagtatgaaggtcttgctg

SEQ ID NO: 227555 - DNA, 33 bp, Homo sapien
aggattaatggcaataaaatgttaacaggtctt

SEQ ID NO: 227556 - DNA, 33 bp, Homo sapien
aggattaatggcaatagaatgttaacaggtctt

SEQ ID NO: 227557 - DNA, 33 bp, Homo sapien
tctccattgtttgaagcaaaaaagatagctttg

SEQ ID NO: 227558 - DNA, 33 bp, Homo sapien
tctccattgtttgaagtaaaaaagatagctttg

SEQ ID NO: 227559 - DNA, 33 bp, Homo sapien
tatcttcagtttttccacattgtaaataatatg

SEQ ID NO: 227560 - DNA, 33 bp, Homo sapien
tatcttcagtttttcctcattgtaaataatatg

SEQ ID NO: 227561 - DNA, 33 bp, Homo sapien
ctggtccctgatgacaacaaattggaaattgct

SEQ ID NO: 227562 - DNA, 33 bp, Homo sapien
ctggtccctgatgacagcaaattggaaattgct

SEQ ID NO: 227563 - DNA, 33 bp, Homo sapien
tttcaggtgagtaatccgaggttcatggaattt

SEQ ID NO: 227564 - DNA, 33 bp, Homo sapien
tttcaggtgagtaatctgaggttcatggaattt

SEQ ID NO: 227565 - DNA, 33 bp, Homo sapien
gagagctagatagtaacagaaaaggttatacct

SEQ ID NO: 227566 - DNA, 33 bp, Homo sapien
gagagctagatagtaatagaaaaggttatacct

SEQ ID NO: 227567 - DNA, 33 bp, Homo sapien
caccatttgttttccaagtggctttgatggagt

SEQ ID NO: 227568 - DNA, 33 bp, Homo sapien
caccatttgttttccatgtggctttgatggagt

SEQ ID NO: 227569 - DNA, 33 bp, Homo sapien
ctgagaagtactgcaacatactatgtaaatttc

SEQ ID NO: 227570 - DNA, 33 bp, Homo sapien
ctgagaagtactgcaatatactatgtaaatttc

SEQ ID NO: 227571 - DNA, 33 bp, Homo sapien
tggttcacagtctctcactccttcaaacctgct

SEQ ID NO: 227572 - DNA, 33 bp, Homo sapien
tggttcacagtctctcgctccttcaaacctgct

SEQ ID NO: 227573 - DNA, 33 bp, Homo sapien
gactttggtgtgcaggaatatcagccctggaaa

SEQ ID NO: 227574 - DNA, 33 bp, Homo sapien
gactttggtgtgcaggtatatcagccctggaaa

SEQ ID NO: 227575 - DNA, 33 bp, Homo sapien
ctcagttcaattgaccagctcaattctaaatct

SEQ ID NO: 227576 - DNA, 33 bp, Homo sapien
ctcagttcaattgaccggctcaattctaaatct

SEQ ID NO: 227577 - DNA, 33 bp, Homo sapien
aaaggaatggaataacacaaagactcagttttg

SEQ ID NO: 227578 - DNA, 33 bp, Homo sapien
aaaggaatggaataacgcaaagactcagttttg

SEQ ID NO: 227579 - DNA, 33 bp, Homo sapien
tatgtcttctgtaccactgcacaactacaacta

SEQ ID NO: 227580 - DNA, 33 bp, Homo sapien
tatgtcttctgtaccattgcacaactacaacta

SEQ ID NO: 227581 - DNA, 33 bp, Homo sapien
attcacctactacttaaacctctttcaagtact

SEQ ID NO: 227582 - DNA, 33 bp, Homo sapien
attcacctactacttatacctctttcaagtact

SEQ ID NO: 227583 - DNA, 33 bp, Homo sapien
catttccatggaatgaaagcgaatctttttact

SEQ ID NO: 227584 - DNA, 33 bp, Homo sapien
catttccatggaatgagagcgaatctttttact

SEQ ID NO: 227585 - DNA, 33 bp, Homo sapien
tcctctgaaaatgcagacattctttggtgaggt

SEQ ID NO: 227586 - DNA, 33 bp, Homo sapien
tcctctgaaaatgcaggcattctttggtgaggt

SEQ ID NO: 227587 - DNA, 33 bp, Homo sapien
tgttttgttaatgagacgaaaatgtttttagaa

SEQ ID NO: 227588 - DNA, 33 bp, Homo sapien
tgttttgttaatgagatgaaaatgtttttagaa

SEQ ID NO: 227589 - DNA, 33 bp, Homo sapien
cttcaagttgtaattcaaatgtcacttactctc

SEQ ID NO: 227590 - DNA, 33 bp, Homo sapien
cttcaagttgtaattctaatgtcacttactctc

SEQ ID NO: 227591 - DNA, 33 bp, Homo sapien
cattgtgaaagagaaaatgtcctcaaaaaagtg

SEQ ID NO: 227592 - DNA, 33 bp, Homo sapien
cattgtgaaagagaaagtgtcctcaaaaaagtg

SEQ ID NO: 227593 - DNA, 33 bp, Homo sapien
ttgataatatgctaaacaagaggtgaataatgc

SEQ ID NO: 227594 - DNA, 33 bp, Homo sapien
ttgataatatgctaaataagaggtgaataatgc

SEQ ID NO: 227595 - DNA, 33 bp, Homo sapien
ttctccaaaatcacaacgctaataaattgaatc

SEQ ID NO: 227596 - DNA, 33 bp, Homo sapien
ttctccaaaatcacaatgctaataaattgaatc

SEQ ID NO: 227597 - DNA, 33 bp, Homo sapien
tgctttgctggccaccagactagaggttctgaa

SEQ ID NO: 227598 - DNA, 33 bp, Homo sapien
tgctttgctggccaccggactagaggttctgaa

SEQ ID NO: 227599 - DNA, 33 bp, Homo sapien
tctggtcccaagcctgaacatatacatccagat

SEQ ID NO: 227600 - DNA, 33 bp, Homo sapien
tctggtcccaagcctgcacatatacatccagat

SEQ ID NO: 227601 - DNA, 33 bp, Homo sapien
cccaaatcctataaaacggtctcacccctatct

SEQ ID NO: 227602 - DNA, 33 bp, Homo sapien
cccaaatcctataaaatggtctcacccctatct

SEQ ID NO: 227603 - DNA, 33 bp, Homo sapien
agccctcaactttctggatggaaaaaattcatt

SEQ ID NO: 227604 - DNA, 33 bp, Homo sapien
agccctcaactttctgtatggaaaaaattcatt

SEQ ID NO: 227605 - DNA, 33 bp, Homo sapien
aaattcattgtcttaactgataatattcgcagg

SEQ ID NO: 227606 - DNA, 33 bp, Homo sapien
aaattcattgtcttaagtgataatattcgcagg

SEQ ID NO: 227607 - DNA, 33 bp, Homo sapien
ataagaccaaaatggaaaactctctaaggaaat

SEQ ID NO: 227608 - DNA, 33 bp, Homo sapien
ataagaccaaaatggagaactctctaaggaaat

SEQ ID NO: 227609 - DNA, 33 bp, Homo sapien
ggaagagccactttcagcagccagcacaggttg

SEQ ID NO: 227610 - DNA, 33 bp, Homo sapien
ggaagagccactttcatcagccagcacaggttg

SEQ ID NO: 227611 - DNA, 33 bp, Homo sapien
ttccttggcaaaacacccaagttgaaaacctca

SEQ ID NO: 227612 - DNA, 33 bp, Homo sapien
ttccttggcaaaacactcaagttgaaaacctca

SEQ ID NO: 227613 - DNA, 33 bp, Homo sapien
acacagtgcatcttcaagtttcttcctttgttt

SEQ ID NO: 227614 - DNA, 33 bp, Homo sapien
acacagtgcatcttcaggtttcttcctttgttt

SEQ ID NO: 227615 - DNA, 33 bp, Homo sapien
acacacaatgttttaacccatttgagcacattt

SEQ ID NO: 227616 - DNA, 33 bp, Homo sapien
acacacaatgttttaatccatttgagcacattt

SEQ ID NO: 227617 - DNA, 33 bp, Homo sapien
tccagaactcttattcagaaggcatatcccgcc

SEQ ID NO: 227618 - DNA, 33 bp, Homo sapien
tccagaactcttattcggaaggcatatcccgcc

SEQ ID NO: 227619 - DNA, 33 bp, Homo sapien
aataaagttactcgaacgtaagcactgtgatag

SEQ ID NO: 227620 - DNA, 33 bp, Homo sapien
aataaagttactcgaatgtaagcactgtgatag

SEQ ID NO: 227621 - DNA, 33 bp, Homo sapien
ttgactaggtgaatgacaaagtgagaataagtc

SEQ ID NO: 227622 - DNA, 33 bp, Homo sapien
ttgactaggtgaatgataaagtgagaataagtc

SEQ ID NO: 227623 - DNA, 33 bp, Homo sapien
cccagcccagtgtgaccgcccacttctacaaaa

SEQ ID NO: 227624 - DNA, 33 bp, Homo sapien
cccagcccagtgtgactgcccacttctacaaaa

SEQ ID NO: 227625 - DNA, 33 bp, Homo sapien
cagagggcaagaagtaagtacaagggagtgtag

SEQ ID NO: 227626 - DNA, 33 bp, Homo sapien
cagagggcaagaagtaggtacaagggagtgtag

SEQ ID NO: 227627 - DNA, 33 bp, Homo sapien
acctgtgtctgagtacgcatttcatctgtcagc

SEQ ID NO: 227628 - DNA, 33 bp, Homo sapien
acctgtgtctgagtactcatttcatctgtcagc

SEQ ID NO: 227629 - DNA, 33 bp, Homo sapien
acctttgaaaattgccacataaaacaacggaac

SEQ ID NO: 227630 - DNA, 33 bp, Homo sapien
acctttgaaaattgccgcataaaacaacggaac

SEQ ID NO: 227631 - DNA, 33 bp, Homo sapien
gctagtgaaggtttggaataggtgaatctccag

SEQ ID NO: 227632 - DNA, 33 bp, Homo sapien
gctagtgaaggtttgggataggtgaatctccag

SEQ ID NO: 227633 - DNA, 33 bp, Homo sapien
ttactagctgcatgacgatgtgcaaatagattg

SEQ ID NO: 227634 - DNA, 33 bp, Homo sapien
ttactagctgcatgactatgtgcaaatagattg

SEQ ID NO: 227635 - DNA, 33 bp, Homo sapien
taaataaatctattaaactcactgttcttaggg

SEQ ID NO: 227636 - DNA, 33 bp, Homo sapien
taaataaatctattaacctcactgttcttaggg

SEQ ID NO: 227637 - DNA, 33 bp, Homo sapien
attccagggagatcaacgtttcataaaaccctg

SEQ ID NO: 227638 - DNA, 33 bp, Homo sapien
attccagggagatcaatgtttcataaaaccctg

SEQ ID NO: 227639 - DNA, 33 bp, Homo sapien
agaatcagtctgaccacgatctgtaacagtagc

SEQ ID NO: 227640 - DNA, 33 bp, Homo sapien
agaatcagtctgaccatgatctgtaacagtagc

SEQ ID NO: 227641 - DNA, 33 bp, Homo sapien
gggggatctctttttactgaggtatactgtggg

SEQ ID NO: 227642 - DNA, 33 bp, Homo sapien
gggggatctctttttagtgaggtatactgtggg

SEQ ID NO: 227643 - DNA, 33 bp, Homo sapien
tagtatgaggtatgagcaatgagaggatagcat

SEQ ID NO: 227644 - DNA, 33 bp, Homo sapien
tagtatgaggtatgagtaatgagaggatagcat

SEQ ID NO: 227645 - DNA, 33 bp, Homo sapien
aaagatcacaaatcaaagaacatcacacctcaa

SEQ ID NO: 227646 - DNA, 33 bp, Homo sapien
aaagatcacaaatcaaggaacatcacacctcaa

SEQ ID NO: 227647 - DNA, 33 bp, Homo sapien
attatccaagtgaatacaactgtgactagaatt

SEQ ID NO: 227648 - DNA, 33 bp, Homo sapien
attatccaagtgaatataactgtgactagaatt

SEQ ID NO: 227649 - DNA, 33 bp, Homo sapien
gataaatcgaatgtacgctatgtgggtatgtgc

SEQ ID NO: 227650 - DNA, 33 bp, Homo sapien
gataaatcgaatgtactctatgtgggtatgtgc

SEQ ID NO: 227651 - DNA, 33 bp, Homo sapien
ttgatatttctgaagaagagtaggtagactttt

SEQ ID NO: 227652 - DNA, 33 bp, Homo sapien
ttgatatttctgaagaggagtaggtagactttt

SEQ ID NO: 227653 - DNA, 33 bp, Homo sapien
cataaacaggtgataaaagcaatttatgaggtt

SEQ ID NO: 227654 - DNA, 33 bp, Homo sapien
cataaacaggtgataacagcaatttatgaggtt

SEQ ID NO: 227655 - DNA, 33 bp, Homo sapien
agcataagaatgaggaagttgtgctagattcaa

SEQ ID NO: 227656 - DNA, 33 bp, Homo sapien
agcataagaatgaggatgttgtgctagattcaa

SEQ ID NO: 227657 - DNA, 33 bp, Homo sapien
atggaaaggctggtacactatggtaaggagatt

SEQ ID NO: 227658 - DNA, 33 bp, Homo sapien
atggaaaggctggtacgctatggtaaggagatt

SEQ ID NO: 227659 - DNA, 33 bp, Homo sapien
gacaaacaaaatttcagaatcaatgagacaaat

SEQ ID NO: 227660 - DNA, 33 bp, Homo sapien
gacaaacaaaatttcataatcaatgagacaaat

SEQ ID NO: 227661 - DNA, 33 bp, Homo sapien
gaagctagagaagacgaatgtaggctgagggaa

SEQ ID NO: 227662 - DNA, 33 bp, Homo sapien
gaagctagagaagacggatgtaggctgagggaa

SEQ ID NO: 227663 - DNA, 33 bp, Homo sapien
agacaatttaagggcacgattcttgccaaaaga

SEQ ID NO: 227664 - DNA, 33 bp, Homo sapien
agacaatttaagggcatgattcttgccaaaaga

SEQ ID NO: 227665 - DNA, 33 bp, Homo sapien
gtgagcccttgcaacaatctccaaaagtaaaga

SEQ ID NO: 227666 - DNA, 33 bp, Homo sapien
gtgagcccttgcaacagtctccaaaagtaaaga

SEQ ID NO: 227667 - DNA, 33 bp, Homo sapien
aaaacaaacatcttcactaatcaagccaagtgt

SEQ ID NO: 227668 - DNA, 33 bp, Homo sapien
aaaacaaacatcttcattaatcaagccaagtgt

SEQ ID NO: 227669 - DNA, 33 bp, Homo sapien
aaactctctcaatcagactattagttacagaga

SEQ ID NO: 227670 - DNA, 33 bp, Homo sapien
aaactctctcaatcagtctattagttacagaga

SEQ ID NO: 227671 - DNA, 33 bp, Homo sapien
ttggtgtgtgatgctacgtaaactctgttaacc

SEQ ID NO: 227672 - DNA, 33 bp, Homo sapien
ttggtgtgtgatgctatgtaaactctgttaacc

SEQ ID NO: 227673 - DNA, 33 bp, Homo sapien
tgctgtgtaattcttccaaaccatttcctcact

SEQ ID NO: 227674 - DNA, 33 bp, Homo sapien
tgctgtgtaattcttctaaaccatttcctcact

SEQ ID NO: 227675 - DNA, 33 bp, Homo sapien
gcctgccatcctcaccaggagaacagaatccac

SEQ ID NO: 227676 - DNA, 33 bp, Homo sapien
gcctgccatcctcaccgggagaacagaatccac

SEQ ID NO: 227677 - DNA, 33 bp, Homo sapien
ctaccaaactaagaaaacagtaagtagagaaaa

SEQ ID NO: 227678 - DNA, 33 bp, Homo sapien
ctaccaaactaagaaaccagtaagtagagaaaa

SEQ ID NO: 227679 - DNA, 33 bp, Homo sapien
tataaccatgctcctaaaacataatatgatggt

SEQ ID NO: 227680 - DNA, 33 bp, Homo sapien
tataaccatgctcctagaacataatatgatggt

SEQ ID NO: 227681 - DNA, 33 bp, Homo sapien
ataattgttgcctcaacacatggtcataaatcc

SEQ ID NO: 227682 - DNA, 33 bp, Homo sapien
ataattgttgcctcaatacatggtcataaatcc

SEQ ID NO: 227683 - DNA, 33 bp, Homo sapien
tatattcctgattctcaagtccaaacatatcac

SEQ ID NO: 227684 - DNA, 33 bp, Homo sapien
tatattcctgattctcgagtccaaacatatcac

SEQ ID NO: 227685 - DNA, 33 bp, Homo sapien
attagataacttcaaacagtgacaaccttgcag

SEQ ID NO: 227686 - DNA, 33 bp, Homo sapien
attagataacttcaaatagtgacaaccttgcag

SEQ ID NO: 227687 - DNA, 33 bp, Homo sapien
gacatagacaagtttacaaaagaaagatatgga

SEQ ID NO: 227688 - DNA, 33 bp, Homo sapien
gacatagacaagtttagaaaagaaagatatgga

SEQ ID NO: 227689 - DNA, 33 bp, Homo sapien
atgtggggccttttgcacatgtacaggatttgg

SEQ ID NO: 227690 - DNA, 33 bp, Homo sapien
atgtggggccttttgcgcatgtacaggatttgg

SEQ ID NO: 227691 - DNA, 33 bp, Homo sapien
atagaaagtgcgcaaacggtggagtatttcctc

SEQ ID NO: 227692 - DNA, 33 bp, Homo sapien
atagaaagtgcgcaaagggtggagtatttcctc

SEQ ID NO: 227693 - DNA, 33 bp, Homo sapien
ttcatgaccagcctatcaaaggaacaacgaaaa

SEQ ID NO: 227694 - DNA, 33 bp, Homo sapien
ttcatgaccagcctattaaaggaacaacgaaaa

SEQ ID NO: 227695 - DNA, 33 bp, Homo sapien
agcaggacacatggataaacatagtgtcctgtg

SEQ ID NO: 227696 - DNA, 33 bp, Homo sapien
agcaggacacatggatgaacatagtgtcctgtg

SEQ ID NO: 227697 - DNA, 33 bp, Homo sapien
cccagacaaaccgtcacgattggagttccttgc

SEQ ID NO: 227698 - DNA, 33 bp, Homo sapien
cccagacaaaccgtcatgattggagttccttgc

SEQ ID NO: 227699 - DNA, 33 bp, Homo sapien
tggattaaaattcaaactgtctgtgtctctgaa

SEQ ID NO: 227700 - DNA, 33 bp, Homo sapien
tggattaaaattcaaattgtctgtgtctctgaa

SEQ ID NO: 227701 - DNA, 33 bp, Homo sapien
ctactgagacatgaaacaaagaattcactggag

SEQ ID NO: 227702 - DNA, 33 bp, Homo sapien
ctactgagacatgaaagaaagaattcactggag

SEQ ID NO: 227703 - DNA, 33 bp, Homo sapien
agacctatggacttcaaatgagtgccattatat

SEQ ID NO: 227704 - DNA, 33 bp, Homo sapien
agacctatggacttcagatgagtgccattatat

SEQ ID NO: 227705 - DNA, 33 bp, Homo sapien
taatgtactaatccaacttaaaaactgccttcc

SEQ ID NO: 227706 - DNA, 33 bp, Homo sapien
taatgtactaatccaatttaaaaactgccttcc

SEQ ID NO: 227707 - DNA, 33 bp, Homo sapien
tttatttccttgtgaagactctatgctatattt

SEQ ID NO: 227708 - DNA, 33 bp, Homo sapien
tttatttccttgtgaatactctatgctatattt

SEQ ID NO: 227709 - DNA, 33 bp, Homo sapien
taagaatacttggattcaagacttggtcacctg

SEQ ID NO: 227710 - DNA, 33 bp, Homo sapien
taagaatacttggatttaagacttggtcacctg

SEQ ID NO: 227711 - DNA, 33 bp, Homo sapien
ttggtgtcattactacaatggagagaaagtgga

SEQ ID NO: 227712 - DNA, 33 bp, Homo sapien
ttggtgtcattactacgatggagagaaagtgga

SEQ ID NO: 227713 - DNA, 33 bp, Homo sapien
atctcactcagagttacgattgcctagattgtt

SEQ ID NO: 227714 - DNA, 33 bp, Homo sapien
atctcactcagagttatgattgcctagattgtt

SEQ ID NO: 227715 - DNA, 33 bp, Homo sapien
ctacatcctttcaccacccataaagcatacact

SEQ ID NO: 227716 - DNA, 33 bp, Homo sapien
ctacatcctttcaccatccataaagcatacact

SEQ ID NO: 227717 - DNA, 33 bp, Homo sapien
atcatctggaccctcaatagagataagatatta

SEQ ID NO: 227718 - DNA, 33 bp, Homo sapien
atcatctggaccctcagtagagataagatatta

SEQ ID NO: 227719 - DNA, 33 bp, Homo sapien
atgcaacaacacaaacccagcttcgaaatacag

SEQ ID NO: 227720 - DNA, 33 bp, Homo sapien
atgcaacaacacaaactcagcttcgaaatacag

SEQ ID NO: 227721 - DNA, 33 bp, Homo sapien
caccatcttccagaccccataatggtatccacc

SEQ ID NO: 227722 - DNA, 33 bp, Homo sapien
caccatcttccagaccgcataatggtatccacc

SEQ ID NO: 227723 - DNA, 33 bp, Homo sapien
gcagacactcaacacccatgaaagcaggcagga

SEQ ID NO: 227724 - DNA, 33 bp, Homo sapien
gcagacactcaacacctatgaaagcaggcagga

SEQ ID NO: 227725 - DNA, 33 bp, Homo sapien
atacggattccaggtacgctcaaaaaaacacaa

SEQ ID NO: 227726 - DNA, 33 bp, Homo sapien
atacggattccaggtaggctcaaaaaaacacaa

SEQ ID NO: 227727 - DNA, 33 bp, Homo sapien
ttctaacctagtgatacgcagtgctaagatgtc

SEQ ID NO: 227728 - DNA, 33 bp, Homo sapien
ttctaacctagtgatatgcagtgctaagatgtc

SEQ ID NO: 227729 - DNA, 33 bp, Homo sapien
ttgcctaaatttactccgaataggttcatgttc

SEQ ID NO: 227730 - DNA, 33 bp, Homo sapien
ttgcctaaatttactctgaataggttcatgttc

SEQ ID NO: 227731 - DNA, 33 bp, Homo sapien
gagagagaagaaagccaaccaaatgcccagaca

SEQ ID NO: 227732 - DNA, 33 bp, Homo sapien
gagagagaagaaagccgaccaaatgcccagaca

SEQ ID NO: 227733 - DNA, 33 bp, Homo sapien
cagactcatgctcaccaatgtggatgggcatca

SEQ ID NO: 227734 - DNA, 33 bp, Homo sapien
cagactcatgctcaccgatgtggatgggcatca

SEQ ID NO: 227735 - DNA, 33 bp, Homo sapien
ttaacaatagaacaataatgaccatttatcaac

SEQ ID NO: 227736 - DNA, 33 bp, Homo sapien
ttaacaatagaacaatgatgaccatttatcaac

SEQ ID NO: 227737 - DNA, 33 bp, Homo sapien
tatggaatttatacaaccttaacaagaatcaca

SEQ ID NO: 227738 - DNA, 33 bp, Homo sapien
tatggaatttatacaagcttaacaagaatcaca

SEQ ID NO: 227739 - DNA, 33 bp, Homo sapien
aatcacatagattacaatgggcctcagatatct

SEQ ID NO: 227740 - DNA, 33 bp, Homo sapien
aatcacatagattacactgggcctcagatatct

SEQ ID NO: 227741 - DNA, 33 bp, Homo sapien
ctggaaagaagccacagaatctggaagtaaggg

SEQ ID NO: 227742 - DNA, 33 bp, Homo sapien
ctggaaagaagccacataatctggaagtaaggg

SEQ ID NO: 227743 - DNA, 33 bp, Homo sapien
aaggcctgggaatcagcagagccagtggtataa

SEQ ID NO: 227744 - DNA, 33 bp, Homo sapien
aaggcctgggaatcaggagagccagtggtataa

SEQ ID NO: 227745 - DNA, 33 bp, Homo sapien
tagtttggtagctccacgaagtctaagtctgtt

SEQ ID NO: 227746 - DNA, 33 bp, Homo sapien
tagtttggtagctccatgaagtctaagtctgtt

SEQ ID NO: 227747 - DNA, 33 bp, Homo sapien
tttcttcttcttaaaacatcaggcttcttttat

SEQ ID NO: 227748 - DNA, 33 bp, Homo sapien
tttcttcttcttaaaatatcaggcttcttttat

SEQ ID NO: 227749 - DNA, 33 bp, Homo sapien
cttagtgtcatccggacaaagaaaaaatgatac

SEQ ID NO: 227750 - DNA, 33 bp, Homo sapien
cttagtgtcatccggagaaagaaaaaatgatac

SEQ ID NO: 227751 - DNA, 33 bp, Homo sapien
tttaggtgatgactgaaaggaaggtagacagat

SEQ ID NO: 227752 - DNA, 33 bp, Homo sapien
tttaggtgatgactgacaggaaggtagacagat

SEQ ID NO: 227753 - DNA, 33 bp, Homo sapien
ttgtctgtgtcttgccaactttcttgtttatat

SEQ ID NO: 227754 - DNA, 33 bp, Homo sapien
ttgtctgtgtcttgccgactttcttgtttatat

SEQ ID NO: 227755 - DNA, 33 bp, Homo sapien
tttaatggtcagaaaccgagtcaggattctttt

SEQ ID NO: 227756 - DNA, 33 bp, Homo sapien
tttaatggtcagaaactgagtcaggattctttt

SEQ ID NO: 227757 - DNA, 33 bp, Homo sapien
gcatggtatagaggaagtaggactgggtaactt

SEQ ID NO: 227758 - DNA, 33 bp, Homo sapien
gcatggtatagaggaattaggactgggtaactt

SEQ ID NO: 227759 - DNA, 33 bp, Homo sapien
ttagtgtttccagtaacgattatttccaatgac

SEQ ID NO: 227760 - DNA, 33 bp, Homo sapien
ttagtgtttccagtaatgattatttccaatgac

SEQ ID NO: 227761 - DNA, 33 bp, Homo sapien
tgtgtagccttggagaacattataaggaagttg

SEQ ID NO: 227762 - DNA, 33 bp, Homo sapien
tgtgtagccttggagatcattataaggaagttg

SEQ ID NO: 227763 - DNA, 33 bp, Homo sapien
taatagagaagacagacgaaacaaataaaaaat

SEQ ID NO: 227764 - DNA, 33 bp, Homo sapien
taatagagaagacagatgaaacaaataaaaaat

SEQ ID NO: 227765 - DNA, 33 bp, Homo sapien
tcaattacatcctccacgtgtttcttctatttt

SEQ ID NO: 227766 - DNA, 33 bp, Homo sapien
tcaattacatcctccatgtgtttcttctatttt

SEQ ID NO: 227767 - DNA, 33 bp, Homo sapien
ttaagactgaaaaataaactggccataagaaga

SEQ ID NO: 227768 - DNA, 33 bp, Homo sapien
ttaagactgaaaaatatactggccataagaaga

SEQ ID NO: 227769 - DNA, 33 bp, Homo sapien
atttgtgcaacttaggacaaatgaactgtctac

SEQ ID NO: 227770 - DNA, 33 bp, Homo sapien
atttgtgcaacttagggcaaatgaactgtctac

SEQ ID NO: 227771 - DNA, 33 bp, Homo sapien
atacgaatcagaaggacatcgaacttgagttgc

SEQ ID NO: 227772 - DNA, 33 bp, Homo sapien
atacgaatcagaaggatatcgaacttgagttgc

SEQ ID NO: 227773 - DNA, 33 bp, Homo sapien
tagaagaatttgccacaatgaaatggatggctt

SEQ ID NO: 227774 - DNA, 33 bp, Homo sapien
tagaagaatttgccacgatgaaatggatggctt

SEQ ID NO: 227775 - DNA, 33 bp, Homo sapien
aaatatgaaaagttaccatgtctccaacttcct

SEQ ID NO: 227776 - DNA, 33 bp, Homo sapien
aaatatgaaaagttactatgtctccaacttcct

SEQ ID NO: 227777 - DNA, 33 bp, Homo sapien
ctgtacctaatttttccccttccattcgacagc

SEQ ID NO: 227778 - DNA, 33 bp, Homo sapien
ctgtacctaatttttctccttccattcgacagc

SEQ ID NO: 227779 - DNA, 33 bp, Homo sapien
agaaaatgaactctcacggaaagttagatgaat

SEQ ID NO: 227780 - DNA, 33 bp, Homo sapien
agaaaatgaactctcatggaaagttagatgaat

SEQ ID NO: 227781 - DNA, 33 bp, Homo sapien
tttgtgagaaaaacaaagaagtgtacatcatga

SEQ ID NO: 227782 - DNA, 33 bp, Homo sapien
tttgtgagaaaaacaaggaagtgtacatcatga

SEQ ID NO: 227783 - DNA, 33 bp, Homo sapien
tcttcttacatacaaaagaaatgataaaactga

SEQ ID NO: 227784 - DNA, 33 bp, Homo sapien
tcttcttacatacaaatgaaatgataaaactga

SEQ ID NO: 227785 - DNA, 33 bp, Homo sapien
ttttattttgtcagcaataaactctgattacct

SEQ ID NO: 227786 - DNA, 33 bp, Homo sapien
ttttattttgtcagcagtaaactctgattacct

SEQ ID NO: 227787 - DNA, 33 bp, Homo sapien
gattatgcttacaggcgaccccgctggaatgag

SEQ ID NO: 227788 - DNA, 33 bp, Homo sapien
gattatgcttacaggctaccccgctggaatgag

SEQ ID NO: 227789 - DNA, 33 bp, Homo sapien
cctgccttcaagattacagttccagattccaaa

SEQ ID NO: 227790 - DNA, 33 bp, Homo sapien
cctgccttcaagattatagttccagattccaaa

SEQ ID NO: 227791 - DNA, 33 bp, Homo sapien
ttgctgttatcaaaaccattcaactcagatatt

SEQ ID NO: 227792 - DNA, 33 bp, Homo sapien
ttgctgttatcaaaactattcaactcagatatt

SEQ ID NO: 227793 - DNA, 33 bp, Homo sapien
ctccctgcttccttggcaagaaggtgccttact

SEQ ID NO: 227794 - DNA, 33 bp, Homo sapien
ctccctgcttccttggtaagaaggtgccttact

SEQ ID NO: 227795 - DNA, 33 bp, Homo sapien
gctatcagttgaaatacaataagatggagaaaa

SEQ ID NO: 227796 - DNA, 33 bp, Homo sapien
gctatcagttgaaatataataagatggagaaaa

SEQ ID NO: 227797 - DNA, 33 bp, Homo sapien
atgacaagaacaacacaatagtgaccaagcaca

SEQ ID NO: 227798 - DNA, 33 bp, Homo sapien
atgacaagaacaacaccatagtgaccaagcaca

SEQ ID NO: 227799 - DNA, 33 bp, Homo sapien
catagactgaactgagccaaaatccacgccctt

SEQ ID NO: 227800 - DNA, 33 bp, Homo sapien
catagactgaactgagtcaaaatccacgccctt

SEQ ID NO: 227801 - DNA, 33 bp, Homo sapien
tcccaattctcttctgcactctctaaagactaa

SEQ ID NO: 227802 - DNA, 33 bp, Homo sapien
tcccaattctcttctggactctctaaagactaa

SEQ ID NO: 227803 - DNA, 33 bp, Homo sapien
atagaaattaacatcacgccaaaaagaaatttt

SEQ ID NO: 227804 - DNA, 33 bp, Homo sapien
atagaaattaacatcatgccaaaaagaaatttt

SEQ ID NO: 227805 - DNA, 33 bp, Homo sapien
gtgactggaagaagcccgaaaactacattagaa

SEQ ID NO: 227806 - DNA, 33 bp, Homo sapien
gtgactggaagaagcctgaaaactacattagaa

SEQ ID NO: 227807 - DNA, 33 bp, Homo sapien
ctactcaaagtgatgccaactgttctgtttaga

SEQ ID NO: 227808 - DNA, 33 bp, Homo sapien
ctactcaaagtgatgctaactgttctgtttaga

SEQ ID NO: 227809 - DNA, 33 bp, Homo sapien
ctaccaatcttagcaccagagcctcaaggtcaa

SEQ ID NO: 227810 - DNA, 33 bp, Homo sapien
ctaccaatcttagcactagagcctcaaggtcaa

SEQ ID NO: 227811 - DNA, 33 bp, Homo sapien
tctgcagccattccagaccacagtgaatttttt

SEQ ID NO: 227812 - DNA, 33 bp, Homo sapien
tctgcagccattccagtccacagtgaatttttt

SEQ ID NO: 227813 - DNA, 33 bp, Homo sapien
cctgttagatcacttgaaaatcttgttatagcc

SEQ ID NO: 227814 - DNA, 33 bp, Homo sapien
cctgttagatcacttgtaaatcttgttatagcc

SEQ ID NO: 227815 - DNA, 33 bp, Homo sapien
taaggtatcaaaactcaacattattctgtagga

SEQ ID NO: 227816 - DNA, 33 bp, Homo sapien
taaggtatcaaaactcgacattattctgtagga

SEQ ID NO: 227817 - DNA, 33 bp, Homo sapien
acaatggtgcattaaacgtacatgtgtatatgt

SEQ ID NO: 227818 - DNA, 33 bp, Homo sapien
acaatggtgcattaaatgtacatgtgtatatgt

SEQ ID NO: 227819 - DNA, 33 bp, Homo sapien
ctcaggtgggcaagaaataccactttttgtata

SEQ ID NO: 227820 - DNA, 33 bp, Homo sapien
ctcaggtgggcaagaagtaccactttttgtata

SEQ ID NO: 227821 - DNA, 33 bp, Homo sapien
gtgaatggtgtttctcaatgtacccagtgccct

SEQ ID NO: 227822 - DNA, 33 bp, Homo sapien
gtgaatggtgtttctcgatgtacccagtgccct

SEQ ID NO: 227823 - DNA, 33 bp, Homo sapien
atgaagcaatgcaaaaacatacatggcagttca

SEQ ID NO: 227824 - DNA, 33 bp, Homo sapien
atgaagcaatgcaaaagcatacatggcagttca

SEQ ID NO: 227825 - DNA, 33 bp, Homo sapien
gtattgattttaaaaaatgtgtggagataattg

SEQ ID NO: 227826 - DNA, 33 bp, Homo sapien
gtattgattttaaaaattgtgtggagataattg

SEQ ID NO: 227827 - DNA, 33 bp, Homo sapien
gttgacagaagaatcacaaagaagacaaaaact

SEQ ID NO: 227828 - DNA, 33 bp, Homo sapien
gttgacagaagaatcataaagaagacaaaaact

SEQ ID NO: 227829 - DNA, 33 bp, Homo sapien
tcagacttgctattcacgccattcaaacaaaga

SEQ ID NO: 227830 - DNA, 33 bp, Homo sapien
tcagacttgctattcatgccattcaaacaaaga

SEQ ID NO: 227831 - DNA, 33 bp, Homo sapien
atgttttcagaaaaaaaactggagcctaactaa

SEQ ID NO: 227832 - DNA, 33 bp, Homo sapien
atgttttcagaaaaaatactggagcctaactaa

SEQ ID NO: 227833 - DNA, 33 bp, Homo sapien
ggttaaaacattgcccagcaaatagttacaatc

SEQ ID NO: 227834 - DNA, 33 bp, Homo sapien
ggttaaaacattgcccggcaaatagttacaatc

SEQ ID NO: 227835 - DNA, 33 bp, Homo sapien
tgtgaaggtagctggccagaccaatacagccca

SEQ ID NO: 227836 - DNA, 33 bp, Homo sapien
tgtgaaggtagctggctagaccaatacagccca

SEQ ID NO: 227837 - DNA, 33 bp, Homo sapien
tcactattgaaaagcaaaaagtggcctgcctct

SEQ ID NO: 227838 - DNA, 33 bp, Homo sapien
tcactattgaaaagcagaaagtggcctgcctct

SEQ ID NO: 227839 - DNA, 33 bp, Homo sapien
ggaacatccacttagaaggctttggagaaaagt

SEQ ID NO: 227840 - DNA, 33 bp, Homo sapien
ggaacatccacttagagggctttggagaaaagt

SEQ ID NO: 227841 - DNA, 33 bp, Homo sapien
ttaggtagacaccataacttcttattcagcttt

SEQ ID NO: 227842 - DNA, 33 bp, Homo sapien
ttaggtagacaccatagcttcttattcagcttt

SEQ ID NO: 227843 - DNA, 33 bp, Homo sapien
ttgtgtctgtgatataagaaggaaggatggggg

SEQ ID NO: 227844 - DNA, 33 bp, Homo sapien
ttgtgtctgtgatatatgaaggaaggatggggg

SEQ ID NO: 227845 - DNA, 33 bp, Homo sapien
atgcatggtgtcagagcagtcaggaatcttaag

SEQ ID NO: 227846 - DNA, 33 bp, Homo sapien
atgcatggtgtcagagtagtcaggaatcttaag

SEQ ID NO: 227847 - DNA, 33 bp, Homo sapien
cttctgaaatgttgccaagacatgaaagaaata

SEQ ID NO: 227848 - DNA, 33 bp, Homo sapien
cttctgaaatgttgccgagacatgaaagaaata

SEQ ID NO: 227849 - DNA, 33 bp, Homo sapien
aatggttacaatagagacacagacttcgccact

SEQ ID NO: 227850 - DNA, 33 bp, Homo sapien
aatggttacaatagaggcacagacttcgccact

SEQ ID NO: 227851 - DNA, 33 bp, Homo sapien
atgaatgctaagtatcaaacaacctctagtgtt

SEQ ID NO: 227852 - DNA, 33 bp, Homo sapien
atgaatgctaagtatccaacaacctctagtgtt

SEQ ID NO: 227853 - DNA, 33 bp, Homo sapien
gattttccacctatacactatgtctctccatct

SEQ ID NO: 227854 - DNA, 33 bp, Homo sapien
gattttccacctatacgctatgtctctccatct

SEQ ID NO: 227855 - DNA, 33 bp, Homo sapien
cgatcaactaggctagaaaataaataatcttca

SEQ ID NO: 227856 - DNA, 33 bp, Homo sapien
cgatcaactaggctagcaaataaataatcttca

SEQ ID NO: 227857 - DNA, 33 bp, Homo sapien
actttattttgttttgaatctcatcctgagtca

SEQ ID NO: 227858 - DNA, 33 bp, Homo sapien
actttattttgttttggatctcatcctgagtca

SEQ ID NO: 227859 - DNA, 33 bp, Homo sapien
aagactgaatctgaaagaatttgaatccctaaa

SEQ ID NO: 227860 - DNA, 33 bp, Homo sapien
aagactgaatctgaaataatttgaatccctaaa

SEQ ID NO: 227861 - DNA, 33 bp, Homo sapien
gaggaggttgttgacaaatgcagtatgatggtg

SEQ ID NO: 227862 - DNA, 33 bp, Homo sapien
gaggaggttgttgacagatgcagtatgatggtg

SEQ ID NO: 227863 - DNA, 33 bp, Homo sapien
atgttggataatctagaaaaagtaagacaatta

SEQ ID NO: 227864 - DNA, 33 bp, Homo sapien
atgttggataatctagcaaaagtaagacaatta

SEQ ID NO: 227865 - DNA, 33 bp, Homo sapien
aagaggaataccagaacaccaggcatggtgctt

SEQ ID NO: 227866 - DNA, 33 bp, Homo sapien
aagaggaataccagaataccaggcatggtgctt

SEQ ID NO: 227867 - DNA, 33 bp, Homo sapien
agacagttttagtccactaatcacttgatcttc

SEQ ID NO: 227868 - DNA, 33 bp, Homo sapien
agacagttttagtccattaatcacttgatcttc

SEQ ID NO: 227869 - DNA, 33 bp, Homo sapien
gaaacataagatagtacgattgctttggaaatt

SEQ ID NO: 227870 - DNA, 33 bp, Homo sapien
gaaacataagatagtatgattgctttggaaatt

SEQ ID NO: 227871 - DNA, 33 bp, Homo sapien
ctattttacaaatgacaaatctgaggcttggag

SEQ ID NO: 227872 - DNA, 33 bp, Homo sapien
ctattttacaaatgacgaatctgaggcttggag

SEQ ID NO: 227873 - DNA, 33 bp, Homo sapien
ttcatagctccctgtacgtttacttcacagcac

SEQ ID NO: 227874 - DNA, 33 bp, Homo sapien
ttcatagctccctgtatgtttacttcacagcac

SEQ ID NO: 227875 - DNA, 33 bp, Homo sapien
cttggtgataatgttaccatatcctctgctatc

SEQ ID NO: 227876 - DNA, 33 bp, Homo sapien
cttggtgataatgttatcatatcctctgctatc

SEQ ID NO: 227877 - DNA, 33 bp, Homo sapien
tagacagttcaacttacggtgtgacttaagatt

SEQ ID NO: 227878 - DNA, 33 bp, Homo sapien
tagacagttcaacttatggtgtgacttaagatt

SEQ ID NO: 227879 - DNA, 33 bp, Homo sapien
tgatctgttgtgccagaaccttttatagaatag

SEQ ID NO: 227880 - DNA, 33 bp, Homo sapien
tgatctgttgtgccagtaccttttatagaatag

SEQ ID NO: 227881 - DNA, 33 bp, Homo sapien
ctaatgactttaagtccataaaagaaactcaaa

SEQ ID NO: 227882 - DNA, 33 bp, Homo sapien
ctaatgactttaagtcgataaaagaaactcaaa

SEQ ID NO: 227883 - DNA, 33 bp, Homo sapien
gataaaatactagaacagaatcaacagattaca

SEQ ID NO: 227884 - DNA, 33 bp, Homo sapien
gataaaatactagaacggaatcaacagattaca

SEQ ID NO: 227885 - DNA, 33 bp, Homo sapien
gacaatagacagttgacatagaaatgtatgaca

SEQ ID NO: 227886 - DNA, 33 bp, Homo sapien
gacaatagacagttgatatagaaatgtatgaca

SEQ ID NO: 227887 - DNA, 33 bp, Homo sapien
cttgagcccactacatgagacatcgaaacctac

SEQ ID NO: 227888 - DNA, 33 bp, Homo sapien
cttgagcccactacattagacatcgaaacctac

SEQ ID NO: 227889 - DNA, 33 bp, Homo sapien
cttctggcaaatgtgacaattttgaggagtata

SEQ ID NO: 227890 - DNA, 33 bp, Homo sapien
cttctggcaaatgtgagaattttgaggagtata

SEQ ID NO: 227891 - DNA, 33 bp, Homo sapien
gcatgataaatcagtacctctagcaattcacaa

SEQ ID NO: 227892 - DNA, 33 bp, Homo sapien
gcatgataaatcagtatctctagcaattcacaa

SEQ ID NO: 227893 - DNA, 33 bp, Homo sapien
tttaaccaccacctacaacacgcagatttttat

SEQ ID NO: 227894 - DNA, 33 bp, Homo sapien
tttaaccaccacctacgacacgcagatttttat

SEQ ID NO: 227895 - DNA, 33 bp, Homo sapien
aatgttaaaaaagccaagattatgtgaagacca

SEQ ID NO: 227896 - DNA, 33 bp, Homo sapien
aatgttaaaaaagccatgattatgtgaagacca

SEQ ID NO: 227897 - DNA, 33 bp, Homo sapien
tgtcttctagcccttccatccaggccctacatg

SEQ ID NO: 227898 - DNA, 33 bp, Homo sapien
tgtcttctagcccttctatccaggccctacatg

SEQ ID NO: 227899 - DNA, 33 bp, Homo sapien
tccacgttctccttcccctttgctttctaacat

SEQ ID NO: 227900 - DNA, 33 bp, Homo sapien
tccacgttctccttccgctttgctttctaacat

SEQ ID NO: 227901 - DNA, 33 bp, Homo sapien
aaagtcctgttgggctaacaaaatatttgacaa

SEQ ID NO: 227902 - DNA, 33 bp, Homo sapien
aaagtcctgttgggctgacaaaatatttgacaa

SEQ ID NO: 227903 - DNA, 33 bp, Homo sapien
actgataattcaccacaatgtgattacaaatag

SEQ ID NO: 227904 - DNA, 33 bp, Homo sapien
actgataattcaccacgatgtgattacaaatag

SEQ ID NO: 227905 - DNA, 33 bp, Homo sapien
tatgataggccataaaatgagccgcaattaatt

SEQ ID NO: 227906 - DNA, 33 bp, Homo sapien
tatgataggccataaagtgagccgcaattaatt

SEQ ID NO: 227907 - DNA, 33 bp, Homo sapien
aagaggtccgtagcagactgcctcccaatcata

SEQ ID NO: 227908 - DNA, 33 bp, Homo sapien
aagaggtccgtagcagtctgcctcccaatcata

SEQ ID NO: 227909 - DNA, 33 bp, Homo sapien
acaatgaattcccttaacacttgcttgtctgga

SEQ ID NO: 227910 - DNA, 33 bp, Homo sapien
acaatgaattcccttagcacttgcttgtctgga

SEQ ID NO: 227911 - DNA, 33 bp, Homo sapien
tcgctggattagtttgaaagacaagactctgaa

SEQ ID NO: 227912 - DNA, 33 bp, Homo sapien
tcgctggattagtttggaagacaagactctgaa

SEQ ID NO: 227913 - DNA, 33 bp, Homo sapien
gaagatcacaggaaagacatccaagcctgggtc

SEQ ID NO: 227914 - DNA, 33 bp, Homo sapien
gaagatcacaggaaagtcatccaagcctgggtc

SEQ ID NO: 227915 - DNA, 33 bp, Homo sapien
agtcactatgaaaaaaaactctccttagttgtc

SEQ ID NO: 227916 - DNA, 33 bp, Homo sapien
agtcactatgaaaaaagactctccttagttgtc

SEQ ID NO: 227917 - DNA, 33 bp, Homo sapien
cgggtattcatattcacgctgtcttctcagatc

SEQ ID NO: 227918 - DNA, 33 bp, Homo sapien
cgggtattcatattcatgctgtcttctcagatc

SEQ ID NO: 227919 - DNA, 33 bp, Homo sapien
tctccctgctacactacgagttcttcagtggaa

SEQ ID NO: 227920 - DNA, 33 bp, Homo sapien
tctccctgctacactatgagttcttcagtggaa

SEQ ID NO: 227921 - DNA, 33 bp, Homo sapien
ctttactgtatcacaaattgaaacatgcagagg

SEQ ID NO: 227922 - DNA, 33 bp, Homo sapien
ctttactgtatcacaatttgaaacatgcagagg

SEQ ID NO: 227923 - DNA, 33 bp, Homo sapien
gcagtatctagtttccaaaggcagcagaaccag

SEQ ID NO: 227924 - DNA, 33 bp, Homo sapien
gcagtatctagtttccgaaggcagcagaaccag

SEQ ID NO: 227925 - DNA, 33 bp, Homo sapien
ctctgctctttgttacaaggttctacattcaaa

SEQ ID NO: 227926 - DNA, 33 bp, Homo sapien
ctctgctctttgttactaggttctacattcaaa

SEQ ID NO: 227927 - DNA, 33 bp, Homo sapien
ttgctttggccacagaaatcatgatgagtataa

SEQ ID NO: 227928 - DNA, 33 bp, Homo sapien
ttgctttggccacagagatcatgatgagtataa

SEQ ID NO: 227929 - DNA, 33 bp, Homo sapien
tttaactagccgaagactctgtttcatttctat

SEQ ID NO: 227930 - DNA, 33 bp, Homo sapien
tttaactagccgaagattctgtttcatttctat

SEQ ID NO: 227931 - DNA, 33 bp, Homo sapien
gtggatcaagagactgcatgataaaagaaaggc

SEQ ID NO: 227932 - DNA, 33 bp, Homo sapien
gtggatcaagagactgtatgataaaagaaaggc

SEQ ID NO: 227933 - DNA, 33 bp, Homo sapien
atagcaaaggctataaatgagcagtgtttacta

SEQ ID NO: 227934 - DNA, 33 bp, Homo sapien
atagcaaaggctataactgagcagtgtttacta

SEQ ID NO: 227935 - DNA, 33 bp, Homo sapien
cctaactttctcctaacacattctacatgatct

SEQ ID NO: 227936 - DNA, 33 bp, Homo sapien
cctaactttctcctaagacattctacatgatct

SEQ ID NO: 227937 - DNA, 33 bp, Homo sapien
tattttgcatttgcaacgtgctttgtttccagc

SEQ ID NO: 227938 - DNA, 33 bp, Homo sapien
tattttgcatttgcaatgtgctttgtttccagc

SEQ ID NO: 227939 - DNA, 33 bp, Homo sapien
aaagaccaaatcttcacatcctcagtccttctc

SEQ ID NO: 227940 - DNA, 33 bp, Homo sapien
aaagaccaaatcttcatatcctcagtccttctc

SEQ ID NO: 227941 - DNA, 33 bp, Homo sapien
caatctgtggaccttacattaaaaatcacaaag

SEQ ID NO: 227942 - DNA, 33 bp, Homo sapien
caatctgtggaccttatattaaaaatcacaaag

SEQ ID NO: 227943 - DNA, 33 bp, Homo sapien
gtagtacatcttgggacctctttaaaagcactg

SEQ ID NO: 227944 - DNA, 33 bp, Homo sapien
gtagtacatcttgggatctctttaaaagcactg

SEQ ID NO: 227945 - DNA, 33 bp, Homo sapien
gacatttcttactgcaaataattcttggcagct

SEQ ID NO: 227946 - DNA, 33 bp, Homo sapien
gacatttcttactgcagataattcttggcagct

SEQ ID NO: 227947 - DNA, 33 bp, Homo sapien
ttttatttctcaagaacagaccattttcctttg

SEQ ID NO: 227948 - DNA, 33 bp, Homo sapien
ttttatttctcaagaatagaccattttcctttg

SEQ ID NO: 227949 - DNA, 33 bp, Homo sapien
gtttaaattaccagcacaatttgttatactttg

SEQ ID NO: 227950 - DNA, 33 bp, Homo sapien
gtttaaattaccagcagaatttgttatactttg

SEQ ID NO: 227951 - DNA, 33 bp, Homo sapien
cttccagaatttaaagcctctgggaataggaag

SEQ ID NO: 227952 - DNA, 33 bp, Homo sapien
cttccagaatttaaaggctctgggaataggaag

SEQ ID NO: 227953 - DNA, 33 bp, Homo sapien
tatctttctcacaaataatgttgacctccagga

SEQ ID NO: 227954 - DNA, 33 bp, Homo sapien
tatctttctcacaaatgatgttgacctccagga

SEQ ID NO: 227955 - DNA, 33 bp, Homo sapien
gaatgtctcccacaaacgcttatgactgcactg

SEQ ID NO: 227956 - DNA, 33 bp, Homo sapien
gaatgtctcccacaaatgcttatgactgcactg

SEQ ID NO: 227957 - DNA, 33 bp, Homo sapien
cacagctagccataataataacaggacaagcca

SEQ ID NO: 227958 - DNA, 33 bp, Homo sapien
cacagctagccataatgataacaggacaagcca

SEQ ID NO: 227959 - DNA, 33 bp, Homo sapien
tttatctacaaatatcggagtctatttgcattg

SEQ ID NO: 227960 - DNA, 33 bp, Homo sapien
tttatctacaaatatctgagtctatttgcattg

SEQ ID NO: 227961 - DNA, 33 bp, Homo sapien
caatgtgagattatcaactgtgaacacagactc

SEQ ID NO: 227962 - DNA, 33 bp, Homo sapien
caatgtgagattatcagctgtgaacacagactc

SEQ ID NO: 227963 - DNA, 33 bp, Homo sapien
tgtcggtattgtattcaaaaaggcctggagccc

SEQ ID NO: 227964 - DNA, 33 bp, Homo sapien
tgtcggtattgtattcgaaaaggcctggagccc

SEQ ID NO: 227965 - DNA, 33 bp, Homo sapien
catttcaaactcctccacagttgtctaatgcag

SEQ ID NO: 227966 - DNA, 33 bp, Homo sapien
catttcaaactcctccgcagttgtctaatgcag

SEQ ID NO: 227967 - DNA, 33 bp, Homo sapien
caggaagatggcttaaccttgagttcaagacca

SEQ ID NO: 227968 - DNA, 33 bp, Homo sapien
caggaagatggcttaagcttgagttcaagacca

SEQ ID NO: 227969 - DNA, 33 bp, Homo sapien
gtttgccatcttccccaaaaggcatacagaaaa

SEQ ID NO: 227970 - DNA, 33 bp, Homo sapien
gtttgccatcttccccgaaaggcatacagaaaa

SEQ ID NO: 227971 - DNA, 33 bp, Homo sapien
ctgtgtacatttatgcaaagaatatagaccgaa

SEQ ID NO: 227972 - DNA, 33 bp, Homo sapien
ctgtgtacatttatgcgaagaatatagaccgaa

SEQ ID NO: 227973 - DNA, 33 bp, Homo sapien
ctcatcaacaggatcaaaaatgggattatttct

SEQ ID NO: 227974 - DNA, 33 bp, Homo sapien
ctcatcaacaggatcagaaatgggattatttct

SEQ ID NO: 227975 - DNA, 33 bp, Homo sapien
aagaaaagcaagtcaaattaatcaatccccttc

SEQ ID NO: 227976 - DNA, 33 bp, Homo sapien
aagaaaagcaagtcaatttaatcaatccccttc

SEQ ID NO: 227977 - DNA, 33 bp, Homo sapien
aaggtaaaggctgccaatagttggtgggaaata

SEQ ID NO: 227978 - DNA, 33 bp, Homo sapien
aaggtaaaggctgccagtagttggtgggaaata

SEQ ID NO: 227979 - DNA, 33 bp, Homo sapien
cagccctcagtggagaggagacccaaaatgggt

SEQ ID NO: 227980 - DNA, 33 bp, Homo sapien
cagccctcagtggagatgagacccaaaatgggt

SEQ ID NO: 227981 - DNA, 33 bp, Homo sapien
aataaactctcccaaaagtagtatctataaata

SEQ ID NO: 227982 - DNA, 33 bp, Homo sapien
aataaactctcccaaatgtagtatctataaata

SEQ ID NO: 227983 - DNA, 33 bp, Homo sapien
cccaacaagaacagatcactaattgagcctgcc

SEQ ID NO: 227984 - DNA, 33 bp, Homo sapien
cccaacaagaacagattactaattgagcctgcc

SEQ ID NO: 227985 - DNA, 33 bp, Homo sapien
atctccttagccacaaaaaaggctgctggcttt

SEQ ID NO: 227986 - DNA, 33 bp, Homo sapien
atctccttagccacaagaaaggctgctggcttt

SEQ ID NO: 227987 - DNA, 33 bp, Homo sapien
gacagcagaaaatttaacaatggctgcctttgc

SEQ ID NO: 227988 - DNA, 33 bp, Homo sapien
gacagcagaaaatttagcaatggctgcctttgc

SEQ ID NO: 227989 - DNA, 33 bp, Homo sapien
caagtgtctatgttaccgagttgaaacagcagt

SEQ ID NO: 227990 - DNA, 33 bp, Homo sapien
caagtgtctatgttactgagttgaaacagcagt

SEQ ID NO: 227991 - DNA, 33 bp, Homo sapien
tgttttgcaaattgagacaggccatattttaaa

SEQ ID NO: 227992 - DNA, 33 bp, Homo sapien
tgttttgcaaattgaggcaggccatattttaaa

SEQ ID NO: 227993 - DNA, 33 bp, Homo sapien
ccagggagcaaaacacagagatattgaaactgt

SEQ ID NO: 227994 - DNA, 33 bp, Homo sapien
ccagggagcaaaacacggagatattgaaactgt

SEQ ID NO: 227995 - DNA, 33 bp, Homo sapien
gcagctgtttttcatcaagggcaatgtatagaa

SEQ ID NO: 227996 - DNA, 33 bp, Homo sapien
gcagctgtttttcatccagggcaatgtatagaa

SEQ ID NO: 227997 - DNA, 33 bp, Homo sapien
ttaaaacgaaaagtaactgcatggtaatataaa

SEQ ID NO: 227998 - DNA, 33 bp, Homo sapien
ttaaaacgaaaagtaattgcatggtaatataaa

SEQ ID NO: 227999 - DNA, 33 bp, Homo sapien
gtattttatgttctgagtatttaaactcctgat

SEQ ID NO: 228000 - DNA, 33 bp, Homo sapien
gtattttatgttctgattatttaaactcctgat

SEQ ID NO: 228001 - DNA, 33 bp, Homo sapien
ccgtccatttattcaccgagcatttgttatgtg

SEQ ID NO: 228002 - DNA, 33 bp, Homo sapien
ccgtccatttattcactgagcatttgttatgtg

SEQ ID NO: 228003 - DNA, 33 bp, Homo sapien
gacttggttaagtgaacatctgctgccttttag

SEQ ID NO: 228004 - DNA, 33 bp, Homo sapien
gacttggttaagtgaatatctgctgccttttag

SEQ ID NO: 228005 - DNA, 33 bp, Homo sapien
gagggagtagatagaccctgaatgtagattatt

SEQ ID NO: 228006 - DNA, 33 bp, Homo sapien
gagggagtagatagacgctgaatgtagattatt

SEQ ID NO: 228007 - DNA, 33 bp, Homo sapien
ttacaaaaggagcatacgtttcctgtaacagtc

SEQ ID NO: 228008 - DNA, 33 bp, Homo sapien
ttacaaaaggagcatatgtttcctgtaacagtc

SEQ ID NO: 228009 - DNA, 33 bp, Homo sapien
gtgtatctagagcagacggagtacttggtgggt

SEQ ID NO: 228010 - DNA, 33 bp, Homo sapien
gtgtatctagagcagagggagtacttggtgggt

SEQ ID NO: 228011 - DNA, 33 bp, Homo sapien
ttgagccatatggtaaccttaactttctgaaga

SEQ ID NO: 228012 - DNA, 33 bp, Homo sapien
ttgagccatatggtaatcttaactttctgaaga

SEQ ID NO: 228013 - DNA, 33 bp, Homo sapien
aaagacatgatattctcaccatccaaagacgat

SEQ ID NO: 228014 - DNA, 33 bp, Homo sapien
aaagacatgatattcttaccatccaaagacgat

SEQ ID NO: 228015 - DNA, 33 bp, Homo sapien
ggaagcttgtcatcaacgaaaatcctatcacca

SEQ ID NO: 228016 - DNA, 33 bp, Homo sapien
ggaagcttgtcatcaatgaaaatcctatcacca

SEQ ID NO: 228017 - DNA, 33 bp, Homo sapien; identical to SEQ ID NO: 228015

SEQ ID NO: 228018 - DNA, 33 bp, Homo sapien; identical to SEQ ID NO: 228016

SEQ ID NO: 228019 - DNA, 33 bp, Homo sapien
acacctcattgatgaccgagaagggagaggctg

SEQ ID NO: 228020 - DNA, 33 bp, Homo sapien
acacctcattgatgactgagaagggagaggctg

SEQ ID NO: 228021 - DNA, 33 bp, Homo sapien
gtgcggttgatggccacggtttatagaggggag

SEQ ID NO: 228022 - DNA, 33 bp, Homo sapien
gtgcggttgatggccatggtttatagaggggag

SEQ ID NO: 228023 - DNA, 33 bp, Homo sapien
aataatgaacccctcaagtttaggtctggccaa

SEQ ID NO: 228024 - DNA, 33 bp, Homo sapien
aataatgaacccctcaggtttaggtctggccaa

SEQ ID NO: 228025 - DNA, 33 bp, Homo sapien
gacagatttgcttcagaatggtggtttggctct

SEQ ID NO: 228026 - DNA, 33 bp, Homo sapien
gacagatttgcttcaggatggtggtttggctct

SEQ ID NO: 228027 - DNA, 33 bp, Homo sapien
ggaagttgtctgcagaatccacattcagaaaag

SEQ ID NO: 228028 - DNA, 33 bp, Homo sapien
ggaagttgtctgcagagtccacattcagaaaag

SEQ ID NO: 228029 - DNA, 33 bp, Homo sapien
atgttgctaagcggataacaagcaaaatctcag

SEQ ID NO: 228030 - DNA, 33 bp, Homo sapien
atgttgctaagcggatcacaagcaaaatctcag

SEQ ID NO: 228031 - DNA, 33 bp, Homo sapien
aaggtcttgtttcctgaagggatgttgatgttc

SEQ ID NO: 228032 - DNA, 33 bp, Homo sapien
aaggtcttgtttcctggagggatgttgatgttc

SEQ ID NO: 228033 - DNA, 33 bp, Homo sapien
actcaaaaaacataccaaagaactgcagtttga

SEQ ID NO: 228034 - DNA, 33 bp, Homo sapien
actcaaaaaacataccgaagaactgcagtttga

SEQ ID NO: 228035 - DNA, 33 bp, Homo sapien
gtggttaagcttcacccggtatttacccacttt

SEQ ID NO: 228036 - DNA, 33 bp, Homo sapien
gtggttaagcttcacctggtatttacccacttt

SEQ ID NO: 228037 - DNA, 33 bp, Homo sapien
tatatatacattttacaacaaatattctaacgt

SEQ ID NO: 228038 - DNA, 33 bp, Homo sapien
tatatatacattttacgacaaatattctaacgt

SEQ ID NO: 228039 - DNA, 33 bp, Homo sapien
ccagagaacaaggagcaaaccgacctggcagtg

SEQ ID NO: 228040 - DNA, 33 bp, Homo sapien
ccagagaacaaggagcgaaccgacctggcagtg

SEQ ID NO: 228041 - DNA, 33 bp, Homo sapien
agaattgaagtcagtcagaaaattcctgagatt

SEQ ID NO: 228042 - DNA, 33 bp, Homo sapien
agaattgaagtcagtcggaaaattcctgagatt

SEQ ID NO: 228043 - DNA, 33 bp, Homo sapien
ctctgtgttcaccttacctcacgcaaagtgttg

SEQ ID NO: 228044 - DNA, 33 bp, Homo sapien
ctctgtgttcaccttatctcacgcaaagtgttg

SEQ ID NO: 228045 - DNA, 33 bp, Homo sapien
cagtgcaaagccccggcaagctgtaggcaggtt

SEQ ID NO: 228046 - DNA, 33 bp, Homo sapien
cagtgcaaagccccggtaagctgtaggcaggtt

SEQ ID NO: 228047 - DNA, 33 bp, Homo sapien
atagcttaaagctaaaagttcatgatatggcac

SEQ ID NO: 228048 - DNA, 33 bp, Homo sapien
atagcttaaagctaaaggttcatgatatggcac

SEQ ID NO: 228049 - DNA, 33 bp, Homo sapien
ccacctgctagtcaaagggtaaatgttatctct

SEQ ID NO: 228050 - DNA, 33 bp, Homo sapien
ccacctgctagtcaaatggtaaatgttatctct

SEQ ID NO: 228051 - DNA, 33 bp, Homo sapien
gttaaatgaagtcaaaacagctagaagcgtctt

SEQ ID NO: 228052 - DNA, 33 bp, Homo sapien
gttaaatgaagtcaaagcagctagaagcgtctt

SEQ ID NO: 228053 - DNA, 33 bp, Homo sapien
accagcagccactaaacccaacgtagatgaggg

SEQ ID NO: 228054 - DNA, 33 bp, Homo sapien
accagcagccactaaatccaacgtagatgaggg

SEQ ID NO: 228055 - DNA, 33 bp, Homo sapien
gttgcaactcagattacagagtagaaaaatgga

SEQ ID NO: 228056 - DNA, 33 bp, Homo sapien
gttgcaactcagattatagagtagaaaaatgga

SEQ ID NO: 228057 - DNA, 33 bp, Homo sapien
cttctagtgtttttgccactcctatgtgctgaa

SEQ ID NO: 228058 - DNA, 33 bp, Homo sapien
cttctagtgtttttgctactcctatgtgctgaa

SEQ ID NO: 228059 - DNA, 33 bp, Homo sapien
tctttgctcttagcaaaacagtaaatgagttac

SEQ ID NO: 228060 - DNA, 33 bp, Homo sapien
tctttgctcttagcaagacagtaaatgagttac

SEQ ID NO: 228061 - DNA, 33 bp, Homo sapien
ccagactgcctgggtcaaatcaagatctacact

SEQ ID NO: 228062 - DNA, 33 bp, Homo sapien
ccagactgcctgggtcgaatcaagatctacact

SEQ ID NO: 228063 - DNA, 33 bp, Homo sapien
ccagttaaaaaaggcaataataatacatattta

SEQ ID NO: 228064 - DNA, 33 bp, Homo sapien
ccagttaaaaaaggcattaataatacatattta

SEQ ID NO: 228065 - DNA, 33 bp, Homo sapien
tgtgttttcacctgaggatggcaatcagtatga

SEQ ID NO: 228066 - DNA, 33 bp, Homo sapien
tgtgttttcacctgagtatggcaatcagtatga

SEQ ID NO: 228067 - DNA, 33 bp, Homo sapien
aagtcaaaggaaagaaaagctagcaatggtgat

SEQ ID NO: 228068 - DNA, 33 bp, Homo sapien
aagtcaaaggaaagaagagctagcaatggtgat

SEQ ID NO: 228069 - DNA, 33 bp, Homo sapien
atcatgaacacttcacactttccaagccctttc

SEQ ID NO: 228070 - DNA, 33 bp, Homo sapien
atcatgaacacttcacgctttccaagccctttc

SEQ ID NO: 228071 - DNA, 33 bp, Homo sapien
tgaagaaacatgcaaacttcactcatagagaat

SEQ ID NO: 228072 - DNA, 33 bp, Homo sapien
tgaagaaacatgcaaagttcactcatagagaat

SEQ ID NO: 228073 - DNA, 33 bp, Homo sapien
cacacacaatgtttgacggtttcaaaggagcca

SEQ ID NO: 228074 - DNA, 33 bp, Homo sapien
cacacacaatgtttgatggtttcaaaggagcca

SEQ ID NO: 228075 - DNA, 33 bp, Homo sapien
cacctgtgggtgaacaagtctcaaaacaacttc

SEQ ID NO: 228076 - DNA, 33 bp, Homo sapien
cacctgtgggtgaacaggtctcaaaacaacttc

SEQ ID NO: 228077 - DNA, 33 bp, Homo sapien
tgatagatgtgatcaaatacactaatccatttt

SEQ ID NO: 228078 - DNA, 33 bp, Homo sapien
tgatagatgtgatcaactacactaatccatttt

SEQ ID NO: 228079 - DNA, 33 bp, Homo sapien
taaattgcaaaaatagaacagagtcccatgtag

SEQ ID NO: 228080 - DNA, 33 bp, Homo sapien
taaattgcaaaaatagtacagagtcccatgtag

SEQ ID NO: 228081 - DNA, 33 bp, Homo sapien
gcttgcctttaaggaaactgttgaatctgttaa

SEQ ID NO: 228082 - DNA, 33 bp, Homo sapien
gcttgcctttaaggaatctgttgaatctgttaa

SEQ ID NO: 228083 - DNA, 33 bp, Homo sapien
tttccctctttgtaaactggaaaataatgtgac

SEQ ID NO: 228084 - DNA, 33 bp, Homo sapien
tttccctctttgtaaattggaaaataatgtgac

SEQ ID NO: 228085 - DNA, 33 bp, Homo sapien
gggtaaagatttttcaaagcagattgttttcag

SEQ ID NO: 228086 - DNA, 33 bp, Homo sapien
gggtaaagatttttcagagcagattgttttcag

SEQ ID NO: 228087 - DNA, 33 bp, Homo sapien
ccattccatgcagagaccctcagagtatccctg

SEQ ID NO: 228088 - DNA, 33 bp, Homo sapien
ccattccatgcagagatcctcagagtatccctg

SEQ ID NO: 228089 - DNA, 33 bp, Homo sapien
acctccccaagacacacaactagccagtggcag

SEQ ID NO: 228090 - DNA, 33 bp, Homo sapien
acctccccaagacacataactagccagtggcag

SEQ ID NO: 228091 - DNA, 33 bp, Homo sapien
tttctttcatttttcacagaagggccctaattg

SEQ ID NO: 228092 - DNA, 33 bp, Homo sapien
tttctttcatttttcatagaagggccctaattg

SEQ ID NO: 228093 - DNA, 33 bp, Homo sapien
aggcaagacccttccaaatgcactgtgaatgag

SEQ ID NO: 228094 - DNA, 33 bp, Homo sapien
aggcaagacccttccagatgcactgtgaatgag

SEQ ID NO: 228095 - DNA, 33 bp, Homo sapien
aggaatggcagtttacccacaatttctgccctg

SEQ ID NO: 228096 - DNA, 33 bp, Homo sapien
aggaatggcagtttactcacaatttctgccctg

SEQ ID NO: 228097 - DNA, 33 bp, Homo sapien
tttagtcaaattttacactgtgtctaatactca

SEQ ID NO: 228098 - DNA, 33 bp, Homo sapien
tttagtcaaattttactctgtgtctaatactca

SEQ ID NO: 228099 - DNA, 33 bp, Homo sapien
acaaagctctatgtcacctaaactgataattat

SEQ ID NO: 228100 - DNA, 33 bp, Homo sapien
acaaagctctatgtcatctaaactgataattat

SEQ ID NO: 228101 - DNA, 33 bp, Homo sapien
aattctccaagttgtccaaggtcatatggtgat

SEQ ID NO: 228102 - DNA, 33 bp, Homo sapien
aattctccaagttgtctaaggtcatatggtgat

SEQ ID NO: 228103 - DNA, 33 bp, Homo sapien
tctctcctctgaatcgaagctaccataaccacc

SEQ ID NO: 228104 - DNA, 33 bp, Homo sapien
tctctcctctgaatcggagctaccataaccacc

SEQ ID NO: 228105 - DNA, 33 bp, Homo sapien
aaattgttcttgaccaatagtaaccacttaatg

SEQ ID NO: 228106 - DNA, 33 bp, Homo sapien
aaattgttcttgaccagtagtaaccacttaatg

SEQ ID NO: 228107 - DNA, 33 bp, Homo sapien
agctgagttgatcctcaaatgcttacagaactt

SEQ ID NO: 228108 - DNA, 33 bp, Homo sapien
agctgagttgatcctcgaatgcttacagaactt

SEQ ID NO: 228109 - DNA, 33 bp, Homo sapien
cagacctgccctgtgccatccatgtgttctttt

SEQ ID NO: 228110 - DNA, 33 bp, Homo sapien
cagacctgccctgtgctatccatgtgttctttt

SEQ ID NO: 228111 - DNA, 33 bp, Homo sapien
acatttggctagaaacggaatgctgtatttatt

SEQ ID NO: 228112 - DNA, 33 bp, Homo sapien
acatttggctagaaactgaatgctgtatttatt

SEQ ID NO: 228113 - DNA, 33 bp, Homo sapien
aggaaagcattttaatccctatcaagagacaga

SEQ ID NO: 228114 - DNA, 33 bp, Homo sapien
aggaaagcattttaattcctatcaagagacaga

SEQ ID NO: 228115 - DNA, 33 bp, Homo sapien
gatataacactaaccaaaagaacaagacaggat

SEQ ID NO: 228116 - DNA, 33 bp, Homo sapien
gatataacactaaccagaagaacaagacaggat

SEQ ID NO: 228117 - DNA, 33 bp, Homo sapien
gttaatagtagttatacggtattgtgtattggt

SEQ ID NO: 228118 - DNA, 33 bp, Homo sapien
gttaatagtagttatatggtattgtgtattggt

SEQ ID NO: 228119 - DNA, 33 bp, Homo sapien
agtaaataatgagcgacgtgatttcaaatagtg

SEQ ID NO: 228120 - DNA, 33 bp, Homo sapien
agtaaataatgagcgaggtgatttcaaatagtg

SEQ ID NO: 228121 - DNA, 33 bp, Homo sapien
aaacacccttttcttacgttggcatctctgacg

SEQ ID NO: 228122 - DNA, 33 bp, Homo sapien
aaacacccttttcttatgttggcatctctgacg

SEQ ID NO: 228123 - DNA, 33 bp, Homo sapien
gtgagatgcctgataaagtctttggcccatttt

SEQ ID NO: 228124 - DNA, 33 bp, Homo sapien
gtgagatgcctgataaggtctttggcccatttt

SEQ ID NO: 228125 - DNA, 33 bp, Homo sapien
cactgggcttggtataaaagagatactgaatat

SEQ ID NO: 228126 - DNA, 33 bp, Homo sapien
cactgggcttggtatacaagagatactgaatat

SEQ ID NO: 228127 - DNA, 33 bp, Homo sapien
cttcttaatttgttccactttgttgtcacgtgt

SEQ ID NO: 228128 - DNA, 33 bp, Homo sapien
cttcttaatttgttcctctttgttgtcacgtgt

SEQ ID NO: 228129 - DNA, 33 bp, Homo sapien
acttactggataaacaaaggagacttagactag

SEQ ID NO: 228130 - DNA, 33 bp, Homo sapien
acttactggataaacagaggagacttagactag

SEQ ID NO: 228131 - DNA, 33 bp, Homo sapien
ccaccatgtcctttacagctactataatttata

SEQ ID NO: 228132 - DNA, 33 bp, Homo sapien
ccaccatgtcctttacggctactataatttata

SEQ ID NO: 228133 - DNA, 33 bp, Homo sapien
gaaacctaaatattaaagtgaagcaataatgct

SEQ ID NO: 228134 - DNA, 33 bp, Homo sapien
gaaacctaaatattaaggtgaagcaataatgct

SEQ ID NO: 228135 - DNA, 33 bp, Homo sapien
gccagctttggaactaaatatggctatatggct

SEQ ID NO: 228136 - DNA, 33 bp, Homo sapien
gccagctttggaactagatatggctatatggct

SEQ ID NO: 228137 - DNA, 33 bp, Homo sapien
tgagacaaactgaaccaattggagtctctctcc

SEQ ID NO: 228138 - DNA, 33 bp, Homo sapien
tgagacaaactgaacctattggagtctctctcc

SEQ ID NO: 228139 - DNA, 33 bp, Homo sapien
gttagaaaaaatatcaaaacataataggccaag

SEQ ID NO: 228140 - DNA, 33 bp, Homo sapien
gttagaaaaaatatcacaacataataggccaag

SEQ ID NO: 228141 - DNA, 33 bp, Homo sapien
aggtggaagccgtttgaacacagtaaaaggaaa

SEQ ID NO: 228142 - DNA, 33 bp, Homo sapien
aggtggaagccgtttggacacagtaaaaggaaa

SEQ ID NO: 228143 - DNA, 33 bp, Homo sapien
aaaaacgggcagaaaacctctgaagtttgaaac

SEQ ID NO: 228144 - DNA, 33 bp, Homo sapien
aaaaacgggcagaaaagctctgaagtttgaaac

SEQ ID NO: 228145 - DNA, 33 bp, Homo sapien
actgatgtgcgaattgcagaaaaaaaatagtta

SEQ ID NO: 228146 - DNA, 33 bp, Homo sapien
actgatgtgcgaattgtagaaaaaaaatagtta

SEQ ID NO: 228147 - DNA, 33 bp, Homo sapien
ctattatctcactgaaacttgcagctattctgt

SEQ ID NO: 228148 - DNA, 33 bp, Homo sapien
ctattatctcactgaaccttgcagctattctgt

SEQ ID NO: 228149 - DNA, 33 bp, Homo sapien
cttgtttctgagttggaagctgtctgggtcatg

SEQ ID NO: 228150 - DNA, 33 bp, Homo sapien
cttgtttctgagttgggagctgtctgggtcatg

SEQ ID NO: 228151 - DNA, 33 bp, Homo sapien
ggtcatgctaaagttgaacagaaattctaaatt

SEQ ID NO: 228152 - DNA, 33 bp, Homo sapien
ggtcatgctaaagttgcacagaaattctaaatt

SEQ ID NO: 228153 - DNA, 33 bp, Homo sapien
gctttttattctctcaaaggatcagtgttgctc

SEQ ID NO: 228154 - DNA, 33 bp, Homo sapien
gctttttattctctcagaggatcagtgttgctc

SEQ ID NO: 228155 - DNA, 33 bp, Homo sapien
ctctccatgaatatccacttcttcatcaaacct

SEQ ID NO: 228156 - DNA, 33 bp, Homo sapien
ctctccatgaatatccgcttcttcatcaaacct

SEQ ID NO: 228157 - DNA, 33 bp, Homo sapien
tctcccctccactacaataaatcccctataggg

SEQ ID NO: 228158 - DNA, 33 bp, Homo sapien
tctcccctccactacagtaaatcccctataggg

SEQ ID NO: 228159 - DNA, 33 bp, Homo sapien
tttggtataattgctcagactagggcactagat

SEQ ID NO: 228160 - DNA, 33 bp, Homo sapien
tttggtataattgctcggactagggcactagat

SEQ ID NO: 228161 - DNA, 33 bp, Homo sapien
ttctagttctttaagacgcatgattaggttact

SEQ ID NO: 228162 - DNA, 33 bp, Homo sapien
ttctagttctttaagatgcatgattaggttact

SEQ ID NO: 228163 - DNA, 33 bp, Homo sapien
gtcatgggaaccctgacatgaagttggtcagtc

SEQ ID NO: 228164 - DNA, 33 bp, Homo sapien
gtcatgggaaccctgatatgaagttggtcagtc

SEQ ID NO: 228165 - DNA, 33 bp, Homo sapien
ctttcaaaagaaaaaaacatgactctcacataa

SEQ ID NO: 228166 - DNA, 33 bp, Homo sapien
ctttcaaaagaaaaaatcatgactctcacataa

SEQ ID NO: 228167 - DNA, 33 bp, Homo sapien
ctttggacctcatgccagaaaattggtcgcgat

SEQ ID NO: 228168 - DNA, 33 bp, Homo sapien
ctttggacctcatgccggaaaattggtcgcgat

SEQ ID NO: 228169 - DNA, 33 bp, Homo sapien; identical to SEQ ID NO: 228167

SEQ ID NO: 228170 - DNA, 33 bp, Homo sapien; identical to SEQ ID NO: 228168

SEQ ID NO: 228171 - DNA, 33 bp, Homo sapien
tatatgtatagctttgccaccagtatctaaata

SEQ ID NO: 228172 - DNA, 33 bp, Homo sapien
tatatgtatagctttgtcaccagtatctaaata

SEQ ID NO: 228173 - DNA, 33 bp, Homo sapien
agaaagtgttggaagccgaaatattttagtctg

SEQ ID NO: 228174 - DNA, 33 bp, Homo sapien
agaaagtgttggaagctgaaatattttagtctg

SEQ ID NO: 228175 - DNA, 33 bp, Homo sapien
ccctgccaactgtggtcaacaagagcccttcag

SEQ ID NO: 228176 - DNA, 33 bp, Homo sapien
ccctgccaactgtggtgaacaagagcccttcag

SEQ ID NO: 228177 - DNA, 33 bp, Homo sapien
ccatcgttaaatgtggcacatctttctagaggg

SEQ ID NO: 228178 - DNA, 33 bp, Homo sapien
ccatcgttaaatgtggtacatctttctagaggg

SEQ ID NO: 228179 - DNA, 33 bp, Homo sapien
gctttccagactgagaagctaatcacaccaacc

SEQ ID NO: 228180 - DNA, 33 bp, Homo sapien
gctttccagactgagacgctaatcacaccaacc

SEQ ID NO: 228181 - DNA, 33 bp, Homo sapien
tgttttctatttttaggatgaatgtcaaggcaa

SEQ ID NO: 228182 - DNA, 33 bp, Homo sapien
tgttttctatttttagtatgaatgtcaaggcaa

SEQ ID NO: 228183 - DNA, 33 bp, Homo sapien; identical to SEQ ID NO: 228181

SEQ ID NO: 228184 - DNA, 33 bp, Homo sapien; identical to SEQ ID NO: 228182

SEQ ID NO: 228185 - DNA, 33 bp, Homo sapien
aagagtagacactgctaaaggaaagaacttaaa

SEQ ID NO: 228186 - DNA, 33 bp, Homo sapien
aagagtagacactgctgaaggaaagaacttaaa

SEQ ID NO: 228187 - DNA, 33 bp, Homo sapien
ggcttcaaacaaatgactcaagttcagaaatat

SEQ ID NO: 228188 - DNA, 33 bp, Homo sapien
ggcttcaaacaaatgattcaagttcagaaatat

SEQ ID NO: 228189 - DNA, 33 bp, Homo sapien
aactaacaactatgaacggtagagataaaatta

SEQ ID NO: 228190 - DNA, 33 bp, Homo sapien
aactaacaactatgaagggtagagataaaatta

SEQ ID NO: 228191 - DNA, 33 bp, Homo sapien
cacctcttcctagctacagagttgggtccatgg

SEQ ID NO: 228192 - DNA, 33 bp, Homo sapien
cacctcttcctagctatagagttgggtccatgg

SEQ ID NO: 228193 - DNA, 33 bp, Homo sapien
atagagcaccaacgaaccatttctgttgtcttc

SEQ ID NO: 228194 - DNA, 33 bp, Homo sapien
atagagcaccaacgaagcatttctgttgtcttc

SEQ ID NO: 228195 - DNA, 33 bp, Homo sapien
agttaactacaaaaagaaagaattcagctagct

SEQ ID NO: 228196 - DNA, 33 bp, Homo sapien
agttaactacaaaaaggaagaattcagctagct

SEQ ID NO: 228197 - DNA, 33 bp, Homo sapien
ttatatagatcatgttgaaactgttcccaccac

SEQ ID NO: 228198 - DNA, 33 bp, Homo sapien
ttatatagatcatgtttaaactgttcccaccac

SEQ ID NO: 228199 - DNA, 33 bp, Homo sapien
aaaagaataagaagaaagaaatcacaggctgag

SEQ ID NO: 228200 - DNA, 33 bp, Homo sapien
aaaagaataagaagaaggaaatcacaggctgag

SEQ ID NO: 228201 - DNA, 33 bp, Homo sapien
atgactcagttgtgccaatttaaactacattaa

SEQ ID NO: 228202 - DNA, 33 bp, Homo sapien
atgactcagttgtgccgatttaaactacattaa

SEQ ID NO: 228203 - DNA, 33 bp, Homo sapien
acagaaaccatttatcaaagacttaccatgtac

SEQ ID NO: 228204 - DNA, 33 bp, Homo sapien
acagaaaccatttatcgaagacttaccatgtac

SEQ ID NO: 228205 - DNA, 33 bp, Homo sapien
agtgtgggcccaggtacaagaaatgcaatatta

SEQ ID NO: 228206 - DNA, 33 bp, Homo sapien
agtgtgggcccaggtataagaaatgcaatatta

SEQ ID NO: 228207 - DNA, 33 bp, Homo sapien
gagcacagattctgaaactacgactgctgttgt

SEQ ID NO: 228208 - DNA, 33 bp, Homo sapien
gagcacagattctgaacctacgactgctgttgt

SEQ ID NO: 228209 - DNA, 33 bp, Homo sapien
gcttccaccagctgataaaaatatgagtgaggg

SEQ ID NO: 228210 - DNA, 33 bp, Homo sapien
gcttccaccagctgatgaaaatatgagtgaggg

SEQ ID NO: 228211 - DNA, 33 bp, Homo sapien
ggttgcggtatctacaatctcttctctttcaat

SEQ ID NO: 228212 - DNA, 33 bp, Homo sapien
ggttgcggtatctacagtctcttctctttcaat

SEQ ID NO: 228213 - DNA, 33 bp, Homo sapien
tcactcactctcacaacaagagcatgagggtaa

SEQ ID NO: 228214 - DNA, 33 bp, Homo sapien
tcactcactctcacaagaagagcatgagggtaa

SEQ ID NO: 228215 - DNA, 33 bp, Homo sapien
tcgcatctttgttgacaatcccacttgtggaaa

SEQ ID NO: 228216 - DNA, 33 bp, Homo sapien
tcgcatctttgttgacgatcccacttgtggaaa

SEQ ID NO: 228217 - DNA, 33 bp, Homo sapien
gtagattgagtggtcaccaagtgtctctaggag

SEQ ID NO: 228218 - DNA, 33 bp, Homo sapien
gtagattgagtggtcatcaagtgtctctaggag

SEQ ID NO: 228219 - DNA, 33 bp, Homo sapien
aagggttcatgctttgaaatggagtcagagagc

SEQ ID NO: 228220 - DNA, 33 bp, Homo sapien
aagggttcatgctttggaatggagtcagagagc

SEQ ID NO: 228221 - DNA, 33 bp, Homo sapien
cttaactctcatgtcaacctatacctatgtaat

SEQ ID NO: 228222 - DNA, 33 bp, Homo sapien
cttaactctcatgtcaccctatacctatgtaat

SEQ ID NO: 228223 - DNA, 33 bp, Homo sapien
gcccagataagatagcaacagggaacaagtcca

SEQ ID NO: 228224 - DNA, 33 bp, Homo sapien
gcccagataagatagcgacagggaacaagtcca

SEQ ID NO: 228225 - DNA, 33 bp, Homo sapien
tagacgtggatcctagacagtttcagaaaaatt

SEQ ID NO: 228226 - DNA, 33 bp, Homo sapien
tagacgtggatcctagccagtttcagaaaaatt

SEQ ID NO: 228227 - DNA, 33 bp, Homo sapien
aaagaaagccagcataacaatgttcagagccct

SEQ ID NO: 228228 - DNA, 33 bp, Homo sapien
aaagaaagccagcatagcaatgttcagagccct

SEQ ID NO: 228229 - DNA, 33 bp, Homo sapien
ctgaagagttaggtcacagaataaaagaataaa

SEQ ID NO: 228230 - DNA, 33 bp, Homo sapien
ctgaagagttaggtcagagaataaaagaataaa

SEQ ID NO: 228231 - DNA, 33 bp, Homo sapien
ttacatcaaagtctaaccacgggaacattgcag

SEQ ID NO: 228232 - DNA, 33 bp, Homo sapien
ttacatcaaagtctaagcacgggaacattgcag

SEQ ID NO: 228233 - DNA, 33 bp, Homo sapien
caatggatgtgtcttaaaccaaaatctaccctc

SEQ ID NO: 228234 - DNA, 33 bp, Homo sapien
caatggatgtgtcttacaccaaaatctaccctc

SEQ ID NO: 228235 - DNA, 33 bp, Homo sapien
ttgtcttgtctcccacaactagaacacagtaag

SEQ ID NO: 228236 - DNA, 33 bp, Homo sapien
ttgtcttgtctcccaccactagaacacagtaag

SEQ ID NO: 228237 - DNA, 33 bp, Homo sapien
atgaggttacaaatcaggcctttgacagtgttt

SEQ ID NO: 228238 - DNA, 33 bp, Homo sapien
atgaggttacaaatcatgcctttgacagtgttt

SEQ ID NO: 228239 - DNA, 33 bp, Homo sapien
agtactaacaagttgaccttgaaggccttttaa

SEQ ID NO: 228240 - DNA, 33 bp, Homo sapien
agtactaacaagttgatcttgaaggccttttaa

SEQ ID NO: 228241 - DNA, 33 bp, Homo sapien
caactattgaccaaccacaacctggaatttcta

SEQ ID NO: 228242 - DNA, 33 bp, Homo sapien
caactattgaccaaccgcaacctggaatttcta

SEQ ID NO: 228243 - DNA, 33 bp, Homo sapien
agcaagggattggagtaaagtgctgaaaaagac

SEQ ID NO: 228244 - DNA, 33 bp, Homo sapien
agcaagggattggagtgaagtgctgaaaaagac

SEQ ID NO: 228245 - DNA, 33 bp, Homo sapien
tagatttaaaggactacgtgatgcataacctaa

SEQ ID NO: 228246 - DNA, 33 bp, Homo sapien
tagatttaaaggactatgtgatgcataacctaa

SEQ ID NO: 228247 - DNA, 33 bp, Homo sapien
ttagccacatagtcatcataagtgattacattt

SEQ ID NO: 228248 - DNA, 33 bp, Homo sapien
ttagccacatagtcatgataagtgattacattt

SEQ ID NO: 228249 - DNA, 33 bp, Homo sapien
gtggattttgaattccagatagcatggtggaaa

SEQ ID NO: 228250 - DNA, 33 bp, Homo sapien
gtggattttgaattccggatagcatggtggaaa

SEQ ID NO: 228251 - DNA, 33 bp, Homo sapien
ataccagaatgtctcaggatatttactaccttt

SEQ ID NO: 228252 - DNA, 33 bp, Homo sapien
ataccagaatgtctcatgatatttactaccttt

SEQ ID NO: 228253 - DNA, 33 bp, Homo sapien
gggttgtctcattacaaacttatccctcctccc

SEQ ID NO: 228254 - DNA, 33 bp, Homo sapien
gggttgtctcattacacacttatccctcctccc

SEQ ID NO: 228255 - DNA, 33 bp, Homo sapien
tgctgaatcacccaccaaaggcacaaggcacct

SEQ ID NO: 228256 - DNA, 33 bp, Homo sapien
tgctgaatcacccaccgaaggcacaaggcacct

SEQ ID NO: 228257 - DNA, 33 bp, Homo sapien
ggtgattggccgtctcaaagatttggtgactac

SEQ ID NO: 228258 - DNA, 33 bp, Homo sapien
ggtgattggccgtctccaagatttggtgactac

SEQ ID NO: 228259 - DNA, 33 bp, Homo sapien
tccaaagactgggtccaaaatcaaggcaatcac

SEQ ID NO: 228260 - DNA, 33 bp, Homo sapien
tccaaagactgggtccgaaatcaaggcaatcac

SEQ ID NO: 228261 - DNA, 33 bp, Homo sapien
aacatttggaatcataagtaacataggacagta

SEQ ID NO: 228262 - DNA, 33 bp, Homo sapien
aacatttggaatcatacgtaacataggacagta

SEQ ID NO: 228263 - DNA, 33 bp, Homo sapien
aacactgatcaaaatacgtttacaatgtccaag

SEQ ID NO: 228264 - DNA, 33 bp, Homo sapien
aacactgatcaaaatatgtttacaatgtccaag

SEQ ID NO: 228265 - DNA, 33 bp, Homo sapien
acatattattggtcaagaaaagcatgaaaactg

SEQ ID NO: 228266 - DNA, 33 bp, Homo sapien
acatattattggtcaataaaagcatgaaaactg

SEQ ID NO: 228267 - DNA, 33 bp, Homo sapien
accctgcgcttcggaccaggagcccaagtcctc

SEQ ID NO: 228268 - DNA, 33 bp, Homo sapien
accctgcgcttcggacgaggagcccaagtcctc

SEQ ID NO: 228269 - DNA, 33 bp, Homo sapien
accttcccgacctcgccgaagttgaaaaaaggc

SEQ ID NO: 228270 - DNA, 33 bp, Homo sapien
accttcccgacctcgctgaagttgaaaaaaggc

SEQ ID NO: 228271 - DNA, 33 bp, Homo sapien
aattccagatatttgaaaagtacttcagttcat

SEQ ID NO: 228272 - DNA, 33 bp, Homo sapien
aattccagatatttgagaagtacttcagttcat

SEQ ID NO: 228273 - DNA, 33 bp, Homo sapien
ttatctacctatgaccagaaacctcccgcttcg

SEQ ID NO: 228274 - DNA, 33 bp, Homo sapien
ttatctacctatgacctgaaacctcccgcttcg

SEQ ID NO: 228275 - DNA, 33 bp, Homo sapien; identical to SEQ ID NO: 228273

SEQ ID NO: 228276 - DNA, 33 bp, Homo sapien; identical to SEQ ID NO: 228274

SEQ ID NO: 228277 - DNA, 33 bp, Homo sapien
aggaggacaccagggagagttcccaaagcagtg

SEQ ID NO: 228278 - DNA, 33 bp, Homo sapien
aggaggacaccagggatagttcccaaagcagtg

SEQ ID NO: 228279 - DNA, 33 bp, Homo sapien
aatttgctcctgcttacgctttcagtttcatcc

SEQ ID NO: 228280 - DNA, 33 bp, Homo sapien
aatttgctcctgcttatgctttcagtttcatcc

SEQ ID NO: 228281 - DNA, 33 bp, Homo sapien
tatgcagtcttgtaggacacgttaaagatattg

SEQ ID NO: 228282 - DNA, 33 bp, Homo sapien
tatgcagtcttgtaggtcacgttaaagatattg

SEQ ID NO: 228283 - DNA, 33 bp, Homo sapien
agagccaaactatctcaatatcaaaacaggtag

SEQ ID NO: 228284 - DNA, 33 bp, Homo sapien
agagccaaactatctccatatcaaaacaggtag

SEQ ID NO: 228285 - DNA, 33 bp, Homo sapien
atgttctcagacaaagaatgaccctcagaagtt

SEQ ID NO: 228286 - DNA, 33 bp, Homo sapien
atgttctcagacaaaggatgaccctcagaagtt

SEQ ID NO: 228287 - DNA, 33 bp, Homo sapien
atgttgttaaaaggcacctctttaatcctgtac

SEQ ID NO: 228288 - DNA, 33 bp, Homo sapien
atgttgttaaaaggcatctctttaatcctgtac

SEQ ID NO: 228289 - DNA, 33 bp, Homo sapien
ccaacttttctggtacccaataggtagtgtttc

SEQ ID NO: 228290 - DNA, 33 bp, Homo sapien
ccaacttttctggtactcaataggtagtgtttc

SEQ ID NO: 228291 - DNA, 33 bp, Homo sapien
ttttatgtaagattaggattgctacttttattg

SEQ ID NO: 228292 - DNA, 33 bp, Homo sapien
ttttatgtaagattagtattgctacttttattg

SEQ ID NO: 228293 - DNA, 33 bp, Homo sapien
attatgggagaattaaacatcttctatgctcta

SEQ ID NO: 228294 - DNA, 33 bp, Homo sapien
attatgggagaattaagcatcttctatgctcta

SEQ ID NO: 228295 - DNA, 33 bp, Homo sapien
attttattatagcaggccaagtggactaagata

SEQ ID NO: 228296 - DNA, 33 bp, Homo sapien
attttattatagcagggcaagtggactaagata

SEQ ID NO: 228297 - DNA, 33 bp, Homo sapien
attagagaatagagaacgtgttttgaaatgacc

SEQ ID NO: 228298 - DNA, 33 bp, Homo sapien
attagagaatagagaatgtgttttgaaatgacc

SEQ ID NO: 228299 - DNA, 33 bp, Homo sapien
atatattcaaggattacctaagaggaacgccac

SEQ ID NO: 228300 - DNA, 33 bp, Homo sapien
atatattcaaggattatctaagaggaacgccac

SEQ ID NO: 228301 - DNA, 33 bp, Homo sapien
tgcttcattgcatgaaagttgtagtaaagtctt

SEQ ID NO: 228302 - DNA, 33 bp, Homo sapien
tgcttcattgcatgaaggttgtagtaaagtctt

SEQ ID NO: 228303 - DNA, 33 bp, Homo sapien
tttctaacacgtgaccacattataatctttgca

SEQ ID NO: 228304 - DNA, 33 bp, Homo sapien
tttctaacacgtgaccgcattataatctttgca

SEQ ID NO: 228305 - DNA, 33 bp, Homo sapien
tttacccaagaatgataaaagcaaaacgtccat

SEQ ID NO: 228306 - DNA, 33 bp, Homo sapien
tttacccaagaatgatgaaagcaaaacgtccat

SEQ ID NO: 228307 - DNA, 33 bp, Homo sapien
gaggctctcactagacacattctcaatactgtc

SEQ ID NO: 228308 - DNA, 33 bp, Homo sapien
gaggctctcactagacgcattctcaatactgtc

SEQ ID NO: 228309 - DNA, 33 bp, Homo sapien
gccctgtaacagtaaaagaggctgttcatgcac

SEQ ID NO: 228310 - DNA, 33 bp, Homo sapien
gccctgtaacagtaaaggaggctgttcatgcac

SEQ ID NO: 228311 - DNA, 33 bp, Homo sapien
tcaactttgggaacagaagaattgtagagcatg

SEQ ID NO: 228312 - DNA, 33 bp, Homo sapien
tcaactttgggaacaggagaattgtagagcatg

SEQ ID NO: 228313 - DNA, 33 bp, Homo sapien
acaagttagttgactaaggacaagtaacttggc

SEQ ID NO: 228314 - DNA, 33 bp, Homo sapien
acaagttagttgactacggacaagtaacttggc

SEQ ID NO: 228315 - DNA, 33 bp, Homo sapien
gatatttgcacacttacgttcatagaagcatta

SEQ ID NO: 228316 - DNA, 33 bp, Homo sapien
gatatttgcacacttatgttcatagaagcatta

SEQ ID NO: 228317 - DNA, 33 bp, Homo sapien
tgctagtattgttcaaatctatatccttactgt

SEQ ID NO: 228318 - DNA, 33 bp, Homo sapien
tgctagtattgttcaagtctatatccttactgt

SEQ ID NO: 228319 - DNA, 33 bp, Homo sapien
tattcatcagatgttacatgaagtgtcctataa

SEQ ID NO: 228320 - DNA, 33 bp, Homo sapien
tattcatcagatgttagatgaagtgtcctataa

SEQ ID NO: 228321 - DNA, 33 bp, Homo sapien
agataccaaagggcatcagttaagagactattt

SEQ ID NO: 228322 - DNA, 33 bp, Homo sapien
agataccaaagggcatgagttaagagactattt

SEQ ID NO: 228323 - DNA, 33 bp, Homo sapien; identical to SEQ ID NO: 228321

SEQ ID NO: 228324 - DNA, 33 bp, Homo sapien; identical to SEQ ID NO: 228322

SEQ ID NO: 228325 - DNA, 33 bp, Homo sapien
agggaaagccttctatcagtgatgagataaatg

SEQ ID NO: 228326 - DNA, 33 bp, Homo sapien
agggaaagccttctattagtgatgagataaatg

SEQ ID NO: 228327 - DNA, 33 bp, Homo sapien
ttagcaaaactctaaccaggaatgctgttgttg

SEQ ID NO: 228328 - DNA, 33 bp, Homo sapien
ttagcaaaactctaactaggaatgctgttgttg

SEQ ID NO: 228329 - DNA, 33 bp, Homo sapien
gtaaagattgggaaaaacttgcactaacttcca

SEQ ID NO: 228330 - DNA, 33 bp, Homo sapien
gtaaagattgggaaaagcttgcactaacttcca

SEQ ID NO: 228331 - DNA, 33 bp, Homo sapien
aattgcttgactaatacgaaaggaagcatggtt

SEQ ID NO: 228332 - DNA, 33 bp, Homo sapien
aattgcttgactaatatgaaaggaagcatggtt

SEQ ID NO: 228333 - DNA, 33 bp, Homo sapien
gtaagaaagctggtaacagtttccccataaaac

SEQ ID NO: 228334 - DNA, 33 bp, Homo sapien
gtaagaaagctggtaatagtttccccataaaac

SEQ ID NO: 228335 - DNA, 33 bp, Homo sapien
tgaatcaacaactgaccgtataaaactatgctt

SEQ ID NO: 228336 - DNA, 33 bp, Homo sapien
tgaatcaacaactgactgtataaaactatgctt

SEQ ID NO: 228337 - DNA, 33 bp, Homo sapien
cctgcaggtccctttcactagaataatgtatct

SEQ ID NO: 228338 - DNA, 33 bp, Homo sapien
cctgcaggtccctttcgctagaataatgtatct

SEQ ID NO: 228339 - DNA, 33 bp, Homo sapien
cctctgaggtgataaaagtacaaattaatgaaa

SEQ ID NO: 228340 - DNA, 33 bp, Homo sapien
cctctgaggtgataaacgtacaaattaatgaaa

SEQ ID NO: 228341 - DNA, 33 bp, Homo sapien
tctgtaggaggacccacgttcaaattctgttcc

SEQ ID NO: 228342 - DNA, 33 bp, Homo sapien
tctgtaggaggacccatgttcaaattctgttcc

SEQ ID NO: 228343 - DNA, 33 bp, Homo sapien
gtgacttgtgttagaccgcaaatgtcacttcaa

SEQ ID NO: 228344 - DNA, 33 bp, Homo sapien
gtgacttgtgttagactgcaaatgtcacttcaa

SEQ ID NO: 228345 - DNA, 33 bp, Homo sapien
ctaaccagagcaatcacgttaagagaaagaaaa

SEQ ID NO: 228346 - DNA, 33 bp, Homo sapien
ctaaccagagcaatcatgttaagagaaagaaaa

SEQ ID NO: 228347 - DNA, 33 bp, Homo sapien
acataggatttaatcactccttgcccataaact

SEQ ID NO: 228348 - DNA, 33 bp, Homo sapien
acataggatttaatcattccttgcccataaact

SEQ ID NO: 228349 - DNA, 33 bp, Homo sapien
ccaaaacatagaagcccctttctcttgtcaagt

SEQ ID NO: 228350 - DNA, 33 bp, Homo sapien
ccaaaacatagaagcctctttctcttgtcaagt

SEQ ID NO: 228351 - DNA, 33 bp, Homo sapien
atagagcaagaatgaaataagcaagaatggagc

SEQ ID NO: 228352 - DNA, 33 bp, Homo sapien
atagagcaagaatgaagtaagcaagaatggagc

SEQ ID NO: 228353 - DNA, 33 bp, Homo sapien
gattaatatatgttgtaaaggccaagcaactcc

SEQ ID NO: 228354 - DNA, 33 bp, Homo sapien
gattaatatatgttgtgaaggccaagcaactcc

SEQ ID NO: 228355 - DNA, 33 bp, Homo sapien
catacgctttctctacagcatgtaagccctggg

SEQ ID NO: 228356 - DNA, 33 bp, Homo sapien
catacgctttctctacggcatgtaagccctggg

SEQ ID NO: 228357 - DNA, 33 bp, Homo sapien
tttaggagtaaagtaaatcgaaaagaacacagg

SEQ ID NO: 228358 - DNA, 33 bp, Homo sapien
tttaggagtaaagtaagtcgaaaagaacacagg

SEQ ID NO: 228359 - DNA, 33 bp, Homo sapien
aaaaactactcacatcaacagagatgattttag

SEQ ID NO: 228360 - DNA, 33 bp, Homo sapien
aaaaactactcacatcgacagagatgattttag

SEQ ID NO: 228361 - DNA, 33 bp, Homo sapien
tgaaatatttcccaaaagtcggaatgctaagag

SEQ ID NO: 228362 - DNA, 33 bp, Homo sapien
tgaaatatttcccaaaggtcggaatgctaagag

SEQ ID NO: 228363 - DNA, 33 bp, Homo sapien
ctacttatcaatgtaaaatcttagtccagttac

SEQ ID NO: 228364 - DNA, 33 bp, Homo sapien
ctacttatcaatgtaagatcttagtccagttac

SEQ ID NO: 228365 - DNA, 33 bp, Homo sapien
gattgtgcatgaactacgtttaaaattcttaga

SEQ ID NO: 228366 - DNA, 33 bp, Homo sapien
gattgtgcatgaactatgtttaaaattcttaga

SEQ ID NO: 228367 - DNA, 33 bp, Homo sapien
ttctggtatagatgtgcatgaatttctctggtt

SEQ ID NO: 228368 - DNA, 33 bp, Homo sapien
ttctggtatagatgtgtatgaatttctctggtt

SEQ ID NO: 228369 - DNA, 33 bp, Homo sapien
atgatggctataaggaagaatggttgcacttta

SEQ ID NO: 228370 - DNA, 33 bp, Homo sapien
atgatggctataaggaggaatggttgcacttta

SEQ ID NO: 228371 - DNA, 33 bp, Homo sapien
tcttaataagatcttcccatttacacaagcact

SEQ ID NO: 228372 - DNA, 33 bp, Homo sapien
tcttaataagatcttctcatttacacaagcact

SEQ ID NO: 228373 - DNA, 33 bp, Homo sapien
ataaaaagcaaaatcacggaaactcagctatag

SEQ ID NO: 228374 - DNA, 33 bp, Homo sapien
ataaaaagcaaaatcatggaaactcagctatag

SEQ ID NO: 228375 - DNA, 33 bp, Homo sapien
tgaatattctgctataactaagaagggcaacaa

SEQ ID NO: 228376 - DNA, 33 bp, Homo sapien
tgaatattctgctatagctaagaagggcaacaa

SEQ ID NO: 228377 - DNA, 33 bp, Homo sapien
gtgaagaagctagacacggagacagaatctagg

SEQ ID NO: 228378 - DNA, 33 bp, Homo sapien
gtgaagaagctagacatggagacagaatctagg

SEQ ID NO: 228379 - DNA, 33 bp, Homo sapien
tcagtattacttcaaccgtcatttccatacatg

SEQ ID NO: 228380 - DNA, 33 bp, Homo sapien
tcagtattacttcaactgtcatttccatacatg

SEQ ID NO: 228381 - DNA, 33 bp, Homo sapien
tgggtcaagaagagagaattagagaaaaagcag

SEQ ID NO: 228382 - DNA, 33 bp, Homo sapien
tgggtcaagaagagaggattagagaaaaagcag

SEQ ID NO: 228383 - DNA, 33 bp, Homo sapien
gaatgttgttgaaaaaactacacaactgtgcat

SEQ ID NO: 228384 - DNA, 33 bp, Homo sapien
gaatgttgttgaaaaagctacacaactgtgcat

SEQ ID NO: 228385 - DNA, 33 bp, Homo sapien
tacacttactaaaagacaattccacacgctaga

SEQ ID NO: 228386 - DNA, 33 bp, Homo sapien
tacacttactaaaagataattccacacgctaga

SEQ ID NO: 228387 - DNA, 33 bp, Homo sapien
tgtcttaagtccttcaagtgtggtggtagccaa

SEQ ID NO: 228388 - DNA, 33 bp, Homo sapien
tgtcttaagtccttcaggtgtggtggtagccaa

SEQ ID NO: 228389 - DNA, 33 bp, Homo sapien
tcatcttatgcaaaaaccacctcaagatagatt

SEQ ID NO: 228390 - DNA, 33 bp, Homo sapien
tcatcttatgcaaaaatcacctcaagatagatt

SEQ ID NO: 228391 - DNA, 33 bp, Homo sapien
atctcatagaaagaaagaagatatggacacata

SEQ ID NO: 228392 - DNA, 33 bp, Homo sapien
atctcatagaaagaaataagatatggacacata

SEQ ID NO: 228393 - DNA, 33 bp, Homo sapien
tcacccagtccagtaacgcggtcttcagtaatg

SEQ ID NO: 228394 - DNA, 33 bp, Homo sapien
tcacccagtccagtaatgcggtcttcagtaatg

SEQ ID NO: 228395 - DNA, 33 bp, Homo sapien
gaaagaaatgactgaactaaatagcagagtgga

SEQ ID NO: 228396 - DNA, 33 bp, Homo sapien
gaaagaaatgactgaattaaatagcagagtgga

SEQ ID NO: 228397 - DNA, 33 bp, Homo sapien
atgaaaaagctgttggacatcattccttcccac

SEQ ID NO: 228398 - DNA, 33 bp, Homo sapien
atgaaaaagctgttgggcatcattccttcccac

SEQ ID NO: 228399 - DNA, 33 bp, Homo sapien
cataatacagaatagaactggaatccaagtcga

SEQ ID NO: 228400 - DNA, 33 bp, Homo sapien
cataatacagaatagagctggaatccaagtcga

SEQ ID NO: 228401 - DNA, 33 bp, Homo sapien
ggagaaatcgaaggaactgtgtcaagacatctg

SEQ ID NO: 228402 - DNA, 33 bp, Homo sapien
ggagaaatcgaaggaattgtgtcaagacatctg

SEQ ID NO: 228403 - DNA, 33 bp, Homo sapien
ttttccatatcttcaaagtcagtgtaccataat

SEQ ID NO: 228404 - DNA, 33 bp, Homo sapien
ttttccatatcttcaaggtcagtgtaccataat

SEQ ID NO: 228405 - DNA, 33 bp, Homo sapien
tcagctagtctagctaaagtcttgccaattttg

SEQ ID NO: 228406 - DNA, 33 bp, Homo sapien
tcagctagtctagctagagtcttgccaattttg

SEQ ID NO: 228407 - DNA, 33 bp, Homo sapien
aaaaactaaaaaactacaggcaacggataaatt

SEQ ID NO: 228408 - DNA, 33 bp, Homo sapien
aaaaactaaaaaactagaggcaacggataaatt

SEQ ID NO: 228409 - DNA, 33 bp, Homo sapien
agggaatcttaaaaagccgaattcatagaaaca

SEQ ID NO: 228410 - DNA, 33 bp, Homo sapien
agggaatcttaaaaagtcgaattcatagaaaca

SEQ ID NO: 228411 - DNA, 33 bp, Homo sapien
gtagtattaatgccccagaacagcaacaaagaa

SEQ ID NO: 228412 - DNA, 33 bp, Homo sapien
gtagtattaatgccccggaacagcaacaaagaa

SEQ ID NO: 228413 - DNA, 33 bp, Homo sapien
tttggccaaaggaacacgagtggatgtgatgtg

SEQ ID NO: 228414 - DNA, 33 bp, Homo sapien
tttggccaaaggaacatgagtggatgtgatgtg

SEQ ID NO: 228415 - DNA, 33 bp, Homo sapien
ctttcacacagttgtcacattttaactgactgg

SEQ ID NO: 228416 - DNA, 33 bp, Homo sapien
ctttcacacagttgtcgcattttaactgactgg

SEQ ID NO: 228417 - DNA, 33 bp, Homo sapien
acgtgtaccaggaggccgaccggatgctctcca

SEQ ID NO: 228418 - DNA, 33 bp, Homo sapien
acgtgtaccaggaggctgaccggatgctctcca

SEQ ID NO: 228419 - DNA, 33 bp, Homo sapien
cagagtagatgcagagaaattgctctaatatga

SEQ ID NO: 228420 - DNA, 33 bp, Homo sapien
cagagtagatgcagagtaattgctctaatatga

SEQ ID NO: 228421 - DNA, 33 bp, Homo sapien
tcactttagagtttaacgtcaatagaagcaagt

SEQ ID NO: 228422 - DNA, 33 bp, Homo sapien
tcactttagagtttaatgtcaatagaagcaagt

SEQ ID NO: 228423 - DNA, 33 bp, Homo sapien
caagtctaaataatacacaagtccgagaattca

SEQ ID NO: 228424 - DNA, 33 bp, Homo sapien
caagtctaaataatacgcaagtccgagaattca

SEQ ID NO: 228425 - DNA, 33 bp, Homo sapien
ctgtacacaagtaaaaggcaccgaaaatggtaa

SEQ ID NO: 228426 - DNA, 33 bp, Homo sapien
ctgtacacaagtaaaatgcaccgaaaatggtaa

SEQ ID NO: 228427 - DNA, 33 bp, Homo sapien; identical to SEQ ID NO: 228425

SEQ ID NO: 228428 - DNA, 33 bp, Homo sapien; identical to SEQ ID NO: 228426

SEQ ID NO: 228429 - DNA, 33 bp, Homo sapien
acacttcgaatagctacgattgcctcagaattt

SEQ ID NO: 228430 - DNA, 33 bp, Homo sapien
acacttcgaatagctaggattgcctcagaattt

SEQ ID NO: 228431 - DNA, 33 bp, Homo sapien
tacaacaatctaaaggacattaattcaagaaaa

SEQ ID NO: 228432 - DNA, 33 bp, Homo sapien
tacaacaatctaaagggcattaattcaagaaaa

SEQ ID NO: 228433 - DNA, 33 bp, Homo sapien
ataaaaataaagtgtacagtttgatcagtttgg

SEQ ID NO: 228434 - DNA, 33 bp, Homo sapien
ataaaaataaagtgtatagtttgatcagtttgg

SEQ ID NO: 228435 - DNA, 33 bp, Homo sapien
ttttgtaggtgttaggcatttttgttattgtgc

SEQ ID NO: 228436 - DNA, 33 bp, Homo sapien
ttttgtaggtgttaggtatttttgttattgtgc

SEQ ID NO: 228437 - DNA, 33 bp, Homo sapien
tcttgcagattagtccacattttctaaactttt

SEQ ID NO: 228438 - DNA, 33 bp, Homo sapien
tcttgcagattagtccgcattttctaaactttt

SEQ ID NO: 228439 - DNA, 33 bp, Homo sapien
tcaacaagtaatgttgaaataatgggatattca

SEQ ID NO: 228440 - DNA, 33 bp, Homo sapien
tcaacaagtaatgttggaataatgggatattca

SEQ ID NO: 228441 - DNA, 33 bp, Homo sapien; identical to SEQ ID NO: 228439

SEQ ID NO: 228442 - DNA, 33 bp, Homo sapien; identical to SEQ ID NO: 228440

SEQ ID NO: 228443 - DNA, 33 bp, Homo sapien
gtagataatttcataccattaaagggctccatt

SEQ ID NO: 228444 - DNA, 33 bp, Homo sapien
gtagataatttcatactattaaagggctccatt

SEQ ID NO: 228445 - DNA, 33 bp, Homo sapien
ctgtaagtataatgcaaattcccaaatctgaga

SEQ ID NO: 228446 - DNA, 33 bp, Homo sapien
ctgtaagtataatgcacattcccaaatctgaga

SEQ ID NO: 228447 - DNA, 33 bp, Homo sapien; identical to SEQ ID NO: 228445

SEQ ID NO: 228448 - DNA, 33 bp, Homo sapien; identical to SEQ ID NO: 228446

SEQ ID NO: 228449 - DNA, 33 bp, Homo sapien
tgaatcacattttacccaaacaactgcaaacca

SEQ ID NO: 228450 - DNA, 33 bp, Homo sapien
tgaatcacattttaccgaaacaactgcaaacca

SEQ ID NO: 228451 - DNA, 33 bp, Homo sapien
gccaagaaaatgtagcagcaatactcagtgcca

SEQ ID NO: 228452 - DNA, 33 bp, Homo sapien
gccaagaaaatgtagccgcaatactcagtgcca

SEQ ID NO: 228453 - DNA, 33 bp, Homo sapien
aggagtaagttgttcccataaatcttctgtcct

SEQ ID NO: 228454 - DNA, 33 bp, Homo sapien
aggagtaagttgttcctataaatcttctgtcct

SEQ ID NO: 228455 - DNA, 33 bp, Homo sapien
aaatccatgaaggataaaacttatttgttaaat

SEQ ID NO: 228456 - DNA, 33 bp, Homo sapien
aaatccatgaaggatacaacttatttgttaaat

SEQ ID NO: 228457 - DNA, 33 bp, Homo sapien
tgatatttgtgaaacaataggcccgtagatcag

SEQ ID NO: 228458 - DNA, 33 bp, Homo sapien
tgatatttgtgaaacagtaggcccgtagatcag

SEQ ID NO: 228459 - DNA, 33 bp, Homo sapien
ttgacaatattttgcacagttagtggataccat

SEQ ID NO: 228460 - DNA, 33 bp, Homo sapien
ttgacaatattttgcatagttagtggataccat

SEQ ID NO: 228461 - DNA, 33 bp, Homo sapien
aaatgtgaatgcttcaaaaaactttgtatccag

SEQ ID NO: 228462 - DNA, 33 bp, Homo sapien
aaatgtgaatgcttcagaaaactttgtatccag

SEQ ID NO: 228463 - DNA, 33 bp, Homo sapien
taatttctgagaggtacagcaactgaatttaaa

SEQ ID NO: 228464 - DNA, 33 bp, Homo sapien
taatttctgagaggtagagcaactgaatttaaa

SEQ ID NO: 228465 - DNA, 33 bp, Homo sapien
tgtagttgtttcaactcaagacttacaattgca

SEQ ID NO: 228466 - DNA, 33 bp, Homo sapien
tgtagttgtttcaactgaagacttacaattgca

SEQ ID NO: 228467 - DNA, 33 bp, Homo sapien
gccaccatgcccggtcaaaaggccctttaggaa

SEQ ID NO: 228468 - DNA, 33 bp, Homo sapien
gccaccatgcccggtcgaaaggccctttaggaa

SEQ ID NO: 228469 - DNA, 33 bp, Homo sapien
actcatcacaaggtacagaaatgattgtcctgt

SEQ ID NO: 228470 - DNA, 33 bp, Homo sapien
actcatcacaaggtacggaaatgattgtcctgt

SEQ ID NO: 228471 - DNA, 33 bp, Homo sapien
taaacacttcctattacgtcccacctcctgaca

SEQ ID NO: 228472 - DNA, 33 bp, Homo sapien
taaacacttcctattaggtcccacctcctgaca

SEQ ID NO: 228473 - DNA, 33 bp, Homo sapien
gaccttaccattgatcacatacatcagaatcac

SEQ ID NO: 228474 - DNA, 33 bp, Homo sapien
gaccttaccattgatcgcatacatcagaatcac

SEQ ID NO: 228475 - DNA, 33 bp, Homo sapien
tcagatgaaggtcagcaaactgttcatttcaga

SEQ ID NO: 228476 - DNA, 33 bp, Homo sapien
tcagatgaaggtcagcgaactgttcatttcaga

SEQ ID NO: 228477 - DNA, 33 bp, Homo sapien
ccatgccatataaacacataaagagctgtgtta

SEQ ID NO: 228478 - DNA, 33 bp, Homo sapien
ccatgccatataaacatataaagagctgtgtta

SEQ ID NO: 228479 - DNA, 33 bp, Homo sapien
cagtttcagtgattgaacttcatttaaagagtc

SEQ ID NO: 228480 - DNA, 33 bp, Homo sapien
cagtttcagtgattgagcttcatttaaagagtc

SEQ ID NO: 228481 - DNA, 33 bp, Homo sapien
aattagcactgtgttacagatgagaagactgat

SEQ ID NO: 228482 - DNA, 33 bp, Homo sapien
aattagcactgtgttatagatgagaagactgat

SEQ ID NO: 228483 - DNA, 33 bp, Homo sapien
ggtgagacgcctggaaaacatcatccgctcatt

SEQ ID NO: 228484 - DNA, 33 bp, Homo sapien
ggtgagacgcctggaacacatcatccgctcatt

SEQ ID NO: 228485 - DNA, 33 bp, Homo sapien
atgcattttatggaagaacgagtgagtgattgg

SEQ ID NO: 228486 - DNA, 33 bp, Homo sapien
atgcattttatggaaggacgagtgagtgattgg

SEQ ID NO: 228487 - DNA, 33 bp, Homo sapien
gagattgcagagaatagaaaggatttaagtaga

SEQ ID NO: 228488 - DNA, 33 bp, Homo sapien
gagattgcagagaatataaaggatttaagtaga

SEQ ID NO: 228489 - DNA, 33 bp, Homo sapien
agcatgtcggagttacagcctaaatagaaggct

SEQ ID NO: 228490 - DNA, 33 bp, Homo sapien
agcatgtcggagttacggcctaaatagaaggct

SEQ ID NO: 228491 - DNA, 33 bp, Homo sapien
gatagtcagctaaagaaaatagcagattataga

SEQ ID NO: 228492 - DNA, 33 bp, Homo sapien
gatagtcagctaaagacaatagcagattataga

SEQ ID NO: 228493 - DNA, 33 bp, Homo sapien
agttgcagagactttacagatctttaggttcaa

SEQ ID NO: 228494 - DNA, 33 bp, Homo sapien
agttgcagagactttatagatctttaggttcaa

SEQ ID NO: 228495 - DNA, 33 bp, Homo sapien
tttcttgttcattacaaagacctccatttcata

SEQ ID NO: 228496 - DNA, 33 bp, Homo sapien
tttcttgttcattacagagacctccatttcata

SEQ ID NO: 228497 - DNA, 33 bp, Homo sapien
ttgggagacagaaggtaaaccatatgtggagaa

SEQ ID NO: 228498 - DNA, 33 bp, Homo sapien
ttgggagacagaaggtgaaccatatgtggagaa

SEQ ID NO: 228499 - DNA, 33 bp, Homo sapien
tgcatcagttgacgaccatttgagtcattttta

SEQ ID NO: 228500 - DNA, 33 bp, Homo sapien
tgcatcagttgacgactatttgagtcattttta

SEQ ID NO: 228501 - DNA, 33 bp, Homo sapien
gtgctccatagccacacgcagccagagcctact

SEQ ID NO: 228502 - DNA, 33 bp, Homo sapien
gtgctccatagccacaggcagccagagcctact

SEQ ID NO: 228503 - DNA, 33 bp, Homo sapien
gaatctcacacttaacaacaaggcttaaacatc

SEQ ID NO: 228504 - DNA, 33 bp, Homo sapien
gaatctcacacttaacgacaaggcttaaacatc

SEQ ID NO: 228505 - DNA, 33 bp, Homo sapien
taaagggtggatacaactgccacttaggttttc

SEQ ID NO: 228506 - DNA, 33 bp, Homo sapien
taaagggtggatacaattgccacttaggttttc

SEQ ID NO: 228507 - DNA, 33 bp, Homo sapien
tgtattttgtaagtcaaagtcaagggcttgata

SEQ ID NO: 228508 - DNA, 33 bp, Homo sapien
tgtattttgtaagtcagagtcaagggcttgata

SEQ ID NO: 228509 - DNA, 33 bp, Homo sapien
tctcagctaggactcaatatttgaagacctgtc

SEQ ID NO: 228510 - DNA, 33 bp, Homo sapien
tctcagctaggactcagtatttgaagacctgtc

SEQ ID NO: 228511 - DNA, 33 bp, Homo sapien
aaatgacagtaaagggcagaggctctgcagcca

SEQ ID NO: 228512 - DNA, 33 bp, Homo sapien
aaatgacagtaaagggtagaggctctgcagcca

SEQ ID NO: 228513 - DNA, 33 bp, Homo sapien
ggatgagattaacataggaatcagtaggctggg

SEQ ID NO: 228514 - DNA, 33 bp, Homo sapien
ggatgagattaacatatgaatcagtaggctggg

SEQ ID NO: 228515 - DNA, 33 bp, Homo sapien
tatccatcatagaatgaagtgtgagagttttac

SEQ ID NO: 228516 - DNA, 33 bp, Homo sapien
tatccatcatagaatgcagtgtgagagttttac

SEQ ID NO: 228517 - DNA, 33 bp, Homo sapien
tgaaagccgattacacaaagtcatttgggtttg

SEQ ID NO: 228518 - DNA, 33 bp, Homo sapien
tgaaagccgattacacgaagtcatttgggtttg

SEQ ID NO: 228519 - DNA, 33 bp, Homo sapien
tttacaatgaggacccaagatacttcagaatct

SEQ ID NO: 228520 - DNA, 33 bp, Homo sapien
tttacaatgaggaccccagatacttcagaatct

SEQ ID NO: 228521 - DNA, 33 bp, Homo sapien
aatatctattccatgcacaaactcttggatatt

SEQ ID NO: 228522 - DNA, 33 bp, Homo sapien
aatatctattccatgcgcaaactcttggatatt

SEQ ID NO: 228523 - DNA, 33 bp, Homo sapien
cacagtgaatgcttcacgaatgcaacacaagta

SEQ ID NO: 228524 - DNA, 33 bp, Homo sapien
cacagtgaatgcttcatgaatgcaacacaagta

SEQ ID NO: 228525 - DNA, 33 bp, Homo sapien
ctaaatgtcatcctacactatttcctctgagct

SEQ ID NO: 228526 - DNA, 33 bp, Homo sapien
ctaaatgtcatcctacgctatttcctctgagct

SEQ ID NO: 228527 - DNA, 33 bp, Homo sapien
gtgacttcatttagtacggaggaagagggaatg

SEQ ID NO: 228528 - DNA, 33 bp, Homo sapien
gtgacttcatttagtatggaggaagagggaatg

SEQ ID NO: 228529 - DNA, 33 bp, Homo sapien
ttaagatttgtccatgaaaacctgtcccattgt

SEQ ID NO: 228530 - DNA, 33 bp, Homo sapien
ttaagatttgtccatggaaacctgtcccattgt

SEQ ID NO: 228531 - DNA, 33 bp, Homo sapien
tctaccaggatgtgaaacattggatctgtcttc

SEQ ID NO: 228532 - DNA, 33 bp, Homo sapien
tctaccaggatgtgaaccattggatctgtcttc

SEQ ID NO: 228533 - DNA, 33 bp, Homo sapien
cttttgagaactaccacattgctttccaaagtg

SEQ ID NO: 228534 - DNA, 33 bp, Homo sapien
cttttgagaactaccagattgctttccaaagtg

SEQ ID NO: 228535 - DNA, 33 bp, Homo sapien
agggcttaattaaatacgtggttggtgaagatt

SEQ ID NO: 228536 - DNA, 33 bp, Homo sapien
agggcttaattaaatatgtggttggtgaagatt

SEQ ID NO: 228537 - DNA, 33 bp, Homo sapien
gtggctctggtaatgacaaacacaatatcagga

SEQ ID NO: 228538 - DNA, 33 bp, Homo sapien
gtggctctggtaatgataaacacaatatcagga

SEQ ID NO: 228539 - DNA, 33 bp, Homo sapien
cctttttaactgcaagacttataggaggataca

SEQ ID NO: 228540 - DNA, 33 bp, Homo sapien
cctttttaactgcaaggcttataggaggataca

SEQ ID NO: 228541 - DNA, 33 bp, Homo sapien
catgaagttcaattcaaaatatttacttgagta

SEQ ID NO: 228542 - DNA, 33 bp, Homo sapien
catgaagttcaattcacaatatttacttgagta

SEQ ID NO: 228543 - DNA, 33 bp, Homo sapien
tctctagagcttgttcaccttgcttgactgaaa

SEQ ID NO: 228544 - DNA, 33 bp, Homo sapien
tctctagagcttgttctccttgcttgactgaaa

SEQ ID NO: 228545 - DNA, 33 bp, Homo sapien
gaactaaaattatggaaaaccagacacgagttc

SEQ ID NO: 228546 - DNA, 33 bp, Homo sapien
gaactaaaattatggagaaccagacacgagttc

SEQ ID NO: 228547 - DNA, 33 bp, Homo sapien
gctctaggatatttgcaatccaattctggcgac

SEQ ID NO: 228548 - DNA, 33 bp, Homo sapien
gctctaggatatttgcgatccaattctggcgac

SEQ ID NO: 228549 - DNA, 33 bp, Homo sapien
gaacaatacaccatcactgagagggtaattcat

SEQ ID NO: 228550 - DNA, 33 bp, Homo sapien
gaacaatacaccatcattgagagggtaattcat

SEQ ID NO: 228551 - DNA, 33 bp, Homo sapien
gacattgttcttcctgcaaatgagtctacaaaa

SEQ ID NO: 228552 - DNA, 33 bp, Homo sapien
gacattgttcttcctggaaatgagtctacaaaa

SEQ ID NO: 228553 - DNA, 33 bp, Homo sapien
tgtttcagtatggataagttgttctctaagtct

SEQ ID NO: 228554 - DNA, 33 bp, Homo sapien
tgtttcagtatggataggttgttctctaagtct

SEQ ID NO: 228555 - DNA, 33 bp, Homo sapien
gtcacatcatctaagaaaacctacaaatctaga

SEQ ID NO: 228556 - DNA, 33 bp, Homo sapien
gtcacatcatctaagagaacctacaaatctaga

SEQ ID NO: 228557 - DNA, 33 bp, Homo sapien
gaaagaaagggcttaacgaatccacctcttcta

SEQ ID NO: 228558 - DNA, 33 bp, Homo sapien
gaaagaaagggcttaatgaatccacctcttcta

SEQ ID NO: 228559 - DNA, 33 bp, Homo sapien
tttttgtttgtggttgaagatgataataaaggg

SEQ ID NO: 228560 - DNA, 33 bp, Homo sapien
tttttgtttgtggttggagatgataataaaggg

SEQ ID NO: 228561 - DNA, 33 bp, Homo sapien
caagtttagatcgtgaatatagaggcaaaaata

SEQ ID NO: 228562 - DNA, 33 bp, Homo sapien
caagtttagatcgtgactatagaggcaaaaata

SEQ ID NO: 228563 - DNA, 33 bp, Homo sapien
ttttcacatgaataacaacatttcacatgataa

SEQ ID NO: 228564 - DNA, 33 bp, Homo sapien
ttttcacatgaataacgacatttcacatgataa

SEQ ID NO: 228565 - DNA, 33 bp, Homo sapien
catgtcaatggttttacgtgtggacatatgttt

SEQ ID NO: 228566 - DNA, 33 bp, Homo sapien
catgtcaatggttttatgtgtggacatatgttt

SEQ ID NO: 228567 - DNA, 33 bp, Homo sapien
atttaaaaaaatctgcaactctagttttaagtt

SEQ ID NO: 228568 - DNA, 33 bp, Homo sapien
atttaaaaaaatctgctactctagttttaagtt

SEQ ID NO: 228569 - DNA, 33 bp, Homo sapien
aattggaagaacttaaaaaggatgagattgatt

SEQ ID NO: 228570 - DNA, 33 bp, Homo sapien
aattggaagaacttaagaaggatgagattgatt

SEQ ID NO: 228571 - DNA, 33 bp, Homo sapien
tcccagtggctgatccaccagactggccaaatt

SEQ ID NO: 228572 - DNA, 33 bp, Homo sapien
tcccagtggctgatccgccagactggccaaatt

SEQ ID NO: 228573 - DNA, 33 bp, Homo sapien
accctttcatttcaacacctcactgcgcattgc

SEQ ID NO: 228574 - DNA, 33 bp, Homo sapien
accctttcatttcaactcctcactgcgcattgc

SEQ ID NO: 228575 - DNA, 33 bp, Homo sapien
gggttaggaggaggagaatatgtggtgtgattg

SEQ ID NO: 228576 - DNA, 33 bp, Homo sapien
gggttaggaggaggagcatatgtggtgtgattg

SEQ ID NO: 228577 - DNA, 33 bp, Homo sapien
attgggttgtttggaccagctcagagccaaaca

SEQ ID NO: 228578 - DNA, 33 bp, Homo sapien
attgggttgtttggacgagctcagagccaaaca

SEQ ID NO: 228579 - DNA, 33 bp, Homo sapien
tttactgatactaattcaatgggtgtgtagtgt

SEQ ID NO: 228580 - DNA, 33 bp, Homo sapien
tttactgatactaatttaatgggtgtgtagtgt

SEQ ID NO: 228581 - DNA, 33 bp, Homo sapien
ggcagtactaccaatcacataaagaagtattca

SEQ ID NO: 228582 - DNA, 33 bp, Homo sapien
ggcagtactaccaatcgcataaagaagtattca

SEQ ID NO: 228583 - DNA, 33 bp, Homo sapien
cgcctcctgggctcaaatagctgagtagctgag

SEQ ID NO: 228584 - DNA, 33 bp, Homo sapien
cgcctcctgggctcaagtagctgagtagctgag

SEQ ID NO: 228585 - DNA, 33 bp, Homo sapien
tatccctagatcacctaagccagagtcctagaa

SEQ ID NO: 228586 - DNA, 33 bp, Homo sapien
tatccctagatcacctcagccagagtcctagaa

SEQ ID NO: 228587 - DNA, 33 bp, Homo sapien
tcaagtgcaatgggaacggaaatgagttttact

SEQ ID NO: 228588 - DNA, 33 bp, Homo sapien
tcaagtgcaatgggaatggaaatgagttttact

SEQ ID NO: 228589 - DNA, 33 bp, Homo sapien
gatgtctagacgtggtaaaaggtttatctgctg

SEQ ID NO: 228590 - DNA, 33 bp, Homo sapien
gatgtctagacgtggtgaaaggtttatctgctg

SEQ ID NO: 228591 - DNA, 33 bp, Homo sapien
ccattattccaggtcacctttatttccacaccc

SEQ ID NO: 228592 - DNA, 33 bp, Homo sapien
ccattattccaggtcagctttatttccacaccc

SEQ ID NO: 228593 - DNA, 33 bp, Homo sapien
ttttgtaaaaggcagaatagtacacatacatga

SEQ ID NO: 228594 - DNA, 33 bp, Homo sapien
ttttgtaaaaggcagactagtacacatacatga

SEQ ID NO: 228595 - DNA, 33 bp, Homo sapien
tttctgcctctagccaagatggagtaataggga

SEQ ID NO: 228596 - DNA, 33 bp, Homo sapien
tttctgcctctagccaggatggagtaataggga

SEQ ID NO: 228597 - DNA, 33 bp, Homo sapien
tattaaattatcacaaagttctgggcacagtgg

SEQ ID NO: 228598 - DNA, 33 bp, Homo sapien
tattaaattatcacaatgttctgggcacagtgg

SEQ ID NO: 228599 - DNA, 33 bp, Homo sapien
aaacctgctaattacaactcctacaaacagttt

SEQ ID NO: 228600 - DNA, 33 bp, Homo sapien
aaacctgctaattacagctcctacaaacagttt

SEQ ID NO: 228601 - DNA, 33 bp, Homo sapien
ttgtagctctgagtccaacttggaataaagtct

SEQ ID NO: 228602 - DNA, 33 bp, Homo sapien
ttgtagctctgagtccgacttggaataaagtct

SEQ ID NO: 228603 - DNA, 33 bp, Homo sapien
actccttgtctctcataagcgatgaatcaagaa

SEQ ID NO: 228604 - DNA, 33 bp, Homo sapien
actccttgtctctcatgagcgatgaatcaagaa

SEQ ID NO: 228605 - DNA, 33 bp, Homo sapien
atatccatggcataaacgaagggaactcgacgg

SEQ ID NO: 228606 - DNA, 33 bp, Homo sapien
atatccatggcataaatgaagggaactcgacgg

SEQ ID NO: 228607 - DNA, 33 bp, Homo sapien
cacacctgtcatcatccctccttttacatacac

SEQ ID NO: 228608 - DNA, 33 bp, Homo sapien
cacacctgtcatcatctctccttttacatacac

SEQ ID NO: 228609 - DNA, 33 bp, Homo sapien
tttctattgcaggaaacggatttaaatatatag

SEQ ID NO: 228610 - DNA, 33 bp, Homo sapien
tttctattgcaggaaatggatttaaatatatag

SEQ ID NO: 228611 - DNA, 33 bp, Homo sapien
attgttgattattcaacgtgtactaaatacaga

SEQ ID NO: 228612 - DNA, 33 bp, Homo sapien
attgttgattattcaatgtgtactaaatacaga

SEQ ID NO: 228613 - DNA, 33 bp, Homo sapien
ccccgagcattccacaaagggcttctagtagtt

SEQ ID NO: 228614 - DNA, 33 bp, Homo sapien
ccccgagcattccacagagggcttctagtagtt

SEQ ID NO: 228615 - DNA, 33 bp, Homo sapien
ttctgtcttttaaaaacgctgatctggtataag

SEQ ID NO: 228616 - DNA, 33 bp, Homo sapien
ttctgtcttttaaaaatgctgatctggtataag

SEQ ID NO: 228617 - DNA, 33 bp, Homo sapien
tcaagaccagtgtaggcacaatggtgagacctg

SEQ ID NO: 228618 - DNA, 33 bp, Homo sapien
tcaagaccagtgtagggacaatggtgagacctg

SEQ ID NO: 228619 - DNA, 33 bp, Homo sapien
agatacgtgagcttcaaaaatacctacctttaa

SEQ ID NO: 228620 - DNA, 33 bp, Homo sapien
agatacgtgagcttcacaaatacctacctttaa

SEQ ID NO: 228621 - DNA, 33 bp, Homo sapien
atatgaataatttcccaagatcttcattaggac

SEQ ID NO: 228622 - DNA, 33 bp, Homo sapien
atatgaataatttccccagatcttcattaggac

SEQ ID NO: 228623 - DNA, 33 bp, Homo sapien
tgtccactaggcctataagcaggtaaatcatgt

SEQ ID NO: 228624 - DNA, 33 bp, Homo sapien
tgtccactaggcctatgagcaggtaaatcatgt

SEQ ID NO: 228625 - DNA, 33 bp, Homo sapien
tcaaacttgctctacacctctttgaaaatattt

SEQ ID NO: 228626 - DNA, 33 bp, Homo sapien
tcaaacttgctctacagctctttgaaaatattt

SEQ ID NO: 228627 - DNA, 33 bp, Homo sapien
ctgggactcaatgataggattctgcaattcagc

SEQ ID NO: 228628 - DNA, 33 bp, Homo sapien
ctgggactcaatgatatgattctgcaattcagc

SEQ ID NO: 228629 - DNA, 33 bp, Homo sapien
cagttccggcaactgacgcttagagtggttaag

SEQ ID NO: 228630 - DNA, 33 bp, Homo sapien
cagttccggcaactgatgcttagagtggttaag

SEQ ID NO: 228631 - DNA, 33 bp, Homo sapien
ataagccatttcacaacttaagttttatttctt

SEQ ID NO: 228632 - DNA, 33 bp, Homo sapien
ataagccatttcacaagttaagttttatttctt

SEQ ID NO: 228633 - DNA, 33 bp, Homo sapien
tataaatataaaggacaagtgttttgcagttca

SEQ ID NO: 228634 - DNA, 33 bp, Homo sapien
tataaatataaaggacgagtgttttgcagttca

SEQ ID NO: 228635 - DNA, 33 bp, Homo sapien
gtcagtgctaatcctgcaaatcggtggtccata

SEQ ID NO: 228636 - DNA, 33 bp, Homo sapien
gtcagtgctaatcctgtaaatcggtggtccata

SEQ ID NO: 228637 - DNA, 33 bp, Homo sapien
ttaactttttgaggaactatcaaactgtttcca

SEQ ID NO: 228638 - DNA, 33 bp, Homo sapien
ttaactttttgaggaagtatcaaactgtttcca

SEQ ID NO: 228639 - DNA, 33 bp, Homo sapien
ggcaagtaatcaagcaaatgaaagcctcatatc

SEQ ID NO: 228640 - DNA, 33 bp, Homo sapien
ggcaagtaatcaagcagatgaaagcctcatatc

SEQ ID NO: 228641 - DNA, 33 bp, Homo sapien
gttcgcctctctttaactgaagactgctgttaa

SEQ ID NO: 228642 - DNA, 33 bp, Homo sapien
gttcgcctctctttaattgaagactgctgttaa

SEQ ID NO: 228643 - DNA, 33 bp, Homo sapien
gtagcttcaccctgcccgatggaaaggctgtgt

SEQ ID NO: 228644 - DNA, 33 bp, Homo sapien
gtagcttcaccctgcctgatggaaaggctgtgt

SEQ ID NO: 228645 - DNA, 33 bp, Homo sapien
ataaatccttctggaaaggttgaatatctatgg

SEQ ID NO: 228646 - DNA, 33 bp, Homo sapien
ataaatccttctggaacggttgaatatctatgg

SEQ ID NO: 228647 - DNA, 33 bp, Homo sapien
acatctaacaaaccttaaacatttaattatgct

SEQ ID NO: 228648 - DNA, 33 bp, Homo sapien
acatctaacaaaccttgaacatttaattatgct

SEQ ID NO: 228649 - DNA, 33 bp, Homo sapien
gagcacggctgaccgagaccaagcagagaaccc

SEQ ID NO: 228650 - DNA, 33 bp, Homo sapien
gagcacggctgaccgataccaagcagagaaccc

SEQ ID NO: 228651 - DNA, 33 bp, Homo sapien
aaaaacaaagaggtacaatgacttgctcaagat

SEQ ID NO: 228652 - DNA, 33 bp, Homo sapien
aaaaacaaagaggtacgatgacttgctcaagat

SEQ ID NO: 228653 - DNA, 33 bp, Homo sapien
aactagctataactcactcctgagtaggcatat

SEQ ID NO: 228654 - DNA, 33 bp, Homo sapien
aactagctataactcattcctgagtaggcatat

SEQ ID NO: 228655 - DNA, 33 bp, Homo sapien
cttgactcctctttctcaccacctctctgccca

SEQ ID NO: 228656 - DNA, 33 bp, Homo sapien
cttgactcctctttcttaccacctctctgccca

SEQ ID NO: 228657 - DNA, 33 bp, Homo sapien
cagtcttctttccattcaagtcctctcatctaa

SEQ ID NO: 228658 - DNA, 33 bp, Homo sapien
cagtcttctttccattgaagtcctctcatctaa

SEQ ID NO: 228659 - DNA, 33 bp, Homo sapien
cagatactattaagaaaactacaaatttgccta

SEQ ID NO: 228660 - DNA, 33 bp, Homo sapien
cagatactattaagaagactacaaatttgccta

SEQ ID NO: 228661 - DNA, 33 bp, Homo sapien
ttcaagagctgtatgaatagctggactcattcc

SEQ ID NO: 228662 - DNA, 33 bp, Homo sapien
ttcaagagctgtatgagtagctggactcattcc

SEQ ID NO: 228663 - DNA, 33 bp, Homo sapien
gcttacctagtttaaggcccaagatatgtggag

SEQ ID NO: 228664 - DNA, 33 bp, Homo sapien
gcttacctagtttaagtcccaagatatgtggag

SEQ ID NO: 228665 - DNA, 33 bp, Homo sapien
tttccagacatctgacaggcactctccaagtac

SEQ ID NO: 228666 - DNA, 33 bp, Homo sapien
tttccagacatctgacgggcactctccaagtac

SEQ ID NO: 228667 - DNA, 33 bp, Homo sapien
tggagtatgctcagaccgcctcggaattcacca

SEQ ID NO: 228668 - DNA, 33 bp, Homo sapien
tggagtatgctcagactgcctcggaattcacca

SEQ ID NO: 228669 - DNA, 33 bp, Homo sapien
gaaggctttggaaaaccagagtacactgctcaa

SEQ ID NO: 228670 - DNA, 33 bp, Homo sapien
gaaggctttggaaaacgagagtacactgctcaa

SEQ ID NO: 228671 - DNA, 33 bp, Homo sapien
ctttaccttttaacacccatcaaacgtgttatc

SEQ ID NO: 228672 - DNA, 33 bp, Homo sapien
ctttaccttttaacactcatcaaacgtgttatc

SEQ ID NO: 228673 - DNA, 33 bp, Homo sapien
tcaccctggcttggcacctcagaaaacatggtg

SEQ ID NO: 228674 - DNA, 33 bp, Homo sapien
tcaccctggcttggcatctcagaaaacatggtg

SEQ ID NO: 228675 - DNA, 33 bp, Homo sapien
atagaagatcacaagaagcgaggccagggaggc

SEQ ID NO: 228676 - DNA, 33 bp, Homo sapien
atagaagatcacaagaggcgaggccagggaggc

SEQ ID NO: 228677 - DNA, 33 bp, Homo sapien
gtacaataagggacttaaaatctcatggatgtg

SEQ ID NO: 228678 - DNA, 33 bp, Homo sapien
gtacaataagggacttcaaatctcatggatgtg

SEQ ID NO: 228679 - DNA, 33 bp, Homo sapien
tttcttggaagtagtcactggagcttttgaaag

SEQ ID NO: 228680 - DNA, 33 bp, Homo sapien
tttcttggaagtagtctctggagcttttgaaag

SEQ ID NO: 228681 - DNA, 33 bp, Homo sapien
gtgagacaagctaaggaaacaggagagcccagg

SEQ ID NO: 228682 - DNA, 33 bp, Homo sapien
gtgagacaagctaaggcaacaggagagcccagg

SEQ ID NO: 228683 - DNA, 33 bp, Homo sapien
aagaattagcgaattaccagctacaaaccaagc

SEQ ID NO: 228684 - DNA, 33 bp, Homo sapien
aagaattagcgaattagcagctacaaaccaagc

SEQ ID NO: 228685 - DNA, 33 bp, Homo sapien
actggttactgcagcaacatttttaatgtgtaa

SEQ ID NO: 228686 - DNA, 33 bp, Homo sapien
actggttactgcagcagcatttttaatgtgtaa

SEQ ID NO: 228687 - DNA, 33 bp, Homo sapien
aagttacagagacccactagagagaagactttg

SEQ ID NO: 228688 - DNA, 33 bp, Homo sapien
aagttacagagacccattagagagaagactttg

SEQ ID NO: 228689 - DNA, 33 bp, Homo sapien
aattaaaattgtgcccccaaaggattaaaaaac

SEQ ID NO: 228690 - DNA, 33 bp, Homo sapien
aattaaaattgtgccctcaaaggattaaaaaac

SEQ ID NO: 228691 - DNA, 33 bp, Homo sapien
aagtttaagtagttcaggctaacatcagcaaag

SEQ ID NO: 228692 - DNA, 33 bp, Homo sapien
aagtttaagtagttcatgctaacatcagcaaag

SEQ ID NO: 228693 - DNA, 33 bp, Homo sapien
agtagctcttagaaataagtcatttgggctggg

SEQ ID NO: 228694 - DNA, 33 bp, Homo sapien
agtagctcttagaaatgagtcatttgggctggg

SEQ ID NO: 228695 - DNA, 33 bp, Homo sapien
gacctctctctgtgaactggcaaagatttttaa

SEQ ID NO: 228696 - DNA, 33 bp, Homo sapien
gacctctctctgtgaagtggcaaagatttttaa

SEQ ID NO: 228697 - DNA, 33 bp, Homo sapien
ccaagtgagtcaatcacactctttctggatatt

SEQ ID NO: 228698 - DNA, 33 bp, Homo sapien
ccaagtgagtcaatcatactctttctggatatt

SEQ ID NO: 228699 - DNA, 33 bp, Homo sapien
gggaatggagattgggaatttgagttttggggg

SEQ ID NO: 228700 - DNA, 33 bp, Homo sapien
gggaatggagattggggatttgagttttggggg

SEQ ID NO: 228701 - DNA, 33 bp, Homo sapien
ggaactgcagtagtaaatcctggcagaagatcc

SEQ ID NO: 228702 - DNA, 33 bp, Homo sapien
ggaactgcagtagtaagtcctggcagaagatcc

SEQ ID NO: 228703 - DNA, 33 bp, Homo sapien; identical to SEQ ID NO: 228701

SEQ ID NO: 228704 - DNA, 33 bp, Homo sapien; identical to SEQ ID NO: 228702

SEQ ID NO: 228705 - DNA, 33 bp, Homo sapien
tatatatattccatgaaaaactacatatttgaa

SEQ ID NO: 228706 - DNA, 33 bp, Homo sapien
tatatatattccatgagaaactacatatttgaa

SEQ ID NO: 228707 - DNA, 33 bp, Homo sapien
ttgacaattagtggtaaaatattctgaaaaagc

SEQ ID NO: 228708 - DNA, 33 bp, Homo sapien
ttgacaattagtggtagaatattctgaaaaagc

SEQ ID NO: 228709 - DNA, 33 bp, Homo sapien
tggaagactggatattcaaaacaaaatcagtat

SEQ ID NO: 228710 - DNA, 33 bp, Homo sapien
tggaagactggatatttaaaacaaaatcagtat

SEQ ID NO: 228711 - DNA, 33 bp, Homo sapien
tgcataaagtgcagagaaactgtgatattgtga

SEQ ID NO: 228712 - DNA, 33 bp, Homo sapien
tgcataaagtgcagaggaactgtgatattgtga

SEQ ID NO: 228713 - DNA, 33 bp, Homo sapien
acatcatttgcagaaaaggatatgccaggacat

SEQ ID NO: 228714 - DNA, 33 bp, Homo sapien
acatcatttgcagaaagggatatgccaggacat

SEQ ID NO: 228715 - DNA, 33 bp, Homo sapien
tggcctgtgatctttcccaaaaagctttggtca

SEQ ID NO: 228716 - DNA, 33 bp, Homo sapien
tggcctgtgatctttctcaaaaagctttggtca

SEQ ID NO: 228717 - DNA, 33 bp, Homo sapien
gttcaatttcagcatccattgacatctgtgtct

SEQ ID NO: 228718 - DNA, 33 bp, Homo sapien
gttcaatttcagcatctattgacatctgtgtct

SEQ ID NO: 228719 - DNA, 33 bp, Homo sapien
agaacggtgataacaacggccacgggagtgttt

SEQ ID NO: 228720 - DNA, 33 bp, Homo sapien
agaacggtgataacaatggccacgggagtgttt

SEQ ID NO: 228721 - DNA, 33 bp, Homo sapien
gcagttctctgaagagcatccacgtgctaattc

SEQ ID NO: 228722 - DNA, 33 bp, Homo sapien
gcagttctctgaagagtatccacgtgctaattc

SEQ ID NO: 228723 - DNA, 33 bp, Homo sapien
agtttttgtgctctaacgtgtaaagcaatattt

SEQ ID NO: 228724 - DNA, 33 bp, Homo sapien
agtttttgtgctctaatgtgtaaagcaatattt

SEQ ID NO: 228725 - DNA, 33 bp, Homo sapien
tggagaagggggcagacgcctttaggcctgtag

SEQ ID NO: 228726 - DNA, 33 bp, Homo sapien
tggagaagggggcagatgcctttaggcctgtag

SEQ ID NO: 228727 - DNA, 33 bp, Homo sapien
gtgactcccaggtctcacagcattcaccataag

SEQ ID NO: 228728 - DNA, 33 bp, Homo sapien
gtgactcccaggtctcgcagcattcaccataag

SEQ ID NO: 228729 - DNA, 33 bp, Homo sapien
aagtctttgggtgtgacggtaaacaattgctca

SEQ ID NO: 228730 - DNA, 33 bp, Homo sapien
aagtctttgggtgtgatggtaaacaattgctca

SEQ ID NO: 228731 - DNA, 33 bp, Homo sapien
ttagatcactccctcacaggcatccctgtctct

SEQ ID NO: 228732 - DNA, 33 bp, Homo sapien
ttagatcactccctcataggcatccctgtctct

SEQ ID NO: 228733 - DNA, 33 bp, Homo sapien
tcatctatcagccctacggtgtccccacagccc

SEQ ID NO: 228734 - DNA, 33 bp, Homo sapien
tcatctatcagccctatggtgtccccacagccc

SEQ ID NO: 228735 - DNA, 33 bp, Homo sapien
agaacagaaggatggacgagagttaacaatcta

SEQ ID NO: 228736 - DNA, 33 bp, Homo sapien
agaacagaaggatggatgagagttaacaatcta

SEQ ID NO: 228737 - DNA, 33 bp, Homo sapien
gcatgtgttgttgatactaagtttgtggacagc

SEQ ID NO: 228738 - DNA, 33 bp, Homo sapien
gcatgtgttgttgatattaagtttgtggacagc

SEQ ID NO: 228739 - DNA, 33 bp, Homo sapien
tcttagcccttttgccaggaatcaactcattct

SEQ ID NO: 228740 - DNA, 33 bp, Homo sapien
tcttagcccttttgccgggaatcaactcattct

SEQ ID NO: 228741 - DNA, 33 bp, Homo sapien
attcattacctcgtgcaacctatcctcaccagc

SEQ ID NO: 228742 - DNA, 33 bp, Homo sapien
attcattacctcgtgcgacctatcctcaccagc

SEQ ID NO: 228743 - DNA, 33 bp, Homo sapien
tatcagagaattgggcatgagtttagagtgctg

SEQ ID NO: 228744 - DNA, 33 bp, Homo sapien
tatcagagaattgggcgtgagtttagagtgctg

SEQ ID NO: 228745 - DNA, 33 bp, Homo sapien
tacacagtttttagacagggaatgatagactca

SEQ ID NO: 228746 - DNA, 33 bp, Homo sapien
tacacagtttttagacggggaatgatagactca

SEQ ID NO: 228747 - DNA, 33 bp, Homo sapien
aagtggccaaaaaaaaatcaagatatgctagaa

SEQ ID NO: 228748 - DNA, 33 bp, Homo sapien
aagtggccaaaaaaaagtcaagatatgctagaa

SEQ ID NO: 228749 - DNA, 33 bp, Homo sapien
tagcctgtgcacacaacccgagcacacatggta

SEQ ID NO: 228750 - DNA, 33 bp, Homo sapien
tagcctgtgcacacaatccgagcacacatggta

SEQ ID NO: 228751 - DNA, 33 bp, Homo sapien
ttgttcctccgtttgacgatacgtgcatcctgc

SEQ ID NO: 228752 - DNA, 33 bp, Homo sapien
ttgttcctccgtttgatgatacgtgcatcctgc

SEQ ID NO: 228753 - DNA, 33 bp, Homo sapien
gttttaaaatgttcacaaaccccattgtggcca

SEQ ID NO: 228754 - DNA, 33 bp, Homo sapien
gttttaaaatgttcactaaccccattgtggcca

SEQ ID NO: 228755 - DNA, 33 bp, Homo sapien
tcaatttatctcttgccctgaatcttttcaagg

SEQ ID NO: 228756 - DNA, 33 bp, Homo sapien
tcaatttatctcttgctctgaatcttttcaagg

SEQ ID NO: 228757 - DNA, 33 bp, Homo sapien
gcttgagctttgaccacagacaagggtttctct

SEQ ID NO: 228758 - DNA, 33 bp, Homo sapien
gcttgagctttgaccatagacaagggtttctct

SEQ ID NO: 228759 - DNA, 33 bp, Homo sapien
ataaggtagtcatagacgtgatccaaaatcagg

SEQ ID NO: 228760 - DNA, 33 bp, Homo sapien
ataaggtagtcatagatgtgatccaaaatcagg

SEQ ID NO: 228761 - DNA, 33 bp, Homo sapien
actgactgaaaatgaacagggatgctttggtca

SEQ ID NO: 228762 - DNA, 33 bp, Homo sapien
actgactgaaaatgaagagggatgctttggtca

SEQ ID NO: 228763 - DNA, 33 bp, Homo sapien
gaatgaaaagttttaacgaagcaagatgggatt

SEQ ID NO: 228764 - DNA, 33 bp, Homo sapien
gaatgaaaagttttaaggaagcaagatgggatt

SEQ ID NO: 228765 - DNA, 33 bp, Homo sapien
aatgaatgaagtgctacaagatttaaatagtct

SEQ ID NO: 228766 - DNA, 33 bp, Homo sapien
aatgaatgaagtgctagaagatttaaatagtct

SEQ ID NO: 228767 - DNA, 33 bp, Homo sapien
gcatgagcataatgagcccaacatgggagaggc

SEQ ID NO: 228768 - DNA, 33 bp, Homo sapien
gcatgagcataatgagtccaacatgggagaggc

SEQ ID NO: 228769 - DNA, 33 bp, Homo sapien
atggtgagatgagtaaaacagagtccttgactt

SEQ ID NO: 228770 - DNA, 33 bp, Homo sapien
atggtgagatgagtaagacagagtccttgactt

SEQ ID NO: 228771 - DNA, 33 bp, Homo sapien
agaactgagatctaaaaccgtttaagacttctg

SEQ ID NO: 228772 - DNA, 33 bp, Homo sapien
agaactgagatctaaagccgtttaagacttctg

SEQ ID NO: 228773 - DNA, 33 bp, Homo sapien
tcccttcatatggtgaactctaaactggtttgc

SEQ ID NO: 228774 - DNA, 33 bp, Homo sapien
tcccttcatatggtgagctctaaactggtttgc

SEQ ID NO: 228775 - DNA, 33 bp, Homo sapien
gaatgaacttgcgctaccgttctagatgtaaga

SEQ ID NO: 228776 - DNA, 33 bp, Homo sapien
gaatgaacttgcgctatcgttctagatgtaaga

SEQ ID NO: 228777 - DNA, 33 bp, Homo sapien
ggttgtctatcaaaaaagtaggggtcgaaatct

SEQ ID NO: 228778 - DNA, 33 bp, Homo sapien
ggttgtctatcaaaaacgtaggggtcgaaatct

SEQ ID NO: 228779 - DNA, 33 bp, Homo sapien
tctttatacacaagtaacttctatgttctgaaa

SEQ ID NO: 228780 - DNA, 33 bp, Homo sapien
tctttatacacaagtaccttctatgttctgaaa

SEQ ID NO: 228781 - DNA, 33 bp, Homo sapien
gcttttagtgaggatagcgtgtcattgtaatac

SEQ ID NO: 228782 - DNA, 33 bp, Homo sapien
gcttttagtgaggatatcgtgtcattgtaatac

SEQ ID NO: 228783 - DNA, 33 bp, Homo sapien
aggccaaaactcaaggcagtagattggagactt

SEQ ID NO: 228784 - DNA, 33 bp, Homo sapien
aggccaaaactcaaggtagtagattggagactt

SEQ ID NO: 228785 - DNA, 33 bp, Homo sapien
ggaacacagtggcaaccgcctggccttagtgtg

SEQ ID NO: 228786 - DNA, 33 bp, Homo sapien
ggaacacagtggcaactgcctggccttagtgtg

SEQ ID NO: 228787 - DNA, 33 bp, Homo sapien
agtagtcacttcccaacagctgggctcccacag

SEQ ID NO: 228788 - DNA, 33 bp, Homo sapien
agtagtcacttcccaagagctgggctcccacag

SEQ ID NO: 228789 - DNA, 33 bp, Homo sapien
tgggaagtgactactaaggctgtgtagaaggtc

SEQ ID NO: 228790 - DNA, 33 bp, Homo sapien
tgggaagtgactactagggctgtgtagaaggtc

SEQ ID NO: 228791 - DNA, 33 bp, Homo sapien
agtttgaaatggcctcaagggattggtcacatt

SEQ ID NO: 228792 - DNA, 33 bp, Homo sapien
agtttgaaatggcctcgagggattggtcacatt

SEQ ID NO: 228793 - DNA, 33 bp, Homo sapien
ctctactgtacaacaccggcgaaaccccttcaa

SEQ ID NO: 228794 - DNA, 33 bp, Homo sapien
ctctactgtacaacactggcgaaaccccttcaa

SEQ ID NO: 228795 - DNA, 33 bp, Homo sapien
cacaggaaaccaattcagaaccatcagggacta

SEQ ID NO: 228796 - DNA, 33 bp, Homo sapien
cacaggaaaccaattcggaaccatcagggacta

SEQ ID NO: 228797 - DNA, 33 bp, Homo sapien
gaaagcggtttctcccaagagtctccagaagga

SEQ ID NO: 228798 - DNA, 33 bp, Homo sapien
gaaagcggtttctcccgagagtctccagaagga

SEQ ID NO: 228799 - DNA, 33 bp, Homo sapien
gatctctaaagctataacgtgaggttacagtca

SEQ ID NO: 228800 - DNA, 33 bp, Homo sapien
gatctctaaagctatagcgtgaggttacagtca

SEQ ID NO: 228801 - DNA, 33 bp, Homo sapien
gtccaggttaaggtgcaacattcaaaaggttaa

SEQ ID NO: 228802 - DNA, 33 bp, Homo sapien
gtccaggttaaggtgctacattcaaaaggttaa

SEQ ID NO: 228803 - DNA, 33 bp, Homo sapien
gtgtcaaaccacgaagccaaatcttgcttcagt

SEQ ID NO: 228804 - DNA, 33 bp, Homo sapien
gtgtcaaaccacgaagtcaaatcttgcttcagt

SEQ ID NO: 228805 - DNA, 33 bp, Homo sapien
agcagcattttcattcacaaggagacctttggg

SEQ ID NO: 228806 - DNA, 33 bp, Homo sapien
agcagcattttcattctcaaggagacctttggg

SEQ ID NO: 228807 - DNA, 33 bp, Homo sapien
gtttgtttctaaaaaactccttgcaggcaaact

SEQ ID NO: 228808 - DNA, 33 bp, Homo sapien
gtttgtttctaaaaaattccttgcaggcaaact

SEQ ID NO: 228809 - DNA, 33 bp, Homo sapien
aattaacagaaaacacactgaagtgcacagacc

SEQ ID NO: 228810 - DNA, 33 bp, Homo sapien
aattaacagaaaacacgctgaagtgcacagacc

SEQ ID NO: 228811 - DNA, 33 bp, Homo sapien
catatgcataagaataaaactttgggttcctat

SEQ ID NO: 228812 - DNA, 33 bp, Homo sapien
catatgcataagaatacaactttgggttcctat

SEQ ID NO: 228813 - DNA, 33 bp, Homo sapien
gagagaaattgcttagacatatgcattcctgtg

SEQ ID NO: 228814 - DNA, 33 bp, Homo sapien
gagagaaattgcttagtcatatgcattcctgtg

SEQ ID NO: 228815 - DNA, 33 bp, Homo sapien
gtaactggtaatcagaacactatgtatatcaaa

SEQ ID NO: 228816 - DNA, 33 bp, Homo sapien
gtaactggtaatcagagcactatgtatatcaaa

SEQ ID NO: 228817 - DNA, 33 bp, Homo sapien
attaaatgttctcaccacaaaaaaaatgataac

SEQ ID NO: 228818 - DNA, 33 bp, Homo sapien
attaaatgttctcaccgcaaaaaaaatgataac

SEQ ID NO: 228819 - DNA, 33 bp, Homo sapien
tttaatctggatagcaatagtcacaataatacc

SEQ ID NO: 228820 - DNA, 33 bp, Homo sapien
tttaatctggatagcagtagtcacaataatacc

SEQ ID NO: 228821 - DNA, 33 bp, Homo sapien
atatatagcattatagaatcacacagagtattt

SEQ ID NO: 228822 - DNA, 33 bp, Homo sapien
atatatagcattatagcatcacacagagtattt

SEQ ID NO: 228823 - DNA, 33 bp, Homo sapien
acaaggcatttcataaacttcacccaagcacca

SEQ ID NO: 228824 - DNA, 33 bp, Homo sapien
acaaggcatttcataagcttcacccaagcacca

SEQ ID NO: 228825 - DNA, 33 bp, Homo sapien
atgcctggtgtaaaaactgatactttcttttcc

SEQ ID NO: 228826 - DNA, 33 bp, Homo sapien
atgcctggtgtaaaaattgatactttcttttcc

SEQ ID NO: 228827 - DNA, 33 bp, Homo sapien
aagaaagaggtagacaaagttggcagatcatat

SEQ ID NO: 228828 - DNA, 33 bp, Homo sapien
aagaaagaggtagacagagttggcagatcatat

SEQ ID NO: 228829 - DNA, 33 bp, Homo sapien
cctcctgaacaaaaaccatgaccaacggtactc

SEQ ID NO: 228830 - DNA, 33 bp, Homo sapien
cctcctgaacaaaaactatgaccaacggtactc

SEQ ID NO: 228831 - DNA, 33 bp, Homo sapien
gtctttggaataaaaaaagattgatcccttcca

SEQ ID NO: 228832 - DNA, 33 bp, Homo sapien
gtctttggaataaaaagagattgatcccttcca

SEQ ID NO: 228833 - DNA, 33 bp, Homo sapien
ctaggtaaactggataagtgagaggtccagact

SEQ ID NO: 228834 - DNA, 33 bp, Homo sapien
ctaggtaaactggataggtgagaggtccagact

SEQ ID NO: 228835 - DNA, 33 bp, Homo sapien
cattagctccaagagaacaaaccagttttagtt

SEQ ID NO: 228836 - DNA, 33 bp, Homo sapien
cattagctccaagagagcaaaccagttttagtt

SEQ ID NO: 228837 - DNA, 33 bp, Homo sapien
aaaagcagaagaaccacgcagttgaactgtaga

SEQ ID NO: 228838 - DNA, 33 bp, Homo sapien
aaaagcagaagaaccatgcagttgaactgtaga

SEQ ID NO: 228839 - DNA, 33 bp, Homo sapien
aatcagctgactttaccggcttccccactatgg

SEQ ID NO: 228840 - DNA, 33 bp, Homo sapien
aatcagctgactttactggcttccccactatgg

SEQ ID NO: 228841 - DNA, 33 bp, Homo sapien
gaaagagtttcaaatacagcggcaggaacataa

SEQ ID NO: 228842 - DNA, 33 bp, Homo sapien
gaaagagtttcaaatatagcggcaggaacataa

SEQ ID NO: 228843 - DNA, 33 bp, Homo sapien
gtcttcatgaatagggacataatttaatacatt

SEQ ID NO: 228844 - DNA, 33 bp, Homo sapien
gtcttcatgaataggggcataatttaatacatt

SEQ ID NO: 228845 - DNA, 33 bp, Homo sapien
aagttttaggagttcaactgaaaattgtgctaa

SEQ ID NO: 228846 - DNA, 33 bp, Homo sapien
aagttttaggagttcacctgaaaattgtgctaa

SEQ ID NO: 228847 - DNA, 33 bp, Homo sapien
tggaggcacttgataactactaatttttttttt

SEQ ID NO: 228848 - DNA, 33 bp, Homo sapien
tggaggcacttgataattactaatttttttttt

SEQ ID NO: 228849 - DNA, 33 bp, Homo sapien
aacagaaaaccagataacatgagttctcactta

SEQ ID NO: 228850 - DNA, 33 bp, Homo sapien
aacagaaaaccagataccatgagttctcactta

SEQ ID NO: 228851 - DNA, 33 bp, Homo sapien
tgccatttactggatcccagtctgaattagacc

SEQ ID NO: 228852 - DNA, 33 bp, Homo sapien
tgccatttactggatctcagtctgaattagacc

SEQ ID NO: 228853 - DNA, 33 bp, Homo sapien
ccacaagtgcagtccaagaaagatgtagcctgt

SEQ ID NO: 228854 - DNA, 33 bp, Homo sapien
ccacaagtgcagtccaggaaagatgtagcctgt

SEQ ID NO: 228855 - DNA, 33 bp, Homo sapien
aggctaagaccactggaatttttgcttgtttct

SEQ ID NO: 228856 - DNA, 33 bp, Homo sapien
aggctaagaccactggcatttttgcttgtttct

SEQ ID NO: 228857 - DNA, 33 bp, Homo sapien
gaattactgccacaaaactactttctttatata

SEQ ID NO: 228858 - DNA, 33 bp, Homo sapien
gaattactgccacaaagctactttctttatata

SEQ ID NO: 228859 - DNA, 33 bp, Homo sapien
tgggttgtaaatggaaggtgctaagttacacaa

SEQ ID NO: 228860 - DNA, 33 bp, Homo sapien
tgggttgtaaatggaatgtgctaagttacacaa

SEQ ID NO: 228861 - DNA, 33 bp, Homo sapien
tggatcagttttaggaaatgagaaatgagttac

SEQ ID NO: 228862 - DNA, 33 bp, Homo sapien
tggatcagttttaggagatgagaaatgagttac

SEQ ID NO: 228863 - DNA, 33 bp, Homo sapien
gaagatctccttatcaatatgtcctagcaggga

SEQ ID NO: 228864 - DNA, 33 bp, Homo sapien
gaagatctccttatcagtatgtcctagcaggga

SEQ ID NO: 228865 - DNA, 33 bp, Homo sapien
actggatggttgattaaattggcttcaggtgga

SEQ ID NO: 228866 - DNA, 33 bp, Homo sapien
actggatggttgattacattggcttcaggtgga

SEQ ID NO: 228867 - DNA, 33 bp, Homo sapien
atctgttttcttcattaaactgtcacttcatta

SEQ ID NO: 228868 - DNA, 33 bp, Homo sapien
atctgttttcttcatttaactgtcacttcatta

SEQ ID NO: 228869 - DNA, 33 bp, Homo sapien
atcataaagtggttaagtatgtatacgtcagtg

SEQ ID NO: 228870 - DNA, 33 bp, Homo sapien
atcataaagtggttaattatgtatacgtcagtg

SEQ ID NO: 228871 - DNA, 33 bp, Homo sapien
ctcagaaacagcaatcccataccatgcatatat

SEQ ID NO: 228872 - DNA, 33 bp, Homo sapien
ctcagaaacagcaatcgcataccatgcatatat

SEQ ID NO: 228873 - DNA, 33 bp, Homo sapien
tagcttgattgccttcactttgggaggaaggga

SEQ ID NO: 228874 - DNA, 33 bp, Homo sapien
tagcttgattgccttcgctttgggaggaaggga

SEQ ID NO: 228875 - DNA, 33 bp, Homo sapien
gattccttcctacatgacatagttataaaatga

SEQ ID NO: 228876 - DNA, 33 bp, Homo sapien
gattccttcctacatggcatagttataaaatga

SEQ ID NO: 228877 - DNA, 33 bp, Homo sapien
gacttagacattaagaagatccctagctggaaa

SEQ ID NO: 228878 - DNA, 33 bp, Homo sapien
gacttagacattaagatgatccctagctggaaa

SEQ ID NO: 228879 - DNA, 33 bp, Homo sapien
aaaaataagagaaaaacatgagtctacaaatta

SEQ ID NO: 228880 - DNA, 33 bp, Homo sapien
aaaaataagagaaaaatatgagtctacaaatta

SEQ ID NO: 228881 - DNA, 33 bp, Homo sapien
aaaactagtgtggtacaaggctttaagggtttc

SEQ ID NO: 228882 - DNA, 33 bp, Homo sapien
aaaactagtgtggtacgaggctttaagggtttc

SEQ ID NO: 228883 - DNA, 33 bp, Homo sapien
attaaaacaaatcagaaagaagccattagcctg

SEQ ID NO: 228884 - DNA, 33 bp, Homo sapien
attaaaacaaatcagatagaagccattagcctg

SEQ ID NO: 228885 - DNA, 33 bp, Homo sapien
tgactttgaacatcaacagtttaaatgcaccaa

SEQ ID NO: 228886 - DNA, 33 bp, Homo sapien
tgactttgaacatcaatagtttaaatgcaccaa

SEQ ID NO: 228887 - DNA, 33 bp, Homo sapien
ctgatgccatgtggtacactctatagtagtcat

SEQ ID NO: 228888 - DNA, 33 bp, Homo sapien
ctgatgccatgtggtatactctatagtagtcat

SEQ ID NO: 228889 - DNA, 33 bp, Homo sapien
actgagttcctaatacacgccaggaataatgct

SEQ ID NO: 228890 - DNA, 33 bp, Homo sapien
actgagttcctaatacgcgccaggaataatgct

SEQ ID NO: 228891 - DNA, 33 bp, Homo sapien
gaacagaatttatggaacagaatatttgagttt

SEQ ID NO: 228892 - DNA, 33 bp, Homo sapien
gaacagaatttatggagcagaatatttgagttt

SEQ ID NO: 228893 - DNA, 33 bp, Homo sapien
gacagagaaactgatacctaattatttagcatg

SEQ ID NO: 228894 - DNA, 33 bp, Homo sapien
gacagagaaactgatatctaattatttagcatg

SEQ ID NO: 228895 - DNA, 33 bp, Homo sapien
actgtattcattgggcgcttttggttttaagta

SEQ ID NO: 228896 - DNA, 33 bp, Homo sapien
actgtattcattgggctcttttggttttaagta

SEQ ID NO: 228897 - DNA, 33 bp, Homo sapien
taaacaaacatttggactatgggcaaagaactt

SEQ ID NO: 228898 - DNA, 33 bp, Homo sapien
taaacaaacatttggattatgggcaaagaactt

SEQ ID NO: 228899 - DNA, 33 bp, Homo sapien
ggtagatgacccagataaagtaatggtgaataa

SEQ ID NO: 228900 - DNA, 33 bp, Homo sapien
ggtagatgacccagatgaagtaatggtgaataa

SEQ ID NO: 228901 - DNA, 33 bp, Homo sapien
tatatatggacttaaccacaacacaagacaata

SEQ ID NO: 228902 - DNA, 33 bp, Homo sapien
tatatatggacttaactacaacacaagacaata

SEQ ID NO: 228903 - DNA, 33 bp, Homo sapien
atgcttttccatgaacactaatttcctgtatga

SEQ ID NO: 228904 - DNA, 33 bp, Homo sapien
atgcttttccatgaacgctaatttcctgtatga

SEQ ID NO: 228905 - DNA, 33 bp, Homo sapien
aaaaatgagggaagtacgtgatttatcattatt

SEQ ID NO: 228906 - DNA, 33 bp, Homo sapien
aaaaatgagggaagtatgtgatttatcattatt

SEQ ID NO: 228907 - DNA, 33 bp, Homo sapien
tttcatgtagtagtaactatgtttttagtatct

SEQ ID NO: 228908 - DNA, 33 bp, Homo sapien
tttcatgtagtagtaattatgtttttagtatct

SEQ ID NO: 228909 - DNA, 33 bp, Homo sapien
taccccacattctaaaataagaggacaatgaga

SEQ ID NO: 228910 - DNA, 33 bp, Homo sapien
taccccacattctaaagtaagaggacaatgaga

SEQ ID NO: 228911 - DNA, 33 bp, Homo sapien
agccagcgcacaggaacagaggcagtgatgtca

SEQ ID NO: 228912 - DNA, 33 bp, Homo sapien
agccagcgcacaggaagagaggcagtgatgtca

SEQ ID NO: 228913 - DNA, 33 bp, Homo sapien
aaaaaaaatcctctccacggcattttaatataa

SEQ ID NO: 228914 - DNA, 33 bp, Homo sapien
aaaaaaaatcctctcctcggcattttaatataa

SEQ ID NO: 228915 - DNA, 33 bp, Homo sapien
attggaacataatgaaaagttcttcatgtatat

SEQ ID NO: 228916 - DNA, 33 bp, Homo sapien
attggaacataatgaacagttcttcatgtatat

SEQ ID NO: 228917 - DNA, 33 bp, Homo sapien
aaccatgcctgacatacggtaagtgctgtagta

SEQ ID NO: 228918 - DNA, 33 bp, Homo sapien
aaccatgcctgacatatggtaagtgctgtagta

SEQ ID NO: 228919 - DNA, 33 bp, Homo sapien
tacttgacactaatacacaagctaagaaactag

SEQ ID NO: 228920 - DNA, 33 bp, Homo sapien
tacttgacactaatacccaagctaagaaactag

SEQ ID NO: 228921 - DNA, 33 bp, Homo sapien
tccaaaagtgctttggaaccctggcataatttc

SEQ ID NO: 228922 - DNA, 33 bp, Homo sapien
tccaaaagtgctttggtaccctggcataatttc

SEQ ID NO: 228923 - DNA, 33 bp, Homo sapien
ccagtcggatttatatcacacatcaacaatcaa

SEQ ID NO: 228924 - DNA, 33 bp, Homo sapien
ccagtcggatttatatgacacatcaacaatcaa

SEQ ID NO: 228925 - DNA, 33 bp, Homo sapien
agatgaacctagtggacgtattcatttttaaaa

SEQ ID NO: 228926 - DNA, 33 bp, Homo sapien
agatgaacctagtggatgtattcatttttaaaa

SEQ ID NO: 228927 - DNA, 33 bp, Homo sapien
tatgtcaaatatggaaacaacttcatagaacta

SEQ ID NO: 228928 - DNA, 33 bp, Homo sapien
tatgtcaaatatggaagcaacttcatagaacta

SEQ ID NO: 228929 - DNA, 33 bp, Homo sapien
ccgtccaatcaacaaccgagtgtcttcaacctc

SEQ ID NO: 228930 - DNA, 33 bp, Homo sapien
ccgtccaatcaacaactgagtgtcttcaacctc

SEQ ID NO: 228931 - DNA, 33 bp, Homo sapien
ggtagatttccagatacacagtcatgcatctca

SEQ ID NO: 228932 - DNA, 33 bp, Homo sapien
ggtagatttccagatagacagtcatgcatctca

SEQ ID NO: 228933 - DNA, 33 bp, Homo sapien
aaccccagagagtccccaagatcctatttaaga

SEQ ID NO: 228934 - DNA, 33 bp, Homo sapien
aaccccagagagtccctaagatcctatttaaga

SEQ ID NO: 228935 - DNA, 33 bp, Homo sapien
gcagtcacataatctacagaaaggacaagttaa

SEQ ID NO: 228936 - DNA, 33 bp, Homo sapien
gcagtcacataatctagagaaaggacaagttaa

SEQ ID NO: 228937 - DNA, 33 bp, Homo sapien
atatgtgtcttgaaaaatagggaatttacaata

SEQ ID NO: 228938 - DNA, 33 bp, Homo sapien
atatgtgtcttgaaaagtagggaatttacaata

SEQ ID NO: 228939 - DNA, 33 bp, Homo sapien
ggagggaagaaatacaaaaattctcaaacaata

SEQ ID NO: 228940 - DNA, 33 bp, Homo sapien
ggagggaagaaatacagaaattctcaaacaata

SEQ ID NO: 228941 - DNA, 33 bp, Homo sapien
catgtatgaaaatacacgctttggagtaaagta

SEQ ID NO: 228942 - DNA, 33 bp, Homo sapien
catgtatgaaaatacatgctttggagtaaagta

SEQ ID NO: 228943 - DNA, 33 bp, Homo sapien
aacagcgtactgaattcaagtggactgggtatc

SEQ ID NO: 228944 - DNA, 33 bp, Homo sapien
aacagcgtactgaattgaagtggactgggtatc

SEQ ID NO: 228945 - DNA, 33 bp, Homo sapien
ctccaacgtgggtaaactcagagatctgatggt

SEQ ID NO: 228946 - DNA, 33 bp, Homo sapien
ctccaacgtgggtaaattcagagatctgatggt

SEQ ID NO: 228947 - DNA, 33 bp, Homo sapien
atttcactgataaaagccatctctacagataag

SEQ ID NO: 228948 - DNA, 33 bp, Homo sapien
atttcactgataaaagtcatctctacagataag

SEQ ID NO: 228949 - DNA, 33 bp, Homo sapien
acaaaagtcttcatcaccccacttctgcctcct

SEQ ID NO: 228950 - DNA, 33 bp, Homo sapien
acaaaagtcttcatcatcccacttctgcctcct

SEQ ID NO: 228951 - DNA, 33 bp, Homo sapien
agaaaatcaagacgtacgaaggcttaattaggc

SEQ ID NO: 228952 - DNA, 33 bp, Homo sapien
agaaaatcaagacgtatgaaggcttaattaggc

SEQ ID NO: 228953 - DNA, 33 bp, Homo sapien
aactaccacagcaaaaaaagtcctattctggat

SEQ ID NO: 228954 - DNA, 33 bp, Homo sapien
aactaccacagcaaaagaagtcctattctggat

SEQ ID NO: 228955 - DNA, 33 bp, Homo sapien
caccagagcttataagactattcaggcatctgg

SEQ ID NO: 228956 - DNA, 33 bp, Homo sapien
caccagagcttataaggctattcaggcatctgg

SEQ ID NO: 228957 - DNA, 33 bp, Homo sapien
cagaactgccagattccctctgtattccaaata

SEQ ID NO: 228958 - DNA, 33 bp, Homo sapien
cagaactgccagattctctctgtattccaaata

SEQ ID NO: 228959 - DNA, 33 bp, Homo sapien
tttcaatttgcataggcccacgtcttctatgag

SEQ ID NO: 228960 - DNA, 33 bp, Homo sapien
tttcaatttgcataggtccacgtcttctatgag

SEQ ID NO: 228961 - DNA, 33 bp, Homo sapien
tccagtaacagggaaacatcaaactgtcaatta

SEQ ID NO: 228962 - DNA, 33 bp, Homo sapien
tccagtaacagggaaatatcaaactgtcaatta

SEQ ID NO: 228963 - DNA, 33 bp, Homo sapien
aatacaggccaccagactaatacagcatgaaaa

SEQ ID NO: 228964 - DNA, 33 bp, Homo sapien
aatacaggccaccagattaatacagcatgaaaa

SEQ ID NO: 228965 - DNA, 33 bp, Homo sapien
atgaaaaaactacaacggtacgcaacaacatgg

SEQ ID NO: 228966 - DNA, 33 bp, Homo sapien
atgaaaaaactacaactgtacgcaacaacatgg

SEQ ID NO: 228967 - DNA, 33 bp, Homo sapien
tgggttattctgcagaaggagataaactcagtt

SEQ ID NO: 228968 - DNA, 33 bp, Homo sapien
tgggttattctgcagagggagataaactcagtt

SEQ ID NO: 228969 - DNA, 33 bp, Homo sapien
gtgatgagatcatacacagaaaacacgtagcat

SEQ ID NO: 228970 - DNA, 33 bp, Homo sapien
gtgatgagatcatacatagaaaacacgtagcat

SEQ ID NO: 228971 - DNA, 33 bp, Homo sapien
aacatgttttgaatgacagtaacatggttggaa

SEQ ID NO: 228972 - DNA, 33 bp, Homo sapien
aacatgttttgaatgatagtaacatggttggaa

SEQ ID NO: 228973 - DNA, 33 bp, Homo sapien
tctttggagttttgaaatctctccttagcttat

SEQ ID NO: 228974 - DNA, 33 bp, Homo sapien
tctttggagttttgaagtctctccttagcttat

SEQ ID NO: 228975 - DNA, 33 bp, Homo sapien
atctggtttgaatcaacctggcctacacagact

SEQ ID NO: 228976 - DNA, 33 bp, Homo sapien
atctggtttgaatcaatctggcctacacagact

SEQ ID NO: 228977 - DNA, 33 bp, Homo sapien
ttaatacacttaataaatatgaagcaattatga

SEQ ID NO: 228978 - DNA, 33 bp, Homo sapien
ttaatacacttaataagtatgaagcaattatga

SEQ ID NO: 228979 - DNA, 33 bp, Homo sapien
acctctaggaattacaatctaagccattcactt

SEQ ID NO: 228980 - DNA, 33 bp, Homo sapien
acctctaggaattacagtctaagccattcactt

SEQ ID NO: 228981 - DNA, 33 bp, Homo sapien
ttgtatggagaaaggacactgaataaccaaaga

SEQ ID NO: 228982 - DNA, 33 bp, Homo sapien
ttgtatggagaaaggatactgaataaccaaaga

SEQ ID NO: 228983 - DNA, 33 bp, Homo sapien
ttttagggttgcttacaatgggaagaactgagg

SEQ ID NO: 228984 - DNA, 33 bp, Homo sapien
ttttagggttgcttacgatgggaagaactgagg

SEQ ID NO: 228985 - DNA, 33 bp, Homo sapien
acacactaaacactttaaaaaatctcccaaatt

SEQ ID NO: 228986 - DNA, 33 bp, Homo sapien
acacactaaacacttttaaaaatctcccaaatt

SEQ ID NO: 228987 - DNA, 33 bp, Homo sapien
gttagagatagctgacaacatctcttaggtttt

SEQ ID NO: 228988 - DNA, 33 bp, Homo sapien
gttagagatagctgacgacatctcttaggtttt

SEQ ID NO: 228989 - DNA, 33 bp, Homo sapien
tggccacagtcaaataacacctgccttgggaag

SEQ ID NO: 228990 - DNA, 33 bp, Homo sapien
tggccacagtcaaatagcacctgccttgggaag

SEQ ID NO: 228991 - DNA, 33 bp, Homo sapien
atttctccattacttacacactgttttgggaag

SEQ ID NO: 228992 - DNA, 33 bp, Homo sapien
atttctccattacttagacactgttttgggaag

SEQ ID NO: 228993 - DNA, 33 bp, Homo sapien
cactagcggttcccaccaaaagtacagattcct

SEQ ID NO: 228994 - DNA, 33 bp, Homo sapien
cactagcggttcccactaaaagtacagattcct

SEQ ID NO: 228995 - DNA, 33 bp, Homo sapien
ccacagatccaacaaccccaaagaactctaatt

SEQ ID NO: 228996 - DNA, 33 bp, Homo sapien
ccacagatccaacaactccaaagaactctaatt

SEQ ID NO: 228997 - DNA, 33 bp, Homo sapien
ctttccatttacctcacgagagcaaaaggtgca

SEQ ID NO: 228998 - DNA, 33 bp, Homo sapien
ctttccatttacctcatgagagcaaaaggtgca

SEQ ID NO: 228999 - DNA, 33 bp, Homo sapien
atgccataatgtgtacaaaatggctaagcccag

SEQ ID NO: 229000 - DNA, 33 bp, Homo sapien
atgccataatgtgtacgaaatggctaagcccag

SEQ ID NO: 229001 - DNA, 33 bp, Homo sapien
gtccaaatccaggagagggtctcaagaaaaagg

SEQ ID NO: 229002 - DNA, 33 bp, Homo sapien
gtccaaatccaggagatggtctcaagaaaaagg

SEQ ID NO: 229003 - DNA, 33 bp, Homo sapien
tcaagttaaaatgaaaccattaggataggccct

SEQ ID NO: 229004 - DNA, 33 bp, Homo sapien
tcaagttaaaatgaaatcattaggataggccct

SEQ ID NO: 229005 - DNA, 33 bp, Homo sapien
aggaaagcaattcttacggaaaagtaggctaga

SEQ ID NO: 229006 - DNA, 33 bp, Homo sapien
aggaaagcaattcttatggaaaagtaggctaga

SEQ ID NO: 229007 - DNA, 33 bp, Homo sapien
tgaacttgaagccacaatatggtagagccacaa

SEQ ID NO: 229008 - DNA, 33 bp, Homo sapien
tgaacttgaagccacagtatggtagagccacaa

SEQ ID NO: 229009 - DNA, 33 bp, Homo sapien
ggctgataatctgagaacagtgccaaaaatgta

SEQ ID NO: 229010 - DNA, 33 bp, Homo sapien
ggctgataatctgagagcagtgccaaaaatgta

SEQ ID NO: 229011 - DNA, 33 bp, Homo sapien
taaagtcgtatttttcaataaagtcctaacatt

SEQ ID NO: 229012 - DNA, 33 bp, Homo sapien
taaagtcgtatttttcgataaagtcctaacatt

SEQ ID NO: 229013 - DNA, 33 bp, Homo sapien
ggctccttttcaggcaaacctcctttcctcgat

SEQ ID NO: 229014 - DNA, 33 bp, Homo sapien
ggctccttttcaggcagacctcctttcctcgat

SEQ ID NO: 229015 - DNA, 33 bp, Homo sapien
acttcttttatcctaacctcagtggcctcagga

SEQ ID NO: 229016 - DNA, 33 bp, Homo sapien
acttcttttatcctaatctcagtggcctcagga

SEQ ID NO: 229017 - DNA, 33 bp, Homo sapien
aagggggtttggacacaagacagaatttggttg

SEQ ID NO: 229018 - DNA, 33 bp, Homo sapien
aagggggtttggacaccagacagaatttggttg

SEQ ID NO: 229019 - DNA, 33 bp, Homo sapien
tttcctttggccagaaatgatgtctcccttttc

SEQ ID NO: 229020 - DNA, 33 bp, Homo sapien
tttcctttggccagaagtgatgtctcccttttc

SEQ ID NO: 229021 - DNA, 33 bp, Homo sapien
cattgtaatagtgaagcacaggagtagaaagca

SEQ ID NO: 229022 - DNA, 33 bp, Homo sapien
cattgtaatagtgaagtacaggagtagaaagca

SEQ ID NO: 229023 - DNA, 33 bp, Homo sapien
cctagttgagactctacataatgccacctgcat

SEQ ID NO: 229024 - DNA, 33 bp, Homo sapien
cctagttgagactctagataatgccacctgcat

SEQ ID NO: 229025 - DNA, 33 bp, Homo sapien
actgacacttgatatacggaggccagtctcatg

SEQ ID NO: 229026 - DNA, 33 bp, Homo sapien
actgacacttgatatatggaggccagtctcatg

SEQ ID NO: 229027 - DNA, 33 bp, Homo sapien
gcagtcatatgataatcacagtttagcacataa

SEQ ID NO: 229028 - DNA, 33 bp, Homo sapien
gcagtcatatgataattacagtttagcacataa

SEQ ID NO: 229029 - DNA, 33 bp, Homo sapien
atttctttgtacatcaccttgcattaactaaga

SEQ ID NO: 229030 - DNA, 33 bp, Homo sapien
atttctttgtacatcatcttgcattaactaaga

SEQ ID NO: 229031 - DNA, 33 bp, Homo sapien
ccttcatttatgcttaagtgccctcccagggac

SEQ ID NO: 229032 - DNA, 33 bp, Homo sapien
ccttcatttatgcttatgtgccctcccagggac

SEQ ID NO: 229033 - DNA, 33 bp, Homo sapien
gtctatatttgcatcacctatatttacatctga

SEQ ID NO: 229034 - DNA, 33 bp, Homo sapien
gtctatatttgcatcatctatatttacatctga

SEQ ID NO: 229035 - DNA, 33 bp, Homo sapien
gcttaaaattgtattaagtacacatgaggcttc

SEQ ID NO: 229036 - DNA, 33 bp, Homo sapien
gcttaaaattgtattatgtacacatgaggcttc

SEQ ID NO: 229037 - DNA, 33 bp, Homo sapien
cagtactacttgttaaataattcatcacttggc

SEQ ID NO: 229038 - DNA, 33 bp, Homo sapien
cagtactacttgttaactaattcatcacttggc

SEQ ID NO: 229039 - DNA, 33 bp, Homo sapien
gtagagggtgtttagaaggggttctaggtaagg

SEQ ID NO: 229040 - DNA, 33 bp, Homo sapien
gtagagggtgtttagagggggttctaggtaagg

SEQ ID NO: 229041 - DNA, 33 bp, Homo sapien
aagggaagcaaggagaacaactccagcagctgg

SEQ ID NO: 229042 - DNA, 33 bp, Homo sapien
aagggaagcaaggagagcaactccagcagctgg

SEQ ID NO: 229043 - DNA, 33 bp, Homo sapien
atccattatggatcacgatagagaaagaaagac

SEQ ID NO: 229044 - DNA, 33 bp, Homo sapien
atccattatggatcactatagagaaagaaagac

SEQ ID NO: 229045 - DNA, 33 bp, Homo sapien
tttcaaatcttacttccaggtttatgcaagcca

SEQ ID NO: 229046 - DNA, 33 bp, Homo sapien
tttcaaatcttacttctaggtttatgcaagcca

SEQ ID NO: 229047 - DNA, 33 bp, Homo sapien
cactaaagctaatgaacggcagctcaaggtaat

SEQ ID NO: 229048 - DNA, 33 bp, Homo sapien
cactaaagctaatgaatggcagctcaaggtaat

SEQ ID NO: 229049 - DNA, 33 bp, Homo sapien
tcaggagctttggacaatcctctgctatctctg

SEQ ID NO: 229050 - DNA, 33 bp, Homo sapien
tcaggagctttggacagtcctctgctatctctg

SEQ ID NO: 229051 - DNA, 33 bp, Homo sapien
gtgctagaaaatgaaccggtcaaaaagactatc

SEQ ID NO: 229052 - DNA, 33 bp, Homo sapien
gtgctagaaaatgaactggtcaaaaagactatc

SEQ ID NO: 229053 - DNA, 33 bp, Homo sapien
tcttccccagggttcaatcatggaccacacaca

SEQ ID NO: 229054 - DNA, 33 bp, Homo sapien
tcttccccagggttcagtcatggaccacacaca

SEQ ID NO: 229055 - DNA, 33 bp, Homo sapien
gcagttcacctggtcaaacaggacaaaattaca

SEQ ID NO: 229056 - DNA, 33 bp, Homo sapien
gcagttcacctggtcatacaggacaaaattaca

SEQ ID NO: 229057 - DNA, 33 bp, Homo sapien
cagacactctctaccactactgtcaccatcttt

SEQ ID NO: 229058 - DNA, 33 bp, Homo sapien
cagacactctctaccattactgtcaccatcttt

SEQ ID NO: 229059 - DNA, 33 bp, Homo sapien
ccatctgtgtgctcccagctttatttgaacaca

SEQ ID NO: 229060 - DNA, 33 bp, Homo sapien
ccatctgtgtgctcccggctttatttgaacaca

SEQ ID NO: 229061 - DNA, 33 bp, Homo sapien
gccagtagaatgaaaacagagcaaggtgaatga

SEQ ID NO: 229062 - DNA, 33 bp, Homo sapien
gccagtagaatgaaaatagagcaaggtgaatga

SEQ ID NO: 229063 - DNA, 33 bp, Homo sapien
tctcaaatgcttgaaggatatgtaaagatttta

SEQ ID NO: 229064 - DNA, 33 bp, Homo sapien
tctcaaatgcttgaagtatatgtaaagatttta

SEQ ID NO: 229065 - DNA, 33 bp, Homo sapien
gaaatgtcaacagataagaaggattggaaacaa

SEQ ID NO: 229066 - DNA, 33 bp, Homo sapien
gaaatgtcaacagataggaaggattggaaacaa

SEQ ID NO: 229067 - DNA, 33 bp, Homo sapien
ccacttccactcaatgaacaagtgaatatattt

SEQ ID NO: 229068 - DNA, 33 bp, Homo sapien
ccacttccactcaatggacaagtgaatatattt

SEQ ID NO: 229069 - DNA, 33 bp, Homo sapien
tataattatccattgccatgaacagatatcccc

SEQ ID NO: 229070 - DNA, 33 bp, Homo sapien
tataattatccattgctatgaacagatatcccc

SEQ ID NO: 229071 - DNA, 33 bp, Homo sapien
ttgcctcatggtccacaatggatgctggactgc

SEQ ID NO: 229072 - DNA, 33 bp, Homo sapien
ttgcctcatggtccacgatggatgctggactgc

SEQ ID NO: 229073 - DNA, 33 bp, Homo sapien
tctaacctagagaatacaaatgaagtatcacat

SEQ ID NO: 229074 - DNA, 33 bp, Homo sapien
tctaacctagagaatataaatgaagtatcacat

SEQ ID NO: 229075 - DNA, 33 bp, Homo sapien
gattcctcttcaagcaaacttttatctctcctc

SEQ ID NO: 229076 - DNA, 33 bp, Homo sapien
gattcctcttcaagcatacttttatctctcctc

SEQ ID NO: 229077 - DNA, 33 bp, Homo sapien
atgacctggttgcagacaagtttaaggcctccc

SEQ ID NO: 229078 - DNA, 33 bp, Homo sapien
atgacctggttgcagagaagtttaaggcctccc

SEQ ID NO: 229079 - DNA, 33 bp, Homo sapien
tatttacatggcctcacaaatagaatcagtcct

SEQ ID NO: 229080 - DNA, 33 bp, Homo sapien
tatttacatggcctcagaaatagaatcagtcct

SEQ ID NO: 229081 - DNA, 33 bp, Homo sapien
taaaatgcatccacatcatgtagaaaaaagaaa

SEQ ID NO: 229082 - DNA, 33 bp, Homo sapien
taaaatgcatccacatgatgtagaaaaaagaaa

SEQ ID NO: 229083 - DNA, 33 bp, Homo sapien
aaagccaatccaacaaagttctggtgaaacaca

SEQ ID NO: 229084 - DNA, 33 bp, Homo sapien
aaagccaatccaacaaggttctggtgaaacaca

SEQ ID NO: 229085 - DNA, 33 bp, Homo sapien
ctgagggggaacttaacgctctcttatcatcca

SEQ ID NO: 229086 - DNA, 33 bp, Homo sapien
ctgagggggaacttaatgctctcttatcatcca

SEQ ID NO: 229087 - DNA, 33 bp, Homo sapien
tccctaaaaatacaccacaaaacattcctaatc

SEQ ID NO: 229088 - DNA, 33 bp, Homo sapien
tccctaaaaatacaccgcaaaacattcctaatc

SEQ ID NO: 229089 - DNA, 33 bp, Homo sapien
cagtcttcttgtttccaaatgaatcatccattt

SEQ ID NO: 229090 - DNA, 33 bp, Homo sapien
cagtcttcttgtttccgaatgaatcatccattt

SEQ ID NO: 229091 - DNA, 33 bp, Homo sapien
agagggcctttgactacggtggaagtgacacta

SEQ ID NO: 229092 - DNA, 33 bp, Homo sapien
agagggcctttgactatggtggaagtgacacta

SEQ ID NO: 229093 - DNA, 33 bp, Homo sapien
tatatcattttctgcacgtttaaatagttcata

SEQ ID NO: 229094 - DNA, 33 bp, Homo sapien
tatatcattttctgcaggtttaaatagttcata

SEQ ID NO: 229095 - DNA, 33 bp, Homo sapien
ctcatcctttttcctcaagcatgatgtcttttt

SEQ ID NO: 229096 - DNA, 33 bp, Homo sapien
ctcatcctttttcctcgagcatgatgtcttttt

SEQ ID NO: 229097 - DNA, 33 bp, Homo sapien
attcctgtaaacaaaaacatggtctgcattcac

SEQ ID NO: 229098 - DNA, 33 bp, Homo sapien
attcctgtaaacaaaagcatggtctgcattcac

SEQ ID NO: 229099 - DNA, 33 bp, Homo sapien
tcattgtatcctgtagcagccatattgactgtg

SEQ ID NO: 229100 - DNA, 33 bp, Homo sapien
tcattgtatcctgtagtagccatattgactgtg

SEQ ID NO: 229101 - DNA, 33 bp, Homo sapien
tacttgtttgtgaatggacttttcaaaagtatc

SEQ ID NO: 229102 - DNA, 33 bp, Homo sapien
tacttgtttgtgaatgtacttttcaaaagtatc

SEQ ID NO: 229103 - DNA, 33 bp, Homo sapien
tgatactcaaaatgttaaacaaccagttcagcg

SEQ ID NO: 229104 - DNA, 33 bp, Homo sapien
tgatactcaaaatgttgaacaaccagttcagcg

SEQ ID NO: 229105 - DNA, 33 bp, Homo sapien
gagaatgtgttctaaaggtttatgctctcccaa

SEQ ID NO: 229106 - DNA, 33 bp, Homo sapien
gagaatgtgttctaaatgtttatgctctcccaa

SEQ ID NO: 229107 - DNA, 33 bp, Homo sapien
acactgtgaaccatcaagaatggactttctatc

SEQ ID NO: 229108 - DNA, 33 bp, Homo sapien
acactgtgaaccatcaggaatggactttctatc

SEQ ID NO: 229109 - DNA, 33 bp, Homo sapien
tgttctatttgtttgacgacaagtcccaaatta

SEQ ID NO: 229110 - DNA, 33 bp, Homo sapien
tgttctatttgtttgatgacaagtcccaaatta

SEQ ID NO: 229111 - DNA, 33 bp, Homo sapien
ccactgctgcatctaactgctgactgcagtcat

SEQ ID NO: 229112 - DNA, 33 bp, Homo sapien
ccactgctgcatctaattgctgactgcagtcat

SEQ ID NO: 229113 - DNA, 33 bp, Homo sapien
ctgcagaatggtttctaaaagttacatttctga

SEQ ID NO: 229114 - DNA, 33 bp, Homo sapien
ctgcagaatggtttctgaaagttacatttctga

SEQ ID NO: 229115 - DNA, 33 bp, Homo sapien
aacagattttctctatgaggtaccaacctgcct

SEQ ID NO: 229116 - DNA, 33 bp, Homo sapien
aacagattttctctattaggtaccaacctgcct

SEQ ID NO: 229117 - DNA, 33 bp, Homo sapien
acaaggctacaaacacagataatacaattgctg

SEQ ID NO: 229118 - DNA, 33 bp, Homo sapien
acaaggctacaaacacggataatacaattgctg

SEQ ID NO: 229119 - DNA, 33 bp, Homo sapien
attctcatgatagtgactaagtgttcacaagat

SEQ ID NO: 229120 - DNA, 33 bp, Homo sapien
attctcatgatagtgagtaagtgttcacaagat

SEQ ID NO: 229121 - DNA, 33 bp, Homo sapien
aggtgaaacattaaaacttgttgtaatctttga

SEQ ID NO: 229122 - DNA, 33 bp, Homo sapien
aggtgaaacattaaaatttgttgtaatctttga

SEQ ID NO: 229123 - DNA, 33 bp, Homo sapien
ggccttgggacatttgaaaacaaagctgttgat

SEQ ID NO: 229124 - DNA, 33 bp, Homo sapien
ggccttgggacatttgcaaacaaagctgttgat

SEQ ID NO: 229125 - DNA, 33 bp, Homo sapien
gagtcctgtcttctccaaaccttcctatggctc

SEQ ID NO: 229126 - DNA, 33 bp, Homo sapien
gagtcctgtcttctccgaaccttcctatggctc

SEQ ID NO: 229127 - DNA, 33 bp, Homo sapien
ggattcattaggtatacgggttagaagccaaat

SEQ ID NO: 229128 - DNA, 33 bp, Homo sapien
ggattcattaggtatatgggttagaagccaaat

SEQ ID NO: 229129 - DNA, 33 bp, Homo sapien
agatgttgcttagtgacgcagctagtgcttctg

SEQ ID NO: 229130 - DNA, 33 bp, Homo sapien
agatgttgcttagtgatgcagctagtgcttctg

SEQ ID NO: 229131 - DNA, 33 bp, Homo sapien
ctaccaaaccaagacaatggtaggctctgtatt

SEQ ID NO: 229132 - DNA, 33 bp, Homo sapien
ctaccaaaccaagacagtggtaggctctgtatt

SEQ ID NO: 229133 - DNA, 33 bp, Homo sapien
tctaacccactaatcacggttctgaatgagact

SEQ ID NO: 229134 - DNA, 33 bp, Homo sapien
tctaacccactaatcatggttctgaatgagact

SEQ ID NO: 229135 - DNA, 33 bp, Homo sapien
taagcatcaaggattacacctggactagaagta

SEQ ID NO: 229136 - DNA, 33 bp, Homo sapien
taagcatcaaggattagacctggactagaagta

SEQ ID NO: 229137 - DNA, 33 bp, Homo sapien
actagatatgagttaaggatctggccccaaaag

SEQ ID NO: 229138 - DNA, 33 bp, Homo sapien
actagatatgagttaatgatctggccccaaaag

SEQ ID NO: 229139 - DNA, 33 bp, Homo sapien
atcatttaaattaggaaattaccatcaccatca

SEQ ID NO: 229140 - DNA, 33 bp, Homo sapien
atcatttaaattaggatattaccatcaccatca

SEQ ID NO: 229141 - DNA, 33 bp, Homo sapien
cattcgaagcaagaaactggagcttaggcagta

SEQ ID NO: 229142 - DNA, 33 bp, Homo sapien
cattcgaagcaagaaattggagcttaggcagta

SEQ ID NO: 229143 - DNA, 33 bp, Homo sapien
aaaatgagtgataaaactcccgtgtgttgaaag

SEQ ID NO: 229144 - DNA, 33 bp, Homo sapien
aaaatgagtgataaaattcccgtgtgttgaaag

SEQ ID NO: 229145 - DNA, 33 bp, Homo sapien
ttatcctgtgtaaacaatcactatagtctgcaa

SEQ ID NO: 229146 - DNA, 33 bp, Homo sapien
ttatcctgtgtaaacagtcactatagtctgcaa

SEQ ID NO: 229147 - DNA, 33 bp, Homo sapien
tacctctggactttacaatctcatgtattatgt

SEQ ID NO: 229148 - DNA, 33 bp, Homo sapien
tacctctggactttaccatctcatgtattatgt

SEQ ID NO: 229149 - DNA, 33 bp, Homo sapien
cttggcattaaaaacacgactggccactagagt

SEQ ID NO: 229150 - DNA, 33 bp, Homo sapien
cttggcattaaaaacatgactggccactagagt

SEQ ID NO: 229151 - DNA, 33 bp, Homo sapien
atcctctattagcccacgcttttgtgtcctaag

SEQ ID NO: 229152 - DNA, 33 bp, Homo sapien
atcctctattagcccatgcttttgtgtcctaag

SEQ ID NO: 229153 - DNA, 33 bp, Homo sapien
gtgaatcatctggggaaaaacgaggtgtgtatc

SEQ ID NO: 229154 - DNA, 33 bp, Homo sapien
gtgaatcatctggggacaaacgaggtgtgtatc

SEQ ID NO: 229155 - DNA, 33 bp, Homo sapien
cctctgaatgttacaacgaatttacagtctagt

SEQ ID NO: 229156 - DNA, 33 bp, Homo sapien
cctctgaatgttacaatgaatttacagtctagt

SEQ ID NO: 229157 - DNA, 33 bp, Homo sapien
cttaacagccggaaacggaggtgagacaaatgt

SEQ ID NO: 229158 - DNA, 33 bp, Homo sapien
cttaacagccggaaactgaggtgagacaaatgt

SEQ ID NO: 229159 - DNA, 33 bp, Homo sapien
aagggaaagagatagaaagaaggttatgcagat

SEQ ID NO: 229160 - DNA, 33 bp, Homo sapien
aagggaaagagatagagagaaggttatgcagat

SEQ ID NO: 229161 - DNA, 33 bp, Homo sapien
aagagttaccattatcacatgtaattgagatac

SEQ ID NO: 229162 - DNA, 33 bp, Homo sapien
aagagttaccattatcgcatgtaattgagatac

SEQ ID NO: 229163 - DNA, 33 bp, Homo sapien
caaccacaatactcaccgctacgtgtgtatcca

SEQ ID NO: 229164 - DNA, 33 bp, Homo sapien
caaccacaatactcactgctacgtgtgtatcca

SEQ ID NO: 229165 - DNA, 33 bp, Homo sapien
tcaacgaaagagtactaagcttaatcaggccag

SEQ ID NO: 229166 - DNA, 33 bp, Homo sapien
tcaacgaaagagtactgagcttaatcaggccag

SEQ ID NO: 229167 - DNA, 33 bp, Homo sapien
cctaagcacaaggtaacgctagaagttgaagcc

SEQ ID NO: 229168 - DNA, 33 bp, Homo sapien
cctaagcacaaggtaatgctagaagttgaagcc

SEQ ID NO: 229169 - DNA, 33 bp, Homo sapien
gcatgacagttaagaacttacgctttggactca

SEQ ID NO: 229170 - DNA, 33 bp, Homo sapien
gcatgacagttaagaatttacgctttggactca

SEQ ID NO: 229171 - DNA, 33 bp, Homo sapien
ttggaatcttaagaaactgctgagtaagtaaat

SEQ ID NO: 229172 - DNA, 33 bp, Homo sapien
ttggaatcttaagaaattgctgagtaagtaaat

SEQ ID NO: 229173 - DNA, 33 bp, Homo sapien
actgtataaagtcaaaattgttggatagtcaat

SEQ ID NO: 229174 - DNA, 33 bp, Homo sapien
actgtataaagtcaaagttgttggatagtcaat

SEQ ID NO: 229175 - DNA, 33 bp, Homo sapien
tttcttcatctattacaaaaataaaggcactga

SEQ ID NO: 229176 - DNA, 33 bp, Homo sapien
tttcttcatctattacgaaaataaaggcactga

SEQ ID NO: 229177 - DNA, 33 bp, Homo sapien
aatgatcaaggaaagaccatctaaattgcctag

SEQ ID NO: 229178 - DNA, 33 bp, Homo sapien
aatgatcaaggaaagagcatctaaattgcctag

SEQ ID NO: 229179 - DNA, 33 bp, Homo sapien
gaattttaaagttgcactgatttgactcaactc

SEQ ID NO: 229180 - DNA, 33 bp, Homo sapien
gaattttaaagttgcattgatttgactcaactc

SEQ ID NO: 229181 - DNA, 33 bp, Homo sapien
tcaggccctgaagatacggtggtgaacaagatt

SEQ ID NO: 229182 - DNA, 33 bp, Homo sapien
tcaggccctgaagatatggtggtgaacaagatt

SEQ ID NO: 229183 - DNA, 33 bp, Homo sapien
gtcctagaacttggaacgaggaaacctagaact

SEQ ID NO: 229184 - DNA, 33 bp, Homo sapien
gtcctagaacttggaatgaggaaacctagaact

SEQ ID NO: 229185 - DNA, 33 bp, Homo sapien
ttagcaggagctcacccagtagcaaccatagac

SEQ ID NO: 229186 - DNA, 33 bp, Homo sapien
ttagcaggagctcaccgagtagcaaccatagac

SEQ ID NO: 229187 - DNA, 33 bp, Homo sapien
atttccgcaagatcacactgtactgttttgtgg

SEQ ID NO: 229188 - DNA, 33 bp, Homo sapien
atttccgcaagatcacgctgtactgttttgtgg

SEQ ID NO: 229189 - DNA, 33 bp, Homo sapien
ctgtatatagcttctaagtagtgtgaaatttgg

SEQ ID NO: 229190 - DNA, 33 bp, Homo sapien
ctgtatatagcttctaggtagtgtgaaatttgg

SEQ ID NO: 229191 - DNA, 33 bp, Homo sapien
gacctgctgagtttctaaatgactggataatga

SEQ ID NO: 229192 - DNA, 33 bp, Homo sapien
gacctgctgagtttctcaatgactggataatga

SEQ ID NO: 229193 - DNA, 33 bp, Homo sapien
agagcaagccagacaacttgcccagtatcattc

SEQ ID NO: 229194 - DNA, 33 bp, Homo sapien
agagcaagccagacaatttgcccagtatcattc

SEQ ID NO: 229195 - DNA, 33 bp, Homo sapien
tcttccaaatctaaaagttcatgattctgtatc

SEQ ID NO: 229196 - DNA, 33 bp, Homo sapien
tcttccaaatctaaaatttcatgattctgtatc

SEQ ID NO: 229197 - DNA, 33 bp, Homo sapien
gccatatgcttattgcaattttgaggcattcat

SEQ ID NO: 229198 - DNA, 33 bp, Homo sapien
gccatatgcttattgcgattttgaggcattcat

SEQ ID NO: 229199 - DNA, 33 bp, Homo sapien
gagattacagagcgtaagtggcatgggtttacc

SEQ ID NO: 229200 - DNA, 33 bp, Homo sapien
gagattacagagcgtaggtggcatgggtttacc

SEQ ID NO: 229201 - DNA, 33 bp, Homo sapien
ctctgccatgaactaccaacctcttggggaaat

SEQ ID NO: 229202 - DNA, 33 bp, Homo sapien
ctctgccatgaactactaacctcttggggaaat

SEQ ID NO: 229203 - DNA, 33 bp, Homo sapien
gtagtgatgtgagggacgtagaagtaaatcaag

SEQ ID NO: 229204 - DNA, 33 bp, Homo sapien
gtagtgatgtgagggatgtagaagtaaatcaag

SEQ ID NO: 229205 - DNA, 33 bp, Homo sapien
actatgcctcttttacagataaggaatctaaga

SEQ ID NO: 229206 - DNA, 33 bp, Homo sapien
actatgcctcttttacggataaggaatctaaga

SEQ ID NO: 229207 - DNA, 33 bp, Homo sapien
tttccctgtaaatgtcaaccacttacactcaaa

SEQ ID NO: 229208 - DNA, 33 bp, Homo sapien
tttccctgtaaatgtcgaccacttacactcaaa

SEQ ID NO: 229209 - DNA, 33 bp, Homo sapien
ggtagtctgtggtatacagatgtatatagatgg

SEQ ID NO: 229210 - DNA, 33 bp, Homo sapien
ggtagtctgtggtatatagatgtatatagatgg

SEQ ID NO: 229211 - DNA, 33 bp, Homo sapien
attagtactggagagaacaacaatgagccagga

SEQ ID NO: 229212 - DNA, 33 bp, Homo sapien
attagtactggagagagcaacaatgagccagga

SEQ ID NO: 229213 - DNA, 33 bp, Homo sapien
tagttctgagtttgcaccacatctaaggaaagc

SEQ ID NO: 229214 - DNA, 33 bp, Homo sapien
tagttctgagtttgcatcacatctaaggaaagc

SEQ ID NO: 229215 - DNA, 33 bp, Homo sapien
ttccagctgaatctcacaaatgtgcttaaggga

SEQ ID NO: 229216 - DNA, 33 bp, Homo sapien
ttccagctgaatctcagaaatgtgcttaaggga

SEQ ID NO: 229217 - DNA, 33 bp, Homo sapien
atttgtcttgttttcaatctgaaactgtagtga

SEQ ID NO: 229218 - DNA, 33 bp, Homo sapien
atttgtcttgttttcagtctgaaactgtagtga

SEQ ID NO: 229219 - DNA, 33 bp, Homo sapien
tgagtcactacatggaagagagtttgctggact

SEQ ID NO: 229220 - DNA, 33 bp, Homo sapien
tgagtcactacatggaggagagtttgctggact

SEQ ID NO: 229221 - DNA, 33 bp, Homo sapien
tcctattacagattaaaagccacattataagaa

SEQ ID NO: 229222 - DNA, 33 bp, Homo sapien
tcctattacagattaagagccacattataagaa

SEQ ID NO: 229223 - DNA, 33 bp, Homo sapien
ccaaaaaactagataacttagatgacatggaca

SEQ ID NO: 229224 - DNA, 33 bp, Homo sapien
ccaaaaaactagataatttagatgacatggaca

SEQ ID NO: 229225 - DNA, 33 bp, Homo sapien
aatcagtcccttccacagccattgaacttttgg

SEQ ID NO: 229226 - DNA, 33 bp, Homo sapien
aatcagtcccttccacggccattgaacttttgg

SEQ ID NO: 229227 - DNA, 33 bp, Homo sapien
gaggactcagataaaaataaagcaggggagagt

SEQ ID NO: 229228 - DNA, 33 bp, Homo sapien
gaggactcagataaaagtaaagcaggggagagt

SEQ ID NO: 229229 - DNA, 33 bp, Homo sapien
gttgccgtggagcatgaattcagaatacacacc

SEQ ID NO: 229230 - DNA, 33 bp, Homo sapien
gttgccgtggagcatggattcagaatacacacc

SEQ ID NO: 229231 - DNA, 33 bp, Homo sapien
cagaagataaagaaaaaagcaagtattgcatag

SEQ ID NO: 229232 - DNA, 33 bp, Homo sapien
cagaagataaagaaaagagcaagtattgcatag

SEQ ID NO: 229233 - DNA, 33 bp, Homo sapien
ggttaatccctgactaccctgcttgtctgaaaa

SEQ ID NO: 229234 - DNA, 33 bp, Homo sapien
ggttaatccctgactagcctgcttgtctgaaaa

SEQ ID NO: 229235 - DNA, 33 bp, Homo sapien
aataagtctcctcttaaccatctatatatatgc

SEQ ID NO: 229236 - DNA, 33 bp, Homo sapien
aataagtctcctcttacccatctatatatatgc

SEQ ID NO: 229237 - DNA, 33 bp, Homo sapien
ctactgtggtattgaacgccagaactcattcct

SEQ ID NO: 229238 - DNA, 33 bp, Homo sapien
ctactgtggtattgaatgccagaactcattcct

SEQ ID NO: 229239 - DNA, 33 bp, Homo sapien
ccatacaaaacagtcaacactttcagggctcat

SEQ ID NO: 229240 - DNA, 33 bp, Homo sapien
ccatacaaaacagtcaccactttcagggctcat

SEQ ID NO: 229241 - DNA, 33 bp, Homo sapien
gttttgggcaagtcaaccagctgtgtgatacca

SEQ ID NO: 229242 - DNA, 33 bp, Homo sapien
gttttgggcaagtcaatcagctgtgtgatacca

SEQ ID NO: 229243 - DNA, 33 bp, Homo sapien
ctgggtgctgttaaagccaccgcagcacccagc

SEQ ID NO: 229244 - DNA, 33 bp, Homo sapien
ctgggtgctgttaaagtcaccgcagcacccagc

SEQ ID NO: 229245 - DNA, 33 bp, Homo sapien
accatttctctctctcagaaaatccatggcatc

SEQ ID NO: 229246 - DNA, 33 bp, Homo sapien
accatttctctctctcggaaaatccatggcatc

SEQ ID NO: 229247 - DNA, 33 bp, Homo sapien
aacaggtgccattggaacacagggaggaattac

SEQ ID NO: 229248 - DNA, 33 bp, Homo sapien
aacaggtgccattggagcacagggaggaattac

SEQ ID NO: 229249 - DNA, 33 bp, Homo sapien
caaagcttacaggaaacatcccttgcaacccac

SEQ ID NO: 229250 - DNA, 33 bp, Homo sapien
caaagcttacaggaaatatcccttgcaacccac

SEQ ID NO: 229251 - DNA, 33 bp, Homo sapien
tgttgaggttgtgccaaagtagtaagagtatct

SEQ ID NO: 229252 - DNA, 33 bp, Homo sapien
tgttgaggttgtgccatagtagtaagagtatct

SEQ ID NO: 229253 - DNA, 33 bp, Homo sapien
ggaatgttagaaaaatcaagtacaggtgaattt

SEQ ID NO: 229254 - DNA, 33 bp, Homo sapien
ggaatgttagaaaaatgaagtacaggtgaattt

SEQ ID NO: 229255 - DNA, 33 bp, Homo sapien
gtgtgatgagcactcacgtttgatttttgtaag

SEQ ID NO: 229256 - DNA, 33 bp, Homo sapien
gtgtgatgagcactcatgtttgatttttgtaag

SEQ ID NO: 229257 - DNA, 33 bp, Homo sapien
ttaagctgtctacctccgagctatgatcttgcc

SEQ ID NO: 229258 - DNA, 33 bp, Homo sapien
ttaagctgtctacctctgagctatgatcttgcc

SEQ ID NO: 229259 - DNA, 33 bp, Homo sapien
cttgcaatagtccatgcaagagaaaatgagagg

SEQ ID NO: 229260 - DNA, 33 bp, Homo sapien
cttgcaatagtccatgtaagagaaaatgagagg

SEQ ID NO: 229261 - DNA, 33 bp, Homo sapien
gagcctccataatccaagtgctgcctgactttc

SEQ ID NO: 229262 - DNA, 33 bp, Homo sapien
gagcctccataatccaggtgctgcctgactttc

SEQ ID NO: 229263 - DNA, 33 bp, Homo sapien
atcagtctgttctcacaccgtgaataaagactg

SEQ ID NO: 229264 - DNA, 33 bp, Homo sapien
atcagtctgttctcacgccgtgaataaagactg

SEQ ID NO: 229265 - DNA, 33 bp, Homo sapien
gggagatgaatagccacgttttcagaaaagaat

SEQ ID NO: 229266 - DNA, 33 bp, Homo sapien
gggagatgaatagccatgttttcagaaaagaat

SEQ ID NO: 229267 - DNA, 33 bp, Homo sapien
caagcaagtatcaccaaaggatatgaacatcac

SEQ ID NO: 229268 - DNA, 33 bp, Homo sapien
caagcaagtatcaccagaggatatgaacatcac

SEQ ID NO: 229269 - DNA, 33 bp, Homo sapien
agttaaggcagatggaataacttgagtgaaggg

SEQ ID NO: 229270 - DNA, 33 bp, Homo sapien
agttaaggcagatggagtaacttgagtgaaggg

SEQ ID NO: 229271 - DNA, 33 bp, Homo sapien
caacaagctggaaggccagaaatctccatttca

SEQ ID NO: 229272 - DNA, 33 bp, Homo sapien
caacaagctggaaggctagaaatctccatttca

SEQ ID NO: 229273 - DNA, 33 bp, Homo sapien
tttcattgttagtgtaaagcatctgtaataaat

SEQ ID NO: 229274 - DNA, 33 bp, Homo sapien
tttcattgttagtgtacagcatctgtaataaat

SEQ ID NO: 229275 - DNA, 33 bp, Homo sapien
gaaataagttcatttacgtgcaagggagaattg

SEQ ID NO: 229276 - DNA, 33 bp, Homo sapien
gaaataagttcatttatgtgcaagggagaattg

SEQ ID NO: 229277 - DNA, 33 bp, Homo sapien
acccctggcttccggaacaggaatttccaaagg

SEQ ID NO: 229278 - DNA, 33 bp, Homo sapien
acccctggcttccggagcaggaatttccaaagg

SEQ ID NO: 229279 - DNA, 33 bp, Homo sapien
atctgcatctttgttcacagaaattgattttct

SEQ ID NO: 229280 - DNA, 33 bp, Homo sapien
atctgcatctttgttcccagaaattgattttct

SEQ ID NO: 229281 - DNA, 33 bp, Homo sapien
caccatcttagttatcagagtaagtctcagtgt

SEQ ID NO: 229282 - DNA, 33 bp, Homo sapien
caccatcttagttatcggagtaagtctcagtgt

SEQ ID NO: 229283 - DNA, 33 bp, Homo sapien
ataggcacagtaaaaaattagcaacaataacat

SEQ ID NO: 229284 - DNA, 33 bp, Homo sapien
ataggcacagtaaaaagttagcaacaataacat

SEQ ID NO: 229285 - DNA, 33 bp, Homo sapien
tcaatatataaaaatcaactgcatttctataca

SEQ ID NO: 229286 - DNA, 33 bp, Homo sapien
tcaatatataaaaatcgactgcatttctataca

SEQ ID NO: 229287 - DNA, 33 bp, Homo sapien
caggtcctccctgacacattgcactgctggaaa

SEQ ID NO: 229288 - DNA, 33 bp, Homo sapien
caggtcctccctgacatattgcactgctggaaa

SEQ ID NO: 229289 - DNA, 33 bp, Homo sapien
ctcattagttctgaaacagctgtcttatcttac

SEQ ID NO: 229290 - DNA, 33 bp, Homo sapien
ctcattagttctgaaagagctgtcttatcttac

SEQ ID NO: 229291 - DNA, 33 bp, Homo sapien
tgtcccatgaagcttcacttttttttctgaatt

SEQ ID NO: 229292 - DNA, 33 bp, Homo sapien
tgtcccatgaagcttcgcttttttttctgaatt

SEQ ID NO: 229293 - DNA, 33 bp, Homo sapien
cagcaaaaatattacacagtacattgctgttaa

SEQ ID NO: 229294 - DNA, 33 bp, Homo sapien
cagcaaaaatattacagagtacattgctgttaa

SEQ ID NO: 229295 - DNA, 33 bp, Homo sapien
cacaaatagtctgaaagccggtagtaagaccat

SEQ ID NO: 229296 - DNA, 33 bp, Homo sapien
cacaaatagtctgaaatccggtagtaagaccat

SEQ ID NO: 229297 - DNA, 33 bp, Homo sapien
cttttagtcttaatgcactaatatggaaggaca

SEQ ID NO: 229298 - DNA, 33 bp, Homo sapien
cttttagtcttaatgcgctaatatggaaggaca

SEQ ID NO: 229299 - DNA, 33 bp, Homo sapien
tctcattgattggtaaccagttcagttatggtt

SEQ ID NO: 229300 - DNA, 33 bp, Homo sapien
tctcattgattggtaatcagttcagttatggtt

SEQ ID NO: 229301 - DNA, 33 bp, Homo sapien
atcacaatacccatcacgttgaaggcggcccat

SEQ ID NO: 229302 - DNA, 33 bp, Homo sapien
atcacaatacccatcatgttgaaggcggcccat

SEQ ID NO: 229303 - DNA, 33 bp, Homo sapien
tgaagtaagtgctggcaagagaggacacattgc

SEQ ID NO: 229304 - DNA, 33 bp, Homo sapien
tgaagtaagtgctggcgagagaggacacattgc

SEQ ID NO: 229305 - DNA, 33 bp, Homo sapien
tatacttttttcaattaaacaagaacatatgtg

SEQ ID NO: 229306 - DNA, 33 bp, Homo sapien
tatacttttttcaattcaacaagaacatatgtg

SEQ ID NO: 229307 - DNA, 33 bp, Homo sapien
caaactcctctgcaaaactgtgtaggtttgacc

SEQ ID NO: 229308 - DNA, 33 bp, Homo sapien
caaactcctctgcaaagctgtgtaggtttgacc

SEQ ID NO: 229309 - DNA, 33 bp, Homo sapien
tgccctgattccctcaacctctctgtgccgttt

SEQ ID NO: 229310 - DNA, 33 bp, Homo sapien
tgccctgattccctcatcctctctgtgccgttt

SEQ ID NO: 229311 - DNA, 33 bp, Homo sapien
acagtaaattctgatacgctttcttaattttag

SEQ ID NO: 229312 - DNA, 33 bp, Homo sapien
acagtaaattctgatatgctttcttaattttag

SEQ ID NO: 229313 - DNA, 33 bp, Homo sapien
cattcattgttagcacagtaagataacaaccac

SEQ ID NO: 229314 - DNA, 33 bp, Homo sapien
cattcattgttagcaccgtaagataacaaccac

SEQ ID NO: 229315 - DNA, 33 bp, Homo sapien
agtactgaccaaatgacagcttcttgtattcca

SEQ ID NO: 229316 - DNA, 33 bp, Homo sapien
agtactgaccaaatgagagcttcttgtattcca

SEQ ID NO: 229317 - DNA, 33 bp, Homo sapien
atcctttctggatgaccagtgaaatatatctta

SEQ ID NO: 229318 - DNA, 33 bp, Homo sapien
atcctttctggatgactagtgaaatatatctta

SEQ ID NO: 229319 - DNA, 33 bp, Homo sapien
tttgaggagccaatgaaacagtttgtggatggg

SEQ ID NO: 229320 - DNA, 33 bp, Homo sapien
tttgaggagccaatgagacagtttgtggatggg

SEQ ID NO: 229321 - DNA, 33 bp, Homo sapien
gccactactacagagcaaggcctcatcatcacc

SEQ ID NO: 229322 - DNA, 33 bp, Homo sapien
gccactactacagagcgaggcctcatcatcacc

SEQ ID NO: 229323 - DNA, 33 bp, Homo sapien
cttaatccagctgagacggaatgagaatggtgc

SEQ ID NO: 229324 - DNA, 33 bp, Homo sapien
cttaatccagctgagatggaatgagaatggtgc

SEQ ID NO: 229325 - DNA, 33 bp, Homo sapien
tcacaccctcatttggacaaaggagctgttggc

SEQ ID NO: 229326 - DNA, 33 bp, Homo sapien
tcacaccctcatttggtcaaaggagctgttggc

SEQ ID NO: 229327 - DNA, 33 bp, Homo sapien
agtctgcctgaattgcagcaaagagtagaagtt

SEQ ID NO: 229328 - DNA, 33 bp, Homo sapien
agtctgcctgaattgcggcaaagagtagaagtt

SEQ ID NO: 229329 - DNA, 33 bp, Homo sapien
gagcaacactgtgaggaccagagaaagagcttg

SEQ ID NO: 229330 - DNA, 33 bp, Homo sapien
gagcaacactgtgagggccagagaaagagcttg

SEQ ID NO: 229331 - DNA, 33 bp, Homo sapien
aggtttttcttaccagaagctgtaaaataatta

SEQ ID NO: 229332 - DNA, 33 bp, Homo sapien
aggtttttcttaccaggagctgtaaaataatta

SEQ ID NO: 229333 - DNA, 33 bp, Homo sapien
gttttaagacaccctcaaaggttgtaaaatcct

SEQ ID NO: 229334 - DNA, 33 bp, Homo sapien
gttttaagacaccctcgaaggttgtaaaatcct

SEQ ID NO: 229335 - DNA, 33 bp, Homo sapien
cctaggacacagtaagaaaacttgcttagttgc

SEQ ID NO: 229336 - DNA, 33 bp, Homo sapien
cctaggacacagtaaggaaacttgcttagttgc

SEQ ID NO: 229337 - DNA, 33 bp, Homo sapien
taatgattagcacatcagaggtatgccactaat

SEQ ID NO: 229338 - DNA, 33 bp, Homo sapien
taatgattagcacatcggaggtatgccactaat

SEQ ID NO: 229339 - DNA, 33 bp, Homo sapien
actactccagatcctacggttgatttgcccata

SEQ ID NO: 229340 - DNA, 33 bp, Homo sapien
actactccagatcctatggttgatttgcccata

SEQ ID NO: 229341 - DNA, 33 bp, Homo sapien
caccttgatgtattaactcccctgatctcctga

SEQ ID NO: 229342 - DNA, 33 bp, Homo sapien
caccttgatgtattaattcccctgatctcctga

SEQ ID NO: 229343 - DNA, 33 bp, Homo sapien
tcaatttaaaggatcactctggattggggaagg

SEQ ID NO: 229344 - DNA, 33 bp, Homo sapien
tcaatttaaaggatcattctggattggggaagg

SEQ ID NO: 229345 - DNA, 33 bp, Homo sapien
cctgacctgcaaactacgtcaacctacccatta

SEQ ID NO: 229346 - DNA, 33 bp, Homo sapien
cctgacctgcaaactatgtcaacctacccatta

SEQ ID NO: 229347 - DNA, 33 bp, Homo sapien
acatttattatggaaaacaattgccagaaaagg

SEQ ID NO: 229348 - DNA, 33 bp, Homo sapien
acatttattatggaaagcaattgccagaaaagg

SEQ ID NO: 229349 - DNA, 33 bp, Homo sapien
gtcaagttattccaaaattaatgcaattaccag

SEQ ID NO: 229350 - DNA, 33 bp, Homo sapien
gtcaagttattccaaagttaatgcaattaccag

SEQ ID NO: 229351 - DNA, 33 bp, Homo sapien
tagttcccaactcttaccaaacatcagaatcac

SEQ ID NO: 229352 - DNA, 33 bp, Homo sapien
tagttcccaactcttatcaaacatcagaatcac

SEQ ID NO: 229353 - DNA, 33 bp, Homo sapien
tgtaaggtaccttgtacgatgcttgtcgataca

SEQ ID NO: 229354 - DNA, 33 bp, Homo sapien
tgtaaggtaccttgtatgatgcttgtcgataca

SEQ ID NO: 229355 - DNA, 33 bp, Homo sapien
tgctcgccttaaccaaactgttagtgaatacca

SEQ ID NO: 229356 - DNA, 33 bp, Homo sapien
tgctcgccttaaccaagctgttagtgaatacca

SEQ ID NO: 229357 - DNA, 33 bp, Homo sapien
caaatgctgatcactacactgagcactgtgtcc

SEQ ID NO: 229358 - DNA, 33 bp, Homo sapien
caaatgctgatcactatactgagcactgtgtcc

SEQ ID NO: 229359 - DNA, 33 bp, Homo sapien
atcagcatttgccccaagctaaatcattaagag

SEQ ID NO: 229360 - DNA, 33 bp, Homo sapien
atcagcatttgccccatgctaaatcattaagag

SEQ ID NO: 229361 - DNA, 33 bp, Homo sapien
tagcaaggtttgtgaacatagtcttaaattgat

SEQ ID NO: 229362 - DNA, 33 bp, Homo sapien
tagcaaggtttgtgaatatagtcttaaattgat

SEQ ID NO: 229363 - DNA, 33 bp, Homo sapien
agccttctgtcctttcagaaaccaactctttaa

SEQ ID NO: 229364 - DNA, 33 bp, Homo sapien
agccttctgtcctttcggaaaccaactctttaa

SEQ ID NO: 229365 - DNA, 33 bp, Homo sapien
tgtcaaagttttggacactaggaacaaatcctg

SEQ ID NO: 229366 - DNA, 33 bp, Homo sapien
tgtcaaagttttggacgctaggaacaaatcctg

SEQ ID NO: 229367 - DNA, 33 bp, Homo sapien
tagttgttcttagacacgtgataatcataatat

SEQ ID NO: 229368 - DNA, 33 bp, Homo sapien
tagttgttcttagacatgtgataatcataatat

SEQ ID NO: 229369 - DNA, 33 bp, Homo sapien
gggaaagtaaatggaaatgactgaggacagtca

SEQ ID NO: 229370 - DNA, 33 bp, Homo sapien
gggaaagtaaatggaagtgactgaggacagtca

SEQ ID NO: 229371 - DNA, 33 bp, Homo sapien
aaggtgtcaaatagaacagcagtctcgactgag

SEQ ID NO: 229372 - DNA, 33 bp, Homo sapien
aaggtgtcaaatagaatagcagtctcgactgag

SEQ ID NO: 229373 - DNA, 33 bp, Homo sapien
cagggccggcattcaaataaggcaggctagctc

SEQ ID NO: 229374 - DNA, 33 bp, Homo sapien
cagggccggcattcaagtaaggcaggctagctc

SEQ ID NO: 229375 - DNA, 33 bp, Homo sapien
gattcgtgctgtgggggcaagctttagggaatc

SEQ ID NO: 229376 - DNA, 33 bp, Homo sapien
gattcgtgctgtggggtcaagctttagggaatc

SEQ ID NO: 229377 - DNA, 33 bp, Homo sapien
agagaaactgaaagaaacaagctgtgctggaca

SEQ ID NO: 229378 - DNA, 33 bp, Homo sapien
agagaaactgaaagaagcaagctgtgctggaca

SEQ ID NO: 229379 - DNA, 33 bp, Homo sapien
ttataaaactgttaaaagtatgaggtagacctg

SEQ ID NO: 229380 - DNA, 33 bp, Homo sapien
ttataaaactgttaaacgtatgaggtagacctg

SEQ ID NO: 229381 - DNA, 33 bp, Homo sapien
aatagagactatttcaccaagttggaaagagaa

SEQ ID NO: 229382 - DNA, 33 bp, Homo sapien
aatagagactatttcatcaagttggaaagagaa

SEQ ID NO: 229383 - DNA, 33 bp, Homo sapien
cttgaaccgctacccactggctcttctaatctt

SEQ ID NO: 229384 - DNA, 33 bp, Homo sapien
cttgaaccgctacccattggctcttctaatctt

SEQ ID NO: 229385 - DNA, 33 bp, Homo sapien
tgacccctgcctcttcaaagactgcttttgctt

SEQ ID NO: 229386 - DNA, 33 bp, Homo sapien
tgacccctgcctcttcgaagactgcttttgctt

SEQ ID NO: 229387 - DNA, 33 bp, Homo sapien
gtcctattctcacctcaacccattcaaatgagg

SEQ ID NO: 229388 - DNA, 33 bp, Homo sapien
gtcctattctcacctccacccattcaaatgagg

SEQ ID NO: 229389 - DNA, 33 bp, Homo sapien
gaaaaactaggtcaaacattgatgatgagatga

SEQ ID NO: 229390 - DNA, 33 bp, Homo sapien
gaaaaactaggtcaaatattgatgatgagatga

SEQ ID NO: 229391 - DNA, 33 bp, Homo sapien
gaaggaagattcagccaaagatatgaagaaaca

SEQ ID NO: 229392 - DNA, 33 bp, Homo sapien
gaaggaagattcagccgaagatatgaagaaaca

SEQ ID NO: 229393 - DNA, 33 bp, Homo sapien
agctcttatggacatagcctcagtcggcctcta

SEQ ID NO: 229394 - DNA, 33 bp, Homo sapien
agctcttatggacatatcctcagtcggcctcta

SEQ ID NO: 229395 - DNA, 33 bp, Homo sapien
aaaatatgaggaaaaaacctagtctataaatag

SEQ ID NO: 229396 - DNA, 33 bp, Homo sapien
aaaatatgaggaaaaaccctagtctataaatag

SEQ ID NO: 229397 - DNA, 33 bp, Homo sapien
agaatctgctgcagcaaacaatgagacagaaaa

SEQ ID NO: 229398 - DNA, 33 bp, Homo sapien
agaatctgctgcagcatacaatgagacagaaaa

SEQ ID NO: 229399 - DNA, 33 bp, Homo sapien
gatacagggacagcccaactgagaagcaaaggt

SEQ ID NO: 229400 - DNA, 33 bp, Homo sapien
gatacagggacagcccgactgagaagcaaaggt

SEQ ID NO: 229401 - DNA, 33 bp, Homo sapien
tgttaatatgatcatcaaagtctgggctgagag

SEQ ID NO: 229402 - DNA, 33 bp, Homo sapien
tgttaatatgatcatcgaagtctgggctgagag

SEQ ID NO: 229403 - DNA, 33 bp, Homo sapien
tgctccttaggtgcccactggttgctttccaag

SEQ ID NO: 229404 - DNA, 33 bp, Homo sapien
tgctccttaggtgcccgctggttgctttccaag

SEQ ID NO: 229405 - DNA, 33 bp, Homo sapien
ggtctcctcatgctctcaaatcctccaacgttt

SEQ ID NO: 229406 - DNA, 33 bp, Homo sapien
ggtctcctcatgctctgaaatcctccaacgttt

SEQ ID NO: 229407 - DNA, 33 bp, Homo sapien
agctccaaaatgttacccaaggttataaatata

SEQ ID NO: 229408 - DNA, 33 bp, Homo sapien
agctccaaaatgttactcaaggttataaatata

SEQ ID NO: 229409 - DNA, 33 bp, Homo sapien
tgtcttaagtgtgtaacggccttagaaacaatg

SEQ ID NO: 229410 - DNA, 33 bp, Homo sapien
tgtcttaagtgtgtaatggccttagaaacaatg

SEQ ID NO: 229411 - DNA, 33 bp, Homo sapien
ttcgtgtaacttataccccttacatacaaccag

SEQ ID NO: 229412 - DNA, 33 bp, Homo sapien
ttcgtgtaacttatactccttacatacaaccag

SEQ ID NO: 229413 - DNA, 33 bp, Homo sapien
tctctcttagccaccacgatacactgtttacca

SEQ ID NO: 229414 - DNA, 33 bp, Homo sapien
tctctcttagccaccatgatacactgtttacca

SEQ ID NO: 229415 - DNA, 33 bp, Homo sapien
atgctcttccttagaaggtattgcaaatccatt

SEQ ID NO: 229416 - DNA, 33 bp, Homo sapien
atgctcttccttagaatgtattgcaaatccatt

SEQ ID NO: 229417 - DNA, 33 bp, Homo sapien
aacacagggaaaagaacgtggttaattattaaa

SEQ ID NO: 229418 - DNA, 33 bp, Homo sapien
aacacagggaaaagaatgtggttaattattaaa

SEQ ID NO: 229419 - DNA, 33 bp, Homo sapien
tagcataatgtcatcaaagtttatgttatagca

SEQ ID NO: 229420 - DNA, 33 bp, Homo sapien
tagcataatgtcatcagagtttatgttatagca

SEQ ID NO: 229421 - DNA, 33 bp, Homo sapien
catctgttaattgctacggaatgaattgtgtct

SEQ ID NO: 229422 - DNA, 33 bp, Homo sapien
catctgttaattgctatggaatgaattgtgtct

SEQ ID NO: 229423 - DNA, 33 bp, Homo sapien
tttaaaaatactatcaagagaatcgagccagac

SEQ ID NO: 229424 - DNA, 33 bp, Homo sapien
tttaaaaatactatcacgagaatcgagccagac

SEQ ID NO: 229425 - DNA, 33 bp, Homo sapien
taaagaggattgagaacgctggggaaaaagcta

SEQ ID NO: 229426 - DNA, 33 bp, Homo sapien
taaagaggattgagaatgctggggaaaaagcta

SEQ ID NO: 229427 - DNA, 33 bp, Homo sapien
attaggattatatctgcaggcctataactgttt

SEQ ID NO: 229428 - DNA, 33 bp, Homo sapien
attaggattatatctgtaggcctataactgttt

SEQ ID NO: 229429 - DNA, 33 bp, Homo sapien
ataaatgcacactcaacgttatgcagaaagtta

SEQ ID NO: 229430 - DNA, 33 bp, Homo sapien
ataaatgcacactcaatgttatgcagaaagtta

SEQ ID NO: 229431 - DNA, 33 bp, Homo sapien
tctagacaggacttcccccaagtcaaattgaaa

SEQ ID NO: 229432 - DNA, 33 bp, Homo sapien
tctagacaggacttccgccaagtcaaattgaaa

SEQ ID NO: 229433 - DNA, 33 bp, Homo sapien
atgctagagaactaaaatgtgccttaatacaac

SEQ ID NO: 229434 - DNA, 33 bp, Homo sapien
atgctagagaactaaagtgtgccttaatacaac

SEQ ID NO: 229435 - DNA, 33 bp, Homo sapien
gtatttattttatgctcacccttgatagacatt

SEQ ID NO: 229436 - DNA, 33 bp, Homo sapien
gtatttattttatgcttacccttgatagacatt

SEQ ID NO: 229437 - DNA, 33 bp, Homo sapien
aaatgatccactggaaatcctacgttagcagtg

SEQ ID NO: 229438 - DNA, 33 bp, Homo sapien
aaatgatccactggaagtcctacgttagcagtg

SEQ ID NO: 229439 - DNA, 33 bp, Homo sapien
gcctgatacaggttataacgcatttgtgtgtat

SEQ ID NO: 229440 - DNA, 33 bp, Homo sapien
gcctgatacaggttatgacgcatttgtgtgtat

SEQ ID NO: 229441 - DNA, 33 bp, Homo sapien
caggcaattaaatcacaatctctggggttggat

SEQ ID NO: 229442 - DNA, 33 bp, Homo sapien
caggcaattaaatcacgatctctggggttggat

SEQ ID NO: 229443 - DNA, 33 bp, Homo sapien
tcttcatttgcaaaacagtaaaaatcatttcta

SEQ ID NO: 229444 - DNA, 33 bp, Homo sapien
tcttcatttgcaaaacggtaaaaatcatttcta

SEQ ID NO: 229445 - DNA, 33 bp, Homo sapien
ttcgtgccattgtaatcacagaaaatgttgtgg

SEQ ID NO: 229446 - DNA, 33 bp, Homo sapien
ttcgtgccattgtaatgacagaaaatgttgtgg

SEQ ID NO: 229447 - DNA, 33 bp, Homo sapien
aaaggaaaattaaacacgggcaataggatggta

SEQ ID NO: 229448 - DNA, 33 bp, Homo sapien
aaaggaaaattaaacatgggcaataggatggta

SEQ ID NO: 229449 - DNA, 33 bp, Homo sapien
gaagcttcaagtcttccaagctgtagctgtttc

SEQ ID NO: 229450 - DNA, 33 bp, Homo sapien
gaagcttcaagtcttctaagctgtagctgtttc

SEQ ID NO: 229451 - DNA, 33 bp, Homo sapien
ctctccaacataactgaaatgtctcctgggaca

SEQ ID NO: 229452 - DNA, 33 bp, Homo sapien
ctctccaacataactggaatgtctcctgggaca

SEQ ID NO: 229453 - DNA, 33 bp, Homo sapien
atgtggtagttttgcacgaatatatacttttta

SEQ ID NO: 229454 - DNA, 33 bp, Homo sapien
atgtggtagttttgcatgaatatatacttttta

SEQ ID NO: 229455 - DNA, 33 bp, Homo sapien
tcttatcacagaagaacaacaacttatggcaga

SEQ ID NO: 229456 - DNA, 33 bp, Homo sapien
tcttatcacagaagaagaacaacttatggcaga

SEQ ID NO: 229457 - DNA, 33 bp, Homo sapien
tgattgtatcacttgactaataggaacttattg

SEQ ID NO: 229458 - DNA, 33 bp, Homo sapien
tgattgtatcacttgattaataggaacttattg

SEQ ID NO: 229459 - DNA, 33 bp, Homo sapien
tctttccctctaccacggacctaatcaaagaaa

SEQ ID NO: 229460 - DNA, 33 bp, Homo sapien
tctttccctctaccactgacctaatcaaagaaa

SEQ ID NO: 229461 - DNA, 33 bp, Homo sapien
gaaaaagactgcaagagaaagagtaattctgga

SEQ ID NO: 229462 - DNA, 33 bp, Homo sapien
gaaaaagactgcaagataaagagtaattctgga

SEQ ID NO: 229463 - DNA, 33 bp, Homo sapien
catcagcatcagtgtacagttcttgacttcaac

SEQ ID NO: 229464 - DNA, 33 bp, Homo sapien
catcagcatcagtgtagagttcttgacttcaac

SEQ ID NO: 229465 - DNA, 33 bp, Homo sapien
tagataacaagcaacacggagatttctatggct

SEQ ID NO: 229466 - DNA, 33 bp, Homo sapien
tagataacaagcaacatggagatttctatggct

SEQ ID NO: 229467 - DNA, 33 bp, Homo sapien
aatcttttcagactcaatgaaatagaaaaaaag

SEQ ID NO: 229468 - DNA, 33 bp, Homo sapien
aatcttttcagactcagtgaaatagaaaaaaag

SEQ ID NO: 229469 - DNA, 33 bp, Homo sapien
caacatctaacaccaactgggcataaaggaaat

SEQ ID NO: 229470 - DNA, 33 bp, Homo sapien
caacatctaacaccaattgggcataaaggaaat

SEQ ID NO: 229471 - DNA, 33 bp, Homo sapien
attaccgccacaggaagtctaactactgcatac

SEQ ID NO: 229472 - DNA, 33 bp, Homo sapien
attaccgccacaggaattctaactactgcatac

SEQ ID NO: 229473 - DNA, 33 bp, Homo sapien
cccttgctaggagtcacaatggctcatagaagc

SEQ ID NO: 229474 - DNA, 33 bp, Homo sapien
cccttgctaggagtcagaatggctcatagaagc

SEQ ID NO: 229475 - DNA, 33 bp, Homo sapien
cttcacgttgttcaaaaggggaagaactcgagg

SEQ ID NO: 229476 - DNA, 33 bp, Homo sapien
cttcacgttgttcaaagggggaagaactcgagg

SEQ ID NO: 229477 - DNA, 33 bp, Homo sapien
tatgctgcaggcttataaaagggagaatcaatt

SEQ ID NO: 229478 - DNA, 33 bp, Homo sapien
tatgctgcaggcttatgaaagggagaatcaatt

SEQ ID NO: 229479 - DNA, 33 bp, Homo sapien
aggacatagatgttatcactcattgctggagtg

SEQ ID NO: 229480 - DNA, 33 bp, Homo sapien
aggacatagatgttattactcattgctggagtg

SEQ ID NO: 229481 - DNA, 33 bp, Homo sapien
ataaatatgtcagctaaacactggttatacaca

SEQ ID NO: 229482 - DNA, 33 bp, Homo sapien
ataaatatgtcagctagacactggttatacaca

SEQ ID NO: 229483 - DNA, 33 bp, Homo sapien
ttcttgccaagaccagacataacatcattaacc

SEQ ID NO: 229484 - DNA, 33 bp, Homo sapien
ttcttgccaagaccaggcataacatcattaacc

SEQ ID NO: 229485 - DNA, 33 bp, Homo sapien
gcctttcagctgagaaatatggcaatgcactat

SEQ ID NO: 229486 - DNA, 33 bp, Homo sapien
gcctttcagctgagaagtatggcaatgcactat

SEQ ID NO: 229487 - DNA, 33 bp, Homo sapien
caggggctgagtggcactgaaagccagactcat

SEQ ID NO: 229488 - DNA, 33 bp, Homo sapien
caggggctgagtggcattgaaagccagactcat

SEQ ID NO: 229489 - DNA, 33 bp, Homo sapien
aatgttcttctcagtacgttcattcaattattt

SEQ ID NO: 229490 - DNA, 33 bp, Homo sapien
aatgttcttctcagtatgttcattcaattattt

SEQ ID NO: 229491 - DNA, 33 bp, Homo sapien
actaacaggtaaaagacgactgtggccaaaggg

SEQ ID NO: 229492 - DNA, 33 bp, Homo sapien
actaacaggtaaaagatgactgtggccaaaggg

SEQ ID NO: 229493 - DNA, 33 bp, Homo sapien
tctcaaatgggtaatacggttgcattcaattac

SEQ ID NO: 229494 - DNA, 33 bp, Homo sapien
tctcaaatgggtaatatggttgcattcaattac

SEQ ID NO: 229495 - DNA, 33 bp, Homo sapien
attttctttcccctccgatggccaaagtcgccg

SEQ ID NO: 229496 - DNA, 33 bp, Homo sapien
attttctttcccctcctatggccaaagtcgccg

SEQ ID NO: 229497 - DNA, 33 bp, Homo sapien
attaaattaatctggcccttttagatttcatag

SEQ ID NO: 229498 - DNA, 33 bp, Homo sapien
attaaattaatctggctcttttagatttcatag

SEQ ID NO: 229499 - DNA, 33 bp, Homo sapien
tccttggccgactacactatctcaggaagagct

SEQ ID NO: 229500 - DNA, 33 bp, Homo sapien
tccttggccgactacattatctcaggaagagct

SEQ ID NO: 229501 - DNA, 33 bp, Homo sapien
ttatagatcagaaaacaagtctagagaggttaa

SEQ ID NO: 229502 - DNA, 33 bp, Homo sapien
ttatagatcagaaaaccagtctagagaggttaa

SEQ ID NO: 229503 - DNA, 33 bp, Homo sapien
taggttaaagagagcaagagactgccaaaggct

SEQ ID NO: 229504 - DNA, 33 bp, Homo sapien
taggttaaagagagcaggagactgccaaaggct

SEQ ID NO: 229505 - DNA, 33 bp, Homo sapien
tagtagtattatgaaccaacagctcacattccc

SEQ ID NO: 229506 - DNA, 33 bp, Homo sapien
tagtagtattatgaacgaacagctcacattccc

SEQ ID NO: 229507 - DNA, 33 bp, Homo sapien
agaaagactgaaaaataatgagggtaaatcgta

SEQ ID NO: 229508 - DNA, 33 bp, Homo sapien
agaaagactgaaaaatgatgagggtaaatcgta

SEQ ID NO: 229509 - DNA, 33 bp, Homo sapien
ccctttgggacgagcacggtacaaaacccagat

SEQ ID NO: 229510 - DNA, 33 bp, Homo sapien
ccctttgggacgagcatggtacaaaacccagat

SEQ ID NO: 229511 - DNA, 33 bp, Homo sapien
cttttatgtcattctacgattactgttggtaag

SEQ ID NO: 229512 - DNA, 33 bp, Homo sapien
cttttatgtcattctatgattactgttggtaag

SEQ ID NO: 229513 - DNA, 33 bp, Homo sapien
ggagatgaggttgtgaagttcctgggcttgaac

SEQ ID NO: 229514 - DNA, 33 bp, Homo sapien
ggagatgaggttgtgaggttcctgggcttgaac

SEQ ID NO: 229515 - DNA, 33 bp, Homo sapien
aaggtgtctcaggaaaccattgatgtgcactcg

SEQ ID NO: 229516 - DNA, 33 bp, Homo sapien
aaggtgtctcaggaaatcattgatgtgcactcg

SEQ ID NO: 229517 - DNA, 33 bp, Homo sapien
tgggcttcaaaggccaaaaaagaaaataggaat

SEQ ID NO: 229518 - DNA, 33 bp, Homo sapien
tgggcttcaaaggccagaaaagaaaataggaat

SEQ ID NO: 229519 - DNA, 33 bp, Homo sapien
gaatccactgtgctatcaattcctattttcttt

SEQ ID NO: 229520 - DNA, 33 bp, Homo sapien
gaatccactgtgctatgaattcctattttcttt

SEQ ID NO: 229521 - DNA, 33 bp, Homo sapien
acatatgcctcattaacagtgcagcccttactg

SEQ ID NO: 229522 - DNA, 33 bp, Homo sapien
acatatgcctcattaatagtgcagcccttactg

SEQ ID NO: 229523 - DNA, 33 bp, Homo sapien
tgaacgaaaatctgaaaatctgagtgactggca

SEQ ID NO: 229524 - DNA, 33 bp, Homo sapien
tgaacgaaaatctgaagatctgagtgactggca

SEQ ID NO: 229525 - DNA, 33 bp, Homo sapien
agatgttcaagggaaaatgtcaaggagacaatc

SEQ ID NO: 229526 - DNA, 33 bp, Homo sapien
agatgttcaagggaaactgtcaaggagacaatc

SEQ ID NO: 229527 - DNA, 33 bp, Homo sapien
atttgccaaataaaatgaaagcatatagctgga

SEQ ID NO: 229528 - DNA, 33 bp, Homo sapien
atttgccaaataaaattaaagcatatagctgga

SEQ ID NO: 229529 - DNA, 33 bp, Homo sapien
tttaaactgcagataccggatatgagtatgtgt

SEQ ID NO: 229530 - DNA, 33 bp, Homo sapien
tttaaactgcagatactggatatgagtatgtgt

SEQ ID NO: 229531 - DNA, 33 bp, Homo sapien
acatcctctagtttcaatgaaaatgttcaatta

SEQ ID NO: 229532 - DNA, 33 bp, Homo sapien
acatcctctagtttcagtgaaaatgttcaatta

SEQ ID NO: 229533 - DNA, 33 bp, Homo sapien
atcacttttggaatgaagtcagtataaatcatt

SEQ ID NO: 229534 - DNA, 33 bp, Homo sapien
atcacttttggaatgaggtcagtataaatcatt

SEQ ID NO: 229535 - DNA, 33 bp, Homo sapien
aagcttcatcatctgaaagacggcatcctttac

SEQ ID NO: 229536 - DNA, 33 bp, Homo sapien
aagcttcatcatctgacagacggcatcctttac

SEQ ID NO: 229537 - DNA, 33 bp, Homo sapien
gatgcattagatatacagcttcatttctataac

SEQ ID NO: 229538 - DNA, 33 bp, Homo sapien
gatgcattagatatacggcttcatttctataac

SEQ ID NO: 229539 - DNA, 33 bp, Homo sapien
gaaagagttgatttccagaccaaggatctgagg

SEQ ID NO: 229540 - DNA, 33 bp, Homo sapien
gaaagagttgatttccggaccaaggatctgagg

SEQ ID NO: 229541 - DNA, 33 bp, Homo sapien
gaaagtgtgttgagacaataatccgatacaatt

SEQ ID NO: 229542 - DNA, 33 bp, Homo sapien
gaaagtgtgttgagaccataatccgatacaatt

SEQ ID NO: 229543 - DNA, 33 bp, Homo sapien
acagtattgtgagcaaactcttaaatgatataa

SEQ ID NO: 229544 - DNA, 33 bp, Homo sapien
acagtattgtgagcaatctcttaaatgatataa

SEQ ID NO: 229545 - DNA, 33 bp, Homo sapien
ggtatcacatacttaaactcacttatgggctat

SEQ ID NO: 229546 - DNA, 33 bp, Homo sapien
ggtatcacatacttaatctcacttatgggctat

SEQ ID NO: 229547 - DNA, 33 bp, Homo sapien
gtatatgcatatttgccccaactgtctcatggt

SEQ ID NO: 229548 - DNA, 33 bp, Homo sapien
gtatatgcatatttgctccaactgtctcatggt

SEQ ID NO: 229549 - DNA, 33 bp, Homo sapien
aacagcattgctctataagagattacattaaaa

SEQ ID NO: 229550 - DNA, 33 bp, Homo sapien
aacagcattgctctatgagagattacattaaaa

SEQ ID NO: 229551 - DNA, 33 bp, Homo sapien
aatattgtgcaggggcaagaaggaaatgagggt

SEQ ID NO: 229552 - DNA, 33 bp, Homo sapien
aatattgtgcaggggcgagaaggaaatgagggt

SEQ ID NO: 229553 - DNA, 33 bp, Homo sapien
aagagaactgagtgcaaaaaggaaggagcagat

SEQ ID NO: 229554 - DNA, 33 bp, Homo sapien
aagagaactgagtgcacaaaggaaggagcagat

SEQ ID NO: 229555 - DNA, 33 bp, Homo sapien
tctgacaagtgtggaacaggagaaaaaagaggt

SEQ ID NO: 229556 - DNA, 33 bp, Homo sapien
tctgacaagtgtggaataggagaaaaaagaggt

SEQ ID NO: 229557 - DNA, 33 bp, Homo sapien
ccaattacaggtcctcaatgatacgctttacat

SEQ ID NO: 229558 - DNA, 33 bp, Homo sapien
ccaattacaggtcctcgatgatacgctttacat

SEQ ID NO: 229559 - DNA, 33 bp, Homo sapien
ttacacaggtgtagaagaatattttgaaatgcc

SEQ ID NO: 229560 - DNA, 33 bp, Homo sapien
ttacacaggtgtagaataatattttgaaatgcc

SEQ ID NO: 229561 - DNA, 33 bp, Homo sapien
aatagcaaaatgagcccgaagaattgactatcc

SEQ ID NO: 229562 - DNA, 33 bp, Homo sapien
aatagcaaaatgagcctgaagaattgactatcc

SEQ ID NO: 229563 - DNA, 33 bp, Homo sapien
tggtgcctcacgcccacgaaagaaggctgccac

SEQ ID NO: 229564 - DNA, 33 bp, Homo sapien
tggtgcctcacgcccatgaaagaaggctgccac

SEQ ID NO: 229565 - DNA, 33 bp, Homo sapien
ttcttataatgcaaaaattaaaaagtgtatcaa

SEQ ID NO: 229566 - DNA, 33 bp, Homo sapien
ttcttataatgcaaaacttaaaaagtgtatcaa

SEQ ID NO: 229567 - DNA, 33 bp, Homo sapien
catggcaaccactgaccggaggatggcagcaag

SEQ ID NO: 229568 - DNA, 33 bp, Homo sapien
catggcaaccactgactggaggatggcagcaag

SEQ ID NO: 229569 - DNA, 33 bp, Homo sapien
ctaaatgcgtgtccaaatactatgttccacatt

SEQ ID NO: 229570 - DNA, 33 bp, Homo sapien
ctaaatgcgtgtccaagtactatgttccacatt

SEQ ID NO: 229571 - DNA, 33 bp, Homo sapien
ttgctaaatatgtgaacgtaaatccaaaacagt

SEQ ID NO: 229572 - DNA, 33 bp, Homo sapien
ttgctaaatatgtgaatgtaaatccaaaacagt

SEQ ID NO: 229573 - DNA, 33 bp, Homo sapien
gacacagaaatactgacgttgttgttttaagag

SEQ ID NO: 229574 - DNA, 33 bp, Homo sapien
gacacagaaatactgatgttgttgttttaagag

SEQ ID NO: 229575 - DNA, 33 bp, Homo sapien
ctctgtttccagccacaggaaggaaattgccac

SEQ ID NO: 229576 - DNA, 33 bp, Homo sapien
ctctgtttccagccacgggaaggaaattgccac

SEQ ID NO: 229577 - DNA, 33 bp, Homo sapien
acctgccactctcctaaaatacctttcctcctt

SEQ ID NO: 229578 - DNA, 33 bp, Homo sapien
acctgccactctcctagaatacctttcctcctt

SEQ ID NO: 229579 - DNA, 33 bp, Homo sapien
atgcaaatgtgaataaaacaagtttcttgttgt

SEQ ID NO: 229580 - DNA, 33 bp, Homo sapien
atgcaaatgtgaataagacaagtttcttgttgt

SEQ ID NO: 229581 - DNA, 33 bp, Homo sapien
cattatgcccttgcccagaaaaacatctattca

SEQ ID NO: 229582 - DNA, 33 bp, Homo sapien
cattatgcccttgcccggaaaaacatctattca

SEQ ID NO: 229583 - DNA, 33 bp, Homo sapien
gtcctgtttgttagcacggtttcacacaatgcc

SEQ ID NO: 229584 - DNA, 33 bp, Homo sapien
gtcctgtttgttagcatggtttcacacaatgcc

SEQ ID NO: 229585 - DNA, 33 bp, Homo sapien
aaaaatacttgtgaaacgatcaagttctgtcta

SEQ ID NO: 229586 - DNA, 33 bp, Homo sapien
aaaaatacttgtgaaatgatcaagttctgtcta

SEQ ID NO: 229587 - DNA, 33 bp, Homo sapien
atggggtggatgaataagttgtcaggtgtgata

SEQ ID NO: 229588 - DNA, 33 bp, Homo sapien
atggggtggatgaatacgttgtcaggtgtgata

SEQ ID NO: 229589 - DNA, 33 bp, Homo sapien
agtgggaagaagaacaaaagtagcaatgttatg

SEQ ID NO: 229590 - DNA, 33 bp, Homo sapien
agtgggaagaagaacagaagtagcaatgttatg

SEQ ID NO: 229591 - DNA, 33 bp, Homo sapien
gggagaagtcctctcaaatggcaaaggcaaaag

SEQ ID NO: 229592 - DNA, 33 bp, Homo sapien
gggagaagtcctctcacatggcaaaggcaaaag

SEQ ID NO: 229593 - DNA, 33 bp, Homo sapien
tgatcatttttaaggaaagtctgcaatctcagg

SEQ ID NO: 229594 - DNA, 33 bp, Homo sapien
tgatcatttttaaggatagtctgcaatctcagg

SEQ ID NO: 229595 - DNA, 33 bp, Homo sapien
catttgcagctgaaataaaggaaccatcttcat

SEQ ID NO: 229596 - DNA, 33 bp, Homo sapien
catttgcagctgaaatgaaggaaccatcttcat

SEQ ID NO: 229597 - DNA, 33 bp, Homo sapien
tgtacctctccagatacgcaaggctaagctagc

SEQ ID NO: 229598 - DNA, 33 bp, Homo sapien
tgtacctctccagatatgcaaggctaagctagc

SEQ ID NO: 229599 - DNA, 33 bp, Homo sapien
gatgaatcactttacacagaaaaaagcaagccc

SEQ ID NO: 229600 - DNA, 33 bp, Homo sapien
gatgaatcactttacatagaaaaaagcaagccc

SEQ ID NO: 229601 - DNA, 33 bp, Homo sapien
gttcagcaacttagataaacattaaggaaagaa

SEQ ID NO: 229602 - DNA, 33 bp, Homo sapien
gttcagcaacttagatcaacattaaggaaagaa

SEQ ID NO: 229603 - DNA, 33 bp, Homo sapien
atgaatcatagctaccaaaattccctgtgtgat

SEQ ID NO: 229604 - DNA, 33 bp, Homo sapien
atgaatcatagctaccgaaattccctgtgtgat

SEQ ID NO: 229605 - DNA, 33 bp, Homo sapien
atttgtaaaggtcacaatacagcaacataggcc

SEQ ID NO: 229606 - DNA, 33 bp, Homo sapien
atttgtaaaggtcacagtacagcaacataggcc

SEQ ID NO: 229607 - DNA, 33 bp, Homo sapien
gaatgcattagtaagaacatggggctgcaaaat

SEQ ID NO: 229608 - DNA, 33 bp, Homo sapien
gaatgcattagtaagagcatggggctgcaaaat

SEQ ID NO: 229609 - DNA, 33 bp, Homo sapien
tgcctttggtcacagagtatgtagattttaaat

SEQ ID NO: 229610 - DNA, 33 bp, Homo sapien
tgcctttggtcacagattatgtagattttaaat

SEQ ID NO: 229611 - DNA, 33 bp, Homo sapien
gtattaaggagaattcaagagaggaatggatca

SEQ ID NO: 229612 - DNA, 33 bp, Homo sapien
gtattaaggagaattcgagagaggaatggatca

SEQ ID NO: 229613 - DNA, 33 bp, Homo sapien
agatgttaatgcagccaggaagagaggaaataa

SEQ ID NO: 229614 - DNA, 33 bp, Homo sapien
agatgttaatgcagccgggaagagaggaaataa

SEQ ID NO: 229615 - DNA, 33 bp, Homo sapien
taacatcaggaaaaaacagttccaagactgagg

SEQ ID NO: 229616 - DNA, 33 bp, Homo sapien
taacatcaggaaaaaatagttccaagactgagg

SEQ ID NO: 229617 - DNA, 33 bp, Homo sapien
gagctgaaagaagttgaaagggcacctggaagg

SEQ ID NO: 229618 - DNA, 33 bp, Homo sapien
gagctgaaagaagttgcaagggcacctggaagg

SEQ ID NO: 229619 - DNA, 33 bp, Homo sapien
ctatactacgaattaacgagttcagttttagat

SEQ ID NO: 229620 - DNA, 33 bp, Homo sapien
ctatactacgaattaatgagttcagttttagat

SEQ ID NO: 229621 - DNA, 33 bp, Homo sapien
aatttgaactttctcaaaaaaagcacaaatcca

SEQ ID NO: 229622 - DNA, 33 bp, Homo sapien
aatttgaactttctcagaaaaagcacaaatcca

SEQ ID NO: 229623 - DNA, 33 bp, Homo sapien
aacccgtgtgagtctccgacaagtgtgtaagta

SEQ ID NO: 229624 - DNA, 33 bp, Homo sapien
aacccgtgtgagtctctgacaagtgtgtaagta

SEQ ID NO: 229625 - DNA, 33 bp, Homo sapien
caatcaataacttagcacagcatgactctgtac

SEQ ID NO: 229626 - DNA, 33 bp, Homo sapien
caatcaataacttagcgcagcatgactctgtac

SEQ ID NO: 229627 - DNA, 33 bp, Homo sapien
acgtatgttctaagaaaggtgcatggttctgag

SEQ ID NO: 229628 - DNA, 33 bp, Homo sapien
acgtatgttctaagaacggtgcatggttctgag

SEQ ID NO: 229629 - DNA, 33 bp, Homo sapien
cccaaattttgcctccaacatcttagctataag

SEQ ID NO: 229630 - DNA, 33 bp, Homo sapien
cccaaattttgcctccgacatcttagctataag

SEQ ID NO: 229631 - DNA, 33 bp, Homo sapien
tgcccactgctttaccccttttcctcaactcac

SEQ ID NO: 229632 - DNA, 33 bp, Homo sapien
tgcccactgctttacctcttttcctcaactcac

SEQ ID NO: 229633 - DNA, 33 bp, Homo sapien
ggaggaggaaaagcagcataatgtgatagacca

SEQ ID NO: 229634 - DNA, 33 bp, Homo sapien
ggaggaggaaaagcaggataatgtgatagacca

SEQ ID NO: 229635 - DNA, 33 bp, Homo sapien
ttaaactagagactaacgtgttcttaattgaca

SEQ ID NO: 229636 - DNA, 33 bp, Homo sapien
ttaaactagagactaatgtgttcttaattgaca

SEQ ID NO: 229637 - DNA, 33 bp, Homo sapien
ctcaagtaatgcaacaaagttacaatgcataca

SEQ ID NO: 229638 - DNA, 33 bp, Homo sapien
ctcaagtaatgcaacagagttacaatgcataca

SEQ ID NO: 229639 - DNA, 33 bp, Homo sapien
atttgttttaccttaaccagtgtgcatagttga

SEQ ID NO: 229640 - DNA, 33 bp, Homo sapien
atttgttttaccttaagcagtgtgcatagttga

SEQ ID NO: 229641 - DNA, 33 bp, Homo sapien
tttgaccattgcaagaaaagtttaaatatatac

SEQ ID NO: 229642 - DNA, 33 bp, Homo sapien
tttgaccattgcaagagaagtttaaatatatac

SEQ ID NO: 229643 - DNA, 33 bp, Homo sapien
atcttttctgttacaacccttctttctttttct

SEQ ID NO: 229644 - DNA, 33 bp, Homo sapien
atcttttctgttacaatccttctttctttttct

SEQ ID NO: 229645 - DNA, 33 bp, Homo sapien
aaatataaaactatggacaagtaaatctgaaca

SEQ ID NO: 229646 - DNA, 33 bp, Homo sapien
aaatataaaactatgggcaagtaaatctgaaca

SEQ ID NO: 229647 - DNA, 33 bp, Homo sapien
cagttgaaatggaagacgactagcaattttcac

SEQ ID NO: 229648 - DNA, 33 bp, Homo sapien
cagttgaaatggaagatgactagcaattttcac

SEQ ID NO: 229649 - DNA, 33 bp, Homo sapien
cctgaccctcttctccaagtcctgatgggcctg

SEQ ID NO: 229650 - DNA, 33 bp, Homo sapien
cctgaccctcttctccgagtcctgatgggcctg

SEQ ID NO: 229651 - DNA, 33 bp, Homo sapien
aaaatcagctgacaaacggaggattcatatgag

SEQ ID NO: 229652 - DNA, 33 bp, Homo sapien
aaaatcagctgacaaatggaggattcatatgag

SEQ ID NO: 229653 - DNA, 33 bp, Homo sapien
cactctaggttcctgacggctgtatttagttct

SEQ ID NO: 229654 - DNA, 33 bp, Homo sapien
cactctaggttcctgatggctgtatttagttct

SEQ ID NO: 229655 - DNA, 33 bp, Homo sapien
aagtcactaaaccggacgctggaaatgcaatga

SEQ ID NO: 229656 - DNA, 33 bp, Homo sapien
aagtcactaaaccggatgctggaaatgcaatga

SEQ ID NO: 229657 - DNA, 33 bp, Homo sapien
actatttctccccaggacattcagatgcagaag

SEQ ID NO: 229658 - DNA, 33 bp, Homo sapien
actatttctccccagggcattcagatgcagaag

SEQ ID NO: 229659 - DNA, 33 bp, Homo sapien
gctagaggcattgggaatattgacaggtgacag

SEQ ID NO: 229660 - DNA, 33 bp, Homo sapien
gctagaggcattgggagtattgacaggtgacag

SEQ ID NO: 229661 - DNA, 33 bp, Homo sapien
tatagtgcatgaataccgtaaacaggggtgtgg

SEQ ID NO: 229662 - DNA, 33 bp, Homo sapien
tatagtgcatgaatactgtaaacaggggtgtgg

SEQ ID NO: 229663 - DNA, 33 bp, Homo sapien
gaggaagaaagtaggacgtgttttttctccaga

SEQ ID NO: 229664 - DNA, 33 bp, Homo sapien
gaggaagaaagtaggatgtgttttttctccaga

SEQ ID NO: 229665 - DNA, 33 bp, Homo sapien
aaacctctatggcaaacaatatgaggatttatc

SEQ ID NO: 229666 - DNA, 33 bp, Homo sapien
aaacctctatggcaaataatatgaggatttatc

SEQ ID NO: 229667 - DNA, 33 bp, Homo sapien
taccactgaaacctaaagaagggctcactgaca

SEQ ID NO: 229668 - DNA, 33 bp, Homo sapien
taccactgaaacctaaggaagggctcactgaca

SEQ ID NO: 229669 - DNA, 33 bp, Homo sapien
aaggtcagatggtcacccaatgagtcagatata

SEQ ID NO: 229670 - DNA, 33 bp, Homo sapien
aaggtcagatggtcactcaatgagtcagatata

SEQ ID NO: 229671 - DNA, 33 bp, Homo sapien
tgcatgagtctgcttgaacatgagcctatgatg

SEQ ID NO: 229672 - DNA, 33 bp, Homo sapien
tgcatgagtctgcttggacatgagcctatgatg

SEQ ID NO: 229673 - DNA, 33 bp, Homo sapien
agattcctgatttggacgtgtatgaaagatatc

SEQ ID NO: 229674 - DNA, 33 bp, Homo sapien
agattcctgatttggatgtgtatgaaagatatc

SEQ ID NO: 229675 - DNA, 33 bp, Homo sapien
gcaacaaagatacaaacatgatgcaaaaagttt

SEQ ID NO: 229676 - DNA, 33 bp, Homo sapien
gcaacaaagatacaaagatgatgcaaaaagttt

SEQ ID NO: 229677 - DNA, 33 bp, Homo sapien
tttcctctgatcctccaagagcagcttagatac

SEQ ID NO: 229678 - DNA, 33 bp, Homo sapien
tttcctctgatcctcccagagcagcttagatac

SEQ ID NO: 229679 - DNA, 33 bp, Homo sapien
tttcctcataacaagaacgaaagaaagtacccc

SEQ ID NO: 229680 - DNA, 33 bp, Homo sapien
tttcctcataacaagagcgaaagaaagtacccc

SEQ ID NO: 229681 - DNA, 33 bp, Homo sapien
acacaaagccacaaagccttcctaaacttaaca

SEQ ID NO: 229682 - DNA, 33 bp, Homo sapien
acacaaagccacaaagtcttcctaaacttaaca

SEQ ID NO: 229683 - DNA, 33 bp, Homo sapien
aagaaaaataatctccacagatgctaaaaagaa

SEQ ID NO: 229684 - DNA, 33 bp, Homo sapien
aagaaaaataatctccgcagatgctaaaaagaa

SEQ ID NO: 229685 - DNA, 33 bp, Homo sapien
acatccgcacttaggcactacctgcccattagt

SEQ ID NO: 229686 - DNA, 33 bp, Homo sapien
acatccgcacttaggcgctacctgcccattagt

SEQ ID NO: 229687 - DNA, 33 bp, Homo sapien
aaataaagccaactataataatgccaacttaaa

SEQ ID NO: 229688 - DNA, 33 bp, Homo sapien
aaataaagccaactattataatgccaacttaaa

SEQ ID NO: 229689 - DNA, 33 bp, Homo sapien
gttgagacataatccaagcttctagacttccaa

SEQ ID NO: 229690 - DNA, 33 bp, Homo sapien
gttgagacataatccaggcttctagacttccaa

SEQ ID NO: 229691 - DNA, 33 bp, Homo sapien
aaatcaaatcaattttcgatgctcatggaagat

SEQ ID NO: 229692 - DNA, 33 bp, Homo sapien
aaatcaaatcaatttttgatgctcatggaagat

SEQ ID NO: 229693 - DNA, 33 bp, Homo sapien
aaaccacccacgtgtcacagcatccacatcaag

SEQ ID NO: 229694 - DNA, 33 bp, Homo sapien
aaaccacccacgtgtcgcagcatccacatcaag

SEQ ID NO: 229695 - DNA, 33 bp, Homo sapien
ctgaaacaaattcatgccacaaactgaaggggt

SEQ ID NO: 229696 - DNA, 33 bp, Homo sapien
ctgaaacaaattcatggcacaaactgaaggggt

SEQ ID NO: 229697 - DNA, 33 bp, Homo sapien
tgtactagatattaccaaaatgctctgtgcatc

SEQ ID NO: 229698 - DNA, 33 bp, Homo sapien
tgtactagatattaccgaaatgctctgtgcatc

SEQ ID NO: 229699 - DNA, 33 bp, Homo sapien
cgacaacccctttgaacaacataatttgtctag

SEQ ID NO: 229700 - DNA, 33 bp, Homo sapien
cgacaacccctttgaataacataatttgtctag

SEQ ID NO: 229701 - DNA, 33 bp, Homo sapien
actacaataagcagtccatgaaccatgagctta

SEQ ID NO: 229702 - DNA, 33 bp, Homo sapien
actacaataagcagtctatgaaccatgagctta

SEQ ID NO: 229703 - DNA, 33 bp, Homo sapien
tctttcatgctggacacgtattacgactcttgg

SEQ ID NO: 229704 - DNA, 33 bp, Homo sapien
tctttcatgctggacatgtattacgactcttgg

SEQ ID NO: 229705 - DNA, 33 bp, Homo sapien
aggtacatattcttgaaaagaccttctcagtag

SEQ ID NO: 229706 - DNA, 33 bp, Homo sapien
aggtacatattcttgacaagaccttctcagtag

SEQ ID NO: 229707 - DNA, 33 bp, Homo sapien
gtgtgatacttacgggccagggctttaaagagc

SEQ ID NO: 229708 - DNA, 33 bp, Homo sapien
gtgtgatacttacgggtcagggctttaaagagc

SEQ ID NO: 229709 - DNA, 33 bp, Homo sapien
aaggtgactggataggccatcaggagaaaccat

SEQ ID NO: 229710 - DNA, 33 bp, Homo sapien
aaggtgactggataggtcatcaggagaaaccat

SEQ ID NO: 229711 - DNA, 33 bp, Homo sapien
agtgccataaaagataagtatagcgggtatagc

SEQ ID NO: 229712 - DNA, 33 bp, Homo sapien
agtgccataaaagataggtatagcgggtatagc

SEQ ID NO: 229713 - DNA, 33 bp, Homo sapien
agtgcacataatttcacagtttagctctaaaat

SEQ ID NO: 229714 - DNA, 33 bp, Homo sapien
agtgcacataatttcatagtttagctctaaaat

SEQ ID NO: 229715 - DNA, 33 bp, Homo sapien
cacagcttaatcagaaacaaagcctatgaatga

SEQ ID NO: 229716 - DNA, 33 bp, Homo sapien
cacagcttaatcagaagcaaagcctatgaatga

SEQ ID NO: 229717 - DNA, 33 bp, Homo sapien
ttatgccaggctcccaaacatttccatgtgaat

SEQ ID NO: 229718 - DNA, 33 bp, Homo sapien
ttatgccaggctcccagacatttccatgtgaat

SEQ ID NO: 229719 - DNA, 33 bp, Homo sapien
aagataaaggctaaaacgggcacattgtattta

SEQ ID NO: 229720 - DNA, 33 bp, Homo sapien
aagataaaggctaaaatgggcacattgtattta

SEQ ID NO: 229721 - DNA, 33 bp, Homo sapien
gctgaggtgacttgacagcatccagaaggtaat

SEQ ID NO: 229722 - DNA, 33 bp, Homo sapien
gctgaggtgacttgacggcatccagaaggtaat

SEQ ID NO: 229723 - DNA, 33 bp, Homo sapien
agggatccttaaactgaatcacactcaatataa

SEQ ID NO: 229724 - DNA, 33 bp, Homo sapien
agggatccttaaactgtatcacactcaatataa

SEQ ID NO: 229725 - DNA, 33 bp, Homo sapien
ggtgggtgctaatacaatcaaatcagctttccg

SEQ ID NO: 229726 - DNA, 33 bp, Homo sapien
ggtgggtgctaatacagtcaaatcagctttccg

SEQ ID NO: 229727 - DNA, 33 bp, Homo sapien
gggattcatataagacaataattttgtgaagtt

SEQ ID NO: 229728 - DNA, 33 bp, Homo sapien
gggattcatataagacgataattttgtgaagtt

SEQ ID NO: 229729 - DNA, 33 bp, Homo sapien
catggaagtctggtcaaccaagtgtattcactg

SEQ ID NO: 229730 - DNA, 33 bp, Homo sapien
catggaagtctggtcagccaagtgtattcactg

SEQ ID NO: 229731 - DNA, 33 bp, Homo sapien
tcctaggactaatttcaatttatgacactcagt

SEQ ID NO: 229732 - DNA, 33 bp, Homo sapien
tcctaggactaatttcgatttatgacactcagt

SEQ ID NO: 229733 - DNA, 33 bp, Homo sapien
agatctgtacagataacgaatttctggagaagc

SEQ ID NO: 229734 - DNA, 33 bp, Homo sapien
agatctgtacagataatgaatttctggagaagc

SEQ ID NO: 229735 - DNA, 33 bp, Homo sapien
ataatgtggcatctagaaaaatattatcttccc

SEQ ID NO: 229736 - DNA, 33 bp, Homo sapien
ataatgtggcatctaggaaaatattatcttccc

SEQ ID NO: 229737 - DNA, 33 bp, Homo sapien
ctgaagaaagaagtagcaaactggatgatcagt

SEQ ID NO: 229738 - DNA, 33 bp, Homo sapien
ctgaagaaagaagtagtaaactggatgatcagt

SEQ ID NO: 229739 - DNA, 33 bp, Homo sapien
ttcttcctacactttacagcgtctgtggttatt

SEQ ID NO: 229740 - DNA, 33 bp, Homo sapien
ttcttcctacactttagagcgtctgtggttatt

SEQ ID NO: 229741 - DNA, 33 bp, Homo sapien
aaatatttcatgaaacagtattcactcttacta

SEQ ID NO: 229742 - DNA, 33 bp, Homo sapien
aaatatttcatgaaacggtattcactcttacta

SEQ ID NO: 229743 - DNA, 33 bp, Homo sapien
gacatttgttattgaacgtccataacctgattg

SEQ ID NO: 229744 - DNA, 33 bp, Homo sapien
gacatttgttattgaaggtccataacctgattg

SEQ ID NO: 229745 - DNA, 33 bp, Homo sapien
ctcagaaagggagcaaaccgttctcatgagtta

SEQ ID NO: 229746 - DNA, 33 bp, Homo sapien
ctcagaaagggagcaatccgttctcatgagtta

SEQ ID NO: 229747 - DNA, 33 bp, Homo sapien
cagtcatggggtcaaccaagctggaaatcaccc

SEQ ID NO: 229748 - DNA, 33 bp, Homo sapien
cagtcatggggtcaactaagctggaaatcaccc

SEQ ID NO: 229749 - DNA, 33 bp, Homo sapien
acaaccaaaattcatacataatctttaccaaat

SEQ ID NO: 229750 - DNA, 33 bp, Homo sapien
acaaccaaaattcatagataatctttaccaaat

SEQ ID NO: 229751 - DNA, 33 bp, Homo sapien
ggaagtgatgagaagcactgttctaaggtactg

SEQ ID NO: 229752 - DNA, 33 bp, Homo sapien
ggaagtgatgagaagcgctgttctaaggtactg

SEQ ID NO: 229753 - DNA, 33 bp, Homo sapien
aattgtcaggcattaactggcagagaatattaa

SEQ ID NO: 229754 - DNA, 33 bp, Homo sapien
aattgtcaggcattaagtggcagagaatattaa

SEQ ID NO: 229755 - DNA, 33 bp, Homo sapien
ccatactgaatggagaatagttaggagaatgac

SEQ ID NO: 229756 - DNA, 33 bp, Homo sapien
ccatactgaatggagactagttaggagaatgac

SEQ ID NO: 229757 - DNA, 33 bp, Homo sapien
ggggaataaatgcaataatcagatttacatttc

SEQ ID NO: 229758 - DNA, 33 bp, Homo sapien
ggggaataaatgcaatgatcagatttacatttc

SEQ ID NO: 229759 - DNA, 33 bp, Homo sapien
ggtgaagcaggaggaaattagtgccaggtaagc

SEQ ID NO: 229760 - DNA, 33 bp, Homo sapien
ggtgaagcaggaggaagttagtgccaggtaagc

SEQ ID NO: 229761 - DNA, 33 bp, Homo sapien
aaacctaataggaagacgatgggaatataggct

SEQ ID NO: 229762 - DNA, 33 bp, Homo sapien
aaacctaataggaagatgatgggaatataggct

SEQ ID NO: 229763 - DNA, 33 bp, Homo sapien
gtgctccacatactgaactgtttccttagtcct

SEQ ID NO: 229764 - DNA, 33 bp, Homo sapien
gtgctccacatactgagctgtttccttagtcct

SEQ ID NO: 229765 - DNA, 33 bp, Homo sapien
tttacagaacgtggtaagaattaaactattagg

SEQ ID NO: 229766 - DNA, 33 bp, Homo sapien
tttacagaacgtggtaggaattaaactattagg

SEQ ID NO: 229767 - DNA, 33 bp, Homo sapien
gctgactgcttgaccaaagaagtagtaggcagg

SEQ ID NO: 229768 - DNA, 33 bp, Homo sapien
gctgactgcttgaccagagaagtagtaggcagg

SEQ ID NO: 229769 - DNA, 33 bp, Homo sapien
gggacatgttggtatacacttgtagtcccagct

SEQ ID NO: 229770 - DNA, 33 bp, Homo sapien
gggacatgttggtatatacttgtagtcccagct

SEQ ID NO: 229771 - DNA, 33 bp, Homo sapien
gggtatgatacggaaaacagcttcagtttcatg

SEQ ID NO: 229772 - DNA, 33 bp, Homo sapien
gggtatgatacggaaagcagcttcagtttcatg

SEQ ID NO: 229773 - DNA, 33 bp, Homo sapien
acatagcaaatactgacgcaaagtaaaattaat

SEQ ID NO: 229774 - DNA, 33 bp, Homo sapien
acatagcaaatactgatgcaaagtaaaattaat

SEQ ID NO: 229775 - DNA, 33 bp, Homo sapien
cttggtcttctaccgacgtaatgagaggacaga

SEQ ID NO: 229776 - DNA, 33 bp, Homo sapien
cttggtcttctaccgatgtaatgagaggacaga

SEQ ID NO: 229777 - DNA, 33 bp, Homo sapien
gagtttttgtgaaagacacttatagatggagat

SEQ ID NO: 229778 - DNA, 33 bp, Homo sapien
gagtttttgtgaaagatacttatagatggagat

SEQ ID NO: 229779 - DNA, 33 bp, Homo sapien
attgcaaatgttgtcaacctaatatgaaacctt

SEQ ID NO: 229780 - DNA, 33 bp, Homo sapien
attgcaaatgttgtcaccctaatatgaaacctt

SEQ ID NO: 229781 - DNA, 33 bp, Homo sapien
ttgaaattctaagcaccgctgttactaattttg

SEQ ID NO: 229782 - DNA, 33 bp, Homo sapien
ttgaaattctaagcactgctgttactaattttg

SEQ ID NO: 229783 - DNA, 33 bp, Homo sapien
gggaaactgaagtgcaaatggcctcacaggttt

SEQ ID NO: 229784 - DNA, 33 bp, Homo sapien
gggaaactgaagtgcagatggcctcacaggttt

SEQ ID NO: 229785 - DNA, 33 bp, Homo sapien
aaggaaacaacttgacacacagagaacaaagaa

SEQ ID NO: 229786 - DNA, 33 bp, Homo sapien
aaggaaacaacttgacccacagagaacaaagaa

SEQ ID NO: 229787 - DNA, 33 bp, Homo sapien
taagtggagctatcacaatgttcctgacactaa

SEQ ID NO: 229788 - DNA, 33 bp, Homo sapien
taagtggagctatcactatgttcctgacactaa

SEQ ID NO: 229789 - DNA, 33 bp, Homo sapien
tctctttaaataagtgcacagttgaccagtgaa

SEQ ID NO: 229790 - DNA, 33 bp, Homo sapien
tctctttaaataagtgtacagttgaccagtgaa

SEQ ID NO: 229791 - DNA, 33 bp, Homo sapien
tggtctatccaataataaaatggccctttgttt

SEQ ID NO: 229792 - DNA, 33 bp, Homo sapien
tggtctatccaataattaaatggccctttgttt

SEQ ID NO: 229793 - DNA, 33 bp, Homo sapien
gcagctatgtcaaaaacgaaaacactgttatgt

SEQ ID NO: 229794 - DNA, 33 bp, Homo sapien
gcagctatgtcaaaaatgaaaacactgttatgt

SEQ ID NO: 229795 - DNA, 33 bp, Homo sapien
tgttttgatactttcccagctttgcagccttgc

SEQ ID NO: 229796 - DNA, 33 bp, Homo sapien
tgttttgatactttcctagctttgcagccttgc

SEQ ID NO: 229797 - DNA, 33 bp, Homo sapien
aagttggccttgtcacagtagcttaggctggga

SEQ ID NO: 229798 - DNA, 33 bp, Homo sapien
aagttggccttgtcacggtagcttaggctggga

SEQ ID NO: 229799 - DNA, 33 bp, Homo sapien
ttatcagcttcttggaccacaagggccatgcta

SEQ ID NO: 229800 - DNA, 33 bp, Homo sapien
ttatcagcttcttggagcacaagggccatgcta

SEQ ID NO: 229801 - DNA, 33 bp, Homo sapien
aagcagagatcagagggattaaattgcgaggga

SEQ ID NO: 229802 - DNA, 33 bp, Homo sapien
aagcagagatcagaggtattaaattgcgaggga

SEQ ID NO: 229803 - DNA, 33 bp, Homo sapien
cctcacctggggcaacaacattgagaaagtgat

SEQ ID NO: 229804 - DNA, 33 bp, Homo sapien
cctcacctggggcaacgacattgagaaagtgat

SEQ ID NO: 229805 - DNA, 33 bp, Homo sapien
gtggtcaactgagtaaataacatgtaaatattt

SEQ ID NO: 229806 - DNA, 33 bp, Homo sapien
gtggtcaactgagtaagtaacatgtaaatattt

SEQ ID NO: 229807 - DNA, 33 bp, Homo sapien
atgaggaaaccgaggccgagtaatttgtcattg

SEQ ID NO: 229808 - DNA, 33 bp, Homo sapien
atgaggaaaccgaggctgagtaatttgtcattg

SEQ ID NO: 229809 - DNA, 33 bp, Homo sapien
ttatataccaaaggaaacatcaatgatctcctg

SEQ ID NO: 229810 - DNA, 33 bp, Homo sapien
ttatataccaaaggaagcatcaatgatctcctg

SEQ ID NO: 229811 - DNA, 33 bp, Homo sapien
ttaagcatagctctaggccctttctagccattc

SEQ ID NO: 229812 - DNA, 33 bp, Homo sapien
ttaagcatagctctagtccctttctagccattc

SEQ ID NO: 229813 - DNA, 33 bp, Homo sapien
gatttgttgtatcactaagcttttctctttttc

SEQ ID NO: 229814 - DNA, 33 bp, Homo sapien
gatttgttgtatcactgagcttttctctttttc

SEQ ID NO: 229815 - DNA, 33 bp, Homo sapien
gaagtcaatgtgaatcaatcttaggttctctgc

SEQ ID NO: 229816 - DNA, 33 bp, Homo sapien
gaagtcaatgtgaatcgatcttaggttctctgc

SEQ ID NO: 229817 - DNA, 33 bp, Homo sapien
ggttgactcagtggtaactcatgcattgccaac

SEQ ID NO: 229818 - DNA, 33 bp, Homo sapien
ggttgactcagtggtacctcatgcattgccaac

SEQ ID NO: 229819 - DNA, 33 bp, Homo sapien
ggactctgccacttgcaatccaaagagttctga

SEQ ID NO: 229820 - DNA, 33 bp, Homo sapien
ggactctgccacttgcgatccaaagagttctga

SEQ ID NO: 229821 - DNA, 33 bp, Homo sapien
cacacataattcaaaccgaagatgtcttttgtt

SEQ ID NO: 229822 - DNA, 33 bp, Homo sapien
cacacataattcaaactgaagatgtcttttgtt

SEQ ID NO: 229823 - DNA, 33 bp, Homo sapien
cgagatatcgcaagaaccaggatgttacataca

SEQ ID NO: 229824 - DNA, 33 bp, Homo sapien
cgagatatcgcaagaatcaggatgttacataca

SEQ ID NO: 229825 - DNA, 33 bp, Homo sapien
caagaatgaatacttacgattcaaagccacaaa

SEQ ID NO: 229826 - DNA, 33 bp, Homo sapien
caagaatgaatacttatgattcaaagccacaaa

SEQ ID NO: 229827 - DNA, 33 bp, Homo sapien
gctctgtgggcacctgcaaaaccctcgtgggaa

SEQ ID NO: 229828 - DNA, 33 bp, Homo sapien
gctctgtgggcacctgtaaaaccctcgtgggaa

SEQ ID NO: 229829 - DNA, 33 bp, Homo sapien
ctgtgttctcactctccagataaagtcaacact

SEQ ID NO: 229830 - DNA, 33 bp, Homo sapien
ctgtgttctcactctctagataaagtcaacact

SEQ ID NO: 229831 - DNA, 33 bp, Homo sapien
caaactgaggcttggaaaagtggaaaacttgcc

SEQ ID NO: 229832 - DNA, 33 bp, Homo sapien
caaactgaggcttggagaagtggaaaacttgcc

SEQ ID NO: 229833 - DNA, 33 bp, Homo sapien
ttgtcattgttttccccagtcattgtgaaagga

SEQ ID NO: 229834 - DNA, 33 bp, Homo sapien
ttgtcattgttttcccgagtcattgtgaaagga

SEQ ID NO: 229835 - DNA, 33 bp, Homo sapien
agaaggaattctgaaacgaagcaaccaggactt

SEQ ID NO: 229836 - DNA, 33 bp, Homo sapien
agaaggaattctgaaatgaagcaaccaggactt

SEQ ID NO: 229837 - DNA, 33 bp, Homo sapien
tagtatgactagggagaagtgacattactgagt

SEQ ID NO: 229838 - DNA, 33 bp, Homo sapien
tagtatgactagggaggagtgacattactgagt

SEQ ID NO: 229839 - DNA, 33 bp, Homo sapien
ttgctcagcacgtcacagagacaacctgaactg

SEQ ID NO: 229840 - DNA, 33 bp, Homo sapien
ttgctcagcacgtcacggagacaacctgaactg

SEQ ID NO: 229841 - DNA, 33 bp, Homo sapien
ggaggcaattattgaacgatgaaaagaaggaag

SEQ ID NO: 229842 - DNA, 33 bp, Homo sapien
ggaggcaattattgaatgatgaaaagaaggaag

SEQ ID NO: 229843 - DNA, 33 bp, Homo sapien
taaaattactttcacacatataggatgcaatgg

SEQ ID NO: 229844 - DNA, 33 bp, Homo sapien
taaaattactttcacatatataggatgcaatgg

SEQ ID NO: 229845 - DNA, 33 bp, Homo sapien
ccagcaagcttaatcaccttgcatttaaatgtt

SEQ ID NO: 229846 - DNA, 33 bp, Homo sapien
ccagcaagcttaatcatcttgcatttaaatgtt

SEQ ID NO: 229847 - DNA, 33 bp, Homo sapien
atgtctacaggtttgagggttttatgagtggac

SEQ ID NO: 229848 - DNA, 33 bp, Homo sapien
atgtctacaggtttgatggttttatgagtggac

SEQ ID NO: 229849 - DNA, 33 bp, Homo sapien
gaggtgagctctaaccagaggatatagggggga

SEQ ID NO: 229850 - DNA, 33 bp, Homo sapien
gaggtgagctctaaccggaggatatagggggga

SEQ ID NO: 229851 - DNA, 33 bp, Homo sapien
gagcaacttcaaatgacgagaaatcaagcaaaa

SEQ ID NO: 229852 - DNA, 33 bp, Homo sapien
gagcaacttcaaatgatgagaaatcaagcaaaa

SEQ ID NO: 229853 - DNA, 33 bp, Homo sapien
gagcacatcgtttgtacaagggcaaaggaaaag

SEQ ID NO: 229854 - DNA, 33 bp, Homo sapien
gagcacatcgtttgtataagggcaaaggaaaag

SEQ ID NO: 229855 - DNA, 33 bp, Homo sapien
tctactgtccaaccagcctaatcctggataatt

SEQ ID NO: 229856 - DNA, 33 bp, Homo sapien
tctactgtccaaccagtctaatcctggataatt

SEQ ID NO: 229857 - DNA, 33 bp, Homo sapien
gccacatcattattgccaactcttcattattct

SEQ ID NO: 229858 - DNA, 33 bp, Homo sapien
gccacatcattattgctaactcttcattattct

SEQ ID NO: 229859 - DNA, 33 bp, Homo sapien
tttttaccaattactcaatagtgtctggagccc

SEQ ID NO: 229860 - DNA, 33 bp, Homo sapien
tttttaccaattactcgatagtgtctggagccc

SEQ ID NO: 229861 - DNA, 33 bp, Homo sapien
gatgtggctaaggagactattctaaggcagatg

SEQ ID NO: 229862 - DNA, 33 bp, Homo sapien
gatgtggctaaggagagtattctaaggcagatg

SEQ ID NO: 229863 - DNA, 33 bp, Homo sapien
tcctatcaactgagacaagttggctctctttcc

SEQ ID NO: 229864 - DNA, 33 bp, Homo sapien
tcctatcaactgagacgagttggctctctttcc

SEQ ID NO: 229865 - DNA, 33 bp, Homo sapien
tcattttgactggcgcagcagaatgaggaggga

SEQ ID NO: 229866 - DNA, 33 bp, Homo sapien
tcattttgactggcgcggcagaatgaggaggga

SEQ ID NO: 229867 - DNA, 33 bp, Homo sapien
ctaatcattttcttgcagagactttaggttttt

SEQ ID NO: 229868 - DNA, 33 bp, Homo sapien
ctaatcattttcttgcggagactttaggttttt

SEQ ID NO: 229869 - DNA, 33 bp, Homo sapien
gtgtgttatagccgggaccacagtatgtgcctg

SEQ ID NO: 229870 - DNA, 33 bp, Homo sapien
gtgtgttatagccggggccacagtatgtgcctg

SEQ ID NO: 229871 - DNA, 33 bp, Homo sapien
atgagttagtcaaaggaatgattggaatttggg

SEQ ID NO: 229872 - DNA, 33 bp, Homo sapien
atgagttagtcaaagggatgattggaatttggg

SEQ ID NO: 229873 - DNA, 33 bp, Homo sapien
cagcctgttcaaatgccacaggatattgagaaa

SEQ ID NO: 229874 - DNA, 33 bp, Homo sapien
cagcctgttcaaatgctacaggatattgagaaa

SEQ ID NO: 229875 - DNA, 33 bp, Homo sapien
aatcacagtgggcctcacaaggtatctgcacca

SEQ ID NO: 229876 - DNA, 33 bp, Homo sapien
aatcacagtgggcctcgcaaggtatctgcacca

SEQ ID NO: 229877 - DNA, 33 bp, Homo sapien
tcttggtagcatgtcagccaacaagccttacct

SEQ ID NO: 229878 - DNA, 33 bp, Homo sapien
tcttggtagcatgtcatccaacaagccttacct

SEQ ID NO: 229879 - DNA, 33 bp, Homo sapien
aaatcagaagtcaagcacaggggcatggttctg

SEQ ID NO: 229880 - DNA, 33 bp, Homo sapien
aaatcagaagtcaagcgcaggggcatggttctg

SEQ ID NO: 229881 - DNA, 33 bp, Homo sapien
aactgtcattagattcactacgtttgtaggcta

SEQ ID NO: 229882 - DNA, 33 bp, Homo sapien
aactgtcattagattcgctacgtttgtaggcta

SEQ ID NO: 229883 - DNA, 33 bp, Homo sapien
ttattcattacgtgacactcaacttaagaatca

SEQ ID NO: 229884 - DNA, 33 bp, Homo sapien
ttattcattacgtgacgctcaacttaagaatca

SEQ ID NO: 229885 - DNA, 33 bp, Homo sapien
caagtgtgtaaacaaagaagcacaaccaaggga

SEQ ID NO: 229886 - DNA, 33 bp, Homo sapien
caagtgtgtaaacaaataagcacaaccaaggga

SEQ ID NO: 229887 - DNA, 33 bp, Homo sapien
tgcattcaaacccttcccttcatggtgcagaga

SEQ ID NO: 229888 - DNA, 33 bp, Homo sapien
tgcattcaaacccttctcttcatggtgcagaga

SEQ ID NO: 229889 - DNA, 33 bp, Homo sapien
agctggaagtattcacagaacataggaggaaac

SEQ ID NO: 229890 - DNA, 33 bp, Homo sapien
agctggaagtattcacggaacataggaggaaac

SEQ ID NO: 229891 - DNA, 33 bp, Homo sapien
tgcgaaatcaacactgccagtgaaaaacaaaca

SEQ ID NO: 229892 - DNA, 33 bp, Homo sapien
tgcgaaatcaacactgtcagtgaaaaacaaaca

SEQ ID NO: 229893 - DNA, 33 bp, Homo sapien
gcactcataacatccacagtttctgttgttgtt

SEQ ID NO: 229894 - DNA, 33 bp, Homo sapien
gcactcataacatccatagtttctgttgttgtt

SEQ ID NO: 229895 - DNA, 33 bp, Homo sapien
ttgacaggcgaaagaaatgggattatggcactt

SEQ ID NO: 229896 - DNA, 33 bp, Homo sapien
ttgacaggcgaaagaattgggattatggcactt

SEQ ID NO: 229897 - DNA, 33 bp, Homo sapien
ctaaaggcagaccaaacgtgtggatgtttaggt

SEQ ID NO: 229898 - DNA, 33 bp, Homo sapien
ctaaaggcagaccaaatgtgtggatgtttaggt

SEQ ID NO: 229899 - DNA, 33 bp, Homo sapien
gatgcttagagcttcaacaggtattaatggtcc

SEQ ID NO: 229900 - DNA, 33 bp, Homo sapien
gatgcttagagcttcagcaggtattaatggtcc

SEQ ID NO: 229901 - DNA, 33 bp, Homo sapien
cttggtccttgggaaacgggaagccagaagaag

SEQ ID NO: 229902 - DNA, 33 bp, Homo sapien
cttggtccttgggaaatgggaagccagaagaag

SEQ ID NO: 229903 - DNA, 33 bp, Homo sapien
gtctaaaaagaaaagaccaagctcatttatgaa

SEQ ID NO: 229904 - DNA, 33 bp, Homo sapien
gtctaaaaagaaaagatcaagctcatttatgaa

SEQ ID NO: 229905 - DNA, 33 bp, Homo sapien
aaacctaattaccaacaaaggctccacttccaa

SEQ ID NO: 229906 - DNA, 33 bp, Homo sapien
aaacctaattaccaacgaaggctccacttccaa

SEQ ID NO: 229907 - DNA, 33 bp, Homo sapien
actttgtataattccacgtgacagactcaggtg

SEQ ID NO: 229908 - DNA, 33 bp, Homo sapien
actttgtataattccatgtgacagactcaggtg

SEQ ID NO: 229909 - DNA, 33 bp, Homo sapien
ggagcttgtgatccagcaggggattcagacgtg

SEQ ID NO: 229910 - DNA, 33 bp, Homo sapien
ggagcttgtgatccagtaggggattcagacgtg

SEQ ID NO: 229911 - DNA, 33 bp, Homo sapien
aaacaatattggagacaaatctggtttgaatgc

SEQ ID NO: 229912 - DNA, 33 bp, Homo sapien
aaacaatattggagacgaatctggtttgaatgc

SEQ ID NO: 229913 - DNA, 33 bp, Homo sapien
ctgttgcttccttgagacacggtaaggagtggt

SEQ ID NO: 229914 - DNA, 33 bp, Homo sapien
ctgttgcttccttgaggcacggtaaggagtggt

SEQ ID NO: 229915 - DNA, 33 bp, Homo sapien
tctgccttctgatcataacggtcccagaaaatt

SEQ ID NO: 229916 - DNA, 33 bp, Homo sapien
tctgccttctgatcattacggtcccagaaaatt

SEQ ID NO: 229917 - DNA, 33 bp, Homo sapien
ggaggaggcatagaaacagtttggtgtctctgg

SEQ ID NO: 229918 - DNA, 33 bp, Homo sapien
ggaggaggcatagaaatagtttggtgtctctgg

SEQ ID NO: 229919 - DNA, 33 bp, Homo sapien
atgttggcaaaacaaacatctctgagatgcagt

SEQ ID NO: 229920 - DNA, 33 bp, Homo sapien
atgttggcaaaacaaatatctctgagatgcagt

SEQ ID NO: 229921 - DNA, 33 bp, Homo sapien
ggtatactggtatgtacggcgtgaagaaaagag

SEQ ID NO: 229922 - DNA, 33 bp, Homo sapien
ggtatactggtatgtatggcgtgaagaaaagag

SEQ ID NO: 229923 - DNA, 33 bp, Homo sapien
aggagggccgaaggacacaaattttattcagtt

SEQ ID NO: 229924 - DNA, 33 bp, Homo sapien
aggagggccgaaggacgcaaattttattcagtt

SEQ ID NO: 229925 - DNA, 33 bp, Homo sapien
ctagcctcattcttggaatttacatccccagga

SEQ ID NO: 229926 - DNA, 33 bp, Homo sapien
ctagcctcattcttggtatttacatccccagga

SEQ ID NO: 229927 - DNA, 33 bp, Homo sapien
ggaggattttgttggccaatccacctagctgat

SEQ ID NO: 229928 - DNA, 33 bp, Homo sapien
ggaggattttgttggctaatccacctagctgat

SEQ ID NO: 229929 - DNA, 33 bp, Homo sapien
cggagtaagtgcttaacatgttttctttttaaa

SEQ ID NO: 229930 - DNA, 33 bp, Homo sapien
cggagtaagtgcttaatatgttttctttttaaa

SEQ ID NO: 229931 - DNA, 33 bp, Homo sapien
gctgtaaatctactccaattactcatctgaatc

SEQ ID NO: 229932 - DNA, 33 bp, Homo sapien
gctgtaaatctactcctattactcatctgaatc

SEQ ID NO: 229933 - DNA, 33 bp, Homo sapien
caaacagtgctaactaactaaaatagcaataac

SEQ ID NO: 229934 - DNA, 33 bp, Homo sapien
caaacagtgctaactatctaaaatagcaataac

SEQ ID NO: 229935 - DNA, 33 bp, Homo sapien
gagctcattcttgaacggaaaggaaaagatgaa

SEQ ID NO: 229936 - DNA, 33 bp, Homo sapien
gagctcattcttgaactgaaaggaaaagatgaa

SEQ ID NO: 229937 - DNA, 33 bp, Homo sapien
actctctacagagcccacactaatattcttaag

SEQ ID NO: 229938 - DNA, 33 bp, Homo sapien
actctctacagagcccgcactaatattcttaag

SEQ ID NO: 229939 - DNA, 33 bp, Homo sapien
gagcactgatttaagcaataccctcttctggtc

SEQ ID NO: 229940 - DNA, 33 bp, Homo sapien
gagcactgatttaagcgataccctcttctggtc

SEQ ID NO: 229941 - DNA, 33 bp, Homo sapien
gaggtactacactgcaaaagaactacgtgagtt

SEQ ID NO: 229942 - DNA, 33 bp, Homo sapien
gaggtactacactgcagaagaactacgtgagtt

SEQ ID NO: 229943 - DNA, 33 bp, Homo sapien
gatgctttgcttgtaacaagggctcatttaatg

SEQ ID NO: 229944 - DNA, 33 bp, Homo sapien
gatgctttgcttgtaataagggctcatttaatg

SEQ ID NO: 229945 - DNA, 33 bp, Homo sapien
cattcactgccagttactaacaagttatttaac

SEQ ID NO: 229946 - DNA, 33 bp, Homo sapien
cattcactgccagttattaacaagttatttaac

SEQ ID NO: 229947 - DNA, 33 bp, Homo sapien
tggctgcagagtgttaaagaaaccggagtgaag

SEQ ID NO: 229948 - DNA, 33 bp, Homo sapien
tggctgcagagtgttagagaaaccggagtgaag

SEQ ID NO: 229949 - DNA, 33 bp, Homo sapien
agagaaaatgaagcacactggagctagcagcag

SEQ ID NO: 229950 - DNA, 33 bp, Homo sapien
agagaaaatgaagcaccctggagctagcagcag

SEQ ID NO: 229951 - DNA, 33 bp, Homo sapien
tccttgggaatagagaccatggcttgcatttgg

SEQ ID NO: 229952 - DNA, 33 bp, Homo sapien
tccttgggaatagagagcatggcttgcatttgg

SEQ ID NO: 229953 - DNA, 33 bp, Homo sapien
ccttagcacagattcaacaaaaccttactgaat

SEQ ID NO: 229954 - DNA, 33 bp, Homo sapien
ccttagcacagattcagcaaaaccttactgaat

SEQ ID NO: 229955 - DNA, 33 bp, Homo sapien
gggcttatctcctagaggctgactccactggca

SEQ ID NO: 229956 - DNA, 33 bp, Homo sapien
gggcttatctcctagatgctgactccactggca

SEQ ID NO: 229957 - DNA, 33 bp, Homo sapien
tgacacagcttataaaataggtgccagtggagt

SEQ ID NO: 229958 - DNA, 33 bp, Homo sapien
tgacacagcttataaagtaggtgccagtggagt

SEQ ID NO: 229959 - DNA, 33 bp, Homo sapien
accttccaaggtgctaactcctgagtggaagac

SEQ ID NO: 229960 - DNA, 33 bp, Homo sapien
accttccaaggtgctatctcctgagtggaagac

SEQ ID NO: 229961 - DNA, 33 bp, Homo sapien
atcaccactccactctaaagaaaatgattctat

SEQ ID NO: 229962 - DNA, 33 bp, Homo sapien
atcaccactccactctgaagaaaatgattctat

SEQ ID NO: 229963 - DNA, 33 bp, Homo sapien
gatgtgcattatgtacaaaattgaaaattggtg

SEQ ID NO: 229964 - DNA, 33 bp, Homo sapien
gatgtgcattatgtacgaaattgaaaattggtg

SEQ ID NO: 229965 - DNA, 33 bp, Homo sapien
gttcagcagaaaacaacgctataattgattaac

SEQ ID NO: 229966 - DNA, 33 bp, Homo sapien
gttcagcagaaaacaatgctataattgattaac

SEQ ID NO: 229967 - DNA, 33 bp, Homo sapien
atccatagactcaagaaaatgatttggagttcg

SEQ ID NO: 229968 - DNA, 33 bp, Homo sapien
atccatagactcaagagaatgatttggagttcg

SEQ ID NO: 229969 - DNA, 33 bp, Homo sapien
aggggctaagacttgaaagagcagagaggtgag

SEQ ID NO: 229970 - DNA, 33 bp, Homo sapien
aggggctaagacttgagagagcagagaggtgag

SEQ ID NO: 229971 - DNA, 33 bp, Homo sapien
taatagaccaatgatacgtgaggagggaagtag

SEQ ID NO: 229972 - DNA, 33 bp, Homo sapien
taatagaccaatgatatgtgaggagggaagtag

SEQ ID NO: 229973 - DNA, 33 bp, Homo sapien
ataaagattttacttcacataggtagctttaca

SEQ ID NO: 229974 - DNA, 33 bp, Homo sapien
ataaagattttacttcgcataggtagctttaca

SEQ ID NO: 229975 - DNA, 33 bp, Homo sapien
ctgcaccatacataagaaggacttggaaggaaa

SEQ ID NO: 229976 - DNA, 33 bp, Homo sapien
ctgcaccatacataagcaggacttggaaggaaa

SEQ ID NO: 229977 - DNA, 33 bp, Homo sapien
cattgcaggcaaggaacggtgtttcctgatgtc

SEQ ID NO: 229978 - DNA, 33 bp, Homo sapien
cattgcaggcaaggaatggtgtttcctgatgtc

SEQ ID NO: 229979 - DNA, 33 bp, Homo sapien
atttcctgcaactgaaaacactgtaaccaatat

SEQ ID NO: 229980 - DNA, 33 bp, Homo sapien
atttcctgcaactgaagacactgtaaccaatat

SEQ ID NO: 229981 - DNA, 33 bp, Homo sapien
ggagagacagagggacaattgtttattgatgac

SEQ ID NO: 229982 - DNA, 33 bp, Homo sapien
ggagagacagagggaccattgtttattgatgac

SEQ ID NO: 229983 - DNA, 33 bp, Homo sapien
aagaatgccaaatcaaagttacaaaagttgtga

SEQ ID NO: 229984 - DNA, 33 bp, Homo sapien
aagaatgccaaatcaaggttacaaaagttgtga

SEQ ID NO: 229985 - DNA, 33 bp, Homo sapien
caacatcagttcttcaaagaaaagcattatttc

SEQ ID NO: 229986 - DNA, 33 bp, Homo sapien
caacatcagttcttcagagaaaagcattatttc

SEQ ID NO: 229987 - DNA, 33 bp, Homo sapien
gcatttgcttttccccagctataagaaggtagt

SEQ ID NO: 229988 - DNA, 33 bp, Homo sapien
gcatttgcttttccccggctataagaaggtagt

SEQ ID NO: 229989 - DNA, 33 bp, Homo sapien
caaaccccttgaactgaacctatacaggtgcca

SEQ ID NO: 229990 - DNA, 33 bp, Homo sapien
caaaccccttgaactgtacctatacaggtgcca

SEQ ID NO: 229991 - DNA, 33 bp, Homo sapien
cagaaaccctgtggaacagacattacaatttcc

SEQ ID NO: 229992 - DNA, 33 bp, Homo sapien
cagaaaccctgtggaatagacattacaatttcc

SEQ ID NO: 229993 - DNA, 33 bp, Homo sapien
tcctaagttctgagaagccccttcattcagaag

SEQ ID NO: 229994 - DNA, 33 bp, Homo sapien
tcctaagttctgagaatccccttcattcagaag

SEQ ID NO: 229995 - DNA, 33 bp, Homo sapien
agagttgtggacaaaaatctggtgagatctagg

SEQ ID NO: 229996 - DNA, 33 bp, Homo sapien
agagttgtggacaaaagtctggtgagatctagg

SEQ ID NO: 229997 - DNA, 33 bp, Homo sapien
aacatctcataatacacagttcacctttgccat

SEQ ID NO: 229998 - DNA, 33 bp, Homo sapien
aacatctcataatacagagttcacctttgccat

SEQ ID NO: 229999 - DNA, 33 bp, Homo sapien
taggatgcgtagtaataagatcctatagcactg

SEQ ID NO: 230000 - DNA, 33 bp, Homo sapien
taggatgcgtagtaatgagatcctatagcactg

SEQ ID NO: 230001 - DNA, 33 bp, Homo sapien
actatagtgaggcatagcccagagtttacctac

SEQ ID NO: 230002 - DNA, 33 bp, Homo sapien
actatagtgaggcatatcccagagtttacctac

SEQ ID NO: 230003 - DNA, 33 bp, Homo sapien
ggggaattcagcagaaagcaactggagaatcac

SEQ ID NO: 230004 - DNA, 33 bp, Homo sapien
ggggaattcagcagaaggcaactggagaatcac

SEQ ID NO: 230005 - DNA, 33 bp, Homo sapien
aatataagtagattcactcactggtttgctctg

SEQ ID NO: 230006 - DNA, 33 bp, Homo sapien
aatataagtagattcattcactggtttgctctg

SEQ ID NO: 230007 - DNA, 33 bp, Homo sapien
gagaaaacaaagctaaaactgtaatttaagtga

SEQ ID NO: 230008 - DNA, 33 bp, Homo sapien
gagaaaacaaagctaagactgtaatttaagtga

SEQ ID NO: 230009 - DNA, 33 bp, Homo sapien
tcattataacgtgttcacaaaagagtaactgaa

SEQ ID NO: 230010 - DNA, 33 bp, Homo sapien
tcattataacgtgttcgcaaaagagtaactgaa

SEQ ID NO: 230011 - DNA, 33 bp, Homo sapien
cagttagaaacatctaaactgggtgttaagtag

SEQ ID NO: 230012 - DNA, 33 bp, Homo sapien
cagttagaaacatctacactgggtgttaagtag

SEQ ID NO: 230013 - DNA, 33 bp, Homo sapien
taactggatgactctgcagtagctctcttccaa

SEQ ID NO: 230014 - DNA, 33 bp, Homo sapien
taactggatgactctgtagtagctctcttccaa

SEQ ID NO: 230015 - DNA, 33 bp, Homo sapien
caccagacaggagaaacacaatgagaatggagg

SEQ ID NO: 230016 - DNA, 33 bp, Homo sapien
caccagacaggagaaagacaatgagaatggagg

SEQ ID NO: 230017 - DNA, 33 bp, Homo sapien
catcaaatggcccaacaaactgcaagtaatgat

SEQ ID NO: 230018 - DNA, 33 bp, Homo sapien
catcaaatggcccaacgaactgcaagtaatgat

SEQ ID NO: 230019 - DNA, 33 bp, Homo sapien
gcatctggaaaacctaacaatcaccaatgcata

SEQ ID NO: 230020 - DNA, 33 bp, Homo sapien
gcatctggaaaacctagcaatcaccaatgcata

SEQ ID NO: 230021 - DNA, 33 bp, Homo sapien
aggacccaaaatttccactatacattacattgc

SEQ ID NO: 230022 - DNA, 33 bp, Homo sapien
aggacccaaaatttccgctatacattacattgc

SEQ ID NO: 230023 - DNA, 33 bp, Homo sapien
ccagtagttgagctgacaccataggacccaaaa

SEQ ID NO: 230024 - DNA, 33 bp, Homo sapien
ccagtagttgagctgataccataggacccaaaa

SEQ ID NO: 230025 - DNA, 33 bp, Homo sapien
cagttagaggaatcaactggagaggtataatca

SEQ ID NO: 230026 - DNA, 33 bp, Homo sapien
cagttagaggaatcaattggagaggtataatca

SEQ ID NO: 230027 - DNA, 33 bp, Homo sapien
aagtactcaagatctcactaggaaatagctcat

SEQ ID NO: 230028 - DNA, 33 bp, Homo sapien
aagtactcaagatctcgctaggaaatagctcat

SEQ ID NO: 230029 - DNA, 33 bp, Homo sapien
aaaaattttcgtacagcaatgcaccttatctgt

SEQ ID NO: 230030 - DNA, 33 bp, Homo sapien
aaaaattttcgtacagtaatgcaccttatctgt

SEQ ID NO: 230031 - DNA, 33 bp, Homo sapien
catctaatccttggtaacacatatgccatccat

SEQ ID NO: 230032 - DNA, 33 bp, Homo sapien
catctaatccttggtatcacatatgccatccat

SEQ ID NO: 230033 - DNA, 33 bp, Homo sapien
cccaagccaacagtccaaatgtcccagggctgt

SEQ ID NO: 230034 - DNA, 33 bp, Homo sapien
cccaagccaacagtccgaatgtcccagggctgt

SEQ ID NO: 230035 - DNA, 33 bp, Homo sapien
attagacttcaaaagaaccttagtctccacaat

SEQ ID NO: 230036 - DNA, 33 bp, Homo sapien
attagacttcaaaagatccttagtctccacaat

SEQ ID NO: 230037 - DNA, 33 bp, Homo sapien
attgtagctttcatcagctctggaaataaggag

SEQ ID NO: 230038 - DNA, 33 bp, Homo sapien
attgtagctttcatcatctctggaaataaggag

SEQ ID NO: 230039 - DNA, 33 bp, Homo sapien
gaaatcgggctttaaaagatataatgagtcaca

SEQ ID NO: 230040 - DNA, 33 bp, Homo sapien
gaaatcgggctttaaatgatataatgagtcaca

SEQ ID NO: 230041 - DNA, 33 bp, Homo sapien
ttaatgtagaagatgaaggatggttgtttcagc

SEQ ID NO: 230042 - DNA, 33 bp, Homo sapien
ttaatgtagaagatgagggatggttgtttcagc

SEQ ID NO: 230043 - DNA, 33 bp, Homo sapien
taggaaacagcccttccatttttaaagactgca

SEQ ID NO: 230044 - DNA, 33 bp, Homo sapien
taggaaacagcccttctatttttaaagactgca

SEQ ID NO: 230045 - DNA, 33 bp, Homo sapien
tggtggaaatgtctaacatctgcactgtccaat

SEQ ID NO: 230046 - DNA, 33 bp, Homo sapien
tggtggaaatgtctaatatctgcactgtccaat

SEQ ID NO: 230047 - DNA, 33 bp, Homo sapien
tcagatgtgaaaggtcaaaaataaagagggaaa

SEQ ID NO: 230048 - DNA, 33 bp, Homo sapien
tcagatgtgaaaggtcgaaaataaagagggaaa

SEQ ID NO: 230049 - DNA, 33 bp, Homo sapien
tgacacctgtccatgcacctctcatcatgagca

SEQ ID NO: 230050 - DNA, 33 bp, Homo sapien
tgacacctgtccatgctcctctcatcatgagca

SEQ ID NO: 230051 - DNA, 33 bp, Homo sapien
ttcagtttagaaaggcaatgacagcactggatt

SEQ ID NO: 230052 - DNA, 33 bp, Homo sapien
ttcagtttagaaaggcgatgacagcactggatt

SEQ ID NO: 230053 - DNA, 33 bp, Homo sapien
caatcacagaaagtagaacatcactgtgaaggc

SEQ ID NO: 230054 - DNA, 33 bp, Homo sapien
caatcacagaaagtaggacatcactgtgaaggc

SEQ ID NO: 230055 - DNA, 33 bp, Homo sapien
atagagaagcttgtacaaagagatccatttaat

SEQ ID NO: 230056 - DNA, 33 bp, Homo sapien
atagagaagcttgtacgaagagatccatttaat

SEQ ID NO: 230057 - DNA, 33 bp, Homo sapien
ggcccacgtgggaaggacaatgacaacttgttt

SEQ ID NO: 230058 - DNA, 33 bp, Homo sapien
ggcccacgtgggaagggcaatgacaacttgttt

SEQ ID NO: 230059 - DNA, 33 bp, Homo sapien
cacaacataatggaccaaaagaagacaatggca

SEQ ID NO: 230060 - DNA, 33 bp, Homo sapien
cacaacataatggacccaaagaagacaatggca

SEQ ID NO: 230061 - DNA, 33 bp, Homo sapien
ttgggggcatcagaaacgagactgaatagagat

SEQ ID NO: 230062 - DNA, 33 bp, Homo sapien
ttgggggcatcagaaatgagactgaatagagat

SEQ ID NO: 230063 - DNA, 33 bp, Homo sapien
gtaccttagagtatagccctgactcaaccccta

SEQ ID NO: 230064 - DNA, 33 bp, Homo sapien
gtaccttagagtataggcctgactcaaccccta

SEQ ID NO: 230065 - DNA, 33 bp, Homo sapien
gctctagccctagaaacctggttgttcacagca

SEQ ID NO: 230066 - DNA, 33 bp, Homo sapien
gctctagccctagaaatctggttgttcacagca

SEQ ID NO: 230067 - DNA, 33 bp, Homo sapien
aagtgcatggattctacgtgtttccagtccttg

SEQ ID NO: 230068 - DNA, 33 bp, Homo sapien
aagtgcatggattctatgtgtttccagtccttg

SEQ ID NO: 230069 - DNA, 33 bp, Homo sapien
ccttttccaaaccagaaccaaaagttgcagata

SEQ ID NO: 230070 - DNA, 33 bp, Homo sapien
ccttttccaaaccagagccaaaagttgcagata

SEQ ID NO: 230071 - DNA, 33 bp, Homo sapien
ctctatttaaagttacccagtgttcagtgttgc

SEQ ID NO: 230072 - DNA, 33 bp, Homo sapien
ctctatttaaagttactcagtgttcagtgttgc

SEQ ID NO: 230073 - DNA, 33 bp, Homo sapien
cacttgctgtgagaaacgaacagcagtgcatat

SEQ ID NO: 230074 - DNA, 33 bp, Homo sapien
cacttgctgtgagaaatgaacagcagtgcatat

SEQ ID NO: 230075 - DNA, 33 bp, Homo sapien
acaaaactaatgttaaagcttgggctgtatact

SEQ ID NO: 230076 - DNA, 33 bp, Homo sapien
acaaaactaatgttaacgcttgggctgtatact

SEQ ID NO: 230077 - DNA, 33 bp, Homo sapien
cagagaacatgaacaacgctaaaggactgaatt

SEQ ID NO: 230078 - DNA, 33 bp, Homo sapien
cagagaacatgaacaatgctaaaggactgaatt

SEQ ID NO: 230079 - DNA, 33 bp, Homo sapien
cttccactttccaacacgtaaagactcactgtt

SEQ ID NO: 230080 - DNA, 33 bp, Homo sapien
cttccactttccaacatgtaaagactcactgtt

SEQ ID NO: 230081 - DNA, 33 bp, Homo sapien
aagacaccaaaataccaaaagcttatggcagca

SEQ ID NO: 230082 - DNA, 33 bp, Homo sapien
aagacaccaaaataccgaaagcttatggcagca

SEQ ID NO: 230083 - DNA, 33 bp, Homo sapien
aaaggcagcagttgaaggtaggactgttaagta

SEQ ID NO: 230084 - DNA, 33 bp, Homo sapien
aaaggcagcagttgaatgtaggactgttaagta

SEQ ID NO: 230085 - DNA, 33 bp, Homo sapien
ctatttctaacattgagggtgacaaaatatttc

SEQ ID NO: 230086 - DNA, 33 bp, Homo sapien
ctatttctaacattgatggtgacaaaatatttc

SEQ ID NO: 230087 - DNA, 33 bp, Homo sapien
cgtcattcccccatcaatctataatccatccta

SEQ ID NO: 230088 - DNA, 33 bp, Homo sapien
cgtcattcccccatcagtctataatccatccta

SEQ ID NO: 230089 - DNA, 33 bp, Homo sapien
gctgttcttgcagcaacaaggaacgtgtatatt

SEQ ID NO: 230090 - DNA, 33 bp, Homo sapien
gctgttcttgcagcaagaaggaacgtgtatatt

SEQ ID NO: 230091 - DNA, 33 bp, Homo sapien
tggaactagggatagaaggaaagtacgaaatgc

SEQ ID NO: 230092 - DNA, 33 bp, Homo sapien
tggaactagggatagagggaaagtacgaaatgc

SEQ ID NO: 230093 - DNA, 33 bp, Homo sapien
ggagacaaagcctaaccatatcattccacttat

SEQ ID NO: 230094 - DNA, 33 bp, Homo sapien
ggagacaaagcctaactatatcattccacttat

SEQ ID NO: 230095 - DNA, 33 bp, Homo sapien
gtactgatatgtggtacaaataatgcaggagaa

SEQ ID NO: 230096 - DNA, 33 bp, Homo sapien
gtactgatatgtggtagaaataatgcaggagaa

SEQ ID NO: 230097 - DNA, 33 bp, Homo sapien
cttggactgtagagagccaagtgcaaatagcaa

SEQ ID NO: 230098 - DNA, 33 bp, Homo sapien
cttggactgtagagaggcaagtgcaaatagcaa

SEQ ID NO: 230099 - DNA, 33 bp, Homo sapien
atttagctcgttttctcaaatgctgacacctgc

SEQ ID NO: 230100 - DNA, 33 bp, Homo sapien
atttagctcgttttcttaaatgctgacacctgc

SEQ ID NO: 230101 - DNA, 33 bp, Homo sapien
gtaggaaaaaacaagccctctcaaggtggcatg

SEQ ID NO: 230102 - DNA, 33 bp, Homo sapien
gtaggaaaaaacaagctctctcaaggtggcatg

SEQ ID NO: 230103 - DNA, 33 bp, Homo sapien
ctggtgtccttacataaagggtaatgaggatgc

SEQ ID NO: 230104 - DNA, 33 bp, Homo sapien
ctggtgtccttacatagagggtaatgaggatgc

SEQ ID NO: 230105 - DNA, 33 bp, Homo sapien
ggtttcaggtttctcacatataaagtgaagaca

SEQ ID NO: 230106 - DNA, 33 bp, Homo sapien
ggtttcaggtttctcatatataaagtgaagaca

SEQ ID NO: 230107 - DNA, 33 bp, Homo sapien
gaggtgtcttgggcacagagggccaggatgacc

SEQ ID NO: 230108 - DNA, 33 bp, Homo sapien
gaggtgtcttgggcactgagggccaggatgacc

SEQ ID NO: 230109 - DNA, 33 bp, Homo sapien
ggtgaattaccaaagcaagatattaaaagaaat

SEQ ID NO: 230110 - DNA, 33 bp, Homo sapien
ggtgaattaccaaagccagatattaaaagaaat

SEQ ID NO: 230111 - DNA, 33 bp, Homo sapien
tgtaacgatgcgttgacggatatgaatgaaact

SEQ ID NO: 230112 - DNA, 33 bp, Homo sapien
tgtaacgatgcgttgatggatatgaatgaaact

SEQ ID NO: 230113 - DNA, 33 bp, Homo sapien
ttgaaggctaacatcaccaataataagaagtat

SEQ ID NO: 230114 - DNA, 33 bp, Homo sapien
ttgaaggctaacatcatcaataataagaagtat

SEQ ID NO: 230115 - DNA, 33 bp, Homo sapien
accatgagccatcctacgaacaagaaattaatt

SEQ ID NO: 230116 - DNA, 33 bp, Homo sapien
accatgagccatcctatgaacaagaaattaatt

SEQ ID NO: 230117 - DNA, 33 bp, Homo sapien
tttgtcccagctgaatgattacattggaacagt

SEQ ID NO: 230118 - DNA, 33 bp, Homo sapien
tttgtcccagctgaattattacattggaacagt

SEQ ID NO: 230119 - DNA, 33 bp, Homo sapien
gaatcactcaaaaccaatcacttgttaaaacca

SEQ ID NO: 230120 - DNA, 33 bp, Homo sapien
gaatcactcaaaaccagtcacttgttaaaacca

SEQ ID NO: 230121 - DNA, 33 bp, Homo sapien
ctgttccttctgtgtgaaagactgtttccatac

SEQ ID NO: 230122 - DNA, 33 bp, Homo sapien
ctgttccttctgtgtggaagactgtttccatac

SEQ ID NO: 230123 - DNA, 33 bp, Homo sapien
ggtttcctgtactgtcaatgtcaaactgatacc

SEQ ID NO: 230124 - DNA, 33 bp, Homo sapien
ggtttcctgtactgtcgatgtcaaactgatacc

SEQ ID NO: 230125 - DNA, 33 bp, Homo sapien
cctggaagcttataaaagttgtctctggccatt

SEQ ID NO: 230126 - DNA, 33 bp, Homo sapien
cctggaagcttataaatgttgtctctggccatt

SEQ ID NO: 230127 - DNA, 33 bp, Homo sapien
atgctcagctgtagaaacatcacgctgaaagca

SEQ ID NO: 230128 - DNA, 33 bp, Homo sapien
atgctcagctgtagaagcatcacgctgaaagca

SEQ ID NO: 230129 - DNA, 33 bp, Homo sapien
cttctagatggatcaaaaatcttaacatcattt

SEQ ID NO: 230130 - DNA, 33 bp, Homo sapien
cttctagatggatcaacaatcttaacatcattt

SEQ ID NO: 230131 - DNA, 33 bp, Homo sapien
ctgagccagattcagcaaaaaaggtagggtgca

SEQ ID NO: 230132 - DNA, 33 bp, Homo sapien
ctgagccagattcagcgaaaaaggtagggtgca

SEQ ID NO: 230133 - DNA, 33 bp, Homo sapien
tgcactgcgatctagaacctggactccttaggt

SEQ ID NO: 230134 - DNA, 33 bp, Homo sapien
tgcactgcgatctagaccctggactccttaggt

SEQ ID NO: 230135 - DNA, 33 bp, Homo sapien
aaaaattgacattaaaaccctttataggcatgg

SEQ ID NO: 230136 - DNA, 33 bp, Homo sapien
aaaaattgacattaaagccctttataggcatgg

SEQ ID NO: 230137 - DNA, 33 bp, Homo sapien
aagtctaagcctatcaccactgctcatcttaga

SEQ ID NO: 230138 - DNA, 33 bp, Homo sapien
aagtctaagcctatcatcactgctcatcttaga

SEQ ID NO: 230139 - DNA, 33 bp, Homo sapien
tatatccttttgtgacaataccactttttattt

SEQ ID NO: 230140 - DNA, 33 bp, Homo sapien
tatatccttttgtgactataccactttttattt

SEQ ID NO: 230141 - DNA, 33 bp, Homo sapien
gtcctttggcattcacagtcttgcgtgagtaga

SEQ ID NO: 230142 - DNA, 33 bp, Homo sapien
gtcctttggcattcaccgtcttgcgtgagtaga

SEQ ID NO: 230143 - DNA, 33 bp, Homo sapien
gtgtcctgaaattatgaacattgtatccccaaa

SEQ ID NO: 230144 - DNA, 33 bp, Homo sapien
gtgtcctgaaattatgtacattgtatccccaaa

SEQ ID NO: 230145 - DNA, 33 bp, Homo sapien
aatgaactattagtgcactcaataacatggatg

SEQ ID NO: 230146 - DNA, 33 bp, Homo sapien
aatgaactattagtgccctcaataacatggatg

SEQ ID NO: 230147 - DNA, 33 bp, Homo sapien
gtgttcagcttgaggcagaaacattttcaagat

SEQ ID NO: 230148 - DNA, 33 bp, Homo sapien
gtgttcagcttgaggcggaaacattttcaagat

SEQ ID NO: 230149 - DNA, 33 bp, Homo sapien
ccacttaaggagcgaaaactgagatatgtgtgg

SEQ ID NO: 230150 - DNA, 33 bp, Homo sapien
ccacttaaggagcgaacactgagatatgtgtgg

SEQ ID NO: 230151 - DNA, 33 bp, Homo sapien
aaaatagatttctgcacgtgaaaatatactcat

SEQ ID NO: 230152 - DNA, 33 bp, Homo sapien
aaaatagatttctgcatgtgaaaatatactcat

SEQ ID NO: 230153 - DNA, 33 bp, Homo sapien
tttctttacagcagtaggaaaatggattaataa

SEQ ID NO: 230154 - DNA, 33 bp, Homo sapien
tttctttacagcagtatgaaaatggattaataa

SEQ ID NO: 230155 - DNA, 33 bp, Homo sapien
aagagtaaatgtgcaacgatagccaaccaagca

SEQ ID NO: 230156 - DNA, 33 bp, Homo sapien
aagagtaaatgtgcaatgatagccaaccaagca

SEQ ID NO: 230157 - DNA, 33 bp, Homo sapien
ggctcacaagaactaacgatggccctagagttc

SEQ ID NO: 230158 - DNA, 33 bp, Homo sapien
ggctcacaagaactaatgatggccctagagttc

SEQ ID NO: 230159 - DNA, 33 bp, Homo sapien
ctacttcactaaccagacccaatattcactgtg

SEQ ID NO: 230160 - DNA, 33 bp, Homo sapien
ctacttcactaaccagtcccaatattcactgtg

SEQ ID NO: 230161 - DNA, 33 bp, Homo sapien
aaaaaagaagagtccaatgaaacaggcagagaa

SEQ ID NO: 230162 - DNA, 33 bp, Homo sapien
aaaaaagaagagtccagtgaaacaggcagagaa

SEQ ID NO: 230163 - DNA, 33 bp, Homo sapien
tagagttcagtattataagcagtttcagacatc

SEQ ID NO: 230164 - DNA, 33 bp, Homo sapien
tagagttcagtattatcagcagtttcagacatc

SEQ ID NO: 230165 - DNA, 33 bp, Homo sapien
ttagagtcctttaaagaagtgaatgtgtctgac

SEQ ID NO: 230166 - DNA, 33 bp, Homo sapien
ttagagtcctttaaagtagtgaatgtgtctgac

SEQ ID NO: 230167 - DNA, 33 bp, Homo sapien
aatgatgagtcctttacattcatttttcagatg

SEQ ID NO: 230168 - DNA, 33 bp, Homo sapien
aatgatgagtcctttatattcatttttcagatg

SEQ ID NO: 230169 - DNA, 33 bp, Homo sapien
ttcatttctgtggttcacaagtatgacatctga

SEQ ID NO: 230170 - DNA, 33 bp, Homo sapien
ttcatttctgtggttctcaagtatgacatctga

SEQ ID NO: 230171 - DNA, 33 bp, Homo sapien
tcacaattctggctgccattaagaactttcatg

SEQ ID NO: 230172 - DNA, 33 bp, Homo sapien
tcacaattctggctgctattaagaactttcatg

SEQ ID NO: 230173 - DNA, 33 bp, Homo sapien
acctgcagcctgtgtacatccgactagtgacca

SEQ ID NO: 230174 - DNA, 33 bp, Homo sapien
acctgcagcctgtgtatatccgactagtgacca

SEQ ID NO: 230175 - DNA, 33 bp, Homo sapien
tacaggatgcccaaaagtccctccaacactgcc

SEQ ID NO: 230176 - DNA, 33 bp, Homo sapien
tacaggatgcccaaaattccctccaacactgcc

SEQ ID NO: 230177 - DNA, 33 bp, Homo sapien
taagaatctaataacccgatgcctttggaaaga

SEQ ID NO: 230178 - DNA, 33 bp, Homo sapien
taagaatctaataacctgatgcctttggaaaga

SEQ ID NO: 230179 - DNA, 33 bp, Homo sapien
agtttccataaaattcaattagtccaatggtca

SEQ ID NO: 230180 - DNA, 33 bp, Homo sapien
agtttccataaaattctattagtccaatggtca

SEQ ID NO: 230181 - DNA, 33 bp, Homo sapien
cttaccttgtgatttaaaaagaagtacgaagtg

SEQ ID NO: 230182 - DNA, 33 bp, Homo sapien
cttaccttgtgatttagaaagaagtacgaagtg

SEQ ID NO: 230183 - DNA, 33 bp, Homo sapien
agtatttcaccagtcactaacatagtaattgcc

SEQ ID NO: 230184 - DNA, 33 bp, Homo sapien
agtatttcaccagtcattaacatagtaattgcc

SEQ ID NO: 230185 - DNA, 33 bp, Homo sapien
gcaaactaatgttctacaatttaggccttcagg

SEQ ID NO: 230186 - DNA, 33 bp, Homo sapien
gcaaactaatgttctataatttaggccttcagg

SEQ ID NO: 230187 - DNA, 33 bp, Homo sapien
caaagccctcaggaaaactgagtagcaaatagg

SEQ ID NO: 230188 - DNA, 33 bp, Homo sapien
caaagccctcaggaaacctgagtagcaaatagg

SEQ ID NO: 230189 - DNA, 33 bp, Homo sapien
ggtgtcataagccccaatgaatatgttgataat

SEQ ID NO: 230190 - DNA, 33 bp, Homo sapien
ggtgtcataagccccagtgaatatgttgataat

SEQ ID NO: 230191 - DNA, 33 bp, Homo sapien
actacaaccacagagaactgggaaaatgacata

SEQ ID NO: 230192 - DNA, 33 bp, Homo sapien
actacaaccacagagagctgggaaaatgacata

SEQ ID NO: 230193 - DNA, 33 bp, Homo sapien
aaatgcttggaagagaaacaatgctctgtaaat

SEQ ID NO: 230194 - DNA, 33 bp, Homo sapien
aaatgcttggaagagagacaatgctctgtaaat

SEQ ID NO: 230195 - DNA, 33 bp, Homo sapien
catcatgtctctataactcatttcagaacaaaa

SEQ ID NO: 230196 - DNA, 33 bp, Homo sapien
catcatgtctctataattcatttcagaacaaaa

SEQ ID NO: 230197 - DNA, 33 bp, Homo sapien
tgttcgttttcttgcaacctatcaggtaggata

SEQ ID NO: 230198 - DNA, 33 bp, Homo sapien
tgttcgttttcttgcatcctatcaggtaggata

SEQ ID NO: 230199 - DNA, 33 bp, Homo sapien
ctttttctaagtgagacctggagtgaaagaact

SEQ ID NO: 230200 - DNA, 33 bp, Homo sapien
ctttttctaagtgagatctggagtgaaagaact

SEQ ID NO: 230201 - DNA, 33 bp, Homo sapien
gtaactcatttgttaaaattatcaatatctaat

SEQ ID NO: 230202 - DNA, 33 bp, Homo sapien
gtaactcatttgttaagattatcaatatctaat

SEQ ID NO: 230203 - DNA, 33 bp, Homo sapien
aagtgagacagtcacaagatataggaattataa

SEQ ID NO: 230204 - DNA, 33 bp, Homo sapien
aagtgagacagtcacaggatataggaattataa

SEQ ID NO: 230205 - DNA, 33 bp, Homo sapien
taatccggaaacctgtcaaagacctcagagatc

SEQ ID NO: 230206 - DNA, 33 bp, Homo sapien
taatccggaaacctgttaaagacctcagagatc

SEQ ID NO: 230207 - DNA, 33 bp, Homo sapien
agatgatgcttcataaaatgtggaccatttacc

SEQ ID NO: 230208 - DNA, 33 bp, Homo sapien
agatgatgcttcataagatgtggaccatttacc

SEQ ID NO: 230209 - DNA, 33 bp, Homo sapien
ggattcctaatgcaaccataaatatgaccagca

SEQ ID NO: 230210 - DNA, 33 bp, Homo sapien
ggattcctaatgcaacgataaatatgaccagca

SEQ ID NO: 230211 - DNA, 33 bp, Homo sapien
tatggtataagcaagccagatggtcaaaaataa

SEQ ID NO: 230212 - DNA, 33 bp, Homo sapien
tatggtataagcaagcgagatggtcaaaaataa

SEQ ID NO: 230213 - DNA, 33 bp, Homo sapien
atatttactaaatcagccctggaatctcaccta

SEQ ID NO: 230214 - DNA, 33 bp, Homo sapien
atatttactaaatcagtcctggaatctcaccta

SEQ ID NO: 230215 - DNA, 33 bp, Homo sapien
taacaacattatgttaagtgaaaccgtgtaagg

SEQ ID NO: 230216 - DNA, 33 bp, Homo sapien
taacaacattatgttacgtgaaaccgtgtaagg

SEQ ID NO: 230217 - DNA, 33 bp, Homo sapien
aagcccagacaaaaaactctggttcaaatccta

SEQ ID NO: 230218 - DNA, 33 bp, Homo sapien
aagcccagacaaaaaattctggttcaaatccta

SEQ ID NO: 230219 - DNA, 33 bp, Homo sapien
aataaagtgttgttgacgtttatgaaaccctta

SEQ ID NO: 230220 - DNA, 33 bp, Homo sapien
aataaagtgttgttgatgtttatgaaaccctta

SEQ ID NO: 230221 - DNA, 33 bp, Homo sapien
atgcttgtttaggacgaagggcccaagaagccc

SEQ ID NO: 230222 - DNA, 33 bp, Homo sapien
atgcttgtttaggacggagggcccaagaagccc

SEQ ID NO: 230223 - DNA, 33 bp, Homo sapien
gaagatcctaccagggacacaaaattacgggtc

SEQ ID NO: 230224 - DNA, 33 bp, Homo sapien
gaagatcctaccagggtcacaaaattacgggtc

SEQ ID NO: 230225 - DNA, 33 bp, Homo sapien
attcatgcagacttggacatcctcttccccagg

SEQ ID NO: 230226 - DNA, 33 bp, Homo sapien
attcatgcagacttgggcatcctcttccccagg

SEQ ID NO: 230227 - DNA, 33 bp, Homo sapien
tcagaacatatgccaaatattgccaaagtactt

SEQ ID NO: 230228 - DNA, 33 bp, Homo sapien
tcagaacatatgccaactattgccaaagtactt

SEQ ID NO: 230229 - DNA, 33 bp, Homo sapien
agcagagtccctttaaggcaaaacaatggttag

SEQ ID NO: 230230 - DNA, 33 bp, Homo sapien
agcagagtccctttaatgcaaaacaatggttag

SEQ ID NO: 230231 - DNA, 33 bp, Homo sapien
aaaccatcagatttcaagagaattcatttactg

SEQ ID NO: 230232 - DNA, 33 bp, Homo sapien
aaaccatcagatttcatgagaattcatttactg

SEQ ID NO: 230233 - DNA, 33 bp, Homo sapien
caggcagaggaaaatacgctcctccgaggcaag

SEQ ID NO: 230234 - DNA, 33 bp, Homo sapien
caggcagaggaaaatatgctcctccgaggcaag

SEQ ID NO: 230235 - DNA, 33 bp, Homo sapien
actatctcctttcctcaaattattggtgttggg

SEQ ID NO: 230236 - DNA, 33 bp, Homo sapien
actatctcctttcctcgaattattggtgttggg

SEQ ID NO: 230237 - DNA, 33 bp, Homo sapien
gtggtcacagtagaaaccatcttagccattaag

SEQ ID NO: 230238 - DNA, 33 bp, Homo sapien
gtggtcacagtagaaatcatcttagccattaag

SEQ ID NO: 230239 - DNA, 33 bp, Homo sapien
agtctttagttgaatcacttatctgtcactctt

SEQ ID NO: 230240 - DNA, 33 bp, Homo sapien
agtctttagttgaatctcttatctgtcactctt

SEQ ID NO: 230241 - DNA, 33 bp, Homo sapien
aattatttatttcatcacctttatcaaatagta

SEQ ID NO: 230242 - DNA, 33 bp, Homo sapien
aattatttatttcatcccctttatcaaatagta

SEQ ID NO: 230243 - DNA, 33 bp, Homo sapien
agctagagatgatcaagatctatttcacttgca

SEQ ID NO: 230244 - DNA, 33 bp, Homo sapien
agctagagatgatcaatatctatttcacttgca

SEQ ID NO: 230245 - DNA, 33 bp, Homo sapien
tacttccgggttataccagagttcatctttaag

SEQ ID NO: 230246 - DNA, 33 bp, Homo sapien
tacttccgggttatactagagttcatctttaag

SEQ ID NO: 230247 - DNA, 33 bp, Homo sapien
cattcattgctcaatcaacccctcagaatcctg

SEQ ID NO: 230248 - DNA, 33 bp, Homo sapien
cattcattgctcaatccacccctcagaatcctg

SEQ ID NO: 230249 - DNA, 33 bp, Homo sapien
aatgccggttagatgaaaggataacctacttaa

SEQ ID NO: 230250 - DNA, 33 bp, Homo sapien
aatgccggttagatgagaggataacctacttaa

SEQ ID NO: 230251 - DNA, 33 bp, Homo sapien
gaaggatgtggcaagcaataaacacaagaccca

SEQ ID NO: 230252 - DNA, 33 bp, Homo sapien
gaaggatgtggcaagctataaacacaagaccca

SEQ ID NO: 230253 - DNA, 33 bp, Homo sapien
gtgttttgtttattaacgcatctgtggccctag

SEQ ID NO: 230254 - DNA, 33 bp, Homo sapien
gtgttttgtttattaatgcatctgtggccctag

SEQ ID NO: 230255 - DNA, 33 bp, Homo sapien
cagccctgggcaaccaactttctgttacctgtc

SEQ ID NO: 230256 - DNA, 33 bp, Homo sapien
cagccctgggcaaccatctttctgttacctgtc

SEQ ID NO: 230257 - DNA, 33 bp, Homo sapien
gcatccaggaaaagcactgctgggaaggtgata

SEQ ID NO: 230258 - DNA, 33 bp, Homo sapien
gcatccaggaaaagcattgctgggaaggtgata

SEQ ID NO: 230259 - DNA, 33 bp, Homo sapien
ttttagcaaagggagacaaatagcaaacaaaat

SEQ ID NO: 230260 - DNA, 33 bp, Homo sapien
ttttagcaaagggagataaatagcaaacaaaat

SEQ ID NO: 230261 - DNA, 33 bp, Homo sapien
tgtggccctcgcctgaacactctatccactttc

SEQ ID NO: 230262 - DNA, 33 bp, Homo sapien
tgtggccctcgcctgagcactctatccactttc

SEQ ID NO: 230263 - DNA, 33 bp, Homo sapien
ttgggctactatgcaacctacaggatgagagat

SEQ ID NO: 230264 - DNA, 33 bp, Homo sapien
ttgggctactatgcaagctacaggatgagagat

SEQ ID NO: 230265 - DNA, 33 bp, Homo sapien
tatactatattattcactagcagaaagtgctcc

SEQ ID NO: 230266 - DNA, 33 bp, Homo sapien
tatactatattattcattagcagaaagtgctcc

SEQ ID NO: 230267 - DNA, 33 bp, Homo sapien
cttaccaccagacaccagcgagttagctccctg

SEQ ID NO: 230268 - DNA, 33 bp, Homo sapien
cttaccaccagacaccggcgagttagctccctg

SEQ ID NO: 230269 - DNA, 33 bp, Homo sapien
tattcttgactctaagaaaatgaggtagctatt

SEQ ID NO: 230270 - DNA, 33 bp, Homo sapien
tattcttgactctaagtaaatgaggtagctatt

SEQ ID NO: 230271 - DNA, 33 bp, Homo sapien
cctatatgcaagtccagctcttttctcattgtt

SEQ ID NO: 230272 - DNA, 33 bp, Homo sapien
cctatatgcaagtccatctcttttctcattgtt

SEQ ID NO: 230273 - DNA, 33 bp, Homo sapien
gcattaatgacttcaaaaatgacttcaaataaa

SEQ ID NO: 230274 - DNA, 33 bp, Homo sapien
gcattaatgacttcaagaatgacttcaaataaa

SEQ ID NO: 230275 - DNA, 33 bp, Homo sapien
atcaggagtcatttggaatcatagagtatttgc

SEQ ID NO: 230276 - DNA, 33 bp, Homo sapien
atcaggagtcatttgggatcatagagtatttgc

SEQ ID NO: 230277 - DNA, 33 bp, Homo sapien
attagattagccaagacagttatttttgaaaca

SEQ ID NO: 230278 - DNA, 33 bp, Homo sapien
attagattagccaagatagttatttttgaaaca

SEQ ID NO: 230279 - DNA, 33 bp, Homo sapien
agaagacgagatagaaaaatgtctttgtgacct

SEQ ID NO: 230280 - DNA, 33 bp, Homo sapien
agaagacgagatagaagaatgtctttgtgacct

SEQ ID NO: 230281 - DNA, 33 bp, Homo sapien
ttctttttgttcttaaaccagtcattactgaag

SEQ ID NO: 230282 - DNA, 33 bp, Homo sapien
ttctttttgttcttaagccagtcattactgaag

SEQ ID NO: 230283 - DNA, 33 bp, Homo sapien
agtccacgaatagctaagtcagccctgaaaaag

SEQ ID NO: 230284 - DNA, 33 bp, Homo sapien
agtccacgaatagctaggtcagccctgaaaaag

SEQ ID NO: 230285 - DNA, 33 bp, Homo sapien
taatgagttcacattacaaagatgttaattctc

SEQ ID NO: 230286 - DNA, 33 bp, Homo sapien
taatgagttcacattataaagatgttaattctc

SEQ ID NO: 230287 - DNA, 33 bp, Homo sapien
cccaggacataattacagattcctagaactgac

SEQ ID NO: 230288 - DNA, 33 bp, Homo sapien
cccaggacataattactgattcctagaactgac

SEQ ID NO: 230289 - DNA, 33 bp, Homo sapien
catgtaaatctgaattaaaatgcccaggttact

SEQ ID NO: 230290 - DNA, 33 bp, Homo sapien
catgtaaatctgaatttaaatgcccaggttact

SEQ ID NO: 230291 - DNA, 33 bp, Homo sapien
caacaagtataatagaacttcagagcaggggag

SEQ ID NO: 230292 - DNA, 33 bp, Homo sapien
caacaagtataatagagcttcagagcaggggag

SEQ ID NO: 230293 - DNA, 33 bp, Homo sapien
ctaattagaactgctgaacaatggaatggaagg

SEQ ID NO: 230294 - DNA, 33 bp, Homo sapien
ctaattagaactgctgcacaatggaatggaagg

SEQ ID NO: 230295 - DNA, 33 bp, Homo sapien
acagccagcagagtaactgacacttggcaggaa

SEQ ID NO: 230296 - DNA, 33 bp, Homo sapien
acagccagcagagtaattgacacttggcaggaa

SEQ ID NO: 230297 - DNA, 33 bp, Homo sapien
agcttaggccacagaaagcactatgtcttcctc

SEQ ID NO: 230298 - DNA, 33 bp, Homo sapien
agcttaggccacagaaggcactatgtcttcctc

SEQ ID NO: 230299 - DNA, 33 bp, Homo sapien
tctttttgggctgggtaaattgtatattttctt

SEQ ID NO: 230300 - DNA, 33 bp, Homo sapien
tctttttgggctgggtgaattgtatattttctt

SEQ ID NO: 230301 - DNA, 33 bp, Homo sapien
tttttgaaaaataagaataatctgacctggtgc

SEQ ID NO: 230302 - DNA, 33 bp, Homo sapien
tttttgaaaaataagagtaatctgacctggtgc

SEQ ID NO: 230303 - DNA, 33 bp, Homo sapien
gagtttgggaatgagacgggtggaggcctcctg

SEQ ID NO: 230304 - DNA, 33 bp, Homo sapien
gagtttgggaatgagaggggtggaggcctcctg

SEQ ID NO: 230305 - DNA, 33 bp, Homo sapien
tgtgggacaggtacacaaggaatactatgcaga

SEQ ID NO: 230306 - DNA, 33 bp, Homo sapien
tgtgggacaggtacacgaggaatactatgcaga

SEQ ID NO: 230307 - DNA, 33 bp, Homo sapien
atataaagaccaaaaaataccccatgcttttgc

SEQ ID NO: 230308 - DNA, 33 bp, Homo sapien
atataaagaccaaaaagtaccccatgcttttgc

SEQ ID NO: 230309 - DNA, 33 bp, Homo sapien
gcaagtatccgatatccctccttcaaaatgcaa

SEQ ID NO: 230310 - DNA, 33 bp, Homo sapien
gcaagtatccgatatcgctccttcaaaatgcaa

SEQ ID NO: 230311 - DNA, 33 bp, Homo sapien
cctcattacttcccataactatgattttcctta

SEQ ID NO: 230312 - DNA, 33 bp, Homo sapien
cctcattacttcccattactatgattttcctta

SEQ ID NO: 230313 - DNA, 33 bp, Homo sapien
ccctggtagagtagtcagaactacaagtacatg

SEQ ID NO: 230314 - DNA, 33 bp, Homo sapien
ccctggtagagtagtcggaactacaagtacatg

SEQ ID NO: 230315 - DNA, 33 bp, Homo sapien
aaataattgcactagagagttaatgcagctgta

SEQ ID NO: 230316 - DNA, 33 bp, Homo sapien
aaataattgcactagatagttaatgcagctgta

SEQ ID NO: 230317 - DNA, 33 bp, Homo sapien
tcagatcaaaagatgccaacgtgctgtaatgcc

SEQ ID NO: 230318 - DNA, 33 bp, Homo sapien
tcagatcaaaagatgcgaacgtgctgtaatgcc

SEQ ID NO: 230319 - DNA, 33 bp, Homo sapien
ccagttagaacgacaaccattaaaaagtcagga

SEQ ID NO: 230320 - DNA, 33 bp, Homo sapien
ccagttagaacgacaatcattaaaaagtcagga

SEQ ID NO: 230321 - DNA, 33 bp, Homo sapien
aaaccagtaaaatcaaatacagttccaaacttt

SEQ ID NO: 230322 - DNA, 33 bp, Homo sapien
aaaccagtaaaatcaagtacagttccaaacttt

SEQ ID NO: 230323 - DNA, 33 bp, Homo sapien
ttcttacggctatacaaaatatacaagtgaatg

SEQ ID NO: 230324 - DNA, 33 bp, Homo sapien
ttcttacggctatacacaatatacaagtgaatg

SEQ ID NO: 230325 - DNA, 33 bp, Homo sapien
cagaagaaaaaacagactaagccattacaggtc

SEQ ID NO: 230326 - DNA, 33 bp, Homo sapien
cagaagaaaaaacagattaagccattacaggtc

SEQ ID NO: 230327 - DNA, 33 bp, Homo sapien
gtattacatccattaaactacctgattggctgc

SEQ ID NO: 230328 - DNA, 33 bp, Homo sapien
gtattacatccattaagctacctgattggctgc

SEQ ID NO: 230329 - DNA, 33 bp, Homo sapien
ttctgcaccctgcaaccgtcttaaagaatggcc

SEQ ID NO: 230330 - DNA, 33 bp, Homo sapien
ttctgcaccctgcaactgtcttaaagaatggcc

SEQ ID NO: 230331 - DNA, 33 bp, Homo sapien
gtgagattttaggaagactgttgcataggatta

SEQ ID NO: 230332 - DNA, 33 bp, Homo sapien
gtgagattttaggaagtctgttgcataggatta

SEQ ID NO: 230333 - DNA, 33 bp, Homo sapien
aggaattacaagactcggacaaataagactttt

SEQ ID NO: 230334 - DNA, 33 bp, Homo sapien
aggaattacaagactctgacaaataagactttt

SEQ ID NO: 230335 - DNA, 33 bp, Homo sapien
aacgtgtatttctttacacgctgtctttactaa

SEQ ID NO: 230336 - DNA, 33 bp, Homo sapien
aacgtgtatttctttatacgctgtctttactaa

SEQ ID NO: 230337 - DNA, 33 bp, Homo sapien
aactatagggacagccaatgtgcaaacactttg

SEQ ID NO: 230338 - DNA, 33 bp, Homo sapien
aactatagggacagccgatgtgcaaacactttg

SEQ ID NO: 230339 - DNA, 33 bp, Homo sapien
aagagttgttaaggtaagatcatgagcatcaga

SEQ ID NO: 230340 - DNA, 33 bp, Homo sapien
aagagttgttaaggtaggatcatgagcatcaga

SEQ ID NO: 230341 - DNA, 33 bp, Homo sapien
ggggaaacaaaggaaccagttgcaaggtgagaa

SEQ ID NO: 230342 - DNA, 33 bp, Homo sapien
ggggaaacaaaggaactagttgcaaggtgagaa

SEQ ID NO: 230343 - DNA, 33 bp, Homo sapien
tctccttcatttccctaactaaactttgtcgct

SEQ ID NO: 230344 - DNA, 33 bp, Homo sapien
tctccttcatttccctgactaaactttgtcgct

SEQ ID NO: 230345 - DNA, 33 bp, Homo sapien
ccaggggaggcctacaatgagaagtcaacacag

SEQ ID NO: 230346 - DNA, 33 bp, Homo sapien
ccaggggaggcctacagtgagaagtcaacacag

SEQ ID NO: 230347 - DNA, 33 bp, Homo sapien
cctgactgacatttaaatggattattagctgtc

SEQ ID NO: 230348 - DNA, 33 bp, Homo sapien
cctgactgacatttaagtggattattagctgtc

SEQ ID NO: 230349 - DNA, 33 bp, Homo sapien
cagatacatagcaactcaacagcattttgtctc

SEQ ID NO: 230350 - DNA, 33 bp, Homo sapien
cagatacatagcaactgaacagcattttgtctc

SEQ ID NO: 230351 - DNA, 33 bp, Homo sapien
acctgaacatcaccacagctccaagcaatgaca

SEQ ID NO: 230352 - DNA, 33 bp, Homo sapien
acctgaacatcaccacggctccaagcaatgaca

SEQ ID NO: 230353 - DNA, 33 bp, Homo sapien
tctgaatgccctgaaacgatccattaccttaca

SEQ ID NO: 230354 - DNA, 33 bp, Homo sapien
tctgaatgccctgaaatgatccattaccttaca

SEQ ID NO: 230355 - DNA, 33 bp, Homo sapien
tcagtgcgacactgaaatagtacaagtttaacc

SEQ ID NO: 230356 - DNA, 33 bp, Homo sapien
tcagtgcgacactgaagtagtacaagtttaacc

SEQ ID NO: 230357 - DNA, 33 bp, Homo sapien
gactcatagctaaaaaatgaataagtggcacaa

SEQ ID NO: 230358 - DNA, 33 bp, Homo sapien
gactcatagctaaaaactgaataagtggcacaa

SEQ ID NO: 230359 - DNA, 33 bp, Homo sapien
aaataagattgaaaacacttcacactaacatat

SEQ ID NO: 230360 - DNA, 33 bp, Homo sapien
aaataagattgaaaacgcttcacactaacatat

SEQ ID NO: 230361 - DNA, 33 bp, Homo sapien
catccagggtgaaggcgctggcagattcagagt

SEQ ID NO: 230362 - DNA, 33 bp, Homo sapien
catccagggtgaaggctctggcagattcagagt

SEQ ID NO: 230363 - DNA, 33 bp, Homo sapien
caggcaatgacaaccacggcaaaactgctgcct

SEQ ID NO: 230364 - DNA, 33 bp, Homo sapien
caggcaatgacaaccatggcaaaactgctgcct

SEQ ID NO: 230365 - DNA, 33 bp, Homo sapien
gaaatcaaatcaataacactagttacccatcta

SEQ ID NO: 230366 - DNA, 33 bp, Homo sapien
gaaatcaaatcaataatactagttacccatcta

SEQ ID NO: 230367 - DNA, 33 bp, Homo sapien
tgtccctgtcccttcacctacatctttcttctc

SEQ ID NO: 230368 - DNA, 33 bp, Homo sapien
tgtccctgtcccttcagctacatctttcttctc

SEQ ID NO: 230369 - DNA, 33 bp, Homo sapien
ctaaagccttttaacactaatctcctttcaagg

SEQ ID NO: 230370 - DNA, 33 bp, Homo sapien
ctaaagccttttaacattaatctcctttcaagg

SEQ ID NO: 230371 - DNA, 33 bp, Homo sapien
ttacgcaaaagctaacagatgacctagatggcc

SEQ ID NO: 230372 - DNA, 33 bp, Homo sapien
ttacgcaaaagctaacggatgacctagatggcc

SEQ ID NO: 230373 - DNA, 33 bp, Homo sapien
agatttttttaagcaaacacacatgtatagaca

SEQ ID NO: 230374 - DNA, 33 bp, Homo sapien
agatttttttaagcaagcacacatgtatagaca

SEQ ID NO: 230375 - DNA, 33 bp, Homo sapien
agaggagcttccaaaacggtttgcattattaaa

SEQ ID NO: 230376 - DNA, 33 bp, Homo sapien
agaggagcttccaaaatggtttgcattattaaa

SEQ ID NO: 230377 - DNA, 33 bp, Homo sapien
aagttcttggattctcaaaactacttccagcta

SEQ ID NO: 230378 - DNA, 33 bp, Homo sapien
aagttcttggattctcgaaactacttccagcta

SEQ ID NO: 230379 - DNA, 33 bp, Homo sapien
gtcttcccaatatataccacgatccccgtagaa

SEQ ID NO: 230380 - DNA, 33 bp, Homo sapien
gtcttcccaatatatatcacgatccccgtagaa

SEQ ID NO: 230381 - DNA, 33 bp, Homo sapien
tttagcatcttttcacactttgctgttcccttc

SEQ ID NO: 230382 - DNA, 33 bp, Homo sapien
tttagcatcttttcaccctttgctgttcccttc

SEQ ID NO: 230383 - DNA, 33 bp, Homo sapien
ggcagagtatgtctaaaatatttgtgagtggga

SEQ ID NO: 230384 - DNA, 33 bp, Homo sapien
ggcagagtatgtctaagatatttgtgagtggga

SEQ ID NO: 230385 - DNA, 33 bp, Homo sapien
gtgctgttattttagcataagctcatttgtact

SEQ ID NO: 230386 - DNA, 33 bp, Homo sapien
gtgctgttattttagcgtaagctcatttgtact

SEQ ID NO: 230387 - DNA, 33 bp, Homo sapien
actgtcttttctgaagaccctgctagcacatgt

SEQ ID NO: 230388 - DNA, 33 bp, Homo sapien
actgtcttttctgaagtccctgctagcacatgt

SEQ ID NO: 230389 - DNA, 33 bp, Homo sapien
gagtccagagaacctaaaccataggagtgtgtg

SEQ ID NO: 230390 - DNA, 33 bp, Homo sapien
gagtccagagaacctagaccataggagtgtgtg

SEQ ID NO: 230391 - DNA, 33 bp, Homo sapien
cagtcctaagctcctcagacacctctgttagct

SEQ ID NO: 230392 - DNA, 33 bp, Homo sapien
cagtcctaagctcctcggacacctctgttagct

SEQ ID NO: 230393 - DNA, 33 bp, Homo sapien
cagtaatgctaccaggaacacatgaagtttaag

SEQ ID NO: 230394 - DNA, 33 bp, Homo sapien
cagtaatgctaccagggacacatgaagtttaag

SEQ ID NO: 230395 - DNA, 33 bp, Homo sapien
tgttcagctgcagaggaaccaaaatcctgacaa

SEQ ID NO: 230396 - DNA, 33 bp, Homo sapien
tgttcagctgcagagggaccaaaatcctgacaa

SEQ ID NO: 230397 - DNA, 33 bp, Homo sapien
ccattcagcaataaaaaggaaggaagtacttaa

SEQ ID NO: 230398 - DNA, 33 bp, Homo sapien
ccattcagcaataaaatggaaggaagtacttaa

SEQ ID NO: 230399 - DNA, 33 bp, Homo sapien
atagtgcctttgtaaaaaaaaggcctgagagat

SEQ ID NO: 230400 - DNA, 33 bp, Homo sapien
atagtgcctttgtaaagaaaaggcctgagagat

SEQ ID NO: 230401 - DNA, 33 bp, Homo sapien
gcccaaagctttatagcagttactggcgaggaa

SEQ ID NO: 230402 - DNA, 33 bp, Homo sapien
gcccaaagctttatagtagttactggcgaggaa

SEQ ID NO: 230403 - DNA, 33 bp, Homo sapien
tttacatatttgaaccaagtacttctttaactc

SEQ ID NO: 230404 - DNA, 33 bp, Homo sapien
tttacatatttgaacctagtacttctttaactc

SEQ ID NO: 230405 - DNA, 33 bp, Homo sapien
gtgattttcttaaaacacaagtcaagtcgcgtc

SEQ ID NO: 230406 - DNA, 33 bp, Homo sapien
gtgattttcttaaaacccaagtcaagtcgcgtc

SEQ ID NO: 230407 - DNA, 33 bp, Homo sapien
atacataattgttcatgaaacctagccctatca

SEQ ID NO: 230408 - DNA, 33 bp, Homo sapien
atacataattgttcattaaacctagccctatca

SEQ ID NO: 230409 - DNA, 33 bp, Homo sapien
ggccaactttgaaagacgcaggtttgagattcc

SEQ ID NO: 230410 - DNA, 33 bp, Homo sapien
ggccaactttgaaagatgcaggtttgagattcc

SEQ ID NO: 230411 - DNA, 33 bp, Homo sapien
ctggacacattacatcagaaatgacctaaattc

SEQ ID NO: 230412 - DNA, 33 bp, Homo sapien
ctggacacattacatcggaaatgacctaaattc

SEQ ID NO: 230413 - DNA, 33 bp, Homo sapien
tcactgccaagacttacgtttggccttctgaaa

SEQ ID NO: 230414 - DNA, 33 bp, Homo sapien
tcactgccaagacttatgtttggccttctgaaa

SEQ ID NO: 230415 - DNA, 33 bp, Homo sapien
aacaattacgtgaaaaattattggagcaaaacc

SEQ ID NO: 230416 - DNA, 33 bp, Homo sapien
aacaattacgtgaaaagttattggagcaaaacc

SEQ ID NO: 230417 - DNA, 33 bp, Homo sapien
tctcatctgttccctcaccttgctttagctttt

SEQ ID NO: 230418 - DNA, 33 bp, Homo sapien
tctcatctgttccctcgccttgctttagctttt

SEQ ID NO: 230419 - DNA, 33 bp, Homo sapien
ttgactgtcttgcttacggatgtatccccagga

SEQ ID NO: 230420 - DNA, 33 bp, Homo sapien
ttgactgtcttgcttatggatgtatccccagga

SEQ ID NO: 230421 - DNA, 33 bp, Homo sapien
acaaaagatgcaaagggagtttatcatggtttt

SEQ ID NO: 230422 - DNA, 33 bp, Homo sapien
acaaaagatgcaaaggtagtttatcatggtttt

SEQ ID NO: 230423 - DNA, 33 bp, Homo sapien
gctctatttagatgtacagaaaagcttccggag

SEQ ID NO: 230424 - DNA, 33 bp, Homo sapien
gctctatttagatgtatagaaaagcttccggag

SEQ ID NO: 230425 - DNA, 33 bp, Homo sapien
taagaaacaattcaagacactataagattaagt

SEQ ID NO: 230426 - DNA, 33 bp, Homo sapien
taagaaacaattcaaggcactataagattaagt

SEQ ID NO: 230427 - DNA, 33 bp, Homo sapien
taattcgtgctgatcacgattttgtagtacagg

SEQ ID NO: 230428 - DNA, 33 bp, Homo sapien
taattcgtgctgatcatgattttgtagtacagg

SEQ ID NO: 230429 - DNA, 33 bp, Homo sapien; identical to SEQ ID NO: 230427

SEQ ID NO: 230430 - DNA, 33 bp, Homo sapien; identical to SEQ ID NO: 230428

SEQ ID NO: 230431 - DNA, 33 bp, Homo sapien
cttaactgactagaaaacaaagggattatatat

SEQ ID NO: 230432 - DNA, 33 bp, Homo sapien
cttaactgactagaaagcaaagggattatatat

SEQ ID NO: 230433 - DNA, 33 bp, Homo sapien
atcatcttatcaaactcaaacttcaaacctgcc

SEQ ID NO: 230434 - DNA, 33 bp, Homo sapien
atcatcttatcaaactgaaacttcaaacctgcc

SEQ ID NO: 230435 - DNA, 33 bp, Homo sapien
cttctgttccattagacaatttgctatccttat

SEQ ID NO: 230436 - DNA, 33 bp, Homo sapien
cttctgttccattagataatttgctatccttat

SEQ ID NO: 230437 - DNA, 33 bp, Homo sapien
tgtgagcagtaaagccaccacagatatacaggt

SEQ ID NO: 230438 - DNA, 33 bp, Homo sapien
tgtgagcagtaaagccgccacagatatacaggt

SEQ ID NO: 230439 - DNA, 33 bp, Homo sapien
agagcttgagtgtccacaaatagctctatacaa

SEQ ID NO: 230440 - DNA, 33 bp, Homo sapien
agagcttgagtgtccagaaatagctctatacaa

SEQ ID NO: 230441 - DNA, 33 bp, Homo sapien
tttcacagaaagtggacgtgatcagctgctaga

SEQ ID NO: 230442 - DNA, 33 bp, Homo sapien
tttcacagaaagtggatgtgatcagctgctaga

SEQ ID NO: 230443 - DNA, 33 bp, Homo sapien
catcactctatgttacagcttacaaacacgttt

SEQ ID NO: 230444 - DNA, 33 bp, Homo sapien
catcactctatgttacggcttacaaacacgttt

SEQ ID NO: 230445 - DNA, 33 bp, Homo sapien; identical to SEQ ID NO: 230443

SEQ ID NO: 230446 - DNA, 33 bp, Homo sapien; identical to SEQ ID NO: 230444

SEQ ID NO: 230447 - DNA, 33 bp, Homo sapien
cttcaggaattgtttacaagtaagacgactatg

SEQ ID NO: 230448 - DNA, 33 bp, Homo sapien
cttcaggaattgtttagaagtaagacgactatg

SEQ ID NO: 230449 - DNA, 33 bp, Homo sapien
tcatagggaccatttcaatatcctcacttcctg

SEQ ID NO: 230450 - DNA, 33 bp, Homo sapien
tcatagggaccatttcgatatcctcacttcctg

SEQ ID NO: 230451 - DNA, 33 bp, Homo sapien
agggtatagtctgtaccagaggaataaaaggat

SEQ ID NO: 230452 - DNA, 33 bp, Homo sapien
agggtatagtctgtactagaggaataaaaggat

SEQ ID NO: 230453 - DNA, 33 bp, Homo sapien
tatttttcaacctgtacataaatcattatcttg

SEQ ID NO: 230454 - DNA, 33 bp, Homo sapien
tatttttcaacctgtatataaatcattatcttg

SEQ ID NO: 230455 - DNA, 33 bp, Homo sapien
ccaaattaatataaaccgaatgatccaggaaaa

SEQ ID NO: 230456 - DNA, 33 bp, Homo sapien
ccaaattaatataaactgaatgatccaggaaaa

SEQ ID NO: 230457 - DNA, 33 bp, Homo sapien
cttttttctccagctacgcctaatatgccatta

SEQ ID NO: 230458 - DNA, 33 bp, Homo sapien
cttttttctccagctatgcctaatatgccatta

SEQ ID NO: 230459 - DNA, 33 bp, Homo sapien
ctgtcttgcaagaagacatgggtagttagaatg

SEQ ID NO: 230460 - DNA, 33 bp, Homo sapien
ctgtcttgcaagaagagatgggtagttagaatg

SEQ ID NO: 230461 - DNA, 33 bp, Homo sapien
ggttctgtagccacagaaagttccgcattatca

SEQ ID NO: 230462 - DNA, 33 bp, Homo sapien
ggttctgtagccacaggaagttccgcattatca

SEQ ID NO: 230463 - DNA, 33 bp, Homo sapien
ggttttatcaatcaaacgcaatcatgtgggacg

SEQ ID NO: 230464 - DNA, 33 bp, Homo sapien
ggttttatcaatcaaatgcaatcatgtgggacg

SEQ ID NO: 230465 - DNA, 33 bp, Homo sapien
caagagtattatgatagctctgtaaagtcaccg

SEQ ID NO: 230466 - DNA, 33 bp, Homo sapien
caagagtattatgatatctctgtaaagtcaccg

SEQ ID NO: 230467 - DNA, 33 bp, Homo sapien
ctctctctttctttcacaggattccctggatca

SEQ ID NO: 230468 - DNA, 33 bp, Homo sapien
ctctctctttctttcataggattccctggatca

SEQ ID NO: 230469 - DNA, 33 bp, Homo sapien
ttttgttacaccgtggaaaagagcttggttgga

SEQ ID NO: 230470 - DNA, 33 bp, Homo sapien
ttttgttacaccgtggcaaagagcttggttgga

SEQ ID NO: 230471 - DNA, 33 bp, Homo sapien
tgattagtttgctctcacattgctataaaggaa

SEQ ID NO: 230472 - DNA, 33 bp, Homo sapien
tgattagtttgctctcgcattgctataaaggaa

SEQ ID NO: 230473 - DNA, 33 bp, Homo sapien
aattaaggatgcaacaatgagtaagaatgacat

SEQ ID NO: 230474 - DNA, 33 bp, Homo sapien
aattaaggatgcaacagtgagtaagaatgacat

SEQ ID NO: 230475 - DNA, 33 bp, Homo sapien
aaatgtggtatgtatacaatggaacactgcaga

SEQ ID NO: 230476 - DNA, 33 bp, Homo sapien
aaatgtggtatgtatataatggaacactgcaga

SEQ ID NO: 230477 - DNA, 33 bp, Homo sapien
ccaaaacaactgaatccaactgcaacagatatt

SEQ ID NO: 230478 - DNA, 33 bp, Homo sapien
ccaaaacaactgaatcgaactgcaacagatatt

SEQ ID NO: 230479 - DNA, 33 bp, Homo sapien
tttggtacaatcaggaaattttaaatatgacct

SEQ ID NO: 230480 - DNA, 33 bp, Homo sapien
tttggtacaatcaggacattttaaatatgacct

SEQ ID NO: 230481 - DNA, 33 bp, Homo sapien
cagtttcagattaggaaagtgttaagaaagata

SEQ ID NO: 230482 - DNA, 33 bp, Homo sapien
cagtttcagattaggagagtgttaagaaagata

SEQ ID NO: 230483 - DNA, 33 bp, Homo sapien
aacaggaaaccttgtccaatgcgtgattttaga

SEQ ID NO: 230484 - DNA, 33 bp, Homo sapien
aacaggaaaccttgtcgaatgcgtgattttaga

SEQ ID NO: 230485 - DNA, 33 bp, Homo sapien
tgtataaaccaacaaaatcaatttgagagataa

SEQ ID NO: 230486 - DNA, 33 bp, Homo sapien
tgtataaaccaacaaattcaatttgagagataa

SEQ ID NO: 230487 - DNA, 33 bp, Homo sapien
ttttgagctagtagataaaagagtggaacagtg

SEQ ID NO: 230488 - DNA, 33 bp, Homo sapien
ttttgagctagtagattaaagagtggaacagtg

SEQ ID NO: 230489 - DNA, 33 bp, Homo sapien
caaacaaaaccagcaacagttccaacagtatca

SEQ ID NO: 230490 - DNA, 33 bp, Homo sapien
caaacaaaaccagcaatagttccaacagtatca

SEQ ID NO: 230491 - DNA, 33 bp, Homo sapien
tgtgaaaattatttcaacagccacatatgtatt

SEQ ID NO: 230492 - DNA, 33 bp, Homo sapien
tgtgaaaattatttcagcagccacatatgtatt

SEQ ID NO: 230493 - DNA, 33 bp, Homo sapien
gagcccaacacatggacgaaaacttcagagaac

SEQ ID NO: 230494 - DNA, 33 bp, Homo sapien
gagcccaacacatggatgaaaacttcagagaac

SEQ ID NO: 230495 - DNA, 33 bp, Homo sapien
gatcttttgttgagaacgcactcctggctccaa

SEQ ID NO: 230496 - DNA, 33 bp, Homo sapien
gatcttttgttgagaatgcactcctggctccaa

SEQ ID NO: 230497 - DNA, 33 bp, Homo sapien
agggtcctttactccaactgtgatgataaaatt

SEQ ID NO: 230498 - DNA, 33 bp, Homo sapien
agggtcctttactccagctgtgatgataaaatt

SEQ ID NO: 230499 - DNA, 33 bp, Homo sapien
atcttcataaattttaacttgccattttgatgt

SEQ ID NO: 230500 - DNA, 33 bp, Homo sapien
atcttcataaattttaccttgccattttgatgt

SEQ ID NO: 230501 - DNA, 33 bp, Homo sapien
ttgttttccattggaaatccatcatgtagatca

SEQ ID NO: 230502 - DNA, 33 bp, Homo sapien
ttgttttccattggaagtccatcatgtagatca

SEQ ID NO: 230503 - DNA, 33 bp, Homo sapien
gtaagccttcttaatgcagtaattccattcatg

SEQ ID NO: 230504 - DNA, 33 bp, Homo sapien
gtaagccttcttaatgtagtaattccattcatg

SEQ ID NO: 230505 - DNA, 33 bp, Homo sapien
taaagctgggtacagacaaggataaagttatga

SEQ ID NO: 230506 - DNA, 33 bp, Homo sapien
taaagctgggtacagataaggataaagttatga

SEQ ID NO: 230507 - DNA, 33 bp, Homo sapien
ttttgactccccaaaaacctaactactgatacc

SEQ ID NO: 230508 - DNA, 33 bp, Homo sapien
ttttgactccccaaaaccctaactactgatacc

SEQ ID NO: 230509 - DNA, 33 bp, Homo sapien
agtgtctgcacagccagagagaagttgtctagc

SEQ ID NO: 230510 - DNA, 33 bp, Homo sapien
agtgtctgcacagccatagagaagttgtctagc

SEQ ID NO: 230511 - DNA, 33 bp, Homo sapien
aggtgtattggtgggggatgaggaatagtatcc

SEQ ID NO: 230512 - DNA, 33 bp, Homo sapien
aggtgtattggtggggtatgaggaatagtatcc

SEQ ID NO: 230513 - DNA, 33 bp, Homo sapien
gttaaaggtcaaattcaactgtccatttgtacc

SEQ ID NO: 230514 - DNA, 33 bp, Homo sapien
gttaaaggtcaaattcgactgtccatttgtacc

SEQ ID NO: 230515 - DNA, 33 bp, Homo sapien
gcctctacaaccgtaaataggaagagtgagcct

SEQ ID NO: 230516 - DNA, 33 bp, Homo sapien
gcctctacaaccgtaagtaggaagagtgagcct

SEQ ID NO: 230517 - DNA, 33 bp, Homo sapien
tccagacgtctatttccccgctgtctgccgtct

SEQ ID NO: 230518 - DNA, 33 bp, Homo sapien
tccagacgtctatttctccgctgtctgccgtct

SEQ ID NO: 230519 - DNA, 33 bp, Homo sapien
acaaacgtaacttcaaccacgcttaacaatgta

SEQ ID NO: 230520 - DNA, 33 bp, Homo sapien
acaaacgtaacttcaatcacgcttaacaatgta

SEQ ID NO: 230521 - DNA, 33 bp, Homo sapien
catttgtaatcttacactgaagaacaagaaggt

SEQ ID NO: 230522 - DNA, 33 bp, Homo sapien
catttgtaatcttacattgaagaacaagaaggt

SEQ ID NO: 230523 - DNA, 33 bp, Homo sapien
cagtgacagattgagcaaccttaggcagaattt

SEQ ID NO: 230524 - DNA, 33 bp, Homo sapien
cagtgacagattgagccaccttaggcagaattt

SEQ ID NO: 230525 - DNA, 33 bp, Homo sapien
tagtatttaatgctcaatagtatagctgaaaag

SEQ ID NO: 230526 - DNA, 33 bp, Homo sapien
tagtatttaatgctcagtagtatagctgaaaag

SEQ ID NO: 230527 - DNA, 33 bp, Homo sapien
atattgaatcttcggacaatgtttggaagtatg

SEQ ID NO: 230528 - DNA, 33 bp, Homo sapien
atattgaatcttcggataatgtttggaagtatg

SEQ ID NO: 230529 - DNA, 33 bp, Homo sapien
catcatgtggagatacccatcctgttcccccta

SEQ ID NO: 230530 - DNA, 33 bp, Homo sapien
catcatgtggagatactcatcctgttcccccta

SEQ ID NO: 230531 - DNA, 33 bp, Homo sapien
aagaaacaagagacaactatatgagtgacttaa

SEQ ID NO: 230532 - DNA, 33 bp, Homo sapien
aagaaacaagagacaattatatgagtgacttaa

SEQ ID NO: 230533 - DNA, 33 bp, Homo sapien
atccatcactaaaatgcagcctttgtgcaatgc

SEQ ID NO: 230534 - DNA, 33 bp, Homo sapien
atccatcactaaaatgtagcctttgtgcaatgc

SEQ ID NO: 230535 - DNA, 33 bp, Homo sapien
gcacagttgaacttcaatcagctctgatccagt

SEQ ID NO: 230536 - DNA, 33 bp, Homo sapien
gcacagttgaacttcagtcagctctgatccagt

SEQ ID NO: 230537 - DNA, 33 bp, Homo sapien
caagactctttctctcaacctgtcatacactag

SEQ ID NO: 230538 - DNA, 33 bp, Homo sapien
caagactctttctctcgacctgtcatacactag

SEQ ID NO: 230539 - DNA, 33 bp, Homo sapien
ggcctccttcctggaactaccaggtgctttctt

SEQ ID NO: 230540 - DNA, 33 bp, Homo sapien
ggcctccttcctggaagtaccaggtgctttctt

SEQ ID NO: 230541 - DNA, 33 bp, Homo sapien
ttttaaataccgaacaaattttatagaggcaca

SEQ ID NO: 230542 - DNA, 33 bp, Homo sapien
ttttaaataccgaacacattttatagaggcaca

SEQ ID NO: 230543 - DNA, 33 bp, Homo sapien
gtccctgtcatgagcggaattgttagcctgtgc

SEQ ID NO: 230544 - DNA, 33 bp, Homo sapien
gtccctgtcatgagcgtaattgttagcctgtgc

SEQ ID NO: 230545 - DNA, 33 bp, Homo sapien
ttccagtgttgccctccaagagcttgttactct

SEQ ID NO: 230546 - DNA, 33 bp, Homo sapien
ttccagtgttgccctctaagagcttgttactct

SEQ ID NO: 230547 - DNA, 33 bp, Homo sapien
tcctggctcatgcatcacatttagtggatatgt

SEQ ID NO: 230548 - DNA, 33 bp, Homo sapien
tcctggctcatgcatcgcatttagtggatatgt

SEQ ID NO: 230549 - DNA, 33 bp, Homo sapien
tcctgtttcctagtctcaccagagttcatttgt

SEQ ID NO: 230550 - DNA, 33 bp, Homo sapien
tcctgtttcctagtcttaccagagttcatttgt

SEQ ID NO: 230551 - DNA, 33 bp, Homo sapien
tgtgatagccacaatgcatagttgaggaaactt

SEQ ID NO: 230552 - DNA, 33 bp, Homo sapien
tgtgatagccacaatgtatagttgaggaaactt

SEQ ID NO: 230553 - DNA, 33 bp, Homo sapien
ggatactgacagattaacctacaagaggatgta

SEQ ID NO: 230554 - DNA, 33 bp, Homo sapien
ggatactgacagattaccctacaagaggatgta

SEQ ID NO: 230555 - DNA, 33 bp, Homo sapien
atgtctctgcagtttacagctggagagaaacat

SEQ ID NO: 230556 - DNA, 33 bp, Homo sapien
atgtctctgcagtttagagctggagagaaacat

SEQ ID NO: 230557 - DNA, 33 bp, Homo sapien
tagagttactggaagacgctcaagaggagaaga

SEQ ID NO: 230558 - DNA, 33 bp, Homo sapien
tagagttactggaagatgctcaagaggagaaga

SEQ ID NO: 230559 - DNA, 33 bp, Homo sapien
cattgatcataacagcaaaagtttagaaacaaa

SEQ ID NO: 230560 - DNA, 33 bp, Homo sapien
cattgatcataacagcgaaagtttagaaacaaa

SEQ ID NO: 230561 - DNA, 33 bp, Homo sapien
agattttatttttacaggataactcctcaagcc

SEQ ID NO: 230562 - DNA, 33 bp, Homo sapien
agattttatttttacatgataactcctcaagcc

SEQ ID NO: 230563 - DNA, 33 bp, Homo sapien
gtaattcactctaagacattttgatcctgtttt

SEQ ID NO: 230564 - DNA, 33 bp, Homo sapien
gtaattcactctaagatattttgatcctgtttt

SEQ ID NO: 230565 - DNA, 33 bp, Homo sapien
aaattccttggaaaaactggccaccttgttttt

SEQ ID NO: 230566 - DNA, 33 bp, Homo sapien
aaattccttggaaaaattggccaccttgttttt

SEQ ID NO: 230567 - DNA, 33 bp, Homo sapien
acaggagttatttgcacggactgagcaaacaga

SEQ ID NO: 230568 - DNA, 33 bp, Homo sapien
acaggagttatttgcatggactgagcaaacaga

SEQ ID NO: 230569 - DNA, 33 bp, Homo sapien
caccaaaccacagtcacgttggcactcagaatt

SEQ ID NO: 230570 - DNA, 33 bp, Homo sapien
caccaaaccacagtcatgttggcactcagaatt

SEQ ID NO: 230571 - DNA, 33 bp, Homo sapien
ctcctgcaggcctacactgctttccatgctcgt

SEQ ID NO: 230572 - DNA, 33 bp, Homo sapien
ctcctgcaggcctacattgctttccatgctcgt

SEQ ID NO: 230573 - DNA, 33 bp, Homo sapien
aacattgcgataaatagggcttagcttcaacac

SEQ ID NO: 230574 - DNA, 33 bp, Homo sapien
aacattgcgataaatatggcttagcttcaacac

SEQ ID NO: 230575 - DNA, 33 bp, Homo sapien
tgttccagttcacctacgaatcaggtactgttt

SEQ ID NO: 230576 - DNA, 33 bp, Homo sapien
tgttccagttcacctatgaatcaggtactgttt

SEQ ID NO: 230577 - DNA, 33 bp, Homo sapien
catccaattaaaagagaagtcatggctcaatcc

SEQ ID NO: 230578 - DNA, 33 bp, Homo sapien
catccaattaaaagaggagtcatggctcaatcc

SEQ ID NO: 230579 - DNA, 33 bp, Homo sapien
tcctggcctctgagaccctatatgaactatccc

SEQ ID NO: 230580 - DNA, 33 bp, Homo sapien
tcctggcctctgagacgctatatgaactatccc

SEQ ID NO: 230581 - DNA, 33 bp, Homo sapien
aaaggcagactagtagcagaaataacatacaaa

SEQ ID NO: 230582 - DNA, 33 bp, Homo sapien
aaaggcagactagtaggagaaataacatacaaa

SEQ ID NO: 230583 - DNA, 33 bp, Homo sapien
ctccagtgatgaagagccccgatgattaatgaa

SEQ ID NO: 230584 - DNA, 33 bp, Homo sapien
ctccagtgatgaagagtcccgatgattaatgaa

SEQ ID NO: 230585 - DNA, 33 bp, Homo sapien
ggaaggttgaacacataaaatggtttcctaaga

SEQ ID NO: 230586 - DNA, 33 bp, Homo sapien
ggaaggttgaacacatgaaatggtttcctaaga

SEQ ID NO: 230587 - DNA, 33 bp, Homo sapien
aatgagggagctgggtcaagtcactgctctctt

SEQ ID NO: 230588 - DNA, 33 bp, Homo sapien
aatgagggagctgggtgaagtcactgctctctt

SEQ ID NO: 230589 - DNA, 33 bp, Homo sapien
ttgggtcctgactcggcagtgcgtctgaatcat

SEQ ID NO: 230590 - DNA, 33 bp, Homo sapien
ttgggtcctgactcggtagtgcgtctgaatcat

SEQ ID NO: 230591 - DNA, 33 bp, Homo sapien
ccccaagttctgggcacagtttttcagtttctt

SEQ ID NO: 230592 - DNA, 33 bp, Homo sapien
ccccaagttctgggcagagtttttcagtttctt

SEQ ID NO: 230593 - DNA, 33 bp, Homo sapien
acaaaagctttaagaaatcaggaatgacaaggg

SEQ ID NO: 230594 - DNA, 33 bp, Homo sapien
acaaaagctttaagaactcaggaatgacaaggg

SEQ ID NO: 230595 - DNA, 33 bp, Homo sapien
ctcttggaactgtacacccactggaactcttta

SEQ ID NO: 230596 - DNA, 33 bp, Homo sapien
ctcttggaactgtacatccactggaactcttta

SEQ ID NO: 230597 - DNA, 33 bp, Homo sapien; identical to SEQ ID NO: 230595

SEQ ID NO: 230598 - DNA, 33 bp, Homo sapien; identical to SEQ ID NO: 230596

SEQ ID NO: 230599 - DNA, 33 bp, Homo sapien
caaagaatgagctagacaaagaattgactcact

SEQ ID NO: 230600 - DNA, 33 bp, Homo sapien
caaagaatgagctagagaaagaattgactcact

SEQ ID NO: 230601 - DNA, 33 bp, Homo sapien
gcttccagttgtcccacctttctagactgaatg

SEQ ID NO: 230602 - DNA, 33 bp, Homo sapien
gcttccagttgtcccatctttctagactgaatg

SEQ ID NO: 230603 - DNA, 33 bp, Homo sapien
tgagatctgtcgcagacacttttggtttacggt

SEQ ID NO: 230604 - DNA, 33 bp, Homo sapien
tgagatctgtcgcagatacttttggtttacggt

SEQ ID NO: 230605 - DNA, 33 bp, Homo sapien
ggctgcacagcagtccaatgtcaacatgctaga

SEQ ID NO: 230606 - DNA, 33 bp, Homo sapien
ggctgcacagcagtccgatgtcaacatgctaga

SEQ ID NO: 230607 - DNA, 33 bp, Homo sapien
cctttctggttgctgcccctctggttattgaga

SEQ ID NO: 230608 - DNA, 33 bp, Homo sapien
cctttctggttgctgcgcctctggttattgaga

SEQ ID NO: 230609 - DNA, 33 bp, Homo sapien
ttctgcaggttatttacccacttgcttggtatt

SEQ ID NO: 230610 - DNA, 33 bp, Homo sapien
ttctgcaggttatttagccacttgcttggtatt

SEQ ID NO: 230611 - DNA, 33 bp, Homo sapien
tgttatttctctcataccccaatgccaggatta

SEQ ID NO: 230612 - DNA, 33 bp, Homo sapien
tgttatttctctcatatcccaatgccaggatta

SEQ ID NO: 230613 - DNA, 33 bp, Homo sapien
tgtagaccatatcttgcaatatttgcttacggc

SEQ ID NO: 230614 - DNA, 33 bp, Homo sapien
tgtagaccatatcttgtaatatttgcttacggc

SEQ ID NO: 230615 - DNA, 33 bp, Homo sapien
ctagttgaaaaatatacgccttttatcacgaat

SEQ ID NO: 230616 - DNA, 33 bp, Homo sapien
ctagttgaaaaatatatgccttttatcacgaat

SEQ ID NO: 230617 - DNA, 33 bp, Homo sapien
tgcccacaaaagtcatcagtaaaagaattcttg

SEQ ID NO: 230618 - DNA, 33 bp, Homo sapien
tgcccacaaaagtcatgagtaaaagaattcttg

SEQ ID NO: 230619 - DNA, 33 bp, Homo sapien
agaacaacagctaccactggaagcggtccagtt

SEQ ID NO: 230620 - DNA, 33 bp, Homo sapien
agaacaacagctaccagtggaagcggtccagtt

SEQ ID NO: 230621 - DNA, 33 bp, Homo sapien
actaatctgtggctaacgatgagaaccaagtct

SEQ ID NO: 230622 - DNA, 33 bp, Homo sapien
actaatctgtggctaatgatgagaaccaagtct

SEQ ID NO: 230623 - DNA, 33 bp, Homo sapien
accttgctgcttacaccgctgatttcctggcac

SEQ ID NO: 230624 - DNA, 33 bp, Homo sapien
accttgctgcttacactgctgatttcctggcac

SEQ ID NO: 230625 - DNA, 33 bp, Homo sapien
gtagatgaaatgagaacatggaaaatgctaagc

SEQ ID NO: 230626 - DNA, 33 bp, Homo sapien
gtagatgaaatgagaatatggaaaatgctaagc

SEQ ID NO: 230627 - DNA, 33 bp, Homo sapien
acataaatagatacaacaaatgtcaagtcatgg

SEQ ID NO: 230628 - DNA, 33 bp, Homo sapien
acataaatagatacaataaatgtcaagtcatgg

SEQ ID NO: 230629 - DNA, 33 bp, Homo sapien
tcttattttgggatagcatctttacagaagtaa

SEQ ID NO: 230630 - DNA, 33 bp, Homo sapien
tcttattttgggataggatctttacagaagtaa

SEQ ID NO: 230631 - DNA, 33 bp, Homo sapien
tgtcctggtgcctaccacatagggtttcttcct

SEQ ID NO: 230632 - DNA, 33 bp, Homo sapien
tgtcctggtgcctaccgcatagggtttcttcct

SEQ ID NO: 230633 - DNA, 33 bp, Homo sapien
tttactgttgttatcaatcggaactattactga

SEQ ID NO: 230634 - DNA, 33 bp, Homo sapien
tttactgttgttatcagtcggaactattactga

SEQ ID NO: 230635 - DNA, 33 bp, Homo sapien
tccagcctgtcctagaaactttgaacttgccaa

SEQ ID NO: 230636 - DNA, 33 bp, Homo sapien
tccagcctgtcctagagactttgaacttgccaa

SEQ ID NO: 230637 - DNA, 33 bp, Homo sapien
ataaatcgaagacagtaaaaagtgttgactaat

SEQ ID NO: 230638 - DNA, 33 bp, Homo sapien
ataaatcgaagacagtgaaaagtgttgactaat

SEQ ID NO: 230639 - DNA, 33 bp, Homo sapien
ataattctgagttatagcatccagtgcaggtgg

SEQ ID NO: 230640 - DNA, 33 bp, Homo sapien
ataattctgagttatatcatccagtgcaggtgg

SEQ ID NO: 230641 - DNA, 33 bp, Homo sapien
acaaagtgctcagtacaattctgttccctctcc

SEQ ID NO: 230642 - DNA, 33 bp, Homo sapien
acaaagtgctcagtacgattctgttccctctcc

SEQ ID NO: 230643 - DNA, 33 bp, Homo sapien
caaaagtgctggacatcaagtatcttggaggct

SEQ ID NO: 230644 - DNA, 33 bp, Homo sapien
caaaagtgctggacattaagtatcttggaggct

SEQ ID NO: 230645 - DNA, 33 bp, Homo sapien
ctttccaaatctagcagggctaccttttggatt

SEQ ID NO: 230646 - DNA, 33 bp, Homo sapien
ctttccaaatctagcatggctaccttttggatt

SEQ ID NO: 230647 - DNA, 33 bp, Homo sapien
caaaaggaaaaaaagtcacaggctaagagaggt

SEQ ID NO: 230648 - DNA, 33 bp, Homo sapien
caaaaggaaaaaaagtgacaggctaagagaggt

SEQ ID NO: 230649 - DNA, 33 bp, Homo sapien
atggtctgatactgagcccttgttaatgattgc

SEQ ID NO: 230650 - DNA, 33 bp, Homo sapien
atggtctgatactgagtccttgttaatgattgc

SEQ ID NO: 230651 - DNA, 33 bp, Homo sapien
ttccaccactgacttaccctcttcaacccgttt

SEQ ID NO: 230652 - DNA, 33 bp, Homo sapien
ttccaccactgacttatcctcttcaacccgttt

SEQ ID NO: 230653 - DNA, 33 bp, Homo sapien
atcaaaggccaaatgcagcaaagagtttcagtc

SEQ ID NO: 230654 - DNA, 33 bp, Homo sapien
atcaaaggccaaatgccgcaaagagtttcagtc

SEQ ID NO: 230655 - DNA, 33 bp, Homo sapien
ctcttatttgcatatgacaacaagcggctatgc

SEQ ID NO: 230656 - DNA, 33 bp, Homo sapien
ctcttatttgcatatggcaacaagcggctatgc

SEQ ID NO: 230657 - DNA, 33 bp, Homo sapien
gaatatacccagaatcagaccaatttcatcact

SEQ ID NO: 230658 - DNA, 33 bp, Homo sapien
gaatatacccagaatcggaccaatttcatcact

SEQ ID NO: 230659 - DNA, 33 bp, Homo sapien
agctgccttaagggtcacagttgcttatcagga

SEQ ID NO: 230660 - DNA, 33 bp, Homo sapien
agctgccttaagggtcgcagttgcttatcagga

SEQ ID NO: 230661 - DNA, 33 bp, Homo sapien
cctgtactgttcagataagttccaaaagggccc

SEQ ID NO: 230662 - DNA, 33 bp, Homo sapien
cctgtactgttcagatgagttccaaaagggccc

SEQ ID NO: 230663 - DNA, 33 bp, Homo sapien
aaaaacctggcatcaaatattgacttctagcac

SEQ ID NO: 230664 - DNA, 33 bp, Homo sapien
aaaaacctggcatcaagtattgacttctagcac

SEQ ID NO: 230665 - DNA, 33 bp, Homo sapien
tatacagaatttcttaggtgctaatattctcac

SEQ ID NO: 230666 - DNA, 33 bp, Homo sapien
tatacagaatttcttatgtgctaatattctcac

SEQ ID NO: 230667 - DNA, 33 bp, Homo sapien
agaaaaagtctagtgacgctagagggagattaa

SEQ ID NO: 230668 - DNA, 33 bp, Homo sapien
agaaaaagtctagtgatgctagagggagattaa

SEQ ID NO: 230669 - DNA, 33 bp, Homo sapien
caaaaaccactaattacgatagatgctataaaa

SEQ ID NO: 230670 - DNA, 33 bp, Homo sapien
caaaaaccactaattatgatagatgctataaaa

SEQ ID NO: 230671 - DNA, 33 bp, Homo sapien
atctaaattctatgatcaagtagctgttgacaa

SEQ ID NO: 230672 - DNA, 33 bp, Homo sapien
atctaaattctatgattaagtagctgttgacaa

SEQ ID NO: 230673 - DNA, 33 bp, Homo sapien
agaagccaaatttaaaagagtacatactgtatg

SEQ ID NO: 230674 - DNA, 33 bp, Homo sapien
agaagccaaatttaaaggagtacatactgtatg

SEQ ID NO: 230675 - DNA, 33 bp, Homo sapien
catggagttaggatacagactgagaagcagcaa

SEQ ID NO: 230676 - DNA, 33 bp, Homo sapien
catggagttaggatacggactgagaagcagcaa

SEQ ID NO: 230677 - DNA, 33 bp, Homo sapien
attggaataatcggaacggacacatgtaaaagg

SEQ ID NO: 230678 - DNA, 33 bp, Homo sapien
attggaataatcggaatggacacatgtaaaagg

SEQ ID NO: 230679 - DNA, 33 bp, Homo sapien
catctaaccttctttacgataagtggatgacta

SEQ ID NO: 230680 - DNA, 33 bp, Homo sapien
catctaaccttctttaggataagtggatgacta

SEQ ID NO: 230681 - DNA, 33 bp, Homo sapien
tccaacaatctgctccaaaccctaatcaaaggt

SEQ ID NO: 230682 - DNA, 33 bp, Homo sapien
tccaacaatctgctccgaaccctaatcaaaggt

SEQ ID NO: 230683 - DNA, 33 bp, Homo sapien
tgttgcctaaaagagacacacttcatctgtaaa

SEQ ID NO: 230684 - DNA, 33 bp, Homo sapien
tgttgcctaaaagagagacacttcatctgtaaa

SEQ ID NO: 230685 - DNA, 33 bp, Homo sapien
ttgactggccatttgcccgattttcaaaaaatt

SEQ ID NO: 230686 - DNA, 33 bp, Homo sapien
ttgactggccatttgctcgattttcaaaaaatt

SEQ ID NO: 230687 - DNA, 33 bp, Homo sapien
ttgcacaagatggtcacggaagaaaactcttaa

SEQ ID NO: 230688 - DNA, 33 bp, Homo sapien
ttgcacaagatggtcatggaagaaaactcttaa

SEQ ID NO: 230689 - DNA, 33 bp, Homo sapien
ctcagttagtcacaacagtgtatagcaattcat

SEQ ID NO: 230690 - DNA, 33 bp, Homo sapien
ctcagttagtcacaacggtgtatagcaattcat

SEQ ID NO: 230691 - DNA, 33 bp, Homo sapien
ttaggaatgacctaaaaatgtaagtacaatcta

SEQ ID NO: 230692 - DNA, 33 bp, Homo sapien
ttaggaatgacctaaagatgtaagtacaatcta

SEQ ID NO: 230693 - DNA, 33 bp, Homo sapien
gtattcttaggttagacgcctaggtaagattct

SEQ ID NO: 230694 - DNA, 33 bp, Homo sapien
gtattcttaggttagatgcctaggtaagattct

SEQ ID NO: 230695 - DNA, 33 bp, Homo sapien
aacttagaaattgatccaaggatactggcagcc

SEQ ID NO: 230696 - DNA, 33 bp, Homo sapien
aacttagaaattgatctaaggatactggcagcc

SEQ ID NO: 230697 - DNA, 33 bp, Homo sapien
tacagtgtgaaatataaaaggctcaagtttaca

SEQ ID NO: 230698 - DNA, 33 bp, Homo sapien
tacagtgtgaaatatagaaggctcaagtttaca

SEQ ID NO: 230699 - DNA, 33 bp, Homo sapien
gaggaggtgggccatacgtcttttagtgtccat

SEQ ID NO: 230700 - DNA, 33 bp, Homo sapien
gaggaggtgggccatatgtcttttagtgtccat

SEQ ID NO: 230701 - DNA, 33 bp, Homo sapien
tggataagagcaccaaatgtagagactagtccc

SEQ ID NO: 230702 - DNA, 33 bp, Homo sapien
tggataagagcaccaagtgtagagactagtccc

SEQ ID NO: 230703 - DNA, 33 bp, Homo sapien
gtatatcttcctgacacgtttgcacctggtggt

SEQ ID NO: 230704 - DNA, 33 bp, Homo sapien
gtatatcttcctgacatgtttgcacctggtggt

SEQ ID NO: 230705 - DNA, 33 bp, Homo sapien
tgttttcttctctgacacattcattaagagggc

SEQ ID NO: 230706 - DNA, 33 bp, Homo sapien
tgttttcttctctgacccattcattaagagggc

SEQ ID NO: 230707 - DNA, 33 bp, Homo sapien
gccagaatgtagggaacagtgtcctaaggctgt

SEQ ID NO: 230708 - DNA, 33 bp, Homo sapien
gccagaatgtagggaagagtgtcctaaggctgt

SEQ ID NO: 230709 - DNA, 33 bp, Homo sapien
ttcaaaatttacacaaagcaacagtattcaaga

SEQ ID NO: 230710 - DNA, 33 bp, Homo sapien
ttcaaaatttacacaaggcaacagtattcaaga

SEQ ID NO: 230711 - DNA, 33 bp, Homo sapien
tatcaccagtggcagcaaagaaataacagagaa

SEQ ID NO: 230712 - DNA, 33 bp, Homo sapien
tatcaccagtggcagccaagaaataacagagaa

SEQ ID NO: 230713 - DNA, 33 bp, Homo sapien
actttatagccacatcaatctcctctctctcat

SEQ ID NO: 230714 - DNA, 33 bp, Homo sapien
actttatagccacatcgatctcctctctctcat

SEQ ID NO: 230715 - DNA, 33 bp, Homo sapien
gataaaatgaacgaaccattgatttcattgaat

SEQ ID NO: 230716 - DNA, 33 bp, Homo sapien
gataaaatgaacgaactattgatttcattgaat

SEQ ID NO: 230717 - DNA, 33 bp, Homo sapien
tgtaatttccgcacaaaaacttttacacacatg

SEQ ID NO: 230718 - DNA, 33 bp, Homo sapien
tgtaatttccgcacaagaacttttacacacatg

SEQ ID NO: 230719 - DNA, 33 bp, Homo sapien
ttgctgatctttttaacggcttttgagtctcat

SEQ ID NO: 230720 - DNA, 33 bp, Homo sapien
ttgctgatctttttaatggcttttgagtctcat

SEQ ID NO: 230721 - DNA, 33 bp, Homo sapien
gtccagcttcagtatgcagtaagagtaaacaag

SEQ ID NO: 230722 - DNA, 33 bp, Homo sapien
gtccagcttcagtatgtagtaagagtaaacaag

SEQ ID NO: 230723 - DNA, 33 bp, Homo sapien
gtccaggctggtgaaaaggcagtattggcctct

SEQ ID NO: 230724 - DNA, 33 bp, Homo sapien
gtccaggctggtgaaagggcagtattggcctct

SEQ ID NO: 230725 - DNA, 33 bp, Homo sapien
gctggcaatctgggcaccgtcagataatttgtt

SEQ ID NO: 230726 - DNA, 33 bp, Homo sapien
gctggcaatctgggcatcgtcagataatttgtt

SEQ ID NO: 230727 - DNA, 33 bp, Homo sapien
tgcctagacttagctacatcactccgcctaact

SEQ ID NO: 230728 - DNA, 33 bp, Homo sapien
tgcctagacttagctatatcactccgcctaact

SEQ ID NO: 230729 - DNA, 33 bp, Homo sapien
taacttcatgttagtacatggctttcttactaa

SEQ ID NO: 230730 - DNA, 33 bp, Homo sapien
taacttcatgttagtatatggctttcttactaa

SEQ ID NO: 230731 - DNA, 33 bp, Homo sapien
aaagcctcctaattccacaaagtcttcaagaag

SEQ ID NO: 230732 - DNA, 33 bp, Homo sapien
aaagcctcctaattccgcaaagtcttcaagaag

SEQ ID NO: 230733 - DNA, 33 bp, Homo sapien
catagcagattgaagaaatggcaagagagaagg

SEQ ID NO: 230734 - DNA, 33 bp, Homo sapien
catagcagattgaagagatggcaagagagaagg

SEQ ID NO: 230735 - DNA, 33 bp, Homo sapien
cctgctcattgcaaaacagatcaaacaagctag

SEQ ID NO: 230736 - DNA, 33 bp, Homo sapien
cctgctcattgcaaaatagatcaaacaagctag

SEQ ID NO: 230737 - DNA, 33 bp, Homo sapien
tgctttgggatgtagaagggaaagcttggtatg

SEQ ID NO: 230738 - DNA, 33 bp, Homo sapien
tgctttgggatgtagaggggaaagcttggtatg

SEQ ID NO: 230739 - DNA, 33 bp, Homo sapien
agagctggaagatatacgtatttacactatatt

SEQ ID NO: 230740 - DNA, 33 bp, Homo sapien
agagctggaagatatatgtatttacactatatt

SEQ ID NO: 230741 - DNA, 33 bp, Homo sapien
atattataaaatcagaaatgtatcatggtaagg

SEQ ID NO: 230742 - DNA, 33 bp, Homo sapien
atattataaaatcagagatgtatcatggtaagg

SEQ ID NO: 230743 - DNA, 33 bp, Homo sapien
atatctcaaatgagaacctagtttgggcttgca

SEQ ID NO: 230744 - DNA, 33 bp, Homo sapien
atatctcaaatgagaatctagtttgggcttgca

SEQ ID NO: 230745 - DNA, 33 bp, Homo sapien
agttgcagttgaaacaagatcatgaatttgaca

SEQ ID NO: 230746 - DNA, 33 bp, Homo sapien
agttgcagttgaaacaggatcatgaatttgaca

SEQ ID NO: 230747 - DNA, 33 bp, Homo sapien
ctcccatgctagcccccctaatgtgctgcgatt

SEQ ID NO: 230748 - DNA, 33 bp, Homo sapien
ctcccatgctagcccctctaatgtgctgcgatt

SEQ ID NO: 230749 - DNA, 33 bp, Homo sapien
atgtggtcatggctcaatcttactctctattgg

SEQ ID NO: 230750 - DNA, 33 bp, Homo sapien
atgtggtcatggctcagtcttactctctattgg

SEQ ID NO: 230751 - DNA, 33 bp, Homo sapien
tgagcaacagacaattaaaaatgctaacacttt

SEQ ID NO: 230752 - DNA, 33 bp, Homo sapien
tgagcaacagacaatttaaaatgctaacacttt

SEQ ID NO: 230753 - DNA, 33 bp, Homo sapien
acacacaaagccctaacattcacttagccacca

SEQ ID NO: 230754 - DNA, 33 bp, Homo sapien
acacacaaagccctaagattcacttagccacca

SEQ ID NO: 230755 - DNA, 33 bp, Homo sapien
agcaaaaccgtgaatacgggaggaccactatat

SEQ ID NO: 230756 - DNA, 33 bp, Homo sapien
agcaaaaccgtgaatatgggaggaccactatat

SEQ ID NO: 230757 - DNA, 33 bp, Homo sapien
ctattgaattatctgacatgagttttgtgttcc

SEQ ID NO: 230758 - DNA, 33 bp, Homo sapien
ctattgaattatctgatatgagttttgtgttcc

SEQ ID NO: 230759 - DNA, 33 bp, Homo sapien
gacagaaccaactctgcagatcaaccaacacct

SEQ ID NO: 230760 - DNA, 33 bp, Homo sapien
gacagaaccaactctgtagatcaaccaacacct

SEQ ID NO: 230761 - DNA, 33 bp, Homo sapien
catgctgttttgagtcaccggaggatagagacg

SEQ ID NO: 230762 - DNA, 33 bp, Homo sapien
catgctgttttgagtcgccggaggatagagacg

SEQ ID NO: 230763 - DNA, 33 bp, Homo sapien
attcagattccacaaactctgtccatttctgtc

SEQ ID NO: 230764 - DNA, 33 bp, Homo sapien
attcagattccacaaattctgtccatttctgtc

SEQ ID NO: 230765 - DNA, 33 bp, Homo sapien
catcagttctttttgggatatcaataatttggc

SEQ ID NO: 230766 - DNA, 33 bp, Homo sapien
catcagttctttttggtatatcaataatttggc

SEQ ID NO: 230767 - DNA, 33 bp, Homo sapien
ctgtgactctacagaaatcggttacagaagtct

SEQ ID NO: 230768 - DNA, 33 bp, Homo sapien
ctgtgactctacagaactcggttacagaagtct

SEQ ID NO: 230769 - DNA, 33 bp, Homo sapien
ccttatacgggctttcacggaggtcatggaaca

SEQ ID NO: 230770 - DNA, 33 bp, Homo sapien
ccttatacgggctttcgcggaggtcatggaaca

SEQ ID NO: 230771 - DNA, 33 bp, Homo sapien
catatgagactaggaaataatagcattcatact

SEQ ID NO: 230772 - DNA, 33 bp, Homo sapien
catatgagactaggaagtaatagcattcatact

SEQ ID NO: 230773 - DNA, 33 bp, Homo sapien
aattcatagaaggaaaccattaaatgcaaagga

SEQ ID NO: 230774 - DNA, 33 bp, Homo sapien
aattcatagaaggaaatcattaaatgcaaagga

SEQ ID NO: 230775 - DNA, 33 bp, Homo sapien
ctgacaattggttgtaataaaaatgacaaagtc

SEQ ID NO: 230776 - DNA, 33 bp, Homo sapien
ctgacaattggttgtagtaaaaatgacaaagtc

SEQ ID NO: 230777 - DNA, 33 bp, Homo sapien
tcagagtacgtaaagcaatagtctacagtctct

SEQ ID NO: 230778 - DNA, 33 bp, Homo sapien
tcagagtacgtaaagcgatagtctacagtctct

SEQ ID NO: 230779 - DNA, 33 bp, Homo sapien
accttttcaatcacaccgatcctcaaattctac

SEQ ID NO: 230780 - DNA, 33 bp, Homo sapien
accttttcaatcacactgatcctcaaattctac

SEQ ID NO: 230781 - DNA, 33 bp, Homo sapien
ccccattcggacttgacctaaacactgacatct

SEQ ID NO: 230782 - DNA, 33 bp, Homo sapien
ccccattcggacttgatctaaacactgacatct

SEQ ID NO: 230783 - DNA, 33 bp, Homo sapien
gagggaccagtcaaaaaccatcacagtaaatca

SEQ ID NO: 230784 - DNA, 33 bp, Homo sapien
gagggaccagtcaaaagccatcacagtaaatca

SEQ ID NO: 230785 - DNA, 33 bp, Homo sapien
aagcaaattagcagaacattaaggataatgaca

SEQ ID NO: 230786 - DNA, 33 bp, Homo sapien
aagcaaattagcagaatattaaggataatgaca

SEQ ID NO: 230787 - DNA, 33 bp, Homo sapien
tctgttgaccagtgaacaaaataatgatcctga

SEQ ID NO: 230788 - DNA, 33 bp, Homo sapien
tctgttgaccagtgaataaaataatgatcctga

SEQ ID NO: 230789 - DNA, 33 bp, Homo sapien
ataatacccacttcacaggatttttgtgagagt

SEQ ID NO: 230790 - DNA, 33 bp, Homo sapien
ataatacccacttcacgggatttttgtgagagt

SEQ ID NO: 230791 - DNA, 33 bp, Homo sapien
cggaagtgcttttccaagattcgggccggagag

SEQ ID NO: 230792 - DNA, 33 bp, Homo sapien
cggaagtgcttttccaggattcgggccggagag

SEQ ID NO: 230793 - DNA, 33 bp, Homo sapien
gtgtgcaacagcattacgtttaaaaaaacgcac

SEQ ID NO: 230794 - DNA, 33 bp, Homo sapien
gtgtgcaacagcattatgtttaaaaaaacgcac

SEQ ID NO: 230795 - DNA, 33 bp, Homo sapien
gcaaattttgcaataaagcaagtcacaaagttt

SEQ ID NO: 230796 - DNA, 33 bp, Homo sapien
gcaaattttgcaataaggcaagtcacaaagttt

SEQ ID NO: 230797 - DNA, 33 bp, Homo sapien
aacttaatttgccaacactattcctctcaaaac

SEQ ID NO: 230798 - DNA, 33 bp, Homo sapien
aacttaatttgccaaccctattcctctcaaaac

SEQ ID NO: 230799 - DNA, 33 bp, Homo sapien
atttagtcctcatatcaataccagggaatactg

SEQ ID NO: 230800 - DNA, 33 bp, Homo sapien
atttagtcctcatatcgataccagggaatactg

SEQ ID NO: 230801 - DNA, 33 bp, Homo sapien
ctgtcctcaaaatgtcaagttattggcagaaac

SEQ ID NO: 230802 - DNA, 33 bp, Homo sapien
ctgtcctcaaaatgtcgagttattggcagaaac

SEQ ID NO: 230803 - DNA, 33 bp, Homo sapien
attaactggtatgtcactcactagagaaatact

SEQ ID NO: 230804 - DNA, 33 bp, Homo sapien
attaactggtatgtcattcactagagaaatact

SEQ ID NO: 230805 - DNA, 33 bp, Homo sapien
aatcaaatgcagaagaacttttttctaagggat

SEQ ID NO: 230806 - DNA, 33 bp, Homo sapien
aatcaaatgcagaagagcttttttctaagggat

SEQ ID NO: 230807 - DNA, 33 bp, Homo sapien
attacctagaaatgaacttatagacactataaa

SEQ ID NO: 230808 - DNA, 33 bp, Homo sapien
attacctagaaatgaagttatagacactataaa

SEQ ID NO: 230809 - DNA, 33 bp, Homo sapien
tctaaatatttttcagcagtgtacaggatatag

SEQ ID NO: 230810 - DNA, 33 bp, Homo sapien
tctaaatatttttcaggagtgtacaggatatag

SEQ ID NO: 230811 - DNA, 33 bp, Homo sapien
taaagcaataaaaatacggccgcacaactacaa

SEQ ID NO: 230812 - DNA, 33 bp, Homo sapien
taaagcaataaaaatatggccgcacaactacaa

SEQ ID NO: 230813 - DNA, 33 bp, Homo sapien
gacccataactccaaggagactatcaatctgca

SEQ ID NO: 230814 - DNA, 33 bp, Homo sapien
gacccataactccaagtagactatcaatctgca

SEQ ID NO: 230815 - DNA, 33 bp, Homo sapien
ggtatttgtacacccacatctatttgtacaaag

SEQ ID NO: 230816 - DNA, 33 bp, Homo sapien
ggtatttgtacacccatatctatttgtacaaag

SEQ ID NO: 230817 - DNA, 33 bp, Homo sapien
atcagtcttaaaatcaatcatctctggccgggc

SEQ ID NO: 230818 - DNA, 33 bp, Homo sapien
atcagtcttaaaatcagtcatctctggccgggc

SEQ ID NO: 230819 - DNA, 33 bp, Homo sapien
ttcatgttaaatacacaaactaatattattcaa

SEQ ID NO: 230820 - DNA, 33 bp, Homo sapien
ttcatgttaaatacacgaactaatattattcaa

SEQ ID NO: 230821 - DNA, 33 bp, Homo sapien
ccatttataaacattcccccgacagcaactgga

SEQ ID NO: 230822 - DNA, 33 bp, Homo sapien
ccatttataaacattcgcccgacagcaactgga

SEQ ID NO: 230823 - DNA, 33 bp, Homo sapien
tgagtatgtggcagaactgcagacccatgtgct

SEQ ID NO: 230824 - DNA, 33 bp, Homo sapien
tgagtatgtggcagaattgcagacccatgtgct

SEQ ID NO: 230825 - DNA, 33 bp, Homo sapien
cgataatacttgcacaactcacttctctatact

SEQ ID NO: 230826 - DNA, 33 bp, Homo sapien
cgataatacttgcacagctcacttctctatact

SEQ ID NO: 230827 - DNA, 33 bp, Homo sapien
aagacagagggggatactagagatgagttccag

SEQ ID NO: 230828 - DNA, 33 bp, Homo sapien
aagacagagggggatagtagagatgagttccag

SEQ ID NO: 230829 - DNA, 33 bp, Homo sapien
gtgcaatagttaagtaaataagtatgtgtttga

SEQ ID NO: 230830 - DNA, 33 bp, Homo sapien
gtgcaatagttaagtacataagtatgtgtttga

SEQ ID NO: 230831 - DNA, 33 bp, Homo sapien
atcacttcctcttgaagactacagttttttgta

SEQ ID NO: 230832 - DNA, 33 bp, Homo sapien
atcacttcctcttgaatactacagttttttgta

SEQ ID NO: 230833 - DNA, 33 bp, Homo sapien
ttctttgtaacagatcaaggtcaaattatcaga

SEQ ID NO: 230834 - DNA, 33 bp, Homo sapien
ttctttgtaacagatcgaggtcaaattatcaga

SEQ ID NO: 230835 - DNA, 33 bp, Homo sapien
gtaagccttgttctaaccattgttttaaagata

SEQ ID NO: 230836 - DNA, 33 bp, Homo sapien
gtaagccttgttctaagcattgttttaaagata

SEQ ID NO: 230837 - DNA, 33 bp, Homo sapien
attcactcagtattcagccctcagcatctaatc

SEQ ID NO: 230838 - DNA, 33 bp, Homo sapien
attcactcagtattcatccctcagcatctaatc

SEQ ID NO: 230839 - DNA, 33 bp, Homo sapien
atttaatgggttacttaaaaaatatgaaacaga

SEQ ID NO: 230840 - DNA, 33 bp, Homo sapien
atttaatgggttactttaaaaatatgaaacaga

SEQ ID NO: 230841 - DNA, 33 bp, Homo sapien
taaaatgcttggcataccttaaagtcagtaatt

SEQ ID NO: 230842 - DNA, 33 bp, Homo sapien
taaaatgcttggcatatcttaaagtcagtaatt

SEQ ID NO: 230843 - DNA, 33 bp, Homo sapien
atttgtatggaaaatgacacggcaaataaatta

SEQ ID NO: 230844 - DNA, 33 bp, Homo sapien
atttgtatggaaaatggcacggcaaataaatta

SEQ ID NO: 230845 - DNA, 33 bp, Homo sapien
tttagaaaaatctcaacttcacaaatatctttc

SEQ ID NO: 230846 - DNA, 33 bp, Homo sapien
tttagaaaaatctcaagttcacaaatatctttc

SEQ ID NO: 230847 - DNA, 33 bp, Homo sapien
catgggatgccactttaaaaaaaaatcaaggaa

SEQ ID NO: 230848 - DNA, 33 bp, Homo sapien
catgggatgccactttgaaaaaaaatcaaggaa

SEQ ID NO: 230849 - DNA, 33 bp, Homo sapien
ttgaaacactgaagagcaaaaggggctgggaca

SEQ ID NO: 230850 - DNA, 33 bp, Homo sapien
ttgaaacactgaagagtaaaaggggctgggaca

SEQ ID NO: 230851 - DNA, 33 bp, Homo sapien
tagtcatgctttgtaaacaacctagatgcctaa

SEQ ID NO: 230852 - DNA, 33 bp, Homo sapien
tagtcatgctttgtaaccaacctagatgcctaa

SEQ ID NO: 230853 - DNA, 33 bp, Homo sapien
agacagtttctattgcactgaaattaagaactg

SEQ ID NO: 230854 - DNA, 33 bp, Homo sapien
agacagtttctattgcgctgaaattaagaactg

SEQ ID NO: 230855 - DNA, 33 bp, Homo sapien
ttacaaacagcttggcaatactagcatgatgga

SEQ ID NO: 230856 - DNA, 33 bp, Homo sapien
ttacaaacagcttggctatactagcatgatgga

SEQ ID NO: 230857 - DNA, 33 bp, Homo sapien
tttctttctcatgaacaggagaaacgtaggctt

SEQ ID NO: 230858 - DNA, 33 bp, Homo sapien
tttctttctcatgaactggagaaacgtaggctt

SEQ ID NO: 230859 - DNA, 33 bp, Homo sapien
gccagtaatctgtctgcaacgtctttctgtgag

SEQ ID NO: 230860 - DNA, 33 bp, Homo sapien
gccagtaatctgtctgtaacgtctttctgtgag

SEQ ID NO: 230861 - DNA, 33 bp, Homo sapien
acgctccacagaacaacagggccattttatcat

SEQ ID NO: 230862 - DNA, 33 bp, Homo sapien
acgctccacagaacaatagggccattttatcat

SEQ ID NO: 230863 - DNA, 33 bp, Homo sapien
aggaggaagaaagagacggttgtgatgaacatt

SEQ ID NO: 230864 - DNA, 33 bp, Homo sapien
aggaggaagaaagagatggttgtgatgaacatt

SEQ ID NO: 230865 - DNA, 33 bp, Homo sapien
agagatggagtccacaatcaaattctatttaga

SEQ ID NO: 230866 - DNA, 33 bp, Homo sapien
agagatggagtccacattcaaattctatttaga

SEQ ID NO: 230867 - DNA, 33 bp, Homo sapien
aacaagaaaagtacagaaactccattagataaa

SEQ ID NO: 230868 - DNA, 33 bp, Homo sapien
aacaagaaaagtacagtaactccattagataaa

SEQ ID NO: 230869 - DNA, 33 bp, Homo sapien
agtcctaaaaggatgcacaggcacatgaagaga

SEQ ID NO: 230870 - DNA, 33 bp, Homo sapien
agtcctaaaaggatgcgcaggcacatgaagaga

SEQ ID NO: 230871 - DNA, 33 bp, Homo sapien
atcccgttccccatcccaactatttcagtttgt

SEQ ID NO: 230872 - DNA, 33 bp, Homo sapien
atcccgttccccatcctaactatttcagtttgt

SEQ ID NO: 230873 - DNA, 33 bp, Homo sapien
tagcggaatgcctgacactcaatagttgcttaa

SEQ ID NO: 230874 - DNA, 33 bp, Homo sapien
tagcggaatgcctgactctcaatagttgcttaa

SEQ ID NO: 230875 - DNA, 33 bp, Homo sapien
gaaaatagttacaaagcattgggtcagtttact

SEQ ID NO: 230876 - DNA, 33 bp, Homo sapien
gaaaatagttacaaaggattgggtcagtttact

SEQ ID NO: 230877 - DNA, 33 bp, Homo sapien
atgcataaaagacgcacgtagacttgagcgggg

SEQ ID NO: 230878 - DNA, 33 bp, Homo sapien
atgcataaaagacgcaggtagacttgagcgggg

SEQ ID NO: 230879 - DNA, 33 bp, Homo sapien
cttttaattgacacagaaacatcctcagagatc

SEQ ID NO: 230880 - DNA, 33 bp, Homo sapien
cttttaattgacacaggaacatcctcagagatc

SEQ ID NO: 230881 - DNA, 33 bp, Homo sapien
gtgtcaaagcctagctcaaaaacttgctttgcc

SEQ ID NO: 230882 - DNA, 33 bp, Homo sapien
gtgtcaaagcctagctgaaaaacttgctttgcc

SEQ ID NO: 230883 - DNA, 33 bp, Homo sapien
tgtgtctaatatagaaagacaaaaatagccctg

SEQ ID NO: 230884 - DNA, 33 bp, Homo sapien
tgtgtctaatatagaaggacaaaaatagccctg

SEQ ID NO: 230885 - DNA, 33 bp, Homo sapien
tcttattattcgaattaaaattgtcaaaatacc

SEQ ID NO: 230886 - DNA, 33 bp, Homo sapien
tcttattattcgaatttaaattgtcaaaatacc

SEQ ID NO: 230887 - DNA, 33 bp, Homo sapien
tttaacagaattgaaaggaggaatttaggaaaa

SEQ ID NO: 230888 - DNA, 33 bp, Homo sapien
tttaacagaattgaaatgaggaatttaggaaaa

SEQ ID NO: 230889 - DNA, 33 bp, Homo sapien
taaaaaaggaaatcaagccatgtacacatctga

SEQ ID NO: 230890 - DNA, 33 bp, Homo sapien
taaaaaaggaaatcaatccatgtacacatctga

SEQ ID NO: 230891 - DNA, 33 bp, Homo sapien
atctgataccatttaaagatgaaaactgattgc

SEQ ID NO: 230892 - DNA, 33 bp, Homo sapien
atctgataccatttaatgatgaaaactgattgc

SEQ ID NO: 230893 - DNA, 33 bp, Homo sapien
cttgaaaatcaaaacacccaacagtaaagaaga

SEQ ID NO: 230894 - DNA, 33 bp, Homo sapien
cttgaaaatcaaaacatccaacagtaaagaaga

SEQ ID NO: 230895 - DNA, 33 bp, Homo sapien
gcatttctattttggggactgcattcagatttt

SEQ ID NO: 230896 - DNA, 33 bp, Homo sapien
gcatttctattttgggtactgcattcagatttt

SEQ ID NO: 230897 - DNA, 33 bp, Homo sapien
ctgagacatgcatacaacaagagattcctatcc

SEQ ID NO: 230898 - DNA, 33 bp, Homo sapien
ctgagacatgcatacagcaagagattcctatcc

SEQ ID NO: 230899 - DNA, 33 bp, Homo sapien
gcaaccttctctaagacgtgctttgcgggcaac

SEQ ID NO: 230900 - DNA, 33 bp, Homo sapien
gcaaccttctctaagatgtgctttgcgggcaac

SEQ ID NO: 230901 - DNA, 33 bp, Homo sapien
ggattgacgtgataccactttgggaactcccac

SEQ ID NO: 230902 - DNA, 33 bp, Homo sapien
ggattgacgtgataccgctttgggaactcccac

SEQ ID NO: 230903 - DNA, 33 bp, Homo sapien
taagaaatacttttcacggaattctttatttct

SEQ ID NO: 230904 - DNA, 33 bp, Homo sapien
taagaaatacttttcatggaattctttatttct

SEQ ID NO: 230905 - DNA, 33 bp, Homo sapien
gatttactaagatgacaggtgtggtaataagta

SEQ ID NO: 230906 - DNA, 33 bp, Homo sapien
gatttactaagatgacgggtgtggtaataagta

SEQ ID NO: 230907 - DNA, 33 bp, Homo sapien
tgaaaaaaatcaaagaatcctgtccttcctgct

SEQ ID NO: 230908 - DNA, 33 bp, Homo sapien
tgaaaaaaatcaaagactcctgtccttcctgct

SEQ ID NO: 230909 - DNA, 33 bp, Homo sapien
tacttactagagtatcggaaaggctggcttaac

SEQ ID NO: 230910 - DNA, 33 bp, Homo sapien
tacttactagagtatctgaaaggctggcttaac

SEQ ID NO: 230911 - DNA, 33 bp, Homo sapien
aaaaatacgctaattacagaccaagaaggacct

SEQ ID NO: 230912 - DNA, 33 bp, Homo sapien
aaaaatacgctaattagagaccaagaaggacct

SEQ ID NO: 230913 - DNA, 33 bp, Homo sapien
ccaagagcgagtaccaggtgggaactttaaagg

SEQ ID NO: 230914 - DNA, 33 bp, Homo sapien
ccaagagcgagtaccatgtgggaactttaaagg

SEQ ID NO: 230915 - DNA, 33 bp, Homo sapien
catttatctcagtgaacggagcaatgactttaa

SEQ ID NO: 230916 - DNA, 33 bp, Homo sapien
catttatctcagtgaatggagcaatgactttaa

SEQ ID NO: 230917 - DNA, 33 bp, Homo sapien
tttctttcagttgaccaactttgatttccaaag

SEQ ID NO: 230918 - DNA, 33 bp, Homo sapien
tttctttcagttgaccgactttgatttccaaag

SEQ ID NO: 230919 - DNA, 33 bp, Homo sapien
agtttctcttgctatcactttttcttctggctg

SEQ ID NO: 230920 - DNA, 33 bp, Homo sapien
agtttctcttgctatcgctttttcttctggctg

SEQ ID NO: 230921 - DNA, 33 bp, Homo sapien
atgagcccggaacagacagaatgtcatcctgtg

SEQ ID NO: 230922 - DNA, 33 bp, Homo sapien
atgagcccggaacagatagaatgtcatcctgtg

SEQ ID NO: 230923 - DNA, 33 bp, Homo sapien
caacttaaaagcaagaaaagttcaaggatgagc

SEQ ID NO: 230924 - DNA, 33 bp, Homo sapien
caacttaaaagcaagagaagttcaaggatgagc

SEQ ID NO: 230925 - DNA, 33 bp, Homo sapien
ataagaccatactataagcaagcattgtgtgtt

SEQ ID NO: 230926 - DNA, 33 bp, Homo sapien
ataagaccatactatacgcaagcattgtgtgtt

SEQ ID NO: 230927 - DNA, 33 bp, Homo sapien
tctgaaaaatacactcaaaggaaatgaaatcac

SEQ ID NO: 230928 - DNA, 33 bp, Homo sapien
tctgaaaaatacactccaaggaaatgaaatcac

SEQ ID NO: 230929 - DNA, 33 bp, Homo sapien
ggagacattaaggtaacataaaattgagctgtc

SEQ ID NO: 230930 - DNA, 33 bp, Homo sapien
ggagacattaaggtaagataaaattgagctgtc

SEQ ID NO: 230931 - DNA, 33 bp, Homo sapien
taataattatcagtcaactacattaatatccct

SEQ ID NO: 230932 - DNA, 33 bp, Homo sapien
taataattatcagtcatctacattaatatccct

SEQ ID NO: 230933 - DNA, 33 bp, Homo sapien
aagaaaagtacctgtacaccaaacttattgctg

SEQ ID NO: 230934 - DNA, 33 bp, Homo sapien
aagaaaagtacctgtataccaaacttattgctg

SEQ ID NO: 230935 - DNA, 33 bp, Homo sapien
tttctgtgaagacagaacactatacaagaataa

SEQ ID NO: 230936 - DNA, 33 bp, Homo sapien
tttctgtgaagacagagcactatacaagaataa

SEQ ID NO: 230937 - DNA, 33 bp, Homo sapien
acaaaatgagttatacaaagacatgtgttttgg

SEQ ID NO: 230938 - DNA, 33 bp, Homo sapien
acaaaatgagttatacgaagacatgtgttttgg

SEQ ID NO: 230939 - DNA, 33 bp, Homo sapien
aggtttggtgatataagaagtaatcagattata

SEQ ID NO: 230940 - DNA, 33 bp, Homo sapien
aggtttggtgatataataagtaatcagattata

SEQ ID NO: 230941 - DNA, 33 bp, Homo sapien
taggagctggggatacacagatgaagactaggt

SEQ ID NO: 230942 - DNA, 33 bp, Homo sapien
taggagctggggatacgcagatgaagactaggt

SEQ ID NO: 230943 - DNA, 33 bp, Homo sapien
aatggcttatttctaacggcactcaactattga

SEQ ID NO: 230944 - DNA, 33 bp, Homo sapien
aatggcttatttctaagggcactcaactattga

SEQ ID NO: 230945 - DNA, 33 bp, Homo sapien
atattctgttgagaaaacttaagagcaccattt

SEQ ID NO: 230946 - DNA, 33 bp, Homo sapien
atattctgttgagaaatcttaagagcaccattt

SEQ ID NO: 230947 - DNA, 33 bp, Homo sapien
cagagctagtattcaaactctggtgtgtctgac

SEQ ID NO: 230948 - DNA, 33 bp, Homo sapien
cagagctagtattcaacctctggtgtgtctgac

SEQ ID NO: 230949 - DNA, 33 bp, Homo sapien
tgactgtagttcctgacgatatattgtaaattc

SEQ ID NO: 230950 - DNA, 33 bp, Homo sapien
tgactgtagttcctgatgatatattgtaaattc

SEQ ID NO: 230951 - DNA, 33 bp, Homo sapien
agagcagcttttagtgaaattctcaggaggaaa

SEQ ID NO: 230952 - DNA, 33 bp, Homo sapien
agagcagcttttagtggaattctcaggaggaaa

SEQ ID NO: 230953 - DNA, 33 bp, Homo sapien
atatccatatcactacaaaattttcttccagtc

SEQ ID NO: 230954 - DNA, 33 bp, Homo sapien
atatccatatcactacgaaattttcttccagtc

SEQ ID NO: 230955 - DNA, 33 bp, Homo sapien
gcatcaaaagacttaactgatcacttgagtgtg

SEQ ID NO: 230956 - DNA, 33 bp, Homo sapien
gcatcaaaagacttaattgatcacttgagtgtg

SEQ ID NO: 230957 - DNA, 33 bp, Homo sapien
agatccatttggtctacagcgttatgcagttct

SEQ ID NO: 230958 - DNA, 33 bp, Homo sapien
agatccatttggtctatagcgttatgcagttct

SEQ ID NO: 230959 - DNA, 33 bp, Homo sapien
aagggaagttctctacacactctgttaaaggca

SEQ ID NO: 230960 - DNA, 33 bp, Homo sapien
aagggaagttctctacgcactctgttaaaggca

SEQ ID NO: 230961 - DNA, 33 bp, Homo sapien
acaagaaccacggccaaagccacacttcacatt

SEQ ID NO: 230962 - DNA, 33 bp, Homo sapien
acaagaaccacggccagagccacacttcacatt

SEQ ID NO: 230963 - DNA, 33 bp, Homo sapien
agatcttttaagaaacgctatacaccatggaat

SEQ ID NO: 230964 - DNA, 33 bp, Homo sapien
agatcttttaagaaactctatacaccatggaat

SEQ ID NO: 230965 - DNA, 33 bp, Homo sapien
ttcactgaatttcacacgatcctttctatttgc

SEQ ID NO: 230966 - DNA, 33 bp, Homo sapien
ttcactgaatttcacatgatcctttctatttgc

SEQ ID NO: 230967 - DNA, 33 bp, Homo sapien
agaggtttgtggtagaaatgtaataagtataga

SEQ ID NO: 230968 - DNA, 33 bp, Homo sapien
agaggtttgtggtagacatgtaataagtataga

SEQ ID NO: 230969 - DNA, 33 bp, Homo sapien
tgttggtcttgaaatcaacatttttcagaaaac

SEQ ID NO: 230970 - DNA, 33 bp, Homo sapien
tgttggtcttgaaatctacatttttcagaaaac

SEQ ID NO: 230971 - DNA, 33 bp, Homo sapien
aattaattacctgctcacatccttctcaataat

SEQ ID NO: 230972 - DNA, 33 bp, Homo sapien
aattaattacctgctcgcatccttctcaataat

SEQ ID NO: 230973 - DNA, 33 bp, Homo sapien
gaattcagacaactggcaagatgacaaaatttg

SEQ ID NO: 230974 - DNA, 33 bp, Homo sapien
gaattcagacaactggtaagatgacaaaatttg

SEQ ID NO: 230975 - DNA, 33 bp, Homo sapien
tctcatcaaatttttaaccaatagttttagcat

SEQ ID NO: 230976 - DNA, 33 bp, Homo sapien
tctcatcaaatttttacccaatagttttagcat

SEQ ID NO: 230977 - DNA, 33 bp, Homo sapien
cacgtattgacctatgaagagttacttaacctc

SEQ ID NO: 230978 - DNA, 33 bp, Homo sapien
cacgtattgacctatggagagttacttaacctc

SEQ ID NO: 230979 - DNA, 33 bp, Homo sapien
catgatttgtagtaaacccaggtctgaatccca

SEQ ID NO: 230980 - DNA, 33 bp, Homo sapien
catgatttgtagtaaatccaggtctgaatccca

SEQ ID NO: 230981 - DNA, 33 bp, Homo sapien
ttaagggcaatttacacaaaccttcacatgttg

SEQ ID NO: 230982 - DNA, 33 bp, Homo sapien
ttaagggcaatttacagaaaccttcacatgttg

SEQ ID NO: 230983 - DNA, 33 bp, Homo sapien
ttgaggagtttattgacgaggaaaagaattgat

SEQ ID NO: 230984 - DNA, 33 bp, Homo sapien
ttgaggagtttattgatgaggaaaagaattgat

SEQ ID NO: 230985 - DNA, 33 bp, Homo sapien
gaaatttgaaactatgaaaaggtatgaagagaa

SEQ ID NO: 230986 - DNA, 33 bp, Homo sapien
gaaatttgaaactatggaaaggtatgaagagaa

SEQ ID NO: 230987 - DNA, 33 bp, Homo sapien
ttcaggctaaagggaaatggttctagatggaaa

SEQ ID NO: 230988 - DNA, 33 bp, Homo sapien
ttcaggctaaagggaagtggttctagatggaaa

SEQ ID NO: 230989 - DNA, 33 bp, Homo sapien
atgaccctgcacataaggtactgtttttcttta

SEQ ID NO: 230990 - DNA, 33 bp, Homo sapien
atgaccctgcacataatgtactgtttttcttta

SEQ ID NO: 230991 - DNA, 33 bp, Homo sapien
tcttgattttagagccgcattgcctccaaccaa

SEQ ID NO: 230992 - DNA, 33 bp, Homo sapien
tcttgattttagagcctcattgcctccaaccaa

SEQ ID NO: 230993 - DNA, 33 bp, Homo sapien
gggtgggaacaagggcaatgccatcaaagcctt

SEQ ID NO: 230994 - DNA, 33 bp, Homo sapien
gggtgggaacaagggcgatgccatcaaagcctt

SEQ ID NO: 230995 - DNA, 33 bp, Homo sapien
agtacacagatcataagtacactattttatact

SEQ ID NO: 230996 - DNA, 33 bp, Homo sapien
agtacacagatcataattacactattttatact

SEQ ID NO: 230997 - DNA, 33 bp, Homo sapien
atatacaatctcaaaactaattcaatcaacatc

SEQ ID NO: 230998 - DNA, 33 bp, Homo sapien
atatacaatctcaaaattaattcaatcaacatc

SEQ ID NO: 230999 - DNA, 33 bp, Homo sapien
cactttcagactctcaactatgcttggttccca

SEQ ID NO: 231000 - DNA, 33 bp, Homo sapien
cactttcagactctcatctatgcttggttccca

SEQ ID NO: 231001 - DNA, 33 bp, Homo sapien
aaaaccaagagactataagagaacaccaaatct

SEQ ID NO: 231002 - DNA, 33 bp, Homo sapien
aaaaccaagagactatgagagaacaccaaatct

SEQ ID NO: 231003 - DNA, 33 bp, Homo sapien
gtggatggcaatgagacataaacatgtggtcac

SEQ ID NO: 231004 - DNA, 33 bp, Homo sapien
gtggatggcaatgagatataaacatgtggtcac

SEQ ID NO: 231005 - DNA, 33 bp, Homo sapien
tcaaaaactctgaatcaaaaactctggggatgg

SEQ ID NO: 231006 - DNA, 33 bp, Homo sapien
tcaaaaactctgaatcgaaaactctggggatgg

SEQ ID NO: 231007 - DNA, 33 bp, Homo sapien
gtcacccgcctagtaaatgccagtatcaaatag

SEQ ID NO: 231008 - DNA, 33 bp, Homo sapien
gtcacccgcctagtaagtgccagtatcaaatag

SEQ ID NO: 231009 - DNA, 33 bp, Homo sapien
aggtaaactgcttagcccggtatatgacacact

SEQ ID NO: 231010 - DNA, 33 bp, Homo sapien
aggtaaactgcttagctcggtatatgacacact

SEQ ID NO: 231011 - DNA, 33 bp, Homo sapien
gcatggctcacaaataaaacaggaagccacctt

SEQ ID NO: 231012 - DNA, 33 bp, Homo sapien
gcatggctcacaaatacaacaggaagccacctt

SEQ ID NO: 231013 - DNA, 33 bp, Homo sapien
atctaattcagagacaacagaccaatgccaatg

SEQ ID NO: 231014 - DNA, 33 bp, Homo sapien
atctaattcagagacagcagaccaatgccaatg

SEQ ID NO: 231015 - DNA, 33 bp, Homo sapien
gctgttttctattccaataacctgcagggggcg

SEQ ID NO: 231016 - DNA, 33 bp, Homo sapien
gctgttttctattccagtaacctgcagggggcg

SEQ ID NO: 231017 - DNA, 33 bp, Homo sapien
ctcttctaatatgaaccgcagcttcacaatcag

SEQ ID NO: 231018 - DNA, 33 bp, Homo sapien
ctcttctaatatgaactgcagcttcacaatcag

SEQ ID NO: 231019 - DNA, 33 bp, Homo sapien
ttgtgactgttccttccaagtatgacctgcaag

SEQ ID NO: 231020 - DNA, 33 bp, Homo sapien
ttgtgactgttccttctaagtatgacctgcaag

SEQ ID NO: 231021 - DNA, 33 bp, Homo sapien
tacttttaattgcctcaatagctactcaataaa

SEQ ID NO: 231022 - DNA, 33 bp, Homo sapien
tacttttaattgcctcgatagctactcaataaa

SEQ ID NO: 231023 - DNA, 33 bp, Homo sapien
ccttctttgctgcaaacgtattgtagatcaaag

SEQ ID NO: 231024 - DNA, 33 bp, Homo sapien
ccttctttgctgcaaatgtattgtagatcaaag

SEQ ID NO: 231025 - DNA, 33 bp, Homo sapien
cttccacctaccagccactgtaccacaaactct

SEQ ID NO: 231026 - DNA, 33 bp, Homo sapien
cttccacctaccagccgctgtaccacaaactct

SEQ ID NO: 231027 - DNA, 33 bp, Homo sapien
tctctccttcctctgaactgatgtagtgcttta

SEQ ID NO: 231028 - DNA, 33 bp, Homo sapien
tctctccttcctctgagctgatgtagtgcttta

SEQ ID NO: 231029 - DNA, 33 bp, Homo sapien
agcaggtcagttaggacatcattataatagtgt

SEQ ID NO: 231030 - DNA, 33 bp, Homo sapien
agcaggtcagttaggagatcattataatagtgt

SEQ ID NO: 231031 - DNA, 33 bp, Homo sapien
tcagatttccttaagtcaataaaaccacttctc

SEQ ID NO: 231032 - DNA, 33 bp, Homo sapien
tcagatttccttaagttaataaaaccacttctc

SEQ ID NO: 231033 - DNA, 33 bp, Homo sapien
tttttttttttcatctaaatgttcagttgacat

SEQ ID NO: 231034 - DNA, 33 bp, Homo sapien
tttttttttttcatctgaatgttcagttgacat

SEQ ID NO: 231035 - DNA, 33 bp, Homo sapien
gactgtagatggtagggattgggtttgttatct

SEQ ID NO: 231036 - DNA, 33 bp, Homo sapien
gactgtagatggtaggtattgggtttgttatct

SEQ ID NO: 231037 - DNA, 33 bp, Homo sapien
cagagcacaatacgctcaacaggtcagaggaag

SEQ ID NO: 231038 - DNA, 33 bp, Homo sapien
cagagcacaatacgctgaacaggtcagaggaag

SEQ ID NO: 231039 - DNA, 33 bp, Homo sapien
tcttttaccactactacggagactgtggaaata

SEQ ID NO: 231040 - DNA, 33 bp, Homo sapien
tcttttaccactactatggagactgtggaaata

SEQ ID NO: 231041 - DNA, 33 bp, Homo sapien
ggtctcttctgaggaccgctttgagaaaagaac

SEQ ID NO: 231042 - DNA, 33 bp, Homo sapien
ggtctcttctgaggactgctttgagaaaagaac

SEQ ID NO: 231043 - DNA, 33 bp, Homo sapien
aattttgctattctggaaaaatgtgaaatgtga

SEQ ID NO: 231044 - DNA, 33 bp, Homo sapien
aattttgctattctgggaaaatgtgaaatgtga

SEQ ID NO: 231045 - DNA, 33 bp, Homo sapien
tgtcacctcacttgtaacttggagccatgagca

SEQ ID NO: 231046 - DNA, 33 bp, Homo sapien
tgtcacctcacttgtaccttggagccatgagca

SEQ ID NO: 231047 - DNA, 33 bp, Homo sapien
attctccccaaataccaatttttcagctataag

SEQ ID NO: 231048 - DNA, 33 bp, Homo sapien
attctccccaaatacccatttttcagctataag

SEQ ID NO: 231049 - DNA, 33 bp, Homo sapien
cctgaaatgctcctcccgagaatttaactactt

SEQ ID NO: 231050 - DNA, 33 bp, Homo sapien
cctgaaatgctcctcctgagaatttaactactt

SEQ ID NO: 231051 - DNA, 33 bp, Homo sapien
atcattcaattggcagaatttactgctcaaacc

SEQ ID NO: 231052 - DNA, 33 bp, Homo sapien
atcattcaattggcagcatttactgctcaaacc

SEQ ID NO: 231053 - DNA, 33 bp, Homo sapien
tgatggatctcatcataaagtattctgtctggg

SEQ ID NO: 231054 - DNA, 33 bp, Homo sapien
tgatggatctcatcatgaagtattctgtctggg

SEQ ID NO: 231055 - DNA, 33 bp, Homo sapien
attagagacgagttccacaattcgtatgaatta

SEQ ID NO: 231056 - DNA, 33 bp, Homo sapien
attagagacgagttccgcaattcgtatgaatta

SEQ ID NO: 231057 - DNA, 33 bp, Homo sapien
gctatgtcttacacccagagactttgtgctcag

SEQ ID NO: 231058 - DNA, 33 bp, Homo sapien
gctatgtcttacacccggagactttgtgctcag

SEQ ID NO: 231059 - DNA, 33 bp, Homo sapien
tcctgggagtgtggaacgaaagataaagaacct

SEQ ID NO: 231060 - DNA, 33 bp, Homo sapien
tcctgggagtgtggaatgaaagataaagaacct

SEQ ID NO: 231061 - DNA, 33 bp, Homo sapien
tggcatttctgtccccaagaacagtaaggaatt

SEQ ID NO: 231062 - DNA, 33 bp, Homo sapien
tggcatttctgtcccccagaacagtaaggaatt

SEQ ID NO: 231063 - DNA, 33 bp, Homo sapien
catacgcattattacactagtagatattcatct

SEQ ID NO: 231064 - DNA, 33 bp, Homo sapien
catacgcattattacagtagtagatattcatct

SEQ ID NO: 231065 - DNA, 33 bp, Homo sapien
caaaagcataccattaactgacattccctgtgt

SEQ ID NO: 231066 - DNA, 33 bp, Homo sapien
caaaagcataccattagctgacattccctgtgt

SEQ ID NO: 231067 - DNA, 33 bp, Homo sapien
actgccatgactaatacatgtgccattaaaaaa

SEQ ID NO: 231068 - DNA, 33 bp, Homo sapien
actgccatgactaatatatgtgccattaaaaaa

SEQ ID NO: 231069 - DNA, 33 bp, Homo sapien
gccattctgaacaacaaagaccaagtctctacc

SEQ ID NO: 231070 - DNA, 33 bp, Homo sapien
gccattctgaacaacatagaccaagtctctacc

SEQ ID NO: 231071 - DNA, 33 bp, Homo sapien
cacacagttggaggcacggggcaaaggagagta

SEQ ID NO: 231072 - DNA, 33 bp, Homo sapien
cacacagttggaggcatggggcaaaggagagta

SEQ ID NO: 231073 - DNA, 33 bp, Homo sapien
aattcagctggcattaaataagtaaaaacaagc

SEQ ID NO: 231074 - DNA, 33 bp, Homo sapien
aattcagctggcattacataagtaaaaacaagc

SEQ ID NO: 231075 - DNA, 33 bp, Homo sapien
cctttgctgaattgccggaataatttggtgctg

SEQ ID NO: 231076 - DNA, 33 bp, Homo sapien
cctttgctgaattgcctgaataatttggtgctg

SEQ ID NO: 231077 - DNA, 33 bp, Homo sapien
atgtttactttgcttaactttcaaaactgtttt

SEQ ID NO: 231078 - DNA, 33 bp, Homo sapien
atgtttactttgcttagctttcaaaactgtttt

SEQ ID NO: 231079 - DNA, 33 bp, Homo sapien
gtttatttctgatttccagaggcaagtaaatga

SEQ ID NO: 231080 - DNA, 33 bp, Homo sapien
gtttatttctgatttctagaggcaagtaaatga

SEQ ID NO: 231081 - DNA, 33 bp, Homo sapien
aagcccaggcttcagaagaagaaccagatgtca

SEQ ID NO: 231082 - DNA, 33 bp, Homo sapien
aagcccaggcttcagaggaagaaccagatgtca

SEQ ID NO: 231083 - DNA, 33 bp, Homo sapien
cagtaaaattaatgcccaagtgaaggatcatct

SEQ ID NO: 231084 - DNA, 33 bp, Homo sapien
cagtaaaattaatgcctaagtgaaggatcatct

SEQ ID NO: 231085 - DNA, 33 bp, Homo sapien
aaacacattgactcataaggcgttatttttaca

SEQ ID NO: 231086 - DNA, 33 bp, Homo sapien
aaacacattgactcatgaggcgttatttttaca

SEQ ID NO: 231087 - DNA, 33 bp, Homo sapien
aatcactgccgttaaaatatggcaggttgtaga

SEQ ID NO: 231088 - DNA, 33 bp, Homo sapien
aatcactgccgttaaagtatggcaggttgtaga

SEQ ID NO: 231089 - DNA, 33 bp, Homo sapien
aatgaacaaggaaacactggatttaagctacac

SEQ ID NO: 231090 - DNA, 33 bp, Homo sapien
aatgaacaaggaaacattggatttaagctacac

SEQ ID NO: 231091 - DNA, 33 bp, Homo sapien
caagatcccccagaccccaggttggtccagaga

SEQ ID NO: 231092 - DNA, 33 bp, Homo sapien
caagatcccccagaccgcaggttggtccagaga

SEQ ID NO: 231093 - DNA, 33 bp, Homo sapien
tcttttcatgaccataaagtattccattgtata

SEQ ID NO: 231094 - DNA, 33 bp, Homo sapien
tcttttcatgaccatacagtattccattgtata

SEQ ID NO: 231095 - DNA, 33 bp, Homo sapien
gaatcaagctgaaaataagctggcaactcctgt

SEQ ID NO: 231096 - DNA, 33 bp, Homo sapien
gaatcaagctgaaaatgagctggcaactcctgt

SEQ ID NO: 231097 - DNA, 33 bp, Homo sapien
aactcctcacttcccaagattgcaggagttgtt

SEQ ID NO: 231098 - DNA, 33 bp, Homo sapien
aactcctcacttcccacgattgcaggagttgtt

SEQ ID NO: 231099 - DNA, 33 bp, Homo sapien
aagaaattttgaccgagattacaaactagtggc

SEQ ID NO: 231100 - DNA, 33 bp, Homo sapien
aagaaattttgaccgatattacaaactagtggc

SEQ ID NO: 231101 - DNA, 33 bp, Homo sapien
aggaggttacaactcccgctccaggaaagaagg

SEQ ID NO: 231102 - DNA, 33 bp, Homo sapien
aggaggttacaactcctgctccaggaaagaagg

SEQ ID NO: 231103 - DNA, 33 bp, Homo sapien
aagccactgggagccaatatagaactgatggtg

SEQ ID NO: 231104 - DNA, 33 bp, Homo sapien
aagccactgggagccagtatagaactgatggtg

SEQ ID NO: 231105 - DNA, 33 bp, Homo sapien
agacttactgaaaaaaatcacaggatcgtccag

SEQ ID NO: 231106 - DNA, 33 bp, Homo sapien
agacttactgaaaaaattcacaggatcgtccag

SEQ ID NO: 231107 - DNA, 33 bp, Homo sapien
agaaatggagctacaacttattccagagttaga

SEQ ID NO: 231108 - DNA, 33 bp, Homo sapien
agaaatggagctacaatttattccagagttaga

SEQ ID NO: 231109 - DNA, 33 bp, Homo sapien
gtggccatggtgaacacgatccttttaaataga

SEQ ID NO: 231110 - DNA, 33 bp, Homo sapien
gtggccatggtgaacatgatccttttaaataga

SEQ ID NO: 231111 - DNA, 33 bp, Homo sapien
tcctgaagcacttgaaactccttctttatttat

SEQ ID NO: 231112 - DNA, 33 bp, Homo sapien
tcctgaagcacttgaacctccttctttatttat

SEQ ID NO: 231113 - DNA, 33 bp, Homo sapien
cattatcacacgagtaagttagttatctcagga

SEQ ID NO: 231114 - DNA, 33 bp, Homo sapien
cattatcacacgagtaggttagttatctcagga

SEQ ID NO: 231115 - DNA, 33 bp, Homo sapien
atttgctactttataaacagaatggcctttact

SEQ ID NO: 231116 - DNA, 33 bp, Homo sapien
atttgctactttataaccagaatggcctttact

SEQ ID NO: 231117 - DNA, 33 bp, Homo sapien
caatttggttgcttcacgctggctttcatttca

SEQ ID NO: 231118 - DNA, 33 bp, Homo sapien
caatttggttgcttcatgctggctttcatttca

SEQ ID NO: 231119 - DNA, 33 bp, Homo sapien
gcacaaaggcatactaataatcattctaatttt

SEQ ID NO: 231120 - DNA, 33 bp, Homo sapien
gcacaaaggcatactagtaatcattctaatttt

SEQ ID NO: 231121 - DNA, 33 bp, Homo sapien
gttttaattaggaatgacaagacatgcagatgg

SEQ ID NO: 231122 - DNA, 33 bp, Homo sapien
gttttaattaggaatggcaagacatgcagatgg

SEQ ID NO: 231123 - DNA, 33 bp, Homo sapien
tgtcctgaccttagagaaaatgcctacccatcc

SEQ ID NO: 231124 - DNA, 33 bp, Homo sapien
tgtcctgaccttagagcaaatgcctacccatcc

SEQ ID NO: 231125 - DNA, 33 bp, Homo sapien
gttagtcctagagttacgactttgctcaattcc

SEQ ID NO: 231126 - DNA, 33 bp, Homo sapien
gttagtcctagagttatgactttgctcaattcc

SEQ ID NO: 231127 - DNA, 33 bp, Homo sapien
tgccccgtatctatgcccagcagcagaatcaga

SEQ ID NO: 231128 - DNA, 33 bp, Homo sapien
tgccccgtatctatgctcagcagcagaatcaga

SEQ ID NO: 231129 - DNA, 33 bp, Homo sapien
agtttccctaataactcagatccagtgccacca

SEQ ID NO: 231130 - DNA, 33 bp, Homo sapien
agtttccctaataacttagatccagtgccacca

SEQ ID NO: 231131 - DNA, 33 bp, Homo sapien
gaactctcagtacacaacccagtcacagcagtg

SEQ ID NO: 231132 - DNA, 33 bp, Homo sapien
gaactctcagtacacaccccagtcacagcagtg

SEQ ID NO: 231133 - DNA, 33 bp, Homo sapien
ccaaagcaatcctgagcaaaacacaacaaagct

SEQ ID NO: 231134 - DNA, 33 bp, Homo sapien
ccaaagcaatcctgagtaaaacacaacaaagct

SEQ ID NO: 231135 - DNA, 33 bp, Homo sapien
gtgcaggtggggtagaccaagacagcaaaatag

SEQ ID NO: 231136 - DNA, 33 bp, Homo sapien
gtgcaggtggggtagagcaagacagcaaaatag

SEQ ID NO: 231137 - DNA, 33 bp, Homo sapien
tggtatgtgcctataaccagctaaaggcttagt

SEQ ID NO: 231138 - DNA, 33 bp, Homo sapien
tggtatgtgcctataatcagctaaaggcttagt

SEQ ID NO: 231139 - DNA, 33 bp, Homo sapien
gaaacaatgttcaataccaccagtcatcaggga

SEQ ID NO: 231140 - DNA, 33 bp, Homo sapien
gaaacaatgttcaatatcaccagtcatcaggga

SEQ ID NO: 231141 - DNA, 33 bp, Homo sapien
tctgttttccataacactgatctgctacaggcc

SEQ ID NO: 231142 - DNA, 33 bp, Homo sapien
tctgttttccataacattgatctgctacaggcc

SEQ ID NO: 231143 - DNA, 33 bp, Homo sapien
atcatgaatactaacaaagagagatttggggaa

SEQ ID NO: 231144 - DNA, 33 bp, Homo sapien
atcatgaatactaacagagagagatttggggaa

SEQ ID NO: 231145 - DNA, 33 bp, Homo sapien
agaagtatggaccaagaacagaagttagggaat

SEQ ID NO: 231146 - DNA, 33 bp, Homo sapien
agaagtatggaccaaggacagaagttagggaat

SEQ ID NO: 231147 - DNA, 33 bp, Homo sapien
tgctgaatagaagtgacaagagtaggttttctt

SEQ ID NO: 231148 - DNA, 33 bp, Homo sapien
tgctgaatagaagtgagaagagtaggttttctt

SEQ ID NO: 231149 - DNA, 33 bp, Homo sapien
gaaacaaaatgacactaactttctagaagctga

SEQ ID NO: 231150 - DNA, 33 bp, Homo sapien
gaaacaaaatgacactgactttctagaagctga

SEQ ID NO: 231151 - DNA, 33 bp, Homo sapien
cttattttggtaatcccaatctttggatataat

SEQ ID NO: 231152 - DNA, 33 bp, Homo sapien
cttattttggtaatcctaatctttggatataat

SEQ ID NO: 231153 - DNA, 33 bp, Homo sapien
tgcaattaggaaacaactcttcataagcataac

SEQ ID NO: 231154 - DNA, 33 bp, Homo sapien
tgcaattaggaaacaattcttcataagcataac

SEQ ID NO: 231155 - DNA, 33 bp, Homo sapien
aagggatgccattacacaaactcaagattagtt

SEQ ID NO: 231156 - DNA, 33 bp, Homo sapien
aagggatgccattacataaactcaagattagtt

SEQ ID NO: 231157 - DNA, 33 bp, Homo sapien
atagacaatcaggctacgtgggcagctctaaat

SEQ ID NO: 231158 - DNA, 33 bp, Homo sapien
atagacaatcaggctatgtgggcagctctaaat

SEQ ID NO: 231159 - DNA, 33 bp, Homo sapien
agataatgaaagaaaaagtgtttaactgtagag

SEQ ID NO: 231160 - DNA, 33 bp, Homo sapien
agataatgaaagaaaacgtgtttaactgtagag

SEQ ID NO: 231161 - DNA, 33 bp, Homo sapien
taatggaattgttcaacgtgtggcctttggggt

SEQ ID NO: 231162 - DNA, 33 bp, Homo sapien
taatggaattgttcaatgtgtggcctttggggt

SEQ ID NO: 231163 - DNA, 33 bp, Homo sapien
aatctgtgaaaaggaacaagtatgagagacagc

SEQ ID NO: 231164 - DNA, 33 bp, Homo sapien
aatctgtgaaaaggaagaagtatgagagacagc

SEQ ID NO: 231165 - DNA, 33 bp, Homo sapien
cagtggataataaatgcaaaatttcagtcagta

SEQ ID NO: 231166 - DNA, 33 bp, Homo sapien
cagtggataataaatggaaaatttcagtcagta

SEQ ID NO: 231167 - DNA, 33 bp, Homo sapien
atacagcctgactgaactattttggctaaacgt

SEQ ID NO: 231168 - DNA, 33 bp, Homo sapien
atacagcctgactgaagtattttggctaaacgt

SEQ ID NO: 231169 - DNA, 33 bp, Homo sapien
tatgccagtctagcccacgaaaatggttacgag

SEQ ID NO: 231170 - DNA, 33 bp, Homo sapien
tatgccagtctagcccgcgaaaatggttacgag

SEQ ID NO: 231171 - DNA, 33 bp, Homo sapien
ctgaactaatatgccaatctatctctgcaaata

SEQ ID NO: 231172 - DNA, 33 bp, Homo sapien
ctgaactaatatgccagtctatctctgcaaata

SEQ ID NO: 231173 - DNA, 33 bp, Homo sapien
tttcaagagcaaagaaaaggaaactgaaccaat

SEQ ID NO: 231174 - DNA, 33 bp, Homo sapien
tttcaagagcaaagaagaggaaactgaaccaat

SEQ ID NO: 231175 - DNA, 33 bp, Homo sapien
gagcttacctggccatcatgaaaacatgtaaga

SEQ ID NO: 231176 - DNA, 33 bp, Homo sapien
gagcttacctggccattatgaaaacatgtaaga

SEQ ID NO: 231177 - DNA, 33 bp, Homo sapien
gcattacatatgtaggacacatctagaacttgt

SEQ ID NO: 231178 - DNA, 33 bp, Homo sapien
gcattacatatgtagggcacatctagaacttgt

SEQ ID NO: 231179 - DNA, 33 bp, Homo sapien
tgtaattattccctgaacaatacagtgactatt

SEQ ID NO: 231180 - DNA, 33 bp, Homo sapien
tgtaattattccctgagcaatacagtgactatt

SEQ ID NO: 231181 - DNA, 33 bp, Homo sapien
tagtgtgaattctttacctgtaacctacttgga

SEQ ID NO: 231182 - DNA, 33 bp, Homo sapien
tagtgtgaattctttatctgtaacctacttgga

SEQ ID NO: 231183 - DNA, 33 bp, Homo sapien
tgcttgaagcttcggtcacacacaaatggtgac

SEQ ID NO: 231184 - DNA, 33 bp, Homo sapien
tgcttgaagcttcggttacacacaaatggtgac

SEQ ID NO: 231185 - DNA, 33 bp, Homo sapien
ataaattcatgctgaccgagtagaataataaac

SEQ ID NO: 231186 - DNA, 33 bp, Homo sapien
ataaattcatgctgactgagtagaataataaac

SEQ ID NO: 231187 - DNA, 33 bp, Homo sapien
tttcgctccaattaccaaagtgttccagaacct

SEQ ID NO: 231188 - DNA, 33 bp, Homo sapien
tttcgctccaattaccgaagtgttccagaacct

SEQ ID NO: 231189 - DNA, 33 bp, Homo sapien
tggcacattactggaactggatgtattggtact

SEQ ID NO: 231190 - DNA, 33 bp, Homo sapien
tggcacattactggaattggatgtattggtact

SEQ ID NO: 231191 - DNA, 33 bp, Homo sapien
taaacgcctttctaaccgtcccatgtgcaaaat

SEQ ID NO: 231192 - DNA, 33 bp, Homo sapien
taaacgcctttctaacggtcccatgtgcaaaat

SEQ ID NO: 231193 - DNA, 33 bp, Homo sapien
gactaaataaacacaacgtactaaatgcaggta

SEQ ID NO: 231194 - DNA, 33 bp, Homo sapien
gactaaataaacacaaggtactaaatgcaggta

SEQ ID NO: 231195 - DNA, 33 bp, Homo sapien
atatatagatcagtaaaaattgtgatcctgttg

SEQ ID NO: 231196 - DNA, 33 bp, Homo sapien
atatatagatcagtaagaattgtgatcctgttg

SEQ ID NO: 231197 - DNA, 33 bp, Homo sapien
gatgcccttgtttagacaggctttatttttctt

SEQ ID NO: 231198 - DNA, 33 bp, Homo sapien
gatgcccttgtttagataggctttatttttctt

SEQ ID NO: 231199 - DNA, 33 bp, Homo sapien
aatctcatgagaccacagtcataaatgcagttc

SEQ ID NO: 231200 - DNA, 33 bp, Homo sapien
aatctcatgagaccaccgtcataaatgcagttc

SEQ ID NO: 231201 - DNA, 33 bp, Homo sapien
aagtatagcgtcttcacattttggaggaaacat

SEQ ID NO: 231202 - DNA, 33 bp, Homo sapien
aagtatagcgtcttcatattttggaggaaacat

SEQ ID NO: 231203 - DNA, 33 bp, Homo sapien
ttcagaatagtattgaacactggctctacgcta

SEQ ID NO: 231204 - DNA, 33 bp, Homo sapien
ttcagaatagtattgatcactggctctacgcta

SEQ ID NO: 231205 - DNA, 33 bp, Homo sapien
gattttaaattctgatcaggagttattaaacaa

SEQ ID NO: 231206 - DNA, 33 bp, Homo sapien
gattttaaattctgattaggagttattaaacaa

SEQ ID NO: 231207 - DNA, 33 bp, Homo sapien
taaatacttgacacaaaagatatactaagtgcg

SEQ ID NO: 231208 - DNA, 33 bp, Homo sapien
taaatacttgacacaagagatatactaagtgcg

SEQ ID NO: 231209 - DNA, 33 bp, Homo sapien
gtcttgttctcacctcgccagcaaattgggaag

SEQ ID NO: 231210 - DNA, 33 bp, Homo sapien
gtcttgttctcacctctccagcaaattgggaag

SEQ ID NO: 231211 - DNA, 33 bp, Homo sapien
atttaggaacaaagggcattaaaaggagagaga

SEQ ID NO: 231212 - DNA, 33 bp, Homo sapien
atttaggaacaaagggtattaaaaggagagaga

SEQ ID NO: 231213 - DNA, 33 bp, Homo sapien
aagtgggcataatctacgatataacagtgtaat

SEQ ID NO: 231214 - DNA, 33 bp, Homo sapien
aagtgggcataatctatgatataacagtgtaat

SEQ ID NO: 231215 - DNA, 33 bp, Homo sapien
aggcttctggaactaaaaggtttgaatcctggc

SEQ ID NO: 231216 - DNA, 33 bp, Homo sapien
aggcttctggaactaagaggtttgaatcctggc

SEQ ID NO: 231217 - DNA, 33 bp, Homo sapien
cagacatgaaagaacacattagagtttggtgaa

SEQ ID NO: 231218 - DNA, 33 bp, Homo sapien
cagacatgaaagaacagattagagtttggtgaa

SEQ ID NO: 231219 - DNA, 33 bp, Homo sapien
tcttaatctaaagcacaaaaaagtttagagatg

SEQ ID NO: 231220 - DNA, 33 bp, Homo sapien
tcttaatctaaagcacgaaaaagtttagagatg

SEQ ID NO: 231221 - DNA, 33 bp, Homo sapien
tcaacagtcctgggtacgatgtgcacagacaaa

SEQ ID NO: 231222 - DNA, 33 bp, Homo sapien
tcaacagtcctgggtatgatgtgcacagacaaa

SEQ ID NO: 231223 - DNA, 33 bp, Homo sapien
aggatccacgctgaagcattttactagaaaatt

SEQ ID NO: 231224 - DNA, 33 bp, Homo sapien
aggatccacgctgaaggattttactagaaaatt

SEQ ID NO: 231225 - DNA, 33 bp, Homo sapien
ttaaaaacggcattgaagtctttattacagtca

SEQ ID NO: 231226 - DNA, 33 bp, Homo sapien
ttaaaaacggcattgacgtctttattacagtca

SEQ ID NO: 231227 - DNA, 33 bp, Homo sapien
acaattattcagtatacgtttctttggctgtat

SEQ ID NO: 231228 - DNA, 33 bp, Homo sapien
acaattattcagtatatgtttctttggctgtat

SEQ ID NO: 231229 - DNA, 33 bp, Homo sapien
catccagagcttgaaacaggggacaagagataa

SEQ ID NO: 231230 - DNA, 33 bp, Homo sapien
catccagagcttgaaagaggggacaagagataa

SEQ ID NO: 231231 - DNA, 33 bp, Homo sapien
cctgctaacgagctaacgtttattccactataa

SEQ ID NO: 231232 - DNA, 33 bp, Homo sapien
cctgctaacgagctaatgtttattccactataa

SEQ ID NO: 231233 - DNA, 33 bp, Homo sapien
agtgagcaaagtccaagtgtctgctttctttgg

SEQ ID NO: 231234 - DNA, 33 bp, Homo sapien
agtgagcaaagtccaattgtctgctttctttgg

SEQ ID NO: 231235 - DNA, 33 bp, Homo sapien
tacccggagaaggcaaacttggttgcaaaggtc

SEQ ID NO: 231236 - DNA, 33 bp, Homo sapien
tacccggagaaggcaatcttggttgcaaaggtc

SEQ ID NO: 231237 - DNA, 33 bp, Homo sapien
tgcagccctgctgacactgaaacagacccagta

SEQ ID NO: 231238 - DNA, 33 bp, Homo sapien
tgcagccctgctgacattgaaacagacccagta

SEQ ID NO: 231239 - DNA, 33 bp, Homo sapien
atccattcattttcctcagaaagatttactgcc

SEQ ID NO: 231240 - DNA, 33 bp, Homo sapien
atccattcattttcctgagaaagatttactgcc

SEQ ID NO: 231241 - DNA, 33 bp, Homo sapien
gaaagggcttctgaccaaaatgggccggggata

SEQ ID NO: 231242 - DNA, 33 bp, Homo sapien
gaaagggcttctgaccgaaatgggccggggata

SEQ ID NO: 231243 - DNA, 33 bp, Homo sapien
agggttaggatgagaacatctttggcggcccat

SEQ ID NO: 231244 - DNA, 33 bp, Homo sapien
agggttaggatgagaatatctttggcggcccat

SEQ ID NO: 231245 - DNA, 33 bp, Homo sapien
aggagaagccaagtggaaagaaatggaagatct

SEQ ID NO: 231246 - DNA, 33 bp, Homo sapien
aggagaagccaagtgggaagaaatggaagatct

SEQ ID NO: 231247 - DNA, 33 bp, Homo sapien
ccctcaaaagtcaaaaacatcagctaatgtaat

SEQ ID NO: 231248 - DNA, 33 bp, Homo sapien
ccctcaaaagtcaaaaccatcagctaatgtaat

SEQ ID NO: 231249 - DNA, 33 bp, Homo sapien
aatgcatattcttagacagcactctccagtcct

SEQ ID NO: 231250 - DNA, 33 bp, Homo sapien
aatgcatattcttagatagcactctccagtcct

SEQ ID NO: 231251 - DNA, 33 bp, Homo sapien
gcaaaatcctgtgacaagagattacctggataa

SEQ ID NO: 231252 - DNA, 33 bp, Homo sapien
gcaaaatcctgtgacacgagattacctggataa

SEQ ID NO: 231253 - DNA, 33 bp, Homo sapien
gtttgtgaaagtgacaataaactaacaaaatat

SEQ ID NO: 231254 - DNA, 33 bp, Homo sapien
gtttgtgaaagtgacagtaaactaacaaaatat

SEQ ID NO: 231255 - DNA, 33 bp, Homo sapien
actggcttgaatgcaggatattaatatgtgctg

SEQ ID NO: 231256 - DNA, 33 bp, Homo sapien
actggcttgaatgcagtatattaatatgtgctg

SEQ ID NO: 231257 - DNA, 33 bp, Homo sapien
gttacttggagaaaaacttgtgaaacacgaggg

SEQ ID NO: 231258 - DNA, 33 bp, Homo sapien
gttacttggagaaaaatttgtgaaacacgaggg

SEQ ID NO: 231259 - DNA, 33 bp, Homo sapien
caagctaacatacaccacatatcttaaactccc

SEQ ID NO: 231260 - DNA, 33 bp, Homo sapien
caagctaacatacaccgcatatcttaaactccc

SEQ ID NO: 231261 - DNA, 33 bp, Homo sapien
actttacctagaacagaacagacagaaaaaaca

SEQ ID NO: 231262 - DNA, 33 bp, Homo sapien
actttacctagaacaggacagacagaaaaaaca

SEQ ID NO: 231263 - DNA, 33 bp, Homo sapien
ataataccatctttcaacaaattatacgaaggc

SEQ ID NO: 231264 - DNA, 33 bp, Homo sapien
ataataccatctttcagcaaattatacgaaggc

SEQ ID NO: 231265 - DNA, 33 bp, Homo sapien
aatgccttggcaaatacgttgctaatttattat

SEQ ID NO: 231266 - DNA, 33 bp, Homo sapien
aatgccttggcaaatatgttgctaatttattat

SEQ ID NO: 231267 - DNA, 33 bp, Homo sapien
aaattttattaaacaacaatccaggatgctatg

SEQ ID NO: 231268 - DNA, 33 bp, Homo sapien
aaattttattaaacaagaatccaggatgctatg

SEQ ID NO: 231269 - DNA, 33 bp, Homo sapien
tagctctaacctctacaaatggaaatgagtcca

SEQ ID NO: 231270 - DNA, 33 bp, Homo sapien
tagctctaacctctacgaatggaaatgagtcca

SEQ ID NO: 231271 - DNA, 33 bp, Homo sapien
ggtcagattacctaacaagtgtctccatagtac

SEQ ID NO: 231272 - DNA, 33 bp, Homo sapien
ggtcagattacctaacgagtgtctccatagtac

SEQ ID NO: 231273 - DNA, 33 bp, Homo sapien
ggttgcccagagatgcacttactgtcttcaacc

SEQ ID NO: 231274 - DNA, 33 bp, Homo sapien
ggttgcccagagatgcgcttactgtcttcaacc

SEQ ID NO: 231275 - DNA, 33 bp, Homo sapien
cagctatgccataacacatacaaataagatagc

SEQ ID NO: 231276 - DNA, 33 bp, Homo sapien
cagctatgccataacatatacaaataagatagc

SEQ ID NO: 231277 - DNA, 33 bp, Homo sapien
taatcatatacatcatcactgtgtggctatcac

SEQ ID NO: 231278 - DNA, 33 bp, Homo sapien
taatcatatacatcatgactgtgtggctatcac

SEQ ID NO: 231279 - DNA, 33 bp, Homo sapien
tgggaagggactgtgggacaacagataaaggac

SEQ ID NO: 231280 - DNA, 33 bp, Homo sapien
tgggaagggactgtggtacaacagataaaggac

SEQ ID NO: 231281 - DNA, 33 bp, Homo sapien
ttcatccttcaaggcaatactgaaatgtcactt

SEQ ID NO: 231282 - DNA, 33 bp, Homo sapien
ttcatccttcaaggcagtactgaaatgtcactt

SEQ ID NO: 231283 - DNA, 33 bp, Homo sapien
tattttctagtcctgaagattagaatctgaaaa

SEQ ID NO: 231284 - DNA, 33 bp, Homo sapien
tattttctagtcctgaggattagaatctgaaaa

SEQ ID NO: 231285 - DNA, 33 bp, Homo sapien
ggcaactgacatggaaatggcaaatcagggtga

SEQ ID NO: 231286 - DNA, 33 bp, Homo sapien
ggcaactgacatggaagtggcaaatcagggtga

SEQ ID NO: 231287 - DNA, 33 bp, Homo sapien
gtgaatgtgggtttgacagctgaattatgtctc

SEQ ID NO: 231288 - DNA, 33 bp, Homo sapien
gtgaatgtgggtttgatagctgaattatgtctc

SEQ ID NO: 231289 - DNA, 33 bp, Homo sapien
ttacagatgaggaaagaacagttcagaaagctt

SEQ ID NO: 231290 - DNA, 33 bp, Homo sapien
ttacagatgaggaaagtacagttcagaaagctt

SEQ ID NO: 231291 - DNA, 33 bp, Homo sapien
aatacctgaactacccaaaagttaaatgcacca

SEQ ID NO: 231292 - DNA, 33 bp, Homo sapien
aatacctgaactacccgaaagttaaatgcacca

SEQ ID NO: 231293 - DNA, 33 bp, Homo sapien
gctgaatgatgttagcaccaagtgagacttact

SEQ ID NO: 231294 - DNA, 33 bp, Homo sapien
gctgaatgatgttagcgccaagtgagacttact

SEQ ID NO: 231295 - DNA, 33 bp, Homo sapien
atcttagcaaaggaaacgaatgttcagtccaat

SEQ ID NO: 231296 - DNA, 33 bp, Homo sapien
atcttagcaaaggaaatgaatgttcagtccaat

SEQ ID NO: 231297 - DNA, 33 bp, Homo sapien
tctcccagaagaacaacgaagtcactgagaaga

SEQ ID NO: 231298 - DNA, 33 bp, Homo sapien
tctcccagaagaacaatgaagtcactgagaaga

SEQ ID NO: 231299 - DNA, 33 bp, Homo sapien
cagggagccatggcaccgaggaagaaattacat

SEQ ID NO: 231300 - DNA, 33 bp, Homo sapien
cagggagccatggcactgaggaagaaattacat

SEQ ID NO: 231301 - DNA, 33 bp, Homo sapien
agtttcacaaaagctaaccatccagaaggtata

SEQ ID NO: 231302 - DNA, 33 bp, Homo sapien
agtttcacaaaagctagccatccagaaggtata

SEQ ID NO: 231303 - DNA, 33 bp, Homo sapien
ctgaataaggtgaaccagagacacagtttaaga

SEQ ID NO: 231304 - DNA, 33 bp, Homo sapien
ctgaataaggtgaaccggagacacagtttaaga

SEQ ID NO: 231305 - DNA, 33 bp, Homo sapien
gtcaacatgaggtcaaagcaatggttccctaat

SEQ ID NO: 231306 - DNA, 33 bp, Homo sapien
gtcaacatgaggtcaaggcaatggttccctaat

SEQ ID NO: 231307 - DNA, 33 bp, Homo sapien
cctttttgaccatatagctcttacttcagatct

SEQ ID NO: 231308 - DNA, 33 bp, Homo sapien
cctttttgaccatatatctcttacttcagatct

SEQ ID NO: 231309 - DNA, 33 bp, Homo sapien
ctgtaatataggacaaattgaaattcttataag

SEQ ID NO: 231310 - DNA, 33 bp, Homo sapien
ctgtaatataggacaagttgaaattcttataag

SEQ ID NO: 231311 - DNA, 33 bp, Homo sapien
agtgggggaggcagacaagtaaattatgatgta

SEQ ID NO: 231312 - DNA, 33 bp, Homo sapien
agtgggggaggcagacgagtaaattatgatgta

SEQ ID NO: 231313 - DNA, 33 bp, Homo sapien
ttcagctacttattaggcagcctagaaaaataa

SEQ ID NO: 231314 - DNA, 33 bp, Homo sapien
ttcagctacttattagtcagcctagaaaaataa

SEQ ID NO: 231315 - DNA, 33 bp, Homo sapien
cgaagtaaaactcagaaaaggatttgccatctt

SEQ ID NO: 231316 - DNA, 33 bp, Homo sapien
cgaagtaaaactcagacaaggatttgccatctt

SEQ ID NO: 231317 - DNA, 33 bp, Homo sapien
caactccaggaaataacgtgaactctaaatttg

SEQ ID NO: 231318 - DNA, 33 bp, Homo sapien
caactccaggaaataatgtgaactctaaatttg

SEQ ID NO: 231319 - DNA, 33 bp, Homo sapien
ttacttttctggacaccctatatcactttaaaa

SEQ ID NO: 231320 - DNA, 33 bp, Homo sapien
ttacttttctggacactctatatcactttaaaa

SEQ ID NO: 231321 - DNA, 33 bp, Homo sapien
aggaaagatttatagtaaaggcgaagtagagac

SEQ ID NO: 231322 - DNA, 33 bp, Homo sapien
aggaaagatttatagtgaaggcgaagtagagac

SEQ ID NO: 231323 - DNA, 33 bp, Homo sapien
attaggctgccatggaataactgtatgttggcc

SEQ ID NO: 231324 - DNA, 33 bp, Homo sapien
attaggctgccatggagtaactgtatgttggcc

SEQ ID NO: 231325 - DNA, 33 bp, Homo sapien
ataaggaataccaggccatctggaactgcatta

SEQ ID NO: 231326 - DNA, 33 bp, Homo sapien
ataaggaataccaggctatctggaactgcatta

SEQ ID NO: 231327 - DNA, 33 bp, Homo sapien
tcaattttacttagcaaaagagggccttttcaa

SEQ ID NO: 231328 - DNA, 33 bp, Homo sapien
tcaattttacttagcagaagagggccttttcaa

SEQ ID NO: 231329 - DNA, 33 bp, Homo sapien
tgataaaagctatgacagtaccccacagaagaa

SEQ ID NO: 231330 - DNA, 33 bp, Homo sapien
tgataaaagctatgacggtaccccacagaagaa

SEQ ID NO: 231331 - DNA, 33 bp, Homo sapien
gtgttttactatgctacgtcttgtatcaatttc

SEQ ID NO: 231332 - DNA, 33 bp, Homo sapien
gtgttttactatgctatgtcttgtatcaatttc

SEQ ID NO: 231333 - DNA, 33 bp, Homo sapien
gtgagatttgaatgaacgaatctgaattgagtg

SEQ ID NO: 231334 - DNA, 33 bp, Homo sapien
gtgagatttgaatgaatgaatctgaattgagtg

SEQ ID NO: 231335 - DNA, 33 bp, Homo sapien
ttgtgtgttcttccataaaagaaagcagaccta

SEQ ID NO: 231336 - DNA, 33 bp, Homo sapien
ttgtgtgttcttccatgaaagaaagcagaccta

SEQ ID NO: 231337 - DNA, 33 bp, Homo sapien
gtggatgtggactgagaatgaaaagctccttca

SEQ ID NO: 231338 - DNA, 33 bp, Homo sapien
gtggatgtggactgaggatgaaaagctccttca

SEQ ID NO: 231339 - DNA, 33 bp, Homo sapien
gaagaccatgccattacgcttgtaggtctttaa

SEQ ID NO: 231340 - DNA, 33 bp, Homo sapien
gaagaccatgccattatgcttgtaggtctttaa

SEQ ID NO: 231341 - DNA, 33 bp, Homo sapien
ttatttaatattttcaaagatgattatgatgag

SEQ ID NO: 231342 - DNA, 33 bp, Homo sapien
ttatttaatattttcagagatgattatgatgag

SEQ ID NO: 231343 - DNA, 33 bp, Homo sapien
ttatggaataaatgtacaaagcttggttaacta

SEQ ID NO: 231344 - DNA, 33 bp, Homo sapien
ttatggaataaatgtataaagcttggttaacta

SEQ ID NO: 231345 - DNA, 33 bp, Homo sapien
attttacccaactacacaatctctgcagtgctc

SEQ ID NO: 231346 - DNA, 33 bp, Homo sapien
attttacccaactacataatctctgcagtgctc

SEQ ID NO: 231347 - DNA, 33 bp, Homo sapien
ctaggaagaaggaaaacgtcctggcagccactt

SEQ ID NO: 231348 - DNA, 33 bp, Homo sapien
ctaggaagaaggaaaatgtcctggcagccactt

SEQ ID NO: 231349 - DNA, 33 bp, Homo sapien
ataattcctgagatcacaacaagaggtctactt

SEQ ID NO: 231350 - DNA, 33 bp, Homo sapien
ataattcctgagatcataacaagaggtctactt

SEQ ID NO: 231351 - DNA, 33 bp, Homo sapien
caggaaattatctgtcaaatccttctttttaag

SEQ ID NO: 231352 - DNA, 33 bp, Homo sapien
caggaaattatctgtcgaatccttctttttaag

SEQ ID NO: 231353 - DNA, 33 bp, Homo sapien
ccccgaacttagtcaaaaacctactttgtgcct

SEQ ID NO: 231354 - DNA, 33 bp, Homo sapien
ccccgaacttagtcaagaacctactttgtgcct

SEQ ID NO: 231355 - DNA, 33 bp, Homo sapien
aggcagttgccgacaacgtcactccaactattc

SEQ ID NO: 231356 - DNA, 33 bp, Homo sapien
aggcagttgccgacaatgtcactccaactattc

SEQ ID NO: 231357 - DNA, 33 bp, Homo sapien
agaaagaatgcagaaaaggtcttgatgaagaaa

SEQ ID NO: 231358 - DNA, 33 bp, Homo sapien
agaaagaatgcagaaagggtcttgatgaagaaa

SEQ ID NO: 231359 - DNA, 33 bp, Homo sapien
catagtagaaaacaaacagggaagatacggtta

SEQ ID NO: 231360 - DNA, 33 bp, Homo sapien
catagtagaaaacaaagagggaagatacggtta

SEQ ID NO: 231361 - DNA, 33 bp, Homo sapien
attttggctgttataactgagagagaatattct

SEQ ID NO: 231362 - DNA, 33 bp, Homo sapien
attttggctgttataattgagagagaatattct

SEQ ID NO: 231363 - DNA, 33 bp, Homo sapien
ggcctctagtgctccacgttctggtaacagcac

SEQ ID NO: 231364 - DNA, 33 bp, Homo sapien
ggcctctagtgctccatgttctggtaacagcac

SEQ ID NO: 231365 - DNA, 33 bp, Homo sapien
ctctgcttggcttgtaccttggtaacattacta

SEQ ID NO: 231366 - DNA, 33 bp, Homo sapien
ctctgcttggcttgtatcttggtaacattacta

SEQ ID NO: 231367 - DNA, 33 bp, Homo sapien
cgaacttgtatttcgccgactgtgtaattgttg

SEQ ID NO: 231368 - DNA, 33 bp, Homo sapien
cgaacttgtatttcgctgactgtgtaattgttg

SEQ ID NO: 231369 - DNA, 33 bp, Homo sapien
gtcaagacagaggagcagatagcgtgggtctcc

SEQ ID NO: 231370 - DNA, 33 bp, Homo sapien
gtcaagacagaggagcggatagcgtgggtctcc

SEQ ID NO: 231371 - DNA, 33 bp, Homo sapien
gtgagcacaagaacaaatccactggttaaggtg

SEQ ID NO: 231372 - DNA, 33 bp, Homo sapien
gtgagcacaagaacaagtccactggttaaggtg

SEQ ID NO: 231373 - DNA, 33 bp, Homo sapien
gttgcttttgtactagcccagctatttcgttga

SEQ ID NO: 231374 - DNA, 33 bp, Homo sapien
gttgcttttgtactaggccagctatttcgttga

SEQ ID NO: 231375 - DNA, 33 bp, Homo sapien
aagaagcttttagggcactgtatagccaaaggc

SEQ ID NO: 231376 - DNA, 33 bp, Homo sapien
aagaagcttttagggcgctgtatagccaaaggc

SEQ ID NO: 231377 - DNA, 33 bp, Homo sapien
acgactagctcttaaaatacatatttggatatg

SEQ ID NO: 231378 - DNA, 33 bp, Homo sapien
acgactagctcttaaagtacatatttggatatg

SEQ ID NO: 231379 - DNA, 33 bp, Homo sapien
agaacttggtaggatgcacagcttaagacttcc

SEQ ID NO: 231380 - DNA, 33 bp, Homo sapien
agaacttggtaggatgtacagcttaagacttcc

SEQ ID NO: 231381 - DNA, 33 bp, Homo sapien
gaagccattttttagggattcactcagaagata

SEQ ID NO: 231382 - DNA, 33 bp, Homo sapien
gaagccattttttaggtattcactcagaagata

SEQ ID NO: 231383 - DNA, 33 bp, Homo sapien
tagaaactgatgtcataagaattgaacaatttt

SEQ ID NO: 231384 - DNA, 33 bp, Homo sapien
tagaaactgatgtcattagaattgaacaatttt

SEQ ID NO: 231385 - DNA, 33 bp, Homo sapien
tattacaaaaaaagtacatttatcttgcccttt

SEQ ID NO: 231386 - DNA, 33 bp, Homo sapien
tattacaaaaaaagtatatttatcttgcccttt

SEQ ID NO: 231387 - DNA, 33 bp, Homo sapien
gagagttcttgtcaaaaatgatttccgtagcgt

SEQ ID NO: 231388 - DNA, 33 bp, Homo sapien
gagagttcttgtcaaacatgatttccgtagcgt

SEQ ID NO: 231389 - DNA, 33 bp, Homo sapien
gtcagtcaacattgcacatatataaaacttctg

SEQ ID NO: 231390 - DNA, 33 bp, Homo sapien
gtcagtcaacattgcagatatataaaacttctg

SEQ ID NO: 231391 - DNA, 33 bp, Homo sapien
ataccgtagtgaacaaataaacaaagtggattg

SEQ ID NO: 231392 - DNA, 33 bp, Homo sapien
ataccgtagtgaacaagtaaacaaagtggattg

SEQ ID NO: 231393 - DNA, 33 bp, Homo sapien
gttgtttttcccctccccatatagccgaacatt

SEQ ID NO: 231394 - DNA, 33 bp, Homo sapien
gttgtttttcccctcctcatatagccgaacatt

SEQ ID NO: 231395 - DNA, 33 bp, Homo sapien
ttgtagtctggtagccacagcaagaaatcctac

SEQ ID NO: 231396 - DNA, 33 bp, Homo sapien
ttgtagtctggtagccgcagcaagaaatcctac

SEQ ID NO: 231397 - DNA, 33 bp, Homo sapien
tgtgtgacatatttgacgtgaagaacagtatca

SEQ ID NO: 231398 - DNA, 33 bp, Homo sapien
tgtgtgacatatttgatgtgaagaacagtatca

SEQ ID NO: 231399 - DNA, 33 bp, Homo sapien
gaatggctgcaacatcacctgttctgtaaagct

SEQ ID NO: 231400 - DNA, 33 bp, Homo sapien
gaatggctgcaacatctcctgttctgtaaagct

SEQ ID NO: 231401 - DNA, 33 bp, Homo sapien
gtcttaacctcttacaactttccaccacacatg

SEQ ID NO: 231402 - DNA, 33 bp, Homo sapien
gtcttaacctcttacacctttccaccacacatg

SEQ ID NO: 231403 - DNA, 33 bp, Homo sapien
caggattatttctgcgaattaggatgaagggct

SEQ ID NO: 231404 - DNA, 33 bp, Homo sapien
caggattatttctgcggattaggatgaagggct

SEQ ID NO: 231405 - DNA, 33 bp, Homo sapien
tcttaaaatcctgcaacaactttctatcctgtt

SEQ ID NO: 231406 - DNA, 33 bp, Homo sapien
tcttaaaatcctgcaataactttctatcctgtt

SEQ ID NO: 231407 - DNA, 33 bp, Homo sapien
atctggctcctattaactgtgagcttcatctca

SEQ ID NO: 231408 - DNA, 33 bp, Homo sapien
atctggctcctattaattgtgagcttcatctca

SEQ ID NO: 231409 - DNA, 33 bp, Homo sapien
ataaatgctatgaggaaaagaaagcagggtgat

SEQ ID NO: 231410 - DNA, 33 bp, Homo sapien
ataaatgctatgaggagaagaaagcagggtgat

SEQ ID NO: 231411 - DNA, 33 bp, Homo sapien
cagtagatgtctgcacaaccagtagcagagagg

SEQ ID NO: 231412 - DNA, 33 bp, Homo sapien
cagtagatgtctgcacgaccagtagcagagagg

SEQ ID NO: 231413 - DNA, 33 bp, Homo sapien
ttcacttttctggtgaactatacaattctccaa

SEQ ID NO: 231414 - DNA, 33 bp, Homo sapien
ttcacttttctggtgatctatacaattctccaa

SEQ ID NO: 231415 - DNA, 33 bp, Homo sapien
tgaagtttggatagaagagtgaaatcattaatg

SEQ ID NO: 231416 - DNA, 33 bp, Homo sapien
tgaagtttggatagaatagtgaaatcattaatg

SEQ ID NO: 231417 - DNA, 33 bp, Homo sapien
tgcaaattcaagtagacaagaggccaacaagta

SEQ ID NO: 231418 - DNA, 33 bp, Homo sapien
tgcaaattcaagtagataagaggccaacaagta

SEQ ID NO: 231419 - DNA, 33 bp, Homo sapien
tttctcagatgggaaacgtgggttagggaaatc

SEQ ID NO: 231420 - DNA, 33 bp, Homo sapien
tttctcagatgggaaatgtgggttagggaaatc

SEQ ID NO: 231421 - DNA, 33 bp, Homo sapien
gcttctcaagctaccaacggagttcactgtgac

SEQ ID NO: 231422 - DNA, 33 bp, Homo sapien
gcttctcaagctaccagcggagttcactgtgac

SEQ ID NO: 231423 - DNA, 33 bp, Homo sapien
cttgcagataggtttccattttcataaatcaca

SEQ ID NO: 231424 - DNA, 33 bp, Homo sapien
cttgcagataggtttcgattttcataaatcaca

SEQ ID NO: 231425 - DNA, 33 bp, Homo sapien
cctttgcattttctgcaacatccaacaccatgc

SEQ ID NO: 231426 - DNA, 33 bp, Homo sapien
cctttgcattttctgcgacatccaacaccatgc

SEQ ID NO: 231427 - DNA, 33 bp, Homo sapien
caataagtctgtctaaagttgggacctctggcc

SEQ ID NO: 231428 - DNA, 33 bp, Homo sapien
caataagtctgtctaacgttgggacctctggcc

SEQ ID NO: 231429 - DNA, 33 bp, Homo sapien
taccttaaattgttgcactccagctcccattcc

SEQ ID NO: 231430 - DNA, 33 bp, Homo sapien
taccttaaattgttgcgctccagctcccattcc

SEQ ID NO: 231431 - DNA, 33 bp, Homo sapien
aaacaatttcttctaccacattcttacaacatg

SEQ ID NO: 231432 - DNA, 33 bp, Homo sapien
aaacaatttcttctactacattcttacaacatg

SEQ ID NO: 231433 - DNA, 33 bp, Homo sapien
ctgatgaaaagatataacccctgcatctaatta

SEQ ID NO: 231434 - DNA, 33 bp, Homo sapien
ctgatgaaaagatatagcccctgcatctaatta

SEQ ID NO: 231435 - DNA, 33 bp, Homo sapien
gaagtttccacatgtaactaagtatccatacat

SEQ ID NO: 231436 - DNA, 33 bp, Homo sapien
gaagtttccacatgtagctaagtatccatacat

SEQ ID NO: 231437 - DNA, 33 bp, Homo sapien
ctttctccttagctggaatcttctccccatgtg

SEQ ID NO: 231438 - DNA, 33 bp, Homo sapien
ctttctccttagctggcatcttctccccatgtg

SEQ ID NO: 231439 - DNA, 33 bp, Homo sapien
agcacacaacttgcatgagggagataattaatt

SEQ ID NO: 231440 - DNA, 33 bp, Homo sapien
agcacacaacttgcattagggagataattaatt

SEQ ID NO: 231441 - DNA, 33 bp, Homo sapien
atgttcctgttagagtaaattgttctctgatag

SEQ ID NO: 231442 - DNA, 33 bp, Homo sapien
atgttcctgttagagtgaattgttctctgatag

SEQ ID NO: 231443 - DNA, 33 bp, Homo sapien
ttttgctgaccagggaagtgaaaactgtacctc

SEQ ID NO: 231444 - DNA, 33 bp, Homo sapien
ttttgctgaccagggaggtgaaaactgtacctc

SEQ ID NO: 231445 - DNA, 33 bp, Homo sapien
ataggccaaatgttcacaaacaatttctacaat

SEQ ID NO: 231446 - DNA, 33 bp, Homo sapien
ataggccaaatgttcagaaacaatttctacaat

SEQ ID NO: 231447 - DNA, 33 bp, Homo sapien
tatctaaagttggtaacgttctcttgactttgc

SEQ ID NO: 231448 - DNA, 33 bp, Homo sapien
tatctaaagttggtaatgttctcttgactttgc

SEQ ID NO: 231449 - DNA, 33 bp, Homo sapien
tttcccatttttgttacggtgatctgcagaaag

SEQ ID NO: 231450 - DNA, 33 bp, Homo sapien
tttcccatttttgttatggtgatctgcagaaag

SEQ ID NO: 231451 - DNA, 33 bp, Homo sapien
cagtctcacatggtcaataatattttcccactc

SEQ ID NO: 231452 - DNA, 33 bp, Homo sapien
cagtctcacatggtcagtaatattttcccactc

SEQ ID NO: 231453 - DNA, 33 bp, Homo sapien
gtcacacctcacattacagtaggctttcgcatt

SEQ ID NO: 231454 - DNA, 33 bp, Homo sapien
gtcacacctcacattatagtaggctttcgcatt

SEQ ID NO: 231455 - DNA, 33 bp, Homo sapien
gtttgccattgagcacgatgctttagtacaacc

SEQ ID NO: 231456 - DNA, 33 bp, Homo sapien
gtttgccattgagcactatgctttagtacaacc

SEQ ID NO: 231457 - DNA, 33 bp, Homo sapien
ggatttttcctgaaacagttgtcaattctgtaa

SEQ ID NO: 231458 - DNA, 33 bp, Homo sapien
ggatttttcctgaaacggttgtcaattctgtaa

SEQ ID NO: 231459 - DNA, 33 bp, Homo sapien
gttggatggacaataaccacaacttccttgtta

SEQ ID NO: 231460 - DNA, 33 bp, Homo sapien
gttggatggacaataagcacaacttccttgtta

SEQ ID NO: 231461 - DNA, 33 bp, Homo sapien
ctctcagaacagaggccgacttcataaagaagg

SEQ ID NO: 231462 - DNA, 33 bp, Homo sapien
ctctcagaacagaggctgacttcataaagaagg

SEQ ID NO: 231463 - DNA, 33 bp, Homo sapien
tgtagtcattttttcaaaactaacatataaaaa

SEQ ID NO: 231464 - DNA, 33 bp, Homo sapien
tgtagtcattttttcataactaacatataaaaa

SEQ ID NO: 231465 - DNA, 33 bp, Homo sapien
tatttctgaacctgacactgacccatacacaat

SEQ ID NO: 231466 - DNA, 33 bp, Homo sapien
tatttctgaacctgacgctgacccatacacaat

SEQ ID NO: 231467 - DNA, 33 bp, Homo sapien
gtgtagtaagttttaccggaaatggctcaggct

SEQ ID NO: 231468 - DNA, 33 bp, Homo sapien
gtgtagtaagttttactggaaatggctcaggct

SEQ ID NO: 231469 - DNA, 33 bp, Homo sapien
agagatcccttttcaaattccttcatgggtctt

SEQ ID NO: 231470 - DNA, 33 bp, Homo sapien
agagatcccttttcaatttccttcatgggtctt

SEQ ID NO: 231471 - DNA, 33 bp, Homo sapien
gtcacttgcccaataaattatccagatcatttg

SEQ ID NO: 231472 - DNA, 33 bp, Homo sapien
gtcacttgcccaataagttatccagatcatttg

SEQ ID NO: 231473 - DNA, 33 bp, Homo sapien
gcaataaacacgggaaagcagatatctgttaga

SEQ ID NO: 231474 - DNA, 33 bp, Homo sapien
gcaataaacacgggaaggcagatatctgttaga

SEQ ID NO: 231475 - DNA, 33 bp, Homo sapien
actcagtgagtattcaataaaagaagccttttt

SEQ ID NO: 231476 - DNA, 33 bp, Homo sapien
actcagtgagtattcagtaaaagaagccttttt

SEQ ID NO: 231477 - DNA, 33 bp, Homo sapien
cattgtgatgggtatactaagaatgaagtaaat

SEQ ID NO: 231478 - DNA, 33 bp, Homo sapien
cattgtgatgggtatattaagaatgaagtaaat

SEQ ID NO: 231479 - DNA, 33 bp, Homo sapien
taagctggaataatcacagaaagttttgagcat

SEQ ID NO: 231480 - DNA, 33 bp, Homo sapien
taagctggaataatcatagaaagttttgagcat

SEQ ID NO: 231481 - DNA, 33 bp, Homo sapien
gtattatgctggtagtcactaattcgcgcttca

SEQ ID NO: 231482 - DNA, 33 bp, Homo sapien
gtattatgctggtagttactaattcgcgcttca

SEQ ID NO: 231483 - DNA, 33 bp, Homo sapien
tttttcttttctgacaatggtctgatatgtcaa

SEQ ID NO: 231484 - DNA, 33 bp, Homo sapien
tttttcttttctgacagtggtctgatatgtcaa

SEQ ID NO: 231485 - DNA, 33 bp, Homo sapien
ggaagcacaagtgtaggagtaaagaaagtggga

SEQ ID NO: 231486 - DNA, 33 bp, Homo sapien
ggaagcacaagtgtagtagtaaagaaagtggga

SEQ ID NO: 231487 - DNA, 33 bp, Homo sapien
aaaaaattctttgcacaagcaagtatttataca

SEQ ID NO: 231488 - DNA, 33 bp, Homo sapien
aaaaaattctttgcacgagcaagtatttataca

SEQ ID NO: 231489 - DNA, 33 bp, Homo sapien
cctagtggccccaatgaacaagagcagagcatg

SEQ ID NO: 231490 - DNA, 33 bp, Homo sapien
cctagtggccccaatggacaagagcagagcatg

SEQ ID NO: 231491 - DNA, 33 bp, Homo sapien
atagcaaacctaagaccatctggatgaaattct

SEQ ID NO: 231492 - DNA, 33 bp, Homo sapien
atagcaaacctaagactatctggatgaaattct

SEQ ID NO: 231493 - DNA, 33 bp, Homo sapien
gcctcaagttgctgaaactcaaggaatcaattc

SEQ ID NO: 231494 - DNA, 33 bp, Homo sapien
gcctcaagttgctgaacctcaaggaatcaattc

SEQ ID NO: 231495 - DNA, 33 bp, Homo sapien
acacaaaagcacacaaataccaagcaaaagatg

SEQ ID NO: 231496 - DNA, 33 bp, Homo sapien
acacaaaagcacacaagtaccaagcaaaagatg

SEQ ID NO: 231497 - DNA, 33 bp, Homo sapien
tagggtggaatagttaaaaaggagcctagaaaa

SEQ ID NO: 231498 - DNA, 33 bp, Homo sapien
tagggtggaatagttagaaaggagcctagaaaa

SEQ ID NO: 231499 - DNA, 33 bp, Homo sapien
gaattagatgataaggacagtgatcattgaggg

SEQ ID NO: 231500 - DNA, 33 bp, Homo sapien
gaattagatgataagggcagtgatcattgaggg

SEQ ID NO: 231501 - DNA, 33 bp, Homo sapien
agggaagggtagagtaagtggcaaagggagaaa

SEQ ID NO: 231502 - DNA, 33 bp, Homo sapien
agggaagggtagagtacgtggcaaagggagaaa

SEQ ID NO: 231503 - DNA, 33 bp, Homo sapien
aaatagtcttgttctaagaaataatatccacaa

SEQ ID NO: 231504 - DNA, 33 bp, Homo sapien
aaatagtcttgttctacgaaataatatccacaa

SEQ ID NO: 231505 - DNA, 33 bp, Homo sapien
ctactcattggacagtaacgtaaggcaaatttt

SEQ ID NO: 231506 - DNA, 33 bp, Homo sapien
ctactcattggacagtgacgtaaggcaaatttt

SEQ ID NO: 231507 - DNA, 33 bp, Homo sapien
tttgggttcacatataaaaactaacactcaaat

SEQ ID NO: 231508 - DNA, 33 bp, Homo sapien
tttgggttcacatatacaaactaacactcaaat

SEQ ID NO: 231509 - DNA, 33 bp, Homo sapien
ttttaaaacttgttaaactcacagaacactaac

SEQ ID NO: 231510 - DNA, 33 bp, Homo sapien
ttttaaaacttgttaatctcacagaacactaac

SEQ ID NO: 231511 - DNA, 33 bp, Homo sapien
tgcttttgttgttgcccaaagcagctggccaga

SEQ ID NO: 231512 - DNA, 33 bp, Homo sapien
tgcttttgttgttgcctaaagcagctggccaga

SEQ ID NO: 231513 - DNA, 33 bp, Homo sapien
agaacctgaaaacttgcaatgcctctgaatgtg

SEQ ID NO: 231514 - DNA, 33 bp, Homo sapien
agaacctgaaaacttgtaatgcctctgaatgtg

SEQ ID NO: 231515 - DNA, 33 bp, Homo sapien
gttcatatgatacacaagaattgatggctttta

SEQ ID NO: 231516 - DNA, 33 bp, Homo sapien
gttcatatgatacacatgaattgatggctttta

SEQ ID NO: 231517 - DNA, 33 bp, Homo sapien
ttcttttagatttcgcacagtggttgggttcat

SEQ ID NO: 231518 - DNA, 33 bp, Homo sapien
ttcttttagatttcgctcagtggttgggttcat

SEQ ID NO: 231519 - DNA, 33 bp, Homo sapien
acatcagcacaagaaacggatcccgtgattaat

SEQ ID NO: 231520 - DNA, 33 bp, Homo sapien
acatcagcacaagaaatggatcccgtgattaat

SEQ ID NO: 231521 - DNA, 33 bp, Homo sapien
agcattacagtttcctaacaatattttagagtt

SEQ ID NO: 231522 - DNA, 33 bp, Homo sapien
agcattacagtttcctgacaatattttagagtt

SEQ ID NO: 231523 - DNA, 33 bp, Homo sapien
ttgctcaaattgttacagcttaggccattagaa

SEQ ID NO: 231524 - DNA, 33 bp, Homo sapien
ttgctcaaattgttacggcttaggccattagaa

SEQ ID NO: 231525 - DNA, 33 bp, Homo sapien
tgttaaggaaactatgaaccttatttggatttt

SEQ ID NO: 231526 - DNA, 33 bp, Homo sapien
tgttaaggaaactatggaccttatttggatttt

SEQ ID NO: 231527 - DNA, 33 bp, Homo sapien
cctcctattactaagcaaatgcctagtgtggga

SEQ ID NO: 231528 - DNA, 33 bp, Homo sapien
cctcctattactaagcgaatgcctagtgtggga

SEQ ID NO: 231529 - DNA, 33 bp, Homo sapien
cttattttatttgtaccatgactcacatataaa

SEQ ID NO: 231530 - DNA, 33 bp, Homo sapien
cttattttatttgtactatgactcacatataaa

SEQ ID NO: 231531 - DNA, 33 bp, Homo sapien
ttgcggtctggttacaacacaacacatattgag

SEQ ID NO: 231532 - DNA, 33 bp, Homo sapien
ttgcggtctggttacagcacaacacatattgag

SEQ ID NO: 231533 - DNA, 33 bp, Homo sapien
aagcccttgtagtgaacggaggtaggaaataca

SEQ ID NO: 231534 - DNA, 33 bp, Homo sapien
aagcccttgtagtgaatggaggtaggaaataca

SEQ ID NO: 231535 - DNA, 33 bp, Homo sapien
tccacaccagctcataaagatactcctcattct

SEQ ID NO: 231536 - DNA, 33 bp, Homo sapien
tccacaccagctcatagagatactcctcattct

SEQ ID NO: 231537 - DNA, 33 bp, Homo sapien
aatctaaactactataaggaaagtcaaaagatg

SEQ ID NO: 231538 - DNA, 33 bp, Homo sapien
aatctaaactactatacggaaagtcaaaagatg

SEQ ID NO: 231539 - DNA, 33 bp, Homo sapien
tttgtttatggtaaaaatggcatcttaaatcat

SEQ ID NO: 231540 - DNA, 33 bp, Homo sapien
tttgtttatggtaaaagtggcatcttaaatcat

SEQ ID NO: 231541 - DNA, 33 bp, Homo sapien
tttaactgttatggcaggatgttggcagttgac

SEQ ID NO: 231542 - DNA, 33 bp, Homo sapien
tttaactgttatggcatgatgttggcagttgac

SEQ ID NO: 231543 - DNA, 33 bp, Homo sapien
tgatccttcctcaggacggattgggagagagaa

SEQ ID NO: 231544 - DNA, 33 bp, Homo sapien
tgatccttcctcaggatggattgggagagagaa

SEQ ID NO: 231545 - DNA, 33 bp, Homo sapien
tgctgtgcttggcataaaataggcacttaacaa

SEQ ID NO: 231546 - DNA, 33 bp, Homo sapien
tgctgtgcttggcatacaataggcacttaacaa

SEQ ID NO: 231547 - DNA, 33 bp, Homo sapien
acccaggattggcatgaagaccttgaatccagg

SEQ ID NO: 231548 - DNA, 33 bp, Homo sapien
acccaggattggcatggagaccttgaatccagg

SEQ ID NO: 231549 - DNA, 33 bp, Homo sapien
gcttgaattttataggacacttaatctgacttc

SEQ ID NO: 231550 - DNA, 33 bp, Homo sapien
gcttgaattttataggtcacttaatctgacttc

SEQ ID NO: 231551 - DNA, 33 bp, Homo sapien
cactgtgatataatcccagctgtagagagaagt

SEQ ID NO: 231552 - DNA, 33 bp, Homo sapien
cactgtgatataatcctagctgtagagagaagt

SEQ ID NO: 231553 - DNA, 33 bp, Homo sapien
gtgtcagatattgtgcaaaataatacataagac

SEQ ID NO: 231554 - DNA, 33 bp, Homo sapien
gtgtcagatattgtgcgaaataatacataagac

SEQ ID NO: 231555 - DNA, 33 bp, Homo sapien
gacacatagaggtatggcagtaatgttgaatga

SEQ ID NO: 231556 - DNA, 33 bp, Homo sapien
gacacatagaggtatgtcagtaatgttgaatga

SEQ ID NO: 231557 - DNA, 33 bp, Homo sapien
tgggactttcatcttccaccatgattgtgaggc

SEQ ID NO: 231558 - DNA, 33 bp, Homo sapien
tgggactttcatcttcgaccatgattgtgaggc

SEQ ID NO: 231559 - DNA, 33 bp, Homo sapien
aggtgattaagtgggcacatttgtcaaggtagg

SEQ ID NO: 231560 - DNA, 33 bp, Homo sapien
aggtgattaagtgggctcatttgtcaaggtagg

SEQ ID NO: 231561 - DNA, 33 bp, Homo sapien
agaggagcattaaaaaattggggcatttcatct

SEQ ID NO: 231562 - DNA, 33 bp, Homo sapien
agaggagcattaaaaatttggggcatttcatct

SEQ ID NO: 231563 - DNA, 33 bp, Homo sapien
ttatactctcccattaccactgtccctctatac

SEQ ID NO: 231564 - DNA, 33 bp, Homo sapien
ttatactctcccattatcactgtccctctatac

SEQ ID NO: 231565 - DNA, 33 bp, Homo sapien
gagtgaggaggaaagacagcggagcacttacag

SEQ ID NO: 231566 - DNA, 33 bp, Homo sapien
gagtgaggaggaaagagagcggagcacttacag

SEQ ID NO: 231567 - DNA, 33 bp, Homo sapien
tgtttttcttttgcaacgttatctcccagcaca

SEQ ID NO: 231568 - DNA, 33 bp, Homo sapien
tgtttttcttttgcaatgttatctcccagcaca

SEQ ID NO: 231569 - DNA, 33 bp, Homo sapien
accacccacattcaaagtactgcctgtgtctgg

SEQ ID NO: 231570 - DNA, 33 bp, Homo sapien
accacccacattcaaattactgcctgtgtctgg

SEQ ID NO: 231571 - DNA, 33 bp, Homo sapien
ctgttctcaattttgacgctgttttgcccaatg

SEQ ID NO: 231572 - DNA, 33 bp, Homo sapien
ctgttctcaattttgatgctgttttgcccaatg

SEQ ID NO: 231573 - DNA, 33 bp, Homo sapien
aaacctcagagccttcacagttttcaacagagt

SEQ ID NO: 231574 - DNA, 33 bp, Homo sapien
aaacctcagagccttcgcagttttcaacagagt

SEQ ID NO: 231575 - DNA, 33 bp, Homo sapien
tgcatactcaccatccacctgggcttctcggca

SEQ ID NO: 231576 - DNA, 33 bp, Homo sapien
tgcatactcaccatccgcctgggcttctcggca

SEQ ID NO: 231577 - DNA, 33 bp, Homo sapien
gtagaaatgtgagagaaccatggagaattttct

SEQ ID NO: 231578 - DNA, 33 bp, Homo sapien
gtagaaatgtgagagacccatggagaattttct

SEQ ID NO: 231579 - DNA, 33 bp, Homo sapien
ctgctacctttacccacctatgcccactcactt

SEQ ID NO: 231580 - DNA, 33 bp, Homo sapien
ctgctacctttacccagctatgcccactcactt

SEQ ID NO: 231581 - DNA, 33 bp, Homo sapien
aagttgtattctcaacaaacaatgaggaaagct

SEQ ID NO: 231582 - DNA, 33 bp, Homo sapien
aagttgtattctcaaccaacaatgaggaaagct

SEQ ID NO: 231583 - DNA, 33 bp, Homo sapien
actcttctggaaataacggcaccagatgttgat

SEQ ID NO: 231584 - DNA, 33 bp, Homo sapien
actcttctggaaataatggcaccagatgttgat

SEQ ID NO: 231585 - DNA, 33 bp, Homo sapien
atgcatgatgatttgaactgtggattggggaca

SEQ ID NO: 231586 - DNA, 33 bp, Homo sapien
atgcatgatgatttgatctgtggattggggaca

SEQ ID NO: 231587 - DNA, 33 bp, Homo sapien
ccttgtacaagattgacgaaccattacaaccat

SEQ ID NO: 231588 - DNA, 33 bp, Homo sapien
ccttgtacaagattgatgaaccattacaaccat

SEQ ID NO: 231589 - DNA, 33 bp, Homo sapien
acccaaacctaacataatatgacagactcagat

SEQ ID NO: 231590 - DNA, 33 bp, Homo sapien
acccaaacctaacatactatgacagactcagat

SEQ ID NO: 231591 - DNA, 33 bp, Homo sapien
gaatgcagtgctttaaccatggcccactaaaac

SEQ ID NO: 231592 - DNA, 33 bp, Homo sapien
gaatgcagtgctttaatcatggcccactaaaac

SEQ ID NO: 231593 - DNA, 33 bp, Homo sapien
ttcttgggaacacttccagcatcactagtagca

SEQ ID NO: 231594 - DNA, 33 bp, Homo sapien
ttcttgggaacacttctagcatcactagtagca

SEQ ID NO: 231595 - DNA, 33 bp, Homo sapien
caacttaagccaaagactagaggaacaaggaaa

SEQ ID NO: 231596 - DNA, 33 bp, Homo sapien
caacttaagccaaagagtagaggaacaaggaaa

SEQ ID NO: 231597 - DNA, 33 bp, Homo sapien
acaaataaaatcataaatgaatgcaatatacaa

SEQ ID NO: 231598 - DNA, 33 bp, Homo sapien
acaaataaaatcataagtgaatgcaatatacaa

SEQ ID NO: 231599 - DNA, 33 bp, Homo sapien
gtctggtaaatgttcagcatttcaaacttcctt

SEQ ID NO: 231600 - DNA, 33 bp, Homo sapien
gtctggtaaatgttcatcatttcaaacttcctt

SEQ ID NO: 231601 - DNA, 33 bp, Homo sapien
gaaagtaatgttctaaagtctttggaagtcagt

SEQ ID NO: 231602 - DNA, 33 bp, Homo sapien
gaaagtaatgttctaaggtctttggaagtcagt

SEQ ID NO: 231603 - DNA, 33 bp, Homo sapien
ttattgcgtaagactcactaatcctttgtcatt

SEQ ID NO: 231604 - DNA, 33 bp, Homo sapien
ttattgcgtaagactcgctaatcctttgtcatt

SEQ ID NO: 231605 - DNA, 33 bp, Homo sapien
ttggtttatctgataactaacactcgtctaagg

SEQ ID NO: 231606 - DNA, 33 bp, Homo sapien
ttggtttatctgataagtaacactcgtctaagg

SEQ ID NO: 231607 - DNA, 33 bp, Homo sapien
gcatttatttcagaacaaggttaaaagacccag

SEQ ID NO: 231608 - DNA, 33 bp, Homo sapien
gcatttatttcagaacgaggttaaaagacccag

SEQ ID NO: 231609 - DNA, 33 bp, Homo sapien
aggatatcactggctacgacccaggagccaatc

SEQ ID NO: 231610 - DNA, 33 bp, Homo sapien
aggatatcactggctatgacccaggagccaatc

SEQ ID NO: 231611 - DNA, 33 bp, Homo sapien
aaagctcaggagtaaacgaggatgaaaagtagt

SEQ ID NO: 231612 - DNA, 33 bp, Homo sapien
aaagctcaggagtaaatgaggatgaaaagtagt

SEQ ID NO: 231613 - DNA, 33 bp, Homo sapien
attttcttttgaagcaccttctcgtacgtgtta

SEQ ID NO: 231614 - DNA, 33 bp, Homo sapien
attttcttttgaagcatcttctcgtacgtgtta

SEQ ID NO: 231615 - DNA, 33 bp, Homo sapien
tcatatcaagcgtataccaccaaaggattaata

SEQ ID NO: 231616 - DNA, 33 bp, Homo sapien
tcatatcaagcgtatatcaccaaaggattaata

SEQ ID NO: 231617 - DNA, 33 bp, Homo sapien
aacatggcacatagtaaacagttaaaattagct

SEQ ID NO: 231618 - DNA, 33 bp, Homo sapien
aacatggcacatagtagacagttaaaattagct

SEQ ID NO: 231619 - DNA, 33 bp, Homo sapien
ctgtgtgtgtgttcttaaaatgctagtgcctgc

SEQ ID NO: 231620 - DNA, 33 bp, Homo sapien
ctgtgtgtgtgttcttgaaatgctagtgcctgc

SEQ ID NO: 231621 - DNA, 33 bp, Homo sapien
ctgtaatttgaaatggaaacagctaattgttgc

SEQ ID NO: 231622 - DNA, 33 bp, Homo sapien
ctgtaatttgaaatgggaacagctaattgttgc

SEQ ID NO: 231623 - DNA, 33 bp, Homo sapien
cttctccagcctccaaccaacctcttctggaga

SEQ ID NO: 231624 - DNA, 33 bp, Homo sapien
cttctccagcctccaatcaacctcttctggaga

SEQ ID NO: 231625 - DNA, 33 bp, Homo sapien
ctagagaatatttgcacaagcgcatgaaaaaat

SEQ ID NO: 231626 - DNA, 33 bp, Homo sapien
ctagagaatatttgcataagcgcatgaaaaaat

SEQ ID NO: 231627 - DNA, 33 bp, Homo sapien
aatgtatttaaaagaaagcttcaggatatgtgc

SEQ ID NO: 231628 - DNA, 33 bp, Homo sapien
aatgtatttaaaagaaggcttcaggatatgtgc

SEQ ID NO: 231629 - DNA, 33 bp, Homo sapien
gaaaacctaaacagaccaatggctgcagaaaaa

SEQ ID NO: 231630 - DNA, 33 bp, Homo sapien
gaaaacctaaacagactaatggctgcagaaaaa

SEQ ID NO: 231631 - DNA, 33 bp, Homo sapien
ttttctttgttcataaatcagaaatccaggaag

SEQ ID NO: 231632 - DNA, 33 bp, Homo sapien
ttttctttgttcataagtcagaaatccaggaag

SEQ ID NO: 231633 - DNA, 33 bp, Homo sapien
ataccttgccaggtacacaagagcttaaaattt

SEQ ID NO: 231634 - DNA, 33 bp, Homo sapien
ataccttgccaggtactcaagagcttaaaattt

SEQ ID NO: 231635 - DNA, 33 bp, Homo sapien
aagttagaagtagattcaaatttaataaggctt

SEQ ID NO: 231636 - DNA, 33 bp, Homo sapien
aagttagaagtagattgaaatttaataaggctt

SEQ ID NO: 231637 - DNA, 33 bp, Homo sapien
aagtttaggagcctaaatccttaatgggcagta

SEQ ID NO: 231638 - DNA, 33 bp, Homo sapien
aagtttaggagcctaagtccttaatgggcagta

SEQ ID NO: 231639 - DNA, 33 bp, Homo sapien
agttcaatttataggcaaagcatggaagccata

SEQ ID NO: 231640 - DNA, 33 bp, Homo sapien
agttcaatttataggcgaagcatggaagccata

SEQ ID NO: 231641 - DNA, 33 bp, Homo sapien
acataattttgtttgacgcggcaattctccaag

SEQ ID NO: 231642 - DNA, 33 bp, Homo sapien
acataattttgtttgaggcggcaattctccaag

SEQ ID NO: 231643 - DNA, 33 bp, Homo sapien
gtctagtattaggtgaaattatgcttccaagaa

SEQ ID NO: 231644 - DNA, 33 bp, Homo sapien
gtctagtattaggtgagattatgcttccaagaa

SEQ ID NO: 231645 - DNA, 33 bp, Homo sapien
taatgtttgcttcaccaatgttccctggtattg

SEQ ID NO: 231646 - DNA, 33 bp, Homo sapien
taatgtttgcttcaccgatgttccctggtattg

SEQ ID NO: 231647 - DNA, 33 bp, Homo sapien
ccatatgcataaagcaataactgtctagtgatc

SEQ ID NO: 231648 - DNA, 33 bp, Homo sapien
ccatatgcataaagcagtaactgtctagtgatc

SEQ ID NO: 231649 - DNA, 33 bp, Homo sapien
ggatggaatttagcagaaacacatgggaatgta

SEQ ID NO: 231650 - DNA, 33 bp, Homo sapien
ggatggaatttagcaggaacacatgggaatgta

SEQ ID NO: 231651 - DNA, 33 bp, Homo sapien
gaaggcaggagatcataactaatttatattcat

SEQ ID NO: 231652 - DNA, 33 bp, Homo sapien
gaaggcaggagatcattactaatttatattcat

SEQ ID NO: 231653 - DNA, 33 bp, Homo sapien
agtctataaatgcagacaaccaacagtactgtg

SEQ ID NO: 231654 - DNA, 33 bp, Homo sapien
agtctataaatgcagataaccaacagtactgtg

SEQ ID NO: 231655 - DNA, 33 bp, Homo sapien
gtggggctaccaataaatggcaaacaagctgga

SEQ ID NO: 231656 - DNA, 33 bp, Homo sapien
gtggggctaccaataagtggcaaacaagctgga

SEQ ID NO: 231657 - DNA, 33 bp, Homo sapien
tgagtggaagaatgaacattagtgaacaagtaa

SEQ ID NO: 231658 - DNA, 33 bp, Homo sapien
tgagtggaagaatgaatattagtgaacaagtaa

SEQ ID NO: 231659 - DNA, 33 bp, Homo sapien
agtaagatgtgaactcaccgatgttttgctttc

SEQ ID NO: 231660 - DNA, 33 bp, Homo sapien
agtaagatgtgaactcgccgatgttttgctttc

SEQ ID NO: 231661 - DNA, 33 bp, Homo sapien
tagccatgtctgtgagcagatatgctattttac

SEQ ID NO: 231662 - DNA, 33 bp, Homo sapien
tagccatgtctgtgagtagatatgctattttac

SEQ ID NO: 231663 - DNA, 33 bp, Homo sapien
tctgatctcaggagaaagtccaaaatcccaaaa

SEQ ID NO: 231664 - DNA, 33 bp, Homo sapien
tctgatctcaggagaaggtccaaaatcccaaaa

SEQ ID NO: 231665 - DNA, 33 bp, Homo sapien
ctcagctagacttgaacagatgtcaagatgact

SEQ ID NO: 231666 - DNA, 33 bp, Homo sapien
ctcagctagacttgaatagatgtcaagatgact

SEQ ID NO: 231667 - DNA, 33 bp, Homo sapien
ttctgggcttgctgaacggatgttttcctaatt

SEQ ID NO: 231668 - DNA, 33 bp, Homo sapien
ttctgggcttgctgaatggatgttttcctaatt

SEQ ID NO: 231669 - DNA, 33 bp, Homo sapien
aagaacttgcaatataagagtcaaaagaataaa

SEQ ID NO: 231670 - DNA, 33 bp, Homo sapien
aagaacttgcaatataggagtcaaaagaataaa

SEQ ID NO: 231671 - DNA, 33 bp, Homo sapien
ttaagctgtggtataacggactatctctggcca

SEQ ID NO: 231672 - DNA, 33 bp, Homo sapien
ttaagctgtggtataatggactatctctggcca

SEQ ID NO: 231673 - DNA, 33 bp, Homo sapien
tgagataagcttcaagaaacgtctaccattcca

SEQ ID NO: 231674 - DNA, 33 bp, Homo sapien
tgagataagcttcaagcaacgtctaccattcca

SEQ ID NO: 231675 - DNA, 33 bp, Homo sapien
acaatttctgagggaaagagctaggcatcagaa

SEQ ID NO: 231676 - DNA, 33 bp, Homo sapien
acaatttctgagggaaggagctaggcatcagaa

SEQ ID NO: 231677 - DNA, 33 bp, Homo sapien
cactaaaatgagcaccagatgaattatcattta

SEQ ID NO: 231678 - DNA, 33 bp, Homo sapien
cactaaaatgagcaccggatgaattatcattta

SEQ ID NO: 231679 - DNA, 33 bp, Homo sapien
gagcagggaagtgacacgatcagcattcaattt

SEQ ID NO: 231680 - DNA, 33 bp, Homo sapien
gagcagggaagtgacaggatcagcattcaattt

SEQ ID NO: 231681 - DNA, 33 bp, Homo sapien
gataaggagatattaaatgacagccattcagag

SEQ ID NO: 231682 - DNA, 33 bp, Homo sapien
gataaggagatattaagtgacagccattcagag

SEQ ID NO: 231683 - DNA, 33 bp, Homo sapien
caaaaatgacaaaaaaaagttggctatcaagaa

SEQ ID NO: 231684 - DNA, 33 bp, Homo sapien
caaaaatgacaaaaaatagttggctatcaagaa

SEQ ID NO: 231685 - DNA, 33 bp, Homo sapien
gccagccagattaataagtggacagtaaattca

SEQ ID NO: 231686 - DNA, 33 bp, Homo sapien
gccagccagattaataggtggacagtaaattca

SEQ ID NO: 231687 - DNA, 33 bp, Homo sapien
ttggatataacttacactgacattttgaatttc

SEQ ID NO: 231688 - DNA, 33 bp, Homo sapien
ttggatataacttacattgacattttgaatttc

SEQ ID NO: 231689 - DNA, 33 bp, Homo sapien
ttctcttgaagaaaaagtttactggaaatgtac

SEQ ID NO: 231690 - DNA, 33 bp, Homo sapien
ttctcttgaagaaaaattttactggaaatgtac

SEQ ID NO: 231691 - DNA, 33 bp, Homo sapien
ctgatgattttaataacggtacagtcctttaga

SEQ ID NO: 231692 - DNA, 33 bp, Homo sapien
ctgatgattttaataatggtacagtcctttaga

SEQ ID NO: 231693 - DNA, 33 bp, Homo sapien
tttaaaagctcaaataataatagtgatatcaac

SEQ ID NO: 231694 - DNA, 33 bp, Homo sapien
tttaaaagctcaaatattaatagtgatatcaac

SEQ ID NO: 231695 - DNA, 33 bp, Homo sapien
tacaaaggcgttttcaaattccattctattgta

SEQ ID NO: 231696 - DNA, 33 bp, Homo sapien
tacaaaggcgttttcacattccattctattgta

SEQ ID NO: 231697 - DNA, 33 bp, Homo sapien
gaaaacaaataggatcaactgaaaaggaaaatt

SEQ ID NO: 231698 - DNA, 33 bp, Homo sapien
gaaaacaaataggatcgactgaaaaggaaaatt

SEQ ID NO: 231699 - DNA, 33 bp, Homo sapien
ggtgttacaaacacacaaagaccgtgaatttat

SEQ ID NO: 231700 - DNA, 33 bp, Homo sapien
ggtgttacaaacacacgaagaccgtgaatttat

SEQ ID NO: 231701 - DNA, 33 bp, Homo sapien
tgacacctggtacacacataaccttagcagcaa

SEQ ID NO: 231702 - DNA, 33 bp, Homo sapien
tgacacctggtacacatataaccttagcagcaa

SEQ ID NO: 231703 - DNA, 33 bp, Homo sapien
gacatttccattgctaagatttaaccttcatag

SEQ ID NO: 231704 - DNA, 33 bp, Homo sapien
gacatttccattgctaggatttaaccttcatag

SEQ ID NO: 231705 - DNA, 33 bp, Homo sapien
tatattaattgtggaaatatagggagaacaaga

SEQ ID NO: 231706 - DNA, 33 bp, Homo sapien
tatattaattgtggaagtatagggagaacaaga

SEQ ID NO: 231707 - DNA, 33 bp, Homo sapien
ctggaaacttcatcaaatatcttgaccatagaa

SEQ ID NO: 231708 - DNA, 33 bp, Homo sapien
ctggaaacttcatcaattatcttgaccatagaa

SEQ ID NO: 231709 - DNA, 33 bp, Homo sapien
gacacatatatacacactgatcattacacaact

SEQ ID NO: 231710 - DNA, 33 bp, Homo sapien
gacacatatatacacagtgatcattacacaact

SEQ ID NO: 231711 - DNA, 33 bp, Homo sapien
ctgacagagagttttccaatagggcagtaatat

SEQ ID NO: 231712 - DNA, 33 bp, Homo sapien
ctgacagagagttttcgaatagggcagtaatat

SEQ ID NO: 231713 - DNA, 33 bp, Homo sapien
taatgctttaaatacacataccacaaatactac

SEQ ID NO: 231714 - DNA, 33 bp, Homo sapien
taatgctttaaatacatataccacaaatactac

SEQ ID NO: 231715 - DNA, 33 bp, Homo sapien
tttctgaaggacctaacagcctcaaatgtatac

SEQ ID NO: 231716 - DNA, 33 bp, Homo sapien
tttctgaaggacctaagagcctcaaatgtatac

SEQ ID NO: 231717 - DNA, 33 bp, Homo sapien
gccaccgcacctgaccaatgataacttttaaag

SEQ ID NO: 231718 - DNA, 33 bp, Homo sapien
gccaccgcacctgaccgatgataacttttaaag

SEQ ID NO: 231719 - DNA, 33 bp, Homo sapien
aagggccaggaaattcacacttgtaacaagctc

SEQ ID NO: 231720 - DNA, 33 bp, Homo sapien
aagggccaggaaattcgcacttgtaacaagctc

SEQ ID NO: 231721 - DNA, 33 bp, Homo sapien
aggctgaaccaccaaccctgcagataccatatt

SEQ ID NO: 231722 - DNA, 33 bp, Homo sapien
aggctgaaccaccaactctgcagataccatatt

SEQ ID NO: 231723 - DNA, 33 bp, Homo sapien
cattactttattgatacggaagcacagaggcta

SEQ ID NO: 231724 - DNA, 33 bp, Homo sapien
cattactttattgatatggaagcacagaggcta

SEQ ID NO: 231725 - DNA, 33 bp, Homo sapien
agacacactgggagacagctatacatatttggg

SEQ ID NO: 231726 - DNA, 33 bp, Homo sapien
agacacactgggagacggctatacatatttggg

SEQ ID NO: 231727 - DNA, 33 bp, Homo sapien
gaggaacaactaagtacagatgtcacatagttt

SEQ ID NO: 231728 - DNA, 33 bp, Homo sapien
gaggaacaactaagtagagatgtcacatagttt

SEQ ID NO: 231729 - DNA, 33 bp, Homo sapien
gtttaactgtaacctgcattcattcatctccct

SEQ ID NO: 231730 - DNA, 33 bp, Homo sapien
gtttaactgtaacctggattcattcatctccct

SEQ ID NO: 231731 - DNA, 33 bp, Homo sapien
caggccagaatgctgaatcaccatagcttcctc

SEQ ID NO: 231732 - DNA, 33 bp, Homo sapien
caggccagaatgctgagtcaccatagcttcctc

SEQ ID NO: 231733 - DNA, 33 bp, Homo sapien
ctatgagagatgttaaatatgtgggcctggcag

SEQ ID NO: 231734 - DNA, 33 bp, Homo sapien
ctatgagagatgttaagtatgtgggcctggcag

SEQ ID NO: 231735 - DNA, 33 bp, Homo sapien
cagagaaacactttcaggcaaaccttgaagact

SEQ ID NO: 231736 - DNA, 33 bp, Homo sapien
cagagaaacactttcatgcaaaccttgaagact

SEQ ID NO: 231737 - DNA, 33 bp, Homo sapien
agactccgcaattactcaagaggcgctgctgct

SEQ ID NO: 231738 - DNA, 33 bp, Homo sapien
agactccgcaattactgaagaggcgctgctgct

SEQ ID NO: 231739 - DNA, 33 bp, Homo sapien
caggagtattaacttccaagtaggagagatgtc

SEQ ID NO: 231740 - DNA, 33 bp, Homo sapien
caggagtattaacttctaagtaggagagatgtc

SEQ ID NO: 231741 - DNA, 33 bp, Homo sapien
gaaggatgtttgatcacctttatcaaggattgt

SEQ ID NO: 231742 - DNA, 33 bp, Homo sapien
gaaggatgtttgatcagctttatcaaggattgt

SEQ ID NO: 231743 - DNA, 33 bp, Homo sapien
agtaactttgaaatcaatctttggaaccctgtc

SEQ ID NO: 231744 - DNA, 33 bp, Homo sapien
agtaactttgaaatcagtctttggaaccctgtc

SEQ ID NO: 231745 - DNA, 33 bp, Homo sapien
taagcatttttttcaacgtgtgtctcaaagtgc

SEQ ID NO: 231746 - DNA, 33 bp, Homo sapien
taagcatttttttcaatgtgtgtctcaaagtgc

SEQ ID NO: 231747 - DNA, 33 bp, Homo sapien
aaaaaaatactttagaagtcagcaaaagagaaa

SEQ ID NO: 231748 - DNA, 33 bp, Homo sapien
aaaaaaatactttagatgtcagcaaaagagaaa

SEQ ID NO: 231749 - DNA, 33 bp, Homo sapien
ttcttaagcaaataataaaaaagccactgcact

SEQ ID NO: 231750 - DNA, 33 bp, Homo sapien
ttcttaagcaaataatgaaaaagccactgcact

SEQ ID NO: 231751 - DNA, 33 bp, Homo sapien
atttagcttgtatgtacctaataaaatgtacta

SEQ ID NO: 231752 - DNA, 33 bp, Homo sapien
atttagcttgtatgtatctaataaaatgtacta

SEQ ID NO: 231753 - DNA, 33 bp, Homo sapien
taacagattttaagcaacattacttcctcaaac

SEQ ID NO: 231754 - DNA, 33 bp, Homo sapien
taacagattttaagcagcattacttcctcaaac

SEQ ID NO: 231755 - DNA, 33 bp, Homo sapien
ttttgcagaatatttcacagagaacccacgctc

SEQ ID NO: 231756 - DNA, 33 bp, Homo sapien
ttttgcagaatatttcgcagagaacccacgctc

SEQ ID NO: 231757 - DNA, 33 bp, Homo sapien
gtgtgatcgatctatcccttagctgaacaaatt

SEQ ID NO: 231758 - DNA, 33 bp, Homo sapien
gtgtgatcgatctatctcttagctgaacaaatt

SEQ ID NO: 231759 - DNA, 33 bp, Homo sapien
aataaacaggataatacgttactgagtctcttg

SEQ ID NO: 231760 - DNA, 33 bp, Homo sapien
aataaacaggataatatgttactgagtctcttg

SEQ ID NO: 231761 - DNA, 33 bp, Homo sapien
agaaaaaatgcaaataagctgctatagggttat

SEQ ID NO: 231762 - DNA, 33 bp, Homo sapien
agaaaaaatgcaaatatgctgctatagggttat

SEQ ID NO: 231763 - DNA, 33 bp, Homo sapien
ttaaaccacaattttaccacagttagaccaaat

SEQ ID NO: 231764 - DNA, 33 bp, Homo sapien
ttaaaccacaattttatcacagttagaccaaat

SEQ ID NO: 231765 - DNA, 33 bp, Homo sapien
atgcaaagaactcattaaaaaaaagacagagac

SEQ ID NO: 231766 - DNA, 33 bp, Homo sapien
atgcaaagaactcatttaaaaaaagacagagac

SEQ ID NO: 231767 - DNA, 33 bp, Homo sapien
atctctgtgcccaagaccagaaccagcaagtct

SEQ ID NO: 231768 - DNA, 33 bp, Homo sapien
atctctgtgcccaagatcagaaccagcaagtct

SEQ ID NO: 231769 - DNA, 33 bp, Homo sapien
ttagtacttgaatacccacttaacagaatactt

SEQ ID NO: 231770 - DNA, 33 bp, Homo sapien
ttagtacttgaatacctacttaacagaatactt

SEQ ID NO: 231771 - DNA, 33 bp, Homo sapien
gttcaaagagtaagaaatagagtagcaagttta

SEQ ID NO: 231772 - DNA, 33 bp, Homo sapien
gttcaaagagtaagaagtagagtagcaagttta

SEQ ID NO: 231773 - DNA, 33 bp, Homo sapien
gtcatagctctaccttaaagctgtgagctagta

SEQ ID NO: 231774 - DNA, 33 bp, Homo sapien
gtcatagctctaccttgaagctgtgagctagta

SEQ ID NO: 231775 - DNA, 33 bp, Homo sapien
caaaaggagtaattagaactctgctattttaag

SEQ ID NO: 231776 - DNA, 33 bp, Homo sapien
caaaaggagtaattaggactctgctattttaag

SEQ ID NO: 231777 - DNA, 33 bp, Homo sapien
gcaagtatccaagagaggtatgctattatgtac

SEQ ID NO: 231778 - DNA, 33 bp, Homo sapien
gcaagtatccaagagatgtatgctattatgtac

SEQ ID NO: 231779 - DNA, 33 bp, Homo sapien
aatgtcaaccagtgtacctatcatttgaattga

SEQ ID NO: 231780 - DNA, 33 bp, Homo sapien
aatgtcaaccagtgtagctatcatttgaattga

SEQ ID NO: 231781 - DNA, 33 bp, Homo sapien
tgtttaaagttaatcaagaaccttactctttcc

SEQ ID NO: 231782 - DNA, 33 bp, Homo sapien
tgtttaaagttaatcaggaaccttactctttcc

SEQ ID NO: 231783 - DNA, 33 bp, Homo sapien
tcctattgtggctatcgcttgtgtggaaggaac

SEQ ID NO: 231784 - DNA, 33 bp, Homo sapien
tcctattgtggctatctcttgtgtggaaggaac

SEQ ID NO: 231785 - DNA, 33 bp, Homo sapien
ggagtgaatcaattaaaccttgtttgtatttac

SEQ ID NO: 231786 - DNA, 33 bp, Homo sapien
ggagtgaatcaattaatccttgtttgtatttac

SEQ ID NO: 231787 - DNA, 33 bp, Homo sapien
acctagcctgcaaataaatttttgtgtgagcct

SEQ ID NO: 231788 - DNA, 33 bp, Homo sapien
acctagcctgcaaatacatttttgtgtgagcct

SEQ ID NO: 231789 - DNA, 33 bp, Homo sapien
tagagacaacatttctcaaccttaaatttgatc

SEQ ID NO: 231790 - DNA, 33 bp, Homo sapien
tagagacaacatttcttaaccttaaatttgatc

SEQ ID NO: 231791 - DNA, 33 bp, Homo sapien
cttctatctgattaataaagtggcattctggct

SEQ ID NO: 231792 - DNA, 33 bp, Homo sapien
cttctatctgattaatgaagtggcattctggct

SEQ ID NO: 231793 - DNA, 33 bp, Homo sapien
ttgagctattcaaaaactaataggatctgtgta

SEQ ID NO: 231794 - DNA, 33 bp, Homo sapien
ttgagctattcaaaaagtaataggatctgtgta

SEQ ID NO: 231795 - DNA, 33 bp, Homo sapien
ggccaagatcactgccagagaggtgagactgcc

SEQ ID NO: 231796 - DNA, 33 bp, Homo sapien
ggccaagatcactgccggagaggtgagactgcc

SEQ ID NO: 231797 - DNA, 33 bp, Homo sapien
tgttaaaacttgtttcagaaaatgaatgcatac

SEQ ID NO: 231798 - DNA, 33 bp, Homo sapien
tgttaaaacttgtttctgaaaatgaatgcatac

SEQ ID NO: 231799 - DNA, 33 bp, Homo sapien
tgcttcttgtaattcacgtcctccaaaaaccag

SEQ ID NO: 231800 - DNA, 33 bp, Homo sapien
tgcttcttgtaattcaggtcctccaaaaaccag

SEQ ID NO: 231801 - DNA, 33 bp, Homo sapien
ttaggctctatacatcaaaatgtgaaacttagg

SEQ ID NO: 231802 - DNA, 33 bp, Homo sapien
ttaggctctatacatcgaaatgtgaaacttagg

SEQ ID NO: 231803 - DNA, 33 bp, Homo sapien
agtcacgcttttcctacggtatgtaagtcctgg

SEQ ID NO: 231804 - DNA, 33 bp, Homo sapien
agtcacgcttttcctatggtatgtaagtcctgg

SEQ ID NO: 231805 - DNA, 33 bp, Homo sapien
gtgaatgatcaaatggaaagtcaatattgttgt

SEQ ID NO: 231806 - DNA, 33 bp, Homo sapien
gtgaatgatcaaatgggaagtcaatattgttgt

SEQ ID NO: 231807 - DNA, 33 bp, Homo sapien
tagttctatatcattaagccatttgcccttagc

SEQ ID NO: 231808 - DNA, 33 bp, Homo sapien
tagttctatatcattaggccatttgcccttagc

SEQ ID NO: 231809 - DNA, 33 bp, Homo sapien
cattgggtcagctcacgaaaacagcttcacctg

SEQ ID NO: 231810 - DNA, 33 bp, Homo sapien
cattgggtcagctcactaaaacagcttcacctg

SEQ ID NO: 231811 - DNA, 33 bp, Homo sapien
tttcttaggcgtgaacagttatccagaagaaca

SEQ ID NO: 231812 - DNA, 33 bp, Homo sapien
tttcttaggcgtgaacggttatccagaagaaca

SEQ ID NO: 231813 - DNA, 33 bp, Homo sapien
ctccatctcgtaaaagacacaaaaactagttag

SEQ ID NO: 231814 - DNA, 33 bp, Homo sapien
ctccatctcgtaaaaggcacaaaaactagttag

SEQ ID NO: 231815 - DNA, 33 bp, Homo sapien
aggaagagaggttcacaaagatgaattttgtgg

SEQ ID NO: 231816 - DNA, 33 bp, Homo sapien
aggaagagaggttcacgaagatgaattttgtgg

SEQ ID NO: 231817 - DNA, 33 bp, Homo sapien
atctacagtggtaccacaatctcctaatagaat

SEQ ID NO: 231818 - DNA, 33 bp, Homo sapien
atctacagtggtaccataatctcctaatagaat

SEQ ID NO: 231819 - DNA, 33 bp, Homo sapien
tgatcaaggtatttatgagctttgaaaccaact

SEQ ID NO: 231820 - DNA, 33 bp, Homo sapien
tgatcaaggtatttattagctttgaaaccaact

SEQ ID NO: 231821 - DNA, 33 bp, Homo sapien
aaaacacttgtgtccactgaggtacttccgtct

SEQ ID NO: 231822 - DNA, 33 bp, Homo sapien
aaaacacttgtgtccattgaggtacttccgtct

SEQ ID NO: 231823 - DNA, 33 bp, Homo sapien
aagatatctcatccacccacttattctaaatgc

SEQ ID NO: 231824 - DNA, 33 bp, Homo sapien
aagatatctcatccacgcacttattctaaatgc

SEQ ID NO: 231825 - DNA, 33 bp, Homo sapien
caatagccaagatacggagtcaatctaagagtc

SEQ ID NO: 231826 - DNA, 33 bp, Homo sapien
caatagccaagatacgtagtcaatctaagagtc

SEQ ID NO: 231827 - DNA, 33 bp, Homo sapien
ccaagatggcatagtgcagtagtcttttgggcc

SEQ ID NO: 231828 - DNA, 33 bp, Homo sapien
ccaagatggcatagtggagtagtcttttgggcc

SEQ ID NO: 231829 - DNA, 33 bp, Homo sapien
aaatcaggagaattaactgaaagtcaacctata

SEQ ID NO: 231830 - DNA, 33 bp, Homo sapien
aaatcaggagaattaattgaaagtcaacctata

SEQ ID NO: 231831 - DNA, 33 bp, Homo sapien
tgttaagaacagattacggaaagaagcagatat

SEQ ID NO: 231832 - DNA, 33 bp, Homo sapien
tgttaagaacagattatggaaagaagcagatat

SEQ ID NO: 231833 - DNA, 33 bp, Homo sapien
gtatgaatgagtctgaactataaaactaacgag

SEQ ID NO: 231834 - DNA, 33 bp, Homo sapien
gtatgaatgagtctgagctataaaactaacgag

SEQ ID NO: 231835 - DNA, 33 bp, Homo sapien
agcaaaagaaactatcaatcaacagggtaaaca

SEQ ID NO: 231836 - DNA, 33 bp, Homo sapien
agcaaaagaaactatctatcaacagggtaaaca

SEQ ID NO: 231837 - DNA, 33 bp, Homo sapien
atctgattaaaagccacctgaagcaaaaataaa

SEQ ID NO: 231838 - DNA, 33 bp, Homo sapien
atctgattaaaagccatctgaagcaaaaataaa

SEQ ID NO: 231839 - DNA, 33 bp, Homo sapien
gctaccctaaacaggcaacatctactttgcata

SEQ ID NO: 231840 - DNA, 33 bp, Homo sapien
gctaccctaaacaggcgacatctactttgcata

SEQ ID NO: 231841 - DNA, 33 bp, Homo sapien
atggggaggttcttaaatgcaaaagattcccat

SEQ ID NO: 231842 - DNA, 33 bp, Homo sapien
atggggaggttcttaagtgcaaaagattcccat

SEQ ID NO: 231843 - DNA, 33 bp, Homo sapien
tcagaggatccaggaacctcactgtatgcaaag

SEQ ID NO: 231844 - DNA, 33 bp, Homo sapien
tcagaggatccaggaatctcactgtatgcaaag

SEQ ID NO: 231845 - DNA, 33 bp, Homo sapien
ttacaccttgatgtgcaaaagaaggaatagcag

SEQ ID NO: 231846 - DNA, 33 bp, Homo sapien
ttacaccttgatgtgcgaaagaaggaatagcag

SEQ ID NO: 231847 - DNA, 33 bp, Homo sapien
caagcacatttggtcaagagtttttcattcttc

SEQ ID NO: 231848 - DNA, 33 bp, Homo sapien
caagcacatttggtcacgagtttttcattcttc

SEQ ID NO: 231849 - DNA, 33 bp, Homo sapien
agagtgactcatcttcacaaaaagatacattaa

SEQ ID NO: 231850 - DNA, 33 bp, Homo sapien
agagtgactcatcttcgcaaaaagatacattaa

SEQ ID NO: 231851 - DNA, 33 bp, Homo sapien
taaaaagggatttgacacatggtgcttaagaca

SEQ ID NO: 231852 - DNA, 33 bp, Homo sapien
taaaaagggatttgacccatggtgcttaagaca

SEQ ID NO: 231853 - DNA, 33 bp, Homo sapien
tacaaataatgtagctcaaaacattcttggaag

SEQ ID NO: 231854 - DNA, 33 bp, Homo sapien
tacaaataatgtagctgaaaacattcttggaag

SEQ ID NO: 231855 - DNA, 33 bp, Homo sapien
aagcaaacaagagtggaataattaaagtaggag

SEQ ID NO: 231856 - DNA, 33 bp, Homo sapien
aagcaaacaagagtggcataattaaagtaggag

SEQ ID NO: 231857 - DNA, 33 bp, Homo sapien
ccaggcagtgcagctccgacttttgacacttaa

SEQ ID NO: 231858 - DNA, 33 bp, Homo sapien
ccaggcagtgcagctctgacttttgacacttaa

SEQ ID NO: 231859 - DNA, 33 bp, Homo sapien
attgcagtttctaacacaagagaaaaacaacct

SEQ ID NO: 231860 - DNA, 33 bp, Homo sapien
attgcagtttctaacagaagagaaaaacaacct

SEQ ID NO: 231861 - DNA, 33 bp, Homo sapien
gtatatttgctaattgaagaggcagaatttctg

SEQ ID NO: 231862 - DNA, 33 bp, Homo sapien
gtatatttgctaattgcagaggcagaatttctg

SEQ ID NO: 231863 - DNA, 33 bp, Homo sapien
ccacaggcaaggaataaacctcgtgctgcaacc

SEQ ID NO: 231864 - DNA, 33 bp, Homo sapien
ccacaggcaaggaatatacctcgtgctgcaacc

SEQ ID NO: 231865 - DNA, 33 bp, Homo sapien
aaatgctctcagagaacagttttgtacctaaac

SEQ ID NO: 231866 - DNA, 33 bp, Homo sapien
aaatgctctcagagaatagttttgtacctaaac

SEQ ID NO: 231867 - DNA, 33 bp, Homo sapien
aaaagaatgattactccataggcagagctgtgg

SEQ ID NO: 231868 - DNA, 33 bp, Homo sapien
aaaagaatgattactctataggcagagctgtgg

SEQ ID NO: 231869 - DNA, 33 bp, Homo sapien
ttacactagtgaacccaatgaatcatacagtga

SEQ ID NO: 231870 - DNA, 33 bp, Homo sapien
ttacactagtgaacccgatgaatcatacagtga

SEQ ID NO: 231871 - DNA, 33 bp, Homo sapien
aaacctcttgacaactaagtgacatatactgtt

SEQ ID NO: 231872 - DNA, 33 bp, Homo sapien
aaacctcttgacaactgagtgacatatactgtt

SEQ ID NO: 231873 - DNA, 33 bp, Homo sapien
tttcctgctttgtaaccggtgcacataccctca

SEQ ID NO: 231874 - DNA, 33 bp, Homo sapien
tttcctgctttgtaactggtgcacataccctca

SEQ ID NO: 231875 - DNA, 33 bp, Homo sapien
ttatttcctcatctataaactcagaataataat

SEQ ID NO: 231876 - DNA, 33 bp, Homo sapien
ttatttcctcatctattaactcagaataataat

SEQ ID NO: 231877 - DNA, 33 bp, Homo sapien
tttcatttggagccagaaaagtgagcaaaagac

SEQ ID NO: 231878 - DNA, 33 bp, Homo sapien
tttcatttggagccaggaaagtgagcaaaagac

SEQ ID NO: 231879 - DNA, 33 bp, Homo sapien
accacctagaataatcagagagagtttcaggtg

SEQ ID NO: 231880 - DNA, 33 bp, Homo sapien
accacctagaataatccgagagagtttcaggtg

SEQ ID NO: 231881 - DNA, 33 bp, Homo sapien
ggtgtacctgtgctgaatacatacaatttaaga

SEQ ID NO: 231882 - DNA, 33 bp, Homo sapien
ggtgtacctgtgctgagtacatacaatttaaga

SEQ ID NO: 231883 - DNA, 33 bp, Homo sapien
gccatacatagtgagacgggaagattatcataa

SEQ ID NO: 231884 - DNA, 33 bp, Homo sapien
gccatacatagtgagatgggaagattatcataa

SEQ ID NO: 231885 - DNA, 33 bp, Homo sapien
acctcggaaaatcagaccaagaagttcaaaagc

SEQ ID NO: 231886 - DNA, 33 bp, Homo sapien
acctcggaaaatcagatcaagaagttcaaaagc

SEQ ID NO: 231887 - DNA, 33 bp, Homo sapien
caatgcatttgaaataagttttctaagcattgt

SEQ ID NO: 231888 - DNA, 33 bp, Homo sapien
caatgcatttgaaatatgttttctaagcattgt

SEQ ID NO: 231889 - DNA, 33 bp, Homo sapien
aaaagctgaaacagaactacaaggctctcaatt

SEQ ID NO: 231890 - DNA, 33 bp, Homo sapien
aaaagctgaaacagaattacaaggctctcaatt

SEQ ID NO: 231891 - DNA, 33 bp, Homo sapien
tgttttttgaaagggcaaaattcattgtgaaca

SEQ ID NO: 231892 - DNA, 33 bp, Homo sapien
tgttttttgaaagggcgaaattcattgtgaaca

SEQ ID NO: 231893 - DNA, 33 bp, Homo sapien
agagttctagtcctcactaacatggttctgtgc

SEQ ID NO: 231894 - DNA, 33 bp, Homo sapien
agagttctagtcctcattaacatggttctgtgc

SEQ ID NO: 231895 - DNA, 33 bp, Homo sapien
cagccagctacaggagagtttgggtcagcctat

SEQ ID NO: 231896 - DNA, 33 bp, Homo sapien
cagccagctacaggagcgtttgggtcagcctat

SEQ ID NO: 231897 - DNA, 33 bp, Homo sapien
gattttcctaatttatattgcacttacaacacc

SEQ ID NO: 231898 - DNA, 33 bp, Homo sapien
gattttcctaatttatgttgcacttacaacacc

SEQ ID NO: 231899 - DNA, 33 bp, Homo sapien
ccaggagcagtctagacggtgacatttaagaga

SEQ ID NO: 231900 - DNA, 33 bp, Homo sapien
ccaggagcagtctagatggtgacatttaagaga

SEQ ID NO: 231901 - DNA, 33 bp, Homo sapien
actcgtgttcactcaccactcttgtgtgccact

SEQ ID NO: 231902 - DNA, 33 bp, Homo sapien
actcgtgttcactcactactcttgtgtgccact

SEQ ID NO: 231903 - DNA, 33 bp, Homo sapien
ttgcagtctatgtaaaaaagtgtttcatagaaa

SEQ ID NO: 231904 - DNA, 33 bp, Homo sapien
ttgcagtctatgtaaagaagtgtttcatagaaa

SEQ ID NO: 231905 - DNA, 33 bp, Homo sapien
aagtcttaacttgtgcaccaaagtcaattaatt

SEQ ID NO: 231906 - DNA, 33 bp, Homo sapien
aagtcttaacttgtgcgccaaagtcaattaatt

SEQ ID NO: 231907 - DNA, 33 bp, Homo sapien
ccatcacaataacaaaagttcaatattctattt

SEQ ID NO: 231908 - DNA, 33 bp, Homo sapien
ccatcacaataacaaaggttcaatattctattt

SEQ ID NO: 231909 - DNA, 33 bp, Homo sapien
aacacattagatttgccactatagctgttattt

SEQ ID NO: 231910 - DNA, 33 bp, Homo sapien
aacacattagatttgctactatagctgttattt

SEQ ID NO: 231911 - DNA, 33 bp, Homo sapien
tacagcctggagctaaatcctaaaggtgcccat

SEQ ID NO: 231912 - DNA, 33 bp, Homo sapien
tacagcctggagctaattcctaaaggtgcccat

SEQ ID NO: 231913 - DNA, 33 bp, Homo sapien
actcaatttggaacaaagaagatgaattcaagc

SEQ ID NO: 231914 - DNA, 33 bp, Homo sapien
actcaatttggaacaaggaagatgaattcaagc

SEQ ID NO: 231915 - DNA, 33 bp, Homo sapien
ctccttcaaagaccgaatcctttctgtatgacc

SEQ ID NO: 231916 - DNA, 33 bp, Homo sapien
ctccttcaaagaccgagtcctttctgtatgacc

SEQ ID NO: 231917 - DNA, 33 bp, Homo sapien
ggggttagatcttaggacaaaagaaaaagccag

SEQ ID NO: 231918 - DNA, 33 bp, Homo sapien
ggggttagatcttagggcaaaagaaaaagccag

SEQ ID NO: 231919 - DNA, 33 bp, Homo sapien
tcttcagctacccttaccaaattgtcatggcaa

SEQ ID NO: 231920 - DNA, 33 bp, Homo sapien
tcttcagctacccttatcaaattgtcatggcaa

SEQ ID NO: 231921 - DNA, 33 bp, Homo sapien
tttccttttggcgaaaatgcatattcagaagta

SEQ ID NO: 231922 - DNA, 33 bp, Homo sapien
tttccttttggcgaaagtgcatattcagaagta

SEQ ID NO: 231923 - DNA, 33 bp, Homo sapien
gatttagttggaaaaaattggggtattgtaaca

SEQ ID NO: 231924 - DNA, 33 bp, Homo sapien
gatttagttggaaaaagttggggtattgtaaca

SEQ ID NO: 231925 - DNA, 33 bp, Homo sapien
ggtagattttgtgttcaattctatgagacttct

SEQ ID NO: 231926 - DNA, 33 bp, Homo sapien
ggtagattttgtgttcgattctatgagacttct

SEQ ID NO: 231927 - DNA, 33 bp, Homo sapien
taaacgtcttcaaagaagttcaagcaaaattat

SEQ ID NO: 231928 - DNA, 33 bp, Homo sapien
taaacgtcttcaaagaggttcaagcaaaattat

SEQ ID NO: 231929 - DNA, 33 bp, Homo sapien
caacaaaaaattagagacaagttgatgtaaaaa

SEQ ID NO: 231930 - DNA, 33 bp, Homo sapien
caacaaaaaattagagtcaagttgatgtaaaaa

SEQ ID NO: 231931 - DNA, 33 bp, Homo sapien
cagttctgtctcagtacacatagaatctccctt

SEQ ID NO: 231932 - DNA, 33 bp, Homo sapien
cagttctgtctcagtatacatagaatctccctt

SEQ ID NO: 231933 - DNA, 33 bp, Homo sapien
aagtaagcatgtttgaagtcaattattggagaa

SEQ ID NO: 231934 - DNA, 33 bp, Homo sapien
aagtaagcatgtttgaggtcaattattggagaa

SEQ ID NO: 231935 - DNA, 33 bp, Homo sapien
aattctcaggagtgaacgaggtaaggtgtgcat

SEQ ID NO: 231936 - DNA, 33 bp, Homo sapien
aattctcaggagtgaatgaggtaaggtgtgcat

SEQ ID NO: 231937 - DNA, 33 bp, Homo sapien
ttatcctcttaacagcacattttccataagttt

SEQ ID NO: 231938 - DNA, 33 bp, Homo sapien
ttatcctcttaacagcgcattttccataagttt

SEQ ID NO: 231939 - DNA, 33 bp, Homo sapien
tggtccatgtttataactgctcccctgccaata

SEQ ID NO: 231940 - DNA, 33 bp, Homo sapien
tggtccatgtttataattgctcccctgccaata

SEQ ID NO: 231941 - DNA, 33 bp, Homo sapien
aaactggatatatgtcagaatgtcatggacaga

SEQ ID NO: 231942 - DNA, 33 bp, Homo sapien
aaactggatatatgtcggaatgtcatggacaga

SEQ ID NO: 231943 - DNA, 33 bp, Homo sapien
attttaattgctatacccattgatacatcaatc

SEQ ID NO: 231944 - DNA, 33 bp, Homo sapien
attttaattgctatactcattgatacatcaatc

SEQ ID NO: 231945 - DNA, 33 bp, Homo sapien
aaaaagtaattttccccggatatgcaataagac

SEQ ID NO: 231946 - DNA, 33 bp, Homo sapien
aaaaagtaattttccctggatatgcaataagac

SEQ ID NO: 231947 - DNA, 33 bp, Homo sapien
acctgaaataattgccacttttgggtagccaga

SEQ ID NO: 231948 - DNA, 33 bp, Homo sapien
acctgaaataattgccgcttttgggtagccaga

SEQ ID NO: 231949 - DNA, 33 bp, Homo sapien
tatttgaaagggatccaaagcagataggctcag

SEQ ID NO: 231950 - DNA, 33 bp, Homo sapien
tatttgaaagggatccgaagcagataggctcag

SEQ ID NO: 231951 - DNA, 33 bp, Homo sapien
ttcaggcaactactaccaatcaatacaggttga

SEQ ID NO: 231952 - DNA, 33 bp, Homo sapien
ttcaggcaactactacgaatcaatacaggttga

SEQ ID NO: 231953 - DNA, 33 bp, Homo sapien
tttctgtactgtgtaaagtttcatctaatgagc

SEQ ID NO: 231954 - DNA, 33 bp, Homo sapien
tttctgtactgtgtaatgtttcatctaatgagc

SEQ ID NO: 231955 - DNA, 33 bp, Homo sapien
attttgtatgctggcacattttattttttaaac

SEQ ID NO: 231956 - DNA, 33 bp, Homo sapien
attttgtatgctggcagattttattttttaaac

SEQ ID NO: 231957 - DNA, 33 bp, Homo sapien
tgcctgactgagtagacggtgcattagccctgt

SEQ ID NO: 231958 - DNA, 33 bp, Homo sapien
tgcctgactgagtagatggtgcattagccctgt

SEQ ID NO: 231959 - DNA, 33 bp, Homo sapien
aacctaactttcagcccgacttgccatttaaaa

SEQ ID NO: 231960 - DNA, 33 bp, Homo sapien
aacctaactttcagcctgacttgccatttaaaa

SEQ ID NO: 231961 - DNA, 33 bp, Homo sapien
gtctatgggcagctgaataaagatgttgctaat

SEQ ID NO: 231962 - DNA, 33 bp, Homo sapien
gtctatgggcagctgagtaaagatgttgctaat

SEQ ID NO: 231963 - DNA, 33 bp, Homo sapien
tgtctggattgtagcaaagatgtagagagaagt

SEQ ID NO: 231964 - DNA, 33 bp, Homo sapien
tgtctggattgtagcatagatgtagagagaagt

SEQ ID NO: 231965 - DNA, 33 bp, Homo sapien
cattcatgaaggctcccaattacttcttaaagg

SEQ ID NO: 231966 - DNA, 33 bp, Homo sapien
cattcatgaaggctcctaattacttcttaaagg

SEQ ID NO: 231967 - DNA, 33 bp, Homo sapien
caacaggtgtggaaaccataggtacatgaaaga

SEQ ID NO: 231968 - DNA, 33 bp, Homo sapien
caacaggtgtggaaactataggtacatgaaaga

SEQ ID NO: 231969 - DNA, 33 bp, Homo sapien
tctgacaagttcttgacatgcaaatatttcatg

SEQ ID NO: 231970 - DNA, 33 bp, Homo sapien
tctgacaagttcttgatatgcaaatatttcatg

SEQ ID NO: 231971 - DNA, 33 bp, Homo sapien
aacagataggtgatgacagatgatagagaaaga

SEQ ID NO: 231972 - DNA, 33 bp, Homo sapien
aacagataggtgatgatagatgatagagaaaga

SEQ ID NO: 231973 - DNA, 33 bp, Homo sapien
tcaattcagttctccaagtatttggcattgtta

SEQ ID NO: 231974 - DNA, 33 bp, Homo sapien
tcaattcagttctccacgtatttggcattgtta

SEQ ID NO: 231975 - DNA, 33 bp, Homo sapien
attattatttttaaagcacacctataccttcaa

SEQ ID NO: 231976 - DNA, 33 bp, Homo sapien
attattatttttaaaggacacctataccttcaa

SEQ ID NO: 231977 - DNA, 33 bp, Homo sapien
ggcactcactagaccacgtaactttgttctaat

SEQ ID NO: 231978 - DNA, 33 bp, Homo sapien
ggcactcactagaccatgtaactttgttctaat

SEQ ID NO: 231979 - DNA, 33 bp, Homo sapien
aagtaatcacaagtaactcttccccaagaaaat

SEQ ID NO: 231980 - DNA, 33 bp, Homo sapien
aagtaatcacaagtaagtcttccccaagaaaat

SEQ ID NO: 231981 - DNA, 33 bp, Homo sapien
aaatattcaaatctgaagcctgaaaagtccatt

SEQ ID NO: 231982 - DNA, 33 bp, Homo sapien
aaatattcaaatctgaggcctgaaaagtccatt

SEQ ID NO: 231983 - DNA, 33 bp, Homo sapien
cccaaagacatagatagaacaagtaatggagcc

SEQ ID NO: 231984 - DNA, 33 bp, Homo sapien
cccaaagacatagatataacaagtaatggagcc

SEQ ID NO: 231985 - DNA, 33 bp, Homo sapien
atctaattgctccaaacagtactaatcatgtgc

SEQ ID NO: 231986 - DNA, 33 bp, Homo sapien
atctaattgctccaaagagtactaatcatgtgc

SEQ ID NO: 231987 - DNA, 33 bp, Homo sapien
ttccaaagcaaacatcggataacaacactatct

SEQ ID NO: 231988 - DNA, 33 bp, Homo sapien
ttccaaagcaaacatctgataacaacactatct

SEQ ID NO: 231989 - DNA, 33 bp, Homo sapien
agtgaaagtgaaacaaacaaatagaacttcgct

SEQ ID NO: 231990 - DNA, 33 bp, Homo sapien
agtgaaagtgaaacaagcaaatagaacttcgct

SEQ ID NO: 231991 - DNA, 33 bp, Homo sapien
gctctactaaacaaaagatttccaactcagaga

SEQ ID NO: 231992 - DNA, 33 bp, Homo sapien
gctctactaaacaaaatatttccaactcagaga

SEQ ID NO: 231993 - DNA, 33 bp, Homo sapien
attggcgtagtgcctacacatacatacacacat

SEQ ID NO: 231994 - DNA, 33 bp, Homo sapien
attggcgtagtgcctatacatacatacacacat

SEQ ID NO: 231995 - DNA, 33 bp, Homo sapien
agatttgaattaattacatctcatagctgtgca

SEQ ID NO: 231996 - DNA, 33 bp, Homo sapien
agatttgaattaattatatctcatagctgtgca

SEQ ID NO: 231997 - DNA, 33 bp, Homo sapien
gttcaccttggctatacaggaaactctttcaag

SEQ ID NO: 231998 - DNA, 33 bp, Homo sapien
gttcaccttggctatataggaaactctttcaag

SEQ ID NO: 231999 - DNA, 33 bp, Homo sapien
tttaatgcaatacaaaccaacatacaagtgaat

SEQ ID NO: 232000 - DNA, 33 bp, Homo sapien
tttaatgcaatacaaatcaacatacaagtgaat

SEQ ID NO: 232001 - DNA, 33 bp, Homo sapien
aaaactagagaaaggcaaaggagggcagtaaac

SEQ ID NO: 232002 - DNA, 33 bp, Homo sapien
aaaactagagaaaggcgaaggagggcagtaaac

SEQ ID NO: 232003 - DNA, 33 bp, Homo sapien
aattctccacattttcgctgctattccaagtca

SEQ ID NO: 232004 - DNA, 33 bp, Homo sapien
aattctccacattttctctgctattccaagtca

SEQ ID NO: 232005 - DNA, 33 bp, Homo sapien
ggaaatcagagtgacaatagaacagctttcatc

SEQ ID NO: 232006 - DNA, 33 bp, Homo sapien
ggaaatcagagtgacagtagaacagctttcatc

SEQ ID NO: 232007 - DNA, 33 bp, Homo sapien
agaaacttcctggataaatagaccagtttcttt

SEQ ID NO: 232008 - DNA, 33 bp, Homo sapien
agaaacttcctggatagatagaccagtttcttt

SEQ ID NO: 232009 - DNA, 33 bp, Homo sapien
ctgagttgatttcttaggcagaatgagataact

SEQ ID NO: 232010 - DNA, 33 bp, Homo sapien
ctgagttgatttcttatgcagaatgagataact

SEQ ID NO: 232011 - DNA, 33 bp, Homo sapien
tctccacttctattcaccattattctggaggtt

SEQ ID NO: 232012 - DNA, 33 bp, Homo sapien
tctccacttctattcatcattattctggaggtt

SEQ ID NO: 232013 - DNA, 33 bp, Homo sapien
tatgagcaagctgaagaaaaggcaattaggaac

SEQ ID NO: 232014 - DNA, 33 bp, Homo sapien
tatgagcaagctgaagcaaaggcaattaggaac

SEQ ID NO: 232015 - DNA, 33 bp, Homo sapien
aattctgaagagtatggcaggctgattctcttg

SEQ ID NO: 232016 - DNA, 33 bp, Homo sapien
aattctgaagagtatgtcaggctgattctcttg

SEQ ID NO: 232017 - DNA, 33 bp, Homo sapien
caacttttgtccatgcaatattttaggctttta

SEQ ID NO: 232018 - DNA, 33 bp, Homo sapien
caacttttgtccatgcgatattttaggctttta

SEQ ID NO: 232019 - DNA, 33 bp, Homo sapien
gtggacttctcatggaacatttagtaccatcct

SEQ ID NO: 232020 - DNA, 33 bp, Homo sapien
gtggacttctcatggatcatttagtaccatcct

SEQ ID NO: 232021 - DNA, 33 bp, Homo sapien
cgacaacaaatgcaaaggccctaaggtgaaaat

SEQ ID NO: 232022 - DNA, 33 bp, Homo sapien
cgacaacaaatgcaaatgccctaaggtgaaaat

SEQ ID NO: 232023 - DNA, 33 bp, Homo sapien
gacactacttttattaagccattacgcctgcta

SEQ ID NO: 232024 - DNA, 33 bp, Homo sapien
gacactacttttattatgccattacgcctgcta

SEQ ID NO: 232025 - DNA, 33 bp, Homo sapien
gtctcactatgttcaccagacttgagttgaact

SEQ ID NO: 232026 - DNA, 33 bp, Homo sapien
gtctcactatgttcactagacttgagttgaact

SEQ ID NO: 232027 - DNA, 33 bp, Homo sapien
gtaaatagaggcctagaaagtttaatgatgtgc

SEQ ID NO: 232028 - DNA, 33 bp, Homo sapien
gtaaatagaggcctaggaagtttaatgatgtgc

SEQ ID NO: 232029 - DNA, 33 bp, Homo sapien
agtaaagcatgaccaaccagctgaatatctgtg

SEQ ID NO: 232030 - DNA, 33 bp, Homo sapien
agtaaagcatgaccaagcagctgaatatctgtg

SEQ ID NO: 232031 - DNA, 33 bp, Homo sapien
aaaatttaggtgggaacttacattaaaaagata

SEQ ID NO: 232032 - DNA, 33 bp, Homo sapien
aaaatttaggtgggaatttacattaaaaagata

SEQ ID NO: 232033 - DNA, 33 bp, Homo sapien
tccttcttgagaagacagtaggtatgctgaggt

SEQ ID NO: 232034 - DNA, 33 bp, Homo sapien
tccttcttgagaagacggtaggtatgctgaggt

SEQ ID NO: 232035 - DNA, 33 bp, Homo sapien
cccccagtctatagaaccttctgcactttattt

SEQ ID NO: 232036 - DNA, 33 bp, Homo sapien
cccccagtctatagaatcttctgcactttattt

SEQ ID NO: 232037 - DNA, 33 bp, Homo sapien
caatgcctccttaagacgcagtaacagattctt

SEQ ID NO: 232038 - DNA, 33 bp, Homo sapien
caatgcctccttaagatgcagtaacagattctt

SEQ ID NO: 232039 - DNA, 33 bp, Homo sapien
gctagagcacatggtgcaatgttgacagatgac

SEQ ID NO: 232040 - DNA, 33 bp, Homo sapien
gctagagcacatggtgtaatgttgacagatgac

SEQ ID NO: 232041 - DNA, 33 bp, Homo sapien
cagtcaaactaataaacaggcacctatgacaca

SEQ ID NO: 232042 - DNA, 33 bp, Homo sapien
cagtcaaactaataaagaggcacctatgacaca

SEQ ID NO: 232043 - DNA, 33 bp, Homo sapien
ctaaatagcacattgacgagacaaaccatgctt

SEQ ID NO: 232044 - DNA, 33 bp, Homo sapien
ctaaatagcacattgatgagacaaaccatgctt

SEQ ID NO: 232045 - DNA, 33 bp, Homo sapien
ctaatctaagtctgtaaaatttgatttcctttc

SEQ ID NO: 232046 - DNA, 33 bp, Homo sapien
ctaatctaagtctgtataatttgatttcctttc

SEQ ID NO: 232047 - DNA, 33 bp, Homo sapien
ttcccgattggtaagagcattggctatcaggtt

SEQ ID NO: 232048 - DNA, 33 bp, Homo sapien
ttcccgattggtaagatcattggctatcaggtt

SEQ ID NO: 232049 - DNA, 33 bp, Homo sapien
ggtcactccacagtaaatagacatcattgttat

SEQ ID NO: 232050 - DNA, 33 bp, Homo sapien
ggtcactccacagtaagtagacatcattgttat

SEQ ID NO: 232051 - DNA, 33 bp, Homo sapien
attaaacagaaattcaatataaactctccagga

SEQ ID NO: 232052 - DNA, 33 bp, Homo sapien
attaaacagaaattcagtataaactctccagga

SEQ ID NO: 232053 - DNA, 33 bp, Homo sapien
tgtttgacaaattcaaataaggctaataggccc

SEQ ID NO: 232054 - DNA, 33 bp, Homo sapien
tgtttgacaaattcaagtaaggctaataggccc

SEQ ID NO: 232055 - DNA, 33 bp, Homo sapien
tgcatctgttgaaacaaaaattttcctaagcat

SEQ ID NO: 232056 - DNA, 33 bp, Homo sapien
tgcatctgttgaaacacaaattttcctaagcat

SEQ ID NO: 232057 - DNA, 33 bp, Homo sapien
tatcctgtactggtaaacgatcagcaagcatct

SEQ ID NO: 232058 - DNA, 33 bp, Homo sapien
tatcctgtactggtaagcgatcagcaagcatct

SEQ ID NO: 232059 - DNA, 33 bp, Homo sapien
cttttcactatacaaaaaaattaagtcaagatg

SEQ ID NO: 232060 - DNA, 33 bp, Homo sapien
cttttcactatacaaacaaattaagtcaagatg

SEQ ID NO: 232061 - DNA, 33 bp, Homo sapien
cagcatgttggtcaacactgtggaaacaatgaa

SEQ ID NO: 232062 - DNA, 33 bp, Homo sapien
cagcatgttggtcaacgctgtggaaacaatgaa

SEQ ID NO: 232063 - DNA, 33 bp, Homo sapien
atttccatcataaatccgaaaccagtcaaacag

SEQ ID NO: 232064 - DNA, 33 bp, Homo sapien
atttccatcataaatctgaaaccagtcaaacag

SEQ ID NO: 232065 - DNA, 33 bp, Homo sapien
gagggctctactttcacaaatgggattagtgcc

SEQ ID NO: 232066 - DNA, 33 bp, Homo sapien
gagggctctactttcagaaatgggattagtgcc

SEQ ID NO: 232067 - DNA, 33 bp, Homo sapien
attccttggcaaaattcaagaagcacattaaag

SEQ ID NO: 232068 - DNA, 33 bp, Homo sapien
attccttggcaaaatttaagaagcacattaaag

SEQ ID NO: 232069 - DNA, 33 bp, Homo sapien
aaaaactggagaggaagggatatcagttgtcca

SEQ ID NO: 232070 - DNA, 33 bp, Homo sapien
aaaaactggagaggaatggatatcagttgtcca

SEQ ID NO: 232071 - DNA, 33 bp, Homo sapien
agtaactattctgttcaaaaggtctctgtagga

SEQ ID NO: 232072 - DNA, 33 bp, Homo sapien
agtaactattctgttcgaaaggtctctgtagga

SEQ ID NO: 232073 - DNA, 33 bp, Homo sapien
gatgaaatattggatcactgtcttcaaatatat

SEQ ID NO: 232074 - DNA, 33 bp, Homo sapien
gatgaaatattggatcgctgtcttcaaatatat

SEQ ID NO: 232075 - DNA, 33 bp, Homo sapien
gttgccattctgcagggaagtgaactttttact

SEQ ID NO: 232076 - DNA, 33 bp, Homo sapien
gttgccattctgcaggtaagtgaactttttact

SEQ ID NO: 232077 - DNA, 33 bp, Homo sapien
atttgttatatctttccagtggtttgacacttt

SEQ ID NO: 232078 - DNA, 33 bp, Homo sapien
atttgttatatctttctagtggtttgacacttt

SEQ ID NO: 232079 - DNA, 33 bp, Homo sapien
ttttcaacaataaagccgccaaaaggttgcaaa

SEQ ID NO: 232080 - DNA, 33 bp, Homo sapien
ttttcaacaataaagctgccaaaaggttgcaaa

SEQ ID NO: 232081 - DNA, 33 bp, Homo sapien
gttgatgtaactgaacggactgagagacagagt

SEQ ID NO: 232082 - DNA, 33 bp, Homo sapien
gttgatgtaactgaactgactgagagacagagt

SEQ ID NO: 232083 - DNA, 33 bp, Homo sapien
cattaactatctcttaacaccattcatattgat

SEQ ID NO: 232084 - DNA, 33 bp, Homo sapien
cattaactatctcttagcaccattcatattgat

SEQ ID NO: 232085 - DNA, 33 bp, Homo sapien
tatgtcaaggaattctcaatagagttaattttt

SEQ ID NO: 232086 - DNA, 33 bp, Homo sapien
tatgtcaaggaattcttaatagagttaattttt

SEQ ID NO: 232087 - DNA, 33 bp, Homo sapien
agccttgagactgaaagtggcagtcatttgcag

SEQ ID NO: 232088 - DNA, 33 bp, Homo sapien
agccttgagactgaaattggcagtcatttgcag

SEQ ID NO: 232089 - DNA, 33 bp, Homo sapien
aaataatctggaattaaagagtttgccagtcag

SEQ ID NO: 232090 - DNA, 33 bp, Homo sapien
aaataatctggaattagagagtttgccagtcag

SEQ ID NO: 232091 - DNA, 33 bp, Homo sapien
ggagtttctttatctccgaccatttcttccttc

SEQ ID NO: 232092 - DNA, 33 bp, Homo sapien
ggagtttctttatctctgaccatttcttccttc

SEQ ID NO: 232093 - DNA, 33 bp, Homo sapien
gactattgttaactgccccagatattttgaagg

SEQ ID NO: 232094 - DNA, 33 bp, Homo sapien
gactattgttaactgctccagatattttgaagg

SEQ ID NO: 232095 - DNA, 33 bp, Homo sapien
tattctacatcagcaaaagtccccccatctcac

SEQ ID NO: 232096 - DNA, 33 bp, Homo sapien
tattctacatcagcaagagtccccccatctcac

SEQ ID NO: 232097 - DNA, 33 bp, Homo sapien
caaacatgcaatctagaataacagaataatgtt

SEQ ID NO: 232098 - DNA, 33 bp, Homo sapien
caaacatgcaatctaggataacagaataatgtt

SEQ ID NO: 232099 - DNA, 33 bp, Homo sapien
caggccataagtgttaagcttcagcaagtagca

SEQ ID NO: 232100 - DNA, 33 bp, Homo sapien
caggccataagtgttacgcttcagcaagtagca

SEQ ID NO: 232101 - DNA, 33 bp, Homo sapien
agtggtgcctcatttacggctaagtacactaac

SEQ ID NO: 232102 - DNA, 33 bp, Homo sapien
agtggtgcctcatttatggctaagtacactaac

SEQ ID NO: 232103 - DNA, 33 bp, Homo sapien
gcaaagctttgaaggacattctgctactagggg

SEQ ID NO: 232104 - DNA, 33 bp, Homo sapien
gcaaagctttgaaggatattctgctactagggg

SEQ ID NO: 232105 - DNA, 33 bp, Homo sapien
aaatcctaattctcagacaaacgaggattgttg

SEQ ID NO: 232106 - DNA, 33 bp, Homo sapien
aaatcctaattctcaggcaaacgaggattgttg

SEQ ID NO: 232107 - DNA, 33 bp, Homo sapien
attcatcagctctatgaaaaaccctttatatgt

SEQ ID NO: 232108 - DNA, 33 bp, Homo sapien
attcatcagctctatgcaaaaccctttatatgt

SEQ ID NO: 232109 - DNA, 33 bp, Homo sapien
atatcatcgcgttctcccctggcccatatagtt

SEQ ID NO: 232110 - DNA, 33 bp, Homo sapien
atatcatcgcgttctctcctggcccatatagtt

SEQ ID NO: 232111 - DNA, 33 bp, Homo sapien
acatgactgttaaatacatttctgaacaatttg

SEQ ID NO: 232112 - DNA, 33 bp, Homo sapien
acatgactgttaaatatatttctgaacaatttg

SEQ ID NO: 232113 - DNA, 33 bp, Homo sapien
aatgtactctaaattacgtgtgcactaatatat

SEQ ID NO: 232114 - DNA, 33 bp, Homo sapien
aatgtactctaaattatgtgtgcactaatatat

SEQ ID NO: 232115 - DNA, 33 bp, Homo sapien
ttgatcctacaggcagaaattggtgaaatagag

SEQ ID NO: 232116 - DNA, 33 bp, Homo sapien
ttgatcctacaggcaggaattggtgaaatagag

SEQ ID NO: 232117 - DNA, 33 bp, Homo sapien
gacttgcagttacaaaaaagtaggtcaatgtgc

SEQ ID NO: 232118 - DNA, 33 bp, Homo sapien
gacttgcagttacaaagaagtaggtcaatgtgc

SEQ ID NO: 232119 - DNA, 33 bp, Homo sapien
aatatgtttgggtatacagcaaatgggaattaa

SEQ ID NO: 232120 - DNA, 33 bp, Homo sapien
aatatgtttgggtatatagcaaatgggaattaa

SEQ ID NO: 232121 - DNA, 33 bp, Homo sapien
attgcacaagaagacacatatagtgaaaataag

SEQ ID NO: 232122 - DNA, 33 bp, Homo sapien
attgcacaagaagacatatatagtgaaaataag

SEQ ID NO: 232123 - DNA, 33 bp, Homo sapien
gtttgtagaaaaactgcaataagagatcaatgg

SEQ ID NO: 232124 - DNA, 33 bp, Homo sapien
gtttgtagaaaaactgtaataagagatcaatgg

SEQ ID NO: 232125 - DNA, 33 bp, Homo sapien
ggagcagtgtctctacacagaattcacatagct

SEQ ID NO: 232126 - DNA, 33 bp, Homo sapien
ggagcagtgtctctacccagaattcacatagct

SEQ ID NO: 232127 - DNA, 33 bp, Homo sapien
gaaagataaggctcgcagacataaagaagggtg

SEQ ID NO: 232128 - DNA, 33 bp, Homo sapien
gaaagataaggctcgcggacataaagaagggtg

SEQ ID NO: 232129 - DNA, 33 bp, Homo sapien
tgaggaaaagatctgaaggcaaaatgacaaata

SEQ ID NO: 232130 - DNA, 33 bp, Homo sapien
tgaggaaaagatctgagggcaaaatgacaaata

SEQ ID NO: 232131 - DNA, 33 bp, Homo sapien
gttataaatgcaactacgcgctaagtgagccca

SEQ ID NO: 232132 - DNA, 33 bp, Homo sapien
gttataaatgcaactatgcgctaagtgagccca

SEQ ID NO: 232133 - DNA, 33 bp, Homo sapien
taaaagcaaataaatgccattgacaggaaccct

SEQ ID NO: 232134 - DNA, 33 bp, Homo sapien
taaaagcaaataaatgtcattgacaggaaccct

SEQ ID NO: 232135 - DNA, 33 bp, Homo sapien
cagtacttttgattacagggtggtgaataacac

SEQ ID NO: 232136 - DNA, 33 bp, Homo sapien
cagtacttttgattacggggtggtgaataacac

SEQ ID NO: 232137 - DNA, 33 bp, Homo sapien
ctaacccccaaatctgaaagtggctcaagatta

SEQ ID NO: 232138 - DNA, 33 bp, Homo sapien
ctaacccccaaatctgtaagtggctcaagatta

SEQ ID NO: 232139 - DNA, 33 bp, Homo sapien
tgtcctagtgactgctaaagaggatgatgtgag

SEQ ID NO: 232140 - DNA, 33 bp, Homo sapien
tgtcctagtgactgctgaagaggatgatgtgag

SEQ ID NO: 232141 - DNA, 33 bp, Homo sapien
cttcctacctgctccaactgtagaccttaaaac

SEQ ID NO: 232142 - DNA, 33 bp, Homo sapien
cttcctacctgctccacctgtagaccttaaaac

SEQ ID NO: 232143 - DNA, 33 bp, Homo sapien
ttaaatattcgtataacaagtgggcatatggaa

SEQ ID NO: 232144 - DNA, 33 bp, Homo sapien
ttaaatattcgtataataagtgggcatatggaa

SEQ ID NO: 232145 - DNA, 33 bp, Homo sapien
aaagcctgctaccaaaatacaagagtgttttat

SEQ ID NO: 232146 - DNA, 33 bp, Homo sapien
aaagcctgctaccaaattacaagagtgttttat

SEQ ID NO: 232147 - DNA, 33 bp, Homo sapien
gaactaagataatagcaaaatgagcaaattaat

SEQ ID NO: 232148 - DNA, 33 bp, Homo sapien
gaactaagataatagcgaaatgagcaaattaat

SEQ ID NO: 232149 - DNA, 33 bp, Homo sapien
actttgtaagaattggcccaatatgaatgcttc

SEQ ID NO: 232150 - DNA, 33 bp, Homo sapien
actttgtaagaattggtccaatatgaatgcttc

SEQ ID NO: 232151 - DNA, 33 bp, Homo sapien
atagagagagcacaaagttaagaaacacaagaa

SEQ ID NO: 232152 - DNA, 33 bp, Homo sapien
atagagagagcacaaatttaagaaacacaagaa

SEQ ID NO: 232153 - DNA, 33 bp, Homo sapien
tttgagttaacctgaaatgagttaagactttgg

SEQ ID NO: 232154 - DNA, 33 bp, Homo sapien
tttgagttaacctgaagtgagttaagactttgg

SEQ ID NO: 232155 - DNA, 33 bp, Homo sapien; identical to SEQ ID NO: 232153

SEQ ID NO: 232156 - DNA, 33 bp, Homo sapien; identical to SEQ ID NO: 232154

SEQ ID NO: 232157 - DNA, 33 bp, Homo sapien
cactcggaattatgacagagtaagagaaaatat

SEQ ID NO: 232158 - DNA, 33 bp, Homo sapien
cactcggaattatgactgagtaagagaaaatat

SEQ ID NO: 232159 - DNA, 33 bp, Homo sapien
gccatattgactttaaaaaatcccatgcaggcc

SEQ ID NO: 232160 - DNA, 33 bp, Homo sapien
gccatattgactttaagaaatcccatgcaggcc

SEQ ID NO: 232161 - DNA, 33 bp, Homo sapien
ctgaaatcttcggtcacgtaagctcagggaagt

SEQ ID NO: 232162 - DNA, 33 bp, Homo sapien
ctgaaatcttcggtcatgtaagctcagggaagt

SEQ ID NO: 232163 - DNA, 33 bp, Homo sapien
agaatatttgtgagaacaagtttacttagaatt

SEQ ID NO: 232164 - DNA, 33 bp, Homo sapien
agaatatttgtgagaataagtttacttagaatt

SEQ ID NO: 232165 - DNA, 33 bp, Homo sapien
gcttgcatttttatgacgtcctgttctatacta

SEQ ID NO: 232166 - DNA, 33 bp, Homo sapien
gcttgcatttttatgatgtcctgttctatacta

SEQ ID NO: 232167 - DNA, 33 bp, Homo sapien
attctttactcttggaaaacttgaagagttaat

SEQ ID NO: 232168 - DNA, 33 bp, Homo sapien
attctttactcttggacaacttgaagagttaat

SEQ ID NO: 232169 - DNA, 33 bp, Homo sapien
agaaaacataaagaaccgaaaattgtgattcag

SEQ ID NO: 232170 - DNA, 33 bp, Homo sapien
agaaaacataaagaactgaaaattgtgattcag

SEQ ID NO: 232171 - DNA, 33 bp, Homo sapien
cctaatagacattctacctgggcattacacatt

SEQ ID NO: 232172 - DNA, 33 bp, Homo sapien
cctaatagacattctatctgggcattacacatt

SEQ ID NO: 232173 - DNA, 33 bp, Homo sapien
acttccattacacaaaagaaaccttatttgact

SEQ ID NO: 232174 - DNA, 33 bp, Homo sapien
acttccattacacaaaggaaaccttatttgact

SEQ ID NO: 232175 - DNA, 33 bp, Homo sapien
ggaaaagctgaggagaatatttttgggggaaat

SEQ ID NO: 232176 - DNA, 33 bp, Homo sapien
ggaaaagctgaggagagtatttttgggggaaat

SEQ ID NO: 232177 - DNA, 33 bp, Homo sapien
tctgtctaataggagcaagcaggatgagaataa

SEQ ID NO: 232178 - DNA, 33 bp, Homo sapien
tctgtctaataggagccagcaggatgagaataa

SEQ ID NO: 232179 - DNA, 33 bp, Homo sapien
catttagggcagaagaaatagctcataaaaagg

SEQ ID NO: 232180 - DNA, 33 bp, Homo sapien
catttagggcagaagagatagctcataaaaagg

SEQ ID NO: 232181 - DNA, 33 bp, Homo sapien
atggaggcaatataaacacgttactaagtgaaa

SEQ ID NO: 232182 - DNA, 33 bp, Homo sapien
atggaggcaatataaatacgttactaagtgaaa

SEQ ID NO: 232183 - DNA, 33 bp, Homo sapien
taagtgaaagaagtcaatctctaaaggcaacat

SEQ ID NO: 232184 - DNA, 33 bp, Homo sapien
taagtgaaagaagtcattctctaaaggcaacat

SEQ ID NO: 232185 - DNA, 33 bp, Homo sapien
ttgggccatcgttccaagaaccaggtgaatctt

SEQ ID NO: 232186 - DNA, 33 bp, Homo sapien
ttgggccatcgttccaggaaccaggtgaatctt

SEQ ID NO: 232187 - DNA, 33 bp, Homo sapien
tcattcagttcatgtgaaaggggacccaggcat

SEQ ID NO: 232188 - DNA, 33 bp, Homo sapien
tcattcagttcatgtggaaggggacccaggcat

SEQ ID NO: 232189 - DNA, 33 bp, Homo sapien
cacatggctcatgcatcataaattctgtcaaca

SEQ ID NO: 232190 - DNA, 33 bp, Homo sapien
cacatggctcatgcattataaattctgtcaaca

SEQ ID NO: 232191 - DNA, 33 bp, Homo sapien
taattatacttgaaaaccaaaatgtttatagta

SEQ ID NO: 232192 - DNA, 33 bp, Homo sapien
taattatacttgaaaatcaaaatgtttatagta

SEQ ID NO: 232193 - DNA, 33 bp, Homo sapien
aaagtcatttttggaaacctagccaagacagtt

SEQ ID NO: 232194 - DNA, 33 bp, Homo sapien
aaagtcatttttggaagcctagccaagacagtt

SEQ ID NO: 232195 - DNA, 33 bp, Homo sapien
atagataatggccaaaatgaggccttaagagat

SEQ ID NO: 232196 - DNA, 33 bp, Homo sapien
atagataatggccaaagtgaggccttaagagat

SEQ ID NO: 232197 - DNA, 33 bp, Homo sapien
gaccaagtagaatacaacagactgggaaatcgt

SEQ ID NO: 232198 - DNA, 33 bp, Homo sapien
gaccaagtagaatacaccagactgggaaatcgt

SEQ ID NO: 232199 - DNA, 33 bp, Homo sapien
ttatatttgtacccccaaatttccaggaggtgt

SEQ ID NO: 232200 - DNA, 33 bp, Homo sapien
ttatatttgtaccccccaatttccaggaggtgt

SEQ ID NO: 232201 - DNA, 33 bp, Homo sapien
atgtttggacagtttacgatgagtggcctttct

SEQ ID NO: 232202 - DNA, 33 bp, Homo sapien
atgtttggacagtttaggatgagtggcctttct

SEQ ID NO: 232203 - DNA, 33 bp, Homo sapien
agtgaagtctccaaaaatgtgtatgtacccaga

SEQ ID NO: 232204 - DNA, 33 bp, Homo sapien
agtgaagtctccaaaattgtgtatgtacccaga

SEQ ID NO: 232205 - DNA, 33 bp, Homo sapien
acacattttggctataaaattttggctatacaa

SEQ ID NO: 232206 - DNA, 33 bp, Homo sapien
acacattttggctatacaattttggctatacaa

SEQ ID NO: 232207 - DNA, 33 bp, Homo sapien
ctgccactgtgccaacaaagcactttggccaac

SEQ ID NO: 232208 - DNA, 33 bp, Homo sapien
ctgccactgtgccaacgaagcactttggccaac

SEQ ID NO: 232209 - DNA, 33 bp, Homo sapien
accaaatctatttctgcacatatccagactgtc

SEQ ID NO: 232210 - DNA, 33 bp, Homo sapien
accaaatctatttctgtacatatccagactgtc

SEQ ID NO: 232211 - DNA, 33 bp, Homo sapien
cccacatttaacagtgaaacatcccagaagaat

SEQ ID NO: 232212 - DNA, 33 bp, Homo sapien
cccacatttaacagtggaacatcccagaagaat

SEQ ID NO: 232213 - DNA, 33 bp, Homo sapien
tttatcccaaagtacacacgcatatgaatatat

SEQ ID NO: 232214 - DNA, 33 bp, Homo sapien
tttatcccaaagtacatacgcatatgaatatat

SEQ ID NO: 232215 - DNA, 33 bp, Homo sapien
tattgaacatgactacaataattctaaaccaga

SEQ ID NO: 232216 - DNA, 33 bp, Homo sapien
tattgaacatgactacgataattctaaaccaga

SEQ ID NO: 232217 - DNA, 33 bp, Homo sapien
gagacagaaacaggtacataaattgtgttaaaa

SEQ ID NO: 232218 - DNA, 33 bp, Homo sapien
gagacagaaacaggtatataaattgtgttaaaa

SEQ ID NO: 232219 - DNA, 33 bp, Homo sapien
gacaagataattaaggaatcaaggaaaagtgaa

SEQ ID NO: 232220 - DNA, 33 bp, Homo sapien
gacaagataattaagggatcaaggaaaagtgaa

SEQ ID NO: 232221 - DNA, 33 bp, Homo sapien
aggctgagtgttcctactactgtgttgtcctca

SEQ ID NO: 232222 - DNA, 33 bp, Homo sapien
aggctgagtgttcctattactgtgttgtcctca

SEQ ID NO: 232223 - DNA, 33 bp, Homo sapien
aggctgggtcagagggaactttgcctacttgac

SEQ ID NO: 232224 - DNA, 33 bp, Homo sapien
aggctgggtcagagggcactttgcctacttgac

SEQ ID NO: 232225 - DNA, 33 bp, Homo sapien
ctgttgagctgggacactggcctcttcttgtcc

SEQ ID NO: 232226 - DNA, 33 bp, Homo sapien
ctgttgagctgggacagtggcctcttcttgtcc

SEQ ID NO: 232227 - DNA, 33 bp, Homo sapien
ttttgtgtgtgccttcaatttttaaatatagta

SEQ ID NO: 232228 - DNA, 33 bp, Homo sapien
ttttgtgtgtgccttcgatttttaaatatagta

SEQ ID NO: 232229 - DNA, 33 bp, Homo sapien
ccatctgctgtaccaaaaaatctagagacggct

SEQ ID NO: 232230 - DNA, 33 bp, Homo sapien
ccatctgctgtaccaacaaatctagagacggct

SEQ ID NO: 232231 - DNA, 33 bp, Homo sapien
ggtaactagttagaaaatgcctaatatggacaa

SEQ ID NO: 232232 - DNA, 33 bp, Homo sapien
ggtaactagttagaaactgcctaatatggacaa

SEQ ID NO: 232233 - DNA, 33 bp, Homo sapien
gttttcctggatcgtcgcaatgcttgtggattt

SEQ ID NO: 232234 - DNA, 33 bp, Homo sapien
gttttcctggatcgtctcaatgcttgtggattt

SEQ ID NO: 232235 - DNA, 33 bp, Homo sapien
atcagaagactggttacgagagtgctgcaatca

SEQ ID NO: 232236 - DNA, 33 bp, Homo sapien
atcagaagactggttatgagagtgctgcaatca

SEQ ID NO: 232237 - DNA, 33 bp, Homo sapien
agtcttctgatacccaagctctcaactctcatc

SEQ ID NO: 232238 - DNA, 33 bp, Homo sapien
agtcttctgatacccaggctctcaactctcatc

SEQ ID NO: 232239 - DNA, 33 bp, Homo sapien
tataagtgctgcctacacatttatgaggacata

SEQ ID NO: 232240 - DNA, 33 bp, Homo sapien
tataagtgctgcctacgcatttatgaggacata

SEQ ID NO: 232241 - DNA, 33 bp, Homo sapien
aaatgtgctccaggaccgaaaacagaaaaatat

SEQ ID NO: 232242 - DNA, 33 bp, Homo sapien
aaatgtgctccaggactgaaaacagaaaaatat

SEQ ID NO: 232243 - DNA, 33 bp, Homo sapien
acatttctttactcaaccttgtgatcttgaaat

SEQ ID NO: 232244 - DNA, 33 bp, Homo sapien
acatttctttactcaatcttgtgatcttgaaat

SEQ ID NO: 232245 - DNA, 33 bp, Homo sapien
gtttaaaattgagacactatgtgtacagtcccc

SEQ ID NO: 232246 - DNA, 33 bp, Homo sapien
gtttaaaattgagacattatgtgtacagtcccc

SEQ ID NO: 232247 - DNA, 33 bp, Homo sapien
caaaaaaggagtgtgaagttattaagacatttg

SEQ ID NO: 232248 - DNA, 33 bp, Homo sapien
caaaaaaggagtgtgaggttattaagacatttg

SEQ ID NO: 232249 - DNA, 33 bp, Homo sapien
caatgaatttttcagactccattaggcactact

SEQ ID NO: 232250 - DNA, 33 bp, Homo sapien
caatgaatttttcagattccattaggcactact

SEQ ID NO: 232251 - DNA, 33 bp, Homo sapien
cgtagtcgctgaaaacaaagacattcacactgt

SEQ ID NO: 232252 - DNA, 33 bp, Homo sapien
cgtagtcgctgaaaacgaagacattcacactgt

SEQ ID NO: 232253 - DNA, 33 bp, Homo sapien
taaagatctggtaacactctgattcacttactt

SEQ ID NO: 232254 - DNA, 33 bp, Homo sapien
taaagatctggtaacattctgattcacttactt

SEQ ID NO: 232255 - DNA, 33 bp, Homo sapien
gctggggtttaaataacggtcagagtgtttcct

SEQ ID NO: 232256 - DNA, 33 bp, Homo sapien
gctggggtttaaataatggtcagagtgtttcct

SEQ ID NO: 232257 - DNA, 33 bp, Homo sapien
gtgttaaataaatgtacgcaagaacaactgtaa

SEQ ID NO: 232258 - DNA, 33 bp, Homo sapien
gtgttaaataaatgtatgcaagaacaactgtaa

SEQ ID NO: 232259 - DNA, 33 bp, Homo sapien
agatatgtaagtttgacgtgaagtgggcttgga

SEQ ID NO: 232260 - DNA, 33 bp, Homo sapien
agatatgtaagtttgaggtgaagtgggcttgga

SEQ ID NO: 232261 - DNA, 33 bp, Homo sapien
ataaaaatccttaataggacccacaagttccta

SEQ ID NO: 232262 - DNA, 33 bp, Homo sapien
ataaaaatccttaatatgacccacaagttccta

SEQ ID NO: 232263 - DNA, 33 bp, Homo sapien
tagaggagtggccaagacttctgtaaagtttct

SEQ ID NO: 232264 - DNA, 33 bp, Homo sapien
tagaggagtggccaagccttctgtaaagtttct

SEQ ID NO: 232265 - DNA, 33 bp, Homo sapien
gagctttgaagattaaaagccttaaatgagtgc

SEQ ID NO: 232266 - DNA, 33 bp, Homo sapien
gagctttgaagattaacagccttaaatgagtgc

SEQ ID NO: 232267 - DNA, 33 bp, Homo sapien
tttagagtaggtgataaggataagtggaatgtg

SEQ ID NO: 232268 - DNA, 33 bp, Homo sapien
tttagagtaggtgatagggataagtggaatgtg

SEQ ID NO: 232269 - DNA, 33 bp, Homo sapien
ttcaacactattcttaaaaagctaccaatatta

SEQ ID NO: 232270 - DNA, 33 bp, Homo sapien
ttcaacactattcttataaagctaccaatatta

SEQ ID NO: 232271 - DNA, 33 bp, Homo sapien
caacaggacttgcaaccaggaccaccttagtga

SEQ ID NO: 232272 - DNA, 33 bp, Homo sapien
caacaggacttgcaacgaggaccaccttagtga

SEQ ID NO: 232273 - DNA, 33 bp, Homo sapien
caaccaagcaatctcaatactgggatatatcca

SEQ ID NO: 232274 - DNA, 33 bp, Homo sapien
caaccaagcaatctcagtactgggatatatcca

SEQ ID NO: 232275 - DNA, 33 bp, Homo sapien
tctttcagcagttttgcacaatttttcgacatt

SEQ ID NO: 232276 - DNA, 33 bp, Homo sapien
tctttcagcagttttggacaatttttcgacatt

SEQ ID NO: 232277 - DNA, 33 bp, Homo sapien
aaatgatgaaagaagacggggaattacattgct

SEQ ID NO: 232278 - DNA, 33 bp, Homo sapien
aaatgatgaaagaagatggggaattacattgct

SEQ ID NO: 232279 - DNA, 33 bp, Homo sapien
aattcccaggtaagtgcattttacagagatgca

SEQ ID NO: 232280 - DNA, 33 bp, Homo sapien
aattcccaggtaagtgtattttacagagatgca

SEQ ID NO: 232281 - DNA, 33 bp, Homo sapien
gtgggctgcaaatacaagagtcaaagtatgcaa

SEQ ID NO: 232282 - DNA, 33 bp, Homo sapien
gtgggctgcaaatacaggagtcaaagtatgcaa

SEQ ID NO: 232283 - DNA, 33 bp, Homo sapien
gagtcaaagtatgcaaatatagcaggccaatga

SEQ ID NO: 232284 - DNA, 33 bp, Homo sapien
gagtcaaagtatgcaagtatagcaggccaatga

SEQ ID NO: 232285 - DNA, 33 bp, Homo sapien
tatctttccccatacaatggagcttcaggtttt

SEQ ID NO: 232286 - DNA, 33 bp, Homo sapien
tatctttccccatacagtggagcttcaggtttt

SEQ ID NO: 232287 - DNA, 33 bp, Homo sapien
ttccttctatgactcaaaacatcataacccatc

SEQ ID NO: 232288 - DNA, 33 bp, Homo sapien
ttccttctatgactcagaacatcataacccatc

SEQ ID NO: 232289 - DNA, 33 bp, Homo sapien
tgatgtttagagcctacgtgcatttacctatgt

SEQ ID NO: 232290 - DNA, 33 bp, Homo sapien
tgatgtttagagcctatgtgcatttacctatgt

SEQ ID NO: 232291 - DNA, 33 bp, Homo sapien
atgaatgaccaagagacaaaaatgatggacaaa

SEQ ID NO: 232292 - DNA, 33 bp, Homo sapien
atgaatgaccaagagagaaaaatgatggacaaa

SEQ ID NO: 232293 - DNA, 33 bp, Homo sapien
agcatcatatgtaaaaacctgtactcaaaccaa

SEQ ID NO: 232294 - DNA, 33 bp, Homo sapien
agcatcatatgtaaaatcctgtactcaaaccaa

SEQ ID NO: 232295 - DNA, 33 bp, Homo sapien
tttacccactcagtcaaaaatagagtagaaaaa

SEQ ID NO: 232296 - DNA, 33 bp, Homo sapien
tttacccactcagtcataaatagagtagaaaaa

SEQ ID NO: 232297 - DNA, 33 bp, Homo sapien
caacaatagcaaataactgtgaaatgtcttaaa

SEQ ID NO: 232298 - DNA, 33 bp, Homo sapien
caacaatagcaaataagtgtgaaatgtcttaaa

SEQ ID NO: 232299 - DNA, 33 bp, Homo sapien
tcgtatcaaactttaaaaatagcacaattctat

SEQ ID NO: 232300 - DNA, 33 bp, Homo sapien
tcgtatcaaactttaacaatagcacaattctat

SEQ ID NO: 232301 - DNA, 33 bp, Homo sapien
attggacactgatgaccctgagattctacctct

SEQ ID NO: 232302 - DNA, 33 bp, Homo sapien
attggacactgatgactctgagattctacctct

SEQ ID NO: 232303 - DNA, 33 bp, Homo sapien
gtacaatttgagagcaactccttaagctaatta

SEQ ID NO: 232304 - DNA, 33 bp, Homo sapien
gtacaatttgagagcatctccttaagctaatta

SEQ ID NO: 232305 - DNA, 33 bp, Homo sapien
tcccccatgatttctacaacaacacaaatttta

SEQ ID NO: 232306 - DNA, 33 bp, Homo sapien
tcccccatgatttctataacaacacaaatttta

SEQ ID NO: 232307 - DNA, 33 bp, Homo sapien
gcatagccactgtatgaatctctttatttggat

SEQ ID NO: 232308 - DNA, 33 bp, Homo sapien
gcatagccactgtatgtatctctttatttggat

SEQ ID NO: 232309 - DNA, 33 bp, Homo sapien
acacatatattgatgacgggaaattagagctgt

SEQ ID NO: 232310 - DNA, 33 bp, Homo sapien
acacatatattgatgatgggaaattagagctgt

SEQ ID NO: 232311 - DNA, 33 bp, Homo sapien
tcccacactcagaatacagcttaaattttattc

SEQ ID NO: 232312 - DNA, 33 bp, Homo sapien
tcccacactcagaatatagcttaaattttattc

SEQ ID NO: 232313 - DNA, 33 bp, Homo sapien
gcctctgggcctgtgacggaaaagcctgccaca

SEQ ID NO: 232314 - DNA, 33 bp, Homo sapien
gcctctgggcctgtgatggaaaagcctgccaca

SEQ ID NO: 232315 - DNA, 33 bp, Homo sapien
taagtaatgaggtgccaaaagttaatttccaag

SEQ ID NO: 232316 - DNA, 33 bp, Homo sapien
taagtaatgaggtgcccaaagttaatttccaag

SEQ ID NO: 232317 - DNA, 33 bp, Homo sapien
gtggaaatctttcaagaccctagttagcctgga

SEQ ID NO: 232318 - DNA, 33 bp, Homo sapien
gtggaaatctttcaagtccctagttagcctgga

SEQ ID NO: 232319 - DNA, 33 bp, Homo sapien
gtgagagagccaggataaattgtttcattgaga

SEQ ID NO: 232320 - DNA, 33 bp, Homo sapien
gtgagagagccaggatgaattgtttcattgaga

SEQ ID NO: 232321 - DNA, 33 bp, Homo sapien
aagtagtggaatgagacgaggctggaggagttc

SEQ ID NO: 232322 - DNA, 33 bp, Homo sapien
aagtagtggaatgagaggaggctggaggagttc

SEQ ID NO: 232323 - DNA, 33 bp, Homo sapien
gatgcccatactccaaagagaaatttttagcaa

SEQ ID NO: 232324 - DNA, 33 bp, Homo sapien
gatgcccatactccaaggagaaatttttagcaa

SEQ ID NO: 232325 - DNA, 33 bp, Homo sapien
ctaagtattagactaaacacatcactcaaaagt

SEQ ID NO: 232326 - DNA, 33 bp, Homo sapien
ctaagtattagactaatcacatcactcaaaagt

SEQ ID NO: 232327 - DNA, 33 bp, Homo sapien
ggtactaaggtgaagacgtcaaataatactgtc

SEQ ID NO: 232328 - DNA, 33 bp, Homo sapien
ggtactaaggtgaagatgtcaaataatactgtc

SEQ ID NO: 232329 - DNA, 33 bp, Homo sapien
agaaagacatcaatacagagttaacattaggaa

SEQ ID NO: 232330 - DNA, 33 bp, Homo sapien
agaaagacatcaatactgagttaacattaggaa

SEQ ID NO: 232331 - DNA, 33 bp, Homo sapien
tgaatgactaaataaacgagtttgtatgtcaag

SEQ ID NO: 232332 - DNA, 33 bp, Homo sapien
tgaatgactaaataaatgagtttgtatgtcaag

SEQ ID NO: 232333 - DNA, 33 bp, Homo sapien
aaagaggaatctccaacactgagcttccccctg

SEQ ID NO: 232334 - DNA, 33 bp, Homo sapien
aaagaggaatctccaatactgagcttccccctg

SEQ ID NO: 232335 - DNA, 33 bp, Homo sapien
aattacattgttgaaaatggcctggcacagaga

SEQ ID NO: 232336 - DNA, 33 bp, Homo sapien
aattacattgttgaaagtggcctggcacagaga

SEQ ID NO: 232337 - DNA, 33 bp, Homo sapien
cacttatgacttcctacgtttgcttgtttaggc

SEQ ID NO: 232338 - DNA, 33 bp, Homo sapien
cacttatgacttcctatgtttgcttgtttaggc

SEQ ID NO: 232339 - DNA, 33 bp, Homo sapien
ctacaacaaagaaggtaaactctaatgtaagct

SEQ ID NO: 232340 - DNA, 33 bp, Homo sapien
ctacaacaaagaaggtgaactctaatgtaagct

SEQ ID NO: 232341 - DNA, 33 bp, Homo sapien
agaaagaatggagtaaatcaatatgtgacaaag

SEQ ID NO: 232342 - DNA, 33 bp, Homo sapien
agaaagaatggagtaagtcaatatgtgacaaag

SEQ ID NO: 232343 - DNA, 33 bp, Homo sapien
gaaaataatcagcagcaattgtatactactacc

SEQ ID NO: 232344 - DNA, 33 bp, Homo sapien
gaaaataatcagcagcgattgtatactactacc

SEQ ID NO: 232345 - DNA, 33 bp, Homo sapien
atttggctataaaaaacttaaaagaacaacatt

SEQ ID NO: 232346 - DNA, 33 bp, Homo sapien
atttggctataaaaaatttaaaagaacaacatt

SEQ ID NO: 232347 - DNA, 33 bp, Homo sapien
aaataatcaaactgaaaaaagacaagcaaaatg

SEQ ID NO: 232348 - DNA, 33 bp, Homo sapien
aaataatcaaactgaagaaagacaagcaaaatg

SEQ ID NO: 232349 - DNA, 33 bp, Homo sapien
aagatgttctggcagcagaagaggttattaaat

SEQ ID NO: 232350 - DNA, 33 bp, Homo sapien
aagatgttctggcagcggaagaggttattaaat

SEQ ID NO: 232351 - DNA, 33 bp, Homo sapien
ataagaaccacttgccactccccacaagatcag

SEQ ID NO: 232352 - DNA, 33 bp, Homo sapien
ataagaaccacttgccgctccccacaagatcag

SEQ ID NO: 232353 - DNA, 33 bp, Homo sapien
tatgcaaatgcttcagaaagaggtcattttagg

SEQ ID NO: 232354 - DNA, 33 bp, Homo sapien
tatgcaaatgcttcagcaagaggtcattttagg

SEQ ID NO: 232355 - DNA, 33 bp, Homo sapien
cggcagaagaaactaaccagaaaggaatgtacc

SEQ ID NO: 232356 - DNA, 33 bp, Homo sapien
cggcagaagaaactaatcagaaaggaatgtacc

SEQ ID NO: 232357 - DNA, 33 bp, Homo sapien
gtaggtcccatttaacaagacactttggctgtc

SEQ ID NO: 232358 - DNA, 33 bp, Homo sapien
gtaggtcccatttaacgagacactttggctgtc

SEQ ID NO: 232359 - DNA, 33 bp, Homo sapien; identical to SEQ ID NO: 232357

SEQ ID NO: 232360 - DNA, 33 bp, Homo sapien; identical to SEQ ID NO: 232358

SEQ ID NO: 232361 - DNA, 33 bp, Homo sapien
tattgatatttctgtacgctttattaagatgta

SEQ ID NO: 232362 - DNA, 33 bp, Homo sapien
tattgatatttctgtatgctttattaagatgta

SEQ ID NO: 232363 - DNA, 33 bp, Homo sapien
ttatatttgcgttcaccaacacatactgccttc

SEQ ID NO: 232364 - DNA, 33 bp, Homo sapien
ttatatttgcgttcactaacacatactgccttc

SEQ ID NO: 232365 - DNA, 33 bp, Homo sapien
tgatttggcaatttgacaaagtaggtcatcaaa

SEQ ID NO: 232366 - DNA, 33 bp, Homo sapien
tgatttggcaatttgataaagtaggtcatcaaa

SEQ ID NO: 232367 - DNA, 33 bp, Homo sapien
gcaggaattaactctcaaaagaattgtggatga

SEQ ID NO: 232368 - DNA, 33 bp, Homo sapien
gcaggaattaactctccaaagaattgtggatga

SEQ ID NO: 232369 - DNA, 33 bp, Homo sapien
taaagataaaggcctacctgaaggcagtgacag

SEQ ID NO: 232370 - DNA, 33 bp, Homo sapien
taaagataaaggcctatctgaaggcagtgacag

SEQ ID NO: 232371 - DNA, 33 bp, Homo sapien
ctagacctcacttgaaaattgcactttcacttg

SEQ ID NO: 232372 - DNA, 33 bp, Homo sapien
ctagacctcacttgaatattgcactttcacttg

SEQ ID NO: 232373 - DNA, 33 bp, Homo sapien
atcaggttggaagttgctatcttattgccataa

SEQ ID NO: 232374 - DNA, 33 bp, Homo sapien
atcaggttggaagttggtatcttattgccataa

SEQ ID NO: 232375 - DNA, 33 bp, Homo sapien
acttctgaatgaagaaaaatgaagtttagtaca

SEQ ID NO: 232376 - DNA, 33 bp, Homo sapien
acttctgaatgaagaataatgaagtttagtaca

SEQ ID NO: 232377 - DNA, 33 bp, Homo sapien
tctagccaagggttcaaaactggatcaagacag

SEQ ID NO: 232378 - DNA, 33 bp, Homo sapien
tctagccaagggttcacaactggatcaagacag

SEQ ID NO: 232379 - DNA, 33 bp, Homo sapien
caaaatactaacataccacagaatcgataggtt

SEQ ID NO: 232380 - DNA, 33 bp, Homo sapien
caaaatactaacatacgacagaatcgataggtt

SEQ ID NO: 232381 - DNA, 33 bp, Homo sapien
tcattaactcagggccaggaatgttactattat

SEQ ID NO: 232382 - DNA, 33 bp, Homo sapien
tcattaactcagggccgggaatgttactattat

SEQ ID NO: 232383 - DNA, 33 bp, Homo sapien
aggaattttcatttgacgtcttctcttgtttgg

SEQ ID NO: 232384 - DNA, 33 bp, Homo sapien
aggaattttcatttgatgtcttctcttgtttgg

SEQ ID NO: 232385 - DNA, 33 bp, Homo sapien
tgagaaataaacaaaaccctgtgacacttctca

SEQ ID NO: 232386 - DNA, 33 bp, Homo sapien
tgagaaataaacaaaatcctgtgacacttctca

SEQ ID NO: 232387 - DNA, 33 bp, Homo sapien
attgctcagcaactggaaaggagagtgctacag

SEQ ID NO: 232388 - DNA, 33 bp, Homo sapien
attgctcagcaactgggaaggagagtgctacag

SEQ ID NO: 232389 - DNA, 33 bp, Homo sapien
tgtctaaagactgtaactgtgaaatcagccagg

SEQ ID NO: 232390 - DNA, 33 bp, Homo sapien
tgtctaaagactgtaattgtgaaatcagccagg

SEQ ID NO: 232391 - DNA, 33 bp, Homo sapien
gtaaagacacaaggccacttatgtttattgcag

SEQ ID NO: 232392 - DNA, 33 bp, Homo sapien
gtaaagacacaaggccgcttatgtttattgcag

SEQ ID NO: 232393 - DNA, 33 bp, Homo sapien
ccattcctatttaacactgaatccagaaattaa

SEQ ID NO: 232394 - DNA, 33 bp, Homo sapien
ccattcctatttaacattgaatccagaaattaa

SEQ ID NO: 232395 - DNA, 33 bp, Homo sapien
gcaatcaaaggttgtacacagacttagagaatt

SEQ ID NO: 232396 - DNA, 33 bp, Homo sapien
gcaatcaaaggttgtatacagacttagagaatt

SEQ ID NO: 232397 - DNA, 33 bp, Homo sapien
tataataaacattatccgaagccctgaaaaaga

SEQ ID NO: 232398 - DNA, 33 bp, Homo sapien
tataataaacattatctgaagccctgaaaaaga

SEQ ID NO: 232399 - DNA, 33 bp, Homo sapien
atgattttttcaattacgagatggctgagtggg

SEQ ID NO: 232400 - DNA, 33 bp, Homo sapien
atgattttttcaattatgagatggctgagtggg

SEQ ID NO: 232401 - DNA, 33 bp, Homo sapien
actgtttcttgactccagatatttaaaggagaa

SEQ ID NO: 232402 - DNA, 33 bp, Homo sapien
actgtttcttgactccggatatttaaaggagaa

SEQ ID NO: 232403 - DNA, 33 bp, Homo sapien
taatattttcattttggacattacaacttccat

SEQ ID NO: 232404 - DNA, 33 bp, Homo sapien
taatattttcattttgtacattacaacttccat

SEQ ID NO: 232405 - DNA, 33 bp, Homo sapien
taaattctaattcccaggtataaatcacactga

SEQ ID NO: 232406 - DNA, 33 bp, Homo sapien
taaattctaattcccatgtataaatcacactga

SEQ ID NO: 232407 - DNA, 33 bp, Homo sapien
aggaatgttgttcaaaatatttccaatactctt

SEQ ID NO: 232408 - DNA, 33 bp, Homo sapien
aggaatgttgttcaaattatttccaatactctt

SEQ ID NO: 232409 - DNA, 33 bp, Homo sapien
tgagatcagttttagaacctgctttatgtttta

SEQ ID NO: 232410 - DNA, 33 bp, Homo sapien
tgagatcagttttagaccctgctttatgtttta

SEQ ID NO: 232411 - DNA, 33 bp, Homo sapien
aagaaacctgtaataacatctcattcagagata

SEQ ID NO: 232412 - DNA, 33 bp, Homo sapien
aagaaacctgtaataatatctcattcagagata

SEQ ID NO: 232413 - DNA, 33 bp, Homo sapien
tgaatttgataactcacattttagttcatttcc

SEQ ID NO: 232414 - DNA, 33 bp, Homo sapien
tgaatttgataactcagattttagttcatttcc

SEQ ID NO: 232415 - DNA, 33 bp, Homo sapien
gtcatcttgtggaaaaccaagagtgaaataaca

SEQ ID NO: 232416 - DNA, 33 bp, Homo sapien
gtcatcttgtggaaaatcaagagtgaaataaca

SEQ ID NO: 232417 - DNA, 33 bp, Homo sapien
tttacagattcactcaccaaagtacaaccaata

SEQ ID NO: 232418 - DNA, 33 bp, Homo sapien
tttacagattcactcagcaaagtacaaccaata

SEQ ID NO: 232419 - DNA, 33 bp, Homo sapien
agcttaagataacccaaaattgtaagaacaaaa

SEQ ID NO: 232420 - DNA, 33 bp, Homo sapien
agcttaagataacccagaattgtaagaacaaaa

SEQ ID NO: 232421 - DNA, 33 bp, Homo sapien
atgaattcacaggttgaaaaatggtataataag

SEQ ID NO: 232422 - DNA, 33 bp, Homo sapien
atgaattcacaggttggaaaatggtataataag

SEQ ID NO: 232423 - DNA, 33 bp, Homo sapien
acaaaatgtaatggaacagagcatgaagagttc

SEQ ID NO: 232424 - DNA, 33 bp, Homo sapien
acaaaatgtaatggaatagagcatgaagagttc

SEQ ID NO: 232425 - DNA, 33 bp, Homo sapien
tcgcattctggaatgtaaattcataacaatgaa

SEQ ID NO: 232426 - DNA, 33 bp, Homo sapien
tcgcattctggaatgtgaattcataacaatgaa

SEQ ID NO: 232427 - DNA, 33 bp, Homo sapien
aattaaatgttcaaatcagtaagacagatacac

SEQ ID NO: 232428 - DNA, 33 bp, Homo sapien
aattaaatgttcaaattagtaagacagatacac

SEQ ID NO: 232429 - DNA, 33 bp, Homo sapien
ttgcatttctttctaccgacttcaagtctttag

SEQ ID NO: 232430 - DNA, 33 bp, Homo sapien
ttgcatttctttctactgacttcaagtctttag

SEQ ID NO: 232431 - DNA, 33 bp, Homo sapien
tgataagccctgaaaaagggaaattacaacaca

SEQ ID NO: 232432 - DNA, 33 bp, Homo sapien
tgataagccctgaaaatgggaaattacaacaca

SEQ ID NO: 232433 - DNA, 33 bp, Homo sapien
ggtgcctagaagaagaaaaattgtgtttagatt

SEQ ID NO: 232434 - DNA, 33 bp, Homo sapien
ggtgcctagaagaagacaaattgtgtttagatt

SEQ ID NO: 232435 - DNA, 33 bp, Homo sapien
agatctgtattacctcacttactaatcaacacc

SEQ ID NO: 232436 - DNA, 33 bp, Homo sapien
agatctgtattacctcgcttactaatcaacacc

SEQ ID NO: 232437 - DNA, 33 bp, Homo sapien
gaaaccgacttccttcaaacttctgttgatgtt

SEQ ID NO: 232438 - DNA, 33 bp, Homo sapien
gaaaccgacttccttcgaacttctgttgatgtt

SEQ ID NO: 232439 - DNA, 33 bp, Homo sapien
atttatctattgctgccgagtaataattatcac

SEQ ID NO: 232440 - DNA, 33 bp, Homo sapien
atttatctattgctgctgagtaataattatcac

SEQ ID NO: 232441 - DNA, 33 bp, Homo sapien
ataatgaaagctggtgcaagcaatcaaaataaa

SEQ ID NO: 232442 - DNA, 33 bp, Homo sapien
ataatgaaagctggtgtaagcaatcaaaataaa

SEQ ID NO: 232443 - DNA, 33 bp, Homo sapien
aactcctgaggcatcaactacatagcatctttt

SEQ ID NO: 232444 - DNA, 33 bp, Homo sapien
aactcctgaggcatcatctacatagcatctttt

SEQ ID NO: 232445 - DNA, 33 bp, Homo sapien
tgctgctacaaagtggaaaagagataaacaagg

SEQ ID NO: 232446 - DNA, 33 bp, Homo sapien
tgctgctacaaagtgggaaagagataaacaagg

SEQ ID NO: 232447 - DNA, 33 bp, Homo sapien
gaccaggaattaaccacgcaaagttagaagaaa

SEQ ID NO: 232448 - DNA, 33 bp, Homo sapien
gaccaggaattaaccatgcaaagttagaagaaa

SEQ ID NO: 232449 - DNA, 33 bp, Homo sapien
caggaagcaaagcagcaccttcacaaggtgaca

SEQ ID NO: 232450 - DNA, 33 bp, Homo sapien
caggaagcaaagcagcgccttcacaaggtgaca

SEQ ID NO: 232451 - DNA, 33 bp, Homo sapien
tatggagcttattaggacaattttataaataag

SEQ ID NO: 232452 - DNA, 33 bp, Homo sapien
tatggagcttattaggccaattttataaataag

SEQ ID NO: 232453 - DNA, 33 bp, Homo sapien
gtctttgaaattctcaagaaaaattatttgaca

SEQ ID NO: 232454 - DNA, 33 bp, Homo sapien
gtctttgaaattctcatgaaaaattatttgaca

SEQ ID NO: 232455 - DNA, 33 bp, Homo sapien
gctgaagaagattggcaataattgttgttttgg

SEQ ID NO: 232456 - DNA, 33 bp, Homo sapien
gctgaagaagattggccataattgttgttttgg

SEQ ID NO: 232457 - DNA, 33 bp, Homo sapien
aatatcacttaaatgaatagacctatacaaaag

SEQ ID NO: 232458 - DNA, 33 bp, Homo sapien
aatatcacttaaatgagtagacctatacaaaag

SEQ ID NO: 232459 - DNA, 33 bp, Homo sapien
tctaatttcagaccaaagcagaattcagttcca

SEQ ID NO: 232460 - DNA, 33 bp, Homo sapien
tctaatttcagaccaaggcagaattcagttcca

SEQ ID NO: 232461 - DNA, 33 bp, Homo sapien
gtgttgcaatagtaccaattacacaaaacagag

SEQ ID NO: 232462 - DNA, 33 bp, Homo sapien
gtgttgcaatagtaccgattacacaaaacagag

SEQ ID NO: 232463 - DNA, 33 bp, Homo sapien
taatttctttgtcttcacaacgaaaaattattt

SEQ ID NO: 232464 - DNA, 33 bp, Homo sapien
taatttctttgtcttcgcaacgaaaaattattt

SEQ ID NO: 232465 - DNA, 33 bp, Homo sapien
ttttcattacttctaaaggtaggaatcgcaccc

SEQ ID NO: 232466 - DNA, 33 bp, Homo sapien
ttttcattacttctaagggtaggaatcgcaccc

SEQ ID NO: 232467 - DNA, 33 bp, Homo sapien
cctcagtggagtacaccaggtaacaactacact

SEQ ID NO: 232468 - DNA, 33 bp, Homo sapien
cctcagtggagtacacgaggtaacaactacact

SEQ ID NO: 232469 - DNA, 33 bp, Homo sapien
ataaaaatagaaaaaacagggcttggagtttta

SEQ ID NO: 232470 - DNA, 33 bp, Homo sapien
ataaaaatagaaaaaatagggcttggagtttta

SEQ ID NO: 232471 - DNA, 33 bp, Homo sapien
actggctctaaggtagaactcaatacttttgtc

SEQ ID NO: 232472 - DNA, 33 bp, Homo sapien
actggctctaaggtagcactcaatacttttgtc

SEQ ID NO: 232473 - DNA, 33 bp, Homo sapien
gatccctttaccaatacgtagtgcctttctttg

SEQ ID NO: 232474 - DNA, 33 bp, Homo sapien
gatccctttaccaatatgtagtgcctttctttg

SEQ ID NO: 232475 - DNA, 33 bp, Homo sapien
cactttcattcaatacagtactagatgtcctag

SEQ ID NO: 232476 - DNA, 33 bp, Homo sapien
cactttcattcaatactgtactagatgtcctag

SEQ ID NO: 232477 - DNA, 33 bp, Homo sapien
acagaaattatgtcacgcttgtaaaaactagta

SEQ ID NO: 232478 - DNA, 33 bp, Homo sapien
acagaaattatgtcactcttgtaaaaactagta

SEQ ID NO: 232479 - DNA, 33 bp, Homo sapien
tccccagaaacagttagagatcatctttttcat

SEQ ID NO: 232480 - DNA, 33 bp, Homo sapien
tccccagaaacagttatagatcatctttttcat

SEQ ID NO: 232481 - DNA, 33 bp, Homo sapien
tacttctaaataccctaaatacttcaactcaat

SEQ ID NO: 232482 - DNA, 33 bp, Homo sapien
tacttctaaataccctgaatacttcaactcaat

SEQ ID NO: 232483 - DNA, 33 bp, Homo sapien
tcctgtattatttagaactttatgaaacatttg

SEQ ID NO: 232484 - DNA, 33 bp, Homo sapien
tcctgtattatttagacctttatgaaacatttg

SEQ ID NO: 232485 - DNA, 33 bp, Homo sapien
tgagtatagatgtctacgttggtacctgttgga

SEQ ID NO: 232486 - DNA, 33 bp, Homo sapien
tgagtatagatgtctatgttggtacctgttgga

SEQ ID NO: 232487 - DNA, 33 bp, Homo sapien
aagataaaaatcttaaatgaagccagaagagag

SEQ ID NO: 232488 - DNA, 33 bp, Homo sapien
aagataaaaatcttaagtgaagccagaagagag

SEQ ID NO: 232489 - DNA, 33 bp, Homo sapien
tgtcaacccaatgtcaaaatggattgataaatt

SEQ ID NO: 232490 - DNA, 33 bp, Homo sapien
tgtcaacccaatgtcagaatggattgataaatt

SEQ ID NO: 232491 - DNA, 33 bp, Homo sapien
atgttctctatatcaccgaatcccgctaattat

SEQ ID NO: 232492 - DNA, 33 bp, Homo sapien
atgttctctatatcactgaatcccgctaattat

SEQ ID NO: 232493 - DNA, 33 bp, Homo sapien
gtaatttttgttgttgcatcttcaaggtctttg

SEQ ID NO: 232494 - DNA, 33 bp, Homo sapien
gtaatttttgttgttgtatcttcaaggtctttg

SEQ ID NO: 232495 - DNA, 33 bp, Homo sapien
aagtaccttattatccaaaaattgtttccatag

SEQ ID NO: 232496 - DNA, 33 bp, Homo sapien
aagtaccttattatcctaaaattgtttccatag

SEQ ID NO: 232497 - DNA, 33 bp, Homo sapien
gagaaccaggcattcacctttctgtacgagact

SEQ ID NO: 232498 - DNA, 33 bp, Homo sapien
gagaaccaggcattcagctttctgtacgagact

SEQ ID NO: 232499 - DNA, 33 bp, Homo sapien
atctgccagcatgtaccaggcacacagaaatag

SEQ ID NO: 232500 - DNA, 33 bp, Homo sapien
atctgccagcatgtacgaggcacacagaaatag

SEQ ID NO: 232501 - DNA, 33 bp, Homo sapien
caaaaggccagggatacatgagaaagaaggtga

SEQ ID NO: 232502 - DNA, 33 bp, Homo sapien
caaaaggccagggatagatgagaaagaaggtga

SEQ ID NO: 232503 - DNA, 33 bp, Homo sapien
aacatcttgatctacaaaggacagagtaaccca

SEQ ID NO: 232504 - DNA, 33 bp, Homo sapien
aacatcttgatctacagaggacagagtaaccca

SEQ ID NO: 232505 - DNA, 33 bp, Homo sapien
ccttttcatttgcccaatcttgatcacaacact

SEQ ID NO: 232506 - DNA, 33 bp, Homo sapien
ccttttcatttgcccagtcttgatcacaacact

SEQ ID NO: 232507 - DNA, 33 bp, Homo sapien
ctgggtccagtcaatacaaagaaagcgcacagt

SEQ ID NO: 232508 - DNA, 33 bp, Homo sapien
ctgggtccagtcaatagaaagaaagcgcacagt

SEQ ID NO: 232509 - DNA, 33 bp, Homo sapien
acatagcaactgtaaaggtttgtgtagacacat

SEQ ID NO: 232510 - DNA, 33 bp, Homo sapien
acatagcaactgtaaatgtttgtgtagacacat

SEQ ID NO: 232511 - DNA, 33 bp, Homo sapien
ctccaaggataaatgaaccttatgcattcagga

SEQ ID NO: 232512 - DNA, 33 bp, Homo sapien
ctccaaggataaatgagccttatgcattcagga

SEQ ID NO: 232513 - DNA, 33 bp, Homo sapien
tgagtaatttattcacaaagctctgggtctctc

SEQ ID NO: 232514 - DNA, 33 bp, Homo sapien
tgagtaatttattcacgaagctctgggtctctc

SEQ ID NO: 232515 - DNA, 33 bp, Homo sapien
agttgaactaacatccgagacttgatgccacca

SEQ ID NO: 232516 - DNA, 33 bp, Homo sapien
agttgaactaacatcctagacttgatgccacca

SEQ ID NO: 232517 - DNA, 33 bp, Homo sapien
agacacatagagtcaagttaaatacataaaaat

SEQ ID NO: 232518 - DNA, 33 bp, Homo sapien
agacacatagagtcaatttaaatacataaaaat

SEQ ID NO: 232519 - DNA, 33 bp, Homo sapien
gcatcaaatatcgataccaaatggatcaactat

SEQ ID NO: 232520 - DNA, 33 bp, Homo sapien
gcatcaaatatcgatatcaaatggatcaactat

SEQ ID NO: 232521 - DNA, 33 bp, Homo sapien
atatatgtgttcaaataagatagtcaagaatag

SEQ ID NO: 232522 - DNA, 33 bp, Homo sapien
atatatgtgttcaaatgagatagtcaagaatag

SEQ ID NO: 232523 - DNA, 33 bp, Homo sapien
aatttaagactacttgaaaaaacatgattaaaa

SEQ ID NO: 232524 - DNA, 33 bp, Homo sapien
aatttaagactacttggaaaaacatgattaaaa

SEQ ID NO: 232525 - DNA, 33 bp, Homo sapien
aagcaatgtttaccaaggaacaaagaatatcct

SEQ ID NO: 232526 - DNA, 33 bp, Homo sapien
aagcaatgtttaccaatgaacaaagaatatcct

SEQ ID NO: 232527 - DNA, 33 bp, Homo sapien
tgtccatccagggctcacagagaaagtatgaat

SEQ ID NO: 232528 - DNA, 33 bp, Homo sapien
tgtccatccagggctcgcagagaaagtatgaat

SEQ ID NO: 232529 - DNA, 33 bp, Homo sapien
aagtatggcttagtgaccaataacatattaatt

SEQ ID NO: 232530 - DNA, 33 bp, Homo sapien
aagtatggcttagtgatcaataacatattaatt

SEQ ID NO: 232531 - DNA, 33 bp, Homo sapien
aaattgatgtgataaacgacaccttacttatat

SEQ ID NO: 232532 - DNA, 33 bp, Homo sapien
aaattgatgtgataaatgacaccttacttatat

SEQ ID NO: 232533 - DNA, 33 bp, Homo sapien
aatggaaactatataaccaggaaaggaatgtat

SEQ ID NO: 232534 - DNA, 33 bp, Homo sapien
aatggaaactatataagcaggaaaggaatgtat

SEQ ID NO: 232535 - DNA, 33 bp, Homo sapien
taaagacaaagatgcaatagagtaaaacagggt

SEQ ID NO: 232536 - DNA, 33 bp, Homo sapien
taaagacaaagatgcagtagagtaaaacagggt

SEQ ID NO: 232537 - DNA, 33 bp, Homo sapien
tcctgtcaatatctaccacgacaatataagaag

SEQ ID NO: 232538 - DNA, 33 bp, Homo sapien
tcctgtcaatatctactacgacaatataagaag

SEQ ID NO: 232539 - DNA, 33 bp, Homo sapien
tggtagctccaaaagaagcaagtttggatggag

SEQ ID NO: 232540 - DNA, 33 bp, Homo sapien
tggtagctccaaaagaggcaagtttggatggag

SEQ ID NO: 232541 - DNA, 33 bp, Homo sapien
gggtctgtcaggttccaagtgaagtgctcctcc

SEQ ID NO: 232542 - DNA, 33 bp, Homo sapien
gggtctgtcaggttccgagtgaagtgctcctcc

SEQ ID NO: 232543 - DNA, 33 bp, Homo sapien
caaggcagagcaaccagaaagctgtgagctgaa

SEQ ID NO: 232544 - DNA, 33 bp, Homo sapien
caaggcagagcaaccataaagctgtgagctgaa

SEQ ID NO: 232545 - DNA, 33 bp, Homo sapien
gtgagctgaaccacacacatacagtcaaatgat

SEQ ID NO: 232546 - DNA, 33 bp, Homo sapien
gtgagctgaaccacacgcatacagtcaaatgat

SEQ ID NO: 232547 - DNA, 33 bp, Homo sapien
tcctttatggttaataagaactcttgtctctgg

SEQ ID NO: 232548 - DNA, 33 bp, Homo sapien
tcctttatggttaataggaactcttgtctctgg

SEQ ID NO: 232549 - DNA, 33 bp, Homo sapien
taatagatgaaaagtaaaacattgaagatgaaa

SEQ ID NO: 232550 - DNA, 33 bp, Homo sapien
taatagatgaaaagtacaacattgaagatgaaa

SEQ ID NO: 232551 - DNA, 33 bp, Homo sapien
aataaagcacggtgaaaaaaaggatggataaaa

SEQ ID NO: 232552 - DNA, 33 bp, Homo sapien
aataaagcacggtgaagaaaaggatggataaaa

SEQ ID NO: 232553 - DNA, 33 bp, Homo sapien
caggtgtggcaagaacagttatctctcttctaa

SEQ ID NO: 232554 - DNA, 33 bp, Homo sapien
caggtgtggcaagaacggttatctctcttctaa

SEQ ID NO: 232555 - DNA, 33 bp, Homo sapien
ttatcagggaatgggcgaactttatccaactgg

SEQ ID NO: 232556 - DNA, 33 bp, Homo sapien
ttatcagggaatgggctaactttatccaactgg

SEQ ID NO: 232557 - DNA, 33 bp, Homo sapien
gaaggaaatagatataataatcgcttaagagaa

SEQ ID NO: 232558 - DNA, 33 bp, Homo sapien
gaaggaaatagatatagtaatcgcttaagagaa

SEQ ID NO: 232559 - DNA, 33 bp, Homo sapien
aagatgctagaagaaacggaaatgagaaagaga

SEQ ID NO: 232560 - DNA, 33 bp, Homo sapien
aagatgctagaagaaatggaaatgagaaagaga

SEQ ID NO: 232561 - DNA, 33 bp, Homo sapien
ttatgtcaatcgcttgcaccatttactgtctta

SEQ ID NO: 232562 - DNA, 33 bp, Homo sapien
ttatgtcaatcgcttgtaccatttactgtctta

SEQ ID NO: 232563 - DNA, 33 bp, Homo sapien
gtctcacaaaattcataacttaaagctgtaacc

SEQ ID NO: 232564 - DNA, 33 bp, Homo sapien
gtctcacaaaattcatgacttaaagctgtaacc

SEQ ID NO: 232565 - DNA, 33 bp, Homo sapien
ttggggatttgggtatgaattctgacaaccaaa

SEQ ID NO: 232566 - DNA, 33 bp, Homo sapien
ttggggatttgggtattaattctgacaaccaaa

SEQ ID NO: 232567 - DNA, 33 bp, Homo sapien
atactagttcaaatgaaagaaaagacacatcct

SEQ ID NO: 232568 - DNA, 33 bp, Homo sapien
atactagttcaaatgagagaaaagacacatcct

SEQ ID NO: 232569 - DNA, 33 bp, Homo sapien
ttcctatagcatcctgaaggtagctggagctga

SEQ ID NO: 232570 - DNA, 33 bp, Homo sapien
ttcctatagcatcctggaggtagctggagctga

SEQ ID NO: 232571 - DNA, 33 bp, Homo sapien
atttttaattgaagtgcacatcagcttttatgt

SEQ ID NO: 232572 - DNA, 33 bp, Homo sapien
atttttaattgaagtgtacatcagcttttatgt

SEQ ID NO: 232573 - DNA, 33 bp, Homo sapien
gggatcaataccaacaacctcaacgacaacgga

SEQ ID NO: 232574 - DNA, 33 bp, Homo sapien
gggatcaataccaacatcctcaacgacaacgga

SEQ ID NO: 232575 - DNA, 33 bp, Homo sapien
taatcctatgatcaaacatggaaactcatggac

SEQ ID NO: 232576 - DNA, 33 bp, Homo sapien
taatcctatgatcaaatatggaaactcatggac

SEQ ID NO: 232577 - DNA, 33 bp, Homo sapien
tctcagcacatcatagcaagagcagatactatt

SEQ ID NO: 232578 - DNA, 33 bp, Homo sapien
tctcagcacatcataggaagagcagatactatt

SEQ ID NO: 232579 - DNA, 33 bp, Homo sapien
taaatagagtacacaacaggttccttgtcttca

SEQ ID NO: 232580 - DNA, 33 bp, Homo sapien
taaatagagtacacaataggttccttgtcttca

SEQ ID NO: 232581 - DNA, 33 bp, Homo sapien
tatttcaggaataaaacgacctctatgatgttg

SEQ ID NO: 232582 - DNA, 33 bp, Homo sapien
tatttcaggaataaaatgacctctatgatgttg

SEQ ID NO: 232583 - DNA, 33 bp, Homo sapien
gaccatgtatcaatgccgacaatcatgtcctgc

SEQ ID NO: 232584 - DNA, 33 bp, Homo sapien
gaccatgtatcaatgctgacaatcatgtcctgc

SEQ ID NO: 232585 - DNA, 33 bp, Homo sapien
attttatgatttattaacttcagagaaaaagag

SEQ ID NO: 232586 - DNA, 33 bp, Homo sapien
attttatgatttattagcttcagagaaaaagag

SEQ ID NO: 232587 - DNA, 33 bp, Homo sapien
gttacctttctacttgcaacagaaggggagaaa

SEQ ID NO: 232588 - DNA, 33 bp, Homo sapien
gttacctttctacttgtaacagaaggggagaaa

SEQ ID NO: 232589 - DNA, 33 bp, Homo sapien
atatctttgggtctaaccagataactccaagcc

SEQ ID NO: 232590 - DNA, 33 bp, Homo sapien
atatctttgggtctaatcagataactccaagcc

SEQ ID NO: 232591 - DNA, 33 bp, Homo sapien
ctttctgaatgatcacaattataggaatattcc

SEQ ID NO: 232592 - DNA, 33 bp, Homo sapien
ctttctgaatgatcacgattataggaatattcc

SEQ ID NO: 232593 - DNA, 33 bp, Homo sapien
ctcagaccctggccaacgatggactagagggga

SEQ ID NO: 232594 - DNA, 33 bp, Homo sapien
ctcagaccctggccaatgatggactagagggga

SEQ ID NO: 232595 - DNA, 33 bp, Homo sapien
ttgggttgtgatctccagaatgcctccagttaa

SEQ ID NO: 232596 - DNA, 33 bp, Homo sapien
ttgggttgtgatctccggaatgcctccagttaa

SEQ ID NO: 232597 - DNA, 33 bp, Homo sapien
aataatgttaatctgaggaataaaaccaaatgc

SEQ ID NO: 232598 - DNA, 33 bp, Homo sapien
aataatgttaatctgatgaataaaaccaaatgc

SEQ ID NO: 232599 - DNA, 33 bp, Homo sapien
tgcctgacattgtgaacatctgaaacaaaataa

SEQ ID NO: 232600 - DNA, 33 bp, Homo sapien
tgcctgacattgtgaatatctgaaacaaaataa

SEQ ID NO: 232601 - DNA, 33 bp, Homo sapien
catgcagatagtgagtgaacagctgtttattct

SEQ ID NO: 232602 - DNA, 33 bp, Homo sapien
catgcagatagtgagttaacagctgtttattct

SEQ ID NO: 232603 - DNA, 33 bp, Homo sapien
tcaaggcattaacttgaagcaataaagagctca

SEQ ID NO: 232604 - DNA, 33 bp, Homo sapien
tcaaggcattaacttggagcaataaagagctca

SEQ ID NO: 232605 - DNA, 33 bp, Homo sapien
ttcctctgggctctcaggtctacctctttttta

SEQ ID NO: 232606 - DNA, 33 bp, Homo sapien
ttcctctgggctctcatgtctacctctttttta

SEQ ID NO: 232607 - DNA, 33 bp, Homo sapien
tattctggcctcaagtaaagtctcaacaaagtt

SEQ ID NO: 232608 - DNA, 33 bp, Homo sapien
tattctggcctcaagttaagtctcaacaaagtt

SEQ ID NO: 232609 - DNA, 33 bp, Homo sapien
ccagtgccctttctaaatgttactatgtcttca

SEQ ID NO: 232610 - DNA, 33 bp, Homo sapien
ccagtgccctttctaagtgttactatgtcttca

SEQ ID NO: 232611 - DNA, 33 bp, Homo sapien
aaagctctatgtggaacataactggataatatt

SEQ ID NO: 232612 - DNA, 33 bp, Homo sapien
aaagctctatgtggaatataactggataatatt

SEQ ID NO: 232613 - DNA, 33 bp, Homo sapien
tttgcctttaacaagacgacttgtcaatatgtg

SEQ ID NO: 232614 - DNA, 33 bp, Homo sapien
tttgcctttaacaagatgacttgtcaatatgtg

SEQ ID NO: 232615 - DNA, 33 bp, Homo sapien
gcatttgagctaatcacatttttctccatatat

SEQ ID NO: 232616 - DNA, 33 bp, Homo sapien
gcatttgagctaatcatatttttctccatatat

SEQ ID NO: 232617 - DNA, 33 bp, Homo sapien
tcaggagagtcaaaacagaaaatattttgccac

SEQ ID NO: 232618 - DNA, 33 bp, Homo sapien
tcaggagagtcaaaacggaaaatattttgccac

SEQ ID NO: 232619 - DNA, 33 bp, Homo sapien
tctctacttgtcttacagaaacggagctcaagt

SEQ ID NO: 232620 - DNA, 33 bp, Homo sapien
tctctacttgtcttacggaaacggagctcaagt

SEQ ID NO: 232621 - DNA, 33 bp, Homo sapien
ttctatattgctgaagcagacggaattttcaag

SEQ ID NO: 232622 - DNA, 33 bp, Homo sapien
ttctatattgctgaagtagacggaattttcaag

SEQ ID NO: 232623 - DNA, 33 bp, Homo sapien
taataataggagaaaccgtgtggggtatatgga

SEQ ID NO: 232624 - DNA, 33 bp, Homo sapien
taataataggagaaacggtgtggggtatatgga

SEQ ID NO: 232625 - DNA, 33 bp, Homo sapien
cactatcatgagaagaccacgggaaagaccagt

SEQ ID NO: 232626 - DNA, 33 bp, Homo sapien
cactatcatgagaagagcacgggaaagaccagt

SEQ ID NO: 232627 - DNA, 33 bp, Homo sapien
acaagcagccaatgaactatatggcctgacgtg

SEQ ID NO: 232628 - DNA, 33 bp, Homo sapien
acaagcagccaatgaagtatatggcctgacgtg

SEQ ID NO: 232629 - DNA, 33 bp, Homo sapien
aaattcttgtcttgtgaagtacaccaaagtcca

SEQ ID NO: 232630 - DNA, 33 bp, Homo sapien
aaattcttgtcttgtgcagtacaccaaagtcca

SEQ ID NO: 232631 - DNA, 33 bp, Homo sapien
atggccccaaaatgtgaaatatgagaacgagat

SEQ ID NO: 232632 - DNA, 33 bp, Homo sapien
atggccccaaaatgtggaatatgagaacgagat

SEQ ID NO: 232633 - DNA, 33 bp, Homo sapien
atagcttacatttactcaaccattgcttacatg

SEQ ID NO: 232634 - DNA, 33 bp, Homo sapien
atagcttacatttactgaaccattgcttacatg

SEQ ID NO: 232635 - DNA, 33 bp, Homo sapien
acactctatgagtctacgagctaaaaagttgga

SEQ ID NO: 232636 - DNA, 33 bp, Homo sapien
acactctatgagtctatgagctaaaaagttgga

SEQ ID NO: 232637 - DNA, 33 bp, Homo sapien
ttttgctttctctctaggacagcggttctcaac

SEQ ID NO: 232638 - DNA, 33 bp, Homo sapien
ttttgctttctctctatgacagcggttctcaac

SEQ ID NO: 232639 - DNA, 33 bp, Homo sapien
aattctattaaggtaacgtgttgaatctcaaac

SEQ ID NO: 232640 - DNA, 33 bp, Homo sapien
aattctattaaggtaatgtgttgaatctcaaac

SEQ ID NO: 232641 - DNA, 33 bp, Homo sapien
tacgttacttagcttgaatacataataagaatt

SEQ ID NO: 232642 - DNA, 33 bp, Homo sapien
tacgttacttagcttggatacataataagaatt

SEQ ID NO: 232643 - DNA, 33 bp, Homo sapien
aagatatttgaaactgaatcttccatgccttat

SEQ ID NO: 232644 - DNA, 33 bp, Homo sapien
aagatatttgaaactggatcttccatgccttat

SEQ ID NO: 232645 - DNA, 33 bp, Homo sapien
atatttctgaccttaactaattttgacaacatc

SEQ ID NO: 232646 - DNA, 33 bp, Homo sapien
atatttctgaccttaattaattttgacaacatc

SEQ ID NO: 232647 - DNA, 33 bp, Homo sapien
tagtaaaaaatctgcaaataacttttgtctccc

SEQ ID NO: 232648 - DNA, 33 bp, Homo sapien
tagtaaaaaatctgcatataacttttgtctccc

SEQ ID NO: 232649 - DNA, 33 bp, Homo sapien
tacatatctagtaaaactggaggcatttgggac

SEQ ID NO: 232650 - DNA, 33 bp, Homo sapien
tacatatctagtaaaattggaggcatttgggac

SEQ ID NO: 232651 - DNA, 33 bp, Homo sapien
attggctacaaaagcactgatgtcttataacat

SEQ ID NO: 232652 - DNA, 33 bp, Homo sapien
attggctacaaaagcattgatgtcttataacat

SEQ ID NO: 232653 - DNA, 33 bp, Homo sapien
gcatctagaacctcaccgatagttgcaagttta

SEQ ID NO: 232654 - DNA, 33 bp, Homo sapien
gcatctagaacctcacggatagttgcaagttta

SEQ ID NO: 232655 - DNA, 33 bp, Homo sapien
tccacagcttgtaaaactgatacgagggaaagg

SEQ ID NO: 232656 - DNA, 33 bp, Homo sapien
tccacagcttgtaaaattgatacgagggaaagg

SEQ ID NO: 232657 - DNA, 33 bp, Homo sapien
attttctctctgccaaatcctacaaatgataac

SEQ ID NO: 232658 - DNA, 33 bp, Homo sapien
attttctctctgccaagtcctacaaatgataac

SEQ ID NO: 232659 - DNA, 33 bp, Homo sapien
gaccttcaaataggtaacatccaatactttctg

SEQ ID NO: 232660 - DNA, 33 bp, Homo sapien
gaccttcaaataggtagcatccaatactttctg

SEQ ID NO: 232661 - DNA, 33 bp, Homo sapien
gtatttagtttttcaccagtactacactgtctt

SEQ ID NO: 232662 - DNA, 33 bp, Homo sapien
gtatttagtttttcacgagtactacactgtctt

SEQ ID NO: 232663 - DNA, 33 bp, Homo sapien
acatcattaatcatcaaggaaacgcaaattaaa

SEQ ID NO: 232664 - DNA, 33 bp, Homo sapien
acatcattaatcatcagggaaacgcaaattaaa

SEQ ID NO: 232665 - DNA, 33 bp, Homo sapien
gcagctcacacttgaaaggtgaagtttatgctc

SEQ ID NO: 232666 - DNA, 33 bp, Homo sapien
gcagctcacacttgaagggtgaagtttatgctc

SEQ ID NO: 232667 - DNA, 33 bp, Homo sapien
ggatacaatcaacaaagaaaactcaaactgata

SEQ ID NO: 232668 - DNA, 33 bp, Homo sapien
ggatacaatcaacaaataaaactcaaactgata

SEQ ID NO: 232669 - DNA, 33 bp, Homo sapien
ttatccttgctttcagaatggtttgaattcaag

SEQ ID NO: 232670 - DNA, 33 bp, Homo sapien
ttatccttgctttcaggatggtttgaattcaag

SEQ ID NO: 232671 - DNA, 33 bp, Homo sapien
ccactccaggaagtcaataccaatcaaggttgg

SEQ ID NO: 232672 - DNA, 33 bp, Homo sapien
ccactccaggaagtcagtaccaatcaaggttgg

SEQ ID NO: 232673 - DNA, 33 bp, Homo sapien
ccaaattgtatctgaaaaagacatgattttata

SEQ ID NO: 232674 - DNA, 33 bp, Homo sapien
ccaaattgtatctgaagaagacatgattttata

SEQ ID NO: 232675 - DNA, 33 bp, Homo sapien
gtccttatctccagagactacattccacatctg

SEQ ID NO: 232676 - DNA, 33 bp, Homo sapien
gtccttatctccagagcctacattccacatctg

SEQ ID NO: 232677 - DNA, 33 bp, Homo sapien
gttttaaatgcggatccacataagtcccaaatc

SEQ ID NO: 232678 - DNA, 33 bp, Homo sapien
gttttaaatgcggatctacataagtcccaaatc

SEQ ID NO: 232679 - DNA, 33 bp, Homo sapien
agctgaagtcagttagacaagtggttaatgcct

SEQ ID NO: 232680 - DNA, 33 bp, Homo sapien
agctgaagtcagttaggcaagtggttaatgcct

SEQ ID NO: 232681 - DNA, 33 bp, Homo sapien
agagttttctgtataccggagacctggaggcat

SEQ ID NO: 232682 - DNA, 33 bp, Homo sapien
agagttttctgtatactggagacctggaggcat

SEQ ID NO: 232683 - DNA, 33 bp, Homo sapien
caagaggtaatctgaaaacaggtctttctttga

SEQ ID NO: 232684 - DNA, 33 bp, Homo sapien
caagaggtaatctgaagacaggtctttctttga

SEQ ID NO: 232685 - DNA, 33 bp, Homo sapien
tcttggaagaagatgacggaagtactttgttgt

SEQ ID NO: 232686 - DNA, 33 bp, Homo sapien
tcttggaagaagatgatggaagtactttgttgt

SEQ ID NO: 232687 - DNA, 33 bp, Homo sapien
gagagccaaggaagaaagggtgaccaagccagt

SEQ ID NO: 232688 - DNA, 33 bp, Homo sapien
gagagccaaggaagaacgggtgaccaagccagt

SEQ ID NO: 232689 - DNA, 33 bp, Homo sapien
agaaacacataaaagaaaggtgtaagtcataac

SEQ ID NO: 232690 - DNA, 33 bp, Homo sapien
agaaacacataaaagagaggtgtaagtcataac

SEQ ID NO: 232691 - DNA, 33 bp, Homo sapien
ttttcatctctgaaaacggcaaatctccagggt

SEQ ID NO: 232692 - DNA, 33 bp, Homo sapien
ttttcatctctgaaaatggcaaatctccagggt

SEQ ID NO: 232693 - DNA, 33 bp, Homo sapien
tcccaaaacagtatcaaaactctgccctctctt

SEQ ID NO: 232694 - DNA, 33 bp, Homo sapien
tcccaaaacagtatcacaactctgccctctctt

SEQ ID NO: 232695 - DNA, 33 bp, Homo sapien
gatgatgttgcagaaactgatgcttttatagct

SEQ ID NO: 232696 - DNA, 33 bp, Homo sapien
gatgatgttgcagaaattgatgcttttatagct

SEQ ID NO: 232697 - DNA, 33 bp, Homo sapien
gtggttgcacctaatgcaggattacttggtctg

SEQ ID NO: 232698 - DNA, 33 bp, Homo sapien
gtggttgcacctaatgtaggattacttggtctg

SEQ ID NO: 232699 - DNA, 33 bp, Homo sapien
gaattttcactaactccctgagtgtctttttat

SEQ ID NO: 232700 - DNA, 33 bp, Homo sapien
gaattttcactaactctctgagtgtctttttat

SEQ ID NO: 232701 - DNA, 33 bp, Homo sapien
tttttcatcatgctcaaaagctagcactctaaa

SEQ ID NO: 232702 - DNA, 33 bp, Homo sapien
tttttcatcatgctcagaagctagcactctaaa

SEQ ID NO: 232703 - DNA, 33 bp, Homo sapien
tcactcccaagagaaactcttagacatagaact

SEQ ID NO: 232704 - DNA, 33 bp, Homo sapien
tcactcccaagagaaagtcttagacatagaact

SEQ ID NO: 232705 - DNA, 33 bp, Homo sapien
cacagcttcagttagaaagcatgattaagttct

SEQ ID NO: 232706 - DNA, 33 bp, Homo sapien
cacagcttcagttagatagcatgattaagttct

SEQ ID NO: 232707 - DNA, 33 bp, Homo sapien
ctaagtagtattccacagtatgcatcaaccaca

SEQ ID NO: 232708 - DNA, 33 bp, Homo sapien
ctaagtagtattccacggtatgcatcaaccaca

SEQ ID NO: 232709 - DNA, 33 bp, Homo sapien
atcacaagaatatggaaccagtccaaataccca

SEQ ID NO: 232710 - DNA, 33 bp, Homo sapien
atcacaagaatatggagccagtccaaataccca

SEQ ID NO: 232711 - DNA, 33 bp, Homo sapien
ctgtcagtttgcataccaaataatgcttcatat

SEQ ID NO: 232712 - DNA, 33 bp, Homo sapien
ctgtcagtttgcatactaaataatgcttcatat

SEQ ID NO: 232713 - DNA, 33 bp, Homo sapien
tactgagtcataagaaatgtcatgtataagtca

SEQ ID NO: 232714 - DNA, 33 bp, Homo sapien
tactgagtcataagaagtgtcatgtataagtca

SEQ ID NO: 232715 - DNA, 33 bp, Homo sapien
ttgtcagttgtgacaaagattaaatagcatttc

SEQ ID NO: 232716 - DNA, 33 bp, Homo sapien
ttgtcagttgtgacaatgattaaatagcatttc

SEQ ID NO: 232717 - DNA, 33 bp, Homo sapien
acctatttctaattccacaaaggagcctttacc

SEQ ID NO: 232718 - DNA, 33 bp, Homo sapien
acctatttctaattccgcaaaggagcctttacc

SEQ ID NO: 232719 - DNA, 33 bp, Homo sapien
gtcttaggaatttgcacgaatggtaaagctaaa

SEQ ID NO: 232720 - DNA, 33 bp, Homo sapien
gtcttaggaatttgcatgaatggtaaagctaaa

SEQ ID NO: 232721 - DNA, 33 bp, Homo sapien
gaggatgtgtatgtagaaaataagtttggagaa

SEQ ID NO: 232722 - DNA, 33 bp, Homo sapien
gaggatgtgtatgtaggaaataagtttggagaa

SEQ ID NO: 232723 - DNA, 33 bp, Homo sapien
caggagtgcagataccccctcagcatactaatt

SEQ ID NO: 232724 - DNA, 33 bp, Homo sapien
caggagtgcagataccgcctcagcatactaatt

SEQ ID NO: 232725 - DNA, 33 bp, Homo sapien
ttagtaattgagataaagcaatgtaacttgaga

SEQ ID NO: 232726 - DNA, 33 bp, Homo sapien
ttagtaattgagataatgcaatgtaacttgaga

SEQ ID NO: 232727 - DNA, 33 bp, Homo sapien
cagctagcggatgtaacaaacctcatggctcat

SEQ ID NO: 232728 - DNA, 33 bp, Homo sapien
cagctagcggatgtaagaaacctcatggctcat

SEQ ID NO: 232729 - DNA, 33 bp, Homo sapien
tctgcaagtattgatacaaaaatgccaatatct

SEQ ID NO: 232730 - DNA, 33 bp, Homo sapien
tctgcaagtattgatataaaaatgccaatatct

SEQ ID NO: 232731 - DNA, 33 bp, Homo sapien
ggagtatgaatgctgtaaagcatgagagcaaac

SEQ ID NO: 232732 - DNA, 33 bp, Homo sapien
ggagtatgaatgctgttaagcatgagagcaaac

SEQ ID NO: 232733 - DNA, 33 bp, Homo sapien
aggctacatgttctcaataactgaacaaacttt

SEQ ID NO: 232734 - DNA, 33 bp, Homo sapien
aggctacatgttctcagtaactgaacaaacttt

SEQ ID NO: 232735 - DNA, 33 bp, Homo sapien
tctctctgcataacagaaggcttgttattttca

SEQ ID NO: 232736 - DNA, 33 bp, Homo sapien
tctctctgcataacaggaggcttgttattttca

SEQ ID NO: 232737 - DNA, 33 bp, Homo sapien
cagaagcattcttccaacctgttttattagtaa

SEQ ID NO: 232738 - DNA, 33 bp, Homo sapien
cagaagcattcttccatcctgttttattagtaa

SEQ ID NO: 232739 - DNA, 33 bp, Homo sapien
ttaatacaattgtgcaataataagattcaattc

SEQ ID NO: 232740 - DNA, 33 bp, Homo sapien
ttaatacaattgtgcagtaataagattcaattc

SEQ ID NO: 232741 - DNA, 33 bp, Homo sapien
tgacaaaggggaatacaactattgaaggctcta

SEQ ID NO: 232742 - DNA, 33 bp, Homo sapien
tgacaaaggggaatacgactattgaaggctcta

SEQ ID NO: 232743 - DNA, 33 bp, Homo sapien
aatttattttactaccagactctatcaatatct

SEQ ID NO: 232744 - DNA, 33 bp, Homo sapien
aatttattttactaccggactctatcaatatct

SEQ ID NO: 232745 - DNA, 33 bp, Homo sapien
gtagggtctctgtatacggaaccacgtcattat

SEQ ID NO: 232746 - DNA, 33 bp, Homo sapien
gtagggtctctgtatatggaaccacgtcattat

SEQ ID NO: 232747 - DNA, 33 bp, Homo sapien
aaaatatgagccataaagcagggcaaatctctg

SEQ ID NO: 232748 - DNA, 33 bp, Homo sapien
aaaatatgagccataacgcagggcaaatctctg

SEQ ID NO: 232749 - DNA, 33 bp, Homo sapien
agaagagatagaaagcaaagagaaggcatgcga

SEQ ID NO: 232750 - DNA, 33 bp, Homo sapien
agaagagatagaaagcgaagagaaggcatgcga

SEQ ID NO: 232751 - DNA, 33 bp, Homo sapien
cactgctagtcacatgaaagtatagcatataaa

SEQ ID NO: 232752 - DNA, 33 bp, Homo sapien
cactgctagtcacatggaagtatagcatataaa

SEQ ID NO: 232753 - DNA, 33 bp, Homo sapien
acaatttagagtactgcacgctgttggcatgga

SEQ ID NO: 232754 - DNA, 33 bp, Homo sapien
acaatttagagtactgtacgctgttggcatgga

SEQ ID NO: 232755 - DNA, 33 bp, Homo sapien
tgaaagattttgaatacagctgagtaatgtgaa

SEQ ID NO: 232756 - DNA, 33 bp, Homo sapien
tgaaagattttgaatatagctgagtaatgtgaa

SEQ ID NO: 232757 - DNA, 33 bp, Homo sapien
atacaaatagtggaatcagatctaactgctttt

SEQ ID NO: 232758 - DNA, 33 bp, Homo sapien
atacaaatagtggaatgagatctaactgctttt

SEQ ID NO: 232759 - DNA, 33 bp, Homo sapien
aagtggaaaaagatcacgttggagtagtaggta

SEQ ID NO: 232760 - DNA, 33 bp, Homo sapien
aagtggaaaaagatcatgttggagtagtaggta

SEQ ID NO: 232761 - DNA, 33 bp, Homo sapien
gaaaaaattccacaaaatgttgttttcatcttc

SEQ ID NO: 232762 - DNA, 33 bp, Homo sapien
gaaaaaattccacaaagtgttgttttcatcttc

SEQ ID NO: 232763 - DNA, 33 bp, Homo sapien
cacagtacagcagaaaagatctaaatttgggaa

SEQ ID NO: 232764 - DNA, 33 bp, Homo sapien
cacagtacagcagaaaggatctaaatttgggaa

SEQ ID NO: 232765 - DNA, 33 bp, Homo sapien
tggttacttagcactacgtaaatctccttgggc

SEQ ID NO: 232766 - DNA, 33 bp, Homo sapien
tggttacttagcactatgtaaatctccttgggc

SEQ ID NO: 232767 - DNA, 33 bp, Homo sapien
caagatcagaacagaaatgaatagagactagga

SEQ ID NO: 232768 - DNA, 33 bp, Homo sapien
caagatcagaacagaattgaatagagactagga

SEQ ID NO: 232769 - DNA, 33 bp, Homo sapien
taatgctgaaaccaacacattcaaacttgaaat

SEQ ID NO: 232770 - DNA, 33 bp, Homo sapien
taatgctgaaaccaacgcattcaaacttgaaat

SEQ ID NO: 232771 - DNA, 33 bp, Homo sapien
taacatttaactcataaaatttgtgcagaattt

SEQ ID NO: 232772 - DNA, 33 bp, Homo sapien
taacatttaactcatagaatttgtgcagaattt

SEQ ID NO: 232773 - DNA, 33 bp, Homo sapien
agtttctgctcactaaccaaaactgctgtgcat

SEQ ID NO: 232774 - DNA, 33 bp, Homo sapien
agtttctgctcactaatcaaaactgctgtgcat

SEQ ID NO: 232775 - DNA, 33 bp, Homo sapien
caactgggaattgaataacatacatcaaaataa

SEQ ID NO: 232776 - DNA, 33 bp, Homo sapien
caactgggaattgaatcacatacatcaaaataa

SEQ ID NO: 232777 - DNA, 33 bp, Homo sapien
ttactgccatattcaaaaaagcaagcagttgtt

SEQ ID NO: 232778 - DNA, 33 bp, Homo sapien
ttactgccatattcaataaagcaagcagttgtt

SEQ ID NO: 232779 - DNA, 33 bp, Homo sapien
ctgacctataggattaagcaaagtcaaaattca

SEQ ID NO: 232780 - DNA, 33 bp, Homo sapien
ctgacctataggattatgcaaagtcaaaattca

SEQ ID NO: 232781 - DNA, 33 bp, Homo sapien
tgtagcagtcaagttacgtagatgggaagctgg

SEQ ID NO: 232782 - DNA, 33 bp, Homo sapien
tgtagcagtcaagttatgtagatgggaagctgg

SEQ ID NO: 232783 - DNA, 33 bp, Homo sapien
ataggtaaaatgccaaaagtgttacagaaaaaa

SEQ ID NO: 232784 - DNA, 33 bp, Homo sapien
ataggtaaaatgccaatagtgttacagaaaaaa

SEQ ID NO: 232785 - DNA, 33 bp, Homo sapien
aataactaagaagggaaacagatggaaaattaa

SEQ ID NO: 232786 - DNA, 33 bp, Homo sapien
aataactaagaagggagacagatggaaaattaa

SEQ ID NO: 232787 - DNA, 33 bp, Homo sapien
tgaaaattattatttacctgagcctcatcctat

SEQ ID NO: 232788 - DNA, 33 bp, Homo sapien
tgaaaattattatttatctgagcctcatcctat

SEQ ID NO: 232789 - DNA, 33 bp, Homo sapien
taataatcaaatgttcaagatgatgtgtagatt

SEQ ID NO: 232790 - DNA, 33 bp, Homo sapien
taataatcaaatgttcgagatgatgtgtagatt

SEQ ID NO: 232791 - DNA, 33 bp, Homo sapien
attcagcgtaaagtataagagacattcttttca

SEQ ID NO: 232792 - DNA, 33 bp, Homo sapien
attcagcgtaaagtatcagagacattcttttca

SEQ ID NO: 232793 - DNA, 33 bp, Homo sapien
caagaacaacatacagaacaaagcacctgatta

SEQ ID NO: 232794 - DNA, 33 bp, Homo sapien
caagaacaacatacaggacaaagcacctgatta

SEQ ID NO: 232795 - DNA, 33 bp, Homo sapien
agctacttttccatggccataaactacaaaatg

SEQ ID NO: 232796 - DNA, 33 bp, Homo sapien
agctacttttccatggtcataaactacaaaatg

SEQ ID NO: 232797 - DNA, 33 bp, Homo sapien
agttttgtgtcttagaactgtttatatttgtag

SEQ ID NO: 232798 - DNA, 33 bp, Homo sapien
agttttgtgtcttagatctgtttatatttgtag

SEQ ID NO: 232799 - DNA, 33 bp, Homo sapien
tttttctcagaatgccaaagttgttttcttttt

SEQ ID NO: 232800 - DNA, 33 bp, Homo sapien
tttttctcagaatgccgaagttgttttcttttt

SEQ ID NO: 232801 - DNA, 33 bp, Homo sapien
tggcatttcaatgaaaccactatacacaattac

SEQ ID NO: 232802 - DNA, 33 bp, Homo sapien
tggcatttcaatgaaagcactatacacaattac

SEQ ID NO: 232803 - DNA, 33 bp, Homo sapien
gtctaatcttttttaccgatttccaagcttggt

SEQ ID NO: 232804 - DNA, 33 bp, Homo sapien
gtctaatcttttttactgatttccaagcttggt

SEQ ID NO: 232805 - DNA, 33 bp, Homo sapien
ctcgaagaacaatccacagctgtcttttttcca

SEQ ID NO: 232806 - DNA, 33 bp, Homo sapien
ctcgaagaacaatccatagctgtcttttttcca

SEQ ID NO: 232807 - DNA, 33 bp, Homo sapien
agtataatattgcaacagtatagaagaagtttt

SEQ ID NO: 232808 - DNA, 33 bp, Homo sapien
agtataatattgcaactgtatagaagaagtttt

SEQ ID NO: 232809 - DNA, 33 bp, Homo sapien
catgtctctcaatttacaatttttaactcaatg

SEQ ID NO: 232810 - DNA, 33 bp, Homo sapien
catgtctctcaatttataatttttaactcaatg

SEQ ID NO: 232811 - DNA, 33 bp, Homo sapien
aatttcaataggcagaaaataggcaaaggcata

SEQ ID NO: 232812 - DNA, 33 bp, Homo sapien
aatttcaataggcagacaataggcaaaggcata

SEQ ID NO: 232813 - DNA, 33 bp, Homo sapien
acatgctcttaagacaatcctaaaaccaaccat

SEQ ID NO: 232814 - DNA, 33 bp, Homo sapien
acatgctcttaagacagtcctaaaaccaaccat

SEQ ID NO: 232815 - DNA, 33 bp, Homo sapien
agaataggtcatttgcaaaattaaacagaagta

SEQ ID NO: 232816 - DNA, 33 bp, Homo sapien
agaataggtcatttgccaaattaaacagaagta

SEQ ID NO: 232817 - DNA, 33 bp, Homo sapien
acattcgtgcataagcccctccagaagtgataa

SEQ ID NO: 232818 - DNA, 33 bp, Homo sapien
acattcgtgcataagctcctccagaagtgataa

SEQ ID NO: 232819 - DNA, 33 bp, Homo sapien
agaccagctctaaaacaatatctgtcagacaaa

SEQ ID NO: 232820 - DNA, 33 bp, Homo sapien
agaccagctctaaaaccatatctgtcagacaaa

SEQ ID NO: 232821 - DNA, 33 bp, Homo sapien
ctttgcatcaggagaaacacaatgaaaatctat

SEQ ID NO: 232822 - DNA, 33 bp, Homo sapien
ctttgcatcaggagaagcacaatgaaaatctat

SEQ ID NO: 232823 - DNA, 33 bp, Homo sapien
tctcatcagtgtgaaaagaagtttaatggtcat

SEQ ID NO: 232824 - DNA, 33 bp, Homo sapien
tctcatcagtgtgaaaggaagtttaatggtcat

SEQ ID NO: 232825 - DNA, 33 bp, Homo sapien
tttttagcttaccaccagaataactcttaacag

SEQ ID NO: 232826 - DNA, 33 bp, Homo sapien
tttttagcttaccaccggaataactcttaacag

SEQ ID NO: 232827 - DNA, 33 bp, Homo sapien
tacctaattgtcctaacgccttgacactaggct

SEQ ID NO: 232828 - DNA, 33 bp, Homo sapien
tacctaattgtcctaatgccttgacactaggct

SEQ ID NO: 232829 - DNA, 33 bp, Homo sapien
atccttcatttttgtaactcagtcctaacacaa

SEQ ID NO: 232830 - DNA, 33 bp, Homo sapien
atccttcatttttgtacctcagtcctaacacaa

SEQ ID NO: 232831 - DNA, 33 bp, Homo sapien
gtaagaattaggacaaacattacaagcagaaga

SEQ ID NO: 232832 - DNA, 33 bp, Homo sapien
gtaagaattaggacaagcattacaagcagaaga

SEQ ID NO: 232833 - DNA, 33 bp, Homo sapien
tattgcaatggaaaaagaaatgaaaagatgtaa

SEQ ID NO: 232834 - DNA, 33 bp, Homo sapien
tattgcaatggaaaaataaatgaaaagatgtaa

SEQ ID NO: 232835 - DNA, 33 bp, Homo sapien
ccatacagtgacctagccaaagtacttagaaga

SEQ ID NO: 232836 - DNA, 33 bp, Homo sapien
ccatacagtgacctaggcaaagtacttagaaga

SEQ ID NO: 232837 - DNA, 33 bp, Homo sapien
ttctccaaaggttgtcaaaagccaaaattgaat

SEQ ID NO: 232838 - DNA, 33 bp, Homo sapien
ttctccaaaggttgtcgaaagccaaaattgaat

SEQ ID NO: 232839 - DNA, 33 bp, Homo sapien
ggtgccatgacgctaacaggctgcagaagagtt

SEQ ID NO: 232840 - DNA, 33 bp, Homo sapien
ggtgccatgacgctaataggctgcagaagagtt

SEQ ID NO: 232841 - DNA, 33 bp, Homo sapien
ttacagttgctacacaaatcaatttatcagcaa

SEQ ID NO: 232842 - DNA, 33 bp, Homo sapien
ttacagttgctacacagatcaatttatcagcaa

SEQ ID NO: 232843 - DNA, 33 bp, Homo sapien
tttcaccacactcagacgttacagtttccaagc

SEQ ID NO: 232844 - DNA, 33 bp, Homo sapien
tttcaccacactcagatgttacagtttccaagc

SEQ ID NO: 232845 - DNA, 33 bp, Homo sapien
aaaatttatagcatccaaattgtaaataaaaga

SEQ ID NO: 232846 - DNA, 33 bp, Homo sapien
aaaatttatagcatccgaattgtaaataaaaga

SEQ ID NO: 232847 - DNA, 33 bp, Homo sapien
aagattaggaccatgtaacaatgaatcatagat

SEQ ID NO: 232848 - DNA, 33 bp, Homo sapien
aagattaggaccatgtgacaatgaatcatagat

SEQ ID NO: 232849 - DNA, 33 bp, Homo sapien
gtatgtgtatacagcaaacctttgaataatcca

SEQ ID NO: 232850 - DNA, 33 bp, Homo sapien
gtatgtgtatacagcagacctttgaataatcca

SEQ ID NO: 232851 - DNA, 33 bp, Homo sapien
attggtttgcagtcacactcattcttttacata

SEQ ID NO: 232852 - DNA, 33 bp, Homo sapien
attggtttgcagtcacgctcattcttttacata

SEQ ID NO: 232853 - DNA, 33 bp, Homo sapien
tggcacctgatagatacggctttgggattaata

SEQ ID NO: 232854 - DNA, 33 bp, Homo sapien
tggcacctgatagatatggctttgggattaata

SEQ ID NO: 232855 - DNA, 33 bp, Homo sapien
ggcttaaagggagtaaatgatttgctcagggcc

SEQ ID NO: 232856 - DNA, 33 bp, Homo sapien
ggcttaaagggagtaagtgatttgctcagggcc

SEQ ID NO: 232857 - DNA, 33 bp, Homo sapien
ttttgaactccaagtaaagcctggattaaatga

SEQ ID NO: 232858 - DNA, 33 bp, Homo sapien
ttttgaactccaagtagagcctggattaaatga

SEQ ID NO: 232859 - DNA, 33 bp, Homo sapien
ggaaatctcctttcaaggttcataggaaaaaca

SEQ ID NO: 232860 - DNA, 33 bp, Homo sapien
ggaaatctcctttcaatgttcataggaaaaaca

SEQ ID NO: 232861 - DNA, 33 bp, Homo sapien
tgtgccagtattgtgccacaactgcagaaaaaa

SEQ ID NO: 232862 - DNA, 33 bp, Homo sapien
tgtgccagtattgtgctacaactgcagaaaaaa

SEQ ID NO: 232863 - DNA, 33 bp, Homo sapien
tgaatgcactttgagcacagttggctacttgct

SEQ ID NO: 232864 - DNA, 33 bp, Homo sapien
tgaatgcactttgagcgcagttggctacttgct

SEQ ID NO: 232865 - DNA, 33 bp, Homo sapien
gtggtaaagggtaaaaattccaggagcgaaagt

SEQ ID NO: 232866 - DNA, 33 bp, Homo sapien
gtggtaaagggtaaaatttccaggagcgaaagt

SEQ ID NO: 232867 - DNA, 33 bp, Homo sapien
actttaatccttgacactcccaattaattcttc

SEQ ID NO: 232868 - DNA, 33 bp, Homo sapien
actttaatccttgacattcccaattaattcttc

SEQ ID NO: 232869 - DNA, 33 bp, Homo sapien
ctttattgctcctatcaagacaaccagaagccg

SEQ ID NO: 232870 - DNA, 33 bp, Homo sapien
ctttattgctcctatcgagacaaccagaagccg

SEQ ID NO: 232871 - DNA, 33 bp, Homo sapien
acatgctagattgtaactgctggaatcaagtgt

SEQ ID NO: 232872 - DNA, 33 bp, Homo sapien
acatgctagattgtaagtgctggaatcaagtgt

SEQ ID NO: 232873 - DNA, 33 bp, Homo sapien
acttgcaaaataatcaacattgcagttatttca

SEQ ID NO: 232874 - DNA, 33 bp, Homo sapien
acttgcaaaataatcagcattgcagttatttca

SEQ ID NO: 232875 - DNA, 33 bp, Homo sapien
tgtcagacaaccaaaagacattagaacacataa

SEQ ID NO: 232876 - DNA, 33 bp, Homo sapien
tgtcagacaaccaaaatacattagaacacataa

SEQ ID NO: 232877 - DNA, 33 bp, Homo sapien
ctaagcagacttcagaataatgaagattatgag

SEQ ID NO: 232878 - DNA, 33 bp, Homo sapien
ctaagcagacttcagagtaatgaagattatgag

SEQ ID NO: 232879 - DNA, 33 bp, Homo sapien
aatagctgcactaaaaagaaaaattgtttgttt

SEQ ID NO: 232880 - DNA, 33 bp, Homo sapien
aatagctgcactaaaaggaaaaattgtttgttt

SEQ ID NO: 232881 - DNA, 33 bp, Homo sapien
gttgagctatactggccattacactttggatac

SEQ ID NO: 232882 - DNA, 33 bp, Homo sapien
gttgagctatactggctattacactttggatac

SEQ ID NO: 232883 - DNA, 33 bp, Homo sapien
ggataaagactcttaacctatggacaaagcaag

SEQ ID NO: 232884 - DNA, 33 bp, Homo sapien
ggataaagactcttaatctatggacaaagcaag

SEQ ID NO: 232885 - DNA, 33 bp, Homo sapien
cctcatttaggtctcaaatagaatgtcaccacc

SEQ ID NO: 232886 - DNA, 33 bp, Homo sapien
cctcatttaggtctcagatagaatgtcaccacc

SEQ ID NO: 232887 - DNA, 33 bp, Homo sapien
tatagcatacaagcaactaacttacaaagacat

SEQ ID NO: 232888 - DNA, 33 bp, Homo sapien
tatagcatacaagcaagtaacttacaaagacat

SEQ ID NO: 232889 - DNA, 33 bp, Homo sapien
tggaaggatgcctggaagaggatacatctaagc

SEQ ID NO: 232890 - DNA, 33 bp, Homo sapien
tggaaggatgcctggaggaggatacatctaagc

SEQ ID NO: 232891 - DNA, 33 bp, Homo sapien
atatgagagtccaaacaaaacttttcaaatctg

SEQ ID NO: 232892 - DNA, 33 bp, Homo sapien
atatgagagtccaaacgaaacttttcaaatctg

SEQ ID NO: 232893 - DNA, 33 bp, Homo sapien
gtccattactggaaaaatagaatgaaatcaaac

SEQ ID NO: 232894 - DNA, 33 bp, Homo sapien
gtccattactggaaaattagaatgaaatcaaac

SEQ ID NO: 232895 - DNA, 33 bp, Homo sapien
tccagggccatatgatcagtaaatggcagagct

SEQ ID NO: 232896 - DNA, 33 bp, Homo sapien
tccagggccatatgattagtaaatggcagagct

SEQ ID NO: 232897 - DNA, 33 bp, Homo sapien
tgttagtcttttcataaagctgactctattcat

SEQ ID NO: 232898 - DNA, 33 bp, Homo sapien
tgttagtcttttcatacagctgactctattcat

SEQ ID NO: 232899 - DNA, 33 bp, Homo sapien
acatgaattttctgatcaacttgtcaatttata

SEQ ID NO: 232900 - DNA, 33 bp, Homo sapien
acatgaattttctgattaacttgtcaatttata

SEQ ID NO: 232901 - DNA, 33 bp, Homo sapien
tgtattttttaaatgacgaatgatgatgagcat

SEQ ID NO: 232902 - DNA, 33 bp, Homo sapien
tgtattttttaaatgatgaatgatgatgagcat

SEQ ID NO: 232903 - DNA, 33 bp, Homo sapien
taggcaacaatctgaaaaagaggaaagacaaga

SEQ ID NO: 232904 - DNA, 33 bp, Homo sapien
taggcaacaatctgaagaagaggaaagacaaga

SEQ ID NO: 232905 - DNA, 33 bp, Homo sapien
gcagaactttgagcaacgcacctggctgtacac

SEQ ID NO: 232906 - DNA, 33 bp, Homo sapien
gcagaactttgagcaatgcacctggctgtacac

SEQ ID NO: 232907 - DNA, 33 bp, Homo sapien
gggttgtcaaactcaaataagtgtgtgttccca

SEQ ID NO: 232908 - DNA, 33 bp, Homo sapien
gggttgtcaaactcaagtaagtgtgtgttccca

SEQ ID NO: 232909 - DNA, 33 bp, Homo sapien
atgactctgtcaataccctctaacaattccaat

SEQ ID NO: 232910 - DNA, 33 bp, Homo sapien
atgactctgtcaatacgctctaacaattccaat

SEQ ID NO: 232911 - DNA, 33 bp, Homo sapien
tttaacattttctttacccttgatattgatatt

SEQ ID NO: 232912 - DNA, 33 bp, Homo sapien
tttaacattttctttatccttgatattgatatt

SEQ ID NO: 232913 - DNA, 33 bp, Homo sapien
ctattgtggtaggtggaaagactatcatgttag

SEQ ID NO: 232914 - DNA, 33 bp, Homo sapien
ctattgtggtaggtggcaagactatcatgttag

SEQ ID NO: 232915 - DNA, 33 bp, Homo sapien
ctttcatctttgaacacggagattaggtttact

SEQ ID NO: 232916 - DNA, 33 bp, Homo sapien
ctttcatctttgaacatggagattaggtttact

SEQ ID NO: 232917 - DNA, 33 bp, Homo sapien
aatattacttcctggagtaaccttcactttagt

SEQ ID NO: 232918 - DNA, 33 bp, Homo sapien
aatattacttcctggattaaccttcactttagt

SEQ ID NO: 232919 - DNA, 33 bp, Homo sapien
aggtggagagttagataacagctagaccaaata

SEQ ID NO: 232920 - DNA, 33 bp, Homo sapien
aggtggagagttagatgacagctagaccaaata

SEQ ID NO: 232921 - DNA, 33 bp, Homo sapien
gtgttcttttcaaaacaaaaatgagatcatgtc

SEQ ID NO: 232922 - DNA, 33 bp, Homo sapien
gtgttcttttcaaaacgaaaatgagatcatgtc

SEQ ID NO: 232923 - DNA, 33 bp, Homo sapien
gtcttatgctgaatccccctctccatctcttac

SEQ ID NO: 232924 - DNA, 33 bp, Homo sapien
gtcttatgctgaatcctcctctccatctcttac

SEQ ID NO: 232925 - DNA, 33 bp, Homo sapien
taatgttattaactgacctaggaaaatatatag

SEQ ID NO: 232926 - DNA, 33 bp, Homo sapien
taatgttattaactgagctaggaaaatatatag

SEQ ID NO: 232927 - DNA, 33 bp, Homo sapien
tctgcagttgactacaagacctttcatttagtt

SEQ ID NO: 232928 - DNA, 33 bp, Homo sapien
tctgcagttgactacaggacctttcatttagtt

SEQ ID NO: 232929 - DNA, 33 bp, Homo sapien
gactatttttctaattcaacccagactgttaaa

SEQ ID NO: 232930 - DNA, 33 bp, Homo sapien
gactatttttctaatttaacccagactgttaaa

SEQ ID NO: 232931 - DNA, 33 bp, Homo sapien
cattacacttgaataacaggttttgctgtatat

SEQ ID NO: 232932 - DNA, 33 bp, Homo sapien
cattacacttgaataataggttttgctgtatat

SEQ ID NO: 232933 - DNA, 33 bp, Homo sapien
ttttgacagatagttgacaacagacatgtacag

SEQ ID NO: 232934 - DNA, 33 bp, Homo sapien
ttttgacagatagttggcaacagacatgtacag

SEQ ID NO: 232935 - DNA, 33 bp, Homo sapien
tctcagtacattgtcaccaaaatatcttccaaa

SEQ ID NO: 232936 - DNA, 33 bp, Homo sapien
tctcagtacattgtcatcaaaatatcttccaaa

SEQ ID NO: 232937 - DNA, 33 bp, Homo sapien
cgaatttatctcctaacccaaattctgtagata

SEQ ID NO: 232938 - DNA, 33 bp, Homo sapien
cgaatttatctcctaatccaaattctgtagata

SEQ ID NO: 232939 - DNA, 33 bp, Homo sapien
gctgagttatgcaaagactatgttcccctccct

SEQ ID NO: 232940 - DNA, 33 bp, Homo sapien
gctgagttatgcaaaggctatgttcccctccct

SEQ ID NO: 232941 - DNA, 33 bp, Homo sapien
attaactgcttctagaatatggactacagttaa

SEQ ID NO: 232942 - DNA, 33 bp, Homo sapien
attaactgcttctagagtatggactacagttaa

SEQ ID NO: 232943 - DNA, 33 bp, Homo sapien
tagtcttttatctatgaatgggtttatcaggca

SEQ ID NO: 232944 - DNA, 33 bp, Homo sapien
tagtcttttatctatgcatgggtttatcaggca

SEQ ID NO: 232945 - DNA, 33 bp, Homo sapien
tgagaacttaggtgtaccattaagcattttaca

SEQ ID NO: 232946 - DNA, 33 bp, Homo sapien
tgagaacttaggtgtatcattaagcattttaca

SEQ ID NO: 232947 - DNA, 33 bp, Homo sapien
gctattagtttcaatgcagtgatgaacacaaac

SEQ ID NO: 232948 - DNA, 33 bp, Homo sapien
gctattagtttcaatgtagtgatgaacacaaac

SEQ ID NO: 232949 - DNA, 33 bp, Homo sapien
aaactttgcaaaagtacgactgtatgtaaagat

SEQ ID NO: 232950 - DNA, 33 bp, Homo sapien
aaactttgcaaaagtatgactgtatgtaaagat

SEQ ID NO: 232951 - DNA, 33 bp, Homo sapien
gtgaagaaaagtaacacgtagccacaatgcaga

SEQ ID NO: 232952 - DNA, 33 bp, Homo sapien
gtgaagaaaagtaacatgtagccacaatgcaga

SEQ ID NO: 232953 - DNA, 33 bp, Homo sapien
tgttgagcacttatctcaagtaaatgggtaatg

SEQ ID NO: 232954 - DNA, 33 bp, Homo sapien
tgttgagcacttatctgaagtaaatgggtaatg

SEQ ID NO: 232955 - DNA, 33 bp, Homo sapien
agattgatcttgtcaccaatttcctattctcag

SEQ ID NO: 232956 - DNA, 33 bp, Homo sapien
agattgatcttgtcactaatttcctattctcag

SEQ ID NO: 232957 - DNA, 33 bp, Homo sapien
ttttatactgtgatcacctttcaattattcaat

SEQ ID NO: 232958 - DNA, 33 bp, Homo sapien
ttttatactgtgatcatctttcaattattcaat

SEQ ID NO: 232959 - DNA, 33 bp, Homo sapien
gagtcattattttccaccttgcacattaaaata

SEQ ID NO: 232960 - DNA, 33 bp, Homo sapien
gagtcattattttccatcttgcacattaaaata

SEQ ID NO: 232961 - DNA, 33 bp, Homo sapien
acacagctacagaagaaagataagtcaattact

SEQ ID NO: 232962 - DNA, 33 bp, Homo sapien
acacagctacagaagatagataagtcaattact

SEQ ID NO: 232963 - DNA, 33 bp, Homo sapien
cttaatttggtagccacgttgcaaggaagaagt

SEQ ID NO: 232964 - DNA, 33 bp, Homo sapien
cttaatttggtagccatgttgcaaggaagaagt

SEQ ID NO: 232965 - DNA, 33 bp, Homo sapien
ttgcaaaaggcagtacaaattcttcaggatgat

SEQ ID NO: 232966 - DNA, 33 bp, Homo sapien
ttgcaaaaggcagtacgaattcttcaggatgat

SEQ ID NO: 232967 - DNA, 33 bp, Homo sapien
gaaacactccttgctaacagttttatcagatct

SEQ ID NO: 232968 - DNA, 33 bp, Homo sapien
gaaacactccttgctagcagttttatcagatct

SEQ ID NO: 232969 - DNA, 33 bp, Homo sapien
tgctaacatagggtaacgacgtgtttttcaaac

SEQ ID NO: 232970 - DNA, 33 bp, Homo sapien
tgctaacatagggtaatgacgtgtttttcaaac

SEQ ID NO: 232971 - DNA, 33 bp, Homo sapien
ggacttcgtcaggtaaacattgtaagtaactag

SEQ ID NO: 232972 - DNA, 33 bp, Homo sapien
ggacttcgtcaggtaagcattgtaagtaactag

SEQ ID NO: 232973 - DNA, 33 bp, Homo sapien
agtttgtcagtaaagacattttgaaagattatc

SEQ ID NO: 232974 - DNA, 33 bp, Homo sapien
agtttgtcagtaaagatattttgaaagattatc

SEQ ID NO: 232975 - DNA, 33 bp, Homo sapien
ccaaaatcttatcagcgattattcaggtactca

SEQ ID NO: 232976 - DNA, 33 bp, Homo sapien
ccaaaatcttatcagctattattcaggtactca

SEQ ID NO: 232977 - DNA, 33 bp, Homo sapien
ttgtaaatcaatcacaatatacatcatttttct

SEQ ID NO: 232978 - DNA, 33 bp, Homo sapien
ttgtaaatcaatcacagtatacatcatttttct

SEQ ID NO: 232979 - DNA, 33 bp, Homo sapien
ttatgttcagatttccaaggatgttaaagaaaa

SEQ ID NO: 232980 - DNA, 33 bp, Homo sapien
ttatgttcagatttcctaggatgttaaagaaaa

SEQ ID NO: 232981 - DNA, 33 bp, Homo sapien
gacactctagtgcttaaaagatcagattcaggc

SEQ ID NO: 232982 - DNA, 33 bp, Homo sapien
gacactctagtgcttataagatcagattcaggc

SEQ ID NO: 232983 - DNA, 33 bp, Homo sapien
acaccaaagcaataaaataatgtcaatatgtca

SEQ ID NO: 232984 - DNA, 33 bp, Homo sapien
acaccaaagcaataaagtaatgtcaatatgtca

SEQ ID NO: 232985 - DNA, 33 bp, Homo sapien
cctgtctgtcttagaaatgctgtaactctgtcc

SEQ ID NO: 232986 - DNA, 33 bp, Homo sapien
cctgtctgtcttagaagtgctgtaactctgtcc

SEQ ID NO: 232987 - DNA, 33 bp, Homo sapien
acactcgagactactagaaaggggagggcaaaa

SEQ ID NO: 232988 - DNA, 33 bp, Homo sapien
acactcgagactactataaaggggagggcaaaa

SEQ ID NO: 232989 - DNA, 33 bp, Homo sapien
tgatcagttagaattacattcattgtgacaaac

SEQ ID NO: 232990 - DNA, 33 bp, Homo sapien
tgatcagttagaattatattcattgtgacaaac

SEQ ID NO: 232991 - DNA, 33 bp, Homo sapien
atgaagatattctgatcaattttaggctacttc

SEQ ID NO: 232992 - DNA, 33 bp, Homo sapien
atgaagatattctgattaattttaggctacttc

SEQ ID NO: 232993 - DNA, 33 bp, Homo sapien
agtgctctctctgaaacgatttgggtaccaaac

SEQ ID NO: 232994 - DNA, 33 bp, Homo sapien
agtgctctctctgaaatgatttgggtaccaaac

SEQ ID NO: 232995 - DNA, 33 bp, Homo sapien
ataagtacatgaaagtaaacgatgtagtcatct

SEQ ID NO: 232996 - DNA, 33 bp, Homo sapien
ataagtacatgaaagtgaacgatgtagtcatct

SEQ ID NO: 232997 - DNA, 33 bp, Homo sapien
ggaggtaaaaaggatccgactcagtatgttctt

SEQ ID NO: 232998 - DNA, 33 bp, Homo sapien
ggaggtaaaaaggatctgactcagtatgttctt

SEQ ID NO: 232999 - DNA, 33 bp, Homo sapien
ttcaatcctctgccaactgctctatgttgtcag

SEQ ID NO: 233000 - DNA, 33 bp, Homo sapien
ttcaatcctctgccaattgctctatgttgtcag

SEQ ID NO: 233001 - DNA, 33 bp, Homo sapien
ggagcgaatatccaggaaccaatatgtgtgctt

SEQ ID NO: 233002 - DNA, 33 bp, Homo sapien
ggagcgaatatccagggaccaatatgtgtgctt

SEQ ID NO: 233003 - DNA, 33 bp, Homo sapien
agatagaaaatccataaagacagaagtcagatg

SEQ ID NO: 233004 - DNA, 33 bp, Homo sapien
agatagaaaatccatagagacagaagtcagatg

SEQ ID NO: 233005 - DNA, 33 bp, Homo sapien
tgaagattggtcaaaacatcaagagacaatcta

SEQ ID NO: 233006 - DNA, 33 bp, Homo sapien
tgaagattggtcaaaagatcaagagacaatcta

SEQ ID NO: 233007 - DNA, 33 bp, Homo sapien
ggtctgagtttggatacaaagctgtagtttctg

SEQ ID NO: 233008 - DNA, 33 bp, Homo sapien
ggtctgagtttggatataaagctgtagtttctg

SEQ ID NO: 233009 - DNA, 33 bp, Homo sapien
gaaatggaaggtgagaaggtttgagtgtcttgt

SEQ ID NO: 233010 - DNA, 33 bp, Homo sapien
gaaatggaaggtgagagggtttgagtgtcttgt

SEQ ID NO: 233011 - DNA, 33 bp, Homo sapien
atgaattgatttgaaccgtgtttgtaaactgag

SEQ ID NO: 233012 - DNA, 33 bp, Homo sapien
atgaattgatttgaactgtgtttgtaaactgag

SEQ ID NO: 233013 - DNA, 33 bp, Homo sapien
tttgattatgccctgaagaatctgttgcaacaa

SEQ ID NO: 233014 - DNA, 33 bp, Homo sapien
tttgattatgccctgaggaatctgttgcaacaa

SEQ ID NO: 233015 - DNA, 33 bp, Homo sapien
taatttttatgcacaggcaataatcctacattt

SEQ ID NO: 233016 - DNA, 33 bp, Homo sapien
taatttttatgcacagtcaataatcctacattt

SEQ ID NO: 233017 - DNA, 33 bp, Homo sapien
agaagaaaactacaatcataactattacttggg

SEQ ID NO: 233018 - DNA, 33 bp, Homo sapien
agaagaaaactacaatgataactattacttggg

SEQ ID NO: 233019 - DNA, 33 bp, Homo sapien
tcacggagataggaaggagaactatggttacca

SEQ ID NO: 233020 - DNA, 33 bp, Homo sapien
tcacggagataggaagtagaactatggttacca

SEQ ID NO: 233021 - DNA, 33 bp, Homo sapien
aacagtttagtttggaagccacagtgtagaggg

SEQ ID NO: 233022 - DNA, 33 bp, Homo sapien
aacagtttagtttggaggccacagtgtagaggg

SEQ ID NO: 233023 - DNA, 33 bp, Homo sapien
ctttggctttaggcaaacctgagaaagctaaga

SEQ ID NO: 233024 - DNA, 33 bp, Homo sapien
ctttggctttaggcaaccctgagaaagctaaga

SEQ ID NO: 233025 - DNA, 33 bp, Homo sapien
ccagactccatagtcacgtgagccaatgcccta

SEQ ID NO: 233026 - DNA, 33 bp, Homo sapien
ccagactccatagtcatgtgagccaatgcccta

SEQ ID NO: 233027 - DNA, 33 bp, Homo sapien
ttagaaggccaaaaccacaactgaaatgacaca

SEQ ID NO: 233028 - DNA, 33 bp, Homo sapien
ttagaaggccaaaaccgcaactgaaatgacaca

SEQ ID NO: 233029 - DNA, 33 bp, Homo sapien
tacattgatcttgctacgctcatcacagatctt

SEQ ID NO: 233030 - DNA, 33 bp, Homo sapien
tacattgatcttgctatgctcatcacagatctt

SEQ ID NO: 233031 - DNA, 33 bp, Homo sapien
ttttgcctaaatgtcaatcttagaagcagagaa

SEQ ID NO: 233032 - DNA, 33 bp, Homo sapien
ttttgcctaaatgtcattcttagaagcagagaa

SEQ ID NO: 233033 - DNA, 33 bp, Homo sapien
tcttgggctttaaaccaacttgatataaaaact

SEQ ID NO: 233034 - DNA, 33 bp, Homo sapien
tcttgggctttaaaccgacttgatataaaaact

SEQ ID NO: 233035 - DNA, 33 bp, Homo sapien
tcccaagatcagtcacaaatttctgtgagctat

SEQ ID NO: 233036 - DNA, 33 bp, Homo sapien
tcccaagatcagtcacgaatttctgtgagctat

SEQ ID NO: 233037 - DNA, 33 bp, Homo sapien
gagaacagcacagtccactcttcttttgctttg

SEQ ID NO: 233038 - DNA, 33 bp, Homo sapien
gagaacagcacagtccgctcttcttttgctttg

SEQ ID NO: 233039 - DNA, 33 bp, Homo sapien
ttcccccactgtgttaagagcttagtgaaaagt

SEQ ID NO: 233040 - DNA, 33 bp, Homo sapien
ttcccccactgtgttatgagcttagtgaaaagt

SEQ ID NO: 233041 - DNA, 33 bp, Homo sapien
aatgaagttacaatacaatacagttaaagaaat

SEQ ID NO: 233042 - DNA, 33 bp, Homo sapien
aatgaagttacaataccatacagttaaagaaat

SEQ ID NO: 233043 - DNA, 33 bp, Homo sapien
cttgtgagatgtaacccctttttcttctacagc

SEQ ID NO: 233044 - DNA, 33 bp, Homo sapien
cttgtgagatgtaacctctttttcttctacagc

SEQ ID NO: 233045 - DNA, 33 bp, Homo sapien
gctatactctaaagaacggggaggcttaagttt

SEQ ID NO: 233046 - DNA, 33 bp, Homo sapien
gctatactctaaagaatggggaggcttaagttt

SEQ ID NO: 233047 - DNA, 33 bp, Homo sapien
atttttctgtagaaaggagaaagaaattgcatg

SEQ ID NO: 233048 - DNA, 33 bp, Homo sapien
atttttctgtagaaagtagaaagaaattgcatg

SEQ ID NO: 233049 - DNA, 33 bp, Homo sapien
ttccagaactgaaacacagtccttcaaggaacc

SEQ ID NO: 233050 - DNA, 33 bp, Homo sapien
ttccagaactgaaacatagtccttcaaggaacc

SEQ ID NO: 233051 - DNA, 33 bp, Homo sapien
tgccctttccattccccgagacttagatgttct

SEQ ID NO: 233052 - DNA, 33 bp, Homo sapien
tgccctttccattccctgagacttagatgttct

SEQ ID NO: 233053 - DNA, 33 bp, Homo sapien
tttaatcctcacaaaaccctctaatattgtatg

SEQ ID NO: 233054 - DNA, 33 bp, Homo sapien
tttaatcctcacaaaatcctctaatattgtatg

SEQ ID NO: 233055 - DNA, 33 bp, Homo sapien
attgattccagccttacgagggactctatctca

SEQ ID NO: 233056 - DNA, 33 bp, Homo sapien
attgattccagccttatgagggactctatctca

SEQ ID NO: 233057 - DNA, 33 bp, Homo sapien
agaatgatggctgagcacaatccagaatgaagt

SEQ ID NO: 233058 - DNA, 33 bp, Homo sapien
agaatgatggctgagcgcaatccagaatgaagt

SEQ ID NO: 233059 - DNA, 33 bp, Homo sapien
cactagtgaatacttaccaatgtcttacaagca

SEQ ID NO: 233060 - DNA, 33 bp, Homo sapien
cactagtgaatacttatcaatgtcttacaagca

SEQ ID NO: 233061 - DNA, 33 bp, Homo sapien
gctgtagggaaatctaggtggaaattctgtttt

SEQ ID NO: 233062 - DNA, 33 bp, Homo sapien
gctgtagggaaatctatgtggaaattctgtttt

SEQ ID NO: 233063 - DNA, 33 bp, Homo sapien
gcttacagtattgttacatgagtcatttcatta

SEQ ID NO: 233064 - DNA, 33 bp, Homo sapien
gcttacagtattgttatatgagtcatttcatta

SEQ ID NO: 233065 - DNA, 33 bp, Homo sapien
attccacacatgaaaaattcatcatactttgaa

SEQ ID NO: 233066 - DNA, 33 bp, Homo sapien
attccacacatgaaaagttcatcatactttgaa

SEQ ID NO: 233067 - DNA, 33 bp, Homo sapien
tatctaccattattaaagttttcatgggtaaga

SEQ ID NO: 233068 - DNA, 33 bp, Homo sapien
tatctaccattattaacgttttcatgggtaaga

SEQ ID NO: 233069 - DNA, 33 bp, Homo sapien
agtggactacaaagacgataaagagagagttcc

SEQ ID NO: 233070 - DNA, 33 bp, Homo sapien
agtggactacaaagactataaagagagagttcc

SEQ ID NO: 233071 - DNA, 33 bp, Homo sapien
tcactgcacaagaagactccttgcagtgttaag

SEQ ID NO: 233072 - DNA, 33 bp, Homo sapien
tcactgcacaagaagattccttgcagtgttaag

SEQ ID NO: 233073 - DNA, 33 bp, Homo sapien
ttatgtgtggccaaagactaaaggatggctaag

SEQ ID NO: 233074 - DNA, 33 bp, Homo sapien
ttatgtgtggccaaaggctaaaggatggctaag

SEQ ID NO: 233075 - DNA, 33 bp, Homo sapien
ttttaatctgtatggcaaaaggtctgaaagcat

SEQ ID NO: 233076 - DNA, 33 bp, Homo sapien
ttttaatctgtatggcgaaaggtctgaaagcat

SEQ ID NO: 233077 - DNA, 33 bp, Homo sapien
caggacttgagaatagaataaaatgaagactga

SEQ ID NO: 233078 - DNA, 33 bp, Homo sapien
caggacttgagaataggataaaatgaagactga

SEQ ID NO: 233079 - DNA, 33 bp, Homo sapien
tcaacaaaagggaataccagaaagcgaataact

SEQ ID NO: 233080 - DNA, 33 bp, Homo sapien
tcaacaaaagggaatagcagaaagcgaataact

SEQ ID NO: 233081 - DNA, 33 bp, Homo sapien
attcataattgcccaaagttgagaacttcaaca

SEQ ID NO: 233082 - DNA, 33 bp, Homo sapien
attcataattgcccaaggttgagaacttcaaca

SEQ ID NO: 233083 - DNA, 33 bp, Homo sapien
tacctatacaaagaaacgctactcagtaatata

SEQ ID NO: 233084 - DNA, 33 bp, Homo sapien
tacctatacaaagaaatgctactcagtaatata

SEQ ID NO: 233085 - DNA, 33 bp, Homo sapien
gtaaggagtcaaatgcacacgatacacaaataa

SEQ ID NO: 233086 - DNA, 33 bp, Homo sapien
gtaaggagtcaaatgcgcacgatacacaaataa

SEQ ID NO: 233087 - DNA, 33 bp, Homo sapien
ggcaactcaattaaaaagtttgcccttacctca

SEQ ID NO: 233088 - DNA, 33 bp, Homo sapien
ggcaactcaattaaaaggtttgcccttacctca

SEQ ID NO: 233089 - DNA, 33 bp, Homo sapien
tgagtctttgatattgaaaatgtccttttatag

SEQ ID NO: 233090 - DNA, 33 bp, Homo sapien
tgagtctttgatattgcaaatgtccttttatag

SEQ ID NO: 233091 - DNA, 33 bp, Homo sapien
caggactcctctatccaatctgataaagtcaga

SEQ ID NO: 233092 - DNA, 33 bp, Homo sapien
caggactcctctatccgatctgataaagtcaga

SEQ ID NO: 233093 - DNA, 33 bp, Homo sapien
agcctttttactggccgcagggaaaaatgatca

SEQ ID NO: 233094 - DNA, 33 bp, Homo sapien
agcctttttactggcctcagggaaaaatgatca

SEQ ID NO: 233095 - DNA, 33 bp, Homo sapien
taagcttgtaatgcaaacaggtccaagggttca

SEQ ID NO: 233096 - DNA, 33 bp, Homo sapien
taagcttgtaatgcaagcaggtccaagggttca

SEQ ID NO: 233097 - DNA, 33 bp, Homo sapien
gcaagactcaaagaataaaaacgtgaagattaa

SEQ ID NO: 233098 - DNA, 33 bp, Homo sapien
gcaagactcaaagaatgaaaacgtgaagattaa

SEQ ID NO: 233099 - DNA, 33 bp, Homo sapien
cactctcagaaatttgaatttaatttgtcatag

SEQ ID NO: 233100 - DNA, 33 bp, Homo sapien
cactctcagaaatttgcatttaatttgtcatag

SEQ ID NO: 233101 - DNA, 33 bp, Homo sapien
ctaatgagacattgttcaaaggattattatatt

SEQ ID NO: 233102 - DNA, 33 bp, Homo sapien
ctaatgagacattgttgaaaggattattatatt

SEQ ID NO: 233103 - DNA, 33 bp, Homo sapien
taaaataagctagcaaaaatgaatgaattatag

SEQ ID NO: 233104 - DNA, 33 bp, Homo sapien
taaaataagctagcaacaatgaatgaattatag

SEQ ID NO: 233105 - DNA, 33 bp, Homo sapien
ttggtacagtcttcgcagagtgaggaaaagaat

SEQ ID NO: 233106 - DNA, 33 bp, Homo sapien
ttggtacagtcttcgccgagtgaggaaaagaat

SEQ ID NO: 233107 - DNA, 33 bp, Homo sapien
aacagttgatcagatacagcagttagagaaaga

SEQ ID NO: 233108 - DNA, 33 bp, Homo sapien
aacagttgatcagatatagcagttagagaaaga

SEQ ID NO: 233109 - DNA, 33 bp, Homo sapien
atgtaaaatgatagcactctggaaaggttctct

SEQ ID NO: 233110 - DNA, 33 bp, Homo sapien
atgtaaaatgatagcattctggaaaggttctct

SEQ ID NO: 233111 - DNA, 33 bp, Homo sapien
cttaaggttgcataatcagaagaattcttttgg

SEQ ID NO: 233112 - DNA, 33 bp, Homo sapien
cttaaggttgcataatgagaagaattcttttgg

SEQ ID NO: 233113 - DNA, 33 bp, Homo sapien
accaaattctgccatacgcaccgattacgttta

SEQ ID NO: 233114 - DNA, 33 bp, Homo sapien
accaaattctgccatatgcaccgattacgttta

SEQ ID NO: 233115 - DNA, 33 bp, Homo sapien
cgtagtgttgatcgaacgtaaagatagctaaag

SEQ ID NO: 233116 - DNA, 33 bp, Homo sapien
cgtagtgttgatcgaatgtaaagatagctaaag

SEQ ID NO: 233117 - DNA, 33 bp, Homo sapien
ctccttcaccagcaaaaagccctgggaagaaca

SEQ ID NO: 233118 - DNA, 33 bp, Homo sapien
ctccttcaccagcaaagagccctgggaagaaca

SEQ ID NO: 233119 - DNA, 33 bp, Homo sapien
gcacagtcctaatacaccatatatgcttgggtg

SEQ ID NO: 233120 - DNA, 33 bp, Homo sapien
gcacagtcctaatacatcatatatgcttgggtg

SEQ ID NO: 233121 - DNA, 33 bp, Homo sapien
caattttccaatttagaaaaaggccagagaaga

SEQ ID NO: 233122 - DNA, 33 bp, Homo sapien
caattttccaatttaggaaaaggccagagaaga

SEQ ID NO: 233123 - DNA, 33 bp, Homo sapien
caaaaagctgtgaaaagtgttgtgttctcaatg

SEQ ID NO: 233124 - DNA, 33 bp, Homo sapien
caaaaagctgtgaaaattgttgtgttctcaatg

SEQ ID NO: 233125 - DNA, 33 bp, Homo sapien
gttcccagggatgccaaattctcctctctttat

SEQ ID NO: 233126 - DNA, 33 bp, Homo sapien
gttcccagggatgccacattctcctctctttat

SEQ ID NO: 233127 - DNA, 33 bp, Homo sapien
atctcattaaacccaaaaaaacaggccagtaat

SEQ ID NO: 233128 - DNA, 33 bp, Homo sapien
atctcattaaacccaacaaaacaggccagtaat

SEQ ID NO: 233129 - DNA, 33 bp, Homo sapien
caaaataattgcaaataaaaatgagttgtatgt

SEQ ID NO: 233130 - DNA, 33 bp, Homo sapien
caaaataattgcaaatgaaaatgagttgtatgt

SEQ ID NO: 233131 - DNA, 33 bp, Homo sapien
aaccaagtaacccacacaaagtgcttacaaata

SEQ ID NO: 233132 - DNA, 33 bp, Homo sapien
aaccaagtaacccacagaaagtgcttacaaata

SEQ ID NO: 233133 - DNA, 33 bp, Homo sapien
ctcatcagtgtgttcccattgcattttttcttt

SEQ ID NO: 233134 - DNA, 33 bp, Homo sapien
ctcatcagtgtgttcctattgcattttttcttt

SEQ ID NO: 233135 - DNA, 33 bp, Homo sapien
aggcttttattaggtacgaagatgagtgtcaca

SEQ ID NO: 233136 - DNA, 33 bp, Homo sapien
aggcttttattaggtatgaagatgagtgtcaca

SEQ ID NO: 233137 - DNA, 33 bp, Homo sapien
tttactaatatttgaccctgaccctgaatgatc

SEQ ID NO: 233138 - DNA, 33 bp, Homo sapien
tttactaatatttgactctgaccctgaatgatc

SEQ ID NO: 233139 - DNA, 33 bp, Homo sapien
atcacggcttaaaccacctctttaatcattcac

SEQ ID NO: 233140 - DNA, 33 bp, Homo sapien
atcacggcttaaaccatctctttaatcattcac

SEQ ID NO: 233141 - DNA, 33 bp, Homo sapien
tgtacaattctctccccgcattgcctgagtgta

SEQ ID NO: 233142 - DNA, 33 bp, Homo sapien
tgtacaattctctccctgcattgcctgagtgta

SEQ ID NO: 233143 - DNA, 33 bp, Homo sapien
acagactaatacaggtcacatcctgatgttgga

SEQ ID NO: 233144 - DNA, 33 bp, Homo sapien
acagactaatacaggtgacatcctgatgttgga

SEQ ID NO: 233145 - DNA, 33 bp, Homo sapien
gggtatgtctttatcaacaatgagagaacagac

SEQ ID NO: 233146 - DNA, 33 bp, Homo sapien
gggtatgtctttatcagcaatgagagaacagac

SEQ ID NO: 233147 - DNA, 33 bp, Homo sapien
gatgggatttaatcgaaggcaagatctttagcc

SEQ ID NO: 233148 - DNA, 33 bp, Homo sapien
gatgggatttaatcgatggcaagatctttagcc

SEQ ID NO: 233149 - DNA, 33 bp, Homo sapien
tttcctgaacccaacaatgcaatatttgaaaat

SEQ ID NO: 233150 - DNA, 33 bp, Homo sapien
tttcctgaacccaacactgcaatatttgaaaat

SEQ ID NO: 233151 - DNA, 33 bp, Homo sapien
aacacaggatgtaaaacttgatcatgctatgaa

SEQ ID NO: 233152 - DNA, 33 bp, Homo sapien
aacacaggatgtaaaatttgatcatgctatgaa

SEQ ID NO: 233153 - DNA, 33 bp, Homo sapien
acagatttgtatcttaagtccactttatttagt

SEQ ID NO: 233154 - DNA, 33 bp, Homo sapien
acagatttgtatcttaggtccactttatttagt

SEQ ID NO: 233155 - DNA, 33 bp, Homo sapien
agccttggtcttagaacgtctgcctctgtctag

SEQ ID NO: 233156 - DNA, 33 bp, Homo sapien
agccttggtcttagaatgtctgcctctgtctag

SEQ ID NO: 233157 - DNA, 33 bp, Homo sapien
gatgcaccttcttagaaattctgtcttagcctc

SEQ ID NO: 233158 - DNA, 33 bp, Homo sapien
gatgcaccttcttagagattctgtcttagcctc

SEQ ID NO: 233159 - DNA, 33 bp, Homo sapien
gaaggtgcatccttacaaaggtgaaatcccaaa

SEQ ID NO: 233160 - DNA, 33 bp, Homo sapien
gaaggtgcatccttacgaaggtgaaatcccaaa

SEQ ID NO: 233161 - DNA, 33 bp, Homo sapien
ccaaagaagattgcctaaagtctgaatacagtt

SEQ ID NO: 233162 - DNA, 33 bp, Homo sapien
ccaaagaagattgcctgaagtctgaatacagtt

SEQ ID NO: 233163 - DNA, 33 bp, Homo sapien
attgagttgtgctacaataactgacatgatgca

SEQ ID NO: 233164 - DNA, 33 bp, Homo sapien
attgagttgtgctacagtaactgacatgatgca

SEQ ID NO: 233165 - DNA, 33 bp, Homo sapien
tcaaaaagtatatgtacctgtgtgtaatattag

SEQ ID NO: 233166 - DNA, 33 bp, Homo sapien
tcaaaaagtatatgtatctgtgtgtaatattag

SEQ ID NO: 233167 - DNA, 33 bp, Homo sapien
agccttcagaggattgaatgaggccaacacaca

SEQ ID NO: 233168 - DNA, 33 bp, Homo sapien
agccttcagaggattggatgaggccaacacaca

SEQ ID NO: 233169 - DNA, 33 bp, Homo sapien
gcttcactgacaacacactctctggtttctcct

SEQ ID NO: 233170 - DNA, 33 bp, Homo sapien
gcttcactgacaacactctctctggtttctcct

SEQ ID NO: 233171 - DNA, 33 bp, Homo sapien
tgttaatggtggttaaggtgaaggtgctaagag

SEQ ID NO: 233172 - DNA, 33 bp, Homo sapien
tgttaatggtggttaatgtgaaggtgctaagag

SEQ ID NO: 233173 - DNA, 33 bp, Homo sapien
tatggctggaacagaaagtaagatgatcaggta

SEQ ID NO: 233174 - DNA, 33 bp, Homo sapien
tatggctggaacagaaggtaagatgatcaggta

SEQ ID NO: 233175 - DNA, 33 bp, Homo sapien
gcagttaattgcatgcacagatgggtacttgtg

SEQ ID NO: 233176 - DNA, 33 bp, Homo sapien
gcagttaattgcatgcgcagatgggtacttgtg

SEQ ID NO: 233177 - DNA, 33 bp, Homo sapien
cagtgacacaacttaacggaggctcagatcctg

SEQ ID NO: 233178 - DNA, 33 bp, Homo sapien
cagtgacacaacttaatggaggctcagatcctg

SEQ ID NO: 233179 - DNA, 33 bp, Homo sapien
aagcaactgcaaaagacgaggaacggactttat

SEQ ID NO: 233180 - DNA, 33 bp, Homo sapien
aagcaactgcaaaagatgaggaacggactttat

SEQ ID NO: 233181 - DNA, 33 bp, Homo sapien
cttgcaatctgagataatacatgttctttgtgg

SEQ ID NO: 233182 - DNA, 33 bp, Homo sapien
cttgcaatctgagatagtacatgttctttgtgg

SEQ ID NO: 233183 - DNA, 33 bp, Homo sapien
gacattactggatgacacatgtagtcgaagaag

SEQ ID NO: 233184 - DNA, 33 bp, Homo sapien
gacattactggatgacgcatgtagtcgaagaag

SEQ ID NO: 233185 - DNA, 33 bp, Homo sapien
ggttttactggtctcacaggacgccacggactg

SEQ ID NO: 233186 - DNA, 33 bp, Homo sapien
ggttttactggtctcataggacgccacggactg

SEQ ID NO: 233187 - DNA, 33 bp, Homo sapien
agagtagttgtgatgactaaatgcattaatagt

SEQ ID NO: 233188 - DNA, 33 bp, Homo sapien
agagtagttgtgatgattaaatgcattaatagt

SEQ ID NO: 233189 - DNA, 33 bp, Homo sapien
agtcttatcaaagatgaagagtttgcataaata

SEQ ID NO: 233190 - DNA, 33 bp, Homo sapien
agtcttatcaaagatggagagtttgcataaata

SEQ ID NO: 233191 - DNA, 33 bp, Homo sapien
ggggagggtcagcctgcagttgggggtcatgaa

SEQ ID NO: 233192 - DNA, 33 bp, Homo sapien
ggggagggtcagcctggagttgggggtcatgaa

SEQ ID NO: 233193 - DNA, 33 bp, Homo sapien
ggaaagtattaaataacgtagagagagtcacta

SEQ ID NO: 233194 - DNA, 33 bp, Homo sapien
ggaaagtattaaataatgtagagagagtcacta

SEQ ID NO: 233195 - DNA, 33 bp, Homo sapien
aatgctatacacgggaggtacaaatgcaggaca

SEQ ID NO: 233196 - DNA, 33 bp, Homo sapien
aatgctatacacgggatgtacaaatgcaggaca

SEQ ID NO: 233197 - DNA, 33 bp, Homo sapien
taagtaaagatttcagacaacctgctcttaatg

SEQ ID NO: 233198 - DNA, 33 bp, Homo sapien
taagtaaagatttcaggcaacctgctcttaatg

SEQ ID NO: 233199 - DNA, 33 bp, Homo sapien
ctcctgaactttagccacctctcagaaaatcct

SEQ ID NO: 233200 - DNA, 33 bp, Homo sapien
ctcctgaactttagccgcctctcagaaaatcct

SEQ ID NO: 233201 - DNA, 33 bp, Homo sapien
attgacaagaatttgcacataaatgtacctgca

SEQ ID NO: 233202 - DNA, 33 bp, Homo sapien
attgacaagaatttgcgcataaatgtacctgca

SEQ ID NO: 233203 - DNA, 33 bp, Homo sapien
gttgtccaggctgcaaagcagtcgctcttcaca

SEQ ID NO: 233204 - DNA, 33 bp, Homo sapien
gttgtccaggctgcaaggcagtcgctcttcaca

SEQ ID NO: 233205 - DNA, 33 bp, Homo sapien
ttattgaaacctcaaaactttctatagctttgg

SEQ ID NO: 233206 - DNA, 33 bp, Homo sapien
ttattgaaacctcaaacctttctatagctttgg

SEQ ID NO: 233207 - DNA, 33 bp, Homo sapien
ctgtcccactgccttacggtttattgaaacctc

SEQ ID NO: 233208 - DNA, 33 bp, Homo sapien
ctgtcccactgccttatggtttattgaaacctc

SEQ ID NO: 233209 - DNA, 33 bp, Homo sapien
gcataagattgcatgacggcaaacatcgttgct

SEQ ID NO: 233210 - DNA, 33 bp, Homo sapien
gcataagattgcatgatggcaaacatcgttgct

SEQ ID NO: 233211 - DNA, 33 bp, Homo sapien
caataactattttgaaggttgagggaatgaatc

SEQ ID NO: 233212 - DNA, 33 bp, Homo sapien
caataactattttgaatgttgagggaatgaatc

SEQ ID NO: 233213 - DNA, 33 bp, Homo sapien
agtgagtgctgtgttacgatgcagataggaaat

SEQ ID NO: 233214 - DNA, 33 bp, Homo sapien
agtgagtgctgtgttatgatgcagataggaaat

SEQ ID NO: 233215 - DNA, 33 bp, Homo sapien
ttcgcttttgtgatcacgaagtcatatgtgtaa

SEQ ID NO: 233216 - DNA, 33 bp, Homo sapien
ttcgcttttgtgatcatgaagtcatatgtgtaa

SEQ ID NO: 233217 - DNA, 33 bp, Homo sapien
tgatcatagcaactaccgaacactgaatttgta

SEQ ID NO: 233218 - DNA, 33 bp, Homo sapien
tgatcatagcaactactgaacactgaatttgta

SEQ ID NO: 233219 - DNA, 33 bp, Homo sapien
agtatttcctaccacaaagggttatcataatga

SEQ ID NO: 233220 - DNA, 33 bp, Homo sapien
agtatttcctaccacatagggttatcataatga

SEQ ID NO: 233221 - DNA, 33 bp, Homo sapien
ttctcggtgcatcatagtaagttattgtgtcca

SEQ ID NO: 233222 - DNA, 33 bp, Homo sapien
ttctcggtgcatcatattaagttattgtgtcca

SEQ ID NO: 233223 - DNA, 33 bp, Homo sapien
tttgtttccatatctaagtgttgctactcatta

SEQ ID NO: 233224 - DNA, 33 bp, Homo sapien
tttgtttccatatctaggtgttgctactcatta

SEQ ID NO: 233225 - DNA, 33 bp, Homo sapien
ggttggtcaagaaaaacaagtggcaatggtgag

SEQ ID NO: 233226 - DNA, 33 bp, Homo sapien
ggttggtcaagaaaaagaagtggcaatggtgag

SEQ ID NO: 233227 - DNA, 33 bp, Homo sapien
taaattccttaacctcactgagttcagattcct

SEQ ID NO: 233228 - DNA, 33 bp, Homo sapien
taaattccttaacctctctgagttcagattcct

SEQ ID NO: 233229 - DNA, 33 bp, Homo sapien
attttagctgaatctcaatctgaagcaaatgtc

SEQ ID NO: 233230 - DNA, 33 bp, Homo sapien
attttagctgaatctctatctgaagcaaatgtc

SEQ ID NO: 233231 - DNA, 33 bp, Homo sapien
agggcagcagcgattgcagagccaggtatagtg

SEQ ID NO: 233232 - DNA, 33 bp, Homo sapien
agggcagcagcgattgtagagccaggtatagtg

SEQ ID NO: 233233 - DNA, 33 bp, Homo sapien
ccagggaaattggaaccgccccattcctggagt

SEQ ID NO: 233234 - DNA, 33 bp, Homo sapien
ccagggaaattggaactgccccattcctggagt

SEQ ID NO: 233235 - DNA, 33 bp, Homo sapien
tgccagggaagcagaccggggagagattttgag

SEQ ID NO: 233236 - DNA, 33 bp, Homo sapien
tgccagggaagcagactggggagagattttgag

SEQ ID NO: 233237 - DNA, 33 bp, Homo sapien
ctagaaagctggccaaacataatccggtgggac

SEQ ID NO: 233238 - DNA, 33 bp, Homo sapien
ctagaaagctggccaagcataatccggtgggac

SEQ ID NO: 233239 - DNA, 33 bp, Homo sapien
aagtcttgataccaagcagatgctcaacatagg

SEQ ID NO: 233240 - DNA, 33 bp, Homo sapien
aagtcttgataccaagtagatgctcaacatagg

SEQ ID NO: 233241 - DNA, 33 bp, Homo sapien
cctgtgtttaaagacactacccaaagacactac

SEQ ID NO: 233242 - DNA, 33 bp, Homo sapien
cctgtgtttaaagacagtacccaaagacactac

SEQ ID NO: 233243 - DNA, 33 bp, Homo sapien
tccttgttcctggataagtggataaaaataatg

SEQ ID NO: 233244 - DNA, 33 bp, Homo sapien
tccttgttcctggatatgtggataaaaataatg

SEQ ID NO: 233245 - DNA, 33 bp, Homo sapien
ccagagcaaagaaatacgtgacaagggttgtgg

SEQ ID NO: 233246 - DNA, 33 bp, Homo sapien
ccagagcaaagaaatatgtgacaagggttgtgg

SEQ ID NO: 233247 - DNA, 33 bp, Homo sapien
aaggaggggagcatagacatatcaggaaaaagg

SEQ ID NO: 233248 - DNA, 33 bp, Homo sapien
aaggaggggagcataggcatatcaggaaaaagg

SEQ ID NO: 233249 - DNA, 33 bp, Homo sapien
caagggtccaaaaaaacagactggtacttataa

SEQ ID NO: 233250 - DNA, 33 bp, Homo sapien
caagggtccaaaaaaatagactggtacttataa

SEQ ID NO: 233251 - DNA, 33 bp, Homo sapien
tggattgctctcatgaccttttgtcctattttc

SEQ ID NO: 233252 - DNA, 33 bp, Homo sapien
tggattgctctcatgatcttttgtcctattttc

SEQ ID NO: 233253 - DNA, 33 bp, Homo sapien
agacagaatgcataagacactcatctgtttttt

SEQ ID NO: 233254 - DNA, 33 bp, Homo sapien
agacagaatgcataagtcactcatctgtttttt

SEQ ID NO: 233255 - DNA, 33 bp, Homo sapien
tctgagttgatatgaaggaacactaaagcaagg

SEQ ID NO: 233256 - DNA, 33 bp, Homo sapien
tctgagttgatatgaatgaacactaaagcaagg

SEQ ID NO: 233257 - DNA, 33 bp, Homo sapien
aaatgcattacacttacgaactatatctctatt

SEQ ID NO: 233258 - DNA, 33 bp, Homo sapien
aaatgcattacacttatgaactatatctctatt

SEQ ID NO: 233259 - DNA, 33 bp, Homo sapien
tctatgtttctgcaaaaatcatgagctcatttt

SEQ ID NO: 233260 - DNA, 33 bp, Homo sapien
tctatgtttctgcaaagatcatgagctcatttt

SEQ ID NO: 233261 - DNA, 33 bp, Homo sapien
gccagtgtaaatcctacagacgtcaatatgaga

SEQ ID NO: 233262 - DNA, 33 bp, Homo sapien
gccagtgtaaatcctatagacgtcaatatgaga

SEQ ID NO: 233263 - DNA, 33 bp, Homo sapien
gtggttatggagctacagctttaaatatgaagc

SEQ ID NO: 233264 - DNA, 33 bp, Homo sapien
gtggttatggagctacggctttaaatatgaagc

SEQ ID NO: 233265 - DNA, 33 bp, Homo sapien
gcctaagattagaacacgtcttcctgtgcaatt

SEQ ID NO: 233266 - DNA, 33 bp, Homo sapien
gcctaagattagaacatgtcttcctgtgcaatt

SEQ ID NO: 233267 - DNA, 33 bp, Homo sapien
aacattaatttgggaaagtgtgattatcagttt

SEQ ID NO: 233268 - DNA, 33 bp, Homo sapien
aacattaatttgggaaggtgtgattatcagttt

SEQ ID NO: 233269 - DNA, 33 bp, Homo sapien
aatagcgctttagtgaacatcattgtatgtatc

SEQ ID NO: 233270 - DNA, 33 bp, Homo sapien
aatagcgctttagtgatcatcattgtatgtatc

SEQ ID NO: 233271 - DNA, 33 bp, Homo sapien
aggatactgataatctcagaaccaaggatttct

SEQ ID NO: 233272 - DNA, 33 bp, Homo sapien
aggatactgataatcttagaaccaaggatttct

SEQ ID NO: 233273 - DNA, 33 bp, Homo sapien
ctggtcttagaggagaaggacaacattatgtac

SEQ ID NO: 233274 - DNA, 33 bp, Homo sapien
ctggtcttagaggagagggacaacattatgtac

SEQ ID NO: 233275 - DNA, 33 bp, Homo sapien
accacagacaatataaccaagcccagcaaagaa

SEQ ID NO: 233276 - DNA, 33 bp, Homo sapien
accacagacaatataagcaagcccagcaaagaa

SEQ ID NO: 233277 - DNA, 33 bp, Homo sapien
acacacacacaatggcagatgctttgtctatat

SEQ ID NO: 233278 - DNA, 33 bp, Homo sapien
acacacacacaatggcggatgctttgtctatat

SEQ ID NO: 233279 - DNA, 33 bp, Homo sapien
gtcattcaaccattccaaatcttacaaagcctg

SEQ ID NO: 233280 - DNA, 33 bp, Homo sapien
gtcattcaaccattccgaatcttacaaagcctg

SEQ ID NO: 233281 - DNA, 33 bp, Homo sapien
gaggccgaagtgagagaattggttgaggccagg

SEQ ID NO: 233282 - DNA, 33 bp, Homo sapien
gaggccgaagtgagaggattggttgaggccagg

SEQ ID NO: 233283 - DNA, 33 bp, Homo sapien
aactgttccaccacagaatcttgggttgcctca

SEQ ID NO: 233284 - DNA, 33 bp, Homo sapien
aactgttccaccacaggatcttgggttgcctca

SEQ ID NO: 233285 - DNA, 33 bp, Homo sapien
tgtgtccatgaaatagaatagagtcacccggaa

SEQ ID NO: 233286 - DNA, 33 bp, Homo sapien
tgtgtccatgaaataggatagagtcacccggaa

SEQ ID NO: 233287 - DNA, 33 bp, Homo sapien
ttttggtgcagttcaaagacggtggaacagatt

SEQ ID NO: 233288 - DNA, 33 bp, Homo sapien
ttttggtgcagttcaaggacggtggaacagatt

SEQ ID NO: 233289 - DNA, 33 bp, Homo sapien
gatttcatcaaccagactagaaatcagggttat

SEQ ID NO: 233290 - DNA, 33 bp, Homo sapien
gatttcatcaaccagagtagaaatcagggttat

SEQ ID NO: 233291 - DNA, 33 bp, Homo sapien
aaggacaagaatcaaccaaagacctgtaaatgt

SEQ ID NO: 233292 - DNA, 33 bp, Homo sapien
aaggacaagaatcaacgaaagacctgtaaatgt

SEQ ID NO: 233293 - DNA, 33 bp, Homo sapien
acagggaagaagaccaagtgaagaaaaggtgga

SEQ ID NO: 233294 - DNA, 33 bp, Homo sapien
acagggaagaagaccacgtgaagaaaaggtgga

SEQ ID NO: 233295 - DNA, 33 bp, Homo sapien
tacattaagattagcaacctaactttacacctc

SEQ ID NO: 233296 - DNA, 33 bp, Homo sapien
tacattaagattagcagcctaactttacacctc

SEQ ID NO: 233297 - DNA, 33 bp, Homo sapien
catctaacggttctccactgaagtctcatctac

SEQ ID NO: 233298 - DNA, 33 bp, Homo sapien
catctaacggttctccgctgaagtctcatctac

SEQ ID NO: 233299 - DNA, 33 bp, Homo sapien
gtcaccatgaatattcacgttcagctagcagat

SEQ ID NO: 233300 - DNA, 33 bp, Homo sapien
gtcaccatgaatattcgcgttcagctagcagat

SEQ ID NO: 233301 - DNA, 33 bp, Homo sapien
tccatcacaaccaagacgcaaaacagtttcaat

SEQ ID NO: 233302 - DNA, 33 bp, Homo sapien
tccatcacaaccaagatgcaaaacagtttcaat

SEQ ID NO: 233303 - DNA, 33 bp, Homo sapien
gtacaggtacaaaataatattggtaaactgaat

SEQ ID NO: 233304 - DNA, 33 bp, Homo sapien
gtacaggtacaaaatagtattggtaaactgaat

SEQ ID NO: 233305 - DNA, 33 bp, Homo sapien
agttgcctatatgaagacctagaaggtaaggtc

SEQ ID NO: 233306 - DNA, 33 bp, Homo sapien
agttgcctatatgaagtcctagaaggtaaggtc

SEQ ID NO: 233307 - DNA, 33 bp, Homo sapien
acaggactcacattcccgcataaaaactgtcta

SEQ ID NO: 233308 - DNA, 33 bp, Homo sapien
acaggactcacattcctgcataaaaactgtcta

SEQ ID NO: 233309 - DNA, 33 bp, Homo sapien
ctattggtctgagtaacaatgctgctctttaga

SEQ ID NO: 233310 - DNA, 33 bp, Homo sapien
ctattggtctgagtaataatgctgctctttaga

SEQ ID NO: 233311 - DNA, 33 bp, Homo sapien
cttagctctaggaaaagagtgacagtatcatga

SEQ ID NO: 233312 - DNA, 33 bp, Homo sapien
cttagctctaggaaaatagtgacagtatcatga

SEQ ID NO: 233313 - DNA, 33 bp, Homo sapien
atgattggtcttaacacagcatctcccaaacat

SEQ ID NO: 233314 - DNA, 33 bp, Homo sapien
atgattggtcttaacatagcatctcccaaacat

SEQ ID NO: 233315 - DNA, 33 bp, Homo sapien
taactaggttgcctccacagtcatctaagtagc

SEQ ID NO: 233316 - DNA, 33 bp, Homo sapien
taactaggttgcctccgcagtcatctaagtagc

SEQ ID NO: 233317 - DNA, 33 bp, Homo sapien
taagatatgctatcgccacaaaaaattaaaaaa

SEQ ID NO: 233318 - DNA, 33 bp, Homo sapien
taagatatgctatcgcgacaaaaaattaaaaaa

SEQ ID NO: 233319 - DNA, 33 bp, Homo sapien
ggaagtggagggagcacgaggagctgctaaaat

SEQ ID NO: 233320 - DNA, 33 bp, Homo sapien
ggaagtggagggagcatgaggagctgctaaaat

SEQ ID NO: 233321 - DNA, 33 bp, Homo sapien
ctctgatctcttaggacaaaaagtgcccaaaga

SEQ ID NO: 233322 - DNA, 33 bp, Homo sapien
ctctgatctcttaggataaaaagtgcccaaaga

SEQ ID NO: 233323 - DNA, 33 bp, Homo sapien
cttttcacttgtgttcacttctctactttggga

SEQ ID NO: 233324 - DNA, 33 bp, Homo sapien
cttttcacttgtgttcccttctctactttggga

SEQ ID NO: 233325 - DNA, 33 bp, Homo sapien
cacatgagtaatgtgaagcaaacacagctcact

SEQ ID NO: 233326 - DNA, 33 bp, Homo sapien
cacatgagtaatgtgaggcaaacacagctcact

SEQ ID NO: 233327 - DNA, 33 bp, Homo sapien
cttgtagctttctttagagattgtggctaagac

SEQ ID NO: 233328 - DNA, 33 bp, Homo sapien
cttgtagctttctttatagattgtggctaagac

SEQ ID NO: 233329 - DNA, 33 bp, Homo sapien
tcccaggttggtcttaaggtctgacagatgata

SEQ ID NO: 233330 - DNA, 33 bp, Homo sapien
tcccaggttggtcttacggtctgacagatgata

SEQ ID NO: 233331 - DNA, 33 bp, Homo sapien
aaattctttcaaaagacagcaagtatgagaaag

SEQ ID NO: 233332 - DNA, 33 bp, Homo sapien
aaattctttcaaaagatagcaagtatgagaaag

SEQ ID NO: 233333 - DNA, 33 bp, Homo sapien
tctcctttaagccaaaattcacaagccatatct

SEQ ID NO: 233334 - DNA, 33 bp, Homo sapien
tctcctttaagccaaacttcacaagccatatct

SEQ ID NO: 233335 - DNA, 33 bp, Homo sapien
cacaacttcactgacaatgctattaccatgtgc

SEQ ID NO: 233336 - DNA, 33 bp, Homo sapien
cacaacttcactgacagtgctattaccatgtgc

SEQ ID NO: 233337 - DNA, 33 bp, Homo sapien
tctttgtcttatctgtcaatgggaacatggctg

SEQ ID NO: 233338 - DNA, 33 bp, Homo sapien
tctttgtcttatctgtgaatgggaacatggctg

SEQ ID NO: 233339 - DNA, 33 bp, Homo sapien
ctcacccttatgaggacgcttatcactggattt

SEQ ID NO: 233340 - DNA, 33 bp, Homo sapien
ctcacccttatgaggatgcttatcactggattt

SEQ ID NO: 233341 - DNA, 33 bp, Homo sapien
tattgaccatttctaacaaggaagagtgagtca

SEQ ID NO: 233342 - DNA, 33 bp, Homo sapien
tattgaccatttctaataaggaagagtgagtca

SEQ ID NO: 233343 - DNA, 33 bp, Homo sapien
tgcctttcaaaagaatcagtcacgtagggaaaa

SEQ ID NO: 233344 - DNA, 33 bp, Homo sapien
tgcctttcaaaagaatgagtcacgtagggaaaa

SEQ ID NO: 233345 - DNA, 33 bp, Homo sapien
agaagtgcttgttgaacaaaacagtgttatctt

SEQ ID NO: 233346 - DNA, 33 bp, Homo sapien
agaagtgcttgttgaataaaacagtgttatctt

SEQ ID NO: 233347 - DNA, 33 bp, Homo sapien
gctttgacaacacttacgctcataggcttagaa

SEQ ID NO: 233348 - DNA, 33 bp, Homo sapien
gctttgacaacacttatgctcataggcttagaa

SEQ ID NO: 233349 - DNA, 33 bp, Homo sapien
tctagggtgaccgaagaactagaactgctaatc

SEQ ID NO: 233350 - DNA, 33 bp, Homo sapien
tctagggtgaccgaaggactagaactgctaatc

SEQ ID NO: 233351 - DNA, 33 bp, Homo sapien
atagtatatggctcacaataaacagtttagtaa

SEQ ID NO: 233352 - DNA, 33 bp, Homo sapien
atagtatatggctcacgataaacagtttagtaa

SEQ ID NO: 233353 - DNA, 33 bp, Homo sapien
gcaacgattgcaacaaaagcagaattgtatgga

SEQ ID NO: 233354 - DNA, 33 bp, Homo sapien
gcaacgattgcaacaacagcagaattgtatgga

SEQ ID NO: 233355 - DNA, 33 bp, Homo sapien
taccaactcagcggcaatatctacttactggaa

SEQ ID NO: 233356 - DNA, 33 bp, Homo sapien
taccaactcagcggcagtatctacttactggaa

SEQ ID NO: 233357 - DNA, 33 bp, Homo sapien
aattagaaaacactgacgtaaatggtatctttc

SEQ ID NO: 233358 - DNA, 33 bp, Homo sapien
aattagaaaacactgatgtaaatggtatctttc

SEQ ID NO: 233359 - DNA, 33 bp, Homo sapien
gtcataagagtctctgaaatctgctaaatgccc

SEQ ID NO: 233360 - DNA, 33 bp, Homo sapien
gtcataagagtctctggaatctgctaaatgccc

SEQ ID NO: 233361 - DNA, 33 bp, Homo sapien
agatgcagcacataaaccaaaatgggagcagat

SEQ ID NO: 233362 - DNA, 33 bp, Homo sapien
agatgcagcacataaatcaaaatgggagcagat

SEQ ID NO: 233363 - DNA, 33 bp, Homo sapien
ataaagcaaacatggacagatatgaagaaagaa

SEQ ID NO: 233364 - DNA, 33 bp, Homo sapien
ataaagcaaacatggagagatatgaagaaagaa

SEQ ID NO: 233365 - DNA, 33 bp, Homo sapien
ctttatcacaaaggaacgaaacagtaagtaatc

SEQ ID NO: 233366 - DNA, 33 bp, Homo sapien
ctttatcacaaaggaatgaaacagtaagtaatc

SEQ ID NO: 233367 - DNA, 33 bp, Homo sapien
gagtacagtagcacgaccataactcatgcaacc

SEQ ID NO: 233368 - DNA, 33 bp, Homo sapien
gagtacagtagcacgatcataactcatgcaacc

SEQ ID NO: 233369 - DNA, 33 bp, Homo sapien
atactgcttaatccaagatctttttttgtgtgt

SEQ ID NO: 233370 - DNA, 33 bp, Homo sapien
atactgcttaatccaatatctttttttgtgtgt

SEQ ID NO: 233371 - DNA, 33 bp, Homo sapien
gtgggtcctgttgttgcataacccaaagtctgt

SEQ ID NO: 233372 - DNA, 33 bp, Homo sapien
gtgggtcctgttgttggataacccaaagtctgt

SEQ ID NO: 233373 - DNA, 33 bp, Homo sapien
tgtggtattagtgataacatctttctaacaata

SEQ ID NO: 233374 - DNA, 33 bp, Homo sapien
tgtggtattagtgatagcatctttctaacaata

SEQ ID NO: 233375 - DNA, 33 bp, Homo sapien
tatatattagaagatagtaagtgctataggaaa

SEQ ID NO: 233376 - DNA, 33 bp, Homo sapien
tatatattagaagatattaagtgctataggaaa

SEQ ID NO: 233377 - DNA, 33 bp, Homo sapien
ggttaacatcgcgtgtaaatagcacaattgtat

SEQ ID NO: 233378 - DNA, 33 bp, Homo sapien
ggttaacatcgcgtgtgaatagcacaattgtat

SEQ ID NO: 233379 - DNA, 33 bp, Homo sapien
gatataaaaatgcccaatcctaacacactactg

SEQ ID NO: 233380 - DNA, 33 bp, Homo sapien
gatataaaaatgcccagtcctaacacactactg

SEQ ID NO: 233381 - DNA, 33 bp, Homo sapien
ttatcattccattttaaggatatggatgcattt

SEQ ID NO: 233382 - DNA, 33 bp, Homo sapien
ttatcattccattttagggatatggatgcattt

SEQ ID NO: 233383 - DNA, 33 bp, Homo sapien
ataatagtaatacatacagcattgctttggaag

SEQ ID NO: 233384 - DNA, 33 bp, Homo sapien
ataatagtaatacatatagcattgctttggaag

SEQ ID NO: 233385 - DNA, 33 bp, Homo sapien
tgactactatagtgtacattagttcagactagc

SEQ ID NO: 233386 - DNA, 33 bp, Homo sapien
tgactactatagtgtagattagttcagactagc

SEQ ID NO: 233387 - DNA, 33 bp, Homo sapien
agtgggatagcttgcacggcacacctctaatcc

SEQ ID NO: 233388 - DNA, 33 bp, Homo sapien
agtgggatagcttgcatggcacacctctaatcc

SEQ ID NO: 233389 - DNA, 33 bp, Homo sapien
tgttttctgtatgtccagaatctagaacagtgc

SEQ ID NO: 233390 - DNA, 33 bp, Homo sapien
tgttttctgtatgtccggaatctagaacagtgc

SEQ ID NO: 233391 - DNA, 33 bp, Homo sapien
gttgtgcatattttctaacagtttatgtcttgc

SEQ ID NO: 233392 - DNA, 33 bp, Homo sapien
gttgtgcatattttcttacagtttatgtcttgc

SEQ ID NO: 233393 - DNA, 33 bp, Homo sapien
gatgttaggccttccacagtggtttaatagatg

SEQ ID NO: 233394 - DNA, 33 bp, Homo sapien
gatgttaggccttccatagtggtttaatagatg

SEQ ID NO: 233395 - DNA, 33 bp, Homo sapien
caaagtagaaaacccaactaaggtgtatctgga

SEQ ID NO: 233396 - DNA, 33 bp, Homo sapien
caaagtagaaaacccagctaaggtgtatctgga

SEQ ID NO: 233397 - DNA, 33 bp, Homo sapien
taacaaattaacacaaattgaacacattaaaat

SEQ ID NO: 233398 - DNA, 33 bp, Homo sapien
taacaaattaacacaagttgaacacattaaaat

SEQ ID NO: 233399 - DNA, 33 bp, Homo sapien
tttaaagcccccaaaagatcaaaggtcagagta

SEQ ID NO: 233400 - DNA, 33 bp, Homo sapien
tttaaagcccccaaaatatcaaaggtcagagta

SEQ ID NO: 233401 - DNA, 33 bp, Homo sapien
ctagttgttttacttcacagaattatcagataa

SEQ ID NO: 233402 - DNA, 33 bp, Homo sapien
ctagttgttttacttcgcagaattatcagataa

SEQ ID NO: 233403 - DNA, 33 bp, Homo sapien
aatctccaactcaccccacaagtgtttacatca

SEQ ID NO: 233404 - DNA, 33 bp, Homo sapien
aatctccaactcacccgacaagtgtttacatca

SEQ ID NO: 233405 - DNA, 33 bp, Homo sapien
cagtgttcaactgataccctgaaatctttgcaa

SEQ ID NO: 233406 - DNA, 33 bp, Homo sapien
cagtgttcaactgatatcctgaaatctttgcaa

SEQ ID NO: 233407 - DNA, 33 bp, Homo sapien
cagtgcattagcaacaaaaaacgctggtccaac

SEQ ID NO: 233408 - DNA, 33 bp, Homo sapien
cagtgcattagcaacacaaaacgctggtccaac

SEQ ID NO: 233409 - DNA, 33 bp, Homo sapien
atgcatccatgtaaccactccaaacaagatata

SEQ ID NO: 233410 - DNA, 33 bp, Homo sapien
atgcatccatgtaaccgctccaaacaagatata

SEQ ID NO: 233411 - DNA, 33 bp, Homo sapien
atgttagcaaaaataactctttgggcctctctc

SEQ ID NO: 233412 - DNA, 33 bp, Homo sapien
atgttagcaaaaataattctttgggcctctctc

SEQ ID NO: 233413 - DNA, 33 bp, Homo sapien
ctgccattaaatgaaaagttctttgaaagcaga

SEQ ID NO: 233414 - DNA, 33 bp, Homo sapien
ctgccattaaatgaaatgttctttgaaagcaga

SEQ ID NO: 233415 - DNA, 33 bp, Homo sapien
atatcttctttcctgccagaagtaatccttgga

SEQ ID NO: 233416 - DNA, 33 bp, Homo sapien
atatcttctttcctgctagaagtaatccttgga

SEQ ID NO: 233417 - DNA, 33 bp, Homo sapien
tacaggatcagcttcaaaaagttgtttctgtta

SEQ ID NO: 233418 - DNA, 33 bp, Homo sapien
tacaggatcagcttcataaagttgtttctgtta

SEQ ID NO: 233419 - DNA, 33 bp, Homo sapien
ctggaatgctccccccaaactattacgtgagga

SEQ ID NO: 233420 - DNA, 33 bp, Homo sapien
ctggaatgctccccccgaactattacgtgagga

SEQ ID NO: 233421 - DNA, 33 bp, Homo sapien
tatcactggcacccccaaaaaaatctcagatca

SEQ ID NO: 233422 - DNA, 33 bp, Homo sapien
tatcactggcaccccccaaaaaatctcagatca

SEQ ID NO: 233423 - DNA, 33 bp, Homo sapien
ctttataacttcaccaaaggaattaacctctag

SEQ ID NO: 233424 - DNA, 33 bp, Homo sapien
ctttataacttcaccacaggaattaacctctag

SEQ ID NO: 233425 - DNA, 33 bp, Homo sapien
gtgggacagattccaacaccaacttgaggaaag

SEQ ID NO: 233426 - DNA, 33 bp, Homo sapien
gtgggacagattccaataccaacttgaggaaag

SEQ ID NO: 233427 - DNA, 33 bp, Homo sapien
ttattaagttccaggccctactatgtactaagc

SEQ ID NO: 233428 - DNA, 33 bp, Homo sapien
ttattaagttccaggctctactatgtactaagc

SEQ ID NO: 233429 - DNA, 33 bp, Homo sapien
ttgtcaccactactagaaattaattgcaaagaa

SEQ ID NO: 233430 - DNA, 33 bp, Homo sapien
ttgtcaccactactaggaattaattgcaaagaa

SEQ ID NO: 233431 - DNA, 33 bp, Homo sapien
gcaaaggctctaaagcacagaaataatttgggg

SEQ ID NO: 233432 - DNA, 33 bp, Homo sapien
gcaaaggctctaaagcgcagaaataatttgggg

SEQ ID NO: 233433 - DNA, 33 bp, Homo sapien
gccaggtgcccttctagatgctagggatatcgc

SEQ ID NO: 233434 - DNA, 33 bp, Homo sapien
gccaggtgcccttctatatgctagggatatcgc

SEQ ID NO: 233435 - DNA, 33 bp, Homo sapien
tagatacctgtgtagacgtccaagatcacgttt

SEQ ID NO: 233436 - DNA, 33 bp, Homo sapien
tagatacctgtgtagatgtccaagatcacgttt

SEQ ID NO: 233437 - DNA, 33 bp, Homo sapien
caagggtcaggtccaactgttgctcatagctca

SEQ ID NO: 233438 - DNA, 33 bp, Homo sapien
caagggtcaggtccaattgttgctcatagctca

SEQ ID NO: 233439 - DNA, 33 bp, Homo sapien; identical to SEQ ID NO: 233437

SEQ ID NO: 233440 - DNA, 33 bp, Homo sapien; identical to SEQ ID NO: 233438

SEQ ID NO: 233441 - DNA, 33 bp, Homo sapien; identical to SEQ ID NO: 233437

SEQ ID NO: 233442 - DNA, 33 bp, Homo sapien; identical to SEQ ID NO: 233438

SEQ ID NO: 233443 - DNA, 33 bp, Homo sapien
aaaacagtcctttaagaagaaatctctgaatta

SEQ ID NO: 233444 - DNA, 33 bp, Homo sapien
aaaacagtcctttaaggagaaatctctgaatta

SEQ ID NO: 233445 - DNA, 33 bp, Homo sapien
tccaatagtactcaccacgtgacaatctacatg

SEQ ID NO: 233446 - DNA, 33 bp, Homo sapien
tccaatagtactcaccgcgtgacaatctacatg

SEQ ID NO: 233447 - DNA, 33 bp, Homo sapien; identical to SEQ ID NO: 233445

SEQ ID NO: 233448 - DNA, 33 bp, Homo sapien; identical to SEQ ID NO: 233446

SEQ ID NO: 233449 - DNA, 33 bp, Homo sapien
ggagtgtgcatggtgaaggatagttcttgggca

SEQ ID NO: 233450 - DNA, 33 bp, Homo sapien
ggagtgtgcatggtgagggatagttcttgggca

SEQ ID NO: 233451 - DNA, 33 bp, Homo sapien
ggctcaagggcactgcagaacattcaagcaaaa

SEQ ID NO: 233452 - DNA, 33 bp, Homo sapien
ggctcaagggcactgcggaacattcaagcaaaa

SEQ ID NO: 233453 - DNA, 33 bp, Homo sapien
aaaatgcagctaacagcaagttccgattttata

SEQ ID NO: 233454 - DNA, 33 bp, Homo sapien
aaaatgcagctaacagtaagttccgattttata

SEQ ID NO: 233455 - DNA, 33 bp, Homo sapien
aaaagatggcctgataacactttggcctcttcc

SEQ ID NO: 233456 - DNA, 33 bp, Homo sapien
aaaagatggcctgatagcactttggcctcttcc

SEQ ID NO: 233457 - DNA, 33 bp, Homo sapien
tgaattgtcatcttcaactaagccaaccagaga

SEQ ID NO: 233458 - DNA, 33 bp, Homo sapien
tgaattgtcatcttcagctaagccaaccagaga

SEQ ID NO: 233459 - DNA, 33 bp, Homo sapien
tggtttgttatactaacgatcttctctatgttg

SEQ ID NO: 233460 - DNA, 33 bp, Homo sapien
tggtttgttatactaaggatcttctctatgttg

SEQ ID NO: 233461 - DNA, 33 bp, Homo sapien
ggttttatgcctcacagggtctgtattacacaa

SEQ ID NO: 233462 - DNA, 33 bp, Homo sapien
ggttttatgcctcacatggtctgtattacacaa

SEQ ID NO: 233463 - DNA, 33 bp, Homo sapien
catcaattatgaaaacaattacaacatcaggaa

SEQ ID NO: 233464 - DNA, 33 bp, Homo sapien
catcaattatgaaaacgattacaacatcaggaa

SEQ ID NO: 233465 - DNA, 33 bp, Homo sapien
atagggaagatcgttacgtgctaaaatacagct

SEQ ID NO: 233466 - DNA, 33 bp, Homo sapien
atagggaagatcgttatgtgctaaaatacagct

SEQ ID NO: 233467 - DNA, 33 bp, Homo sapien
atggttaacacatcaccgtacatccatactgtg

SEQ ID NO: 233468 - DNA, 33 bp, Homo sapien
atggttaacacatcacggtacatccatactgtg

SEQ ID NO: 233469 - DNA, 33 bp, Homo sapien
taggcctattcaagcagatttaccttttatcag

SEQ ID NO: 233470 - DNA, 33 bp, Homo sapien
taggcctattcaagcatatttaccttttatcag

SEQ ID NO: 233471 - DNA, 33 bp, Homo sapien
tgaactgattatcctccatgcctgaaatgtgtg

SEQ ID NO: 233472 - DNA, 33 bp, Homo sapien
tgaactgattatcctctatgcctgaaatgtgtg

SEQ ID NO: 233473 - DNA, 33 bp, Homo sapien
caaatcatttgtttccactgttgttgctttaca

SEQ ID NO: 233474 - DNA, 33 bp, Homo sapien
caaatcatttgtttcccctgttgttgctttaca

SEQ ID NO: 233475 - DNA, 33 bp, Homo sapien
tattacctcttaaataactgacctaaatggtca

SEQ ID NO: 233476 - DNA, 33 bp, Homo sapien
tattacctcttaaatacctgacctaaatggtca

SEQ ID NO: 233477 - DNA, 33 bp, Homo sapien
atggagtgatcaaataaatatagacttaactca

SEQ ID NO: 233478 - DNA, 33 bp, Homo sapien
atggagtgatcaaatagatatagacttaactca

SEQ ID NO: 233479 - DNA, 33 bp, Homo sapien
ctttcaactactcctccagtcatctaactattt

SEQ ID NO: 233480 - DNA, 33 bp, Homo sapien
ctttcaactactcctctagtcatctaactattt

SEQ ID NO: 233481 - DNA, 33 bp, Homo sapien
gaacacttacttagcacgagtatttacagcctt

SEQ ID NO: 233482 - DNA, 33 bp, Homo sapien
gaacacttacttagcatgagtatttacagcctt

SEQ ID NO: 233483 - DNA, 33 bp, Homo sapien
atggactttaacaaccagaccagtacagaaatg

SEQ ID NO: 233484 - DNA, 33 bp, Homo sapien
atggactttaacaaccggaccagtacagaaatg

SEQ ID NO: 233485 - DNA, 33 bp, Homo sapien
taaacgttagcaggtaaggacattaaaacagtt

SEQ ID NO: 233486 - DNA, 33 bp, Homo sapien
taaacgttagcaggtagggacattaaaacagtt

SEQ ID NO: 233487 - DNA, 33 bp, Homo sapien
ggattatacagaacaccaccccaccatgcacgt

SEQ ID NO: 233488 - DNA, 33 bp, Homo sapien
ggattatacagaacactaccccaccatgcacgt

SEQ ID NO: 233489 - DNA, 33 bp, Homo sapien
gatttgtatttacttcaatttcacagcaccttg

SEQ ID NO: 233490 - DNA, 33 bp, Homo sapien
gatttgtatttacttccatttcacagcaccttg

SEQ ID NO: 233491 - DNA, 33 bp, Homo sapien
ctcatcagagccgtatcataatcaagagctgac

SEQ ID NO: 233492 - DNA, 33 bp, Homo sapien
ctcatcagagccgtatgataatcaagagctgac

SEQ ID NO: 233493 - DNA, 33 bp, Homo sapien
ctggctcacacctgaagagcgtttcctagacct

SEQ ID NO: 233494 - DNA, 33 bp, Homo sapien
ctggctcacacctgaatagcgtttcctagacct

SEQ ID NO: 233495 - DNA, 33 bp, Homo sapien
gctgtcctctactctacaccaacattcttgctg

SEQ ID NO: 233496 - DNA, 33 bp, Homo sapien
gctgtcctctactctataccaacattcttgctg

SEQ ID NO: 233497 - DNA, 33 bp, Homo sapien
tcctgtaacactacaagactgtgtttttgctgt

SEQ ID NO: 233498 - DNA, 33 bp, Homo sapien
tcctgtaacactacaatactgtgtttttgctgt

SEQ ID NO: 233499 - DNA, 33 bp, Homo sapien
aactagtggaggaaaaccttaagaaacagttaa

SEQ ID NO: 233500 - DNA, 33 bp, Homo sapien
aactagtggaggaaaatcttaagaaacagttaa

SEQ ID NO: 233501 - DNA, 33 bp, Homo sapien
acatggatccggaaagcactagggatgaggaaa

SEQ ID NO: 233502 - DNA, 33 bp, Homo sapien
acatggatccggaaagtactagggatgaggaaa

SEQ ID NO: 233503 - DNA, 33 bp, Homo sapien
ctgccactttgactgacatcccagatgatagcc

SEQ ID NO: 233504 - DNA, 33 bp, Homo sapien
ctgccactttgactgagatcccagatgatagcc

SEQ ID NO: 233505 - DNA, 33 bp, Homo sapien
attctttctttctgtcaagttggatcaccagag

SEQ ID NO: 233506 - DNA, 33 bp, Homo sapien
attctttctttctgtccagttggatcaccagag

SEQ ID NO: 233507 - DNA, 33 bp, Homo sapien
tttcatattgaaaaaactgttctggtgacatag

SEQ ID NO: 233508 - DNA, 33 bp, Homo sapien
tttcatattgaaaaaattgttctggtgacatag

SEQ ID NO: 233509 - DNA, 33 bp, Homo sapien
tgtgtgtatgtgttcaaactaaacaaattgtat

SEQ ID NO: 233510 - DNA, 33 bp, Homo sapien
tgtgtgtatgtgttcagactaaacaaattgtat

SEQ ID NO: 233511 - DNA, 33 bp, Homo sapien
cattgttccattttgccagacattgtattatct

SEQ ID NO: 233512 - DNA, 33 bp, Homo sapien
cattgttccattttgctagacattgtattatct

SEQ ID NO: 233513 - DNA, 33 bp, Homo sapien
ctactgatcttggtgacggtccaagatcattca

SEQ ID NO: 233514 - DNA, 33 bp, Homo sapien
ctactgatcttggtgatggtccaagatcattca

SEQ ID NO: 233515 - DNA, 33 bp, Homo sapien
tgggtcctctacatagccatcaaaataattctt

SEQ ID NO: 233516 - DNA, 33 bp, Homo sapien
tgggtcctctacataggcatcaaaataattctt

SEQ ID NO: 233517 - DNA, 33 bp, Homo sapien
gtactggttttgaatcaccatgcgtttcctgct

SEQ ID NO: 233518 - DNA, 33 bp, Homo sapien
gtactggttttgaatcgccatgcgtttcctgct

SEQ ID NO: 233519 - DNA, 33 bp, Homo sapien
ctaataagaaaagtgaagtttggacagacaaag

SEQ ID NO: 233520 - DNA, 33 bp, Homo sapien
ctaataagaaaagtgaggtttggacagacaaag

SEQ ID NO: 233521 - DNA, 33 bp, Homo sapien
ctgttgttcaagttagaaggaccttagccaatt

SEQ ID NO: 233522 - DNA, 33 bp, Homo sapien
ctgttgttcaagttaggaggaccttagccaatt

SEQ ID NO: 233523 - DNA, 33 bp, Homo sapien
cctatgtttttgcctacgagttttacagttcca

SEQ ID NO: 233524 - DNA, 33 bp, Homo sapien
cctatgtttttgcctatgagttttacagttcca

SEQ ID NO: 233525 - DNA, 33 bp, Homo sapien
ccaagcactaatcacacatattcagttcaaggc

SEQ ID NO: 233526 - DNA, 33 bp, Homo sapien
ccaagcactaatcacatatattcagttcaaggc

SEQ ID NO: 233527 - DNA, 33 bp, Homo sapien
tgacttacttctcctaaccttcttgttccaaga

SEQ ID NO: 233528 - DNA, 33 bp, Homo sapien
tgacttacttctcctatccttcttgttccaaga

SEQ ID NO: 233529 - DNA, 33 bp, Homo sapien
ttggagaatacctagcaatctctgccaagggtc

SEQ ID NO: 233530 - DNA, 33 bp, Homo sapien
ttggagaatacctagcgatctctgccaagggtc

SEQ ID NO: 233531 - DNA, 33 bp, Homo sapien
accttttgtccaactcaatcttaaaaagttgtc

SEQ ID NO: 233532 - DNA, 33 bp, Homo sapien
accttttgtccaactcgatcttaaaaagttgtc

SEQ ID NO: 233533 - DNA, 33 bp, Homo sapien
tgccctgcattaaacaataatttaaccacaaag

SEQ ID NO: 233534 - DNA, 33 bp, Homo sapien
tgccctgcattaaacagtaatttaaccacaaag

SEQ ID NO: 233535 - DNA, 33 bp, Homo sapien
cgaagtagagaaatgaaaagagattttagcaat

SEQ ID NO: 233536 - DNA, 33 bp, Homo sapien
cgaagtagagaaatgacaagagattttagcaat

SEQ ID NO: 233537 - DNA, 33 bp, Homo sapien
accctgctggtaggaaagaagaggagaaagaca

SEQ ID NO: 233538 - DNA, 33 bp, Homo sapien
accctgctggtaggaacgaagaggagaaagaca

SEQ ID NO: 233539 - DNA, 33 bp, Homo sapien
tagacaatactgtctaacctttcgtgaagttcc

SEQ ID NO: 233540 - DNA, 33 bp, Homo sapien
tagacaatactgtctatcctttcgtgaagttcc

SEQ ID NO: 233541 - DNA, 33 bp, Homo sapien
ggattttaggtataaccaatgtcatgccaaaag

SEQ ID NO: 233542 - DNA, 33 bp, Homo sapien
ggattttaggtataacgaatgtcatgccaaaag

SEQ ID NO: 233543 - DNA, 33 bp, Homo sapien
tcttgagacctgtgaaatggaactttttagtgc

SEQ ID NO: 233544 - DNA, 33 bp, Homo sapien
tcttgagacctgtgaagtggaactttttagtgc

SEQ ID NO: 233545 - DNA, 33 bp, Homo sapien
cagtgttaaatctacacggcactggaatctgga

SEQ ID NO: 233546 - DNA, 33 bp, Homo sapien
cagtgttaaatctacatggcactggaatctgga

SEQ ID NO: 233547 - DNA, 33 bp, Homo sapien
gaagctgtttcactgacgactgtcttttggggt

SEQ ID NO: 233548 - DNA, 33 bp, Homo sapien
gaagctgtttcactgatgactgtcttttggggt

SEQ ID NO: 233549 - DNA, 33 bp, Homo sapien
cagacataaacaagaacgaatatcatagcatag

SEQ ID NO: 233550 - DNA, 33 bp, Homo sapien
cagacataaacaagaatgaatatcatagcatag

SEQ ID NO: 233551 - DNA, 33 bp, Homo sapien
tgctgtctgtcaacaaacttaactggagtaatg

SEQ ID NO: 233552 - DNA, 33 bp, Homo sapien
tgctgtctgtcaacaagcttaactggagtaatg

SEQ ID NO: 233553 - DNA, 33 bp, Homo sapien
ctagagagctctctaacgtcattctccagagca

SEQ ID NO: 233554 - DNA, 33 bp, Homo sapien
ctagagagctctctaatgtcattctccagagca

SEQ ID NO: 233555 - DNA, 33 bp, Homo sapien
cacaggctcatttttaagtgtagaatttcagaa

SEQ ID NO: 233556 - DNA, 33 bp, Homo sapien
cacaggctcatttttaggtgtagaatttcagaa

SEQ ID NO: 233557 - DNA, 33 bp, Homo sapien
ctggggagttctagggaagccatcagaggagtc

SEQ ID NO: 233558 - DNA, 33 bp, Homo sapien
ctggggagttctagggcagccatcagaggagtc

SEQ ID NO: 233559 - DNA, 33 bp, Homo sapien
cgaaagggttctgccaatgcataatagtgttat

SEQ ID NO: 233560 - DNA, 33 bp, Homo sapien
cgaaagggttctgccagtgcataatagtgttat

SEQ ID NO: 233561 - DNA, 33 bp, Homo sapien
cagtttctgctctcaacgcgtatatagttctct

SEQ ID NO: 233562 - DNA, 33 bp, Homo sapien
cagtttctgctctcaatgcgtatatagttctct

SEQ ID NO: 233563 - DNA, 33 bp, Homo sapien
atttctttcttataacacttgttcactgcagaa

SEQ ID NO: 233564 - DNA, 33 bp, Homo sapien
atttctttcttataacccttgttcactgcagaa

SEQ ID NO: 233565 - DNA, 33 bp, Homo sapien
ccacctgttaactgacggctaaaacaatgcctt

SEQ ID NO: 233566 - DNA, 33 bp, Homo sapien
ccacctgttaactgactgctaaaacaatgcctt

SEQ ID NO: 233567 - DNA, 33 bp, Homo sapien
caataaacatagaaaaccaggtacctttttgat

SEQ ID NO: 233568 - DNA, 33 bp, Homo sapien
caataaacatagaaaagcaggtacctttttgat

SEQ ID NO: 233569 - DNA, 33 bp, Homo sapien
ttaatttctggtctgacatttatattttacttt

SEQ ID NO: 233570 - DNA, 33 bp, Homo sapien
ttaatttctggtctgatatttatattttacttt

SEQ ID NO: 233571 - DNA, 33 bp, Homo sapien
taaaaggaaacagagacgcaatggagaagacag

SEQ ID NO: 233572 - DNA, 33 bp, Homo sapien
taaaaggaaacagagatgcaatggagaagacag

SEQ ID NO: 233573 - DNA, 33 bp, Homo sapien
gcaagccatgccaaaacttgctggattcaaacc

SEQ ID NO: 233574 - DNA, 33 bp, Homo sapien
gcaagccatgccaaaagttgctggattcaaacc

SEQ ID NO: 233575 - DNA, 33 bp, Homo sapien
caccccagatacaatcacatgaagcagaggaaa

SEQ ID NO: 233576 - DNA, 33 bp, Homo sapien
caccccagatacaatcgcatgaagcagaggaaa

SEQ ID NO: 233577 - DNA, 33 bp, Homo sapien
atcaacatttttctcaacttataatgccatctc

SEQ ID NO: 233578 - DNA, 33 bp, Homo sapien
atcaacatttttctcatcttataatgccatctc

SEQ ID NO: 233579 - DNA, 33 bp, Homo sapien
gcttttcctagagcaactaaacagctgaacaaa

SEQ ID NO: 233580 - DNA, 33 bp, Homo sapien
gcttttcctagagcaattaaacagctgaacaaa

SEQ ID NO: 233581 - DNA, 33 bp, Homo sapien
tccatccccaaaggacagcatagtatttatacc

SEQ ID NO: 233582 - DNA, 33 bp, Homo sapien
tccatccccaaaggacggcatagtatttatacc

SEQ ID NO: 233583 - DNA, 33 bp, Homo sapien
tctgaggacagacatacggcctcctcaagtggg

SEQ ID NO: 233584 - DNA, 33 bp, Homo sapien
tctgaggacagacatatggcctcctcaagtggg

SEQ ID NO: 233585 - DNA, 33 bp, Homo sapien
tatgttgtcaggattacggcaaatagttgtgca

SEQ ID NO: 233586 - DNA, 33 bp, Homo sapien
tatgttgtcaggattatggcaaatagttgtgca

SEQ ID NO: 233587 - DNA, 33 bp, Homo sapien
gtgtcagtagatattcaataagctagaaacatc

SEQ ID NO: 233588 - DNA, 33 bp, Homo sapien
gtgtcagtagatattcgataagctagaaacatc

SEQ ID NO: 233589 - DNA, 33 bp, Homo sapien
ctatatcacttcattccactaagattattcaag

SEQ ID NO: 233590 - DNA, 33 bp, Homo sapien
ctatatcacttcattctactaagattattcaag

SEQ ID NO: 233591 - DNA, 33 bp, Homo sapien
cacattgttcagagagacaaacagttctatgag

SEQ ID NO: 233592 - DNA, 33 bp, Homo sapien
cacattgttcagagagtcaaacagttctatgag

SEQ ID NO: 233593 - DNA, 33 bp, Homo sapien
attaacttaggaaatcaaattgcggtgtaatag

SEQ ID NO: 233594 - DNA, 33 bp, Homo sapien
attaacttaggaaatccaattgcggtgtaatag

SEQ ID NO: 233595 - DNA, 33 bp, Homo sapien
taacagcttagaggacagatgatggtgtcagat

SEQ ID NO: 233596 - DNA, 33 bp, Homo sapien
taacagcttagaggaccgatgatggtgtcagat

SEQ ID NO: 233597 - DNA, 33 bp, Homo sapien
gaacacacacctttgaatatagtctgtacttta

SEQ ID NO: 233598 - DNA, 33 bp, Homo sapien
gaacacacacctttgattatagtctgtacttta

SEQ ID NO: 233599 - DNA, 33 bp, Homo sapien
ccagatcaatgatacccagattataggaaggca

SEQ ID NO: 233600 - DNA, 33 bp, Homo sapien
ccagatcaatgatacctagattataggaaggca

SEQ ID NO: 233601 - DNA, 33 bp, Homo sapien
tgacgtctctcctctgaattgattgtaatgcct

SEQ ID NO: 233602 - DNA, 33 bp, Homo sapien
tgacgtctctcctctggattgattgtaatgcct

SEQ ID NO: 233603 - DNA, 33 bp, Homo sapien
caaggtcatgtaatgaataagtggcagggctga

SEQ ID NO: 233604 - DNA, 33 bp, Homo sapien
caaggtcatgtaatgagtaagtggcagggctga

SEQ ID NO: 233605 - DNA, 33 bp, Homo sapien
agtagcagtaagaaaacaataagtgggcagagc

SEQ ID NO: 233606 - DNA, 33 bp, Homo sapien
agtagcagtaagaaaagaataagtgggcagagc

SEQ ID NO: 233607 - DNA, 33 bp, Homo sapien
catctctttgttcatcactgaattctctctagt

SEQ ID NO: 233608 - DNA, 33 bp, Homo sapien
catctctttgttcatccctgaattctctctagt

SEQ ID NO: 233609 - DNA, 33 bp, Homo sapien
atttcctgttacttggccattttctaaggaatt

SEQ ID NO: 233610 - DNA, 33 bp, Homo sapien
atttcctgttacttggtcattttctaaggaatt

SEQ ID NO: 233611 - DNA, 33 bp, Homo sapien
tttgccctgaggaaaaggaataagaagcattat

SEQ ID NO: 233612 - DNA, 33 bp, Homo sapien
tttgccctgaggaaaatgaataagaagcattat

SEQ ID NO: 233613 - DNA, 33 bp, Homo sapien
cccctttcagtactgacacaatcttgcagcata

SEQ ID NO: 233614 - DNA, 33 bp, Homo sapien
cccctttcagtactgatacaatcttgcagcata

SEQ ID NO: 233615 - DNA, 33 bp, Homo sapien
catcttgtaaactaaaagtgctggcagaggaaa

SEQ ID NO: 233616 - DNA, 33 bp, Homo sapien
catcttgtaaactaaatgtgctggcagaggaaa

SEQ ID NO: 233617 - DNA, 33 bp, Homo sapien
gatgagggacaaactggactgttaacgtttcaa

SEQ ID NO: 233618 - DNA, 33 bp, Homo sapien
gatgagggacaaactgtactgttaacgtttcaa

SEQ ID NO: 233619 - DNA, 33 bp, Homo sapien
aggagctggtagaaggaagggtactttgcaatt

SEQ ID NO: 233620 - DNA, 33 bp, Homo sapien
aggagctggtagaaggtagggtactttgcaatt

SEQ ID NO: 233621 - DNA, 33 bp, Homo sapien
aaactaacacatttgtaaagtcttggtttttat

SEQ ID NO: 233622 - DNA, 33 bp, Homo sapien
aaactaacacatttgtcaagtcttggtttttat

SEQ ID NO: 233623 - DNA, 33 bp, Homo sapien
aaaacttccaaacttaggaatatgttaccttaa

SEQ ID NO: 233624 - DNA, 33 bp, Homo sapien
aaaacttccaaacttatgaatatgttaccttaa

SEQ ID NO: 233625 - DNA, 33 bp, Homo sapien
attgacaaaggaaaccagatggggatcaaaata

SEQ ID NO: 233626 - DNA, 33 bp, Homo sapien
attgacaaaggaaaccggatggggatcaaaata

SEQ ID NO: 233627 - DNA, 33 bp, Homo sapien
ccattcttgacatttaaaagatccatagctttt

SEQ ID NO: 233628 - DNA, 33 bp, Homo sapien
ccattcttgacatttagaagatccatagctttt

SEQ ID NO: 233629 - DNA, 33 bp, Homo sapien
caacatagcatgggacagctacaaaaacagaca

SEQ ID NO: 233630 - DNA, 33 bp, Homo sapien
caacatagcatgggacggctacaaaaacagaca

SEQ ID NO: 233631 - DNA, 33 bp, Homo sapien
tccatatccaccacagaatcaaatgaaactgta

SEQ ID NO: 233632 - DNA, 33 bp, Homo sapien
tccatatccaccacagcatcaaatgaaactgta

SEQ ID NO: 233633 - DNA, 33 bp, Homo sapien
aacatctgatagtgaccaagtctgctaaaatat

SEQ ID NO: 233634 - DNA, 33 bp, Homo sapien
aacatctgatagtgacgaagtctgctaaaatat

SEQ ID NO: 233635 - DNA, 33 bp, Homo sapien
ataaagagagttaaagcatattttagcagactt

SEQ ID NO: 233636 - DNA, 33 bp, Homo sapien
ataaagagagttaaagtatattttagcagactt

SEQ ID NO: 233637 - DNA, 33 bp, Homo sapien
ttatggtaggaaacagccatactgagtggcaga

SEQ ID NO: 233638 - DNA, 33 bp, Homo sapien
ttatggtaggaaacaggcatactgagtggcaga

SEQ ID NO: 233639 - DNA, 33 bp, Homo sapien
tagaaaccacacaaagacttacttactcttccc

SEQ ID NO: 233640 - DNA, 33 bp, Homo sapien
tagaaaccacacaaagccttacttactcttccc

SEQ ID NO: 233641 - DNA, 33 bp, Homo sapien
ataaagtggattggccaaaggacctcgaaatcc

SEQ ID NO: 233642 - DNA, 33 bp, Homo sapien
ataaagtggattggccgaaggacctcgaaatcc

SEQ ID NO: 233643 - DNA, 33 bp, Homo sapien
caagtgttttgttcacacacctcaagagaggag

SEQ ID NO: 233644 - DNA, 33 bp, Homo sapien
caagtgttttgttcacgcacctcaagagaggag

SEQ ID NO: 233645 - DNA, 33 bp, Homo sapien
aactattacaggaatacgagtttgagatgttat

SEQ ID NO: 233646 - DNA, 33 bp, Homo sapien
aactattacaggaatatgagtttgagatgttat

SEQ ID NO: 233647 - DNA, 33 bp, Homo sapien
ttgaccaagaaaacataaataggcacctgttac

SEQ ID NO: 233648 - DNA, 33 bp, Homo sapien
ttgaccaagaaaacattaataggcacctgttac

SEQ ID NO: 233649 - DNA, 33 bp, Homo sapien
gctcccctaaacataccatgcccactcttatgg

SEQ ID NO: 233650 - DNA, 33 bp, Homo sapien
gctcccctaaacatacgatgcccactcttatgg

SEQ ID NO: 233651 - DNA, 33 bp, Homo sapien
tctcttttctttggaaaatgtggtttctcaata

SEQ ID NO: 233652 - DNA, 33 bp, Homo sapien
tctcttttctttggaatatgtggtttctcaata

SEQ ID NO: 233653 - DNA, 33 bp, Homo sapien
aagaaaaagttaggaaagaatgatggtatctta

SEQ ID NO: 233654 - DNA, 33 bp, Homo sapien
aagaaaaagttaggaaggaatgatggtatctta

SEQ ID NO: 233655 - DNA, 33 bp, Homo sapien
tattgttgcatagtgaagttacaggtagtttca

SEQ ID NO: 233656 - DNA, 33 bp, Homo sapien
tattgttgcatagtgaggttacaggtagtttca

SEQ ID NO: 233657 - DNA, 33 bp, Homo sapien
aggccctcagggatacaaattctgacaagctac

SEQ ID NO: 233658 - DNA, 33 bp, Homo sapien
aggccctcagggatacgaattctgacaagctac

SEQ ID NO: 233659 - DNA, 33 bp, Homo sapien
ttgcccttatcggtcacgaatgttaagctttca

SEQ ID NO: 233660 - DNA, 33 bp, Homo sapien
ttgcccttatcggtcatgaatgttaagctttca

SEQ ID NO: 233661 - DNA, 33 bp, Homo sapien
tccacactgcctttgaagacaaacctaaaattc

SEQ ID NO: 233662 - DNA, 33 bp, Homo sapien
tccacactgcctttgaggacaaacctaaaattc

SEQ ID NO: 233663 - DNA, 33 bp, Homo sapien
gggcccgatagtaccacagctatccatatgatg

SEQ ID NO: 233664 - DNA, 33 bp, Homo sapien
gggcccgatagtaccagagctatccatatgatg

SEQ ID NO: 233665 - DNA, 33 bp, Homo sapien
aactcagggcattctaacatttcaagttcaggt

SEQ ID NO: 233666 - DNA, 33 bp, Homo sapien
aactcagggcattctatcatttcaagttcaggt

SEQ ID NO: 233667 - DNA, 33 bp, Homo sapien
atcgtctctagcataccgcaaacccatagcata

SEQ ID NO: 233668 - DNA, 33 bp, Homo sapien
atcgtctctagcatactgcaaacccatagcata

SEQ ID NO: 233669 - DNA, 33 bp, Homo sapien
gtgtaaacttgagaaaattaactccaagcagac

SEQ ID NO: 233670 - DNA, 33 bp, Homo sapien
gtgtaaacttgagaaagttaactccaagcagac

SEQ ID NO: 233671 - DNA, 33 bp, Homo sapien
gggaaagggctccatacatacaattatgacaat

SEQ ID NO: 233672 - DNA, 33 bp, Homo sapien
gggaaagggctccatatatacaattatgacaat

SEQ ID NO: 233673 - DNA, 33 bp, Homo sapien
aatggcagggcaattcgaatttctagacctaaa

SEQ ID NO: 233674 - DNA, 33 bp, Homo sapien
aatggcagggcaattctaatttctagacctaaa

SEQ ID NO: 233675 - DNA, 33 bp, Homo sapien
taggtgcccaacagcaaatgaatagataaagaa

SEQ ID NO: 233676 - DNA, 33 bp, Homo sapien
taggtgcccaacagcagatgaatagataaagaa

SEQ ID NO: 233677 - DNA, 33 bp, Homo sapien
gctggttttggtgtcactctccttgtagggttt

SEQ ID NO: 233678 - DNA, 33 bp, Homo sapien
gctggttttggtgtcattctccttgtagggttt

SEQ ID NO: 233679 - DNA, 33 bp, Homo sapien
cccagaatgaaaaaagcctgagcttcctgacaa

SEQ ID NO: 233680 - DNA, 33 bp, Homo sapien
cccagaatgaaaaaaggctgagcttcctgacaa

SEQ ID NO: 233681 - DNA, 33 bp, Homo sapien
atcccatatcgaaatgaaaattgcaaatatgaa

SEQ ID NO: 233682 - DNA, 33 bp, Homo sapien
atcccatatcgaaatggaaattgcaaatatgaa

SEQ ID NO: 233683 - DNA, 33 bp, Homo sapien
gtaagtaggtatgtgacgcttttccatcttcta

SEQ ID NO: 233684 - DNA, 33 bp, Homo sapien
gtaagtaggtatgtgatgcttttccatcttcta

SEQ ID NO: 233685 - DNA, 33 bp, Homo sapien
ggcattattttaagcaacatacagtgcctttaa

SEQ ID NO: 233686 - DNA, 33 bp, Homo sapien
ggcattattttaagcagcatacagtgcctttaa

SEQ ID NO: 233687 - DNA, 33 bp, Homo sapien
taaaagacatttgtggaagattatgcatagttg

SEQ ID NO: 233688 - DNA, 33 bp, Homo sapien
taaaagacatttgtgggagattatgcatagttg

SEQ ID NO: 233689 - DNA, 33 bp, Homo sapien
gaagagaatagttcaacgagaaggtcaaggtca

SEQ ID NO: 233690 - DNA, 33 bp, Homo sapien
gaagagaatagttcaaggagaaggtcaaggtca

SEQ ID NO: 233691 - DNA, 33 bp, Homo sapien
aaagtcaaaagtggtcacaatttcacttgatct

SEQ ID NO: 233692 - DNA, 33 bp, Homo sapien
aaagtcaaaagtggtctcaatttcacttgatct

SEQ ID NO: 233693 - DNA, 33 bp, Homo sapien
cagaggatgtcagactcagagaaaagccattcc

SEQ ID NO: 233694 - DNA, 33 bp, Homo sapien
cagaggatgtcagacttagagaaaagccattcc

SEQ ID NO: 233695 - DNA, 33 bp, Homo sapien
gtaaaatgcctgccacaaattagttattaacca

SEQ ID NO: 233696 - DNA, 33 bp, Homo sapien
gtaaaatgcctgccacgaattagttattaacca

SEQ ID NO: 233697 - DNA, 33 bp, Homo sapien
tagccagtttcggccacagtgtccacatctcct

SEQ ID NO: 233698 - DNA, 33 bp, Homo sapien
tagccagtttcggccatagtgtccacatctcct

SEQ ID NO: 233699 - DNA, 33 bp, Homo sapien
ttgatcagtgtagttaaggagaaacaaatgaca

SEQ ID NO: 233700 - DNA, 33 bp, Homo sapien
ttgatcagtgtagttacggagaaacaaatgaca

SEQ ID NO: 233701 - DNA, 33 bp, Homo sapien
cctgcattcaaggactcagaactctctctttgg

SEQ ID NO: 233702 - DNA, 33 bp, Homo sapien
cctgcattcaaggactgagaactctctctttgg

SEQ ID NO: 233703 - DNA, 33 bp, Homo sapien
atttccgaaaagatccacttaaagctattaaca

SEQ ID NO: 233704 - DNA, 33 bp, Homo sapien
atttccgaaaagatccgcttaaagctattaaca

SEQ ID NO: 233705 - DNA, 33 bp, Homo sapien
cagtcttggtatatgaaagtgtgattaatattg

SEQ ID NO: 233706 - DNA, 33 bp, Homo sapien
cagtcttggtatatgagagtgtgattaatattg

SEQ ID NO: 233707 - DNA, 33 bp, Homo sapien
actagaagatgtcaaagaagtttccagagatca

SEQ ID NO: 233708 - DNA, 33 bp, Homo sapien
actagaagatgtcaaataagtttccagagatca

SEQ ID NO: 233709 - DNA, 33 bp, Homo sapien
ctgaaccatgagatccgaaagaagtgatgagat

SEQ ID NO: 233710 - DNA, 33 bp, Homo sapien
ctgaaccatgagatcctaaagaagtgatgagat

SEQ ID NO: 233711 - DNA, 33 bp, Homo sapien
tggagagtgtccattacagaccgacatctgagg

SEQ ID NO: 233712 - DNA, 33 bp, Homo sapien
tggagagtgtccattatagaccgacatctgagg

SEQ ID NO: 233713 - DNA, 33 bp, Homo sapien
tagaaaccatctccaacgttatagtattaagag

SEQ ID NO: 233714 - DNA, 33 bp, Homo sapien
tagaaaccatctccaatgttatagtattaagag

SEQ ID NO: 233715 - DNA, 33 bp, Homo sapien
ttctaatttcaacttaccaggcatcttcatcta

SEQ ID NO: 233716 - DNA, 33 bp, Homo sapien
ttctaatttcaacttatcaggcatcttcatcta

SEQ ID NO: 233717 - DNA, 33 bp, Homo sapien
actggaccttaaatatcagcagacaatgtcact

SEQ ID NO: 233718 - DNA, 33 bp, Homo sapien
actggaccttaaatattagcagacaatgtcact

SEQ ID NO: 233719 - DNA, 33 bp, Homo sapien
cgtgaaccttagggcaagtatttatagtcttat

SEQ ID NO: 233720 - DNA, 33 bp, Homo sapien
cgtgaaccttagggcatgtatttatagtcttat

SEQ ID NO: 233721 - DNA, 33 bp, Homo sapien
gggaagagctagaagaaggctgagacttgagaa

SEQ ID NO: 233722 - DNA, 33 bp, Homo sapien
gggaagagctagaagagggctgagacttgagaa

SEQ ID NO: 233723 - DNA, 33 bp, Homo sapien
acaggactaagcaaataaaccaagaaaatactc

SEQ ID NO: 233724 - DNA, 33 bp, Homo sapien
acaggactaagcaaatgaaccaagaaaatactc

SEQ ID NO: 233725 - DNA, 33 bp, Homo sapien
tttcatctaatagaaaaaagaatttcaagctgc

SEQ ID NO: 233726 - DNA, 33 bp, Homo sapien
tttcatctaatagaaacaagaatttcaagctgc

SEQ ID NO: 233727 - DNA, 33 bp, Homo sapien
tgtttatacacaaagaagttaatcacagtaatt

SEQ ID NO: 233728 - DNA, 33 bp, Homo sapien
tgtttatacacaaagatgttaatcacagtaatt

SEQ ID NO: 233729 - DNA, 33 bp, Homo sapien
cactgtgataaatgaacgtgagatttcagagtg

SEQ ID NO: 233730 - DNA, 33 bp, Homo sapien
cactgtgataaatgaatgtgagatttcagagtg

SEQ ID NO: 233731 - DNA, 33 bp, Homo sapien
tcagaaaagaagctaacctagtgactttaaaga

SEQ ID NO: 233732 - DNA, 33 bp, Homo sapien
tcagaaaagaagctaatctagtgactttaaaga

SEQ ID NO: 233733 - DNA, 33 bp, Homo sapien
tttgaacagtttatacaatgagacagactgacg

SEQ ID NO: 233734 - DNA, 33 bp, Homo sapien
tttgaacagtttatacgatgagacagactgacg

SEQ ID NO: 233735 - DNA, 33 bp, Homo sapien
acagcaaggtctcaaaggtggtcaggctagcca

SEQ ID NO: 233736 - DNA, 33 bp, Homo sapien
acagcaaggtctcaaatgtggtcaggctagcca

SEQ ID NO: 233737 - DNA, 33 bp, Homo sapien
tttgctataatgttcccaaaaatcactattgca

SEQ ID NO: 233738 - DNA, 33 bp, Homo sapien
tttgctataatgttcctaaaaatcactattgca

SEQ ID NO: 233739 - DNA, 33 bp, Homo sapien
tccaatgcaattgttacattaggcaacaattga

SEQ ID NO: 233740 - DNA, 33 bp, Homo sapien
tccaatgcaattgttatattaggcaacaattga

SEQ ID NO: 233741 - DNA, 33 bp, Homo sapien
aacaagggtcagaaacagatattaggatcatgg

SEQ ID NO: 233742 - DNA, 33 bp, Homo sapien
aacaagggtcagaaacggatattaggatcatgg

SEQ ID NO: 233743 - DNA, 33 bp, Homo sapien
ctaaaagaacttctaactcctctcaggtctact

SEQ ID NO: 233744 - DNA, 33 bp, Homo sapien
ctaaaagaacttctaattcctctcaggtctact

SEQ ID NO: 233745 - DNA, 33 bp, Homo sapien
cccaaactacatagaaaatccaagaactgtacc

SEQ ID NO: 233746 - DNA, 33 bp, Homo sapien
cccaaactacatagaagatccaagaactgtacc

SEQ ID NO: 233747 - DNA, 33 bp, Homo sapien
cacacataaataaagccagatttcattatggac

SEQ ID NO: 233748 - DNA, 33 bp, Homo sapien
cacacataaataaagcgagatttcattatggac

SEQ ID NO: 233749 - DNA, 33 bp, Homo sapien
cacaccaacaaccttaagagctgactaaactgt

SEQ ID NO: 233750 - DNA, 33 bp, Homo sapien
cacaccaacaaccttacgagctgactaaactgt

SEQ ID NO: 233751 - DNA, 33 bp, Homo sapien
cctgacttcagaaatgaatacagctaagcccaa

SEQ ID NO: 233752 - DNA, 33 bp, Homo sapien
cctgacttcagaaatggatacagctaagcccaa

SEQ ID NO: 233753 - DNA, 33 bp, Homo sapien
cctttgtatgttcttcaagcccattgacttccc

SEQ ID NO: 233754 - DNA, 33 bp, Homo sapien
cctttgtatgttcttcgagcccattgacttccc

SEQ ID NO: 233755 - DNA, 33 bp, Homo sapien
gtaattgttagtacgaaaatgcagagtaatggt

SEQ ID NO: 233756 - DNA, 33 bp, Homo sapien
gtaattgttagtacgacaatgcagagtaatggt

SEQ ID NO: 233757 - DNA, 33 bp, Homo sapien
agggatttgaaggaaaatgaaaacatggatagc

SEQ ID NO: 233758 - DNA, 33 bp, Homo sapien
agggatttgaaggaaagtgaaaacatggatagc

SEQ ID NO: 233759 - DNA, 33 bp, Homo sapien
taagatagagaggcggcccaacagttttttatg

SEQ ID NO: 233760 - DNA, 33 bp, Homo sapien
taagatagagaggcggtccaacagttttttatg

SEQ ID NO: 233761 - DNA, 33 bp, Homo sapien
actccttcaaacgttacgtagaactggactcca

SEQ ID NO: 233762 - DNA, 33 bp, Homo sapien
actccttcaaacgttatgtagaactggactcca

SEQ ID NO: 233763 - DNA, 33 bp, Homo sapien
taataatacagtgaaacattacgcatttatctc

SEQ ID NO: 233764 - DNA, 33 bp, Homo sapien
taataatacagtgaaatattacgcatttatctc

SEQ ID NO: 233765 - DNA, 33 bp, Homo sapien
tcactgaacaagtcacacagtagatgactaaga

SEQ ID NO: 233766 - DNA, 33 bp, Homo sapien
tcactgaacaagtcacgcagtagatgactaaga

SEQ ID NO: 233767 - DNA, 33 bp, Homo sapien
ggagctagtaaactcacaagaaaatgaatgtag

SEQ ID NO: 233768 - DNA, 33 bp, Homo sapien
ggagctagtaaactcagaagaaaatgaatgtag

SEQ ID NO: 233769 - DNA, 33 bp, Homo sapien
tcttgttttttcctcaactcaacttttccaaac

SEQ ID NO: 233770 - DNA, 33 bp, Homo sapien
tcttgttttttcctcagctcaacttttccaaac

SEQ ID NO: 233771 - DNA, 33 bp, Homo sapien
tgctggcttaatataacgaaatgggttagcagt

SEQ ID NO: 233772 - DNA, 33 bp, Homo sapien
tgctggcttaatataatgaaatgggttagcagt

SEQ ID NO: 233773 - DNA, 33 bp, Homo sapien
ctaggtcatcggaatgcaaaattgaggaagacg

SEQ ID NO: 233774 - DNA, 33 bp, Homo sapien
ctaggtcatcggaatgtaaaattgaggaagacg

SEQ ID NO: 233775 - DNA, 33 bp, Homo sapien
tatttcaaaaacctccacagagctagcataata

SEQ ID NO: 233776 - DNA, 33 bp, Homo sapien
tatttcaaaaacctccgcagagctagcataata

SEQ ID NO: 233777 - DNA, 33 bp, Homo sapien
gaaagtgcttatagcaaaactctagaactaaca

SEQ ID NO: 233778 - DNA, 33 bp, Homo sapien
gaaagtgcttatagcagaactctagaactaaca

SEQ ID NO: 233779 - DNA, 33 bp, Homo sapien
tttcttgcctaaaatacgtccaattcaatttga

SEQ ID NO: 233780 - DNA, 33 bp, Homo sapien
tttcttgcctaaaatatgtccaattcaatttga

SEQ ID NO: 233781 - DNA, 33 bp, Homo sapien
aactgtatcctgggggccaagtataggagtaat

SEQ ID NO: 233782 - DNA, 33 bp, Homo sapien
aactgtatcctgggggtcaagtataggagtaat

SEQ ID NO: 233783 - DNA, 33 bp, Homo sapien
ttcaggtgtagaacacagaggcctaatccttga

SEQ ID NO: 233784 - DNA, 33 bp, Homo sapien
ttcaggtgtagaacacggaggcctaatccttga

SEQ ID NO: 233785 - DNA, 33 bp, Homo sapien
aggattttgcaataataacaacaatgaaggtta

SEQ ID NO: 233786 - DNA, 33 bp, Homo sapien
aggattttgcaataatgacaacaatgaaggtta

SEQ ID NO: 233787 - DNA, 33 bp, Homo sapien
aaaagagaatctcaccactgaggctgccttctt

SEQ ID NO: 233788 - DNA, 33 bp, Homo sapien
aaaagagaatctcaccgctgaggctgccttctt

SEQ ID NO: 233789 - DNA, 33 bp, Homo sapien
gatcatatcatcaaccaggcacattaaattcac

SEQ ID NO: 233790 - DNA, 33 bp, Homo sapien
gatcatatcatcaaccgggcacattaaattcac

SEQ ID NO: 233791 - DNA, 33 bp, Homo sapien
tatttctgggttaacaatgacaactaattagga

SEQ ID NO: 233792 - DNA, 33 bp, Homo sapien
tatttctgggttaacagtgacaactaattagga

SEQ ID NO: 233793 - DNA, 33 bp, Homo sapien
gaagaaaaattaggccaaatctttcatattgat

SEQ ID NO: 233794 - DNA, 33 bp, Homo sapien
gaagaaaaattaggccgaatctttcatattgat

SEQ ID NO: 233795 - DNA, 33 bp, Homo sapien
tccaaggcagcaagaacgaggaataaaagggta

SEQ ID NO: 233796 - DNA, 33 bp, Homo sapien
tccaaggcagcaagaatgaggaataaaagggta

SEQ ID NO: 233797 - DNA, 33 bp, Homo sapien
tctcacatcaaaacagaaattctagtagaaggt

SEQ ID NO: 233798 - DNA, 33 bp, Homo sapien
tctcacatcaaaacaggaattctagtagaaggt

SEQ ID NO: 233799 - DNA, 33 bp, Homo sapien
agggagacctcagatcaaatcctcttttcaaac

SEQ ID NO: 233800 - DNA, 33 bp, Homo sapien
agggagacctcagatcgaatcctcttttcaaac

SEQ ID NO: 233801 - DNA, 33 bp, Homo sapien
taaggagaatgacaacagaatctgtactgagga

SEQ ID NO: 233802 - DNA, 33 bp, Homo sapien
taaggagaatgacaacggaatctgtactgagga

SEQ ID NO: 233803 - DNA, 33 bp, Homo sapien
tttttgtttgtgaaaaatgaactccattattgt

SEQ ID NO: 233804 - DNA, 33 bp, Homo sapien
tttttgtttgtgaaaagtgaactccattattgt

SEQ ID NO: 233805 - DNA, 33 bp, Homo sapien
atattgctcactttagaattgatggctcagtgg

SEQ ID NO: 233806 - DNA, 33 bp, Homo sapien
atattgctcactttagcattgatggctcagtgg

SEQ ID NO: 233807 - DNA, 33 bp, Homo sapien
ccccagtgatgaagtcaaactcaaattgcagcc

SEQ ID NO: 233808 - DNA, 33 bp, Homo sapien
ccccagtgatgaagtcgaactcaaattgcagcc

SEQ ID NO: 233809 - DNA, 33 bp, Homo sapien
ctttcagaagcactggcataaagcagaggcagt

SEQ ID NO: 233810 - DNA, 33 bp, Homo sapien
ctttcagaagcactggtataaagcagaggcagt

SEQ ID NO: 233811 - DNA, 33 bp, Homo sapien
tttctgtaagttttcaagtggtgctgatgctgc

SEQ ID NO: 233812 - DNA, 33 bp, Homo sapien
tttctgtaagttttcacgtggtgctgatgctgc

SEQ ID NO: 233813 - DNA, 33 bp, Homo sapien
agctatggtaaaatagcagagtattgcataggg

SEQ ID NO: 233814 - DNA, 33 bp, Homo sapien
agctatggtaaaatagtagagtattgcataggg

SEQ ID NO: 233815 - DNA, 33 bp, Homo sapien
tactctccggtcttgcaaaacaaagggcacttg

SEQ ID NO: 233816 - DNA, 33 bp, Homo sapien
tactctccggtcttgccaaacaaagggcacttg

SEQ ID NO: 233817 - DNA, 33 bp, Homo sapien
tacaatgaaggggagacgagatattaaagcaga

SEQ ID NO: 233818 - DNA, 33 bp, Homo sapien
tacaatgaaggggagatgagatattaaagcaga

SEQ ID NO: 233819 - DNA, 33 bp, Homo sapien
tctcagtccaaagtagaccctcaataactatta

SEQ ID NO: 233820 - DNA, 33 bp, Homo sapien
tctcagtccaaagtaggccctcaataactatta

SEQ ID NO: 233821 - DNA, 33 bp, Homo sapien
aagttatttagtcccacacacatctattctgtt

SEQ ID NO: 233822 - DNA, 33 bp, Homo sapien
aagttatttagtcccatacacatctattctgtt

SEQ ID NO: 233823 - DNA, 33 bp, Homo sapien
tctacagaaggtccgaagatgtggtctgggtca

SEQ ID NO: 233824 - DNA, 33 bp, Homo sapien
tctacagaaggtccgacgatgtggtctgggtca

SEQ ID NO: 233825 - DNA, 33 bp, Homo sapien
gtgtaatctctggcaactcacttcatctctgtg

SEQ ID NO: 233826 - DNA, 33 bp, Homo sapien
gtgtaatctctggcaagtcacttcatctctgtg

SEQ ID NO: 233827 - DNA, 33 bp, Homo sapien
tttcatcgtttatggcaaatagggaaaaaaatg

SEQ ID NO: 233828 - DNA, 33 bp, Homo sapien
tttcatcgtttatggctaatagggaaaaaaatg

SEQ ID NO: 233829 - DNA, 33 bp, Homo sapien
tacttgctgtacaaaaatttccctaccagagtc

SEQ ID NO: 233830 - DNA, 33 bp, Homo sapien
tacttgctgtacaaaagtttccctaccagagtc

SEQ ID NO: 233831 - DNA, 33 bp, Homo sapien
atcatgacttggaattaaaagaagtaatgataa

SEQ ID NO: 233832 - DNA, 33 bp, Homo sapien
atcatgacttggaattgaaagaagtaatgataa

SEQ ID NO: 233833 - DNA, 33 bp, Homo sapien
tgttagagaacaaccacgtgaacaaatgtgaat

SEQ ID NO: 233834 - DNA, 33 bp, Homo sapien
tgttagagaacaaccatgtgaacaaatgtgaat

SEQ ID NO: 233835 - DNA, 33 bp, Homo sapien
gcatggcttaccgtcacaatcagcaaataaaga

SEQ ID NO: 233836 - DNA, 33 bp, Homo sapien
gcatggcttaccgtcagaatcagcaaataaaga

SEQ ID NO: 233837 - DNA, 33 bp, Homo sapien
ccccagttaagacttcaagttatcccagcctag

SEQ ID NO: 233838 - DNA, 33 bp, Homo sapien
ccccagttaagacttccagttatcccagcctag

SEQ ID NO: 233839 - DNA, 33 bp, Homo sapien
tatccagagtgtggtaaaattggaatgtttaga

SEQ ID NO: 233840 - DNA, 33 bp, Homo sapien
tatccagagtgtggtagaattggaatgtttaga

SEQ ID NO: 233841 - DNA, 33 bp, Homo sapien
aattttgcataattagcccagttattgcgcaca

SEQ ID NO: 233842 - DNA, 33 bp, Homo sapien
aattttgcataattagtccagttattgcgcaca

SEQ ID NO: 233843 - DNA, 33 bp, Homo sapien
tcttcttaaaggcaaaaatagtatctgttgaga

SEQ ID NO: 233844 - DNA, 33 bp, Homo sapien
tcttcttaaaggcaaacatagtatctgttgaga

SEQ ID NO: 233845 - DNA, 33 bp, Homo sapien
atagagtgttcaaaaacgatagtaagccaattc

SEQ ID NO: 233846 - DNA, 33 bp, Homo sapien
atagagtgttcaaaaatgatagtaagccaattc

SEQ ID NO: 233847 - DNA, 33 bp, Homo sapien
acatatgtaaattgaacaggactgttgttgagg

SEQ ID NO: 233848 - DNA, 33 bp, Homo sapien
acatatgtaaattgaataggactgttgttgagg

SEQ ID NO: 233849 - DNA, 33 bp, Homo sapien
agaatatctcaaaatacggaagaagcaagattc

SEQ ID NO: 233850 - DNA, 33 bp, Homo sapien
agaatatctcaaaatatggaagaagcaagattc

SEQ ID NO: 233851 - DNA, 33 bp, Homo sapien
tagacaatctctgtgaaacacataaaaggaatt

SEQ ID NO: 233852 - DNA, 33 bp, Homo sapien
tagacaatctctgtgagacacataaaaggaatt

SEQ ID NO: 233853 - DNA, 33 bp, Homo sapien
tctgagaatgacagaagtggggagaaatgtaac

SEQ ID NO: 233854 - DNA, 33 bp, Homo sapien
tctgagaatgacagaattggggagaaatgtaac

SEQ ID NO: 233855 - DNA, 33 bp, Homo sapien
agaatgtaaatgtggacgatagcaaggatgaat

SEQ ID NO: 233856 - DNA, 33 bp, Homo sapien
agaatgtaaatgtggatgatagcaaggatgaat

SEQ ID NO: 233857 - DNA, 33 bp, Homo sapien
aatgagaaaataattaccatgcaaaagcttttt

SEQ ID NO: 233858 - DNA, 33 bp, Homo sapien
aatgagaaaataattatcatgcaaaagcttttt

SEQ ID NO: 233859 - DNA, 33 bp, Homo sapien
ggtgttggactagtgccgaaaggttggctataa

SEQ ID NO: 233860 - DNA, 33 bp, Homo sapien
ggtgttggactagtgctgaaaggttggctataa

SEQ ID NO: 233861 - DNA, 33 bp, Homo sapien
atgtaagaacctgatcaaataataggtttgatt

SEQ ID NO: 233862 - DNA, 33 bp, Homo sapien
atgtaagaacctgatccaataataggtttgatt

SEQ ID NO: 233863 - DNA, 33 bp, Homo sapien
ctaaaatagctccccacaaatgttaagaaaagt

SEQ ID NO: 233864 - DNA, 33 bp, Homo sapien
ctaaaatagctccccataaatgttaagaaaagt

SEQ ID NO: 233865 - DNA, 33 bp, Homo sapien
actttcatgtactcaacatctagctttgccata

SEQ ID NO: 233866 - DNA, 33 bp, Homo sapien
actttcatgtactcaatatctagctttgccata

SEQ ID NO: 233867 - DNA, 33 bp, Homo sapien
gggtgtcgctttaccacgcggaaacctctgttg

SEQ ID NO: 233868 - DNA, 33 bp, Homo sapien
gggtgtcgctttaccaggcggaaacctctgttg

SEQ ID NO: 233869 - DNA, 33 bp, Homo sapien
ttaatgtaacttaaaaagctgattatgaaattt

SEQ ID NO: 233870 - DNA, 33 bp, Homo sapien
ttaatgtaacttaaaaggctgattatgaaattt

SEQ ID NO: 233871 - DNA, 33 bp, Homo sapien
tgccccagatccaagactcattgttacacataa

SEQ ID NO: 233872 - DNA, 33 bp, Homo sapien
tgccccagatccaagattcattgttacacataa

SEQ ID NO: 233873 - DNA, 33 bp, Homo sapien
ttcttagcatgatattcaacactctacccattc

SEQ ID NO: 233874 - DNA, 33 bp, Homo sapien
ttcttagcatgatattgaacactctacccattc

SEQ ID NO: 233875 - DNA, 33 bp, Homo sapien
aaactatggacactcaccaatatgtatgaatct

SEQ ID NO: 233876 - DNA, 33 bp, Homo sapien
aaactatggacactcatcaatatgtatgaatct

SEQ ID NO: 233877 - DNA, 33 bp, Homo sapien
gaggttgcactttgtacgaggcccataaactgt

SEQ ID NO: 233878 - DNA, 33 bp, Homo sapien
gaggttgcactttgtatgaggcccataaactgt

SEQ ID NO: 233879 - DNA, 33 bp, Homo sapien
ggagtcgatgaagttcagaaacggtgtgtgatg

SEQ ID NO: 233880 - DNA, 33 bp, Homo sapien
ggagtcgatgaagttcggaaacggtgtgtgatg

SEQ ID NO: 233881 - DNA, 33 bp, Homo sapien
aacatactgtttcacgaaaatcaaccctgctgt

SEQ ID NO: 233882 - DNA, 33 bp, Homo sapien
aacatactgtttcacggaaatcaaccctgctgt

SEQ ID NO: 233883 - DNA, 33 bp, Homo sapien
gacacaatgagtcacaatgagtttaaattaaag

SEQ ID NO: 233884 - DNA, 33 bp, Homo sapien
gacacaatgagtcacagtgagtttaaattaaag

SEQ ID NO: 233885 - DNA, 33 bp, Homo sapien
agtcctaacattcagaccactgccttcattccc

SEQ ID NO: 233886 - DNA, 33 bp, Homo sapien
agtcctaacattcagatcactgccttcattccc

SEQ ID NO: 233887 - DNA, 33 bp, Homo sapien
tcaattttacagagaaatgtgattaagcaaatt

SEQ ID NO: 233888 - DNA, 33 bp, Homo sapien
tcaattttacagagaagtgtgattaagcaaatt

SEQ ID NO: 233889 - DNA, 33 bp, Homo sapien
gtacgtgaaaaagtacaacacatgcaggagcac

SEQ ID NO: 233890 - DNA, 33 bp, Homo sapien
gtacgtgaaaaagtacgacacatgcaggagcac

SEQ ID NO: 233891 - DNA, 33 bp, Homo sapien
aacacaagggagaacaacactttggctgtttgg

SEQ ID NO: 233892 - DNA, 33 bp, Homo sapien
aacacaagggagaacaccactttggctgtttgg

SEQ ID NO: 233893 - DNA, 33 bp, Homo sapien
gatactggaatacagacaagtgagcaacaacat

SEQ ID NO: 233894 - DNA, 33 bp, Homo sapien
gatactggaatacagagaagtgagcaacaacat

SEQ ID NO: 233895 - DNA, 33 bp, Homo sapien
ggcagaattggtacagcatatctttggcattct

SEQ ID NO: 233896 - DNA, 33 bp, Homo sapien
ggcagaattggtacagtatatctttggcattct

SEQ ID NO: 233897 - DNA, 33 bp, Homo sapien
ggaactaaagcttgggcaagacttgaaggtgac

SEQ ID NO: 233898 - DNA, 33 bp, Homo sapien
ggaactaaagcttggggaagacttgaaggtgac

SEQ ID NO: 233899 - DNA, 33 bp, Homo sapien
atactaggagccagagaccaatgtctgctagat

SEQ ID NO: 233900 - DNA, 33 bp, Homo sapien
atactaggagccagagcccaatgtctgctagat

SEQ ID NO: 233901 - DNA, 33 bp, Homo sapien
gcatttcaggtgagataactgaagcttagacag

SEQ ID NO: 233902 - DNA, 33 bp, Homo sapien
gcatttcaggtgagattactgaagcttagacag

SEQ ID NO: 233903 - DNA, 33 bp, Homo sapien
ctcaatgctgggtgagaatattagtgtttgcca

SEQ ID NO: 233904 - DNA, 33 bp, Homo sapien
ctcaatgctgggtgaggatattagtgtttgcca

SEQ ID NO: 233905 - DNA, 33 bp, Homo sapien
ggagtagaacacataacctcagcaaagtcaatc

SEQ ID NO: 233906 - DNA, 33 bp, Homo sapien
ggagtagaacacataatctcagcaaagtcaatc

SEQ ID NO: 233907 - DNA, 33 bp, Homo sapien
caattagccaaagttcaagagttacctatggaa

SEQ ID NO: 233908 - DNA, 33 bp, Homo sapien
caattagccaaagttctagagttacctatggaa

SEQ ID NO: 233909 - DNA, 33 bp, Homo sapien
cataaagacatactgaagtagatacaatgctct

SEQ ID NO: 233910 - DNA, 33 bp, Homo sapien
cataaagacatactgaggtagatacaatgctct

SEQ ID NO: 233911 - DNA, 33 bp, Homo sapien
cctacacagctagcaagaagtttttaaagagga

SEQ ID NO: 233912 - DNA, 33 bp, Homo sapien
cctacacagctagcaataagtttttaaagagga

SEQ ID NO: 233913 - DNA, 33 bp, Homo sapien
ttcatccagcagcataacctgtaaactccacct

SEQ ID NO: 233914 - DNA, 33 bp, Homo sapien
ttcatccagcagcatatcctgtaaactccacct

SEQ ID NO: 233915 - DNA, 33 bp, Homo sapien
cttcacgtctttaatgcatttcacacagccagt

SEQ ID NO: 233916 - DNA, 33 bp, Homo sapien
cttcacgtctttaatgtatttcacacagccagt

SEQ ID NO: 233917 - DNA, 33 bp, Homo sapien
actaattatcaccaaacgtatgatatttctgct

SEQ ID NO: 233918 - DNA, 33 bp, Homo sapien
actaattatcaccaaatgtatgatatttctgct

SEQ ID NO: 233919 - DNA, 33 bp, Homo sapien
tttttttctttttccaagatggatttgttccct

SEQ ID NO: 233920 - DNA, 33 bp, Homo sapien
tttttttctttttccatgatggatttgttccct

SEQ ID NO: 233921 - DNA, 33 bp, Homo sapien
catgattaagcatccaagttatgtctctcaatg

SEQ ID NO: 233922 - DNA, 33 bp, Homo sapien
catgattaagcatccaggttatgtctctcaatg

SEQ ID NO: 233923 - DNA, 33 bp, Homo sapien
aagaaaggaattcctaatagactgagaagcttc

SEQ ID NO: 233924 - DNA, 33 bp, Homo sapien
aagaaaggaattcctagtagactgagaagcttc

SEQ ID NO: 233925 - DNA, 33 bp, Homo sapien
catttctcaatggataactttagctcagaagaa

SEQ ID NO: 233926 - DNA, 33 bp, Homo sapien
catttctcaatggatacctttagctcagaagaa

SEQ ID NO: 233927 - DNA, 33 bp, Homo sapien
atagaaagactttaaacgccttagctggtacac

SEQ ID NO: 233928 - DNA, 33 bp, Homo sapien
atagaaagactttaaatgccttagctggtacac

SEQ ID NO: 233929 - DNA, 33 bp, Homo sapien
tttatatgtagtataagcctcactcatagtcga

SEQ ID NO: 233930 - DNA, 33 bp, Homo sapien
tttatatgtagtataatcctcactcatagtcga

SEQ ID NO: 233931 - DNA, 33 bp, Homo sapien
ctcccgttttgtttccaattgagcttatttgga

SEQ ID NO: 233932 - DNA, 33 bp, Homo sapien
ctcccgttttgtttcccattgagcttatttgga

SEQ ID NO: 233933 - DNA, 33 bp, Homo sapien
tttgtataagctgagaaatgaaaatccagtatc

SEQ ID NO: 233934 - DNA, 33 bp, Homo sapien
tttgtataagctgagagatgaaaatccagtatc

SEQ ID NO: 233935 - DNA, 33 bp, Homo sapien
tgtctgagttaaaatccgaagaataggagttaa

SEQ ID NO: 233936 - DNA, 33 bp, Homo sapien
tgtctgagttaaaatctgaagaataggagttaa

SEQ ID NO: 233937 - DNA, 33 bp, Homo sapien
attttgccaataaccacatgcgttctgaagcag

SEQ ID NO: 233938 - DNA, 33 bp, Homo sapien
attttgccaataaccatatgcgttctgaagcag

SEQ ID NO: 233939 - DNA, 33 bp, Homo sapien
ccagttcaaaatcttacgcttctatagcagtac

SEQ ID NO: 233940 - DNA, 33 bp, Homo sapien
ccagttcaaaatcttaggcttctatagcagtac

SEQ ID NO: 233941 - DNA, 33 bp, Homo sapien
tagtctaatctatggaagtaaactgccacatta

SEQ ID NO: 233942 - DNA, 33 bp, Homo sapien
tagtctaatctatggatgtaaactgccacatta

SEQ ID NO: 233943 - DNA, 33 bp, Homo sapien
ggaatttgaaccctcacagtttgtttgtgaaaa

SEQ ID NO: 233944 - DNA, 33 bp, Homo sapien
ggaatttgaaccctcatagtttgtttgtgaaaa

SEQ ID NO: 233945 - DNA, 33 bp, Homo sapien
gattggaataaaagcaggaactgaactattctt

SEQ ID NO: 233946 - DNA, 33 bp, Homo sapien
gattggaataaaagcatgaactgaactattctt

SEQ ID NO: 233947 - DNA, 33 bp, Homo sapien
aaatgaaaatgtacacagcaaatgtccagaaaa

SEQ ID NO: 233948 - DNA, 33 bp, Homo sapien
aaatgaaaatgtacacggcaaatgtccagaaaa

SEQ ID NO: 233949 - DNA, 33 bp, Homo sapien
ctattcgagacttttgaacattgtgagcaccag

SEQ ID NO: 233950 - DNA, 33 bp, Homo sapien
ctattcgagacttttgtacattgtgagcaccag

SEQ ID NO: 233951 - DNA, 33 bp, Homo sapien
atgatttggtcaagatcaccattttaaaaaata

SEQ ID NO: 233952 - DNA, 33 bp, Homo sapien
atgatttggtcaagattaccattttaaaaaata

SEQ ID NO: 233953 - DNA, 33 bp, Homo sapien
gacctacctgtggataagttctactggactcct

SEQ ID NO: 233954 - DNA, 33 bp, Homo sapien
gacctacctgtggataggttctactggactcct

SEQ ID NO: 233955 - DNA, 33 bp, Homo sapien
gctatggatctaggcaactgtactcctggccca

SEQ ID NO: 233956 - DNA, 33 bp, Homo sapien
gctatggatctaggcacctgtactcctggccca

SEQ ID NO: 233957 - DNA, 33 bp, Homo sapien
ctggataagctctaaaagctgtggtgtaggtgt

SEQ ID NO: 233958 - DNA, 33 bp, Homo sapien
ctggataagctctaaacgctgtggtgtaggtgt

SEQ ID NO: 233959 - DNA, 33 bp, Homo sapien
atttataacataggcacactaggagattaacaa

SEQ ID NO: 233960 - DNA, 33 bp, Homo sapien
atttataacataggcatactaggagattaacaa

SEQ ID NO: 233961 - DNA, 33 bp, Homo sapien
tctgggttctgataaaaggttataaggttttat

SEQ ID NO: 233962 - DNA, 33 bp, Homo sapien
tctgggttctgataaagggttataaggttttat

SEQ ID NO: 233963 - DNA, 33 bp, Homo sapien
tgagtttgtgaactgaactttatacttgctaca

SEQ ID NO: 233964 - DNA, 33 bp, Homo sapien
tgagtttgtgaactgagctttatacttgctaca

SEQ ID NO: 233965 - DNA, 33 bp, Homo sapien
aggcagacatcaagataagattaagtgtacaaa

SEQ ID NO: 233966 - DNA, 33 bp, Homo sapien
aggcagacatcaagatgagattaagtgtacaaa

SEQ ID NO: 233967 - DNA, 33 bp, Homo sapien
acattgagatcaggaagatttcattgaaaaggt

SEQ ID NO: 233968 - DNA, 33 bp, Homo sapien
acattgagatcaggaatatttcattgaaaaggt

SEQ ID NO: 233969 - DNA, 33 bp, Homo sapien
atgttggtgatactcacgatatttccaattttt

SEQ ID NO: 233970 - DNA, 33 bp, Homo sapien
atgttggtgatactcatgatatttccaattttt

SEQ ID NO: 233971 - DNA, 33 bp, Homo sapien
tggaactactgtttcaaccaaatgagtaattta

SEQ ID NO: 233972 - DNA, 33 bp, Homo sapien
tggaactactgtttcacccaaatgagtaattta

SEQ ID NO: 233973 - DNA, 33 bp, Homo sapien
ttttaaactatcctaaagtgtcttcaaaatact

SEQ ID NO: 233974 - DNA, 33 bp, Homo sapien
ttttaaactatcctaaggtgtcttcaaaatact

SEQ ID NO: 233975 - DNA, 33 bp, Homo sapien
aacgaaacctaatgcacccttagaatatctgca

SEQ ID NO: 233976 - DNA, 33 bp, Homo sapien
aacgaaacctaatgcatccttagaatatctgca

SEQ ID NO: 233977 - DNA, 33 bp, Homo sapien
gataaagttgaaagaacggaaagatgacactag

SEQ ID NO: 233978 - DNA, 33 bp, Homo sapien
gataaagttgaaagaatggaaagatgacactag

SEQ ID NO: 233979 - DNA, 33 bp, Homo sapien
cactttatagaaagaacagctatgacttggaga

SEQ ID NO: 233980 - DNA, 33 bp, Homo sapien
cactttatagaaagaagagctatgacttggaga

SEQ ID NO: 233981 - DNA, 33 bp, Homo sapien
gagctctctgtttcagcaagttccaaaggtctt

SEQ ID NO: 233982 - DNA, 33 bp, Homo sapien
gagctctctgtttcagtaagttccaaaggtctt

SEQ ID NO: 233983 - DNA, 33 bp, Homo sapien
tgatacaaattttcaaacagaaattctttgaaa

SEQ ID NO: 233984 - DNA, 33 bp, Homo sapien
tgatacaaattttcaagcagaaattctttgaaa

SEQ ID NO: 233985 - DNA, 33 bp, Homo sapien
aatacaactttgcttaacacagaggcttattgg

SEQ ID NO: 233986 - DNA, 33 bp, Homo sapien
aatacaactttgcttaccacagaggcttattgg

SEQ ID NO: 233987 - DNA, 33 bp, Homo sapien
tcaccatttcacatcccataacttgccagaagt

SEQ ID NO: 233988 - DNA, 33 bp, Homo sapien
tcaccatttcacatcctataacttgccagaagt

SEQ ID NO: 233989 - DNA, 33 bp, Homo sapien
ctagatggagctatgacggaaatagagaaagtg

SEQ ID NO: 233990 - DNA, 33 bp, Homo sapien
ctagatggagctatgatggaaatagagaaagtg

SEQ ID NO: 233991 - DNA, 33 bp, Homo sapien
tacttaacattctggaagttaaggttaagaaag

SEQ ID NO: 233992 - DNA, 33 bp, Homo sapien
tacttaacattctggaggttaaggttaagaaag

SEQ ID NO: 233993 - DNA, 33 bp, Homo sapien
ctgagatcagttgctacggctgtttgaccagag

SEQ ID NO: 233994 - DNA, 33 bp, Homo sapien
ctgagatcagttgctatggctgtttgaccagag

SEQ ID NO: 233995 - DNA, 33 bp, Homo sapien
tcctctgtaagacagacaggatgtggtctagga

SEQ ID NO: 233996 - DNA, 33 bp, Homo sapien
tcctctgtaagacagataggatgtggtctagga

SEQ ID NO: 233997 - DNA, 33 bp, Homo sapien
gggaagatgaaatccaactgaaagcaacagggc

SEQ ID NO: 233998 - DNA, 33 bp, Homo sapien
gggaagatgaaatccagctgaaagcaacagggc

SEQ ID NO: 233999 - DNA, 33 bp, Homo sapien
acttattagaaaagtaagcagaaaacctgaatg

SEQ ID NO: 234000 - DNA, 33 bp, Homo sapien
acttattagaaaagtaggcagaaaacctgaatg

SEQ ID NO: 234001 - DNA, 33 bp, Homo sapien
aaacaaaacaataaaaatcatcaactctgtgtc

SEQ ID NO: 234002 - DNA, 33 bp, Homo sapien
aaacaaaacaataaaactcatcaactctgtgtc

SEQ ID NO: 234003 - DNA, 33 bp, Homo sapien
tagattcttctagtcaaatttcccactgtcttt

SEQ ID NO: 234004 - DNA, 33 bp, Homo sapien
tagattcttctagtcagatttcccactgtcttt

SEQ ID NO: 234005 - DNA, 33 bp, Homo sapien
ctcttaccacacttctcaaaagagcacctcctc

SEQ ID NO: 234006 - DNA, 33 bp, Homo sapien
ctcttaccacacttctgaaaagagcacctcctc

SEQ ID NO: 234007 - DNA, 33 bp, Homo sapien
cagtatttcaggaaccaagaacacagtagtgaa

SEQ ID NO: 234008 - DNA, 33 bp, Homo sapien
cagtatttcaggaaccgagaacacagtagtgaa

SEQ ID NO: 234009 - DNA, 33 bp, Homo sapien
agactaatcactggacaccatcaggagataatg

SEQ ID NO: 234010 - DNA, 33 bp, Homo sapien
agactaatcactggacgccatcaggagataatg

SEQ ID NO: 234011 - DNA, 33 bp, Homo sapien
atcttatggtaccacaatcatatatgcggcata

SEQ ID NO: 234012 - DNA, 33 bp, Homo sapien
atcttatggtaccacagtcatatatgcggcata

SEQ ID NO: 234013 - DNA, 33 bp, Homo sapien
aattagtgaacagaaagaaataacaggcattca

SEQ ID NO: 234014 - DNA, 33 bp, Homo sapien
aattagtgaacagaaataaataacaggcattca

SEQ ID NO: 234015 - DNA, 33 bp, Homo sapien
gaacaaaaaagtgtccagacagccaaagcgatc

SEQ ID NO: 234016 - DNA, 33 bp, Homo sapien
gaacaaaaaagtgtccggacagccaaagcgatc

SEQ ID NO: 234017 - DNA, 33 bp, Homo sapien
ttggttactgtatccacagagtgtagtttgaag

SEQ ID NO: 234018 - DNA, 33 bp, Homo sapien
ttggttactgtatccatagagtgtagtttgaag

SEQ ID NO: 234019 - DNA, 33 bp, Homo sapien
atctctctctaaaggcaccttgttggtagtcga

SEQ ID NO: 234020 - DNA, 33 bp, Homo sapien
atctctctctaaaggccccttgttggtagtcga

SEQ ID NO: 234021 - DNA, 33 bp, Homo sapien
catgcaagaatgtggactcagtgtagacagatc

SEQ ID NO: 234022 - DNA, 33 bp, Homo sapien
catgcaagaatgtggattcagtgtagacagatc

SEQ ID NO: 234023 - DNA, 33 bp, Homo sapien
aagcgttaattcactaactatgagaaacccatc

SEQ ID NO: 234024 - DNA, 33 bp, Homo sapien
aagcgttaattcactagctatgagaaacccatc

SEQ ID NO: 234025 - DNA, 33 bp, Homo sapien
aatgacagaagttggcaactgtatttcatatag

SEQ ID NO: 234026 - DNA, 33 bp, Homo sapien
aatgacagaagttggccactgtatttcatatag

SEQ ID NO: 234027 - DNA, 33 bp, Homo sapien
atgttcctcagttaagacaataccgactgtgaa

SEQ ID NO: 234028 - DNA, 33 bp, Homo sapien
atgttcctcagttaaggcaataccgactgtgaa

SEQ ID NO: 234029 - DNA, 33 bp, Homo sapien
ccaaaggaccttatgagatgggcattgttatat

SEQ ID NO: 234030 - DNA, 33 bp, Homo sapien
ccaaaggaccttatgatatgggcattgttatat

SEQ ID NO: 234031 - DNA, 33 bp, Homo sapien
ttgagatgctttgttaggtacagtcactcaaga

SEQ ID NO: 234032 - DNA, 33 bp, Homo sapien
ttgagatgctttgttatgtacagtcactcaaga

SEQ ID NO: 234033 - DNA, 33 bp, Homo sapien
aacatttccttttgtacgagctgagagtataaa

SEQ ID NO: 234034 - DNA, 33 bp, Homo sapien
aacatttccttttgtatgagctgagagtataaa

SEQ ID NO: 234035 - DNA, 33 bp, Homo sapien
taaaaataaggttataaaaagagtctgagcgaa

SEQ ID NO: 234036 - DNA, 33 bp, Homo sapien
taaaaataaggttatagaaagagtctgagcgaa

SEQ ID NO: 234037 - DNA, 33 bp, Homo sapien
gcaaccagaaatcataccttagggaaaggtgat

SEQ ID NO: 234038 - DNA, 33 bp, Homo sapien
gcaaccagaaatcatatcttagggaaaggtgat

SEQ ID NO: 234039 - DNA, 33 bp, Homo sapien
ttagccagaacattcaggattaaaatcttcaat

SEQ ID NO: 234040 - DNA, 33 bp, Homo sapien
ttagccagaacattcatgattaaaatcttcaat

SEQ ID NO: 234041 - DNA, 33 bp, Homo sapien
ccagtgccttccaaaaggatattataatctaga

SEQ ID NO: 234042 - DNA, 33 bp, Homo sapien
ccagtgccttccaaaatgatattataatctaga

SEQ ID NO: 234043 - DNA, 33 bp, Homo sapien
cttgtgcctaatccacagtgctcttctatttgt

SEQ ID NO: 234044 - DNA, 33 bp, Homo sapien
cttgtgcctaatccacggtgctcttctatttgt

SEQ ID NO: 234045 - DNA, 33 bp, Homo sapien
ttctgaaggtcagaaaagagtattggttagaat

SEQ ID NO: 234046 - DNA, 33 bp, Homo sapien
ttctgaaggtcagaaatgagtattggttagaat

SEQ ID NO: 234047 - DNA, 33 bp, Homo sapien
tattcactctacagaagatgttcacatacaggt

SEQ ID NO: 234048 - DNA, 33 bp, Homo sapien
tattcactctacagaatatgttcacatacaggt

SEQ ID NO: 234049 - DNA, 33 bp, Homo sapien
tattattctgcttttacaacttacataagtgtt

SEQ ID NO: 234050 - DNA, 33 bp, Homo sapien
tattattctgcttttataacttacataagtgtt

SEQ ID NO: 234051 - DNA, 33 bp, Homo sapien
tgtaactatttcacataatcagatgtcctcatt

SEQ ID NO: 234052 - DNA, 33 bp, Homo sapien
tgtaactatttcacatgatcagatgtcctcatt

SEQ ID NO: 234053 - DNA, 33 bp, Homo sapien
ccctctcccagtttcacgagagtttatatccct

SEQ ID NO: 234054 - DNA, 33 bp, Homo sapien
ccctctcccagtttcatgagagtttatatccct

SEQ ID NO: 234055 - DNA, 33 bp, Homo sapien
tccaggccttttcctcaaactgtgatttgttga

SEQ ID NO: 234056 - DNA, 33 bp, Homo sapien
tccaggccttttcctcgaactgtgatttgttga

SEQ ID NO: 234057 - DNA, 33 bp, Homo sapien
cagtgtttctaatacacactctatggttgatat

SEQ ID NO: 234058 - DNA, 33 bp, Homo sapien
cagtgtttctaatacatactctatggttgatat

SEQ ID NO: 234059 - DNA, 33 bp, Homo sapien
ctaaatctaatagtcaactcttagctcttgtcg

SEQ ID NO: 234060 - DNA, 33 bp, Homo sapien
ctaaatctaatagtcacctcttagctcttgtcg

SEQ ID NO: 234061 - DNA, 33 bp, Homo sapien
gtatggatgctttcacggggacttatttgcaaa

SEQ ID NO: 234062 - DNA, 33 bp, Homo sapien
gtatggatgctttcactgggacttatttgcaaa

SEQ ID NO: 234063 - DNA, 33 bp, Homo sapien
gagcaagaaatccaaacagttggttaattttcc

SEQ ID NO: 234064 - DNA, 33 bp, Homo sapien
gagcaagaaatccaaagagttggttaattttcc

SEQ ID NO: 234065 - DNA, 33 bp, Homo sapien
actgatacaagcacataagtacgtttttcaaac

SEQ ID NO: 234066 - DNA, 33 bp, Homo sapien
actgatacaagcacatgagtacgtttttcaaac

SEQ ID NO: 234067 - DNA, 33 bp, Homo sapien
cacgttcatctttgaaagtggacacattcttga

SEQ ID NO: 234068 - DNA, 33 bp, Homo sapien
cacgttcatctttgaaggtggacacattcttga

SEQ ID NO: 234069 - DNA, 33 bp, Homo sapien
aatttaagatgacaggaaggctttagtaattta

SEQ ID NO: 234070 - DNA, 33 bp, Homo sapien
aatttaagatgacaggtaggctttagtaattta

SEQ ID NO: 234071 - DNA, 33 bp, Homo sapien
ctctctagagataaaaaaatcctgctttaagta

SEQ ID NO: 234072 - DNA, 33 bp, Homo sapien
ctctctagagataaaagaatcctgctttaagta

SEQ ID NO: 234073 - DNA, 33 bp, Homo sapien
gatgaatcatattatgaagtgtttgaccacaaa

SEQ ID NO: 234074 - DNA, 33 bp, Homo sapien
gatgaatcatattatgcagtgtttgaccacaaa

SEQ ID NO: 234075 - DNA, 33 bp, Homo sapien
ttttctgaagatctgcaacattgtgcttagcta

SEQ ID NO: 234076 - DNA, 33 bp, Homo sapien
ttttctgaagatctgccacattgtgcttagcta

SEQ ID NO: 234077 - DNA, 33 bp, Homo sapien
taaagaaactggattccaaataaagctatggat

SEQ ID NO: 234078 - DNA, 33 bp, Homo sapien
taaagaaactggattctaaataaagctatggat

SEQ ID NO: 234079 - DNA, 33 bp, Homo sapien
gcaacattttaattcaacattatacaggtatca

SEQ ID NO: 234080 - DNA, 33 bp, Homo sapien
gcaacattttaattcaccattatacaggtatca

SEQ ID NO: 234081 - DNA, 33 bp, Homo sapien
ccttcatctatacattcaacctggttcatccta

SEQ ID NO: 234082 - DNA, 33 bp, Homo sapien
ccttcatctatacatttaacctggttcatccta

SEQ ID NO: 234083 - DNA, 33 bp, Homo sapien
aaaaacaggttcaaataatatagctcaggatgg

SEQ ID NO: 234084 - DNA, 33 bp, Homo sapien
aaaaacaggttcaaattatatagctcaggatgg

SEQ ID NO: 234085 - DNA, 33 bp, Homo sapien
atacacatacattgaagcattatttattttgat

SEQ ID NO: 234086 - DNA, 33 bp, Homo sapien
atacacatacattgaatcattatttattttgat

SEQ ID NO: 234087 - DNA, 33 bp, Homo sapien
tcttgaatacaaatcaatatgcaaacattcatg

SEQ ID NO: 234088 - DNA, 33 bp, Homo sapien
tcttgaatacaaatcagtatgcaaacattcatg

SEQ ID NO: 234089 - DNA, 33 bp, Homo sapien
tgtcacatttaacgacagagtgactgagctgtc

SEQ ID NO: 234090 - DNA, 33 bp, Homo sapien
tgtcacatttaacgaccgagtgactgagctgtc

SEQ ID NO: 234091 - DNA, 33 bp, Homo sapien
actaccattccttttacagtaacaaagagatca

SEQ ID NO: 234092 - DNA, 33 bp, Homo sapien
actaccattccttttatagtaacaaagagatca

SEQ ID NO: 234093 - DNA, 33 bp, Homo sapien
gttacttgattcctcacgaatatagatctatat

SEQ ID NO: 234094 - DNA, 33 bp, Homo sapien
gttacttgattcctcatgaatatagatctatat

SEQ ID NO: 234095 - DNA, 33 bp, Homo sapien
aatttgtgatagagtcacttgagcttcatagca

SEQ ID NO: 234096 - DNA, 33 bp, Homo sapien
aatttgtgatagagtcgcttgagcttcatagca

SEQ ID NO: 234097 - DNA, 33 bp, Homo sapien
cgtcagaggtttcataaggagattacaacaaag

SEQ ID NO: 234098 - DNA, 33 bp, Homo sapien
cgtcagaggtttcatatggagattacaacaaag

SEQ ID NO: 234099 - DNA, 33 bp, Homo sapien
gaaatatcaactggaaaaatgaaaaagtgatca

SEQ ID NO: 234100 - DNA, 33 bp, Homo sapien
gaaatatcaactggaagaatgaaaaagtgatca

SEQ ID NO: 234101 - DNA, 33 bp, Homo sapien
ctttcacaatgaactgacaattgaaggaaacta

SEQ ID NO: 234102 - DNA, 33 bp, Homo sapien
ctttcacaatgaactggcaattgaaggaaacta

SEQ ID NO: 234103 - DNA, 33 bp, Homo sapien
caggaagtaaggatgccaaggacggagtaactg

SEQ ID NO: 234104 - DNA, 33 bp, Homo sapien
caggaagtaaggatgctaaggacggagtaactg

SEQ ID NO: 234105 - DNA, 33 bp, Homo sapien
acttgttaatttagccaagtgacgaggtgatcc

SEQ ID NO: 234106 - DNA, 33 bp, Homo sapien
acttgttaatttagcccagtgacgaggtgatcc

SEQ ID NO: 234107 - DNA, 33 bp, Homo sapien
agctttagaattctgacaggttcattcttttat

SEQ ID NO: 234108 - DNA, 33 bp, Homo sapien
agctttagaattctgagaggttcattcttttat

SEQ ID NO: 234109 - DNA, 33 bp, Homo sapien
tcttccataagtattaaattcctggccatatca

SEQ ID NO: 234110 - DNA, 33 bp, Homo sapien
tcttccataagtattacattcctggccatatca

SEQ ID NO: 234111 - DNA, 33 bp, Homo sapien
ttgtatacctagataactaagtcacctcttctt

SEQ ID NO: 234112 - DNA, 33 bp, Homo sapien
ttgtatacctagataattaagtcacctcttctt

SEQ ID NO: 234113 - DNA, 33 bp, Homo sapien
gctataaaatgtatgcccctttccacaatttga

SEQ ID NO: 234114 - DNA, 33 bp, Homo sapien
gctataaaatgtatgctcctttccacaatttga

SEQ ID NO: 234115 - DNA, 33 bp, Homo sapien
taactttctgagttacacctagagtacatggaa

SEQ ID NO: 234116 - DNA, 33 bp, Homo sapien
taactttctgagttacgcctagagtacatggaa

SEQ ID NO: 234117 - DNA, 33 bp, Homo sapien
acataggctggcaatcacatctaattaaataga

SEQ ID NO: 234118 - DNA, 33 bp, Homo sapien
acataggctggcaatcgcatctaattaaataga

SEQ ID NO: 234119 - DNA, 33 bp, Homo sapien
acaaaataaggtgataagtcttaaggaagatag

SEQ ID NO: 234120 - DNA, 33 bp, Homo sapien
acaaaataaggtgataggtcttaaggaagatag

SEQ ID NO: 234121 - DNA, 33 bp, Homo sapien
gtcaaggtgagtcttacgaaaaaatagcattta

SEQ ID NO: 234122 - DNA, 33 bp, Homo sapien
gtcaaggtgagtcttatgaaaaaatagcattta

SEQ ID NO: 234123 - DNA, 33 bp, Homo sapien
tttttaaagtgcataaaaataatgacgtcaata

SEQ ID NO: 234124 - DNA, 33 bp, Homo sapien
tttttaaagtgcataagaataatgacgtcaata

SEQ ID NO: 234125 - DNA, 33 bp, Homo sapien
atgtcataggtttctggaaaagacagacacaga

SEQ ID NO: 234126 - DNA, 33 bp, Homo sapien
atgtcataggtttctgtaaaagacagacacaga

SEQ ID NO: 234127 - DNA, 33 bp, Homo sapien
atgtatattttgtgataagaactgcattcgatt

SEQ ID NO: 234128 - DNA, 33 bp, Homo sapien
atgtatattttgtgatgagaactgcattcgatt

SEQ ID NO: 234129 - DNA, 33 bp, Homo sapien
gcattttacaaagtacaattttttggcttggga

SEQ ID NO: 234130 - DNA, 33 bp, Homo sapien
gcattttacaaagtacgattttttggcttggga

SEQ ID NO: 234131 - DNA, 33 bp, Homo sapien
agcaagtgcctttatacagttccatgaagcata

SEQ ID NO: 234132 - DNA, 33 bp, Homo sapien
agcaagtgcctttatagagttccatgaagcata

SEQ ID NO: 234133 - DNA, 33 bp, Homo sapien
actcttcttgggctaacatgagtcaaaataata

SEQ ID NO: 234134 - DNA, 33 bp, Homo sapien
actcttcttgggctaatatgagtcaaaataata

SEQ ID NO: 234135 - DNA, 33 bp, Homo sapien
agattgttgttgctaacctggaccatctctcac

SEQ ID NO: 234136 - DNA, 33 bp, Homo sapien
agattgttgttgctaatctggaccatctctcac

SEQ ID NO: 234137 - DNA, 33 bp, Homo sapien
gagaagagagttaaaaagtgtaaacatatagtt

SEQ ID NO: 234138 - DNA, 33 bp, Homo sapien
gagaagagagttaaaaggtgtaaacatatagtt

SEQ ID NO: 234139 - DNA, 33 bp, Homo sapien
aataaaatggtaatgaaatactactagataggc

SEQ ID NO: 234140 - DNA, 33 bp, Homo sapien
aataaaatggtaatgagatactactagataggc

SEQ ID NO: 234141 - DNA, 33 bp, Homo sapien
agaagcaaagtgttcaagatatgatttgggtgc

SEQ ID NO: 234142 - DNA, 33 bp, Homo sapien
agaagcaaagtgttcaggatatgatttgggtgc

SEQ ID NO: 234143 - DNA, 33 bp, Homo sapien
ctttgttctaaaaatcaaaaacttgtgctgtag

SEQ ID NO: 234144 - DNA, 33 bp, Homo sapien
ctttgttctaaaaatccaaaacttgtgctgtag

SEQ ID NO: 234145 - DNA, 33 bp, Homo sapien
ggacatcctacattaaagggaaactggcgtaat

SEQ ID NO: 234146 - DNA, 33 bp, Homo sapien
ggacatcctacattaaggggaaactggcgtaat

SEQ ID NO: 234147 - DNA, 33 bp, Homo sapien
attactttatcatcggaaagccccatttgcacg

SEQ ID NO: 234148 - DNA, 33 bp, Homo sapien
attactttatcatcgggaagccccatttgcacg

SEQ ID NO: 234149 - DNA, 33 bp, Homo sapien
atttagacattaatccaagattcagaaataaag

SEQ ID NO: 234150 - DNA, 33 bp, Homo sapien
atttagacattaatcccagattcagaaataaag

SEQ ID NO: 234151 - DNA, 33 bp, Homo sapien
ctgcattagaaaggaactcaaatatgtgtgacg

SEQ ID NO: 234152 - DNA, 33 bp, Homo sapien
ctgcattagaaaggaattcaaatatgtgtgacg

SEQ ID NO: 234153 - DNA, 33 bp, Homo sapien
gagtcttgtcctggctaaaagctggaaagtcca

SEQ ID NO: 234154 - DNA, 33 bp, Homo sapien
gagtcttgtcctggctgaaagctggaaagtcca

SEQ ID NO: 234155 - DNA, 33 bp, Homo sapien
aagtaaatggatggctaaagacttaaactctgg

SEQ ID NO: 234156 - DNA, 33 bp, Homo sapien
aagtaaatggatggctgaagacttaaactctgg

SEQ ID NO: 234157 - DNA, 33 bp, Homo sapien
atatccaatgactccactgattttttccatgta

SEQ ID NO: 234158 - DNA, 33 bp, Homo sapien
atatccaatgactccagtgattttttccatgta

SEQ ID NO: 234159 - DNA, 33 bp, Homo sapien
acaggagttgtgtagcaaaataacggcatactc

SEQ ID NO: 234160 - DNA, 33 bp, Homo sapien
acaggagttgtgtagcgaaataacggcatactc

SEQ ID NO: 234161 - DNA, 33 bp, Homo sapien
ttaataggtgacttgacagtaattcaaattcct

SEQ ID NO: 234162 - DNA, 33 bp, Homo sapien
ttaataggtgacttgagagtaattcaaattcct

SEQ ID NO: 234163 - DNA, 33 bp, Homo sapien
ttaatattttgcaaacgaagtctataataaact

SEQ ID NO: 234164 - DNA, 33 bp, Homo sapien
ttaatattttgcaaactaagtctataataaact

SEQ ID NO: 234165 - DNA, 33 bp, Homo sapien
aaattcttggtcaaacaacgccaatatcatagt

SEQ ID NO: 234166 - DNA, 33 bp, Homo sapien
aaattcttggtcaaactacgccaatatcatagt

SEQ ID NO: 234167 - DNA, 33 bp, Homo sapien
aagatactgttactgcaaaaaatttaaaaacaa

SEQ ID NO: 234168 - DNA, 33 bp, Homo sapien
aagatactgttactgcgaaaaatttaaaaacaa

SEQ ID NO: 234169 - DNA, 33 bp, Homo sapien
tgacgcttggaaaccaataatatgtatgttcct

SEQ ID NO: 234170 - DNA, 33 bp, Homo sapien
tgacgcttggaaaccagtaatatgtatgttcct

SEQ ID NO: 234171 - DNA, 33 bp, Homo sapien
gaacagcgcaagtagcaagcacgatataagagt

SEQ ID NO: 234172 - DNA, 33 bp, Homo sapien
gaacagcgcaagtagcgagcacgatataagagt

SEQ ID NO: 234173 - DNA, 33 bp, Homo sapien
cctcaaagcacattccacaaactgacacagaag

SEQ ID NO: 234174 - DNA, 33 bp, Homo sapien
cctcaaagcacattccgcaaactgacacagaag

SEQ ID NO: 234175 - DNA, 33 bp, Homo sapien
ttttagcttgattttacgttgaaatgctaattt

SEQ ID NO: 234176 - DNA, 33 bp, Homo sapien
ttttagcttgattttatgttgaaatgctaattt

SEQ ID NO: 234177 - DNA, 33 bp, Homo sapien
atccaaatgtagaatacgtaggtgctatggacc

SEQ ID NO: 234178 - DNA, 33 bp, Homo sapien
atccaaatgtagaataggtaggtgctatggacc

SEQ ID NO: 234179 - DNA, 33 bp, Homo sapien
tatgacaaataagagacagattaaagtagtact

SEQ ID NO: 234180 - DNA, 33 bp, Homo sapien
tatgacaaataagagagagattaaagtagtact

SEQ ID NO: 234181 - DNA, 33 bp, Homo sapien
actgtgtcacccattagattttacgtacactat

SEQ ID NO: 234182 - DNA, 33 bp, Homo sapien
actgtgtcacccattatattttacgtacactat

SEQ ID NO: 234183 - DNA, 33 bp, Homo sapien
cagggagtatcttgaaacaaatgtctttggctg

SEQ ID NO: 234184 - DNA, 33 bp, Homo sapien
cagggagtatcttgaagcaaatgtctttggctg

SEQ ID NO: 234185 - DNA, 33 bp, Homo sapien
atgtagaatcatcaaacggcttacaatttacca

SEQ ID NO: 234186 - DNA, 33 bp, Homo sapien
atgtagaatcatcaaatggcttacaatttacca

SEQ ID NO: 234187 - DNA, 33 bp, Homo sapien
actgtattaacaattagaaacttctgtacaatc

SEQ ID NO: 234188 - DNA, 33 bp, Homo sapien
actgtattaacaattataaacttctgtacaatc

SEQ ID NO: 234189 - DNA, 33 bp, Homo sapien
agggtaggatttaccactggaaattatttagaa

SEQ ID NO: 234190 - DNA, 33 bp, Homo sapien
agggtaggatttaccattggaaattatttagaa

SEQ ID NO: 234191 - DNA, 33 bp, Homo sapien
tagtatacttagagaaacacttgactcaaaaca

SEQ ID NO: 234192 - DNA, 33 bp, Homo sapien
tagtatacttagagaatcacttgactcaaaaca

SEQ ID NO: 234193 - DNA, 33 bp, Homo sapien
ctttcatgccaaaattgaagactttgcaaagga

SEQ ID NO: 234194 - DNA, 33 bp, Homo sapien
ctttcatgccaaaatttaagactttgcaaagga

SEQ ID NO: 234195 - DNA, 33 bp, Homo sapien
tatgtttgccaagttacgtgttttctattttat

SEQ ID NO: 234196 - DNA, 33 bp, Homo sapien
tatgtttgccaagttatgtgttttctattttat

SEQ ID NO: 234197 - DNA, 33 bp, Homo sapien
ttttgagcatctctaccctgacactaatgccat

SEQ ID NO: 234198 - DNA, 33 bp, Homo sapien
ttttgagcatctctactctgacactaatgccat

SEQ ID NO: 234199 - DNA, 33 bp, Homo sapien
acaaaacatgttgggaccgaaatgataaattta

SEQ ID NO: 234200 - DNA, 33 bp, Homo sapien
acaaaacatgttgggatcgaaatgataaattta

SEQ ID NO: 234201 - DNA, 33 bp, Homo sapien
cctggatgcaaacttacccattcacaattcaag

SEQ ID NO: 234202 - DNA, 33 bp, Homo sapien
cctggatgcaaacttatccattcacaattcaag

SEQ ID NO: 234203 - DNA, 33 bp, Homo sapien
catgaggatatatttacagggaaagcttgaaat

SEQ ID NO: 234204 - DNA, 33 bp, Homo sapien
catgaggatatatttagagggaaagcttgaaat

SEQ ID NO: 234205 - DNA, 33 bp, Homo sapien
agtgagacactggtgacaataagctgccatctg

SEQ ID NO: 234206 - DNA, 33 bp, Homo sapien
agtgagacactggtgataataagctgccatctg

SEQ ID NO: 234207 - DNA, 33 bp, Homo sapien
cttcgggaatatgatcacacccttgcaattcag

SEQ ID NO: 234208 - DNA, 33 bp, Homo sapien
cttcgggaatatgatcgcacccttgcaattcag

SEQ ID NO: 234209 - DNA, 33 bp, Homo sapien
gtgtagggggcagataactaaagaaaatttttg

SEQ ID NO: 234210 - DNA, 33 bp, Homo sapien
gtgtagggggcagatatctaaagaaaatttttg

SEQ ID NO: 234211 - DNA, 33 bp, Homo sapien
tttagcaaaatgttcaatacactttcaaaaatg

SEQ ID NO: 234212 - DNA, 33 bp, Homo sapien
tttagcaaaatgttcattacactttcaaaaatg

SEQ ID NO: 234213 - DNA, 33 bp, Homo sapien
tgtgaatcatcggcaaatatttagcttgaacca

SEQ ID NO: 234214 - DNA, 33 bp, Homo sapien
tgtgaatcatcggcaactatttagcttgaacca

SEQ ID NO: 234215 - DNA, 33 bp, Homo sapien
agctgaaaagaggaaacagcaaattgatgtaac

SEQ ID NO: 234216 - DNA, 33 bp, Homo sapien
agctgaaaagaggaaagagcaaattgatgtaac

SEQ ID NO: 234217 - DNA, 33 bp, Homo sapien
taatacatatagccaaccaaacagaatgccaat

SEQ ID NO: 234218 - DNA, 33 bp, Homo sapien
taatacatatagccaatcaaacagaatgccaat

SEQ ID NO: 234219 - DNA, 33 bp, Homo sapien
tgaaggatatggggtaagaagaggaggtgtttt

SEQ ID NO: 234220 - DNA, 33 bp, Homo sapien
tgaaggatatggggtaggaagaggaggtgtttt

SEQ ID NO: 234221 - DNA, 33 bp, Homo sapien
tctaccaatttggccaataaaggctccataaca

SEQ ID NO: 234222 - DNA, 33 bp, Homo sapien
tctaccaatttggccagtaaaggctccataaca

SEQ ID NO: 234223 - DNA, 33 bp, Homo sapien
tgtccaagatctctccaagtcaactttctaaaa

SEQ ID NO: 234224 - DNA, 33 bp, Homo sapien
tgtccaagatctctcccagtcaactttctaaaa

SEQ ID NO: 234225 - DNA, 33 bp, Homo sapien
tggtgctctggaaaaaagcaatatgagcttttc

SEQ ID NO: 234226 - DNA, 33 bp, Homo sapien
tggtgctctggaaaaaggcaatatgagcttttc

SEQ ID NO: 234227 - DNA, 33 bp, Homo sapien
cacaaacctaatggccaactaaaacgagaaaga

SEQ ID NO: 234228 - DNA, 33 bp, Homo sapien
cacaaacctaatggcccactaaaacgagaaaga

SEQ ID NO: 234229 - DNA, 33 bp, Homo sapien
aagtctttatatgagaagtattgtgaattttat

SEQ ID NO: 234230 - DNA, 33 bp, Homo sapien
aagtctttatatgagaggtattgtgaattttat

SEQ ID NO: 234231 - DNA, 33 bp, Homo sapien
gctatcagaaagtatccaggctagaaagccctc

SEQ ID NO: 234232 - DNA, 33 bp, Homo sapien
gctatcagaaagtatctaggctagaaagccctc

SEQ ID NO: 234233 - DNA, 33 bp, Homo sapien
attaccaaatgatatacgatttttctacatggc

SEQ ID NO: 234234 - DNA, 33 bp, Homo sapien
attaccaaatgatataggatttttctacatggc

SEQ ID NO: 234235 - DNA, 33 bp, Homo sapien
aatacaactgaatggcccttatcaatgtgcaat

SEQ ID NO: 234236 - DNA, 33 bp, Homo sapien
aatacaactgaatggctcttatcaatgtgcaat

SEQ ID NO: 234237 - DNA, 33 bp, Homo sapien
gcagcacgacattcaacgccattttaagtggat

SEQ ID NO: 234238 - DNA, 33 bp, Homo sapien
gcagcacgacattcaatgccattttaagtggat

SEQ ID NO: 234239 - DNA, 33 bp, Homo sapien
tccctccttgatattgcacttgtgttcatcaga

SEQ ID NO: 234240 - DNA, 33 bp, Homo sapien
tccctccttgatattgtacttgtgttcatcaga

SEQ ID NO: 234241 - DNA, 33 bp, Homo sapien
gctggagccatgtagtaaaatggggaaagatta

SEQ ID NO: 234242 - DNA, 33 bp, Homo sapien
gctggagccatgtagtcaaatggggaaagatta

SEQ ID NO: 234243 - DNA, 33 bp, Homo sapien
tatttctgattaaatcaaaagtcagttaaatca

SEQ ID NO: 234244 - DNA, 33 bp, Homo sapien
tatttctgattaaatcgaaagtcagttaaatca

SEQ ID NO: 234245 - DNA, 33 bp, Homo sapien
ctactttttgcttccccatcagctacttgctgt

SEQ ID NO: 234246 - DNA, 33 bp, Homo sapien
ctactttttgcttcccgatcagctacttgctgt

SEQ ID NO: 234247 - DNA, 33 bp, Homo sapien
cacttctcaaatctccaagaacatatttccttc

SEQ ID NO: 234248 - DNA, 33 bp, Homo sapien
cacttctcaaatctccgagaacatatttccttc

SEQ ID NO: 234249 - DNA, 33 bp, Homo sapien
gacaagcgggccaatcgatactatgctttgggt

SEQ ID NO: 234250 - DNA, 33 bp, Homo sapien
gacaagcgggccaatctatactatgctttgggt

SEQ ID NO: 234251 - DNA, 33 bp, Homo sapien
gctgtatacctgagtcacctgcaagttaatgag

SEQ ID NO: 234252 - DNA, 33 bp, Homo sapien
gctgtatacctgagtcgcctgcaagttaatgag

SEQ ID NO: 234253 - DNA, 33 bp, Homo sapien
ataaggttcattaagcagagattgagagaggac

SEQ ID NO: 234254 - DNA, 33 bp, Homo sapien
ataaggttcattaagcggagattgagagaggac

SEQ ID NO: 234255 - DNA, 33 bp, Homo sapien
tagatcaggaattagaataaatctaggagtact

SEQ ID NO: 234256 - DNA, 33 bp, Homo sapien
tagatcaggaattagactaaatctaggagtact

SEQ ID NO: 234257 - DNA, 33 bp, Homo sapien
gggctacctgcaggagcaaacagagttcacttt

SEQ ID NO: 234258 - DNA, 33 bp, Homo sapien
gggctacctgcaggaggaaacagagttcacttt

SEQ ID NO: 234259 - DNA, 33 bp, Homo sapien
ggtcattctcagaaaacggtcacttgaaatcaa

SEQ ID NO: 234260 - DNA, 33 bp, Homo sapien
ggtcattctcagaaaatggtcacttgaaatcaa

SEQ ID NO: 234261 - DNA, 33 bp, Homo sapien
agattcactctcttcaatatttaccacaagcct

SEQ ID NO: 234262 - DNA, 33 bp, Homo sapien
agattcactctcttcagtatttaccacaagcct

SEQ ID NO: 234263 - DNA, 33 bp, Homo sapien
tgtcagataaatctaccggatggaagactcaaa

SEQ ID NO: 234264 - DNA, 33 bp, Homo sapien
tgtcagataaatctactggatggaagactcaaa

SEQ ID NO: 234265 - DNA, 33 bp, Homo sapien
tggaggtaaaggaatagccaatcacctgttgcc

SEQ ID NO: 234266 - DNA, 33 bp, Homo sapien
tggaggtaaaggaatatccaatcacctgttgcc

SEQ ID NO: 234267 - DNA, 33 bp, Homo sapien
taggagacagatacctaaacaattaaatataat

SEQ ID NO: 234268 - DNA, 33 bp, Homo sapien
taggagacagatacctgaacaattaaatataat

SEQ ID NO: 234269 - DNA, 33 bp, Homo sapien
gtccaatactccacataaaatccacttcaatca

SEQ ID NO: 234270 - DNA, 33 bp, Homo sapien
gtccaatactccacatgaaatccacttcaatca

SEQ ID NO: 234271 - DNA, 33 bp, Homo sapien
ccacagaatcagccgaaatgaacataagcattg

SEQ ID NO: 234272 - DNA, 33 bp, Homo sapien
ccacagaatcagccgacatgaacataagcattg

SEQ ID NO: 234273 - DNA, 33 bp, Homo sapien
atataggaagtgatgaaagcaggaacaacagac

SEQ ID NO: 234274 - DNA, 33 bp, Homo sapien
atataggaagtgatgagagcaggaacaacagac

SEQ ID NO: 234275 - DNA, 33 bp, Homo sapien
aataacttaaggagtcaaatggaaatgtttctt

SEQ ID NO: 234276 - DNA, 33 bp, Homo sapien
aataacttaaggagtctaatggaaatgtttctt

SEQ ID NO: 234277 - DNA, 33 bp, Homo sapien
gatggcagagagagatcagaagaaaggtccatg

SEQ ID NO: 234278 - DNA, 33 bp, Homo sapien
gatggcagagagagatgagaagaaaggtccatg

SEQ ID NO: 234279 - DNA, 33 bp, Homo sapien
aatgtcttggaaccacaaagtgctaagcaatgg

SEQ ID NO: 234280 - DNA, 33 bp, Homo sapien
aatgtcttggaaccacgaagtgctaagcaatgg

SEQ ID NO: 234281 - DNA, 33 bp, Homo sapien
tgctaagcaatggtggaaaatatcttttttcaa

SEQ ID NO: 234282 - DNA, 33 bp, Homo sapien
tgctaagcaatggtgggaaatatcttttttcaa

SEQ ID NO: 234283 - DNA, 33 bp, Homo sapien
tctgtttttccatccaatcagatcaataatcaa

SEQ ID NO: 234284 - DNA, 33 bp, Homo sapien
tctgtttttccatccagtcagatcaataatcaa

SEQ ID NO: 234285 - DNA, 33 bp, Homo sapien
aattaccctggataaaagtttgagaaactgtat

SEQ ID NO: 234286 - DNA, 33 bp, Homo sapien
aattaccctggataaacgtttgagaaactgtat

SEQ ID NO: 234287 - DNA, 33 bp, Homo sapien
ttttgctagcagattaaattttggtaaacagaa

SEQ ID NO: 234288 - DNA, 33 bp, Homo sapien
ttttgctagcagattatattttggtaaacagaa

SEQ ID NO: 234289 - DNA, 33 bp, Homo sapien
aacccatacactctgactagagtccacatactt

SEQ ID NO: 234290 - DNA, 33 bp, Homo sapien
aacccatacactctgattagagtccacatactt

SEQ ID NO: 234291 - DNA, 33 bp, Homo sapien
acggcctagattgtgcagaaaaaccagcccttg

SEQ ID NO: 234292 - DNA, 33 bp, Homo sapien
acggcctagattgtgcggaaaaaccagcccttg

SEQ ID NO: 234293 - DNA, 33 bp, Homo sapien
aaaatgggtttgctagactaaaatcaagtattg

SEQ ID NO: 234294 - DNA, 33 bp, Homo sapien
aaaatgggtttgctaggctaaaatcaagtattg

SEQ ID NO: 234295 - DNA, 33 bp, Homo sapien
gatgccgtggaggttcaaagatgctagctttga

SEQ ID NO: 234296 - DNA, 33 bp, Homo sapien
gatgccgtggaggttcgaagatgctagctttga

SEQ ID NO: 234297 - DNA, 33 bp, Homo sapien
aaagcaggatgtagcaaagttctcaggtttgtg

SEQ ID NO: 234298 - DNA, 33 bp, Homo sapien
aaagcaggatgtagcatagttctcaggtttgtg

SEQ ID NO: 234299 - DNA, 33 bp, Homo sapien
aaatatagatttgagacgatggtctggactgag

SEQ ID NO: 234300 - DNA, 33 bp, Homo sapien
aaatatagatttgagatgatggtctggactgag

SEQ ID NO: 234301 - DNA, 33 bp, Homo sapien
gactatatgagaaaaacatatacagtgctagtc

SEQ ID NO: 234302 - DNA, 33 bp, Homo sapien
gactatatgagaaaaagatatacagtgctagtc

SEQ ID NO: 234303 - DNA, 33 bp, Homo sapien
ggaatgcaaggacttacatgaatctacttcttc

SEQ ID NO: 234304 - DNA, 33 bp, Homo sapien
ggaatgcaaggacttatatgaatctacttcttc

SEQ ID NO: 234305 - DNA, 33 bp, Homo sapien
caaagaagagaggttcccagaagctaatatagg

SEQ ID NO: 234306 - DNA, 33 bp, Homo sapien
caaagaagagaggttctcagaagctaatatagg

SEQ ID NO: 234307 - DNA, 33 bp, Homo sapien
accccctcaagtcctaaagaatggccagagttc

SEQ ID NO: 234308 - DNA, 33 bp, Homo sapien
accccctcaagtcctagagaatggccagagttc

SEQ ID NO: 234309 - DNA, 33 bp, Homo sapien
tagtaaatatcataaaccaagagcaactattca

SEQ ID NO: 234310 - DNA, 33 bp, Homo sapien
tagtaaatatcataaatcaagagcaactattca

SEQ ID NO: 234311 - DNA, 33 bp, Homo sapien
cagtggaatagaatacagaaccctgaaatgaag

SEQ ID NO: 234312 - DNA, 33 bp, Homo sapien
cagtggaatagaatacggaaccctgaaatgaag

SEQ ID NO: 234313 - DNA, 33 bp, Homo sapien
agataaagaaaatgtacgaggcatgttggtaga

SEQ ID NO: 234314 - DNA, 33 bp, Homo sapien
agataaagaaaatgtatgaggcatgttggtaga

SEQ ID NO: 234315 - DNA, 33 bp, Homo sapien
ttagaaggtcttaacactccaggtcacccattt

SEQ ID NO: 234316 - DNA, 33 bp, Homo sapien
ttagaaggtcttaacattccaggtcacccattt

SEQ ID NO: 234317 - DNA, 33 bp, Homo sapien
atatgcacaacaaagacgagtgagaagagtggt

SEQ ID NO: 234318 - DNA, 33 bp, Homo sapien
atatgcacaacaaagatgagtgagaagagtggt

SEQ ID NO: 234319 - DNA, 33 bp, Homo sapien
gatgctactctactaccgatttgtctctctctt

SEQ ID NO: 234320 - DNA, 33 bp, Homo sapien
gatgctactctactactgatttgtctctctctt

SEQ ID NO: 234321 - DNA, 33 bp, Homo sapien
ctagctgggagagaaaatctaaattacattgga

SEQ ID NO: 234322 - DNA, 33 bp, Homo sapien
ctagctgggagagaaagtctaaattacattgga

SEQ ID NO: 234323 - DNA, 33 bp, Homo sapien
gataggaagggtagatcacaactgccttgttca

SEQ ID NO: 234324 - DNA, 33 bp, Homo sapien
gataggaagggtagatgacaactgccttgttca

SEQ ID NO: 234325 - DNA, 33 bp, Homo sapien
cataagtagaccattaaaaattaaatatatata

SEQ ID NO: 234326 - DNA, 33 bp, Homo sapien
cataagtagaccattacaaattaaatatatata

SEQ ID NO: 234327 - DNA, 33 bp, Homo sapien
taaatagactatttgacgttagtaagtgctata

SEQ ID NO: 234328 - DNA, 33 bp, Homo sapien
taaatagactatttgatgttagtaagtgctata

SEQ ID NO: 234329 - DNA, 33 bp, Homo sapien
atatctagtggaaataataaagtttacaaagtg

SEQ ID NO: 234330 - DNA, 33 bp, Homo sapien
atatctagtggaaatattaaagtttacaaagtg

SEQ ID NO: 234331 - DNA, 33 bp, Homo sapien
ttattacactgatgtacctggttgggtctattt

SEQ ID NO: 234332 - DNA, 33 bp, Homo sapien
ttattacactgatgtatctggttgggtctattt

SEQ ID NO: 234333 - DNA, 33 bp, Homo sapien
aacttgtctttgaaaacaccagtgaaagactga

SEQ ID NO: 234334 - DNA, 33 bp, Homo sapien
aacttgtctttgaaaataccagtgaaagactga

SEQ ID NO: 234335 - DNA, 33 bp, Homo sapien
taatttaacgtcaatgacataatccagcattgt

SEQ ID NO: 234336 - DNA, 33 bp, Homo sapien
taatttaacgtcaatgccataatccagcattgt

SEQ ID NO: 234337 - DNA, 33 bp, Homo sapien
ttgaaattccagtcaacgaaagtgggaatattt

SEQ ID NO: 234338 - DNA, 33 bp, Homo sapien
ttgaaattccagtcaatgaaagtgggaatattt

SEQ ID NO: 234339 - DNA, 33 bp, Homo sapien
tcagataggggaagaactgacaaagtattgagt

SEQ ID NO: 234340 - DNA, 33 bp, Homo sapien
tcagataggggaagaattgacaaagtattgagt

SEQ ID NO: 234341 - DNA, 33 bp, Homo sapien
ctggggttttgattaaatgtaaaaatcagatag

SEQ ID NO: 234342 - DNA, 33 bp, Homo sapien
ctggggttttgattaagtgtaaaaatcagatag

SEQ ID NO: 234343 - DNA, 33 bp, Homo sapien
acttattaattttgtcaatcactttctttctat

SEQ ID NO: 234344 - DNA, 33 bp, Homo sapien
acttattaattttgtctatcactttctttctat

SEQ ID NO: 234345 - DNA, 33 bp, Homo sapien
tcatagctatttttaaatcctgtcttctaattc

SEQ ID NO: 234346 - DNA, 33 bp, Homo sapien
tcatagctatttttaagtcctgtcttctaattc

SEQ ID NO: 234347 - DNA, 33 bp, Homo sapien
aacccaaatgcctatcaacaaataaaaggataa

SEQ ID NO: 234348 - DNA, 33 bp, Homo sapien
aacccaaatgcctatctacaaataaaaggataa

SEQ ID NO: 234349 - DNA, 33 bp, Homo sapien
caatgatgtttcacataaagaaaatacaaatag

SEQ ID NO: 234350 - DNA, 33 bp, Homo sapien
caatgatgtttcacatgaagaaaatacaaatag

SEQ ID NO: 234351 - DNA, 33 bp, Homo sapien
ttagccttttggcaaaacttacttataaacaat

SEQ ID NO: 234352 - DNA, 33 bp, Homo sapien
ttagccttttggcaaaccttacttataaacaat

SEQ ID NO: 234353 - DNA, 33 bp, Homo sapien
ttgtattgcttgtttgcagaatctcactcttct

SEQ ID NO: 234354 - DNA, 33 bp, Homo sapien
ttgtattgcttgtttggagaatctcactcttct

SEQ ID NO: 234355 - DNA, 33 bp, Homo sapien
catacacacactgttacgatcacattgcaaata

SEQ ID NO: 234356 - DNA, 33 bp, Homo sapien
catacacacactgttatgatcacattgcaaata

SEQ ID NO: 234357 - DNA, 33 bp, Homo sapien
tttactaaatgatttccctgacacctttcagtg

SEQ ID NO: 234358 - DNA, 33 bp, Homo sapien
tttactaaatgatttctctgacacctttcagtg

SEQ ID NO: 234359 - DNA, 33 bp, Homo sapien
aagacatactcttcaaacttattcaccactatg

SEQ ID NO: 234360 - DNA, 33 bp, Homo sapien
aagacatactcttcaaccttattcaccactatg

SEQ ID NO: 234361 - DNA, 33 bp, Homo sapien
cagaaactttctagcaaatggttactcttcagc

SEQ ID NO: 234362 - DNA, 33 bp, Homo sapien
cagaaactttctagcagatggttactcttcagc

SEQ ID NO: 234363 - DNA, 33 bp, Homo sapien
aatggtgatcatagaccaatccaattctcctca

SEQ ID NO: 234364 - DNA, 33 bp, Homo sapien
aatggtgatcatagacgaatccaattctcctca

SEQ ID NO: 234365 - DNA, 33 bp, Homo sapien
aagttgactgtaggacccagttttagtctgaac

SEQ ID NO: 234366 - DNA, 33 bp, Homo sapien
aagttgactgtaggactcagttttagtctgaac

SEQ ID NO: 234367 - DNA, 33 bp, Homo sapien
tatgagtcaagattacaaaacaaccatcttcaa

SEQ ID NO: 234368 - DNA, 33 bp, Homo sapien
tatgagtcaagattacgaaacaaccatcttcaa

SEQ ID NO: 234369 - DNA, 33 bp, Homo sapien
tgggccttggacagaactaaagcctacgttgtt

SEQ ID NO: 234370 - DNA, 33 bp, Homo sapien
tgggccttggacagaagtaaagcctacgttgtt

SEQ ID NO: 234371 - DNA, 33 bp, Homo sapien
ttaaattcaaactgacacctccaaaatcaacac

SEQ ID NO: 234372 - DNA, 33 bp, Homo sapien
ttaaattcaaactgacgcctccaaaatcaacac

SEQ ID NO: 234373 - DNA, 33 bp, Homo sapien
ttcatctaataatcgcactttttctatgttcaa

SEQ ID NO: 234374 - DNA, 33 bp, Homo sapien
ttcatctaataatcgcgctttttctatgttcaa

SEQ ID NO: 234375 - DNA, 33 bp, Homo sapien
gttaaaaatattactcaacttgactgcttagag

SEQ ID NO: 234376 - DNA, 33 bp, Homo sapien
gttaaaaatattactctacttgactgcttagag

SEQ ID NO: 234377 - DNA, 33 bp, Homo sapien
attttagacaagacaggctcacagaagttgata

SEQ ID NO: 234378 - DNA, 33 bp, Homo sapien
attttagacaagacagtctcacagaagttgata

SEQ ID NO: 234379 - DNA, 33 bp, Homo sapien
ttaccaaagcagtaaaatgtcgtttgctgaaaa

SEQ ID NO: 234380 - DNA, 33 bp, Homo sapien
ttaccaaagcagtaaagtgtcgtttgctgaaaa

SEQ ID NO: 234381 - DNA, 33 bp, Homo sapien
aagtatttccaagtacaaagagttcattttctt

SEQ ID NO: 234382 - DNA, 33 bp, Homo sapien
aagtatttccaagtacgaagagttcattttctt

SEQ ID NO: 234383 - DNA, 33 bp, Homo sapien
ttttggcaggtgaactaaccaggtgtctattag

SEQ ID NO: 234384 - DNA, 33 bp, Homo sapien
ttttggcaggtgaactgaccaggtgtctattag

SEQ ID NO: 234385 - DNA, 33 bp, Homo sapien
acatcgtcaaacctgaggtccaaagaaaagaat

SEQ ID NO: 234386 - DNA, 33 bp, Homo sapien
acatcgtcaaacctgatgtccaaagaaaagaat

SEQ ID NO: 234387 - DNA, 33 bp, Homo sapien
ttgcctcattttccaaccaaaccaattagttcc

SEQ ID NO: 234388 - DNA, 33 bp, Homo sapien
ttgcctcattttccaatcaaaccaattagttcc

SEQ ID NO: 234389 - DNA, 33 bp, Homo sapien
tgcacggaggttgcgactagacaatggcaaaat

SEQ ID NO: 234390 - DNA, 33 bp, Homo sapien
tgcacggaggttgcgattagacaatggcaaaat

SEQ ID NO: 234391 - DNA, 33 bp, Homo sapien
gtcaccttgccaactaggcacttaataaatatt

SEQ ID NO: 234392 - DNA, 33 bp, Homo sapien
gtcaccttgccaactatgcacttaataaatatt

SEQ ID NO: 234393 - DNA, 33 bp, Homo sapien
agttcggaattgagaacgaggtatgggatttga

SEQ ID NO: 234394 - DNA, 33 bp, Homo sapien
agttcggaattgagaatgaggtatgggatttga

SEQ ID NO: 234395 - DNA, 33 bp, Homo sapien
gttatttcactttggagtacattataatcacct

SEQ ID NO: 234396 - DNA, 33 bp, Homo sapien
gttatttcactttggattacattataatcacct

SEQ ID NO: 234397 - DNA, 33 bp, Homo sapien
tgtatttagattatggacagactactttaattg

SEQ ID NO: 234398 - DNA, 33 bp, Homo sapien
tgtatttagattatgggcagactactttaattg

SEQ ID NO: 234399 - DNA, 33 bp, Homo sapien
aactcatcccttctgacggctttatatctaatt

SEQ ID NO: 234400 - DNA, 33 bp, Homo sapien
aactcatcccttctgatggctttatatctaatt

SEQ ID NO: 234401 - DNA, 33 bp, Homo sapien
gtgtttccattgcctacaaagtgacccaaaact

SEQ ID NO: 234402 - DNA, 33 bp, Homo sapien
gtgtttccattgcctataaagtgacccaaaact

SEQ ID NO: 234403 - DNA, 33 bp, Homo sapien
ctaagtgagaactgctcacactgtctatagcaa

SEQ ID NO: 234404 - DNA, 33 bp, Homo sapien
ctaagtgagaactgctgacactgtctatagcaa

SEQ ID NO: 234405 - DNA, 33 bp, Homo sapien
caagctatgctagacacggtgtggagaaaagac

SEQ ID NO: 234406 - DNA, 33 bp, Homo sapien
caagctatgctagacatggtgtggagaaaagac

SEQ ID NO: 234407 - DNA, 33 bp, Homo sapien
aaaatgtctctgtcaacgaggaaataaatagat

SEQ ID NO: 234408 - DNA, 33 bp, Homo sapien
aaaatgtctctgtcaatgaggaaataaatagat

SEQ ID NO: 234409 - DNA, 33 bp, Homo sapien
cagatagatgatggaaagtgcaaaataatcctt

SEQ ID NO: 234410 - DNA, 33 bp, Homo sapien
cagatagatgatggaaggtgcaaaataatcctt

SEQ ID NO: 234411 - DNA, 33 bp, Homo sapien
cagcataaaatatctaaagtgacagcggtattt

SEQ ID NO: 234412 - DNA, 33 bp, Homo sapien
cagcataaaatatctacagtgacagcggtattt

SEQ ID NO: 234413 - DNA, 33 bp, Homo sapien
tatcacttggttcttgcataaagagcttatgtc

SEQ ID NO: 234414 - DNA, 33 bp, Homo sapien
tatcacttggttcttgtataaagagcttatgtc

SEQ ID NO: 234415 - DNA, 33 bp, Homo sapien
ccaaactctagactgaacagatgtccagaaata

SEQ ID NO: 234416 - DNA, 33 bp, Homo sapien
ccaaactctagactgagcagatgtccagaaata

SEQ ID NO: 234417 - DNA, 33 bp, Homo sapien
agaattggtgtctgaaccttaagtcaataagaa

SEQ ID NO: 234418 - DNA, 33 bp, Homo sapien
agaattggtgtctgaatcttaagtcaataagaa

SEQ ID NO: 234419 - DNA, 33 bp, Homo sapien
caggtcagaaaataacaacaaaatgtcattatg

SEQ ID NO: 234420 - DNA, 33 bp, Homo sapien
caggtcagaaaataacgacaaaatgtcattatg

SEQ ID NO: 234421 - DNA, 33 bp, Homo sapien
caaggactctggggatcaagggaagctactctg

SEQ ID NO: 234422 - DNA, 33 bp, Homo sapien
caaggactctggggattaagggaagctactctg

SEQ ID NO: 234423 - DNA, 33 bp, Homo sapien
acaccgaacttttataagccagaggtacaggat

SEQ ID NO: 234424 - DNA, 33 bp, Homo sapien
acaccgaacttttatatgccagaggtacaggat

SEQ ID NO: 234425 - DNA, 33 bp, Homo sapien
taattctggccaacaacaaatactgcaagggta

SEQ ID NO: 234426 - DNA, 33 bp, Homo sapien
taattctggccaacaagaaatactgcaagggta

SEQ ID NO: 234427 - DNA, 33 bp, Homo sapien
cacacacagaaagaaaagggagcgttatttcct

SEQ ID NO: 234428 - DNA, 33 bp, Homo sapien
cacacacagaaagaaacgggagcgttatttcct

SEQ ID NO: 234429 - DNA, 33 bp, Homo sapien
gaatgcatgagatccaactaaaaattctgttct

SEQ ID NO: 234430 - DNA, 33 bp, Homo sapien
gaatgcatgagatccacctaaaaattctgttct

SEQ ID NO: 234431 - DNA, 33 bp, Homo sapien
ttcatcactcaattacaagtcagacatacagga

SEQ ID NO: 234432 - DNA, 33 bp, Homo sapien
ttcatcactcaattacgagtcagacatacagga

SEQ ID NO: 234433 - DNA, 33 bp, Homo sapien
aatagggcatctgaacaatttgcatggggcttt

SEQ ID NO: 234434 - DNA, 33 bp, Homo sapien
aatagggcatctgaacgatttgcatggggcttt

SEQ ID NO: 234435 - DNA, 33 bp, Homo sapien
cttttgcaataccatactatattcactgattta

SEQ ID NO: 234436 - DNA, 33 bp, Homo sapien
cttttgcaataccatattatattcactgattta

SEQ ID NO: 234437 - DNA, 33 bp, Homo sapien
ggtttagaaggctaaaatggacaatttgaactc

SEQ ID NO: 234438 - DNA, 33 bp, Homo sapien
ggtttagaaggctaaagtggacaatttgaactc

SEQ ID NO: 234439 - DNA, 33 bp, Homo sapien
aatgacctgttagccagaggtcattgatatcat

SEQ ID NO: 234440 - DNA, 33 bp, Homo sapien
aatgacctgttagccataggtcattgatatcat

SEQ ID NO: 234441 - DNA, 33 bp, Homo sapien
gaatgaggtcagattaaagaggtagacacagat

SEQ ID NO: 234442 - DNA, 33 bp, Homo sapien
gaatgaggtcagattagagaggtagacacagat

SEQ ID NO: 234443 - DNA, 33 bp, Homo sapien
ctggatgaccttggaaatatcatttgtcttctc

SEQ ID NO: 234444 - DNA, 33 bp, Homo sapien
ctggatgaccttggaattatcatttgtcttctc

SEQ ID NO: 234445 - DNA, 33 bp, Homo sapien
taactttagttcagaaaagaaaggtgttaaaat

SEQ ID NO: 234446 - DNA, 33 bp, Homo sapien
taactttagttcagaacagaaaggtgttaaaat

SEQ ID NO: 234447 - DNA, 33 bp, Homo sapien
atggactgagaacgacactaaataaacagatgt

SEQ ID NO: 234448 - DNA, 33 bp, Homo sapien
atggactgagaacgacgctaaataaacagatgt

SEQ ID NO: 234449 - DNA, 33 bp, Homo sapien
caaggagtaggaagaactgacaggaagagaagt

SEQ ID NO: 234450 - DNA, 33 bp, Homo sapien
caaggagtaggaagaagtgacaggaagagaagt

SEQ ID NO: 234451 - DNA, 33 bp, Homo sapien
ttatgggtctattgagcatttgatctttctttg

SEQ ID NO: 234452 - DNA, 33 bp, Homo sapien
ttatgggtctattgagtatttgatctttctttg

SEQ ID NO: 234453 - DNA, 33 bp, Homo sapien
tctggttctggtttgacgataaaaggtactggt

SEQ ID NO: 234454 - DNA, 33 bp, Homo sapien
tctggttctggtttgatgataaaaggtactggt

SEQ ID NO: 234455 - DNA, 33 bp, Homo sapien
agataacgcagaatcaggtttccctttactgcg

SEQ ID NO: 234456 - DNA, 33 bp, Homo sapien
agataacgcagaatcatgtttccctttactgcg

SEQ ID NO: 234457 - DNA, 33 bp, Homo sapien
atggtaacgaagcacacggtcttttatagtcag

SEQ ID NO: 234458 - DNA, 33 bp, Homo sapien
atggtaacgaagcacatggtcttttatagtcag

SEQ ID NO: 234459 - DNA, 33 bp, Homo sapien
tcatctgggtcagccagtgcaactattgacccg

SEQ ID NO: 234460 - DNA, 33 bp, Homo sapien
tcatctgggtcagccattgcaactattgacccg

SEQ ID NO: 234461 - DNA, 33 bp, Homo sapien
ttaaaacttttatgaaaccctggagaccacaag

SEQ ID NO: 234462 - DNA, 33 bp, Homo sapien
ttaaaacttttatgaagccctggagaccacaag

SEQ ID NO: 234463 - DNA, 33 bp, Homo sapien
atggccatggcaccacaatttcactcttctaag

SEQ ID NO: 234464 - DNA, 33 bp, Homo sapien
atggccatggcaccacgatttcactcttctaag

SEQ ID NO: 234465 - DNA, 33 bp, Homo sapien
gatcccagtgttaataaagaaatccatactcag

SEQ ID NO: 234466 - DNA, 33 bp, Homo sapien
gatcccagtgttaatatagaaatccatactcag

SEQ ID NO: 234467 - DNA, 33 bp, Homo sapien
tacaagtgacaaaaccagaactcaatagggttt

SEQ ID NO: 234468 - DNA, 33 bp, Homo sapien
tacaagtgacaaaaccggaactcaatagggttt

SEQ ID NO: 234469 - DNA, 33 bp, Homo sapien
tctgcattcagtagcaaaacaaagcctaatagt

SEQ ID NO: 234470 - DNA, 33 bp, Homo sapien
tctgcattcagtagcacaacaaagcctaatagt

SEQ ID NO: 234471 - DNA, 33 bp, Homo sapien
tgctagaaaaacagtcagaaaaatagaaatgca

SEQ ID NO: 234472 - DNA, 33 bp, Homo sapien
tgctagaaaaacagtcggaaaaatagaaatgca

SEQ ID NO: 234473 - DNA, 33 bp, Homo sapien
atgagaaatggagcaaagagtttatacatatat

SEQ ID NO: 234474 - DNA, 33 bp, Homo sapien
atgagaaatggagcaaggagtttatacatatat

SEQ ID NO: 234475 - DNA, 33 bp, Homo sapien
ttaaattgaaaggaaggaatagctgttaggtaa

SEQ ID NO: 234476 - DNA, 33 bp, Homo sapien
ttaaattgaaaggaagtaatagctgttaggtaa

SEQ ID NO: 234477 - DNA, 33 bp, Homo sapien
tgtgcattcctaactgcacatggaagactgtta

SEQ ID NO: 234478 - DNA, 33 bp, Homo sapien
tgtgcattcctaactgtacatggaagactgtta

SEQ ID NO: 234479 - DNA, 33 bp, Homo sapien
gcctggttttcacctcaatctgagtttcactac

SEQ ID NO: 234480 - DNA, 33 bp, Homo sapien
gcctggttttcacctcgatctgagtttcactac

SEQ ID NO: 234481 - DNA, 33 bp, Homo sapien
agattcacatatctgaaaatgcctagcaaaatt

SEQ ID NO: 234482 - DNA, 33 bp, Homo sapien
agattcacatatctgataatgcctagcaaaatt

SEQ ID NO: 234483 - DNA, 33 bp, Homo sapien
aaaacttgataagttacgatttttcaaggagtc

SEQ ID NO: 234484 - DNA, 33 bp, Homo sapien
aaaacttgataagttaggatttttcaaggagtc

SEQ ID NO: 234485 - DNA, 33 bp, Homo sapien
tatagatgagggctcaaaccagaataatgacag

SEQ ID NO: 234486 - DNA, 33 bp, Homo sapien
tatagatgagggctcagaccagaataatgacag

SEQ ID NO: 234487 - DNA, 33 bp, Homo sapien
ttgtcctcacacaatccaaagtagacataacta

SEQ ID NO: 234488 - DNA, 33 bp, Homo sapien
ttgtcctcacacaatcgaaagtagacataacta

SEQ ID NO: 234489 - DNA, 33 bp, Homo sapien
gcaggaggtctctaaaactaaagtcactccaga

SEQ ID NO: 234490 - DNA, 33 bp, Homo sapien
gcaggaggtctctaaacctaaagtcactccaga

SEQ ID NO: 234491 - DNA, 33 bp, Homo sapien
ttaattctgagaccaaagcaagctgttctgggg

SEQ ID NO: 234492 - DNA, 33 bp, Homo sapien
ttaattctgagaccaaggcaagctgttctgggg

SEQ ID NO: 234493 - DNA, 33 bp, Homo sapien
agaaggctaactttaccgaagactaaaatgaga

SEQ ID NO: 234494 - DNA, 33 bp, Homo sapien
agaaggctaactttactgaagactaaaatgaga

SEQ ID NO: 234495 - DNA, 33 bp, Homo sapien
aacttcaggaaatctcaaatcaaagcttcctaa

SEQ ID NO: 234496 - DNA, 33 bp, Homo sapien
aacttcaggaaatctccaatcaaagcttcctaa

SEQ ID NO: 234497 - DNA, 33 bp, Homo sapien
tagtaaacgcaccatacgtgatttgtcactcaa

SEQ ID NO: 234498 - DNA, 33 bp, Homo sapien
tagtaaacgcaccatatgtgatttgtcactcaa

SEQ ID NO: 234499 - DNA, 33 bp, Homo sapien
aaagaatagttctttgaagtcacagtgactgag

SEQ ID NO: 234500 - DNA, 33 bp, Homo sapien
aaagaatagttctttgtagtcacagtgactgag

SEQ ID NO: 234501 - DNA, 33 bp, Homo sapien
ttgtagtaaattcatgaagccttctccaaatag

SEQ ID NO: 234502 - DNA, 33 bp, Homo sapien
ttgtagtaaattcatgtagccttctccaaatag

SEQ ID NO: 234503 - DNA, 33 bp, Homo sapien
agggaggcaaattaccgaagctgcaatttcctg

SEQ ID NO: 234504 - DNA, 33 bp, Homo sapien
agggaggcaaattacctaagctgcaatttcctg

SEQ ID NO: 234505 - DNA, 33 bp, Homo sapien
gaaatcaaaatggataagccagtggtagactgt

SEQ ID NO: 234506 - DNA, 33 bp, Homo sapien
gaaatcaaaatggatatgccagtggtagactgt

SEQ ID NO: 234507 - DNA, 33 bp, Homo sapien
ggaggtaacaaaacggacatttttgcttcaatt

SEQ ID NO: 234508 - DNA, 33 bp, Homo sapien
ggaggtaacaaaacgggcatttttgcttcaatt

SEQ ID NO: 234509 - DNA, 33 bp, Homo sapien
atcctggaatgtcttcaaatgaaaagcgatttt

SEQ ID NO: 234510 - DNA, 33 bp, Homo sapien
atcctggaatgtcttcgaatgaaaagcgatttt

SEQ ID NO: 234511 - DNA, 33 bp, Homo sapien
attccaggatccacaaagttgatgaaaatgttc

SEQ ID NO: 234512 - DNA, 33 bp, Homo sapien
attccaggatccacaacgttgatgaaaatgttc

SEQ ID NO: 234513 - DNA, 33 bp, Homo sapien
aaattttacacaaagcagaggtgatagacttat

SEQ ID NO: 234514 - DNA, 33 bp, Homo sapien
aaattttacacaaagccgaggtgatagacttat

SEQ ID NO: 234515 - DNA, 33 bp, Homo sapien
agtgcaaatggaaaaaaattgattgcagaatta

SEQ ID NO: 234516 - DNA, 33 bp, Homo sapien
agtgcaaatggaaaaatattgattgcagaatta

SEQ ID NO: 234517 - DNA, 33 bp, Homo sapien
gatgtgatgcacaaaccgttcttcagattctgc

SEQ ID NO: 234518 - DNA, 33 bp, Homo sapien
gatgtgatgcacaaactgttcttcagattctgc

SEQ ID NO: 234519 - DNA, 33 bp, Homo sapien
aaatgcagaagctacaaaacatagttgtttacc

SEQ ID NO: 234520 - DNA, 33 bp, Homo sapien
aaatgcagaagctacagaacatagttgtttacc

SEQ ID NO: 234521 - DNA, 33 bp, Homo sapien
gtctgacatgtgaggacatggtgaaaagaccat

SEQ ID NO: 234522 - DNA, 33 bp, Homo sapien
gtctgacatgtgaggatatggtgaaaagaccat

SEQ ID NO: 234523 - DNA, 33 bp, Homo sapien
atactccaatggattaccttatgaaatctgcaa

SEQ ID NO: 234524 - DNA, 33 bp, Homo sapien
atactccaatggattatcttatgaaatctgcaa

SEQ ID NO: 234525 - DNA, 33 bp, Homo sapien
tttaattttccgctaaatcattaaagtgtgagg

SEQ ID NO: 234526 - DNA, 33 bp, Homo sapien
tttaattttccgctaactcattaaagtgtgagg

SEQ ID NO: 234527 - DNA, 33 bp, Homo sapien
tagggacaagtagcaacgtatctgattagtctc

SEQ ID NO: 234528 - DNA, 33 bp, Homo sapien
tagggacaagtagcaatgtatctgattagtctc

SEQ ID NO: 234529 - DNA, 33 bp, Homo sapien
aggactaattcaaaccaagctgtgactgagtat

SEQ ID NO: 234530 - DNA, 33 bp, Homo sapien
aggactaattcaaaccgagctgtgactgagtat

SEQ ID NO: 234531 - DNA, 33 bp, Homo sapien
agatgggaagtaagtaaacagagatgcctcttg

SEQ ID NO: 234532 - DNA, 33 bp, Homo sapien
agatgggaagtaagtacacagagatgcctcttg

SEQ ID NO: 234533 - DNA, 33 bp, Homo sapien
catttttctctacagggaaaagtagtacattca

SEQ ID NO: 234534 - DNA, 33 bp, Homo sapien
catttttctctacaggtaaaagtagtacattca

SEQ ID NO: 234535 - DNA, 33 bp, Homo sapien
aatcagcttgcttccacgcaatttgtagctcaa

SEQ ID NO: 234536 - DNA, 33 bp, Homo sapien
aatcagcttgcttccatgcaatttgtagctcaa

SEQ ID NO: 234537 - DNA, 33 bp, Homo sapien
ggctgagaggtgatcacgttaatctggaaaatt

SEQ ID NO: 234538 - DNA, 33 bp, Homo sapien
ggctgagaggtgatcatgttaatctggaaaatt

SEQ ID NO: 234539 - DNA, 33 bp, Homo sapien
tttcctttctcatctaacattgtttaattgtcc

SEQ ID NO: 234540 - DNA, 33 bp, Homo sapien
tttcctttctcatctagcattgtttaattgtcc

SEQ ID NO: 234541 - DNA, 33 bp, Homo sapien
atgaggccagtatcacagtaattttgcaagatg

SEQ ID NO: 234542 - DNA, 33 bp, Homo sapien
atgaggccagtatcacggtaattttgcaagatg

SEQ ID NO: 234543 - DNA, 33 bp, Homo sapien
tggaagatgggataaacgtagttaacatagact

SEQ ID NO: 234544 - DNA, 33 bp, Homo sapien
tggaagatgggataaatgtagttaacatagact

SEQ ID NO: 234545 - DNA, 33 bp, Homo sapien
ccataaacataaaggacaagttaggcatagagg

SEQ ID NO: 234546 - DNA, 33 bp, Homo sapien
ccataaacataaaggataagttaggcatagagg

SEQ ID NO: 234547 - DNA, 33 bp, Homo sapien
catggaaaccaaatgcactactgaggcttatga

SEQ ID NO: 234548 - DNA, 33 bp, Homo sapien
catggaaaccaaatgcgctactgaggcttatga

SEQ ID NO: 234549 - DNA, 33 bp, Homo sapien
agttttctatcactgactaatgtggacaagact

SEQ ID NO: 234550 - DNA, 33 bp, Homo sapien
agttttctatcactgattaatgtggacaagact

SEQ ID NO: 234551 - DNA, 33 bp, Homo sapien
gtatattagataagcccgagattggttgaagaa

SEQ ID NO: 234552 - DNA, 33 bp, Homo sapien
gtatattagataagcctgagattggttgaagaa

SEQ ID NO: 234553 - DNA, 33 bp, Homo sapien
atgtgcccagctaaaaattagggtgctaaaact

SEQ ID NO: 234554 - DNA, 33 bp, Homo sapien
atgtgcccagctaaaacttagggtgctaaaact

SEQ ID NO: 234555 - DNA, 33 bp, Homo sapien
atctgatgttgtgtcacgtttcactacatttaa

SEQ ID NO: 234556 - DNA, 33 bp, Homo sapien
atctgatgttgtgtcatgtttcactacatttaa

SEQ ID NO: 234557 - DNA, 33 bp, Homo sapien
caaatagctgtttgtagcatttcctgatatttg

SEQ ID NO: 234558 - DNA, 33 bp, Homo sapien
caaatagctgtttgtatcatttcctgatatttg

SEQ ID NO: 234559 - DNA, 33 bp, Homo sapien
ctgtctccactttccaacacattcctttctttg

SEQ ID NO: 234560 - DNA, 33 bp, Homo sapien
ctgtctccactttccagcacattcctttctttg

SEQ ID NO: 234561 - DNA, 33 bp, Homo sapien
gctgcaaataaaattaccggcctcgaggaatgg

SEQ ID NO: 234562 - DNA, 33 bp, Homo sapien
gctgcaaataaaattatcggcctcgaggaatgg

SEQ ID NO: 234563 - DNA, 33 bp, Homo sapien
agtgtagctaggcgagaaccagaatagggccct

SEQ ID NO: 234564 - DNA, 33 bp, Homo sapien
agtgtagctaggcgaggaccagaatagggccct

SEQ ID NO: 234565 - DNA, 33 bp, Homo sapien
tctacctaagcataccactatccaaatatcact

SEQ ID NO: 234566 - DNA, 33 bp, Homo sapien
tctacctaagcataccgctatccaaatatcact

SEQ ID NO: 234567 - DNA, 33 bp, Homo sapien
acgtaaataagaggctaaacctatatctcaaaa

SEQ ID NO: 234568 - DNA, 33 bp, Homo sapien
acgtaaataagaggcttaacctatatctcaaaa

SEQ ID NO: 234569 - DNA, 33 bp, Homo sapien
gcttagtttaaaagtcaccacttccctgaagat

SEQ ID NO: 234570 - DNA, 33 bp, Homo sapien
gcttagtttaaaagtctccacttccctgaagat

SEQ ID NO: 234571 - DNA, 33 bp, Homo sapien
cataatatctaaggcagaaattactcctaatat

SEQ ID NO: 234572 - DNA, 33 bp, Homo sapien
cataatatctaaggcataaattactcctaatat

SEQ ID NO: 234573 - DNA, 33 bp, Homo sapien
gggaatgattagtaaaagaacacggaaaaaatg

SEQ ID NO: 234574 - DNA, 33 bp, Homo sapien
gggaatgattagtaaacgaacacggaaaaaatg

SEQ ID NO: 234575 - DNA, 33 bp, Homo sapien
tgtgaatgttaacaaacgtgacaatgtaaaaac

SEQ ID NO: 234576 - DNA, 33 bp, Homo sapien
tgtgaatgttaacaaatgtgacaatgtaaaaac

SEQ ID NO: 234577 - DNA, 33 bp, Homo sapien
agctcatgacccgatcccaaagaataatgtgga

SEQ ID NO: 234578 - DNA, 33 bp, Homo sapien
agctcatgacccgatcgcaaagaataatgtgga

SEQ ID NO: 234579 - DNA, 33 bp, Homo sapien
ggctcaagcaaatgcaactgtgaagatttactt

SEQ ID NO: 234580 - DNA, 33 bp, Homo sapien
ggctcaagcaaatgcagctgtgaagatttactt

SEQ ID NO: 234581 - DNA, 33 bp, Homo sapien
aaacaaactgtcatctaaaaacgtctcctgaat

SEQ ID NO: 234582 - DNA, 33 bp, Homo sapien
aaacaaactgtcatctgaaaacgtctcctgaat

SEQ ID NO: 234583 - DNA, 33 bp, Homo sapien
atttttctcttttctgcaataggttaaggatcc

SEQ ID NO: 234584 - DNA, 33 bp, Homo sapien
atttttctcttttctgtaataggttaaggatcc

SEQ ID NO: 234585 - DNA, 33 bp, Homo sapien
gttgattactatcagcactaaaacccagtcttt

SEQ ID NO: 234586 - DNA, 33 bp, Homo sapien
gttgattactatcagcgctaaaacccagtcttt

SEQ ID NO: 234587 - DNA, 33 bp, Homo sapien
acttttctagctttcccaagccaggatctctag

SEQ ID NO: 234588 - DNA, 33 bp, Homo sapien
acttttctagctttcctaagccaggatctctag

SEQ ID NO: 234589 - DNA, 33 bp, Homo sapien
aaggttttctagttaaataatgctgaaatgggg

SEQ ID NO: 234590 - DNA, 33 bp, Homo sapien
aaggttttctagttaagtaatgctgaaatgggg

SEQ ID NO: 234591 - DNA, 33 bp, Homo sapien
ggtttgcacaggttacacagtatgttaatggca

SEQ ID NO: 234592 - DNA, 33 bp, Homo sapien
ggtttgcacaggttacgcagtatgttaatggca

SEQ ID NO: 234593 - DNA, 33 bp, Homo sapien
taatagttaaaaagaccctgtttcctgcttctt

SEQ ID NO: 234594 - DNA, 33 bp, Homo sapien
taatagttaaaaagactctgtttcctgcttctt

SEQ ID NO: 234595 - DNA, 33 bp, Homo sapien
actgttattagtgaaggctgtggtgaagctgtg

SEQ ID NO: 234596 - DNA, 33 bp, Homo sapien
actgttattagtgaagtctgtggtgaagctgtg

SEQ ID NO: 234597 - DNA, 33 bp, Homo sapien
ttcactaataacagtaaactaacccacagagga

SEQ ID NO: 234598 - DNA, 33 bp, Homo sapien
ttcactaataacagtacactaacccacagagga

SEQ ID NO: 234599 - DNA, 33 bp, Homo sapien
acacacacacacgtacaaaactcactggtaaag

SEQ ID NO: 234600 - DNA, 33 bp, Homo sapien
acacacacacacgtacgaaactcactggtaaag

SEQ ID NO: 234601 - DNA, 33 bp, Homo sapien
agccatcacctgggacaccacttcataattctg

SEQ ID NO: 234602 - DNA, 33 bp, Homo sapien
agccatcacctgggacgccacttcataattctg

SEQ ID NO: 234603 - DNA, 33 bp, Homo sapien
aaaggttgctgttataaaaaagtatgactctat

SEQ ID NO: 234604 - DNA, 33 bp, Homo sapien
aaaggttgctgttatacaaaagtatgactctat

SEQ ID NO: 234605 - DNA, 33 bp, Homo sapien
gatcagtccgttgcaccacctgtacacaatgag

SEQ ID NO: 234606 - DNA, 33 bp, Homo sapien
gatcagtccgttgcactacctgtacacaatgag

SEQ ID NO: 234607 - DNA, 33 bp, Homo sapien
gcttggacttgaattccctatgccaagcagctc

SEQ ID NO: 234608 - DNA, 33 bp, Homo sapien
gcttggacttgaattctctatgccaagcagctc

SEQ ID NO: 234609 - DNA, 33 bp, Homo sapien
agagtcccaagtagaacgtgaagtttaccttta

SEQ ID NO: 234610 - DNA, 33 bp, Homo sapien
agagtcccaagtagaatgtgaagtttaccttta

SEQ ID NO: 234611 - DNA, 33 bp, Homo sapien
atgtaacagcatattgaaaaagcttacaagaga

SEQ ID NO: 234612 - DNA, 33 bp, Homo sapien
atgtaacagcatattggaaaagcttacaagaga

SEQ ID NO: 234613 - DNA, 33 bp, Homo sapien
tttttcttatgtagaaagtgtagagttagataa

SEQ ID NO: 234614 - DNA, 33 bp, Homo sapien
tttttcttatgtagaaggtgtagagttagataa

SEQ ID NO: 234615 - DNA, 33 bp, Homo sapien
gatattattgcttaggaaaggcaaagtttgtaa

SEQ ID NO: 234616 - DNA, 33 bp, Homo sapien
gatattattgcttaggcaaggcaaagtttgtaa

SEQ ID NO: 234617 - DNA, 33 bp, Homo sapien
aatataccataggtcaatagatacaaaaacata

SEQ ID NO: 234618 - DNA, 33 bp, Homo sapien
aatataccataggtcactagatacaaaaacata

SEQ ID NO: 234619 - DNA, 33 bp, Homo sapien
ttatcttatggatatgcaaatttaactcagggg

SEQ ID NO: 234620 - DNA, 33 bp, Homo sapien
ttatcttatggatatggaaatttaactcagggg

SEQ ID NO: 234621 - DNA, 33 bp, Homo sapien
tgcattagaaaactaaaagagatgctacaccta

SEQ ID NO: 234622 - DNA, 33 bp, Homo sapien
tgcattagaaaactaatagagatgctacaccta

SEQ ID NO: 234623 - DNA, 33 bp, Homo sapien
atacacctgacagaaacgggtgccacttttgac

SEQ ID NO: 234624 - DNA, 33 bp, Homo sapien
atacacctgacagaaatgggtgccacttttgac

SEQ ID NO: 234625 - DNA, 33 bp, Homo sapien
tatgtgtaaatatcaccgtatgtatgagcattt

SEQ ID NO: 234626 - DNA, 33 bp, Homo sapien
tatgtgtaaatatcactgtatgtatgagcattt

SEQ ID NO: 234627 - DNA, 33 bp, Homo sapien
agtaagataaaagaagaccaaagacaaactact

SEQ ID NO: 234628 - DNA, 33 bp, Homo sapien
agtaagataaaagaaggccaaagacaaactact

SEQ ID NO: 234629 - DNA, 33 bp, Homo sapien
actcagaacctattaacactaagagaactggtc

SEQ ID NO: 234630 - DNA, 33 bp, Homo sapien
actcagaacctattaatactaagagaactggtc

SEQ ID NO: 234631 - DNA, 33 bp, Homo sapien
tcacataaatcaagtacatattcatttgtctct

SEQ ID NO: 234632 - DNA, 33 bp, Homo sapien
tcacataaatcaagtatatattcatttgtctct

SEQ ID NO: 234633 - DNA, 33 bp, Homo sapien
ggatttgggacaggaaaagcattggaaggggta

SEQ ID NO: 234634 - DNA, 33 bp, Homo sapien
ggatttgggacaggaatagcattggaaggggta

SEQ ID NO: 234635 - DNA, 33 bp, Homo sapien
taatctctgtctaactaaatccatttcttgact

SEQ ID NO: 234636 - DNA, 33 bp, Homo sapien
taatctctgtctaactgaatccatttcttgact

SEQ ID NO: 234637 - DNA, 33 bp, Homo sapien
agattctgcatacagacagctttatgtaaaata

SEQ ID NO: 234638 - DNA, 33 bp, Homo sapien
agattctgcatacagagagctttatgtaaaata

SEQ ID NO: 234639 - DNA, 33 bp, Homo sapien
tgcaatgtaactaaaaacttaacagtagctatg

SEQ ID NO: 234640 - DNA, 33 bp, Homo sapien
tgcaatgtaactaaaaccttaacagtagctatg

SEQ ID NO: 234641 - DNA, 33 bp, Homo sapien
tttctctttcttcctgaaaacaggcattaaaga

SEQ ID NO: 234642 - DNA, 33 bp, Homo sapien
tttctctttcttcctggaaacaggcattaaaga

SEQ ID NO: 234643 - DNA, 33 bp, Homo sapien
ataagcagttcataaaaggagaaatacaaatgc

SEQ ID NO: 234644 - DNA, 33 bp, Homo sapien
ataagcagttcataaatggagaaatacaaatgc

SEQ ID NO: 234645 - DNA, 33 bp, Homo sapien
ctaccttattctgttacaggacctaccacagct

SEQ ID NO: 234646 - DNA, 33 bp, Homo sapien
ctaccttattctgttataggacctaccacagct

SEQ ID NO: 234647 - DNA, 33 bp, Homo sapien
gcagcttgaagtacagaaagcagagtttcaagg

SEQ ID NO: 234648 - DNA, 33 bp, Homo sapien
gcagcttgaagtacaggaagcagagtttcaagg

SEQ ID NO: 234649 - DNA, 33 bp, Homo sapien
gccaaaagattacgtacgtgtgtatgtacatat

SEQ ID NO: 234650 - DNA, 33 bp, Homo sapien
gccaaaagattacgtatgtgtgtatgtacatat

SEQ ID NO: 234651 - DNA, 33 bp, Homo sapien
ttttgggctatcatcaccttaacaaatcatcca

SEQ ID NO: 234652 - DNA, 33 bp, Homo sapien
ttttgggctatcatcatcttaacaaatcatcca

SEQ ID NO: 234653 - DNA, 33 bp, Homo sapien
caaatcatccagtatacgctagagttaaactgc

SEQ ID NO: 234654 - DNA, 33 bp, Homo sapien
caaatcatccagtatatgctagagttaaactgc

SEQ ID NO: 234655 - DNA, 33 bp, Homo sapien
agcagaacggctcaaaaacactttcaaaatctt

SEQ ID NO: 234656 - DNA, 33 bp, Homo sapien
agcagaacggctcaaatacactttcaaaatctt

SEQ ID NO: 234657 - DNA, 33 bp, Homo sapien
ccaaataaatcaggaggagaatttccaagtgtc

SEQ ID NO: 234658 - DNA, 33 bp, Homo sapien
ccaaataaatcaggagtagaatttccaagtgtc

SEQ ID NO: 234659 - DNA, 33 bp, Homo sapien
gatatttttatctctaaggtgaactactgaaat

SEQ ID NO: 234660 - DNA, 33 bp, Homo sapien
gatatttttatctctacggtgaactactgaaat

SEQ ID NO: 234661 - DNA, 33 bp, Homo sapien
agaactaactttgttaaatgaagccattccctt

SEQ ID NO: 234662 - DNA, 33 bp, Homo sapien
agaactaactttgttatatgaagccattccctt

SEQ ID NO: 234663 - DNA, 33 bp, Homo sapien
gcaggagggttggaaaatagtagatggacttaa

SEQ ID NO: 234664 - DNA, 33 bp, Homo sapien
gcaggagggttggaaagtagtagatggacttaa

SEQ ID NO: 234665 - DNA, 33 bp, Homo sapien
gtgatgagcgagtaaaaatgtacatggtatagg

SEQ ID NO: 234666 - DNA, 33 bp, Homo sapien
gtgatgagcgagtaaagatgtacatggtatagg

SEQ ID NO: 234667 - DNA, 33 bp, Homo sapien
ttcatgaaatataaagacttgagtttcaacctc

SEQ ID NO: 234668 - DNA, 33 bp, Homo sapien
ttcatgaaatataaagccttgagtttcaacctc

SEQ ID NO: 234669 - DNA, 33 bp, Homo sapien
tttaaacgcaataagcacctcctctctactttg

SEQ ID NO: 234670 - DNA, 33 bp, Homo sapien
tttaaacgcaataagcgcctcctctctactttg

SEQ ID NO: 234671 - DNA, 33 bp, Homo sapien
tggatgatttggtccactcaatagacattgtgt

SEQ ID NO: 234672 - DNA, 33 bp, Homo sapien
tggatgatttggtccattcaatagacattgtgt

SEQ ID NO: 234673 - DNA, 33 bp, Homo sapien
caagatgactggacaccgtattcatttctcagg

SEQ ID NO: 234674 - DNA, 33 bp, Homo sapien
caagatgactggacactgtattcatttctcagg

SEQ ID NO: 234675 - DNA, 33 bp, Homo sapien
atttgaggtgaagaaacatacatggaaatggca

SEQ ID NO: 234676 - DNA, 33 bp, Homo sapien
atttgaggtgaagaaagatacatggaaatggca

SEQ ID NO: 234677 - DNA, 33 bp, Homo sapien
ttcctgtccctatctacgcccttctcgatgact

SEQ ID NO: 234678 - DNA, 33 bp, Homo sapien
ttcctgtccctatctatgcccttctcgatgact

SEQ ID NO: 234679 - DNA, 33 bp, Homo sapien
ttgcagatatagaaacggaagctcaactaactt

SEQ ID NO: 234680 - DNA, 33 bp, Homo sapien
ttgcagatatagaaactgaagctcaactaactt

SEQ ID NO: 234681 - DNA, 33 bp, Homo sapien
aatgtctcacctcaagcaagtagaaaaacaaga

SEQ ID NO: 234682 - DNA, 33 bp, Homo sapien
aatgtctcacctcaaggaagtagaaaaacaaga

SEQ ID NO: 234683 - DNA, 33 bp, Homo sapien
ttccagagacactcaacgtatccactttccaac

SEQ ID NO: 234684 - DNA, 33 bp, Homo sapien
ttccagagacactcaatgtatccactttccaac

SEQ ID NO: 234685 - DNA, 33 bp, Homo sapien
atggctacccctccataatgccaaaatatgcaa

SEQ ID NO: 234686 - DNA, 33 bp, Homo sapien
atggctacccctccatgatgccaaaatatgcaa

SEQ ID NO: 234687 - DNA, 33 bp, Homo sapien
aaagtaccttatggcaaagatcatgtgtgtgtt

SEQ ID NO: 234688 - DNA, 33 bp, Homo sapien
aaagtaccttatggcagagatcatgtgtgtgtt

SEQ ID NO: 234689 - DNA, 33 bp, Homo sapien
gtgatttagcagtgtccaccaaagctataaata

SEQ ID NO: 234690 - DNA, 33 bp, Homo sapien
gtgatttagcagtgtctaccaaagctataaata

SEQ ID NO: 234691 - DNA, 33 bp, Homo sapien
gtggaaagttcaggtacagatgtctagcagcca

SEQ ID NO: 234692 - DNA, 33 bp, Homo sapien
gtggaaagttcaggtagagatgtctagcagcca

SEQ ID NO: 234693 - DNA, 33 bp, Homo sapien
gagcatgtatatttacaagtaagtccaagtagc

SEQ ID NO: 234694 - DNA, 33 bp, Homo sapien
gagcatgtatatttacgagtaagtccaagtagc

SEQ ID NO: 234695 - DNA, 33 bp, Homo sapien
gtgaaggaaggctaacaaggctgcagtggagag

SEQ ID NO: 234696 - DNA, 33 bp, Homo sapien
gtgaaggaaggctaacgaggctgcagtggagag

SEQ ID NO: 234697 - DNA, 33 bp, Homo sapien
caagtcaaatttgcttaaacaattacaattgct

SEQ ID NO: 234698 - DNA, 33 bp, Homo sapien
caagtcaaatttgcttgaacaattacaattgct

SEQ ID NO: 234699 - DNA, 33 bp, Homo sapien
ccagttttcccacttacgtgaataatgtctaca

SEQ ID NO: 234700 - DNA, 33 bp, Homo sapien
ccagttttcccacttaggtgaataatgtctaca

SEQ ID NO: 234701 - DNA, 33 bp, Homo sapien
cagcaatcattataatcatcagtgtggtacatg

SEQ ID NO: 234702 - DNA, 33 bp, Homo sapien
cagcaatcattataattatcagtgtggtacatg

SEQ ID NO: 234703 - DNA, 33 bp, Homo sapien
ggctcatgaagaactacggagatgactaatagg

SEQ ID NO: 234704 - DNA, 33 bp, Homo sapien
ggctcatgaagaactatggagatgactaatagg

SEQ ID NO: 234705 - DNA, 33 bp, Homo sapien
caggtaataaatgcaactgtggctcagattcaa

SEQ ID NO: 234706 - DNA, 33 bp, Homo sapien
caggtaataaatgcaattgtggctcagattcaa

SEQ ID NO: 234707 - DNA, 33 bp, Homo sapien
actgaaaataacaagaatcaactgtggcttaaa

SEQ ID NO: 234708 - DNA, 33 bp, Homo sapien
actgaaaataacaagactcaactgtggcttaaa

SEQ ID NO: 234709 - DNA, 33 bp, Homo sapien
tcatcaatcttttaaagaaatctggtaaattca

SEQ ID NO: 234710 - DNA, 33 bp, Homo sapien
tcatcaatcttttaaataaatctggtaaattca

SEQ ID NO: 234711 - DNA, 33 bp, Homo sapien
ttgaataacatttcatgaagtgtgagataattt

SEQ ID NO: 234712 - DNA, 33 bp, Homo sapien
ttgaataacatttcattaagtgtgagataattt

SEQ ID NO: 234713 - DNA, 33 bp, Homo sapien
catgcttccttatcaaaaacacatattctcctt

SEQ ID NO: 234714 - DNA, 33 bp, Homo sapien
catgcttccttatcaagaacacatattctcctt

SEQ ID NO: 234715 - DNA, 33 bp, Homo sapien
ggtgcccgacattgccaaagcttgactaggtaa

SEQ ID NO: 234716 - DNA, 33 bp, Homo sapien
ggtgcccgacattgccgaagcttgactaggtaa

SEQ ID NO: 234717 - DNA, 33 bp, Homo sapien
caaagaacagaaacacaggttagagctccattt

SEQ ID NO: 234718 - DNA, 33 bp, Homo sapien
caaagaacagaaacacgggttagagctccattt

SEQ ID NO: 234719 - DNA, 33 bp, Homo sapien
ggtccaggaataactcacaagatcctaccgcag

SEQ ID NO: 234720 - DNA, 33 bp, Homo sapien
ggtccaggaataactcccaagatcctaccgcag

SEQ ID NO: 234721 - DNA, 33 bp, Homo sapien
gttaaggctcagttataaaggataaaattcata

SEQ ID NO: 234722 - DNA, 33 bp, Homo sapien
gttaaggctcagttatgaaggataaaattcata

SEQ ID NO: 234723 - DNA, 33 bp, Homo sapien
tttctcccagttacaacgttcagtgttgaaatt

SEQ ID NO: 234724 - DNA, 33 bp, Homo sapien
tttctcccagttacaatgttcagtgttgaaatt

SEQ ID NO: 234725 - DNA, 33 bp, Homo sapien
ggaagtggcatgtggccaacacaagatacagaa

SEQ ID NO: 234726 - DNA, 33 bp, Homo sapien
ggaagtggcatgtggctaacacaagatacagaa

SEQ ID NO: 234727 - DNA, 33 bp, Homo sapien
gaaactggaaaggaaaatctgagggtataggtc

SEQ ID NO: 234728 - DNA, 33 bp, Homo sapien
gaaactggaaaggaaagtctgagggtataggtc

SEQ ID NO: 234729 - DNA, 33 bp, Homo sapien
ctaatgtcactgtgaacgtgaatggccctttaa

SEQ ID NO: 234730 - DNA, 33 bp, Homo sapien
ctaatgtcactgtgaatgtgaatggccctttaa

SEQ ID NO: 234731 - DNA, 33 bp, Homo sapien
tagaagacatttaaaaattacaatgaatcaaaa

SEQ ID NO: 234732 - DNA, 33 bp, Homo sapien
tagaagacatttaaaagttacaatgaatcaaaa

SEQ ID NO: 234733 - DNA, 33 bp, Homo sapien
gtccatttcacgtatacgatactttctgccaaa

SEQ ID NO: 234734 - DNA, 33 bp, Homo sapien
gtccatttcacgtatatgatactttctgccaaa

SEQ ID NO: 234735 - DNA, 33 bp, Homo sapien
tgggaaagagagattacgaagagacacaaggaa

SEQ ID NO: 234736 - DNA, 33 bp, Homo sapien
tgggaaagagagattatgaagagacacaaggaa

SEQ ID NO: 234737 - DNA, 33 bp, Homo sapien
ctggggtaaagtgacaactcactggagcaggct

SEQ ID NO: 234738 - DNA, 33 bp, Homo sapien
ctggggtaaagtgacatctcactggagcaggct

SEQ ID NO: 234739 - DNA, 33 bp, Homo sapien
aaaggaaggaatactcaagctttcttattagtg

SEQ ID NO: 234740 - DNA, 33 bp, Homo sapien
aaaggaaggaatactcgagctttcttattagtg

SEQ ID NO: 234741 - DNA, 33 bp, Homo sapien
agtaatagcacttgtacgataaaaccaaacctt

SEQ ID NO: 234742 - DNA, 33 bp, Homo sapien
agtaatagcacttgtaggataaaaccaaacctt

SEQ ID NO: 234743 - DNA, 33 bp, Homo sapien
atttaagcccatttacacgatttctcacaaact

SEQ ID NO: 234744 - DNA, 33 bp, Homo sapien
atttaagcccatttacgcgatttctcacaaact

SEQ ID NO: 234745 - DNA, 33 bp, Homo sapien
atcaggtggataattacgtctatcacctactaa

SEQ ID NO: 234746 - DNA, 33 bp, Homo sapien
atcaggtggataattatgtctatcacctactaa

SEQ ID NO: 234747 - DNA, 33 bp, Homo sapien
ctatggctttggcccaatctctttcttgagctc

SEQ ID NO: 234748 - DNA, 33 bp, Homo sapien
ctatggctttggcccattctctttcttgagctc

SEQ ID NO: 234749 - DNA, 33 bp, Homo sapien
tctctaagacgtaaaaccttctcagtatgggag

SEQ ID NO: 234750 - DNA, 33 bp, Homo sapien
tctctaagacgtaaaatcttctcagtatgggag

SEQ ID NO: 234751 - DNA, 33 bp, Homo sapien
acctgatgggagagacacggctaagtaggaaag

SEQ ID NO: 234752 - DNA, 33 bp, Homo sapien
acctgatgggagagacgcggctaagtaggaaag

SEQ ID NO: 234753 - DNA, 33 bp, Homo sapien
tttaagaaaggacgacaggatgagaggtgcaca

SEQ ID NO: 234754 - DNA, 33 bp, Homo sapien
tttaagaaaggacgacgggatgagaggtgcaca

SEQ ID NO: 234755 - DNA, 33 bp, Homo sapien
aaccccagaatattcacattgtaatcaggagat

SEQ ID NO: 234756 - DNA, 33 bp, Homo sapien
aaccccagaatattcatattgtaatcaggagat

SEQ ID NO: 234757 - DNA, 33 bp, Homo sapien
ttcgatttatcttggacagccccatctaggcca

SEQ ID NO: 234758 - DNA, 33 bp, Homo sapien
ttcgatttatcttggagagccccatctaggcca

SEQ ID NO: 234759 - DNA, 33 bp, Homo sapien
tgttctgtttaaaatgaagttctgaagttcctt

SEQ ID NO: 234760 - DNA, 33 bp, Homo sapien
tgttctgtttaaaatgcagttctgaagttcctt

SEQ ID NO: 234761 - DNA, 33 bp, Homo sapien
aatgataacaattttgcatgtaactcagtaaga

SEQ ID NO: 234762 - DNA, 33 bp, Homo sapien
aatgataacaattttgtatgtaactcagtaaga

SEQ ID NO: 234763 - DNA, 33 bp, Homo sapien
atgccatatctccaaaagcagttttccatatca

SEQ ID NO: 234764 - DNA, 33 bp, Homo sapien
atgccatatctccaaaggcagttttccatatca

SEQ ID NO: 234765 - DNA, 33 bp, Homo sapien
ttttccatcctctgtgacaaatacccaattaaa

SEQ ID NO: 234766 - DNA, 33 bp, Homo sapien
ttttccatcctctgtggcaaatacccaattaaa

SEQ ID NO: 234767 - DNA, 33 bp, Homo sapien
ccacctctctggctacaacaacatcctatttat

SEQ ID NO: 234768 - DNA, 33 bp, Homo sapien
ccacctctctggctactacaacatcctatttat

SEQ ID NO: 234769 - DNA, 33 bp, Homo sapien
gaagtttgtgttgaagaaccatgtctgtttgtg

SEQ ID NO: 234770 - DNA, 33 bp, Homo sapien
gaagtttgtgttgaaggaccatgtctgtttgtg

SEQ ID NO: 234771 - DNA, 33 bp, Homo sapien
tttgtggaaaatgatacgattacacctatttgt

SEQ ID NO: 234772 - DNA, 33 bp, Homo sapien
tttgtggaaaatgatatgattacacctatttgt

SEQ ID NO: 234773 - DNA, 33 bp, Homo sapien
aacatagtctagtgaccgccatctttttttgca

SEQ ID NO: 234774 - DNA, 33 bp, Homo sapien
aacatagtctagtgactgccatctttttttgca

SEQ ID NO: 234775 - DNA, 33 bp, Homo sapien
cacaaagcactgtttacactaatcactatgtca

SEQ ID NO: 234776 - DNA, 33 bp, Homo sapien
cacaaagcactgtttatactaatcactatgtca

SEQ ID NO: 234777 - DNA, 33 bp, Homo sapien
gaacaaaaaagaaagacagtgcatataaattag

SEQ ID NO: 234778 - DNA, 33 bp, Homo sapien
gaacaaaaaagaaagagagtgcatataaattag

SEQ ID NO: 234779 - DNA, 33 bp, Homo sapien
gggcaaattctaggcaaataataaacaatactt

SEQ ID NO: 234780 - DNA, 33 bp, Homo sapien
gggcaaattctaggcacataataaacaatactt

SEQ ID NO: 234781 - DNA, 33 bp, Homo sapien
tctcactataccacagaagtgcagaagtagaca

SEQ ID NO: 234782 - DNA, 33 bp, Homo sapien
tctcactataccacagcagtgcagaagtagaca

SEQ ID NO: 234783 - DNA, 33 bp, Homo sapien
cattactttctgcttcaagcccacattccagaa

SEQ ID NO: 234784 - DNA, 33 bp, Homo sapien
cattactttctgcttcgagcccacattccagaa

SEQ ID NO: 234785 - DNA, 33 bp, Homo sapien
ttggggaagacaagctcacaagtagtttcatta

SEQ ID NO: 234786 - DNA, 33 bp, Homo sapien
ttggggaagacaagcttacaagtagtttcatta

SEQ ID NO: 234787 - DNA, 33 bp, Homo sapien
gaaggtgagagtattaacagaccttgcaggaga

SEQ ID NO: 234788 - DNA, 33 bp, Homo sapien
gaaggtgagagtattagcagaccttgcaggaga

SEQ ID NO: 234789 - DNA, 33 bp, Homo sapien
tttgacccttctttgactacaatgctacaggaa

SEQ ID NO: 234790 - DNA, 33 bp, Homo sapien
tttgacccttctttgattacaatgctacaggaa

SEQ ID NO: 234791 - DNA, 33 bp, Homo sapien
catatccgccataacaatatgttgcattatata

SEQ ID NO: 234792 - DNA, 33 bp, Homo sapien
catatccgccataacagtatgttgcattatata

SEQ ID NO: 234793 - DNA, 33 bp, Homo sapien
gtgtcagaggttaatcaaagacagaagttgggt

SEQ ID NO: 234794 - DNA, 33 bp, Homo sapien
gtgtcagaggttaatcgaagacagaagttgggt

SEQ ID NO: 234795 - DNA, 33 bp, Homo sapien
acacagtcttctcttacattcaaacaggaagtg

SEQ ID NO: 234796 - DNA, 33 bp, Homo sapien
acacagtcttctcttagattcaaacaggaagtg

SEQ ID NO: 234797 - DNA, 33 bp, Homo sapien
tgtggcctgtgaagaacagttccaactttgcac

SEQ ID NO: 234798 - DNA, 33 bp, Homo sapien
tgtggcctgtgaagaatagttccaactttgcac

SEQ ID NO: 234799 - DNA, 33 bp, Homo sapien
agtgagctatgaccaccgtactcaagcctgtgc

SEQ ID NO: 234800 - DNA, 33 bp, Homo sapien
agtgagctatgaccactgtactcaagcctgtgc

SEQ ID NO: 234801 - DNA, 33 bp, Homo sapien
gagaaatctgagaaaaacaatagacttgtgaca

SEQ ID NO: 234802 - DNA, 33 bp, Homo sapien
gagaaatctgagaaaatcaatagacttgtgaca

SEQ ID NO: 234803 - DNA, 33 bp, Homo sapien
atctttcctcttctcacgttttgttgagtgtta

SEQ ID NO: 234804 - DNA, 33 bp, Homo sapien
atctttcctcttctcatgttttgttgagtgtta

SEQ ID NO: 234805 - DNA, 33 bp, Homo sapien
ctggtatagccatttacgaatgaacatcttcac

SEQ ID NO: 234806 - DNA, 33 bp, Homo sapien
ctggtatagccatttatgaatgaacatcttcac

SEQ ID NO: 234807 - DNA, 33 bp, Homo sapien
gatgtttgaatcatgaatagtagtaagaataga

SEQ ID NO: 234808 - DNA, 33 bp, Homo sapien
gatgtttgaatcatgagtagtagtaagaataga

SEQ ID NO: 234809 - DNA, 33 bp, Homo sapien
aatttgtccagcagcacgaaaagtaacttgaga

SEQ ID NO: 234810 - DNA, 33 bp, Homo sapien
aatttgtccagcagcaggaaaagtaacttgaga

SEQ ID NO: 234811 - DNA, 33 bp, Homo sapien
tacatcagcccaggccacaagctatggtgcaga

SEQ ID NO: 234812 - DNA, 33 bp, Homo sapien
tacatcagcccaggccgcaagctatggtgcaga

SEQ ID NO: 234813 - DNA, 33 bp, Homo sapien
accaaaatccaatgaaataggttctgacattag

SEQ ID NO: 234814 - DNA, 33 bp, Homo sapien
accaaaatccaatgaagtaggttctgacattag

SEQ ID NO: 234815 - DNA, 33 bp, Homo sapien
agccatgatatgacacaggttacaatagattaa

SEQ ID NO: 234816 - DNA, 33 bp, Homo sapien
agccatgatatgacacgggttacaatagattaa

SEQ ID NO: 234817 - DNA, 33 bp, Homo sapien
gtacaggcgtttgtacagcatatatattctagg

SEQ ID NO: 234818 - DNA, 33 bp, Homo sapien
gtacaggcgtttgtacggcatatatattctagg

SEQ ID NO: 234819 - DNA, 33 bp, Homo sapien
aatcccttagatgtacaaggtcttcaagactca

SEQ ID NO: 234820 - DNA, 33 bp, Homo sapien
aatcccttagatgtacgaggtcttcaagactca

SEQ ID NO: 234821 - DNA, 33 bp, Homo sapien
tgcctctcctgatcttaaacatatatttctgta

SEQ ID NO: 234822 - DNA, 33 bp, Homo sapien
tgcctctcctgatcttgaacatatatttctgta

SEQ ID NO: 234823 - DNA, 33 bp, Homo sapien
gtttatactgtagcacaaaaatttactttttat

SEQ ID NO: 234824 - DNA, 33 bp, Homo sapien
gtttatactgtagcacgaaaatttactttttat

SEQ ID NO: 234825 - DNA, 33 bp, Homo sapien
agctactgctaatacactaacacttggattatg

SEQ ID NO: 234826 - DNA, 33 bp, Homo sapien
agctactgctaatacattaacacttggattatg

SEQ ID NO: 234827 - DNA, 33 bp, Homo sapien
gcatcgctggcccaaacgaaagccgccagagca

SEQ ID NO: 234828 - DNA, 33 bp, Homo sapien
gcatcgctggcccaaatgaaagccgccagagca

SEQ ID NO: 234829 - DNA, 33 bp, Homo sapien
gcatttaataaatgctaacttgaattcatacag

SEQ ID NO: 234830 - DNA, 33 bp, Homo sapien
gcatttaataaatgctgacttgaattcatacag

SEQ ID NO: 234831 - DNA, 33 bp, Homo sapien
gctttttcttcattcaaatttcagtctaagcct

SEQ ID NO: 234832 - DNA, 33 bp, Homo sapien
gctttttcttcattcagatttcagtctaagcct

SEQ ID NO: 234833 - DNA, 33 bp, Homo sapien
tcgacgccatgtgcaaggtactataataagaaa

SEQ ID NO: 234834 - DNA, 33 bp, Homo sapien
tcgacgccatgtgcaatgtactataataagaaa

SEQ ID NO: 234835 - DNA, 33 bp, Homo sapien
atttagatttacatgaactctttaaacattatt

SEQ ID NO: 234836 - DNA, 33 bp, Homo sapien
atttagatttacatgagctctttaaacattatt

SEQ ID NO: 234837 - DNA, 33 bp, Homo sapien
ttaatgcttactaaaaaccaatgcttaacatac

SEQ ID NO: 234838 - DNA, 33 bp, Homo sapien
ttaatgcttactaaaagccaatgcttaacatac

SEQ ID NO: 234839 - DNA, 33 bp, Homo sapien
cccatcacttacccataaccatcggcaccctga

SEQ ID NO: 234840 - DNA, 33 bp, Homo sapien
cccatcacttacccatgaccatcggcaccctga

SEQ ID NO: 234841 - DNA, 33 bp, Homo sapien
tttagagacattcataaggtgtccctggttcct

SEQ ID NO: 234842 - DNA, 33 bp, Homo sapien
tttagagacattcatatggtgtccctggttcct

SEQ ID NO: 234843 - DNA, 33 bp, Homo sapien
aatggtacacaaaattaaaatcaagaaaaagct

SEQ ID NO: 234844 - DNA, 33 bp, Homo sapien
aatggtacacaaaattgaaatcaagaaaaagct

SEQ ID NO: 234845 - DNA, 33 bp, Homo sapien
gcctatgtaggcacctcaggagtttctttcatg

SEQ ID NO: 234846 - DNA, 33 bp, Homo sapien
gcctatgtaggcaccttaggagtttctttcatg

SEQ ID NO: 234847 - DNA, 33 bp, Homo sapien
aagtattgtttaaaaaaagccagaattatttta

SEQ ID NO: 234848 - DNA, 33 bp, Homo sapien
aagtattgtttaaaaacagccagaattatttta

SEQ ID NO: 234849 - DNA, 33 bp, Homo sapien
gaaatcctacattaacaaagtggcacaataatt

SEQ ID NO: 234850 - DNA, 33 bp, Homo sapien
gaaatcctacattaacgaagtggcacaataatt

SEQ ID NO: 234851 - DNA, 33 bp, Homo sapien
aggatattctacactaacaaggtcacaaagtca

SEQ ID NO: 234852 - DNA, 33 bp, Homo sapien
aggatattctacactagcaaggtcacaaagtca

SEQ ID NO: 234853 - DNA, 33 bp, Homo sapien
agtagtaaaaagcaacaagagagaactacaata

SEQ ID NO: 234854 - DNA, 33 bp, Homo sapien
agtagtaaaaagcaacgagagagaactacaata

SEQ ID NO: 234855 - DNA, 33 bp, Homo sapien
aggcactctagatgtacggtagtgatacacatg

SEQ ID NO: 234856 - DNA, 33 bp, Homo sapien
aggcactctagatgtatggtagtgatacacatg

SEQ ID NO: 234857 - DNA, 33 bp, Homo sapien
tttcatcttcattcggcatctagctatgtgctt

SEQ ID NO: 234858 - DNA, 33 bp, Homo sapien
tttcatcttcattcggtatctagctatgtgctt

SEQ ID NO: 234859 - DNA, 33 bp, Homo sapien
tgatatccacagcataataaagaatacaagtat

SEQ ID NO: 234860 - DNA, 33 bp, Homo sapien
tgatatccacagcatagtaaagaatacaagtat

SEQ ID NO: 234861 - DNA, 33 bp, Homo sapien
ggaaaaacttaagagaagctgtagtagttaaag

SEQ ID NO: 234862 - DNA, 33 bp, Homo sapien
ggaaaaacttaagagatgctgtagtagttaaag

SEQ ID NO: 234863 - DNA, 33 bp, Homo sapien
aagctctaatgatataaggttctgaggattaat

SEQ ID NO: 234864 - DNA, 33 bp, Homo sapien
aagctctaatgatatagggttctgaggattaat

SEQ ID NO: 234865 - DNA, 33 bp, Homo sapien
agctagaaggttcaacaaactgaaaatagactc

SEQ ID NO: 234866 - DNA, 33 bp, Homo sapien
agctagaaggttcaactaactgaaaatagactc

SEQ ID NO: 234867 - DNA, 33 bp, Homo sapien
aaggaaaacttaaatgcaaacaagaggccaggg

SEQ ID NO: 234868 - DNA, 33 bp, Homo sapien
aaggaaaacttaaatggaaacaagaggccaggg

SEQ ID NO: 234869 - DNA, 33 bp, Homo sapien
tctccaaattcctagaaaccacagtaaaaaggg

SEQ ID NO: 234870 - DNA, 33 bp, Homo sapien
tctccaaattcctagagaccacagtaaaaaggg

SEQ ID NO: 234871 - DNA, 33 bp, Homo sapien
agctatatgaggatcacggtcagtggctcaaga

SEQ ID NO: 234872 - DNA, 33 bp, Homo sapien
agctatatgaggatcatggtcagtggctcaaga

SEQ ID NO: 234873 - DNA, 33 bp, Homo sapien
atctcttggtgaacataagaataagaacatgta

SEQ ID NO: 234874 - DNA, 33 bp, Homo sapien
atctcttggtgaacatgagaataagaacatgta

SEQ ID NO: 234875 - DNA, 33 bp, Homo sapien
cttaaaaattcttacaaatgattgtgctgtagt

SEQ ID NO: 234876 - DNA, 33 bp, Homo sapien
cttaaaaattcttacagatgattgtgctgtagt

SEQ ID NO: 234877 - DNA, 33 bp, Homo sapien
acttagggtatcatgtaacacaattggcctcat

SEQ ID NO: 234878 - DNA, 33 bp, Homo sapien
acttagggtatcatgttacacaattggcctcat

SEQ ID NO: 234879 - DNA, 33 bp, Homo sapien
tggtatcatgttatacacaacgttttattattt

SEQ ID NO: 234880 - DNA, 33 bp, Homo sapien
tggtatcatgttatacgcaacgttttattattt

SEQ ID NO: 234881 - DNA, 33 bp, Homo sapien
gtataacatgataccacaagtaatcaaataact

SEQ ID NO: 234882 - DNA, 33 bp, Homo sapien
gtataacatgataccataagtaatcaaataact

SEQ ID NO: 234883 - DNA, 33 bp, Homo sapien
gtctaaaattctctcccgattgagagcctctga

SEQ ID NO: 234884 - DNA, 33 bp, Homo sapien
gtctaaaattctctcctgattgagagcctctga

SEQ ID NO: 234885 - DNA, 33 bp, Homo sapien
aaaactctattaagaccaaaatcaagggctctg

SEQ ID NO: 234886 - DNA, 33 bp, Homo sapien
aaaactctattaagacgaaaatcaagggctctg

SEQ ID NO: 234887 - DNA, 33 bp, Homo sapien
tcattcttggactacagcatgtgacaaaaatag

SEQ ID NO: 234888 - DNA, 33 bp, Homo sapien
tcattcttggactacatcatgtgacaaaaatag

SEQ ID NO: 234889 - DNA, 33 bp, Homo sapien
gcactggtcctaaggaagtttattctttgaatg

SEQ ID NO: 234890 - DNA, 33 bp, Homo sapien
gcactggtcctaaggatgtttattctttgaatg

SEQ ID NO: 234891 - DNA, 33 bp, Homo sapien
ctttttcagaagatcaatagaaatgggaagaga

SEQ ID NO: 234892 - DNA, 33 bp, Homo sapien
ctttttcagaagatcagtagaaatgggaagaga

SEQ ID NO: 234893 - DNA, 33 bp, Homo sapien
agtattaaggaacaaacagtttcaaaagctgaa

SEQ ID NO: 234894 - DNA, 33 bp, Homo sapien
agtattaaggaacaaatagtttcaaaagctgaa

SEQ ID NO: 234895 - DNA, 33 bp, Homo sapien
tttctaactttttagtaaagatgttccacagag

SEQ ID NO: 234896 - DNA, 33 bp, Homo sapien
tttctaactttttagtgaagatgttccacagag

SEQ ID NO: 234897 - DNA, 33 bp, Homo sapien
aagacttcaagtcagccgctctttaggccttat

SEQ ID NO: 234898 - DNA, 33 bp, Homo sapien
aagacttcaagtcagctgctctttaggccttat

SEQ ID NO: 234899 - DNA, 33 bp, Homo sapien
aggacaggtaattagaaaagcaaaacacattct

SEQ ID NO: 234900 - DNA, 33 bp, Homo sapien
aggacaggtaattagagaagcaaaacacattct

SEQ ID NO: 234901 - DNA, 33 bp, Homo sapien
ttctgttagctacctacgaattcacattccgtg

SEQ ID NO: 234902 - DNA, 33 bp, Homo sapien
ttctgttagctacctatgaattcacattccgtg

SEQ ID NO: 234903 - DNA, 33 bp, Homo sapien
tatcaatatcgtgagaaacgtcacctgaccttt

SEQ ID NO: 234904 - DNA, 33 bp, Homo sapien
tatcaatatcgtgagagacgtcacctgaccttt

SEQ ID NO: 234905 - DNA, 33 bp, Homo sapien
atgaatttcctacatacgaatttcctacacagg

SEQ ID NO: 234906 - DNA, 33 bp, Homo sapien
atgaatttcctacatatgaatttcctacacagg

SEQ ID NO: 234907 - DNA, 33 bp, Homo sapien
agctgttaccgaattgcagataacacataaatc

SEQ ID NO: 234908 - DNA, 33 bp, Homo sapien
agctgttaccgaattggagataacacataaatc

SEQ ID NO: 234909 - DNA, 33 bp, Homo sapien
tccagtcaccagactaccaactcacatttgtac

SEQ ID NO: 234910 - DNA, 33 bp, Homo sapien
tccagtcaccagactagcaactcacatttgtac

SEQ ID NO: 234911 - DNA, 33 bp, Homo sapien
ctatctggaaagatgaccagaagtccagaataa

SEQ ID NO: 234912 - DNA, 33 bp, Homo sapien
ctatctggaaagatgatcagaagtccagaataa

SEQ ID NO: 234913 - DNA, 33 bp, Homo sapien
gcatttcagtgctttacgtttagtcttggtctt

SEQ ID NO: 234914 - DNA, 33 bp, Homo sapien
gcatttcagtgctttatgtttagtcttggtctt

SEQ ID NO: 234915 - DNA, 33 bp, Homo sapien
gtccaacactctatgaagtgggcatttactgtg

SEQ ID NO: 234916 - DNA, 33 bp, Homo sapien
gtccaacactctatgaggtgggcatttactgtg

SEQ ID NO: 234917 - DNA, 33 bp, Homo sapien
ccatttgaatgcctacaatgtccaaggctttct

SEQ ID NO: 234918 - DNA, 33 bp, Homo sapien
ccatttgaatgcctacgatgtccaaggctttct

SEQ ID NO: 234919 - DNA, 33 bp, Homo sapien
ttacctactagatgcaaaacaattttaaaaata

SEQ ID NO: 234920 - DNA, 33 bp, Homo sapien
ttacctactagatgcagaacaattttaaaaata

SEQ ID NO: 234921 - DNA, 33 bp, Homo sapien
ttgttcagattggaaaaaattttacagcctgtt

SEQ ID NO: 234922 - DNA, 33 bp, Homo sapien
ttgttcagattggaaacaattttacagcctgtt

SEQ ID NO: 234923 - DNA, 33 bp, Homo sapien
agggactgcaatatgaatacttgacttatatct

SEQ ID NO: 234924 - DNA, 33 bp, Homo sapien
agggactgcaatatgagtacttgacttatatct

SEQ ID NO: 234925 - DNA, 33 bp, Homo sapien
gattcctgtatagttacattcaagtactattat

SEQ ID NO: 234926 - DNA, 33 bp, Homo sapien
gattcctgtatagttatattcaagtactattat

SEQ ID NO: 234927 - DNA, 33 bp, Homo sapien
aaacagccctatcactgagacctggactgacca

SEQ ID NO: 234928 - DNA, 33 bp, Homo sapien
aaacagccctatcacttagacctggactgacca

SEQ ID NO: 234929 - DNA, 33 bp, Homo sapien
ttccaacattacagaacaggatttcataacatt

SEQ ID NO: 234930 - DNA, 33 bp, Homo sapien
ttccaacattacagaataggatttcataacatt

SEQ ID NO: 234931 - DNA, 33 bp, Homo sapien
ggcctggcacaaacaacgtagaatgttgtgatc

SEQ ID NO: 234932 - DNA, 33 bp, Homo sapien
ggcctggcacaaacaatgtagaatgttgtgatc

SEQ ID NO: 234933 - DNA, 33 bp, Homo sapien
aaaaacagacttaaaaagttggatacatatgct

SEQ ID NO: 234934 - DNA, 33 bp, Homo sapien
aaaaacagacttaaaatgttggatacatatgct

SEQ ID NO: 234935 - DNA, 33 bp, Homo sapien
gaacaacacttgtaaaatatccagcttccttat

SEQ ID NO: 234936 - DNA, 33 bp, Homo sapien
gaacaacacttgtaaattatccagcttccttat

SEQ ID NO: 234937 - DNA, 33 bp, Homo sapien
tacaggactcagaaaaattatgagctcaatttt

SEQ ID NO: 234938 - DNA, 33 bp, Homo sapien
tacaggactcagaaaagttatgagctcaatttt

SEQ ID NO: 234939 - DNA, 33 bp, Homo sapien
gaagtaaaatatatgaacagaatttgtcaaaga

SEQ ID NO: 234940 - DNA, 33 bp, Homo sapien
gaagtaaaatatatgaccagaatttgtcaaaga

SEQ ID NO: 234941 - DNA, 33 bp, Homo sapien
tgcttattggcctccaagtaaagaaaggtataa

SEQ ID NO: 234942 - DNA, 33 bp, Homo sapien
tgcttattggcctccaggtaaagaaaggtataa

SEQ ID NO: 234943 - DNA, 33 bp, Homo sapien
ttctttgatccctccaaactttgtatatttagc

SEQ ID NO: 234944 - DNA, 33 bp, Homo sapien
ttctttgatccctccacactttgtatatttagc

SEQ ID NO: 234945 - DNA, 33 bp, Homo sapien
gtaagagattggttaacgaatgcaaaattacag

SEQ ID NO: 234946 - DNA, 33 bp, Homo sapien
gtaagagattggttaatgaatgcaaaattacag

SEQ ID NO: 234947 - DNA, 33 bp, Homo sapien
tctcttgcagtaaatacgcaggcctgctgtaac

SEQ ID NO: 234948 - DNA, 33 bp, Homo sapien
tctcttgcagtaaatatgcaggcctgctgtaac

SEQ ID NO: 234949 - DNA, 33 bp, Homo sapien
agcagcatactgttgtcaaaaaagtttaattcc

SEQ ID NO: 234950 - DNA, 33 bp, Homo sapien
agcagcatactgttgtgaaaaaagtttaattcc

SEQ ID NO: 234951 - DNA, 33 bp, Homo sapien
gtcttttgcagaaaaactaattaaacgttgacc

SEQ ID NO: 234952 - DNA, 33 bp, Homo sapien
gtcttttgcagaaaaattaattaaacgttgacc

SEQ ID NO: 234953 - DNA, 33 bp, Homo sapien
tgatcatcagaataacagcttcaatttatagaa

SEQ ID NO: 234954 - DNA, 33 bp, Homo sapien
tgatcatcagaataacggcttcaatttatagaa

SEQ ID NO: 234955 - DNA, 33 bp, Homo sapien
tagaatcgggataataaacccaccagctcatgg

SEQ ID NO: 234956 - DNA, 33 bp, Homo sapien
tagaatcgggataatacacccaccagctcatgg

SEQ ID NO: 234957 - DNA, 33 bp, Homo sapien
tatataaagctgggtcaacttatgtcactgcac

SEQ ID NO: 234958 - DNA, 33 bp, Homo sapien
tatataaagctgggtcgacttatgtcactgcac

SEQ ID NO: 234959 - DNA, 33 bp, Homo sapien
gtcttcagttagcagacgtgaaaatcaaatcgg

SEQ ID NO: 234960 - DNA, 33 bp, Homo sapien
gtcttcagttagcagatgtgaaaatcaaatcgg

SEQ ID NO: 234961 - DNA, 33 bp, Homo sapien
aggtgcgcaacaagaaagtacagcctttggagg

SEQ ID NO: 234962 - DNA, 33 bp, Homo sapien
aggtgcgcaacaagaaggtacagcctttggagg

SEQ ID NO: 234963 - DNA, 33 bp, Homo sapien
catctgtggatcatgcactacgctaatatctaa

SEQ ID NO: 234964 - DNA, 33 bp, Homo sapien
catctgtggatcatgccctacgctaatatctaa

SEQ ID NO: 234965 - DNA, 33 bp, Homo sapien
aacatagaaatttgcaacaaatatctggcaatt

SEQ ID NO: 234966 - DNA, 33 bp, Homo sapien
aacatagaaatttgcaccaaatatctggcaatt

SEQ ID NO: 234967 - DNA, 33 bp, Homo sapien
ggcctaatacacaggaagaagaaggcttcaaaa

SEQ ID NO: 234968 - DNA, 33 bp, Homo sapien
ggcctaatacacaggacgaagaaggcttcaaaa

SEQ ID NO: 234969 - DNA, 33 bp, Homo sapien
tcttcttgctttcataaaggaggaaacaaatgt

SEQ ID NO: 234970 - DNA, 33 bp, Homo sapien
tcttcttgctttcatagaggaggaaacaaatgt

SEQ ID NO: 234971 - DNA, 33 bp, Homo sapien
ttattagaaaccttctcacatgacaaagctaga

SEQ ID NO: 234972 - DNA, 33 bp, Homo sapien
ttattagaaaccttctgacatgacaaagctaga

SEQ ID NO: 234973 - DNA, 33 bp, Homo sapien
caagaggatgtttttgcaatagaaaaagccagt

SEQ ID NO: 234974 - DNA, 33 bp, Homo sapien
caagaggatgtttttgtaatagaaaaagccagt

SEQ ID NO: 234975 - DNA, 33 bp, Homo sapien
ttcagatcttagctagcaaacttgagcaaatta

SEQ ID NO: 234976 - DNA, 33 bp, Homo sapien
ttcagatcttagctagtaaacttgagcaaatta

SEQ ID NO: 234977 - DNA, 33 bp, Homo sapien
ggagttctagcttcaaattaacagtagtgtcaa

SEQ ID NO: 234978 - DNA, 33 bp, Homo sapien
ggagttctagcttcaatttaacagtagtgtcaa

SEQ ID NO: 234979 - DNA, 33 bp, Homo sapien
aactttcaccttgaaagttcaccaagtaatttt

SEQ ID NO: 234980 - DNA, 33 bp, Homo sapien
aactttcaccttgaaatttcaccaagtaatttt

SEQ ID NO: 234981 - DNA, 33 bp, Homo sapien
tagctttgcactcaacaaaactccaaatcctaa

SEQ ID NO: 234982 - DNA, 33 bp, Homo sapien
tagctttgcactcaacgaaactccaaatcctaa

SEQ ID NO: 234983 - DNA, 33 bp, Homo sapien
gctgttagggagaaacactatttcccaactcat

SEQ ID NO: 234984 - DNA, 33 bp, Homo sapien
gctgttagggagaaacgctatttcccaactcat

SEQ ID NO: 234985 - DNA, 33 bp, Homo sapien
ctgtcttcccttgttacgctgcacaaaagagga

SEQ ID NO: 234986 - DNA, 33 bp, Homo sapien
ctgtcttcccttgttatgctgcacaaaagagga

SEQ ID NO: 234987 - DNA, 33 bp, Homo sapien
tccaaagggcctgtaacggatagtcaataaata

SEQ ID NO: 234988 - DNA, 33 bp, Homo sapien
tccaaagggcctgtaatggatagtcaataaata

SEQ ID NO: 234989 - DNA, 33 bp, Homo sapien
ggctgtactatcaagacagttgttagttttaga

SEQ ID NO: 234990 - DNA, 33 bp, Homo sapien
ggctgtactatcaagagagttgttagttttaga

SEQ ID NO: 234991 - DNA, 33 bp, Homo sapien
tggtgaactgtaatcccgctacatagacaagta

SEQ ID NO: 234992 - DNA, 33 bp, Homo sapien
tggtgaactgtaatcctgctacatagacaagta

SEQ ID NO: 234993 - DNA, 33 bp, Homo sapien
tgaaccaaaccaacaaacgaaaggacatctgtg

SEQ ID NO: 234994 - DNA, 33 bp, Homo sapien
tgaaccaaaccaacaagcgaaaggacatctgtg

SEQ ID NO: 234995 - DNA, 33 bp, Homo sapien
ttgaatacagtattacactggactctttttttg

SEQ ID NO: 234996 - DNA, 33 bp, Homo sapien
ttgaatacagtattacgctggactctttttttg

SEQ ID NO: 234997 - DNA, 33 bp, Homo sapien
gatatcttgggatctaacagaataaagtctggt

SEQ ID NO: 234998 - DNA, 33 bp, Homo sapien
gatatcttgggatctagcagaataaagtctggt

SEQ ID NO: 234999 - DNA, 33 bp, Homo sapien
gggcaggggtaggatgaaaagaagtaggttaaa

SEQ ID NO: 235000 - DNA, 33 bp, Homo sapien
gggcaggggtaggatgcaaagaagtaggttaaa

SEQ ID NO: 235001 - DNA, 33 bp, Homo sapien
tctctagttattgctacagtaaatgttggagag

SEQ ID NO: 235002 - DNA, 33 bp, Homo sapien
tctctagttattgctagagtaaatgttggagag

SEQ ID NO: 235003 - DNA, 33 bp, Homo sapien
ggagtctatgcataaaactggctgtagatatgc

SEQ ID NO: 235004 - DNA, 33 bp, Homo sapien
ggagtctatgcataaacctggctgtagatatgc

SEQ ID NO: 235005 - DNA, 33 bp, Homo sapien
aagaacaaaaaaaacgcccagaatgatttgaat

SEQ ID NO: 235006 - DNA, 33 bp, Homo sapien
aagaacaaaaaaaacgtccagaatgatttgaat

SEQ ID NO: 235007 - DNA, 33 bp, Homo sapien
acaatggtgtttctacacgtggagagagagagg

SEQ ID NO: 235008 - DNA, 33 bp, Homo sapien
acaatggtgtttctacgcgtggagagagagagg

SEQ ID NO: 235009 - DNA, 33 bp, Homo sapien
atcaccccttaactgaggctactctgaccggca

SEQ ID NO: 235010 - DNA, 33 bp, Homo sapien
atcaccccttaactgatgctactctgaccggca

SEQ ID NO: 235011 - DNA, 33 bp, Homo sapien
aatgattttgtatctacgagagaagagaaagaa

SEQ ID NO: 235012 - DNA, 33 bp, Homo sapien
aatgattttgtatctatgagagaagagaaagaa

SEQ ID NO: 235013 - DNA, 33 bp, Homo sapien
attcactcatctgttaggcttaaaaatcaatta

SEQ ID NO: 235014 - DNA, 33 bp, Homo sapien
attcactcatctgttatgcttaaaaatcaatta

SEQ ID NO: 235015 - DNA, 33 bp, Homo sapien
tgtgtggaaaagaagggacagtcgttgggaata

SEQ ID NO: 235016 - DNA, 33 bp, Homo sapien
tgtgtggaaaagaaggtacagtcgttgggaata

SEQ ID NO: 235017 - DNA, 33 bp, Homo sapien
ctccctgccatcaaacaatatacactttggtga

SEQ ID NO: 235018 - DNA, 33 bp, Homo sapien
ctccctgccatcaaaccatatacactttggtga

SEQ ID NO: 235019 - DNA, 33 bp, Homo sapien
taagggcaaatacctacaggagtcaagccacag

SEQ ID NO: 235020 - DNA, 33 bp, Homo sapien
taagggcaaatacctataggagtcaagccacag

SEQ ID NO: 235021 - DNA, 33 bp, Homo sapien
ttgaattagaaagtgggatattcaaggagcaat

SEQ ID NO: 235022 - DNA, 33 bp, Homo sapien
ttgaattagaaagtggtatattcaaggagcaat

SEQ ID NO: 235023 - DNA, 33 bp, Homo sapien
acatctttgttaggtcaaaatgagttataaaag

SEQ ID NO: 235024 - DNA, 33 bp, Homo sapien
acatctttgttaggtcgaaatgagttataaaag

SEQ ID NO: 235025 - DNA, 33 bp, Homo sapien
gcttggagccgatacaactagtcttctcatttt

SEQ ID NO: 235026 - DNA, 33 bp, Homo sapien
gcttggagccgatacagctagtcttctcatttt

SEQ ID NO: 235027 - DNA, 33 bp, Homo sapien
tcagcttatactaacccaacagagagtgagtca

SEQ ID NO: 235028 - DNA, 33 bp, Homo sapien
tcagcttatactaaccgaacagagagtgagtca

SEQ ID NO: 235029 - DNA, 33 bp, Homo sapien
ctcccttctttaagccgacacattgactgtctt

SEQ ID NO: 235030 - DNA, 33 bp, Homo sapien
ctcccttctttaagcctacacattgactgtctt

SEQ ID NO: 235031 - DNA, 33 bp, Homo sapien
acatgggaatcacatacagtgcttttgaaagtc

SEQ ID NO: 235032 - DNA, 33 bp, Homo sapien
acatgggaatcacatagagtgcttttgaaagtc

SEQ ID NO: 235033 - DNA, 33 bp, Homo sapien
atgacagggttcagagaaatatcaaccataaat

SEQ ID NO: 235034 - DNA, 33 bp, Homo sapien
atgacagggttcagaggaatatcaaccataaat

SEQ ID NO: 235035 - DNA, 33 bp, Homo sapien
ttaattaactgaagataaactatgtagcagata

SEQ ID NO: 235036 - DNA, 33 bp, Homo sapien
ttaattaactgaagatgaactatgtagcagata

SEQ ID NO: 235037 - DNA, 33 bp, Homo sapien
ggacatctatttcttacaatcctcaaaaataca

SEQ ID NO: 235038 - DNA, 33 bp, Homo sapien
ggacatctatttcttagaatcctcaaaaataca

SEQ ID NO: 235039 - DNA, 33 bp, Homo sapien
actaatgtaagtatccactctctttcaataaga

SEQ ID NO: 235040 - DNA, 33 bp, Homo sapien
actaatgtaagtatcctctctctttcaataaga

SEQ ID NO: 235041 - DNA, 33 bp, Homo sapien
ttaagtggtctttcaacctagttagtgcctgag

SEQ ID NO: 235042 - DNA, 33 bp, Homo sapien
ttaagtggtctttcaagctagttagtgcctgag

SEQ ID NO: 235043 - DNA, 33 bp, Homo sapien
ccatttggtaccttcacctactgtaaacgtaat

SEQ ID NO: 235044 - DNA, 33 bp, Homo sapien
ccatttggtaccttcagctactgtaaacgtaat

SEQ ID NO: 235045 - DNA, 33 bp, Homo sapien
accttattagactgaaagtagaaaatgtctatt

SEQ ID NO: 235046 - DNA, 33 bp, Homo sapien
accttattagactgaaggtagaaaatgtctatt

SEQ ID NO: 235047 - DNA, 33 bp, Homo sapien
gacctaacatctacaaagaagtccatccatgaa

SEQ ID NO: 235048 - DNA, 33 bp, Homo sapien
gacctaacatctacaaggaagtccatccatgaa

SEQ ID NO: 235049 - DNA, 33 bp, Homo sapien
cctacagagtttattggagcgtagagcaggcac

SEQ ID NO: 235050 - DNA, 33 bp, Homo sapien
cctacagagtttattgtagcgtagagcaggcac

SEQ ID NO: 235051 - DNA, 33 bp, Homo sapien
atgacacaaattacatgaaatcccatcaaagaa

SEQ ID NO: 235052 - DNA, 33 bp, Homo sapien
atgacacaaattacattaaatcccatcaaagaa

SEQ ID NO: 235053 - DNA, 33 bp, Homo sapien
attgctgtgtatctccacagtttgcctataaac

SEQ ID NO: 235054 - DNA, 33 bp, Homo sapien
attgctgtgtatctccgcagtttgcctataaac

SEQ ID NO: 235055 - DNA, 33 bp, Homo sapien
atttttgctatttctaagacatgccacagaatt

SEQ ID NO: 235056 - DNA, 33 bp, Homo sapien
atttttgctatttctaggacatgccacagaatt

SEQ ID NO: 235057 - DNA, 33 bp, Homo sapien
tttctgacatctgaagaattgtatacattcaca

SEQ ID NO: 235058 - DNA, 33 bp, Homo sapien
tttctgacatctgaaggattgtatacattcaca

SEQ ID NO: 235059 - DNA, 33 bp, Homo sapien
tctatttaatacctgtaaatttatggttagaag

SEQ ID NO: 235060 - DNA, 33 bp, Homo sapien
tctatttaatacctgttaatttatggttagaag

SEQ ID NO: 235061 - DNA, 33 bp, Homo sapien
gttgaataaataagaagtacctcagagtcttgc

SEQ ID NO: 235062 - DNA, 33 bp, Homo sapien
gttgaataaataagaattacctcagagtcttgc

SEQ ID NO: 235063 - DNA, 33 bp, Homo sapien
atttttattaactgaccatatgccaatgtttat

SEQ ID NO: 235064 - DNA, 33 bp, Homo sapien
atttttattaactgactatatgccaatgtttat

SEQ ID NO: 235065 - DNA, 33 bp, Homo sapien
gaatagaaactataaactaagagcataacactg

SEQ ID NO: 235066 - DNA, 33 bp, Homo sapien
gaatagaaactataaagtaagagcataacactg

SEQ ID NO: 235067 - DNA, 33 bp, Homo sapien
gggtattttcagttaacacagtgtgattcaagc

SEQ ID NO: 235068 - DNA, 33 bp, Homo sapien
gggtattttcagttaatacagtgtgattcaagc

SEQ ID NO: 235069 - DNA, 33 bp, Homo sapien
cttagttcccaggagccaaatgccagcttgaat

SEQ ID NO: 235070 - DNA, 33 bp, Homo sapien
cttagttcccaggagctaaatgccagcttgaat

SEQ ID NO: 235071 - DNA, 33 bp, Homo sapien
gaagagtatacataaaagcaggtccacagtcac

SEQ ID NO: 235072 - DNA, 33 bp, Homo sapien
gaagagtatacataaaggcaggtccacagtcac

SEQ ID NO: 235073 - DNA, 33 bp, Homo sapien
tcgaccaatgctaaccaaacaggcccttctctg

SEQ ID NO: 235074 - DNA, 33 bp, Homo sapien
tcgaccaatgctaaccgaacaggcccttctctg

SEQ ID NO: 235075 - DNA, 33 bp, Homo sapien
tctgcactgcacttgacgtgtatgtactgacta

SEQ ID NO: 235076 - DNA, 33 bp, Homo sapien
tctgcactgcacttgatgtgtatgtactgacta

SEQ ID NO: 235077 - DNA, 33 bp, Homo sapien
ggctttgtttcttataccactaaatccagggtc

SEQ ID NO: 235078 - DNA, 33 bp, Homo sapien
ggctttgtttcttatatcactaaatccagggtc

SEQ ID NO: 235079 - DNA, 33 bp, Homo sapien
aatatcatgatgacaactgcatttatcaatttc

SEQ ID NO: 235080 - DNA, 33 bp, Homo sapien
aatatcatgatgacaagtgcatttatcaatttc

SEQ ID NO: 235081 - DNA, 33 bp, Homo sapien
taaaatataaacatcaagacatacttctattca

SEQ ID NO: 235082 - DNA, 33 bp, Homo sapien
taaaatataaacatcacgacatacttctattca

SEQ ID NO: 235083 - DNA, 33 bp, Homo sapien
ctgaccatcctacaaaaaatagttagctacaga

SEQ ID NO: 235084 - DNA, 33 bp, Homo sapien
ctgaccatcctacaaagaatagttagctacaga

SEQ ID NO: 235085 - DNA, 33 bp, Homo sapien
atatgagtcaagttgccaagacatcaaagcatg

SEQ ID NO: 235086 - DNA, 33 bp, Homo sapien
atatgagtcaagttgctaagacatcaaagcatg

SEQ ID NO: 235087 - DNA, 33 bp, Homo sapien
tgatgatatttccactaaaagacacatttttgt

SEQ ID NO: 235088 - DNA, 33 bp, Homo sapien
tgatgatatttccactgaaagacacatttttgt

SEQ ID NO: 235089 - DNA, 33 bp, Homo sapien
atatactacacaggtaaccttgttttacagctg

SEQ ID NO: 235090 - DNA, 33 bp, Homo sapien
atatactacacaggtacccttgttttacagctg

SEQ ID NO: 235091 - DNA, 33 bp, Homo sapien
ctatttcttcaaaaccacaccagcatcttttgt

SEQ ID NO: 235092 - DNA, 33 bp, Homo sapien
ctatttcttcaaaaccgcaccagcatcttttgt

SEQ ID NO: 235093 - DNA, 33 bp, Homo sapien
tccaattttttctgagcaccaacataatgcaac

SEQ ID NO: 235094 - DNA, 33 bp, Homo sapien
tccaattttttctgaggaccaacataatgcaac

SEQ ID NO: 235095 - DNA, 33 bp, Homo sapien
ggcaaaggattctggggaatgtattttctaggc

SEQ ID NO: 235096 - DNA, 33 bp, Homo sapien
ggcaaaggattctgggtaatgtattttctaggc

SEQ ID NO: 235097 - DNA, 33 bp, Homo sapien
tttgaaagctaaaggaatataagagtcaaattt

SEQ ID NO: 235098 - DNA, 33 bp, Homo sapien
tttgaaagctaaaggagtataagagtcaaattt

SEQ ID NO: 235099 - DNA, 33 bp, Homo sapien
atttgatcataccatgaaaattaattgaattaa

SEQ ID NO: 235100 - DNA, 33 bp, Homo sapien
atttgatcataccatgcaaattaattgaattaa

SEQ ID NO: 235101 - DNA, 33 bp, Homo sapien
aagtgaacaaaggacccgaagatacttctcaaa

SEQ ID NO: 235102 - DNA, 33 bp, Homo sapien
aagtgaacaaaggacctgaagatacttctcaaa

SEQ ID NO: 235103 - DNA, 33 bp, Homo sapien
ttacaaaaaaagaggaggttcaggtgtccaaaa

SEQ ID NO: 235104 - DNA, 33 bp, Homo sapien
ttacaaaaaaagaggatgttcaggtgtccaaaa

SEQ ID NO: 235105 - DNA, 33 bp, Homo sapien
ttctttttcgtgcttacgagtctctttcagttt

SEQ ID NO: 235106 - DNA, 33 bp, Homo sapien
ttctttttcgtgcttatgagtctctttcagttt

SEQ ID NO: 235107 - DNA, 33 bp, Homo sapien
tactcattagaaataaatcagtaagtccaacac

SEQ ID NO: 235108 - DNA, 33 bp, Homo sapien
tactcattagaaataagtcagtaagtccaacac

SEQ ID NO: 235109 - DNA, 33 bp, Homo sapien
ctaccatttgtttatgaatttaaaacatttctg

SEQ ID NO: 235110 - DNA, 33 bp, Homo sapien
ctaccatttgtttatgcatttaaaacatttctg

SEQ ID NO: 235111 - DNA, 33 bp, Homo sapien
acttaagttttgactacggtctatcacatggtt

SEQ ID NO: 235112 - DNA, 33 bp, Homo sapien
acttaagttttgactatggtctatcacatggtt

SEQ ID NO: 235113 - DNA, 33 bp, Homo sapien
attatcctctcagggaactactatttagacttg

SEQ ID NO: 235114 - DNA, 33 bp, Homo sapien
attatcctctcagggagctactatttagacttg

SEQ ID NO: 235115 - DNA, 33 bp, Homo sapien
accaaatcatagagaacagtttggtaatatata

SEQ ID NO: 235116 - DNA, 33 bp, Homo sapien
accaaatcatagagaagagtttggtaatatata

SEQ ID NO: 235117 - DNA, 33 bp, Homo sapien
tttgagagaattccacaagaggaaagccaacag

SEQ ID NO: 235118 - DNA, 33 bp, Homo sapien
tttgagagaattccaccagaggaaagccaacag

SEQ ID NO: 235119 - DNA, 33 bp, Homo sapien
gatggatagttggatacagatggatgtatgtat

SEQ ID NO: 235120 - DNA, 33 bp, Homo sapien
gatggatagttggatagagatggatgtatgtat

SEQ ID NO: 235121 - DNA, 33 bp, Homo sapien
ttattcaatagagtgaacttttcctagtgtgtg

SEQ ID NO: 235122 - DNA, 33 bp, Homo sapien
ttattcaatagagtgaccttttcctagtgtgtg

SEQ ID NO: 235123 - DNA, 33 bp, Homo sapien
tgacgaatgttaaacccagacagtactatatac

SEQ ID NO: 235124 - DNA, 33 bp, Homo sapien
tgacgaatgttaaacctagacagtactatatac

SEQ ID NO: 235125 - DNA, 33 bp, Homo sapien
tgtgaggagaagcaatcacgtataaacccctaa

SEQ ID NO: 235126 - DNA, 33 bp, Homo sapien
tgtgaggagaagcaattacgtataaacccctaa

SEQ ID NO: 235127 - DNA, 33 bp, Homo sapien
ggaacaacaaagtggaagtttctggttattttc

SEQ ID NO: 235128 - DNA, 33 bp, Homo sapien
ggaacaacaaagtggatgtttctggttattttc

SEQ ID NO: 235129 - DNA, 33 bp, Homo sapien
acatttctgtagtcaaaatactgtgggtttctc

SEQ ID NO: 235130 - DNA, 33 bp, Homo sapien
acatttctgtagtcaagatactgtgggtttctc

SEQ ID NO: 235131 - DNA, 33 bp, Homo sapien
ggaccacattagctcacgggagtatttctttca

SEQ ID NO: 235132 - DNA, 33 bp, Homo sapien
ggaccacattagctcatgggagtatttctttca

SEQ ID NO: 235133 - DNA, 33 bp, Homo sapien
acaatggaaaagttaacggctgggacaggcaaa

SEQ ID NO: 235134 - DNA, 33 bp, Homo sapien
acaatggaaaagttaatggctgggacaggcaaa

SEQ ID NO: 235135 - DNA, 33 bp, Homo sapien
aagtccaccactgtataacttcggacaagccac

SEQ ID NO: 235136 - DNA, 33 bp, Homo sapien
aagtccaccactgtatgacttcggacaagccac

SEQ ID NO: 235137 - DNA, 33 bp, Homo sapien
ttctccactctcaaaacgaagactggtttgcaa

SEQ ID NO: 235138 - DNA, 33 bp, Homo sapien
ttctccactctcaaaatgaagactggtttgcaa

SEQ ID NO: 235139 - DNA, 33 bp, Homo sapien
caaacatagaatgggtaaagttaacattaggaa

SEQ ID NO: 235140 - DNA, 33 bp, Homo sapien
caaacatagaatgggtgaagttaacattaggaa

SEQ ID NO: 235141 - DNA, 33 bp, Homo sapien
ctcacatccagcataaaaacctggactcagccc

SEQ ID NO: 235142 - DNA, 33 bp, Homo sapien
ctcacatccagcataagaacctggactcagccc

SEQ ID NO: 235143 - DNA, 33 bp, Homo sapien
ctcagctcctgtaaataaatagtcactacagaa

SEQ ID NO: 235144 - DNA, 33 bp, Homo sapien
ctcagctcctgtaaatcaatagtcactacagaa

SEQ ID NO: 235145 - DNA, 33 bp, Homo sapien
gggcaaatgaaatgggaagaatctcagctcctg

SEQ ID NO: 235146 - DNA, 33 bp, Homo sapien
gggcaaatgaaatgggtagaatctcagctcctg

SEQ ID NO: 235147 - DNA, 33 bp, Homo sapien
cttatcctgtgcttaacggacatttgtctttta

SEQ ID NO: 235148 - DNA, 33 bp, Homo sapien
cttatcctgtgcttaatggacatttgtctttta

SEQ ID NO: 235149 - DNA, 33 bp, Homo sapien
agtgaaaattgtattaaggctctgaaacaagag

SEQ ID NO: 235150 - DNA, 33 bp, Homo sapien
agtgaaaattgtattagggctctgaaacaagag

SEQ ID NO: 235151 - DNA, 33 bp, Homo sapien
gcttccagaatctcacagcacaaactgtatcta

SEQ ID NO: 235152 - DNA, 33 bp, Homo sapien
gcttccagaatctcacggcacaaactgtatcta

SEQ ID NO: 235153 - DNA, 33 bp, Homo sapien
gaaacaagtgaaaagacagttgtcgatcaggtc

SEQ ID NO: 235154 - DNA, 33 bp, Homo sapien
gaaacaagtgaaaagagagttgtcgatcaggtc

SEQ ID NO: 235155 - DNA, 33 bp, Homo sapien
ttgtcttgtttacttacctgatgtatctgaaaa

SEQ ID NO: 235156 - DNA, 33 bp, Homo sapien
ttgtcttgtttacttatctgatgtatctgaaaa

SEQ ID NO: 235157 - DNA, 33 bp, Homo sapien
tgctgtaacaggacacaatcacaggtcttccga

SEQ ID NO: 235158 - DNA, 33 bp, Homo sapien
tgctgtaacaggacacgatcacaggtcttccga

SEQ ID NO: 235159 - DNA, 33 bp, Homo sapien
cactatttgggtgacaagtaccctaaaagtcca

SEQ ID NO: 235160 - DNA, 33 bp, Homo sapien
cactatttgggtgacaggtaccctaaaagtcca

SEQ ID NO: 235161 - DNA, 33 bp, Homo sapien
ccagatggtttgtccacaaatcagctttcttgt

SEQ ID NO: 235162 - DNA, 33 bp, Homo sapien
ccagatggtttgtccataaatcagctttcttgt

SEQ ID NO: 235163 - DNA, 33 bp, Homo sapien
tgaagacaagtaaactcacagattgtcataaat

SEQ ID NO: 235164 - DNA, 33 bp, Homo sapien
tgaagacaagtaaacttacagattgtcataaat

SEQ ID NO: 235165 - DNA, 33 bp, Homo sapien
tagctcagtaagctggaaattataaagaactat

SEQ ID NO: 235166 - DNA, 33 bp, Homo sapien
tagctcagtaagctggcaattataaagaactat

SEQ ID NO: 235167 - DNA, 33 bp, Homo sapien
gataactttgtggtcccatttctgagtaactaa

SEQ ID NO: 235168 - DNA, 33 bp, Homo sapien
gataactttgtggtcctatttctgagtaactaa

SEQ ID NO: 235169 - DNA, 33 bp, Homo sapien
caatgttagtaactaacggaaagtcaatttctg

SEQ ID NO: 235170 - DNA, 33 bp, Homo sapien
caatgttagtaactaatggaaagtcaatttctg

SEQ ID NO: 235171 - DNA, 33 bp, Homo sapien
aacttgacatcatcaaacaacaagatttaattg

SEQ ID NO: 235172 - DNA, 33 bp, Homo sapien
aacttgacatcatcaaccaacaagatttaattg

SEQ ID NO: 235173 - DNA, 33 bp, Homo sapien
ggaaaacactcaaatcaagaatataagctccta

SEQ ID NO: 235174 - DNA, 33 bp, Homo sapien
ggaaaacactcaaatcgagaatataagctccta

SEQ ID NO: 235175 - DNA, 33 bp, Homo sapien
tctatttttttgatggacattatcattgctagt

SEQ ID NO: 235176 - DNA, 33 bp, Homo sapien
tctatttttttgatgggcattatcattgctagt

SEQ ID NO: 235177 - DNA, 33 bp, Homo sapien
ggaagacagtgataccaacaatcctgatcctgt

SEQ ID NO: 235178 - DNA, 33 bp, Homo sapien
ggaagacagtgataccgacaatcctgatcctgt

SEQ ID NO: 235179 - DNA, 33 bp, Homo sapien
tgtatctaatatttccaaaacctctgtgattaa

SEQ ID NO: 235180 - DNA, 33 bp, Homo sapien
tgtatctaatatttcctaaacctctgtgattaa

SEQ ID NO: 235181 - DNA, 33 bp, Homo sapien
agttagaatgtttggaaagttactgacttattt

SEQ ID NO: 235182 - DNA, 33 bp, Homo sapien
agttagaatgtttggagagttactgacttattt

SEQ ID NO: 235183 - DNA, 33 bp, Homo sapien
aattttccttttaccaacacagtggtgacttct

SEQ ID NO: 235184 - DNA, 33 bp, Homo sapien
aattttccttttaccatcacagtggtgacttct

SEQ ID NO: 235185 - DNA, 33 bp, Homo sapien
caaagagcaaccaaaacgaataattctacaggt

SEQ ID NO: 235186 - DNA, 33 bp, Homo sapien
caaagagcaaccaaaatgaataattctacaggt

SEQ ID NO: 235187 - DNA, 33 bp, Homo sapien
ttaaaaaatttgactcactgaaagcagctatga

SEQ ID NO: 235188 - DNA, 33 bp, Homo sapien
ttaaaaaatttgactccctgaaagcagctatga

SEQ ID NO: 235189 - DNA, 33 bp, Homo sapien
agttaggatctctatacgtttgcatagaaaaaa

SEQ ID NO: 235190 - DNA, 33 bp, Homo sapien
agttaggatctctatatgtttgcatagaaaaaa

SEQ ID NO: 235191 - DNA, 33 bp, Homo sapien
cccctgatctttatcaagggagcctaaaatcat

SEQ ID NO: 235192 - DNA, 33 bp, Homo sapien
cccctgatctttatcatgggagcctaaaatcat

SEQ ID NO: 235193 - DNA, 33 bp, Homo sapien
gatgtaattgctgagaagtgagagtacaggaac

SEQ ID NO: 235194 - DNA, 33 bp, Homo sapien
gatgtaattgctgagaggtgagagtacaggaac

SEQ ID NO: 235195 - DNA, 33 bp, Homo sapien
caatatgccagcatcactactattgtgctttag

SEQ ID NO: 235196 - DNA, 33 bp, Homo sapien
caatatgccagcatcagtactattgtgctttag

SEQ ID NO: 235197 - DNA, 33 bp, Homo sapien
atcttgttagtgaggaacagaaagcatgcactt

SEQ ID NO: 235198 - DNA, 33 bp, Homo sapien
atcttgttagtgaggatcagaaagcatgcactt

SEQ ID NO: 235199 - DNA, 33 bp, Homo sapien
aagtagacaacttgcaataatagatgattaatg

SEQ ID NO: 235200 - DNA, 33 bp, Homo sapien
aagtagacaacttgcactaatagatgattaatg

SEQ ID NO: 235201 - DNA, 33 bp, Homo sapien
ttttattcttactatcacgaccttaacctactg

SEQ ID NO: 235202 - DNA, 33 bp, Homo sapien
ttttattcttactatcgcgaccttaacctactg

SEQ ID NO: 235203 - DNA, 33 bp, Homo sapien
taaatgtattctaaataaatgcctttccttatt

SEQ ID NO: 235204 - DNA, 33 bp, Homo sapien
taaatgtattctaaatgaatgcctttccttatt

SEQ ID NO: 235205 - DNA, 33 bp, Homo sapien
tctcatcacaaaccagactcctttttacactgc

SEQ ID NO: 235206 - DNA, 33 bp, Homo sapien
tctcatcacaaaccagtctcctttttacactgc

SEQ ID NO: 235207 - DNA, 33 bp, Homo sapien
aattatgtgagtttgacgttttacagataccaa

SEQ ID NO: 235208 - DNA, 33 bp, Homo sapien
aattatgtgagtttgatgttttacagataccaa

SEQ ID NO: 235209 - DNA, 33 bp, Homo sapien
atatttaaaccgtttaccttcaagcttctctga

SEQ ID NO: 235210 - DNA, 33 bp, Homo sapien
atatttaaaccgtttatcttcaagcttctctga

SEQ ID NO: 235211 - DNA, 33 bp, Homo sapien
tacacatttctattgccagggattgtgttgagg

SEQ ID NO: 235212 - DNA, 33 bp, Homo sapien
tacacatttctattgcgagggattgtgttgagg

SEQ ID NO: 235213 - DNA, 33 bp, Homo sapien
gaagtaatatggccaccgaagaagaggaataga

SEQ ID NO: 235214 - DNA, 33 bp, Homo sapien
gaagtaatatggccactgaagaagaggaataga

SEQ ID NO: 235215 - DNA, 33 bp, Homo sapien
aaatcatcactaaaacaacattgatacacatat

SEQ ID NO: 235216 - DNA, 33 bp, Homo sapien
aaatcatcactaaaacgacattgatacacatat

SEQ ID NO: 235217 - DNA, 33 bp, Homo sapien
gcacacaaggaggtaacagtaatcaggaacaaa

SEQ ID NO: 235218 - DNA, 33 bp, Homo sapien
gcacacaaggaggtaagagtaatcaggaacaaa

SEQ ID NO: 235219 - DNA, 33 bp, Homo sapien
cagacctttgaagttacggctcttcttgcttct

SEQ ID NO: 235220 - DNA, 33 bp, Homo sapien
cagacctttgaagttatggctcttcttgcttct

SEQ ID NO: 235221 - DNA, 33 bp, Homo sapien
tggaacactcctggaaccagataacttttatgt

SEQ ID NO: 235222 - DNA, 33 bp, Homo sapien
tggaacactcctggaagcagataacttttatgt

SEQ ID NO: 235223 - DNA, 33 bp, Homo sapien
gttgatctctttggtgaaaataaatatcacaag

SEQ ID NO: 235224 - DNA, 33 bp, Homo sapien
gttgatctctttggtgcaaataaatatcacaag

SEQ ID NO: 235225 - DNA, 33 bp, Homo sapien
agaaaaggaaaagaaacttgcaatccagttgac

SEQ ID NO: 235226 - DNA, 33 bp, Homo sapien
agaaaaggaaaagaaatttgcaatccagttgac

SEQ ID NO: 235227 - DNA, 33 bp, Homo sapien
actatcataaaatgaaactacaacataactgtc

SEQ ID NO: 235228 - DNA, 33 bp, Homo sapien
actatcataaaatgaagctacaacataactgtc

SEQ ID NO: 235229 - DNA, 33 bp, Homo sapien
atgtcttcaccactcaccttgtacgggtccctt

SEQ ID NO: 235230 - DNA, 33 bp, Homo sapien
atgtcttcaccactcatcttgtacgggtccctt

SEQ ID NO: 235231 - DNA, 33 bp, Homo sapien
atctctggtatttgagcatttggtatatccttc

SEQ ID NO: 235232 - DNA, 33 bp, Homo sapien
atctctggtatttgagtatttggtatatccttc

SEQ ID NO: 235233 - DNA, 33 bp, Homo sapien
aagctaatctgtaagcagagagttaaatttgtt

SEQ ID NO: 235234 - DNA, 33 bp, Homo sapien
aagctaatctgtaagctgagagttaaatttgtt

SEQ ID NO: 235235 - DNA, 33 bp, Homo sapien
aaatgatgattgaacagtaaaaacagttgtgaa

SEQ ID NO: 235236 - DNA, 33 bp, Homo sapien
aaatgatgattgaacattaaaaacagttgtgaa

SEQ ID NO: 235237 - DNA, 33 bp, Homo sapien
atgtgaagggatacctaaaagcaaatgtcaaca

SEQ ID NO: 235238 - DNA, 33 bp, Homo sapien
atgtgaagggatacctgaaagcaaatgtcaaca

SEQ ID NO: 235239 - DNA, 33 bp, Homo sapien
taagtttagtcatggcaacttgtttcaattgtt

SEQ ID NO: 235240 - DNA, 33 bp, Homo sapien
taagtttagtcatggcgacttgtttcaattgtt

SEQ ID NO: 235241 - DNA, 33 bp, Homo sapien
ttagtacatatgcagaactaaataaactctaca

SEQ ID NO: 235242 - DNA, 33 bp, Homo sapien
ttagtacatatgcagagctaaataaactctaca

SEQ ID NO: 235243 - DNA, 33 bp, Homo sapien
atccaagactcctttgcaaacacaatagcctcg

SEQ ID NO: 235244 - DNA, 33 bp, Homo sapien
atccaagactcctttgtaaacacaatagcctcg

SEQ ID NO: 235245 - DNA, 33 bp, Homo sapien
aaggagacaaacccaacggcttagaaccaagac

SEQ ID NO: 235246 - DNA, 33 bp, Homo sapien
aaggagacaaacccaatggcttagaaccaagac

SEQ ID NO: 235247 - DNA, 33 bp, Homo sapien
atctggttaggtaacacctgctgtggcaaacac

SEQ ID NO: 235248 - DNA, 33 bp, Homo sapien
atctggttaggtaacagctgctgtggcaaacac

SEQ ID NO: 235249 - DNA, 33 bp, Homo sapien
attgtgtcttcttaaaatgtaagcagaatttta

SEQ ID NO: 235250 - DNA, 33 bp, Homo sapien
attgtgtcttcttaaactgtaagcagaatttta

SEQ ID NO: 235251 - DNA, 33 bp, Homo sapien
gttacaggtgttgtcactatttagcaacttaat

SEQ ID NO: 235252 - DNA, 33 bp, Homo sapien
gttacaggtgttgtcattatttagcaacttaat

SEQ ID NO: 235253 - DNA, 33 bp, Homo sapien
tttcagaaacacagcacgctttctatcctacag

SEQ ID NO: 235254 - DNA, 33 bp, Homo sapien
tttcagaaacacagcaggctttctatcctacag

SEQ ID NO: 235255 - DNA, 33 bp, Homo sapien
taccagagtgtgtttacatctatgttgggtaat

SEQ ID NO: 235256 - DNA, 33 bp, Homo sapien
taccagagtgtgtttatatctatgttgggtaat

SEQ ID NO: 235257 - DNA, 33 bp, Homo sapien
tctacaatgtgaggaacgcttagaacacgaaaa

SEQ ID NO: 235258 - DNA, 33 bp, Homo sapien
tctacaatgtgaggaatgcttagaacacgaaaa

SEQ ID NO: 235259 - DNA, 33 bp, Homo sapien
agactcacattatccaggtttgcaatctgataa

SEQ ID NO: 235260 - DNA, 33 bp, Homo sapien
agactcacattatccatgtttgcaatctgataa

SEQ ID NO: 235261 - DNA, 33 bp, Homo sapien
ctttaagatacgtcaactgagatgcctattaga

SEQ ID NO: 235262 - DNA, 33 bp, Homo sapien
ctttaagatacgtcaattgagatgcctattaga

SEQ ID NO: 235263 - DNA, 33 bp, Homo sapien
ctgttctcttgccctaccaaagcaaacaaacca

SEQ ID NO: 235264 - DNA, 33 bp, Homo sapien
ctgttctcttgccctatcaaagcaaacaaacca

SEQ ID NO: 235265 - DNA, 33 bp, Homo sapien
caattgtggaaagggaatagtaaacagttgtgt

SEQ ID NO: 235266 - DNA, 33 bp, Homo sapien
caattgtggaaagggactagtaaacagttgtgt

SEQ ID NO: 235267 - DNA, 33 bp, Homo sapien
tctgacccgagaacaacaactgcctcagggtat

SEQ ID NO: 235268 - DNA, 33 bp, Homo sapien
tctgacccgagaacaagaactgcctcagggtat

SEQ ID NO: 235269 - DNA, 33 bp, Homo sapien
gaaaaaacaaagataactggggaattgggtgca

SEQ ID NO: 235270 - DNA, 33 bp, Homo sapien
gaaaaaacaaagataattggggaattgggtgca

SEQ ID NO: 235271 - DNA, 33 bp, Homo sapien
ttaatatttcaaaaaaagccatcaagaagtctg

SEQ ID NO: 235272 - DNA, 33 bp, Homo sapien
ttaatatttcaaaaaaggccatcaagaagtctg

SEQ ID NO: 235273 - DNA, 33 bp, Homo sapien
ctaggattacattcagcattagagagtgctcac

SEQ ID NO: 235274 - DNA, 33 bp, Homo sapien
ctaggattacattcaggattagagagtgctcac

SEQ ID NO: 235275 - DNA, 33 bp, Homo sapien
tccttgccgtaatttacccagtaactagaatag

SEQ ID NO: 235276 - DNA, 33 bp, Homo sapien
tccttgccgtaatttatccagtaactagaatag

SEQ ID NO: 235277 - DNA, 33 bp, Homo sapien
tgtcactttgtgatagaaatttttcagttgcat

SEQ ID NO: 235278 - DNA, 33 bp, Homo sapien
tgtcactttgtgataggaatttttcagttgcat

SEQ ID NO: 235279 - DNA, 33 bp, Homo sapien
atcccaaccaaggaaacatccagtattctaaca

SEQ ID NO: 235280 - DNA, 33 bp, Homo sapien
atcccaaccaaggaaatatccagtattctaaca

SEQ ID NO: 235281 - DNA, 33 bp, Homo sapien
gcatggtagcattacacgataacaaagcatttt

SEQ ID NO: 235282 - DNA, 33 bp, Homo sapien
gcatggtagcattacaggataacaaagcatttt

SEQ ID NO: 235283 - DNA, 33 bp, Homo sapien
ggcaaactgtgtaaaagacaagattcaaccttc

SEQ ID NO: 235284 - DNA, 33 bp, Homo sapien
ggcaaactgtgtaaaatacaagattcaaccttc

SEQ ID NO: 235285 - DNA, 33 bp, Homo sapien
taactttatcagactaacaaaagacctcttagc

SEQ ID NO: 235286 - DNA, 33 bp, Homo sapien
taactttatcagactagcaaaagacctcttagc

SEQ ID NO: 235287 - DNA, 33 bp, Homo sapien
ggataatcactagagcaatgtccttgagtagat

SEQ ID NO: 235288 - DNA, 33 bp, Homo sapien
ggataatcactagagccatgtccttgagtagat

SEQ ID NO: 235289 - DNA, 33 bp, Homo sapien
gctttgtgaactgcaacgacacccatgttgcct

SEQ ID NO: 235290 - DNA, 33 bp, Homo sapien
gctttgtgaactgcaatgacacccatgttgcct

SEQ ID NO: 235291 - DNA, 33 bp, Homo sapien
ttgtagtccaaagagaagaatgtagtaagtaac

SEQ ID NO: 235292 - DNA, 33 bp, Homo sapien
ttgtagtccaaagagacgaatgtagtaagtaac

SEQ ID NO: 235293 - DNA, 33 bp, Homo sapien
ctctccactgaaatcccaggtaatatgtacagc

SEQ ID NO: 235294 - DNA, 33 bp, Homo sapien
ctctccactgaaatcctaggtaatatgtacagc

SEQ ID NO: 235295 - DNA, 33 bp, Homo sapien
agatgcttcaaggataactccagtgggaactct

SEQ ID NO: 235296 - DNA, 33 bp, Homo sapien
agatgcttcaaggatagctccagtgggaactct

SEQ ID NO: 235297 - DNA, 33 bp, Homo sapien
aagaatttcagctcaacatagagtttttccttc

SEQ ID NO: 235298 - DNA, 33 bp, Homo sapien
aagaatttcagctcaatatagagtttttccttc

SEQ ID NO: 235299 - DNA, 33 bp, Homo sapien
acgcagagtgattcaacgacagtaatcattact

SEQ ID NO: 235300 - DNA, 33 bp, Homo sapien
acgcagagtgattcaatgacagtaatcattact

SEQ ID NO: 235301 - DNA, 33 bp, Homo sapien
atgctatcttcaaaagccaataataccaaagga

SEQ ID NO: 235302 - DNA, 33 bp, Homo sapien
atgctatcttcaaaaggcaataataccaaagga

SEQ ID NO: 235303 - DNA, 33 bp, Homo sapien
acaccactacatcttacgctattttgcaaggat

SEQ ID NO: 235304 - DNA, 33 bp, Homo sapien
acaccactacatcttatgctattttgcaaggat

SEQ ID NO: 235305 - DNA, 33 bp, Homo sapien
tagtggaaagtaggtaaaagagaaaaagcacag

SEQ ID NO: 235306 - DNA, 33 bp, Homo sapien
tagtggaaagtaggtagaagagaaaaagcacag

SEQ ID NO: 235307 - DNA, 33 bp, Homo sapien
agaatataaactgaaacgtgaggtggtggcagg

SEQ ID NO: 235308 - DNA, 33 bp, Homo sapien
agaatataaactgaaatgtgaggtggtggcagg

SEQ ID NO: 235309 - DNA, 33 bp, Homo sapien
ctgacttcctgcataaccaagctcttaaaatag

SEQ ID NO: 235310 - DNA, 33 bp, Homo sapien
ctgacttcctgcataatcaagctcttaaaatag

SEQ ID NO: 235311 - DNA, 33 bp, Homo sapien
aggcacaagtgtttcaatagtgcataagaatag

SEQ ID NO: 235312 - DNA, 33 bp, Homo sapien
aggcacaagtgtttcagtagtgcataagaatag

SEQ ID NO: 235313 - DNA, 33 bp, Homo sapien
tcttgagatggagagagaattctgaattagcta

SEQ ID NO: 235314 - DNA, 33 bp, Homo sapien
tcttgagatggagagataattctgaattagcta

SEQ ID NO: 235315 - DNA, 33 bp, Homo sapien
cttcataagtgtgtaaattaaatatgcaaggtt

SEQ ID NO: 235316 - DNA, 33 bp, Homo sapien
cttcataagtgtgtaagttaaatatgcaaggtt

SEQ ID NO: 235317 - DNA, 33 bp, Homo sapien
ttatagccattctaaccggtttaaggtggtatc

SEQ ID NO: 235318 - DNA, 33 bp, Homo sapien
ttatagccattctaactggtttaaggtggtatc

SEQ ID NO: 235319 - DNA, 33 bp, Homo sapien
aattgattttcaacaaatataccaattcaatgt

SEQ ID NO: 235320 - DNA, 33 bp, Homo sapien
aattgattttcaacaattataccaattcaatgt

SEQ ID NO: 235321 - DNA, 33 bp, Homo sapien
gacacttattgtctaacgtgtacaaaactgagt

SEQ ID NO: 235322 - DNA, 33 bp, Homo sapien
gacacttattgtctaatgtgtacaaaactgagt

SEQ ID NO: 235323 - DNA, 33 bp, Homo sapien
gcacaaattgagagcactaaaaatccttactct

SEQ ID NO: 235324 - DNA, 33 bp, Homo sapien
gcacaaattgagagcattaaaaatccttactct

SEQ ID NO: 235325 - DNA, 33 bp, Homo sapien
ctaagtatgtctatacaaattatgcattctggc

SEQ ID NO: 235326 - DNA, 33 bp, Homo sapien
ctaagtatgtctataccaattatgcattctggc

SEQ ID NO: 235327 - DNA, 33 bp, Homo sapien
gcatactcacctcataaaaaaccttggcccaca

SEQ ID NO: 235328 - DNA, 33 bp, Homo sapien
gcatactcacctcatagaaaaccttggcccaca

SEQ ID NO: 235329 - DNA, 33 bp, Homo sapien
attcctgaattttccaactcaactacctgaaga

SEQ ID NO: 235330 - DNA, 33 bp, Homo sapien
attcctgaattttccacctcaactacctgaaga

SEQ ID NO: 235331 - DNA, 33 bp, Homo sapien
tatctaacattttcccacctggtcttgacctat

SEQ ID NO: 235332 - DNA, 33 bp, Homo sapien
tatctaacattttccctcctggtcttgacctat

SEQ ID NO: 235333 - DNA, 33 bp, Homo sapien
tagttgactctcaccccgacacttcccagtcta

SEQ ID NO: 235334 - DNA, 33 bp, Homo sapien
tagttgactctcaccctgacacttcccagtcta

SEQ ID NO: 235335 - DNA, 33 bp, Homo sapien
tcccatgaattctgccgatgtctaacaaacatt

SEQ ID NO: 235336 - DNA, 33 bp, Homo sapien
tcccatgaattctgcctatgtctaacaaacatt

SEQ ID NO: 235337 - DNA, 33 bp, Homo sapien
tatagaggatgaagcacgtttaaaaattggaca

SEQ ID NO: 235338 - DNA, 33 bp, Homo sapien
tatagaggatgaagcaggtttaaaaattggaca

SEQ ID NO: 235339 - DNA, 33 bp, Homo sapien
gcctaacatgaattgaaaccatttgtaatacca

SEQ ID NO: 235340 - DNA, 33 bp, Homo sapien
gcctaacatgaattgataccatttgtaatacca

SEQ ID NO: 235341 - DNA, 33 bp, Homo sapien
catctatgattaactaagaaacactttccaaga

SEQ ID NO: 235342 - DNA, 33 bp, Homo sapien
catctatgattaactaggaaacactttccaaga

SEQ ID NO: 235343 - DNA, 33 bp, Homo sapien
agcaaattaagttatgaaaactacaacacaaat

SEQ ID NO: 235344 - DNA, 33 bp, Homo sapien
agcaaattaagttatgcaaactacaacacaaat

SEQ ID NO: 235345 - DNA, 33 bp, Homo sapien
tgctaaaatgcggtataaaagggatagctacaa

SEQ ID NO: 235346 - DNA, 33 bp, Homo sapien
tgctaaaatgcggtatgaaagggatagctacaa

SEQ ID NO: 235347 - DNA, 33 bp, Homo sapien
agatagctgaactttacgtgagtatgggtttaa

SEQ ID NO: 235348 - DNA, 33 bp, Homo sapien
agatagctgaactttatgtgagtatgggtttaa

SEQ ID NO: 235349 - DNA, 33 bp, Homo sapien
aatataatacaaaacgaagatagctgaacttta

SEQ ID NO: 235350 - DNA, 33 bp, Homo sapien
aatataatacaaaacggagatagctgaacttta

SEQ ID NO: 235351 - DNA, 33 bp, Homo sapien
attattctacaattctaacttatttgcacaata

SEQ ID NO: 235352 - DNA, 33 bp, Homo sapien
attattctacaattctgacttatttgcacaata

SEQ ID NO: 235353 - DNA, 33 bp, Homo sapien
cctgtattttatgtcacgcttatcaaaaaccta

SEQ ID NO: 235354 - DNA, 33 bp, Homo sapien
cctgtattttatgtcatgcttatcaaaaaccta

SEQ ID NO: 235355 - DNA, 33 bp, Homo sapien
tcatgaagttcaaggaagggcttgattagaacg

SEQ ID NO: 235356 - DNA, 33 bp, Homo sapien
tcatgaagttcaaggacgggcttgattagaacg

SEQ ID NO: 235357 - DNA, 33 bp, Homo sapien
ttgatgcttttacttcgctgacatcctctgcca

SEQ ID NO: 235358 - DNA, 33 bp, Homo sapien
ttgatgcttttacttctctgacatcctctgcca

SEQ ID NO: 235359 - DNA, 33 bp, Homo sapien
ccaatcctgccctgacaaaagaaagacattaga

SEQ ID NO: 235360 - DNA, 33 bp, Homo sapien
ccaatcctgccctgacgaaagaaagacattaga

SEQ ID NO: 235361 - DNA, 33 bp, Homo sapien
gctacatattcaaagcagcactcttaataagaa

SEQ ID NO: 235362 - DNA, 33 bp, Homo sapien
gctacatattcaaagctgcactcttaataagaa

SEQ ID NO: 235363 - DNA, 33 bp, Homo sapien
atataacctggagaaaaaaaaggatagactatt

SEQ ID NO: 235364 - DNA, 33 bp, Homo sapien
atataacctggagaaacaaaaggatagactatt

SEQ ID NO: 235365 - DNA, 33 bp, Homo sapien
gtaaatgaaataagagcctaagagaatgggaga

SEQ ID NO: 235366 - DNA, 33 bp, Homo sapien
gtaaatgaaataagagtctaagagaatgggaga

SEQ ID NO: 235367 - DNA, 33 bp, Homo sapien
taggctttggagagtccaaattttccagattag

SEQ ID NO: 235368 - DNA, 33 bp, Homo sapien
taggctttggagagtctaaattttccagattag

SEQ ID NO: 235369 - DNA, 33 bp, Homo sapien
tatttcatgtcgtatacgtaccacattatttta

SEQ ID NO: 235370 - DNA, 33 bp, Homo sapien
tatttcatgtcgtatatgtaccacattatttta

SEQ ID NO: 235371 - DNA, 33 bp, Homo sapien
aatacatcaaatctaaaccaaactaaacatagt

SEQ ID NO: 235372 - DNA, 33 bp, Homo sapien
aatacatcaaatctaacccaaactaaacatagt

SEQ ID NO: 235373 - DNA, 33 bp, Homo sapien
cttttttcactgccaaatattttgttatgtttg

SEQ ID NO: 235374 - DNA, 33 bp, Homo sapien
cttttttcactgccaagtattttgttatgtttg

SEQ ID NO: 235375 - DNA, 33 bp, Homo sapien
cctaaccttgtgttcacgcgtaggtgtttagtt

SEQ ID NO: 235376 - DNA, 33 bp, Homo sapien
cctaaccttgtgttcatgcgtaggtgtttagtt

SEQ ID NO: 235377 - DNA, 33 bp, Homo sapien
taatacctgccataataaattcggttactttgg

SEQ ID NO: 235378 - DNA, 33 bp, Homo sapien
taatacctgccataatgaattcggttactttgg

SEQ ID NO: 235379 - DNA, 33 bp, Homo sapien
actttttctatctgaaattatcttggcaattga

SEQ ID NO: 235380 - DNA, 33 bp, Homo sapien
actttttctatctgaatttatcttggcaattga

SEQ ID NO: 235381 - DNA, 33 bp, Homo sapien
ttgccggaaacagcataataaaaacatcaataa

SEQ ID NO: 235382 - DNA, 33 bp, Homo sapien
ttgccggaaacagcatgataaaaacatcaataa

SEQ ID NO: 235383 - DNA, 33 bp, Homo sapien
catactctgcaatttcacacatatgaaatattc

SEQ ID NO: 235384 - DNA, 33 bp, Homo sapien
catactctgcaatttctcacatatgaaatattc

SEQ ID NO: 235385 - DNA, 33 bp, Homo sapien
tatatgataaagtcaccgtcctctttcaaagtc

SEQ ID NO: 235386 - DNA, 33 bp, Homo sapien
tatatgataaagtcactgtcctctttcaaagtc

SEQ ID NO: 235387 - DNA, 33 bp, Homo sapien
ggctgaaatatggaaactggttgatgagggtgt

SEQ ID NO: 235388 - DNA, 33 bp, Homo sapien
ggctgaaatatggaaattggttgatgagggtgt

SEQ ID NO: 235389 - DNA, 33 bp, Homo sapien
gaggctaccatgttagaaaaggccaaatggaag

SEQ ID NO: 235390 - DNA, 33 bp, Homo sapien
gaggctaccatgttaggaaaggccaaatggaag

SEQ ID NO: 235391 - DNA, 33 bp, Homo sapien
atgaggagttaacagacgaagagtagactaggg

SEQ ID NO: 235392 - DNA, 33 bp, Homo sapien
atgaggagttaacagatgaagagtagactaggg

SEQ ID NO: 235393 - DNA, 33 bp, Homo sapien
acactgctgtgcagcagcaggtagaaaatgaat

SEQ ID NO: 235394 - DNA, 33 bp, Homo sapien
acactgctgtgcagcatcaggtagaaaatgaat

SEQ ID NO: 235395 - DNA, 33 bp, Homo sapien
cagaccaggctcgatacatctgtgaaccattgg

SEQ ID NO: 235396 - DNA, 33 bp, Homo sapien
cagaccaggctcgatatatctgtgaaccattgg

SEQ ID NO: 235397 - DNA, 33 bp, Homo sapien
gaataaaaaagatccgaaaacatgccaatattt

SEQ ID NO: 235398 - DNA, 33 bp, Homo sapien
gaataaaaaagatccggaaacatgccaatattt

SEQ ID NO: 235399 - DNA, 33 bp, Homo sapien
tgcaaatccttccagaaaatatcactcttggga

SEQ ID NO: 235400 - DNA, 33 bp, Homo sapien
tgcaaatccttccagagaatatcactcttggga

SEQ ID NO: 235401 - DNA, 33 bp, Homo sapien
acaaaggcttgccttcaagggaaactattttac

SEQ ID NO: 235402 - DNA, 33 bp, Homo sapien
acaaaggcttgccttcgagggaaactattttac

SEQ ID NO: 235403 - DNA, 33 bp, Homo sapien
aaggaacacgtttgagaagataggagaaatttg

SEQ ID NO: 235404 - DNA, 33 bp, Homo sapien
aaggaacacgtttgaggagataggagaaatttg

SEQ ID NO: 235405 - DNA, 33 bp, Homo sapien
aattcagaaaaatcaaagtgagtgttgcagagg

SEQ ID NO: 235406 - DNA, 33 bp, Homo sapien
aattcagaaaaatcaaggtgagtgttgcagagg

SEQ ID NO: 235407 - DNA, 33 bp, Homo sapien
aatagcacaaaatataaggagggaatgtagcta

SEQ ID NO: 235408 - DNA, 33 bp, Homo sapien
aatagcacaaaatatagggagggaatgtagcta

SEQ ID NO: 235409 - DNA, 33 bp, Homo sapien
gagatcatattggctgaaatggggtagtaaagg

SEQ ID NO: 235410 - DNA, 33 bp, Homo sapien
gagatcatattggctgcaatggggtagtaaagg

SEQ ID NO: 235411 - DNA, 33 bp, Homo sapien
aaattttgaaggtgaccgagataaaaagggatg

SEQ ID NO: 235412 - DNA, 33 bp, Homo sapien
aaattttgaaggtgactgagataaaaagggatg

SEQ ID NO: 235413 - DNA, 33 bp, Homo sapien
aatgtgtataaaaccacataagctgagaaacag

SEQ ID NO: 235414 - DNA, 33 bp, Homo sapien
aatgtgtataaaaccatataagctgagaaacag

SEQ ID NO: 235415 - DNA, 33 bp, Homo sapien
aaataaaaacatgggaaacaattcactatgtct

SEQ ID NO: 235416 - DNA, 33 bp, Homo sapien
aaataaaaacatgggacacaattcactatgtct

SEQ ID NO: 235417 - DNA, 33 bp, Homo sapien
accagcaactgaataaacagagcaaagtacact

SEQ ID NO: 235418 - DNA, 33 bp, Homo sapien
accagcaactgaataagcagagcaaagtacact

SEQ ID NO: 235419 - DNA, 33 bp, Homo sapien
ttcataaactggaagcactttcaaaattgaagc

SEQ ID NO: 235420 - DNA, 33 bp, Homo sapien
ttcataaactggaagcgctttcaaaattgaagc

SEQ ID NO: 235421 - DNA, 33 bp, Homo sapien
atgtgtaatttatgaaggtgtaactactccctt

SEQ ID NO: 235422 - DNA, 33 bp, Homo sapien
atgtgtaatttatgaatgtgtaactactccctt

SEQ ID NO: 235423 - DNA, 33 bp, Homo sapien
catattctggagtttacgctaaattactcttct

SEQ ID NO: 235424 - DNA, 33 bp, Homo sapien
catattctggagtttatgctaaattactcttct

SEQ ID NO: 235425 - DNA, 33 bp, Homo sapien
tttcaacctcttttcacaaggggtcagattttc

SEQ ID NO: 235426 - DNA, 33 bp, Homo sapien
tttcaacctcttttcagaaggggtcagattttc

SEQ ID NO: 235427 - DNA, 33 bp, Homo sapien
gccttgcctgtaagcccgccttaatgtctacct

SEQ ID NO: 235428 - DNA, 33 bp, Homo sapien
gccttgcctgtaagcctgccttaatgtctacct

SEQ ID NO: 235429 - DNA, 33 bp, Homo sapien
tttcttcaggaaatcaatacaatttagcagtac

SEQ ID NO: 235430 - DNA, 33 bp, Homo sapien
tttcttcaggaaatcagtacaatttagcagtac

SEQ ID NO: 235431 - DNA, 33 bp, Homo sapien
ttaacatagccctgaggcaaacacataaatgaa

SEQ ID NO: 235432 - DNA, 33 bp, Homo sapien
ttaacatagccctgagtcaaacacataaatgaa

SEQ ID NO: 235433 - DNA, 33 bp, Homo sapien
taaacccatgtccataaaatctactggccaaat

SEQ ID NO: 235434 - DNA, 33 bp, Homo sapien
taaacccatgtccatagaatctactggccaaat

SEQ ID NO: 235435 - DNA, 33 bp, Homo sapien
gaaaagcaaagtataacaatggcttatactatc

SEQ ID NO: 235436 - DNA, 33 bp, Homo sapien
gaaaagcaaagtataagaatggcttatactatc

SEQ ID NO: 235437 - DNA, 33 bp, Homo sapien
ttttttctcacattaaagattttgcaatgtaaa

SEQ ID NO: 235438 - DNA, 33 bp, Homo sapien
ttttttctcacattaaggattttgcaatgtaaa

SEQ ID NO: 235439 - DNA, 33 bp, Homo sapien
caggtttattgagtcacacatatacaaaaactc

SEQ ID NO: 235440 - DNA, 33 bp, Homo sapien
caggtttattgagtcatacatatacaaaaactc

SEQ ID NO: 235441 - DNA, 33 bp, Homo sapien
agagtagatattggaaagtaattaacagtattg

SEQ ID NO: 235442 - DNA, 33 bp, Homo sapien
agagtagatattggaaggtaattaacagtattg

SEQ ID NO: 235443 - DNA, 33 bp, Homo sapien
aacaaatgttctataactagatggtggctgaag

SEQ ID NO: 235444 - DNA, 33 bp, Homo sapien
aacaaatgttctataattagatggtggctgaag

SEQ ID NO: 235445 - DNA, 33 bp, Homo sapien
aagattttggctgcaaatagtagaaagcccaac

SEQ ID NO: 235446 - DNA, 33 bp, Homo sapien
aagattttggctgcaagtagtagaaagcccaac

SEQ ID NO: 235447 - DNA, 33 bp, Homo sapien
ctcatcaattaacacccgctttaaaatctttca

SEQ ID NO: 235448 - DNA, 33 bp, Homo sapien
ctcatcaattaacacctgctttaaaatctttca

SEQ ID NO: 235449 - DNA, 33 bp, Homo sapien
aaatctgttgtaataaagtaacctggataatgg

SEQ ID NO: 235450 - DNA, 33 bp, Homo sapien
aaatctgttgtaataaggtaacctggataatgg

SEQ ID NO: 235451 - DNA, 33 bp, Homo sapien
tgaaaggctgtccagaccataaatgagagtgtt

SEQ ID NO: 235452 - DNA, 33 bp, Homo sapien
tgaaaggctgtccagagcataaatgagagtgtt

SEQ ID NO: 235453 - DNA, 33 bp, Homo sapien
acattgaagaaaatcacgacatcctctggagag

SEQ ID NO: 235454 - DNA, 33 bp, Homo sapien
acattgaagaaaatcatgacatcctctggagag

SEQ ID NO: 235455 - DNA, 33 bp, Homo sapien
aataataagtgtgaaacttgctccttctagctg

SEQ ID NO: 235456 - DNA, 33 bp, Homo sapien
aataataagtgtgaaagttgctccttctagctg

SEQ ID NO: 235457 - DNA, 33 bp, Homo sapien
cttgttatagaatatacataacttcaggaaaaa

SEQ ID NO: 235458 - DNA, 33 bp, Homo sapien
cttgttatagaatatagataacttcaggaaaaa

SEQ ID NO: 235459 - DNA, 33 bp, Homo sapien
tctacttcttaaaaaagcactctcaggctcaaa

SEQ ID NO: 235460 - DNA, 33 bp, Homo sapien
tctacttcttaaaaaatcactctcaggctcaaa

SEQ ID NO: 235461 - DNA, 33 bp, Homo sapien
cctattcagaactttgcaagctctaagattagg

SEQ ID NO: 235462 - DNA, 33 bp, Homo sapien
cctattcagaactttgtaagctctaagattagg

SEQ ID NO: 235463 - DNA, 33 bp, Homo sapien
tcagtaaaatcaatcaagttctccacaaattta

SEQ ID NO: 235464 - DNA, 33 bp, Homo sapien
tcagtaaaatcaatcatgttctccacaaattta

SEQ ID NO: 235465 - DNA, 33 bp, Homo sapien
cccacactactggtacaaattttgtgaattggt

SEQ ID NO: 235466 - DNA, 33 bp, Homo sapien
cccacactactggtaccaattttgtgaattggt

SEQ ID NO: 235467 - DNA, 33 bp, Homo sapien
cttgtttgtgatggtacctcagacattcccggt

SEQ ID NO: 235468 - DNA, 33 bp, Homo sapien
cttgtttgtgatggtatctcagacattcccggt

SEQ ID NO: 235469 - DNA, 33 bp, Homo sapien
ctggccacttcccctcacttttctgtaaactca

SEQ ID NO: 235470 - DNA, 33 bp, Homo sapien
ctggccacttcccctcgcttttctgtaaactca

SEQ ID NO: 235471 - DNA, 33 bp, Homo sapien
aagtatagtgtaggtaagtatagtatacagtgg

SEQ ID NO: 235472 - DNA, 33 bp, Homo sapien
aagtatagtgtaggtatgtatagtatacagtgg

SEQ ID NO: 235473 - DNA, 33 bp, Homo sapien
agattagtcctctggcaataggtgctgggttgg

SEQ ID NO: 235474 - DNA, 33 bp, Homo sapien
agattagtcctctggctataggtgctgggttgg

SEQ ID NO: 235475 - DNA, 33 bp, Homo sapien
ccctaaattaagagcaagagatatgcactcccc

SEQ ID NO: 235476 - DNA, 33 bp, Homo sapien
ccctaaattaagagcatgagatatgcactcccc

SEQ ID NO: 235477 - DNA, 33 bp, Homo sapien
tagatttggctatgaaagtattacaggtcaatt

SEQ ID NO: 235478 - DNA, 33 bp, Homo sapien
tagatttggctatgaaggtattacaggtcaatt

SEQ ID NO: 235479 - DNA, 33 bp, Homo sapien
tcgtcagagatccaaaattattctggtcgggca

SEQ ID NO: 235480 - DNA, 33 bp, Homo sapien
tcgtcagagatccaaagttattctggtcgggca

SEQ ID NO: 235481 - DNA, 33 bp, Homo sapien
attaagtgtgtgatagcaaatgtctaaaaagtg

SEQ ID NO: 235482 - DNA, 33 bp, Homo sapien
attaagtgtgtgataggaaatgtctaaaaagtg

SEQ ID NO: 235483 - DNA, 33 bp, Homo sapien
attaggaaaggcaatacgtagttgctacaccaa

SEQ ID NO: 235484 - DNA, 33 bp, Homo sapien
attaggaaaggcaatatgtagttgctacaccaa

SEQ ID NO: 235485 - DNA, 33 bp, Homo sapien
agaaagatagagcgagcaagaaatgtaaaaaat

SEQ ID NO: 235486 - DNA, 33 bp, Homo sapien
agaaagatagagcgaggaagaaatgtaaaaaat

SEQ ID NO: 235487 - DNA, 33 bp, Homo sapien
attacttcataaaaaaatgaccacagaagaagc

SEQ ID NO: 235488 - DNA, 33 bp, Homo sapien
attacttcataaaaaagtgaccacagaagaagc

SEQ ID NO: 235489 - DNA, 33 bp, Homo sapien
aggacattggctgtcaataagggagactacaga

SEQ ID NO: 235490 - DNA, 33 bp, Homo sapien
aggacattggctgtcagtaagggagactacaga

SEQ ID NO: 235491 - DNA, 33 bp, Homo sapien
tgctttaatcagtgtgcaacaaaccatctcaat

SEQ ID NO: 235492 - DNA, 33 bp, Homo sapien
tgctttaatcagtgtgtaacaaaccatctcaat

SEQ ID NO: 235493 - DNA, 33 bp, Homo sapien
tttctctgtcaaagtaactcatcaaatctcttt

SEQ ID NO: 235494 - DNA, 33 bp, Homo sapien
tttctctgtcaaagtacctcatcaaatctcttt

SEQ ID NO: 235495 - DNA, 33 bp, Homo sapien
taatagtgaatgtttcaaaatatttacatatta

SEQ ID NO: 235496 - DNA, 33 bp, Homo sapien
taatagtgaatgtttcgaaatatttacatatta

SEQ ID NO: 235497 - DNA, 33 bp, Homo sapien
gactgtttggatataaagccattggttaacacc

SEQ ID NO: 235498 - DNA, 33 bp, Homo sapien
gactgtttggatataacgccattggttaacacc

SEQ ID NO: 235499 - DNA, 33 bp, Homo sapien
tgataattactttataagctgacattttggaaa

SEQ ID NO: 235500 - DNA, 33 bp, Homo sapien
tgataattactttatatgctgacattttggaaa

SEQ ID NO: 235501 - DNA, 33 bp, Homo sapien
caagaaaaatgctaacaatacatccaacctgta

SEQ ID NO: 235502 - DNA, 33 bp, Homo sapien
caagaaaaatgctaacgatacatccaacctgta

SEQ ID NO: 235503 - DNA, 33 bp, Homo sapien
ctgccgaggagaaaaccacacagcgagcttaag

SEQ ID NO: 235504 - DNA, 33 bp, Homo sapien
ctgccgaggagaaaactacacagcgagcttaag

SEQ ID NO: 235505 - DNA, 33 bp, Homo sapien
gtttgtatttgtataactgtcagttcaatggct

SEQ ID NO: 235506 - DNA, 33 bp, Homo sapien
gtttgtatttgtataattgtcagttcaatggct

SEQ ID NO: 235507 - DNA, 33 bp, Homo sapien
aacattaaatgtaaaaactcttcttagtgttca

SEQ ID NO: 235508 - DNA, 33 bp, Homo sapien
aacattaaatgtaaaatctcttcttagtgttca

SEQ ID NO: 235509 - DNA, 33 bp, Homo sapien
tatagcaggaaacttccacatttttgttactga

SEQ ID NO: 235510 - DNA, 33 bp, Homo sapien
tatagcaggaaacttctacatttttgttactga

SEQ ID NO: 235511 - DNA, 33 bp, Homo sapien
gggagagaaagtcaaaataatggtgcaggtagg

SEQ ID NO: 235512 - DNA, 33 bp, Homo sapien
gggagagaaagtcaaagtaatggtgcaggtagg

SEQ ID NO: 235513 - DNA, 33 bp, Homo sapien
aaagcagaataatacaaaaagcaaagagagaat

SEQ ID NO: 235514 - DNA, 33 bp, Homo sapien
aaagcagaataatacacaaagcaaagagagaat

SEQ ID NO: 235515 - DNA, 33 bp, Homo sapien
taatatagcaaaccccagcaaaagcagaataat

SEQ ID NO: 235516 - DNA, 33 bp, Homo sapien
taatatagcaaaccccggcaaaagcagaataat

SEQ ID NO: 235517 - DNA, 33 bp, Homo sapien
tcatgccttgaaaatacaccactcaaaatgttt

SEQ ID NO: 235518 - DNA, 33 bp, Homo sapien
tcatgccttgaaaatagaccactcaaaatgttt

SEQ ID NO: 235519 - DNA, 33 bp, Homo sapien
caagcctcagagagcacccaatttaacaatatg

SEQ ID NO: 235520 - DNA, 33 bp, Homo sapien
caagcctcagagagcatccaatttaacaatatg

SEQ ID NO: 235521 - DNA, 33 bp, Homo sapien
ttgtttcaagttaaaaatcagtgaaagcattat

SEQ ID NO: 235522 - DNA, 33 bp, Homo sapien
ttgtttcaagttaaaagtcagtgaaagcattat

SEQ ID NO: 235523 - DNA, 33 bp, Homo sapien
aattcttctaaacacccagtgaagtttgcccta

SEQ ID NO: 235524 - DNA, 33 bp, Homo sapien
aattcttctaaacacctagtgaagtttgcccta

SEQ ID NO: 235525 - DNA, 33 bp, Homo sapien
gacaacattttggaaaacctggaattatgtctt

SEQ ID NO: 235526 - DNA, 33 bp, Homo sapien
gacaacattttggaaagcctggaattatgtctt

SEQ ID NO: 235527 - DNA, 33 bp, Homo sapien
tggtggcagattttagcatacttatttcattag

SEQ ID NO: 235528 - DNA, 33 bp, Homo sapien
tggtggcagattttaggatacttatttcattag

SEQ ID NO: 235529 - DNA, 33 bp, Homo sapien
aatcagaactctttgaataaagttactaagcaa

SEQ ID NO: 235530 - DNA, 33 bp, Homo sapien
aatcagaactctttgagtaaagttactaagcaa

SEQ ID NO: 235531 - DNA, 33 bp, Homo sapien
tggtaacagtacagataatattttgaaggaatc

SEQ ID NO: 235532 - DNA, 33 bp, Homo sapien
tggtaacagtacagatgatattttgaaggaatc

SEQ ID NO: 235533 - DNA, 33 bp, Homo sapien
cttgagggcttgtaacggggaacctgaaatggt

SEQ ID NO: 235534 - DNA, 33 bp, Homo sapien
cttgagggcttgtaactgggaacctgaaatggt

SEQ ID NO: 235535 - DNA, 33 bp, Homo sapien
tagatgtccatcatcaacaggaatcttttttat

SEQ ID NO: 235536 - DNA, 33 bp, Homo sapien
tagatgtccatcatcaccaggaatcttttttat

SEQ ID NO: 235537 - DNA, 33 bp, Homo sapien
gaaaggatgagaaagaaataggtttgtagaaga

SEQ ID NO: 235538 - DNA, 33 bp, Homo sapien
gaaaggatgagaaagagataggtttgtagaaga

SEQ ID NO: 235539 - DNA, 33 bp, Homo sapien
gtgatgattccccgaggatctagaactagaaat

SEQ ID NO: 235540 - DNA, 33 bp, Homo sapien
gtgatgattccccgagtatctagaactagaaat

SEQ ID NO: 235541 - DNA, 33 bp, Homo sapien
ctattataaacactgccaacctttagaaaagaa

SEQ ID NO: 235542 - DNA, 33 bp, Homo sapien
ctattataaacactgctaacctttagaaaagaa

SEQ ID NO: 235543 - DNA, 33 bp, Homo sapien
tattgtttcacaaaaacgcttaaatgcttgctc

SEQ ID NO: 235544 - DNA, 33 bp, Homo sapien
tattgtttcacaaaaatgcttaaatgcttgctc

SEQ ID NO: 235545 - DNA, 33 bp, Homo sapien
acaacatttgccatgcacttccctggaaatgaa

SEQ ID NO: 235546 - DNA, 33 bp, Homo sapien
acaacatttgccatgcgcttccctggaaatgaa

SEQ ID NO: 235547 - DNA, 33 bp, Homo sapien
ttaaccttatcttagaccttcaacaatacagca

SEQ ID NO: 235548 - DNA, 33 bp, Homo sapien
ttaaccttatcttagagcttcaacaatacagca

SEQ ID NO: 235549 - DNA, 33 bp, Homo sapien
atctatgctgctcaaaagtctctgtcttgtggt

SEQ ID NO: 235550 - DNA, 33 bp, Homo sapien
atctatgctgctcaaacgtctctgtcttgtggt

SEQ ID NO: 235551 - DNA, 33 bp, Homo sapien
gttggaggtcatgcaaaatgttgagttgtttcc

SEQ ID NO: 235552 - DNA, 33 bp, Homo sapien
gttggaggtcatgcaagatgttgagttgtttcc

SEQ ID NO: 235553 - DNA, 33 bp, Homo sapien
atgctatcttaccaagcatagaatttggagtgg

SEQ ID NO: 235554 - DNA, 33 bp, Homo sapien
atgctatcttaccaagtatagaatttggagtgg

SEQ ID NO: 235555 - DNA, 33 bp, Homo sapien
cagaccttaatgtatacgtagggagctttgatc

SEQ ID NO: 235556 - DNA, 33 bp, Homo sapien
cagaccttaatgtatatgtagggagctttgatc

SEQ ID NO: 235557 - DNA, 33 bp, Homo sapien
atgtaggattaaatgaacacacttactatctgt

SEQ ID NO: 235558 - DNA, 33 bp, Homo sapien
atgtaggattaaatgagcacacttactatctgt

SEQ ID NO: 235559 - DNA, 33 bp, Homo sapien
cagaggtttctgataacacaagttataagatgg

SEQ ID NO: 235560 - DNA, 33 bp, Homo sapien
cagaggtttctgataagacaagttataagatgg

SEQ ID NO: 235561 - DNA, 33 bp, Homo sapien
caaaaagcttagtttacacaccgcatcaactat

SEQ ID NO: 235562 - DNA, 33 bp, Homo sapien
caaaaagcttagtttatacaccgcatcaactat

SEQ ID NO: 235563 - DNA, 33 bp, Homo sapien
cacaatccacagcaacacaacaaattttaattt

SEQ ID NO: 235564 - DNA, 33 bp, Homo sapien
cacaatccacagcaacgcaacaaattttaattt

SEQ ID NO: 235565 - DNA, 33 bp, Homo sapien
tgacaatatgtggatgcacaatcttgcttcttt

SEQ ID NO: 235566 - DNA, 33 bp, Homo sapien
tgacaatatgtggatgtacaatcttgcttcttt

SEQ ID NO: 235567 - DNA, 33 bp, Homo sapien
tgccctttgggatgtaaatttgagttattaata

SEQ ID NO: 235568 - DNA, 33 bp, Homo sapien
tgccctttgggatgtacatttgagttattaata

SEQ ID NO: 235569 - DNA, 33 bp, Homo sapien
tgtaagtatgagcaaaaacttgtaaaattaaaa

SEQ ID NO: 235570 - DNA, 33 bp, Homo sapien
tgtaagtatgagcaaacacttgtaaaattaaaa

SEQ ID NO: 235571 - DNA, 33 bp, Homo sapien
ctagtgtacttttgaccggaagctttaccgata

SEQ ID NO: 235572 - DNA, 33 bp, Homo sapien
ctagtgtacttttgactggaagctttaccgata

SEQ ID NO: 235573 - DNA, 33 bp, Homo sapien
ttctgagctccttgatgaccattttttcagttt

SEQ ID NO: 235574 - DNA, 33 bp, Homo sapien
ttctgagctccttgattaccattttttcagttt

SEQ ID NO: 235575 - DNA, 33 bp, Homo sapien
ggtagatagcctgcaaaaacaaactgaaaatgt

SEQ ID NO: 235576 - DNA, 33 bp, Homo sapien
ggtagatagcctgcaagaacaaactgaaaatgt

SEQ ID NO: 235577 - DNA, 33 bp, Homo sapien
atgatctgtaccaggcaatgcttccattccaat

SEQ ID NO: 235578 - DNA, 33 bp, Homo sapien
atgatctgtaccaggcgatgcttccattccaat

SEQ ID NO: 235579 - DNA, 33 bp, Homo sapien
tcaccaaggcatatacccccaaaatgaattact

SEQ ID NO: 235580 - DNA, 33 bp, Homo sapien
tcaccaaggcatatactcccaaaatgaattact

SEQ ID NO: 235581 - DNA, 33 bp, Homo sapien
tgttggcacattggtcccaaatttcaaaaataa

SEQ ID NO: 235582 - DNA, 33 bp, Homo sapien
tgttggcacattggtctcaaatttcaaaaataa

SEQ ID NO: 235583 - DNA, 33 bp, Homo sapien
attagtcaggatagagcaagttacaccctggtt

SEQ ID NO: 235584 - DNA, 33 bp, Homo sapien
attagtcaggatagagtaagttacaccctggtt

SEQ ID NO: 235585 - DNA, 33 bp, Homo sapien
gttagtgcaattaaaaacttatgtagtatctta

SEQ ID NO: 235586 - DNA, 33 bp, Homo sapien
gttagtgcaattaaaatcttatgtagtatctta

SEQ ID NO: 235587 - DNA, 33 bp, Homo sapien
aaatgactgttggtatcaatatgaatgaaatgt

SEQ ID NO: 235588 - DNA, 33 bp, Homo sapien
aaatgactgttggtatgaatatgaatgaaatgt

SEQ ID NO: 235589 - DNA, 33 bp, Homo sapien
gactacagttttatgcaaccaaatgctagaaaa

SEQ ID NO: 235590 - DNA, 33 bp, Homo sapien
gactacagttttatgcgaccaaatgctagaaaa

SEQ ID NO: 235591 - DNA, 33 bp, Homo sapien
tacccagatactatgaggaacaacagtggtttt

SEQ ID NO: 235592 - DNA, 33 bp, Homo sapien
tacccagatactatgatgaacaacagtggtttt

SEQ ID NO: 235593 - DNA, 33 bp, Homo sapien
ctctggagctctgctgaacagcgtggagaacat

SEQ ID NO: 235594 - DNA, 33 bp, Homo sapien
ctctggagctctgctgcacagcgtggagaacat

SEQ ID NO: 235595 - DNA, 33 bp, Homo sapien
cattgtcaagtttaaccatgatttaggatgtca

SEQ ID NO: 235596 - DNA, 33 bp, Homo sapien
cattgtcaagtttaacgatgatttaggatgtca

SEQ ID NO: 235597 - DNA, 33 bp, Homo sapien
taattaaggatctccactcaaaaaacacaggaa

SEQ ID NO: 235598 - DNA, 33 bp, Homo sapien
taattaaggatctccattcaaaaaacacaggaa

SEQ ID NO: 235599 - DNA, 33 bp, Homo sapien
ccctcaagtccaagggaatacattctacctcca

SEQ ID NO: 235600 - DNA, 33 bp, Homo sapien
ccctcaagtccaagggtatacattctacctcca

SEQ ID NO: 235601 - DNA, 33 bp, Homo sapien
actttcaacacatctacatcaaacttacttcaa

SEQ ID NO: 235602 - DNA, 33 bp, Homo sapien
actttcaacacatctatatcaaacttacttcaa

SEQ ID NO: 235603 - DNA, 33 bp, Homo sapien
gttaaataaggacaaaagttctggaattgaacc

SEQ ID NO: 235604 - DNA, 33 bp, Homo sapien
gttaaataaggacaaacgttctggaattgaacc

SEQ ID NO: 235605 - DNA, 33 bp, Homo sapien
aagtacagaaatgccaaagctgaccaaagtcaa

SEQ ID NO: 235606 - DNA, 33 bp, Homo sapien
aagtacagaaatgccagagctgaccaaagtcaa

SEQ ID NO: 235607 - DNA, 33 bp, Homo sapien
aagatagaaaaaaagcagcacttgcagccctac

SEQ ID NO: 235608 - DNA, 33 bp, Homo sapien
aagatagaaaaaaagcggcacttgcagccctac

SEQ ID NO: 235609 - DNA, 33 bp, Homo sapien
actactgaaattttgcacctgctctttcttatt

SEQ ID NO: 235610 - DNA, 33 bp, Homo sapien
actactgaaattttgcgcctgctctttcttatt

SEQ ID NO: 235611 - DNA, 33 bp, Homo sapien
tataggcaatacaagacattaaattcgcccaca

SEQ ID NO: 235612 - DNA, 33 bp, Homo sapien
tataggcaatacaagatattaaattcgcccaca

SEQ ID NO: 235613 - DNA, 33 bp, Homo sapien
ccattgtcctcagtaggaacttttatcgcagtt

SEQ ID NO: 235614 - DNA, 33 bp, Homo sapien
ccattgtcctcagtagtaacttttatcgcagtt

SEQ ID NO: 235615 - DNA, 33 bp, Homo sapien
aggtgatattcaaaggaagggaatccagacctc

SEQ ID NO: 235616 - DNA, 33 bp, Homo sapien
aggtgatattcaaagggagggaatccagacctc

SEQ ID NO: 235617 - DNA, 33 bp, Homo sapien
cccctgagaaaggagaaattgattactgtgacc

SEQ ID NO: 235618 - DNA, 33 bp, Homo sapien
cccctgagaaaggagacattgattactgtgacc

SEQ ID NO: 235619 - DNA, 33 bp, Homo sapien
tagtactgaggctccaaacactaagttctcaat

SEQ ID NO: 235620 - DNA, 33 bp, Homo sapien
tagtactgaggctccatacactaagttctcaat

SEQ ID NO: 235621 - DNA, 33 bp, Homo sapien
aaagacatctgacttccagcattcagttgctaa

SEQ ID NO: 235622 - DNA, 33 bp, Homo sapien
aaagacatctgacttctagcattcagttgctaa

SEQ ID NO: 235623 - DNA, 33 bp, Homo sapien
agtaagtaagtaacaacgttcctatcactaagg

SEQ ID NO: 235624 - DNA, 33 bp, Homo sapien
agtaagtaagtaacaaggttcctatcactaagg

SEQ ID NO: 235625 - DNA, 33 bp, Homo sapien
aatgaattctgctttacaaaacctttggaacat

SEQ ID NO: 235626 - DNA, 33 bp, Homo sapien
aatgaattctgctttataaaacctttggaacat

SEQ ID NO: 235627 - DNA, 33 bp, Homo sapien
ggaaaattaattttgacgtggacattagttaaa

SEQ ID NO: 235628 - DNA, 33 bp, Homo sapien
ggaaaattaattttgatgtggacattagttaaa

SEQ ID NO: 235629 - DNA, 33 bp, Homo sapien
ataaatattaactaaaaatccacatctggtcct

SEQ ID NO: 235630 - DNA, 33 bp, Homo sapien
ataaatattaactaaagatccacatctggtcct

SEQ ID NO: 235631 - DNA, 33 bp, Homo sapien
aggttaaaaagtcatacaggccgaagcatttct

SEQ ID NO: 235632 - DNA, 33 bp, Homo sapien
aggttaaaaagtcatataggccgaagcatttct

SEQ ID NO: 235633 - DNA, 33 bp, Homo sapien
gataggattagttgggacaaaacctgtaacgat

SEQ ID NO: 235634 - DNA, 33 bp, Homo sapien
gataggattagttggggcaaaacctgtaacgat

SEQ ID NO: 235635 - DNA, 33 bp, Homo sapien
tgaccacatgagaaaaatggataccagaagaat

SEQ ID NO: 235636 - DNA, 33 bp, Homo sapien
tgaccacatgagaaaagtggataccagaagaat

SEQ ID NO: 235637 - DNA, 33 bp, Homo sapien
ctcagttgattatcatcacacataggagtaaaa

SEQ ID NO: 235638 - DNA, 33 bp, Homo sapien
ctcagttgattatcattacacataggagtaaaa

SEQ ID NO: 235639 - DNA, 33 bp, Homo sapien
gagaagtgaattctccaccttcttgttgtttct

SEQ ID NO: 235640 - DNA, 33 bp, Homo sapien
gagaagtgaattctcctccttcttgttgtttct

SEQ ID NO: 235641 - DNA, 33 bp, Homo sapien
gaaaagggaagaagataaagatagagcgtgctg

SEQ ID NO: 235642 - DNA, 33 bp, Homo sapien
gaaaagggaagaagatgaagatagagcgtgctg

SEQ ID NO: 235643 - DNA, 33 bp, Homo sapien
attagattacatttaacgacaggttttgtaaat

SEQ ID NO: 235644 - DNA, 33 bp, Homo sapien
attagattacatttaatgacaggttttgtaaat

SEQ ID NO: 235645 - DNA, 33 bp, Homo sapien
aaaatctgagctcttacacaggttagagatgtg

SEQ ID NO: 235646 - DNA, 33 bp, Homo sapien
aaaatctgagctcttatacaggttagagatgtg

SEQ ID NO: 235647 - DNA, 33 bp, Homo sapien
tctggagaaatgcttaccttctaactacaaatc

SEQ ID NO: 235648 - DNA, 33 bp, Homo sapien
tctggagaaatgcttagcttctaactacaaatc

SEQ ID NO: 235649 - DNA, 33 bp, Homo sapien
cacaaaccaggtgttacgatcaaagcaaaaaca

SEQ ID NO: 235650 - DNA, 33 bp, Homo sapien
cacaaaccaggtgttatgatcaaagcaaaaaca

SEQ ID NO: 235651 - DNA, 33 bp, Homo sapien
cttcttaggcatactaaattctatctaagaaag

SEQ ID NO: 235652 - DNA, 33 bp, Homo sapien
cttcttaggcatactagattctatctaagaaag

SEQ ID NO: 235653 - DNA, 33 bp, Homo sapien
catattcatgacaataccaaactatatttaaac

SEQ ID NO: 235654 - DNA, 33 bp, Homo sapien
catattcatgacaatagcaaactatatttaaac

SEQ ID NO: 235655 - DNA, 33 bp, Homo sapien
aaccaatataactaacccaggaataacagtgag

SEQ ID NO: 235656 - DNA, 33 bp, Homo sapien
aaccaatataactaactcaggaataacagtgag

SEQ ID NO: 235657 - DNA, 33 bp, Homo sapien
ccacacctggacattacacaaaaattttataag

SEQ ID NO: 235658 - DNA, 33 bp, Homo sapien
ccacacctggacattagacaaaaattttataag

SEQ ID NO: 235659 - DNA, 33 bp, Homo sapien
gagaaaaagagaaacaagatttccatactcagg

SEQ ID NO: 235660 - DNA, 33 bp, Homo sapien
gagaaaaagagaaacaggatttccatactcagg

SEQ ID NO: 235661 - DNA, 33 bp, Homo sapien
gaaaatggaagaaataggagcatcattatatat

SEQ ID NO: 235662 - DNA, 33 bp, Homo sapien
gaaaatggaagaaatatgagcatcattatatat

SEQ ID NO: 235663 - DNA, 33 bp, Homo sapien
agctaacatatcttagaactttcttggcttatt

SEQ ID NO: 235664 - DNA, 33 bp, Homo sapien
agctaacatatcttaggactttcttggcttatt

SEQ ID NO: 235665 - DNA, 33 bp, Homo sapien
tttcttggcttattcacgttagcattttttgaa

SEQ ID NO: 235666 - DNA, 33 bp, Homo sapien
tttcttggcttattcatgttagcattttttgaa

SEQ ID NO: 235667 - DNA, 33 bp, Homo sapien
acaactgaattatacaactggcgtggacgtgct

SEQ ID NO: 235668 - DNA, 33 bp, Homo sapien
acaactgaattatacacctggcgtggacgtgct

SEQ ID NO: 235669 - DNA, 33 bp, Homo sapien
ttagggaagttatcagaaagttatctattctct

SEQ ID NO: 235670 - DNA, 33 bp, Homo sapien
ttagggaagttatcaggaagttatctattctct

SEQ ID NO: 235671 - DNA, 33 bp, Homo sapien
gtaagcttaggggaaaagtatatatattgcata

SEQ ID NO: 235672 - DNA, 33 bp, Homo sapien
gtaagcttaggggaaaggtatatatattgcata

SEQ ID NO: 235673 - DNA, 33 bp, Homo sapien
tggttgccgtgtataaaaaggtctaggcagaca

SEQ ID NO: 235674 - DNA, 33 bp, Homo sapien
tggttgccgtgtataataaggtctaggcagaca

SEQ ID NO: 235675 - DNA, 33 bp, Homo sapien
ctgcacttgacctccaaagttcctgcttgggtc

SEQ ID NO: 235676 - DNA, 33 bp, Homo sapien
ctgcacttgacctccagagttcctgcttgggtc

SEQ ID NO: 235677 - DNA, 33 bp, Homo sapien
ttgagatttagactggaaagtaatagtctgaac

SEQ ID NO: 235678 - DNA, 33 bp, Homo sapien
ttgagatttagactgggaagtaatagtctgaac

SEQ ID NO: 235679 - DNA, 33 bp, Homo sapien
gtaatagtctgaacaaaagagagtttatgaatt

SEQ ID NO: 235680 - DNA, 33 bp, Homo sapien
gtaatagtctgaacaagagagagtttatgaatt

SEQ ID NO: 235681 - DNA, 33 bp, Homo sapien
tcccattcatgttcagcaggaaaataaaaacat

SEQ ID NO: 235682 - DNA, 33 bp, Homo sapien
tcccattcatgttcagtaggaaaataaaaacat

SEQ ID NO: 235683 - DNA, 33 bp, Homo sapien
acacaaatgtttgcaagaatccttaccctttca

SEQ ID NO: 235684 - DNA, 33 bp, Homo sapien
acacaaatgtttgcaataatccttaccctttca

SEQ ID NO: 235685 - DNA, 33 bp, Homo sapien
actgtgaagaacactgaaaatggaatgatgagc

SEQ ID NO: 235686 - DNA, 33 bp, Homo sapien
actgtgaagaacactgcaaatggaatgatgagc

SEQ ID NO: 235687 - DNA, 33 bp, Homo sapien
tcttagcctgtgtccacgtttgttcatttgtgg

SEQ ID NO: 235688 - DNA, 33 bp, Homo sapien
tcttagcctgtgtccaggtttgttcatttgtgg

SEQ ID NO: 235689 - DNA, 33 bp, Homo sapien
taccgtgagaaaaaaacctttgaggccgggcat

SEQ ID NO: 235690 - DNA, 33 bp, Homo sapien
taccgtgagaaaaaaatctttgaggccgggcat

SEQ ID NO: 235691 - DNA, 33 bp, Homo sapien
tagcatggtatttggcacattgtatataatcat

SEQ ID NO: 235692 - DNA, 33 bp, Homo sapien
tagcatggtatttggcccattgtatataatcat

SEQ ID NO: 235693 - DNA, 33 bp, Homo sapien
taagacagtctcccacaacatagtctttatcca

SEQ ID NO: 235694 - DNA, 33 bp, Homo sapien
taagacagtctcccaccacatagtctttatcca

SEQ ID NO: 235695 - DNA, 33 bp, Homo sapien
aagctcctttggcaagaaaggaccatcctttac

SEQ ID NO: 235696 - DNA, 33 bp, Homo sapien
aagctcctttggcaagtaaggaccatcctttac

SEQ ID NO: 235697 - DNA, 33 bp, Homo sapien
aatgccccaattaatacagtacccagtagaaga

SEQ ID NO: 235698 - DNA, 33 bp, Homo sapien
aatgccccaattaatatagtacccagtagaaga

SEQ ID NO: 235699 - DNA, 33 bp, Homo sapien
ggccctgagccagtcaaaaaatgatcgacagtt

SEQ ID NO: 235700 - DNA, 33 bp, Homo sapien
ggccctgagccagtcagaaaatgatcgacagtt

SEQ ID NO: 235701 - DNA, 33 bp, Homo sapien
gctaatcagagctcaccgtagtcttgatttcct

SEQ ID NO: 235702 - DNA, 33 bp, Homo sapien
gctaatcagagctcactgtagtcttgatttcct

SEQ ID NO: 235703 - DNA, 33 bp, Homo sapien
accaaatccagggcaacaaaaacataactaaag

SEQ ID NO: 235704 - DNA, 33 bp, Homo sapien
accaaatccagggcaagaaaaacataactaaag

SEQ ID NO: 235705 - DNA, 33 bp, Homo sapien
tgattaagtgtagaaacagcgattttcagggaa

SEQ ID NO: 235706 - DNA, 33 bp, Homo sapien
tgattaagtgtagaaatagcgattttcagggaa

SEQ ID NO: 235707 - DNA, 33 bp, Homo sapien
ctctaacatttcatcaagccaggagattaaata

SEQ ID NO: 235708 - DNA, 33 bp, Homo sapien
ctctaacatttcatcaggccaggagattaaata

SEQ ID NO: 235709 - DNA, 33 bp, Homo sapien
ccacctaatagtctcaaaggcatgattaacaaa

SEQ ID NO: 235710 - DNA, 33 bp, Homo sapien
ccacctaatagtctcagaggcatgattaacaaa

SEQ ID NO: 235711 - DNA, 33 bp, Homo sapien
atattgatgatgtggcacgaaacaaagaaatca

SEQ ID NO: 235712 - DNA, 33 bp, Homo sapien
atattgatgatgtggcccgaaacaaagaaatca

SEQ ID NO: 235713 - DNA, 33 bp, Homo sapien
cttcccaattcctagcaaaaaatctgtactgga

SEQ ID NO: 235714 - DNA, 33 bp, Homo sapien
cttcccaattcctagcgaaaaatctgtactgga

SEQ ID NO: 235715 - DNA, 33 bp, Homo sapien
aaaatctgtactggaaaagtggttattgacaag

SEQ ID NO: 235716 - DNA, 33 bp, Homo sapien
aaaatctgtactggaagagtggttattgacaag

SEQ ID NO: 235717 - DNA, 33 bp, Homo sapien
cttctgtacaccagagaaaattaggtacatctc

SEQ ID NO: 235718 - DNA, 33 bp, Homo sapien
cttctgtacaccagagcaaattaggtacatctc

SEQ ID NO: 235719 - DNA, 33 bp, Homo sapien
tagcacacagaggtaactgaagctactgctact

SEQ ID NO: 235720 - DNA, 33 bp, Homo sapien
tagcacacagaggtaattgaagctactgctact

SEQ ID NO: 235721 - DNA, 33 bp, Homo sapien
tagtctatcagcattgaaatcccaggaggctaa

SEQ ID NO: 235722 - DNA, 33 bp, Homo sapien
tagtctatcagcattggaatcccaggaggctaa

SEQ ID NO: 235723 - DNA, 33 bp, Homo sapien
acccagcaccgagttacgaattacataccaaaa

SEQ ID NO: 235724 - DNA, 33 bp, Homo sapien
acccagcaccgagttatgaattacataccaaaa

SEQ ID NO: 235725 - DNA, 33 bp, Homo sapien
gacaacaaattgcatacgccaagctataactca

SEQ ID NO: 235726 - DNA, 33 bp, Homo sapien
gacaacaaattgcatatgccaagctataactca

SEQ ID NO: 235727 - DNA, 33 bp, Homo sapien
gtttctgttcctgctagctaagcccatttgtaa

SEQ ID NO: 235728 - DNA, 33 bp, Homo sapien
gtttctgttcctgctatctaagcccatttgtaa

SEQ ID NO: 235729 - DNA, 33 bp, Homo sapien
aatacaaaaaacagccaagtggccaatatggtg

SEQ ID NO: 235730 - DNA, 33 bp, Homo sapien
aatacaaaaaacagccgagtggccaatatggtg

SEQ ID NO: 235731 - DNA, 33 bp, Homo sapien
gttctctcccagtccagtcagcaaagttaagag

SEQ ID NO: 235732 - DNA, 33 bp, Homo sapien
gttctctcccagtccattcagcaaagttaagag

SEQ ID NO: 235733 - DNA, 33 bp, Homo sapien
taccatggacttctgggatcctggctgcacaag

SEQ ID NO: 235734 - DNA, 33 bp, Homo sapien
taccatggacttctggtatcctggctgcacaag

SEQ ID NO: 235735 - DNA, 33 bp, Homo sapien
tgggatggccgacctacaggaaggactccttgg

SEQ ID NO: 235736 - DNA, 33 bp, Homo sapien
tgggatggccgacctataggaaggactccttgg

SEQ ID NO: 235737 - DNA, 33 bp, Homo sapien
tttgggagaaaacactaagagttgacagagagg

SEQ ID NO: 235738 - DNA, 33 bp, Homo sapien
tttgggagaaaacactgagagttgacagagagg

SEQ ID NO: 235739 - DNA, 33 bp, Homo sapien
gagtgagaccaaaatacggagcaaatcaacata

SEQ ID NO: 235740 - DNA, 33 bp, Homo sapien
gagtgagaccaaaatatggagcaaatcaacata

SEQ ID NO: 235741 - DNA, 33 bp, Homo sapien
gggaaaagagggccaactagacacacccaggaa

SEQ ID NO: 235742 - DNA, 33 bp, Homo sapien
gggaaaagagggccaagtagacacacccaggaa

SEQ ID NO: 235743 - DNA, 33 bp, Homo sapien
ttagttgtatttaaaagagcattccaggactgg

SEQ ID NO: 235744 - DNA, 33 bp, Homo sapien
ttagttgtatttaaaatagcattccaggactgg

SEQ ID NO: 235745 - DNA, 33 bp, Homo sapien
gtgtaatttcacaagaaaatgtgggccacttac

SEQ ID NO: 235746 - DNA, 33 bp, Homo sapien
gtgtaatttcacaagacaatgtgggccacttac

SEQ ID NO: 235747 - DNA, 33 bp, Homo sapien
gtccagtccggcgatacgcttgtcgcttgtatt

SEQ ID NO: 235748 - DNA, 33 bp, Homo sapien
gtccagtccggcgatatgcttgtcgcttgtatt

SEQ ID NO: 235749 - DNA, 33 bp, Homo sapien
tgtcttagggaatggaaagctgaggtcacagta

SEQ ID NO: 235750 - DNA, 33 bp, Homo sapien
tgtcttagggaatggacagctgaggtcacagta

SEQ ID NO: 235751 - DNA, 33 bp, Homo sapien
acatggcagtgtcatgaagccatcatttgactc

SEQ ID NO: 235752 - DNA, 33 bp, Homo sapien
acatggcagtgtcatggagccatcatttgactc

SEQ ID NO: 235753 - DNA, 33 bp, Homo sapien
gaaacagtgggcatagacagagcagtttcaggc

SEQ ID NO: 235754 - DNA, 33 bp, Homo sapien
gaaacagtgggcataggcagagcagtttcaggc

SEQ ID NO: 235755 - DNA, 33 bp, Homo sapien
ggaagcataatggtgcccacaaaactaggaggg

SEQ ID NO: 235756 - DNA, 33 bp, Homo sapien
ggaagcataatggtgctcacaaaactaggaggg

SEQ ID NO: 235757 - DNA, 33 bp, Homo sapien
tttttcaatgagcttaagtcctatgacactata

SEQ ID NO: 235758 - DNA, 33 bp, Homo sapien
tttttcaatgagcttaggtcctatgacactata

SEQ ID NO: 235759 - DNA, 33 bp, Homo sapien
cagaggctggctgaaagatacttatagtgtcat

SEQ ID NO: 235760 - DNA, 33 bp, Homo sapien
cagaggctggctgaaatatacttatagtgtcat

SEQ ID NO: 235761 - DNA, 33 bp, Homo sapien
actctcaacctaaaacacttctgacacaagtgt

SEQ ID NO: 235762 - DNA, 33 bp, Homo sapien
actctcaacctaaaacgcttctgacacaagtgt

SEQ ID NO: 235763 - DNA, 33 bp, Homo sapien
gggaggtttggaaacaccctcagcataggaact

SEQ ID NO: 235764 - DNA, 33 bp, Homo sapien
gggaggtttggaaacatcctcagcataggaact

SEQ ID NO: 235765 - DNA, 33 bp, Homo sapien
atgttctcaccttcaacgtgtttattttgcatc

SEQ ID NO: 235766 - DNA, 33 bp, Homo sapien
atgttctcaccttcaatgtgtttattttgcatc

SEQ ID NO: 235767 - DNA, 33 bp, Homo sapien
cccaaattcatagaacacacaacacaaaagagc

SEQ ID NO: 235768 - DNA, 33 bp, Homo sapien
cccaaattcatagaacgcacaacacaaaagagc

SEQ ID NO: 235769 - DNA, 33 bp, Homo sapien
tctattcagtaactccgcgttaaatcacaagtc

SEQ ID NO: 235770 - DNA, 33 bp, Homo sapien
tctattcagtaactcctcgttaaatcacaagtc

SEQ ID NO: 235771 - DNA, 33 bp, Homo sapien
gcctgctcctaatttacatactctctacccaca

SEQ ID NO: 235772 - DNA, 33 bp, Homo sapien
gcctgctcctaatttatatactctctacccaca

SEQ ID NO: 235773 - DNA, 33 bp, Homo sapien
tttctcccatgaaaaaattttggatttaaacag

SEQ ID NO: 235774 - DNA, 33 bp, Homo sapien
tttctcccatgaaaaatttttggatttaaacag

SEQ ID NO: 235775 - DNA, 33 bp, Homo sapien
acctgtaacaaatagcaaagtcaaggctcaatt

SEQ ID NO: 235776 - DNA, 33 bp, Homo sapien
acctgtaacaaatagcgaagtcaaggctcaatt

SEQ ID NO: 235777 - DNA, 33 bp, Homo sapien
aaaacgagaaagaaatcaaactgtgttgtaaag

SEQ ID NO: 235778 - DNA, 33 bp, Homo sapien
aaaacgagaaagaaatgaaactgtgttgtaaag

SEQ ID NO: 235779 - DNA, 33 bp, Homo sapien
agacagaaaggtatcactagagttcagatgatt

SEQ ID NO: 235780 - DNA, 33 bp, Homo sapien
agacagaaaggtatcagtagagttcagatgatt

SEQ ID NO: 235781 - DNA, 33 bp, Homo sapien
ggtgaccatattgggacaattctgatttccacc

SEQ ID NO: 235782 - DNA, 33 bp, Homo sapien
ggtgaccatattgggataattctgatttccacc

SEQ ID NO: 235783 - DNA, 33 bp, Homo sapien
cacagaactctttcaaatgtacctcaaaaatta

SEQ ID NO: 235784 - DNA, 33 bp, Homo sapien
cacagaactctttcaactgtacctcaaaaatta

SEQ ID NO: 235785 - DNA, 33 bp, Homo sapien
tatctgaactgccaaactgaataatatatttca

SEQ ID NO: 235786 - DNA, 33 bp, Homo sapien
tatctgaactgccaaattgaataatatatttca

SEQ ID NO: 235787 - DNA, 33 bp, Homo sapien
atgcccaacatggaaaatatagctactattaat

SEQ ID NO: 235788 - DNA, 33 bp, Homo sapien
atgcccaacatggaaagtatagctactattaat

SEQ ID NO: 235789 - DNA, 33 bp, Homo sapien
aatgtattctgtgtacaataacagcatcaaatt

SEQ ID NO: 235790 - DNA, 33 bp, Homo sapien
aatgtattctgtgtaccataacagcatcaaatt

SEQ ID NO: 235791 - DNA, 33 bp, Homo sapien
aagatgtccaccctacaaaagcacaagaagttg

SEQ ID NO: 235792 - DNA, 33 bp, Homo sapien
aagatgtccaccctacgaaagcacaagaagttg

SEQ ID NO: 235793 - DNA, 33 bp, Homo sapien
tagggtggacatcttgaagcactgagtgtggtt

SEQ ID NO: 235794 - DNA, 33 bp, Homo sapien
tagggtggacatcttgcagcactgagtgtggtt

SEQ ID NO: 235795 - DNA, 33 bp, Homo sapien
caaaatcactgatttacagagttgtgccttgtc

SEQ ID NO: 235796 - DNA, 33 bp, Homo sapien
caaaatcactgatttatagagttgtgccttgtc

SEQ ID NO: 235797 - DNA, 33 bp, Homo sapien
attaaaccagaggtccccaatcttaactgcaca

SEQ ID NO: 235798 - DNA, 33 bp, Homo sapien
attaaaccagaggtcctcaatcttaactgcaca

SEQ ID NO: 235799 - DNA, 33 bp, Homo sapien
gaagaacagcgtgtataaaggcctaaagagaag

SEQ ID NO: 235800 - DNA, 33 bp, Homo sapien
gaagaacagcgtgtatgaaggcctaaagagaag

SEQ ID NO: 235801 - DNA, 33 bp, Homo sapien
ctaacaattcttttcacgcttttttgtgtgcca

SEQ ID NO: 235802 - DNA, 33 bp, Homo sapien
ctaacaattcttttcatgcttttttgtgtgcca

SEQ ID NO: 235803 - DNA, 33 bp, Homo sapien
gttttatcggaaaccaaatatgtagatgagctc

SEQ ID NO: 235804 - DNA, 33 bp, Homo sapien
gttttatcggaaaccagatatgtagatgagctc

SEQ ID NO: 235805 - DNA, 33 bp, Homo sapien
gatagaggaagatctaagggctttgtatgcaat

SEQ ID NO: 235806 - DNA, 33 bp, Homo sapien
gatagaggaagatctaggggctttgtatgcaat

SEQ ID NO: 235807 - DNA, 33 bp, Homo sapien
cttccagtcttataaaccaacttccactgctgc

SEQ ID NO: 235808 - DNA, 33 bp, Homo sapien
cttccagtcttataaatcaacttccactgctgc

SEQ ID NO: 235809 - DNA, 33 bp, Homo sapien
agctgtctgatggagaccaactgagagataata

SEQ ID NO: 235810 - DNA, 33 bp, Homo sapien
agctgtctgatggagatcaactgagagataata

SEQ ID NO: 235811 - DNA, 33 bp, Homo sapien
tagcagctatctagatgagtaagggcagccagc

SEQ ID NO: 235812 - DNA, 33 bp, Homo sapien
tagcagctatctagattagtaagggcagccagc

SEQ ID NO: 235813 - DNA, 33 bp, Homo sapien
caattatttctgaaccaaaagcaatgctacagg

SEQ ID NO: 235814 - DNA, 33 bp, Homo sapien
caattatttctgaaccgaaagcaatgctacagg

SEQ ID NO: 235815 - DNA, 33 bp, Homo sapien
tgaagaagttgataacagactagtgttttatga

SEQ ID NO: 235816 - DNA, 33 bp, Homo sapien
tgaagaagttgataacggactagtgttttatga

SEQ ID NO: 235817 - DNA, 33 bp, Homo sapien
atcaatcacaatatccaagagcaagagaaaaca

SEQ ID NO: 235818 - DNA, 33 bp, Homo sapien
atcaatcacaatatccgagagcaagagaaaaca

SEQ ID NO: 235819 - DNA, 33 bp, Homo sapien
cttattgcttctatgcgccacttttacttagac

SEQ ID NO: 235820 - DNA, 33 bp, Homo sapien
cttattgcttctatgctccacttttacttagac

SEQ ID NO: 235821 - DNA, 33 bp, Homo sapien
cttttatcccgtaacacggcatcttcattcaac

SEQ ID NO: 235822 - DNA, 33 bp, Homo sapien
cttttatcccgtaacatggcatcttcattcaac

SEQ ID NO: 235823 - DNA, 33 bp, Homo sapien
cagtattcagaattaccaagtgtgttgcttcct

SEQ ID NO: 235824 - DNA, 33 bp, Homo sapien
cagtattcagaattacgaagtgtgttgcttcct

SEQ ID NO: 235825 - DNA, 33 bp, Homo sapien
aagatggccatccggccactttagtcttctcat

SEQ ID NO: 235826 - DNA, 33 bp, Homo sapien
aagatggccatccggctactttagtcttctcat

SEQ ID NO: 235827 - DNA, 33 bp, Homo sapien
cctagtggttttgccaaatatacaatcagttat

SEQ ID NO: 235828 - DNA, 33 bp, Homo sapien
cctagtggttttgccagatatacaatcagttat

SEQ ID NO: 235829 - DNA, 33 bp, Homo sapien
tctctaatcaaatttacggtcattgttcaacta

SEQ ID NO: 235830 - DNA, 33 bp, Homo sapien
tctctaatcaaatttatggtcattgttcaacta

SEQ ID NO: 235831 - DNA, 33 bp, Homo sapien
cagggaaaataggcccagatgaatttggagatt

SEQ ID NO: 235832 - DNA, 33 bp, Homo sapien
cagggaaaataggcccggatgaatttggagatt

SEQ ID NO: 235833 - DNA, 33 bp, Homo sapien
cagagatataaatcaacacatgtaggctatacg

SEQ ID NO: 235834 - DNA, 33 bp, Homo sapien
cagagatataaatcaatacatgtaggctatacg

SEQ ID NO: 235835 - DNA, 33 bp, Homo sapien
gtggaagatttatcccaaagaaagagtgaaagt

SEQ ID NO: 235836 - DNA, 33 bp, Homo sapien
gtggaagatttatccctaagaaagagtgaaagt

SEQ ID NO: 235837 - DNA, 33 bp, Homo sapien
tgtacaaatacacaaagaagcaaaaggaataaa

SEQ ID NO: 235838 - DNA, 33 bp, Homo sapien
tgtacaaatacacaaataagcaaaaggaataaa

SEQ ID NO: 235839 - DNA, 33 bp, Homo sapien
aagatttattgacttaacctggatcggcagtag

SEQ ID NO: 235840 - DNA, 33 bp, Homo sapien
aagatttattgacttagcctggatcggcagtag

SEQ ID NO: 235841 - DNA, 33 bp, Homo sapien
ttgttgcagaatctcaaatagacactgagtaaa

SEQ ID NO: 235842 - DNA, 33 bp, Homo sapien
ttgttgcagaatctcagatagacactgagtaaa

SEQ ID NO: 235843 - DNA, 33 bp, Homo sapien
gtggcatctagggacactgaaatgcaaggagga

SEQ ID NO: 235844 - DNA, 33 bp, Homo sapien
gtggcatctagggacagtgaaatgcaaggagga

SEQ ID NO: 235845 - DNA, 33 bp, Homo sapien
gccaccaaatgacttcccaaatagggagctcta

SEQ ID NO: 235846 - DNA, 33 bp, Homo sapien
gccaccaaatgacttctcaaatagggagctcta

SEQ ID NO: 235847 - DNA, 33 bp, Homo sapien
ccattctccttcagggaacttaaatatgtcaag

SEQ ID NO: 235848 - DNA, 33 bp, Homo sapien
ccattctccttcagggtacttaaatatgtcaag

SEQ ID NO: 235849 - DNA, 33 bp, Homo sapien
gactagtttgtcaataaaagttcttagggaatt

SEQ ID NO: 235850 - DNA, 33 bp, Homo sapien
gactagtttgtcaatagaagttcttagggaatt

SEQ ID NO: 235851 - DNA, 33 bp, Homo sapien
ttcaatacctagataccggtgaacatccgagtg

SEQ ID NO: 235852 - DNA, 33 bp, Homo sapien
ttcaatacctagatactggtgaacatccgagtg

SEQ ID NO: 235853 - DNA, 33 bp, Homo sapien
cagtaagatgttcttcaatctctgatattctct

SEQ ID NO: 235854 - DNA, 33 bp, Homo sapien
cagtaagatgttcttcgatctctgatattctct

SEQ ID NO: 235855 - DNA, 33 bp, Homo sapien
ccccaataaaaagacacggactggcaaattggt

SEQ ID NO: 235856 - DNA, 33 bp, Homo sapien
ccccaataaaaagacatggactggcaaattggt

SEQ ID NO: 235857 - DNA, 33 bp, Homo sapien
gaaagctcaaagtagacaggggctaaatatatt

SEQ ID NO: 235858 - DNA, 33 bp, Homo sapien
gaaagctcaaagtagataggggctaaatatatt

SEQ ID NO: 235859 - DNA, 33 bp, Homo sapien
gaggattagatagctcacattgcttttagatgg

SEQ ID NO: 235860 - DNA, 33 bp, Homo sapien
gaggattagatagctcgcattgcttttagatgg

SEQ ID NO: 235861 - DNA, 33 bp, Homo sapien
agagactgcagccttacatagtgcttggatctg

SEQ ID NO: 235862 - DNA, 33 bp, Homo sapien
agagactgcagccttagatagtgcttggatctg

SEQ ID NO: 235863 - DNA, 33 bp, Homo sapien
ttaacaggagtatgtgcatatatgtctgtatcg

SEQ ID NO: 235864 - DNA, 33 bp, Homo sapien
ttaacaggagtatgtgtatatatgtctgtatcg

SEQ ID NO: 235865 - DNA, 33 bp, Homo sapien
catgtaagaatgaaagaaaaagtaattggagca

SEQ ID NO: 235866 - DNA, 33 bp, Homo sapien
catgtaagaatgaaaggaaaagtaattggagca

SEQ ID NO: 235867 - DNA, 33 bp, Homo sapien
cagagaagtcaggagaaacaagttctttagtac

SEQ ID NO: 235868 - DNA, 33 bp, Homo sapien
cagagaagtcaggagagacaagttctttagtac

SEQ ID NO: 235869 - DNA, 33 bp, Homo sapien
tagccttggtgtaacccggtcacagccttgttg

SEQ ID NO: 235870 - DNA, 33 bp, Homo sapien
tagccttggtgtaacctggtcacagccttgttg

SEQ ID NO: 235871 - DNA, 33 bp, Homo sapien
taccctagatactacgacaaaacagatatattc

SEQ ID NO: 235872 - DNA, 33 bp, Homo sapien
taccctagatactacggcaaaacagatatattc

SEQ ID NO: 235873 - DNA, 33 bp, Homo sapien
aattctcaatgaaatcaaatataccgccactat

SEQ ID NO: 235874 - DNA, 33 bp, Homo sapien
aattctcaatgaaatcgaatataccgccactat

SEQ ID NO: 235875 - DNA, 33 bp, Homo sapien
gttactaatgccacaaccatccatgtcagagga

SEQ ID NO: 235876 - DNA, 33 bp, Homo sapien
gttactaatgccacaatcatccatgtcagagga

SEQ ID NO: 235877 - DNA, 33 bp, Homo sapien
aggggaaggaataaaactaaggcatggaaatca

SEQ ID NO: 235878 - DNA, 33 bp, Homo sapien
aggggaaggaataaaattaaggcatggaaatca

SEQ ID NO: 235879 - DNA, 33 bp, Homo sapien
catccacagaaaattaaactcattggagacaga

SEQ ID NO: 235880 - DNA, 33 bp, Homo sapien
catccacagaaaattagactcattggagacaga

SEQ ID NO: 235881 - DNA, 33 bp, Homo sapien
agctgtgacatataggcaccaagccttaagaaa

SEQ ID NO: 235882 - DNA, 33 bp, Homo sapien
agctgtgacatataggtaccaagccttaagaaa

SEQ ID NO: 235883 - DNA, 33 bp, Homo sapien
cctcagattttccagcacctgaaggtatcaatg

SEQ ID NO: 235884 - DNA, 33 bp, Homo sapien
cctcagattttccagcgcctgaaggtatcaatg

SEQ ID NO: 235885 - DNA, 33 bp, Homo sapien
agaatctcctgatcaacttctgcaaccacccca

SEQ ID NO: 235886 - DNA, 33 bp, Homo sapien
agaatctcctgatcaagttctgcaaccacccca

SEQ ID NO: 235887 - DNA, 33 bp, Homo sapien
gtaaaagctgtagtaacaatccctctttctccc

SEQ ID NO: 235888 - DNA, 33 bp, Homo sapien
gtaaaagctgtagtaataatccctctttctccc

SEQ ID NO: 235889 - DNA, 33 bp, Homo sapien
ctgagagatgttctgaatattaaatacttggtt

SEQ ID NO: 235890 - DNA, 33 bp, Homo sapien
ctgagagatgttctgagtattaaatacttggtt

SEQ ID NO: 235891 - DNA, 33 bp, Homo sapien
ttcttctggttttttcactgttgaatttcacca

SEQ ID NO: 235892 - DNA, 33 bp, Homo sapien
ttcttctggttttttcgctgttgaatttcacca

SEQ ID NO: 235893 - DNA, 33 bp, Homo sapien
ggttctggtcatttggcaaccatttctacttgc

SEQ ID NO: 235894 - DNA, 33 bp, Homo sapien
ggttctggtcatttggtaaccatttctacttgc

SEQ ID NO: 235895 - DNA, 33 bp, Homo sapien
gcagaataatgaaaccagattcctacctattac

SEQ ID NO: 235896 - DNA, 33 bp, Homo sapien
gcagaataatgaaaccggattcctacctattac

SEQ ID NO: 235897 - DNA, 33 bp, Homo sapien
tgcaggagcaaccaggcaggcaatcttgggagg

SEQ ID NO: 235898 - DNA, 33 bp, Homo sapien
tgcaggagcaaccaggtaggcaatcttgggagg

SEQ ID NO: 235899 - DNA, 33 bp, Homo sapien
atacttcaaaggccaaaatgcttaattataaac

SEQ ID NO: 235900 - DNA, 33 bp, Homo sapien
atacttcaaaggccaagatgcttaattataaac

SEQ ID NO: 235901 - DNA, 33 bp, Homo sapien
agataacattgagagtaaatgacaaaaacctca

SEQ ID NO: 235902 - DNA, 33 bp, Homo sapien
agataacattgagagtgaatgacaaaaacctca

SEQ ID NO: 235903 - DNA, 33 bp, Homo sapien
accccagagtgaaaagacacaggtactagagct

SEQ ID NO: 235904 - DNA, 33 bp, Homo sapien
accccagagtgaaaaggcacaggtactagagct

SEQ ID NO: 235905 - DNA, 33 bp, Homo sapien
atcagtctctacattcacatgaaccaattcctt

SEQ ID NO: 235906 - DNA, 33 bp, Homo sapien
atcagtctctacattctcatgaaccaattcctt

SEQ ID NO: 235907 - DNA, 33 bp, Homo sapien
ttagaaagcaaataaaaactggatattcctcct

SEQ ID NO: 235908 - DNA, 33 bp, Homo sapien
ttagaaagcaaataaagactggatattcctcct

SEQ ID NO: 235909 - DNA, 33 bp, Homo sapien
acagtgttgtgaaataagcaagagatgatagaa

SEQ ID NO: 235910 - DNA, 33 bp, Homo sapien
acagtgttgtgaaatatgcaagagatgatagaa

SEQ ID NO: 235911 - DNA, 33 bp, Homo sapien
ctctccagccctccatcaacttgaatgctttga

SEQ ID NO: 235912 - DNA, 33 bp, Homo sapien
ctctccagccctccattaacttgaatgctttga

SEQ ID NO: 235913 - DNA, 33 bp, Homo sapien
atccaatatccatttacccatcttccactccta

SEQ ID NO: 235914 - DNA, 33 bp, Homo sapien
atccaatatccatttatccatcttccactccta

SEQ ID NO: 235915 - DNA, 33 bp, Homo sapien
atatcatgataaaatagtatgcttttgtgtgtg

SEQ ID NO: 235916 - DNA, 33 bp, Homo sapien
atatcatgataaaatattatgcttttgtgtgtg

SEQ ID NO: 235917 - DNA, 33 bp, Homo sapien
ggctagctctatcacacccttccactgtcaact

SEQ ID NO: 235918 - DNA, 33 bp, Homo sapien
ggctagctctatcacatccttccactgtcaact

SEQ ID NO: 235919 - DNA, 33 bp, Homo sapien
acttcaaatcaaatcccctaatgttaacctaca

SEQ ID NO: 235920 - DNA, 33 bp, Homo sapien
acttcaaatcaaatcctctaatgttaacctaca

SEQ ID NO: 235921 - DNA, 33 bp, Homo sapien
tacaaaggggcctgaactgatctgattcatgtt

SEQ ID NO: 235922 - DNA, 33 bp, Homo sapien
tacaaaggggcctgaagtgatctgattcatgtt

SEQ ID NO: 235923 - DNA, 33 bp, Homo sapien
gagctgtcagcatagacataattaaagctatta

SEQ ID NO: 235924 - DNA, 33 bp, Homo sapien
gagctgtcagcatagagataattaaagctatta

SEQ ID NO: 235925 - DNA, 33 bp, Homo sapien
atgaggccattaattacgaagcagtaggcagaa

SEQ ID NO: 235926 - DNA, 33 bp, Homo sapien
atgaggccattaattatgaagcagtaggcagaa

SEQ ID NO: 235927 - DNA, 33 bp, Homo sapien
cttaggctgattattcaatgatagatattttga

SEQ ID NO: 235928 - DNA, 33 bp, Homo sapien
cttaggctgattattcgatgatagatattttga

SEQ ID NO: 235929 - DNA, 33 bp, Homo sapien
agatagcataagtacaaatcaaaaattactgta

SEQ ID NO: 235930 - DNA, 33 bp, Homo sapien
agatagcataagtacatatcaaaaattactgta

SEQ ID NO: 235931 - DNA, 33 bp, Homo sapien
cctcattccagaaaaagaagtattgatgtagtc

SEQ ID NO: 235932 - DNA, 33 bp, Homo sapien
cctcattccagaaaaataagtattgatgtagtc

SEQ ID NO: 235933 - DNA, 33 bp, Homo sapien
ctgagattcacttatacatactcgaactattca

SEQ ID NO: 235934 - DNA, 33 bp, Homo sapien
ctgagattcacttatatatactcgaactattca

SEQ ID NO: 235935 - DNA, 33 bp, Homo sapien
aatcaaacaccacttaggtcatataaatctttt

SEQ ID NO: 235936 - DNA, 33 bp, Homo sapien
aatcaaacaccacttatgtcatataaatctttt

SEQ ID NO: 235937 - DNA, 33 bp, Homo sapien
aatctctagtttacaactaacacagtaagtagt

SEQ ID NO: 235938 - DNA, 33 bp, Homo sapien
aatctctagtttacaattaacacagtaagtagt

SEQ ID NO: 235939 - DNA, 33 bp, Homo sapien
acattctgtgtagtaaagcaagagaggcagagc

SEQ ID NO: 235940 - DNA, 33 bp, Homo sapien
acattctgtgtagtaacgcaagagaggcagagc

SEQ ID NO: 235941 - DNA, 33 bp, Homo sapien
acatagttggtcattaagcacttacaaaaaaag

SEQ ID NO: 235942 - DNA, 33 bp, Homo sapien
acatagttggtcattatgcacttacaaaaaaag

SEQ ID NO: 235943 - DNA, 33 bp, Homo sapien
tcatacatgaaaaaggaaaattacaaatcatta

SEQ ID NO: 235944 - DNA, 33 bp, Homo sapien
tcatacatgaaaaagggaaattacaaatcatta

SEQ ID NO: 235945 - DNA, 33 bp, Homo sapien
gaaaacaatagtcacactgaaaagtaatgaaat

SEQ ID NO: 235946 - DNA, 33 bp, Homo sapien
gaaaacaatagtcacattgaaaagtaatgaaat

SEQ ID NO: 235947 - DNA, 33 bp, Homo sapien
tcacaattttatctgacggaggacaaattattt

SEQ ID NO: 235948 - DNA, 33 bp, Homo sapien
tcacaattttatctgatggaggacaaattattt

SEQ ID NO: 235949 - DNA, 33 bp, Homo sapien
aactgcaggatttttacgttttgaatttatatc

SEQ ID NO: 235950 - DNA, 33 bp, Homo sapien
aactgcaggatttttaggttttgaatttatatc

SEQ ID NO: 235951 - DNA, 33 bp, Homo sapien
tattaatatctttgagaaaaatgttaagcagaa

SEQ ID NO: 235952 - DNA, 33 bp, Homo sapien
tattaatatctttgaggaaaatgttaagcagaa

SEQ ID NO: 235953 - DNA, 33 bp, Homo sapien
cacattaccctgataaaaggccagaggtctccc

SEQ ID NO: 235954 - DNA, 33 bp, Homo sapien
cacattaccctgataataggccagaggtctccc

SEQ ID NO: 235955 - DNA, 33 bp, Homo sapien
tatctgcagtccccaaagctcagtttctgctgc

SEQ ID NO: 235956 - DNA, 33 bp, Homo sapien
tatctgcagtccccaacgctcagtttctgctgc

SEQ ID NO: 235957 - DNA, 33 bp, Homo sapien
ccaagagtcactcttacgttgacttctaacatc

SEQ ID NO: 235958 - DNA, 33 bp, Homo sapien
ccaagagtcactcttatgttgacttctaacatc

SEQ ID NO: 235959 - DNA, 33 bp, Homo sapien
aagcagcagcaaccaaatactgaagagtaccca

SEQ ID NO: 235960 - DNA, 33 bp, Homo sapien
aagcagcagcaaccaagtactgaagagtaccca

SEQ ID NO: 235961 - DNA, 33 bp, Homo sapien
aaagccctaagagatgaaatggagacagtaaac

SEQ ID NO: 235962 - DNA, 33 bp, Homo sapien
aaagccctaagagatgcaatggagacagtaaac

SEQ ID NO: 235963 - DNA, 33 bp, Homo sapien
tttaagcaccacccaaacagtcatttacatctc

SEQ ID NO: 235964 - DNA, 33 bp, Homo sapien
tttaagcaccacccaagcagtcatttacatctc

SEQ ID NO: 235965 - DNA, 33 bp, Homo sapien
gcagcaggaaggttaacgactgaaagggctctc

SEQ ID NO: 235966 - DNA, 33 bp, Homo sapien
gcagcaggaaggttaaggactgaaagggctctc

SEQ ID NO: 235967 - DNA, 33 bp, Homo sapien
attaactatcacaaaacgtagctactgcatata

SEQ ID NO: 235968 - DNA, 33 bp, Homo sapien
attaactatcacaaaatgtagctactgcatata

SEQ ID NO: 235969 - DNA, 33 bp, Homo sapien
ctttgttagagtaaataaaactatgcaaaatga

SEQ ID NO: 235970 - DNA, 33 bp, Homo sapien
ctttgttagagtaaatcaaactatgcaaaatga

SEQ ID NO: 235971 - DNA, 33 bp, Homo sapien
gattaacaaggataccaaggacctgaactcagc

SEQ ID NO: 235972 - DNA, 33 bp, Homo sapien
gattaacaaggataccgaggacctgaactcagc

SEQ ID NO: 235973 - DNA, 33 bp, Homo sapien
atcttttgtgagaatacgaatggagctagaggc

SEQ ID NO: 235974 - DNA, 33 bp, Homo sapien
atcttttgtgagaatatgaatggagctagaggc

SEQ ID NO: 235975 - DNA, 33 bp, Homo sapien
tgtgactttgctgttacaggcctgagccaagtt

SEQ ID NO: 235976 - DNA, 33 bp, Homo sapien
tgtgactttgctgttataggcctgagccaagtt

SEQ ID NO: 235977 - DNA, 33 bp, Homo sapien
atgtagatataaccaccgagacagaaagcacat

SEQ ID NO: 235978 - DNA, 33 bp, Homo sapien
atgtagatataaccactgagacagaaagcacat

SEQ ID NO: 235979 - DNA, 33 bp, Homo sapien
aatatctaacaaatacaagaaagtgagctattc

SEQ ID NO: 235980 - DNA, 33 bp, Homo sapien
aatatctaacaaataccagaaagtgagctattc

SEQ ID NO: 235981 - DNA, 33 bp, Homo sapien
gagagggaactgtaagaatatgggaaaatgata

SEQ ID NO: 235982 - DNA, 33 bp, Homo sapien
gagagggaactgtaaggatatgggaaaatgata

SEQ ID NO: 235983 - DNA, 33 bp, Homo sapien
gttttacactgttataaagaatgctgtaatgaa

SEQ ID NO: 235984 - DNA, 33 bp, Homo sapien
gttttacactgttatagagaatgctgtaatgaa

SEQ ID NO: 235985 - DNA, 33 bp, Homo sapien
ccaaaagaggaaaaaacgtgcttagatcaagtg

SEQ ID NO: 235986 - DNA, 33 bp, Homo sapien
ccaaaagaggaaaaaatgtgcttagatcaagtg

SEQ ID NO: 235987 - DNA, 33 bp, Homo sapien
aaaatcacctgtgtccaccaatgaatgagtgga

SEQ ID NO: 235988 - DNA, 33 bp, Homo sapien
aaaatcacctgtgtccgccaatgaatgagtgga

SEQ ID NO: 235989 - DNA, 33 bp, Homo sapien
ccacctatactattcactagctgagcacaatcc

SEQ ID NO: 235990 - DNA, 33 bp, Homo sapien
ccacctatactattcagtagctgagcacaatcc

SEQ ID NO: 235991 - DNA, 33 bp, Homo sapien
agtgggtgtatcacaccgtataaacagcctcag

SEQ ID NO: 235992 - DNA, 33 bp, Homo sapien
agtgggtgtatcacactgtataaacagcctcag

SEQ ID NO: 235993 - DNA, 33 bp, Homo sapien
ttctcggaaagaggcaaatattgttagtcacaa

SEQ ID NO: 235994 - DNA, 33 bp, Homo sapien
ttctcggaaagaggcatatattgttagtcacaa

SEQ ID NO: 235995 - DNA, 33 bp, Homo sapien
ttctgatgtgaatacacagtttagcaagatata

SEQ ID NO: 235996 - DNA, 33 bp, Homo sapien
ttctgatgtgaatacagagtttagcaagatata

SEQ ID NO: 235997 - DNA, 33 bp, Homo sapien
gagaaggagattacacaatgaggcaggaatatt

SEQ ID NO: 235998 - DNA, 33 bp, Homo sapien
gagaaggagattacacgatgaggcaggaatatt

SEQ ID NO: 235999 - DNA, 33 bp, Homo sapien
attatattaagttatacggcagaagggatttta

SEQ ID NO: 236000 - DNA, 33 bp, Homo sapien
attatattaagttatatggcagaagggatttta

SEQ ID NO: 236001 - DNA, 33 bp, Homo sapien
acaacatagtgtagataagtctgaaaggtcagg

SEQ ID NO: 236002 - DNA, 33 bp, Homo sapien
acaacatagtgtagatgagtctgaaaggtcagg

SEQ ID NO: 236003 - DNA, 33 bp, Homo sapien
tatcattcacagaagaaaattgtacattatttt

SEQ ID NO: 236004 - DNA, 33 bp, Homo sapien
tatcattcacagaagacaattgtacattatttt

SEQ ID NO: 236005 - DNA, 33 bp, Homo sapien
gataagctggaattaacgtgtgaaatcaaatga

SEQ ID NO: 236006 - DNA, 33 bp, Homo sapien
gataagctggaattaatgtgtgaaatcaaatga

SEQ ID NO: 236007 - DNA, 33 bp, Homo sapien
ttttttgactcacataacttaattgaatcttga

SEQ ID NO: 236008 - DNA, 33 bp, Homo sapien
ttttttgactcacataccttaattgaatcttga

SEQ ID NO: 236009 - DNA, 33 bp, Homo sapien
aagttcatctggacaacagtaaacaaactaaaa

SEQ ID NO: 236010 - DNA, 33 bp, Homo sapien
aagttcatctggacaatagtaaacaaactaaaa

SEQ ID NO: 236011 - DNA, 33 bp, Homo sapien
gcagctatcaagtacccctgccattacaaattc

SEQ ID NO: 236012 - DNA, 33 bp, Homo sapien
gcagctatcaagtacctctgccattacaaattc

SEQ ID NO: 236013 - DNA, 33 bp, Homo sapien
gtggtatctctacaagactgtaagactcacagt

SEQ ID NO: 236014 - DNA, 33 bp, Homo sapien
gtggtatctctacaagcctgtaagactcacagt

SEQ ID NO: 236015 - DNA, 33 bp, Homo sapien
ttcaacataacacaaagaaggaattgagaaaat

SEQ ID NO: 236016 - DNA, 33 bp, Homo sapien
ttcaacataacacaaataaggaattgagaaaat

SEQ ID NO: 236017 - DNA, 33 bp, Homo sapien
aacaaaaacagcaagcgactgataccaaaactg

SEQ ID NO: 236018 - DNA, 33 bp, Homo sapien
aacaaaaacagcaagctactgataccaaaactg

SEQ ID NO: 236019 - DNA, 33 bp, Homo sapien
caaggcctcactagagaagtcagacaagagaaa

SEQ ID NO: 236020 - DNA, 33 bp, Homo sapien
caaggcctcactagagcagtcagacaagagaaa

SEQ ID NO: 236021 - DNA, 33 bp, Homo sapien
ttagttgccagtgtggccaaaatataaagcagg

SEQ ID NO: 236022 - DNA, 33 bp, Homo sapien
ttagttgccagtgtggtcaaaatataaagcagg

SEQ ID NO: 236023 - DNA, 33 bp, Homo sapien
atagagatagacacaaatcttagaaggccaaga

SEQ ID NO: 236024 - DNA, 33 bp, Homo sapien
atagagatagacacaattcttagaaggccaaga

SEQ ID NO: 236025 - DNA, 33 bp, Homo sapien
tcccctggattctgctaaaaaaaactgtgctag

SEQ ID NO: 236026 - DNA, 33 bp, Homo sapien
tcccctggattctgctcaaaaaaactgtgctag

SEQ ID NO: 236027 - DNA, 33 bp, Homo sapien
atagtcagcaagaaggaagagtaaaagatactt

SEQ ID NO: 236028 - DNA, 33 bp, Homo sapien
atagtcagcaagaagggagagtaaaagatactt

SEQ ID NO: 236029 - DNA, 33 bp, Homo sapien
tttttcaacttaattccattctccccatcactg

SEQ ID NO: 236030 - DNA, 33 bp, Homo sapien
tttttcaacttaattctattctccccatcactg

SEQ ID NO: 236031 - DNA, 33 bp, Homo sapien
attttgtaaaattgcacgtataatacttttgag

SEQ ID NO: 236032 - DNA, 33 bp, Homo sapien
attttgtaaaattgcatgtataatacttttgag

SEQ ID NO: 236033 - DNA, 33 bp, Homo sapien
cctacatgagagattccgacagtttcttgccac

SEQ ID NO: 236034 - DNA, 33 bp, Homo sapien
cctacatgagagattctgacagtttcttgccac

SEQ ID NO: 236035 - DNA, 33 bp, Homo sapien
aacctgtattttcccacaacaataatgtaactc

SEQ ID NO: 236036 - DNA, 33 bp, Homo sapien
aacctgtattttcccagaacaataatgtaactc

SEQ ID NO: 236037 - DNA, 33 bp, Homo sapien
tatagcatcttgcacaatcattagcagttaaga

SEQ ID NO: 236038 - DNA, 33 bp, Homo sapien
tatagcatcttgcacagtcattagcagttaaga

SEQ ID NO: 236039 - DNA, 33 bp, Homo sapien
agcataaactttgaaaagaataatcttggaatc

SEQ ID NO: 236040 - DNA, 33 bp, Homo sapien
agcataaactttgaaatgaataatcttggaatc

SEQ ID NO: 236041 - DNA, 33 bp, Homo sapien
ccatacaacaaaatggaaagaagtgtgatggtg

SEQ ID NO: 236042 - DNA, 33 bp, Homo sapien
ccatacaacaaaatggcaagaagtgtgatggtg

SEQ ID NO: 236043 - DNA, 33 bp, Homo sapien
aggtatctttctgttacggatttacaatttaat

SEQ ID NO: 236044 - DNA, 33 bp, Homo sapien
aggtatctttctgttatggatttacaatttaat

SEQ ID NO: 236045 - DNA, 33 bp, Homo sapien
tattttaaagctgcacaaatcgataacctatca

SEQ ID NO: 236046 - DNA, 33 bp, Homo sapien
tattttaaagctgcacgaatcgataacctatca

SEQ ID NO: 236047 - DNA, 33 bp, Homo sapien
attgcactgataggatcaaagcgctggtgaatg

SEQ ID NO: 236048 - DNA, 33 bp, Homo sapien
attgcactgataggattaaagcgctggtgaatg

SEQ ID NO: 236049 - DNA, 33 bp, Homo sapien
ttcaaccaagagaccaacaattcataatgtaag

SEQ ID NO: 236050 - DNA, 33 bp, Homo sapien
ttcaaccaagagaccaccaattcataatgtaag

SEQ ID NO: 236051 - DNA, 33 bp, Homo sapien
cagaataattggcagcaatactagccttcttgt

SEQ ID NO: 236052 - DNA, 33 bp, Homo sapien
cagaataattggcagcgatactagccttcttgt

SEQ ID NO: 236053 - DNA, 33 bp, Homo sapien
gcaaagagtattcaggaacaaggggaacaagaa

SEQ ID NO: 236054 - DNA, 33 bp, Homo sapien
gcaaagagtattcagggacaaggggaacaagaa

SEQ ID NO: 236055 - DNA, 33 bp, Homo sapien
atgaatagaattttgaaaagtatcaccctgtct

SEQ ID NO: 236056 - DNA, 33 bp, Homo sapien
atgaatagaattttgacaagtatcaccctgtct

SEQ ID NO: 236057 - DNA, 33 bp, Homo sapien
aatataaccatggatgccactatgctattttgg

SEQ ID NO: 236058 - DNA, 33 bp, Homo sapien
aatataaccatggatgtcactatgctattttgg

SEQ ID NO: 236059 - DNA, 33 bp, Homo sapien
ttaagagaagctgtgaccaataaaagaaacagt

SEQ ID NO: 236060 - DNA, 33 bp, Homo sapien
ttaagagaagctgtgatcaataaaagaaacagt

SEQ ID NO: 236061 - DNA, 33 bp, Homo sapien
agaagaaaataatgcccgaaaatttcccaaatc

SEQ ID NO: 236062 - DNA, 33 bp, Homo sapien
agaagaaaataatgcctgaaaatttcccaaatc

SEQ ID NO: 236063 - DNA, 33 bp, Homo sapien
gagggaaatagcctcaaagcaaatgggaacctc

SEQ ID NO: 236064 - DNA, 33 bp, Homo sapien
gagggaaatagcctcagagcaaatgggaacctc

SEQ ID NO: 236065 - DNA, 33 bp, Homo sapien
gtaatttgctgcttgacgcaataaatacaatgt

SEQ ID NO: 236066 - DNA, 33 bp, Homo sapien
gtaatttgctgcttgatgcaataaatacaatgt

SEQ ID NO: 236067 - DNA, 33 bp, Homo sapien
atacagattagagacacattagaagctctagaa

SEQ ID NO: 236068 - DNA, 33 bp, Homo sapien
atacagattagagacatattagaagctctagaa

SEQ ID NO: 236069 - DNA, 33 bp, Homo sapien
gtctttcatggcttgccacttaattagaagtga

SEQ ID NO: 236070 - DNA, 33 bp, Homo sapien
gtctttcatggcttgctacttaattagaagtga

SEQ ID NO: 236071 - DNA, 33 bp, Homo sapien
tgagaactgatgaacacaaggaaacaatagaca

SEQ ID NO: 236072 - DNA, 33 bp, Homo sapien
tgagaactgatgaacagaaggaaacaatagaca

SEQ ID NO: 236073 - DNA, 33 bp, Homo sapien
ttttctttatcagttcaaccttcgatgcgtact

SEQ ID NO: 236074 - DNA, 33 bp, Homo sapien
ttttctttatcagttcgaccttcgatgcgtact

SEQ ID NO: 236075 - DNA, 33 bp, Homo sapien
ttcatgagatgagcaaagaaaagtaagtttcta

SEQ ID NO: 236076 - DNA, 33 bp, Homo sapien
ttcatgagatgagcaacgaaaagtaagtttcta

SEQ ID NO: 236077 - DNA, 33 bp, Homo sapien
cccatgctgctgtaaacggttagaataaaagcc

SEQ ID NO: 236078 - DNA, 33 bp, Homo sapien
cccatgctgctgtaaatggttagaataaaagcc

SEQ ID NO: 236079 - DNA, 33 bp, Homo sapien
acaaaatatagttgcccccatgagaagttccct

SEQ ID NO: 236080 - DNA, 33 bp, Homo sapien
acaaaatatagttgcctccatgagaagttccct

SEQ ID NO: 236081 - DNA, 33 bp, Homo sapien
tttaaagatactgaggcaataaagattttcaaa

SEQ ID NO: 236082 - DNA, 33 bp, Homo sapien
tttaaagatactgagggaataaagattttcaaa

SEQ ID NO: 236083 - DNA, 33 bp, Homo sapien
tgacttcctataacaaacacacctgtgagatcc

SEQ ID NO: 236084 - DNA, 33 bp, Homo sapien
tgacttcctataacaagcacacctgtgagatcc

SEQ ID NO: 236085 - DNA, 33 bp, Homo sapien
tctgtgcctgtgcatccacacatcctctcttcc

SEQ ID NO: 236086 - DNA, 33 bp, Homo sapien
tctgtgcctgtgcatctacacatcctctcttcc

SEQ ID NO: 236087 - DNA, 33 bp, Homo sapien
acattcaagctctccaaaatctaatgcttaaaa

SEQ ID NO: 236088 - DNA, 33 bp, Homo sapien
acattcaagctctccacaatctaatgcttaaaa

SEQ ID NO: 236089 - DNA, 33 bp, Homo sapien
gataaaagttgcatgaaagttaaaggaaacact

SEQ ID NO: 236090 - DNA, 33 bp, Homo sapien
gataaaagttgcatgagagttaaaggaaacact

SEQ ID NO: 236091 - DNA, 33 bp, Homo sapien
acatactaaggctatacacaacaaaggaagcct

SEQ ID NO: 236092 - DNA, 33 bp, Homo sapien
acatactaaggctatatacaacaaaggaagcct

SEQ ID NO: 236093 - DNA, 33 bp, Homo sapien
tttatcatcaaatttacatcatggagacctatg

SEQ ID NO: 236094 - DNA, 33 bp, Homo sapien
tttatcatcaaatttatatcatggagacctatg

SEQ ID NO: 236095 - DNA, 33 bp, Homo sapien
aaattcttttgcatggaacaaagtaggactttt

SEQ ID NO: 236096 - DNA, 33 bp, Homo sapien
aaattcttttgcatgggacaaagtaggactttt

SEQ ID NO: 236097 - DNA, 33 bp, Homo sapien
aagcaacctgttaaaccggtgagcacatttgca

SEQ ID NO: 236098 - DNA, 33 bp, Homo sapien
aagcaacctgttaaactggtgagcacatttgca

SEQ ID NO: 236099 - DNA, 33 bp, Homo sapien
agcaataacttccaataaaaaataaatgcatac

SEQ ID NO: 236100 - DNA, 33 bp, Homo sapien
agcaataacttccaatgaaaaataaatgcatac

SEQ ID NO: 236101 - DNA, 33 bp, Homo sapien
tggtgtgagtgggagaaacaaaggattgaactg

SEQ ID NO: 236102 - DNA, 33 bp, Homo sapien
tggtgtgagtgggagagacaaaggattgaactg

SEQ ID NO: 236103 - DNA, 33 bp, Homo sapien
ataattttgaaaaccacagcaatgtattagtga

SEQ ID NO: 236104 - DNA, 33 bp, Homo sapien
ataattttgaaaaccatagcaatgtattagtga

SEQ ID NO: 236105 - DNA, 33 bp, Homo sapien
gacctggaaagccaaaaaagaaatgaggagcca

SEQ ID NO: 236106 - DNA, 33 bp, Homo sapien
gacctggaaagccaaagaagaaatgaggagcca

SEQ ID NO: 236107 - DNA, 33 bp, Homo sapien
cagtgagattggggatgaactaattcagccttc

SEQ ID NO: 236108 - DNA, 33 bp, Homo sapien
cagtgagattggggattaactaattcagccttc

SEQ ID NO: 236109 - DNA, 33 bp, Homo sapien
gagcctaaaactaagaaccaaagcaataagata

SEQ ID NO: 236110 - DNA, 33 bp, Homo sapien
gagcctaaaactaagagccaaagcaataagata

SEQ ID NO: 236111 - DNA, 33 bp, Homo sapien
tatcattctagccttcaaaacttccttttaaaa

SEQ ID NO: 236112 - DNA, 33 bp, Homo sapien
tatcattctagccttcgaaacttccttttaaaa

SEQ ID NO: 236113 - DNA, 33 bp, Homo sapien
ggacatatattcaacacgagagcttgagatttt

SEQ ID NO: 236114 - DNA, 33 bp, Homo sapien
ggacatatattcaacatgagagcttgagatttt

SEQ ID NO: 236115 - DNA, 33 bp, Homo sapien
attattctaggaagccacattggaaaagaagtt

SEQ ID NO: 236116 - DNA, 33 bp, Homo sapien
attattctaggaagccgcattggaaaagaagtt

SEQ ID NO: 236117 - DNA, 33 bp, Homo sapien
tacattcgtctcagcactatgtggcacttattc

SEQ ID NO: 236118 - DNA, 33 bp, Homo sapien
tacattcgtctcagcagtatgtggcacttattc

SEQ ID NO: 236119 - DNA, 33 bp, Homo sapien
tgaataactctgaatacactgaaacaattgaat

SEQ ID NO: 236120 - DNA, 33 bp, Homo sapien
tgaataactctgaatatactgaaacaattgaat

SEQ ID NO: 236121 - DNA, 33 bp, Homo sapien
aaccccatacacttcacctatcacctgctagtc

SEQ ID NO: 236122 - DNA, 33 bp, Homo sapien
aaccccatacacttcagctatcacctgctagtc

SEQ ID NO: 236123 - DNA, 33 bp, Homo sapien
tatcaatttactcacaacatggcttatagaagg

SEQ ID NO: 236124 - DNA, 33 bp, Homo sapien
tatcaatttactcacagcatggcttatagaagg

SEQ ID NO: 236125 - DNA, 33 bp, Homo sapien
aacagcttacaaacaagtaactcattttaagaa

SEQ ID NO: 236126 - DNA, 33 bp, Homo sapien
aacagcttacaaacaattaactcattttaagaa

SEQ ID NO: 236127 - DNA, 33 bp, Homo sapien
gagaccaaaattgagacacattttacaaaataa

SEQ ID NO: 236128 - DNA, 33 bp, Homo sapien
gagaccaaaattgagagacattttacaaaataa

SEQ ID NO: 236129 - DNA, 33 bp, Homo sapien
cttttgcatttaaacaataaaaacatcacaaca

SEQ ID NO: 236130 - DNA, 33 bp, Homo sapien
cttttgcatttaaacagtaaaaacatcacaaca

SEQ ID NO: 236131 - DNA, 33 bp, Homo sapien
aatacagattggtgtgacacaactagtttctga

SEQ ID NO: 236132 - DNA, 33 bp, Homo sapien
aatacagattggtgtgccacaactagtttctga

SEQ ID NO: 236133 - DNA, 33 bp, Homo sapien
ttactctcttacgttacgaaccattacccactt

SEQ ID NO: 236134 - DNA, 33 bp, Homo sapien
ttactctcttacgttatgaaccattacccactt

SEQ ID NO: 236135 - DNA, 33 bp, Homo sapien
tcattaaggccaacagaagatcaagatttttgt

SEQ ID NO: 236136 - DNA, 33 bp, Homo sapien
tcattaaggccaacagcagatcaagatttttgt

SEQ ID NO: 236137 - DNA, 33 bp, Homo sapien
ggggactcaaatcaaaagttattaaggtgatag

SEQ ID NO: 236138 - DNA, 33 bp, Homo sapien
ggggactcaaatcaaaggttattaaggtgatag

SEQ ID NO: 236139 - DNA, 33 bp, Homo sapien
atctctaggactcaaacggaccataaaacctgt

SEQ ID NO: 236140 - DNA, 33 bp, Homo sapien
atctctaggactcaaatggaccataaaacctgt

SEQ ID NO: 236141 - DNA, 33 bp, Homo sapien
tggaaaaaaggaagaaacagaaggaatatttga

SEQ ID NO: 236142 - DNA, 33 bp, Homo sapien
tggaaaaaaggaagaagcagaaggaatatttga

SEQ ID NO: 236143 - DNA, 33 bp, Homo sapien
gcccactgaatttaggcattaccatgaaactta

SEQ ID NO: 236144 - DNA, 33 bp, Homo sapien
gcccactgaatttaggtattaccatgaaactta

SEQ ID NO: 236145 - DNA, 33 bp, Homo sapien
acgtaaagggaatgacactcaaaattttatcac

SEQ ID NO: 236146 - DNA, 33 bp, Homo sapien
acgtaaagggaatgacgctcaaaattttatcac

SEQ ID NO: 236147 - DNA, 33 bp, Homo sapien
gaacatccttgctcacaactggaaagtttttta

SEQ ID NO: 236148 - DNA, 33 bp, Homo sapien
gaacatccttgctcaccactggaaagtttttta

SEQ ID NO: 236149 - DNA, 33 bp, Homo sapien
caactccaaaaaaaaggcagaaaattatgtcat

SEQ ID NO: 236150 - DNA, 33 bp, Homo sapien
caactccaaaaaaaagtcagaaaattatgtcat

SEQ ID NO: 236151 - DNA, 33 bp, Homo sapien
agtttgtttcttcaccacctctgcaaaagacaa

SEQ ID NO: 236152 - DNA, 33 bp, Homo sapien
agtttgtttcttcaccgcctctgcaaaagacaa

SEQ ID NO: 236153 - DNA, 33 bp, Homo sapien
atctataatgtaggtagaaagtgttctgtagat

SEQ ID NO: 236154 - DNA, 33 bp, Homo sapien
atctataatgtaggtataaagtgttctgtagat

SEQ ID NO: 236155 - DNA, 33 bp, Homo sapien
gactgttgttacctacagctacttttcaatggg

SEQ ID NO: 236156 - DNA, 33 bp, Homo sapien
gactgttgttacctacggctacttttcaatggg

SEQ ID NO: 236157 - DNA, 33 bp, Homo sapien
agcagccactccataaatatcagtagaacaaag

SEQ ID NO: 236158 - DNA, 33 bp, Homo sapien
agcagccactccataagtatcagtagaacaaag

SEQ ID NO: 236159 - DNA, 33 bp, Homo sapien
tgaagtatgtagtagaaacagaataatataaaa

SEQ ID NO: 236160 - DNA, 33 bp, Homo sapien
tgaagtatgtagtagagacagaataatataaaa

SEQ ID NO: 236161 - DNA, 33 bp, Homo sapien
tctggggttccatgaacgcagacaaacatgatt

SEQ ID NO: 236162 - DNA, 33 bp, Homo sapien
tctggggttccatgaatgcagacaaacatgatt

SEQ ID NO: 236163 - DNA, 33 bp, Homo sapien
gtacatatatagaaccccaaacagtttccgaac

SEQ ID NO: 236164 - DNA, 33 bp, Homo sapien
gtacatatatagaacctcaaacagtttccgaac

SEQ ID NO: 236165 - DNA, 33 bp, Homo sapien
ttcagctaatcatcaagatgtgctttgttcatt

SEQ ID NO: 236166 - DNA, 33 bp, Homo sapien
ttcagctaatcatcaatatgtgctttgttcatt

SEQ ID NO: 236167 - DNA, 33 bp, Homo sapien
gacatgtcaggaatcacggaaccccaaagggtg

SEQ ID NO: 236168 - DNA, 33 bp, Homo sapien
gacatgtcaggaatcatggaaccccaaagggtg

SEQ ID NO: 236169 - DNA, 33 bp, Homo sapien
aatgttgtgagatgaccgggtttagtaagggaa

SEQ ID NO: 236170 - DNA, 33 bp, Homo sapien
aatgttgtgagatgactgggtttagtaagggaa

SEQ ID NO: 236171 - DNA, 33 bp, Homo sapien
tttcgaaagtcttataccatctagtccttcctg

SEQ ID NO: 236172 - DNA, 33 bp, Homo sapien
tttcgaaagtcttatagcatctagtccttcctg

SEQ ID NO: 236173 - DNA, 33 bp, Homo sapien
ccataaaaatctattaacctctgtcatcctttt

SEQ ID NO: 236174 - DNA, 33 bp, Homo sapien
ccataaaaatctattaccctctgtcatcctttt

SEQ ID NO: 236175 - DNA, 33 bp, Homo sapien
gtattagtaaagaaaaatgtgacttgcttttta

SEQ ID NO: 236176 - DNA, 33 bp, Homo sapien
gtattagtaaagaaaagtgtgacttgcttttta

SEQ ID NO: 236177 - DNA, 33 bp, Homo sapien
ggttttatgaaccaaagacctgactttagcata

SEQ ID NO: 236178 - DNA, 33 bp, Homo sapien
ggttttatgaaccaaatacctgactttagcata

SEQ ID NO: 236179 - DNA, 33 bp, Homo sapien
taggtctccagatactaaggttttaggggagtc

SEQ ID NO: 236180 - DNA, 33 bp, Homo sapien
taggtctccagatactgaggttttaggggagtc

SEQ ID NO: 236181 - DNA, 33 bp, Homo sapien
ctgactagtagcaaaactgaaatgagagattaa

SEQ ID NO: 236182 - DNA, 33 bp, Homo sapien
ctgactagtagcaaaagtgaaatgagagattaa

SEQ ID NO: 236183 - DNA, 33 bp, Homo sapien
atgtggaaatacaatacgattagttgaacatga

SEQ ID NO: 236184 - DNA, 33 bp, Homo sapien
atgtggaaatacaatatgattagttgaacatga

SEQ ID NO: 236185 - DNA, 33 bp, Homo sapien
ctaattagacaaaaaaagtatgaactatccatc

SEQ ID NO: 236186 - DNA, 33 bp, Homo sapien
ctaattagacaaaaaaggtatgaactatccatc

SEQ ID NO: 236187 - DNA, 33 bp, Homo sapien
aatgcatgactgtagcacaaaaggtacgtaaga

SEQ ID NO: 236188 - DNA, 33 bp, Homo sapien
aatgcatgactgtagcgcaaaaggtacgtaaga

SEQ ID NO: 236189 - DNA, 33 bp, Homo sapien
aagaaaagatgtgcacaggctgttaacagagga

SEQ ID NO: 236190 - DNA, 33 bp, Homo sapien
aagaaaagatgtgcacgggctgttaacagagga

SEQ ID NO: 236191 - DNA, 33 bp, Homo sapien
aagaaaagtacaggaaaggttaacagaagtgga

SEQ ID NO: 236192 - DNA, 33 bp, Homo sapien
aagaaaagtacaggaatggttaacagaagtgga

SEQ ID NO: 236193 - DNA, 33 bp, Homo sapien
ttactctgtctaatgcactcctcttaagtgtga

SEQ ID NO: 236194 - DNA, 33 bp, Homo sapien
ttactctgtctaatgccctcctcttaagtgtga

SEQ ID NO: 236195 - DNA, 33 bp, Homo sapien
taaaatgtattgaaaaccacatagaaaagcaga

SEQ ID NO: 236196 - DNA, 33 bp, Homo sapien
taaaatgtattgaaaatcacatagaaaagcaga

SEQ ID NO: 236197 - DNA, 33 bp, Homo sapien
ccatcacctgttgaccagagagcccttaatccc

SEQ ID NO: 236198 - DNA, 33 bp, Homo sapien
ccatcacctgttgaccggagagcccttaatccc

SEQ ID NO: 236199 - DNA, 33 bp, Homo sapien
ctactaatgagaatcaagtgttgaagaatgggt

SEQ ID NO: 236200 - DNA, 33 bp, Homo sapien
ctactaatgagaatcaggtgttgaagaatgggt

SEQ ID NO: 236201 - DNA, 33 bp, Homo sapien
ctcccaggcttggaatcaggttatgtccatata

SEQ ID NO: 236202 - DNA, 33 bp, Homo sapien
ctcccaggcttggaatgaggttatgtccatata

SEQ ID NO: 236203 - DNA, 33 bp, Homo sapien
tcctttatcagttacacattttacgaatacctt

SEQ ID NO: 236204 - DNA, 33 bp, Homo sapien
tcctttatcagttacatattttacgaatacctt

SEQ ID NO: 236205 - DNA, 33 bp, Homo sapien
tagcaaagggaaaaaacaattcactgcatgaag

SEQ ID NO: 236206 - DNA, 33 bp, Homo sapien
tagcaaagggaaaaaataattcactgcatgaag

SEQ ID NO: 236207 - DNA, 33 bp, Homo sapien
actaaccactctagaaacataacccctctatct

SEQ ID NO: 236208 - DNA, 33 bp, Homo sapien
actaaccactctagaagcataacccctctatct

SEQ ID NO: 236209 - DNA, 33 bp, Homo sapien
agtgcctggtacctagccctggaataataaagg

SEQ ID NO: 236210 - DNA, 33 bp, Homo sapien
agtgcctggtacctagtcctggaataataaagg

SEQ ID NO: 236211 - DNA, 33 bp, Homo sapien
aaacataatacaaaaaaaaacgtgatgctgtgg

SEQ ID NO: 236212 - DNA, 33 bp, Homo sapien
aaacataatacaaaaataaacgtgatgctgtgg

SEQ ID NO: 236213 - DNA, 33 bp, Homo sapien
aaaaaaatcagcctccaaaacaaaatataaatt

SEQ ID NO: 236214 - DNA, 33 bp, Homo sapien
aaaaaaatcagcctccgaaacaaaatataaatt

SEQ ID NO: 236215 - DNA, 33 bp, Homo sapien
agcaaagtcaaaaaacaggattgcattaaacta

SEQ ID NO: 236216 - DNA, 33 bp, Homo sapien
agcaaagtcaaaaaacgggattgcattaaacta

SEQ ID NO: 236217 - DNA, 33 bp, Homo sapien
taattttagctggtaaagttttgaactggcctg

SEQ ID NO: 236218 - DNA, 33 bp, Homo sapien
taattttagctggtaaggttttgaactggcctg

SEQ ID NO: 236219 - DNA, 33 bp, Homo sapien
ttatatttgaaatagcggacaggtaatcggttt

SEQ ID NO: 236220 - DNA, 33 bp, Homo sapien
ttatatttgaaatagctgacaggtaatcggttt

SEQ ID NO: 236221 - DNA, 33 bp, Homo sapien
tagaattcacttgctaactctaattctcacttc

SEQ ID NO: 236222 - DNA, 33 bp, Homo sapien
tagaattcacttgctatctctaattctcacttc

SEQ ID NO: 236223 - DNA, 33 bp, Homo sapien
tggacatagtgttctagaccataagtttgcctt

SEQ ID NO: 236224 - DNA, 33 bp, Homo sapien
tggacatagtgttctataccataagtttgcctt

SEQ ID NO: 236225 - DNA, 33 bp, Homo sapien
atttcattcttttgtcgactcatcctttgtaat

SEQ ID NO: 236226 - DNA, 33 bp, Homo sapien
atttcattcttttgtctactcatcctttgtaat

SEQ ID NO: 236227 - DNA, 33 bp, Homo sapien
acatatggctttgtaggattctctggaggttta

SEQ ID NO: 236228 - DNA, 33 bp, Homo sapien
acatatggctttgtagtattctctggaggttta

SEQ ID NO: 236229 - DNA, 33 bp, Homo sapien
caatacagcagagtaactgattgctagaaataa

SEQ ID NO: 236230 - DNA, 33 bp, Homo sapien
caatacagcagagtaattgattgctagaaataa

SEQ ID NO: 236231 - DNA, 33 bp, Homo sapien
ggtagggaagtgccttaaagttggactagagta

SEQ ID NO: 236232 - DNA, 33 bp, Homo sapien
ggtagggaagtgccttgaagttggactagagta

SEQ ID NO: 236233 - DNA, 33 bp, Homo sapien
tgcttgtgttgtcccaacttccacttcctcttc

SEQ ID NO: 236234 - DNA, 33 bp, Homo sapien
tgcttgtgttgtcccaccttccacttcctcttc

SEQ ID NO: 236235 - DNA, 33 bp, Homo sapien
tttctgttagcaataaagactgctcagctactt

SEQ ID NO: 236236 - DNA, 33 bp, Homo sapien
tttctgttagcaataaggactgctcagctactt

SEQ ID NO: 236237 - DNA, 33 bp, Homo sapien
ttcctggtaattttcactcatactgacagaaaa

SEQ ID NO: 236238 - DNA, 33 bp, Homo sapien
ttcctggtaattttcattcatactgacagaaaa

SEQ ID NO: 236239 - DNA, 33 bp, Homo sapien
tctttcattttaaaaagcacattggttcagtac

SEQ ID NO: 236240 - DNA, 33 bp, Homo sapien
tctttcattttaaaaatcacattggttcagtac

SEQ ID NO: 236241 - DNA, 33 bp, Homo sapien
gtaaaataaaagtacaatggatgcatagggaat

SEQ ID NO: 236242 - DNA, 33 bp, Homo sapien
gtaaaataaaagtacagtggatgcatagggaat

SEQ ID NO: 236243 - DNA, 33 bp, Homo sapien
cttccagagagaaccaagtacaaccagatgggc

SEQ ID NO: 236244 - DNA, 33 bp, Homo sapien
cttccagagagaaccaggtacaaccagatgggc

SEQ ID NO: 236245 - DNA, 33 bp, Homo sapien
gctaaaaacactgaggaatcttagccaccatta

SEQ ID NO: 236246 - DNA, 33 bp, Homo sapien
gctaaaaacactgaggtatcttagccaccatta

SEQ ID NO: 236247 - DNA, 33 bp, Homo sapien
cagttctttttcttccagattttgcaacaacca

SEQ ID NO: 236248 - DNA, 33 bp, Homo sapien
cagttctttttcttccggattttgcaacaacca

SEQ ID NO: 236249 - DNA, 33 bp, Homo sapien
ttttccagaaactactcaaataataggtgttaa

SEQ ID NO: 236250 - DNA, 33 bp, Homo sapien
ttttccagaaactactgaaataataggtgttaa

SEQ ID NO: 236251 - DNA, 33 bp, Homo sapien
tattaagtgtattcaaatggtgatatttacatg

SEQ ID NO: 236252 - DNA, 33 bp, Homo sapien
tattaagtgtattcaagtggtgatatttacatg

SEQ ID NO: 236253 - DNA, 33 bp, Homo sapien
atacattttccatagcagaataacttacacata

SEQ ID NO: 236254 - DNA, 33 bp, Homo sapien
atacattttccatagcggaataacttacacata

SEQ ID NO: 236255 - DNA, 33 bp, Homo sapien
tttctcatgggtaagaacatacgtagcctgctt

SEQ ID NO: 236256 - DNA, 33 bp, Homo sapien
tttctcatgggtaagagcatacgtagcctgctt

SEQ ID NO: 236257 - DNA, 33 bp, Homo sapien
ttacattttctggtagccacattacaaagaata

SEQ ID NO: 236258 - DNA, 33 bp, Homo sapien
ttacattttctggtagtcacattacaaagaata

SEQ ID NO: 236259 - DNA, 33 bp, Homo sapien
ttagcatctatgagtacagggcagagatgctgt

SEQ ID NO: 236260 - DNA, 33 bp, Homo sapien
ttagcatctatgagtagagggcagagatgctgt

SEQ ID NO: 236261 - DNA, 33 bp, Homo sapien
ttaaacattctacaataagcaggacactccttg

SEQ ID NO: 236262 - DNA, 33 bp, Homo sapien
ttaaacattctacaatgagcaggacactccttg

SEQ ID NO: 236263 - DNA, 33 bp, Homo sapien
ctgcttttcagacaaaaccgataccttttattt

SEQ ID NO: 236264 - DNA, 33 bp, Homo sapien
ctgcttttcagacaaagccgataccttttattt

SEQ ID NO: 236265 - DNA, 33 bp, Homo sapien
agttatgagccctcaactgaaggttttgctaga

SEQ ID NO: 236266 - DNA, 33 bp, Homo sapien
agttatgagccctcaattgaaggttttgctaga

SEQ ID NO: 236267 - DNA, 33 bp, Homo sapien
caataaagatctaaaaaaaatgctggtgttcta

SEQ ID NO: 236268 - DNA, 33 bp, Homo sapien
caataaagatctaaaagaaatgctggtgttcta

SEQ ID NO: 236269 - DNA, 33 bp, Homo sapien
aacttatctaggactaactggaccagataattt

SEQ ID NO: 236270 - DNA, 33 bp, Homo sapien
aacttatctaggactagctggaccagataattt

SEQ ID NO: 236271 - DNA, 33 bp, Homo sapien
atcctgggacagtctggaaccaggtatttctcc

SEQ ID NO: 236272 - DNA, 33 bp, Homo sapien
atcctgggacagtctgtaaccaggtatttctcc

SEQ ID NO: 236273 - DNA, 33 bp, Homo sapien
ctttcaaaaaataatgaaagctgtggaagtaca

SEQ ID NO: 236274 - DNA, 33 bp, Homo sapien
ctttcaaaaaataatggaagctgtggaagtaca

SEQ ID NO: 236275 - DNA, 33 bp, Homo sapien
tctgtctgctaaaaaccataatattaaactttt

SEQ ID NO: 236276 - DNA, 33 bp, Homo sapien
tctgtctgctaaaaacgataatattaaactttt

SEQ ID NO: 236277 - DNA, 33 bp, Homo sapien
ttgtgtatcataataacttacagagctttgaag

SEQ ID NO: 236278 - DNA, 33 bp, Homo sapien
ttgtgtatcataataatttacagagctttgaag

SEQ ID NO: 236279 - DNA, 33 bp, Homo sapien
cattcttttccagtcaataccctcactttaaca

SEQ ID NO: 236280 - DNA, 33 bp, Homo sapien
cattcttttccagtcagtaccctcactttaaca

SEQ ID NO: 236281 - DNA, 33 bp, Homo sapien
aaccatgaatgagagaaccttagtgtaagatct

SEQ ID NO: 236282 - DNA, 33 bp, Homo sapien
aaccatgaatgagagacccttagtgtaagatct

SEQ ID NO: 236283 - DNA, 33 bp, Homo sapien
actctgatattttggactatcaataaaagttga

SEQ ID NO: 236284 - DNA, 33 bp, Homo sapien
actctgatattttggagtatcaataaaagttga

SEQ ID NO: 236285 - DNA, 33 bp, Homo sapien
tttgcatgatgtagtaagatttcaagtgcttca

SEQ ID NO: 236286 - DNA, 33 bp, Homo sapien
tttgcatgatgtagtaggatttcaagtgcttca

SEQ ID NO: 236287 - DNA, 33 bp, Homo sapien
acagagatttttctaaagtggttgtaacatttt

SEQ ID NO: 236288 - DNA, 33 bp, Homo sapien
acagagatttttctaacgtggttgtaacatttt

SEQ ID NO: 236289 - DNA, 33 bp, Homo sapien
tgaaaaaatagcctcaagtaatctgcattacac

SEQ ID NO: 236290 - DNA, 33 bp, Homo sapien
tgaaaaaatagcctcaggtaatctgcattacac

SEQ ID NO: 236291 - DNA, 33 bp, Homo sapien
ttggaaaatgataagcagatatggaagttagcc

SEQ ID NO: 236292 - DNA, 33 bp, Homo sapien
ttggaaaatgataagcggatatggaagttagcc

SEQ ID NO: 236293 - DNA, 33 bp, Homo sapien
catcagttcagctgtcaagaagctcactgtaac

SEQ ID NO: 236294 - DNA, 33 bp, Homo sapien
catcagttcagctgtccagaagctcactgtaac

SEQ ID NO: 236295 - DNA, 33 bp, Homo sapien
ccacacatatggtgtcagaagcgtgttgtgaga

SEQ ID NO: 236296 - DNA, 33 bp, Homo sapien
ccacacatatggtgtcggaagcgtgttgtgaga

SEQ ID NO: 236297 - DNA, 33 bp, Homo sapien
aaattgttaccaggaaagaaggcaggaagaaga

SEQ ID NO: 236298 - DNA, 33 bp, Homo sapien
aaattgttaccaggaaggaaggcaggaagaaga

SEQ ID NO: 236299 - DNA, 33 bp, Homo sapien
agcaattggaactaacaaggactcccatgctga

SEQ ID NO: 236300 - DNA, 33 bp, Homo sapien
agcaattggaactaacgaggactcccatgctga

SEQ ID NO: 236301 - DNA, 33 bp, Homo sapien
aggaatagtgagagtacagttgggagtgtgaga

SEQ ID NO: 236302 - DNA, 33 bp, Homo sapien
aggaatagtgagagtagagttgggagtgtgaga

SEQ ID NO: 236303 - DNA, 33 bp, Homo sapien
acaaaccagagtaccagcaacaggaatattaag

SEQ ID NO: 236304 - DNA, 33 bp, Homo sapien
acaaaccagagtaccatcaacaggaatattaag

SEQ ID NO: 236305 - DNA, 33 bp, Homo sapien
aagtttacataacaacaagtcttccaattcatg

SEQ ID NO: 236306 - DNA, 33 bp, Homo sapien
aagtttacataacaacgagtcttccaattcatg

SEQ ID NO: 236307 - DNA, 33 bp, Homo sapien
ccagacaaaaggccagaactgaatggcttaatt

SEQ ID NO: 236308 - DNA, 33 bp, Homo sapien
ccagacaaaaggccaggactgaatggcttaatt

SEQ ID NO: 236309 - DNA, 33 bp, Homo sapien
atggggacaggagaataatcatagttggcagtt

SEQ ID NO: 236310 - DNA, 33 bp, Homo sapien
atggggacaggagaattatcatagttggcagtt

SEQ ID NO: 236311 - DNA, 33 bp, Homo sapien
cttaatcttgtctctcaaacattacttgacatc

SEQ ID NO: 236312 - DNA, 33 bp, Homo sapien
cttaatcttgtctctccaacattacttgacatc

SEQ ID NO: 236313 - DNA, 33 bp, Homo sapien
tacatgaaaatgcatcaaaatggttatttaatt

SEQ ID NO: 236314 - DNA, 33 bp, Homo sapien
tacatgaaaatgcatcgaaatggttatttaatt

SEQ ID NO: 236315 - DNA, 33 bp, Homo sapien
tctgtaagatgctgagacattcctttggaaagt

SEQ ID NO: 236316 - DNA, 33 bp, Homo sapien
tctgtaagatgctgagtcattcctttggaaagt

SEQ ID NO: 236317 - DNA, 33 bp, Homo sapien
agaaggaggtttgagcagaaaaagcatcagact

SEQ ID NO: 236318 - DNA, 33 bp, Homo sapien
agaaggaggtttgagccgaaaaagcatcagact

SEQ ID NO: 236319 - DNA, 33 bp, Homo sapien
tctgggagtcgtgtaaaaataaatataatatac

SEQ ID NO: 236320 - DNA, 33 bp, Homo sapien
tctgggagtcgtgtaagaataaatataatatac

SEQ ID NO: 236321 - DNA, 33 bp, Homo sapien
tttgaacttcctgctacataacataactaccca

SEQ ID NO: 236322 - DNA, 33 bp, Homo sapien
tttgaacttcctgctatataacataactaccca

SEQ ID NO: 236323 - DNA, 33 bp, Homo sapien
tcatagttttctttggccattcctagagaattg

SEQ ID NO: 236324 - DNA, 33 bp, Homo sapien
tcatagttttctttggtcattcctagagaattg

SEQ ID NO: 236325 - DNA, 33 bp, Homo sapien
ctcaattaaaccaatgaacacatggattcttgc

SEQ ID NO: 236326 - DNA, 33 bp, Homo sapien
ctcaattaaaccaatggacacatggattcttgc

SEQ ID NO: 236327 - DNA, 33 bp, Homo sapien
gagggcatatgggaatcaacaaaggccctctaa

SEQ ID NO: 236328 - DNA, 33 bp, Homo sapien
gagggcatatgggaatgaacaaaggccctctaa

SEQ ID NO: 236329 - DNA, 33 bp, Homo sapien
tggggaacagtttgtaagtaggagaaaggcaaa

SEQ ID NO: 236330 - DNA, 33 bp, Homo sapien
tggggaacagtttgtaggtaggagaaaggcaaa

SEQ ID NO: 236331 - DNA, 33 bp, Homo sapien
gagtcatggcaccgaaatacattaccagctggt

SEQ ID NO: 236332 - DNA, 33 bp, Homo sapien
gagtcatggcaccgaagtacattaccagctggt

SEQ ID NO: 236333 - DNA, 33 bp, Homo sapien
acacacggagtcaaaaacttcaaaaatttgtgt

SEQ ID NO: 236334 - DNA, 33 bp, Homo sapien
acacacggagtcaaaatcttcaaaaatttgtgt

SEQ ID NO: 236335 - DNA, 33 bp, Homo sapien
tagagcaggggtacaacgccactagtttctttg

SEQ ID NO: 236336 - DNA, 33 bp, Homo sapien
tagagcaggggtacaatgccactagtttctttg

SEQ ID NO: 236337 - DNA, 33 bp, Homo sapien
ccttaagcagtcacagcaatgatgtcatattga

SEQ ID NO: 236338 - DNA, 33 bp, Homo sapien
ccttaagcagtcacagtaatgatgtcatattga

SEQ ID NO: 236339 - DNA, 33 bp, Homo sapien
gttacagcatctatacagaactcatacaccaga

SEQ ID NO: 236340 - DNA, 33 bp, Homo sapien
gttacagcatctatacggaactcatacaccaga

SEQ ID NO: 236341 - DNA, 33 bp, Homo sapien
catgcaaagagaatagcattgtttctggcatat

SEQ ID NO: 236342 - DNA, 33 bp, Homo sapien
catgcaaagagaatagtattgtttctggcatat

SEQ ID NO: 236343 - DNA, 33 bp, Homo sapien
ttagtgtggccggatacggaattccggttggaa

SEQ ID NO: 236344 - DNA, 33 bp, Homo sapien
ttagtgtggccggatatggaattccggttggaa

SEQ ID NO: 236345 - DNA, 33 bp, Homo sapien
aatgacatatgaagcaactacatcaacaggtct

SEQ ID NO: 236346 - DNA, 33 bp, Homo sapien
aatgacatatgaagcagctacatcaacaggtct

SEQ ID NO: 236347 - DNA, 33 bp, Homo sapien
actgtttgagggtttacagaaggcaagagggtt

SEQ ID NO: 236348 - DNA, 33 bp, Homo sapien
actgtttgagggtttagagaaggcaagagggtt

SEQ ID NO: 236349 - DNA, 33 bp, Homo sapien
ttcttttcttgagtagccacagttaattacctc

SEQ ID NO: 236350 - DNA, 33 bp, Homo sapien
ttcttttcttgagtagtcacagttaattacctc

SEQ ID NO: 236351 - DNA, 33 bp, Homo sapien
cgtgttaatcttgtaccctggcatttgttcata

SEQ ID NO: 236352 - DNA, 33 bp, Homo sapien
cgtgttaatcttgtactctggcatttgttcata

SEQ ID NO: 236353 - DNA, 33 bp, Homo sapien
agacccaaatctgaccaaatgagatagaacatt

SEQ ID NO: 236354 - DNA, 33 bp, Homo sapien
agacccaaatctgaccgaatgagatagaacatt

SEQ ID NO: 236355 - DNA, 33 bp, Homo sapien
ctgctcgtaatatcagcattagagcaagtagga

SEQ ID NO: 236356 - DNA, 33 bp, Homo sapien
ctgctcgtaatatcaggattagagcaagtagga

SEQ ID NO: 236357 - DNA, 33 bp, Homo sapien
aattcttatcccattaccatcaatgcttacagt

SEQ ID NO: 236358 - DNA, 33 bp, Homo sapien
aattcttatcccattatcatcaatgcttacagt

SEQ ID NO: 236359 - DNA, 33 bp, Homo sapien
tcaaaaagccacaaagcatgtacaattactacc

SEQ ID NO: 236360 - DNA, 33 bp, Homo sapien
tcaaaaagccacaaagtatgtacaattactacc

SEQ ID NO: 236361 - DNA, 33 bp, Homo sapien
aggtagcaacatccccagattttggtctattat

SEQ ID NO: 236362 - DNA, 33 bp, Homo sapien
aggtagcaacatccccggattttggtctattat

SEQ ID NO: 236363 - DNA, 33 bp, Homo sapien
caactggacatggaaactttacacaatgcaaag

SEQ ID NO: 236364 - DNA, 33 bp, Homo sapien
caactggacatggaaattttacacaatgcaaag

SEQ ID NO: 236365 - DNA, 33 bp, Homo sapien
tttattctatgattatgccaacattcacttact

SEQ ID NO: 236366 - DNA, 33 bp, Homo sapien
tttattctatgattattccaacattcacttact

SEQ ID NO: 236367 - DNA, 33 bp, Homo sapien
caagctaccgacgtgcatcaaccagccttaaaa

SEQ ID NO: 236368 - DNA, 33 bp, Homo sapien
caagctaccgacgtgcgtcaaccagccttaaaa

SEQ ID NO: 236369 - DNA, 33 bp, Homo sapien
tgaaacatagtgaccaaaaaaacaacaactcct

SEQ ID NO: 236370 - DNA, 33 bp, Homo sapien
tgaaacatagtgaccacaaaaacaacaactcct

SEQ ID NO: 236371 - DNA, 33 bp, Homo sapien
gaagaaaaaactgaaaagagactgtgattttgg

SEQ ID NO: 236372 - DNA, 33 bp, Homo sapien
gaagaaaaaactgaaatgagactgtgattttgg

SEQ ID NO: 236373 - DNA, 33 bp, Homo sapien
agctattttattgttacggatgtctgaggctag

SEQ ID NO: 236374 - DNA, 33 bp, Homo sapien
agctattttattgttatggatgtctgaggctag

SEQ ID NO: 236375 - DNA, 33 bp, Homo sapien
ggttcacatgcctgacaatttcactaaaaagca

SEQ ID NO: 236376 - DNA, 33 bp, Homo sapien
ggttcacatgcctgactatttcactaaaaagca

SEQ ID NO: 236377 - DNA, 33 bp, Homo sapien
attacttaataagctcaaatagctataacctta

SEQ ID NO: 236378 - DNA, 33 bp, Homo sapien
attacttaataagctcgaatagctataacctta

SEQ ID NO: 236379 - DNA, 33 bp, Homo sapien
aacctaccgataagtgaatgtatagagaatccc

SEQ ID NO: 236380 - DNA, 33 bp, Homo sapien
aacctaccgataagtggatgtatagagaatccc

SEQ ID NO: 236381 - DNA, 33 bp, Homo sapien
ccctcacttgagtgaaactgcaaattatcacta

SEQ ID NO: 236382 - DNA, 33 bp, Homo sapien
ccctcacttgagtgaatctgcaaattatcacta

SEQ ID NO: 236383 - DNA, 33 bp, Homo sapien
tacttctctgcttctacattcttggtcatctgg

SEQ ID NO: 236384 - DNA, 33 bp, Homo sapien
tacttctctgcttctatattcttggtcatctgg

SEQ ID NO: 236385 - DNA, 33 bp, Homo sapien
gcataaaatgcaattcaagttttaagaagaaat

SEQ ID NO: 236386 - DNA, 33 bp, Homo sapien
gcataaaatgcaattcgagttttaagaagaaat

SEQ ID NO: 236387 - DNA, 33 bp, Homo sapien
cagtcaccccagtgtacgttaacagccatctaa

SEQ ID NO: 236388 - DNA, 33 bp, Homo sapien
cagtcaccccagtgtatgttaacagccatctaa

SEQ ID NO: 236389 - DNA, 33 bp, Homo sapien
aattatccttaatgtcaagtctagaaagtataa

SEQ ID NO: 236390 - DNA, 33 bp, Homo sapien
aattatccttaatgtcgagtctagaaagtataa

SEQ ID NO: 236391 - DNA, 33 bp, Homo sapien
aaagtaacttgaaggaaacattttgatttgaca

SEQ ID NO: 236392 - DNA, 33 bp, Homo sapien
aaagtaacttgaaggagacattttgatttgaca

SEQ ID NO: 236393 - DNA, 33 bp, Homo sapien
gtgtaactaaaaacaagggatgctgatatggtt

SEQ ID NO: 236394 - DNA, 33 bp, Homo sapien
gtgtaactaaaaacaatggatgctgatatggtt

SEQ ID NO: 236395 - DNA, 33 bp, Homo sapien
gagaaagcaatgctccaaacactgtttttctac

SEQ ID NO: 236396 - DNA, 33 bp, Homo sapien
gagaaagcaatgctcctaacactgtttttctac

SEQ ID NO: 236397 - DNA, 33 bp, Homo sapien
gaaaattctccttttacggctcaggaatgccat

SEQ ID NO: 236398 - DNA, 33 bp, Homo sapien
gaaaattctccttttatggctcaggaatgccat

SEQ ID NO: 236399 - DNA, 33 bp, Homo sapien
gataatagatattaaaaagtgaactgattatcc

SEQ ID NO: 236400 - DNA, 33 bp, Homo sapien
gataatagatattaaagagtgaactgattatcc

SEQ ID NO: 236401 - DNA, 33 bp, Homo sapien
gttattatgtatgcgactcatattattgactga

SEQ ID NO: 236402 - DNA, 33 bp, Homo sapien
gttattatgtatgcgattcatattattgactga

SEQ ID NO: 236403 - DNA, 33 bp, Homo sapien
aaacagtgtctcttacaataaagtgactgtgtc

SEQ ID NO: 236404 - DNA, 33 bp, Homo sapien
aaacagtgtctcttacgataaagtgactgtgtc

SEQ ID NO: 236405 - DNA, 33 bp, Homo sapien
atatggtagctgaaaaggtcaatcccttcgaga

SEQ ID NO: 236406 - DNA, 33 bp, Homo sapien
atatggtagctgaaaatgtcaatcccttcgaga

SEQ ID NO: 236407 - DNA, 33 bp, Homo sapien
ttattcatgtgttcaccggttaagttctttcaa

SEQ ID NO: 236408 - DNA, 33 bp, Homo sapien
ttattcatgtgttcactggttaagttctttcaa

SEQ ID NO: 236409 - DNA, 33 bp, Homo sapien
cactgaaaagctttggaatacattgcaagcaaa

SEQ ID NO: 236410 - DNA, 33 bp, Homo sapien
cactgaaaagctttggtatacattgcaagcaaa

SEQ ID NO: 236411 - DNA, 33 bp, Homo sapien
attttcagttcctgcaagtttaggataattcaa

SEQ ID NO: 236412 - DNA, 33 bp, Homo sapien
attttcagttcctgcaggtttaggataattcaa

SEQ ID NO: 236413 - DNA, 33 bp, Homo sapien
atctaaattgattcaccaggagatgaaggaaag

SEQ ID NO: 236414 - DNA, 33 bp, Homo sapien
atctaaattgattcactaggagatgaaggaaag

SEQ ID NO: 236415 - DNA, 33 bp, Homo sapien
ttcatagaaaagttacactgatatggtagtaca

SEQ ID NO: 236416 - DNA, 33 bp, Homo sapien
ttcatagaaaagttacgctgatatggtagtaca

SEQ ID NO: 236417 - DNA, 33 bp, Homo sapien
ctctgtgtttgaaatacatcatcacatattata

SEQ ID NO: 236418 - DNA, 33 bp, Homo sapien
ctctgtgtttgaaatatatcatcacatattata

SEQ ID NO: 236419 - DNA, 33 bp, Homo sapien
atccatgtctctagaaccgcagtgaagactaac

SEQ ID NO: 236420 - DNA, 33 bp, Homo sapien
atccatgtctctagaagcgcagtgaagactaac

SEQ ID NO: 236421 - DNA, 33 bp, Homo sapien
gtacttgatttgtaaaaaaggcttttcatgcat

SEQ ID NO: 236422 - DNA, 33 bp, Homo sapien
gtacttgatttgtaaagaaggcttttcatgcat

SEQ ID NO: 236423 - DNA, 33 bp, Homo sapien
gttagtacagttagtaagagaagaggtcagata

SEQ ID NO: 236424 - DNA, 33 bp, Homo sapien
gttagtacagttagtaggagaagaggtcagata

SEQ ID NO: 236425 - DNA, 33 bp, Homo sapien
ctaactgtactaactacgttgtggtaagcaaat

SEQ ID NO: 236426 - DNA, 33 bp, Homo sapien
ctaactgtactaactatgttgtggtaagcaaat

SEQ ID NO: 236427 - DNA, 33 bp, Homo sapien
ttccaaatgccacccacctgatacgcatctctc

SEQ ID NO: 236428 - DNA, 33 bp, Homo sapien
ttccaaatgccacccatctgatacgcatctctc

SEQ ID NO: 236429 - DNA, 33 bp, Homo sapien
ataattgattggaagagtacagtcatggagacc

SEQ ID NO: 236430 - DNA, 33 bp, Homo sapien
ataattgattggaagattacagtcatggagacc

SEQ ID NO: 236431 - DNA, 33 bp, Homo sapien
tatttctgattcatcaatcttcactctaatcaa

SEQ ID NO: 236432 - DNA, 33 bp, Homo sapien
tatttctgattcatcagtcttcactctaatcaa

SEQ ID NO: 236433 - DNA, 33 bp, Homo sapien
gtgaccaccgcgctcaccctctgaaatgtattt

SEQ ID NO: 236434 - DNA, 33 bp, Homo sapien
gtgaccaccgcgctcagcctctgaaatgtattt

SEQ ID NO: 236435 - DNA, 33 bp, Homo sapien
ctggacatcacagggagactattataatggtct

SEQ ID NO: 236436 - DNA, 33 bp, Homo sapien
ctggacatcacagggatactattataatggtct

SEQ ID NO: 236437 - DNA, 33 bp, Homo sapien
tgacccattagtcatcaaccattgaacacttta

SEQ ID NO: 236438 - DNA, 33 bp, Homo sapien
tgacccattagtcatcgaccattgaacacttta

SEQ ID NO: 236439 - DNA, 33 bp, Homo sapien
ctcccctctcgaagaggatattgtggccaggtg

SEQ ID NO: 236440 - DNA, 33 bp, Homo sapien
ctcccctctcgaagagtatattgtggccaggtg

SEQ ID NO: 236441 - DNA, 33 bp, Homo sapien
tatgcctaaggcctggaatactccctgggttac

SEQ ID NO: 236442 - DNA, 33 bp, Homo sapien
tatgcctaaggcctgggatactccctgggttac

SEQ ID NO: 236443 - DNA, 33 bp, Homo sapien
atcctcaggaaaagtcaagaaaatgaatgaaat

SEQ ID NO: 236444 - DNA, 33 bp, Homo sapien
atcctcaggaaaagtcgagaaaatgaatgaaat

SEQ ID NO: 236445 - DNA, 33 bp, Homo sapien
agcttgagttttctcacagagagtggttttata

SEQ ID NO: 236446 - DNA, 33 bp, Homo sapien
agcttgagttttctcatagagagtggttttata

SEQ ID NO: 236447 - DNA, 33 bp, Homo sapien
cctacccatcgagttacacctgtggctagcttg

SEQ ID NO: 236448 - DNA, 33 bp, Homo sapien
cctacccatcgagttatacctgtggctagcttg

SEQ ID NO: 236449 - DNA, 33 bp, Homo sapien
tgtgtttgtgtgtgcaaccaatacctcagagtc

SEQ ID NO: 236450 - DNA, 33 bp, Homo sapien
tgtgtttgtgtgtgcatccaatacctcagagtc

SEQ ID NO: 236451 - DNA, 33 bp, Homo sapien
aaaagagacttagataacctctgatactcaagc

SEQ ID NO: 236452 - DNA, 33 bp, Homo sapien
aaaagagacttagataccctctgatactcaagc

SEQ ID NO: 236453 - DNA, 33 bp, Homo sapien
acgagtggaaggatcaagcctaggccaagggac

SEQ ID NO: 236454 - DNA, 33 bp, Homo sapien
acgagtggaaggatcaggcctaggccaagggac

SEQ ID NO: 236455 - DNA, 33 bp, Homo sapien
catgctacgcattcaacctgcatgggatttgag

SEQ ID NO: 236456 - DNA, 33 bp, Homo sapien
catgctacgcattcaatctgcatgggatttgag

SEQ ID NO: 236457 - DNA, 33 bp, Homo sapien
gaggcttagcaaaatacctaatatgatttgcat

SEQ ID NO: 236458 - DNA, 33 bp, Homo sapien
gaggcttagcaaaatatctaatatgatttgcat

SEQ ID NO: 236459 - DNA, 33 bp, Homo sapien
tgcctcatgcaggctacgccactgtggacagct

SEQ ID NO: 236460 - DNA, 33 bp, Homo sapien
tgcctcatgcaggctatgccactgtggacagct

SEQ ID NO: 236461 - DNA, 33 bp, Homo sapien
gcaaacagactggcggcatttagcacctgccct

SEQ ID NO: 236462 - DNA, 33 bp, Homo sapien
gcaaacagactggcggtatttagcacctgccct

SEQ ID NO: 236463 - DNA, 33 bp, Homo sapien
ggacaggacagtttttaaaaaaatcaggatcat

SEQ ID NO: 236464 - DNA, 33 bp, Homo sapien
ggacaggacagttttttaaaaaatcaggatcat

SEQ ID NO: 236465 - DNA, 33 bp, Homo sapien
aaagaaaaacgaagaaagagataatctcaccat

SEQ ID NO: 236466 - DNA, 33 bp, Homo sapien
aaagaaaaacgaagaaggagataatctcaccat

SEQ ID NO: 236467 - DNA, 33 bp, Homo sapien
ttagtactttgctctgaattaggcttagcttaa

SEQ ID NO: 236468 - DNA, 33 bp, Homo sapien
ttagtactttgctctggattaggcttagcttaa

SEQ ID NO: 236469 - DNA, 33 bp, Homo sapien
cccgggccttgacaaccattatgcctgtcaaag

SEQ ID NO: 236470 - DNA, 33 bp, Homo sapien
cccgggccttgacaactattatgcctgtcaaag

SEQ ID NO: 236471 - DNA, 33 bp, Homo sapien
aattcaactgtgcaacaaacagaaatgtatcct

SEQ ID NO: 236472 - DNA, 33 bp, Homo sapien
aattcaactgtgcaaccaacagaaatgtatcct

SEQ ID NO: 236473 - DNA, 33 bp, Homo sapien
tgggttgggtgagatcacttatgcaatataatc

SEQ ID NO: 236474 - DNA, 33 bp, Homo sapien
tgggttgggtgagatcgcttatgcaatataatc

SEQ ID NO: 236475 - DNA, 33 bp, Homo sapien
gattttagaaagagaccatctgagttcaaattg

SEQ ID NO: 236476 - DNA, 33 bp, Homo sapien
gattttagaaagagactatctgagttcaaattg

SEQ ID NO: 236477 - DNA, 33 bp, Homo sapien
ggccagggtcataaaaccataagtgacagagtt

SEQ ID NO: 236478 - DNA, 33 bp, Homo sapien
ggccagggtcataaaatcataagtgacagagtt

SEQ ID NO: 236479 - DNA, 33 bp, Homo sapien
aaggaatatcatacagaagttttttaaatgaag

SEQ ID NO: 236480 - DNA, 33 bp, Homo sapien
aaggaatatcatacagtagttttttaaatgaag

SEQ ID NO: 236481 - DNA, 33 bp, Homo sapien
agggagactactgtaccgctgaatgtggtctga

SEQ ID NO: 236482 - DNA, 33 bp, Homo sapien
agggagactactgtactgctgaatgtggtctga

SEQ ID NO: 236483 - DNA, 33 bp, Homo sapien
tttggcaatgataggccatattaactcataatt

SEQ ID NO: 236484 - DNA, 33 bp, Homo sapien
tttggcaatgataggctatattaactcataatt

SEQ ID NO: 236485 - DNA, 33 bp, Homo sapien
tttcatagtttttcccacttcaggacatggaac

SEQ ID NO: 236486 - DNA, 33 bp, Homo sapien
tttcatagtttttcccgcttcaggacatggaac

SEQ ID NO: 236487 - DNA, 33 bp, Homo sapien
caacttttgcaaggaacaaaaccctctctgaaa

SEQ ID NO: 236488 - DNA, 33 bp, Homo sapien
caacttttgcaaggaagaaaaccctctctgaaa

SEQ ID NO: 236489 - DNA, 33 bp, Homo sapien
cagttctggaatagagaatattgatttatgaca

SEQ ID NO: 236490 - DNA, 33 bp, Homo sapien
cagttctggaatagagcatattgatttatgaca

SEQ ID NO: 236491 - DNA, 33 bp, Homo sapien
cccacacatatatcataaaactgggctgcatca

SEQ ID NO: 236492 - DNA, 33 bp, Homo sapien
cccacacatatatcatgaaactgggctgcatca

SEQ ID NO: 236493 - DNA, 33 bp, Homo sapien
aactgctccataactacagcctagagaaagaaa

SEQ ID NO: 236494 - DNA, 33 bp, Homo sapien
aactgctccataactatagcctagagaaagaaa

SEQ ID NO: 236495 - DNA, 33 bp, Homo sapien
gttaaatgagtaccaacgattaaagaaaatcaa

SEQ ID NO: 236496 - DNA, 33 bp, Homo sapien
gttaaatgagtaccaatgattaaagaaaatcaa

SEQ ID NO: 236497 - DNA, 33 bp, Homo sapien
catatttttgataggcaacaaatgctttatatt

SEQ ID NO: 236498 - DNA, 33 bp, Homo sapien
catatttttgataggctacaaatgctttatatt

SEQ ID NO: 236499 - DNA, 33 bp, Homo sapien
agctctgcagacctgacagatgtggcaaataca

SEQ ID NO: 236500 - DNA, 33 bp, Homo sapien
agctctgcagacctgatagatgtggcaaataca

SEQ ID NO: 236501 - DNA, 33 bp, Homo sapien
ctgttaaagctaggcaagagtgatggcttcatg

SEQ ID NO: 236502 - DNA, 33 bp, Homo sapien
ctgttaaagctaggcacgagtgatggcttcatg

SEQ ID NO: 236503 - DNA, 33 bp, Homo sapien
tatcatcagctacaccaaacactcaagtgtagc

SEQ ID NO: 236504 - DNA, 33 bp, Homo sapien
tatcatcagctacaccgaacactcaagtgtagc

SEQ ID NO: 236505 - DNA, 33 bp, Homo sapien
gatattgaatggtttccaatcttccatattacc

SEQ ID NO: 236506 - DNA, 33 bp, Homo sapien
gatattgaatggtttctaatcttccatattacc

SEQ ID NO: 236507 - DNA, 33 bp, Homo sapien
atgaaaattgaccacacattagattagcaagac

SEQ ID NO: 236508 - DNA, 33 bp, Homo sapien
atgaaaattgaccacatattagattagcaagac

SEQ ID NO: 236509 - DNA, 33 bp, Homo sapien
aattcttcccacagaaatgagccaatggtctaa

SEQ ID NO: 236510 - DNA, 33 bp, Homo sapien
aattcttcccacagaagtgagccaatggtctaa

SEQ ID NO: 236511 - DNA, 33 bp, Homo sapien
aataaaggctgacaaccgagtaaaataaactta

SEQ ID NO: 236512 - DNA, 33 bp, Homo sapien
aataaaggctgacaactgagtaaaataaactta

SEQ ID NO: 236513 - DNA, 33 bp, Homo sapien
aagcttagaaagtatcacattagtgccaagtaa

SEQ ID NO: 236514 - DNA, 33 bp, Homo sapien
aagcttagaaagtatcgcattagtgccaagtaa

SEQ ID NO: 236515 - DNA, 33 bp, Homo sapien
aggacactgcatacagaaggagttcataaaata

SEQ ID NO: 236516 - DNA, 33 bp, Homo sapien
aggacactgcatacaggaggagttcataaaata

SEQ ID NO: 236517 - DNA, 33 bp, Homo sapien
ccttggagaaagctataaaggaagctgctgaaa

SEQ ID NO: 236518 - DNA, 33 bp, Homo sapien
ccttggagaaagctatgaaggaagctgctgaaa

SEQ ID NO: 236519 - DNA, 33 bp, Homo sapien
agagactagaagtagaacatattatgtgattgg

SEQ ID NO: 236520 - DNA, 33 bp, Homo sapien
agagactagaagtagagcatattatgtgattgg

SEQ ID NO: 236521 - DNA, 33 bp, Homo sapien
gggtaaagataggtcacatgaagtaatctccgc

SEQ ID NO: 236522 - DNA, 33 bp, Homo sapien
gggtaaagataggtcagatgaagtaatctccgc

SEQ ID NO: 236523 - DNA, 33 bp, Homo sapien
ttggccagcaatgaacaaatgattttgcctcac

SEQ ID NO: 236524 - DNA, 33 bp, Homo sapien
ttggccagcaatgaacgaatgattttgcctcac

SEQ ID NO: 236525 - DNA, 33 bp, Homo sapien
cttttcactatcatcacgaaattcctttgcttc

SEQ ID NO: 236526 - DNA, 33 bp, Homo sapien
cttttcactatcatcatgaaattcctttgcttc

SEQ ID NO: 236527 - DNA, 33 bp, Homo sapien
tcaaaactctgtcttacataactccaagttggt

SEQ ID NO: 236528 - DNA, 33 bp, Homo sapien
tcaaaactctgtcttatataactccaagttggt

SEQ ID NO: 236529 - DNA, 33 bp, Homo sapien
tacaaataggacatcacgaaaactgcatcaaat

SEQ ID NO: 236530 - DNA, 33 bp, Homo sapien
tacaaataggacatcatgaaaactgcatcaaat

SEQ ID NO: 236531 - DNA, 33 bp, Homo sapien
atcaccagatgtctctaaaagattaacttgcag

SEQ ID NO: 236532 - DNA, 33 bp, Homo sapien
atcaccagatgtctctgaaagattaacttgcag

SEQ ID NO: 236533 - DNA, 33 bp, Homo sapien
agtgactgctgaattgaatggcaagagtgtgtt

SEQ ID NO: 236534 - DNA, 33 bp, Homo sapien
agtgactgctgaattgtatggcaagagtgtgtt

SEQ ID NO: 236535 - DNA, 33 bp, Homo sapien
aattgtaaacagagaaaaatcaggggttgctat

SEQ ID NO: 236536 - DNA, 33 bp, Homo sapien
aattgtaaacagagaagaatcaggggttgctat

SEQ ID NO: 236537 - DNA, 33 bp, Homo sapien
tctccttgtaattttccactgatacatgagctt

SEQ ID NO: 236538 - DNA, 33 bp, Homo sapien
tctccttgtaattttctactgatacatgagctt

SEQ ID NO: 236539 - DNA, 33 bp, Homo sapien
aaaattcgcttcagaaatctgtgttgctcggga

SEQ ID NO: 236540 - DNA, 33 bp, Homo sapien
aaaattcgcttcagaactctgtgttgctcggga

SEQ ID NO: 236541 - DNA, 33 bp, Homo sapien
ttgtactttctatggcaactaattttcaaataa

SEQ ID NO: 236542 - DNA, 33 bp, Homo sapien
ttgtactttctatggcgactaattttcaaataa

SEQ ID NO: 236543 - DNA, 33 bp, Homo sapien
cagcaatggtttccaacgaaaactgccacacca

SEQ ID NO: 236544 - DNA, 33 bp, Homo sapien
cagcaatggtttccaatgaaaactgccacacca

SEQ ID NO: 236545 - DNA, 33 bp, Homo sapien
tattctcgtcctttagccattagagctcccaag

SEQ ID NO: 236546 - DNA, 33 bp, Homo sapien
tattctcgtcctttagtcattagagctcccaag

SEQ ID NO: 236547 - DNA, 33 bp, Homo sapien
tgatttgaactctgagaactgcgaggtgagatg

SEQ ID NO: 236548 - DNA, 33 bp, Homo sapien
tgatttgaactctgaggactgcgaggtgagatg

SEQ ID NO: 236549 - DNA, 33 bp, Homo sapien
cctttgccaagaaaaaatcttctctcgctcttt

SEQ ID NO: 236550 - DNA, 33 bp, Homo sapien
cctttgccaagaaaaattcttctctcgctcttt

SEQ ID NO: 236551 - DNA, 33 bp, Homo sapien
gttgcctgtaagcctaagtttgcttgttctttc

SEQ ID NO: 236552 - DNA, 33 bp, Homo sapien
gttgcctgtaagcctaggtttgcttgttctttc

SEQ ID NO: 236553 - DNA, 33 bp, Homo sapien
acagaaggaatgatgacaagtcagtggcagaaa

SEQ ID NO: 236554 - DNA, 33 bp, Homo sapien
acagaaggaatgatgataagtcagtggcagaaa

SEQ ID NO: 236555 - DNA, 33 bp, Homo sapien
tggagatgatgtagtaaaaaaaaatagcagtct

SEQ ID NO: 236556 - DNA, 33 bp, Homo sapien
tggagatgatgtagtacaaaaaaatagcagtct

SEQ ID NO: 236557 - DNA, 33 bp, Homo sapien
ttgtcatgtgctaaggacaaaacataaatccca

SEQ ID NO: 236558 - DNA, 33 bp, Homo sapien
ttgtcatgtgctaagggcaaaacataaatccca

SEQ ID NO: 236559 - DNA, 33 bp, Homo sapien
ttttgacattgcaaaccgaaaaattcacttcta

SEQ ID NO: 236560 - DNA, 33 bp, Homo sapien
ttttgacattgcaaacggaaaaattcacttcta

SEQ ID NO: 236561 - DNA, 33 bp, Homo sapien
actccttctggaaacaactgcttcttatccttc

SEQ ID NO: 236562 - DNA, 33 bp, Homo sapien
actccttctggaaacagctgcttcttatccttc

SEQ ID NO: 236563 - DNA, 33 bp, Homo sapien
ttccctatgctgaaaacacacaaattaacaaac

SEQ ID NO: 236564 - DNA, 33 bp, Homo sapien
ttccctatgctgaaaatacacaaattaacaaac

SEQ ID NO: 236565 - DNA, 33 bp, Homo sapien
tccctatgctgaaatacgttccctatgctgaaa

SEQ ID NO: 236566 - DNA, 33 bp, Homo sapien
tccctatgctgaaatatgttccctatgctgaaa

SEQ ID NO: 236567 - DNA, 33 bp, Homo sapien
tctttgacacaggcttaaaaaaaataaagaaag

SEQ ID NO: 236568 - DNA, 33 bp, Homo sapien
tctttgacacaggctttaaaaaaataaagaaag

SEQ ID NO: 236569 - DNA, 33 bp, Homo sapien
taagacttttacttgacgttgaaattacagtca

SEQ ID NO: 236570 - DNA, 33 bp, Homo sapien
taagacttttacttgatgttgaaattacagtca

SEQ ID NO: 236571 - DNA, 33 bp, Homo sapien
ttatgatcataattcaactgacctttttaggac

SEQ ID NO: 236572 - DNA, 33 bp, Homo sapien
ttatgatcataattcagctgacctttttaggac

SEQ ID NO: 236573 - DNA, 33 bp, Homo sapien
tgactacatttaactgaagatccaaaaataaaa

SEQ ID NO: 236574 - DNA, 33 bp, Homo sapien
tgactacatttaactgcagatccaaaaataaaa

SEQ ID NO: 236575 - DNA, 33 bp, Homo sapien
agacatttcctagctacattctattgttcattt

SEQ ID NO: 236576 - DNA, 33 bp, Homo sapien
agacatttcctagctatattctattgttcattt

SEQ ID NO: 236577 - DNA, 33 bp, Homo sapien
tggatcactacagtgaagtattacagttgtaca

SEQ ID NO: 236578 - DNA, 33 bp, Homo sapien
tggatcactacagtgacgtattacagttgtaca

SEQ ID NO: 236579 - DNA, 33 bp, Homo sapien
attattgattatcaaagaaagcctgtgaatgga

SEQ ID NO: 236580 - DNA, 33 bp, Homo sapien
attattgattatcaaataaagcctgtgaatgga

SEQ ID NO: 236581 - DNA, 33 bp, Homo sapien
taatgtatgacctcatgagcatctggatgaaat

SEQ ID NO: 236582 - DNA, 33 bp, Homo sapien
taatgtatgacctcattagcatctggatgaaat

SEQ ID NO: 236583 - DNA, 33 bp, Homo sapien
aattgcaaactgtatgcatttctccactgggtg

SEQ ID NO: 236584 - DNA, 33 bp, Homo sapien
aattgcaaactgtatgtatttctccactgggtg

SEQ ID NO: 236585 - DNA, 33 bp, Homo sapien
ttgaatactgtgataacgcaagtatattgagca

SEQ ID NO: 236586 - DNA, 33 bp, Homo sapien
ttgaatactgtgataatgcaagtatattgagca

SEQ ID NO: 236587 - DNA, 33 bp, Homo sapien
aattcttgggttcatgccaaaacacttattgat

SEQ ID NO: 236588 - DNA, 33 bp, Homo sapien
aattcttgggttcatgtcaaaacacttattgat

SEQ ID NO: 236589 - DNA, 33 bp, Homo sapien
gtcaaggaagatgaccaatgaaaatgggtagca

SEQ ID NO: 236590 - DNA, 33 bp, Homo sapien
gtcaaggaagatgaccgatgaaaatgggtagca

SEQ ID NO: 236591 - DNA, 33 bp, Homo sapien
ttaggaaaggcaatagaaaggaaaaataataaa

SEQ ID NO: 236592 - DNA, 33 bp, Homo sapien
ttaggaaaggcaatagtaaggaaaaataataaa

SEQ ID NO: 236593 - DNA, 33 bp, Homo sapien
ctaaatatattataaagttggtgacccaatacc

SEQ ID NO: 236594 - DNA, 33 bp, Homo sapien
ctaaatatattataaatttggtgacccaatacc

SEQ ID NO: 236595 - DNA, 33 bp, Homo sapien
acattgtcaagtacacaggtaggcaatacgcaa

SEQ ID NO: 236596 - DNA, 33 bp, Homo sapien
acattgtcaagtacacgggtaggcaatacgcaa

SEQ ID NO: 236597 - DNA, 33 bp, Homo sapien
aatgctacaaatcagaagttttagcatactatt

SEQ ID NO: 236598 - DNA, 33 bp, Homo sapien
aatgctacaaatcagaggttttagcatactatt

SEQ ID NO: 236599 - DNA, 33 bp, Homo sapien
aacgtggatttttttcgacaagttatgggcagg

SEQ ID NO: 236600 - DNA, 33 bp, Homo sapien
aacgtggatttttttctacaagttatgggcagg

SEQ ID NO: 236601 - DNA, 33 bp, Homo sapien
taatagagaaatgacacgaagcttattttaact

SEQ ID NO: 236602 - DNA, 33 bp, Homo sapien
taatagagaaatgacatgaagcttattttaact

SEQ ID NO: 236603 - DNA, 33 bp, Homo sapien
atctttattgttacaacagtctgataaatgcta

SEQ ID NO: 236604 - DNA, 33 bp, Homo sapien
atctttattgttacaatagtctgataaatgcta

SEQ ID NO: 236605 - DNA, 33 bp, Homo sapien
gaagaaacatgtgaataagataaccacagatct

SEQ ID NO: 236606 - DNA, 33 bp, Homo sapien
gaagaaacatgtgaatgagataaccacagatct

SEQ ID NO: 236607 - DNA, 33 bp, Homo sapien
attcacagttatggacggaatgtttgcgttcct

SEQ ID NO: 236608 - DNA, 33 bp, Homo sapien
attcacagttatggactgaatgtttgcgttcct

SEQ ID NO: 236609 - DNA, 33 bp, Homo sapien
gcagttttacctcttaaccaaagccacatattt

SEQ ID NO: 236610 - DNA, 33 bp, Homo sapien
gcagttttacctcttagccaaagccacatattt

SEQ ID NO: 236611 - DNA, 33 bp, Homo sapien
gatgaataagaaatgacctttgtcttcaggaag

SEQ ID NO: 236612 - DNA, 33 bp, Homo sapien
gatgaataagaaatgatctttgtcttcaggaag

SEQ ID NO: 236613 - DNA, 33 bp, Homo sapien
ggaaaacacaatcacaactagctttaagggaac

SEQ ID NO: 236614 - DNA, 33 bp, Homo sapien
ggaaaacacaatcacagctagctttaagggaac

SEQ ID NO: 236615 - DNA, 33 bp, Homo sapien
agacttcactcacccactgacacataaagccta

SEQ ID NO: 236616 - DNA, 33 bp, Homo sapien
agacttcactcacccattgacacataaagccta

SEQ ID NO: 236617 - DNA, 33 bp, Homo sapien
gtatgctgcacataataatgactgaagaagtac

SEQ ID NO: 236618 - DNA, 33 bp, Homo sapien
gtatgctgcacataattatgactgaagaagtac

SEQ ID NO: 236619 - DNA, 33 bp, Homo sapien
aggttttgtgacaatacgatctctattgcaact

SEQ ID NO: 236620 - DNA, 33 bp, Homo sapien
aggttttgtgacaatatgatctctattgcaact

SEQ ID NO: 236621 - DNA, 33 bp, Homo sapien
ttatttgtgagccataaaatgaagtagtaaaat

SEQ ID NO: 236622 - DNA, 33 bp, Homo sapien
ttatttgtgagccatataatgaagtagtaaaat

SEQ ID NO: 236623 - DNA, 33 bp, Homo sapien
tatgaaatgtatgtaaaaagaaagcttccgatt

SEQ ID NO: 236624 - DNA, 33 bp, Homo sapien
tatgaaatgtatgtaacaagaaagcttccgatt

SEQ ID NO: 236625 - DNA, 33 bp, Homo sapien
aaatgaaagtttggcacaataataatcatatgc

SEQ ID NO: 236626 - DNA, 33 bp, Homo sapien
aaatgaaagtttggcataataataatcatatgc

SEQ ID NO: 236627 - DNA, 33 bp, Homo sapien
gtcatggccttagagaaagctgtatgtctgtat

SEQ ID NO: 236628 - DNA, 33 bp, Homo sapien
gtcatggccttagagacagctgtatgtctgtat

SEQ ID NO: 236629 - DNA, 33 bp, Homo sapien
tacagtacatcaaagacagttgtatttaatata

SEQ ID NO: 236630 - DNA, 33 bp, Homo sapien
tacagtacatcaaagatagttgtatttaatata

SEQ ID NO: 236631 - DNA, 33 bp, Homo sapien
gctgtggctgtgatgaccaaatatccatatatg

SEQ ID NO: 236632 - DNA, 33 bp, Homo sapien
gctgtggctgtgatgatcaaatatccatatatg

SEQ ID NO: 236633 - DNA, 33 bp, Homo sapien
ttgagtccacactatacgtcaggctgtactagc

SEQ ID NO: 236634 - DNA, 33 bp, Homo sapien
ttgagtccacactatatgtcaggctgtactagc

SEQ ID NO: 236635 - DNA, 33 bp, Homo sapien
acacgtaatttacttccaactgttatccaagga

SEQ ID NO: 236636 - DNA, 33 bp, Homo sapien
acacgtaatttacttctaactgttatccaagga

SEQ ID NO: 236637 - DNA, 33 bp, Homo sapien
gcaggtgaacttagtaccagtaagttgaatgcg

SEQ ID NO: 236638 - DNA, 33 bp, Homo sapien
gcaggtgaacttagtatcagtaagttgaatgcg

SEQ ID NO: 236639 - DNA, 33 bp, Homo sapien
aaatgagatatagaaaattgttccagactgcac

SEQ ID NO: 236640 - DNA, 33 bp, Homo sapien
aaatgagatatagaaatttgttccagactgcac

SEQ ID NO: 236641 - DNA, 33 bp, Homo sapien
tttaattcatgtgctacctatggagtcttttaa

SEQ ID NO: 236642 - DNA, 33 bp, Homo sapien
tttaattcatgtgctatctatggagtcttttaa

SEQ ID NO: 236643 - DNA, 33 bp, Homo sapien
actatagccacgggagaaagatattagaattgg

SEQ ID NO: 236644 - DNA, 33 bp, Homo sapien
actatagccacgggagtaagatattagaattgg

SEQ ID NO: 236645 - DNA, 33 bp, Homo sapien
tgtaggcctgacttcaaataggaccttcagatt

SEQ ID NO: 236646 - DNA, 33 bp, Homo sapien
tgtaggcctgacttcagataggaccttcagatt

SEQ ID NO: 236647 - DNA, 33 bp, Homo sapien
cgtggtcaaaaatggcaagtctcatggttttca

SEQ ID NO: 236648 - DNA, 33 bp, Homo sapien
cgtggtcaaaaatggcgagtctcatggttttca

SEQ ID NO: 236649 - DNA, 33 bp, Homo sapien
aactactaactgttaaaatgaactaaatgtggc

SEQ ID NO: 236650 - DNA, 33 bp, Homo sapien
aactactaactgttaacatgaactaaatgtggc

SEQ ID NO: 236651 - DNA, 33 bp, Homo sapien
aacttgagaacactacaaatttctttagactta

SEQ ID NO: 236652 - DNA, 33 bp, Homo sapien
aacttgagaacactacgaatttctttagactta

SEQ ID NO: 236653 - DNA, 33 bp, Homo sapien
atcctttgccatccacacagtcccatcatgttt

SEQ ID NO: 236654 - DNA, 33 bp, Homo sapien
atcctttgccatccacgcagtcccatcatgttt

SEQ ID NO: 236655 - DNA, 33 bp, Homo sapien
aaacttactccattatcacctttaaggatcatg

SEQ ID NO: 236656 - DNA, 33 bp, Homo sapien
aaacttactccattattacctttaaggatcatg

SEQ ID NO: 236657 - DNA, 33 bp, Homo sapien
tactgactacaagagactcagtgtacactgcag

SEQ ID NO: 236658 - DNA, 33 bp, Homo sapien
tactgactacaagagattcagtgtacactgcag

SEQ ID NO: 236659 - DNA, 33 bp, Homo sapien
taaggctgccataacaaactatgataaattaga

SEQ ID NO: 236660 - DNA, 33 bp, Homo sapien
taaggctgccataacagactatgataaattaga

SEQ ID NO: 236661 - DNA, 33 bp, Homo sapien
tccttttcaaatccaccgaaagcaaagtaatga

SEQ ID NO: 236662 - DNA, 33 bp, Homo sapien
tccttttcaaatccactgaaagcaaagtaatga

SEQ ID NO: 236663 - DNA, 33 bp, Homo sapien
atgtttatagttgagactatgactgcttaaaat

SEQ ID NO: 236664 - DNA, 33 bp, Homo sapien
atgtttatagttgagattatgactgcttaaaat

SEQ ID NO: 236665 - DNA, 33 bp, Homo sapien
cttagtaaattcatttcaaaagcatacattaac

SEQ ID NO: 236666 - DNA, 33 bp, Homo sapien
cttagtaaattcatttgaaaagcatacattaac

SEQ ID NO: 236667 - DNA, 33 bp, Homo sapien
atttgtacctgtttaccgacatttccccatttt

SEQ ID NO: 236668 - DNA, 33 bp, Homo sapien
atttgtacctgtttactgacatttccccatttt

SEQ ID NO: 236669 - DNA, 33 bp, Homo sapien
caagcagcataggacacgtagttgaagcaagag

SEQ ID NO: 236670 - DNA, 33 bp, Homo sapien
caagcagcataggacatgtagttgaagcaagag

SEQ ID NO: 236671 - DNA, 33 bp, Homo sapien
tagttccattctaggagattttttgaagatttc

SEQ ID NO: 236672 - DNA, 33 bp, Homo sapien
tagttccattctaggatattttttgaagatttc

SEQ ID NO: 236673 - DNA, 33 bp, Homo sapien
tgagttaggtgaaaaacgtgcagactgagtgct

SEQ ID NO: 236674 - DNA, 33 bp, Homo sapien
tgagttaggtgaaaaatgtgcagactgagtgct

SEQ ID NO: 236675 - DNA, 33 bp, Homo sapien
aagatataaacgagaaaataatgctgaattgta

SEQ ID NO: 236676 - DNA, 33 bp, Homo sapien
aagatataaacgagaacataatgctgaattgta

SEQ ID NO: 236677 - DNA, 33 bp, Homo sapien
tgactttgcagacagaacatgaagccaaagatc

SEQ ID NO: 236678 - DNA, 33 bp, Homo sapien
tgactttgcagacagaccatgaagccaaagatc

SEQ ID NO: 236679 - DNA, 33 bp, Homo sapien
gagttacaataaaatgaagaatgcaacaagtta

SEQ ID NO: 236680 - DNA, 33 bp, Homo sapien
gagttacaataaaatggagaatgcaacaagtta

SEQ ID NO: 236681 - DNA, 33 bp, Homo sapien
catggaaaacaggttacagtggcaaggatagaa

SEQ ID NO: 236682 - DNA, 33 bp, Homo sapien
catggaaaacaggttatagtggcaaggatagaa

SEQ ID NO: 236683 - DNA, 33 bp, Homo sapien
aagagattacttaggaacccaaaaccttataga

SEQ ID NO: 236684 - DNA, 33 bp, Homo sapien
aagagattacttaggatcccaaaaccttataga

SEQ ID NO: 236685 - DNA, 33 bp, Homo sapien
tagatatgagtaggagcatccaggttagacata

SEQ ID NO: 236686 - DNA, 33 bp, Homo sapien
tagatatgagtaggagtatccaggttagacata

SEQ ID NO: 236687 - DNA, 33 bp, Homo sapien
agcaattttcttattcaagtccaaaatgggtca

SEQ ID NO: 236688 - DNA, 33 bp, Homo sapien
agcaattttcttattcgagtccaaaatgggtca

SEQ ID NO: 236689 - DNA, 33 bp, Homo sapien
aactctaacaaaggccccttttcttcaatgact

SEQ ID NO: 236690 - DNA, 33 bp, Homo sapien
aactctaacaaaggcctcttttcttcaatgact

SEQ ID NO: 236691 - DNA, 33 bp, Homo sapien
tatttgatgtttgcaactgattagtattttatt

SEQ ID NO: 236692 - DNA, 33 bp, Homo sapien
tatttgatgtttgcaattgattagtattttatt

SEQ ID NO: 236693 - DNA, 33 bp, Homo sapien
ctgattgacagcttaccatgttatacaccacag

SEQ ID NO: 236694 - DNA, 33 bp, Homo sapien
ctgattgacagcttactatgttatacaccacag

SEQ ID NO: 236695 - DNA, 33 bp, Homo sapien
gagattggagctcctccaaaacacccatctact

SEQ ID NO: 236696 - DNA, 33 bp, Homo sapien
gagattggagctcctctaaaacacccatctact

SEQ ID NO: 236697 - DNA, 33 bp, Homo sapien
tttaagtaaagcagaaaagtcttagaagcaatg

SEQ ID NO: 236698 - DNA, 33 bp, Homo sapien
tttaagtaaagcagaacagtcttagaagcaatg

SEQ ID NO: 236699 - DNA, 33 bp, Homo sapien
cttcctgaactatgacaagaatgaactggctcc

SEQ ID NO: 236700 - DNA, 33 bp, Homo sapien
cttcctgaactatgacgagaatgaactggctcc

SEQ ID NO: 236701 - DNA, 33 bp, Homo sapien
agtgcatgcatttggagattagggatatttttc

SEQ ID NO: 236702 - DNA, 33 bp, Homo sapien
agtgcatgcatttggatattagggatatttttc

SEQ ID NO: 236703 - DNA, 33 bp, Homo sapien
cagaaagagagccctcaccgtaatctgaacact

SEQ ID NO: 236704 - DNA, 33 bp, Homo sapien
cagaaagagagccctcgccgtaatctgaacact

SEQ ID NO: 236705 - DNA, 33 bp, Homo sapien
aaacccataaaagcacaactgtgaagaataatt

SEQ ID NO: 236706 - DNA, 33 bp, Homo sapien
aaacccataaaagcactactgtgaagaataatt

SEQ ID NO: 236707 - DNA, 33 bp, Homo sapien
aataaaaaccttagaaaaattagatagctctga

SEQ ID NO: 236708 - DNA, 33 bp, Homo sapien
aataaaaaccttagaagaattagatagctctga

SEQ ID NO: 236709 - DNA, 33 bp, Homo sapien
ctggcactgagctcctaacatgatttggagatg

SEQ ID NO: 236710 - DNA, 33 bp, Homo sapien
ctggcactgagctcctcacatgatttggagatg

SEQ ID NO: 236711 - DNA, 33 bp, Homo sapien
ctagaacaattgaagcacttacactatctctta

SEQ ID NO: 236712 - DNA, 33 bp, Homo sapien
ctagaacaattgaagctcttacactatctctta

SEQ ID NO: 236713 - DNA, 33 bp, Homo sapien
caattgttctagtgtaagtgtatcaattgttca

SEQ ID NO: 236714 - DNA, 33 bp, Homo sapien
caattgttctagtgtaggtgtatcaattgttca

SEQ ID NO: 236715 - DNA, 33 bp, Homo sapien
atgcagtgcagtttacacctattatatattcta

SEQ ID NO: 236716 - DNA, 33 bp, Homo sapien
atgcagtgcagtttacgcctattatatattcta

SEQ ID NO: 236717 - DNA, 33 bp, Homo sapien
ttaaaaaagaaacaaaatcctagcttttcttat

SEQ ID NO: 236718 - DNA, 33 bp, Homo sapien
ttaaaaaagaaacaaagtcctagcttttcttat

SEQ ID NO: 236719 - DNA, 33 bp, Homo sapien
ttctccacaagataaacgcactatactaatttg

SEQ ID NO: 236720 - DNA, 33 bp, Homo sapien
ttctccacaagataaatgcactatactaatttg

SEQ ID NO: 236721 - DNA, 33 bp, Homo sapien
aaactcctgtccttaactgagatctttttaaaa

SEQ ID NO: 236722 - DNA, 33 bp, Homo sapien
aaactcctgtccttaattgagatctttttaaaa

SEQ ID NO: 236723 - DNA, 33 bp, Homo sapien
ccttgttcttgatgaacttactaattggtagca

SEQ ID NO: 236724 - DNA, 33 bp, Homo sapien
ccttgttcttgatgaatttactaattggtagca

SEQ ID NO: 236725 - DNA, 33 bp, Homo sapien
tatcaatttaatccaacgacaggcaatgatatt

SEQ ID NO: 236726 - DNA, 33 bp, Homo sapien
tatcaatttaatccaatgacaggcaatgatatt

SEQ ID NO: 236727 - DNA, 33 bp, Homo sapien
aagctctcataatcaaaggaaattctataggaa

SEQ ID NO: 236728 - DNA, 33 bp, Homo sapien
aagctctcataatcaatggaaattctataggaa

SEQ ID NO: 236729 - DNA, 33 bp, Homo sapien
gtgttacgacacaataatagatcatttgtaaaa

SEQ ID NO: 236730 - DNA, 33 bp, Homo sapien
gtgttacgacacaatagtagatcatttgtaaaa

SEQ ID NO: 236731 - DNA, 33 bp, Homo sapien
tatataacaccaactaacttacctcttagcctg

SEQ ID NO: 236732 - DNA, 33 bp, Homo sapien
tatataacaccaactagcttacctcttagcctg

SEQ ID NO: 236733 - DNA, 33 bp, Homo sapien
tcatttggcctgattaagtattctaacttttca

SEQ ID NO: 236734 - DNA, 33 bp, Homo sapien
tcatttggcctgattatgtattctaacttttca

SEQ ID NO: 236735 - DNA, 33 bp, Homo sapien
tttgatatttttacacaagcatttgccaggaat

SEQ ID NO: 236736 - DNA, 33 bp, Homo sapien
tttgatatttttacactagcatttgccaggaat

SEQ ID NO: 236737 - DNA, 33 bp, Homo sapien
tacttcttagtctccaaggtattttgacattaa

SEQ ID NO: 236738 - DNA, 33 bp, Homo sapien
tacttcttagtctccagggtattttgacattaa

SEQ ID NO: 236739 - DNA, 33 bp, Homo sapien
ttaattctttatagtgcattcatgctttagttt

SEQ ID NO: 236740 - DNA, 33 bp, Homo sapien
ttaattctttatagtgtattcatgctttagttt

SEQ ID NO: 236741 - DNA, 33 bp, Homo sapien
atcacattgtagcataactaatttcatgtcatt

SEQ ID NO: 236742 - DNA, 33 bp, Homo sapien
atcacattgtagcatagctaatttcatgtcatt

SEQ ID NO: 236743 - DNA, 33 bp, Homo sapien
aaatagtaaattttcaaagattgagatgggaac

SEQ ID NO: 236744 - DNA, 33 bp, Homo sapien
aaatagtaaattttcagagattgagatgggaac

SEQ ID NO: 236745 - DNA, 33 bp, Homo sapien
aatatgggtatttcaaattaagcagtgaaaaga

SEQ ID NO: 236746 - DNA, 33 bp, Homo sapien
aatatgggtatttcaagttaagcagtgaaaaga

SEQ ID NO: 236747 - DNA, 33 bp, Homo sapien
tcacgccatatctgccacccctttagtgaagtc

SEQ ID NO: 236748 - DNA, 33 bp, Homo sapien
tcacgccatatctgccgcccctttagtgaagtc

SEQ ID NO: 236749 - DNA, 33 bp, Homo sapien
ggcaccatagaaagcagtagaaggcagacaggc

SEQ ID NO: 236750 - DNA, 33 bp, Homo sapien
ggcaccatagaaagcattagaaggcagacaggc

SEQ ID NO: 236751 - DNA, 33 bp, Homo sapien
tctgaagggactggagaatctaaattgactcct

SEQ ID NO: 236752 - DNA, 33 bp, Homo sapien
tctgaagggactggagtatctaaattgactcct

SEQ ID NO: 236753 - DNA, 33 bp, Homo sapien
tggcagccctggtctacagtttacctgcaatct

SEQ ID NO: 236754 - DNA, 33 bp, Homo sapien
tggcagccctggtctagagtttacctgcaatct

SEQ ID NO: 236755 - DNA, 33 bp, Homo sapien
cattgtaaatgccccaaaaggtatattttggca

SEQ ID NO: 236756 - DNA, 33 bp, Homo sapien
cattgtaaatgccccagaaggtatattttggca

SEQ ID NO: 236757 - DNA, 33 bp, Homo sapien
ccactttcaatccagggatactctgaatcctgg

SEQ ID NO: 236758 - DNA, 33 bp, Homo sapien
ccactttcaatccaggtatactctgaatcctgg

SEQ ID NO: 236759 - DNA, 33 bp, Homo sapien
ccaaaatgaggagggacatatggagcaaagctg

SEQ ID NO: 236760 - DNA, 33 bp, Homo sapien
ccaaaatgaggagggatatatggagcaaagctg

SEQ ID NO: 236761 - DNA, 33 bp, Homo sapien
aatgtctagaagattacgaactgcaatccctgc

SEQ ID NO: 236762 - DNA, 33 bp, Homo sapien
aatgtctagaagattatgaactgcaatccctgc

SEQ ID NO: 236763 - DNA, 33 bp, Homo sapien
agaaaacattctttggaaaacggtatggagatt

SEQ ID NO: 236764 - DNA, 33 bp, Homo sapien
agaaaacattctttgggaaacggtatggagatt

SEQ ID NO: 236765 - DNA, 33 bp, Homo sapien
tgccttatgctctgaaatcatttaagtgtaaaa

SEQ ID NO: 236766 - DNA, 33 bp, Homo sapien
tgccttatgctctgaattcatttaagtgtaaaa

SEQ ID NO: 236767 - DNA, 33 bp, Homo sapien
acatttatgcacccagcaaacatacgaaaaaaa

SEQ ID NO: 236768 - DNA, 33 bp, Homo sapien
acatttatgcacccaggaaacatacgaaaaaaa

SEQ ID NO: 236769 - DNA, 33 bp, Homo sapien
tcttgctcctctttccccatgactcttccgtta

SEQ ID NO: 236770 - DNA, 33 bp, Homo sapien
tcttgctcctctttccgcatgactcttccgtta

SEQ ID NO: 236771 - DNA, 33 bp, Homo sapien
ttatttggtttgcactaactttatggtacttta

SEQ ID NO: 236772 - DNA, 33 bp, Homo sapien
ttatttggtttgcactgactttatggtacttta

SEQ ID NO: 236773 - DNA, 33 bp, Homo sapien
atacttctagtaagtaccatgacatattcttaa

SEQ ID NO: 236774 - DNA, 33 bp, Homo sapien
atacttctagtaagtatcatgacatattcttaa

SEQ ID NO: 236775 - DNA, 33 bp, Homo sapien
tatttattttttttcaacctgcactttcagttg

SEQ ID NO: 236776 - DNA, 33 bp, Homo sapien
tatttattttttttcatcctgcactttcagttg

SEQ ID NO: 236777 - DNA, 33 bp, Homo sapien
tgcatggaaggagaaacggctagatatgcaatt

SEQ ID NO: 236778 - DNA, 33 bp, Homo sapien
tgcatggaaggagaaatggctagatatgcaatt

SEQ ID NO: 236779 - DNA, 33 bp, Homo sapien
aggcattctgtgagttcaaagatggcagtcttg

SEQ ID NO: 236780 - DNA, 33 bp, Homo sapien
aggcattctgtgagtttaaagatggcagtcttg

SEQ ID NO: 236781 - DNA, 33 bp, Homo sapien
ctgaatcagtgaccaacatatagtgctgtttct

SEQ ID NO: 236782 - DNA, 33 bp, Homo sapien
ctgaatcagtgaccaatatatagtgctgtttct

SEQ ID NO: 236783 - DNA, 33 bp, Homo sapien
tgtccaactcactacaactacttaaaacaaaaa

SEQ ID NO: 236784 - DNA, 33 bp, Homo sapien
tgtccaactcactacagctacttaaaacaaaaa

SEQ ID NO: 236785 - DNA, 33 bp, Homo sapien
caatgatctgacagaaaaacagatgcattcatt

SEQ ID NO: 236786 - DNA, 33 bp, Homo sapien
caatgatctgacagaagaacagatgcattcatt

SEQ ID NO: 236787 - DNA, 33 bp, Homo sapien
agttgcatttgagtgaccaagagtagtagctag

SEQ ID NO: 236788 - DNA, 33 bp, Homo sapien
agttgcatttgagtgatcaagagtagtagctag

SEQ ID NO: 236789 - DNA, 33 bp, Homo sapien
aattaatctgtatataacttgtggaagtgaggt

SEQ ID NO: 236790 - DNA, 33 bp, Homo sapien
aattaatctgtatataccttgtggaagtgaggt

SEQ ID NO: 236791 - DNA, 33 bp, Homo sapien
ttcttttataaacaacagagttctgactaacag

SEQ ID NO: 236792 - DNA, 33 bp, Homo sapien
ttcttttataaacaactgagttctgactaacag

SEQ ID NO: 236793 - DNA, 33 bp, Homo sapien
aagattaactgttactaaattaaagctccttca

SEQ ID NO: 236794 - DNA, 33 bp, Homo sapien
aagattaactgttacttaattaaagctccttca

SEQ ID NO: 236795 - DNA, 33 bp, Homo sapien
agaataagttgtagaaactgaccttcaagttaa

SEQ ID NO: 236796 - DNA, 33 bp, Homo sapien
agaataagttgtagaagctgaccttcaagttaa

SEQ ID NO: 236797 - DNA, 33 bp, Homo sapien
taaggatcttgagctgcaataattctggattta

SEQ ID NO: 236798 - DNA, 33 bp, Homo sapien
taaggatcttgagctgtaataattctggattta

SEQ ID NO: 236799 - DNA, 33 bp, Homo sapien
cttctttaatttttaacggcctgcagtctagca

SEQ ID NO: 236800 - DNA, 33 bp, Homo sapien
cttctttaatttttaatggcctgcagtctagca

SEQ ID NO: 236801 - DNA, 33 bp, Homo sapien
ataacaaagcagtgtacatttcaagatatcctg

SEQ ID NO: 236802 - DNA, 33 bp, Homo sapien
ataacaaagcagtgtatatttcaagatatcctg

SEQ ID NO: 236803 - DNA, 33 bp, Homo sapien
tcagaactagagtagacaagccaatgggttcat

SEQ ID NO: 236804 - DNA, 33 bp, Homo sapien
tcagaactagagtagagaagccaatgggttcat

SEQ ID NO: 236805 - DNA, 33 bp, Homo sapien
atcacacaaatgaagacgagttacttgagcagg

SEQ ID NO: 236806 - DNA, 33 bp, Homo sapien
atcacacaaatgaagatgagttacttgagcagg

SEQ ID NO: 236807 - DNA, 33 bp, Homo sapien
aaatccagaactaacacacagattggtttttac

SEQ ID NO: 236808 - DNA, 33 bp, Homo sapien
aaatccagaactaacatacagattggtttttac

SEQ ID NO: 236809 - DNA, 33 bp, Homo sapien
tgtgttagcagcagccaatctgctggagctctc

SEQ ID NO: 236810 - DNA, 33 bp, Homo sapien
tgtgttagcagcagccgatctgctggagctctc

SEQ ID NO: 236811 - DNA, 33 bp, Homo sapien
aagtaaaggacagtagaatagtagttaccaggg

SEQ ID NO: 236812 - DNA, 33 bp, Homo sapien
aagtaaaggacagtaggatagtagttaccaggg

SEQ ID NO: 236813 - DNA, 33 bp, Homo sapien
tattgtatcatgatacaactaaatagccagcca

SEQ ID NO: 236814 - DNA, 33 bp, Homo sapien
tattgtatcatgatacgactaaatagccagcca

SEQ ID NO: 236815 - DNA, 33 bp, Homo sapien
atggtctaatgtcatcaaaaatgaaatataatg

SEQ ID NO: 236816 - DNA, 33 bp, Homo sapien
atggtctaatgtcatcgaaaatgaaatataatg

SEQ ID NO: 236817 - DNA, 33 bp, Homo sapien
atgcacagcaacagggaaaattgtcactaagtt

SEQ ID NO: 236818 - DNA, 33 bp, Homo sapien
atgcacagcaacagggcaaattgtcactaagtt

SEQ ID NO: 236819 - DNA, 33 bp, Homo sapien
gtctggcaatgccattaaacagtctagatgacc

SEQ ID NO: 236820 - DNA, 33 bp, Homo sapien
gtctggcaatgccattcaacagtctagatgacc

SEQ ID NO: 236821 - DNA, 33 bp, Homo sapien
tcacataatgtaccaactgaaatgagaaaacaa

SEQ ID NO: 236822 - DNA, 33 bp, Homo sapien
tcacataatgtaccaagtgaaatgagaaaacaa

SEQ ID NO: 236823 - DNA, 33 bp, Homo sapien
agacgatgggtctagaagcttgagaataatggt

SEQ ID NO: 236824 - DNA, 33 bp, Homo sapien
agacgatgggtctagatgcttgagaataatggt

SEQ ID NO: 236825 - DNA, 33 bp, Homo sapien
agaatttggctcattacgtttgaagttatataa

SEQ ID NO: 236826 - DNA, 33 bp, Homo sapien
agaatttggctcattatgtttgaagttatataa

SEQ ID NO: 236827 - DNA, 33 bp, Homo sapien
aaagaaagtaataaccaaaaaagagcacatttt

SEQ ID NO: 236828 - DNA, 33 bp, Homo sapien
aaagaaagtaataaccgaaaaagagcacatttt

SEQ ID NO: 236829 - DNA, 33 bp, Homo sapien
gcagcagaagtactaaactctggctcatatttt

SEQ ID NO: 236830 - DNA, 33 bp, Homo sapien
gcagcagaagtactaatctctggctcatatttt

SEQ ID NO: 236831 - DNA, 33 bp, Homo sapien
ctgaaaggaaaaaaaaagcaagagaggatactt

SEQ ID NO: 236832 - DNA, 33 bp, Homo sapien
ctgaaaggaaaaaaaacgcaagagaggatactt

SEQ ID NO: 236833 - DNA, 33 bp, Homo sapien
ttgcctgacttacaccagagctgagggaccctg

SEQ ID NO: 236834 - DNA, 33 bp, Homo sapien
ttgcctgacttacaccggagctgagggaccctg

SEQ ID NO: 236835 - DNA, 33 bp, Homo sapien
aagaaatatttctgcagtatccagggcctaaat

SEQ ID NO: 236836 - DNA, 33 bp, Homo sapien
aagaaatatttctgcattatccagggcctaaat

SEQ ID NO: 236837 - DNA, 33 bp, Homo sapien
gtataaagctgctatgaactcttcaaaaatgtc

SEQ ID NO: 236838 - DNA, 33 bp, Homo sapien
gtataaagctgctatgtactcttcaaaaatgtc

SEQ ID NO: 236839 - DNA, 33 bp, Homo sapien
tgttggtatgttcaaacttagcattctaagctt

SEQ ID NO: 236840 - DNA, 33 bp, Homo sapien
tgttggtatgttcaaatttagcattctaagctt

SEQ ID NO: 236841 - DNA, 33 bp, Homo sapien
tacttcatttctactacctcaagatttcataat

SEQ ID NO: 236842 - DNA, 33 bp, Homo sapien
tacttcatttctactatctcaagatttcataat

SEQ ID NO: 236843 - DNA, 33 bp, Homo sapien
ttctgacatttgtgtaccaatatttttaaagtt

SEQ ID NO: 236844 - DNA, 33 bp, Homo sapien
ttctgacatttgtgtatcaatatttttaaagtt

SEQ ID NO: 236845 - DNA, 33 bp, Homo sapien
taattaatgacaactacaagtaagctaagacag

SEQ ID NO: 236846 - DNA, 33 bp, Homo sapien
taattaatgacaactataagtaagctaagacag

SEQ ID NO: 236847 - DNA, 33 bp, Homo sapien
ctactttccacataagaatgctccaaggattaa

SEQ ID NO: 236848 - DNA, 33 bp, Homo sapien
ctactttccacataagtatgctccaaggattaa

SEQ ID NO: 236849 - DNA, 33 bp, Homo sapien
tccctatgggctctaacggctcttcagaacttt

SEQ ID NO: 236850 - DNA, 33 bp, Homo sapien
tccctatgggctctaatggctcttcagaacttt

SEQ ID NO: 236851 - DNA, 33 bp, Homo sapien
atgttgctggaacacacagaccatcatgctggg

SEQ ID NO: 236852 - DNA, 33 bp, Homo sapien
atgttgctggaacacagagaccatcatgctggg

SEQ ID NO: 236853 - DNA, 33 bp, Homo sapien
caggattatttggcaccatttaaagcagtctga

SEQ ID NO: 236854 - DNA, 33 bp, Homo sapien
caggattatttggcactatttaaagcagtctga

SEQ ID NO: 236855 - DNA, 33 bp, Homo sapien
catgtgtctttaaaataaacgcatttgattgtt

SEQ ID NO: 236856 - DNA, 33 bp, Homo sapien
catgtgtctttaaaattaacgcatttgattgtt

SEQ ID NO: 236857 - DNA, 33 bp, Homo sapien
ctcatttctgcctcctaagaacaatgagagcac

SEQ ID NO: 236858 - DNA, 33 bp, Homo sapien
ctcatttctgcctcctcagaacaatgagagcac

SEQ ID NO: 236859 - DNA, 33 bp, Homo sapien
ttttagataaaagctacgcaggagagcagcagc

SEQ ID NO: 236860 - DNA, 33 bp, Homo sapien
ttttagataaaagctatgcaggagagcagcagc

SEQ ID NO: 236861 - DNA, 33 bp, Homo sapien
cagacatttagcagaaacttttaataagcaaac

SEQ ID NO: 236862 - DNA, 33 bp, Homo sapien
cagacatttagcagaaccttttaataagcaaac

SEQ ID NO: 236863 - DNA, 33 bp, Homo sapien
aatttgtttcatcttacaccattcaacctgaac

SEQ ID NO: 236864 - DNA, 33 bp, Homo sapien
aatttgtttcatcttataccattcaacctgaac

SEQ ID NO: 236865 - DNA, 33 bp, Homo sapien
attatatgtctaaaaaggtaatagcaaccaaag

SEQ ID NO: 236866 - DNA, 33 bp, Homo sapien
attatatgtctaaaaatgtaatagcaaccaaag

SEQ ID NO: 236867 - DNA, 33 bp, Homo sapien
tgtttgacagctgctacggataaaagttacata

SEQ ID NO: 236868 - DNA, 33 bp, Homo sapien
tgtttgacagctgctatggataaaagttacata

SEQ ID NO: 236869 - DNA, 33 bp, Homo sapien
gtttatagtattaagaagaatgagacatcattt

SEQ ID NO: 236870 - DNA, 33 bp, Homo sapien
gtttatagtattaagacgaatgagacatcattt

SEQ ID NO: 236871 - DNA, 33 bp, Homo sapien
gttttagttttacacactccatcatgaaaataa

SEQ ID NO: 236872 - DNA, 33 bp, Homo sapien
gttttagttttacacagtccatcatgaaaataa

SEQ ID NO: 236873 - DNA, 33 bp, Homo sapien
gatatggcatttgttaagatatataatgagata

SEQ ID NO: 236874 - DNA, 33 bp, Homo sapien
gatatggcatttgttaggatatataatgagata

SEQ ID NO: 236875 - DNA, 33 bp, Homo sapien
taatcatttatcatgaactacatggctaatatg

SEQ ID NO: 236876 - DNA, 33 bp, Homo sapien
taatcatttatcatgacctacatggctaatatg

SEQ ID NO: 236877 - DNA, 33 bp, Homo sapien
ctttgtaataaatgccaaatacactactaatct

SEQ ID NO: 236878 - DNA, 33 bp, Homo sapien
ctttgtaataaatgccgaatacactactaatct

SEQ ID NO: 236879 - DNA, 33 bp, Homo sapien
taaaatcactgaagaaatattccactatttatg

SEQ ID NO: 236880 - DNA, 33 bp, Homo sapien
taaaatcactgaagaattattccactatttatg

SEQ ID NO: 236881 - DNA, 33 bp, Homo sapien
taagcctaaagaaaaaattaggaaggcacattg

SEQ ID NO: 236882 - DNA, 33 bp, Homo sapien
taagcctaaagaaaaagttaggaaggcacattg

SEQ ID NO: 236883 - DNA, 33 bp, Homo sapien
aatgtggaatgatttcaaacaataagtgtaaat

SEQ ID NO: 236884 - DNA, 33 bp, Homo sapien
aatgtggaatgatttcgaacaataagtgtaaat

SEQ ID NO: 236885 - DNA, 33 bp, Homo sapien
aataaatgcttaacaaataactaaatgaatgat

SEQ ID NO: 236886 - DNA, 33 bp, Homo sapien
aataaatgcttaacaattaactaaatgaatgat

SEQ ID NO: 236887 - DNA, 33 bp, Homo sapien
gaataatcaagaacaacgaaacttgcctaaagt

SEQ ID NO: 236888 - DNA, 33 bp, Homo sapien
gaataatcaagaacaatgaaacttgcctaaagt

SEQ ID NO: 236889 - DNA, 33 bp, Homo sapien
attatatggttgataaatgaaagaggcttaaca

SEQ ID NO: 236890 - DNA, 33 bp, Homo sapien
attatatggttgataagtgaaagaggcttaaca

SEQ ID NO: 236891 - DNA, 33 bp, Homo sapien
gagtacaaggtaatcaagaagaggatggaactg

SEQ ID NO: 236892 - DNA, 33 bp, Homo sapien
gagtacaaggtaatcaggaagaggatggaactg

SEQ ID NO: 236893 - DNA, 33 bp, Homo sapien
tttatgtccaactccaagacagaaaggtggtgg

SEQ ID NO: 236894 - DNA, 33 bp, Homo sapien
tttatgtccaactccaggacagaaaggtggtgg

SEQ ID NO: 236895 - DNA, 33 bp, Homo sapien
tcatttagcaaaaaggacactcatttaggacac

SEQ ID NO: 236896 - DNA, 33 bp, Homo sapien
tcatttagcaaaaagggcactcatttaggacac

SEQ ID NO: 236897 - DNA, 33 bp, Homo sapien
attattaatccctttaagcatcaacttccttgc

SEQ ID NO: 236898 - DNA, 33 bp, Homo sapien
attattaatccctttaggcatcaacttccttgc

SEQ ID NO: 236899 - DNA, 33 bp, Homo sapien
ggcttctgcaagataagtactagggtacaacta

SEQ ID NO: 236900 - DNA, 33 bp, Homo sapien
ggcttctgcaagataattactagggtacaacta

SEQ ID NO: 236901 - DNA, 33 bp, Homo sapien
gttttttgagaaaaagaatttgcatagagctat

SEQ ID NO: 236902 - DNA, 33 bp, Homo sapien
gttttttgagaaaaagcatttgcatagagctat

SEQ ID NO: 236903 - DNA, 33 bp, Homo sapien
catctagtaatgtcaagggaatcctggaagaat

SEQ ID NO: 236904 - DNA, 33 bp, Homo sapien
catctagtaatgtcaatggaatcctggaagaat

SEQ ID NO: 236905 - DNA, 33 bp, Homo sapien
agtgaggttggttccacgaattcaaggatggtt

SEQ ID NO: 236906 - DNA, 33 bp, Homo sapien
agtgaggttggttccaggaattcaaggatggtt

SEQ ID NO: 236907 - DNA, 33 bp, Homo sapien
tattgagtatctgtgacgtctggggccctatgt

SEQ ID NO: 236908 - DNA, 33 bp, Homo sapien
tattgagtatctgtgatgtctggggccctatgt

SEQ ID NO: 236909 - DNA, 33 bp, Homo sapien
attcattcatgtcaccagaattagcttccttgc

SEQ ID NO: 236910 - DNA, 33 bp, Homo sapien
attcattcatgtcaccggaattagcttccttgc

SEQ ID NO: 236911 - DNA, 33 bp, Homo sapien
gccgggcagtaacctacaagtatttaccagttc

SEQ ID NO: 236912 - DNA, 33 bp, Homo sapien
gccgggcagtaacctataagtatttaccagttc

SEQ ID NO: 236913 - DNA, 33 bp, Homo sapien
tgggctcggctatcagaacatagtcgcaacttt

SEQ ID NO: 236914 - DNA, 33 bp, Homo sapien
tgggctcggctatcaggacatagtcgcaacttt

SEQ ID NO: 236915 - DNA, 33 bp, Homo sapien
tttactaagttttacaaatcaggcaaacctcat

SEQ ID NO: 236916 - DNA, 33 bp, Homo sapien
tttactaagttttacacatcaggcaaacctcat

SEQ ID NO: 236917 - DNA, 33 bp, Homo sapien
tggcagttcctctggacagtttacctgaaatta

SEQ ID NO: 236918 - DNA, 33 bp, Homo sapien
tggcagttcctctggatagtttacctgaaatta

SEQ ID NO: 236919 - DNA, 33 bp, Homo sapien
tataatagttttgtacccattgaaatgatctat

SEQ ID NO: 236920 - DNA, 33 bp, Homo sapien
tataatagttttgtactcattgaaatgatctat

SEQ ID NO: 236921 - DNA, 33 bp, Homo sapien
aatggatattaaacacactaacttgaagaggta

SEQ ID NO: 236922 - DNA, 33 bp, Homo sapien
aatggatattaaacactctaacttgaagaggta

SEQ ID NO: 236923 - DNA, 33 bp, Homo sapien
catacttgttagcctaccatgtctccagtatct

SEQ ID NO: 236924 - DNA, 33 bp, Homo sapien
catacttgttagcctatcatgtctccagtatct

SEQ ID NO: 236925 - DNA, 33 bp, Homo sapien
atgatctgctctgaaacagcctcacaaactctc

SEQ ID NO: 236926 - DNA, 33 bp, Homo sapien
atgatctgctctgaaatagcctcacaaactctc

SEQ ID NO: 236927 - DNA, 33 bp, Homo sapien
atcctggcagagggaaaatgtgaactcggcaac

SEQ ID NO: 236928 - DNA, 33 bp, Homo sapien
atcctggcagagggaagatgtgaactcggcaac

SEQ ID NO: 236929 - DNA, 33 bp, Homo sapien
atttttaccacatccacgattacttcctccact

SEQ ID NO: 236930 - DNA, 33 bp, Homo sapien
atttttaccacatccatgattacttcctccact

SEQ ID NO: 236931 - DNA, 33 bp, Homo sapien
gagtgagatgtgtttacgcaataaatgagaaaa

SEQ ID NO: 236932 - DNA, 33 bp, Homo sapien
gagtgagatgtgtttatgcaataaatgagaaaa

SEQ ID NO: 236933 - DNA, 33 bp, Homo sapien
tctatgtcaccaattaataacttgttgccagat

SEQ ID NO: 236934 - DNA, 33 bp, Homo sapien
tctatgtcaccaattagtaacttgttgccagat

SEQ ID NO: 236935 - DNA, 33 bp, Homo sapien
gaaataagaatagtgcaacaacttagaaagaaa

SEQ ID NO: 236936 - DNA, 33 bp, Homo sapien
gaaataagaatagtgcgacaacttagaaagaaa

SEQ ID NO: 236937 - DNA, 33 bp, Homo sapien
ggtttacctctttcacaagttgctttggcaaat

SEQ ID NO: 236938 - DNA, 33 bp, Homo sapien
ggtttacctctttcacgagttgctttggcaaat

SEQ ID NO: 236939 - DNA, 33 bp, Homo sapien
caacccagaagaagatcagaacaggaggacaga

SEQ ID NO: 236940 - DNA, 33 bp, Homo sapien
caacccagaagaagatgagaacaggaggacaga

SEQ ID NO: 236941 - DNA, 33 bp, Homo sapien
ctcagtggaagagattcaaaatttaggaacagt

SEQ ID NO: 236942 - DNA, 33 bp, Homo sapien
ctcagtggaagagatttaaaatttaggaacagt

SEQ ID NO: 236943 - DNA, 33 bp, Homo sapien
tgtcctaacagaatataaacccttagagacctt

SEQ ID NO: 236944 - DNA, 33 bp, Homo sapien
tgtcctaacagaatatcaacccttagagacctt

SEQ ID NO: 236945 - DNA, 33 bp, Homo sapien
gtaaatgtctacctcaatattttaagttcactg

SEQ ID NO: 236946 - DNA, 33 bp, Homo sapien
gtaaatgtctacctcagtattttaagttcactg

SEQ ID NO: 236947 - DNA, 33 bp, Homo sapien
tatcttttctgtttccgacaaaaatgtgagatt

SEQ ID NO: 236948 - DNA, 33 bp, Homo sapien
tatcttttctgtttcctacaaaaatgtgagatt

SEQ ID NO: 236949 - DNA, 33 bp, Homo sapien
catacaaaaattcaaaatcactctgaatgtgtt

SEQ ID NO: 236950 - DNA, 33 bp, Homo sapien
catacaaaaattcaaattcactctgaatgtgtt

SEQ ID NO: 236951 - DNA, 33 bp, Homo sapien
acaattgcaattgcaaaatgtttgcctcaaaat

SEQ ID NO: 236952 - DNA, 33 bp, Homo sapien
acaattgcaattgcaagatgtttgcctcaaaat

SEQ ID NO: 236953 - DNA, 33 bp, Homo sapien
tatctcccctagtttacgttgtgtctgtcccag

SEQ ID NO: 236954 - DNA, 33 bp, Homo sapien
tatctcccctagtttatgttgtgtctgtcccag

SEQ ID NO: 236955 - DNA, 33 bp, Homo sapien
taagatttaaatggaaaaaatgctatgtctatt

SEQ ID NO: 236956 - DNA, 33 bp, Homo sapien
taagatttaaatggaagaaatgctatgtctatt

SEQ ID NO: 236957 - DNA, 33 bp, Homo sapien
caaacaccgataattacagcaaactactacagc

SEQ ID NO: 236958 - DNA, 33 bp, Homo sapien
caaacaccgataattatagcaaactactacagc

SEQ ID NO: 236959 - DNA, 33 bp, Homo sapien
ccagatttcaggagaaagtttatacgtaagata

SEQ ID NO: 236960 - DNA, 33 bp, Homo sapien
ccagatttcaggagaaggtttatacgtaagata

SEQ ID NO: 236961 - DNA, 33 bp, Homo sapien
caggagagctgtgacaaatactgggtaaagttg

SEQ ID NO: 236962 - DNA, 33 bp, Homo sapien
caggagagctgtgacacatactgggtaaagttg

SEQ ID NO: 236963 - DNA, 33 bp, Homo sapien
aaatggacgattcctcaaaagacacaatctgcc

SEQ ID NO: 236964 - DNA, 33 bp, Homo sapien
aaatggacgattcctcgaaagacacaatctgcc

SEQ ID NO: 236965 - DNA, 33 bp, Homo sapien
ctaaaaatagagctaccactgctgagtatatag

SEQ ID NO: 236966 - DNA, 33 bp, Homo sapien
ctaaaaatagagctactactgctgagtatatag

SEQ ID NO: 236967 - DNA, 33 bp, Homo sapien
caaaataaactgtcaaaggagtaaatatacaac

SEQ ID NO: 236968 - DNA, 33 bp, Homo sapien
caaaataaactgtcaatggagtaaatatacaac

SEQ ID NO: 236969 - DNA, 33 bp, Homo sapien
tttggacctctctaaactcaatttctcgcaact

SEQ ID NO: 236970 - DNA, 33 bp, Homo sapien
tttggacctctctaaattcaatttctcgcaact

SEQ ID NO: 236971 - DNA, 33 bp, Homo sapien
actattttgtttgttacgtggacttcaatctca

SEQ ID NO: 236972 - DNA, 33 bp, Homo sapien
actattttgtttgttatgtggacttcaatctca

SEQ ID NO: 236973 - DNA, 33 bp, Homo sapien
cagtaagactgggctaacccaactgtatttata

SEQ ID NO: 236974 - DNA, 33 bp, Homo sapien
cagtaagactgggctatcccaactgtatttata

SEQ ID NO: 236975 - DNA, 33 bp, Homo sapien
ttgaataccctgaaaagacttgacttgtgaagg

SEQ ID NO: 236976 - DNA, 33 bp, Homo sapien
ttgaataccctgaaaatacttgacttgtgaagg

SEQ ID NO: 236977 - DNA, 33 bp, Homo sapien
tctccagaaacaatgcagactactatttttttt

SEQ ID NO: 236978 - DNA, 33 bp, Homo sapien
tctccagaaacaatgcggactactatttttttt

SEQ ID NO: 236979 - DNA, 33 bp, Homo sapien
tagtatagatgcatatgagtatcaggattgtta

SEQ ID NO: 236980 - DNA, 33 bp, Homo sapien
tagtatagatgcatattagtatcaggattgtta

SEQ ID NO: 236981 - DNA, 33 bp, Homo sapien
taacattctaaatcaagaaacagaacaatacaa

SEQ ID NO: 236982 - DNA, 33 bp, Homo sapien
taacattctaaatcaataaacagaacaatacaa

SEQ ID NO: 236983 - DNA, 33 bp, Homo sapien
aactgagttcacattaaaagttaccccaattct

SEQ ID NO: 236984 - DNA, 33 bp, Homo sapien
aactgagttcacattacaagttaccccaattct

SEQ ID NO: 236985 - DNA, 33 bp, Homo sapien
atttgagtcagtggtacgctggaagaaagaaaa

SEQ ID NO: 236986 - DNA, 33 bp, Homo sapien
atttgagtcagtggtatgctggaagaaagaaaa

SEQ ID NO: 236987 - DNA, 33 bp, Homo sapien
tgtactagcagaattactaaagaagttacagat

SEQ ID NO: 236988 - DNA, 33 bp, Homo sapien
tgtactagcagaattattaaagaagttacagat

SEQ ID NO: 236989 - DNA, 33 bp, Homo sapien
taaatcctttattccaaggcaagccatttcttc

SEQ ID NO: 236990 - DNA, 33 bp, Homo sapien
taaatcctttattccagggcaagccatttcttc

SEQ ID NO: 236991 - DNA, 33 bp, Homo sapien
agtagctacattactaaacagcaaagatacaga

SEQ ID NO: 236992 - DNA, 33 bp, Homo sapien
agtagctacattactagacagcaaagatacaga

SEQ ID NO: 236993 - DNA, 33 bp, Homo sapien
aagtaccaatgatgaacattgacaaagtttaaa

SEQ ID NO: 236994 - DNA, 33 bp, Homo sapien
aagtaccaatgatgaatattgacaaagtttaaa

SEQ ID NO: 236995 - DNA, 33 bp, Homo sapien
tacagtggccaagatacagtaggcttttagtga

SEQ ID NO: 236996 - DNA, 33 bp, Homo sapien
tacagtggccaagatatagtaggcttttagtga

SEQ ID NO: 236997 - DNA, 33 bp, Homo sapien
ttgatcttgccagtaaacgagatatttgatgat

SEQ ID NO: 236998 - DNA, 33 bp, Homo sapien
ttgatcttgccagtaagcgagatatttgatgat

SEQ ID NO: 236999 - DNA, 33 bp, Homo sapien
tgaaagatcaattggccacgtgatactgtgcag

SEQ ID NO: 237000 - DNA, 33 bp, Homo sapien
tgaaagatcaattggctacgtgatactgtgcag

SEQ ID NO: 237001 - DNA, 33 bp, Homo sapien
cctagatatcttggctaaaaggactctgtctcc

SEQ ID NO: 237002 - DNA, 33 bp, Homo sapien
cctagatatcttggctgaaaggactctgtctcc

SEQ ID NO: 237003 - DNA, 33 bp, Homo sapien
cttttgtctgttcaccaaatatctttctgacta

SEQ ID NO: 237004 - DNA, 33 bp, Homo sapien
cttttgtctgttcacctaatatctttctgacta

SEQ ID NO: 237005 - DNA, 33 bp, Homo sapien
ctttttattaaacagaagagattccactaattt

SEQ ID NO: 237006 - DNA, 33 bp, Homo sapien
ctttttattaaacagacgagattccactaattt

SEQ ID NO: 237007 - DNA, 33 bp, Homo sapien
ttcactctctaaaacacataacctattagctaa

SEQ ID NO: 237008 - DNA, 33 bp, Homo sapien
ttcactctctaaaacatataacctattagctaa

SEQ ID NO: 237009 - DNA, 33 bp, Homo sapien
caggcagcattggataccaatcagcttcatgga

SEQ ID NO: 237010 - DNA, 33 bp, Homo sapien
caggcagcattggatatcaatcagcttcatgga

SEQ ID NO: 237011 - DNA, 33 bp, Homo sapien
cccacatggtattgataacacgggtacacagaa

SEQ ID NO: 237012 - DNA, 33 bp, Homo sapien
cccacatggtattgatcacacgggtacacagaa

SEQ ID NO: 237013 - DNA, 33 bp, Homo sapien
acaattggatttggaaaattgacctaatgtcag

SEQ ID NO: 237014 - DNA, 33 bp, Homo sapien
acaattggatttggaacattgacctaatgtcag

SEQ ID NO: 237015 - DNA, 33 bp, Homo sapien
cctaccaatctaaatagaagctgaatttttgaa

SEQ ID NO: 237016 - DNA, 33 bp, Homo sapien
cctaccaatctaaatataagctgaatttttgaa

SEQ ID NO: 237017 - DNA, 33 bp, Homo sapien
tgcactcaaaaatttacgtgcccattccagtgg

SEQ ID NO: 237018 - DNA, 33 bp, Homo sapien
tgcactcaaaaatttatgtgcccattccagtgg

SEQ ID NO: 237019 - DNA, 33 bp, Homo sapien
gatagggagtaattacaattaaatgtggtcatc

SEQ ID NO: 237020 - DNA, 33 bp, Homo sapien
gatagggagtaattaccattaaatgtggtcatc

SEQ ID NO: 237021 - DNA, 33 bp, Homo sapien
aacgctgatacaccccaacctgaaatatatgaa

SEQ ID NO: 237022 - DNA, 33 bp, Homo sapien
aacgctgatacaccccgacctgaaatatatgaa

SEQ ID NO: 237023 - DNA, 33 bp, Homo sapien
ttaggctggtgcaaaactaattgtaatttcaga

SEQ ID NO: 237024 - DNA, 33 bp, Homo sapien
ttaggctggtgcaaaagtaattgtaatttcaga

SEQ ID NO: 237025 - DNA, 33 bp, Homo sapien
attaatcaaaacaggaaccattacaattgaaac

SEQ ID NO: 237026 - DNA, 33 bp, Homo sapien
attaatcaaaacaggagccattacaattgaaac

SEQ ID NO: 237027 - DNA, 33 bp, Homo sapien
ttgtattctaagaacacactgcaatggactaaa

SEQ ID NO: 237028 - DNA, 33 bp, Homo sapien
ttgtattctaagaacatactgcaatggactaaa

SEQ ID NO: 237029 - DNA, 33 bp, Homo sapien
ctcttctttccacgataatagctttatagacaa

SEQ ID NO: 237030 - DNA, 33 bp, Homo sapien
ctcttctttccacgatgatagctttatagacaa

SEQ ID NO: 237031 - DNA, 33 bp, Homo sapien
tatactcaattatctcacataaagttttgtcaa

SEQ ID NO: 237032 - DNA, 33 bp, Homo sapien
tatactcaattatctcgcataaagttttgtcaa

SEQ ID NO: 237033 - DNA, 33 bp, Homo sapien
attttaaaacatttaacgcaactaccttagagg

SEQ ID NO: 237034 - DNA, 33 bp, Homo sapien
attttaaaacatttaatgcaactaccttagagg

SEQ ID NO: 237035 - DNA, 33 bp, Homo sapien
tctttctttaaacccactgagagagaaggatct

SEQ ID NO: 237036 - DNA, 33 bp, Homo sapien
tctttctttaaacccagtgagagagaaggatct

SEQ ID NO: 237037 - DNA, 33 bp, Homo sapien
catttcataagcaatagcttttttccactaaga

SEQ ID NO: 237038 - DNA, 33 bp, Homo sapien
catttcataagcaatatcttttttccactaaga

SEQ ID NO: 237039 - DNA, 33 bp, Homo sapien
catgctatatggcacaacaaaacttaaatgaaa

SEQ ID NO: 237040 - DNA, 33 bp, Homo sapien
catgctatatggcacaccaaaacttaaatgaaa

SEQ ID NO: 237041 - DNA, 33 bp, Homo sapien
cctaataaaacatataaacacaagtcaaaccac

SEQ ID NO: 237042 - DNA, 33 bp, Homo sapien
cctaataaaacatatacacacaagtcaaaccac

SEQ ID NO: 237043 - DNA, 33 bp, Homo sapien
ttcgatgcactgttggacaagttacctactgaa

SEQ ID NO: 237044 - DNA, 33 bp, Homo sapien
ttcgatgcactgttgggcaagttacctactgaa

SEQ ID NO: 237045 - DNA, 33 bp, Homo sapien
tatataaagcctagcaccatatttatgtaaaat

SEQ ID NO: 237046 - DNA, 33 bp, Homo sapien
tatataaagcctagcatcatatttatgtaaaat

SEQ ID NO: 237047 - DNA, 33 bp, Homo sapien
cagctaagcgaaaagaagcattctgtgtgttag

SEQ ID NO: 237048 - DNA, 33 bp, Homo sapien
cagctaagcgaaaagatgcattctgtgtgttag

SEQ ID NO: 237049 - DNA, 33 bp, Homo sapien
tgtttgcaatgcagtacgacttcatagctgttg

SEQ ID NO: 237050 - DNA, 33 bp, Homo sapien
tgtttgcaatgcagtatgacttcatagctgttg

SEQ ID NO: 237051 - DNA, 33 bp, Homo sapien
gaagatacgtttgtgaaattcttaatgaaaaat

SEQ ID NO: 237052 - DNA, 33 bp, Homo sapien
gaagatacgtttgtgagattcttaatgaaaaat

SEQ ID NO: 237053 - DNA, 33 bp, Homo sapien
tatgatcaccatgtacaatatgattcagatttt

SEQ ID NO: 237054 - DNA, 33 bp, Homo sapien
tatgatcaccatgtacgatatgattcagatttt

SEQ ID NO: 237055 - DNA, 33 bp, Homo sapien
aaggtgccatctgggaacaaggggactggccct

SEQ ID NO: 237056 - DNA, 33 bp, Homo sapien
aaggtgccatctgggatcaaggggactggccct

SEQ ID NO: 237057 - DNA, 33 bp, Homo sapien
gtttgtctgtgccaacaagacaggtaaaaattg

SEQ ID NO: 237058 - DNA, 33 bp, Homo sapien
gtttgtctgtgccaaccagacaggtaaaaattg

SEQ ID NO: 237059 - DNA, 33 bp, Homo sapien
atcacgaatgtagaaaagttgtctcctactctc

SEQ ID NO: 237060 - DNA, 33 bp, Homo sapien
atcacgaatgtagaaacgttgtctcctactctc

SEQ ID NO: 237061 - DNA, 33 bp, Homo sapien
acctgagcctctagccaaagttattggagatcc

SEQ ID NO: 237062 - DNA, 33 bp, Homo sapien
acctgagcctctagccgaagttattggagatcc

SEQ ID NO: 237063 - DNA, 33 bp, Homo sapien; identical to SEQ ID NO: 237061

SEQ ID NO: 237064 - DNA, 33 bp, Homo sapien; identical to SEQ ID NO: 237062

SEQ ID NO: 237065 - DNA, 33 bp, Homo sapien
gggaaaagcacagaccagagctatagcaatggg

SEQ ID NO: 237066 - DNA, 33 bp, Homo sapien
gggaaaagcacagaccggagctatagcaatggg

SEQ ID NO: 237067 - DNA, 33 bp, Homo sapien; identical to SEQ ID NO: 237065

SEQ ID NO: 237068 - DNA, 33 bp, Homo sapien; identical to SEQ ID NO: 237066

SEQ ID NO: 237069 - DNA, 33 bp, Homo sapien
gtgccacccagcggggcaaactgtgctttttct

SEQ ID NO: 237070 - DNA, 33 bp, Homo sapien
gtgccacccagcgggggaaactgtgctttttct

SEQ ID NO: 237071 - DNA, 33 bp, Homo sapien
caagcacacctaatgcacaagtcttgatttcta

SEQ ID NO: 237072 - DNA, 33 bp, Homo sapien
caagcacacctaatgcgcaagtcttgatttcta

SEQ ID NO: 237073 - DNA, 33 bp, Homo sapien
atccagcttaggcagccaagagccctataaaaa

SEQ ID NO: 237074 - DNA, 33 bp, Homo sapien
atccagcttaggcagcgaagagccctataaaaa

SEQ ID NO: 237075 - DNA, 33 bp, Homo sapien
agcaaggtggaagaaacgtcgtctttgttgttt

SEQ ID NO: 237076 - DNA, 33 bp, Homo sapien
agcaaggtggaagaaaggtcgtctttgttgttt

SEQ ID NO: 237077 - DNA, 33 bp, Homo sapien
aactccctctcaaaacaaggcctttacacttac

SEQ ID NO: 237078 - DNA, 33 bp, Homo sapien
aactccctctcaaaacgaggcctttacacttac

SEQ ID NO: 237079 - DNA, 33 bp, Homo sapien
agtctcatagagccaaactgtgattttaaatat

SEQ ID NO: 237080 - DNA, 33 bp, Homo sapien
agtctcatagagccaacctgtgattttaaatat

SEQ ID NO: 237081 - DNA, 33 bp, Homo sapien
gagttacgtatattaaatgattttgtgttttga

SEQ ID NO: 237082 - DNA, 33 bp, Homo sapien
gagttacgtatattaagtgattttgtgttttga

SEQ ID NO: 237083 - DNA, 33 bp, Homo sapien
ttttgactctattgaccactccttctttcttaa

SEQ ID NO: 237084 - DNA, 33 bp, Homo sapien
ttttgactctattgactactccttctttcttaa

SEQ ID NO: 237085 - DNA, 33 bp, Homo sapien
attaaagtggtaaacactgggattaggacttaa

SEQ ID NO: 237086 - DNA, 33 bp, Homo sapien
attaaagtggtaaacattgggattaggacttaa

SEQ ID NO: 237087 - DNA, 33 bp, Homo sapien
gtagagcctcaggcacaataccacacactaact

SEQ ID NO: 237088 - DNA, 33 bp, Homo sapien
gtagagcctcaggcacgataccacacactaact

SEQ ID NO: 237089 - DNA, 33 bp, Homo sapien
acctatcagggcaaaacgttgtcatgtataagg

SEQ ID NO: 237090 - DNA, 33 bp, Homo sapien
acctatcagggcaaaaggttgtcatgtataagg

SEQ ID NO: 237091 - DNA, 33 bp, Homo sapien
atcatccccattgtgcaatttaataagccaatt

SEQ ID NO: 237092 - DNA, 33 bp, Homo sapien
atcatccccattgtgccatttaataagccaatt

SEQ ID NO: 237093 - DNA, 33 bp, Homo sapien
ttatggttaagggaaccgagcaataatgtttac

SEQ ID NO: 237094 - DNA, 33 bp, Homo sapien
ttatggttaagggaactgagcaataatgtttac

SEQ ID NO: 237095 - DNA, 33 bp, Homo sapien
gaagcaattaaggaaacgattaatcttgtaccc

SEQ ID NO: 237096 - DNA, 33 bp, Homo sapien
gaagcaattaaggaaatgattaatcttgtaccc

SEQ ID NO: 237097 - DNA, 33 bp, Homo sapien
ttcacaggaaggtatcaaggttcccatactggc

SEQ ID NO: 237098 - DNA, 33 bp, Homo sapien
ttcacaggaaggtatcgaggttcccatactggc

SEQ ID NO: 237099 - DNA, 33 bp, Homo sapien
ggatgctccatattccactgcccatatctttcc

SEQ ID NO: 237100 - DNA, 33 bp, Homo sapien
ggatgctccatattccgctgcccatatctttcc

SEQ ID NO: 237101 - DNA, 33 bp, Homo sapien
gcacatatagactatgaatagggcattactttt

SEQ ID NO: 237102 - DNA, 33 bp, Homo sapien
gcacatatagactatgtatagggcattactttt

SEQ ID NO: 237103 - DNA, 33 bp, Homo sapien
atggaactgaaagacaagagggcaggagaaggc

SEQ ID NO: 237104 - DNA, 33 bp, Homo sapien
atggaactgaaagacaggagggcaggagaaggc

SEQ ID NO: 237105 - DNA, 33 bp, Homo sapien
gcaaaacaggttatcaaagagagacaagaggag

SEQ ID NO: 237106 - DNA, 33 bp, Homo sapien
gcaaaacaggttatcagagagagacaagaggag

SEQ ID NO: 237107 - DNA, 33 bp, Homo sapien
acaaaacacagctttacagggctatttctgttt

SEQ ID NO: 237108 - DNA, 33 bp, Homo sapien
acaaaacacagctttagagggctatttctgttt

SEQ ID NO: 237109 - DNA, 33 bp, Homo sapien
caggaaaaggaaggtaacatacagaacatcaaa

SEQ ID NO: 237110 - DNA, 33 bp, Homo sapien
caggaaaaggaaggtagcatacagaacatcaaa

SEQ ID NO: 237111 - DNA, 33 bp, Homo sapien
cagcattaattcaaaaatccatagtccaaagtc

SEQ ID NO: 237112 - DNA, 33 bp, Homo sapien
cagcattaattcaaaagtccatagtccaaagtc

SEQ ID NO: 237113 - DNA, 33 bp, Homo sapien
attcaatgtcttaaacaacagaagcgtattcat

SEQ ID NO: 237114 - DNA, 33 bp, Homo sapien
attcaatgtcttaaaccacagaagcgtattcat

SEQ ID NO: 237115 - DNA, 33 bp, Homo sapien
ttttaaataattggaaacattaggtagcttgcc

SEQ ID NO: 237116 - DNA, 33 bp, Homo sapien
ttttaaataattggaagcattaggtagcttgcc

SEQ ID NO: 237117 - DNA, 33 bp, Homo sapien
ttcctttgggtaaggccaataagcaagcacaga

SEQ ID NO: 237118 - DNA, 33 bp, Homo sapien
ttcctttgggtaaggctaataagcaagcacaga

SEQ ID NO: 237119 - DNA, 33 bp, Homo sapien
ttgatgccaattagtcaataagaagaaaactaa

SEQ ID NO: 237120 - DNA, 33 bp, Homo sapien
ttgatgccaattagtcgataagaagaaaactaa

SEQ ID NO: 237121 - DNA, 33 bp, Homo sapien
taaatgtaagcattgaataggtgtatgtgtgta

SEQ ID NO: 237122 - DNA, 33 bp, Homo sapien
taaatgtaagcattgagtaggtgtatgtgtgta

SEQ ID NO: 237123 - DNA, 33 bp, Homo sapien
aacattcaactgcctgcacaagaaaaggaacca

SEQ ID NO: 237124 - DNA, 33 bp, Homo sapien
aacattcaactgcctggacaagaaaaggaacca

SEQ ID NO: 237125 - DNA, 33 bp, Homo sapien
tatgaaaaagcttttacagtctgagttgtccga

SEQ ID NO: 237126 - DNA, 33 bp, Homo sapien
tatgaaaaagcttttatagtctgagttgtccga

SEQ ID NO: 237127 - DNA, 33 bp, Homo sapien
tgacagtgtgaatataaacttgctatcttatct

SEQ ID NO: 237128 - DNA, 33 bp, Homo sapien
tgacagtgtgaatatagacttgctatcttatct

SEQ ID NO: 237129 - DNA, 33 bp, Homo sapien
aagaatctattgaacaatgtagagaccttatgg

SEQ ID NO: 237130 - DNA, 33 bp, Homo sapien
aagaatctattgaacagtgtagagaccttatgg

SEQ ID NO: 237131 - DNA, 33 bp, Homo sapien
gtttcaagtttggctacatttttaagagttttg

SEQ ID NO: 237132 - DNA, 33 bp, Homo sapien
gtttcaagtttggctatatttttaagagttttg

SEQ ID NO: 237133 - DNA, 33 bp, Homo sapien
tttataatctttatcacatttttctggtgtatg

SEQ ID NO: 237134 - DNA, 33 bp, Homo sapien
tttataatctttatcatatttttctggtgtatg

SEQ ID NO: 237135 - DNA, 33 bp, Homo sapien
tatttttaaagcaagcaaagttctaaaacaaca

SEQ ID NO: 237136 - DNA, 33 bp, Homo sapien
tatttttaaagcaagcgaagttctaaaacaaca

SEQ ID NO: 237137 - DNA, 33 bp, Homo sapien
taattggaaagctctcaaacacacattaaaaag

SEQ ID NO: 237138 - DNA, 33 bp, Homo sapien
taattggaaagctctcgaacacacattaaaaag

SEQ ID NO: 237139 - DNA, 33 bp, Homo sapien
ggccattttatacttacactgccacaatgcctg

SEQ ID NO: 237140 - DNA, 33 bp, Homo sapien
ggccattttatacttatactgccacaatgcctg

SEQ ID NO: 237141 - DNA, 33 bp, Homo sapien
gggggtttgtcacaaggattatttcatcaccag

SEQ ID NO: 237142 - DNA, 33 bp, Homo sapien
gggggtttgtcacaagtattatttcatcaccag

SEQ ID NO: 237143 - DNA, 33 bp, Homo sapien
acagatatagctgtccaatttgaggtggtgcct

SEQ ID NO: 237144 - DNA, 33 bp, Homo sapien
acagatatagctgtccgatttgaggtggtgcct

SEQ ID NO: 237145 - DNA, 33 bp, Homo sapien
tgttttcatgaatcaaattacacctttgttcac

SEQ ID NO: 237146 - DNA, 33 bp, Homo sapien
tgttttcatgaatcaagttacacctttgttcac

SEQ ID NO: 237147 - DNA, 33 bp, Homo sapien
tgtcaattatcaaaagacactgtggatcttaat

SEQ ID NO: 237148 - DNA, 33 bp, Homo sapien
tgtcaattatcaaaaggcactgtggatcttaat

SEQ ID NO: 237149 - DNA, 33 bp, Homo sapien
tccttcttcctgtgcaatattcctgggagtttg

SEQ ID NO: 237150 - DNA, 33 bp, Homo sapien
tccttcttcctgtgcagtattcctgggagtttg

SEQ ID NO: 237151 - DNA, 33 bp, Homo sapien
tcaacagggaatatacacaaatatgtccagaac

SEQ ID NO: 237152 - DNA, 33 bp, Homo sapien
tcaacagggaatatacgcaaatatgtccagaac

SEQ ID NO: 237153 - DNA, 33 bp, Homo sapien
gattccattatcataaatgcagaggctgagagg

SEQ ID NO: 237154 - DNA, 33 bp, Homo sapien
gattccattatcataagtgcagaggctgagagg

SEQ ID NO: 237155 - DNA, 33 bp, Homo sapien
ctttgggatttcaggaaattaaccgatttataa

SEQ ID NO: 237156 - DNA, 33 bp, Homo sapien
ctttgggatttcaggatattaaccgatttataa

SEQ ID NO: 237157 - DNA, 33 bp, Homo sapien
ggcacatataccagaaaggcaggaaattttagg

SEQ ID NO: 237158 - DNA, 33 bp, Homo sapien
ggcacatataccagaagggcaggaaattttagg

SEQ ID NO: 237159 - DNA, 33 bp, Homo sapien
gtatggctgggcattcacccaaagagttaattg

SEQ ID NO: 237160 - DNA, 33 bp, Homo sapien
gtatggctgggcattcccccaaagagttaattg

SEQ ID NO: 237161 - DNA, 33 bp, Homo sapien
tttcgcttaatatgaacgatttcctgatgataa

SEQ ID NO: 237162 - DNA, 33 bp, Homo sapien
tttcgcttaatatgaatgatttcctgatgataa

SEQ ID NO: 237163 - DNA, 33 bp, Homo sapien
agatattagctgagtacagttttagtagtttca

SEQ ID NO: 237164 - DNA, 33 bp, Homo sapien
agatattagctgagtagagttttagtagtttca

SEQ ID NO: 237165 - DNA, 33 bp, Homo sapien
atgacagagaagtgtacgtaaaggcttccttaa

SEQ ID NO: 237166 - DNA, 33 bp, Homo sapien
atgacagagaagtgtatgtaaaggcttccttaa

SEQ ID NO: 237167 - DNA, 33 bp, Homo sapien
gcatataacaccatgaagaattccaggaactaa

SEQ ID NO: 237168 - DNA, 33 bp, Homo sapien
gcatataacaccatgaggaattccaggaactaa

SEQ ID NO: 237169 - DNA, 33 bp, Homo sapien
ggaagaagattccaaccatgagagatttaggag

SEQ ID NO: 237170 - DNA, 33 bp, Homo sapien
ggaagaagattccaactatgagagatttaggag

SEQ ID NO: 237171 - DNA, 33 bp, Homo sapien
gagattattagacagaatataaactgagaaagg

SEQ ID NO: 237172 - DNA, 33 bp, Homo sapien
gagattattagacagagtataaactgagaaagg

SEQ ID NO: 237173 - DNA, 33 bp, Homo sapien
catacagcattgtgcaacaagttctgggtgacc

SEQ ID NO: 237174 - DNA, 33 bp, Homo sapien
catacagcattgtgcaccaagttctgggtgacc

SEQ ID NO: 237175 - DNA, 33 bp, Homo sapien
taaagtaagactacaaacagaggcttttaatta

SEQ ID NO: 237176 - DNA, 33 bp, Homo sapien
taaagtaagactacaaccagaggcttttaatta

SEQ ID NO: 237177 - DNA, 33 bp, Homo sapien
atgatgtatctgtcaaaagaaatggaaacaact

SEQ ID NO: 237178 - DNA, 33 bp, Homo sapien
atgatgtatctgtcaagagaaatggaaacaact

SEQ ID NO: 237179 - DNA, 33 bp, Homo sapien
tgaggcatttttcaacaataccttgcattattt

SEQ ID NO: 237180 - DNA, 33 bp, Homo sapien
tgaggcatttttcaaccataccttgcattattt

SEQ ID NO: 237181 - DNA, 33 bp, Homo sapien
ggttccaggaattggacgcaaacagctttggag

SEQ ID NO: 237182 - DNA, 33 bp, Homo sapien
ggttccaggaattggatgcaaacagctttggag

SEQ ID NO: 237183 - DNA, 33 bp, Homo sapien
agttcaaatgggtgtaaacgttctctaggttca

SEQ ID NO: 237184 - DNA, 33 bp, Homo sapien
agttcaaatgggtgtacacgttctctaggttca

SEQ ID NO: 237185 - DNA, 33 bp, Homo sapien
gatctttttgtaatagaagcttagattataccc

SEQ ID NO: 237186 - DNA, 33 bp, Homo sapien
gatctttttgtaatagtagcttagattataccc

SEQ ID NO: 237187 - DNA, 33 bp, Homo sapien
acttgccatttttgtacccttttgttgaacaac

SEQ ID NO: 237188 - DNA, 33 bp, Homo sapien
acttgccatttttgtatccttttgttgaacaac

SEQ ID NO: 237189 - DNA, 33 bp, Homo sapien
tgtctctgactaaatacgagtaatgtgcacact

SEQ ID NO: 237190 - DNA, 33 bp, Homo sapien
tgtctctgactaaatatgagtaatgtgcacact

SEQ ID NO: 237191 - DNA, 33 bp, Homo sapien
taacaggagtttatcacggttgttcttatgttc

SEQ ID NO: 237192 - DNA, 33 bp, Homo sapien
taacaggagtttatcatggttgttcttatgttc

SEQ ID NO: 237193 - DNA, 33 bp, Homo sapien
gctgggctctgagtgaaggaagggccaatataa

SEQ ID NO: 237194 - DNA, 33 bp, Homo sapien
gctgggctctgagtgagggaagggccaatataa

SEQ ID NO: 237195 - DNA, 33 bp, Homo sapien
acataaaaaatgtaagaccttcaaaagttgaca

SEQ ID NO: 237196 - DNA, 33 bp, Homo sapien
acataaaaaatgtaaggccttcaaaagttgaca

SEQ ID NO: 237197 - DNA, 33 bp, Homo sapien
aaggagactattactagtaagcaggttattatt

SEQ ID NO: 237198 - DNA, 33 bp, Homo sapien
aaggagactattactattaagcaggttattatt

SEQ ID NO: 237199 - DNA, 33 bp, Homo sapien
ggctgagccctctctccgaagctgcctggctaa

SEQ ID NO: 237200 - DNA, 33 bp, Homo sapien
ggctgagccctctctctgaagctgcctggctaa

SEQ ID NO: 237201 - DNA, 33 bp, Homo sapien
acacagataatgccggaatgtatttcattgttg

SEQ ID NO: 237202 - DNA, 33 bp, Homo sapien
acacagataatgccgggatgtatttcattgttg

SEQ ID NO: 237203 - DNA, 33 bp, Homo sapien
tattttagtccagttacggtaatataaaatcaa

SEQ ID NO: 237204 - DNA, 33 bp, Homo sapien
tattttagtccagttatggtaatataaaatcaa

SEQ ID NO: 237205 - DNA, 33 bp, Homo sapien
gtagtatctttataaccaagacagtaagattta

SEQ ID NO: 237206 - DNA, 33 bp, Homo sapien
gtagtatctttataacgaagacagtaagattta

SEQ ID NO: 237207 - DNA, 33 bp, Homo sapien
actaagaatgattccaatattaaatgaatttct

SEQ ID NO: 237208 - DNA, 33 bp, Homo sapien
actaagaatgattccagtattaaatgaatttct

SEQ ID NO: 237209 - DNA, 33 bp, Homo sapien
taattactgatttgtgcagtaggaagggctcaa

SEQ ID NO: 237210 - DNA, 33 bp, Homo sapien
taattactgatttgtgtagtaggaagggctcaa

SEQ ID NO: 237211 - DNA, 33 bp, Homo sapien
aaaagaataaactatccatccatacaagcaaga

SEQ ID NO: 237212 - DNA, 33 bp, Homo sapien
aaaagaataaactatcgatccatacaagcaaga

SEQ ID NO: 237213 - DNA, 33 bp, Homo sapien
gtcttacaaatacataagtacctcaaatgcccc

SEQ ID NO: 237214 - DNA, 33 bp, Homo sapien
gtcttacaaatacataggtacctcaaatgcccc

SEQ ID NO: 237215 - DNA, 33 bp, Homo sapien
ctgggttctcagacacaaagtgaagataaatct

SEQ ID NO: 237216 - DNA, 33 bp, Homo sapien
ctgggttctcagacacgaagtgaagataaatct

SEQ ID NO: 237217 - DNA, 33 bp, Homo sapien
cagagggtctaatcacactgacgaagcttcctc

SEQ ID NO: 237218 - DNA, 33 bp, Homo sapien
cagagggtctaatcacgctgacgaagcttcctc

SEQ ID NO: 237219 - DNA, 33 bp, Homo sapien
ttttctgactctaatcaccaattcaataagcac

SEQ ID NO: 237220 - DNA, 33 bp, Homo sapien
ttttctgactctaatcgccaattcaataagcac

SEQ ID NO: 237221 - DNA, 33 bp, Homo sapien
caattccacccaaagcacatggcttgatagtca

SEQ ID NO: 237222 - DNA, 33 bp, Homo sapien
caattccacccaaagcgcatggcttgatagtca

SEQ ID NO: 237223 - DNA, 33 bp, Homo sapien
tacttttgctgtcttacatcaggattgcatcaa

SEQ ID NO: 237224 - DNA, 33 bp, Homo sapien
tacttttgctgtcttatatcaggattgcatcaa

SEQ ID NO: 237225 - DNA, 33 bp, Homo sapien
ctggctaaagaggagactagaattttattatta

SEQ ID NO: 237226 - DNA, 33 bp, Homo sapien
ctggctaaagaggagagtagaattttattatta

SEQ ID NO: 237227 - DNA, 33 bp, Homo sapien
tagccatgatgaatgacagctaaacagaatact

SEQ ID NO: 237228 - DNA, 33 bp, Homo sapien
tagccatgatgaatgagagctaaacagaatact

SEQ ID NO: 237229 - DNA, 33 bp, Homo sapien
tcagagcagcctcatagctatggaattttcctg

SEQ ID NO: 237230 - DNA, 33 bp, Homo sapien
tcagagcagcctcatatctatggaattttcctg

SEQ ID NO: 237231 - DNA, 33 bp, Homo sapien
gcatggcacttaacacaaatgtatgtacttgtt

SEQ ID NO: 237232 - DNA, 33 bp, Homo sapien
gcatggcacttaacacgaatgtatgtacttgtt

SEQ ID NO: 237233 - DNA, 33 bp, Homo sapien
tattaggaacaccgacagcatttgagtgaaaat

SEQ ID NO: 237234 - DNA, 33 bp, Homo sapien
tattaggaacaccgacggcatttgagtgaaaat

SEQ ID NO: 237235 - DNA, 33 bp, Homo sapien
taacattttaccttgccatatctgtagatactt

SEQ ID NO: 237236 - DNA, 33 bp, Homo sapien
taacattttaccttgctatatctgtagatactt

SEQ ID NO: 237237 - DNA, 33 bp, Homo sapien
cagacaaggaaatcaaaatgttgaacagttaag

SEQ ID NO: 237238 - DNA, 33 bp, Homo sapien
cagacaaggaaatcaagatgttgaacagttaag

SEQ ID NO: 237239 - DNA, 33 bp, Homo sapien
ttatttcttctatagactaaacacttctgggga

SEQ ID NO: 237240 - DNA, 33 bp, Homo sapien
ttatttcttctatagattaaacacttctgggga

SEQ ID NO: 237241 - DNA, 33 bp, Homo sapien
acaggctttggatctccctgaataacacacttg

SEQ ID NO: 237242 - DNA, 33 bp, Homo sapien
acaggctttggatctctctgaataacacacttg

SEQ ID NO: 237243 - DNA, 33 bp, Homo sapien
agttccttcccataacagcaactgaatccagtt

SEQ ID NO: 237244 - DNA, 33 bp, Homo sapien
agttccttcccataacggcaactgaatccagtt

SEQ ID NO: 237245 - DNA, 33 bp, Homo sapien
gtttataaaagacagactcaagtattagaagaa

SEQ ID NO: 237246 - DNA, 33 bp, Homo sapien
gtttataaaagacagagtcaagtattagaagaa

SEQ ID NO: 237247 - DNA, 33 bp, Homo sapien
ttgcctgtgagttagccccgccctgcaaagaac

SEQ ID NO: 237248 - DNA, 33 bp, Homo sapien
ttgcctgtgagttagctccgccctgcaaagaac

SEQ ID NO: 237249 - DNA, 33 bp, Homo sapien
tgtgaaaggcacaaataaaataaccacaaaata

SEQ ID NO: 237250 - DNA, 33 bp, Homo sapien
tgtgaaaggcacaaattaaataaccacaaaata

SEQ ID NO: 237251 - DNA, 33 bp, Homo sapien
tgccacccagctctcgaacatttttgtttttga

SEQ ID NO: 237252 - DNA, 33 bp, Homo sapien
tgccacccagctctcggacatttttgtttttga

SEQ ID NO: 237253 - DNA, 33 bp, Homo sapien
gtaggagtcttcagaaatgaaaataaacaaatc

SEQ ID NO: 237254 - DNA, 33 bp, Homo sapien
gtaggagtcttcagaagtgaaaataaacaaatc

SEQ ID NO: 237255 - DNA, 33 bp, Homo sapien
tcacaggaatagaacacgaatctagcaagcatt

SEQ ID NO: 237256 - DNA, 33 bp, Homo sapien
tcacaggaatagaacaggaatctagcaagcatt

SEQ ID NO: 237257 - DNA, 33 bp, Homo sapien
tctcatggaagtagaaagtagaatagtggttac

SEQ ID NO: 237258 - DNA, 33 bp, Homo sapien
tctcatggaagtagaaggtagaatagtggttac

SEQ ID NO: 237259 - DNA, 33 bp, Homo sapien
tgtatcacagactaaaaatggaaaatacaaaag

SEQ ID NO: 237260 - DNA, 33 bp, Homo sapien
tgtatcacagactaaacatggaaaatacaaaag

SEQ ID NO: 237261 - DNA, 33 bp, Homo sapien
aaatgacagaatcagaactgcaaaaagtaatta

SEQ ID NO: 237262 - DNA, 33 bp, Homo sapien
aaatgacagaatcagacctgcaaaaagtaatta

SEQ ID NO: 237263 - DNA, 33 bp, Homo sapien
catatagcactgcaaacgacttcagagtaatta

SEQ ID NO: 237264 - DNA, 33 bp, Homo sapien
catatagcactgcaaatgacttcagagtaatta

SEQ ID NO: 237265 - DNA, 33 bp, Homo sapien
aaaactaatgttcttagcaacatttctctgagg

SEQ ID NO: 237266 - DNA, 33 bp, Homo sapien
aaaactaatgttcttatcaacatttctctgagg

SEQ ID NO: 237267 - DNA, 33 bp, Homo sapien
cagcaatcatgtaatacgttaagatgcattttt

SEQ ID NO: 237268 - DNA, 33 bp, Homo sapien
cagcaatcatgtaatatgttaagatgcattttt

SEQ ID NO: 237269 - DNA, 33 bp, Homo sapien
gttgtttgcaaacgtacgcagagtggtgaaaat

SEQ ID NO: 237270 - DNA, 33 bp, Homo sapien
gttgtttgcaaacgtatgcagagtggtgaaaat

SEQ ID NO: 237271 - DNA, 33 bp, Homo sapien
gttccccgaggagcaacggttcagtgtttgcta

SEQ ID NO: 237272 - DNA, 33 bp, Homo sapien
gttccccgaggagcaatggttcagtgtttgcta

SEQ ID NO: 237273 - DNA, 33 bp, Homo sapien
agaaaagtaagactagaccaagaagaacaaaag

SEQ ID NO: 237274 - DNA, 33 bp, Homo sapien
agaaaagtaagactagcccaagaagaacaaaag

SEQ ID NO: 237275 - DNA, 33 bp, Homo sapien
attaggttagggtaaaaatatgtgaagaaagtt

SEQ ID NO: 237276 - DNA, 33 bp, Homo sapien
attaggttagggtaaagatatgtgaagaaagtt

SEQ ID NO: 237277 - DNA, 33 bp, Homo sapien
caaatccccaatttaaaagatatcctacaaagc

SEQ ID NO: 237278 - DNA, 33 bp, Homo sapien
caaatccccaatttaagagatatcctacaaagc

SEQ ID NO: 237279 - DNA, 33 bp, Homo sapien
tatgtaaccattagaccatcttgttgctttctc

SEQ ID NO: 237280 - DNA, 33 bp, Homo sapien
tatgtaaccattagactatcttgttgctttctc

SEQ ID NO: 237281 - DNA, 33 bp, Homo sapien
atagtccatattcaaccagaacattgaaagatt

SEQ ID NO: 237282 - DNA, 33 bp, Homo sapien
atagtccatattcaacgagaacattgaaagatt

SEQ ID NO: 237283 - DNA, 33 bp, Homo sapien
gaaagtaaaggtagaaacccctgataaactgat

SEQ ID NO: 237284 - DNA, 33 bp, Homo sapien
gaaagtaaaggtagaatcccctgataaactgat

SEQ ID NO: 237285 - DNA, 33 bp, Homo sapien
ataaggtatgtgtaagcaacgtagatcatttct

SEQ ID NO: 237286 - DNA, 33 bp, Homo sapien
ataaggtatgtgtaagtaacgtagatcatttct

SEQ ID NO: 237287 - DNA, 33 bp, Homo sapien
cctcttggaaaaactgaaagtagatccttgatg

SEQ ID NO: 237288 - DNA, 33 bp, Homo sapien
cctcttggaaaaactggaagtagatccttgatg

SEQ ID NO: 237289 - DNA, 33 bp, Homo sapien
tgaaggagggctttccaaaggagtaaagaatta

SEQ ID NO: 237290 - DNA, 33 bp, Homo sapien
tgaaggagggctttccgaaggagtaaagaatta

SEQ ID NO: 237291 - DNA, 33 bp, Homo sapien
tttataagtgaaggcactagacaggataacttt

SEQ ID NO: 237292 - DNA, 33 bp, Homo sapien
tttataagtgaaggcattagacaggataacttt

SEQ ID NO: 237293 - DNA, 33 bp, Homo sapien
aatgataaacacctatgaatatcactgattggt

SEQ ID NO: 237294 - DNA, 33 bp, Homo sapien
aatgataaacacctattaatatcactgattggt

SEQ ID NO: 237295 - DNA, 33 bp, Homo sapien
acaaattctaatgtaacgctctcttgtaaacag

SEQ ID NO: 237296 - DNA, 33 bp, Homo sapien
acaaattctaatgtaatgctctcttgtaaacag

SEQ ID NO: 237297 - DNA, 33 bp, Homo sapien
aatgtggattagaagcccatgagagtgttcgtt

SEQ ID NO: 237298 - DNA, 33 bp, Homo sapien
aatgtggattagaagctcatgagagtgttcgtt

SEQ ID NO: 237299 - DNA, 33 bp, Homo sapien
aatttttctgtactccaagaaatgtaaatacta

SEQ ID NO: 237300 - DNA, 33 bp, Homo sapien
aatttttctgtactcccagaaatgtaaatacta

SEQ ID NO: 237301 - DNA, 33 bp, Homo sapien
tcttgattctacctcaatctacatctatttctt

SEQ ID NO: 237302 - DNA, 33 bp, Homo sapien
tcttgattctacctcagtctacatctatttctt

SEQ ID NO: 237303 - DNA, 33 bp, Homo sapien
tgatgaggaagatgaaaaaatcaggagcttgtt

SEQ ID NO: 237304 - DNA, 33 bp, Homo sapien
tgatgaggaagatgaacaaatcaggagcttgtt

SEQ ID NO: 237305 - DNA, 33 bp, Homo sapien
gacaatcagaaggatcaaatgttgtttttaaag

SEQ ID NO: 237306 - DNA, 33 bp, Homo sapien
gacaatcagaaggatcgaatgttgtttttaaag

SEQ ID NO: 237307 - DNA, 33 bp, Homo sapien
aaaaacccctcaaatacggaagacaggaccagc

SEQ ID NO: 237308 - DNA, 33 bp, Homo sapien
aaaaacccctcaaatatggaagacaggaccagc

SEQ ID NO: 237309 - DNA, 33 bp, Homo sapien
tgcggagttactggaaagttggtggcttgtttc

SEQ ID NO: 237310 - DNA, 33 bp, Homo sapien
tgcggagttactggaaggttggtggcttgtttc

SEQ ID NO: 237311 - DNA, 33 bp, Homo sapien
gttttcataatagaagcctgttttctctaacac

SEQ ID NO: 237312 - DNA, 33 bp, Homo sapien
gttttcataatagaagtctgttttctctaacac

SEQ ID NO: 237313 - DNA, 33 bp, Homo sapien
tagatatggtaatctacgtgttgcaagagaaaa

SEQ ID NO: 237314 - DNA, 33 bp, Homo sapien
tagatatggtaatctatgtgttgcaagagaaaa

SEQ ID NO: 237315 - DNA, 33 bp, Homo sapien
agtttcaacaatgtgactagcttatgcttctta

SEQ ID NO: 237316 - DNA, 33 bp, Homo sapien
agtttcaacaatgtgattagcttatgcttctta

SEQ ID NO: 237317 - DNA, 33 bp, Homo sapien
tttgactaaagagtaacgaactgtgaaagttca

SEQ ID NO: 237318 - DNA, 33 bp, Homo sapien
tttgactaaagagtaatgaactgtgaaagttca

SEQ ID NO: 237319 - DNA, 33 bp, Homo sapien
aggccctacataagataagcagtttgttatact

SEQ ID NO: 237320 - DNA, 33 bp, Homo sapien
aggccctacataagattagcagtttgttatact

SEQ ID NO: 237321 - DNA, 33 bp, Homo sapien
tctcatttcctacataaggcaaaccactcagtc

SEQ ID NO: 237322 - DNA, 33 bp, Homo sapien
tctcatttcctacatacggcaaaccactcagtc

SEQ ID NO: 237323 - DNA, 33 bp, Homo sapien
accatactatggtgtcactaggacccaacctgg

SEQ ID NO: 237324 - DNA, 33 bp, Homo sapien
accatactatggtgtcgctaggacccaacctgg

SEQ ID NO: 237325 - DNA, 33 bp, Homo sapien
aggtcacactgattcaagagatgggttctcatg

SEQ ID NO: 237326 - DNA, 33 bp, Homo sapien
aggtcacactgattcaggagatgggttctcatg

SEQ ID NO: 237327 - DNA, 33 bp, Homo sapien
ctctcaaagattgcaacacccattttatctctt

SEQ ID NO: 237328 - DNA, 33 bp, Homo sapien
ctctcaaagattgcaatacccattttatctctt

SEQ ID NO: 237329 - DNA, 33 bp, Homo sapien
ggctcaaaactgactgaatatccctcctccagt

SEQ ID NO: 237330 - DNA, 33 bp, Homo sapien
ggctcaaaactgactgcatatccctcctccagt

SEQ ID NO: 237331 - DNA, 33 bp, Homo sapien
ttctataccgatgaacaacgtggagctgcacta

SEQ ID NO: 237332 - DNA, 33 bp, Homo sapien
ttctataccgatgaacgacgtggagctgcacta

SEQ ID NO: 237333 - DNA, 33 bp, Homo sapien
ttcttcctcactctcaaataatccctatcctcc

SEQ ID NO: 237334 - DNA, 33 bp, Homo sapien
ttcttcctcactctcagataatccctatcctcc

SEQ ID NO: 237335 - DNA, 33 bp, Homo sapien
tgtagttttgtataaaagcatgaaaataccatg

SEQ ID NO: 237336 - DNA, 33 bp, Homo sapien
tgtagttttgtataaacgcatgaaaataccatg

SEQ ID NO: 237337 - DNA, 33 bp, Homo sapien
atttgggttgagacacagagccaaatgatatca

SEQ ID NO: 237338 - DNA, 33 bp, Homo sapien
atttgggttgagacacggagccaaatgatatca

SEQ ID NO: 237339 - DNA, 33 bp, Homo sapien
acacaaacaaccaaagaaatgtccaatcatttg

SEQ ID NO: 237340 - DNA, 33 bp, Homo sapien
acacaaacaaccaaagtaatgtccaatcatttg

SEQ ID NO: 237341 - DNA, 33 bp, Homo sapien
caaaatattatctttcaccatgcccagaggaag

SEQ ID NO: 237342 - DNA, 33 bp, Homo sapien
caaaatattatctttcgccatgcccagaggaag

SEQ ID NO: 237343 - DNA, 33 bp, Homo sapien
gcatcattttaatggcgcatcatactccattta

SEQ ID NO: 237344 - DNA, 33 bp, Homo sapien
gcatcattttaatggctcatcatactccattta

SEQ ID NO: 237345 - DNA, 33 bp, Homo sapien
ggcagaacagtatttaaatcttgaaaatctgat

SEQ ID NO: 237346 - DNA, 33 bp, Homo sapien
ggcagaacagtatttagatcttgaaaatctgat

SEQ ID NO: 237347 - DNA, 33 bp, Homo sapien
cctccaccatatcttgcaacagattccatgctc

SEQ ID NO: 237348 - DNA, 33 bp, Homo sapien
cctccaccatatcttggaacagattccatgctc

SEQ ID NO: 237349 - DNA, 33 bp, Homo sapien
tagtctctccaatccaatccaaacctatttact

SEQ ID NO: 237350 - DNA, 33 bp, Homo sapien
tagtctctccaatccagtccaaacctatttact

SEQ ID NO: 237351 - DNA, 33 bp, Homo sapien
tggcaagtcctgcttcaattaaaattattaagt

SEQ ID NO: 237352 - DNA, 33 bp, Homo sapien
tggcaagtcctgcttccattaaaattattaagt

SEQ ID NO: 237353 - DNA, 33 bp, Homo sapien
tgtaggtagtcagtagaatggatagagaaatct

SEQ ID NO: 237354 - DNA, 33 bp, Homo sapien
tgtaggtagtcagtaggatggatagagaaatct

SEQ ID NO: 237355 - DNA, 33 bp, Homo sapien
gcttagaagtcagcacactacagaccttcggca

SEQ ID NO: 237356 - DNA, 33 bp, Homo sapien
gcttagaagtcagcacgctacagaccttcggca

SEQ ID NO: 237357 - DNA, 33 bp, Homo sapien
tacgtaaaagaaatgaactagagcagcagtcct

SEQ ID NO: 237358 - DNA, 33 bp, Homo sapien
tacgtaaaagaaatgatctagagcagcagtcct

SEQ ID NO: 237359 - DNA, 33 bp, Homo sapien
gaaaagaaagataaccaagcacaatgggataat

SEQ ID NO: 237360 - DNA, 33 bp, Homo sapien
gaaaagaaagataaccgagcacaatgggataat

SEQ ID NO: 237361 - DNA, 33 bp, Homo sapien
ctgacaaccatgaatacgaatatctgtgccact

SEQ ID NO: 237362 - DNA, 33 bp, Homo sapien
ctgacaaccatgaatatgaatatctgtgccact

SEQ ID NO: 237363 - DNA, 33 bp, Homo sapien
taggaagctgatggtacattgagagaatacttc

SEQ ID NO: 237364 - DNA, 33 bp, Homo sapien
taggaagctgatggtatattgagagaatacttc

SEQ ID NO: 237365 - DNA, 33 bp, Homo sapien
accatacaacatgacaagaaatggtaaggacat

SEQ ID NO: 237366 - DNA, 33 bp, Homo sapien
accatacaacatgacaggaaatggtaaggacat

SEQ ID NO: 237367 - DNA, 33 bp, Homo sapien
aagttttctctcaacaacattctggttagtctc

SEQ ID NO: 237368 - DNA, 33 bp, Homo sapien
aagttttctctcaacagcattctggttagtctc

SEQ ID NO: 237369 - DNA, 33 bp, Homo sapien
actaatctttcttgcaccagatttgacttctca

SEQ ID NO: 237370 - DNA, 33 bp, Homo sapien
actaatctttcttgcatcagatttgacttctca

SEQ ID NO: 237371 - DNA, 33 bp, Homo sapien
ttgacttctcagcatcaattttagtgccagccg

SEQ ID NO: 237372 - DNA, 33 bp, Homo sapien
ttgacttctcagcatcgattttagtgccagccg

SEQ ID NO: 237373 - DNA, 33 bp, Homo sapien
aaattgaaaggccaacaggcaaatagagagagt

SEQ ID NO: 237374 - DNA, 33 bp, Homo sapien
aaattgaaaggccaacgggcaaatagagagagt

SEQ ID NO: 237375 - DNA, 33 bp, Homo sapien
aatgaactgtctctcaagcaatcttcaaggatg

SEQ ID NO: 237376 - DNA, 33 bp, Homo sapien
aatgaactgtctctcaggcaatcttcaaggatg

SEQ ID NO: 237377 - DNA, 33 bp, Homo sapien
gccaaaaatgggaaaaatgagcttcaagaagga

SEQ ID NO: 237378 - DNA, 33 bp, Homo sapien
gccaaaaatgggaaaattgagcttcaagaagga

SEQ ID NO: 237379 - DNA, 33 bp, Homo sapien
ctcgtgtggcactctcaaattccaggaaaaaaa

SEQ ID NO: 237380 - DNA, 33 bp, Homo sapien
ctcgtgtggcactctcgaattccaggaaaaaaa

SEQ ID NO: 237381 - DNA, 33 bp, Homo sapien
aaggaagattattcctcagacaagatttaatgt

SEQ ID NO: 237382 - DNA, 33 bp, Homo sapien
aaggaagattattcctgagacaagatttaatgt

SEQ ID NO: 237383 - DNA, 33 bp, Homo sapien
agagaacaatcctaagcctatgaaaaagtcttc

SEQ ID NO: 237384 - DNA, 33 bp, Homo sapien
agagaacaatcctaagtctatgaaaaagtcttc

SEQ ID NO: 237385 - DNA, 33 bp, Homo sapien
taacttttacctttaacaactgaatgcagaaca

SEQ ID NO: 237386 - DNA, 33 bp, Homo sapien
taacttttacctttaataactgaatgcagaaca

SEQ ID NO: 237387 - DNA, 33 bp, Homo sapien
tctctctgcttctggaccttttgttgttggaag

SEQ ID NO: 237388 - DNA, 33 bp, Homo sapien
tctctctgcttctggatcttttgttgttggaag

SEQ ID NO: 237389 - DNA, 33 bp, Homo sapien
attctagaagggtacaaactgaattcatgaaga

SEQ ID NO: 237390 - DNA, 33 bp, Homo sapien
attctagaagggtacacactgaattcatgaaga

SEQ ID NO: 237391 - DNA, 33 bp, Homo sapien
atgattgattaataccaaaatcttctccaaatc

SEQ ID NO: 237392 - DNA, 33 bp, Homo sapien
atgattgattaatacccaaatcttctccaaatc

SEQ ID NO: 237393 - DNA, 33 bp, Homo sapien
tgtggagtcatagaaaacctattttgttctttt

SEQ ID NO: 237394 - DNA, 33 bp, Homo sapien
tgtggagtcatagaaagcctattttgttctttt

SEQ ID NO: 237395 - DNA, 33 bp, Homo sapien
acttaaaaggtcattgaatgtccaaagttgcta

SEQ ID NO: 237396 - DNA, 33 bp, Homo sapien
acttaaaaggtcattggatgtccaaagttgcta

SEQ ID NO: 237397 - DNA, 33 bp, Homo sapien
cacttagctaaaaatcaaagttacaagtgcatc

SEQ ID NO: 237398 - DNA, 33 bp, Homo sapien
cacttagctaaaaatcgaagttacaagtgcatc

SEQ ID NO: 237399 - DNA, 33 bp, Homo sapien
gtaactcataatctcacattccaccaaacgccc

SEQ ID NO: 237400 - DNA, 33 bp, Homo sapien
gtaactcataatctcatattccaccaaacgccc

SEQ ID NO: 237401 - DNA, 33 bp, Homo sapien
cttttacttttaagcactatggtagattttgaa

SEQ ID NO: 237402 - DNA, 33 bp, Homo sapien
cttttacttttaagcagtatggtagattttgaa

SEQ ID NO: 237403 - DNA, 33 bp, Homo sapien
ggatgaagctgtaaaccattattctcagcaaac

SEQ ID NO: 237404 - DNA, 33 bp, Homo sapien
ggatgaagctgtaaactattattctcagcaaac

SEQ ID NO: 237405 - DNA, 33 bp, Homo sapien
cccaggaaataatcacagtaaaggcaaggggaa

SEQ ID NO: 237406 - DNA, 33 bp, Homo sapien
cccaggaaataatcacggtaaaggcaaggggaa

SEQ ID NO: 237407 - DNA, 33 bp, Homo sapien
ggtaggcacttttttaccttaacagagacacag

SEQ ID NO: 237408 - DNA, 33 bp, Homo sapien
ggtaggcacttttttatcttaacagagacacag

SEQ ID NO: 237409 - DNA, 33 bp, Homo sapien
aataatacatataatacagttggttggtcttaa

SEQ ID NO: 237410 - DNA, 33 bp, Homo sapien
aataatacatataatagagttggttggtcttaa

SEQ ID NO: 237411 - DNA, 33 bp, Homo sapien
aagcttcagaaaatcagcctttagcttttagga

SEQ ID NO: 237412 - DNA, 33 bp, Homo sapien
aagcttcagaaaatcatcctttagcttttagga

SEQ ID NO: 237413 - DNA, 33 bp, Homo sapien
tgagtgaaagaggcaactcccaaaataataaaa

SEQ ID NO: 237414 - DNA, 33 bp, Homo sapien
tgagtgaaagaggcaagtcccaaaataataaaa

SEQ ID NO: 237415 - DNA, 33 bp, Homo sapien
tgctttaattttttacagagacaggctctctct

SEQ ID NO: 237416 - DNA, 33 bp, Homo sapien
tgctttaattttttacggagacaggctctctct

SEQ ID NO: 237417 - DNA, 33 bp, Homo sapien
atgtacccaagatgaacagcttctggacaaatt

SEQ ID NO: 237418 - DNA, 33 bp, Homo sapien
atgtacccaagatgaatagcttctggacaaatt

SEQ ID NO: 237419 - DNA, 33 bp, Homo sapien
aactgtgggttgcttgaaatatttgagtttaaa

SEQ ID NO: 237420 - DNA, 33 bp, Homo sapien
aactgtgggttgcttgtaatatttgagtttaaa

SEQ ID NO: 237421 - DNA, 33 bp, Homo sapien
cccgtagtatattgacccaccttccagaaagca

SEQ ID NO: 237422 - DNA, 33 bp, Homo sapien
cccgtagtatattgactcaccttccagaaagca

SEQ ID NO: 237423 - DNA, 33 bp, Homo sapien
gagggtctctctcaaaggcagttttcctggaat

SEQ ID NO: 237424 - DNA, 33 bp, Homo sapien
gagggtctctctcaaatgcagttttcctggaat

SEQ ID NO: 237425 - DNA, 33 bp, Homo sapien
agagacagacaaaagactagaagaccactagga

SEQ ID NO: 237426 - DNA, 33 bp, Homo sapien
agagacagacaaaagattagaagaccactagga

SEQ ID NO: 237427 - DNA, 33 bp, Homo sapien
acatggtcaatcattaagacatccaaagaagac

SEQ ID NO: 237428 - DNA, 33 bp, Homo sapien
acatggtcaatcattaggacatccaaagaagac

SEQ ID NO: 237429 - DNA, 33 bp, Homo sapien
aaaatctaaccaaccaagtgtattacctatagt

SEQ ID NO: 237430 - DNA, 33 bp, Homo sapien
aaaatctaaccaaccaggtgtattacctatagt

SEQ ID NO: 237431 - DNA, 33 bp, Homo sapien
acaccatctttccataccaaagttcttatagtc

SEQ ID NO: 237432 - DNA, 33 bp, Homo sapien
acaccatctttccatatcaaagttcttatagtc

SEQ ID NO: 237433 - DNA, 33 bp, Homo sapien
ctatcacgtctggaaaactaaaaacgccatttc

SEQ ID NO: 237434 - DNA, 33 bp, Homo sapien
ctatcacgtctggaaagctaaaaacgccatttc

SEQ ID NO: 237435 - DNA, 33 bp, Homo sapien
tttcaaagaaataagacgagcagacctccccca

SEQ ID NO: 237436 - DNA, 33 bp, Homo sapien
tttcaaagaaataagatgagcagacctccccca

SEQ ID NO: 237437 - DNA, 33 bp, Homo sapien
cctgattgaaacctggaatatacttcaaagagt

SEQ ID NO: 237438 - DNA, 33 bp, Homo sapien
cctgattgaaacctgggatatacttcaaagagt

SEQ ID NO: 237439 - DNA, 33 bp, Homo sapien
acaaggggaaaaagccaagtaattaagcattta

SEQ ID NO: 237440 - DNA, 33 bp, Homo sapien
acaaggggaaaaagcccagtaattaagcattta

SEQ ID NO: 237441 - DNA, 33 bp, Homo sapien
gctttgctgtgtttcagctggtagaattgtatt

SEQ ID NO: 237442 - DNA, 33 bp, Homo sapien
gctttgctgtgtttcatctggtagaattgtatt

SEQ ID NO: 237443 - DNA, 33 bp, Homo sapien
cacaagccaattggcaaatctatgagaacatta

SEQ ID NO: 237444 - DNA, 33 bp, Homo sapien
cacaagccaattggcagatctatgagaacatta

SEQ ID NO: 237445 - DNA, 33 bp, Homo sapien
caactgatgaacaaaaccctcctgtttatcctt

SEQ ID NO: 237446 - DNA, 33 bp, Homo sapien
caactgatgaacaaaatcctcctgtttatcctt

SEQ ID NO: 237447 - DNA, 33 bp, Homo sapien
cactatttgaatttagaagttattgagcctaag

SEQ ID NO: 237448 - DNA, 33 bp, Homo sapien
cactatttgaatttagcagttattgagcctaag

SEQ ID NO: 237449 - DNA, 33 bp, Homo sapien
gccaggtcagcccttcaattttgggccacatct

SEQ ID NO: 237450 - DNA, 33 bp, Homo sapien
gccaggtcagcccttcgattttgggccacatct

SEQ ID NO: 237451 - DNA, 33 bp, Homo sapien
agaacttactgacagcacaggagatccatgtcc

SEQ ID NO: 237452 - DNA, 33 bp, Homo sapien
agaacttactgacagcgcaggagatccatgtcc

SEQ ID NO: 237453 - DNA, 33 bp, Homo sapien
tagtttttgtatagtacgatcatgaatagcttt

SEQ ID NO: 237454 - DNA, 33 bp, Homo sapien
tagtttttgtatagtatgatcatgaatagcttt

SEQ ID NO: 237455 - DNA, 33 bp, Homo sapien
acacagtttttaaaacctgatggacctttgtga

SEQ ID NO: 237456 - DNA, 33 bp, Homo sapien
acacagtttttaaaacttgatggacctttgtga

SEQ ID NO: 237457 - DNA, 33 bp, Homo sapien
ttatgaaccatggaaacataaacactgtaattt

SEQ ID NO: 237458 - DNA, 33 bp, Homo sapien
ttatgaaccatggaaatataaacactgtaattt

SEQ ID NO: 237459 - DNA, 33 bp, Homo sapien
ggatgctgaggaagagaaattatttgttagaaa

SEQ ID NO: 237460 - DNA, 33 bp, Homo sapien
ggatgctgaggaagagcaattatttgttagaaa

SEQ ID NO: 237461 - DNA, 33 bp, Homo sapien
ggaggaggaatctttgaagaaggaagaaatggt

SEQ ID NO: 237462 - DNA, 33 bp, Homo sapien
ggaggaggaatctttgcagaaggaagaaatggt

SEQ ID NO: 237463 - DNA, 33 bp, Homo sapien
gaaagagagggcaaaagttccagagcttgaaaa

SEQ ID NO: 237464 - DNA, 33 bp, Homo sapien
gaaagagagggcaaaatttccagagcttgaaaa

SEQ ID NO: 237465 - DNA, 33 bp, Homo sapien
tgggacagagttttgaagcacatgaatgggaat

SEQ ID NO: 237466 - DNA, 33 bp, Homo sapien
tgggacagagttttgaggcacatgaatgggaat

SEQ ID NO: 237467 - DNA, 33 bp, Homo sapien
ttgctaataggtatcaaaattgtcattagcttc

SEQ ID NO: 237468 - DNA, 33 bp, Homo sapien
ttgctaataggtatcataattgtcattagcttc

SEQ ID NO: 237469 - DNA, 33 bp, Homo sapien
ctgttgcacctatgtccctgatgaagaaagtaa

SEQ ID NO: 237470 - DNA, 33 bp, Homo sapien
ctgttgcacctatgtctctgatgaagaaagtaa

SEQ ID NO: 237471 - DNA, 33 bp, Homo sapien
agtcagcaaccagtccaattgttgggaatgtga

SEQ ID NO: 237472 - DNA, 33 bp, Homo sapien
agtcagcaaccagtccgattgttgggaatgtga

SEQ ID NO: 237473 - DNA, 33 bp, Homo sapien
ttgcagaaaagacaaccgtgtgactatgctgaa

SEQ ID NO: 237474 - DNA, 33 bp, Homo sapien
ttgcagaaaagacaacggtgtgactatgctgaa

SEQ ID NO: 237475 - DNA, 33 bp, Homo sapien
tagtgtgtctgatacacatagcaagtgacaaca

SEQ ID NO: 237476 - DNA, 33 bp, Homo sapien
tagtgtgtctgatacatatagcaagtgacaaca

SEQ ID NO: 237477 - DNA, 33 bp, Homo sapien
aaaaatgattttgagcgatgacaggaaggtagc

SEQ ID NO: 237478 - DNA, 33 bp, Homo sapien
aaaaatgattttgagctatgacaggaaggtagc

SEQ ID NO: 237479 - DNA, 33 bp, Homo sapien
atactagttgtggaaaatcattcttatcagtac

SEQ ID NO: 237480 - DNA, 33 bp, Homo sapien
atactagttgtggaaattcattcttatcagtac

SEQ ID NO: 237481 - DNA, 33 bp, Homo sapien
tctttcccgtcacctcacatttccacatgcttg

SEQ ID NO: 237482 - DNA, 33 bp, Homo sapien
tctttcccgtcacctcgcatttccacatgcttg

SEQ ID NO: 237483 - DNA, 33 bp, Homo sapien
aataaataatcacaaaaaagatcaatgtagact

SEQ ID NO: 237484 - DNA, 33 bp, Homo sapien
aataaataatcacaaataagatcaatgtagact

SEQ ID NO: 237485 - DNA, 33 bp, Homo sapien
agaagtatagtgaggtaaataagaaaacaggct

SEQ ID NO: 237486 - DNA, 33 bp, Homo sapien
agaagtatagtgaggtgaataagaaaacaggct

SEQ ID NO: 237487 - DNA, 33 bp, Homo sapien
tacttcctagatacaactgaagtacaggcactg

SEQ ID NO: 237488 - DNA, 33 bp, Homo sapien
tacttcctagatacaattgaagtacaggcactg

SEQ ID NO: 237489 - DNA, 33 bp, Homo sapien
atttctcttaggcatacacttaggagtagatca

SEQ ID NO: 237490 - DNA, 33 bp, Homo sapien
atttctcttaggcatatacttaggagtagatca

SEQ ID NO: 237491 - DNA, 33 bp, Homo sapien
ttccccaatttagtaaatggtagcttcattatt

SEQ ID NO: 237492 - DNA, 33 bp, Homo sapien
ttccccaatttagtaagtggtagcttcattatt

SEQ ID NO: 237493 - DNA, 33 bp, Homo sapien
ttattgatactagcttcaaatatactcaacgtg

SEQ ID NO: 237494 - DNA, 33 bp, Homo sapien
ttattgatactagcttgaaatatactcaacgtg

SEQ ID NO: 237495 - DNA, 33 bp, Homo sapien
tcagcttatcatttaccaaatattgtcagttct

SEQ ID NO: 237496 - DNA, 33 bp, Homo sapien
tcagcttatcatttactaaatattgtcagttct

SEQ ID NO: 237497 - DNA, 33 bp, Homo sapien
caatggaacaagtaaaaactgatcaaatatatg

SEQ ID NO: 237498 - DNA, 33 bp, Homo sapien
caatggaacaagtaaagactgatcaaatatatg

SEQ ID NO: 237499 - DNA, 33 bp, Homo sapien
aataacagcaacagcaaaacacagcattttatt

SEQ ID NO: 237500 - DNA, 33 bp, Homo sapien
aataacagcaacagcacaacacagcattttatt

SEQ ID NO: 237501 - DNA, 33 bp, Homo sapien
ctgcctgatgcatgagaagaggagtcacctgac

SEQ ID NO: 237502 - DNA, 33 bp, Homo sapien
ctgcctgatgcatgaggagaggagtcacctgac

SEQ ID NO: 237503 - DNA, 33 bp, Homo sapien
atccccaaaggcagaccattttcaagaagcagc

SEQ ID NO: 237504 - DNA, 33 bp, Homo sapien
atccccaaaggcagactattttcaagaagcagc

SEQ ID NO: 237505 - DNA, 33 bp, Homo sapien
gccgagtgctctacctgaacgcctctcatagtg

SEQ ID NO: 237506 - DNA, 33 bp, Homo sapien
gccgagtgctctaccttaacgcctctcatagtg

SEQ ID NO: 237507 - DNA, 33 bp, Homo sapien
tagggtggaagcctataaatacgaaggaaaaat

SEQ ID NO: 237508 - DNA, 33 bp, Homo sapien
tagggtggaagcctatgaatacgaaggaaaaat

SEQ ID NO: 237509 - DNA, 33 bp, Homo sapien
tattaggactgaattacgatgaatcaggtttta

SEQ ID NO: 237510 - DNA, 33 bp, Homo sapien
tattaggactgaattatgatgaatcaggtttta

SEQ ID NO: 237511 - DNA, 33 bp, Homo sapien
cttcagctttattttacgtagcagttttaaact

SEQ ID NO: 237512 - DNA, 33 bp, Homo sapien
cttcagctttattttatgtagcagttttaaact

SEQ ID NO: 237513 - DNA, 33 bp, Homo sapien
aaggatatgggctgaacgaaaaaaggaactaga

SEQ ID NO: 237514 - DNA, 33 bp, Homo sapien
aaggatatgggctgaatgaaaaaaggaactaga

SEQ ID NO: 237515 - DNA, 33 bp, Homo sapien
gtttatatctgcaaataacccagttccagattc

SEQ ID NO: 237516 - DNA, 33 bp, Homo sapien
gtttatatctgcaaatcacccagttccagattc

SEQ ID NO: 237517 - DNA, 33 bp, Homo sapien
aaaaaactaagaaaaacagccaagaaggtaata

SEQ ID NO: 237518 - DNA, 33 bp, Homo sapien
aaaaaactaagaaaaatagccaagaaggtaata

SEQ ID NO: 237519 - DNA, 33 bp, Homo sapien
aagggacattttcataacttcaatctcaccaca

SEQ ID NO: 237520 - DNA, 33 bp, Homo sapien
aagggacattttcataccttcaatctcaccaca

SEQ ID NO: 237521 - DNA, 33 bp, Homo sapien
taagagtgataagcacaccccaaaagggtcaag

SEQ ID NO: 237522 - DNA, 33 bp, Homo sapien
taagagtgataagcacgccccaaaagggtcaag

SEQ ID NO: 237523 - DNA, 33 bp, Homo sapien
aggttcagcaggctcaactaatatgtgaactac

SEQ ID NO: 237524 - DNA, 33 bp, Homo sapien
aggttcagcaggctcagctaatatgtgaactac

SEQ ID NO: 237525 - DNA, 33 bp, Homo sapien
gcagatgaaagagcataataaataccacagtag

SEQ ID NO: 237526 - DNA, 33 bp, Homo sapien
gcagatgaaagagcattataaataccacagtag

SEQ ID NO: 237527 - DNA, 33 bp, Homo sapien
ttcatatgatctctcacggctaggatggtttat

SEQ ID NO: 237528 - DNA, 33 bp, Homo sapien
ttcatatgatctctcatggctaggatggtttat

SEQ ID NO: 237529 - DNA, 33 bp, Homo sapien
atgtagctataaaaaaagcaatggtagccaaag

SEQ ID NO: 237530 - DNA, 33 bp, Homo sapien
atgtagctataaaaaacgcaatggtagccaaag

SEQ ID NO: 237531 - DNA, 33 bp, Homo sapien
tattgaattagtggtggatcatcagaatttaaa

SEQ ID NO: 237532 - DNA, 33 bp, Homo sapien
tattgaattagtggtgtatcatcagaatttaaa

SEQ ID NO: 237533 - DNA, 33 bp, Homo sapien
tggagagtgaagatacgggacttgacagtaatc

SEQ ID NO: 237534 - DNA, 33 bp, Homo sapien
tggagagtgaagatactggacttgacagtaatc

SEQ ID NO: 237535 - DNA, 33 bp, Homo sapien
ctgacagattttgttaccatacctcagaaaggg

SEQ ID NO: 237536 - DNA, 33 bp, Homo sapien
ctgacagattttgttatcatacctcagaaaggg

SEQ ID NO: 237537 - DNA, 33 bp, Homo sapien
agatgaacaattcaaacgatcaacaacttgtga

SEQ ID NO: 237538 - DNA, 33 bp, Homo sapien
agatgaacaattcaaatgatcaacaacttgtga

SEQ ID NO: 237539 - DNA, 33 bp, Homo sapien
ttttaattaacttatcccatgagtttgtaatgc

SEQ ID NO: 237540 - DNA, 33 bp, Homo sapien
ttttaattaacttatctcatgagtttgtaatgc

SEQ ID NO: 237541 - DNA, 33 bp, Homo sapien
gcaaattgtgttacagccatacaatatactact

SEQ ID NO: 237542 - DNA, 33 bp, Homo sapien
gcaaattgtgttacagtcatacaatatactact

SEQ ID NO: 237543 - DNA, 33 bp, Homo sapien
aatgatagttatgaccaaaattatagtttccac

SEQ ID NO: 237544 - DNA, 33 bp, Homo sapien
aatgatagttatgaccgaaattatagtttccac

SEQ ID NO: 237545 - DNA, 33 bp, Homo sapien
gaagagtaattctttacgtcatgtgcactgtga

SEQ ID NO: 237546 - DNA, 33 bp, Homo sapien
gaagagtaattctttatgtcatgtgcactgtga

SEQ ID NO: 237547 - DNA, 33 bp, Homo sapien
agccctactacatgccacagagagagcaataag

SEQ ID NO: 237548 - DNA, 33 bp, Homo sapien
agccctactacatgccgcagagagagcaataag

SEQ ID NO: 237549 - DNA, 33 bp, Homo sapien
taaagagaagtatgctcaccgaccactaaactc

SEQ ID NO: 237550 - DNA, 33 bp, Homo sapien
taaagagaagtatgcttaccgaccactaaactc

SEQ ID NO: 237551 - DNA, 33 bp, Homo sapien
caacttctaataagcaaaaattaagtgttactg

SEQ ID NO: 237552 - DNA, 33 bp, Homo sapien
caacttctaataagcagaaattaagtgttactg

SEQ ID NO: 237553 - DNA, 33 bp, Homo sapien
aacaactttccaaagacggcccagtgttggtgc

SEQ ID NO: 237554 - DNA, 33 bp, Homo sapien
aacaactttccaaagatggcccagtgttggtgc

SEQ ID NO: 237555 - DNA, 33 bp, Homo sapien
gcagctggaagtgacaaccattactttataatt

SEQ ID NO: 237556 - DNA, 33 bp, Homo sapien
gcagctggaagtgacagccattactttataatt

SEQ ID NO: 237557 - DNA, 33 bp, Homo sapien
tgcatttgttaaaggccgatgtgcttcttaaca

SEQ ID NO: 237558 - DNA, 33 bp, Homo sapien
tgcatttgttaaaggctgatgtgcttcttaaca

SEQ ID NO: 237559 - DNA, 33 bp, Homo sapien
agatgggaatcctaaaatgcctacattactatc

SEQ ID NO: 237560 - DNA, 33 bp, Homo sapien
agatgggaatcctaaagtgcctacattactatc

SEQ ID NO: 237561 - DNA, 33 bp, Homo sapien
tggattgatgataaagacagctgcctgaaaaag

SEQ ID NO: 237562 - DNA, 33 bp, Homo sapien
tggattgatgataaagtcagctgcctgaaaaag

SEQ ID NO: 237563 - DNA, 33 bp, Homo sapien
ctcccaagtttgcaataatgttttcttaataga

SEQ ID NO: 237564 - DNA, 33 bp, Homo sapien
ctcccaagtttgcaatgatgttttcttaataga

SEQ ID NO: 237565 - DNA, 33 bp, Homo sapien
tggctgaggttgtgcaatgaaagctataagcta

SEQ ID NO: 237566 - DNA, 33 bp, Homo sapien
tggctgaggttgtgcagtgaaagctataagcta

SEQ ID NO: 237567 - DNA, 33 bp, Homo sapien
aatacactatttttcgcagaatgtacttaaggc

SEQ ID NO: 237568 - DNA, 33 bp, Homo sapien
aatacactatttttcggagaatgtacttaaggc

SEQ ID NO: 237569 - DNA, 33 bp, Homo sapien
cttttatgatagactaaaaggtgaaggggaaga

SEQ ID NO: 237570 - DNA, 33 bp, Homo sapien
cttttatgatagactagaaggtgaaggggaaga

SEQ ID NO: 237571 - DNA, 33 bp, Homo sapien
ccaatttccaacaacaagagagtgactaaatga

SEQ ID NO: 237572 - DNA, 33 bp, Homo sapien
ccaatttccaacaacaggagagtgactaaatga

SEQ ID NO: 237573 - DNA, 33 bp, Homo sapien
catggcttgatctcttcaaaattcttcagcatc

SEQ ID NO: 237574 - DNA, 33 bp, Homo sapien
catggcttgatctctttaaaattcttcagcatc

SEQ ID NO: 237575 - DNA, 33 bp, Homo sapien
tccaggattccagcagaacgtttgtactgagtt

SEQ ID NO: 237576 - DNA, 33 bp, Homo sapien
tccaggattccagcagcacgtttgtactgagtt

SEQ ID NO: 237577 - DNA, 33 bp, Homo sapien
cctggtctgtgtcttaccatctgcagaccacgt

SEQ ID NO: 237578 - DNA, 33 bp, Homo sapien
cctggtctgtgtcttatcatctgcagaccacgt

SEQ ID NO: 237579 - DNA, 33 bp, Homo sapien
accaaagacttacagaaaagagtccaaattggc

SEQ ID NO: 237580 - DNA, 33 bp, Homo sapien
accaaagacttacagagaagagtccaaattggc

SEQ ID NO: 237581 - DNA, 33 bp, Homo sapien
gggatgtttgatgccactctagcatatgggacc

SEQ ID NO: 237582 - DNA, 33 bp, Homo sapien
gggatgtttgatgccagtctagcatatgggacc

SEQ ID NO: 237583 - DNA, 33 bp, Homo sapien
tttgacctgagcagaaaatattgcagttaaaag

SEQ ID NO: 237584 - DNA, 33 bp, Homo sapien
tttgacctgagcagaagatattgcagttaaaag

SEQ ID NO: 237585 - DNA, 33 bp, Homo sapien
ctgtgaatacagatcactcttccaagttcaggg

SEQ ID NO: 237586 - DNA, 33 bp, Homo sapien
ctgtgaatacagatcattcttccaagttcaggg

SEQ ID NO: 237587 - DNA, 33 bp, Homo sapien
gaaaatagtcagtaaaccctggcttttccttct

SEQ ID NO: 237588 - DNA, 33 bp, Homo sapien
gaaaatagtcagtaaatcctggcttttccttct

SEQ ID NO: 237589 - DNA, 33 bp, Homo sapien
atgatcaataatgctacgatttgacaccaactc

SEQ ID NO: 237590 - DNA, 33 bp, Homo sapien
atgatcaataatgctatgatttgacaccaactc

SEQ ID NO: 237591 - DNA, 33 bp, Homo sapien
ctgttgccaagcatggcattaaatactttaaaa

SEQ ID NO: 237592 - DNA, 33 bp, Homo sapien
ctgttgccaagcatggtattaaatactttaaaa

SEQ ID NO: 237593 - DNA, 33 bp, Homo sapien
tgagggtgtggagaaaaggaaatcctgaaccac

SEQ ID NO: 237594 - DNA, 33 bp, Homo sapien
tgagggtgtggagaaacggaaatcctgaaccac

SEQ ID NO: 237595 - DNA, 33 bp, Homo sapien
catgtatgataagaccccgaagaagataagcac

SEQ ID NO: 237596 - DNA, 33 bp, Homo sapien
catgtatgataagacctcgaagaagataagcac

SEQ ID NO: 237597 - DNA, 33 bp, Homo sapien
gaacaaaaatatagcaggaaaattattgtatgg

SEQ ID NO: 237598 - DNA, 33 bp, Homo sapien
gaacaaaaatatagcatgaaaattattgtatgg

SEQ ID NO: 237599 - DNA, 33 bp, Homo sapien
gaaagggaaaaagttcaagttctagagttgaaa

SEQ ID NO: 237600 - DNA, 33 bp, Homo sapien
gaaagggaaaaagttcgagttctagagttgaaa

SEQ ID NO: 237601 - DNA, 33 bp, Homo sapien
aggagatttgcacttcacaaacacacttccatt

SEQ ID NO: 237602 - DNA, 33 bp, Homo sapien
aggagatttgcacttcgcaaacacacttccatt

SEQ ID NO: 237603 - DNA, 33 bp, Homo sapien
tgttaacttccattcaatattcttcttgtgccg

SEQ ID NO: 237604 - DNA, 33 bp, Homo sapien
tgttaacttccattcagtattcttcttgtgccg

SEQ ID NO: 237605 - DNA, 33 bp, Homo sapien
gcagttccactgtgagaaaagagccttctggct

SEQ ID NO: 237606 - DNA, 33 bp, Homo sapien
gcagttccactgtgaggaaagagccttctggct

SEQ ID NO: 237607 - DNA, 33 bp, Homo sapien
atctaggcaaaagctcagaatgcctcaattgct

SEQ ID NO: 237608 - DNA, 33 bp, Homo sapien
atctaggcaaaagctcggaatgcctcaattgct

SEQ ID NO: 237609 - DNA, 33 bp, Homo sapien
caaaatttgcatctgaccttaggcaaaattaat

SEQ ID NO: 237610 - DNA, 33 bp, Homo sapien
caaaatttgcatctgatcttaggcaaaattaat

SEQ ID NO: 237611 - DNA, 33 bp, Homo sapien
tatatagcaattagtacatgccagtcttcatct

SEQ ID NO: 237612 - DNA, 33 bp, Homo sapien
tatatagcaattagtatatgccagtcttcatct

SEQ ID NO: 237613 - DNA, 33 bp, Homo sapien
ttgattggtcagtcaaaatttaaacataacatt

SEQ ID NO: 237614 - DNA, 33 bp, Homo sapien
ttgattggtcagtcaagatttaaacataacatt

SEQ ID NO: 237615 - DNA, 33 bp, Homo sapien
agtaggaactgtatcaacataatttttaaagac

SEQ ID NO: 237616 - DNA, 33 bp, Homo sapien
agtaggaactgtatcaccataatttttaaagac

SEQ ID NO: 237617 - DNA, 33 bp, Homo sapien
gtgacaaccttcgatcaacgaaaacaatatctt

SEQ ID NO: 237618 - DNA, 33 bp, Homo sapien
gtgacaaccttcgatcgacgaaaacaatatctt

SEQ ID NO: 237619 - DNA, 33 bp, Homo sapien
actatacacaccacataaatttatcacaaactc

SEQ ID NO: 237620 - DNA, 33 bp, Homo sapien
actatacacaccacatgaatttatcacaaactc

SEQ ID NO: 237621 - DNA, 33 bp, Homo sapien
cctggaggcttttaccagacttgcaattctgca

SEQ ID NO: 237622 - DNA, 33 bp, Homo sapien
cctggaggcttttaccggacttgcaattctgca

SEQ ID NO: 237623 - DNA, 33 bp, Homo sapien
caatctgttgcaaaaaagagttccgaagaaacc

SEQ ID NO: 237624 - DNA, 33 bp, Homo sapien
caatctgttgcaaaaacgagttccgaagaaacc

SEQ ID NO: 237625 - DNA, 33 bp, Homo sapien
ttcttatcatttgggaactataaacttgagttg

SEQ ID NO: 237626 - DNA, 33 bp, Homo sapien
ttcttatcatttgggagctataaacttgagttg

SEQ ID NO: 237627 - DNA, 33 bp, Homo sapien
acatggcttccagaaaacctttttgcccttttt

SEQ ID NO: 237628 - DNA, 33 bp, Homo sapien
acatggcttccagaaatcctttttgcccttttt

SEQ ID NO: 237629 - DNA, 33 bp, Homo sapien
attttgtttcatcttcacacgatctgacacagg

SEQ ID NO: 237630 - DNA, 33 bp, Homo sapien
attttgtttcatcttcgcacgatctgacacagg

SEQ ID NO: 237631 - DNA, 33 bp, Homo sapien
ttacttacttcaaaaaacaccctcattgtggcc

SEQ ID NO: 237632 - DNA, 33 bp, Homo sapien
ttacttacttcaaaaagcaccctcattgtggcc

SEQ ID NO: 237633 - DNA, 33 bp, Homo sapien
ctattggtatatttgaagctcatcacaattctc

SEQ ID NO: 237634 - DNA, 33 bp, Homo sapien
ctattggtatatttgaggctcatcacaattctc

SEQ ID NO: 237635 - DNA, 33 bp, Homo sapien
agctcttccacagaaaactagggctcaaaagaa

SEQ ID NO: 237636 - DNA, 33 bp, Homo sapien
agctcttccacagaaacctagggctcaaaagaa

SEQ ID NO: 237637 - DNA, 33 bp, Homo sapien
tctggtagttgccttacatatggtgtgtgtagt

SEQ ID NO: 237638 - DNA, 33 bp, Homo sapien
tctggtagttgccttatatatggtgtgtgtagt

SEQ ID NO: 237639 - DNA, 33 bp, Homo sapien
gagaaggatcccatcaaaaagctgcagagtcaa

SEQ ID NO: 237640 - DNA, 33 bp, Homo sapien
gagaaggatcccatcataaagctgcagagtcaa

SEQ ID NO: 237641 - DNA, 33 bp, Homo sapien
ctttacagagtttcacactagattacatagaaa

SEQ ID NO: 237642 - DNA, 33 bp, Homo sapien
ctttacagagtttcacgctagattacatagaaa

SEQ ID NO: 237643 - DNA, 33 bp, Homo sapien
actactccctctcccactcacttctactcttcc

SEQ ID NO: 237644 - DNA, 33 bp, Homo sapien
actactccctctcccattcacttctactcttcc

SEQ ID NO: 237645 - DNA, 33 bp, Homo sapien
aattcatcagaagtaccgactattgattagaat

SEQ ID NO: 237646 - DNA, 33 bp, Homo sapien
aattcatcagaagtactgactattgattagaat

SEQ ID NO: 237647 - DNA, 33 bp, Homo sapien
tttgtgatttgggtgcacaaaataattcatttt

SEQ ID NO: 237648 - DNA, 33 bp, Homo sapien
tttgtgatttgggtgcgcaaaataattcatttt

SEQ ID NO: 237649 - DNA, 33 bp, Homo sapien
ttaccatgctggccaacgtaaagtgtgctgcaa

SEQ ID NO: 237650 - DNA, 33 bp, Homo sapien
ttaccatgctggccaatgtaaagtgtgctgcaa

SEQ ID NO: 237651 - DNA, 33 bp, Homo sapien
agcatgaaaagtttaagcacactgacttcaaaa

SEQ ID NO: 237652 - DNA, 33 bp, Homo sapien
agcatgaaaagtttaatcacactgacttcaaaa

SEQ ID NO: 237653 - DNA, 33 bp, Homo sapien
ctgctacagataagaggacttggaaatctacaa

SEQ ID NO: 237654 - DNA, 33 bp, Homo sapien
ctgctacagataagagtacttggaaatctacaa

SEQ ID NO: 237655 - DNA, 33 bp, Homo sapien
aagactcagataaatcactaagtccctactgtt

SEQ ID NO: 237656 - DNA, 33 bp, Homo sapien
aagactcagataaatcgctaagtccctactgtt

SEQ ID NO: 237657 - DNA, 33 bp, Homo sapien
gtatcagtttcagggcgatcataaatcaacagt

SEQ ID NO: 237658 - DNA, 33 bp, Homo sapien
gtatcagtttcagggctatcataaatcaacagt

SEQ ID NO: 237659 - DNA, 33 bp, Homo sapien
gtactaggttgaataacagtgtggacagtggga

SEQ ID NO: 237660 - DNA, 33 bp, Homo sapien
gtactaggttgaataagagtgtggacagtggga

SEQ ID NO: 237661 - DNA, 33 bp, Homo sapien
agttcatgtgcactctaaaggcagcaattgtat

SEQ ID NO: 237662 - DNA, 33 bp, Homo sapien
agttcatgtgcactctgaaggcagcaattgtat

SEQ ID NO: 237663 - DNA, 33 bp, Homo sapien
tatgatatccatcaaacttctcagacaatacta

SEQ ID NO: 237664 - DNA, 33 bp, Homo sapien
tatgatatccatcaaatttctcagacaatacta

SEQ ID NO: 237665 - DNA, 33 bp, Homo sapien
gataaaatttctgatgacagcattaaacaaccc

SEQ ID NO: 237666 - DNA, 33 bp, Homo sapien
gataaaatttctgatggcagcattaaacaaccc

SEQ ID NO: 237667 - DNA, 33 bp, Homo sapien
agtcaatccttaaagacgatcagggtctgcatg

SEQ ID NO: 237668 - DNA, 33 bp, Homo sapien
agtcaatccttaaagatgatcagggtctgcatg

SEQ ID NO: 237669 - DNA, 33 bp, Homo sapien
cccatctcatccaatacgcttcagtggagttgt

SEQ ID NO: 237670 - DNA, 33 bp, Homo sapien
cccatctcatccaatatgcttcagtggagttgt

SEQ ID NO: 237671 - DNA, 33 bp, Homo sapien
aattaaaggtcattgcaataactagatgggatt

SEQ ID NO: 237672 - DNA, 33 bp, Homo sapien
aattaaaggtcattgcgataactagatgggatt

SEQ ID NO: 237673 - DNA, 33 bp, Homo sapien
tcttattctagcctgcaacatttaccacaatac

SEQ ID NO: 237674 - DNA, 33 bp, Homo sapien
tcttattctagcctgcgacatttaccacaatac

SEQ ID NO: 237675 - DNA, 33 bp, Homo sapien
gaagttatgtgactgaaaaggtcatatattagt

SEQ ID NO: 237676 - DNA, 33 bp, Homo sapien
gaagttatgtgactgacaaggtcatatattagt

SEQ ID NO: 237677 - DNA, 33 bp, Homo sapien
ttccaaatttgtgccacctgaaactcaatgtgc

SEQ ID NO: 237678 - DNA, 33 bp, Homo sapien
ttccaaatttgtgccatctgaaactcaatgtgc

SEQ ID NO: 237679 - DNA, 33 bp, Homo sapien
aatcaacgtttaaaaaattatcagtcatcaacg

SEQ ID NO: 237680 - DNA, 33 bp, Homo sapien
aatcaacgtttaaaaagttatcagtcatcaacg

SEQ ID NO: 237681 - DNA, 33 bp, Homo sapien
gagatttcgcccaaaaagttagcaagtaaaatc

SEQ ID NO: 237682 - DNA, 33 bp, Homo sapien
gagatttcgcccaaaaggttagcaagtaaaatc

SEQ ID NO: 237683 - DNA, 33 bp, Homo sapien
tcaccatagcatacaacctggacacattgctca

SEQ ID NO: 237684 - DNA, 33 bp, Homo sapien
tcaccatagcatacaatctggacacattgctca

SEQ ID NO: 237685 - DNA, 33 bp, Homo sapien
aagcagtgacagaccaatgatggcttttactcc

SEQ ID NO: 237686 - DNA, 33 bp, Homo sapien
aagcagtgacagaccagtgatggcttttactcc

SEQ ID NO: 237687 - DNA, 33 bp, Homo sapien
agtgtaaaaagtagcaatatgaataagttttga

SEQ ID NO: 237688 - DNA, 33 bp, Homo sapien
agtgtaaaaagtagcagtatgaataagttttga

SEQ ID NO: 237689 - DNA, 33 bp, Homo sapien
ggaaaagagaagagacaatgaaacgcacaaaga

SEQ ID NO: 237690 - DNA, 33 bp, Homo sapien
ggaaaagagaagagacgatgaaacgcacaaaga

SEQ ID NO: 237691 - DNA, 33 bp, Homo sapien
agttatcagagcaggacaataaaatatatttta

SEQ ID NO: 237692 - DNA, 33 bp, Homo sapien
agttatcagagcaggagaataaaatatatttta

SEQ ID NO: 237693 - DNA, 33 bp, Homo sapien
aactagctcagcatcacagggtattgttaagca

SEQ ID NO: 237694 - DNA, 33 bp, Homo sapien
aactagctcagcatcagagggtattgttaagca

SEQ ID NO: 237695 - DNA, 33 bp, Homo sapien
taagcttttcctagaacgtttttcagcagcagt

SEQ ID NO: 237696 - DNA, 33 bp, Homo sapien
taagcttttcctagaatgtttttcagcagcagt

SEQ ID NO: 237697 - DNA, 33 bp, Homo sapien
caggcgcatagggtagaaccaaatgatagggta

SEQ ID NO: 237698 - DNA, 33 bp, Homo sapien
caggcgcatagggtaggaccaaatgatagggta

SEQ ID NO: 237699 - DNA, 33 bp, Homo sapien
ataccacgtggaggtgaatatagtgtccataac

SEQ ID NO: 237700 - DNA, 33 bp, Homo sapien
ataccacgtggaggtgcatatagtgtccataac

SEQ ID NO: 237701 - DNA, 33 bp, Homo sapien
tcctcctatttctgcaactagaaaaatcactta

SEQ ID NO: 237702 - DNA, 33 bp, Homo sapien
tcctcctatttctgcagctagaaaaatcactta

SEQ ID NO: 237703 - DNA, 33 bp, Homo sapien
tctttcgtggctacaactgcaagcatctctcag

SEQ ID NO: 237704 - DNA, 33 bp, Homo sapien
tctttcgtggctacaattgcaagcatctctcag

SEQ ID NO: 237705 - DNA, 33 bp, Homo sapien
ttgggcggtccgactgcaaaatctctttcctaa

SEQ ID NO: 237706 - DNA, 33 bp, Homo sapien
ttgggcggtccgactgtaaaatctctttcctaa

SEQ ID NO: 237707 - DNA, 33 bp, Homo sapien
gagtcttttgattttcacctatagatttacaga

SEQ ID NO: 237708 - DNA, 33 bp, Homo sapien
gagtcttttgattttcgcctatagatttacaga

SEQ ID NO: 237709 - DNA, 33 bp, Homo sapien
ttttcaagtcctcacagggtaggcacctaaagg

SEQ ID NO: 237710 - DNA, 33 bp, Homo sapien
ttttcaagtcctcacatggtaggcacctaaagg

SEQ ID NO: 237711 - DNA, 33 bp, Homo sapien
catctttgcatctctaacatatgtaacttctct

SEQ ID NO: 237712 - DNA, 33 bp, Homo sapien
catctttgcatctctagcatatgtaacttctct

SEQ ID NO: 237713 - DNA, 33 bp, Homo sapien
gaatcaggggtagtacaaccagagtggacaaaa

SEQ ID NO: 237714 - DNA, 33 bp, Homo sapien
gaatcaggggtagtacgaccagagtggacaaaa

SEQ ID NO: 237715 - DNA, 33 bp, Homo sapien
taggaccagaggagtcccaaaagtctaagatgg

SEQ ID NO: 237716 - DNA, 33 bp, Homo sapien
taggaccagaggagtctcaaaagtctaagatgg

SEQ ID NO: 237717 - DNA, 33 bp, Homo sapien
ccctttgccttctggactaaaataaaaaatgtt

SEQ ID NO: 237718 - DNA, 33 bp, Homo sapien
ccctttgccttctggagtaaaataaaaaatgtt

SEQ ID NO: 237719 - DNA, 33 bp, Homo sapien
atatcatcatttgcaaactccaggaattaatag

SEQ ID NO: 237720 - DNA, 33 bp, Homo sapien
atatcatcatttgcaatctccaggaattaatag

SEQ ID NO: 237721 - DNA, 33 bp, Homo sapien
tttaccaaataaccagcatgattcaaataagca

SEQ ID NO: 237722 - DNA, 33 bp, Homo sapien
tttaccaaataaccaggatgattcaaataagca

SEQ ID NO: 237723 - DNA, 33 bp, Homo sapien
tatcttgtaccagaaaccattctaattattcaa

SEQ ID NO: 237724 - DNA, 33 bp, Homo sapien
tatcttgtaccagaaagcattctaattattcaa

SEQ ID NO: 237725 - DNA, 33 bp, Homo sapien
gtgatgaagatgaagacgcaggaggataggtcc

SEQ ID NO: 237726 - DNA, 33 bp, Homo sapien
gtgatgaagatgaagatgcaggaggataggtcc

SEQ ID NO: 237727 - DNA, 33 bp, Homo sapien
agtggtcaaacatacacgaatctggagcttcag

SEQ ID NO: 237728 - DNA, 33 bp, Homo sapien
agtggtcaaacatacatgaatctggagcttcag

SEQ ID NO: 237729 - DNA, 33 bp, Homo sapien
tactgtttggagtgaacgattaatgtgaaactc

SEQ ID NO: 237730 - DNA, 33 bp, Homo sapien
tactgtttggagtgaatgattaatgtgaaactc

SEQ ID NO: 237731 - DNA, 33 bp, Homo sapien
ctcctggatttgctagaaaagattcacaaaaat

SEQ ID NO: 237732 - DNA, 33 bp, Homo sapien
ctcctggatttgctaggaaagattcacaaaaat

SEQ ID NO: 237733 - DNA, 33 bp, Homo sapien
ttagcaaaccatatcaacctcacttcctaaata

SEQ ID NO: 237734 - DNA, 33 bp, Homo sapien
ttagcaaaccatatcatcctcacttcctaaata

SEQ ID NO: 237735 - DNA, 33 bp, Homo sapien
ttgctgtatgacagtcacaaaaccttagtactt

SEQ ID NO: 237736 - DNA, 33 bp, Homo sapien
ttgctgtatgacagtcgcaaaaccttagtactt

SEQ ID NO: 237737 - DNA, 33 bp, Homo sapien
tgaaggatccatgaacaggcgttaggaagttaa

SEQ ID NO: 237738 - DNA, 33 bp, Homo sapien
tgaaggatccatgaacgggcgttaggaagttaa

SEQ ID NO: 237739 - DNA, 33 bp, Homo sapien
cccgtattcaattagcactcagtaactttattt

SEQ ID NO: 237740 - DNA, 33 bp, Homo sapien
cccgtattcaattagcgctcagtaactttattt

SEQ ID NO: 237741 - DNA, 33 bp, Homo sapien
ttttgagcaggggcaacctcatgatctggttta

SEQ ID NO: 237742 - DNA, 33 bp, Homo sapien
ttttgagcaggggcaatctcatgatctggttta

SEQ ID NO: 237743 - DNA, 33 bp, Homo sapien
agtctagtccagaccactgctttctcctgactg

SEQ ID NO: 237744 - DNA, 33 bp, Homo sapien
agtctagtccagaccagtgctttctcctgactg

SEQ ID NO: 237745 - DNA, 33 bp, Homo sapien
tctagtcattagcaagcctcatagaccctacag

SEQ ID NO: 237746 - DNA, 33 bp, Homo sapien
tctagtcattagcaagtctcatagaccctacag

SEQ ID NO: 237747 - DNA, 33 bp, Homo sapien
taattggcatctcaaaactactatgtccacccc

SEQ ID NO: 237748 - DNA, 33 bp, Homo sapien
taattggcatctcaaatctactatgtccacccc

SEQ ID NO: 237749 - DNA, 33 bp, Homo sapien
ctgattttggtcaaatcaatgagtgagaaagct

SEQ ID NO: 237750 - DNA, 33 bp, Homo sapien
ctgattttggtcaaattaatgagtgagaaagct

SEQ ID NO: 237751 - DNA, 33 bp, Homo sapien
aaattcttgatggcagcctatgtggtactttgt

SEQ ID NO: 237752 - DNA, 33 bp, Homo sapien
aaattcttgatggcagtctatgtggtactttgt

SEQ ID NO: 237753 - DNA, 33 bp, Homo sapien
gtggtgtgcttgtacaacaaatgatggtaaaga

SEQ ID NO: 237754 - DNA, 33 bp, Homo sapien
gtggtgtgcttgtacagcaaatgatggtaaaga

SEQ ID NO: 237755 - DNA, 33 bp, Homo sapien
aagcctctctggtcatcaagcattgtgcaatct

SEQ ID NO: 237756 - DNA, 33 bp, Homo sapien
aagcctctctggtcattaagcattgtgcaatct

SEQ ID NO: 237757 - DNA, 33 bp, Homo sapien
aagctgacctggtacccacgccttctctcctca

SEQ ID NO: 237758 - DNA, 33 bp, Homo sapien
aagctgacctggtaccgacgccttctctcctca

SEQ ID NO: 237759 - DNA, 33 bp, Homo sapien
gtcaccagcagaacataagcacttctcaaatct

SEQ ID NO: 237760 - DNA, 33 bp, Homo sapien
gtcaccagcagaacatgagcacttctcaaatct

SEQ ID NO: 237761 - DNA, 33 bp, Homo sapien
tttacaaggacacatcactggatttagggccca

SEQ ID NO: 237762 - DNA, 33 bp, Homo sapien
tttacaaggacacatcgctggatttagggccca

SEQ ID NO: 237763 - DNA, 33 bp, Homo sapien
aatagctcaagtttacaaagtacggaatgtaaa

SEQ ID NO: 237764 - DNA, 33 bp, Homo sapien
aatagctcaagtttacgaagtacggaatgtaaa

SEQ ID NO: 237765 - DNA, 33 bp, Homo sapien
ttgaccacatttccaaatgtctacctctgagct

SEQ ID NO: 237766 - DNA, 33 bp, Homo sapien
ttgaccacatttccaattgtctacctctgagct

SEQ ID NO: 237767 - DNA, 33 bp, Homo sapien
tactctcttgctccaacttctacacaaagaaac

SEQ ID NO: 237768 - DNA, 33 bp, Homo sapien
tactctcttgctccaatttctacacaaagaaac

SEQ ID NO: 237769 - DNA, 33 bp, Homo sapien
gtttatgtgtctatcagcacttaactgtagtga

SEQ ID NO: 237770 - DNA, 33 bp, Homo sapien
gtttatgtgtctatcatcacttaactgtagtga

SEQ ID NO: 237771 - DNA, 33 bp, Homo sapien
agtgtaatgttatagacaatgaaaggaagtgct

SEQ ID NO: 237772 - DNA, 33 bp, Homo sapien
agtgtaatgttatagagaatgaaaggaagtgct

SEQ ID NO: 237773 - DNA, 33 bp, Homo sapien
tgtttcagtcagtgggccaccaattagtgagca

SEQ ID NO: 237774 - DNA, 33 bp, Homo sapien
tgtttcagtcagtgggtcaccaattagtgagca

SEQ ID NO: 237775 - DNA, 33 bp, Homo sapien
tacctgggaatgtgacaaagtaacctattcgta

SEQ ID NO: 237776 - DNA, 33 bp, Homo sapien
tacctgggaatgtgacgaagtaacctattcgta

SEQ ID NO: 237777 - DNA, 33 bp, Homo sapien
ttacatcatcagtatcaaagctgacattttgac

SEQ ID NO: 237778 - DNA, 33 bp, Homo sapien
ttacatcatcagtatcgaagctgacattttgac

SEQ ID NO: 237779 - DNA, 33 bp, Homo sapien
ggagctttctagcaagcctatttggttgtacac

SEQ ID NO: 237780 - DNA, 33 bp, Homo sapien
ggagctttctagcaaggctatttggttgtacac

SEQ ID NO: 237781 - DNA, 33 bp, Homo sapien
ttgagataaatacctccagcacagtgacagcca

SEQ ID NO: 237782 - DNA, 33 bp, Homo sapien
ttgagataaatacctcgagcacagtgacagcca

SEQ ID NO: 237783 - DNA, 33 bp, Homo sapien
agagaaaagaccagacagctcttggaacagact

SEQ ID NO: 237784 - DNA, 33 bp, Homo sapien
agagaaaagaccagactgctcttggaacagact

SEQ ID NO: 237785 - DNA, 33 bp, Homo sapien
caccctcaatcaatggcagacatcacttatctc

SEQ ID NO: 237786 - DNA, 33 bp, Homo sapien
caccctcaatcaatggtagacatcacttatctc

SEQ ID NO: 237787 - DNA, 33 bp, Homo sapien
agaacctgacaagttcaaggcaaaaaagccagt

SEQ ID NO: 237788 - DNA, 33 bp, Homo sapien
agaacctgacaagttcgaggcaaaaaagccagt

SEQ ID NO: 237789 - DNA, 33 bp, Homo sapien
ctttgttctagatctacatattgcggatggaag

SEQ ID NO: 237790 - DNA, 33 bp, Homo sapien
ctttgttctagatctatatattgcggatggaag

SEQ ID NO: 237791 - DNA, 33 bp, Homo sapien
tcaatccgataagctcaaaataagcatctatta

SEQ ID NO: 237792 - DNA, 33 bp, Homo sapien
tcaatccgataagctccaaataagcatctatta

SEQ ID NO: 237793 - DNA, 33 bp, Homo sapien
tctgttacttgcagcaaatgagtcttgactaat

SEQ ID NO: 237794 - DNA, 33 bp, Homo sapien
tctgttacttgcagcagatgagtcttgactaat

SEQ ID NO: 237795 - DNA, 33 bp, Homo sapien
ctgaacccttgtggtacactagcatgccatgat

SEQ ID NO: 237796 - DNA, 33 bp, Homo sapien
ctgaacccttgtggtatactagcatgccatgat

SEQ ID NO: 237797 - DNA, 33 bp, Homo sapien
ggatttgtatcctctacggttggcccaaggttg

SEQ ID NO: 237798 - DNA, 33 bp, Homo sapien
ggatttgtatcctctatggttggcccaaggttg

SEQ ID NO: 237799 - DNA, 33 bp, Homo sapien
ttacatacaagtaaatcacaaagaagaccagaa

SEQ ID NO: 237800 - DNA, 33 bp, Homo sapien
ttacatacaagtaaatgacaaagaagaccagaa

SEQ ID NO: 237801 - DNA, 33 bp, Homo sapien
atatagtgaatgctcacggaaggaagctcaaga

SEQ ID NO: 237802 - DNA, 33 bp, Homo sapien
atatagtgaatgctcatggaaggaagctcaaga

SEQ ID NO: 237803 - DNA, 33 bp, Homo sapien
ctttcaactgtgccaaaaagtacaatatattag

SEQ ID NO: 237804 - DNA, 33 bp, Homo sapien
ctttcaactgtgccaagaagtacaatatattag

SEQ ID NO: 237805 - DNA, 33 bp, Homo sapien
gggctaagtgaatatgaactaaaagcagcttac

SEQ ID NO: 237806 - DNA, 33 bp, Homo sapien
gggctaagtgaatatggactaaaagcagcttac

SEQ ID NO: 237807 - DNA, 33 bp, Homo sapien
tgcctttcttctcatacagtctgtgtttatctt

SEQ ID NO: 237808 - DNA, 33 bp, Homo sapien
tgcctttcttctcatatagtctgtgtttatctt

SEQ ID NO: 237809 - DNA, 33 bp, Homo sapien
tttggaaaacacagaaagatgagcatatctgaa

SEQ ID NO: 237810 - DNA, 33 bp, Homo sapien
tttggaaaacacagaaggatgagcatatctgaa

SEQ ID NO: 237811 - DNA, 33 bp, Homo sapien
tctacaagatggtataagatagtacgatcagaa

SEQ ID NO: 237812 - DNA, 33 bp, Homo sapien
tctacaagatggtataggatagtacgatcagaa

SEQ ID NO: 237813 - DNA, 33 bp, Homo sapien
attccatactccagacaataaatgttacatcct

SEQ ID NO: 237814 - DNA, 33 bp, Homo sapien
attccatactccagacgataaatgttacatcct

SEQ ID NO: 237815 - DNA, 33 bp, Homo sapien
agtgccatgctacctgcatagcccgcagaattg

SEQ ID NO: 237816 - DNA, 33 bp, Homo sapien
agtgccatgctacctgtatagcccgcagaattg

SEQ ID NO: 237817 - DNA, 33 bp, Homo sapien
ttcttaaattactccaactctttccagggtcct

SEQ ID NO: 237818 - DNA, 33 bp, Homo sapien
ttcttaaattactccagctctttccagggtcct

SEQ ID NO: 237819 - DNA, 33 bp, Homo sapien
gttaatgctggtctgagctaaatgtaaagagaa

SEQ ID NO: 237820 - DNA, 33 bp, Homo sapien
gttaatgctggtctgatctaaatgtaaagagaa

SEQ ID NO: 237821 - DNA, 33 bp, Homo sapien
ttctattatggaatcactatggtttgaagtatg

SEQ ID NO: 237822 - DNA, 33 bp, Homo sapien
ttctattatggaatcattatggtttgaagtatg

SEQ ID NO: 237823 - DNA, 33 bp, Homo sapien
aaagttcagaactgccaacacaaaaaatgtaca

SEQ ID NO: 237824 - DNA, 33 bp, Homo sapien
aaagttcagaactgcctacacaaaaaatgtaca

SEQ ID NO: 237825 - DNA, 33 bp, Homo sapien
cagttctgaacttttagaagcacattaatgttc

SEQ ID NO: 237826 - DNA, 33 bp, Homo sapien
cagttctgaacttttataagcacattaatgttc

SEQ ID NO: 237827 - DNA, 33 bp, Homo sapien
acattgagaaatacaaattaggtagactggtgc

SEQ ID NO: 237828 - DNA, 33 bp, Homo sapien
acattgagaaatacaagttaggtagactggtgc

SEQ ID NO: 237829 - DNA, 33 bp, Homo sapien
tgcttttgcgtacactaacttttattttacttt

SEQ ID NO: 237830 - DNA, 33 bp, Homo sapien
tgcttttgcgtacactcacttttattttacttt

SEQ ID NO: 237831 - DNA, 33 bp, Homo sapien
atttcgttattgtgcaaattcacacagtgtact

SEQ ID NO: 237832 - DNA, 33 bp, Homo sapien
atttcgttattgtgcagattcacacagtgtact

SEQ ID NO: 237833 - DNA, 33 bp, Homo sapien
tccagtcatccctgccaaagtatcagacatcca

SEQ ID NO: 237834 - DNA, 33 bp, Homo sapien
tccagtcatccctgccgaagtatcagacatcca

SEQ ID NO: 237835 - DNA, 33 bp, Homo sapien
aacagtaggctgagtacccaacactgatcataa

SEQ ID NO: 237836 - DNA, 33 bp, Homo sapien
aacagtaggctgagtatccaacactgatcataa

SEQ ID NO: 237837 - DNA, 33 bp, Homo sapien
aactactattctcctccccacttcaacgagaac

SEQ ID NO: 237838 - DNA, 33 bp, Homo sapien
aactactattctcctctccacttcaacgagaac

SEQ ID NO: 237839 - DNA, 33 bp, Homo sapien
gcccttcctattcagagcctcttggctttaaca

SEQ ID NO: 237840 - DNA, 33 bp, Homo sapien
gcccttcctattcagatcctcttggctttaaca

SEQ ID NO: 237841 - DNA, 33 bp, Homo sapien
aatcatatcaatcgataaacttacatcttttaa

SEQ ID NO: 237842 - DNA, 33 bp, Homo sapien
aatcatatcaatcgattaacttacatcttttaa

SEQ ID NO: 237843 - DNA, 33 bp, Homo sapien
ccctaaaagatgctaacgttctaaccccaagca

SEQ ID NO: 237844 - DNA, 33 bp, Homo sapien
ccctaaaagatgctaatgttctaaccccaagca

SEQ ID NO: 237845 - DNA, 33 bp, Homo sapien
tgccaattgtatgcaaaatagttttatcatggt

SEQ ID NO: 237846 - DNA, 33 bp, Homo sapien
tgccaattgtatgcaagatagttttatcatggt

SEQ ID NO: 237847 - DNA, 33 bp, Homo sapien
tatgggatatcaagaaaaaaagtaaacatcacc

SEQ ID NO: 237848 - DNA, 33 bp, Homo sapien
tatgggatatcaagaagaaaagtaaacatcacc

SEQ ID NO: 237849 - DNA, 33 bp, Homo sapien
atttattaatatggtcgcactaaaagaaattct

SEQ ID NO: 237850 - DNA, 33 bp, Homo sapien
atttattaatatggtctcactaaaagaaattct

SEQ ID NO: 237851 - DNA, 33 bp, Homo sapien
ggtagaggccatgcaaatgagataagcaaggtg

SEQ ID NO: 237852 - DNA, 33 bp, Homo sapien
ggtagaggccatgcaactgagataagcaaggtg

SEQ ID NO: 237853 - DNA, 33 bp, Homo sapien
ttctattactccaatacagtagtcgcttatttg

SEQ ID NO: 237854 - DNA, 33 bp, Homo sapien
ttctattactccaatatagtagtcgcttatttg

SEQ ID NO: 237855 - DNA, 33 bp, Homo sapien
tcctcatttccacccactcatacacttaaacat

SEQ ID NO: 237856 - DNA, 33 bp, Homo sapien
tcctcatttccacccagtcatacacttaaacat

SEQ ID NO: 237857 - DNA, 33 bp, Homo sapien
aggtccagctccctagaaaacagactcagatgt

SEQ ID NO: 237858 - DNA, 33 bp, Homo sapien
aggtccagctccctaggaaacagactcagatgt

SEQ ID NO: 237859 - DNA, 33 bp, Homo sapien
tctgatttcattgactcacgataattactactc

SEQ ID NO: 237860 - DNA, 33 bp, Homo sapien
tctgatttcattgacttacgataattactactc

SEQ ID NO: 237861 - DNA, 33 bp, Homo sapien
gagtcccctccagcaacaaggccctcattagat

SEQ ID NO: 237862 - DNA, 33 bp, Homo sapien
gagtcccctccagcaagaaggccctcattagat

SEQ ID NO: 237863 - DNA, 33 bp, Homo sapien
gatttgggtgacagcagcttcctaataaggaag

SEQ ID NO: 237864 - DNA, 33 bp, Homo sapien
gatttgggtgacagcatcttcctaataaggaag

SEQ ID NO: 237865 - DNA, 33 bp, Homo sapien
tgagcttacagcaaaaaaattttggtccattct

SEQ ID NO: 237866 - DNA, 33 bp, Homo sapien
tgagcttacagcaaaacaattttggtccattct

SEQ ID NO: 237867 - DNA, 33 bp, Homo sapien
tgctacctgacaaaaaatttgaccttgttggat

SEQ ID NO: 237868 - DNA, 33 bp, Homo sapien
tgctacctgacaaaaactttgaccttgttggat

SEQ ID NO: 237869 - DNA, 33 bp, Homo sapien
gcaaagtttacctttaaatattggctttagaag

SEQ ID NO: 237870 - DNA, 33 bp, Homo sapien
gcaaagtttacctttagatattggctttagaag

SEQ ID NO: 237871 - DNA, 33 bp, Homo sapien
ggtagtctcttgattcaattatcaaaagggcca

SEQ ID NO: 237872 - DNA, 33 bp, Homo sapien
ggtagtctcttgattcgattatcaaaagggcca

SEQ ID NO: 237873 - DNA, 33 bp, Homo sapien
tgctattttaactggcactgcaaagactgcagt

SEQ ID NO: 237874 - DNA, 33 bp, Homo sapien
tgctattttaactggcgctgcaaagactgcagt

SEQ ID NO: 237875 - DNA, 33 bp, Homo sapien
caaggataggaaaaaaatcacagatgctgattc

SEQ ID NO: 237876 - DNA, 33 bp, Homo sapien
caaggataggaaaaaagtcacagatgctgattc

SEQ ID NO: 237877 - DNA, 33 bp, Homo sapien
tttttatcattcagggcccaatcaggaaaacag

SEQ ID NO: 237878 - DNA, 33 bp, Homo sapien
tttttatcattcagggtccaatcaggaaaacag

SEQ ID NO: 237879 - DNA, 33 bp, Homo sapien
atttggcccatttttcccatgctcatggccact

SEQ ID NO: 237880 - DNA, 33 bp, Homo sapien
atttggcccatttttctcatgctcatggccact

SEQ ID NO: 237881 - DNA, 33 bp, Homo sapien
cattttactctgacaaaaaggaacttacataca

SEQ ID NO: 237882 - DNA, 33 bp, Homo sapien
cattttactctgacaacaaggaacttacataca

SEQ ID NO: 237883 - DNA, 33 bp, Homo sapien
agtaagctgcaaataaaccaaatgagcaggaaa

SEQ ID NO: 237884 - DNA, 33 bp, Homo sapien
agtaagctgcaaataacccaaatgagcaggaaa

SEQ ID NO: 237885 - DNA, 33 bp, Homo sapien
accatattaatccaaacgttaaatgctgaattc

SEQ ID NO: 237886 - DNA, 33 bp, Homo sapien
accatattaatccaaatgttaaatgctgaattc

SEQ ID NO: 237887 - DNA, 33 bp, Homo sapien
aagtgctttattggtacggatctattctgactt

SEQ ID NO: 237888 - DNA, 33 bp, Homo sapien
aagtgctttattggtatggatctattctgactt

SEQ ID NO: 237889 - DNA, 33 bp, Homo sapien
tgaccaaatcaggaatcaatgatctgccatttt

SEQ ID NO: 237890 - DNA, 33 bp, Homo sapien
tgaccaaatcaggaattaatgatctgccatttt

SEQ ID NO: 237891 - DNA, 33 bp, Homo sapien
agcaagtaagagaggacatccagttagagaaac

SEQ ID NO: 237892 - DNA, 33 bp, Homo sapien
agcaagtaagagaggagatccagttagagaaac

SEQ ID NO: 237893 - DNA, 33 bp, Homo sapien
aggcttcacagtgaatcaatattggcctatctg

SEQ ID NO: 237894 - DNA, 33 bp, Homo sapien
aggcttcacagtgaattaatattggcctatctg

SEQ ID NO: 237895 - DNA, 33 bp, Homo sapien
tgctgtcagaaacagacgaaatgcagggcatgg

SEQ ID NO: 237896 - DNA, 33 bp, Homo sapien
tgctgtcagaaacagatgaaatgcagggcatgg

SEQ ID NO: 237897 - DNA, 33 bp, Homo sapien
ctctttgattttcacaatacactttatcagcat

SEQ ID NO: 237898 - DNA, 33 bp, Homo sapien
ctctttgattttcacagtacactttatcagcat

SEQ ID NO: 237899 - DNA, 33 bp, Homo sapien
agccagagctgagaatcactgatccaggagtcc

SEQ ID NO: 237900 - DNA, 33 bp, Homo sapien
agccagagctgagaattactgatccaggagtcc

SEQ ID NO: 237901 - DNA, 33 bp, Homo sapien
gtggctcaggtaataacgtcataacagagatga

SEQ ID NO: 237902 - DNA, 33 bp, Homo sapien
gtggctcaggtaataatgtcataacagagatga

SEQ ID NO: 237903 - DNA, 33 bp, Homo sapien
gcggcatgttctaattaaaatgtgagaagagta

SEQ ID NO: 237904 - DNA, 33 bp, Homo sapien
gcggcatgttctaattgaaatgtgagaagagta

SEQ ID NO: 237905 - DNA, 33 bp, Homo sapien
tgtggctcttacaaaaatcctcaatttcagaac

SEQ ID NO: 237906 - DNA, 33 bp, Homo sapien
tgtggctcttacaaaagtcctcaatttcagaac

SEQ ID NO: 237907 - DNA, 33 bp, Homo sapien
ttgtgttgcaaagaagcaaataaaaagtgaggc

SEQ ID NO: 237908 - DNA, 33 bp, Homo sapien
ttgtgttgcaaagaagtaaataaaaagtgaggc

SEQ ID NO: 237909 - DNA, 33 bp, Homo sapien
aatcctttgtggtctcacatccaataatatcca

SEQ ID NO: 237910 - DNA, 33 bp, Homo sapien
aatcctttgtggtctcccatccaataatatcca

SEQ ID NO: 237911 - DNA, 33 bp, Homo sapien
gttgatgatgataacaatggtaatgacttacaa

SEQ ID NO: 237912 - DNA, 33 bp, Homo sapien
gttgatgatgataacagtggtaatgacttacaa

SEQ ID NO: 237913 - DNA, 33 bp, Homo sapien
tcttattatgtactcaacaatacactctagaat

SEQ ID NO: 237914 - DNA, 33 bp, Homo sapien
tcttattatgtactcagcaatacactctagaat

SEQ ID NO: 237915 - DNA, 33 bp, Homo sapien
ttgttttaggaattggacatttcagttatttgc

SEQ ID NO: 237916 - DNA, 33 bp, Homo sapien
ttgttttaggaattgggcatttcagttatttgc

SEQ ID NO: 237917 - DNA, 33 bp, Homo sapien
tatctgttattcagaccgactgtggaatggcag

SEQ ID NO: 237918 - DNA, 33 bp, Homo sapien
tatctgttattcagactgactgtggaatggcag

SEQ ID NO: 237919 - DNA, 33 bp, Homo sapien
caactttctgcaaaaaatcccataagaggtgaa

SEQ ID NO: 237920 - DNA, 33 bp, Homo sapien
caactttctgcaaaaagtcccataagaggtgaa

SEQ ID NO: 237921 - DNA, 33 bp, Homo sapien
atttaagaaacatggccgattacagtgcgttaa

SEQ ID NO: 237922 - DNA, 33 bp, Homo sapien
atttaagaaacatggctgattacagtgcgttaa

SEQ ID NO: 237923 - DNA, 33 bp, Homo sapien
agatagcatagggcccagatataggaattcaag

SEQ ID NO: 237924 - DNA, 33 bp, Homo sapien
agatagcatagggcccggatataggaattcaag

SEQ ID NO: 237925 - DNA, 33 bp, Homo sapien
aaagcctaaaacaataactagcacagtataatg

SEQ ID NO: 237926 - DNA, 33 bp, Homo sapien
aaagcctaaaacaatacctagcacagtataatg

SEQ ID NO: 237927 - DNA, 33 bp, Homo sapien
taaatactcagtattcactttcttatcccaggc

SEQ ID NO: 237928 - DNA, 33 bp, Homo sapien
taaatactcagtattcgctttcttatcccaggc

SEQ ID NO: 237929 - DNA, 33 bp, Homo sapien
ccaaagcagtagaaccaatgggatctatatcta

SEQ ID NO: 237930 - DNA, 33 bp, Homo sapien
ccaaagcagtagaaccgatgggatctatatcta

SEQ ID NO: 237931 - DNA, 33 bp, Homo sapien
gaatgaatgcctaaaacgtcaaaatagatatgt

SEQ ID NO: 237932 - DNA, 33 bp, Homo sapien
gaatgaatgcctaaaatgtcaaaatagatatgt

SEQ ID NO: 237933 - DNA, 33 bp, Homo sapien
tccaaattttccttaccggtgctcaagaagtta

SEQ ID NO: 237934 - DNA, 33 bp, Homo sapien
tccaaattttccttactggtgctcaagaagtta

SEQ ID NO: 237935 - DNA, 33 bp, Homo sapien
tacaaagttgccctacagagatagaagggggct

SEQ ID NO: 237936 - DNA, 33 bp, Homo sapien
tacaaagttgccctacggagatagaagggggct

SEQ ID NO: 237937 - DNA, 33 bp, Homo sapien
aaataggtgtgaatcaaaactgttatctgtcaa

SEQ ID NO: 237938 - DNA, 33 bp, Homo sapien
aaataggtgtgaatcagaactgttatctgtcaa

SEQ ID NO: 237939 - DNA, 33 bp, Homo sapien
aatattaaaggatagccgatctgcaccgaacat

SEQ ID NO: 237940 - DNA, 33 bp, Homo sapien
aatattaaaggatagctgatctgcaccgaacat

SEQ ID NO: 237941 - DNA, 33 bp, Homo sapien
ttaaactattaaatcaacacacaatgaatcata

SEQ ID NO: 237942 - DNA, 33 bp, Homo sapien
ttaaactattaaatcagcacacaatgaatcata

SEQ ID NO: 237943 - DNA, 33 bp, Homo sapien
aatcagataagtgaagaaaagtttagctggaca

SEQ ID NO: 237944 - DNA, 33 bp, Homo sapien
aatcagataagtgaagcaaagtttagctggaca

SEQ ID NO: 237945 - DNA, 33 bp, Homo sapien
tcctcaaggtacatgccagtggatgacagcagt

SEQ ID NO: 237946 - DNA, 33 bp, Homo sapien
tcctcaaggtacatgcgagtggatgacagcagt

SEQ ID NO: 237947 - DNA, 33 bp, Homo sapien
cagctgacaggcaagcaaagaagcctttaaaga

SEQ ID NO: 237948 - DNA, 33 bp, Homo sapien
cagctgacaggcaagcgaagaagcctttaaaga

SEQ ID NO: 237949 - DNA, 33 bp, Homo sapien
tcagattttctagtgccaaaggagacatggttc

SEQ ID NO: 237950 - DNA, 33 bp, Homo sapien
tcagattttctagtgctaaaggagacatggttc

SEQ ID NO: 237951 - DNA, 33 bp, Homo sapien
tatccctgtgctccagaaagggtgatactagag

SEQ ID NO: 237952 - DNA, 33 bp, Homo sapien
tatccctgtgctccaggaagggtgatactagag

SEQ ID NO: 237953 - DNA, 33 bp, Homo sapien
cttccaccttcctggaataggctttgaataatc

SEQ ID NO: 237954 - DNA, 33 bp, Homo sapien
cttccaccttcctggagtaggctttgaataatc

SEQ ID NO: 237955 - DNA, 33 bp, Homo sapien
ctcttcttccagtgccagaaggtgaatgtgaaa

SEQ ID NO: 237956 - DNA, 33 bp, Homo sapien
ctcttcttccagtgcctgaaggtgaatgtgaaa

SEQ ID NO: 237957 - DNA, 33 bp, Homo sapien
gattggctttttattccattgagtctgagttta

SEQ ID NO: 237958 - DNA, 33 bp, Homo sapien
gattggctttttattctattgagtctgagttta

SEQ ID NO: 237959 - DNA, 33 bp, Homo sapien
ggcttgcgtcctgataccaagcatcgttccctc

SEQ ID NO: 237960 - DNA, 33 bp, Homo sapien
ggcttgcgtcctgatatcaagcatcgttccctc

SEQ ID NO: 237961 - DNA, 33 bp, Homo sapien
gggcatgggctcacaaatgggattttctgatct

SEQ ID NO: 237962 - DNA, 33 bp, Homo sapien
gggcatgggctcacaattgggattttctgatct

SEQ ID NO: 237963 - DNA, 33 bp, Homo sapien
atctgcttaagcctaccgagctcacgtggggag

SEQ ID NO: 237964 - DNA, 33 bp, Homo sapien
atctgcttaagcctactgagctcacgtggggag

SEQ ID NO: 237965 - DNA, 33 bp, Homo sapien
atttgaaagaaaaccactggaagcaaagtcaac

SEQ ID NO: 237966 - DNA, 33 bp, Homo sapien
atttgaaagaaaaccattggaagcaaagtcaac

SEQ ID NO: 237967 - DNA, 33 bp, Homo sapien
tcagcatatgaaagaacagacttttgaatacag

SEQ ID NO: 237968 - DNA, 33 bp, Homo sapien
tcagcatatgaaagaatagacttttgaatacag

SEQ ID NO: 237969 - DNA, 33 bp, Homo sapien
ccgcatagagaaatcaatcaactctgtggtatt

SEQ ID NO: 237970 - DNA, 33 bp, Homo sapien
ccgcatagagaaatcagtcaactctgtggtatt

SEQ ID NO: 237971 - DNA, 33 bp, Homo sapien
actgacactagggactaaaaacaaatgtgaaat

SEQ ID NO: 237972 - DNA, 33 bp, Homo sapien
actgacactagggacttaaaacaaatgtgaaat

SEQ ID NO: 237973 - DNA, 33 bp, Homo sapien
aattaacattgaataaacagttgtagtatgttc

SEQ ID NO: 237974 - DNA, 33 bp, Homo sapien
aattaacattgaataagcagttgtagtatgttc

SEQ ID NO: 237975 - DNA, 33 bp, Homo sapien
attcaattatgtaaaaaggtttttcatctcacc

SEQ ID NO: 237976 - DNA, 33 bp, Homo sapien
attcaattatgtaaaagggtttttcatctcacc

SEQ ID NO: 237977 - DNA, 33 bp, Homo sapien
tcttgacctgcagttgcatcactccattctctg

SEQ ID NO: 237978 - DNA, 33 bp, Homo sapien
tcttgacctgcagttgtatcactccattctctg

SEQ ID NO: 237979 - DNA, 33 bp, Homo sapien
gctgtggccatgagtcacctagatgttgatggc

SEQ ID NO: 237980 - DNA, 33 bp, Homo sapien
gctgtggccatgagtcccctagatgttgatggc

SEQ ID NO: 237981 - DNA, 33 bp, Homo sapien
gtactctactcactccagaaactacagttgaga

SEQ ID NO: 237982 - DNA, 33 bp, Homo sapien
gtactctactcactccggaaactacagttgaga

SEQ ID NO: 237983 - DNA, 33 bp, Homo sapien
agtcgaggaagaagaaggagtaaaatcagtggg

SEQ ID NO: 237984 - DNA, 33 bp, Homo sapien
agtcgaggaagaagaatgagtaaaatcagtggg

SEQ ID NO: 237985 - DNA, 33 bp, Homo sapien
caaaggccttctgaaaaatctcagttactttga

SEQ ID NO: 237986 - DNA, 33 bp, Homo sapien
caaaggccttctgaaagatctcagttactttga

SEQ ID NO: 237987 - DNA, 33 bp, Homo sapien
ccaaaattcttcatggaaaagattcagtttcta

SEQ ID NO: 237988 - DNA, 33 bp, Homo sapien
ccaaaattcttcatgggaaagattcagtttcta

SEQ ID NO: 237989 - DNA, 33 bp, Homo sapien
ttgtagatttgcaggaactttttagatagtacc

SEQ ID NO: 237990 - DNA, 33 bp, Homo sapien
ttgtagatttgcaggacctttttagatagtacc

SEQ ID NO: 237991 - DNA, 33 bp, Homo sapien
gatgagatttggatgacgacataggtaaaccat

SEQ ID NO: 237992 - DNA, 33 bp, Homo sapien
gatgagatttggatgatgacataggtaaaccat

SEQ ID NO: 237993 - DNA, 33 bp, Homo sapien
cacgttttatatcagacgagtacaaagttattg

SEQ ID NO: 237994 - DNA, 33 bp, Homo sapien
cacgttttatatcagatgagtacaaagttattg

SEQ ID NO: 237995 - DNA, 33 bp, Homo sapien
ctcaggacataccgtaacactaatggcttttgc

SEQ ID NO: 237996 - DNA, 33 bp, Homo sapien
ctcaggacataccgtatcactaatggcttttgc

SEQ ID NO: 237997 - DNA, 33 bp, Homo sapien
ggggaggtgcaagtaccatgcctagttatccat

SEQ ID NO: 237998 - DNA, 33 bp, Homo sapien
ggggaggtgcaagtactatgcctagttatccat

SEQ ID NO: 237999 - DNA, 33 bp, Homo sapien
agagggggaagacaacaaacttcagctgttaac

SEQ ID NO: 238000 - DNA, 33 bp, Homo sapien
agagggggaagacaaccaacttcagctgttaac

SEQ ID NO: 238001 - DNA, 33 bp, Homo sapien
aacttccctggaagcacagtatactgatatcaa

SEQ ID NO: 238002 - DNA, 33 bp, Homo sapien
aacttccctggaagcatagtatactgatatcaa

SEQ ID NO: 238003 - DNA, 33 bp, Homo sapien
tgatcaatagagcatcaaggcaacaatgtgaga

SEQ ID NO: 238004 - DNA, 33 bp, Homo sapien
tgatcaatagagcatcgaggcaacaatgtgaga

SEQ ID NO: 238005 - DNA, 33 bp, Homo sapien
ttgaggacagagattagactaaggttaccatag

SEQ ID NO: 238006 - DNA, 33 bp, Homo sapien
ttgaggacagagattatactaaggttaccatag

SEQ ID NO: 238007 - DNA, 33 bp, Homo sapien
ggtctctgaatcagtccacatttaataaatcaa

SEQ ID NO: 238008 - DNA, 33 bp, Homo sapien
ggtctctgaatcagtctacatttaataaatcaa

SEQ ID NO: 238009 - DNA, 33 bp, Homo sapien
aacattttgtggaatacggtttcacagattact

SEQ ID NO: 238010 - DNA, 33 bp, Homo sapien
aacattttgtggaatatggtttcacagattact

SEQ ID NO: 238011 - DNA, 33 bp, Homo sapien
aactactttgtcaacacagaaattataggtgat

SEQ ID NO: 238012 - DNA, 33 bp, Homo sapien
aactactttgtcaacagagaaattataggtgat

SEQ ID NO: 238013 - DNA, 33 bp, Homo sapien
gccagttgttcttagcgctcaagaagtgtagaa

SEQ ID NO: 238014 - DNA, 33 bp, Homo sapien
gccagttgttcttagctctcaagaagtgtagaa

SEQ ID NO: 238015 - DNA, 33 bp, Homo sapien
tagagcatagtcaccactgattaaaggactaca

SEQ ID NO: 238016 - DNA, 33 bp, Homo sapien
tagagcatagtcaccattgattaaaggactaca

SEQ ID NO: 238017 - DNA, 33 bp, Homo sapien
cagcctagcaaacctaacaaattaatacacagt

SEQ ID NO: 238018 - DNA, 33 bp, Homo sapien
cagcctagcaaacctagcaaattaatacacagt

SEQ ID NO: 238019 - DNA, 33 bp, Homo sapien
gaggtcttcaccaaaacctgatgccagtgctgt

SEQ ID NO: 238020 - DNA, 33 bp, Homo sapien
gaggtcttcaccaaaagctgatgccagtgctgt

SEQ ID NO: 238021 - DNA, 33 bp, Homo sapien
cgagatattaacacacagctttgtcataaatcc

SEQ ID NO: 238022 - DNA, 33 bp, Homo sapien
cgagatattaacacacggctttgtcataaatcc

SEQ ID NO: 238023 - DNA, 33 bp, Homo sapien
agtgcaagctactacaaggttttctgacagcag

SEQ ID NO: 238024 - DNA, 33 bp, Homo sapien
agtgcaagctactacagggttttctgacagcag

SEQ ID NO: 238025 - DNA, 33 bp, Homo sapien
ggagaaagcgtcaaaaatagaggatatctgtga

SEQ ID NO: 238026 - DNA, 33 bp, Homo sapien
ggagaaagcgtcaaaagtagaggatatctgtga

SEQ ID NO: 238027 - DNA, 33 bp, Homo sapien
aatattgttaaaatgacgatgctgcccaaagca

SEQ ID NO: 238028 - DNA, 33 bp, Homo sapien
aatattgttaaaatgatgatgctgcccaaagca

SEQ ID NO: 238029 - DNA, 33 bp, Homo sapien
aaactccaatctcttcacaaagtgtcatcctgc

SEQ ID NO: 238030 - DNA, 33 bp, Homo sapien
aaactccaatctcttcgcaaagtgtcatcctgc

SEQ ID NO: 238031 - DNA, 33 bp, Homo sapien
cactcactttggaggagaccatgctaccatgtc

SEQ ID NO: 238032 - DNA, 33 bp, Homo sapien
cactcactttggaggataccatgctaccatgtc

SEQ ID NO: 238033 - DNA, 33 bp, Homo sapien
tatttctccttgacaactggagctttgtacccc

SEQ ID NO: 238034 - DNA, 33 bp, Homo sapien
tatttctccttgacaattggagctttgtacccc

SEQ ID NO: 238035 - DNA, 33 bp, Homo sapien
ggtgagtttaaggcataagaaacagcatgtgta

SEQ ID NO: 238036 - DNA, 33 bp, Homo sapien
ggtgagtttaaggcattagaaacagcatgtgta

SEQ ID NO: 238037 - DNA, 33 bp, Homo sapien
atgcacgtattagatacaggcataatcaaatta

SEQ ID NO: 238038 - DNA, 33 bp, Homo sapien
atgcacgtattagatagaggcataatcaaatta

SEQ ID NO: 238039 - DNA, 33 bp, Homo sapien
gcaacaccagtgaaagaagaaactttttatttt

SEQ ID NO: 238040 - DNA, 33 bp, Homo sapien
gcaacaccagtgaaaggagaaactttttatttt

SEQ ID NO: 238041 - DNA, 33 bp, Homo sapien
tctcctgctactacaaaacctacttttctggta

SEQ ID NO: 238042 - DNA, 33 bp, Homo sapien
tctcctgctactacaacacctacttttctggta

SEQ ID NO: 238043 - DNA, 33 bp, Homo sapien
ctggacttttgaaagtaaagattagatgatgta

SEQ ID NO: 238044 - DNA, 33 bp, Homo sapien
ctggacttttgaaagttaagattagatgatgta

SEQ ID NO: 238045 - DNA, 33 bp, Homo sapien
ctttcttcgtacaatacgagtctagttaatgag

SEQ ID NO: 238046 - DNA, 33 bp, Homo sapien
ctttcttcgtacaatatgagtctagttaatgag

SEQ ID NO: 238047 - DNA, 33 bp, Homo sapien
gagaagaccattgaaacaaattaaagtttgtcc

SEQ ID NO: 238048 - DNA, 33 bp, Homo sapien
gagaagaccattgaaataaattaaagtttgtcc

SEQ ID NO: 238049 - DNA, 33 bp, Homo sapien
ggaaggctgccagtcacaggtttggacttcccc

SEQ ID NO: 238050 - DNA, 33 bp, Homo sapien
ggaaggctgccagtcataggtttggacttcccc

SEQ ID NO: 238051 - DNA, 33 bp, Homo sapien
ctctgtaggaacttaacaatcagcagagtgagt

SEQ ID NO: 238052 - DNA, 33 bp, Homo sapien
ctctgtaggaacttaataatcagcagagtgagt

SEQ ID NO: 238053 - DNA, 33 bp, Homo sapien
attaatattagaggaacaatgtatctcatggga

SEQ ID NO: 238054 - DNA, 33 bp, Homo sapien
attaatattagaggaagaatgtatctcatggga

SEQ ID NO: 238055 - DNA, 33 bp, Homo sapien
tggcattacagagatacaaatgaaggacattca

SEQ ID NO: 238056 - DNA, 33 bp, Homo sapien
tggcattacagagatataaatgaaggacattca

SEQ ID NO: 238057 - DNA, 33 bp, Homo sapien
acaaaagtcaggggagactcatccagcctggtt

SEQ ID NO: 238058 - DNA, 33 bp, Homo sapien
acaaaagtcaggggagtctcatccagcctggtt

SEQ ID NO: 238059 - DNA, 33 bp, Homo sapien
ttccttctccataaatcatccagctgtatttac

SEQ ID NO: 238060 - DNA, 33 bp, Homo sapien
ttccttctccataaattatccagctgtatttac

SEQ ID NO: 238061 - DNA, 33 bp, Homo sapien
gttctgtctgtttggaatcaggcaagcagtgaa

SEQ ID NO: 238062 - DNA, 33 bp, Homo sapien
gttctgtctgtttggactcaggcaagcagtgaa

SEQ ID NO: 238063 - DNA, 33 bp, Homo sapien
ttaatgttaaataaacacctacacttatccttg

SEQ ID NO: 238064 - DNA, 33 bp, Homo sapien
ttaatgttaaataaacccctacacttatccttg

SEQ ID NO: 238065 - DNA, 33 bp, Homo sapien
agagttctagtgaagacgaataaaatgagatct

SEQ ID NO: 238066 - DNA, 33 bp, Homo sapien
agagttctagtgaagatgaataaaatgagatct

SEQ ID NO: 238067 - DNA, 33 bp, Homo sapien
tcccagacatttcattaaagtctcattgattct

SEQ ID NO: 238068 - DNA, 33 bp, Homo sapien
tcccagacatttcattgaagtctcattgattct

SEQ ID NO: 238069 - DNA, 33 bp, Homo sapien
aatgtaatgctaagtgaaacatggaggacttgg

SEQ ID NO: 238070 - DNA, 33 bp, Homo sapien
aatgtaatgctaagtggaacatggaggacttgg

SEQ ID NO: 238071 - DNA, 33 bp, Homo sapien
ttacaaatcaacatagacaacacgaaaacatct

SEQ ID NO: 238072 - DNA, 33 bp, Homo sapien
ttacaaatcaacataggcaacacgaaaacatct

SEQ ID NO: 238073 - DNA, 33 bp, Homo sapien
ctactcctaggttcataatccaaagaaagaaat

SEQ ID NO: 238074 - DNA, 33 bp, Homo sapien
ctactcctaggttcatgatccaaagaaagaaat

SEQ ID NO: 238075 - DNA, 33 bp, Homo sapien
aaaaccataacacacaaaaaatgttttccactt

SEQ ID NO: 238076 - DNA, 33 bp, Homo sapien
aaaaccataacacacacaaaatgttttccactt

SEQ ID NO: 238077 - DNA, 33 bp, Homo sapien
aacctagaaaatggataaattctagacagcaac

SEQ ID NO: 238078 - DNA, 33 bp, Homo sapien
aacctagaaaatggatgaattctagacagcaac

SEQ ID NO: 238079 - DNA, 33 bp, Homo sapien
gattcagacgttgaggaatgatattactaagat

SEQ ID NO: 238080 - DNA, 33 bp, Homo sapien
gattcagacgttgaggtatgatattactaagat

SEQ ID NO: 238081 - DNA, 33 bp, Homo sapien
aatgaagtttaaagagaccaaacgatctcctga

SEQ ID NO: 238082 - DNA, 33 bp, Homo sapien
aatgaagtttaaagagcccaaacgatctcctga

SEQ ID NO: 238083 - DNA, 33 bp, Homo sapien
caattataataacctcaaggcaaagaagttggt

SEQ ID NO: 238084 - DNA, 33 bp, Homo sapien
caattataataacctcgaggcaaagaagttggt

SEQ ID NO: 238085 - DNA, 33 bp, Homo sapien
atgtgaccctgtgctacgattgtaaggagcaca

SEQ ID NO: 238086 - DNA, 33 bp, Homo sapien
atgtgaccctgtgctatgattgtaaggagcaca

SEQ ID NO: 238087 - DNA, 33 bp, Homo sapien
accttcataaaactatcaatgcaccccttttct

SEQ ID NO: 238088 - DNA, 33 bp, Homo sapien
accttcataaaactattaatgcaccccttttct

SEQ ID NO: 238089 - DNA, 33 bp, Homo sapien
taatctactgtatctcaactctaaatcaatcac

SEQ ID NO: 238090 - DNA, 33 bp, Homo sapien
taatctactgtatctccactctaaatcaatcac

SEQ ID NO: 238091 - DNA, 33 bp, Homo sapien
taaattttatgacctacgatgttgctaaagtcc

SEQ ID NO: 238092 - DNA, 33 bp, Homo sapien
taaattttatgacctatgatgttgctaaagtcc

SEQ ID NO: 238093 - DNA, 33 bp, Homo sapien
ctcctgtttcacttaacctgtgtcctgttggtt

SEQ ID NO: 238094 - DNA, 33 bp, Homo sapien
ctcctgtttcacttaatctgtgtcctgttggtt

SEQ ID NO: 238095 - DNA, 33 bp, Homo sapien
tatttcctgtaccttacaataccctgagtgcca

SEQ ID NO: 238096 - DNA, 33 bp, Homo sapien
tatttcctgtaccttataataccctgagtgcca

SEQ ID NO: 238097 - DNA, 33 bp, Homo sapien
cagatcttgttagaacacacttagtatcatgag

SEQ ID NO: 238098 - DNA, 33 bp, Homo sapien
cagatcttgttagaacgcacttagtatcatgag

SEQ ID NO: 238099 - DNA, 33 bp, Homo sapien
aattctgacactgttaagctgcataatgatggc

SEQ ID NO: 238100 - DNA, 33 bp, Homo sapien
aattctgacactgttacgctgcataatgatggc

SEQ ID NO: 238101 - DNA, 33 bp, Homo sapien
cctgaggtaaattgcaatacaattcactaaaca

SEQ ID NO: 238102 - DNA, 33 bp, Homo sapien
cctgaggtaaattgcagtacaattcactaaaca

SEQ ID NO: 238103 - DNA, 33 bp, Homo sapien
ttcaacctaagcatccaaaaactggtatgtagt

SEQ ID NO: 238104 - DNA, 33 bp, Homo sapien
ttcaacctaagcatcccaaaactggtatgtagt

SEQ ID NO: 238105 - DNA, 33 bp, Homo sapien
acattatgtggtgttaggtggtagactatgaag

SEQ ID NO: 238106 - DNA, 33 bp, Homo sapien
acattatgtggtgttatgtggtagactatgaag

SEQ ID NO: 238107 - DNA, 33 bp, Homo sapien
attctctcttccactgaaggaaacacatcacac

SEQ ID NO: 238108 - DNA, 33 bp, Homo sapien
attctctcttccactggaggaaacacatcacac

SEQ ID NO: 238109 - DNA, 33 bp, Homo sapien
tatacagtggctattacccattcagcccagaaa

SEQ ID NO: 238110 - DNA, 33 bp, Homo sapien
tatacagtggctattatccattcagcccagaaa

SEQ ID NO: 238111 - DNA, 33 bp, Homo sapien
tctctgaactgataaaatgagtgtttgtagaga

SEQ ID NO: 238112 - DNA, 33 bp, Homo sapien
tctctgaactgataaagtgagtgtttgtagaga

SEQ ID NO: 238113 - DNA, 33 bp, Homo sapien
tgaatttaataatgccactggacacttatactc

SEQ ID NO: 238114 - DNA, 33 bp, Homo sapien
tgaatttaataatgcctctggacacttatactc

SEQ ID NO: 238115 - DNA, 33 bp, Homo sapien
tctgttcagtatactaaaaagaaggagaagcaa

SEQ ID NO: 238116 - DNA, 33 bp, Homo sapien
tctgttcagtatactacaaagaaggagaagcaa

SEQ ID NO: 238117 - DNA, 33 bp, Homo sapien
acccctcataaaatcaacagatatcgtgagatt

SEQ ID NO: 238118 - DNA, 33 bp, Homo sapien
acccctcataaaatcaccagatatcgtgagatt

SEQ ID NO: 238119 - DNA, 33 bp, Homo sapien
ccactcctcattaaaaacattagttgacctcat

SEQ ID NO: 238120 - DNA, 33 bp, Homo sapien
ccactcctcattaaaaccattagttgacctcat

SEQ ID NO: 238121 - DNA, 33 bp, Homo sapien
ttaacaaatattgacacagccttcttatgcctg

SEQ ID NO: 238122 - DNA, 33 bp, Homo sapien
ttaacaaatattgacatagccttcttatgcctg

SEQ ID NO: 238123 - DNA, 33 bp, Homo sapien
cccaaggggagaagcaaaccattagaccagagc

SEQ ID NO: 238124 - DNA, 33 bp, Homo sapien
cccaaggggagaagcagaccattagaccagagc

SEQ ID NO: 238125 - DNA, 33 bp, Homo sapien
ggacttacataattacagcttaagtccagagaa

SEQ ID NO: 238126 - DNA, 33 bp, Homo sapien
ggacttacataattacggcttaagtccagagaa

SEQ ID NO: 238127 - DNA, 33 bp, Homo sapien
agatctgcttgattcaatatgtctcagcttggc

SEQ ID NO: 238128 - DNA, 33 bp, Homo sapien
agatctgcttgattcagtatgtctcagcttggc

SEQ ID NO: 238129 - DNA, 33 bp, Homo sapien
ctgtttcacaaagaacactgtgcaaagggatga

SEQ ID NO: 238130 - DNA, 33 bp, Homo sapien
ctgtttcacaaagaacgctgtgcaaagggatga

SEQ ID NO: 238131 - DNA, 33 bp, Homo sapien
ctccagggattcatggaaagctaaacagtaaac

SEQ ID NO: 238132 - DNA, 33 bp, Homo sapien
ctccagggattcatggcaagctaaacagtaaac

SEQ ID NO: 238133 - DNA, 33 bp, Homo sapien
tgacttaaagtaatgagatttcttggcgttggt

SEQ ID NO: 238134 - DNA, 33 bp, Homo sapien
tgacttaaagtaatgatatttcttggcgttggt

SEQ ID NO: 238135 - DNA, 33 bp, Homo sapien
ctacaggagcatcactaagcaagaacccaactg

SEQ ID NO: 238136 - DNA, 33 bp, Homo sapien
ctacaggagcatcactgagcaagaacccaactg

SEQ ID NO: 238137 - DNA, 33 bp, Homo sapien
atgtatactggccaagaagagctttccatttct

SEQ ID NO: 238138 - DNA, 33 bp, Homo sapien
atgtatactggccaaggagagctttccatttct

SEQ ID NO: 238139 - DNA, 33 bp, Homo sapien
ctgagacacaatcggacaatattaaatgtatgt

SEQ ID NO: 238140 - DNA, 33 bp, Homo sapien
ctgagacacaatcggagaatattaaatgtatgt

SEQ ID NO: 238141 - DNA, 33 bp, Homo sapien
tactcatgctttatggcaatgtgcctatttaaa

SEQ ID NO: 238142 - DNA, 33 bp, Homo sapien
tactcatgctttatgggaatgtgcctatttaaa

SEQ ID NO: 238143 - DNA, 33 bp, Homo sapien
gagttatttaattccaatgctgactactagcct

SEQ ID NO: 238144 - DNA, 33 bp, Homo sapien
gagttatttaattccagtgctgactactagcct

SEQ ID NO: 238145 - DNA, 33 bp, Homo sapien
agattccatgtgcaaaactgcttgttgaacaga

SEQ ID NO: 238146 - DNA, 33 bp, Homo sapien
agattccatgtgcaaagctgcttgttgaacaga

SEQ ID NO: 238147 - DNA, 33 bp, Homo sapien
accggaatacccatcacacctccatcctcatga

SEQ ID NO: 238148 - DNA, 33 bp, Homo sapien
accggaatacccatcatacctccatcctcatga

SEQ ID NO: 238149 - DNA, 33 bp, Homo sapien
ttctttatccaatgacaagttctagtgggctat

SEQ ID NO: 238150 - DNA, 33 bp, Homo sapien
ttctttatccaatgacgagttctagtgggctat

SEQ ID NO: 238151 - DNA, 33 bp, Homo sapien
ctgccattcaaacctacgaattggttctcaagc

SEQ ID NO: 238152 - DNA, 33 bp, Homo sapien
ctgccattcaaacctaggaattggttctcaagc

SEQ ID NO: 238153 - DNA, 33 bp, Homo sapien
tctggggactgaaggaaaatggcactcttttca

SEQ ID NO: 238154 - DNA, 33 bp, Homo sapien
tctggggactgaaggacaatggcactcttttca

SEQ ID NO: 238155 - DNA, 33 bp, Homo sapien
tgaggatgcagagtcaaacaatatcagaagggg

SEQ ID NO: 238156 - DNA, 33 bp, Homo sapien
tgaggatgcagagtcagacaatatcagaagggg

SEQ ID NO: 238157 - DNA, 33 bp, Homo sapien
gaagatgacataagaaatacaataaagtcagca

SEQ ID NO: 238158 - DNA, 33 bp, Homo sapien
gaagatgacataagaagtacaataaagtcagca

SEQ ID NO: 238159 - DNA, 33 bp, Homo sapien
ttctgttactctggaaacaaataaagttataaa

SEQ ID NO: 238160 - DNA, 33 bp, Homo sapien
ttctgttactctggaagcaaataaagttataaa

SEQ ID NO: 238161 - DNA, 33 bp, Homo sapien
ctgtaagtagtgaaaacctttgctagactggaa

SEQ ID NO: 238162 - DNA, 33 bp, Homo sapien
ctgtaagtagtgaaaatctttgctagactggaa

SEQ ID NO: 238163 - DNA, 33 bp, Homo sapien
cacacttcgtaagacactaaaaattcattccta

SEQ ID NO: 238164 - DNA, 33 bp, Homo sapien
cacacttcgtaagacattaaaaattcattccta

SEQ ID NO: 238165 - DNA, 33 bp, Homo sapien
cagctcatacacaatgaaacagttccgttgaag

SEQ ID NO: 238166 - DNA, 33 bp, Homo sapien
cagctcatacacaatgtaacagttccgttgaag

SEQ ID NO: 238167 - DNA, 33 bp, Homo sapien
aattccaggaaatgtacattaatgtctactgaa

SEQ ID NO: 238168 - DNA, 33 bp, Homo sapien
aattccaggaaatgtatattaatgtctactgaa

SEQ ID NO: 238169 - DNA, 33 bp, Homo sapien
acatcatttaaacagacgatcctgctccacatt

SEQ ID NO: 238170 - DNA, 33 bp, Homo sapien
acatcatttaaacagatgatcctgctccacatt

SEQ ID NO: 238171 - DNA, 33 bp, Homo sapien
cacggattgcataatcaagaaaatagagcagtc

SEQ ID NO: 238172 - DNA, 33 bp, Homo sapien
cacggattgcataatcgagaaaatagagcagtc

SEQ ID NO: 238173 - DNA, 33 bp, Homo sapien
gataggttaataattgacaagactttaattggg

SEQ ID NO: 238174 - DNA, 33 bp, Homo sapien
gataggttaataattggcaagactttaattggg

SEQ ID NO: 238175 - DNA, 33 bp, Homo sapien
ttcttaagcatataaaataaaactaccattctc

SEQ ID NO: 238176 - DNA, 33 bp, Homo sapien
ttcttaagcatataaagtaaaactaccattctc

SEQ ID NO: 238177 - DNA, 33 bp, Homo sapien
tttttagtttgaatggcaagaggttatggcaga

SEQ ID NO: 238178 - DNA, 33 bp, Homo sapien
tttttagtttgaatggtaagaggttatggcaga

SEQ ID NO: 238179 - DNA, 33 bp, Homo sapien
tctttgtgaattttcagcttgattccttttgct

SEQ ID NO: 238180 - DNA, 33 bp, Homo sapien
tctttgtgaattttcatcttgattccttttgct

SEQ ID NO: 238181 - DNA, 33 bp, Homo sapien
tttgtgttagatttacaaatgctagataattta

SEQ ID NO: 238182 - DNA, 33 bp, Homo sapien
tttgtgttagatttaccaatgctagataattta

SEQ ID NO: 238183 - DNA, 33 bp, Homo sapien
agtcaattcagtgagtcacataaaatattgcat

SEQ ID NO: 238184 - DNA, 33 bp, Homo sapien
agtcaattcagtgagtgacataaaatattgcat

SEQ ID NO: 238185 - DNA, 33 bp, Homo sapien
tttattaaatgtccacaagatagctggcactaa

SEQ ID NO: 238186 - DNA, 33 bp, Homo sapien
tttattaaatgtccaccagatagctggcactaa

SEQ ID NO: 238187 - DNA, 33 bp, Homo sapien
tttatttttaccagcaagaattgaggaaagtgt

SEQ ID NO: 238188 - DNA, 33 bp, Homo sapien
tttatttttaccagcaggaattgaggaaagtgt

SEQ ID NO: 238189 - DNA, 33 bp, Homo sapien
ttatattggggtcatcgctgacacatttattgc

SEQ ID NO: 238190 - DNA, 33 bp, Homo sapien
ttatattggggtcatctctgacacatttattgc

SEQ ID NO: 238191 - DNA, 33 bp, Homo sapien
aactcaaatgtttggaaactgcatcgcccagac

SEQ ID NO: 238192 - DNA, 33 bp, Homo sapien
aactcaaatgtttggagactgcatcgcccagac

SEQ ID NO: 238193 - DNA, 33 bp, Homo sapien
gagcttcctaaacatgaagtgtcagaaacacat

SEQ ID NO: 238194 - DNA, 33 bp, Homo sapien
gagcttcctaaacatggagtgtcagaaacacat

SEQ ID NO: 238195 - DNA, 33 bp, Homo sapien
ccttttctctttaggaactaccttctttcacaa

SEQ ID NO: 238196 - DNA, 33 bp, Homo sapien
ccttttctctttaggagctaccttctttcacaa

SEQ ID NO: 238197 - DNA, 33 bp, Homo sapien
ttcccctatcaatctgaaatagttcttctcatt

SEQ ID NO: 238198 - DNA, 33 bp, Homo sapien
ttcccctatcaatctggaatagttcttctcatt

SEQ ID NO: 238199 - DNA, 33 bp, Homo sapien
aacaacctaataccaaatagaaactaactgcaa

SEQ ID NO: 238200 - DNA, 33 bp, Homo sapien
aacaacctaataccaactagaaactaactgcaa

SEQ ID NO: 238201 - DNA, 33 bp, Homo sapien
tgggagttgttcatgtcaaacttcccataaatg

SEQ ID NO: 238202 - DNA, 33 bp, Homo sapien
tgggagttgttcatgtgaaacttcccataaatg

SEQ ID NO: 238203 - DNA, 33 bp, Homo sapien
ccagcttctgcggaagaaatttaaaatatatgt

SEQ ID NO: 238204 - DNA, 33 bp, Homo sapien
ccagcttctgcggaaggaatttaaaatatatgt

SEQ ID NO: 238205 - DNA, 33 bp, Homo sapien
atggacagagcctggcaataaataataaatatt

SEQ ID NO: 238206 - DNA, 33 bp, Homo sapien
atggacagagcctggcgataaataataaatatt

SEQ ID NO: 238207 - DNA, 33 bp, Homo sapien
ccatacgatgtgcaaaacatagctctgggcact

SEQ ID NO: 238208 - DNA, 33 bp, Homo sapien
ccatacgatgtgcaaagcatagctctgggcact

SEQ ID NO: 238209 - DNA, 33 bp, Homo sapien
ccaagtctcttagctgaagtgcaagtggagccc

SEQ ID NO: 238210 - DNA, 33 bp, Homo sapien
ccaagtctcttagctgcagtgcaagtggagccc

SEQ ID NO: 238211 - DNA, 33 bp, Homo sapien
tgaactttggggaaccagcttctaatgcaactt

SEQ ID NO: 238212 - DNA, 33 bp, Homo sapien
tgaactttggggaaccggcttctaatgcaactt

SEQ ID NO: 238213 - DNA, 33 bp, Homo sapien
gtgaaaagaactctacaaagcaaacataatgta

SEQ ID NO: 238214 - DNA, 33 bp, Homo sapien
gtgaaaagaactctaccaagcaaacataatgta

SEQ ID NO: 238215 - DNA, 33 bp, Homo sapien
tgaagatctaaacaatcagatatttgtgccctc

SEQ ID NO: 238216 - DNA, 33 bp, Homo sapien
tgaagatctaaacaatgagatatttgtgccctc

SEQ ID NO: 238217 - DNA, 33 bp, Homo sapien
tgaaagaggtttaaaaatgaagctgagcataaa

SEQ ID NO: 238218 - DNA, 33 bp, Homo sapien
tgaaagaggtttaaaactgaagctgagcataaa

SEQ ID NO: 238219 - DNA, 33 bp, Homo sapien
ccttttttgtgccataaattttgcatttttgta

SEQ ID NO: 238220 - DNA, 33 bp, Homo sapien
ccttttttgtgccatacattttgcatttttgta

SEQ ID NO: 238221 - DNA, 33 bp, Homo sapien
agcctaaataatgcagaaactctatgacacatt

SEQ ID NO: 238222 - DNA, 33 bp, Homo sapien
agcctaaataatgcaggaactctatgacacatt

SEQ ID NO: 238223 - DNA, 33 bp, Homo sapien
cctcctgtgatttatccctaaaccagttatgtg

SEQ ID NO: 238224 - DNA, 33 bp, Homo sapien
cctcctgtgatttatctctaaaccagttatgtg

SEQ ID NO: 238225 - DNA, 33 bp, Homo sapien
agtcacttatgtagaacagttaaactatcaaaa

SEQ ID NO: 238226 - DNA, 33 bp, Homo sapien
agtcacttatgtagaagagttaaactatcaaaa

SEQ ID NO: 238227 - DNA, 33 bp, Homo sapien
tttattacgctgctaaaaaaacctgtaatttaa

SEQ ID NO: 238228 - DNA, 33 bp, Homo sapien
tttattacgctgctaagaaaacctgtaatttaa

SEQ ID NO: 238229 - DNA, 33 bp, Homo sapien
tgaagacaaatcaagaaatgctgtcagtctcta

SEQ ID NO: 238230 - DNA, 33 bp, Homo sapien
tgaagacaaatcaagacatgctgtcagtctcta

SEQ ID NO: 238231 - DNA, 33 bp, Homo sapien
aaaattaatgagaggagaaaactattagtcatt

SEQ ID NO: 238232 - DNA, 33 bp, Homo sapien
aaaattaatgagaggataaaactattagtcatt

SEQ ID NO: 238233 - DNA, 33 bp, Homo sapien
aaaatcagcaaaaagacggactgagatacttag

SEQ ID NO: 238234 - DNA, 33 bp, Homo sapien
aaaatcagcaaaaagatggactgagatacttag

SEQ ID NO: 238235 - DNA, 33 bp, Homo sapien
ataatcactattccaaatcacaaatcagagaag

SEQ ID NO: 238236 - DNA, 33 bp, Homo sapien
ataatcactattccaagtcacaaatcagagaag

SEQ ID NO: 238237 - DNA, 33 bp, Homo sapien
gaatgtttgaataaccagaaggcaggaatctca

SEQ ID NO: 238238 - DNA, 33 bp, Homo sapien
gaatgtttgaataaccggaaggcaggaatctca

SEQ ID NO: 238239 - DNA, 33 bp, Homo sapien
tttaacagtacctagaagaatgtttgaataacc

SEQ ID NO: 238240 - DNA, 33 bp, Homo sapien
tttaacagtacctagacgaatgtttgaataacc

SEQ ID NO: 238241 - DNA, 33 bp, Homo sapien
aaatcacaggctgaaactgatgttttttttttc

SEQ ID NO: 238242 - DNA, 33 bp, Homo sapien
aaatcacaggctgaaattgatgttttttttttc

SEQ ID NO: 238243 - DNA, 33 bp, Homo sapien
ttcattttcttcaacacgtgaaactttcagtgg

SEQ ID NO: 238244 - DNA, 33 bp, Homo sapien
ttcattttcttcaacaggtgaaactttcagtgg

SEQ ID NO: 238245 - DNA, 33 bp, Homo sapien
cacaggaagatagacaaagaaacaaatttagag

SEQ ID NO: 238246 - DNA, 33 bp, Homo sapien
cacaggaagatagacatagaaacaaatttagag

SEQ ID NO: 238247 - DNA, 33 bp, Homo sapien
cttttttagatgaaacaagctttgaatctattg

SEQ ID NO: 238248 - DNA, 33 bp, Homo sapien
cttttttagatgaaactagctttgaatctattg

SEQ ID NO: 238249 - DNA, 33 bp, Homo sapien
gtaatgttgtcaagtccaataaatcactattca

SEQ ID NO: 238250 - DNA, 33 bp, Homo sapien
gtaatgttgtcaagtctaataaatcactattca

SEQ ID NO: 238251 - DNA, 33 bp, Homo sapien
tgcaatgcagcatcaagtgccagaaagataggt

SEQ ID NO: 238252 - DNA, 33 bp, Homo sapien
tgcaatgcagcatcaattgccagaaagataggt

SEQ ID NO: 238253 - DNA, 33 bp, Homo sapien
atgtgaacccaagcacaatggggttagccttca

SEQ ID NO: 238254 - DNA, 33 bp, Homo sapien
atgtgaacccaagcacgatggggttagccttca

SEQ ID NO: 238255 - DNA, 33 bp, Homo sapien
ttttggaggttaataccggaacagtcttttgcc

SEQ ID NO: 238256 - DNA, 33 bp, Homo sapien
ttttggaggttaatactggaacagtcttttgcc

SEQ ID NO: 238257 - DNA, 33 bp, Homo sapien
catgtttaaaaggcaccatttggtaagattccc

SEQ ID NO: 238258 - DNA, 33 bp, Homo sapien
catgtttaaaaggcactatttggtaagattccc

SEQ ID NO: 238259 - DNA, 33 bp, Homo sapien
cttgattgaatcctcaaaaagcataatgttata

SEQ ID NO: 238260 - DNA, 33 bp, Homo sapien
cttgattgaatcctcagaaagcataatgttata

SEQ ID NO: 238261 - DNA, 33 bp, Homo sapien
tcctccttctacgtaaagtatcccatgcttcta

SEQ ID NO: 238262 - DNA, 33 bp, Homo sapien
tcctccttctacgtaaggtatcccatgcttcta

SEQ ID NO: 238263 - DNA, 33 bp, Homo sapien
gtagcagatgaaaatgcagacttcaagggccat

SEQ ID NO: 238264 - DNA, 33 bp, Homo sapien
gtagcagatgaaaatgtagacttcaagggccat

SEQ ID NO: 238265 - DNA, 33 bp, Homo sapien
tgtcaggctcatagtacgtattcaaaactagtt

SEQ ID NO: 238266 - DNA, 33 bp, Homo sapien
tgtcaggctcatagtatgtattcaaaactagtt

SEQ ID NO: 238267 - DNA, 33 bp, Homo sapien
attcttagatgtactaccagtcccactgttact

SEQ ID NO: 238268 - DNA, 33 bp, Homo sapien
attcttagatgtactatcagtcccactgttact

SEQ ID NO: 238269 - DNA, 33 bp, Homo sapien
atgtagctttgagtctaaagtttgtagggcagg

SEQ ID NO: 238270 - DNA, 33 bp, Homo sapien
atgtagctttgagtctgaagtttgtagggcagg

SEQ ID NO: 238271 - DNA, 33 bp, Homo sapien
taccaaagatatcaggaagtatacaggctaata

SEQ ID NO: 238272 - DNA, 33 bp, Homo sapien
taccaaagatatcagggagtatacaggctaata

SEQ ID NO: 238273 - DNA, 33 bp, Homo sapien
tatgcatcattgattaaaagagaaattagcaag

SEQ ID NO: 238274 - DNA, 33 bp, Homo sapien
tatgcatcattgattagaagagaaattagcaag

SEQ ID NO: 238275 - DNA, 33 bp, Homo sapien
aagctttttaccctcacaatctaggcaaacaaa

SEQ ID NO: 238276 - DNA, 33 bp, Homo sapien
aagctttttaccctcataatctaggcaaacaaa

SEQ ID NO: 238277 - DNA, 33 bp, Homo sapien
tgacatataacctaacagtaaccaataaacttt

SEQ ID NO: 238278 - DNA, 33 bp, Homo sapien
tgacatataacctaactgtaaccaataaacttt

SEQ ID NO: 238279 - DNA, 33 bp, Homo sapien
ggagtgagaggaacgaaggtattaaagtttctg

SEQ ID NO: 238280 - DNA, 33 bp, Homo sapien
ggagtgagaggaacgagggtattaaagtttctg

SEQ ID NO: 238281 - DNA, 33 bp, Homo sapien
atattctgttttgttaaaaagcattcaatattt

SEQ ID NO: 238282 - DNA, 33 bp, Homo sapien
atattctgttttgttagaaagcattcaatattt

SEQ ID NO: 238283 - DNA, 33 bp, Homo sapien
ttgaaatccacttaaactgcaaattgttcttta

SEQ ID NO: 238284 - DNA, 33 bp, Homo sapien
ttgaaatccacttaaattgcaaattgttcttta

SEQ ID NO: 238285 - DNA, 33 bp, Homo sapien
ttataagaatgcagtgaactatatctaaaaaca

SEQ ID NO: 238286 - DNA, 33 bp, Homo sapien
ttataagaatgcagtggactatatctaaaaaca

SEQ ID NO: 238287 - DNA, 33 bp, Homo sapien
actgagatgactgttaagtttgctgaacttttg

SEQ ID NO: 238288 - DNA, 33 bp, Homo sapien
actgagatgactgttatgtttgctgaacttttg

SEQ ID NO: 238289 - DNA, 33 bp, Homo sapien
agcttatggagtattacgtgtgtagtatagacc

SEQ ID NO: 238290 - DNA, 33 bp, Homo sapien
agcttatggagtattatgtgtgtagtatagacc

SEQ ID NO: 238291 - DNA, 33 bp, Homo sapien
aaagacttcaacagatgagtaaatgtgaggatc

SEQ ID NO: 238292 - DNA, 33 bp, Homo sapien
aaagacttcaacagattagtaaatgtgaggatc

SEQ ID NO: 238293 - DNA, 33 bp, Homo sapien
ggttccaaatgctagaaatgctcttaaataatg

SEQ ID NO: 238294 - DNA, 33 bp, Homo sapien
ggttccaaatgctagagatgctcttaaataatg

SEQ ID NO: 238295 - DNA, 33 bp, Homo sapien
ctcttcttgctctatacacatttcctgcatgat

SEQ ID NO: 238296 - DNA, 33 bp, Homo sapien
ctcttcttgctctatatacatttcctgcatgat

SEQ ID NO: 238297 - DNA, 33 bp, Homo sapien
gtctcaagggcatatacgtaaaacgaaattctc

SEQ ID NO: 238298 - DNA, 33 bp, Homo sapien
gtctcaagggcatatatgtaaaacgaaattctc

SEQ ID NO: 238299 - DNA, 33 bp, Homo sapien
ttgacaagatataatacgcaggaactgattgca

SEQ ID NO: 238300 - DNA, 33 bp, Homo sapien
ttgacaagatataatatgcaggaactgattgca

SEQ ID NO: 238301 - DNA, 33 bp, Homo sapien
ggtagattataaaggcacaaaatcagaactttc

SEQ ID NO: 238302 - DNA, 33 bp, Homo sapien
ggtagattataaaggctcaaaatcagaactttc

SEQ ID NO: 238303 - DNA, 33 bp, Homo sapien
tgtgataagtggtccacgaaactatcagactcc

SEQ ID NO: 238304 - DNA, 33 bp, Homo sapien
tgtgataagtggtccatgaaactatcagactcc

SEQ ID NO: 238305 - DNA, 33 bp, Homo sapien
ttcagaaaattgcaaaatgttttataaggttgt

SEQ ID NO: 238306 - DNA, 33 bp, Homo sapien
ttcagaaaattgcaaagtgttttataaggttgt

SEQ ID NO: 238307 - DNA, 33 bp, Homo sapien
tgcaggacagaataaacacaggatgatcccttg

SEQ ID NO: 238308 - DNA, 33 bp, Homo sapien
tgcaggacagaataaagacaggatgatcccttg

SEQ ID NO: 238309 - DNA, 33 bp, Homo sapien
gttgttaagcattggccgatgaaataaaacaag

SEQ ID NO: 238310 - DNA, 33 bp, Homo sapien
gttgttaagcattggctgatgaaataaaacaag

SEQ ID NO: 238311 - DNA, 33 bp, Homo sapien
tttaggttattttgccagataataatcaactat

SEQ ID NO: 238312 - DNA, 33 bp, Homo sapien
tttaggttattttgccggataataatcaactat

SEQ ID NO: 238313 - DNA, 33 bp, Homo sapien
tactttcttcatgccaaaatcgaagatgccatg

SEQ ID NO: 238314 - DNA, 33 bp, Homo sapien
tactttcttcatgccacaatcgaagatgccatg

SEQ ID NO: 238315 - DNA, 33 bp, Homo sapien
catttgaggtctgttacaaataccacaacacat

SEQ ID NO: 238316 - DNA, 33 bp, Homo sapien
catttgaggtctgttataaataccacaacacat

SEQ ID NO: 238317 - DNA, 33 bp, Homo sapien
aagtgtaggcttatcaaaccttaaagcatctga

SEQ ID NO: 238318 - DNA, 33 bp, Homo sapien
aagtgtaggcttatcagaccttaaagcatctga

SEQ ID NO: 238319 - DNA, 33 bp, Homo sapien
ctaagggacagatcaaatacttattttcatgga

SEQ ID NO: 238320 - DNA, 33 bp, Homo sapien
ctaagggacagatcaagtacttattttcatgga

SEQ ID NO: 238321 - DNA, 33 bp, Homo sapien
cctatacaatgcaacaccgtccttgttattctc

SEQ ID NO: 238322 - DNA, 33 bp, Homo sapien
cctatacaatgcaacatcgtccttgttattctc

SEQ ID NO: 238323 - DNA, 33 bp, Homo sapien
aagctgtgagacattaagcatatcaaaatgaga

SEQ ID NO: 238324 - DNA, 33 bp, Homo sapien
aagctgtgagacattaggcatatcaaaatgaga

SEQ ID NO: 238325 - DNA, 33 bp, Homo sapien
gtttttcagtctcacaaaagccctctatattat

SEQ ID NO: 238326 - DNA, 33 bp, Homo sapien
gtttttcagtctcacagaagccctctatattat

SEQ ID NO: 238327 - DNA, 33 bp, Homo sapien
ggtagcagctgtacaaccttttctgacctagtc

SEQ ID NO: 238328 - DNA, 33 bp, Homo sapien
ggtagcagctgtacaatcttttctgacctagtc

SEQ ID NO: 238329 - DNA, 33 bp, Homo sapien
ccagagcattcaagaaaagtcaggaaattaagg

SEQ ID NO: 238330 - DNA, 33 bp, Homo sapien
ccagagcattcaagaagagtcaggaaattaagg

SEQ ID NO: 238331 - DNA, 33 bp, Homo sapien
ataatgtataattcccagccaaagtaaagtatg

SEQ ID NO: 238332 - DNA, 33 bp, Homo sapien
ataatgtataattcccggccaaagtaaagtatg

SEQ ID NO: 238333 - DNA, 33 bp, Homo sapien
gagggttgaaggaaaacgtggctgattcttacc

SEQ ID NO: 238334 - DNA, 33 bp, Homo sapien
gagggttgaaggaaaatgtggctgattcttacc

SEQ ID NO: 238335 - DNA, 33 bp, Homo sapien
atgaaatgactgttcagaactattatatcttta

SEQ ID NO: 238336 - DNA, 33 bp, Homo sapien
atgaaatgactgttcataactattatatcttta

SEQ ID NO: 238337 - DNA, 33 bp, Homo sapien
gaaatcagacccactaccttatacagtatacaa

SEQ ID NO: 238338 - DNA, 33 bp, Homo sapien
gaaatcagacccactatcttatacagtatacaa

SEQ ID NO: 238339 - DNA, 33 bp, Homo sapien
gcttgaagatggctcacgtaattgcatttgcct

SEQ ID NO: 238340 - DNA, 33 bp, Homo sapien
gcttgaagatggctcatgtaattgcatttgcct

SEQ ID NO: 238341 - DNA, 33 bp, Homo sapien
gaagaatgtagatttaactaagttcacatgact

SEQ ID NO: 238342 - DNA, 33 bp, Homo sapien
gaagaatgtagatttagctaagttcacatgact

SEQ ID NO: 238343 - DNA, 33 bp, Homo sapien
ggttggaatcatttggaatatagcctttacaga

SEQ ID NO: 238344 - DNA, 33 bp, Homo sapien
ggttggaatcatttggtatatagcctttacaga

SEQ ID NO: 238345 - DNA, 33 bp, Homo sapien
tttcatagactctataacatccaggtcaaagat

SEQ ID NO: 238346 - DNA, 33 bp, Homo sapien
tttcatagactctatagcatccaggtcaaagat

SEQ ID NO: 238347 - DNA, 33 bp, Homo sapien
aagatgactaatgaagaaattagaagcactgag

SEQ ID NO: 238348 - DNA, 33 bp, Homo sapien
aagatgactaatgaaggaattagaagcactgag

SEQ ID NO: 238349 - DNA, 33 bp, Homo sapien
gtatttcagtcaaagaaaaggcaggagcgaata

SEQ ID NO: 238350 - DNA, 33 bp, Homo sapien
gtatttcagtcaaagagaaggcaggagcgaata

SEQ ID NO: 238351 - DNA, 33 bp, Homo sapien
gcaaggtaggattccaatcaccaataagtatct

SEQ ID NO: 238352 - DNA, 33 bp, Homo sapien
gcaaggtaggattccagtcaccaataagtatct

SEQ ID NO: 238353 - DNA, 33 bp, Homo sapien
gtcctaagagatcagacagctttctgcaattaa

SEQ ID NO: 238354 - DNA, 33 bp, Homo sapien
gtcctaagagatcagatagctttctgcaattaa

SEQ ID NO: 238355 - DNA, 33 bp, Homo sapien
tgggccttcaatggacaatttgtttagtacctt

SEQ ID NO: 238356 - DNA, 33 bp, Homo sapien
tgggccttcaatggaccatttgtttagtacctt

SEQ ID NO: 238357 - DNA, 33 bp, Homo sapien
atcaaaatgccgaaaacaaacatatatatatat

SEQ ID NO: 238358 - DNA, 33 bp, Homo sapien
atcaaaatgccgaaaagaaacatatatatatat

SEQ ID NO: 238359 - DNA, 33 bp, Homo sapien
ttggccagtcctgccagaagctcatcaatttta

SEQ ID NO: 238360 - DNA, 33 bp, Homo sapien
ttggccagtcctgccataagctcatcaatttta

SEQ ID NO: 238361 - DNA, 33 bp, Homo sapien
tgatagtgttattatccaatgaatcacagctga

SEQ ID NO: 238362 - DNA, 33 bp, Homo sapien
tgatagtgttattatctaatgaatcacagctga

SEQ ID NO: 238363 - DNA, 33 bp, Homo sapien
gattctgtttcatgctcaatcttgttgtgctct

SEQ ID NO: 238364 - DNA, 33 bp, Homo sapien
gattctgtttcatgctgaatcttgttgtgctct

SEQ ID NO: 238365 - DNA, 33 bp, Homo sapien
aagaacctaagaattcacccctgatattgcaaa

SEQ ID NO: 238366 - DNA, 33 bp, Homo sapien
aagaacctaagaattcgcccctgatattgcaaa

SEQ ID NO: 238367 - DNA, 33 bp, Homo sapien
actatagatatgtgcaataacagataaagcaca

SEQ ID NO: 238368 - DNA, 33 bp, Homo sapien
actatagatatgtgcagtaacagataaagcaca

SEQ ID NO: 238369 - DNA, 33 bp, Homo sapien
tctaattgtaactatgaatgtccacttgcagca

SEQ ID NO: 238370 - DNA, 33 bp, Homo sapien
tctaattgtaactatgtatgtccacttgcagca

SEQ ID NO: 238371 - DNA, 33 bp, Homo sapien
agggtacacaaagttccccagttggtcactggg

SEQ ID NO: 238372 - DNA, 33 bp, Homo sapien
agggtacacaaagttctccagttggtcactggg

SEQ ID NO: 238373 - DNA, 33 bp, Homo sapien
aaaacctatatgctaacaattttcaactttgct

SEQ ID NO: 238374 - DNA, 33 bp, Homo sapien
aaaacctatatgctaataattttcaactttgct

SEQ ID NO: 238375 - DNA, 33 bp, Homo sapien
cttatgcaatataaccaccaggattaatctttt

SEQ ID NO: 238376 - DNA, 33 bp, Homo sapien
cttatgcaatataacccccaggattaatctttt

SEQ ID NO: 238377 - DNA, 33 bp, Homo sapien
atgcaaataaatcatacgtcagagagtcttgaa

SEQ ID NO: 238378 - DNA, 33 bp, Homo sapien
atgcaaataaatcatatgtcagagagtcttgaa

SEQ ID NO: 238379 - DNA, 33 bp, Homo sapien
ggatcaagtggatacacatttgacaattacccc

SEQ ID NO: 238380 - DNA, 33 bp, Homo sapien
ggatcaagtggatacatatttgacaattacccc

SEQ ID NO: 238381 - DNA, 33 bp, Homo sapien
tcaataatggataaaacgaccagacaaaaaaca

SEQ ID NO: 238382 - DNA, 33 bp, Homo sapien
tcaataatggataaaatgaccagacaaaaaaca

SEQ ID NO: 238383 - DNA, 33 bp, Homo sapien
ggtgtattacgttgaccgggtgtttctaggaag

SEQ ID NO: 238384 - DNA, 33 bp, Homo sapien
ggtgtattacgttgactgggtgtttctaggaag

SEQ ID NO: 238385 - DNA, 33 bp, Homo sapien
aaaggactgtctcttaaagaatcaagccagcaa

SEQ ID NO: 238386 - DNA, 33 bp, Homo sapien
aaaggactgtctcttagagaatcaagccagcaa

SEQ ID NO: 238387 - DNA, 33 bp, Homo sapien
tgtttttcttttagcactcagacttctcttccg

SEQ ID NO: 238388 - DNA, 33 bp, Homo sapien
tgtttttcttttagcagtcagacttctcttccg

SEQ ID NO: 238389 - DNA, 33 bp, Homo sapien
tattttagggacttcaatcagttggaggtttgg

SEQ ID NO: 238390 - DNA, 33 bp, Homo sapien
tattttagggacttcagtcagttggaggtttgg

SEQ ID NO: 238391 - DNA, 33 bp, Homo sapien
gatacaacataccagaacaataaagcagtgtta

SEQ ID NO: 238392 - DNA, 33 bp, Homo sapien
gatacaacataccagagcaataaagcagtgtta

SEQ ID NO: 238393 - DNA, 33 bp, Homo sapien
ctgcaagaacaactgaataaatggagttcttcc

SEQ ID NO: 238394 - DNA, 33 bp, Homo sapien
ctgcaagaacaactgagtaaatggagttcttcc

SEQ ID NO: 238395 - DNA, 33 bp, Homo sapien
tgtgtatcacattttcaatttccagtctatcac

SEQ ID NO: 238396 - DNA, 33 bp, Homo sapien
tgtgtatcacattttctatttccagtctatcac

SEQ ID NO: 238397 - DNA, 33 bp, Homo sapien
ttttgatttacagaccgggtatcaggccaacac

SEQ ID NO: 238398 - DNA, 33 bp, Homo sapien
ttttgatttacagacctggtatcaggccaacac

SEQ ID NO: 238399 - DNA, 33 bp, Homo sapien
ggtgtttttctcataccatctcatttattgccc

SEQ ID NO: 238400 - DNA, 33 bp, Homo sapien
ggtgtttttctcatacgatctcatttattgccc

SEQ ID NO: 238401 - DNA, 33 bp, Homo sapien
aagtccaatatgtccaatgcactttctaatctc

SEQ ID NO: 238402 - DNA, 33 bp, Homo sapien
aagtccaatatgtccagtgcactttctaatctc

SEQ ID NO: 238403 - DNA, 33 bp, Homo sapien
tgaagttaaaaacatgcattccagtttgaagat

SEQ ID NO: 238404 - DNA, 33 bp, Homo sapien
tgaagttaaaaacatgtattccagtttgaagat

SEQ ID NO: 238405 - DNA, 33 bp, Homo sapien
ggacagcacagatctaaaacttaatggctaatg

SEQ ID NO: 238406 - DNA, 33 bp, Homo sapien
ggacagcacagatctacaacttaatggctaatg

SEQ ID NO: 238407 - DNA, 33 bp, Homo sapien
ggtgaaataatacaagaatctgtcaaagaggtg

SEQ ID NO: 238408 - DNA, 33 bp, Homo sapien
ggtgaaataatacaaggatctgtcaaagaggtg

SEQ ID NO: 238409 - DNA, 33 bp, Homo sapien
ttcagttgtgtttcacgaaatacatggcttcat

SEQ ID NO: 238410 - DNA, 33 bp, Homo sapien
ttcagttgtgtttcactaaatacatggcttcat

SEQ ID NO: 238411 - DNA, 33 bp, Homo sapien
actaaacagtagacaacgctgacgtataaaatg

SEQ ID NO: 238412 - DNA, 33 bp, Homo sapien
actaaacagtagacaatgctgacgtataaaatg

SEQ ID NO: 238413 - DNA, 33 bp, Homo sapien
aaagcattcaaaaaaaactggagaactttgtgt

SEQ ID NO: 238414 - DNA, 33 bp, Homo sapien
aaagcattcaaaaaaagctggagaactttgtgt

SEQ ID NO: 238415 - DNA, 33 bp, Homo sapien
ctaacctgtaacttccactaattccttgtttat

SEQ ID NO: 238416 - DNA, 33 bp, Homo sapien
ctaacctgtaacttccgctaattccttgtttat

SEQ ID NO: 238417 - DNA, 33 bp, Homo sapien
gttgtcttatcatcctaagagttacaaggatat

SEQ ID NO: 238418 - DNA, 33 bp, Homo sapien
gttgtcttatcatcctgagagttacaaggatat

SEQ ID NO: 238419 - DNA, 33 bp, Homo sapien
atatgtagcagtttcacgttatgttagattctt

SEQ ID NO: 238420 - DNA, 33 bp, Homo sapien
atatgtagcagtttcatgttatgttagattctt

SEQ ID NO: 238421 - DNA, 33 bp, Homo sapien
gagtagaaaactagtgcaaggagaggcctctca

SEQ ID NO: 238422 - DNA, 33 bp, Homo sapien
gagtagaaaactagtggaaggagaggcctctca

SEQ ID NO: 238423 - DNA, 33 bp, Homo sapien
tgtgaggataaatagacggacttaagagccagg

SEQ ID NO: 238424 - DNA, 33 bp, Homo sapien
tgtgaggataaatagagggacttaagagccagg

SEQ ID NO: 238425 - DNA, 33 bp, Homo sapien
cattcccaaccattccccatgtagtgtctgatc

SEQ ID NO: 238426 - DNA, 33 bp, Homo sapien
cattcccaaccattcctcatgtagtgtctgatc

SEQ ID NO: 238427 - DNA, 33 bp, Homo sapien
ggttgggaatgaggaaactgctcagatatacag

SEQ ID NO: 238428 - DNA, 33 bp, Homo sapien
ggttgggaatgaggaacctgctcagatatacag

SEQ ID NO: 238429 - DNA, 33 bp, Homo sapien
aatctcaaaaggatgcccaattatttctttgac

SEQ ID NO: 238430 - DNA, 33 bp, Homo sapien
aatctcaaaaggatgctcaattatttctttgac

SEQ ID NO: 238431 - DNA, 33 bp, Homo sapien
acatacgctcatttgacggacacactgtggcac

SEQ ID NO: 238432 - DNA, 33 bp, Homo sapien
acatacgctcatttgatggacacactgtggcac

SEQ ID NO: 238433 - DNA, 33 bp, Homo sapien
ttcatgcatcttgaaaacctctgtaatttctca

SEQ ID NO: 238434 - DNA, 33 bp, Homo sapien
ttcatgcatcttgaaagcctctgtaatttctca

SEQ ID NO: 238435 - DNA, 33 bp, Homo sapien
aatctggaagacttcaataagttgtaaagattt

SEQ ID NO: 238436 - DNA, 33 bp, Homo sapien
aatctggaagacttcagtaagttgtaaagattt

SEQ ID NO: 238437 - DNA, 33 bp, Homo sapien
ttgtattcctaaacaacgaaatctccagatgac

SEQ ID NO: 238438 - DNA, 33 bp, Homo sapien
ttgtattcctaaacaatgaaatctccagatgac

SEQ ID NO: 238439 - DNA, 33 bp, Homo sapien
ggaaatcaattggaatcacagttttgggtgtat

SEQ ID NO: 238440 - DNA, 33 bp, Homo sapien
ggaaatcaattggaattacagttttgggtgtat

SEQ ID NO: 238441 - DNA, 33 bp, Homo sapien
tctgggacatgtgcgacgtatagtcaccctact

SEQ ID NO: 238442 - DNA, 33 bp, Homo sapien
tctgggacatgtgcgatgtatagtcaccctact

SEQ ID NO: 238443 - DNA, 33 bp, Homo sapien
atgagttaagtctttacgctactgttgggaagg

SEQ ID NO: 238444 - DNA, 33 bp, Homo sapien
atgagttaagtctttaggctactgttgggaagg

SEQ ID NO: 238445 - DNA, 33 bp, Homo sapien
agtcagtgagttctcaagaggtctactggttct

SEQ ID NO: 238446 - DNA, 33 bp, Homo sapien
agtcagtgagttctcacgaggtctactggttct

SEQ ID NO: 238447 - DNA, 33 bp, Homo sapien
gacttctcttgaaagacgggatttaatgccctg

SEQ ID NO: 238448 - DNA, 33 bp, Homo sapien
gacttctcttgaaagatgggatttaatgccctg

SEQ ID NO: 238449 - DNA, 33 bp, Homo sapien
gtctgattaaccattggacccatctgatttctt

SEQ ID NO: 238450 - DNA, 33 bp, Homo sapien
gtctgattaaccattgtacccatctgatttctt

SEQ ID NO: 238451 - DNA, 33 bp, Homo sapien
tgctgtgcatacacataaagttggaaaaataga

SEQ ID NO: 238452 - DNA, 33 bp, Homo sapien
tgctgtgcatacacatgaagttggaaaaataga

SEQ ID NO: 238453 - DNA, 33 bp, Homo sapien
acacacaaaaaatataccaaccaggcaaagttt

SEQ ID NO: 238454 - DNA, 33 bp, Homo sapien
acacacaaaaaatatatcaaccaggcaaagttt

SEQ ID NO: 238455 - DNA, 33 bp, Homo sapien
acagctaccacaactacacataggattacgtcg

SEQ ID NO: 238456 - DNA, 33 bp, Homo sapien
acagctaccacaactatacataggattacgtcg

SEQ ID NO: 238457 - DNA, 33 bp, Homo sapien
caaacagtcttaacccacaaatgcttatgtctt

SEQ ID NO: 238458 - DNA, 33 bp, Homo sapien
caaacagtcttaacccgcaaatgcttatgtctt

SEQ ID NO: 238459 - DNA, 33 bp, Homo sapien
cacaatgtcagctcataaactcaaggcccacct

SEQ ID NO: 238460 - DNA, 33 bp, Homo sapien
cacaatgtcagctcatgaactcaaggcccacct

SEQ ID NO: 238461 - DNA, 33 bp, Homo sapien
ctgtgaacctgtaaccaattgcacagagcatag

SEQ ID NO: 238462 - DNA, 33 bp, Homo sapien
ctgtgaacctgtaaccgattgcacagagcatag

SEQ ID NO: 238463 - DNA, 33 bp, Homo sapien
aaaaaaaaatgtgaaaagataatgtaggatata

SEQ ID NO: 238464 - DNA, 33 bp, Homo sapien
aaaaaaaaatgtgaaacgataatgtaggatata

SEQ ID NO: 238465 - DNA, 33 bp, Homo sapien
gtgaagtttgtaataacgatctctctgtttgtt

SEQ ID NO: 238466 - DNA, 33 bp, Homo sapien
gtgaagtttgtaataatgatctctctgtttgtt

SEQ ID NO: 238467 - DNA, 33 bp, Homo sapien
tgtagccaactctgcaaacaaaagtgtcaaagg

SEQ ID NO: 238468 - DNA, 33 bp, Homo sapien
tgtagccaactctgcatacaaaagtgtcaaagg

SEQ ID NO: 238469 - DNA, 33 bp, Homo sapien
agtgtcaaaggcctcaatcttgaaatctccttc

SEQ ID NO: 238470 - DNA, 33 bp, Homo sapien
agtgtcaaaggcctcattcttgaaatctccttc

SEQ ID NO: 238471 - DNA, 33 bp, Homo sapien
tcccttagcccagtaaagttgacacatgaaatt

SEQ ID NO: 238472 - DNA, 33 bp, Homo sapien
tcccttagcccagtaaggttgacacatgaaatt

SEQ ID NO: 238473 - DNA, 33 bp, Homo sapien
ctcaggtcagcttatacggctacagaaaaagga

SEQ ID NO: 238474 - DNA, 33 bp, Homo sapien
ctcaggtcagcttatatggctacagaaaaagga

SEQ ID NO: 238475 - DNA, 33 bp, Homo sapien
aaagcaatgacaaggacgttgagaacagggttc

SEQ ID NO: 238476 - DNA, 33 bp, Homo sapien
aaagcaatgacaaggatgttgagaacagggttc

SEQ ID NO: 238477 - DNA, 33 bp, Homo sapien
atagaaaagaaaaaaaaaccatgattcaaagag

SEQ ID NO: 238478 - DNA, 33 bp, Homo sapien
atagaaaagaaaaaaagaccatgattcaaagag

SEQ ID NO: 238479 - DNA, 33 bp, Homo sapien
ctttgataaccagacaatgaggctcagatatta

SEQ ID NO: 238480 - DNA, 33 bp, Homo sapien
ctttgataaccagacagtgaggctcagatatta

SEQ ID NO: 238481 - DNA, 33 bp, Homo sapien
tttaataagcatttaccgactctctttgataac

SEQ ID NO: 238482 - DNA, 33 bp, Homo sapien
tttaataagcatttactgactctctttgataac

SEQ ID NO: 238483 - DNA, 33 bp, Homo sapien
attcttgggacgaagacggtaataagagtggaa

SEQ ID NO: 238484 - DNA, 33 bp, Homo sapien
attcttgggacgaagatggtaataagagtggaa

SEQ ID NO: 238485 - DNA, 33 bp, Homo sapien
tgccagggccttcaaagtatttgcattttatat

SEQ ID NO: 238486 - DNA, 33 bp, Homo sapien
tgccagggccttcaaattatttgcattttatat

SEQ ID NO: 238487 - DNA, 33 bp, Homo sapien
gatgctttatttgttacaaagctaatgttacat

SEQ ID NO: 238488 - DNA, 33 bp, Homo sapien
gatgctttatttgttagaaagctaatgttacat

SEQ ID NO: 238489 - DNA, 33 bp, Homo sapien
aggccagtgaagcgaaacccagtgaagaagcag

SEQ ID NO: 238490 - DNA, 33 bp, Homo sapien
aggccagtgaagcgaagcccagtgaagaagcag

SEQ ID NO: 238491 - DNA, 33 bp, Homo sapien
ttataggagaagaaacactgttaagaacatttt

SEQ ID NO: 238492 - DNA, 33 bp, Homo sapien
ttataggagaagaaactctgttaagaacatttt

SEQ ID NO: 238493 - DNA, 33 bp, Homo sapien
cctctgtgagaaaggaaaaagttattctaaaag

SEQ ID NO: 238494 - DNA, 33 bp, Homo sapien
cctctgtgagaaaggagaaagttattctaaaag

SEQ ID NO: 238495 - DNA, 33 bp, Homo sapien
atgtagcccatgtgacaatcgtattcctcatgt

SEQ ID NO: 238496 - DNA, 33 bp, Homo sapien
atgtagcccatgtgacgatcgtattcctcatgt

SEQ ID NO: 238497 - DNA, 33 bp, Homo sapien
tttgtatgggattggtaaaggcaaaagtggctc

SEQ ID NO: 238498 - DNA, 33 bp, Homo sapien
tttgtatgggattggtgaaggcaaaagtggctc

SEQ ID NO: 238499 - DNA, 33 bp, Homo sapien
tttctataagagagtaagactggtaatacaaga

SEQ ID NO: 238500 - DNA, 33 bp, Homo sapien
tttctataagagagtaggactggtaatacaaga

SEQ ID NO: 238501 - DNA, 33 bp, Homo sapien
taaatttcacacagaactgaatagaaagcaaat

SEQ ID NO: 238502 - DNA, 33 bp, Homo sapien
taaatttcacacagaattgaatagaaagcaaat

SEQ ID NO: 238503 - DNA, 33 bp, Homo sapien
tggccaagctaagccaaagttaggaatctagga

SEQ ID NO: 238504 - DNA, 33 bp, Homo sapien
tggccaagctaagccagagttaggaatctagga

SEQ ID NO: 238505 - DNA, 33 bp, Homo sapien
ttttctccatagactcaccagcgatttgttgct

SEQ ID NO: 238506 - DNA, 33 bp, Homo sapien
ttttctccatagactcgccagcgatttgttgct

SEQ ID NO: 238507 - DNA, 33 bp, Homo sapien
ctgccttaaatcttccagagatcttcacaaggg

SEQ ID NO: 238508 - DNA, 33 bp, Homo sapien
ctgccttaaatcttccggagatcttcacaaggg

SEQ ID NO: 238509 - DNA, 33 bp, Homo sapien
ttgtgagctgcacagcaaattatcccaaaactt

SEQ ID NO: 238510 - DNA, 33 bp, Homo sapien
ttgtgagctgcacagcgaattatcccaaaactt

SEQ ID NO: 238511 - DNA, 33 bp, Homo sapien
tgccttcatatgaaaacatttccagctgataac

SEQ ID NO: 238512 - DNA, 33 bp, Homo sapien
tgccttcatatgaaaagatttccagctgataac

SEQ ID NO: 238513 - DNA, 33 bp, Homo sapien
tattaaactatcaaaccgtacatttcaaatgag

SEQ ID NO: 238514 - DNA, 33 bp, Homo sapien
tattaaactatcaaactgtacatttcaaatgag

SEQ ID NO: 238515 - DNA, 33 bp, Homo sapien
cccccaccagagttatcaagccagtagcaactt

SEQ ID NO: 238516 - DNA, 33 bp, Homo sapien
cccccaccagagttatgaagccagtagcaactt

SEQ ID NO: 238517 - DNA, 33 bp, Homo sapien
gcttgtcaccagaaagaaaactcctggctttgg

SEQ ID NO: 238518 - DNA, 33 bp, Homo sapien
gcttgtcaccagaaaggaaactcctggctttgg

SEQ ID NO: 238519 - DNA, 33 bp, Homo sapien
aaaacttcccatgtcaataacaataggtagacc

SEQ ID NO: 238520 - DNA, 33 bp, Homo sapien
aaaacttcccatgtcagtaacaataggtagacc

SEQ ID NO: 238521 - DNA, 33 bp, Homo sapien
caaggatatgaaagaaagtcaatttggctggtg

SEQ ID NO: 238522 - DNA, 33 bp, Homo sapien
caaggatatgaaagaaggtcaatttggctggtg

SEQ ID NO: 238523 - DNA, 33 bp, Homo sapien
gttgttattgtttgccgagtctctatttcccat

SEQ ID NO: 238524 - DNA, 33 bp, Homo sapien
gttgttattgtttgcctagtctctatttcccat

SEQ ID NO: 238525 - DNA, 33 bp, Homo sapien
aacatctgaagtactgaatagtaatgtcctagg

SEQ ID NO: 238526 - DNA, 33 bp, Homo sapien
aacatctgaagtactgcatagtaatgtcctagg

SEQ ID NO: 238527 - DNA, 33 bp, Homo sapien
cttgtgaatgatactgaagcatttcctaggttc

SEQ ID NO: 238528 - DNA, 33 bp, Homo sapien
cttgtgaatgatactggagcatttcctaggttc

SEQ ID NO: 238529 - DNA, 33 bp, Homo sapien
ggtcactacggagtcactctgcctttgaagtta

SEQ ID NO: 238530 - DNA, 33 bp, Homo sapien
ggtcactacggagtcattctgcctttgaagtta

SEQ ID NO: 238531 - DNA, 33 bp, Homo sapien
ctgaagcccagaaagacgtgcaattacccaaga

SEQ ID NO: 238532 - DNA, 33 bp, Homo sapien
ctgaagcccagaaagatgtgcaattacccaaga

SEQ ID NO: 238533 - DNA, 33 bp, Homo sapien
tttaccaaggtaaggacatggacaaatagccta

SEQ ID NO: 238534 - DNA, 33 bp, Homo sapien
tttaccaaggtaaggagatggacaaatagccta

SEQ ID NO: 238535 - DNA, 33 bp, Homo sapien
atcttcatgggtttcaactgcatgaaagagaaa

SEQ ID NO: 238536 - DNA, 33 bp, Homo sapien
atcttcatgggtttcagctgcatgaaagagaaa

SEQ ID NO: 238537 - DNA, 33 bp, Homo sapien
atagagcagggtgcttcaacttgtcacttctaa

SEQ ID NO: 238538 - DNA, 33 bp, Homo sapien
atagagcagggtgctttaacttgtcacttctaa

SEQ ID NO: 238539 - DNA, 33 bp, Homo sapien
cttttccctgtaaccaatctttgccatgaacat

SEQ ID NO: 238540 - DNA, 33 bp, Homo sapien
cttttccctgtaaccagtctttgccatgaacat

SEQ ID NO: 238541 - DNA, 33 bp, Homo sapien
aatagtactgaaaaaacgctgagctgtccacat

SEQ ID NO: 238542 - DNA, 33 bp, Homo sapien
aatagtactgaaaaaatgctgagctgtccacat

SEQ ID NO: 238543 - DNA, 33 bp, Homo sapien
atgaaaactctataaaacagctttcatgaagca

SEQ ID NO: 238544 - DNA, 33 bp, Homo sapien
atgaaaactctataaagcagctttcatgaagca

SEQ ID NO: 238545 - DNA, 33 bp, Homo sapien
acctcaaagtttgcacgctactttaagaacaaa

SEQ ID NO: 238546 - DNA, 33 bp, Homo sapien
acctcaaagtttgcactctactttaagaacaaa

SEQ ID NO: 238547 - DNA, 33 bp, Homo sapien
gatttaaagtagtcagacatcctccatcacaca

SEQ ID NO: 238548 - DNA, 33 bp, Homo sapien
gatttaaagtagtcagtcatcctccatcacaca

SEQ ID NO: 238549 - DNA, 33 bp, Homo sapien
attaccaggctttgaacgtggctttggataatc

SEQ ID NO: 238550 - DNA, 33 bp, Homo sapien
attaccaggctttgaatgtggctttggataatc

SEQ ID NO: 238551 - DNA, 33 bp, Homo sapien
acgctacataagtaaagtttaagcacgtttaca

SEQ ID NO: 238552 - DNA, 33 bp, Homo sapien
acgctacataagtaaattttaagcacgtttaca

SEQ ID NO: 238553 - DNA, 33 bp, Homo sapien
aggagagagaagaatgcaatcaaacttacagac

SEQ ID NO: 238554 - DNA, 33 bp, Homo sapien
aggagagagaagaatggaatcaaacttacagac

SEQ ID NO: 238555 - DNA, 33 bp, Homo sapien
aaaccaagcacaggcaatgaagaaatgtgatac

SEQ ID NO: 238556 - DNA, 33 bp, Homo sapien
aaaccaagcacaggcagtgaagaaatgtgatac

SEQ ID NO: 238557 - DNA, 33 bp, Homo sapien
tcatgaagtgaaggtcaaaagattgtttaataa

SEQ ID NO: 238558 - DNA, 33 bp, Homo sapien
tcatgaagtgaaggtcgaaagattgtttaataa

SEQ ID NO: 238559 - DNA, 33 bp, Homo sapien
aatctgtaacctgtccgactgaggaaaactttc

SEQ ID NO: 238560 - DNA, 33 bp, Homo sapien
aatctgtaacctgtcctactgaggaaaactttc

SEQ ID NO: 238561 - DNA, 33 bp, Homo sapien
attttttggatactgcacttacttcctaagatc

SEQ ID NO: 238562 - DNA, 33 bp, Homo sapien
attttttggatactgcgcttacttcctaagatc

SEQ ID NO: 238563 - DNA, 33 bp, Homo sapien
agcacatccagtttgactaacattatagcatca

SEQ ID NO: 238564 - DNA, 33 bp, Homo sapien
agcacatccagtttgattaacattatagcatca

SEQ ID NO: 238565 - DNA, 33 bp, Homo sapien
tctacagtatggttaacagagatgaaacaaact

SEQ ID NO: 238566 - DNA, 33 bp, Homo sapien
tctacagtatggttaagagagatgaaacaaact

SEQ ID NO: 238567 - DNA, 33 bp, Homo sapien
ggggtctcacatgagcactttatccagtacaaa

SEQ ID NO: 238568 - DNA, 33 bp, Homo sapien
ggggtctcacatgagccctttatccagtacaaa

SEQ ID NO: 238569 - DNA, 33 bp, Homo sapien
aaatatagacattagaatcagaggcctgggttc

SEQ ID NO: 238570 - DNA, 33 bp, Homo sapien
aaatatagacattagagtcagaggcctgggttc

SEQ ID NO: 238571 - DNA, 33 bp, Homo sapien
tatttgtagaatgctcaaagcttacagtgggtt

SEQ ID NO: 238572 - DNA, 33 bp, Homo sapien
tatttgtagaatgctcgaagcttacagtgggtt

SEQ ID NO: 238573 - DNA, 33 bp, Homo sapien
gactgcaagaaatttacggtatagcgtcactag

SEQ ID NO: 238574 - DNA, 33 bp, Homo sapien
gactgcaagaaatttatggtatagcgtcactag

SEQ ID NO: 238575 - DNA, 33 bp, Homo sapien
attttaatgtcttggccatcattgtctcttccc

SEQ ID NO: 238576 - DNA, 33 bp, Homo sapien
attttaatgtcttggctatcattgtctcttccc

SEQ ID NO: 238577 - DNA, 33 bp, Homo sapien
gtagtgtccatcacaacttactcaaataatgtg

SEQ ID NO: 238578 - DNA, 33 bp, Homo sapien
gtagtgtccatcacaagttactcaaataatgtg

SEQ ID NO: 238579 - DNA, 33 bp, Homo sapien
acaggtcccagagctaagactattgtaacgaac

SEQ ID NO: 238580 - DNA, 33 bp, Homo sapien
acaggtcccagagctacgactattgtaacgaac

SEQ ID NO: 238581 - DNA, 33 bp, Homo sapien
attgtatcacttaacaatagagcctaaacagta

SEQ ID NO: 238582 - DNA, 33 bp, Homo sapien
attgtatcacttaacagtagagcctaaacagta

SEQ ID NO: 238583 - DNA, 33 bp, Homo sapien
tatataatgtttgtaaaatatgtagcaaaaata

SEQ ID NO: 238584 - DNA, 33 bp, Homo sapien
tatataatgtttgtaagatatgtagcaaaaata

SEQ ID NO: 238585 - DNA, 33 bp, Homo sapien
ccttgtcttcagagcacagtttctctaacagtg

SEQ ID NO: 238586 - DNA, 33 bp, Homo sapien
ccttgtcttcagagcatagtttctctaacagtg

SEQ ID NO: 238587 - DNA, 33 bp, Homo sapien
gtaattacttaagggaatagaaatgtttttgag

SEQ ID NO: 238588 - DNA, 33 bp, Homo sapien
gtaattacttaagggactagaaatgtttttgag

SEQ ID NO: 238589 - DNA, 33 bp, Homo sapien
tatgctctttgccgtcaaactgctaaatattgt

SEQ ID NO: 238590 - DNA, 33 bp, Homo sapien
tatgctctttgccgtcgaactgctaaatattgt

SEQ ID NO: 238591 - DNA, 33 bp, Homo sapien
tgctctctggctcttaccgcttccagtctaata

SEQ ID NO: 238592 - DNA, 33 bp, Homo sapien
tgctctctggctcttatcgcttccagtctaata

SEQ ID NO: 238593 - DNA, 33 bp, Homo sapien
tgacagactgtagacaactaagttatggggatg

SEQ ID NO: 238594 - DNA, 33 bp, Homo sapien
tgacagactgtagacagctaagttatggggatg

SEQ ID NO: 238595 - DNA, 33 bp, Homo sapien
ctctttttaccatcccaatgacagcagaaactg

SEQ ID NO: 238596 - DNA, 33 bp, Homo sapien
ctctttttaccatcccgatgacagcagaaactg

SEQ ID NO: 238597 - DNA, 33 bp, Homo sapien
atgttcatgcacatcaaagaacccttttttaag

SEQ ID NO: 238598 - DNA, 33 bp, Homo sapien
atgttcatgcacatcagagaacccttttttaag

SEQ ID NO: 238599 - DNA, 33 bp, Homo sapien
ctgccatgaccaagtcaatttcagatttccatt

SEQ ID NO: 238600 - DNA, 33 bp, Homo sapien
ctgccatgaccaagtcgatttcagatttccatt

SEQ ID NO: 238601 - DNA, 33 bp, Homo sapien
ccttcctcatttggacaatttggacactccaaa

SEQ ID NO: 238602 - DNA, 33 bp, Homo sapien
ccttcctcatttggaccatttggacactccaaa

SEQ ID NO: 238603 - DNA, 33 bp, Homo sapien
actaaagaaagtgaaaatgtaggcttctgtgat

SEQ ID NO: 238604 - DNA, 33 bp, Homo sapien
actaaagaaagtgaaactgtaggcttctgtgat

SEQ ID NO: 238605 - DNA, 33 bp, Homo sapien
gtaggcttctgtgatccgacttgcctctaggac

SEQ ID NO: 238606 - DNA, 33 bp, Homo sapien
gtaggcttctgtgatctgacttgcctctaggac

SEQ ID NO: 238607 - DNA, 33 bp, Homo sapien
gttgctacaacttggaaggagggtgctgttggc

SEQ ID NO: 238608 - DNA, 33 bp, Homo sapien
gttgctacaacttggacggagggtgctgttggc

SEQ ID NO: 238609 - DNA, 33 bp, Homo sapien
ggatacctgaaggatcacttggttcacaatcaa

SEQ ID NO: 238610 - DNA, 33 bp, Homo sapien
ggatacctgaaggatcgcttggttcacaatcaa

SEQ ID NO: 238611 - DNA, 33 bp, Homo sapien
atctcccctaggcacaataaaagtattcatgca

SEQ ID NO: 238612 - DNA, 33 bp, Homo sapien
atctcccctaggcacagtaaaagtattcatgca

SEQ ID NO: 238613 - DNA, 33 bp, Homo sapien
ttccaggtcaacagaaaggactttaaaagctat

SEQ ID NO: 238614 - DNA, 33 bp, Homo sapien
ttccaggtcaacagaacggactttaaaagctat

SEQ ID NO: 238615 - DNA, 33 bp, Homo sapien
tgctgtatggtgtatgcacaacgtctttgctgc

SEQ ID NO: 238616 - DNA, 33 bp, Homo sapien
tgctgtatggtgtatgtacaacgtctttgctgc

SEQ ID NO: 238617 - DNA, 33 bp, Homo sapien
gcttcctacatataaaagaatgagctttttcct

SEQ ID NO: 238618 - DNA, 33 bp, Homo sapien
gcttcctacatataaaggaatgagctttttcct

SEQ ID NO: 238619 - DNA, 33 bp, Homo sapien
tttaacatgagctccacatatgaaatgatcatg

SEQ ID NO: 238620 - DNA, 33 bp, Homo sapien
tttaacatgagctccagatatgaaatgatcatg

SEQ ID NO: 238621 - DNA, 33 bp, Homo sapien
caaaagagcttcttgacaaggagagactaaaga

SEQ ID NO: 238622 - DNA, 33 bp, Homo sapien
caaaagagcttcttgagaaggagagactaaaga

SEQ ID NO: 238623 - DNA, 33 bp, Homo sapien
tgtcctgaagcaggaagagaggttaataatgca

SEQ ID NO: 238624 - DNA, 33 bp, Homo sapien
tgtcctgaagcaggaatagaggttaataatgca

SEQ ID NO: 238625 - DNA, 33 bp, Homo sapien
gtattttatttccataggtggtctttttaactt

SEQ ID NO: 238626 - DNA, 33 bp, Homo sapien
gtattttatttccatatgtggtctttttaactt

SEQ ID NO: 238627 - DNA, 33 bp, Homo sapien
aaattgccttcataacaatatccacttcataaa

SEQ ID NO: 238628 - DNA, 33 bp, Homo sapien
aaattgccttcataactatatccacttcataaa

SEQ ID NO: 238629 - DNA, 33 bp, Homo sapien
agtaaggtttggaagacggtatatgtttctgaa

SEQ ID NO: 238630 - DNA, 33 bp, Homo sapien
agtaaggtttggaagatggtatatgtttctgaa

SEQ ID NO: 238631 - DNA, 33 bp, Homo sapien
tcctgtctgcaaaactgaagggcttctttgcat

SEQ ID NO: 238632 - DNA, 33 bp, Homo sapien
tcctgtctgcaaaacttaagggcttctttgcat

SEQ ID NO: 238633 - DNA, 33 bp, Homo sapien
gtgaggagagtgtaaaaaagttgacacaaagga

SEQ ID NO: 238634 - DNA, 33 bp, Homo sapien
gtgaggagagtgtaaagaagttgacacaaagga

SEQ ID NO: 238635 - DNA, 33 bp, Homo sapien
tcttaatattctacataaaatatcgttgtagct

SEQ ID NO: 238636 - DNA, 33 bp, Homo sapien
tcttaatattctacatgaaatatcgttgtagct

SEQ ID NO: 238637 - DNA, 33 bp, Homo sapien
gaaaattgatggagaacctgcatgctaaaacat

SEQ ID NO: 238638 - DNA, 33 bp, Homo sapien
gaaaattgatggagaatctgcatgctaaaacat

SEQ ID NO: 238639 - DNA, 33 bp, Homo sapien
gtatagatgaatgttacagtttttttattgttg

SEQ ID NO: 238640 - DNA, 33 bp, Homo sapien
gtatagatgaatgttatagtttttttattgttg

SEQ ID NO: 238641 - DNA, 33 bp, Homo sapien
ttccaatttggtaacacgaagggaacagtggtt

SEQ ID NO: 238642 - DNA, 33 bp, Homo sapien
ttccaatttggtaacatgaagggaacagtggtt

SEQ ID NO: 238643 - DNA, 33 bp, Homo sapien
agtggccagaatggaacgctactcaaatctcta

SEQ ID NO: 238644 - DNA, 33 bp, Homo sapien
agtggccagaatggaatgctactcaaatctcta

SEQ ID NO: 238645 - DNA, 33 bp, Homo sapien
agcattaaatgagatactacactatgacagagt

SEQ ID NO: 238646 - DNA, 33 bp, Homo sapien
agcattaaatgagatattacactatgacagagt

SEQ ID NO: 238647 - DNA, 33 bp, Homo sapien
tatcaattgtttcaaacgcactaaagtaaatag

SEQ ID NO: 238648 - DNA, 33 bp, Homo sapien
tatcaattgtttcaaatgcactaaagtaaatag

SEQ ID NO: 238649 - DNA, 33 bp, Homo sapien
aacaaaacacagataaagagtttgtcgtcagag

SEQ ID NO: 238650 - DNA, 33 bp, Homo sapien
aacaaaacacagataaggagtttgtcgtcagag

SEQ ID NO: 238651 - DNA, 33 bp, Homo sapien
tttgtgtctatgaacaaaaggaagatggtagga

SEQ ID NO: 238652 - DNA, 33 bp, Homo sapien
tttgtgtctatgaacataaggaagatggtagga

SEQ ID NO: 238653 - DNA, 33 bp, Homo sapien
accctgattttcttcaagatctgactgcttcgg

SEQ ID NO: 238654 - DNA, 33 bp, Homo sapien
accctgattttcttcatgatctgactgcttcgg

SEQ ID NO: 238655 - DNA, 33 bp, Homo sapien
aacacaatagaaaggacgactggatttcaggat

SEQ ID NO: 238656 - DNA, 33 bp, Homo sapien
aacacaatagaaaggatgactggatttcaggat

SEQ ID NO: 238657 - DNA, 33 bp, Homo sapien
ctggagttttcatatacggtggaaataccagag

SEQ ID NO: 238658 - DNA, 33 bp, Homo sapien
ctggagttttcatatatggtggaaataccagag

SEQ ID NO: 238659 - DNA, 33 bp, Homo sapien
aaacccgcaaggttacgacatgttgttcaccac

SEQ ID NO: 238660 - DNA, 33 bp, Homo sapien
aaacccgcaaggttactacatgttgttcaccac

SEQ ID NO: 238661 - DNA, 33 bp, Homo sapien
aacacttgctaatataaataaaccttcaagaca

SEQ ID NO: 238662 - DNA, 33 bp, Homo sapien
aacacttgctaatatatataaaccttcaagaca

SEQ ID NO: 238663 - DNA, 33 bp, Homo sapien
tcatatttgcacatcaatatcaccttctttaat

SEQ ID NO: 238664 - DNA, 33 bp, Homo sapien
tcatatttgcacatcagtatcaccttctttaat

SEQ ID NO: 238665 - DNA, 33 bp, Homo sapien
taaagtcctatggctcactccaactccacaaca

SEQ ID NO: 238666 - DNA, 33 bp, Homo sapien
taaagtcctatggctcgctccaactccacaaca

SEQ ID NO: 238667 - DNA, 33 bp, Homo sapien
tgctaaagcttgtcagcaccctgtccccactac

SEQ ID NO: 238668 - DNA, 33 bp, Homo sapien
tgctaaagcttgtcagtaccctgtccccactac

SEQ ID NO: 238669 - DNA, 33 bp, Homo sapien
tagatgggctgtctcaggaccatgaatgtgggt

SEQ ID NO: 238670 - DNA, 33 bp, Homo sapien
tagatgggctgtctcatgaccatgaatgtgggt

SEQ ID NO: 238671 - DNA, 33 bp, Homo sapien
agcgatggaccttgaaagtgaggtctgtgaggt

SEQ ID NO: 238672 - DNA, 33 bp, Homo sapien
agcgatggaccttgaaggtgaggtctgtgaggt

SEQ ID NO: 238673 - DNA, 33 bp, Homo sapien
atagggtgtgggcaacactatggacattgctag

SEQ ID NO: 238674 - DNA, 33 bp, Homo sapien
atagggtgtgggcaacgctatggacattgctag

SEQ ID NO: 238675 - DNA, 33 bp, Homo sapien
aaggtgaaactacctacaagggctgttctctgt

SEQ ID NO: 238676 - DNA, 33 bp, Homo sapien
aaggtgaaactacctataagggctgttctctgt

SEQ ID NO: 238677 - DNA, 33 bp, Homo sapien
ggtgccctagcaagtaactttcagaatttcctg

SEQ ID NO: 238678 - DNA, 33 bp, Homo sapien
ggtgccctagcaagtagctttcagaatttcctg

SEQ ID NO: 238679 - DNA, 33 bp, Homo sapien
tggaactaaataataacgatagctgcataatat

SEQ ID NO: 238680 - DNA, 33 bp, Homo sapien
tggaactaaataataatgatagctgcataatat

SEQ ID NO: 238681 - DNA, 33 bp, Homo sapien
aaactttctcagagacaaaaaatgatcttgggg

SEQ ID NO: 238682 - DNA, 33 bp, Homo sapien
aaactttctcagagaccaaaaatgatcttgggg

SEQ ID NO: 238683 - DNA, 33 bp, Homo sapien
aagaaatatatagttacgtcttctcgagttaca

SEQ ID NO: 238684 - DNA, 33 bp, Homo sapien
aagaaatatatagttatgtcttctcgagttaca

SEQ ID NO: 238685 - DNA, 33 bp, Homo sapien
tgcaactctccattgcggaaagtgtttaagagg

SEQ ID NO: 238686 - DNA, 33 bp, Homo sapien
tgcaactctccattgctgaaagtgtttaagagg

SEQ ID NO: 238687 - DNA, 33 bp, Homo sapien
gggataagatatggaacacattagtggtagtat

SEQ ID NO: 238688 - DNA, 33 bp, Homo sapien
gggataagatatggaatacattagtggtagtat

SEQ ID NO: 238689 - DNA, 33 bp, Homo sapien
tctaactgcaaagtccacacaagtaattgctct

SEQ ID NO: 238690 - DNA, 33 bp, Homo sapien
tctaactgcaaagtccgcacaagtaattgctct

SEQ ID NO: 238691 - DNA, 33 bp, Homo sapien
ctcatttcagagacaaagggtggtagtgggaaa

SEQ ID NO: 238692 - DNA, 33 bp, Homo sapien
ctcatttcagagacaatgggtggtagtgggaaa

SEQ ID NO: 238693 - DNA, 33 bp, Homo sapien
cctatcctctgccttcaatttgcataagtaatg

SEQ ID NO: 238694 - DNA, 33 bp, Homo sapien
cctatcctctgccttcgatttgcataagtaatg

SEQ ID NO: 238695 - DNA, 33 bp, Homo sapien
aaaatgaagataataaagcctccctgcaaaatt

SEQ ID NO: 238696 - DNA, 33 bp, Homo sapien
aaaatgaagataataaggcctccctgcaaaatt

SEQ ID NO: 238697 - DNA, 33 bp, Homo sapien
tgatgaaaatagttaacggcacatcactaattc

SEQ ID NO: 238698 - DNA, 33 bp, Homo sapien
tgatgaaaatagttaatggcacatcactaattc

SEQ ID NO: 238699 - DNA, 33 bp, Homo sapien
gtgagatgacatgataaaagtaaaaagaaaatc

SEQ ID NO: 238700 - DNA, 33 bp, Homo sapien
gtgagatgacatgatacaagtaaaaagaaaatc

SEQ ID NO: 238701 - DNA, 33 bp, Homo sapien
aaacatttattttgcacctatgatgtgctaggc

SEQ ID NO: 238702 - DNA, 33 bp, Homo sapien
aaacatttattttgcatctatgatgtgctaggc

SEQ ID NO: 238703 - DNA, 33 bp, Homo sapien
accaagaggctgactacagctgaacaaccatac

SEQ ID NO: 238704 - DNA, 33 bp, Homo sapien
accaagaggctgactatagctgaacaaccatac

SEQ ID NO: 238705 - DNA, 33 bp, Homo sapien
tcacagtaattgtacactagatgtttccttttc

SEQ ID NO: 238706 - DNA, 33 bp, Homo sapien
tcacagtaattgtacagtagatgtttccttttc

SEQ ID NO: 238707 - DNA, 33 bp, Homo sapien
tgtagcttcatagatcacatgcttgctttcctt

SEQ ID NO: 238708 - DNA, 33 bp, Homo sapien
tgtagcttcatagatcgcatgcttgctttcctt

SEQ ID NO: 238709 - DNA, 33 bp, Homo sapien
aaaaatgaatctgtgcaacctagggaaagtcaa

SEQ ID NO: 238710 - DNA, 33 bp, Homo sapien
aaaaatgaatctgtgcgacctagggaaagtcaa

SEQ ID NO: 238711 - DNA, 33 bp, Homo sapien
gttttgatggccaacaagaaacatttaagttta

SEQ ID NO: 238712 - DNA, 33 bp, Homo sapien
gttttgatggccaacaggaaacatttaagttta

SEQ ID NO: 238713 - DNA, 33 bp, Homo sapien
catgctgtttgaaaaacggtgccaactgacttg

SEQ ID NO: 238714 - DNA, 33 bp, Homo sapien
catgctgtttgaaaaatggtgccaactgacttg

SEQ ID NO: 238715 - DNA, 33 bp, Homo sapien
tgtgttaacccctaacaatagagtaagcctgtc

SEQ ID NO: 238716 - DNA, 33 bp, Homo sapien
tgtgttaacccctaacgatagagtaagcctgtc

SEQ ID NO: 238717 - DNA, 33 bp, Homo sapien
gtaattcttaatcttcaagtttttcttctctct

SEQ ID NO: 238718 - DNA, 33 bp, Homo sapien
gtaattcttaatcttcgagtttttcttctctct

SEQ ID NO: 238719 - DNA, 33 bp, Homo sapien
gatggagaacagggcaagagcttaaaaacactt

SEQ ID NO: 238720 - DNA, 33 bp, Homo sapien
gatggagaacagggcaggagcttaaaaacactt

SEQ ID NO: 238721 - DNA, 33 bp, Homo sapien
aaaattatgattttgaagattatctggcttttt

SEQ ID NO: 238722 - DNA, 33 bp, Homo sapien
aaaattatgattttgacgattatctggcttttt

SEQ ID NO: 238723 - DNA, 33 bp, Homo sapien
acaccataatttgcgaagaccactatctttttt

SEQ ID NO: 238724 - DNA, 33 bp, Homo sapien
acaccataatttgcgaggaccactatctttttt

SEQ ID NO: 238725 - DNA, 33 bp, Homo sapien
ttctgtgacgtgtcaccccaaaactgaccacag

SEQ ID NO: 238726 - DNA, 33 bp, Homo sapien
ttctgtgacgtgtcactccaaaactgaccacag

SEQ ID NO: 238727 - DNA, 33 bp, Homo sapien
tgccttattatgagaccgctctctaaagggcca

SEQ ID NO: 238728 - DNA, 33 bp, Homo sapien
tgccttattatgagactgctctctaaagggcca

SEQ ID NO: 238729 - DNA, 33 bp, Homo sapien
gcttctgaggaatagcactgtaacagggggaga

SEQ ID NO: 238730 - DNA, 33 bp, Homo sapien
gcttctgaggaatagcgctgtaacagggggaga

SEQ ID NO: 238731 - DNA, 33 bp, Homo sapien
cagtacagccttgctaagaagcccacaaaagca

SEQ ID NO: 238732 - DNA, 33 bp, Homo sapien
cagtacagccttgctaggaagcccacaaaagca

SEQ ID NO: 238733 - DNA, 33 bp, Homo sapien
ccaagaattctctaaacgccactaaaaatcaaa

SEQ ID NO: 238734 - DNA, 33 bp, Homo sapien
ccaagaattctctaaaggccactaaaaatcaaa

SEQ ID NO: 238735 - DNA, 33 bp, Homo sapien
caaaaaatatgcaatgaagcatgaagtagagtg

SEQ ID NO: 238736 - DNA, 33 bp, Homo sapien
caaaaaatatgcaatgcagcatgaagtagagtg

SEQ ID NO: 238737 - DNA, 33 bp, Homo sapien
ttatctttccaagttgcaggtacatctgccaga

SEQ ID NO: 238738 - DNA, 33 bp, Homo sapien
ttatctttccaagttgtaggtacatctgccaga

SEQ ID NO: 238739 - DNA, 33 bp, Homo sapien
gaagaagaaatgcaaacgagagtaatgaacaga

SEQ ID NO: 238740 - DNA, 33 bp, Homo sapien
gaagaagaaatgcaaatgagagtaatgaacaga

SEQ ID NO: 238741 - DNA, 33 bp, Homo sapien
ccaagtgcacgatacagggttttaccgcataca

SEQ ID NO: 238742 - DNA, 33 bp, Homo sapien
ccaagtgcacgatacatggttttaccgcataca

SEQ ID NO: 238743 - DNA, 33 bp, Homo sapien
tttatagagcatgaacgatttctagcaccctgt

SEQ ID NO: 238744 - DNA, 33 bp, Homo sapien
tttatagagcatgaactatttctagcaccctgt

SEQ ID NO: 238745 - DNA, 33 bp, Homo sapien
tcatatggaaaataacaaaactggacccatacc

SEQ ID NO: 238746 - DNA, 33 bp, Homo sapien
tcatatggaaaataacgaaactggacccatacc

SEQ ID NO: 238747 - DNA, 33 bp, Homo sapien
accaggactctcagaacgcactggtcataaaca

SEQ ID NO: 238748 - DNA, 33 bp, Homo sapien
accaggactctcagaatgcactggtcataaaca

SEQ ID NO: 238749 - DNA, 33 bp, Homo sapien
gaggcatgaaaatacactggaaagcaggctcat

SEQ ID NO: 238750 - DNA, 33 bp, Homo sapien
gaggcatgaaaatacattggaaagcaggctcat

SEQ ID NO: 238751 - DNA, 33 bp, Homo sapien
tttgactgtgagttgacaattattgaagcagag

SEQ ID NO: 238752 - DNA, 33 bp, Homo sapien
tttgactgtgagttgataattattgaagcagag

SEQ ID NO: 238753 - DNA, 33 bp, Homo sapien
accagtggatgcctaaaccaatcaatgtggtaa

SEQ ID NO: 238754 - DNA, 33 bp, Homo sapien
accagtggatgcctaagccaatcaatgtggtaa

SEQ ID NO: 238755 - DNA, 33 bp, Homo sapien
ccatcacttccttaggaaagcctctgtaaccac

SEQ ID NO: 238756 - DNA, 33 bp, Homo sapien
ccatcacttccttagggaagcctctgtaaccac

SEQ ID NO: 238757 - DNA, 33 bp, Homo sapien
ttcccctactacttccaacacatgcattttggt

SEQ ID NO: 238758 - DNA, 33 bp, Homo sapien
ttcccctactacttccgacacatgcattttggt

SEQ ID NO: 238759 - DNA, 33 bp, Homo sapien
ctgaatgggattagaaaccattagaagaaagta

SEQ ID NO: 238760 - DNA, 33 bp, Homo sapien
ctgaatgggattagaagccattagaagaaagta

SEQ ID NO: 238761 - DNA, 33 bp, Homo sapien
catttgcttcaaaatacggtgaggaatttctca

SEQ ID NO: 238762 - DNA, 33 bp, Homo sapien
catttgcttcaaaatatggtgaggaatttctca

SEQ ID NO: 238763 - DNA, 33 bp, Homo sapien
atagttttgggttttacatccaatctttaatcc

SEQ ID NO: 238764 - DNA, 33 bp, Homo sapien
atagttttgggttttatatccaatctttaatcc

SEQ ID NO: 238765 - DNA, 33 bp, Homo sapien
gcttcaaaggaaggtcaaaaagaactggcctcc

SEQ ID NO: 238766 - DNA, 33 bp, Homo sapien
gcttcaaaggaaggtcgaaaagaactggcctcc

SEQ ID NO: 238767 - DNA, 33 bp, Homo sapien
tttataataaggacaaacgttggtctctgcatt

SEQ ID NO: 238768 - DNA, 33 bp, Homo sapien
tttataataaggacaaccgttggtctctgcatt

SEQ ID NO: 238769 - DNA, 33 bp, Homo sapien
aagtagctggctttgaaatctactaactagaag

SEQ ID NO: 238770 - DNA, 33 bp, Homo sapien
aagtagctggctttgagatctactaactagaag

SEQ ID NO: 238771 - DNA, 33 bp, Homo sapien
taaactaagaattacaacagagagtgaaaggta

SEQ ID NO: 238772 - DNA, 33 bp, Homo sapien
taaactaagaattacagcagagagtgaaaggta

SEQ ID NO: 238773 - DNA, 33 bp, Homo sapien
agaactttaagcaaacacctgtcttctgcaagg

SEQ ID NO: 238774 - DNA, 33 bp, Homo sapien
agaactttaagcaaacgcctgtcttctgcaagg

SEQ ID NO: 238775 - DNA, 33 bp, Homo sapien
ctacctggagttagtaactggcttgaggcaaat

SEQ ID NO: 238776 - DNA, 33 bp, Homo sapien
ctacctggagttagtacctggcttgaggcaaat

SEQ ID NO: 238777 - DNA, 33 bp, Homo sapien
aataataatggcagagcattttatgttctttgt

SEQ ID NO: 238778 - DNA, 33 bp, Homo sapien
aataataatggcagagtattttatgttctttgt

SEQ ID NO: 238779 - DNA, 33 bp, Homo sapien
caccactcctaactaacggcaaatctattatag

SEQ ID NO: 238780 - DNA, 33 bp, Homo sapien
caccactcctaactaatggcaaatctattatag

SEQ ID NO: 238781 - DNA, 33 bp, Homo sapien
tacctccagagatgcactgatcaacccccattt

SEQ ID NO: 238782 - DNA, 33 bp, Homo sapien
tacctccagagatgcattgatcaacccccattt

SEQ ID NO: 238783 - DNA, 33 bp, Homo sapien
agtatacctggaattacatgtaaccctgaaatg

SEQ ID NO: 238784 - DNA, 33 bp, Homo sapien
agtatacctggaattatatgtaaccctgaaatg

SEQ ID NO: 238785 - DNA, 33 bp, Homo sapien
accagtgtgcaacagagattcagtttatagaac

SEQ ID NO: 238786 - DNA, 33 bp, Homo sapien
accagtgtgcaacagatattcagtttatagaac

SEQ ID NO: 238787 - DNA, 33 bp, Homo sapien
ggtttagatctactgcaattcacaaaacacaaa

SEQ ID NO: 238788 - DNA, 33 bp, Homo sapien
ggtttagatctactgcgattcacaaaacacaaa

SEQ ID NO: 238789 - DNA, 33 bp, Homo sapien
cagagtgcacagagaaatctttgaaaagaaaac

SEQ ID NO: 238790 - DNA, 33 bp, Homo sapien
cagagtgcacagagaagtctttgaaaagaaaac

SEQ ID NO: 238791 - DNA, 33 bp, Homo sapien
tttaaagcaggaagtacaagaaactgatgtgga

SEQ ID NO: 238792 - DNA, 33 bp, Homo sapien
tttaaagcaggaagtagaagaaactgatgtgga

SEQ ID NO: 238793 - DNA, 33 bp, Homo sapien
ctaccccggaggcttacgtgccctgatgtgtct

SEQ ID NO: 238794 - DNA, 33 bp, Homo sapien
ctaccccggaggcttatgtgccctgatgtgtct

SEQ ID NO: 238795 - DNA, 33 bp, Homo sapien
tgccctgatgtgtctacgggcttttaggctctc

SEQ ID NO: 238796 - DNA, 33 bp, Homo sapien
tgccctgatgtgtctatgggcttttaggctctc

SEQ ID NO: 238797 - DNA, 33 bp, Homo sapien
atgtgatagaaatagcgcgacctagaattagaa

SEQ ID NO: 238798 - DNA, 33 bp, Homo sapien
atgtgatagaaatagctcgacctagaattagaa

SEQ ID NO: 238799 - DNA, 33 bp, Homo sapien
gaggctgacctctaaacgaatctgtatccaggt

SEQ ID NO: 238800 - DNA, 33 bp, Homo sapien
gaggctgacctctaaatgaatctgtatccaggt

SEQ ID NO: 238801 - DNA, 33 bp, Homo sapien
taaccaagaagtgttacagttctattatcacaa

SEQ ID NO: 238802 - DNA, 33 bp, Homo sapien
taaccaagaagtgttagagttctattatcacaa

SEQ ID NO: 238803 - DNA, 33 bp, Homo sapien
agggtatacatttagaacttctttccaactaaa

SEQ ID NO: 238804 - DNA, 33 bp, Homo sapien
agggtatacatttagagcttctttccaactaaa

SEQ ID NO: 238805 - DNA, 33 bp, Homo sapien
aaaattgtcaggattaaccttttctgtcactac

SEQ ID NO: 238806 - DNA, 33 bp, Homo sapien
aaaattgtcaggattagccttttctgtcactac

SEQ ID NO: 238807 - DNA, 33 bp, Homo sapien
ttatgattttaagtcaccaagtttgccgtaatt

SEQ ID NO: 238808 - DNA, 33 bp, Homo sapien
ttatgattttaagtcagcaagtttgccgtaatt

SEQ ID NO: 238809 - DNA, 33 bp, Homo sapien
ctaggaggatactgaaacttcctaacatggtaa

SEQ ID NO: 238810 - DNA, 33 bp, Homo sapien
ctaggaggatactgaatcttcctaacatggtaa

SEQ ID NO: 238811 - DNA, 33 bp, Homo sapien
tcatttattcaagagacgagacagttatttccc

SEQ ID NO: 238812 - DNA, 33 bp, Homo sapien
tcatttattcaagagatgagacagttatttccc

SEQ ID NO: 238813 - DNA, 33 bp, Homo sapien
gtgaaagatgaaacggaaagctgtcttttggca

SEQ ID NO: 238814 - DNA, 33 bp, Homo sapien
gtgaaagatgaaacggcaagctgtcttttggca

SEQ ID NO: 238815 - DNA, 33 bp, Homo sapien
tgtcaggaaactccatgatggaggcattgtggg

SEQ ID NO: 238816 - DNA, 33 bp, Homo sapien
tgtcaggaaactccattatggaggcattgtggg

SEQ ID NO: 238817 - DNA, 33 bp, Homo sapien
atttttaagaaacaaccgtcaggtgaaatattt

SEQ ID NO: 238818 - DNA, 33 bp, Homo sapien
atttttaagaaacaactgtcaggtgaaatattt

SEQ ID NO: 238819 - DNA, 33 bp, Homo sapien
aatgttggttgtgatccactaaatttattttca

SEQ ID NO: 238820 - DNA, 33 bp, Homo sapien
aatgttggttgtgatctactaaatttattttca

SEQ ID NO: 238821 - DNA, 33 bp, Homo sapien
aggcaaacagccttcacggtcatgggtttgttt

SEQ ID NO: 238822 - DNA, 33 bp, Homo sapien
aggcaaacagccttcatggtcatgggtttgttt

SEQ ID NO: 238823 - DNA, 33 bp, Homo sapien
tatatcagatagtggaaccaatttcactgcata

SEQ ID NO: 238824 - DNA, 33 bp, Homo sapien
tatatcagatagtggagccaatttcactgcata

SEQ ID NO: 238825 - DNA, 33 bp, Homo sapien
catattgaaagcgcccaaagagaatatatgagc

SEQ ID NO: 238826 - DNA, 33 bp, Homo sapien
catattgaaagcgcccgaagagaatatatgagc

SEQ ID NO: 238827 - DNA, 33 bp, Homo sapien
tctgaggatctggagaaatgatgattgtggttt

SEQ ID NO: 238828 - DNA, 33 bp, Homo sapien
tctgaggatctggagagatgatgattgtggttt

SEQ ID NO: 238829 - DNA, 33 bp, Homo sapien
gaatggtttaagccctaagctctatttagaaca

SEQ ID NO: 238830 - DNA, 33 bp, Homo sapien
gaatggtttaagccctgagctctatttagaaca

SEQ ID NO: 238831 - DNA, 33 bp, Homo sapien
agccaggtttctgagaaatcaaagatgcatagc

SEQ ID NO: 238832 - DNA, 33 bp, Homo sapien
agccaggtttctgagagatcaaagatgcatagc

SEQ ID NO: 238833 - DNA, 33 bp, Homo sapien
tacaatcaggtaattcaatgtaagagcccaagc

SEQ ID NO: 238834 - DNA, 33 bp, Homo sapien
tacaatcaggtaattcgatgtaagagcccaagc

SEQ ID NO: 238835 - DNA, 33 bp, Homo sapien
ccactaatttgggacactacttccagacttctc

SEQ ID NO: 238836 - DNA, 33 bp, Homo sapien
ccactaatttgggacattacttccagacttctc

SEQ ID NO: 238837 - DNA, 33 bp, Homo sapien
atatgaatactgggaaacattggggtggttata

SEQ ID NO: 238838 - DNA, 33 bp, Homo sapien
atatgaatactgggaagcattggggtggttata

SEQ ID NO: 238839 - DNA, 33 bp, Homo sapien
atccctgaagagatcaacagaagatattgaggg

SEQ ID NO: 238840 - DNA, 33 bp, Homo sapien
atccctgaagagatcagcagaagatattgaggg

SEQ ID NO: 238841 - DNA, 33 bp, Homo sapien
ctgagactttttggccgaactctcatggttgca

SEQ ID NO: 238842 - DNA, 33 bp, Homo sapien
ctgagactttttggcctaactctcatggttgca

SEQ ID NO: 238843 - DNA, 33 bp, Homo sapien
atgctacttggattaactgtcagaatagcacag

SEQ ID NO: 238844 - DNA, 33 bp, Homo sapien
atgctacttggattaattgtcagaatagcacag

SEQ ID NO: 238845 - DNA, 33 bp, Homo sapien
aatagcacagcagttaaaaatctggaatccagg

SEQ ID NO: 238846 - DNA, 33 bp, Homo sapien
aatagcacagcagttacaaatctggaatccagg

SEQ ID NO: 238847 - DNA, 33 bp, Homo sapien
gggtttggacaaatgcagaatgtcatgcattca

SEQ ID NO: 238848 - DNA, 33 bp, Homo sapien
gggtttggacaaatgcggaatgtcatgcattca

SEQ ID NO: 238849 - DNA, 33 bp, Homo sapien
taaagttacagtgagacaggtgtgaatgtacaa

SEQ ID NO: 238850 - DNA, 33 bp, Homo sapien
taaagttacagtgagataggtgtgaatgtacaa

SEQ ID NO: 238851 - DNA, 33 bp, Homo sapien
caaatttttcctaaccaggtcaggagaggcttc

SEQ ID NO: 238852 - DNA, 33 bp, Homo sapien
caaatttttcctaaccgggtcaggagaggcttc

SEQ ID NO: 238853 - DNA, 33 bp, Homo sapien
ttaggagtcgcctaaccctagagaagcgtcatt

SEQ ID NO: 238854 - DNA, 33 bp, Homo sapien
ttaggagtcgcctaacgctagagaagcgtcatt

SEQ ID NO: 238855 - DNA, 33 bp, Homo sapien
gtcttacctttcatcactcatgctttcagacac

SEQ ID NO: 238856 - DNA, 33 bp, Homo sapien
gtcttacctttcatcagtcatgctttcagacac

SEQ ID NO: 238857 - DNA, 33 bp, Homo sapien
gaagaatcccaacagcccagtttgaagacttgt

SEQ ID NO: 238858 - DNA, 33 bp, Homo sapien
gaagaatcccaacagctcagtttgaagacttgt

SEQ ID NO: 238859 - DNA, 33 bp, Homo sapien
atcaatccataaataccgaatatgttacaggtc

SEQ ID NO: 238860 - DNA, 33 bp, Homo sapien
atcaatccataaatactgaatatgttacaggtc

SEQ ID NO: 238861 - DNA, 33 bp, Homo sapien
agaagaaaatgaatcacgaagagcatctgaaat

SEQ ID NO: 238862 - DNA, 33 bp, Homo sapien
agaagaaaatgaatcatgaagagcatctgaaat

SEQ ID NO: 238863 - DNA, 33 bp, Homo sapien
tagctcaatcttggaaataacatcccatcattt

SEQ ID NO: 238864 - DNA, 33 bp, Homo sapien
tagctcaatcttggaagtaacatcccatcattt

SEQ ID NO: 238865 - DNA, 33 bp, Homo sapien
gttattcaagttggaaatatttgcattatcttt

SEQ ID NO: 238866 - DNA, 33 bp, Homo sapien
gttattcaagttggaagtatttgcattatcttt

SEQ ID NO: 238867 - DNA, 33 bp, Homo sapien
gttacacagcaataaacatctaacacagcagat

SEQ ID NO: 238868 - DNA, 33 bp, Homo sapien
gttacacagcaataaatatctaacacagcagat

SEQ ID NO: 238869 - DNA, 33 bp, Homo sapien
ggtatctgtctaataaggttgctatagaaatga

SEQ ID NO: 238870 - DNA, 33 bp, Homo sapien
ggtatctgtctaataatgttgctatagaaatga

SEQ ID NO: 238871 - DNA, 33 bp, Homo sapien
ccaaaacagaaaaggcaagtcagctgcatccac

SEQ ID NO: 238872 - DNA, 33 bp, Homo sapien
ccaaaacagaaaaggcgagtcagctgcatccac

SEQ ID NO: 238873 - DNA, 33 bp, Homo sapien
aagaaaaactcaaaagaagcctatctcttttag

SEQ ID NO: 238874 - DNA, 33 bp, Homo sapien
aagaaaaactcaaaagtagcctatctcttttag

SEQ ID NO: 238875 - DNA, 33 bp, Homo sapien
ctgattttgattagtacgccaggatatgtaaga

SEQ ID NO: 238876 - DNA, 33 bp, Homo sapien
ctgattttgattagtatgccaggatatgtaaga

SEQ ID NO: 238877 - DNA, 33 bp, Homo sapien
ctcctgctacaatggccataatcaaaaaataaa

SEQ ID NO: 238878 - DNA, 33 bp, Homo sapien
ctcctgctacaatggcgataatcaaaaaataaa

SEQ ID NO: 238879 - DNA, 33 bp, Homo sapien
tttggttcgagtccaccgctggtaagctagtgt

SEQ ID NO: 238880 - DNA, 33 bp, Homo sapien
tttggttcgagtccactgctggtaagctagtgt

SEQ ID NO: 238881 - DNA, 33 bp, Homo sapien; identical to SEQ ID NO: 238879

SEQ ID NO: 238882 - DNA, 33 bp, Homo sapien; identical to SEQ ID NO: 238880

SEQ ID NO: 238883 - DNA, 33 bp, Homo sapien
gtggcttactgagaacaaagttgtagtgattgt

SEQ ID NO: 238884 - DNA, 33 bp, Homo sapien
gtggcttactgagaaccaagttgtagtgattgt

SEQ ID NO: 238885 - DNA, 33 bp, Homo sapien
aaaaatacaaaaactacctggacgttgtggcat

SEQ ID NO: 238886 - DNA, 33 bp, Homo sapien
aaaaatacaaaaactagctggacgttgtggcat

SEQ ID NO: 238887 - DNA, 33 bp, Homo sapien
attcaatattcagcaaagattggccaagtagct

SEQ ID NO: 238888 - DNA, 33 bp, Homo sapien
attcaatattcagcaaggattggccaagtagct

SEQ ID NO: 238889 - DNA, 33 bp, Homo sapien
agagcacttaaaaccacgcctgtctgggcatac

SEQ ID NO: 238890 - DNA, 33 bp, Homo sapien
agagcacttaaaaccatgcctgtctgggcatac

SEQ ID NO: 238891 - DNA, 33 bp, Homo sapien
ccttactcttaaagcacagacaggagcaagctg

SEQ ID NO: 238892 - DNA, 33 bp, Homo sapien
ccttactcttaaagcagagacaggagcaagctg

SEQ ID NO: 238893 - DNA, 33 bp, Homo sapien
ccatttgccttgctgacataatcactaccctgt

SEQ ID NO: 238894 - DNA, 33 bp, Homo sapien
ccatttgccttgctgagataatcactaccctgt

SEQ ID NO: 238895 - DNA, 33 bp, Homo sapien
agtgaattacactagaacctgtggatgatcaga

SEQ ID NO: 238896 - DNA, 33 bp, Homo sapien
agtgaattacactagaccctgtggatgatcaga

SEQ ID NO: 238897 - DNA, 33 bp, Homo sapien
gctgtgatgtccacacaccaacctagttccttg

SEQ ID NO: 238898 - DNA, 33 bp, Homo sapien
gctgtgatgtccacactccaacctagttccttg

SEQ ID NO: 238899 - DNA, 33 bp, Homo sapien
ctaactggcctacaaactgccccaggatctggt

SEQ ID NO: 238900 - DNA, 33 bp, Homo sapien
ctaactggcctacaaagtgccccaggatctggt

SEQ ID NO: 238901 - DNA, 33 bp, Homo sapien
tttttggcaggaggcccatgtttaaccagtgtt

SEQ ID NO: 238902 - DNA, 33 bp, Homo sapien
tttttggcaggaggcctatgtttaaccagtgtt

SEQ ID NO: 238903 - DNA, 33 bp, Homo sapien
acaatttaaggctcctaaaagaggattcaacca

SEQ ID NO: 238904 - DNA, 33 bp, Homo sapien
acaatttaaggctcctgaaagaggattcaacca

SEQ ID NO: 238905 - DNA, 33 bp, Homo sapien
tcattcactgaatatacgagaatagtgctagag

SEQ ID NO: 238906 - DNA, 33 bp, Homo sapien
tcattcactgaatatatgagaatagtgctagag

SEQ ID NO: 238907 - DNA, 33 bp, Homo sapien
ctgcctccattgtcaccgggccttctttctgtg

SEQ ID NO: 238908 - DNA, 33 bp, Homo sapien
ctgcctccattgtcactgggccttctttctgtg

SEQ ID NO: 238909 - DNA, 33 bp, Homo sapien
tgccctgacattactacataggcagtttgcatt

SEQ ID NO: 238910 - DNA, 33 bp, Homo sapien
tgccctgacattactagataggcagtttgcatt

SEQ ID NO: 238911 - DNA, 33 bp, Homo sapien
ttggataggacaccaaagccagttgaggttcta

SEQ ID NO: 238912 - DNA, 33 bp, Homo sapien
ttggataggacaccaaggccagttgaggttcta

SEQ ID NO: 238913 - DNA, 33 bp, Homo sapien
tttggtatctaaaggaagaaaaatgagaggagt

SEQ ID NO: 238914 - DNA, 33 bp, Homo sapien
tttggtatctaaaggatgaaaaatgagaggagt

SEQ ID NO: 238915 - DNA, 33 bp, Homo sapien
ctttaaaaggaagcagaaatcaacttcataaat

SEQ ID NO: 238916 - DNA, 33 bp, Homo sapien
ctttaaaaggaagcaggaatcaacttcataaat

SEQ ID NO: 238917 - DNA, 33 bp, Homo sapien
gtttatttccaggaccagaggctgctctcccaa

SEQ ID NO: 238918 - DNA, 33 bp, Homo sapien
gtttatttccaggaccggaggctgctctcccaa

SEQ ID NO: 238919 - DNA, 33 bp, Homo sapien
agagaaaaggccagaacgctgggagatgatatc

SEQ ID NO: 238920 - DNA, 33 bp, Homo sapien
agagaaaaggccagaatgctgggagatgatatc

SEQ ID NO: 238921 - DNA, 33 bp, Homo sapien
tttgcacttatctccacgtggaaatagatagcc

SEQ ID NO: 238922 - DNA, 33 bp, Homo sapien
tttgcacttatctccatgtggaaatagatagcc

SEQ ID NO: 238923 - DNA, 33 bp, Homo sapien
atgatatagctgacaccattcaaagcactatgc

SEQ ID NO: 238924 - DNA, 33 bp, Homo sapien
atgatatagctgacactattcaaagcactatgc

SEQ ID NO: 238925 - DNA, 33 bp, Homo sapien
tgctgttccagggaccaaactgaagtagcaaga

SEQ ID NO: 238926 - DNA, 33 bp, Homo sapien
tgctgttccagggaccgaactgaagtagcaaga

SEQ ID NO: 238927 - DNA, 33 bp, Homo sapien
ttcatcatggaataagaagtgagaatgagttag

SEQ ID NO: 238928 - DNA, 33 bp, Homo sapien
ttcatcatggaataaggagtgagaatgagttag

SEQ ID NO: 238929 - DNA, 33 bp, Homo sapien
gaagctaaactgagaaatcttgcaaatcattga

SEQ ID NO: 238930 - DNA, 33 bp, Homo sapien
gaagctaaactgagaattcttgcaaatcattga

SEQ ID NO: 238931 - DNA, 33 bp, Homo sapien
gttcttacttggcaagccacagtctaaatgttg

SEQ ID NO: 238932 - DNA, 33 bp, Homo sapien
gttcttacttggcaagtcacagtctaaatgttg

SEQ ID NO: 238933 - DNA, 33 bp, Homo sapien
gcctggaccatacaacaagagtgcctaagccag

SEQ ID NO: 238934 - DNA, 33 bp, Homo sapien
gcctggaccatacaaccagagtgcctaagccag

SEQ ID NO: 238935 - DNA, 33 bp, Homo sapien
gagctgtaagaataaaatgagctaacccatgtc

SEQ ID NO: 238936 - DNA, 33 bp, Homo sapien
gagctgtaagaataaactgagctaacccatgtc

SEQ ID NO: 238937 - DNA, 33 bp, Homo sapien
cagctcctatacacacaataaaataattaataa

SEQ ID NO: 238938 - DNA, 33 bp, Homo sapien
cagctcctatacacaccataaaataattaataa

SEQ ID NO: 238939 - DNA, 33 bp, Homo sapien
gaggaacatctgtatacgcatttcaaaaggtaa

SEQ ID NO: 238940 - DNA, 33 bp, Homo sapien
gaggaacatctgtataggcatttcaaaaggtaa

SEQ ID NO: 238941 - DNA, 33 bp, Homo sapien
acaagtgcattctacaagactccagggagtgtg

SEQ ID NO: 238942 - DNA, 33 bp, Homo sapien
acaagtgcattctacaggactccagggagtgtg

SEQ ID NO: 238943 - DNA, 33 bp, Homo sapien
agacataaaagagaaaaagcagagaaagaccag

SEQ ID NO: 238944 - DNA, 33 bp, Homo sapien
agacataaaagagaaagagcagagaaagaccag

SEQ ID NO: 238945 - DNA, 33 bp, Homo sapien
tagagaaaggtcaaataataaattgccataaaa

SEQ ID NO: 238946 - DNA, 33 bp, Homo sapien
tagagaaaggtcaaatgataaattgccataaaa

SEQ ID NO: 238947 - DNA, 33 bp, Homo sapien
ggcatctttagcagcaagagtgattatagtttc

SEQ ID NO: 238948 - DNA, 33 bp, Homo sapien
ggcatctttagcagcacgagtgattatagtttc

SEQ ID NO: 238949 - DNA, 33 bp, Homo sapien
aggagctttctaaaatcaaaggcaactatccat

SEQ ID NO: 238950 - DNA, 33 bp, Homo sapien
aggagctttctaaaattaaaggcaactatccat

SEQ ID NO: 238951 - DNA, 33 bp, Homo sapien
tccattttcaaatgccagagactccaacttgtg

SEQ ID NO: 238952 - DNA, 33 bp, Homo sapien
tccattttcaaatgccggagactccaacttgtg

SEQ ID NO: 238953 - DNA, 33 bp, Homo sapien
gtgatggcagtccatgaataatttgcacttgtt

SEQ ID NO: 238954 - DNA, 33 bp, Homo sapien
gtgatggcagtccatggataatttgcacttgtt

SEQ ID NO: 238955 - DNA, 33 bp, Homo sapien
ctgcaaagaacgatcacgtttgccgcaatcttg

SEQ ID NO: 238956 - DNA, 33 bp, Homo sapien
ctgcaaagaacgatcatgtttgccgcaatcttg

SEQ ID NO: 238957 - DNA, 33 bp, Homo sapien
gaaagcaatcacagacaatatataggtgaatat

SEQ ID NO: 238958 - DNA, 33 bp, Homo sapien
gaaagcaatcacagacgatatataggtgaatat

SEQ ID NO: 238959 - DNA, 33 bp, Homo sapien
agtttcaattttcacacctactgaatacagatc

SEQ ID NO: 238960 - DNA, 33 bp, Homo sapien
agtttcaattttcacatctactgaatacagatc

SEQ ID NO: 238961 - DNA, 33 bp, Homo sapien
agattctgagatacacagaggtctagtaatttt

SEQ ID NO: 238962 - DNA, 33 bp, Homo sapien
agattctgagatacaccgaggtctagtaatttt

SEQ ID NO: 238963 - DNA, 33 bp, Homo sapien
agctgatagagatgcaagatcagtaaacatatc

SEQ ID NO: 238964 - DNA, 33 bp, Homo sapien
agctgatagagatgcaggatcagtaaacatatc

SEQ ID NO: 238965 - DNA, 33 bp, Homo sapien
ataatggtccaaaaagaaatggtagcaaaagga

SEQ ID NO: 238966 - DNA, 33 bp, Homo sapien
ataatggtccaaaaagcaatggtagcaaaagga

SEQ ID NO: 238967 - DNA, 33 bp, Homo sapien
ttacgcttgctttatacgggttgaattgcacat

SEQ ID NO: 238968 - DNA, 33 bp, Homo sapien
ttacgcttgctttatatgggttgaattgcacat

SEQ ID NO: 238969 - DNA, 33 bp, Homo sapien
tggccctagtggttaacagagatgagagaggga

SEQ ID NO: 238970 - DNA, 33 bp, Homo sapien
tggccctagtggttaatagagatgagagaggga

SEQ ID NO: 238971 - DNA, 33 bp, Homo sapien
atttcttgcagttcaacgagtacagtatttcaa

SEQ ID NO: 238972 - DNA, 33 bp, Homo sapien
atttcttgcagttcaatgagtacagtatttcaa

SEQ ID NO: 238973 - DNA, 33 bp, Homo sapien
tccatgtgctaatttgcatagagagtttacgta

SEQ ID NO: 238974 - DNA, 33 bp, Homo sapien
tccatgtgctaatttgtatagagagtttacgta

SEQ ID NO: 238975 - DNA, 33 bp, Homo sapien
tcttatttaaagcaaacaacaagtgtccaaaag

SEQ ID NO: 238976 - DNA, 33 bp, Homo sapien
tcttatttaaagcaaataacaagtgtccaaaag

SEQ ID NO: 238977 - DNA, 33 bp, Homo sapien
atgaattttccaaatacctattagtctgagaga

SEQ ID NO: 238978 - DNA, 33 bp, Homo sapien
atgaattttccaaatatctattagtctgagaga

SEQ ID NO: 238979 - DNA, 33 bp, Homo sapien
gatctgcaagtcaaagaaatgatctattataca

SEQ ID NO: 238980 - DNA, 33 bp, Homo sapien
gatctgcaagtcaaaggaatgatctattataca

SEQ ID NO: 238981 - DNA, 33 bp, Homo sapien
acctctgatcctgtcactcagtgtgtgttacct

SEQ ID NO: 238982 - DNA, 33 bp, Homo sapien
acctctgatcctgtcattcagtgtgtgttacct

SEQ ID NO: 238983 - DNA, 33 bp, Homo sapien
tagagctcaattccaactcataaaaagctgtac

SEQ ID NO: 238984 - DNA, 33 bp, Homo sapien
tagagctcaattccaattcataaaaagctgtac

SEQ ID NO: 238985 - DNA, 33 bp, Homo sapien
acaagtgactaagttaaagagagttatgaataa

SEQ ID NO: 238986 - DNA, 33 bp, Homo sapien
acaagtgactaagttacagagagttatgaataa

SEQ ID NO: 238987 - DNA, 33 bp, Homo sapien
ctatctccaaattccacctgtttgcaaagacac

SEQ ID NO: 238988 - DNA, 33 bp, Homo sapien
ctatctccaaattccatctgtttgcaaagacac

SEQ ID NO: 238989 - DNA, 33 bp, Homo sapien
aagccacagtaacatccctctaaacgtgttctt

SEQ ID NO: 238990 - DNA, 33 bp, Homo sapien
aagccacagtaacatctctctaaacgtgttctt

SEQ ID NO: 238991 - DNA, 33 bp, Homo sapien
tgatcatgcttgtaataaatagttcaatggttg

SEQ ID NO: 238992 - DNA, 33 bp, Homo sapien
tgatcatgcttgtaatgaatagttcaatggttg

SEQ ID NO: 238993 - DNA, 33 bp, Homo sapien
cagaatgcatgcccgacattaagtgacacttgg

SEQ ID NO: 238994 - DNA, 33 bp, Homo sapien
cagaatgcatgcccgagattaagtgacacttgg

SEQ ID NO: 238995 - DNA, 33 bp, Homo sapien
atacataactacatgcagaaatattattactta

SEQ ID NO: 238996 - DNA, 33 bp, Homo sapien
atacataactacatgcggaaatattattactta

SEQ ID NO: 238997 - DNA, 33 bp, Homo sapien
gtattatttgcaatcaatagaattgagaaaaac

SEQ ID NO: 238998 - DNA, 33 bp, Homo sapien
gtattatttgcaatcattagaattgagaaaaac

SEQ ID NO: 238999 - DNA, 33 bp, Homo sapien
ccttccaggtggcatacgtttagcggcctggaa

SEQ ID NO: 239000 - DNA, 33 bp, Homo sapien
ccttccaggtggcatatgtttagcggcctggaa

SEQ ID NO: 239001 - DNA, 33 bp, Homo sapien
tggataaaacaccatcagaaatgtagagccaag

SEQ ID NO: 239002 - DNA, 33 bp, Homo sapien
tggataaaacaccatcggaaatgtagagccaag

SEQ ID NO: 239003 - DNA, 33 bp, Homo sapien
caactgggtaaatagacatgtaagtcgggagtt

SEQ ID NO: 239004 - DNA, 33 bp, Homo sapien
caactgggtaaatagatatgtaagtcgggagtt

SEQ ID NO: 239005 - DNA, 33 bp, Homo sapien
ggactgagaacttccaataccatgtgaatgagc

SEQ ID NO: 239006 - DNA, 33 bp, Homo sapien
ggactgagaacttccagtaccatgtgaatgagc

SEQ ID NO: 239007 - DNA, 33 bp, Homo sapien
gattcacctaaaaaccacattttagatacaaaa

SEQ ID NO: 239008 - DNA, 33 bp, Homo sapien
gattcacctaaaaaccgcattttagatacaaaa

SEQ ID NO: 239009 - DNA, 33 bp, Homo sapien
tgagtgaagtgagtaaaatgaaagaagatgaat

SEQ ID NO: 239010 - DNA, 33 bp, Homo sapien
tgagtgaagtgagtaagatgaaagaagatgaat

SEQ ID NO: 239011 - DNA, 33 bp, Homo sapien
gcagaaggggccttagccaaaaataatgatttg

SEQ ID NO: 239012 - DNA, 33 bp, Homo sapien
gcagaaggggccttagtcaaaaataatgatttg

SEQ ID NO: 239013 - DNA, 33 bp, Homo sapien
taggagacaacatttgaaggcaataatcttttc

SEQ ID NO: 239014 - DNA, 33 bp, Homo sapien
taggagacaacatttggaggcaataatcttttc

SEQ ID NO: 239015 - DNA, 33 bp, Homo sapien
actgcagtgttaaagacgcagaacctgttcagg

SEQ ID NO: 239016 - DNA, 33 bp, Homo sapien
actgcagtgttaaagatgcagaacctgttcagg

SEQ ID NO: 239017 - DNA, 33 bp, Homo sapien
agttctgggtaatacaccttgaactggtggaaa

SEQ ID NO: 239018 - DNA, 33 bp, Homo sapien
agttctgggtaatacatcttgaactggtggaaa

SEQ ID NO: 239019 - DNA, 33 bp, Homo sapien
actacaatgccagctcaacccaagtcttgccag

SEQ ID NO: 239020 - DNA, 33 bp, Homo sapien
actacaatgccagctcgacccaagtcttgccag

SEQ ID NO: 239021 - DNA, 33 bp, Homo sapien
ttgaatccaagcatcacgagaatgtgagagatg

SEQ ID NO: 239022 - DNA, 33 bp, Homo sapien
ttgaatccaagcatcatgagaatgtgagagatg

SEQ ID NO: 239023 - DNA, 33 bp, Homo sapien
acagtttttgcaaaggcagtttcattatgctac

SEQ ID NO: 239024 - DNA, 33 bp, Homo sapien
acagtttttgcaaaggtagtttcattatgctac

SEQ ID NO: 239025 - DNA, 33 bp, Homo sapien
ggtcaggaattgttaactaaatactcatggtct

SEQ ID NO: 239026 - DNA, 33 bp, Homo sapien
ggtcaggaattgttaattaaatactcatggtct

SEQ ID NO: 239027 - DNA, 33 bp, Homo sapien
taaagggcaagagccacgctttattcctcttgc

SEQ ID NO: 239028 - DNA, 33 bp, Homo sapien
taaagggcaagagccatgctttattcctcttgc

SEQ ID NO: 239029 - DNA, 33 bp, Homo sapien
gaaaagatgaatgctaatacatcgggaaattta

SEQ ID NO: 239030 - DNA, 33 bp, Homo sapien
gaaaagatgaatgctagtacatcgggaaattta

SEQ ID NO: 239031 - DNA, 33 bp, Homo sapien
catatgtcataactacccagcggctgtagagta

SEQ ID NO: 239032 - DNA, 33 bp, Homo sapien
catatgtcataactactcagcggctgtagagta

SEQ ID NO: 239033 - DNA, 33 bp, Homo sapien
tcagaaactgtagacactgggtcttgggcattg

SEQ ID NO: 239034 - DNA, 33 bp, Homo sapien
tcagaaactgtagacattgggtcttgggcattg

SEQ ID NO: 239035 - DNA, 33 bp, Homo sapien
ttaaaatcagcatgcccactgaagttccaggac

SEQ ID NO: 239036 - DNA, 33 bp, Homo sapien
ttaaaatcagcatgcctactgaagttccaggac

SEQ ID NO: 239037 - DNA, 33 bp, Homo sapien
ggccattagttggggcaattttcagtttccatt

SEQ ID NO: 239038 - DNA, 33 bp, Homo sapien
ggccattagttggggcgattttcagtttccatt

SEQ ID NO: 239039 - DNA, 33 bp, Homo sapien
gggactttctgcttgaagttttcaaatgatcca

SEQ ID NO: 239040 - DNA, 33 bp, Homo sapien
gggactttctgcttgatgttttcaaatgatcca

SEQ ID NO: 239041 - DNA, 33 bp, Homo sapien
tcatatgttgaaaaagacataggatttgaggat

SEQ ID NO: 239042 - DNA, 33 bp, Homo sapien
tcatatgttgaaaaagccataggatttgaggat

SEQ ID NO: 239043 - DNA, 33 bp, Homo sapien
taaggtaattgcactgcagcagggaataagaga

SEQ ID NO: 239044 - DNA, 33 bp, Homo sapien
taaggtaattgcactgtagcagggaataagaga

SEQ ID NO: 239045 - DNA, 33 bp, Homo sapien
ggtctaagcaaaggcagtctcaaatgttgagaa

SEQ ID NO: 239046 - DNA, 33 bp, Homo sapien
ggtctaagcaaaggcattctcaaatgttgagaa

SEQ ID NO: 239047 - DNA, 33 bp, Homo sapien
ggagagcactcaggtaacaacacaatagatctg

SEQ ID NO: 239048 - DNA, 33 bp, Homo sapien
ggagagcactcaggtagcaacacaatagatctg

SEQ ID NO: 239049 - DNA, 33 bp, Homo sapien
atctctatgaaattcgaatgctggttactgaag

SEQ ID NO: 239050 - DNA, 33 bp, Homo sapien
atctctatgaaattcgcatgctggttactgaag

SEQ ID NO: 239051 - DNA, 33 bp, Homo sapien
tatccatagagtttgacgagagaagttaggact

SEQ ID NO: 239052 - DNA, 33 bp, Homo sapien
tatccatagagtttgatgagagaagttaggact

SEQ ID NO: 239053 - DNA, 33 bp, Homo sapien
aacccaacaagatgtaaagtgttctccagtatc

SEQ ID NO: 239054 - DNA, 33 bp, Homo sapien
aacccaacaagatgtagagtgttctccagtatc

SEQ ID NO: 239055 - DNA, 33 bp, Homo sapien
cccttggcaccaggcgaaactcattatgttagc

SEQ ID NO: 239056 - DNA, 33 bp, Homo sapien
cccttggcaccaggcggaactcattatgttagc

SEQ ID NO: 239057 - DNA, 33 bp, Homo sapien
tttcctcttggaaataacaaaatggctatgaaa

SEQ ID NO: 239058 - DNA, 33 bp, Homo sapien
tttcctcttggaaatatcaaaatggctatgaaa

SEQ ID NO: 239059 - DNA, 33 bp, Homo sapien
tgagggccaagtgtacaaaaaagtggacaggtc

SEQ ID NO: 239060 - DNA, 33 bp, Homo sapien
tgagggccaagtgtacgaaaaagtggacaggtc

SEQ ID NO: 239061 - DNA, 33 bp, Homo sapien
cctccactaaatatgaacagccattgtgcacat

SEQ ID NO: 239062 - DNA, 33 bp, Homo sapien
cctccactaaatatgagcagccattgtgcacat

SEQ ID NO: 239063 - DNA, 33 bp, Homo sapien
acatcaggggaaaaaaattgtagatgatgatgt

SEQ ID NO: 239064 - DNA, 33 bp, Homo sapien
acatcaggggaaaaaagttgtagatgatgatgt

SEQ ID NO: 239065 - DNA, 33 bp, Homo sapien
gcaaagggagatggaaaggagtaagctgaggct

SEQ ID NO: 239066 - DNA, 33 bp, Homo sapien
gcaaagggagatggaatggagtaagctgaggct

SEQ ID NO: 239067 - DNA, 33 bp, Homo sapien
ggacaactcataggtacctgcttagattctgag

SEQ ID NO: 239068 - DNA, 33 bp, Homo sapien
ggacaactcataggtatctgcttagattctgag

SEQ ID NO: 239069 - DNA, 33 bp, Homo sapien
aaacaaaacaaccttacattgagaggagataaa

SEQ ID NO: 239070 - DNA, 33 bp, Homo sapien
aaacaaaacaaccttatattgagaggagataaa

SEQ ID NO: 239071 - DNA, 33 bp, Homo sapien
gaaataaagtacaccacaaatgtattgtgcttc

SEQ ID NO: 239072 - DNA, 33 bp, Homo sapien
gaaataaagtacaccataaatgtattgtgcttc

SEQ ID NO: 239073 - DNA, 33 bp, Homo sapien
agggcttcctgtgtcacggactatatcgacttc

SEQ ID NO: 239074 - DNA, 33 bp, Homo sapien
agggcttcctgtgtcatggactatatcgacttc

SEQ ID NO: 239075 - DNA, 33 bp, Homo sapien
caactgatcataggtcactccctctgaggccat

SEQ ID NO: 239076 - DNA, 33 bp, Homo sapien
caactgatcataggtctctccctctgaggccat

SEQ ID NO: 239077 - DNA, 33 bp, Homo sapien
ctgctgctctaactgccaagcccttctatatct

SEQ ID NO: 239078 - DNA, 33 bp, Homo sapien
ctgctgctctaactgcgaagcccttctatatct

SEQ ID NO: 239079 - DNA, 33 bp, Homo sapien
tctttggattgaaagaaataaagtacagcatat

SEQ ID NO: 239080 - DNA, 33 bp, Homo sapien
tctttggattgaaagacataaagtacagcatat

SEQ ID NO: 239081 - DNA, 33 bp, Homo sapien
tggcttgcatagtagactactctgttttgaaca

SEQ ID NO: 239082 - DNA, 33 bp, Homo sapien
tggcttgcatagtagattactctgttttgaaca

SEQ ID NO: 239083 - DNA, 33 bp, Homo sapien
ggatattggtcattaaaacctttctaacttaat

SEQ ID NO: 239084 - DNA, 33 bp, Homo sapien
ggatattggtcattaatacctttctaacttaat

SEQ ID NO: 239085 - DNA, 33 bp, Homo sapien
cttctaaagaaggtacacatttctcatgacctt

SEQ ID NO: 239086 - DNA, 33 bp, Homo sapien
cttctaaagaaggtacgcatttctcatgacctt

SEQ ID NO: 239087 - DNA, 33 bp, Homo sapien
taaaacaaaatgttaacatcttctaaccagtaa

SEQ ID NO: 239088 - DNA, 33 bp, Homo sapien
taaaacaaaatgttaatatcttctaaccagtaa

SEQ ID NO: 239089 - DNA, 33 bp, Homo sapien
cttttcttcatcctaccctgatgagattttctg

SEQ ID NO: 239090 - DNA, 33 bp, Homo sapien
cttttcttcatcctactctgatgagattttctg

SEQ ID NO: 239091 - DNA, 33 bp, Homo sapien
atgaatgcatttaaccacaacaaatctttgaag

SEQ ID NO: 239092 - DNA, 33 bp, Homo sapien
atgaatgcatttaaccgcaacaaatctttgaag

SEQ ID NO: 239093 - DNA, 33 bp, Homo sapien
agctgccactatgaagaaatatcctcccatcca

SEQ ID NO: 239094 - DNA, 33 bp, Homo sapien
agctgccactatgaagcaatatcctcccatcca

SEQ ID NO: 239095 - DNA, 33 bp, Homo sapien
agtgttcacagctgaactattatgtccaggtgc

SEQ ID NO: 239096 - DNA, 33 bp, Homo sapien
agtgttcacagctgaattattatgtccaggtgc

SEQ ID NO: 239097 - DNA, 33 bp, Homo sapien
ggggtacttggctccaatagactataaactctg

SEQ ID NO: 239098 - DNA, 33 bp, Homo sapien
ggggtacttggctccagtagactataaactctg

SEQ ID NO: 239099 - DNA, 33 bp, Homo sapien
attaaactgttgggaaaggcattgtatttctct

SEQ ID NO: 239100 - DNA, 33 bp, Homo sapien
attaaactgttgggaagggcattgtatttctct

SEQ ID NO: 239101 - DNA, 33 bp, Homo sapien
tattggttatttgaacaatcaggccaatgatag

SEQ ID NO: 239102 - DNA, 33 bp, Homo sapien
tattggttatttgaaccatcaggccaatgatag

SEQ ID NO: 239103 - DNA, 33 bp, Homo sapien
gtttccagtggagtcacataaggaagaaattgc

SEQ ID NO: 239104 - DNA, 33 bp, Homo sapien
gtttccagtggagtcatataaggaagaaattgc

SEQ ID NO: 239105 - DNA, 33 bp, Homo sapien
gattatataagataaagtgatggacgtgcaaca

SEQ ID NO: 239106 - DNA, 33 bp, Homo sapien
gattatataagataaattgatggacgtgcaaca

SEQ ID NO: 239107 - DNA, 33 bp, Homo sapien
aattgaataagcacatcacattgagagatatca

SEQ ID NO: 239108 - DNA, 33 bp, Homo sapien
aattgaataagcacattacattgagagatatca

SEQ ID NO: 239109 - DNA, 33 bp, Homo sapien
gaattctgaagctccaataggctgtaaacctct

SEQ ID NO: 239110 - DNA, 33 bp, Homo sapien
gaattctgaagctccagtaggctgtaaacctct

SEQ ID NO: 239111 - DNA, 33 bp, Homo sapien
cccacaaggcaggatccgacaatggttctagac

SEQ ID NO: 239112 - DNA, 33 bp, Homo sapien
cccacaaggcaggatctgacaatggttctagac

SEQ ID NO: 239113 - DNA, 33 bp, Homo sapien
tacgacacctatggacacacctcttacttaatg

SEQ ID NO: 239114 - DNA, 33 bp, Homo sapien
tacgacacctatggacgcacctcttacttaatg

SEQ ID NO: 239115 - DNA, 33 bp, Homo sapien
gttcatacagagaagcagatgtactacaatgac

SEQ ID NO: 239116 - DNA, 33 bp, Homo sapien
gttcatacagagaagcggatgtactacaatgac

SEQ ID NO: 239117 - DNA, 33 bp, Homo sapien
tctataatccatagcaacttccacctgtacttt

SEQ ID NO: 239118 - DNA, 33 bp, Homo sapien
tctataatccatagcagcttccacctgtacttt

SEQ ID NO: 239119 - DNA, 33 bp, Homo sapien
tcacaaaagattatcacggaaaaaaatgtgcca

SEQ ID NO: 239120 - DNA, 33 bp, Homo sapien
tcacaaaagattatcagggaaaaaaatgtgcca

SEQ ID NO: 239121 - DNA, 33 bp, Homo sapien
cctttctaacaagttcccaagtcatagtgatac

SEQ ID NO: 239122 - DNA, 33 bp, Homo sapien
cctttctaacaagttctcaagtcatagtgatac

SEQ ID NO: 239123 - DNA, 33 bp, Homo sapien
tatgataatcttacggaaccactattgtatatg

SEQ ID NO: 239124 - DNA, 33 bp, Homo sapien
tatgataatcttacgggaccactattgtatatg

SEQ ID NO: 239125 - DNA, 33 bp, Homo sapien
ttttgcaccagcctaacagatgagctgatgctg

SEQ ID NO: 239126 - DNA, 33 bp, Homo sapien
ttttgcaccagcctaatagatgagctgatgctg

SEQ ID NO: 239127 - DNA, 33 bp, Homo sapien
gcgcttttgtatgttcaactatggtttccaatt

SEQ ID NO: 239128 - DNA, 33 bp, Homo sapien
gcgcttttgtatgttcgactatggtttccaatt

SEQ ID NO: 239129 - DNA, 33 bp, Homo sapien
catgaactcttactaccagacaaggactatagt

SEQ ID NO: 239130 - DNA, 33 bp, Homo sapien
catgaactcttactacgagacaaggactatagt

SEQ ID NO: 239131 - DNA, 33 bp, Homo sapien
gggaattaaaggctaggagtccttggcttaagt

SEQ ID NO: 239132 - DNA, 33 bp, Homo sapien
gggaattaaaggctagtagtccttggcttaagt

SEQ ID NO: 239133 - DNA, 33 bp, Homo sapien
gtgcccacttataagcaagagaatgtgatattt

SEQ ID NO: 239134 - DNA, 33 bp, Homo sapien
gtgcccacttataagcgagagaatgtgatattt

SEQ ID NO: 239135 - DNA, 33 bp, Homo sapien
tgcctaagggagagtccacctaatctctcttta

SEQ ID NO: 239136 - DNA, 33 bp, Homo sapien
tgcctaagggagagtctacctaatctctcttta

SEQ ID NO: 239137 - DNA, 33 bp, Homo sapien
ctctttaataaagatcaataagctggtcaaaat

SEQ ID NO: 239138 - DNA, 33 bp, Homo sapien
ctctttaataaagatcgataagctggtcaaaat

SEQ ID NO: 239139 - DNA, 33 bp, Homo sapien
tgctgtatagttctccaatttgtgaaatcatca

SEQ ID NO: 239140 - DNA, 33 bp, Homo sapien
tgctgtatagttctccgatttgtgaaatcatca

SEQ ID NO: 239141 - DNA, 33 bp, Homo sapien
cgcacccagctcacatcatgcttttataacgca

SEQ ID NO: 239142 - DNA, 33 bp, Homo sapien
cgcacccagctcacatgatgcttttataacgca

SEQ ID NO: 239143 - DNA, 33 bp, Homo sapien
cccactgagccactaacaagcctggatatgaga

SEQ ID NO: 239144 - DNA, 33 bp, Homo sapien
cccactgagccactaagaagcctggatatgaga

SEQ ID NO: 239145 - DNA, 33 bp, Homo sapien
aaccctgccagctttaagacttgaactttatgg

SEQ ID NO: 239146 - DNA, 33 bp, Homo sapien
aaccctgccagctttacgacttgaactttatgg

SEQ ID NO: 239147 - DNA, 33 bp, Homo sapien
gttgatcacatcttcaatattggctagttgata

SEQ ID NO: 239148 - DNA, 33 bp, Homo sapien
gttgatcacatcttcattattggctagttgata

SEQ ID NO: 239149 - DNA, 33 bp, Homo sapien
tgagtttaacattttacaggctgttatttaaac

SEQ ID NO: 239150 - DNA, 33 bp, Homo sapien
tgagtttaacattttataggctgttatttaaac

SEQ ID NO: 239151 - DNA, 33 bp, Homo sapien
ggcaaactagtggagcaattacttaatttcccc

SEQ ID NO: 239152 - DNA, 33 bp, Homo sapien
ggcaaactagtggagctattacttaatttcccc

SEQ ID NO: 239153 - DNA, 33 bp, Homo sapien
agcgacaatttccctacattacgctccattttt

SEQ ID NO: 239154 - DNA, 33 bp, Homo sapien
agcgacaatttccctatattacgctccattttt

SEQ ID NO: 239155 - DNA, 33 bp, Homo sapien
atgcttcatagcttacaaagttatttcagagat

SEQ ID NO: 239156 - DNA, 33 bp, Homo sapien
atgcttcatagcttaccaagttatttcagagat

SEQ ID NO: 239157 - DNA, 33 bp, Homo sapien
gttcatgttatttctcccccttttaagcactgt

SEQ ID NO: 239158 - DNA, 33 bp, Homo sapien
gttcatgttatttctctcccttttaagcactgt

SEQ ID NO: 239159 - DNA, 33 bp, Homo sapien
atctgtttggcatgatgaagaggttcgtcttgg

SEQ ID NO: 239160 - DNA, 33 bp, Homo sapien
atctgtttggcatgattaagaggttcgtcttgg

SEQ ID NO: 239161 - DNA, 33 bp, Homo sapien
gatgagggatgccctaaaggagaaagtcatcaa

SEQ ID NO: 239162 - DNA, 33 bp, Homo sapien
gatgagggatgccctagaggagaaagtcatcaa

SEQ ID NO: 239163 - DNA, 33 bp, Homo sapien
aggtgcctttgaggaaaggattatactaagatc

SEQ ID NO: 239164 - DNA, 33 bp, Homo sapien
aggtgcctttgaggaagggattatactaagatc

SEQ ID NO: 239165 - DNA, 33 bp, Homo sapien
tacttgctggcatagacagttactggtcaagga

SEQ ID NO: 239166 - DNA, 33 bp, Homo sapien
tacttgctggcatagatagttactggtcaagga

SEQ ID NO: 239167 - DNA, 33 bp, Homo sapien
atgctacaagggaatacggattgctttaattat

SEQ ID NO: 239168 - DNA, 33 bp, Homo sapien
atgctacaagggaatatggattgctttaattat

SEQ ID NO: 239169 - DNA, 33 bp, Homo sapien
attaccagaaagtgcacgatgaaaatgaaacaa

SEQ ID NO: 239170 - DNA, 33 bp, Homo sapien
attaccagaaagtgcatgatgaaaatgaaacaa

SEQ ID NO: 239171 - DNA, 33 bp, Homo sapien
gagagagaggaagactaaaaacagatgccagat

SEQ ID NO: 239172 - DNA, 33 bp, Homo sapien
gagagagaggaagactgaaaacagatgccagat

SEQ ID NO: 239173 - DNA, 33 bp, Homo sapien
tatccttagctatcacagatacaggagatatac

SEQ ID NO: 239174 - DNA, 33 bp, Homo sapien
tatccttagctatcactgatacaggagatatac

SEQ ID NO: 239175 - DNA, 33 bp, Homo sapien
tggtaattaccataacaaactaccactgacacc

SEQ ID NO: 239176 - DNA, 33 bp, Homo sapien
tggtaattaccataacgaactaccactgacacc

SEQ ID NO: 239177 - DNA, 33 bp, Homo sapien
cccaaaatcctatagcagagaaggctggtgttt

SEQ ID NO: 239178 - DNA, 33 bp, Homo sapien
cccaaaatcctatagcggagaaggctggtgttt

SEQ ID NO: 239179 - DNA, 33 bp, Homo sapien
ttctccctccattgcacgggaatatcgttcaac

SEQ ID NO: 239180 - DNA, 33 bp, Homo sapien
ttctccctccattgcatgggaatatcgttcaac

SEQ ID NO: 239181 - DNA, 33 bp, Homo sapien
atacaagaaaacacagaattcaagcaacaaaaa

SEQ ID NO: 239182 - DNA, 33 bp, Homo sapien
atacaagaaaacacagtattcaagcaacaaaaa

SEQ ID NO: 239183 - DNA, 33 bp, Homo sapien
taggctgttctttaacacctggtcttaagcaat

SEQ ID NO: 239184 - DNA, 33 bp, Homo sapien
taggctgttctttaactcctggtcttaagcaat

SEQ ID NO: 239185 - DNA, 33 bp, Homo sapien
cgaagaagcatttcttaaaatctagctggtaat

SEQ ID NO: 239186 - DNA, 33 bp, Homo sapien
cgaagaagcatttcttgaaatctagctggtaat

SEQ ID NO: 239187 - DNA, 33 bp, Homo sapien
cagagggtgctagttcacttcaaaaaagtaaaa

SEQ ID NO: 239188 - DNA, 33 bp, Homo sapien
cagagggtgctagttctcttcaaaaaagtaaaa

SEQ ID NO: 239189 - DNA, 33 bp, Homo sapien
ttaaatggcttaagaccgggcaataagcctgat

SEQ ID NO: 239190 - DNA, 33 bp, Homo sapien
ttaaatggcttaagactgggcaataagcctgat

SEQ ID NO: 239191 - DNA, 33 bp, Homo sapien
tgatggagcagcctaaagaagtcaagcagtcct

SEQ ID NO: 239192 - DNA, 33 bp, Homo sapien
tgatggagcagcctaaggaagtcaagcagtcct

SEQ ID NO: 239193 - DNA, 33 bp, Homo sapien
tcttgtgtctgcctcactccctcagttctcagc

SEQ ID NO: 239194 - DNA, 33 bp, Homo sapien
tcttgtgtctgcctcattccctcagttctcagc

SEQ ID NO: 239195 - DNA, 33 bp, Homo sapien
ttttatattcctttcagaagcagtgaactgtat

SEQ ID NO: 239196 - DNA, 33 bp, Homo sapien
ttttatattcctttcataagcagtgaactgtat

SEQ ID NO: 239197 - DNA, 33 bp, Homo sapien
atttagagagatcaaagtttagagatcaaagca

SEQ ID NO: 239198 - DNA, 33 bp, Homo sapien
atttagagagatcaaattttagagatcaaagca

SEQ ID NO: 239199 - DNA, 33 bp, Homo sapien
attagaaagaatgaaaacactggccgggtgtgg

SEQ ID NO: 239200 - DNA, 33 bp, Homo sapien
attagaaagaatgaaagcactggccgggtgtgg

SEQ ID NO: 239201 - DNA, 33 bp, Homo sapien
agacaaactactttccccaaggcatcatcagtg

SEQ ID NO: 239202 - DNA, 33 bp, Homo sapien
agacaaactactttcctcaaggcatcatcagtg

SEQ ID NO: 239203 - DNA, 33 bp, Homo sapien
gactaggtgtgtgttaaggtcactgatgatgcc

SEQ ID NO: 239204 - DNA, 33 bp, Homo sapien
gactaggtgtgtgttacggtcactgatgatgcc

SEQ ID NO: 239205 - DNA, 33 bp, Homo sapien
cactttgtagcataacagagttctagatacctc

SEQ ID NO: 239206 - DNA, 33 bp, Homo sapien
cactttgtagcataacggagttctagatacctc

SEQ ID NO: 239207 - DNA, 33 bp, Homo sapien
aggaatacttgctgtaaagttggatatatagtt

SEQ ID NO: 239208 - DNA, 33 bp, Homo sapien
aggaatacttgctgtagagttggatatatagtt

SEQ ID NO: 239209 - DNA, 33 bp, Homo sapien
ttcctgcagcaccagaaactttggcttcctcct

SEQ ID NO: 239210 - DNA, 33 bp, Homo sapien
ttcctgcagcaccagacactttggcttcctcct

SEQ ID NO: 239211 - DNA, 33 bp, Homo sapien
acacaacgtgaagaaaggactatgatttgatga

SEQ ID NO: 239212 - DNA, 33 bp, Homo sapien
acacaacgtgaagaaatgactatgatttgatga

SEQ ID NO: 239213 - DNA, 33 bp, Homo sapien
tcttcacgttgtgtctcaaaatccctttgaaat

SEQ ID NO: 239214 - DNA, 33 bp, Homo sapien
tcttcacgttgtgtctgaaaatccctttgaaat

SEQ ID NO: 239215 - DNA, 33 bp, Homo sapien
atctggacaccttcacaagctaactgatggggt

SEQ ID NO: 239216 - DNA, 33 bp, Homo sapien
atctggacaccttcacgagctaactgatggggt

SEQ ID NO: 239217 - DNA, 33 bp, Homo sapien
ggcctcaatgttttcaagtagcctatactttgc

SEQ ID NO: 239218 - DNA, 33 bp, Homo sapien
ggcctcaatgttttcacgtagcctatactttgc

SEQ ID NO: 239219 - DNA, 33 bp, Homo sapien
gctgtgaatatcttgaagtttccactgtggcct

SEQ ID NO: 239220 - DNA, 33 bp, Homo sapien
gctgtgaatatcttgaggtttccactgtggcct

SEQ ID NO: 239221 - DNA, 33 bp, Homo sapien
tagatgaaacacatccaacaacatagtgtattt

SEQ ID NO: 239222 - DNA, 33 bp, Homo sapien
tagatgaaacacatccgacaacatagtgtattt

SEQ ID NO: 239223 - DNA, 33 bp, Homo sapien
tttagcaaacatttcagccttcagtcatccgga

SEQ ID NO: 239224 - DNA, 33 bp, Homo sapien
tttagcaaacatttcatccttcagtcatccgga

SEQ ID NO: 239225 - DNA, 33 bp, Homo sapien
gatcaataagatatcaatgaagggctttaagca

SEQ ID NO: 239226 - DNA, 33 bp, Homo sapien
gatcaataagatatcattgaagggctttaagca

SEQ ID NO: 239227 - DNA, 33 bp, Homo sapien
tgttctaacaatatgcaatcaaatgtaaaatca

SEQ ID NO: 239228 - DNA, 33 bp, Homo sapien
tgttctaacaatatgcgatcaaatgtaaaatca

SEQ ID NO: 239229 - DNA, 33 bp, Homo sapien
actaaggatataattgcatggtttgcttctacc

SEQ ID NO: 239230 - DNA, 33 bp, Homo sapien
actaaggatataattgtatggtttgcttctacc

SEQ ID NO: 239231 - DNA, 33 bp, Homo sapien
cacccaaacgttataacccagaagtaagagcgt

SEQ ID NO: 239232 - DNA, 33 bp, Homo sapien
cacccaaacgttataatccagaagtaagagcgt

SEQ ID NO: 239233 - DNA, 33 bp, Homo sapien
aggatagcttgagctggagtttaaaaccaatat

SEQ ID NO: 239234 - DNA, 33 bp, Homo sapien
aggatagcttgagctgtagtttaaaaccaatat

SEQ ID NO: 239235 - DNA, 33 bp, Homo sapien
aaacaaaaatctgtagcatatcggactcttgca

SEQ ID NO: 239236 - DNA, 33 bp, Homo sapien
aaacaaaaatctgtagtatatcggactcttgca

SEQ ID NO: 239237 - DNA, 33 bp, Homo sapien
aacatttcctgagtgcccacacaaggcctggaa

SEQ ID NO: 239238 - DNA, 33 bp, Homo sapien
aacatttcctgagtgcgcacacaaggcctggaa

SEQ ID NO: 239239 - DNA, 33 bp, Homo sapien
tttccattaccagtaaacctccttttgtcctag

SEQ ID NO: 239240 - DNA, 33 bp, Homo sapien
tttccattaccagtaaccctccttttgtcctag

SEQ ID NO: 239241 - DNA, 33 bp, Homo sapien
tctcccccttttcctaccgatgtggcttcctgt

SEQ ID NO: 239242 - DNA, 33 bp, Homo sapien
tctcccccttttcctatcgatgtggcttcctgt

SEQ ID NO: 239243 - DNA, 33 bp, Homo sapien
aggctggagaaataacacttgtggggtgagatg

SEQ ID NO: 239244 - DNA, 33 bp, Homo sapien
aggctggagaaataacgcttgtggggtgagatg

SEQ ID NO: 239245 - DNA, 33 bp, Homo sapien
gagagagttagagagacaggtcaagtccttagt

SEQ ID NO: 239246 - DNA, 33 bp, Homo sapien
gagagagttagagagataggtcaagtccttagt

SEQ ID NO: 239247 - DNA, 33 bp, Homo sapien
acttgatttatcaaaaaggaatgtatgtatgta

SEQ ID NO: 239248 - DNA, 33 bp, Homo sapien
acttgatttatcaaaatggaatgtatgtatgta

SEQ ID NO: 239249 - DNA, 33 bp, Homo sapien
taaagcattactttggcaacttgtagcccacaa

SEQ ID NO: 239250 - DNA, 33 bp, Homo sapien
taaagcattactttgggaacttgtagcccacaa

SEQ ID NO: 239251 - DNA, 33 bp, Homo sapien
tttagacatttggtctaaattaaggtcagatat

SEQ ID NO: 239252 - DNA, 33 bp, Homo sapien
tttagacatttggtctcaattaaggtcagatat

SEQ ID NO: 239253 - DNA, 33 bp, Homo sapien
gcattaaagagcttaccgaagtgcaggtcatac

SEQ ID NO: 239254 - DNA, 33 bp, Homo sapien
gcattaaagagcttacggaagtgcaggtcatac

SEQ ID NO: 239255 - DNA, 33 bp, Homo sapien
tatacgttaggccacaaattaagtctcaataca

SEQ ID NO: 239256 - DNA, 33 bp, Homo sapien
tatacgttaggccacagattaagtctcaataca

SEQ ID NO: 239257 - DNA, 33 bp, Homo sapien
agcattaaaggtgtacagaaggtatcatgggcc

SEQ ID NO: 239258 - DNA, 33 bp, Homo sapien
agcattaaaggtgtacggaaggtatcatgggcc

SEQ ID NO: 239259 - DNA, 33 bp, Homo sapien
ctaggttgaaaacaaaatgaaaaggaaatctaa

SEQ ID NO: 239260 - DNA, 33 bp, Homo sapien
ctaggttgaaaacaaactgaaaaggaaatctaa

SEQ ID NO: 239261 - DNA, 33 bp, Homo sapien
tcctttggactgtgataaggaagaagacattta

SEQ ID NO: 239262 - DNA, 33 bp, Homo sapien
tcctttggactgtgatcaggaagaagacattta

SEQ ID NO: 239263 - DNA, 33 bp, Homo sapien
gctagctttgtcagaacaatggtattagtaaca

SEQ ID NO: 239264 - DNA, 33 bp, Homo sapien
gctagctttgtcagaagaatggtattagtaaca

SEQ ID NO: 239265 - DNA, 33 bp, Homo sapien
ctgacagtaaaagaagaaaacatttgtagtgct

SEQ ID NO: 239266 - DNA, 33 bp, Homo sapien
ctgacagtaaaagaaggaaacatttgtagtgct

SEQ ID NO: 239267 - DNA, 33 bp, Homo sapien
acctcccttctaaagacgctggcaatacttcgg

SEQ ID NO: 239268 - DNA, 33 bp, Homo sapien
acctcccttctaaagatgctggcaatacttcgg

SEQ ID NO: 239269 - DNA, 33 bp, Homo sapien
aatgccagaaaaattcaaatgactctcgtgtat

SEQ ID NO: 239270 - DNA, 33 bp, Homo sapien
aatgccagaaaaattcgaatgactctcgtgtat

SEQ ID NO: 239271 - DNA, 33 bp, Homo sapien
aaaggataatgaaaaggcctggagaacttggat

SEQ ID NO: 239272 - DNA, 33 bp, Homo sapien
aaaggataatgaaaagtcctggagaacttggat

SEQ ID NO: 239273 - DNA, 33 bp, Homo sapien
taggaggtagataccactgaaggatcattatac

SEQ ID NO: 239274 - DNA, 33 bp, Homo sapien
taggaggtagataccattgaaggatcattatac

SEQ ID NO: 239275 - DNA, 33 bp, Homo sapien
ctagacttttaatttcccccagatcaggaaaag

SEQ ID NO: 239276 - DNA, 33 bp, Homo sapien
ctagacttttaatttctcccagatcaggaaaag

SEQ ID NO: 239277 - DNA, 33 bp, Homo sapien
atcatctttccaatagcagtcagtttactgatc

SEQ ID NO: 239278 - DNA, 33 bp, Homo sapien
atcatctttccaatagtagtcagtttactgatc

SEQ ID NO: 239279 - DNA, 33 bp, Homo sapien
attgagaaaactcctacgatctttattatgaaa

SEQ ID NO: 239280 - DNA, 33 bp, Homo sapien
attgagaaaactcctatgatctttattatgaaa

SEQ ID NO: 239281 - DNA, 33 bp, Homo sapien
tcgttcattcaacaacgatttactgagccctca

SEQ ID NO: 239282 - DNA, 33 bp, Homo sapien
tcgttcattcaacaactatttactgagccctca

SEQ ID NO: 239283 - DNA, 33 bp, Homo sapien
aaattaccagatataacattaacgacaagatga

SEQ ID NO: 239284 - DNA, 33 bp, Homo sapien
aaattaccagatataatattaacgacaagatga

SEQ ID NO: 239285 - DNA, 33 bp, Homo sapien
ttaaaatcagaaacagaaaatggaatggtggat

SEQ ID NO: 239286 - DNA, 33 bp, Homo sapien
ttaaaatcagaaacagcaaatggaatggtggat

SEQ ID NO: 239287 - DNA, 33 bp, Homo sapien
gcttttcctttcaagacggacctgctgattcag

SEQ ID NO: 239288 - DNA, 33 bp, Homo sapien
gcttttcctttcaagatggacctgctgattcag

SEQ ID NO: 239289 - DNA, 33 bp, Homo sapien
gccattctaattaacacaaaagcaagaaacatg

SEQ ID NO: 239290 - DNA, 33 bp, Homo sapien
gccattctaattaacataaaagcaagaaacatg

SEQ ID NO: 239291 - DNA, 33 bp, Homo sapien
ggtcaacctgatttacaacattattgataatac

SEQ ID NO: 239292 - DNA, 33 bp, Homo sapien
ggtcaacctgatttaccacattattgataatac

SEQ ID NO: 239293 - DNA, 33 bp, Homo sapien
ctcaaaggctgtctagcaagatcttaggtctaa

SEQ ID NO: 239294 - DNA, 33 bp, Homo sapien
ctcaaaggctgtctagtaagatcttaggtctaa

SEQ ID NO: 239295 - DNA, 33 bp, Homo sapien
acagcctttgagaggacgaaggataactagagc

SEQ ID NO: 239296 - DNA, 33 bp, Homo sapien
acagcctttgagaggatgaaggataactagagc

SEQ ID NO: 239297 - DNA, 33 bp, Homo sapien
ttgggatacgcttttgaaggcctttctgtagct

SEQ ID NO: 239298 - DNA, 33 bp, Homo sapien
ttgggatacgcttttggaggcctttctgtagct

SEQ ID NO: 239299 - DNA, 33 bp, Homo sapien
tttcttaggcattaagaaaagaaataaaagcca

SEQ ID NO: 239300 - DNA, 33 bp, Homo sapien
tttcttaggcattaagtaaagaaataaaagcca

SEQ ID NO: 239301 - DNA, 33 bp, Homo sapien
gaggaacaggctaccaagagcaccagaactctt

SEQ ID NO: 239302 - DNA, 33 bp, Homo sapien
gaggaacaggctaccaggagcaccagaactctt

SEQ ID NO: 239303 - DNA, 33 bp, Homo sapien
tcttgaaacagtcactcacaaatggtacacaga

SEQ ID NO: 239304 - DNA, 33 bp, Homo sapien
tcttgaaacagtcactgacaaatggtacacaga

SEQ ID NO: 239305 - DNA, 33 bp, Homo sapien
gaaattggtatgcttaaaagcagattctaaaag

SEQ ID NO: 239306 - DNA, 33 bp, Homo sapien
gaaattggtatgcttagaagcagattctaaaag

SEQ ID NO: 239307 - DNA, 33 bp, Homo sapien
gttgctgttttctctcccatactcttttaccac

SEQ ID NO: 239308 - DNA, 33 bp, Homo sapien
gttgctgttttctctcgcatactcttttaccac

SEQ ID NO: 239309 - DNA, 33 bp, Homo sapien
ttcttaagacaggaaacgatgggctatgttttg

SEQ ID NO: 239310 - DNA, 33 bp, Homo sapien
ttcttaagacaggaaatgatgggctatgttttg

SEQ ID NO: 239311 - DNA, 33 bp, Homo sapien
tattgggcactacctcactgcctgggtgatggg

SEQ ID NO: 239312 - DNA, 33 bp, Homo sapien
tattgggcactacctcgctgcctgggtgatggg

SEQ ID NO: 239313 - DNA, 33 bp, Homo sapien
gaggaccatcagaagcacagttagacacatacc

SEQ ID NO: 239314 - DNA, 33 bp, Homo sapien
gaggaccatcagaagcgcagttagacacatacc

SEQ ID NO: 239315 - DNA, 33 bp, Homo sapien
gacaagggagatgaaaaggaagcaccaagataa

SEQ ID NO: 239316 - DNA, 33 bp, Homo sapien
gacaagggagatgaaagggaagcaccaagataa

SEQ ID NO: 239317 - DNA, 33 bp, Homo sapien
tggaagttttatttccagagttcagctaccagg

SEQ ID NO: 239318 - DNA, 33 bp, Homo sapien
tggaagttttatttcccgagttcagctaccagg

SEQ ID NO: 239319 - DNA, 33 bp, Homo sapien
attaagttgaaatgaacgaagtacagctgtcta

SEQ ID NO: 239320 - DNA, 33 bp, Homo sapien
attaagttgaaatgaatgaagtacagctgtcta

SEQ ID NO: 239321 - DNA, 33 bp, Homo sapien
agtcctttgtggatataagttttcgtttctctc

SEQ ID NO: 239322 - DNA, 33 bp, Homo sapien
agtcctttgtggatatgagttttcgtttctctc

SEQ ID NO: 239323 - DNA, 33 bp, Homo sapien
atccttcagatctaaacgctggcaacattaagg

SEQ ID NO: 239324 - DNA, 33 bp, Homo sapien
atccttcagatctaaatgctggcaacattaagg

SEQ ID NO: 239325 - DNA, 33 bp, Homo sapien
caagaggggaaaagaccaggcaatcagttacgt

SEQ ID NO: 239326 - DNA, 33 bp, Homo sapien
caagaggggaaaagacgaggcaatcagttacgt

SEQ ID NO: 239327 - DNA, 33 bp, Homo sapien
ataaatgaaggaggaaatggttttgaaagtaag

SEQ ID NO: 239328 - DNA, 33 bp, Homo sapien
ataaatgaaggaggaactggttttgaaagtaag

SEQ ID NO: 239329 - DNA, 33 bp, Homo sapien
tttttttctagttcaacggcacaatgtctaaag

SEQ ID NO: 239330 - DNA, 33 bp, Homo sapien
tttttttctagttcaatggcacaatgtctaaag

SEQ ID NO: 239331 - DNA, 33 bp, Homo sapien
gtggaggatgatgttacaccaaaagactctggg

SEQ ID NO: 239332 - DNA, 33 bp, Homo sapien
gtggaggatgatgttataccaaaagactctggg

SEQ ID NO: 239333 - DNA, 33 bp, Homo sapien
tcaggtttagtgaaatcacacataagaaaagat

SEQ ID NO: 239334 - DNA, 33 bp, Homo sapien
tcaggtttagtgaaatgacacataagaaaagat

SEQ ID NO: 239335 - DNA, 33 bp, Homo sapien
aacagacactttcaccaacaaatatatatataa

SEQ ID NO: 239336 - DNA, 33 bp, Homo sapien
aacagacactttcaccgacaaatatatatataa

SEQ ID NO: 239337 - DNA, 33 bp, Homo sapien
taacactttactcttccctgaccatataatggt

SEQ ID NO: 239338 - DNA, 33 bp, Homo sapien
taacactttactcttctctgaccatataatggt

SEQ ID NO: 239339 - DNA, 33 bp, Homo sapien
gacactttacaagtataacctcactgaaagttc

SEQ ID NO: 239340 - DNA, 33 bp, Homo sapien
gacactttacaagtatgacctcactgaaagttc

SEQ ID NO: 239341 - DNA, 33 bp, Homo sapien
gaaatcaaagtcccaaaaatagcatcattatta

SEQ ID NO: 239342 - DNA, 33 bp, Homo sapien
gaaatcaaagtcccaataatagcatcattatta

SEQ ID NO: 239343 - DNA, 33 bp, Homo sapien
ctaattatccagcttggaagagtccctgacatc

SEQ ID NO: 239344 - DNA, 33 bp, Homo sapien
ctaattatccagcttgtaagagtccctgacatc

SEQ ID NO: 239345 - DNA, 33 bp, Homo sapien
gctatgagagtaaacactgcctcctatttttag

SEQ ID NO: 239346 - DNA, 33 bp, Homo sapien
gctatgagagtaaacattgcctcctatttttag

SEQ ID NO: 239347 - DNA, 33 bp, Homo sapien
gaaggagaaaaaagtaacattgaaaccagcttt

SEQ ID NO: 239348 - DNA, 33 bp, Homo sapien
gaaggagaaaaaagtagcattgaaaccagcttt

SEQ ID NO: 239349 - DNA, 33 bp, Homo sapien
cctctgcctttggaaacgttaaaattgaagtca

SEQ ID NO: 239350 - DNA, 33 bp, Homo sapien
cctctgcctttggaaatgttaaaattgaagtca

SEQ ID NO: 239351 - DNA, 33 bp, Homo sapien
gggaaatggacagatcagagaaatttttttagt

SEQ ID NO: 239352 - DNA, 33 bp, Homo sapien
gggaaatggacagatcggagaaatttttttagt

SEQ ID NO: 239353 - DNA, 33 bp, Homo sapien
tggagaccctgatacaaccatgcctgacctctg

SEQ ID NO: 239354 - DNA, 33 bp, Homo sapien
tggagaccctgatacagccatgcctgacctctg

SEQ ID NO: 239355 - DNA, 33 bp, Homo sapien
ttgaaatatcttggaactggaaatttttgtgtt

SEQ ID NO: 239356 - DNA, 33 bp, Homo sapien
ttgaaatatcttggaattggaaatttttgtgtt

SEQ ID NO: 239357 - DNA, 33 bp, Homo sapien
gtctaatagtcaattccatggctgtaccaaaat

SEQ ID NO: 239358 - DNA, 33 bp, Homo sapien
gtctaatagtcaattctatggctgtaccaaaat

SEQ ID NO: 239359 - DNA, 33 bp, Homo sapien
tgcattttcttgatagacaattatgttaagtat

SEQ ID NO: 239360 - DNA, 33 bp, Homo sapien
tgcattttcttgatagccaattatgttaagtat

SEQ ID NO: 239361 - DNA, 33 bp, Homo sapien
cttgaccttgaatgtacgccttgtctttcccct

SEQ ID NO: 239362 - DNA, 33 bp, Homo sapien
cttgaccttgaatgtatgccttgtctttcccct

SEQ ID NO: 239363 - DNA, 33 bp, Homo sapien
tctgctgcatcttaataaggcaaatacaaccat

SEQ ID NO: 239364 - DNA, 33 bp, Homo sapien
tctgctgcatcttaatgaggcaaatacaaccat

SEQ ID NO: 239365 - DNA, 33 bp, Homo sapien
tgttacccagtggtaacgaatccacaggaagga

SEQ ID NO: 239366 - DNA, 33 bp, Homo sapien
tgttacccagtggtaatgaatccacaggaagga

SEQ ID NO: 239367 - DNA, 33 bp, Homo sapien
acacctctagaacttacggtatacaggattttc

SEQ ID NO: 239368 - DNA, 33 bp, Homo sapien
acacctctagaacttatggtatacaggattttc

SEQ ID NO: 239369 - DNA, 33 bp, Homo sapien
caactctgcagccaaactcagttctctgctcag

SEQ ID NO: 239370 - DNA, 33 bp, Homo sapien
caactctgcagccaaattcagttctctgctcag

SEQ ID NO: 239371 - DNA, 33 bp, Homo sapien
atttaagatgacctcacgaagcatttgtacgtg

SEQ ID NO: 239372 - DNA, 33 bp, Homo sapien
atttaagatgacctcatgaagcatttgtacgtg

SEQ ID NO: 239373 - DNA, 33 bp, Homo sapien
gatatcaagatcatccaacaactcgtccctttt

SEQ ID NO: 239374 - DNA, 33 bp, Homo sapien
gatatcaagatcatccgacaactcgtccctttt

SEQ ID NO: 239375 - DNA, 33 bp, Homo sapien
gtggggcagttaatgaagtcaacaccctggaag

SEQ ID NO: 239376 - DNA, 33 bp, Homo sapien
gtggggcagttaatgatgtcaacaccctggaag

SEQ ID NO: 239377 - DNA, 33 bp, Homo sapien
ggatctgttttcttccacactcaagaacacagt

SEQ ID NO: 239378 - DNA, 33 bp, Homo sapien
ggatctgttttcttccgcactcaagaacacagt

SEQ ID NO: 239379 - DNA, 33 bp, Homo sapien
ggactttccgtcactccgaaaacatgaagtcca

SEQ ID NO: 239380 - DNA, 33 bp, Homo sapien
ggactttccgtcactctgaaaacatgaagtcca

SEQ ID NO: 239381 - DNA, 33 bp, Homo sapien
accaggggaaatgagacattatggaggaaaact

SEQ ID NO: 239382 - DNA, 33 bp, Homo sapien
accaggggaaatgagatattatggaggaaaact

SEQ ID NO: 239383 - DNA, 33 bp, Homo sapien
aagtctgtggctctaaatgtttctgtggctaat

SEQ ID NO: 239384 - DNA, 33 bp, Homo sapien
aagtctgtggctctaattgtttctgtggctaat

SEQ ID NO: 239385 - DNA, 33 bp, Homo sapien
gttgcatatagtaacaagcaagttctgtgttag

SEQ ID NO: 239386 - DNA, 33 bp, Homo sapien
gttgcatatagtaacacgcaagttctgtgttag

SEQ ID NO: 239387 - DNA, 33 bp, Homo sapien
tgacaaggtgtggggacccaaatacagagccta

SEQ ID NO: 239388 - DNA, 33 bp, Homo sapien
tgacaaggtgtggggatccaaatacagagccta

SEQ ID NO: 239389 - DNA, 33 bp, Homo sapien
gggagatgtggacccaaatattttgtgcagaga

SEQ ID NO: 239390 - DNA, 33 bp, Homo sapien
gggagatgtggacccatatattttgtgcagaga

SEQ ID NO: 239391 - DNA, 33 bp, Homo sapien
gagcagagttccatacaacagactgctttagtt

SEQ ID NO: 239392 - DNA, 33 bp, Homo sapien
gagcagagttccataccacagactgctttagtt

SEQ ID NO: 239393 - DNA, 33 bp, Homo sapien
tagaagagaaacacatgaggggaaggcagggaa

SEQ ID NO: 239394 - DNA, 33 bp, Homo sapien
tagaagagaaacacattaggggaaggcagggaa

SEQ ID NO: 239395 - DNA, 33 bp, Homo sapien
tgttgtgatggtaaccccataagcagccattta

SEQ ID NO: 239396 - DNA, 33 bp, Homo sapien
tgttgtgatggtaacctcataagcagccattta

SEQ ID NO: 239397 - DNA, 33 bp, Homo sapien
aagttaacatctaaaacgaagtcacatcctcta

SEQ ID NO: 239398 - DNA, 33 bp, Homo sapien
aagttaacatctaaaatgaagtcacatcctcta

SEQ ID NO: 239399 - DNA, 33 bp, Homo sapien
cttgatctaaacaggaagttcagtcaatcacta

SEQ ID NO: 239400 - DNA, 33 bp, Homo sapien
cttgatctaaacaggaggttcagtcaatcacta

SEQ ID NO: 239401 - DNA, 33 bp, Homo sapien
tgcaggaatgatagaacaaccaaaagaaatcgg

SEQ ID NO: 239402 - DNA, 33 bp, Homo sapien
tgcaggaatgatagaataaccaaaagaaatcgg

SEQ ID NO: 239403 - DNA, 33 bp, Homo sapien
actggttttatccaaactggtaggcttgttata

SEQ ID NO: 239404 - DNA, 33 bp, Homo sapien
actggttttatccaaagtggtaggcttgttata

SEQ ID NO: 239405 - DNA, 33 bp, Homo sapien
acatttaccattcatcaataattttgtcaagtt

SEQ ID NO: 239406 - DNA, 33 bp, Homo sapien
acatttaccattcatcgataattttgtcaagtt

SEQ ID NO: 239407 - DNA, 33 bp, Homo sapien
acttgctggcatgtgacaaaatattgcttattg

SEQ ID NO: 239408 - DNA, 33 bp, Homo sapien
acttgctggcatgtgataaaatattgcttattg

SEQ ID NO: 239409 - DNA, 33 bp, Homo sapien
gtctggttctgacatccagagcatgacacatga

SEQ ID NO: 239410 - DNA, 33 bp, Homo sapien
gtctggttctgacatcgagagcatgacacatga

SEQ ID NO: 239411 - DNA, 33 bp, Homo sapien
gacgttgtttccttcaagaatcgaggcgctaaa

SEQ ID NO: 239412 - DNA, 33 bp, Homo sapien
gacgttgtttccttcaggaatcgaggcgctaaa

SEQ ID NO: 239413 - DNA, 33 bp, Homo sapien
aatataaatccttaaacagccgaaacatacttg

SEQ ID NO: 239414 - DNA, 33 bp, Homo sapien
aatataaatccttaaatagccgaaacatacttg

SEQ ID NO: 239415 - DNA, 33 bp, Homo sapien
agataaacttgaaactcaactataggtgggggg

SEQ ID NO: 239416 - DNA, 33 bp, Homo sapien
agataaacttgaaacttaactataggtgggggg

SEQ ID NO: 239417 - DNA, 33 bp, Homo sapien
ccgaactcctttgtgaagtacctgctgcctatg

SEQ ID NO: 239418 - DNA, 33 bp, Homo sapien
ccgaactcctttgtgatgtacctgctgcctatg

SEQ ID NO: 239419 - DNA, 33 bp, Homo sapien
gtgacttgaaaatgacaaagagcccaaagtgca

SEQ ID NO: 239420 - DNA, 33 bp, Homo sapien
gtgacttgaaaatgacgaagagcccaaagtgca

SEQ ID NO: 239421 - DNA, 33 bp, Homo sapien
tttcaaggacttttgaactttttcttcaggtaa

SEQ ID NO: 239422 - DNA, 33 bp, Homo sapien
tttcaaggacttttgagctttttcttcaggtaa

SEQ ID NO: 239423 - DNA, 33 bp, Homo sapien
ccctgattacttgaaactctgtgtgtctgaagt

SEQ ID NO: 239424 - DNA, 33 bp, Homo sapien
ccctgattacttgaaattctgtgtgtctgaagt

SEQ ID NO: 239425 - DNA, 33 bp, Homo sapien
gaaaaccagttgagaaatctaagggccaccgag

SEQ ID NO: 239426 - DNA, 33 bp, Homo sapien
gaaaaccagttgagaagtctaagggccaccgag

SEQ ID NO: 239427 - DNA, 33 bp, Homo sapien
ggtacctttttgtatcacatcttcttcaaatat

SEQ ID NO: 239428 - DNA, 33 bp, Homo sapien
ggtacctttttgtatcccatcttcttcaaatat

SEQ ID NO: 239429 - DNA, 33 bp, Homo sapien
cctcaggctgtaaaatgaattaagggagcactc

SEQ ID NO: 239430 - DNA, 33 bp, Homo sapien
cctcaggctgtaaaattaattaagggagcactc

SEQ ID NO: 239431 - DNA, 33 bp, Homo sapien
gcctcattaatattaaagaaacgttgtgttaga

SEQ ID NO: 239432 - DNA, 33 bp, Homo sapien
gcctcattaatattaaggaaacgttgtgttaga

SEQ ID NO: 239433 - DNA, 33 bp, Homo sapien
tgcgctcatcagtttacggtctacttcactaat

SEQ ID NO: 239434 - DNA, 33 bp, Homo sapien
tgcgctcatcagtttatggtctacttcactaat

SEQ ID NO: 239435 - DNA, 33 bp, Homo sapien
atcttgttctgttagacgtacccaagaaaagtt

SEQ ID NO: 239436 - DNA, 33 bp, Homo sapien
atcttgttctgttagatgtacccaagaaaagtt

SEQ ID NO: 239437 - DNA, 33 bp, Homo sapien
ggactgatgagcatgaagtagactgacctgaat

SEQ ID NO: 239438 - DNA, 33 bp, Homo sapien
ggactgatgagcatgaggtagactgacctgaat

SEQ ID NO: 239439 - DNA, 33 bp, Homo sapien
gtgctagaggacaaagactaaaccaaacagcta

SEQ ID NO: 239440 - DNA, 33 bp, Homo sapien
gtgctagaggacaaaggctaaaccaaacagcta

SEQ ID NO: 239441 - DNA, 33 bp, Homo sapien
tatgtggtgtacttgcacagacattcctggttc

SEQ ID NO: 239442 - DNA, 33 bp, Homo sapien
tatgtggtgtacttgcgcagacattcctggttc

SEQ ID NO: 239443 - DNA, 33 bp, Homo sapien
tgcttgtcggaccatacgcaagtaattaaaaca

SEQ ID NO: 239444 - DNA, 33 bp, Homo sapien
tgcttgtcggaccatatgcaagtaattaaaaca

SEQ ID NO: 239445 - DNA, 33 bp, Homo sapien
attctgaaatctgaccggcattcaagtctcagc

SEQ ID NO: 239446 - DNA, 33 bp, Homo sapien
attctgaaatctgacctgcattcaagtctcagc

SEQ ID NO: 239447 - DNA, 33 bp, Homo sapien
acaggcagtgtggtgaaaagtgcgaggagccca

SEQ ID NO: 239448 - DNA, 33 bp, Homo sapien
acaggcagtgtggtgagaagtgcgaggagccca

SEQ ID NO: 239449 - DNA, 33 bp, Homo sapien
tccacgtattgatttaggattttaactgcaatt

SEQ ID NO: 239450 - DNA, 33 bp, Homo sapien
tccacgtattgatttatgattttaactgcaatt

SEQ ID NO: 239451 - DNA, 33 bp, Homo sapien
cagaatttggttttgccattaacataagtttat

SEQ ID NO: 239452 - DNA, 33 bp, Homo sapien
cagaatttggttttgctattaacataagtttat

SEQ ID NO: 239453 - DNA, 33 bp, Homo sapien
ctcattacttgattaacaaagcaactagcagtt

SEQ ID NO: 239454 - DNA, 33 bp, Homo sapien
ctcattacttgattaataaagcaactagcagtt

SEQ ID NO: 239455 - DNA, 33 bp, Homo sapien
gggcaacctcctctgccgaaggggaaatagtcc

SEQ ID NO: 239456 - DNA, 33 bp, Homo sapien
gggcaacctcctctgctgaaggggaaatagtcc

SEQ ID NO: 239457 - DNA, 33 bp, Homo sapien
gcacaatggatgctcaatagatgctaattacca

SEQ ID NO: 239458 - DNA, 33 bp, Homo sapien
gcacaatggatgctcagtagatgctaattacca

SEQ ID NO: 239459 - DNA, 33 bp, Homo sapien
tgagtttgtttttctccaccaggtgaagctctg

SEQ ID NO: 239460 - DNA, 33 bp, Homo sapien
tgagtttgtttttctctaccaggtgaagctctg

SEQ ID NO: 239461 - DNA, 33 bp, Homo sapien
ctcaagtaactccccaatgaagaatgaataaga

SEQ ID NO: 239462 - DNA, 33 bp, Homo sapien
ctcaagtaactccccagtgaagaatgaataaga

SEQ ID NO: 239463 - DNA, 33 bp, Homo sapien
aatcaagttagtttcacgtataggcacagccta

SEQ ID NO: 239464 - DNA, 33 bp, Homo sapien
aatcaagttagtttcatgtataggcacagccta

SEQ ID NO: 239465 - DNA, 33 bp, Homo sapien
attgcaagttgttttacgacattcagtgataac

SEQ ID NO: 239466 - DNA, 33 bp, Homo sapien
attgcaagttgttttatgacattcagtgataac

SEQ ID NO: 239467 - DNA, 33 bp, Homo sapien
acttaaatccgaaaaacgatttggttatctcca

SEQ ID NO: 239468 - DNA, 33 bp, Homo sapien
acttaaatccgaaaaatgatttggttatctcca

SEQ ID NO: 239469 - DNA, 33 bp, Homo sapien
cttgagaatttccaagactaggtaagagcaaca

SEQ ID NO: 239470 - DNA, 33 bp, Homo sapien
cttgagaatttccaagtctaggtaagagcaaca

SEQ ID NO: 239471 - DNA, 33 bp, Homo sapien
ttctgcaagacaggaacggagagttgaagaaat

SEQ ID NO: 239472 - DNA, 33 bp, Homo sapien
ttctgcaagacaggaatggagagttgaagaaat

SEQ ID NO: 239473 - DNA, 33 bp, Homo sapien
tctgcactacaacagcaaagttaggtagttgtg

SEQ ID NO: 239474 - DNA, 33 bp, Homo sapien
tctgcactacaacagcgaagttaggtagttgtg

SEQ ID NO: 239475 - DNA, 33 bp, Homo sapien
ctactcctcaaaagaaattcctaccattttcca

SEQ ID NO: 239476 - DNA, 33 bp, Homo sapien
ctactcctcaaaagaatttcctaccattttcca

SEQ ID NO: 239477 - DNA, 33 bp, Homo sapien
acacaaagtgaaaatccgacagaactaaagaat

SEQ ID NO: 239478 - DNA, 33 bp, Homo sapien
acacaaagtgaaaatctgacagaactaaagaat

SEQ ID NO: 239479 - DNA, 33 bp, Homo sapien
atgtcagctgccatcactccttatggaaaaccc

SEQ ID NO: 239480 - DNA, 33 bp, Homo sapien
atgtcagctgccatcattccttatggaaaaccc

SEQ ID NO: 239481 - DNA, 33 bp, Homo sapien
aaggacttcatacgtgaaatgctcccccttttc

SEQ ID NO: 239482 - DNA, 33 bp, Homo sapien
aaggacttcatacgtgcaatgctcccccttttc

SEQ ID NO: 239483 - DNA, 33 bp, Homo sapien
atcctaaagactccaaaaaaagactcctagatt

SEQ ID NO: 239484 - DNA, 33 bp, Homo sapien
atcctaaagactccaacaaaagactcctagatt

SEQ ID NO: 239485 - DNA, 33 bp, Homo sapien
ttgactatatgtatccagctttatttctgggtt

SEQ ID NO: 239486 - DNA, 33 bp, Homo sapien
ttgactatatgtatccggctttatttctgggtt

SEQ ID NO: 239487 - DNA, 33 bp, Homo sapien
ataatactaacattgaaaaatggcttccaagca

SEQ ID NO: 239488 - DNA, 33 bp, Homo sapien
ataatactaacattgagaaatggcttccaagca

SEQ ID NO: 239489 - DNA, 33 bp, Homo sapien
atacaaagatcctagcgcctttaaggcaagctt

SEQ ID NO: 239490 - DNA, 33 bp, Homo sapien
atacaaagatcctagctcctttaaggcaagctt

SEQ ID NO: 239491 - DNA, 33 bp, Homo sapien
tctgcagaatccccaaatggagttgctaaagga

SEQ ID NO: 239492 - DNA, 33 bp, Homo sapien
tctgcagaatccccaactggagttgctaaagga

SEQ ID NO: 239493 - DNA, 33 bp, Homo sapien
ggactttgtagagaccagatatgacaccaggaa

SEQ ID NO: 239494 - DNA, 33 bp, Homo sapien
ggactttgtagagaccggatatgacaccaggaa

SEQ ID NO: 239495 - DNA, 33 bp, Homo sapien
agttacagtagttgaaagcaagaaccaaatccg

SEQ ID NO: 239496 - DNA, 33 bp, Homo sapien
agttacagtagttgaaggcaagaaccaaatccg

SEQ ID NO: 239497 - DNA, 33 bp, Homo sapien
catggcaaggagagaactggactgatataccca

SEQ ID NO: 239498 - DNA, 33 bp, Homo sapien
catggcaaggagagaattggactgatataccca

SEQ ID NO: 239499 - DNA, 33 bp, Homo sapien
ctctctgtgccaattccctattatcacaagtct

SEQ ID NO: 239500 - DNA, 33 bp, Homo sapien
ctctctgtgccaattctctattatcacaagtct

SEQ ID NO: 239501 - DNA, 33 bp, Homo sapien
gctgagccatcttgaaccatatgggcaaaagca

SEQ ID NO: 239502 - DNA, 33 bp, Homo sapien
gctgagccatcttgaatcatatgggcaaaagca

SEQ ID NO: 239503 - DNA, 33 bp, Homo sapien
aaaccagaataaagaacgtgtggtttatttgag

SEQ ID NO: 239504 - DNA, 33 bp, Homo sapien
aaaccagaataaagaatgtgtggtttatttgag

SEQ ID NO: 239505 - DNA, 33 bp, Homo sapien
cagtgggtgtggagggaatgattatttgccgat

SEQ ID NO: 239506 - DNA, 33 bp, Homo sapien
cagtgggtgtggagggtatgattatttgccgat

SEQ ID NO: 239507 - DNA, 33 bp, Homo sapien
gacactaaacagttcacgaaaattacatagtag

SEQ ID NO: 239508 - DNA, 33 bp, Homo sapien
gacactaaacagttcatgaaaattacatagtag

SEQ ID NO: 239509 - DNA, 33 bp, Homo sapien
gaattctaaagatccaatctatcccaggaaact

SEQ ID NO: 239510 - DNA, 33 bp, Homo sapien
gaattctaaagatccagtctatcccaggaaact

SEQ ID NO: 239511 - DNA, 33 bp, Homo sapien
caaaggttaaacctgacactattaattgcaacc

SEQ ID NO: 239512 - DNA, 33 bp, Homo sapien
caaaggttaaacctgatactattaattgcaacc

SEQ ID NO: 239513 - DNA, 33 bp, Homo sapien
gtcatgtggtgtgtcacggtccctgaatgcttc

SEQ ID NO: 239514 - DNA, 33 bp, Homo sapien
gtcatgtggtgtgtcagggtccctgaatgcttc

SEQ ID NO: 239515 - DNA, 33 bp, Homo sapien
tatccaattaaaactgacagagattctatggaa

SEQ ID NO: 239516 - DNA, 33 bp, Homo sapien
tatccaattaaaactgccagagattctatggaa

SEQ ID NO: 239517 - DNA, 33 bp, Homo sapien
aagtccatagtttactcagatttttaaagtttt

SEQ ID NO: 239518 - DNA, 33 bp, Homo sapien
aagtccatagtttactgagatttttaaagtttt

SEQ ID NO: 239519 - DNA, 33 bp, Homo sapien
ttttaaccaccaaagaaactctagactcagcag

SEQ ID NO: 239520 - DNA, 33 bp, Homo sapien
ttttaaccaccaaagacactctagactcagcag

SEQ ID NO: 239521 - DNA, 33 bp, Homo sapien
ttattaacacatgcagcatgacatatacttggg

SEQ ID NO: 239522 - DNA, 33 bp, Homo sapien
ttattaacacatgcaggatgacatatacttggg

SEQ ID NO: 239523 - DNA, 33 bp, Homo sapien
taggtacgttatctcaaatggtcttcatcttag

SEQ ID NO: 239524 - DNA, 33 bp, Homo sapien
taggtacgttatctcagatggtcttcatcttag

SEQ ID NO: 239525 - DNA, 33 bp, Homo sapien
tgctcctctgggagaaaaggtgaagaaatgtag

SEQ ID NO: 239526 - DNA, 33 bp, Homo sapien
tgctcctctgggagaagaggtgaagaaatgtag

SEQ ID NO: 239527 - DNA, 33 bp, Homo sapien
gcaacaatcacagcaacgttcttcatttgaaat

SEQ ID NO: 239528 - DNA, 33 bp, Homo sapien
gcaacaatcacagcaaggttcttcatttgaaat

SEQ ID NO: 239529 - DNA, 33 bp, Homo sapien
aactctttttgtgtgaaaatgagagaagaggtg

SEQ ID NO: 239530 - DNA, 33 bp, Homo sapien
aactctttttgtgtgataatgagagaagaggtg

SEQ ID NO: 239531 - DNA, 33 bp, Homo sapien
cctgttgcctccagaaacttcttcccattcagg

SEQ ID NO: 239532 - DNA, 33 bp, Homo sapien
cctgttgcctccagaaccttcttcccattcagg

SEQ ID NO: 239533 - DNA, 33 bp, Homo sapien
catgctaaagtattgacagagggtcagaagagg

SEQ ID NO: 239534 - DNA, 33 bp, Homo sapien
catgctaaagtattgagagagggtcagaagagg

SEQ ID NO: 239535 - DNA, 33 bp, Homo sapien
catctcctgaccgttacaccaaataggagtgac

SEQ ID NO: 239536 - DNA, 33 bp, Homo sapien
catctcctgaccgttataccaaataggagtgac

SEQ ID NO: 239537 - DNA, 33 bp, Homo sapien
tgccccacggcatcccactctaggactcaggct

SEQ ID NO: 239538 - DNA, 33 bp, Homo sapien
tgccccacggcatcccgctctaggactcaggct

SEQ ID NO: 239539 - DNA, 33 bp, Homo sapien
gtgagatgtggtctggacaacaaaaaatgagca

SEQ ID NO: 239540 - DNA, 33 bp, Homo sapien
gtgagatgtggtctggccaacaaaaaatgagca

SEQ ID NO: 239541 - DNA, 33 bp, Homo sapien
ttcagtgttgtcaagagtaagtttgtttttcct

SEQ ID NO: 239542 - DNA, 33 bp, Homo sapien
ttcagtgttgtcaagattaagtttgtttttcct

SEQ ID NO: 239543 - DNA, 33 bp, Homo sapien
gcaaaggagagtgacacacaaggcagtgcttcc

SEQ ID NO: 239544 - DNA, 33 bp, Homo sapien
gcaaaggagagtgacagacaaggcagtgcttcc

SEQ ID NO: 239545 - DNA, 33 bp, Homo sapien
tgccgtgatgaacatacgcttgcaggtatcttt

SEQ ID NO: 239546 - DNA, 33 bp, Homo sapien
tgccgtgatgaacatatgcttgcaggtatcttt

SEQ ID NO: 239547 - DNA, 33 bp, Homo sapien
cttggccatatgcttacgtatggaattgctgga

SEQ ID NO: 239548 - DNA, 33 bp, Homo sapien
cttggccatatgcttatgtatggaattgctgga

SEQ ID NO: 239549 - DNA, 33 bp, Homo sapien
aagaagcccaagctagacgtgtaaagaaggagt

SEQ ID NO: 239550 - DNA, 33 bp, Homo sapien
aagaagcccaagctagccgtgtaaagaaggagt

SEQ ID NO: 239551 - DNA, 33 bp, Homo sapien
aaaattaaccatcttacagtccaacccaatcac

SEQ ID NO: 239552 - DNA, 33 bp, Homo sapien
aaaattaaccatcttatagtccaacccaatcac

SEQ ID NO: 239553 - DNA, 33 bp, Homo sapien
tcctatacgttagctgcaatgcccaacaatgga

SEQ ID NO: 239554 - DNA, 33 bp, Homo sapien
tcctatacgttagctggaatgcccaacaatgga

SEQ ID NO: 239555 - DNA, 33 bp, Homo sapien
agagatgagacagttgcattaacactagaagcc

SEQ ID NO: 239556 - DNA, 33 bp, Homo sapien
agagatgagacagttgtattaacactagaagcc

SEQ ID NO: 239557 - DNA, 33 bp, Homo sapien
aagggaggctatggaagtgagaatctgcatttt

SEQ ID NO: 239558 - DNA, 33 bp, Homo sapien
aagggaggctatggaattgagaatctgcatttt

SEQ ID NO: 239559 - DNA, 33 bp, Homo sapien
agtggattttacgttaaattgtttgtctttgtg

SEQ ID NO: 239560 - DNA, 33 bp, Homo sapien
agtggattttacgttatattgtttgtctttgtg

SEQ ID NO: 239561 - DNA, 33 bp, Homo sapien
atgtccattaatactaacaatccaaccaacact

SEQ ID NO: 239562 - DNA, 33 bp, Homo sapien
atgtccattaatactatcaatccaaccaacact

SEQ ID NO: 239563 - DNA, 33 bp, Homo sapien
taatggtggaaagagacatggtagattcctagc

SEQ ID NO: 239564 - DNA, 33 bp, Homo sapien
taatggtggaaagagagatggtagattcctagc

SEQ ID NO: 239565 - DNA, 33 bp, Homo sapien
cctagcctagtaaggacggtcagtgtttgagaa

SEQ ID NO: 239566 - DNA, 33 bp, Homo sapien
cctagcctagtaaggatggtcagtgtttgagaa

SEQ ID NO: 239567 - DNA, 33 bp, Homo sapien
atcctctgcttagaaacagaaatctgaatgtga

SEQ ID NO: 239568 - DNA, 33 bp, Homo sapien
atcctctgcttagaaatagaaatctgaatgtga

SEQ ID NO: 239569 - DNA, 33 bp, Homo sapien
actatgcagtaaaaaaagcaaataatatcttga

SEQ ID NO: 239570 - DNA, 33 bp, Homo sapien
actatgcagtaaaaaaggcaaataatatcttga

SEQ ID NO: 239571 - DNA, 33 bp, Homo sapien
gtcacctttaaagcacacttgacacagagaaag

SEQ ID NO: 239572 - DNA, 33 bp, Homo sapien
gtcacctttaaagcacgcttgacacagagaaag

SEQ ID NO: 239573 - DNA, 33 bp, Homo sapien
tctgtttggggcaacaataggtgtgctctcagt

SEQ ID NO: 239574 - DNA, 33 bp, Homo sapien
tctgtttggggcaacagtaggtgtgctctcagt

SEQ ID NO: 239575 - DNA, 33 bp, Homo sapien
gttctttaataggcaacaggcaaggaaaacaag

SEQ ID NO: 239576 - DNA, 33 bp, Homo sapien
gttctttaataggcaataggcaaggaaaacaag

SEQ ID NO: 239577 - DNA, 33 bp, Homo sapien
agaagcaatacttcacaatgtcaacctgtacat

SEQ ID NO: 239578 - DNA, 33 bp, Homo sapien
agaagcaatacttcacgatgtcaacctgtacat

SEQ ID NO: 239579 - DNA, 33 bp, Homo sapien
gggggaaccagagtgaaaaagtgagggagagcc

SEQ ID NO: 239580 - DNA, 33 bp, Homo sapien
gggggaaccagagtgagaaagtgagggagagcc

SEQ ID NO: 239581 - DNA, 33 bp, Homo sapien
tcaacatgaggacaataaagttgaagaccttta

SEQ ID NO: 239582 - DNA, 33 bp, Homo sapien
tcaacatgaggacaatgaagttgaagaccttta

SEQ ID NO: 239583 - DNA, 33 bp, Homo sapien
ggcagacgaaaatccacgtacaagtggacccac

SEQ ID NO: 239584 - DNA, 33 bp, Homo sapien
ggcagacgaaaatccatgtacaagtggacccac

SEQ ID NO: 239585 - DNA, 33 bp, Homo sapien
aaaaaactgaaagcacagacgtgaagctcatcg

SEQ ID NO: 239586 - DNA, 33 bp, Homo sapien
aaaaaactgaaagcacggacgtgaagctcatcg

SEQ ID NO: 239587 - DNA, 33 bp, Homo sapien
tgaaagggtcccggagcagatagaggcaatgat

SEQ ID NO: 239588 - DNA, 33 bp, Homo sapien
tgaaagggtcccggagtagatagaggcaatgat

SEQ ID NO: 239589 - DNA, 33 bp, Homo sapien
gcgctgggagaaattaacccccatcatcaaaaa

SEQ ID NO: 239590 - DNA, 33 bp, Homo sapien
gcgctgggagaaattagcccccatcatcaaaaa

SEQ ID NO: 239591 - DNA, 33 bp, Homo sapien
gcctctccagagataactcttcggtcaaaccag

SEQ ID NO: 239592 - DNA, 33 bp, Homo sapien
gcctctccagagataagtcttcggtcaaaccag

SEQ ID NO: 239593 - DNA, 33 bp, Homo sapien
ccagcaagcaaacaaacgagatggcttcagatt

SEQ ID NO: 239594 - DNA, 33 bp, Homo sapien
ccagcaagcaaacaaatgagatggcttcagatt

SEQ ID NO: 239595 - DNA, 33 bp, Homo sapien
ctccagaacccaagacaaggaaggtgaaaaaga

SEQ ID NO: 239596 - DNA, 33 bp, Homo sapien
ctccagaacccaagacgaggaaggtgaaaaaga

SEQ ID NO: 239597 - DNA, 33 bp, Homo sapien
gattcagtttcaacataagcttggaggagacaa

SEQ ID NO: 239598 - DNA, 33 bp, Homo sapien
gattcagtttcaacatgagcttggaggagacaa

SEQ ID NO: 239599 - DNA, 33 bp, Homo sapien
gtcctgaaagaatcaaatcacacacggacttga

SEQ ID NO: 239600 - DNA, 33 bp, Homo sapien
gtcctgaaagaatcaagtcacacacggacttga

SEQ ID NO: 239601 - DNA, 33 bp, Homo sapien
gcccactgcccttgtgaaaaggcagaaggccca

SEQ ID NO: 239602 - DNA, 33 bp, Homo sapien
gcccactgcccttgtggaaaggcagaaggccca

SEQ ID NO: 239603 - DNA, 33 bp, Homo sapien
aaaggcagaaggcccactgagctggtaaataca

SEQ ID NO: 239604 - DNA, 33 bp, Homo sapien
aaaggcagaaggcccattgagctggtaaataca

SEQ ID NO: 239605 - DNA, 33 bp, Homo sapien
attagaacactgagaacagactgaaatctggat

SEQ ID NO: 239606 - DNA, 33 bp, Homo sapien
attagaacactgagaatagactgaaatctggat

SEQ ID NO: 239607 - DNA, 33 bp, Homo sapien
ctggcttgggtggttcaaaagaaggaaaccaat

SEQ ID NO: 239608 - DNA, 33 bp, Homo sapien
ctggcttgggtggttcgaaagaaggaaaccaat

SEQ ID NO: 239609 - DNA, 33 bp, Homo sapien
accccttagtctgacacgtgcttaattggagga

SEQ ID NO: 239610 - DNA, 33 bp, Homo sapien
accccttagtctgacatgtgcttaattggagga

SEQ ID NO: 239611 - DNA, 33 bp, Homo sapien
ctcaaattcgtgggggaatctcaccagttattt

SEQ ID NO: 239612 - DNA, 33 bp, Homo sapien
ctcaaattcgtgggggtatctcaccagttattt

SEQ ID NO: 239613 - DNA, 33 bp, Homo sapien
agttatcttgtgacagcagaaagatattaaaag

SEQ ID NO: 239614 - DNA, 33 bp, Homo sapien
agttatcttgtgacaggagaaagatattaaaag

SEQ ID NO: 239615 - DNA, 33 bp, Homo sapien
aaagacacaaaggaaaatagatgaaattagtat

SEQ ID NO: 239616 - DNA, 33 bp, Homo sapien
aaagacacaaaggaaagtagatgaaattagtat

SEQ ID NO: 239617 - DNA, 33 bp, Homo sapien
caattcatgaattggtaaatatgcactgtggag

SEQ ID NO: 239618 - DNA, 33 bp, Homo sapien
caattcatgaattggtgaatatgcactgtggag

SEQ ID NO: 239619 - DNA, 33 bp, Homo sapien
atagtgcaacaggtgaaaaatgaaaaggcagag

SEQ ID NO: 239620 - DNA, 33 bp, Homo sapien
atagtgcaacaggtgagaaatgaaaaggcagag

SEQ ID NO: 239621 - DNA, 33 bp, Homo sapien
agtggctgataacactcaatctgttaccctccc

SEQ ID NO: 239622 - DNA, 33 bp, Homo sapien
agtggctgataacacttaatctgttaccctccc

SEQ ID NO: 239623 - DNA, 33 bp, Homo sapien
gaaatacactgccacccagtctgtgatactttg

SEQ ID NO: 239624 - DNA, 33 bp, Homo sapien
gaaatacactgccaccgagtctgtgatactttg

SEQ ID NO: 239625 - DNA, 33 bp, Homo sapien
tccaacccacgatgagaatgctgagggtcagag

SEQ ID NO: 239626 - DNA, 33 bp, Homo sapien
tccaacccacgatgaggatgctgagggtcagag

SEQ ID NO: 239627 - DNA, 33 bp, Homo sapien
cttgagtataaaggaaccaaaaacatccaagtt

SEQ ID NO: 239628 - DNA, 33 bp, Homo sapien
cttgagtataaaggaagcaaaaacatccaagtt

SEQ ID NO: 239629 - DNA, 33 bp, Homo sapien
ctattaaatcatgacaaagaaaaagatgacaac

SEQ ID NO: 239630 - DNA, 33 bp, Homo sapien
ctattaaatcatgacatagaaaaagatgacaac

SEQ ID NO: 239631 - DNA, 33 bp, Homo sapien
attttcaggtcttgaacgtgtttttgaaaaggc

SEQ ID NO: 239632 - DNA, 33 bp, Homo sapien
attttcaggtcttgaatgtgtttttgaaaaggc

SEQ ID NO: 239633 - DNA, 33 bp, Homo sapien
aatagattccaacagcaattcctttagagcaga

SEQ ID NO: 239634 - DNA, 33 bp, Homo sapien
aatagattccaacagcgattcctttagagcaga

SEQ ID NO: 239635 - DNA, 33 bp, Homo sapien
tgtagggggacataccaccttcttccacgccta

SEQ ID NO: 239636 - DNA, 33 bp, Homo sapien
tgtagggggacataccgccttcttccacgccta

SEQ ID NO: 239637 - DNA, 33 bp, Homo sapien
tgccccatatggtgaaagagaatcaacagaaaa

SEQ ID NO: 239638 - DNA, 33 bp, Homo sapien
tgccccatatggtgaatgagaatcaacagaaaa

SEQ ID NO: 239639 - DNA, 33 bp, Homo sapien
tcctctgctattttccagctatggaacctaaca

SEQ ID NO: 239640 - DNA, 33 bp, Homo sapien
tcctctgctattttccggctatggaacctaaca

SEQ ID NO: 239641 - DNA, 33 bp, Homo sapien
atcaaaaattacaccacagaagttccaaccatg

SEQ ID NO: 239642 - DNA, 33 bp, Homo sapien
atcaaaaattacaccatagaagttccaaccatg

SEQ ID NO: 239643 - DNA, 33 bp, Homo sapien
cgtctattgtgctgtacgccagaaccaattccg

SEQ ID NO: 239644 - DNA, 33 bp, Homo sapien
cgtctattgtgctgtatgccagaaccaattccg

SEQ ID NO: 239645 - DNA, 33 bp, Homo sapien
ctcattctttctataacagcaggagtcaacaaa

SEQ ID NO: 239646 - DNA, 33 bp, Homo sapien
ctcattctttctataatagcaggagtcaacaaa

SEQ ID NO: 239647 - DNA, 33 bp, Homo sapien
acttcattgccaactccctacttagcaactctt

SEQ ID NO: 239648 - DNA, 33 bp, Homo sapien
acttcattgccaactcgctacttagcaactctt

SEQ ID NO: 239649 - DNA, 33 bp, Homo sapien
aggcttctgttatcaaggaggaaacttattccc

SEQ ID NO: 239650 - DNA, 33 bp, Homo sapien
aggcttctgttatcaatgaggaaacttattccc

SEQ ID NO: 239651 - DNA, 33 bp, Homo sapien
gggaccacaggaagcccaaagacagggtagcta

SEQ ID NO: 239652 - DNA, 33 bp, Homo sapien
gggaccacaggaagcctaaagacagggtagcta

SEQ ID NO: 239653 - DNA, 33 bp, Homo sapien
ggaatctagtctaagaaaatatatgtggggccc

SEQ ID NO: 239654 - DNA, 33 bp, Homo sapien
ggaatctagtctaagagaatatatgtggggccc

SEQ ID NO: 239655 - DNA, 33 bp, Homo sapien
tccacacagtggagaaaaaatagtcctctgaga

SEQ ID NO: 239656 - DNA, 33 bp, Homo sapien
tccacacagtggagaagaaatagtcctctgaga

SEQ ID NO: 239657 - DNA, 33 bp, Homo sapien
tcctctcacccccgacaactctgcaacttttta

SEQ ID NO: 239658 - DNA, 33 bp, Homo sapien
tcctctcacccccgacgactctgcaacttttta

SEQ ID NO: 239659 - DNA, 33 bp, Homo sapien
gacagaaaacaagtaaatggattaatcagcgat

SEQ ID NO: 239660 - DNA, 33 bp, Homo sapien
gacagaaaacaagtaagtggattaatcagcgat

SEQ ID NO: 239661 - DNA, 33 bp, Homo sapien
agccatcgggagactcaaatcctatagtgctag

SEQ ID NO: 239662 - DNA, 33 bp, Homo sapien
agccatcgggagactcgaatcctatagtgctag

SEQ ID NO: 239663 - DNA, 33 bp, Homo sapien
gtctaggtgcatagaactgtgtacatatacata

SEQ ID NO: 239664 - DNA, 33 bp, Homo sapien
gtctaggtgcatagaattgtgtacatatacata

SEQ ID NO: 239665 - DNA, 33 bp, Homo sapien
cgcatgacactttttcaaaaatgcgagttggtg

SEQ ID NO: 239666 - DNA, 33 bp, Homo sapien
cgcatgacactttttcgaaaatgcgagttggtg

SEQ ID NO: 239667 - DNA, 33 bp, Homo sapien
agaagagaaggagaaacggatgatacaggagag

SEQ ID NO: 239668 - DNA, 33 bp, Homo sapien
agaagagaaggagaaatggatgatacaggagag

SEQ ID NO: 239669 - DNA, 33 bp, Homo sapien
tgctctaggaccagacagtcaagaaagagtctg

SEQ ID NO: 239670 - DNA, 33 bp, Homo sapien
tgctctaggaccagaccgtcaagaaagagtctg

SEQ ID NO: 239671 - DNA, 33 bp, Homo sapien
acatttaaaataaacacagtgggatgctctacc

SEQ ID NO: 239672 - DNA, 33 bp, Homo sapien
acatttaaaataaacatagtgggatgctctacc

SEQ ID NO: 239673 - DNA, 33 bp, Homo sapien
tgggaaggcagacttaccaatggccaacattca

SEQ ID NO: 239674 - DNA, 33 bp, Homo sapien
tgggaaggcagacttatcaatggccaacattca

SEQ ID NO: 239675 - DNA, 33 bp, Homo sapien
cttcccccatgctagcccttatgacactctatt

SEQ ID NO: 239676 - DNA, 33 bp, Homo sapien
cttcccccatgctagctcttatgacactctatt

SEQ ID NO: 239677 - DNA, 33 bp, Homo sapien
gcactattgagtggaacggccgacaatttgaga

SEQ ID NO: 239678 - DNA, 33 bp, Homo sapien
gcactattgagtggaatggccgacaatttgaga

SEQ ID NO: 239679 - DNA, 33 bp, Homo sapien
tggttcttttgtgggcaatgagtgtactaaaag

SEQ ID NO: 239680 - DNA, 33 bp, Homo sapien
tggttcttttgtgggcgatgagtgtactaaaag

SEQ ID NO: 239681 - DNA, 33 bp, Homo sapien
tcaggctctccatctgcagaaatgcaaataata

SEQ ID NO: 239682 - DNA, 33 bp, Homo sapien
tcaggctctccatctgtagaaatgcaaataata

SEQ ID NO: 239683 - DNA, 33 bp, Homo sapien
tgagcaataatcctcacggcggatcaaattaca

SEQ ID NO: 239684 - DNA, 33 bp, Homo sapien
tgagcaataatcctcatggcggatcaaattaca

SEQ ID NO: 239685 - DNA, 33 bp, Homo sapien
ctgcacctccgtttctcaacctctgacatggag

SEQ ID NO: 239686 - DNA, 33 bp, Homo sapien
ctgcacctccgtttctgaacctctgacatggag

SEQ ID NO: 239687 - DNA, 33 bp, Homo sapien
tagtgtctctcctctaagaaccatattgtttaa

SEQ ID NO: 239688 - DNA, 33 bp, Homo sapien
tagtgtctctcctctaggaaccatattgtttaa

SEQ ID NO: 239689 - DNA, 33 bp, Homo sapien
catatcctgcattaaaaccatttttactaagag

SEQ ID NO: 239690 - DNA, 33 bp, Homo sapien
catatcctgcattaaagccatttttactaagag

SEQ ID NO: 239691 - DNA, 33 bp, Homo sapien
acaaagaacggcttaaactaagttgttcaaagc

SEQ ID NO: 239692 - DNA, 33 bp, Homo sapien
acaaagaacggcttaagctaagttgttcaaagc

SEQ ID NO: 239693 - DNA, 33 bp, Homo sapien
atgcaatgaactcaaactgatggaacattggtt

SEQ ID NO: 239694 - DNA, 33 bp, Homo sapien
atgcaatgaactcaaattgatggaacattggtt

SEQ ID NO: 239695 - DNA, 33 bp, Homo sapien
aaagactgagttccaaaagatcacttggagggg

SEQ ID NO: 239696 - DNA, 33 bp, Homo sapien
aaagactgagttccaacagatcacttggagggg

SEQ ID NO: 239697 - DNA, 33 bp, Homo sapien
ttccgctttcactttccctctcacttggacccc

SEQ ID NO: 239698 - DNA, 33 bp, Homo sapien
ttccgctttcactttctctctcacttggacccc

SEQ ID NO: 239699 - DNA, 33 bp, Homo sapien
ccaactagctttacaaagtgatctcaaatactt

SEQ ID NO: 239700 - DNA, 33 bp, Homo sapien
ccaactagctttacaaggtgatctcaaatactt

SEQ ID NO: 239701 - DNA, 33 bp, Homo sapien
aagatattcagaaaacagcaggtgaagggttgg

SEQ ID NO: 239702 - DNA, 33 bp, Homo sapien
aagatattcagaaaacggcaggtgaagggttgg

SEQ ID NO: 239703 - DNA, 33 bp, Homo sapien
aaaacctgtctttgaacgaccatgaccacaact

SEQ ID NO: 239704 - DNA, 33 bp, Homo sapien
aaaacctgtctttgaatgaccatgaccacaact

SEQ ID NO: 239705 - DNA, 33 bp, Homo sapien
gagggaatatgaatcaaatggatatgaagttaa

SEQ ID NO: 239706 - DNA, 33 bp, Homo sapien
gagggaatatgaatcagatggatatgaagttaa

SEQ ID NO: 239707 - DNA, 33 bp, Homo sapien
tgtctttatggcagtaacgcactgtttgattac

SEQ ID NO: 239708 - DNA, 33 bp, Homo sapien
tgtctttatggcagtaccgcactgtttgattac

SEQ ID NO: 239709 - DNA, 33 bp, Homo sapien
ctggggagccttgtgacgatagagctgttctgt

SEQ ID NO: 239710 - DNA, 33 bp, Homo sapien
ctggggagccttgtgatgatagagctgttctgt

SEQ ID NO: 239711 - DNA, 33 bp, Homo sapien
cataaaagaacttggaagaatttccagagaatt

SEQ ID NO: 239712 - DNA, 33 bp, Homo sapien
cataaaagaacttggatgaatttccagagaatt

SEQ ID NO: 239713 - DNA, 33 bp, Homo sapien
cacctattagatgcaagtataccgacctccaca

SEQ ID NO: 239714 - DNA, 33 bp, Homo sapien
cacctattagatgcaattataccgacctccaca

SEQ ID NO: 239715 - DNA, 33 bp, Homo sapien
ctggttcctctgcttcaaatacccgcattcatg

SEQ ID NO: 239716 - DNA, 33 bp, Homo sapien
ctggttcctctgcttcgaatacccgcattcatg

SEQ ID NO: 239717 - DNA, 33 bp, Homo sapien
ttctcctgtggggagacgaaaggtaagagaagg

SEQ ID NO: 239718 - DNA, 33 bp, Homo sapien
ttctcctgtggggagatgaaaggtaagagaagg

SEQ ID NO: 239719 - DNA, 33 bp, Homo sapien
tggcgcgagtttgtcacgagtatggaactgtag

SEQ ID NO: 239720 - DNA, 33 bp, Homo sapien
tggcgcgagtttgtcatgagtatggaactgtag

SEQ ID NO: 239721 - DNA, 33 bp, Homo sapien
aaaatgacaacttcaacatttccaaaaaagaca

SEQ ID NO: 239722 - DNA, 33 bp, Homo sapien
aaaatgacaacttcaatatttccaaaaaagaca

SEQ ID NO: 239723 - DNA, 33 bp, Homo sapien
tcacattttcaagagacgtttccaaatgtgaat

SEQ ID NO: 239724 - DNA, 33 bp, Homo sapien
tcacattttcaagagatgtttccaaatgtgaat

SEQ ID NO: 239725 - DNA, 33 bp, Homo sapien
acagaatcccaagagcaatattttaactcaaca

SEQ ID NO: 239726 - DNA, 33 bp, Homo sapien
acagaatcccaagagcgatattttaactcaaca

SEQ ID NO: 239727 - DNA, 33 bp, Homo sapien
ttattattcaagactcaaccttcggaatatgat

SEQ ID NO: 239728 - DNA, 33 bp, Homo sapien
ttattattcaagactcgaccttcggaatatgat

SEQ ID NO: 239729 - DNA, 33 bp, Homo sapien
aattatagagaaactgcaaattgcttactgcat

SEQ ID NO: 239730 - DNA, 33 bp, Homo sapien
aattatagagaaactggaaattgcttactgcat

SEQ ID NO: 239731 - DNA, 33 bp, Homo sapien
gcatattggtaggcaacgggtatttctacaatg

SEQ ID NO: 239732 - DNA, 33 bp, Homo sapien
gcatattggtaggcaatgggtatttctacaatg

SEQ ID NO: 239733 - DNA, 33 bp, Homo sapien
ttgacttgtaatcaaacttaagtgtgaaatggt

SEQ ID NO: 239734 - DNA, 33 bp, Homo sapien
ttgacttgtaatcaaagttaagtgtgaaatggt

SEQ ID NO: 239735 - DNA, 33 bp, Homo sapien
acgttcctgcttttatcagccaagaatatggtt

SEQ ID NO: 239736 - DNA, 33 bp, Homo sapien
acgttcctgcttttattagccaagaatatggtt

SEQ ID NO: 239737 - DNA, 33 bp, Homo sapien
ttcctcttctgtaaacaggcaatgaccaaaacc

SEQ ID NO: 239738 - DNA, 33 bp, Homo sapien
ttcctcttctgtaaacgggcaatgaccaaaacc

SEQ ID NO: 239739 - DNA, 33 bp, Homo sapien
tgagcacctacttcacaccaggaaagatggcta

SEQ ID NO: 239740 - DNA, 33 bp, Homo sapien
tgagcacctacttcacgccaggaaagatggcta

SEQ ID NO: 239741 - DNA, 33 bp, Homo sapien
ctgcatggaggaggcaacatttgaattgggtcg

SEQ ID NO: 239742 - DNA, 33 bp, Homo sapien
ctgcatggaggaggcagcatttgaattgggtcg

SEQ ID NO: 239743 - DNA, 33 bp, Homo sapien
gcagagactcaaaaacacagatgcccaaagggc

SEQ ID NO: 239744 - DNA, 33 bp, Homo sapien
gcagagactcaaaaacgcagatgcccaaagggc

SEQ ID NO: 239745 - DNA, 33 bp, Homo sapien
tcatcacagagccccgaagcaagcgctgaacaa

SEQ ID NO: 239746 - DNA, 33 bp, Homo sapien
tcatcacagagccccgcagcaagcgctgaacaa

SEQ ID NO: 239747 - DNA, 33 bp, Homo sapien
cagattttaccactcacagcatcaggtatgcaa

SEQ ID NO: 239748 - DNA, 33 bp, Homo sapien
cagattttaccactcatagcatcaggtatgcaa

SEQ ID NO: 239749 - DNA, 33 bp, Homo sapien
tcaaatacatttagtacgaaaaaacagatgaag

SEQ ID NO: 239750 - DNA, 33 bp, Homo sapien
tcaaatacatttagtatgaaaaaacagatgaag

SEQ ID NO: 239751 - DNA, 33 bp, Homo sapien
gatctgtaacctggacaactaaaacatggtttc

SEQ ID NO: 239752 - DNA, 33 bp, Homo sapien
gatctgtaacctggacgactaaaacatggtttc

SEQ ID NO: 239753 - DNA, 33 bp, Homo sapien
tttttaaaaacatgaaataagtgctggtgaaga

SEQ ID NO: 239754 - DNA, 33 bp, Homo sapien
tttttaaaaacatgaagtaagtgctggtgaaga

SEQ ID NO: 239755 - DNA, 33 bp, Homo sapien
agacacaaatcaaaaaaaggtcctagagccaaa

SEQ ID NO: 239756 - DNA, 33 bp, Homo sapien
agacacaaatcaaaaagaggtcctagagccaaa

SEQ ID NO: 239757 - DNA, 33 bp, Homo sapien
agatgactttacgctcagaaactcaaatacata

SEQ ID NO: 239758 - DNA, 33 bp, Homo sapien
agatgactttacgctcggaaactcaaatacata

SEQ ID NO: 239759 - DNA, 33 bp, Homo sapien
acaaaagacagcaaacaagtggaacaacttgct

SEQ ID NO: 239760 - DNA, 33 bp, Homo sapien
acaaaagacagcaaacgagtggaacaacttgct

SEQ ID NO: 239761 - DNA, 33 bp, Homo sapien
ggatagaagacattacagggtagactcacattt

SEQ ID NO: 239762 - DNA, 33 bp, Homo sapien
ggatagaagacattacggggtagactcacattt

SEQ ID NO: 239763 - DNA, 33 bp, Homo sapien
atagatttcaaagaagccatttagtctcatcat

SEQ ID NO: 239764 - DNA, 33 bp, Homo sapien
atagatttcaaagaagtcatttagtctcatcat

SEQ ID NO: 239765 - DNA, 33 bp, Homo sapien
gtactattcttgcaataatgtgaggtgataaaa

SEQ ID NO: 239766 - DNA, 33 bp, Homo sapien
gtactattcttgcaatgatgtgaggtgataaaa

SEQ ID NO: 239767 - DNA, 33 bp, Homo sapien
gcactgttgatgggaaataaaatagtagagcca

SEQ ID NO: 239768 - DNA, 33 bp, Homo sapien
gcactgttgatgggaattaaaatagtagagcca

SEQ ID NO: 239769 - DNA, 33 bp, Homo sapien
agacaatactgtctaccacttatactccacagt

SEQ ID NO: 239770 - DNA, 33 bp, Homo sapien
agacaatactgtctactacttatactccacagt

SEQ ID NO: 239771 - DNA, 33 bp, Homo sapien
caggggatccatttcagagtaaaggtggtatga

SEQ ID NO: 239772 - DNA, 33 bp, Homo sapien
caggggatccatttcatagtaaaggtggtatga

SEQ ID NO: 239773 - DNA, 33 bp, Homo sapien
gaatgcctagaacttacactcttctctatccag

SEQ ID NO: 239774 - DNA, 33 bp, Homo sapien
gaatgcctagaacttatactcttctctatccag

SEQ ID NO: 239775 - DNA, 33 bp, Homo sapien
tcctgtctgtatatctcacctatctcagtaaat

SEQ ID NO: 239776 - DNA, 33 bp, Homo sapien
tcctgtctgtatatcttacctatctcagtaaat

SEQ ID NO: 239777 - DNA, 33 bp, Homo sapien
ccattgaagcctttaacgctagcaagatctgat

SEQ ID NO: 239778 - DNA, 33 bp, Homo sapien
ccattgaagcctttaatgctagcaagatctgat

SEQ ID NO: 239779 - DNA, 33 bp, Homo sapien
ttttacactacagttacaagttcaaatcatact

SEQ ID NO: 239780 - DNA, 33 bp, Homo sapien
ttttacactacagttagaagttcaaatcatact

SEQ ID NO: 239781 - DNA, 33 bp, Homo sapien
caataaaattgtatctaaaaaacttatgaggaa

SEQ ID NO: 239782 - DNA, 33 bp, Homo sapien
caataaaattgtatctgaaaaacttatgaggaa

SEQ ID NO: 239783 - DNA, 33 bp, Homo sapien
taaaattttactttgaatagcttggtagtacac

SEQ ID NO: 239784 - DNA, 33 bp, Homo sapien
taaaattttactttgagtagcttggtagtacac

SEQ ID NO: 239785 - DNA, 33 bp, Homo sapien
agttataagacattcacatcttcagccttagta

SEQ ID NO: 239786 - DNA, 33 bp, Homo sapien
agttataagacattcatatcttcagccttagta

SEQ ID NO: 239787 - DNA, 33 bp, Homo sapien
tccacttctgggcatagactcaagagaaactct

SEQ ID NO: 239788 - DNA, 33 bp, Homo sapien
tccacttctgggcatatactcaagagaaactct

SEQ ID NO: 239789 - DNA, 33 bp, Homo sapien
tgccacctcaaaatacacctctttaccactgga

SEQ ID NO: 239790 - DNA, 33 bp, Homo sapien
tgccacctcaaaatacgcctctttaccactgga

SEQ ID NO: 239791 - DNA, 33 bp, Homo sapien
cttgagctaaacacaactgagaaatagtagata

SEQ ID NO: 239792 - DNA, 33 bp, Homo sapien
cttgagctaaacacaattgagaaatagtagata

SEQ ID NO: 239793 - DNA, 33 bp, Homo sapien
gcagataagagtcatccaggtgataagggtcat

SEQ ID NO: 239794 - DNA, 33 bp, Homo sapien
gcagataagagtcatctaggtgataagggtcat

SEQ ID NO: 239795 - DNA, 33 bp, Homo sapien
gagaaggaccagttgagctggctaaagtttatt

SEQ ID NO: 239796 - DNA, 33 bp, Homo sapien
gagaaggaccagttgatctggctaaagtttatt

SEQ ID NO: 239797 - DNA, 33 bp, Homo sapien
ttatatacaaagtgtaactcagtaaaactgaca

SEQ ID NO: 239798 - DNA, 33 bp, Homo sapien
ttatatacaaagtgtacctcagtaaaactgaca

SEQ ID NO: 239799 - DNA, 33 bp, Homo sapien
ccctgggaatgatcccccttttcttgcagaaca

SEQ ID NO: 239800 - DNA, 33 bp, Homo sapien
ccctgggaatgatccctcttttcttgcagaaca

SEQ ID NO: 239801 - DNA, 33 bp, Homo sapien
ccacaagttgactctcaaagcaagactcccctt

SEQ ID NO: 239802 - DNA, 33 bp, Homo sapien
ccacaagttgactctcgaagcaagactcccctt

SEQ ID NO: 239803 - DNA, 33 bp, Homo sapien
ccctgccctaatttaccccctgtgttagtgtgt

SEQ ID NO: 239804 - DNA, 33 bp, Homo sapien
ccctgccctaatttactccctgtgttagtgtgt

SEQ ID NO: 239805 - DNA, 33 bp, Homo sapien
ttctcttaaatgtgggaaacttcttctggggtc

SEQ ID NO: 239806 - DNA, 33 bp, Homo sapien
ttctcttaaatgtggggaacttcttctggggtc

SEQ ID NO: 239807 - DNA, 33 bp, Homo sapien
gagggcagatcttcccaacttagtccactgaga

SEQ ID NO: 239808 - DNA, 33 bp, Homo sapien
gagggcagatcttcccgacttagtccactgaga

SEQ ID NO: 239809 - DNA, 33 bp, Homo sapien
gtctgttctggactcccgcctttgtcccatgga

SEQ ID NO: 239810 - DNA, 33 bp, Homo sapien
gtctgttctggactcctgcctttgtcccatgga

SEQ ID NO: 239811 - DNA, 33 bp, Homo sapien
caagactgaagtcccaaagaaccatgtgatcat

SEQ ID NO: 239812 - DNA, 33 bp, Homo sapien
caagactgaagtcccagagaaccatgtgatcat

SEQ ID NO: 239813 - DNA, 33 bp, Homo sapien
gagagcatcctcaggccactgataattcaaatc

SEQ ID NO: 239814 - DNA, 33 bp, Homo sapien
gagagcatcctcaggctactgataattcaaatc

SEQ ID NO: 239815 - DNA, 33 bp, Homo sapien
tagtcacagtgggtccccgttctttaagacaac

SEQ ID NO: 239816 - DNA, 33 bp, Homo sapien
tagtcacagtgggtcctcgttctttaagacaac

SEQ ID NO: 239817 - DNA, 33 bp, Homo sapien
acccactgtgactagaaagttgacatagcacat

SEQ ID NO: 239818 - DNA, 33 bp, Homo sapien
acccactgtgactagagagttgacatagcacat

SEQ ID NO: 239819 - DNA, 33 bp, Homo sapien
agccgaggaatcatggcaagcaggtagagaggg

SEQ ID NO: 239820 - DNA, 33 bp, Homo sapien
agccgaggaatcatggtaagcaggtagagaggg

SEQ ID NO: 239821 - DNA, 33 bp, Homo sapien
gtctcttagcggcctcaagagcttcattcgcag

SEQ ID NO: 239822 - DNA, 33 bp, Homo sapien
gtctcttagcggcctcgagagcttcattcgcag

SEQ ID NO: 239823 - DNA, 33 bp, Homo sapien
cacctcttttcaaaccactattgaagacacctt

SEQ ID NO: 239824 - DNA, 33 bp, Homo sapien
cacctcttttcaaaccgctattgaagacacctt

SEQ ID NO: 239825 - DNA, 33 bp, Homo sapien
tactgattctagtttacagtggtttgaggaaac

SEQ ID NO: 239826 - DNA, 33 bp, Homo sapien
tactgattctagtttatagtggtttgaggaaac

SEQ ID NO: 239827 - DNA, 33 bp, Homo sapien
taaaaaactgcagatacccaacaacaggagatg

SEQ ID NO: 239828 - DNA, 33 bp, Homo sapien
taaaaaactgcagatatccaacaacaggagatg

SEQ ID NO: 239829 - DNA, 33 bp, Homo sapien
tcctacagtgaaagcacggacttccattgtctc

SEQ ID NO: 239830 - DNA, 33 bp, Homo sapien
tcctacagtgaaagcatggacttccattgtctc

SEQ ID NO: 239831 - DNA, 33 bp, Homo sapien
tgaaaatcatgagtgcacactaatacctccaat

SEQ ID NO: 239832 - DNA, 33 bp, Homo sapien
tgaaaatcatgagtgcgcactaatacctccaat

SEQ ID NO: 239833 - DNA, 33 bp, Homo sapien
tgattttcaatatagacatagatgcagaaatca

SEQ ID NO: 239834 - DNA, 33 bp, Homo sapien
tgattttcaatatagagatagatgcagaaatca

SEQ ID NO: 239835 - DNA, 33 bp, Homo sapien
aaggtagagtttgacacgattagatggcactgg

SEQ ID NO: 239836 - DNA, 33 bp, Homo sapien
aaggtagagtttgacatgattagatggcactgg

SEQ ID NO: 239837 - DNA, 33 bp, Homo sapien
ctattcttttaagaaacgtgatagtgacaggga

SEQ ID NO: 239838 - DNA, 33 bp, Homo sapien
ctattcttttaagaaatgtgatagtgacaggga

SEQ ID NO: 239839 - DNA, 33 bp, Homo sapien
aggtcttgtagctcccaggaacagtgaactgta

SEQ ID NO: 239840 - DNA, 33 bp, Homo sapien
aggtcttgtagctcccgggaacagtgaactgta

SEQ ID NO: 239841 - DNA, 33 bp, Homo sapien
taagctggaatgagacaccaagggcaatgccaa

SEQ ID NO: 239842 - DNA, 33 bp, Homo sapien
taagctggaatgagactccaagggcaatgccaa

SEQ ID NO: 239843 - DNA, 33 bp, Homo sapien
agttggcaactgctaccgagttaagagaattgt

SEQ ID NO: 239844 - DNA, 33 bp, Homo sapien
agttggcaactgctacggagttaagagaattgt

SEQ ID NO: 239845 - DNA, 33 bp, Homo sapien
ccagccagattttaaacaacttcatctcgtctt

SEQ ID NO: 239846 - DNA, 33 bp, Homo sapien
ccagccagattttaaataacttcatctcgtctt

SEQ ID NO: 239847 - DNA, 33 bp, Homo sapien
gtctaggctgctcctacgatatgccacccagaa

SEQ ID NO: 239848 - DNA, 33 bp, Homo sapien
gtctaggctgctcctatgatatgccacccagaa

SEQ ID NO: 239849 - DNA, 33 bp, Homo sapien
tcctgtatggaaaatacgagacttcgtacagta

SEQ ID NO: 239850 - DNA, 33 bp, Homo sapien
tcctgtatggaaaataggagacttcgtacagta

SEQ ID NO: 239851 - DNA, 33 bp, Homo sapien
tgacagctaagaagacacagagccaggatttgt

SEQ ID NO: 239852 - DNA, 33 bp, Homo sapien
tgacagctaagaagacgcagagccaggatttgt

SEQ ID NO: 239853 - DNA, 33 bp, Homo sapien
cctcctcttattgacgacagagcatttaatgac

SEQ ID NO: 239854 - DNA, 33 bp, Homo sapien
cctcctcttattgacggcagagcatttaatgac

SEQ ID NO: 239855 - DNA, 33 bp, Homo sapien
cccactcaaaacactcgcagcaaccaggtagct

SEQ ID NO: 239856 - DNA, 33 bp, Homo sapien
cccactcaaaacactctcagcaaccaggtagct

SEQ ID NO: 239857 - DNA, 33 bp, Homo sapien
gcaaagttttcacctacgatgaacaaaatggca

SEQ ID NO: 239858 - DNA, 33 bp, Homo sapien
gcaaagttttcacctatgatgaacaaaatggca

SEQ ID NO: 239859 - DNA, 33 bp, Homo sapien
aaataattcagcgataccctcttacttgcacat

SEQ ID NO: 239860 - DNA, 33 bp, Homo sapien
aaataattcagcgatatcctcttacttgcacat

SEQ ID NO: 239861 - DNA, 33 bp, Homo sapien
gagattgtggtacttacggtatatttacaatgg

SEQ ID NO: 239862 - DNA, 33 bp, Homo sapien
gagattgtggtacttatggtatatttacaatgg

SEQ ID NO: 239863 - DNA, 33 bp, Homo sapien
cctcattatcttgactcaaacctgtctctgtcc

SEQ ID NO: 239864 - DNA, 33 bp, Homo sapien
cctcattatcttgacttaaacctgtctctgtcc

SEQ ID NO: 239865 - DNA, 33 bp, Homo sapien
cctcactggttacacacaggaatgtgaagcatg

SEQ ID NO: 239866 - DNA, 33 bp, Homo sapien
cctcactggttacacagaggaatgtgaagcatg

SEQ ID NO: 239867 - DNA, 33 bp, Homo sapien
cagccagagtgtgtaaatatgtattgtggagct

SEQ ID NO: 239868 - DNA, 33 bp, Homo sapien
cagccagagtgtgtaagtatgtattgtggagct

SEQ ID NO: 239869 - DNA, 33 bp, Homo sapien
aagaacaagttcctccgcgctcacatatgtagt

SEQ ID NO: 239870 - DNA, 33 bp, Homo sapien
aagaacaagttcctcctcgctcacatatgtagt

SEQ ID NO: 239871 - DNA, 33 bp, Homo sapien
ggcagattccatctaacgtggccatctgtctgc

SEQ ID NO: 239872 - DNA, 33 bp, Homo sapien
ggcagattccatctaatgtggccatctgtctgc

SEQ ID NO: 239873 - DNA, 33 bp, Homo sapien
gatcagtgcttattttaaaaaagaaatccatct

SEQ ID NO: 239874 - DNA, 33 bp, Homo sapien
gatcagtgcttatttttaaaaagaaatccatct

SEQ ID NO: 239875 - DNA, 33 bp, Homo sapien
taaacaatacaatcaaacctgtgttctggacct

SEQ ID NO: 239876 - DNA, 33 bp, Homo sapien
taaacaatacaatcaatcctgtgttctggacct

SEQ ID NO: 239877 - DNA, 33 bp, Homo sapien
gcagagctacttaaggaaagagaattaacattt

SEQ ID NO: 239878 - DNA, 33 bp, Homo sapien
gcagagctacttaagggaagagaattaacattt

SEQ ID NO: 239879 - DNA, 33 bp, Homo sapien
cgatggtgtgtcacaaattacttaaggtggcaa

SEQ ID NO: 239880 - DNA, 33 bp, Homo sapien
cgatggtgtgtcacaagttacttaaggtggcaa

SEQ ID NO: 239881 - DNA, 33 bp, Homo sapien
tgttacctctcatcaaattcgacttaatgttat

SEQ ID NO: 239882 - DNA, 33 bp, Homo sapien
tgttacctctcatcaagttcgacttaatgttat

SEQ ID NO: 239883 - DNA, 33 bp, Homo sapien
caagaggtaggtggaaatgtctcataggataca

SEQ ID NO: 239884 - DNA, 33 bp, Homo sapien
caagaggtaggtggaagtgtctcataggataca

SEQ ID NO: 239885 - DNA, 33 bp, Homo sapien
tttcttattgtgcacccggcatggagttaaaca

SEQ ID NO: 239886 - DNA, 33 bp, Homo sapien
tttcttattgtgcacctggcatggagttaaaca

SEQ ID NO: 239887 - DNA, 33 bp, Homo sapien
aggccagtgttcactgaaaagagatgaggtcag

SEQ ID NO: 239888 - DNA, 33 bp, Homo sapien
aggccagtgttcactggaaagagatgaggtcag

SEQ ID NO: 239889 - DNA, 33 bp, Homo sapien
acttgaggctacataaagaagtacaaaaatgta

SEQ ID NO: 239890 - DNA, 33 bp, Homo sapien
acttgaggctacataaggaagtacaaaaatgta

SEQ ID NO: 239891 - DNA, 33 bp, Homo sapien
ggttcaggttcaaaacaattcattatatgagtt

SEQ ID NO: 239892 - DNA, 33 bp, Homo sapien
ggttcaggttcaaaacgattcattatatgagtt

SEQ ID NO: 239893 - DNA, 33 bp, Homo sapien
ggcctgcaaagcagacaaggaggaagataaggc

SEQ ID NO: 239894 - DNA, 33 bp, Homo sapien
ggcctgcaaagcagacgaggaggaagataaggc

SEQ ID NO: 239895 - DNA, 33 bp, Homo sapien
tgtgggttagcatgtccatgtgagcaatcagca

SEQ ID NO: 239896 - DNA, 33 bp, Homo sapien
tgtgggttagcatgtctatgtgagcaatcagca

SEQ ID NO: 239897 - DNA, 33 bp, Homo sapien
gtaataaagcaaaactcaggcttcctggcccca

SEQ ID NO: 239898 - DNA, 33 bp, Homo sapien
gtaataaagcaaaactgaggcttcctggcccca

SEQ ID NO: 239899 - DNA, 33 bp, Homo sapien
gtgccttcagcaatgcactgagtctctttcctc

SEQ ID NO: 239900 - DNA, 33 bp, Homo sapien
gtgccttcagcaatgcgctgagtctctttcctc

SEQ ID NO: 239901 - DNA, 33 bp, Homo sapien
gagcttgaacgtgaaactcatacagaggcttag

SEQ ID NO: 239902 - DNA, 33 bp, Homo sapien
gagcttgaacgtgaaagtcatacagaggcttag

SEQ ID NO: 239903 - DNA, 33 bp, Homo sapien
gagaaccatattctcaagcgataggactgattc

SEQ ID NO: 239904 - DNA, 33 bp, Homo sapien
gagaaccatattctcaggcgataggactgattc

SEQ ID NO: 239905 - DNA, 33 bp, Homo sapien
tctgctttgggccacaatgtctttctgatccag

SEQ ID NO: 239906 - DNA, 33 bp, Homo sapien
tctgctttgggccacagtgtctttctgatccag

SEQ ID NO: 239907 - DNA, 33 bp, Homo sapien
gtaatcttgtttcgaccgtaacctctctttgtc

SEQ ID NO: 239908 - DNA, 33 bp, Homo sapien
gtaatcttgtttcgactgtaacctctctttgtc

SEQ ID NO: 239909 - DNA, 33 bp, Homo sapien
gcacctatttttatacagcctgtgagcttagga

SEQ ID NO: 239910 - DNA, 33 bp, Homo sapien
gcacctatttttataccgcctgtgagcttagga

SEQ ID NO: 239911 - DNA, 33 bp, Homo sapien
tactgagctatacctacgatgtcagcctctctt

SEQ ID NO: 239912 - DNA, 33 bp, Homo sapien
tactgagctatacctatgatgtcagcctctctt

SEQ ID NO: 239913 - DNA, 33 bp, Homo sapien
tcattgtgcaatatacaaagtgtaaaacaaaat

SEQ ID NO: 239914 - DNA, 33 bp, Homo sapien
tcattgtgcaatatacgaagtgtaaaacaaaat

SEQ ID NO: 239915 - DNA, 33 bp, Homo sapien
gatggaagtgcatacaaatcacctggcaatctt

SEQ ID NO: 239916 - DNA, 33 bp, Homo sapien
gatggaagtgcatacagatcacctggcaatctt

SEQ ID NO: 239917 - DNA, 33 bp, Homo sapien
cctggatgaaggaagggccctagaaccatgggg

SEQ ID NO: 239918 - DNA, 33 bp, Homo sapien
cctggatgaaggaaggtccctagaaccatgggg

SEQ ID NO: 239919 - DNA, 33 bp, Homo sapien
aactagcatatgcgccaaaatatttatgttcaa

SEQ ID NO: 239920 - DNA, 33 bp, Homo sapien
aactagcatatgcgccgaaatatttatgttcaa

SEQ ID NO: 239921 - DNA, 33 bp, Homo sapien
tcaccccacctgcattaaaaaagagtccgtatt

SEQ ID NO: 239922 - DNA, 33 bp, Homo sapien
tcaccccacctgcattgaaaaagagtccgtatt

SEQ ID NO: 239923 - DNA, 33 bp, Homo sapien
ttgtgactgctttgctaaaactgagattcacta

SEQ ID NO: 239924 - DNA, 33 bp, Homo sapien
ttgtgactgctttgctgaaactgagattcacta

SEQ ID NO: 239925 - DNA, 33 bp, Homo sapien
cttcacagagaatagacgttcagcaaacaacag

SEQ ID NO: 239926 - DNA, 33 bp, Homo sapien
cttcacagagaatagatgttcagcaaacaacag

SEQ ID NO: 239927 - DNA, 33 bp, Homo sapien
tctccgcttgcccttcacaggagagatgttggc

SEQ ID NO: 239928 - DNA, 33 bp, Homo sapien
tctccgcttgcccttcgcaggagagatgttggc

SEQ ID NO: 239929 - DNA, 33 bp, Homo sapien
agactctttttaacaaccagctttcaggagaac

SEQ ID NO: 239930 - DNA, 33 bp, Homo sapien
agactctttttaacaatcagctttcaggagaac

SEQ ID NO: 239931 - DNA, 33 bp, Homo sapien
caaaaggtattggttgcattgagtgttttctga

SEQ ID NO: 239932 - DNA, 33 bp, Homo sapien
caaaaggtattggttggattgagtgttttctga

SEQ ID NO: 239933 - DNA, 33 bp, Homo sapien
aatatatttgaagttcgcaagctaaaagggcaa

SEQ ID NO: 239934 - DNA, 33 bp, Homo sapien
aatatatttgaagttctcaagctaaaagggcaa

SEQ ID NO: 239935 - DNA, 33 bp, Homo sapien
tttgaagacacatacactggacacctaaaatca

SEQ ID NO: 239936 - DNA, 33 bp, Homo sapien
tttgaagacacatacattggacacctaaaatca

SEQ ID NO: 239937 - DNA, 33 bp, Homo sapien
aaagaaaatgaaaaaacgggtagatgcataagt

SEQ ID NO: 239938 - DNA, 33 bp, Homo sapien
aaagaaaatgaaaaaatgggtagatgcataagt

SEQ ID NO: 239939 - DNA, 33 bp, Homo sapien
cctgggctgagctcttaaaaggtaaaagtgggc

SEQ ID NO: 239940 - DNA, 33 bp, Homo sapien
cctgggctgagctcttgaaaggtaaaagtgggc

SEQ ID NO: 239941 - DNA, 33 bp, Homo sapien
cctgaaaggcatattgaagttaaccagaccagg

SEQ ID NO: 239942 - DNA, 33 bp, Homo sapien
cctgaaaggcatattggagttaaccagaccagg

SEQ ID NO: 239943 - DNA, 33 bp, Homo sapien
ctttccaaacagaaccacagagccaggaagcaa

SEQ ID NO: 239944 - DNA, 33 bp, Homo sapien
ctttccaaacagaaccgcagagccaggaagcaa

SEQ ID NO: 239945 - DNA, 33 bp, Homo sapien
atggtcttgctcaatgacaagcatccatgttga

SEQ ID NO: 239946 - DNA, 33 bp, Homo sapien
atggtcttgctcaatggcaagcatccatgttga

SEQ ID NO: 239947 - DNA, 33 bp, Homo sapien
acattctgctgggggaacttgacaatcaacatg

SEQ ID NO: 239948 - DNA, 33 bp, Homo sapien
acattctgctgggggagcttgacaatcaacatg

SEQ ID NO: 239949 - DNA, 33 bp, Homo sapien
tcactcatttgattcactaattccttagttcat

SEQ ID NO: 239950 - DNA, 33 bp, Homo sapien
tcactcatttgattcattaattccttagttcat

SEQ ID NO: 239951 - DNA, 33 bp, Homo sapien
atacttactggtatagacagttgctgaagatac

SEQ ID NO: 239952 - DNA, 33 bp, Homo sapien
atacttactggtataggcagttgctgaagatac

SEQ ID NO: 239953 - DNA, 33 bp, Homo sapien
aggccagatggtttgaccaattccaattcctgc

SEQ ID NO: 239954 - DNA, 33 bp, Homo sapien
aggccagatggtttgatcaattccaattcctgc

SEQ ID NO: 239955 - DNA, 33 bp, Homo sapien
catgagccaaataagcaatgaaaacgtgaaaag

SEQ ID NO: 239956 - DNA, 33 bp, Homo sapien
catgagccaaataagcgatgaaaacgtgaaaag

SEQ ID NO: 239957 - DNA, 33 bp, Homo sapien
cccacacagtgccacaatgaaaaatgcagcctg

SEQ ID NO: 239958 - DNA, 33 bp, Homo sapien
cccacacagtgccacagtgaaaaatgcagcctg

SEQ ID NO: 239959 - DNA, 33 bp, Homo sapien
ggtgcacccatgatccaagcagtatacactgaa

SEQ ID NO: 239960 - DNA, 33 bp, Homo sapien
ggtgcacccatgatccgagcagtatacactgaa

SEQ ID NO: 239961 - DNA, 33 bp, Homo sapien
ttaaggcacttggcaacggatcgagagatgtat

SEQ ID NO: 239962 - DNA, 33 bp, Homo sapien
ttaaggcacttggcaatggatcgagagatgtat

SEQ ID NO: 239963 - DNA, 33 bp, Homo sapien
cttccagtcctataaactcccttcatggtaaat

SEQ ID NO: 239964 - DNA, 33 bp, Homo sapien
cttccagtcctataaagtcccttcatggtaaat

SEQ ID NO: 239965 - DNA, 33 bp, Homo sapien
aagcatggtttgatgacggtctttaatcactgc

SEQ ID NO: 239966 - DNA, 33 bp, Homo sapien
aagcatggtttgatgatggtctttaatcactgc

SEQ ID NO: 239967 - DNA, 33 bp, Homo sapien
aacaaacaaaaccactgaccaaattgatgcata

SEQ ID NO: 239968 - DNA, 33 bp, Homo sapien
aacaaacaaaaccacttaccaaattgatgcata

SEQ ID NO: 239969 - DNA, 33 bp, Homo sapien
tgagtagctggtactacggttgtgtgccaccac

SEQ ID NO: 239970 - DNA, 33 bp, Homo sapien
tgagtagctggtactatggttgtgtgccaccac

SEQ ID NO: 239971 - DNA, 33 bp, Homo sapien
ctgtgggctcatcttccaccaaacttttattga

SEQ ID NO: 239972 - DNA, 33 bp, Homo sapien
ctgtgggctcatcttctaccaaacttttattga

SEQ ID NO: 239973 - DNA, 33 bp, Homo sapien
agagatcacccctgaccgcccagtcactctcta

SEQ ID NO: 239974 - DNA, 33 bp, Homo sapien
agagatcacccctgactgcccagtcactctcta

SEQ ID NO: 239975 - DNA, 33 bp, Homo sapien
attcgttgagctcttacgtttctcattaaaccc

SEQ ID NO: 239976 - DNA, 33 bp, Homo sapien
attcgttgagctcttatgtttctcattaaaccc

SEQ ID NO: 239977 - DNA, 33 bp, Homo sapien
gaacaagaatatgcaacaataagaaaaagttct

SEQ ID NO: 239978 - DNA, 33 bp, Homo sapien
gaacaagaatatgcaagaataagaaaaagttct

SEQ ID NO: 239979 - DNA, 33 bp, Homo sapien
gctctagtcatcacaaccatgttccaggcagca

SEQ ID NO: 239980 - DNA, 33 bp, Homo sapien
gctctagtcatcacaatcatgttccaggcagca

SEQ ID NO: 239981 - DNA, 33 bp, Homo sapien
aatagatgaatcgatgaatgctcttctaccaac

SEQ ID NO: 239982 - DNA, 33 bp, Homo sapien
aatagatgaatcgatggatgctcttctaccaac

SEQ ID NO: 239983 - DNA, 33 bp, Homo sapien
tgtgacttacgcagagacacaatctagcaaaga

SEQ ID NO: 239984 - DNA, 33 bp, Homo sapien
tgtgacttacgcagaggcacaatctagcaaaga

SEQ ID NO: 239985 - DNA, 33 bp, Homo sapien
ttcatttggtcaagggaaatactaaacacacaa

SEQ ID NO: 239986 - DNA, 33 bp, Homo sapien
ttcatttggtcaaggggaatactaaacacacaa

SEQ ID NO: 239987 - DNA, 33 bp, Homo sapien
tgatatgtcattttaactaacgttgtgctatct

SEQ ID NO: 239988 - DNA, 33 bp, Homo sapien
tgatatgtcattttaattaacgttgtgctatct

SEQ ID NO: 239989 - DNA, 33 bp, Homo sapien
ttatctgattttcacaacatgaaaggcacgggg

SEQ ID NO: 239990 - DNA, 33 bp, Homo sapien
ttatctgattttcacagcatgaaaggcacgggg

SEQ ID NO: 239991 - DNA, 33 bp, Homo sapien
ttctcattgttcaacaagggagtatatttttaa

SEQ ID NO: 239992 - DNA, 33 bp, Homo sapien
ttctcattgttcaacaggggagtatatttttaa

SEQ ID NO: 239993 - DNA, 33 bp, Homo sapien
atactattacataacaatgaaaatgaatgaagt

SEQ ID NO: 239994 - DNA, 33 bp, Homo sapien
atactattacataacagtgaaaatgaatgaagt

SEQ ID NO: 239995 - DNA, 33 bp, Homo sapien
attctgccctgaggacactagcatgttgtttgg

SEQ ID NO: 239996 - DNA, 33 bp, Homo sapien
attctgccctgaggacgctagcatgttgtttgg

SEQ ID NO: 239997 - DNA, 33 bp, Homo sapien
agggaggacaccgaggaatatatgatgcagatt

SEQ ID NO: 239998 - DNA, 33 bp, Homo sapien
agggaggacaccgaggcatatatgatgcagatt

SEQ ID NO: 239999 - DNA, 33 bp, Homo sapien
agtttgccggcctataaagagtcaccatttcct

SEQ ID NO: 240000 - DNA, 33 bp, Homo sapien
agtttgccggcctatagagagtcaccatttcct

SEQ ID NO: 240001 - DNA, 33 bp, Homo sapien
cttcttacatccaaaaatgacctcagtttttag

SEQ ID NO: 240002 - DNA, 33 bp, Homo sapien
cttcttacatccaaaattgacctcagtttttag

SEQ ID NO: 240003 - DNA, 33 bp, Homo sapien
gagcccaagctcataaccaccacgggacataca

SEQ ID NO: 240004 - DNA, 33 bp, Homo sapien
gagcccaagctcataagcaccacgggacataca

SEQ ID NO: 240005 - DNA, 33 bp, Homo sapien
tcccctgtgtctagcacggtcctggacagagga

SEQ ID NO: 240006 - DNA, 33 bp, Homo sapien
tcccctgtgtctagcatggtcctggacagagga

SEQ ID NO: 240007 - DNA, 33 bp, Homo sapien
ccattcataaatgtaacgccagggagtgccaca

SEQ ID NO: 240008 - DNA, 33 bp, Homo sapien
ccattcataaatgtaatgccagggagtgccaca

SEQ ID NO: 240009 - DNA, 33 bp, Homo sapien
gagtgccacagctatgaataaaagtcaagcagg

SEQ ID NO: 240010 - DNA, 33 bp, Homo sapien
gagtgccacagctatgcataaaagtcaagcagg

SEQ ID NO: 240011 - DNA, 33 bp, Homo sapien
gtctgtttttatgccactactatactgtcttgt

SEQ ID NO: 240012 - DNA, 33 bp, Homo sapien
gtctgtttttatgccattactatactgtcttgt

SEQ ID NO: 240013 - DNA, 33 bp, Homo sapien
ataaatgcgtagataaaagcttaaatgacctga

SEQ ID NO: 240014 - DNA, 33 bp, Homo sapien
ataaatgcgtagataagagcttaaatgacctga

SEQ ID NO: 240015 - DNA, 33 bp, Homo sapien
gtggaaggcactgtaacagcttttcaaaaggtt

SEQ ID NO: 240016 - DNA, 33 bp, Homo sapien
gtggaaggcactgtaatagcttttcaaaaggtt

SEQ ID NO: 240017 - DNA, 33 bp, Homo sapien
taatgctgtgcaaaagcaatcagaggacctcac

SEQ ID NO: 240018 - DNA, 33 bp, Homo sapien
taatgctgtgcaaaagtaatcagaggacctcac

SEQ ID NO: 240019 - DNA, 33 bp, Homo sapien
gcagtaagggctcataactcaagtgtctggagt

SEQ ID NO: 240020 - DNA, 33 bp, Homo sapien
gcagtaagggctcatagctcaagtgtctggagt

SEQ ID NO: 240021 - DNA, 33 bp, Homo sapien
tatctgatgtaagagtaacagattctgtgtacc

SEQ ID NO: 240022 - DNA, 33 bp, Homo sapien
tatctgatgtaagagttacagattctgtgtacc

SEQ ID NO: 240023 - DNA, 33 bp, Homo sapien
tccagataacatcacaaccctataaatcagctc

SEQ ID NO: 240024 - DNA, 33 bp, Homo sapien
tccagataacatcacatccctataaatcagctc

SEQ ID NO: 240025 - DNA, 33 bp, Homo sapien
tatcaataagtagactaaccttaactactttac

SEQ ID NO: 240026 - DNA, 33 bp, Homo sapien
tatcaataagtagacttaccttaactactttac

SEQ ID NO: 240027 - DNA, 33 bp, Homo sapien
ccagaaccacgtttccaacatgcagatctaatc

SEQ ID NO: 240028 - DNA, 33 bp, Homo sapien
ccagaaccacgtttccgacatgcagatctaatc

SEQ ID NO: 240029 - DNA, 33 bp, Homo sapien
tcaaatcatctttcaaactgtattcgttataaa

SEQ ID NO: 240030 - DNA, 33 bp, Homo sapien
tcaaatcatctttcaagctgtattcgttataaa

SEQ ID NO: 240031 - DNA, 33 bp, Homo sapien
ttaatatttgtggtagaagttttgtaaacagaa

SEQ ID NO: 240032 - DNA, 33 bp, Homo sapien
ttaatatttgtggtaggagttttgtaaacagaa

SEQ ID NO: 240033 - DNA, 33 bp, Homo sapien
agaggtggcaagcctcaaaactaaccagcttga

SEQ ID NO: 240034 - DNA, 33 bp, Homo sapien
agaggtggcaagcctcgaaactaaccagcttga

SEQ ID NO: 240035 - DNA, 33 bp, Homo sapien
acttgacaaacttatacagcgcttaaaatgtgc

SEQ ID NO: 240036 - DNA, 33 bp, Homo sapien
acttgacaaacttatatagcgcttaaaatgtgc

SEQ ID NO: 240037 - DNA, 33 bp, Homo sapien
caagaattttatatccactaaaactgactttca

SEQ ID NO: 240038 - DNA, 33 bp, Homo sapien
caagaattttatatccgctaaaactgactttca

SEQ ID NO: 240039 - DNA, 33 bp, Homo sapien
cagctttggcagtagaaatagacactgtctccc

SEQ ID NO: 240040 - DNA, 33 bp, Homo sapien
cagctttggcagtagatatagacactgtctccc

SEQ ID NO: 240041 - DNA, 33 bp, Homo sapien
tatgcatttaccatgactatcgtaaacctttta

SEQ ID NO: 240042 - DNA, 33 bp, Homo sapien
tatgcatttaccatgattatcgtaaacctttta

SEQ ID NO: 240043 - DNA, 33 bp, Homo sapien
tactagaagttaatgacagcagttgccaatata

SEQ ID NO: 240044 - DNA, 33 bp, Homo sapien
tactagaagttaatgatagcagttgccaatata

SEQ ID NO: 240045 - DNA, 33 bp, Homo sapien
cttgaaaatggttgccagaaatatttgaaattc

SEQ ID NO: 240046 - DNA, 33 bp, Homo sapien
cttgaaaatggttgccggaaatatttgaaattc

SEQ ID NO: 240047 - DNA, 33 bp, Homo sapien
agagtgaagatgagacaccaacagcctcacact

SEQ ID NO: 240048 - DNA, 33 bp, Homo sapien
agagtgaagatgagacgccaacagcctcacact

SEQ ID NO: 240049 - DNA, 33 bp, Homo sapien
taggttttgcttcccaaggaatggccttactgt

SEQ ID NO: 240050 - DNA, 33 bp, Homo sapien
taggttttgcttcccatggaatggccttactgt

SEQ ID NO: 240051 - DNA, 33 bp, Homo sapien
gggtaatttggcaataccaggcaaaattataca

SEQ ID NO: 240052 - DNA, 33 bp, Homo sapien
gggtaatttggcaatatcaggcaaaattataca

SEQ ID NO: 240053 - DNA, 33 bp, Homo sapien
ctcagacaactagaaaaagacacagtatgagca

SEQ ID NO: 240054 - DNA, 33 bp, Homo sapien
ctcagacaactagaaagagacacagtatgagca

SEQ ID NO: 240055 - DNA, 33 bp, Homo sapien
ttttatctggcaacctcaccatgaaagagaatg

SEQ ID NO: 240056 - DNA, 33 bp, Homo sapien
ttttatctggcaaccttaccatgaaagagaatg

SEQ ID NO: 240057 - DNA, 33 bp, Homo sapien
gtgttttttattcgctcacccccatctttcatc

SEQ ID NO: 240058 - DNA, 33 bp, Homo sapien
gtgttttttattcgcttacccccatctttcatc

SEQ ID NO: 240059 - DNA, 33 bp, Homo sapien
ttctttttaggacttcactgccattttcttgct

SEQ ID NO: 240060 - DNA, 33 bp, Homo sapien
ttctttttaggacttcgctgccattttcttgct

SEQ ID NO: 240061 - DNA, 33 bp, Homo sapien
gagcttggatcataaacgacaaaaagcaagaaa

SEQ ID NO: 240062 - DNA, 33 bp, Homo sapien
gagcttggatcataaatgacaaaaagcaagaaa

SEQ ID NO: 240063 - DNA, 33 bp, Homo sapien
acagtgtctttctcataaggttttgtgaattgc

SEQ ID NO: 240064 - DNA, 33 bp, Homo sapien
acagtgtctttctcattaggttttgtgaattgc

SEQ ID NO: 240065 - DNA, 33 bp, Homo sapien
cccaagcagcagctcaatctcctgtgtttgccc

SEQ ID NO: 240066 - DNA, 33 bp, Homo sapien
cccaagcagcagctcagtctcctgtgtttgccc

SEQ ID NO: 240067 - DNA, 33 bp, Homo sapien
acttcagtactacttgcataccaccatttcttt

SEQ ID NO: 240068 - DNA, 33 bp, Homo sapien
acttcagtactacttggataccaccatttcttt

SEQ ID NO: 240069 - DNA, 33 bp, Homo sapien
gtgggtgcaccagccaagtagaaggcacctggg

SEQ ID NO: 240070 - DNA, 33 bp, Homo sapien
gtgggtgcaccagccaggtagaaggcacctggg

SEQ ID NO: 240071 - DNA, 33 bp, Homo sapien
gtaccatgagggcaaccgtgtctattttatcca

SEQ ID NO: 240072 - DNA, 33 bp, Homo sapien
gtaccatgagggcaactgtgtctattttatcca

SEQ ID NO: 240073 - DNA, 33 bp, Homo sapien
gtgtgaaaataaaggccacaaattcttacagtg

SEQ ID NO: 240074 - DNA, 33 bp, Homo sapien
gtgtgaaaataaaggctacaaattcttacagtg

SEQ ID NO: 240075 - DNA, 33 bp, Homo sapien
aacctgaaattacagcagaaggaaccactgctg

SEQ ID NO: 240076 - DNA, 33 bp, Homo sapien
aacctgaaattacagcggaaggaaccactgctg

SEQ ID NO: 240077 - DNA, 33 bp, Homo sapien
aaaatctgcattaatacctgtcttgagaatgca

SEQ ID NO: 240078 - DNA, 33 bp, Homo sapien
aaaatctgcattaatatctgtcttgagaatgca

SEQ ID NO: 240079 - DNA, 33 bp, Homo sapien
tcttgctctgtaatgcacgggttttctgcccat

SEQ ID NO: 240080 - DNA, 33 bp, Homo sapien
tcttgctctgtaatgcgcgggttttctgcccat

SEQ ID NO: 240081 - DNA, 33 bp, Homo sapien
ggaaatatccagggaaaaattacaaacgtgggg

SEQ ID NO: 240082 - DNA, 33 bp, Homo sapien
ggaaatatccagggaagaattacaaacgtgggg

SEQ ID NO: 240083 - DNA, 33 bp, Homo sapien
ttaagctagtccaatccgaggtcctttgacaag

SEQ ID NO: 240084 - DNA, 33 bp, Homo sapien
ttaagctagtccaatctgaggtcctttgacaag

SEQ ID NO: 240085 - DNA, 33 bp, Homo sapien
tgcaacaggaagagaaagctcccatgatgtgat

SEQ ID NO: 240086 - DNA, 33 bp, Homo sapien
tgcaacaggaagagaaggctcccatgatgtgat

SEQ ID NO: 240087 - DNA, 33 bp, Homo sapien
attaagtgaccccatccccactctttgattacc

SEQ ID NO: 240088 - DNA, 33 bp, Homo sapien
attaagtgaccccatctccactctttgattacc

SEQ ID NO: 240089 - DNA, 33 bp, Homo sapien
tcttgcctcatctttacagcatcctaacagcaa

SEQ ID NO: 240090 - DNA, 33 bp, Homo sapien
tcttgcctcatctttatagcatcctaacagcaa

SEQ ID NO: 240091 - DNA, 33 bp, Homo sapien
ccatcccagagcttagccacgtagcgttgggca

SEQ ID NO: 240092 - DNA, 33 bp, Homo sapien
ccatcccagagcttagtcacgtagcgttgggca

SEQ ID NO: 240093 - DNA, 33 bp, Homo sapien
ggatgtttgttaatcaaatagaactctaacaac

SEQ ID NO: 240094 - DNA, 33 bp, Homo sapien
ggatgtttgttaatcagatagaactctaacaac

SEQ ID NO: 240095 - DNA, 33 bp, Homo sapien
gctgcctctaaatgcaacaacctttttatatgg

SEQ ID NO: 240096 - DNA, 33 bp, Homo sapien
gctgcctctaaatgcagcaacctttttatatgg

SEQ ID NO: 240097 - DNA, 33 bp, Homo sapien
aaaataaaacaaggaaattcatacaaataaaca

SEQ ID NO: 240098 - DNA, 33 bp, Homo sapien
aaaataaaacaaggaatttcatacaaataaaca

SEQ ID NO: 240099 - DNA, 33 bp, Homo sapien
ctcttccttctgcctaaaatattaacatctttg

SEQ ID NO: 240100 - DNA, 33 bp, Homo sapien
ctcttccttctgcctagaatattaacatctttg

SEQ ID NO: 240101 - DNA, 33 bp, Homo sapien
gggttataagtgaaacacagggtaattatatga

SEQ ID NO: 240102 - DNA, 33 bp, Homo sapien
gggttataagtgaaacgcagggtaattatatga

SEQ ID NO: 240103 - DNA, 33 bp, Homo sapien
tgcctataaactacaaaagaacaaagaccatac

SEQ ID NO: 240104 - DNA, 33 bp, Homo sapien
tgcctataaactacaagagaacaaagaccatac

SEQ ID NO: 240105 - DNA, 33 bp, Homo sapien
taggccacacttggcacctgagaactcaggaca

SEQ ID NO: 240106 - DNA, 33 bp, Homo sapien
taggccacacttggcatctgagaactcaggaca

SEQ ID NO: 240107 - DNA, 33 bp, Homo sapien
agagccaacgtctctaataactccaaaggcata

SEQ ID NO: 240108 - DNA, 33 bp, Homo sapien
agagccaacgtctctagtaactccaaaggcata

SEQ ID NO: 240109 - DNA, 33 bp, Homo sapien
tgtccttgatgtagaacgatagtttccttctgg

SEQ ID NO: 240110 - DNA, 33 bp, Homo sapien
tgtccttgatgtagaatgatagtttccttctgg

SEQ ID NO: 240111 - DNA, 33 bp, Homo sapien
actcgattggacagaacagtttgtttgtttttc

SEQ ID NO: 240112 - DNA, 33 bp, Homo sapien
actcgattggacagaatagtttgtttgtttttc

SEQ ID NO: 240113 - DNA, 33 bp, Homo sapien
ctacaaggaactcacacaaatcagtaagaaaaa

SEQ ID NO: 240114 - DNA, 33 bp, Homo sapien
ctacaaggaactcacataaatcagtaagaaaaa

SEQ ID NO: 240115 - DNA, 33 bp, Homo sapien
atcaatcagtgtaatggactacaaatggtttgc

SEQ ID NO: 240116 - DNA, 33 bp, Homo sapien
atcaatcagtgtaatgtactacaaatggtttgc

SEQ ID NO: 240117 - DNA, 33 bp, Homo sapien
aagaagccataccaaacaagatgctcagtaccc

SEQ ID NO: 240118 - DNA, 33 bp, Homo sapien
aagaagccataccaaagaagatgctcagtaccc

SEQ ID NO: 240119 - DNA, 33 bp, Homo sapien
aagcttgagtttcttacagtaggccattttcta

SEQ ID NO: 240120 - DNA, 33 bp, Homo sapien
aagcttgagtttcttatagtaggccattttcta

SEQ ID NO: 240121 - DNA, 33 bp, Homo sapien
atctacattctgttctaaagaaatcagatgaga

SEQ ID NO: 240122 - DNA, 33 bp, Homo sapien
atctacattctgttctgaagaaatcagatgaga

SEQ ID NO: 240123 - DNA, 33 bp, Homo sapien
gttgcttctacaattacctttctagcagtttct

SEQ ID NO: 240124 - DNA, 33 bp, Homo sapien
gttgcttctacaattatctttctagcagtttct

SEQ ID NO: 240125 - DNA, 33 bp, Homo sapien
ctttgaacaagacactaaacatctctacatctc

SEQ ID NO: 240126 - DNA, 33 bp, Homo sapien
ctttgaacaagacactgaacatctctacatctc

SEQ ID NO: 240127 - DNA, 33 bp, Homo sapien
cctgttaagtcagttacaatagcagttattgcg

SEQ ID NO: 240128 - DNA, 33 bp, Homo sapien
cctgttaagtcagttataatagcagttattgcg

SEQ ID NO: 240129 - DNA, 33 bp, Homo sapien
agacatcagaagctatcagcttgaccaaacacc

SEQ ID NO: 240130 - DNA, 33 bp, Homo sapien
agacatcagaagctatgagcttgaccaaacacc

SEQ ID NO: 240131 - DNA, 33 bp, Homo sapien
acttgtattttcctcaataaatttctgaaagct

SEQ ID NO: 240132 - DNA, 33 bp, Homo sapien
acttgtattttcctcagtaaatttctgaaagct

SEQ ID NO: 240133 - DNA, 33 bp, Homo sapien
cctggctgaatcatgaaccagttctaaatctaa

SEQ ID NO: 240134 - DNA, 33 bp, Homo sapien
cctggctgaatcatgagccagttctaaatctaa

SEQ ID NO: 240135 - DNA, 33 bp, Homo sapien
atgaactattttgttcaaaagagacctaatttc

SEQ ID NO: 240136 - DNA, 33 bp, Homo sapien
atgaactattttgttcgaaagagacctaatttc

SEQ ID NO: 240137 - DNA, 33 bp, Homo sapien
cagtttttcagtttgaagaagatgctgattctt

SEQ ID NO: 240138 - DNA, 33 bp, Homo sapien
cagtttttcagtttgaggaagatgctgattctt

SEQ ID NO: 240139 - DNA, 33 bp, Homo sapien
tcctgcagttagtccaagtagtaaatggtgtgg

SEQ ID NO: 240140 - DNA, 33 bp, Homo sapien
tcctgcagttagtccatgtagtaaatggtgtgg

SEQ ID NO: 240141 - DNA, 33 bp, Homo sapien
gacacaggaactccaactatcccactagctatg

SEQ ID NO: 240142 - DNA, 33 bp, Homo sapien
gacacaggaactccaattatcccactagctatg

SEQ ID NO: 240143 - DNA, 33 bp, Homo sapien
ctatatcttgttgtggaaaggaatgcagattta

SEQ ID NO: 240144 - DNA, 33 bp, Homo sapien
ctatatcttgttgtgggaaggaatgcagattta

SEQ ID NO: 240145 - DNA, 33 bp, Homo sapien
tgttcataaaagttcacgtttgagtacaagcaa

SEQ ID NO: 240146 - DNA, 33 bp, Homo sapien
tgttcataaaagttcatgtttgagtacaagcaa

SEQ ID NO: 240147 - DNA, 33 bp, Homo sapien
gaaaggtcatagaatactaccagtctaacatgg

SEQ ID NO: 240148 - DNA, 33 bp, Homo sapien
gaaaggtcatagaatattaccagtctaacatgg

SEQ ID NO: 240149 - DNA, 33 bp, Homo sapien
taaaatatttcatggacggctaggtgtagtggc

SEQ ID NO: 240150 - DNA, 33 bp, Homo sapien
taaaatatttcatggatggctaggtgtagtggc

SEQ ID NO: 240151 - DNA, 33 bp, Homo sapien
ggtgtctgatataaggcagttccaaccatgtta

SEQ ID NO: 240152 - DNA, 33 bp, Homo sapien
ggtgtctgatataaggtagttccaaccatgtta

SEQ ID NO: 240153 - DNA, 33 bp, Homo sapien
cagtcttcctctttgaagtcatgcccaatcact

SEQ ID NO: 240154 - DNA, 33 bp, Homo sapien
cagtcttcctctttgaggtcatgcccaatcact

SEQ ID NO: 240155 - DNA, 33 bp, Homo sapien
tgtcttgtgaacagaacagtgataaccatagag

SEQ ID NO: 240156 - DNA, 33 bp, Homo sapien
tgtcttgtgaacagaatagtgataaccatagag

SEQ ID NO: 240157 - DNA, 33 bp, Homo sapien
tgaaacattccttggtaaaggggctcagaataa

SEQ ID NO: 240158 - DNA, 33 bp, Homo sapien
tgaaacattccttggtgaaggggctcagaataa

SEQ ID NO: 240159 - DNA, 33 bp, Homo sapien
tttttcaaatgctgtcccattatgacttggtga

SEQ ID NO: 240160 - DNA, 33 bp, Homo sapien
tttttcaaatgctgtctcattatgacttggtga

SEQ ID NO: 240161 - DNA, 33 bp, Homo sapien
aagatatataaattacagctttcccttactgcc

SEQ ID NO: 240162 - DNA, 33 bp, Homo sapien
aagatatataaattacggctttcccttactgcc

SEQ ID NO: 240163 - DNA, 33 bp, Homo sapien
tctttgcattttctgaatagcacatttagatat

SEQ ID NO: 240164 - DNA, 33 bp, Homo sapien
tctttgcattttctgagtagcacatttagatat

SEQ ID NO: 240165 - DNA, 33 bp, Homo sapien
tattagttggttataagtagtctaacagtgatt

SEQ ID NO: 240166 - DNA, 33 bp, Homo sapien
tattagttggttataattagtctaacagtgatt

SEQ ID NO: 240167 - DNA, 33 bp, Homo sapien
aaaaggctccataaagccttccttctctaagaa

SEQ ID NO: 240168 - DNA, 33 bp, Homo sapien
aaaaggctccataaagtcttccttctctaagaa

SEQ ID NO: 240169 - DNA, 33 bp, Homo sapien
aaatctggggtctctaaaaatgctcattaattt

SEQ ID NO: 240170 - DNA, 33 bp, Homo sapien
aaatctggggtctctacaaatgctcattaattt

SEQ ID NO: 240171 - DNA, 33 bp, Homo sapien
aagaccatatgggctacacccaagcttgtcaaa

SEQ ID NO: 240172 - DNA, 33 bp, Homo sapien
aagaccatatgggctatacccaagcttgtcaaa

SEQ ID NO: 240173 - DNA, 33 bp, Homo sapien
aaatgctatgagaatacctgacagttaaaggaa

SEQ ID NO: 240174 - DNA, 33 bp, Homo sapien
aaatgctatgagaatatctgacagttaaaggaa

SEQ ID NO: 240175 - DNA, 33 bp, Homo sapien
cttcctattctgaccacccagttatgctgtgat

SEQ ID NO: 240176 - DNA, 33 bp, Homo sapien
cttcctattctgaccatccagttatgctgtgat

SEQ ID NO: 240177 - DNA, 33 bp, Homo sapien
actcaccaggctgttgaaggttaattgcaatga

SEQ ID NO: 240178 - DNA, 33 bp, Homo sapien
actcaccaggctgttggaggttaattgcaatga

SEQ ID NO: 240179 - DNA, 33 bp, Homo sapien
aaaaaaggagagataactggacacaatggctca

SEQ ID NO: 240180 - DNA, 33 bp, Homo sapien
aaaaaaggagagataattggacacaatggctca

SEQ ID NO: 240181 - DNA, 33 bp, Homo sapien
taattcagttttgagagagcaagaactcactca

SEQ ID NO: 240182 - DNA, 33 bp, Homo sapien
taattcagttttgagatagcaagaactcactca

SEQ ID NO: 240183 - DNA, 33 bp, Homo sapien
atgacaagaacgcaaactgatatttcttaaaca

SEQ ID NO: 240184 - DNA, 33 bp, Homo sapien
atgacaagaacgcaaattgatatttcttaaaca

SEQ ID NO: 240185 - DNA, 33 bp, Homo sapien
gtaattttagtcagccaaaaaataataatactt

SEQ ID NO: 240186 - DNA, 33 bp, Homo sapien
gtaattttagtcagccgaaaaataataatactt

SEQ ID NO: 240187 - DNA, 33 bp, Homo sapien
ctgttggtcattcagtaaatatttatggagcac

SEQ ID NO: 240188 - DNA, 33 bp, Homo sapien
ctgttggtcattcagtgaatatttatggagcac

SEQ ID NO: 240189 - DNA, 33 bp, Homo sapien
taaaaatctgcaaaaccgacctaggaagaattt

SEQ ID NO: 240190 - DNA, 33 bp, Homo sapien
taaaaatctgcaaaactgacctaggaagaattt

SEQ ID NO: 240191 - DNA, 33 bp, Homo sapien
atataacttggagatccacattagagcactaag

SEQ ID NO: 240192 - DNA, 33 bp, Homo sapien
atataacttggagatcgacattagagcactaag

SEQ ID NO: 240193 - DNA, 33 bp, Homo sapien
atttacaggtaactacgaatttcagatcagtta

SEQ ID NO: 240194 - DNA, 33 bp, Homo sapien
atttacaggtaactactaatttcagatcagtta

SEQ ID NO: 240195 - DNA, 33 bp, Homo sapien
taattgctgtaaaccaaaaagaggattaattga

SEQ ID NO: 240196 - DNA, 33 bp, Homo sapien
taattgctgtaaaccagaaagaggattaattga

SEQ ID NO: 240197 - DNA, 33 bp, Homo sapien
tggagtaatgaatcaagggctttcccagacaac

SEQ ID NO: 240198 - DNA, 33 bp, Homo sapien
tggagtaatgaatcaatggctttcccagacaac

SEQ ID NO: 240199 - DNA, 33 bp, Homo sapien
gctgtggcttgcttcaataataatttatagtca

SEQ ID NO: 240200 - DNA, 33 bp, Homo sapien
gctgtggcttgcttcagtaataatttatagtca

SEQ ID NO: 240201 - DNA, 33 bp, Homo sapien
aatcttccagatatcaagtttggtcagaactca

SEQ ID NO: 240202 - DNA, 33 bp, Homo sapien
aatcttccagatatcacgtttggtcagaactca

SEQ ID NO: 240203 - DNA, 33 bp, Homo sapien
caggacacagggttgtcaaaaatcttcagtttg

SEQ ID NO: 240204 - DNA, 33 bp, Homo sapien
caggacacagggttgttaaaaatcttcagtttg

SEQ ID NO: 240205 - DNA, 33 bp, Homo sapien
aaagataaagaaaacaaagaatcattctgcttc

SEQ ID NO: 240206 - DNA, 33 bp, Homo sapien
aaagataaagaaaacacagaatcattctgcttc

SEQ ID NO: 240207 - DNA, 33 bp, Homo sapien
catctgaaataaatgcactttgtccctgggcca

SEQ ID NO: 240208 - DNA, 33 bp, Homo sapien
catctgaaataaatgcgctttgtccctgggcca

SEQ ID NO: 240209 - DNA, 33 bp, Homo sapien
tctaaattcatgggcaacaattgtcctcttctg

SEQ ID NO: 240210 - DNA, 33 bp, Homo sapien
tctaaattcatgggcagcaattgtcctcttctg

SEQ ID NO: 240211 - DNA, 33 bp, Homo sapien
aaatgttcttatggtgaattgaaaatggctgtg

SEQ ID NO: 240212 - DNA, 33 bp, Homo sapien
aaatgttcttatggtggattgaaaatggctgtg

SEQ ID NO: 240213 - DNA, 33 bp, Homo sapien
aactcttttggaggacactagaggtctttgcta

SEQ ID NO: 240214 - DNA, 33 bp, Homo sapien
aactcttttggaggacgctagaggtctttgcta

SEQ ID NO: 240215 - DNA, 33 bp, Homo sapien
atttgtattctctttaggttctctggtcacggg

SEQ ID NO: 240216 - DNA, 33 bp, Homo sapien
atttgtattctctttatgttctctggtcacggg

SEQ ID NO: 240217 - DNA, 33 bp, Homo sapien
agcaagaggaagggaagaatcccgtgaccagag

SEQ ID NO: 240218 - DNA, 33 bp, Homo sapien
agcaagaggaagggaataatcccgtgaccagag

SEQ ID NO: 240219 - DNA, 33 bp, Homo sapien
atattattttgtacaacggggctgatagcaacc

SEQ ID NO: 240220 - DNA, 33 bp, Homo sapien
atattattttgtacaatggggctgatagcaacc

SEQ ID NO: 240221 - DNA, 33 bp, Homo sapien
aacttttagttgtttcacgagtaaggttcataa

SEQ ID NO: 240222 - DNA, 33 bp, Homo sapien
aacttttagttgtttcccgagtaaggttcataa

SEQ ID NO: 240223 - DNA, 33 bp, Homo sapien
ttgcatgacatgtggacggaaatttgggactga

SEQ ID NO: 240224 - DNA, 33 bp, Homo sapien
ttgcatgacatgtggatggaaatttgggactga

SEQ ID NO: 240225 - DNA, 33 bp, Homo sapien
tgtctttttccctccccaagtcataacaacaca

SEQ ID NO: 240226 - DNA, 33 bp, Homo sapien
tgtctttttccctccctaagtcataacaacaca

SEQ ID NO: 240227 - DNA, 33 bp, Homo sapien
atcaggatcaccaatgaagtaggttatttagct

SEQ ID NO: 240228 - DNA, 33 bp, Homo sapien
atcaggatcaccaatggagtaggttatttagct

SEQ ID NO: 240229 - DNA, 33 bp, Homo sapien
aaggataaaatacacaccagatgtcgaagactt

SEQ ID NO: 240230 - DNA, 33 bp, Homo sapien
aaggataaaatacacagcagatgtcgaagactt

SEQ ID NO: 240231 - DNA, 33 bp, Homo sapien
ggacctggccttcaaaaggaaaacttgataatc

SEQ ID NO: 240232 - DNA, 33 bp, Homo sapien
ggacctggccttcaaagggaaaacttgataatc

SEQ ID NO: 240233 - DNA, 33 bp, Homo sapien
aagtaaaagcatagtcacaaaagaccacatatt

SEQ ID NO: 240234 - DNA, 33 bp, Homo sapien
aagtaaaagcatagtctcaaaagaccacatatt

SEQ ID NO: 240235 - DNA, 33 bp, Homo sapien
gaccccctttggagcactctgtggattttccga

SEQ ID NO: 240236 - DNA, 33 bp, Homo sapien
gaccccctttggagcagtctgtggattttccga

SEQ ID NO: 240237 - DNA, 33 bp, Homo sapien; identical to SEQ ID NO: 240235

SEQ ID NO: 240238 - DNA, 33 bp, Homo sapien; identical to SEQ ID NO: 240236

SEQ ID NO: 240239 - DNA, 33 bp, Homo sapien
agcaaattttacattacaaggtgcagagagaaa

SEQ ID NO: 240240 - DNA, 33 bp, Homo sapien
agcaaattttacattataaggtgcagagagaaa

SEQ ID NO: 240241 - DNA, 33 bp, Homo sapien
tggaagttgctcagaaggttaaaaatagagtta

SEQ ID NO: 240242 - DNA, 33 bp, Homo sapien
tggaagttgctcagaatgttaaaaatagagtta

SEQ ID NO: 240243 - DNA, 33 bp, Homo sapien
atgagcatttttcaagacttctctagcatcatg

SEQ ID NO: 240244 - DNA, 33 bp, Homo sapien
atgagcatttttcaagccttctctagcatcatg

SEQ ID NO: 240245 - DNA, 33 bp, Homo sapien
attgggcttcttcttccctcttgctgcttttgg

SEQ ID NO: 240246 - DNA, 33 bp, Homo sapien
attgggcttcttcttctctcttgctgcttttgg

SEQ ID NO: 240247 - DNA, 33 bp, Homo sapien
taaactgaaagcgagcacatggaagaggattag

SEQ ID NO: 240248 - DNA, 33 bp, Homo sapien
taaactgaaagcgagcgcatggaagaggattag

SEQ ID NO: 240249 - DNA, 33 bp, Homo sapien
ttgtggtagtctgttacagcaatcatagaaaac

SEQ ID NO: 240250 - DNA, 33 bp, Homo sapien
ttgtggtagtctgttatagcaatcatagaaaac

SEQ ID NO: 240251 - DNA, 33 bp, Homo sapien
ttgtatgttgttcatacctcaataaagtagttt

SEQ ID NO: 240252 - DNA, 33 bp, Homo sapien
ttgtatgttgttcatatctcaataaagtagttt

SEQ ID NO: 240253 - DNA, 33 bp, Homo sapien
tacctatcccgtagtacgattgtaagatctaaa

SEQ ID NO: 240254 - DNA, 33 bp, Homo sapien
tacctatcccgtagtatgattgtaagatctaaa

SEQ ID NO: 240255 - DNA, 33 bp, Homo sapien
ctctcagggcaagctcactctcagctgcttcca

SEQ ID NO: 240256 - DNA, 33 bp, Homo sapien
ctctcagggcaagctctctctcagctgcttcca

SEQ ID NO: 240257 - DNA, 33 bp, Homo sapien
gatgaactcatagagaaaggattccagggctgc

SEQ ID NO: 240258 - DNA, 33 bp, Homo sapien
gatgaactcatagagagaggattccagggctgc

SEQ ID NO: 240259 - DNA, 33 bp, Homo sapien
accagtaggtagcagaaacttgcagccctggaa

SEQ ID NO: 240260 - DNA, 33 bp, Homo sapien
accagtaggtagcagagacttgcagccctggaa

SEQ ID NO: 240261 - DNA, 33 bp, Homo sapien
ttagctgtcatacatacgtccttatttatttat

SEQ ID NO: 240262 - DNA, 33 bp, Homo sapien
ttagctgtcatacatatgtccttatttatttat

SEQ ID NO: 240263 - DNA, 33 bp, Homo sapien
gaacatgctgctgaaaatcatgaagcctgtgtg

SEQ ID NO: 240264 - DNA, 33 bp, Homo sapien
gaacatgctgctgaaagtcatgaagcctgtgtg

SEQ ID NO: 240265 - DNA, 33 bp, Homo sapien
tattaacaaatgtgtaggttcctcaccaaattg

SEQ ID NO: 240266 - DNA, 33 bp, Homo sapien
tattaacaaatgtgtatgttcctcaccaaattg

SEQ ID NO: 240267 - DNA, 33 bp, Homo sapien
ccacgtagccgtataactcaggcacttcttttg

SEQ ID NO: 240268 - DNA, 33 bp, Homo sapien
ccacgtagccgtataattcaggcacttcttttg

SEQ ID NO: 240269 - DNA, 33 bp, Homo sapien
ccaggagtcaagctggcaaagcagaggtcatgt

SEQ ID NO: 240270 - DNA, 33 bp, Homo sapien
ccaggagtcaagctggtaaagcagaggtcatgt

SEQ ID NO: 240271 - DNA, 33 bp, Homo sapien
agtagaggcaagccagccagtctatgcagatat

SEQ ID NO: 240272 - DNA, 33 bp, Homo sapien
agtagaggcaagccagtcagtctatgcagatat

SEQ ID NO: 240273 - DNA, 33 bp, Homo sapien
gagaagaaggctcccaagtctcctaacttctcc

SEQ ID NO: 240274 - DNA, 33 bp, Homo sapien
gagaagaaggctcccacgtctcctaacttctcc

SEQ ID NO: 240275 - DNA, 33 bp, Homo sapien
ctttactctatgtccacattggaaatgcacaaa

SEQ ID NO: 240276 - DNA, 33 bp, Homo sapien
ctttactctatgtccatattggaaatgcacaaa

SEQ ID NO: 240277 - DNA, 33 bp, Homo sapien
gagtattttttgcctaccaattttgcaaagttg

SEQ ID NO: 240278 - DNA, 33 bp, Homo sapien
gagtattttttgcctatcaattttgcaaagttg

SEQ ID NO: 240279 - DNA, 33 bp, Homo sapien
acccccttatatgctcactacagattccaaaac

SEQ ID NO: 240280 - DNA, 33 bp, Homo sapien
acccccttatatgctcgctacagattccaaaac

SEQ ID NO: 240281 - DNA, 33 bp, Homo sapien
cattttaaagagtggaaaaatggtcagaaaaaa

SEQ ID NO: 240282 - DNA, 33 bp, Homo sapien
cattttaaagagtggagaaatggtcagaaaaaa

SEQ ID NO: 240283 - DNA, 33 bp, Homo sapien
tgttcctttatctccaactttatttcatacact

SEQ ID NO: 240284 - DNA, 33 bp, Homo sapien
tgttcctttatctccatctttatttcatacact

SEQ ID NO: 240285 - DNA, 33 bp, Homo sapien
aaagtctctattaatacgccattattgctttgt

SEQ ID NO: 240286 - DNA, 33 bp, Homo sapien
aaagtctctattaatatgccattattgctttgt

SEQ ID NO: 240287 - DNA, 33 bp, Homo sapien
cactcccagtcttccacggctctctgattctgg

SEQ ID NO: 240288 - DNA, 33 bp, Homo sapien
cactcccagtcttccatggctctctgattctgg

SEQ ID NO: 240289 - DNA, 33 bp, Homo sapien
gtgctgggagtagagacgtgcaccatggggtca

SEQ ID NO: 240290 - DNA, 33 bp, Homo sapien
gtgctgggagtagagatgtgcaccatggggtca

SEQ ID NO: 240291 - DNA, 33 bp, Homo sapien
aaggcatgaacggaatcaactggtcttgaggtt

SEQ ID NO: 240292 - DNA, 33 bp, Homo sapien
aaggcatgaacggaattaactggtcttgaggtt

SEQ ID NO: 240293 - DNA, 33 bp, Homo sapien
cctgacccaaacaatagatgaataacacgagca

SEQ ID NO: 240294 - DNA, 33 bp, Homo sapien
cctgacccaaacaatatatgaataacacgagca

SEQ ID NO: 240295 - DNA, 33 bp, Homo sapien
attagttgatgactcaaatttttatatctgctc

SEQ ID NO: 240296 - DNA, 33 bp, Homo sapien
attagttgatgactcagatttttatatctgctc

SEQ ID NO: 240297 - DNA, 33 bp, Homo sapien
atcatgttaattgcaaatctcatcaggttaact

SEQ ID NO: 240298 - DNA, 33 bp, Homo sapien
atcatgttaattgcaactctcatcaggttaact

SEQ ID NO: 240299 - DNA, 33 bp, Homo sapien
agagtttacagttggacattatgaactaggaac

SEQ ID NO: 240300 - DNA, 33 bp, Homo sapien
agagtttacagttggatattatgaactaggaac

SEQ ID NO: 240301 - DNA, 33 bp, Homo sapien
aatttcagaaagatgaagattagctctcttcga

SEQ ID NO: 240302 - DNA, 33 bp, Homo sapien
aatttcagaaagatgaggattagctctcttcga

SEQ ID NO: 240303 - DNA, 33 bp, Homo sapien
accaaaaaacaaaatgaatatctaagcacaagt

SEQ ID NO: 240304 - DNA, 33 bp, Homo sapien
accaaaaaacaaaatggatatctaagcacaagt

SEQ ID NO: 240305 - DNA, 33 bp, Homo sapien
gtacagatgacttaaacagtcttggaaacaaat

SEQ ID NO: 240306 - DNA, 33 bp, Homo sapien
gtacagatgacttaaatagtcttggaaacaaat

SEQ ID NO: 240307 - DNA, 33 bp, Homo sapien
ataaccttgcacaaagcccactgcaaccttaca

SEQ ID NO: 240308 - DNA, 33 bp, Homo sapien
ataaccttgcacaaaggccactgcaaccttaca

SEQ ID NO: 240309 - DNA, 33 bp, Homo sapien
gcttcagactacttaactctgctctagaagaaa

SEQ ID NO: 240310 - DNA, 33 bp, Homo sapien
gcttcagactacttaattctgctctagaagaaa

SEQ ID NO: 240311 - DNA, 33 bp, Homo sapien
ttcctgtactaccaaaggtttcaattgcatata

SEQ ID NO: 240312 - DNA, 33 bp, Homo sapien
ttcctgtactaccaaatgtttcaattgcatata

SEQ ID NO: 240313 - DNA, 33 bp, Homo sapien
aaaaaacacacaaaaacatctactgtgtcttta

SEQ ID NO: 240314 - DNA, 33 bp, Homo sapien
aaaaaacacacaaaaagatctactgtgtcttta

SEQ ID NO: 240315 - DNA, 33 bp, Homo sapien
tgttctgaatgataacacaactggagacctgaa

SEQ ID NO: 240316 - DNA, 33 bp, Homo sapien
tgttctgaatgataacgcaactggagacctgaa

SEQ ID NO: 240317 - DNA, 33 bp, Homo sapien
tgaaaactaaacagaaaaatgtcaagtgttaat

SEQ ID NO: 240318 - DNA, 33 bp, Homo sapien
tgaaaactaaacagaacaatgtcaagtgttaat

SEQ ID NO: 240319 - DNA, 33 bp, Homo sapien
agtcccaggtaccagccagtggccttagaaggg

SEQ ID NO: 240320 - DNA, 33 bp, Homo sapien
agtcccaggtaccagcgagtggccttagaaggg

SEQ ID NO: 240321 - DNA, 33 bp, Homo sapien
tttacaacccaggagcaacactgcaggatttca

SEQ ID NO: 240322 - DNA, 33 bp, Homo sapien
tttacaacccaggagcgacactgcaggatttca

SEQ ID NO: 240323 - DNA, 33 bp, Homo sapien
taccagacactgtagaaagaggattaaggctct

SEQ ID NO: 240324 - DNA, 33 bp, Homo sapien
taccagacactgtagagagaggattaaggctct

SEQ ID NO: 240325 - DNA, 33 bp, Homo sapien
tggactgtaagcaaccgaaagagagagccttaa

SEQ ID NO: 240326 - DNA, 33 bp, Homo sapien
tggactgtaagcaacctaaagagagagccttaa

SEQ ID NO: 240327 - DNA, 33 bp, Homo sapien
tcactgatacgtttacagcagatctattgagaa

SEQ ID NO: 240328 - DNA, 33 bp, Homo sapien
tcactgatacgtttacggcagatctattgagaa

SEQ ID NO: 240329 - DNA, 33 bp, Homo sapien
acattcatggctctgaacttttcacttacgatt

SEQ ID NO: 240330 - DNA, 33 bp, Homo sapien
acattcatggctctgagcttttcacttacgatt

SEQ ID NO: 240331 - DNA, 33 bp, Homo sapien
caaatcatcaacagaagaagaatcgaagaatgc

SEQ ID NO: 240332 - DNA, 33 bp, Homo sapien
caaatcatcaacagaataagaatcgaagaatgc

SEQ ID NO: 240333 - DNA, 33 bp, Homo sapien
ctgtggatatagtgcaatcggagatgatttaca

SEQ ID NO: 240334 - DNA, 33 bp, Homo sapien
ctgtggatatagtgcagtcggagatgatttaca

SEQ ID NO: 240335 - DNA, 33 bp, Homo sapien
ttattgaaggcaccataatgataaggtaggatt

SEQ ID NO: 240336 - DNA, 33 bp, Homo sapien
ttattgaaggcaccatgatgataaggtaggatt

SEQ ID NO: 240337 - DNA, 33 bp, Homo sapien
atttgcttcattgtgacatttaccctctgggcc

SEQ ID NO: 240338 - DNA, 33 bp, Homo sapien
atttgcttcattgtgatatttaccctctgggcc

SEQ ID NO: 240339 - DNA, 33 bp, Homo sapien
gtttcctcagaaatcaaatccacttctgaccct

SEQ ID NO: 240340 - DNA, 33 bp, Homo sapien
gtttcctcagaaatcatatccacttctgaccct

SEQ ID NO: 240341 - DNA, 33 bp, Homo sapien
tttgcagccaaataaacttcagtgcccagcaga

SEQ ID NO: 240342 - DNA, 33 bp, Homo sapien
tttgcagccaaataaagttcagtgcccagcaga

SEQ ID NO: 240343 - DNA, 33 bp, Homo sapien
atagcacttgattgaaaagcctgtcagaattca

SEQ ID NO: 240344 - DNA, 33 bp, Homo sapien
atagcacttgattgaagagcctgtcagaattca

SEQ ID NO: 240345 - DNA, 33 bp, Homo sapien
ctatactctagatccactcagtcatggcaaacc

SEQ ID NO: 240346 - DNA, 33 bp, Homo sapien
ctatactctagatccattcagtcatggcaaacc

SEQ ID NO: 240347 - DNA, 33 bp, Homo sapien
tgccctagaactagtaaccttgcaccatgggaa

SEQ ID NO: 240348 - DNA, 33 bp, Homo sapien
tgccctagaactagtagccttgcaccatgggaa

SEQ ID NO: 240349 - DNA, 33 bp, Homo sapien
cctaccacttttctaacgtctttgtccctactt

SEQ ID NO: 240350 - DNA, 33 bp, Homo sapien
cctaccacttttctaaggtctttgtccctactt

SEQ ID NO: 240351 - DNA, 33 bp, Homo sapien
ttgtcactgtgatgcacaaagcgattatgtcaa

SEQ ID NO: 240352 - DNA, 33 bp, Homo sapien
ttgtcactgtgatgcagaaagcgattatgtcaa

SEQ ID NO: 240353 - DNA, 33 bp, Homo sapien
gcctatgagatgagccaatcaccaattatgtta

SEQ ID NO: 240354 - DNA, 33 bp, Homo sapien
gcctatgagatgagccgatcaccaattatgtta

SEQ ID NO: 240355 - DNA, 33 bp, Homo sapien
agtaacttgactcttacgcagcctatagtcatg

SEQ ID NO: 240356 - DNA, 33 bp, Homo sapien
agtaacttgactcttatgcagcctatagtcatg

SEQ ID NO: 240357 - DNA, 33 bp, Homo sapien
tggtctccattcctttaaaaatataacccaggg

SEQ ID NO: 240358 - DNA, 33 bp, Homo sapien
tggtctccattcctttgaaaatataacccaggg

SEQ ID NO: 240359 - DNA, 33 bp, Homo sapien
ggaatggtaatgtagcaataacaaatcaacata

SEQ ID NO: 240360 - DNA, 33 bp, Homo sapien
ggaatggtaatgtagcgataacaaatcaacata

SEQ ID NO: 240361 - DNA, 33 bp, Homo sapien
attcccatttctcagaggaagaaacagaggtgc

SEQ ID NO: 240362 - DNA, 33 bp, Homo sapien
attcccatttctcagatgaagaaacagaggtgc

SEQ ID NO: 240363 - DNA, 33 bp, Homo sapien
tcacagtatcggttaaatattctgcccagaaac

SEQ ID NO: 240364 - DNA, 33 bp, Homo sapien
tcacagtatcggttaactattctgcccagaaac

SEQ ID NO: 240365 - DNA, 33 bp, Homo sapien
cacgtctgagaacacgaagtttattttgtatcc

SEQ ID NO: 240366 - DNA, 33 bp, Homo sapien
cacgtctgagaacacggagtttattttgtatcc

SEQ ID NO: 240367 - DNA, 33 bp, Homo sapien
catttaccgagcatcaaatatgtgctagataat

SEQ ID NO: 240368 - DNA, 33 bp, Homo sapien
catttaccgagcatcacatatgtgctagataat

SEQ ID NO: 240369 - DNA, 33 bp, Homo sapien
gcagctggtacgactccgacctgagcccggcag

SEQ ID NO: 240370 - DNA, 33 bp, Homo sapien
gcagctggtacgactctgacctgagcccggcag

SEQ ID NO: 240371 - DNA, 33 bp, Homo sapien
ctgaagttagggctcaagaatttgtgataagcc

SEQ ID NO: 240372 - DNA, 33 bp, Homo sapien
ctgaagttagggctcacgaatttgtgataagcc

SEQ ID NO: 240373 - DNA, 33 bp, Homo sapien
cagctttaagaagaaacgacacaatttgaactg

SEQ ID NO: 240374 - DNA, 33 bp, Homo sapien
cagctttaagaagaaatgacacaatttgaactg

SEQ ID NO: 240375 - DNA, 33 bp, Homo sapien
gggaagagaagtggacaaggtcatgaaattctc

SEQ ID NO: 240376 - DNA, 33 bp, Homo sapien
gggaagagaagtggacgaggtcatgaaattctc

SEQ ID NO: 240377 - DNA, 33 bp, Homo sapien
attgccattcttcacactctactcaaatagccc

SEQ ID NO: 240378 - DNA, 33 bp, Homo sapien
attgccattcttcacattctactcaaatagccc

SEQ ID NO: 240379 - DNA, 33 bp, Homo sapien
acgtaggtagagagtacgtaggtagagagaact

SEQ ID NO: 240380 - DNA, 33 bp, Homo sapien
acgtaggtagagagtaggtaggtagagagaact

SEQ ID NO: 240381 - DNA, 33 bp, Homo sapien
taatgtcctatgaatcagatagatcttttcaaa

SEQ ID NO: 240382 - DNA, 33 bp, Homo sapien
taatgtcctatgaatcggatagatcttttcaaa

SEQ ID NO: 240383 - DNA, 33 bp, Homo sapien
tttctttgtaaagtcaacgcatctgtggactcc

SEQ ID NO: 240384 - DNA, 33 bp, Homo sapien
tttctttgtaaagtcagcgcatctgtggactcc

SEQ ID NO: 240385 - DNA, 33 bp, Homo sapien
atatactactgcttgacctaagataacactcaa

SEQ ID NO: 240386 - DNA, 33 bp, Homo sapien
atatactactgcttgatctaagataacactcaa

SEQ ID NO: 240387 - DNA, 33 bp, Homo sapien
ccacttgcagagtgcgaccaccagtggtaggaa

SEQ ID NO: 240388 - DNA, 33 bp, Homo sapien
ccacttgcagagtgcgtccaccagtggtaggaa

SEQ ID NO: 240389 - DNA, 33 bp, Homo sapien
ttgtgatacatgtgaacgtttgacgaggtaact

SEQ ID NO: 240390 - DNA, 33 bp, Homo sapien
ttgtgatacatgtgaatgtttgacgaggtaact

SEQ ID NO: 240391 - DNA, 33 bp, Homo sapien
tcatctgaaaatcaaacgaggaagagctaagag

SEQ ID NO: 240392 - DNA, 33 bp, Homo sapien
tcatctgaaaatcaaatgaggaagagctaagag

SEQ ID NO: 240393 - DNA, 33 bp, Homo sapien
agtgcgtgatgatactaaaaagaggaagctagt

SEQ ID NO: 240394 - DNA, 33 bp, Homo sapien
agtgcgtgatgatactgaaaagaggaagctagt

SEQ ID NO: 240395 - DNA, 33 bp, Homo sapien
ggaccaatagcagccacggttggaaatgtgaat

SEQ ID NO: 240396 - DNA, 33 bp, Homo sapien
ggaccaatagcagccatggttggaaatgtgaat

SEQ ID NO: 240397 - DNA, 33 bp, Homo sapien
ccttccatgatggcacacttacactgttctatt

SEQ ID NO: 240398 - DNA, 33 bp, Homo sapien
ccttccatgatggcacgcttacactgttctatt

SEQ ID NO: 240399 - DNA, 33 bp, Homo sapien
agacacacttctctaagacaagtaggtacttca

SEQ ID NO: 240400 - DNA, 33 bp, Homo sapien
agacacacttctctaatacaagtaggtacttca

SEQ ID NO: 240401 - DNA, 33 bp, Homo sapien
taaatgtataggaaagaaacagttttagaagcc

SEQ ID NO: 240402 - DNA, 33 bp, Homo sapien
taaatgtataggaaagtaacagttttagaagcc

SEQ ID NO: 240403 - DNA, 33 bp, Homo sapien
tagtatttctaatgaactcatctaatgtattaa

SEQ ID NO: 240404 - DNA, 33 bp, Homo sapien
tagtatttctaatgaagtcatctaatgtattaa

SEQ ID NO: 240405 - DNA, 33 bp, Homo sapien
gcctcctgccatgggcactctttcttatttcat

SEQ ID NO: 240406 - DNA, 33 bp, Homo sapien
gcctcctgccatgggcgctctttcttatttcat

SEQ ID NO: 240407 - DNA, 33 bp, Homo sapien
atgtgtattttcaaagcctctcactccctccct

SEQ ID NO: 240408 - DNA, 33 bp, Homo sapien
atgtgtattttcaaaggctctcactccctccct

SEQ ID NO: 240409 - DNA, 33 bp, Homo sapien
cttgtaagaaaaatcaatctcaatttggttaag

SEQ ID NO: 240410 - DNA, 33 bp, Homo sapien
cttgtaagaaaaatcagtctcaatttggttaag

SEQ ID NO: 240411 - DNA, 33 bp, Homo sapien
atgttttctgttgttacaatgaaagtggctggg

SEQ ID NO: 240412 - DNA, 33 bp, Homo sapien
atgttttctgttgttataatgaaagtggctggg

SEQ ID NO: 240413 - DNA, 33 bp, Homo sapien
gatgaaggaatcttcaatagttatgttagagag

SEQ ID NO: 240414 - DNA, 33 bp, Homo sapien
gatgaaggaatcttcagtagttatgttagagag

SEQ ID NO: 240415 - DNA, 33 bp, Homo sapien
gagccaatcttagaagcaaacattgaccgcaga

SEQ ID NO: 240416 - DNA, 33 bp, Homo sapien
gagccaatcttagaagtaaacattgaccgcaga

SEQ ID NO: 240417 - DNA, 33 bp, Homo sapien
aagtacttataacaacggacttgatatgactct

SEQ ID NO: 240418 - DNA, 33 bp, Homo sapien
aagtacttataacaactgacttgatatgactct

SEQ ID NO: 240419 - DNA, 33 bp, Homo sapien
acgaagtagccagggacatttgtctttctatca

SEQ ID NO: 240420 - DNA, 33 bp, Homo sapien
acgaagtagccagggatatttgtctttctatca

SEQ ID NO: 240421 - DNA, 33 bp, Homo sapien
tatatatttgttcacaatggaggaagagtgatc

SEQ ID NO: 240422 - DNA, 33 bp, Homo sapien
tatatatttgttcacagtggaggaagagtgatc

SEQ ID NO: 240423 - DNA, 33 bp, Homo sapien
tatcatagtcgccatccagctttttttttcttt

SEQ ID NO: 240424 - DNA, 33 bp, Homo sapien
tatcatagtcgccatcgagctttttttttcttt

SEQ ID NO: 240425 - DNA, 33 bp, Homo sapien
gagtggccagggttgaaactattgcattaagag

SEQ ID NO: 240426 - DNA, 33 bp, Homo sapien
gagtggccagggttgagactattgcattaagag

SEQ ID NO: 240427 - DNA, 33 bp, Homo sapien
ctcaggctgcaacttacgaatttcactgtctta

SEQ ID NO: 240428 - DNA, 33 bp, Homo sapien
ctcaggctgcaacttatgaatttcactgtctta

SEQ ID NO: 240429 - DNA, 33 bp, Homo sapien
ttaccttcttcacttccccctatgtttccacct

SEQ ID NO: 240430 - DNA, 33 bp, Homo sapien
ttaccttcttcacttctccctatgtttccacct

SEQ ID NO: 240431 - DNA, 33 bp, Homo sapien
cagttaggaagaaaccaagagagtagtgtacta

SEQ ID NO: 240432 - DNA, 33 bp, Homo sapien
cagttaggaagaaaccgagagagtagtgtacta

SEQ ID NO: 240433 - DNA, 33 bp, Homo sapien
cttttacactagaaaacctcacaaagtagtcaa

SEQ ID NO: 240434 - DNA, 33 bp, Homo sapien
cttttacactagaaaatctcacaaagtagtcaa

SEQ ID NO: 240435 - DNA, 33 bp, Homo sapien
agtcaggcttctaaaacacatattgagtctttg

SEQ ID NO: 240436 - DNA, 33 bp, Homo sapien
agtcaggcttctaaaatacatattgagtctttg

SEQ ID NO: 240437 - DNA, 33 bp, Homo sapien
atctcctagcaaccagcagcggcttgggtttgc

SEQ ID NO: 240438 - DNA, 33 bp, Homo sapien
atctcctagcaaccagtagcggcttgggtttgc

SEQ ID NO: 240439 - DNA, 33 bp, Homo sapien
ccaactctcttctaccaaatcaccaatattttg

SEQ ID NO: 240440 - DNA, 33 bp, Homo sapien
ccaactctcttctaccgaatcaccaatattttg

SEQ ID NO: 240441 - DNA, 33 bp, Homo sapien
aaagtaggaagagctcagacacttgattcataa

SEQ ID NO: 240442 - DNA, 33 bp, Homo sapien
aaagtaggaagagctcggacacttgattcataa

SEQ ID NO: 240443 - DNA, 33 bp, Homo sapien
tacgaggttgttgagacagtttgtatgtaacag

SEQ ID NO: 240444 - DNA, 33 bp, Homo sapien
tacgaggttgttgagagagtttgtatgtaacag

SEQ ID NO: 240445 - DNA, 33 bp, Homo sapien
tttgttgtctataagaaagggagtaacatccag

SEQ ID NO: 240446 - DNA, 33 bp, Homo sapien
tttgttgtctataagagagggagtaacatccag

SEQ ID NO: 240447 - DNA, 33 bp, Homo sapien
atggaggttttgaatgaaagacaagtcgtcttc

SEQ ID NO: 240448 - DNA, 33 bp, Homo sapien
atggaggttttgaatggaagacaagtcgtcttc

SEQ ID NO: 240449 - DNA, 33 bp, Homo sapien
atgctagtcaggtgctcaacaggagaaagccat

SEQ ID NO: 240450 - DNA, 33 bp, Homo sapien
atgctagtcaggtgctgaacaggagaaagccat

SEQ ID NO: 240451 - DNA, 33 bp, Homo sapien
tgggattccctcctccactttttattttgtttt

SEQ ID NO: 240452 - DNA, 33 bp, Homo sapien
tgggattccctcctccgctttttattttgtttt

SEQ ID NO: 240453 - DNA, 33 bp, Homo sapien
tcacatacatacagaaaagtacacaaataaatg

SEQ ID NO: 240454 - DNA, 33 bp, Homo sapien
tcacatacatacagaagagtacacaaataaatg

SEQ ID NO: 240455 - DNA, 33 bp, Homo sapien
ctcattgtgttgctcagactttcaaacaattcc

SEQ ID NO: 240456 - DNA, 33 bp, Homo sapien
ctcattgtgttgctcatactttcaaacaattcc

SEQ ID NO: 240457 - DNA, 33 bp, Homo sapien
agaaagaatggcggcaaaagtacagtcaataag

SEQ ID NO: 240458 - DNA, 33 bp, Homo sapien
agaaagaatggcggcagaagtacagtcaataag

SEQ ID NO: 240459 - DNA, 33 bp, Homo sapien
tgggttacatattgtgccaaaaggaaatgcatc

SEQ ID NO: 240460 - DNA, 33 bp, Homo sapien
tgggttacatattgtgtcaaaaggaaatgcatc

SEQ ID NO: 240461 - DNA, 33 bp, Homo sapien
cctcaagaatctccaccaacagttaaacggcac

SEQ ID NO: 240462 - DNA, 33 bp, Homo sapien
cctcaagaatctccacgaacagttaaacggcac

SEQ ID NO: 240463 - DNA, 33 bp, Homo sapien
tacggtcctgagacaacttacctaccacctcaa

SEQ ID NO: 240464 - DNA, 33 bp, Homo sapien
tacggtcctgagacaagttacctaccacctcaa

SEQ ID NO: 240465 - DNA, 33 bp, Homo sapien
ggaaaagatacaaggaataaaaagtctcagaaa

SEQ ID NO: 240466 - DNA, 33 bp, Homo sapien
ggaaaagatacaaggattaaaaagtctcagaaa

SEQ ID NO: 240467 - DNA, 33 bp, Homo sapien
cgttttgcactccacaatgtaaactattaaaaa

SEQ ID NO: 240468 - DNA, 33 bp, Homo sapien
cgttttgcactccacattgtaaactattaaaaa

SEQ ID NO: 240469 - DNA, 33 bp, Homo sapien
aataaagctgtcgctacgtgcaaatgacataat

SEQ ID NO: 240470 - DNA, 33 bp, Homo sapien
aataaagctgtcgctatgtgcaaatgacataat

SEQ ID NO: 240471 - DNA, 33 bp, Homo sapien
atggtctacttagaaaatccacaggaatcttta

SEQ ID NO: 240472 - DNA, 33 bp, Homo sapien
atggtctacttagaaagtccacaggaatcttta

SEQ ID NO: 240473 - DNA, 33 bp, Homo sapien
cattaaaaggtgtaaacatcacagtatagatat

SEQ ID NO: 240474 - DNA, 33 bp, Homo sapien
cattaaaaggtgtaaatatcacagtatagatat

SEQ ID NO: 240475 - DNA, 33 bp, Homo sapien
taaaaaagacaatctacacactcagagaaattc

SEQ ID NO: 240476 - DNA, 33 bp, Homo sapien
taaaaaagacaatctatacactcagagaaattc

SEQ ID NO: 240477 - DNA, 33 bp, Homo sapien
tttattaaaactgttgcattttgaaaattctgt

SEQ ID NO: 240478 - DNA, 33 bp, Homo sapien
tttattaaaactgttggattttgaaaattctgt

SEQ ID NO: 240479 - DNA, 33 bp, Homo sapien
cgtacacaaagacaaacagtacatagttctgca

SEQ ID NO: 240480 - DNA, 33 bp, Homo sapien
cgtacacaaagacaaatagtacatagttctgca

SEQ ID NO: 240481 - DNA, 33 bp, Homo sapien
accaggccatttgcaacgaggtgactgactttg

SEQ ID NO: 240482 - DNA, 33 bp, Homo sapien
accaggccatttgcaatgaggtgactgactttg

SEQ ID NO: 240483 - DNA, 33 bp, Homo sapien
tttttttctgctgcaaatgtctccaaaacattg

SEQ ID NO: 240484 - DNA, 33 bp, Homo sapien
tttttttctgctgcaagtgtctccaaaacattg

SEQ ID NO: 240485 - DNA, 33 bp, Homo sapien
acacactacagacataagctgatcctcaggaca

SEQ ID NO: 240486 - DNA, 33 bp, Homo sapien
acacactacagacataggctgatcctcaggaca

SEQ ID NO: 240487 - DNA, 33 bp, Homo sapien
ttagtacagaatataaaagtccatgtggtgatt

SEQ ID NO: 240488 - DNA, 33 bp, Homo sapien
ttagtacagaatataagagtccatgtggtgatt

SEQ ID NO: 240489 - DNA, 33 bp, Homo sapien
cttggcttgaattctgcacccaccgagaacttc

SEQ ID NO: 240490 - DNA, 33 bp, Homo sapien
cttggcttgaattctgtacccaccgagaacttc

SEQ ID NO: 240491 - DNA, 33 bp, Homo sapien
ttctttgatgggcaccgagcagtttgccactta

SEQ ID NO: 240492 - DNA, 33 bp, Homo sapien
ttctttgatgggcacctagcagtttgccactta

SEQ ID NO: 240493 - DNA, 33 bp, Homo sapien
ccctcaagagattggacgagactcacccacatg

SEQ ID NO: 240494 - DNA, 33 bp, Homo sapien
ccctcaagagattggatgagactcacccacatg

SEQ ID NO: 240495 - DNA, 33 bp, Homo sapien
gaggtgtccagcccaccaattactcatcccctg

SEQ ID NO: 240496 - DNA, 33 bp, Homo sapien
gaggtgtccagcccactaattactcatcccctg

SEQ ID NO: 240497 - DNA, 33 bp, Homo sapien
agggacaaaaatatcaccttgtcaattccaaga

SEQ ID NO: 240498 - DNA, 33 bp, Homo sapien
agggacaaaaatatcatcttgtcaattccaaga

SEQ ID NO: 240499 - DNA, 33 bp, Homo sapien
attgaagtgtgaggataaagggacatagagaga

SEQ ID NO: 240500 - DNA, 33 bp, Homo sapien
attgaagtgtgaggattaagggacatagagaga

SEQ ID NO: 240501 - DNA, 33 bp, Homo sapien
tacagtgcattaagcacaattctctagacccaa

SEQ ID NO: 240502 - DNA, 33 bp, Homo sapien
tacagtgcattaagcataattctctagacccaa

SEQ ID NO: 240503 - DNA, 33 bp, Homo sapien
aatctgacacctctcccgatcctcccattggtt

SEQ ID NO: 240504 - DNA, 33 bp, Homo sapien
aatctgacacctctcctgatcctcccattggtt

SEQ ID NO: 240505 - DNA, 33 bp, Homo sapien
atagtaatgctctttaagaggtagctcaaacct

SEQ ID NO: 240506 - DNA, 33 bp, Homo sapien
atagtaatgctctttaggaggtagctcaaacct

SEQ ID NO: 240507 - DNA, 33 bp, Homo sapien
attaagtttcccatagcatgaatgtgcaagaat

SEQ ID NO: 240508 - DNA, 33 bp, Homo sapien
attaagtttcccataggatgaatgtgcaagaat

SEQ ID NO: 240509 - DNA, 33 bp, Homo sapien
ggacaagacttggaagaaatacgaagagatcaa

SEQ ID NO: 240510 - DNA, 33 bp, Homo sapien
ggacaagacttggaagcaatacgaagagatcaa

SEQ ID NO: 240511 - DNA, 33 bp, Homo sapien
ggtaagaccaggctccaagtaacttttagaagg

SEQ ID NO: 240512 - DNA, 33 bp, Homo sapien
ggtaagaccaggctccgagtaacttttagaagg

SEQ ID NO: 240513 - DNA, 33 bp, Homo sapien
tgcagatgaggcctaaatcccttttccactaat

SEQ ID NO: 240514 - DNA, 33 bp, Homo sapien
tgcagatgaggcctaattcccttttccactaat

SEQ ID NO: 240515 - DNA, 33 bp, Homo sapien
tttagaagaactgaatgatacaatggattgatc

SEQ ID NO: 240516 - DNA, 33 bp, Homo sapien
tttagaagaactgaattatacaatggattgatc

SEQ ID NO: 240517 - DNA, 33 bp, Homo sapien
tactctatacatgaccagacacagctgctgttt

SEQ ID NO: 240518 - DNA, 33 bp, Homo sapien
tactctatacatgaccggacacagctgctgttt

SEQ ID NO: 240519 - DNA, 33 bp, Homo sapien
ctaggagggaggtataagagaggttagccttta

SEQ ID NO: 240520 - DNA, 33 bp, Homo sapien
ctaggagggaggtatacgagaggttagccttta

SEQ ID NO: 240521 - DNA, 33 bp, Homo sapien
ggctggctaattcagaaactccaggaggagagc

SEQ ID NO: 240522 - DNA, 33 bp, Homo sapien
ggctggctaattcagacactccaggaggagagc

SEQ ID NO: 240523 - DNA, 33 bp, Homo sapien
taaggcttgaagataacgtttgctggtcacttc

SEQ ID NO: 240524 - DNA, 33 bp, Homo sapien
taaggcttgaagataatgtttgctggtcacttc

SEQ ID NO: 240525 - DNA, 33 bp, Homo sapien
agaggcaaagattagcgctttagaaccaggaag

SEQ ID NO: 240526 - DNA, 33 bp, Homo sapien
agaggcaaagattagctctttagaaccaggaag

SEQ ID NO: 240527 - DNA, 33 bp, Homo sapien
ctttcttgcacacagcaagttctcagttaatag

SEQ ID NO: 240528 - DNA, 33 bp, Homo sapien
ctttcttgcacacagcgagttctcagttaatag

SEQ ID NO: 240529 - DNA, 33 bp, Homo sapien
gggttgattctatagaaaatggagcccctgatt

SEQ ID NO: 240530 - DNA, 33 bp, Homo sapien
gggttgattctatagacaatggagcccctgatt

SEQ ID NO: 240531 - DNA, 33 bp, Homo sapien
cttcgtgttcagtttccaccttagcagttcacc

SEQ ID NO: 240532 - DNA, 33 bp, Homo sapien
cttcgtgttcagtttctaccttagcagttcacc

SEQ ID NO: 240533 - DNA, 33 bp, Homo sapien
acttcttttctttcaacggaagattgttctgcc

SEQ ID NO: 240534 - DNA, 33 bp, Homo sapien
acttcttttctttcaagggaagattgttctgcc

SEQ ID NO: 240535 - DNA, 33 bp, Homo sapien
ctggtcccatttactacgtcaatttcacagatt

SEQ ID NO: 240536 - DNA, 33 bp, Homo sapien
ctggtcccatttactatgtcaatttcacagatt

SEQ ID NO: 240537 - DNA, 33 bp, Homo sapien
ggcaatctgagtaatactacattcagtgcttga

SEQ ID NO: 240538 - DNA, 33 bp, Homo sapien
ggcaatctgagtaatagtacattcagtgcttga

SEQ ID NO: 240539 - DNA, 33 bp, Homo sapien
ttacagatgagacagcaaaagcttagaagtcag

SEQ ID NO: 240540 - DNA, 33 bp, Homo sapien
ttacagatgagacagcgaaagcttagaagtcag

SEQ ID NO: 240541 - DNA, 33 bp, Homo sapien
gggatgcagaaagaatcagctgagcctcagaaa

SEQ ID NO: 240542 - DNA, 33 bp, Homo sapien
gggatgcagaaagaattagctgagcctcagaaa

SEQ ID NO: 240543 - DNA, 33 bp, Homo sapien
gtgtcacagttggcccacagaacacgttttaca

SEQ ID NO: 240544 - DNA, 33 bp, Homo sapien
gtgtcacagttggcccgcagaacacgttttaca

SEQ ID NO: 240545 - DNA, 33 bp, Homo sapien
aatagcagttcttaaaggtttgtattatagatc

SEQ ID NO: 240546 - DNA, 33 bp, Homo sapien
aatagcagttcttaaatgtttgtattatagatc

SEQ ID NO: 240547 - DNA, 33 bp, Homo sapien
gaaatttctatacctcaaatggtacaatgaatg

SEQ ID NO: 240548 - DNA, 33 bp, Homo sapien
gaaatttctatacctcgaatggtacaatgaatg

SEQ ID NO: 240549 - DNA, 33 bp, Homo sapien
ggaggatgattaatgaagaagtagaagtagtag

SEQ ID NO: 240550 - DNA, 33 bp, Homo sapien
ggaggatgattaatgaggaagtagaagtagtag

SEQ ID NO: 240551 - DNA, 33 bp, Homo sapien
atgcccacatcttcaactagtatctctgtgaag

SEQ ID NO: 240552 - DNA, 33 bp, Homo sapien
atgcccacatcttcaattagtatctctgtgaag

SEQ ID NO: 240553 - DNA, 33 bp, Homo sapien
ttctacttgctatgtgcagggatatgatgaaaa

SEQ ID NO: 240554 - DNA, 33 bp, Homo sapien
ttctacttgctatgtgtagggatatgatgaaaa

SEQ ID NO: 240555 - DNA, 33 bp, Homo sapien
accaaagtgcgatctgaaaggaaatagatgcct

SEQ ID NO: 240556 - DNA, 33 bp, Homo sapien
accaaagtgcgatctgcaaggaaatagatgcct

SEQ ID NO: 240557 - DNA, 33 bp, Homo sapien
tgttttgctgtacaaaccgtggttgcttctcac

SEQ ID NO: 240558 - DNA, 33 bp, Homo sapien
tgttttgctgtacaaatcgtggttgcttctcac

SEQ ID NO: 240559 - DNA, 33 bp, Homo sapien
tttgatcacttcttaccaattctactgctgatt

SEQ ID NO: 240560 - DNA, 33 bp, Homo sapien
tttgatcacttcttactaattctactgctgatt

SEQ ID NO: 240561 - DNA, 33 bp, Homo sapien
acctgataaaccaggaaaatgtagtaggattag

SEQ ID NO: 240562 - DNA, 33 bp, Homo sapien
acctgataaaccaggagaatgtagtaggattag

SEQ ID NO: 240563 - DNA, 33 bp, Homo sapien
cactgtgcccaactcaatctttcacatattcaa

SEQ ID NO: 240564 - DNA, 33 bp, Homo sapien
cactgtgcccaactcagtctttcacatattcaa

SEQ ID NO: 240565 - DNA, 33 bp, Homo sapien
aggctcaaggaagggcaagagagtgcagagagc

SEQ ID NO: 240566 - DNA, 33 bp, Homo sapien
aggctcaaggaagggccagagagtgcagagagc

SEQ ID NO: 240567 - DNA, 33 bp, Homo sapien
gatgccaatttcactacgcaaatttcaccatgc

SEQ ID NO: 240568 - DNA, 33 bp, Homo sapien
gatgccaatttcactatgcaaatttcaccatgc

SEQ ID NO: 240569 - DNA, 33 bp, Homo sapien
gtagcatgtatctcaaaactcttttagccttca

SEQ ID NO: 240570 - DNA, 33 bp, Homo sapien
gtagcatgtatctcaacactcttttagccttca

SEQ ID NO: 240571 - DNA, 33 bp, Homo sapien
atcaaatgggtgaccaaccacactcttaataat

SEQ ID NO: 240572 - DNA, 33 bp, Homo sapien
atcaaatgggtgaccagccacactcttaataat

SEQ ID NO: 240573 - DNA, 33 bp, Homo sapien
tattctctgaagttagaaaatcaagtgaaataa

SEQ ID NO: 240574 - DNA, 33 bp, Homo sapien
tattctctgaagttagcaaatcaagtgaaataa

SEQ ID NO: 240575 - DNA, 33 bp, Homo sapien
ctctagggtgtaaatggaccgattcctttaaag

SEQ ID NO: 240576 - DNA, 33 bp, Homo sapien
ctctagggtgtaaatgtaccgattcctttaaag

SEQ ID NO: 240577 - DNA, 33 bp, Homo sapien
agggtgaggacaggaaactggggaagagcagag

SEQ ID NO: 240578 - DNA, 33 bp, Homo sapien
agggtgaggacaggaagctggggaagagcagag

SEQ ID NO: 240579 - DNA, 33 bp, Homo sapien
atacccctctataggacacttcccgtgattgga

SEQ ID NO: 240580 - DNA, 33 bp, Homo sapien
atacccctctataggatacttcccgtgattgga

SEQ ID NO: 240581 - DNA, 33 bp, Homo sapien
tgtctcattaaactttggtcagttatgtcctat

SEQ ID NO: 240582 - DNA, 33 bp, Homo sapien
tgtctcattaaacttttgtcagttatgtcctat

SEQ ID NO: 240583 - DNA, 33 bp, Homo sapien
gaaattaagtaaggaaaccactgtgaatatttt

SEQ ID NO: 240584 - DNA, 33 bp, Homo sapien
gaaattaagtaaggaagccactgtgaatatttt

SEQ ID NO: 240585 - DNA, 33 bp, Homo sapien
cctcagtgatatcataacatcagcaacaagcaa

SEQ ID NO: 240586 - DNA, 33 bp, Homo sapien
cctcagtgatatcatatcatcagcaacaagcaa

SEQ ID NO: 240587 - DNA, 33 bp, Homo sapien
ttggactggcctggaactacaccgccagttctc

SEQ ID NO: 240588 - DNA, 33 bp, Homo sapien
ttggactggcctggaagtacaccgccagttctc

SEQ ID NO: 240589 - DNA, 33 bp, Homo sapien
cccagaaacttagcaactgatatggtttgtctg

SEQ ID NO: 240590 - DNA, 33 bp, Homo sapien
cccagaaacttagcaagtgatatggtttgtctg

SEQ ID NO: 240591 - DNA, 33 bp, Homo sapien
tcaagttgggtgttgccaggaagctgtcacaat

SEQ ID NO: 240592 - DNA, 33 bp, Homo sapien
tcaagttgggtgttgctaggaagctgtcacaat

SEQ ID NO: 240593 - DNA, 33 bp, Homo sapien
atctcctactactcccatcttgctcactctgct

SEQ ID NO: 240594 - DNA, 33 bp, Homo sapien
atctcctactactcccgtcttgctcactctgct

SEQ ID NO: 240595 - DNA, 33 bp, Homo sapien
gagcttaggagtgacacggtatgacttactatt

SEQ ID NO: 240596 - DNA, 33 bp, Homo sapien
gagcttaggagtgacatggtatgacttactatt

SEQ ID NO: 240597 - DNA, 33 bp, Homo sapien
actgtctcttatctacagagaagccaaagtaat

SEQ ID NO: 240598 - DNA, 33 bp, Homo sapien
actgtctcttatctacggagaagccaaagtaat

SEQ ID NO: 240599 - DNA, 33 bp, Homo sapien
agctctaccacaaaaaatatctagaatctgatc

SEQ ID NO: 240600 - DNA, 33 bp, Homo sapien
agctctaccacaaaaattatctagaatctgatc

SEQ ID NO: 240601 - DNA, 33 bp, Homo sapien
gcctgagaactgtggacagcatttatgtgaaag

SEQ ID NO: 240602 - DNA, 33 bp, Homo sapien
gcctgagaactgtggatagcatttatgtgaaag

SEQ ID NO: 240603 - DNA, 33 bp, Homo sapien
agagatagcactagaagcctcctggaggtccac

SEQ ID NO: 240604 - DNA, 33 bp, Homo sapien
agagatagcactagaatcctcctggaggtccac

SEQ ID NO: 240605 - DNA, 33 bp, Homo sapien
tggaatgccttattaacgaatcctaatcttggt

SEQ ID NO: 240606 - DNA, 33 bp, Homo sapien
tggaatgccttattaatgaatcctaatcttggt

SEQ ID NO: 240607 - DNA, 33 bp, Homo sapien
acagaagctggaaatccaggtttatacataaaa

SEQ ID NO: 240608 - DNA, 33 bp, Homo sapien
acagaagctggaaatctaggtttatacataaaa

SEQ ID NO: 240609 - DNA, 33 bp, Homo sapien
cctgccacttttctaacactttgatgcagatta

SEQ ID NO: 240610 - DNA, 33 bp, Homo sapien
cctgccacttttctaagactttgatgcagatta

SEQ ID NO: 240611 - DNA, 33 bp, Homo sapien
taccatcagtctcagacaagaaagcagatgaag

SEQ ID NO: 240612 - DNA, 33 bp, Homo sapien
taccatcagtctcagagaagaaagcagatgaag

SEQ ID NO: 240613 - DNA, 33 bp, Homo sapien
ttaggattttttactacatgccttaatggtgtg

SEQ ID NO: 240614 - DNA, 33 bp, Homo sapien
ttaggattttttactagatgccttaatggtgtg

SEQ ID NO: 240615 - DNA, 33 bp, Homo sapien
ttaacctgatacttgccgacaattcaccagaga

SEQ ID NO: 240616 - DNA, 33 bp, Homo sapien
ttaacctgatacttgctgacaattcaccagaga

SEQ ID NO: 240617 - DNA, 33 bp, Homo sapien
aggagcatcatgtgcacggcatggaacgagcaa

SEQ ID NO: 240618 - DNA, 33 bp, Homo sapien
aggagcatcatgtgcatggcatggaacgagcaa

SEQ ID NO: 240619 - DNA, 33 bp, Homo sapien
aggagttaggactgagaagatttcaagtaagag

SEQ ID NO: 240620 - DNA, 33 bp, Homo sapien
aggagttaggactgagtagatttcaagtaagag

SEQ ID NO: 240621 - DNA, 33 bp, Homo sapien
cctgaagcaaatgcccaaaggaaattcctatca

SEQ ID NO: 240622 - DNA, 33 bp, Homo sapien
cctgaagcaaatgcccgaaggaaattcctatca

SEQ ID NO: 240623 - DNA, 33 bp, Homo sapien
catgaatgctatgttacgtatgtggccaaaatt

SEQ ID NO: 240624 - DNA, 33 bp, Homo sapien
catgaatgctatgttatgtatgtggccaaaatt

SEQ ID NO: 240625 - DNA, 33 bp, Homo sapien
cccacttgtatcgagaaccacccttgcttattt

SEQ ID NO: 240626 - DNA, 33 bp, Homo sapien
cccacttgtatcgagagccacccttgcttattt

SEQ ID NO: 240627 - DNA, 33 bp, Homo sapien
ttcctgtaagagcagcaatgcctttaaaagcag

SEQ ID NO: 240628 - DNA, 33 bp, Homo sapien
ttcctgtaagagcagcgatgcctttaaaagcag

SEQ ID NO: 240629 - DNA, 33 bp, Homo sapien
cagagctgctggtcacaatgccgaccaaacttg

SEQ ID NO: 240630 - DNA, 33 bp, Homo sapien
cagagctgctggtcacgatgccgaccaaacttg

SEQ ID NO: 240631 - DNA, 33 bp, Homo sapien
aagaactttgctcacaatacaaatgagatgcag

SEQ ID NO: 240632 - DNA, 33 bp, Homo sapien
aagaactttgctcacagtacaaatgagatgcag

SEQ ID NO: 240633 - DNA, 33 bp, Homo sapien
ctgcagcaggtataaacactagactccgtgaca

SEQ ID NO: 240634 - DNA, 33 bp, Homo sapien
ctgcagcaggtataaatactagactccgtgaca

SEQ ID NO: 240635 - DNA, 33 bp, Homo sapien
tgtgtgtttctcaaatcaacaggggcctttcat

SEQ ID NO: 240636 - DNA, 33 bp, Homo sapien
tgtgtgtttctcaaatgaacaggggcctttcat

SEQ ID NO: 240637 - DNA, 33 bp, Homo sapien
tggttaaagatgtcgacacagaatcatcctgga

SEQ ID NO: 240638 - DNA, 33 bp, Homo sapien
tggttaaagatgtcgagacagaatcatcctgga

SEQ ID NO: 240639 - DNA, 33 bp, Homo sapien
ttgttgaatgaattaccaactataaggagaact

SEQ ID NO: 240640 - DNA, 33 bp, Homo sapien
ttgttgaatgaattacgaactataaggagaact

SEQ ID NO: 240641 - DNA, 33 bp, Homo sapien
ttggatatctgtgacactcattgacagtatttt

SEQ ID NO: 240642 - DNA, 33 bp, Homo sapien
ttggatatctgtgacattcattgacagtatttt

SEQ ID NO: 240643 - DNA, 33 bp, Homo sapien
aagcccaagcgcctcccgaaatgtaaactggcc

SEQ ID NO: 240644 - DNA, 33 bp, Homo sapien
aagcccaagcgcctcctgaaatgtaaactggcc

SEQ ID NO: 240645 - DNA, 33 bp, Homo sapien
aattaattgtgaaacgcaataaagcaaagtaca

SEQ ID NO: 240646 - DNA, 33 bp, Homo sapien
aattaattgtgaaacgtaataaagcaaagtaca

SEQ ID NO: 240647 - DNA, 33 bp, Homo sapien
ggtatacgttttagaccagagaaatagaaattc

SEQ ID NO: 240648 - DNA, 33 bp, Homo sapien
ggtatacgttttagactagagaaatagaaattc

SEQ ID NO: 240649 - DNA, 33 bp, Homo sapien
tttgtgatgtcaataaggtgctttgtgtaagaa

SEQ ID NO: 240650 - DNA, 33 bp, Homo sapien
tttgtgatgtcaataatgtgctttgtgtaagaa

SEQ ID NO: 240651 - DNA, 33 bp, Homo sapien
catagtttagtgagaaagattgccagatcaaca

SEQ ID NO: 240652 - DNA, 33 bp, Homo sapien
catagtttagtgagaaggattgccagatcaaca

SEQ ID NO: 240653 - DNA, 33 bp, Homo sapien
aagagaagtctgagaaaggccagtattaatagc

SEQ ID NO: 240654 - DNA, 33 bp, Homo sapien
aagagaagtctgagaagggccagtattaatagc

SEQ ID NO: 240655 - DNA, 33 bp, Homo sapien
tcttttggtggagagagaaaaacacctcatttc

SEQ ID NO: 240656 - DNA, 33 bp, Homo sapien
tcttttggtggagagataaaaacacctcatttc

SEQ ID NO: 240657 - DNA, 33 bp, Homo sapien
gaagggacaggatttcaatcgagtacatttaga

SEQ ID NO: 240658 - DNA, 33 bp, Homo sapien
gaagggacaggatttcgatcgagtacatttaga

SEQ ID NO: 240659 - DNA, 33 bp, Homo sapien
attaatgatccttgccgaagtactattggtttc

SEQ ID NO: 240660 - DNA, 33 bp, Homo sapien
attaatgatccttgcctaagtactattggtttc

SEQ ID NO: 240661 - DNA, 33 bp, Homo sapien
aagcctcaagaagctacgaattaaccatttcag

SEQ ID NO: 240662 - DNA, 33 bp, Homo sapien
aagcctcaagaagctatgaattaaccatttcag

SEQ ID NO: 240663 - DNA, 33 bp, Homo sapien
acttccaggttctaaaatgtaatggttaaaaga

SEQ ID NO: 240664 - DNA, 33 bp, Homo sapien
acttccaggttctaaagtgtaatggttaaaaga

SEQ ID NO: 240665 - DNA, 33 bp, Homo sapien
tcttaaagttgctttccagtacccctttataga

SEQ ID NO: 240666 - DNA, 33 bp, Homo sapien
tcttaaagttgctttctagtacccctttataga

SEQ ID NO: 240667 - DNA, 33 bp, Homo sapien
atattaacatttcaaaagttcgttgagctgtac

SEQ ID NO: 240668 - DNA, 33 bp, Homo sapien
atattaacatttcaaaggttcgttgagctgtac

SEQ ID NO: 240669 - DNA, 33 bp, Homo sapien
ccagatgttaaaataaaaagagcttgttaagtg

SEQ ID NO: 240670 - DNA, 33 bp, Homo sapien
ccagatgttaaaataagaagagcttgttaagtg

SEQ ID NO: 240671 - DNA, 33 bp, Homo sapien
aacatttcggactccaactttttcaaacacagg

SEQ ID NO: 240672 - DNA, 33 bp, Homo sapien
aacatttcggactccagctttttcaaacacagg

SEQ ID NO: 240673 - DNA, 33 bp, Homo sapien
aaggtatcttgatagacggatttacattcttcc

SEQ ID NO: 240674 - DNA, 33 bp, Homo sapien
aaggtatcttgatagatggatttacattcttcc

SEQ ID NO: 240675 - DNA, 33 bp, Homo sapien
ttgggtgatttacagacgaagttttacagatag

SEQ ID NO: 240676 - DNA, 33 bp, Homo sapien
ttgggtgatttacagatgaagttttacagatag

SEQ ID NO: 240677 - DNA, 33 bp, Homo sapien
atgacattattaataactggatgggctgataga

SEQ ID NO: 240678 - DNA, 33 bp, Homo sapien
atgacattattaataagtggatgggctgataga

SEQ ID NO: 240679 - DNA, 33 bp, Homo sapien
aggctaaagaaatgcaaaacaatttatagaaac

SEQ ID NO: 240680 - DNA, 33 bp, Homo sapien
aggctaaagaaatgcagaacaatttatagaaac

SEQ ID NO: 240681 - DNA, 33 bp, Homo sapien
aaaccactgtattatccgacctgtctgtacaag

SEQ ID NO: 240682 - DNA, 33 bp, Homo sapien
aaaccactgtattatctgacctgtctgtacaag

SEQ ID NO: 240683 - DNA, 33 bp, Homo sapien
gaaggaagaacactaacgtttactcattgcctg

SEQ ID NO: 240684 - DNA, 33 bp, Homo sapien
gaaggaagaacactaatgtttactcattgcctg

SEQ ID NO: 240685 - DNA, 33 bp, Homo sapien
agcaggtaaataagaaactgtggttcaggtgct

SEQ ID NO: 240686 - DNA, 33 bp, Homo sapien
agcaggtaaataagaatctgtggttcaggtgct

SEQ ID NO: 240687 - DNA, 33 bp, Homo sapien
ttttaattgccgatcaaaacaacaaaagagagt

SEQ ID NO: 240688 - DNA, 33 bp, Homo sapien
ttttaattgccgatcagaacaacaaaagagagt

SEQ ID NO: 240689 - DNA, 33 bp, Homo sapien
gctgtaatttcttctcaagtcaagtaatggcag

SEQ ID NO: 240690 - DNA, 33 bp, Homo sapien
gctgtaatttcttctccagtcaagtaatggcag

SEQ ID NO: 240691 - DNA, 33 bp, Homo sapien
tgcatatgtcagcaagaaaatggttaaaataac

SEQ ID NO: 240692 - DNA, 33 bp, Homo sapien
tgcatatgtcagcaaggaaatggttaaaataac

SEQ ID NO: 240693 - DNA, 33 bp, Homo sapien
tttgcctataaatgcaacatggaatctttttga

SEQ ID NO: 240694 - DNA, 33 bp, Homo sapien
tttgcctataaatgcatcatggaatctttttga

SEQ ID NO: 240695 - DNA, 33 bp, Homo sapien
tgtagatctttttctgaagccttagtaagttta

SEQ ID NO: 240696 - DNA, 33 bp, Homo sapien
tgtagatctttttctggagccttagtaagttta

SEQ ID NO: 240697 - DNA, 33 bp, Homo sapien
tcataccctcaattgactacttctgacaatgca

SEQ ID NO: 240698 - DNA, 33 bp, Homo sapien
tcataccctcaattgattacttctgacaatgca

SEQ ID NO: 240699 - DNA, 33 bp, Homo sapien
aatgtgaaatgaaccacagaaaagagatgataa

SEQ ID NO: 240700 - DNA, 33 bp, Homo sapien
aatgtgaaatgaaccatagaaaagagatgataa

SEQ ID NO: 240701 - DNA, 33 bp, Homo sapien
ctataaaagcatagacacaaagagaggtcagtg

SEQ ID NO: 240702 - DNA, 33 bp, Homo sapien
ctataaaagcatagacgcaaagagaggtcagtg

SEQ ID NO: 240703 - DNA, 33 bp, Homo sapien
gacagaaatttcaataactcaagcagtgatagt

SEQ ID NO: 240704 - DNA, 33 bp, Homo sapien
gacagaaatttcaatatctcaagcagtgatagt

SEQ ID NO: 240705 - DNA, 33 bp, Homo sapien
aggttttcactgtttagcctttcaagactttgc

SEQ ID NO: 240706 - DNA, 33 bp, Homo sapien
aggttttcactgtttatcctttcaagactttgc

SEQ ID NO: 240707 - DNA, 33 bp, Homo sapien
tagagaaactgtcctacgtgaacacaagaagac

SEQ ID NO: 240708 - DNA, 33 bp, Homo sapien
tagagaaactgtcctatgtgaacacaagaagac

SEQ ID NO: 240709 - DNA, 33 bp, Homo sapien
gtggtggaaactgatgccagagtgcctgggttg

SEQ ID NO: 240710 - DNA, 33 bp, Homo sapien
gtggtggaaactgatggcagagtgcctgggttg

SEQ ID NO: 240711 - DNA, 33 bp, Homo sapien
agtgtgagagttgctacctgttatggaacaata

SEQ ID NO: 240712 - DNA, 33 bp, Homo sapien
agtgtgagagttgctagctgttatggaacaata

SEQ ID NO: 240713 - DNA, 33 bp, Homo sapien
ctctattagttcaagcaagagctgattgtttaa

SEQ ID NO: 240714 - DNA, 33 bp, Homo sapien
ctctattagttcaagcgagagctgattgtttaa

SEQ ID NO: 240715 - DNA, 33 bp, Homo sapien
cagaaaaatgaatgaccaatgtgaaaggtaaag

SEQ ID NO: 240716 - DNA, 33 bp, Homo sapien
cagaaaaatgaatgactaatgtgaaaggtaaag

SEQ ID NO: 240717 - DNA, 33 bp, Homo sapien
tgtttcttgcattgctaaaggataaataaaaat

SEQ ID NO: 240718 - DNA, 33 bp, Homo sapien
tgtttcttgcattgctgaaggataaataaaaat

SEQ ID NO: 240719 - DNA, 33 bp, Homo sapien
cagtgcatattctgcgccagacaccattttagg

SEQ ID NO: 240720 - DNA, 33 bp, Homo sapien
cagtgcatattctgcgtcagacaccattttagg

SEQ ID NO: 240721 - DNA, 33 bp, Homo sapien
caggttacacaaccaaggccgctaaatcagaca

SEQ ID NO: 240722 - DNA, 33 bp, Homo sapien
caggttacacaaccaatgccgctaaatcagaca

SEQ ID NO: 240723 - DNA, 33 bp, Homo sapien
catagttattactcagcatttaaaacaaaaaac

SEQ ID NO: 240724 - DNA, 33 bp, Homo sapien
catagttattactcaggatttaaaacaaaaaac

SEQ ID NO: 240725 - DNA, 33 bp, Homo sapien
tctttgactgctgaaaaaagagaagtcttggca

SEQ ID NO: 240726 - DNA, 33 bp, Homo sapien
tctttgactgctgaaagaagagaagtcttggca

SEQ ID NO: 240727 - DNA, 33 bp, Homo sapien
tcataaagtgcaataaaagtcaaagttcacata

SEQ ID NO: 240728 - DNA, 33 bp, Homo sapien
tcataaagtgcaataacagtcaaagttcacata

SEQ ID NO: 240729 - DNA, 33 bp, Homo sapien
ggaatcttactatgaggcattgatggaacaatt

SEQ ID NO: 240730 - DNA, 33 bp, Homo sapien
ggaatcttactatgagtcattgatggaacaatt

SEQ ID NO: 240731 - DNA, 33 bp, Homo sapien
ctgagagcagccttgaacatttgagttgattta

SEQ ID NO: 240732 - DNA, 33 bp, Homo sapien
ctgagagcagccttgaccatttgagttgattta

SEQ ID NO: 240733 - DNA, 33 bp, Homo sapien
tataatgtaaacagtacgccaacatttatctat

SEQ ID NO: 240734 - DNA, 33 bp, Homo sapien
tataatgtaaacagtatgccaacatttatctat

SEQ ID NO: 240735 - DNA, 33 bp, Homo sapien
ccagcggaagagcacaccgatagacgttggcac

SEQ ID NO: 240736 - DNA, 33 bp, Homo sapien
ccagcggaagagcacagcgatagacgttggcac

SEQ ID NO: 240737 - DNA, 33 bp, Homo sapien
ttagtgtccatacaaggcatagatgaacccata

SEQ ID NO: 240738 - DNA, 33 bp, Homo sapien
ttagtgtccatacaagtcatagatgaacccata

SEQ ID NO: 240739 - DNA, 33 bp, Homo sapien
aggcttgtcagacacaatagttgcacagctcca

SEQ ID NO: 240740 - DNA, 33 bp, Homo sapien
aggcttgtcagacacagtagttgcacagctcca

SEQ ID NO: 240741 - DNA, 33 bp, Homo sapien
gccactgcgcctagacaacagatggttattttt

SEQ ID NO: 240742 - DNA, 33 bp, Homo sapien
gccactgcgcctagacgacagatggttattttt

SEQ ID NO: 240743 - DNA, 33 bp, Homo sapien
gggaagagatcattcactgaaagctactcagtt

SEQ ID NO: 240744 - DNA, 33 bp, Homo sapien
gggaagagatcattcattgaaagctactcagtt

SEQ ID NO: 240745 - DNA, 33 bp, Homo sapien
acaaaaaaaaccgtgcacatcagtatttctagc

SEQ ID NO: 240746 - DNA, 33 bp, Homo sapien
acaaaaaaaaccgtgcgcatcagtatttctagc

SEQ ID NO: 240747 - DNA, 33 bp, Homo sapien
gtaattacagttaaaagtattgcttcctatgta

SEQ ID NO: 240748 - DNA, 33 bp, Homo sapien
gtaattacagttaaaattattgcttcctatgta

SEQ ID NO: 240749 - DNA, 33 bp, Homo sapien
acagacatttctcaaacaaccctacactgtgct

SEQ ID NO: 240750 - DNA, 33 bp, Homo sapien
acagacatttctcaaataaccctacactgtgct

SEQ ID NO: 240751 - DNA, 33 bp, Homo sapien
atggtatcagatggaacacagactgaatcttta

SEQ ID NO: 240752 - DNA, 33 bp, Homo sapien
atggtatcagatggaagacagactgaatcttta

SEQ ID NO: 240753 - DNA, 33 bp, Homo sapien
tccatacagaaccttaccctgaatattctaaca

SEQ ID NO: 240754 - DNA, 33 bp, Homo sapien
tccatacagaaccttatcctgaatattctaaca

SEQ ID NO: 240755 - DNA, 33 bp, Homo sapien
caagttgctgattactcaaaccaaaaataccat

SEQ ID NO: 240756 - DNA, 33 bp, Homo sapien
caagttgctgattacttaaaccaaaaataccat

SEQ ID NO: 240757 - DNA, 33 bp, Homo sapien
tcttgttaacgaccataaataaatcatctggcc

SEQ ID NO: 240758 - DNA, 33 bp, Homo sapien
tcttgttaacgaccatgaataaatcatctggcc

SEQ ID NO: 240759 - DNA, 33 bp, Homo sapien
catctggccaattcacaattccatttagttttt

SEQ ID NO: 240760 - DNA, 33 bp, Homo sapien
catctggccaattcactattccatttagttttt

SEQ ID NO: 240761 - DNA, 33 bp, Homo sapien
ctgttcacattgaccaccaaattgtgacttcct

SEQ ID NO: 240762 - DNA, 33 bp, Homo sapien
ctgttcacattgaccatcaaattgtgacttcct

SEQ ID NO: 240763 - DNA, 33 bp, Homo sapien
acttaaacagtagctccatacagattatcgctt

SEQ ID NO: 240764 - DNA, 33 bp, Homo sapien
acttaaacagtagctctatacagattatcgctt

SEQ ID NO: 240765 - DNA, 33 bp, Homo sapien
aatcccaggaagaatcacgaagatattttcgag

SEQ ID NO: 240766 - DNA, 33 bp, Homo sapien
aatcccaggaagaatcgcgaagatattttcgag

SEQ ID NO: 240767 - DNA, 33 bp, Homo sapien
ggctcttgcaaatgaacaggcctctgagtggtt

SEQ ID NO: 240768 - DNA, 33 bp, Homo sapien
ggctcttgcaaatgaataggcctctgagtggtt

SEQ ID NO: 240769 - DNA, 33 bp, Homo sapien
aagggccttgggataacgggcagaatttggtta

SEQ ID NO: 240770 - DNA, 33 bp, Homo sapien
aagggccttgggataatgggcagaatttggtta

SEQ ID NO: 240771 - DNA, 33 bp, Homo sapien
cattttgggccagtacaaagcagaatgactggg

SEQ ID NO: 240772 - DNA, 33 bp, Homo sapien
cattttgggccagtacgaagcagaatgactggg

SEQ ID NO: 240773 - DNA, 33 bp, Homo sapien
gtgcacatgtgtatgcaaatgcccatctgaatg

SEQ ID NO: 240774 - DNA, 33 bp, Homo sapien
gtgcacatgtgtatgcgaatgcccatctgaatg

SEQ ID NO: 240775 - DNA, 33 bp, Homo sapien
aaagaaaggagtactcaacagtaacacatagat

SEQ ID NO: 240776 - DNA, 33 bp, Homo sapien
aaagaaaggagtactcgacagtaacacatagat

SEQ ID NO: 240777 - DNA, 33 bp, Homo sapien
tgtattaacttttgccaaggtaagtgaagcaca

SEQ ID NO: 240778 - DNA, 33 bp, Homo sapien
tgtattaacttttgcccaggtaagtgaagcaca

SEQ ID NO: 240779 - DNA, 33 bp, Homo sapien
tttttaagccttgatcactattttttggttagc

SEQ ID NO: 240780 - DNA, 33 bp, Homo sapien
tttttaagccttgatcgctattttttggttagc

SEQ ID NO: 240781 - DNA, 33 bp, Homo sapien
atgagccaggaactgcagacaacaataattatt

SEQ ID NO: 240782 - DNA, 33 bp, Homo sapien
atgagccaggaactgcggacaacaataattatt

SEQ ID NO: 240783 - DNA, 33 bp, Homo sapien
ctaagaaatggtaccaatcaaatgccatcatga

SEQ ID NO: 240784 - DNA, 33 bp, Homo sapien
ctaagaaatggtaccagtcaaatgccatcatga

SEQ ID NO: 240785 - DNA, 33 bp, Homo sapien
agcattagaagaggaacgtgcatttgaggaagt

SEQ ID NO: 240786 - DNA, 33 bp, Homo sapien
agcattagaagaggaatgtgcatttgaggaagt

SEQ ID NO: 240787 - DNA, 33 bp, Homo sapien
attttgccttgagagagaaattttctggcaatt

SEQ ID NO: 240788 - DNA, 33 bp, Homo sapien
attttgccttgagagataaattttctggcaatt

SEQ ID NO: 240789 - DNA, 33 bp, Homo sapien
atcagcttaataaaacaattgcactttgcctca

SEQ ID NO: 240790 - DNA, 33 bp, Homo sapien
atcagcttaataaaacgattgcactttgcctca

SEQ ID NO: 240791 - DNA, 33 bp, Homo sapien
atgtcagaggaggtgacatttgtgtggatctta

SEQ ID NO: 240792 - DNA, 33 bp, Homo sapien
atgtcagaggaggtgatatttgtgtggatctta

SEQ ID NO: 240793 - DNA, 33 bp, Homo sapien
ttggcttccagaattccactcttggttttcctt

SEQ ID NO: 240794 - DNA, 33 bp, Homo sapien
ttggcttccagaattcgactcttggttttcctt

SEQ ID NO: 240795 - DNA, 33 bp, Homo sapien
tttttagtacatgatcaagaagactaactagac

SEQ ID NO: 240796 - DNA, 33 bp, Homo sapien
tttttagtacatgatcgagaagactaactagac

SEQ ID NO: 240797 - DNA, 33 bp, Homo sapien
acatttatctgacacaacaattcttctgttagt

SEQ ID NO: 240798 - DNA, 33 bp, Homo sapien
acatttatctgacacagcaattcttctgttagt

SEQ ID NO: 240799 - DNA, 33 bp, Homo sapien
agtttagcttttcaaaagtagtgtgagattgca

SEQ ID NO: 240800 - DNA, 33 bp, Homo sapien
agtttagcttttcaaaggtagtgtgagattgca

SEQ ID NO: 240801 - DNA, 33 bp, Homo sapien
gttgtatactttcaaaactcgcagtatgtttct

SEQ ID NO: 240802 - DNA, 33 bp, Homo sapien
gttgtatactttcaaagctcgcagtatgtttct

SEQ ID NO: 240803 - DNA, 33 bp, Homo sapien
tgctgtaaagttctgcgcatggtcacatatttc

SEQ ID NO: 240804 - DNA, 33 bp, Homo sapien
tgctgtaaagttctgctcatggtcacatatttc

SEQ ID NO: 240805 - DNA, 33 bp, Homo sapien
aaatgtatatgagcagaagaaagttttcctata

SEQ ID NO: 240806 - DNA, 33 bp, Homo sapien
aaatgtatatgagcaggagaaagttttcctata

SEQ ID NO: 240807 - DNA, 33 bp, Homo sapien
aattcaaaactcatagaaaacttactcttccaa

SEQ ID NO: 240808 - DNA, 33 bp, Homo sapien
aattcaaaactcataggaaacttactcttccaa

SEQ ID NO: 240809 - DNA, 33 bp, Homo sapien
gaggaaaacagaaatgcataccaacacgggtac

SEQ ID NO: 240810 - DNA, 33 bp, Homo sapien
gaggaaaacagaaatggataccaacacgggtac

SEQ ID NO: 240811 - DNA, 33 bp, Homo sapien
ctacataaacttggagaaaggacaagactatca

SEQ ID NO: 240812 - DNA, 33 bp, Homo sapien
ctacataaacttggaggaaggacaagactatca

SEQ ID NO: 240813 - DNA, 33 bp, Homo sapien
ttttctcttgggctacaatgttctttccctaga

SEQ ID NO: 240814 - DNA, 33 bp, Homo sapien
ttttctcttgggctacgatgttctttccctaga

SEQ ID NO: 240815 - DNA, 33 bp, Homo sapien
ctgcctatgagtaacaacctctgtccatctggg

SEQ ID NO: 240816 - DNA, 33 bp, Homo sapien
ctgcctatgagtaacagcctctgtccatctggg

SEQ ID NO: 240817 - DNA, 33 bp, Homo sapien
tcctctactggctggaccttccctcactgactg

SEQ ID NO: 240818 - DNA, 33 bp, Homo sapien
tcctctactggctggatcttccctcactgactg

SEQ ID NO: 240819 - DNA, 33 bp, Homo sapien
tgagtctaacatgcccacagtctccaggacttc

SEQ ID NO: 240820 - DNA, 33 bp, Homo sapien
tgagtctaacatgcccgcagtctccaggacttc

SEQ ID NO: 240821 - DNA, 33 bp, Homo sapien
tcacataagatgaggacggactgttgtgtttgg

SEQ ID NO: 240822 - DNA, 33 bp, Homo sapien
tcacataagatgaggagggactgttgtgtttgg

SEQ ID NO: 240823 - DNA, 33 bp, Homo sapien
taactctaccagagaaattaaacaccagtaagg

SEQ ID NO: 240824 - DNA, 33 bp, Homo sapien
taactctaccagagaacttaaacaccagtaagg

SEQ ID NO: 240825 - DNA, 33 bp, Homo sapien
tttttcaagccctgcagatctttttcctggttg

SEQ ID NO: 240826 - DNA, 33 bp, Homo sapien
tttttcaagccctgcatatctttttcctggttg

SEQ ID NO: 240827 - DNA, 33 bp, Homo sapien
cattcttttgttttcaatcctgcaaactgtgat

SEQ ID NO: 240828 - DNA, 33 bp, Homo sapien
cattcttttgttttcagtcctgcaaactgtgat

SEQ ID NO: 240829 - DNA, 33 bp, Homo sapien
ggtcccaacctaaagccgctaaattcaaagccc

SEQ ID NO: 240830 - DNA, 33 bp, Homo sapien
ggtcccaacctaaagctgctaaattcaaagccc

SEQ ID NO: 240831 - DNA, 33 bp, Homo sapien
aggtgagattcagagcaagttggtataaaccat

SEQ ID NO: 240832 - DNA, 33 bp, Homo sapien
aggtgagattcagagcgagttggtataaaccat

SEQ ID NO: 240833 - DNA, 33 bp, Homo sapien
agatcagagaagacataagagaaaaatctatat

SEQ ID NO: 240834 - DNA, 33 bp, Homo sapien
agatcagagaagacatgagagaaaaatctatat

SEQ ID NO: 240835 - DNA, 33 bp, Homo sapien
gttgctcaccacctccaacaggtaagctaaaga

SEQ ID NO: 240836 - DNA, 33 bp, Homo sapien
gttgctcaccacctccgacaggtaagctaaaga

SEQ ID NO: 240837 - DNA, 33 bp, Homo sapien
aacgttgctatgctcaatatgaaatcactcagc

SEQ ID NO: 240838 - DNA, 33 bp, Homo sapien
aacgttgctatgctcagtatgaaatcactcagc

SEQ ID NO: 240839 - DNA, 33 bp, Homo sapien
aggtttggggtaccaaatggcatctactgggaa

SEQ ID NO: 240840 - DNA, 33 bp, Homo sapien
aggtttggggtaccaagtggcatctactgggaa

SEQ ID NO: 240841 - DNA, 33 bp, Homo sapien
atacagatcctagcctcaagaattttgcaatat

SEQ ID NO: 240842 - DNA, 33 bp, Homo sapien
atacagatcctagccttaagaattttgcaatat

SEQ ID NO: 240843 - DNA, 33 bp, Homo sapien
aaagggtaccaatgatcctatatttgtgtgagt

SEQ ID NO: 240844 - DNA, 33 bp, Homo sapien
aaagggtaccaatgattctatatttgtgtgagt

SEQ ID NO: 240845 - DNA, 33 bp, Homo sapien
aggttcaggggagacacataaactctttcaggt

SEQ ID NO: 240846 - DNA, 33 bp, Homo sapien
aggttcaggggagacatataaactctttcaggt

SEQ ID NO: 240847 - DNA, 33 bp, Homo sapien
atttgtgagtaccctgcatccctttgtatgttg

SEQ ID NO: 240848 - DNA, 33 bp, Homo sapien
atttgtgagtaccctgtatccctttgtatgttg

SEQ ID NO: 240849 - DNA, 33 bp, Homo sapien
tttcaatgataaaaataacttgacaaactaaga

SEQ ID NO: 240850 - DNA, 33 bp, Homo sapien
tttcaatgataaaaatcacttgacaaactaaga

SEQ ID NO: 240851 - DNA, 33 bp, Homo sapien
ctggatataccttgaaagtggagtcaaaaagat

SEQ ID NO: 240852 - DNA, 33 bp, Homo sapien
ctggatataccttgaaggtggagtcaaaaagat

SEQ ID NO: 240853 - DNA, 33 bp, Homo sapien
tgtctcttctccatctaaactcattgccatgga

SEQ ID NO: 240854 - DNA, 33 bp, Homo sapien
tgtctcttctccatctgaactcattgccatgga

SEQ ID NO: 240855 - DNA, 33 bp, Homo sapien
gcctgaacattgaaagaatctgcattttgacaa

SEQ ID NO: 240856 - DNA, 33 bp, Homo sapien
gcctgaacattgaaaggatctgcattttgacaa

SEQ ID NO: 240857 - DNA, 33 bp, Homo sapien
tgagtattgtggattaagctcttccagctggtc

SEQ ID NO: 240858 - DNA, 33 bp, Homo sapien
tgagtattgtggattatgctcttccagctggtc

SEQ ID NO: 240859 - DNA, 33 bp, Homo sapien
gataatatagaaacacaggaatatagaaacata

SEQ ID NO: 240860 - DNA, 33 bp, Homo sapien
gataatatagaaacacgggaatatagaaacata

SEQ ID NO: 240861 - DNA, 33 bp, Homo sapien
ggtactgctcacataaagagaccttgcaagaag

SEQ ID NO: 240862 - DNA, 33 bp, Homo sapien
ggtactgctcacataatgagaccttgcaagaag

SEQ ID NO: 240863 - DNA, 33 bp, Homo sapien
cttgtttttctatgtacggttggtgtaatggtt

SEQ ID NO: 240864 - DNA, 33 bp, Homo sapien
cttgtttttctatgtatggttggtgtaatggtt

SEQ ID NO: 240865 - DNA, 33 bp, Homo sapien
acctcattcattgcttcaacttcactttgtaag

SEQ ID NO: 240866 - DNA, 33 bp, Homo sapien
acctcattcattgctttaacttcactttgtaag

SEQ ID NO: 240867 - DNA, 33 bp, Homo sapien
atttggcttaagttgcaattctgtcacttgcaa

SEQ ID NO: 240868 - DNA, 33 bp, Homo sapien
atttggcttaagttgcgattctgtcacttgcaa

SEQ ID NO: 240869 - DNA, 33 bp, Homo sapien
ttgtttccagggaacaacttgccctactcttcc

SEQ ID NO: 240870 - DNA, 33 bp, Homo sapien
ttgtttccagggaacaccttgccctactcttcc

SEQ ID NO: 240871 - DNA, 33 bp, Homo sapien
tctgcagtgggaaaaccgtgtatcagcctaact

SEQ ID NO: 240872 - DNA, 33 bp, Homo sapien
tctgcagtgggaaaacggtgtatcagcctaact

SEQ ID NO: 240873 - DNA, 33 bp, Homo sapien
taatttcctcatctcaaaaatgggagtttttac

SEQ ID NO: 240874 - DNA, 33 bp, Homo sapien
taatttcctcatctcagaaatgggagtttttac

SEQ ID NO: 240875 - DNA, 33 bp, Homo sapien
tggcacttacttgataagattgttaagaagatg

SEQ ID NO: 240876 - DNA, 33 bp, Homo sapien
tggcacttacttgataggattgttaagaagatg

SEQ ID NO: 240877 - DNA, 33 bp, Homo sapien
gtaatataaacagaaacgcagtgtaggactctg

SEQ ID NO: 240878 - DNA, 33 bp, Homo sapien
gtaatataaacagaaaggcagtgtaggactctg

SEQ ID NO: 240879 - DNA, 33 bp, Homo sapien
tgcatggccaattgtgcagcagagaaagcacgg

SEQ ID NO: 240880 - DNA, 33 bp, Homo sapien
tgcatggccaattgtgtagcagagaaagcacgg

SEQ ID NO: 240881 - DNA, 33 bp, Homo sapien
accccagagccagacaagcagacatttattcaa

SEQ ID NO: 240882 - DNA, 33 bp, Homo sapien
accccagagccagacaggcagacatttattcaa

SEQ ID NO: 240883 - DNA, 33 bp, Homo sapien
tcagtcaattcttaccaattattcatatggcag

SEQ ID NO: 240884 - DNA, 33 bp, Homo sapien
tcagtcaattcttaccgattattcatatggcag

SEQ ID NO: 240885 - DNA, 33 bp, Homo sapien
aatctgaatgaaaacagtagtgtaattccttac

SEQ ID NO: 240886 - DNA, 33 bp, Homo sapien
aatctgaatgaaaacattagtgtaattccttac

SEQ ID NO: 240887 - DNA, 33 bp, Homo sapien
atagtggtgattgttgaacaactctgtaaattt

SEQ ID NO: 240888 - DNA, 33 bp, Homo sapien
atagtggtgattgttgcacaactctgtaaattt

SEQ ID NO: 240889 - DNA, 33 bp, Homo sapien
ctgtctcagaaaaactaaaataaactctatcat

SEQ ID NO: 240890 - DNA, 33 bp, Homo sapien
ctgtctcagaaaaacttaaataaactctatcat

SEQ ID NO: 240891 - DNA, 33 bp, Homo sapien
tagcaaggtcacaggacgcaaaacaatgaatac

SEQ ID NO: 240892 - DNA, 33 bp, Homo sapien
tagcaaggtcacaggatgcaaaacaatgaatac

SEQ ID NO: 240893 - DNA, 33 bp, Homo sapien
aggcatgaggtatcacacccaactcctttctct

SEQ ID NO: 240894 - DNA, 33 bp, Homo sapien
aggcatgaggtatcacgcccaactcctttctct

SEQ ID NO: 240895 - DNA, 33 bp, Homo sapien
ggatatatcctgaaaacgtacaatgagttaaca

SEQ ID NO: 240896 - DNA, 33 bp, Homo sapien
ggatatatcctgaaaatgtacaatgagttaaca

SEQ ID NO: 240897 - DNA, 33 bp, Homo sapien
cattattttttatggcagagtagttctttatcc

SEQ ID NO: 240898 - DNA, 33 bp, Homo sapien
cattattttttatggctgagtagttctttatcc

SEQ ID NO: 240899 - DNA, 33 bp, Homo sapien
agatgaggaggtgaaaaacttgatgagtcatgc

SEQ ID NO: 240900 - DNA, 33 bp, Homo sapien
agatgaggaggtgaaagacttgatgagtcatgc

SEQ ID NO: 240901 - DNA, 33 bp, Homo sapien
atttgaaagtggaaaaggttatcctaggtcaag

SEQ ID NO: 240902 - DNA, 33 bp, Homo sapien
atttgaaagtggaaaatgttatcctaggtcaag

SEQ ID NO: 240903 - DNA, 33 bp, Homo sapien
ggatattagcggtcaaaggaggctgttagtgtt

SEQ ID NO: 240904 - DNA, 33 bp, Homo sapien
ggatattagcggtcaagggaggctgttagtgtt

SEQ ID NO: 240905 - DNA, 33 bp, Homo sapien
gctgatccagggaaaacataaggattgagggcc

SEQ ID NO: 240906 - DNA, 33 bp, Homo sapien
gctgatccagggaaaatataaggattgagggcc

SEQ ID NO: 240907 - DNA, 33 bp, Homo sapien
aatgagtaataacacaaccagtctatttcaacc

SEQ ID NO: 240908 - DNA, 33 bp, Homo sapien
aatgagtaataacacatccagtctatttcaacc

SEQ ID NO: 240909 - DNA, 33 bp, Homo sapien
tgcttcagagaccttcaacgaatctagttgacc

SEQ ID NO: 240910 - DNA, 33 bp, Homo sapien
tgcttcagagaccttcgacgaatctagttgacc

SEQ ID NO: 240911 - DNA, 33 bp, Homo sapien
aaggttctgtatgaaacgcccctgctctgtgca

SEQ ID NO: 240912 - DNA, 33 bp, Homo sapien
aaggttctgtatgaaatgcccctgctctgtgca

SEQ ID NO: 240913 - DNA, 33 bp, Homo sapien
tcttttggtcatggaacgcttagaattgatgaa

SEQ ID NO: 240914 - DNA, 33 bp, Homo sapien
tcttttggtcatggaatgcttagaattgatgaa

SEQ ID NO: 240915 - DNA, 33 bp, Homo sapien
ttagaattgatgaaaacgtaactgacagtgtgc

SEQ ID NO: 240916 - DNA, 33 bp, Homo sapien
ttagaattgatgaaaaggtaactgacagtgtgc

SEQ ID NO: 240917 - DNA, 33 bp, Homo sapien
tctcagaagtataaaacatggaaggtctcattt

SEQ ID NO: 240918 - DNA, 33 bp, Homo sapien
tctcagaagtataaaatatggaaggtctcattt

SEQ ID NO: 240919 - DNA, 33 bp, Homo sapien
aattaaactgtttctaaggtcaataaaaacatt

SEQ ID NO: 240920 - DNA, 33 bp, Homo sapien
aattaaactgtttctagggtcaataaaaacatt

SEQ ID NO: 240921 - DNA, 33 bp, Homo sapien
cagggatgtagaagctaagcagggattgcagga

SEQ ID NO: 240922 - DNA, 33 bp, Homo sapien
cagggatgtagaagctgagcagggattgcagga

SEQ ID NO: 240923 - DNA, 33 bp, Homo sapien
tgaagtctgataatatcaaggttgtctgaccta

SEQ ID NO: 240924 - DNA, 33 bp, Homo sapien
tgaagtctgataatattaaggttgtctgaccta

SEQ ID NO: 240925 - DNA, 33 bp, Homo sapien
gccggcttcaagacaaaatggtggatccctgtg

SEQ ID NO: 240926 - DNA, 33 bp, Homo sapien
gccggcttcaagacaagatggtggatccctgtg

SEQ ID NO: 240927 - DNA, 33 bp, Homo sapien
tttctttctgagaaaacggataggtcagcctct

SEQ ID NO: 240928 - DNA, 33 bp, Homo sapien
tttctttctgagaaaatggataggtcagcctct

SEQ ID NO: 240929 - DNA, 33 bp, Homo sapien
cattgtcttaaaataactggtgcttgtactatt

SEQ ID NO: 240930 - DNA, 33 bp, Homo sapien
cattgtcttaaaataattggtgcttgtactatt

SEQ ID NO: 240931 - DNA, 33 bp, Homo sapien
tatatttaacacttaaccagcattactggctgg

SEQ ID NO: 240932 - DNA, 33 bp, Homo sapien
tatatttaacacttaatcagcattactggctgg

SEQ ID NO: 240933 - DNA, 33 bp, Homo sapien
atcctcactacagttcaaacagaatgagtaaaa

SEQ ID NO: 240934 - DNA, 33 bp, Homo sapien
atcctcactacagttccaacagaatgagtaaaa

SEQ ID NO: 240935 - DNA, 33 bp, Homo sapien
tttctgctagatatcactaagtaaaaaaaaaaa

SEQ ID NO: 240936 - DNA, 33 bp, Homo sapien
tttctgctagatatcattaagtaaaaaaaaaaa

SEQ ID NO: 240937 - DNA, 33 bp, Homo sapien
accgctgttcttaaaacgtatgccctcagaata

SEQ ID NO: 240938 - DNA, 33 bp, Homo sapien
accgctgttcttaaaatgtatgccctcagaata

SEQ ID NO: 240939 - DNA, 33 bp, Homo sapien
ttccctttccataacccctcatagcctcccgag

SEQ ID NO: 240940 - DNA, 33 bp, Homo sapien
ttccctttccataacctctcatagcctcccgag

SEQ ID NO: 240941 - DNA, 33 bp, Homo sapien
tcactatttgaaccagaaattggaacaaatgtt

SEQ ID NO: 240942 - DNA, 33 bp, Homo sapien
tcactatttgaaccagcaattggaacaaatgtt

SEQ ID NO: 240943 - DNA, 33 bp, Homo sapien
tccgatacagtgctaccaaaagccattaaagtc

SEQ ID NO: 240944 - DNA, 33 bp, Homo sapien
tccgatacagtgctactaaaagccattaaagtc

SEQ ID NO: 240945 - DNA, 33 bp, Homo sapien
aaagaagctgctctagacaggcactttaaagag

SEQ ID NO: 240946 - DNA, 33 bp, Homo sapien
aaagaagctgctctaggcaggcactttaaagag

SEQ ID NO: 240947 - DNA, 33 bp, Homo sapien
tgactgcgcctacaaacagtttaaaacaatgta

SEQ ID NO: 240948 - DNA, 33 bp, Homo sapien
tgactgcgcctacaaatagtttaaaacaatgta

SEQ ID NO: 240949 - DNA, 33 bp, Homo sapien
gtacaaaaatattcacagtagctaccttgtaac

SEQ ID NO: 240950 - DNA, 33 bp, Homo sapien
gtacaaaaatattcacggtagctaccttgtaac

SEQ ID NO: 240951 - DNA, 33 bp, Homo sapien
tcaacatatccaaagcaagatttcaaagtattc

SEQ ID NO: 240952 - DNA, 33 bp, Homo sapien
tcaacatatccaaagcgagatttcaaagtattc

SEQ ID NO: 240953 - DNA, 33 bp, Homo sapien
cttagaaaaatactgcaactttccatctgctgt

SEQ ID NO: 240954 - DNA, 33 bp, Homo sapien
cttagaaaaatactgccactttccatctgctgt

SEQ ID NO: 240955 - DNA, 33 bp, Homo sapien
aatttctcaactctaacaacgaaaacaaacctg

SEQ ID NO: 240956 - DNA, 33 bp, Homo sapien
aatttctcaactctaataacgaaaacaaacctg

SEQ ID NO: 240957 - DNA, 33 bp, Homo sapien
tgcacctaacagaacaaccagatatatgaagca

SEQ ID NO: 240958 - DNA, 33 bp, Homo sapien
tgcacctaacagaacacccagatatatgaagca

SEQ ID NO: 240959 - DNA, 33 bp, Homo sapien
agctggagaggtaagacagaaaacaggaaaatg

SEQ ID NO: 240960 - DNA, 33 bp, Homo sapien
agctggagaggtaagagagaaaacaggaaaatg

SEQ ID NO: 240961 - DNA, 33 bp, Homo sapien
aaatgcattactaaaaaccctggttcatcaata

SEQ ID NO: 240962 - DNA, 33 bp, Homo sapien
aaatgcattactaaaagccctggttcatcaata

SEQ ID NO: 240963 - DNA, 33 bp, Homo sapien
aaaataattatgtctaagagtgcaaattagaaa

SEQ ID NO: 240964 - DNA, 33 bp, Homo sapien
aaaataattatgtctaggagtgcaaattagaaa

SEQ ID NO: 240965 - DNA, 33 bp, Homo sapien
ggcacataaaagatacccactaattgttggatt

SEQ ID NO: 240966 - DNA, 33 bp, Homo sapien
ggcacataaaagatactcactaattgttggatt

SEQ ID NO: 240967 - DNA, 33 bp, Homo sapien
ggagtgaaaaattggaagggagtagaataatcc

SEQ ID NO: 240968 - DNA, 33 bp, Homo sapien
ggagtgaaaaattggaggggagtagaataatcc

SEQ ID NO: 240969 - DNA, 33 bp, Homo sapien
gccaaactcatttactaacccacctttgagatt

SEQ ID NO: 240970 - DNA, 33 bp, Homo sapien
gccaaactcatttacttacccacctttgagatt

SEQ ID NO: 240971 - DNA, 33 bp, Homo sapien
cctagagaggatgaaggtagccttgttgagcta

SEQ ID NO: 240972 - DNA, 33 bp, Homo sapien
cctagagaggatgaagttagccttgttgagcta

SEQ ID NO: 240973 - DNA, 33 bp, Homo sapien
tagcttagacaactgggcagatggtgatgtcct

SEQ ID NO: 240974 - DNA, 33 bp, Homo sapien
tagcttagacaactggtcagatggtgatgtcct

SEQ ID NO: 240975 - DNA, 33 bp, Homo sapien
ataaaacaaaacaaaacgagcgcagcagtggca

SEQ ID NO: 240976 - DNA, 33 bp, Homo sapien
ataaaacaaaacaaaatgagcgcagcagtggca

SEQ ID NO: 240977 - DNA, 33 bp, Homo sapien
cattgtgctgtgaaaagcccaagccacatagag

SEQ ID NO: 240978 - DNA, 33 bp, Homo sapien
cattgtgctgtgaaaatcccaagccacatagag

SEQ ID NO: 240979 - DNA, 33 bp, Homo sapien
gaatgaatctaggatacgcttaacctaaggaat

SEQ ID NO: 240980 - DNA, 33 bp, Homo sapien
gaatgaatctaggataggcttaacctaaggaat

SEQ ID NO: 240981 - DNA, 33 bp, Homo sapien
ttttgtctgcacactcaagtcatttttttccag

SEQ ID NO: 240982 - DNA, 33 bp, Homo sapien
ttttgtctgcacactcgagtcatttttttccag

SEQ ID NO: 240983 - DNA, 33 bp, Homo sapien
atataaccagaactgagaattttcttttgggag

SEQ ID NO: 240984 - DNA, 33 bp, Homo sapien
atataaccagaactgataattttcttttgggag

SEQ ID NO: 240985 - DNA, 33 bp, Homo sapien
gtgaagacacctccaaatgatatgtagctgctg

SEQ ID NO: 240986 - DNA, 33 bp, Homo sapien
gtgaagacacctccaactgatatgtagctgctg

SEQ ID NO: 240987 - DNA, 33 bp, Homo sapien
aataaggcctagggtccacctactttgaatctg

SEQ ID NO: 240988 - DNA, 33 bp, Homo sapien
aataaggcctagggtctacctactttgaatctg

SEQ ID NO: 240989 - DNA, 33 bp, Homo sapien
ggctagaagttcataacgaagggccattttcct

SEQ ID NO: 240990 - DNA, 33 bp, Homo sapien
ggctagaagttcataatgaagggccattttcct

SEQ ID NO: 240991 - DNA, 33 bp, Homo sapien
actgcgcctggtctgcaatttccactttagatc

SEQ ID NO: 240992 - DNA, 33 bp, Homo sapien
actgcgcctggtctgcgatttccactttagatc

SEQ ID NO: 240993 - DNA, 33 bp, Homo sapien
aaagtaggcaagaaaacgagttgtagataatat

SEQ ID NO: 240994 - DNA, 33 bp, Homo sapien
aaagtaggcaagaaaaggagttgtagataatat

SEQ ID NO: 240995 - DNA, 33 bp, Homo sapien
tcaactggatccaccaaagaacattatacagtc

SEQ ID NO: 240996 - DNA, 33 bp, Homo sapien
tcaactggatccaccacagaacattatacagtc

SEQ ID NO: 240997 - DNA, 33 bp, Homo sapien
ccttatggggcttagaatccactgtgttctggg

SEQ ID NO: 240998 - DNA, 33 bp, Homo sapien
ccttatggggcttagagtccactgtgttctggg

SEQ ID NO: 240999 - DNA, 33 bp, Homo sapien
aatcttagcaaaatccagagtttcctagccttt

SEQ ID NO: 241000 - DNA, 33 bp, Homo sapien
aatcttagcaaaatccggagtttcctagccttt

SEQ ID NO: 241001 - DNA, 33 bp, Homo sapien
atggtcaatttaggaaatgagttgacatctact

SEQ ID NO: 241002 - DNA, 33 bp, Homo sapien
atggtcaatttaggaagtgagttgacatctact

SEQ ID NO: 241003 - DNA, 33 bp, Homo sapien
tcacctcctcattttacagttaaaaatactgag

SEQ ID NO: 241004 - DNA, 33 bp, Homo sapien
tcacctcctcattttagagttaaaaatactgag

SEQ ID NO: 241005 - DNA, 33 bp, Homo sapien
tggctgtcttatttacaggacaaggagaaataa

SEQ ID NO: 241006 - DNA, 33 bp, Homo sapien
tggctgtcttatttactggacaaggagaaataa

SEQ ID NO: 241007 - DNA, 33 bp, Homo sapien
gtacaaataaggttaacaggaaaatcaagttta

SEQ ID NO: 241008 - DNA, 33 bp, Homo sapien
gtacaaataaggttaataggaaaatcaagttta

SEQ ID NO: 241009 - DNA, 33 bp, Homo sapien
ctaagaaagggagagcaataagttctgtttgca

SEQ ID NO: 241010 - DNA, 33 bp, Homo sapien
ctaagaaagggagagcgataagttctgtttgca

SEQ ID NO: 241011 - DNA, 33 bp, Homo sapien
gaattaacactggaagaatataagcttggcata

SEQ ID NO: 241012 - DNA, 33 bp, Homo sapien
gaattaacactggaaggatataagcttggcata

SEQ ID NO: 241013 - DNA, 33 bp, Homo sapien
aatcctgccaaaaaaaacaattgtgagcatgtc

SEQ ID NO: 241014 - DNA, 33 bp, Homo sapien
aatcctgccaaaaaaaccaattgtgagcatgtc

SEQ ID NO: 241015 - DNA, 33 bp, Homo sapien
aggcatacttgggaaacgtttagaaaatggagc

SEQ ID NO: 241016 - DNA, 33 bp, Homo sapien
aggcatacttgggaaatgtttagaaaatggagc

SEQ ID NO: 241017 - DNA, 33 bp, Homo sapien
tccatttatgatgccactatcattcgtctgatc

SEQ ID NO: 241018 - DNA, 33 bp, Homo sapien
tccatttatgatgccattatcattcgtctgatc

SEQ ID NO: 241019 - DNA, 33 bp, Homo sapien
agaggggtggtgagaccgaaagacaaaagcagc

SEQ ID NO: 241020 - DNA, 33 bp, Homo sapien
agaggggtggtgagacggaaagacaaaagcagc

SEQ ID NO: 241021 - DNA, 33 bp, Homo sapien
tttattgagccatttggcaaacaggtattgaac

SEQ ID NO: 241022 - DNA, 33 bp, Homo sapien
tttattgagccatttgtcaaacaggtattgaac

SEQ ID NO: 241023 - DNA, 33 bp, Homo sapien
cttggtactgtagttcacaaatagttacatagt

SEQ ID NO: 241024 - DNA, 33 bp, Homo sapien
cttggtactgtagttcccaaatagttacatagt

SEQ ID NO: 241025 - DNA, 33 bp, Homo sapien
tattagattttaataacggacaacatggcagga

SEQ ID NO: 241026 - DNA, 33 bp, Homo sapien
tattagattttaataatggacaacatggcagga

SEQ ID NO: 241027 - DNA, 33 bp, Homo sapien
ctagatttagcaaacaactttcttcctgccatg

SEQ ID NO: 241028 - DNA, 33 bp, Homo sapien
ctagatttagcaaacatctttcttcctgccatg

SEQ ID NO: 241029 - DNA, 33 bp, Homo sapien
tcactctcacatttcaataagtcttgtagaagt

SEQ ID NO: 241030 - DNA, 33 bp, Homo sapien
tcactctcacatttcactaagtcttgtagaagt

SEQ ID NO: 241031 - DNA, 33 bp, Homo sapien
atgcttcttatttctgcatgcttttaaacataa

SEQ ID NO: 241032 - DNA, 33 bp, Homo sapien
atgcttcttatttctgtatgcttttaaacataa

SEQ ID NO: 241033 - DNA, 33 bp, Homo sapien
aaggtaaaaatcataaatagtctatcatgctca

SEQ ID NO: 241034 - DNA, 33 bp, Homo sapien
aaggtaaaaatcataagtagtctatcatgctca

SEQ ID NO: 241035 - DNA, 33 bp, Homo sapien
attaacattaagcaacaaacatctgaattggct

SEQ ID NO: 241036 - DNA, 33 bp, Homo sapien
attaacattaagcaacgaacatctgaattggct

SEQ ID NO: 241037 - DNA, 33 bp, Homo sapien
tgggggtattttaggacgtactgttcaaacctg

SEQ ID NO: 241038 - DNA, 33 bp, Homo sapien
tgggggtattttaggatgtactgttcaaacctg

SEQ ID NO: 241039 - DNA, 33 bp, Homo sapien
caagggagtctgatccagagccaattgcctttt

SEQ ID NO: 241040 - DNA, 33 bp, Homo sapien
caagggagtctgatccggagccaattgcctttt

SEQ ID NO: 241041 - DNA, 33 bp, Homo sapien
tgtgtgattagttccacagaggaaaaacagaag

SEQ ID NO: 241042 - DNA, 33 bp, Homo sapien
tgtgtgattagttccatagaggaaaaacagaag

SEQ ID NO: 241043 - DNA, 33 bp, Homo sapien
ctgcacctgtgagagccgaacaaactgtagaca

SEQ ID NO: 241044 - DNA, 33 bp, Homo sapien
ctgcacctgtgagagctgaacaaactgtagaca

SEQ ID NO: 241045 - DNA, 33 bp, Homo sapien
gcaggtgaaggtagaacgatgggatacttttgt

SEQ ID NO: 241046 - DNA, 33 bp, Homo sapien
gcaggtgaaggtagaatgatgggatacttttgt

SEQ ID NO: 241047 - DNA, 33 bp, Homo sapien
gtttgaccaaacaaccaagcaccataatctagc

SEQ ID NO: 241048 - DNA, 33 bp, Homo sapien
gtttgaccaaacaaccgagcaccataatctagc

SEQ ID NO: 241049 - DNA, 33 bp, Homo sapien
aagcaatgaaagcaaacgttttcaaaatactgc

SEQ ID NO: 241050 - DNA, 33 bp, Homo sapien
aagcaatgaaagcaaatgttttcaaaatactgc

SEQ ID NO: 241051 - DNA, 33 bp, Homo sapien
atagtacggagaggaacgagtggtcaatatgct

SEQ ID NO: 241052 - DNA, 33 bp, Homo sapien
atagtacggagaggaatgagtggtcaatatgct

SEQ ID NO: 241053 - DNA, 33 bp, Homo sapien
caatgcagttcaagtacaagagggttcggtgca

SEQ ID NO: 241054 - DNA, 33 bp, Homo sapien
caatgcagttcaagtataagagggttcggtgca

SEQ ID NO: 241055 - DNA, 33 bp, Homo sapien
attgacatattctcaaacttatgtatagtgctg

SEQ ID NO: 241056 - DNA, 33 bp, Homo sapien
attgacatattctcaatcttatgtatagtgctg

SEQ ID NO: 241057 - DNA, 33 bp, Homo sapien
ttctagtctttactcacattggaaaaacacact

SEQ ID NO: 241058 - DNA, 33 bp, Homo sapien
ttctagtctttactcatattggaaaaacacact

SEQ ID NO: 241059 - DNA, 33 bp, Homo sapien
tagccattgcataaaactgaggcaaacttataa

SEQ ID NO: 241060 - DNA, 33 bp, Homo sapien
tagccattgcataaaattgaggcaaacttataa

SEQ ID NO: 241061 - DNA, 33 bp, Homo sapien
tatgaattaagcttatcagggagttgtattaac

SEQ ID NO: 241062 - DNA, 33 bp, Homo sapien
tatgaattaagcttattagggagttgtattaac

SEQ ID NO: 241063 - DNA, 33 bp, Homo sapien
cctgatgcgaaaatgccgagtggagagaaaaga

SEQ ID NO: 241064 - DNA, 33 bp, Homo sapien
cctgatgcgaaaatgctgagtggagagaaaaga

SEQ ID NO: 241065 - DNA, 33 bp, Homo sapien
gagtaataagcacctacgttggggaaagctatg

SEQ ID NO: 241066 - DNA, 33 bp, Homo sapien
gagtaataagcacctatgttggggaaagctatg

SEQ ID NO: 241067 - DNA, 33 bp, Homo sapien
tattttgcgatacaaacttaatcacttaggtgt

SEQ ID NO: 241068 - DNA, 33 bp, Homo sapien
tattttgcgatacaaatttaatcacttaggtgt

SEQ ID NO: 241069 - DNA, 33 bp, Homo sapien
actgaaaatacctatacctccacagcacaaaca

SEQ ID NO: 241070 - DNA, 33 bp, Homo sapien
actgaaaatacctatatctccacagcacaaaca

SEQ ID NO: 241071 - DNA, 33 bp, Homo sapien
taagttgattctagtacgctaaggagctgtggt

SEQ ID NO: 241072 - DNA, 33 bp, Homo sapien
taagttgattctagtatgctaaggagctgtggt

SEQ ID NO: 241073 - DNA, 33 bp, Homo sapien
ttgcttatatcatttcaccatgctcatctatgt

SEQ ID NO: 241074 - DNA, 33 bp, Homo sapien
ttgcttatatcatttcgccatgctcatctatgt

SEQ ID NO: 241075 - DNA, 33 bp, Homo sapien
gtctgtgttggaagaagagcttaagatgctcat

SEQ ID NO: 241076 - DNA, 33 bp, Homo sapien
gtctgtgttggaagaatagcttaagatgctcat

SEQ ID NO: 241077 - DNA, 33 bp, Homo sapien
aagggagaagaaatcaaaagaacttatatttca

SEQ ID NO: 241078 - DNA, 33 bp, Homo sapien
aagggagaagaaatcagaagaacttatatttca

SEQ ID NO: 241079 - DNA, 33 bp, Homo sapien
aaaacaattctgtgtaaggtggacggattgatt

SEQ ID NO: 241080 - DNA, 33 bp, Homo sapien
aaaacaattctgtgtagggtggacggattgatt

SEQ ID NO: 241081 - DNA, 33 bp, Homo sapien
gattactttactgcaacgattactattacactg

SEQ ID NO: 241082 - DNA, 33 bp, Homo sapien
gattactttactgcaatgattactattacactg

SEQ ID NO: 241083 - DNA, 33 bp, Homo sapien
aaatatctgtggaacccctgttgaaccattcta

SEQ ID NO: 241084 - DNA, 33 bp, Homo sapien
aaatatctgtggaacctctgttgaaccattcta

SEQ ID NO: 241085 - DNA, 33 bp, Homo sapien
tgtcattttaatagtcaccaaggaagaaaaaat

SEQ ID NO: 241086 - DNA, 33 bp, Homo sapien
tgtcattttaatagtcgccaaggaagaaaaaat

SEQ ID NO: 241087 - DNA, 33 bp, Homo sapien
gtggtttgattctggacgtattttcaatgtaga

SEQ ID NO: 241088 - DNA, 33 bp, Homo sapien
gtggtttgattctggatgtattttcaatgtaga

SEQ ID NO: 241089 - DNA, 33 bp, Homo sapien
tatagctctcaacctcaaaataatcaggaagga

SEQ ID NO: 241090 - DNA, 33 bp, Homo sapien
tatagctctcaacctcgaaataatcaggaagga

SEQ ID NO: 241091 - DNA, 33 bp, Homo sapien
gttgaattttatcgaaatgagttacattattaa

SEQ ID NO: 241092 - DNA, 33 bp, Homo sapien
gttgaattttatcgaattgagttacattattaa

SEQ ID NO: 241093 - DNA, 33 bp, Homo sapien
cacatgcaaatagcaaacacttatccagggccc

SEQ ID NO: 241094 - DNA, 33 bp, Homo sapien
cacatgcaaatagcaagcacttatccagggccc

SEQ ID NO: 241095 - DNA, 33 bp, Homo sapien
tatgtggatacctcaaatcactaacagatcatt

SEQ ID NO: 241096 - DNA, 33 bp, Homo sapien
tatgtggatacctcaattcactaacagatcatt

SEQ ID NO: 241097 - DNA, 33 bp, Homo sapien
tagcttaaatgtgttacaaaattcaatgaacaa

SEQ ID NO: 241098 - DNA, 33 bp, Homo sapien
tagcttaaatgtgttataaaattcaatgaacaa

SEQ ID NO: 241099 - DNA, 33 bp, Homo sapien
ttcaatagccaagttcaacttctagtcattttt

SEQ ID NO: 241100 - DNA, 33 bp, Homo sapien
ttcaatagccaagttcgacttctagtcattttt

SEQ ID NO: 241101 - DNA, 33 bp, Homo sapien
acatctttggcttcaccattgtctcatctcctc

SEQ ID NO: 241102 - DNA, 33 bp, Homo sapien
acatctttggcttcactattgtctcatctcctc

SEQ ID NO: 241103 - DNA, 33 bp, Homo sapien
cttaggcatcagcttaaggtctatgacagagat

SEQ ID NO: 241104 - DNA, 33 bp, Homo sapien
cttaggcatcagcttagggtctatgacagagat

SEQ ID NO: 241105 - DNA, 33 bp, Homo sapien
attgatggctgcatacaacaccagggcaaaata

SEQ ID NO: 241106 - DNA, 33 bp, Homo sapien
attgatggctgcatacgacaccagggcaaaata

SEQ ID NO: 241107 - DNA, 33 bp, Homo sapien
catctttgtatgcgcacgttgttcctagttgat

SEQ ID NO: 241108 - DNA, 33 bp, Homo sapien
catctttgtatgcgcaggttgttcctagttgat

SEQ ID NO: 241109 - DNA, 33 bp, Homo sapien
tgtgaatgaacaaaaaaagtatcacctaatgat

SEQ ID NO: 241110 - DNA, 33 bp, Homo sapien
tgtgaatgaacaaaaagagtatcacctaatgat

SEQ ID NO: 241111 - DNA, 33 bp, Homo sapien
atctcatggtggtctcaatatgcatctctctag

SEQ ID NO: 241112 - DNA, 33 bp, Homo sapien
atctcatggtggtctcgatatgcatctctctag

SEQ ID NO: 241113 - DNA, 33 bp, Homo sapien
tgtatcagagagcctcaactaagaatttaggag

SEQ ID NO: 241114 - DNA, 33 bp, Homo sapien
tgtatcagagagcctcgactaagaatttaggag

SEQ ID NO: 241115 - DNA, 33 bp, Homo sapien
tcaagtcatggttcaaatgcttcctcctccatg

SEQ ID NO: 241116 - DNA, 33 bp, Homo sapien
tcaagtcatggttcaattgcttcctcctccatg

SEQ ID NO: 241117 - DNA, 33 bp, Homo sapien
aactgaagagtagggccgaattattagaagtgt

SEQ ID NO: 241118 - DNA, 33 bp, Homo sapien
aactgaagagtagggctgaattattagaagtgt

SEQ ID NO: 241119 - DNA, 33 bp, Homo sapien
attgttttcaaccatccgaaccataaattatac

SEQ ID NO: 241120 - DNA, 33 bp, Homo sapien
attgttttcaaccatctgaaccataaattatac

SEQ ID NO: 241121 - DNA, 33 bp, Homo sapien
ccctgccatgtatatgaaagtgttataataaaa

SEQ ID NO: 241122 - DNA, 33 bp, Homo sapien
ccctgccatgtatatggaagtgttataataaaa

SEQ ID NO: 241123 - DNA, 33 bp, Homo sapien
tttttaggtcctagccactaactgcctccacat

SEQ ID NO: 241124 - DNA, 33 bp, Homo sapien
tttttaggtcctagcccctaactgcctccacat

SEQ ID NO: 241125 - DNA, 33 bp, Homo sapien
ggtaagggacttctgaggagggaacatttggcc

SEQ ID NO: 241126 - DNA, 33 bp, Homo sapien
ggtaagggacttctgatgagggaacatttggcc

SEQ ID NO: 241127 - DNA, 33 bp, Homo sapien
catatttcaataggttaaaacagtcgaccagat

SEQ ID NO: 241128 - DNA, 33 bp, Homo sapien
catatttcaataggttgaaacagtcgaccagat

SEQ ID NO: 241129 - DNA, 33 bp, Homo sapien
tgccactgggaaagaaatgagaaaaagctaacc

SEQ ID NO: 241130 - DNA, 33 bp, Homo sapien
tgccactgggaaagaagtgagaaaaagctaacc

SEQ ID NO: 241131 - DNA, 33 bp, Homo sapien
gtattattgtcagaaaagctctgtcatacatat

SEQ ID NO: 241132 - DNA, 33 bp, Homo sapien
gtattattgtcagaaaggctctgtcatacatat

SEQ ID NO: 241133 - DNA, 33 bp, Homo sapien
tcctcatctgtaagaacggctgtttgaggatta

SEQ ID NO: 241134 - DNA, 33 bp, Homo sapien
tcctcatctgtaagaatggctgtttgaggatta

SEQ ID NO: 241135 - DNA, 33 bp, Homo sapien
ttttgcccaacatctacagagactggttactgt

SEQ ID NO: 241136 - DNA, 33 bp, Homo sapien
ttttgcccaacatctagagagactggttactgt

SEQ ID NO: 241137 - DNA, 33 bp, Homo sapien
ggcttgagtgacaaaaatctaggctaggctggt

SEQ ID NO: 241138 - DNA, 33 bp, Homo sapien
ggcttgagtgacaaaagtctaggctaggctggt

SEQ ID NO: 241139 - DNA, 33 bp, Homo sapien
tccctggccctcagaaataggcctcagaccaag

SEQ ID NO: 241140 - DNA, 33 bp, Homo sapien
tccctggccctcagaagtaggcctcagaccaag

SEQ ID NO: 241141 - DNA, 33 bp, Homo sapien
gatttgaatagcaaaacgtacacagcaggattt

SEQ ID NO: 241142 - DNA, 33 bp, Homo sapien
gatttgaatagcaaaaggtacacagcaggattt

SEQ ID NO: 241143 - DNA, 33 bp, Homo sapien
agcacagcagtcaggtcaattaaggaaggcttc

SEQ ID NO: 241144 - DNA, 33 bp, Homo sapien
agcacagcagtcaggttaattaaggaaggcttc

SEQ ID NO: 241145 - DNA, 33 bp, Homo sapien
tgtcacactgctctaccactgaagcgcaaaagc

SEQ ID NO: 241146 - DNA, 33 bp, Homo sapien
tgtcacactgctctactactgaagcgcaaaagc

SEQ ID NO: 241147 - DNA, 33 bp, Homo sapien
atggatgcagctaaaaagctagaaataaagcca

SEQ ID NO: 241148 - DNA, 33 bp, Homo sapien
atggatgcagctaaaatgctagaaataaagcca

SEQ ID NO: 241149 - DNA, 33 bp, Homo sapien
ctcttcccttgataaactgtagcttgtctttcc

SEQ ID NO: 241150 - DNA, 33 bp, Homo sapien
ctcttcccttgataaattgtagcttgtctttcc

SEQ ID NO: 241151 - DNA, 33 bp, Homo sapien
tcatgtcaacagtcaacctttaaagtcatggaa

SEQ ID NO: 241152 - DNA, 33 bp, Homo sapien
tcatgtcaacagtcaagctttaaagtcatggaa

SEQ ID NO: 241153 - DNA, 33 bp, Homo sapien
tagtaaaaaagtgaacagatttgggatttcatg

SEQ ID NO: 241154 - DNA, 33 bp, Homo sapien
tagtaaaaaagtgaacggatttgggatttcatg

SEQ ID NO: 241155 - DNA, 33 bp, Homo sapien
agaattaagaagttccagctcttggcttatgtt

SEQ ID NO: 241156 - DNA, 33 bp, Homo sapien
agaattaagaagttccggctcttggcttatgtt

SEQ ID NO: 241157 - DNA, 33 bp, Homo sapien
tgttaagttgacatcaaatgaagaattaagaag

SEQ ID NO: 241158 - DNA, 33 bp, Homo sapien
tgttaagttgacatcagatgaagaattaagaag

SEQ ID NO: 241159 - DNA, 33 bp, Homo sapien
acttaacaatacattaaacttgcagatatcgct

SEQ ID NO: 241160 - DNA, 33 bp, Homo sapien
acttaacaatacattagacttgcagatatcgct

SEQ ID NO: 241161 - DNA, 33 bp, Homo sapien
aattaaaatggttgcaatgaaaagaatgccagc

SEQ ID NO: 241162 - DNA, 33 bp, Homo sapien
aattaaaatggttgcagtgaaaagaatgccagc

SEQ ID NO: 241163 - DNA, 33 bp, Homo sapien
gaaatctatagaagtaccattgaaacaatattt

SEQ ID NO: 241164 - DNA, 33 bp, Homo sapien
gaaatctatagaagtatcattgaaacaatattt

SEQ ID NO: 241165 - DNA, 33 bp, Homo sapien
tagaccaggagtaaaacatgatgacaatgaaat

SEQ ID NO: 241166 - DNA, 33 bp, Homo sapien
tagaccaggagtaaaatatgatgacaatgaaat

SEQ ID NO: 241167 - DNA, 33 bp, Homo sapien
cgaggctttgcacaaaatatacaataaatattt

SEQ ID NO: 241168 - DNA, 33 bp, Homo sapien
cgaggctttgcacaaagtatacaataaatattt

SEQ ID NO: 241169 - DNA, 33 bp, Homo sapien
tgacagagcaaaaaacactaagctcagtttcca

SEQ ID NO: 241170 - DNA, 33 bp, Homo sapien
tgacagagcaaaaaacgctaagctcagtttcca

SEQ ID NO: 241171 - DNA, 33 bp, Homo sapien
tgtgactcaaagtccccactctaattcacattg

SEQ ID NO: 241172 - DNA, 33 bp, Homo sapien
tgtgactcaaagtccctactctaattcacattg

SEQ ID NO: 241173 - DNA, 33 bp, Homo sapien
ctttgggctggccagacagtaacaatgtggttt

SEQ ID NO: 241174 - DNA, 33 bp, Homo sapien
ctttgggctggccagatagtaacaatgtggttt

SEQ ID NO: 241175 - DNA, 33 bp, Homo sapien
atgtgtagtatgcaacaaagaatttaaccttgc

SEQ ID NO: 241176 - DNA, 33 bp, Homo sapien
atgtgtagtatgcaacgaagaatttaaccttgc

SEQ ID NO: 241177 - DNA, 33 bp, Homo sapien
atgctgcctcaggagcacaaagatgtatatgag

SEQ ID NO: 241178 - DNA, 33 bp, Homo sapien
atgctgcctcaggagcccaaagatgtatatgag

SEQ ID NO: 241179 - DNA, 33 bp, Homo sapien
ttttgttaatcagataagacgagcagtatgtgg

SEQ ID NO: 241180 - DNA, 33 bp, Homo sapien
ttttgttaatcagataggacgagcagtatgtgg

SEQ ID NO: 241181 - DNA, 33 bp, Homo sapien
gcaatggagaaagacaatgaaggtctaaggatg

SEQ ID NO: 241182 - DNA, 33 bp, Homo sapien
gcaatggagaaagacagtgaaggtctaaggatg

SEQ ID NO: 241183 - DNA, 33 bp, Homo sapien
aatcagaggtaagatgaaaagttatgtagaaga

SEQ ID NO: 241184 - DNA, 33 bp, Homo sapien
aatcagaggtaagatggaaagttatgtagaaga

SEQ ID NO: 241185 - DNA, 33 bp, Homo sapien
agttccagatagtaaaaattttcaactttgcag

SEQ ID NO: 241186 - DNA, 33 bp, Homo sapien
agttccagatagtaaacattttcaactttgcag

SEQ ID NO: 241187 - DNA, 33 bp, Homo sapien
cattgtagtaggggaaaagaggtatatgggctg

SEQ ID NO: 241188 - DNA, 33 bp, Homo sapien
cattgtagtaggggaagagaggtatatgggctg

SEQ ID NO: 241189 - DNA, 33 bp, Homo sapien
aggaaagaaggattctaactataacttcaacac

SEQ ID NO: 241190 - DNA, 33 bp, Homo sapien
aggaaagaaggattctgactataacttcaacac

SEQ ID NO: 241191 - DNA, 33 bp, Homo sapien
ctcatttcccaaagctcagagtgaatgaaaata

SEQ ID NO: 241192 - DNA, 33 bp, Homo sapien
ctcatttcccaaagctgagagtgaatgaaaata

SEQ ID NO: 241193 - DNA, 33 bp, Homo sapien
aaggacttgagcccaaatgtccctgcaaatcct

SEQ ID NO: 241194 - DNA, 33 bp, Homo sapien
aaggacttgagcccaactgtccctgcaaatcct

SEQ ID NO: 241195 - DNA, 33 bp, Homo sapien
gatcccatgatgcctcaaatatgggaaattcct

SEQ ID NO: 241196 - DNA, 33 bp, Homo sapien
gatcccatgatgcctctaatatgggaaattcct

SEQ ID NO: 241197 - DNA, 33 bp, Homo sapien
aatatttccaaccttacattaatttacatagtg

SEQ ID NO: 241198 - DNA, 33 bp, Homo sapien
aatatttccaaccttatattaatttacatagtg

SEQ ID NO: 241199 - DNA, 33 bp, Homo sapien
tattccttgctgttcaaccaagattaaaaccat

SEQ ID NO: 241200 - DNA, 33 bp, Homo sapien
tattccttgctgttcagccaagattaaaaccat

SEQ ID NO: 241201 - DNA, 33 bp, Homo sapien
tctggactagaaaaagaaattattcacatcatc

SEQ ID NO: 241202 - DNA, 33 bp, Homo sapien
tctggactagaaaaaggaattattcacatcatc

SEQ ID NO: 241203 - DNA, 33 bp, Homo sapien
gcaggtgaatatgcaccgcatgagggctgtgaa

SEQ ID NO: 241204 - DNA, 33 bp, Homo sapien
gcaggtgaatatgcacggcatgagggctgtgaa

SEQ ID NO: 241205 - DNA, 33 bp, Homo sapien
atcttgctccacattcacagttgtaagtgcctt

SEQ ID NO: 241206 - DNA, 33 bp, Homo sapien
atcttgctccacattcgcagttgtaagtgcctt

SEQ ID NO: 241207 - DNA, 33 bp, Homo sapien
gtaccatggttatcaaggattctgtcagaaatc

SEQ ID NO: 241208 - DNA, 33 bp, Homo sapien
gtaccatggttatcaatgattctgtcagaaatc

SEQ ID NO: 241209 - DNA, 33 bp, Homo sapien
acgctcagaaggatgacgaatttgggacttatc

SEQ ID NO: 241210 - DNA, 33 bp, Homo sapien
acgctcagaaggatgaggaatttgggacttatc

SEQ ID NO: 241211 - DNA, 33 bp, Homo sapien
agttgcatttttttaaagctcttcagaagacta

SEQ ID NO: 241212 - DNA, 33 bp, Homo sapien
agttgcatttttttaacgctcttcagaagacta

SEQ ID NO: 241213 - DNA, 33 bp, Homo sapien
aaaagccaccaaatgacgggatgagattttata

SEQ ID NO: 241214 - DNA, 33 bp, Homo sapien
aaaagccaccaaatgatgggatgagattttata

SEQ ID NO: 241215 - DNA, 33 bp, Homo sapien
aggagagagtagagtcaaactctgtaatgcagt

SEQ ID NO: 241216 - DNA, 33 bp, Homo sapien
aggagagagtagagtcgaactctgtaatgcagt

SEQ ID NO: 241217 - DNA, 33 bp, Homo sapien
taaagggatcagctacgagaatgtttcaaacag

SEQ ID NO: 241218 - DNA, 33 bp, Homo sapien
taaagggatcagctactagaatgtttcaaacag

SEQ ID NO: 241219 - DNA, 33 bp, Homo sapien
ggaaagtgtccagcataataaatctattccagt

SEQ ID NO: 241220 - DNA, 33 bp, Homo sapien
ggaaagtgtccagcatgataaatctattccagt

SEQ ID NO: 241221 - DNA, 33 bp, Homo sapien
cattaaaatatctcacaaaaaggttcttaattc

SEQ ID NO: 241222 - DNA, 33 bp, Homo sapien
cattaaaatatctcacgaaaaggttcttaattc

SEQ ID NO: 241223 - DNA, 33 bp, Homo sapien
tatttgaacaggtaataaggatatgctggagac

SEQ ID NO: 241224 - DNA, 33 bp, Homo sapien
tatttgaacaggtaatgaggatatgctggagac

SEQ ID NO: 241225 - DNA, 33 bp, Homo sapien
atgataagattagaaaaagctgaacattttaag

SEQ ID NO: 241226 - DNA, 33 bp, Homo sapien
atgataagattagaaagagctgaacattttaag

SEQ ID NO: 241227 - DNA, 33 bp, Homo sapien
ctcagctcccttatcagctcagtctatataaat

SEQ ID NO: 241228 - DNA, 33 bp, Homo sapien
ctcagctcccttatcatctcagtctatataaat

SEQ ID NO: 241229 - DNA, 33 bp, Homo sapien
gtaagatggatagaccaaattaggatttagaat

SEQ ID NO: 241230 - DNA, 33 bp, Homo sapien
gtaagatggatagacccaattaggatttagaat

SEQ ID NO: 241231 - DNA, 33 bp, Homo sapien
acccagtgtgacagaacagaatgagtgaaggtg

SEQ ID NO: 241232 - DNA, 33 bp, Homo sapien
acccagtgtgacagaatagaatgagtgaaggtg

SEQ ID NO: 241233 - DNA, 33 bp, Homo sapien
gattcgttctaggacccctgaaaatgtcaaaat

SEQ ID NO: 241234 - DNA, 33 bp, Homo sapien
gattcgttctaggacctctgaaaatgtcaaaat

SEQ ID NO: 241235 - DNA, 33 bp, Homo sapien
tgtgctccttataccacgaagtgccaaagtagc

SEQ ID NO: 241236 - DNA, 33 bp, Homo sapien
tgtgctccttataccatgaagtgccaaagtagc

SEQ ID NO: 241237 - DNA, 33 bp, Homo sapien
aacttctgattaggtgccttttcattcaatctg

SEQ ID NO: 241238 - DNA, 33 bp, Homo sapien
aacttctgattaggtgtcttttcattcaatctg

SEQ ID NO: 241239 - DNA, 33 bp, Homo sapien
caaaattctgacccaactgagaaataagacaaa

SEQ ID NO: 241240 - DNA, 33 bp, Homo sapien
caaaattctgacccaattgagaaataagacaaa

SEQ ID NO: 241241 - DNA, 33 bp, Homo sapien
gattcaaggaatggagaaagacattgtccctct

SEQ ID NO: 241242 - DNA, 33 bp, Homo sapien
gattcaaggaatggaggaagacattgtccctct

SEQ ID NO: 241243 - DNA, 33 bp, Homo sapien
caagagggtcatcaatcatgtcaaatgctgccg

SEQ ID NO: 241244 - DNA, 33 bp, Homo sapien
caagagggtcatcaatgatgtcaaatgctgccg

SEQ ID NO: 241245 - DNA, 33 bp, Homo sapien
ttttctcaagttcaaaatgagttaagaatgtca

SEQ ID NO: 241246 - DNA, 33 bp, Homo sapien
ttttctcaagttcaaactgagttaagaatgtca

SEQ ID NO: 241247 - DNA, 33 bp, Homo sapien
aattcatttgatctaaatctcagaaccaggtac

SEQ ID NO: 241248 - DNA, 33 bp, Homo sapien
aattcatttgatctaactctcagaaccaggtac

SEQ ID NO: 241249 - DNA, 33 bp, Homo sapien
gagatgggcttatcatcatagagttatggttcc

SEQ ID NO: 241250 - DNA, 33 bp, Homo sapien
gagatgggcttatcattatagagttatggttcc

SEQ ID NO: 241251 - DNA, 33 bp, Homo sapien
gagagtcatattttaaagattacagactaaaat

SEQ ID NO: 241252 - DNA, 33 bp, Homo sapien
gagagtcatattttaaggattacagactaaaat

SEQ ID NO: 241253 - DNA, 33 bp, Homo sapien
catatccacatatactaacacaaatggatgttt

SEQ ID NO: 241254 - DNA, 33 bp, Homo sapien
catatccacatatacttacacaaatggatgttt

SEQ ID NO: 241255 - DNA, 33 bp, Homo sapien
tttggcctgcccaaagaaaagaaaaacatccat

SEQ ID NO: 241256 - DNA, 33 bp, Homo sapien
tttggcctgcccaaaggaaagaaaaacatccat

SEQ ID NO: 241257 - DNA, 33 bp, Homo sapien
gaagaataaaaggaggaatgccctgcataggaa

SEQ ID NO: 241258 - DNA, 33 bp, Homo sapien
gaagaataaaaggaggtatgccctgcataggaa

SEQ ID NO: 241259 - DNA, 33 bp, Homo sapien
ccggtcatttgactccactttctatcccaagcc

SEQ ID NO: 241260 - DNA, 33 bp, Homo sapien
ccggtcatttgactccgctttctatcccaagcc

SEQ ID NO: 241261 - DNA, 33 bp, Homo sapien
ataaagtctgcactaacgtaaaaggacttaaag

SEQ ID NO: 241262 - DNA, 33 bp, Homo sapien
ataaagtctgcactaatgtaaaaggacttaaag

SEQ ID NO: 241263 - DNA, 33 bp, Homo sapien
tttcccatatgcaaatcagaaactggcacactt

SEQ ID NO: 241264 - DNA, 33 bp, Homo sapien
tttcccatatgcaaattagaaactggcacactt

SEQ ID NO: 241265 - DNA, 33 bp, Homo sapien
gatgtatttttcttgcacctttgtcccagccat

SEQ ID NO: 241266 - DNA, 33 bp, Homo sapien
gatgtatttttcttgcgcctttgtcccagccat

SEQ ID NO: 241267 - DNA, 33 bp, Homo sapien
aatgggttcttggcttaaaaaggagagagaaaa

SEQ ID NO: 241268 - DNA, 33 bp, Homo sapien
aatgggttcttggcttgaaaaggagagagaaaa

SEQ ID NO: 241269 - DNA, 33 bp, Homo sapien
ctggcaatgatcttcacagttcgtaatgagtcc

SEQ ID NO: 241270 - DNA, 33 bp, Homo sapien
ctggcaatgatcttcatagttcgtaatgagtcc

SEQ ID NO: 241271 - DNA, 33 bp, Homo sapien
agaagtagactaagaacgcaaaagaaaaaggaa

SEQ ID NO: 241272 - DNA, 33 bp, Homo sapien
agaagtagactaagaatgcaaaagaaaaaggaa

SEQ ID NO: 241273 - DNA, 33 bp, Homo sapien
tatttttgtgagagaaagcagcaaaaatacagg

SEQ ID NO: 241274 - DNA, 33 bp, Homo sapien
tatttttgtgagagaaggcagcaaaaatacagg

SEQ ID NO: 241275 - DNA, 33 bp, Homo sapien
ctcctactgggtagcaccattcatctctgtccc

SEQ ID NO: 241276 - DNA, 33 bp, Homo sapien
ctcctactgggtagcagcattcatctctgtccc

SEQ ID NO: 241277 - DNA, 33 bp, Homo sapien
ataaataggaattggacgtctgcaaaagaaaca

SEQ ID NO: 241278 - DNA, 33 bp, Homo sapien
ataaataggaattggatgtctgcaaaagaaaca

SEQ ID NO: 241279 - DNA, 33 bp, Homo sapien
tctaccaaccctcaaagtatctgtttctggctt

SEQ ID NO: 241280 - DNA, 33 bp, Homo sapien
tctaccaaccctcaaattatctgtttctggctt

SEQ ID NO: 241281 - DNA, 33 bp, Homo sapien
ggatgctttttatataggcttacagtgtcagtg

SEQ ID NO: 241282 - DNA, 33 bp, Homo sapien
ggatgctttttatatatgcttacagtgtcagtg

SEQ ID NO: 241283 - DNA, 33 bp, Homo sapien
tgtaagctcaatgaagccaaagctattgctcac

SEQ ID NO: 241284 - DNA, 33 bp, Homo sapien
tgtaagctcaatgaaggcaaagctattgctcac

SEQ ID NO: 241285 - DNA, 33 bp, Homo sapien
agtgtagaagggagagaaaaattctgtaacact

SEQ ID NO: 241286 - DNA, 33 bp, Homo sapien
agtgtagaagggagaggaaaattctgtaacact

SEQ ID NO: 241287 - DNA, 33 bp, Homo sapien
cagaggatgtggaaatcaatgacacctggtctc

SEQ ID NO: 241288 - DNA, 33 bp, Homo sapien
cagaggatgtggaaatgaatgacacctggtctc

SEQ ID NO: 241289 - DNA, 33 bp, Homo sapien
agagaagatgaataaaaagccaactaggtgtgt

SEQ ID NO: 241290 - DNA, 33 bp, Homo sapien
agagaagatgaataaagagccaactaggtgtgt

SEQ ID NO: 241291 - DNA, 33 bp, Homo sapien
aataaaaggaagcagagagtctaaaagctattg

SEQ ID NO: 241292 - DNA, 33 bp, Homo sapien
aataaaaggaagcagatagtctaaaagctattg

SEQ ID NO: 241293 - DNA, 33 bp, Homo sapien
tcatgctatatttggacaattataaacattgct

SEQ ID NO: 241294 - DNA, 33 bp, Homo sapien
tcatgctatatttggataattataaacattgct

SEQ ID NO: 241295 - DNA, 33 bp, Homo sapien
cagaaatcttgattccacatgagctttcatgcc

SEQ ID NO: 241296 - DNA, 33 bp, Homo sapien
cagaaatcttgattccgcatgagctttcatgcc

SEQ ID NO: 241297 - DNA, 33 bp, Homo sapien
cagaggtgatcttctacgtatttaataactgca

SEQ ID NO: 241298 - DNA, 33 bp, Homo sapien
cagaggtgatcttctatgtatttaataactgca

SEQ ID NO: 241299 - DNA, 33 bp, Homo sapien
tgggtgcacaatgagaatagcaaatggagaaca

SEQ ID NO: 241300 - DNA, 33 bp, Homo sapien
tgggtgcacaatgagagtagcaaatggagaaca

SEQ ID NO: 241301 - DNA, 33 bp, Homo sapien
agtactgtccagacacaattttgaaaatgcaga

SEQ ID NO: 241302 - DNA, 33 bp, Homo sapien
agtactgtccagacaccattttgaaaatgcaga

SEQ ID NO: 241303 - DNA, 33 bp, Homo sapien
tacttcagaaattgcaactaagggatatttgct

SEQ ID NO: 241304 - DNA, 33 bp, Homo sapien
tacttcagaaattgcagctaagggatatttgct

SEQ ID NO: 241305 - DNA, 33 bp, Homo sapien
aatggttagatgatgaaggtacggaggtgactt

SEQ ID NO: 241306 - DNA, 33 bp, Homo sapien
aatggttagatgatgagggtacggaggtgactt

SEQ ID NO: 241307 - DNA, 33 bp, Homo sapien
caccaaattttcaagaagtttgaatgagatgag

SEQ ID NO: 241308 - DNA, 33 bp, Homo sapien
caccaaattttcaagaggtttgaatgagatgag

SEQ ID NO: 241309 - DNA, 33 bp, Homo sapien
ggagatataagtcataacacctccacatagaga

SEQ ID NO: 241310 - DNA, 33 bp, Homo sapien
ggagatataagtcatagcacctccacatagaga

SEQ ID NO: 241311 - DNA, 33 bp, Homo sapien
attatctgtgcaaaggaataatgtttcccataa

SEQ ID NO: 241312 - DNA, 33 bp, Homo sapien
attatctgtgcaaagggataatgtttcccataa

SEQ ID NO: 241313 - DNA, 33 bp, Homo sapien
atttttttaaaaagccagaggtgattatcaagc

SEQ ID NO: 241314 - DNA, 33 bp, Homo sapien
atttttttaaaaagccggaggtgattatcaagc

SEQ ID NO: 241315 - DNA, 33 bp, Homo sapien
agtgactgaacacttaccttgaaaatcttaagt

SEQ ID NO: 241316 - DNA, 33 bp, Homo sapien
agtgactgaacacttatcttgaaaatcttaagt

SEQ ID NO: 241317 - DNA, 33 bp, Homo sapien
tcttaggtttctggcaactaactcttatattgc

SEQ ID NO: 241318 - DNA, 33 bp, Homo sapien
tcttaggtttctggcagctaactcttatattgc

SEQ ID NO: 241319 - DNA, 33 bp, Homo sapien
accatagttaatcctcaaaagtgaaatttttgc

SEQ ID NO: 241320 - DNA, 33 bp, Homo sapien
accatagttaatcctcgaaagtgaaatttttgc

SEQ ID NO: 241321 - DNA, 33 bp, Homo sapien
ctagcaaaaacctcaaatcagcagtcattatta

SEQ ID NO: 241322 - DNA, 33 bp, Homo sapien
ctagcaaaaacctcaagtcagcagtcattatta

SEQ ID NO: 241323 - DNA, 33 bp, Homo sapien
tgtaagttaatggataagaatgactgaagttag

SEQ ID NO: 241324 - DNA, 33 bp, Homo sapien
tgtaagttaatggatacgaatgactgaagttag

SEQ ID NO: 241325 - DNA, 33 bp, Homo sapien
tatgtggtaactgggaaatgtgtcacctaaaaa

SEQ ID NO: 241326 - DNA, 33 bp, Homo sapien
tatgtggtaactgggagatgtgtcacctaaaaa

SEQ ID NO: 241327 - DNA, 33 bp, Homo sapien
aggtgttatcttctccacttagaatgattcctc

SEQ ID NO: 241328 - DNA, 33 bp, Homo sapien
aggtgttatcttctccgcttagaatgattcctc

SEQ ID NO: 241329 - DNA, 33 bp, Homo sapien
ataaagtcgatcaacacacaccattttatttcc

SEQ ID NO: 241330 - DNA, 33 bp, Homo sapien
ataaagtcgatcaacatacaccattttatttcc

SEQ ID NO: 241331 - DNA, 33 bp, Homo sapien
ttcctaaatgtgaaaaatgattctcttacatta

SEQ ID NO: 241332 - DNA, 33 bp, Homo sapien
ttcctaaatgtgaaaagtgattctcttacatta

SEQ ID NO: 241333 - DNA, 33 bp, Homo sapien
tataaaatttcagagactcaaccttgggttcca

SEQ ID NO: 241334 - DNA, 33 bp, Homo sapien
tataaaatttcagagagtcaaccttgggttcca

SEQ ID NO: 241335 - DNA, 33 bp, Homo sapien
gggttaggaataaataacaatgacatctctatt

SEQ ID NO: 241336 - DNA, 33 bp, Homo sapien
gggttaggaataaatagcaatgacatctctatt

SEQ ID NO: 241337 - DNA, 33 bp, Homo sapien
cattcctggctccataagataaaatatttctgt

SEQ ID NO: 241338 - DNA, 33 bp, Homo sapien
cattcctggctccataggataaaatatttctgt

SEQ ID NO: 241339 - DNA, 33 bp, Homo sapien
cttctagaagtgtgggcatgactgattacattg

SEQ ID NO: 241340 - DNA, 33 bp, Homo sapien
cttctagaagtgtggggatgactgattacattg

SEQ ID NO: 241341 - DNA, 33 bp, Homo sapien
tattgctgtgagtgcacgtccagtagtttatgt

SEQ ID NO: 241342 - DNA, 33 bp, Homo sapien
tattgctgtgagtgcatgtccagtagtttatgt

SEQ ID NO: 241343 - DNA, 33 bp, Homo sapien
gagtggcatagaaaaaattactatagggacctc

SEQ ID NO: 241344 - DNA, 33 bp, Homo sapien
gagtggcatagaaaaatttactatagggacctc

SEQ ID NO: 241345 - DNA, 33 bp, Homo sapien
gttccaaggtgtctcacagaggaagatagtgca

SEQ ID NO: 241346 - DNA, 33 bp, Homo sapien
gttccaaggtgtctcagagaggaagatagtgca

SEQ ID NO: 241347 - DNA, 33 bp, Homo sapien
agattgctatggagaaatcagtaaatgaggatt

SEQ ID NO: 241348 - DNA, 33 bp, Homo sapien
agattgctatggagaagtcagtaaatgaggatt

SEQ ID NO: 241349 - DNA, 33 bp, Homo sapien
ccacagtgagattccaccgcttgcaagttagaa

SEQ ID NO: 241350 - DNA, 33 bp, Homo sapien
ccacagtgagattccatcgcttgcaagttagaa

SEQ ID NO: 241351 - DNA, 33 bp, Homo sapien; identical to SEQ ID NO: 241349

SEQ ID NO: 241352 - DNA, 33 bp, Homo sapien; identical to SEQ ID NO: 241350

SEQ ID NO: 241353 - DNA, 33 bp, Homo sapien
caaagcattattattcaaatgtgagatactact

SEQ ID NO: 241354 - DNA, 33 bp, Homo sapien
caaagcattattattccaatgtgagatactact

SEQ ID NO: 241355 - DNA, 33 bp, Homo sapien
agaattctaggatcaaattaattatctcagaat

SEQ ID NO: 241356 - DNA, 33 bp, Homo sapien
agaattctaggatcaagttaattatctcagaat

SEQ ID NO: 241357 - DNA, 33 bp, Homo sapien
accataggtataactcccagaactccttgaggc

SEQ ID NO: 241358 - DNA, 33 bp, Homo sapien
accataggtataactcgcagaactccttgaggc

SEQ ID NO: 241359 - DNA, 33 bp, Homo sapien
acaccagtgttccaacggaagttgcctgggtct

SEQ ID NO: 241360 - DNA, 33 bp, Homo sapien
acaccagtgttccaactgaagttgcctgggtct

SEQ ID NO: 241361 - DNA, 33 bp, Homo sapien
ggccttcagagagctacaggtatctgctgtatc

SEQ ID NO: 241362 - DNA, 33 bp, Homo sapien
ggccttcagagagctataggtatctgctgtatc

SEQ ID NO: 241363 - DNA, 33 bp, Homo sapien
ccctgaaaactggtaaagatgaatacaacttac

SEQ ID NO: 241364 - DNA, 33 bp, Homo sapien
ccctgaaaactggtaacgatgaatacaacttac

SEQ ID NO: 241365 - DNA, 33 bp, Homo sapien
ctgccaagactcctaacatttgtaatagcccaa

SEQ ID NO: 241366 - DNA, 33 bp, Homo sapien
ctgccaagactcctaatatttgtaatagcccaa

SEQ ID NO: 241367 - DNA, 33 bp, Homo sapien
atgggtaactttttcaaggctgccaggatgcat

SEQ ID NO: 241368 - DNA, 33 bp, Homo sapien
atgggtaactttttcagggctgccaggatgcat

SEQ ID NO: 241369 - DNA, 33 bp, Homo sapien
tgcaagtgaaagccccaaacagaaagcgcagta

SEQ ID NO: 241370 - DNA, 33 bp, Homo sapien
tgcaagtgaaagccccgaacagaaagcgcagta

SEQ ID NO: 241371 - DNA, 33 bp, Homo sapien
tcttgaaaagcataaaacacactgctgtacata

SEQ ID NO: 241372 - DNA, 33 bp, Homo sapien
tcttgaaaagcataaagcacactgctgtacata

SEQ ID NO: 241373 - DNA, 33 bp, Homo sapien
gggttctcgttcttaaaggctgcttcataggaa

SEQ ID NO: 241374 - DNA, 33 bp, Homo sapien
gggttctcgttcttaatggctgcttcataggaa

SEQ ID NO: 241375 - DNA, 33 bp, Homo sapien
aaagtaatacttctgacagaggcatttgtgttt

SEQ ID NO: 241376 - DNA, 33 bp, Homo sapien
aaagtaatacttctgatagaggcatttgtgttt

SEQ ID NO: 241377 - DNA, 33 bp, Homo sapien
ccattcattttgccacaatttgttattttggtt

SEQ ID NO: 241378 - DNA, 33 bp, Homo sapien
ccattcattttgccacgatttgttattttggtt

SEQ ID NO: 241379 - DNA, 33 bp, Homo sapien
cagattcacttaggacaaccaaccaccctattc

SEQ ID NO: 241380 - DNA, 33 bp, Homo sapien
cagattcacttaggacgaccaaccaccctattc

SEQ ID NO: 241381 - DNA, 33 bp, Homo sapien
gatgaaaccatgggcaactctaagacttgagga

SEQ ID NO: 241382 - DNA, 33 bp, Homo sapien
gatgaaaccatgggcagctctaagacttgagga

SEQ ID NO: 241383 - DNA, 33 bp, Homo sapien
cctcctctcagatggaactaactagccacatgg

SEQ ID NO: 241384 - DNA, 33 bp, Homo sapien
cctcctctcagatggagctaactagccacatgg

SEQ ID NO: 241385 - DNA, 33 bp, Homo sapien
atttattgtcactgtcaagaaggataaagccta

SEQ ID NO: 241386 - DNA, 33 bp, Homo sapien
atttattgtcactgtctagaaggataaagccta

SEQ ID NO: 241387 - DNA, 33 bp, Homo sapien
aaactgatgacactggacaacctctttagagtc

SEQ ID NO: 241388 - DNA, 33 bp, Homo sapien
aaactgatgacactgggcaacctctttagagtc

SEQ ID NO: 241389 - DNA, 33 bp, Homo sapien
ttcactgagtgagaaaagattcctctggcactg

SEQ ID NO: 241390 - DNA, 33 bp, Homo sapien
ttcactgagtgagaaaggattcctctggcactg

SEQ ID NO: 241391 - DNA, 33 bp, Homo sapien
tcagaggctctctttacgggacagctctatttc

SEQ ID NO: 241392 - DNA, 33 bp, Homo sapien
tcagaggctctctttaggggacagctctatttc

SEQ ID NO: 241393 - DNA, 33 bp, Homo sapien
tggaggtttcctttgccagaaaagcccaggtgt

SEQ ID NO: 241394 - DNA, 33 bp, Homo sapien
tggaggtttcctttgctagaaaagcccaggtgt

SEQ ID NO: 241395 - DNA, 33 bp, Homo sapien
gggtttcagagattagaacagtataaagaaatt

SEQ ID NO: 241396 - DNA, 33 bp, Homo sapien
gggtttcagagattaggacagtataaagaaatt

SEQ ID NO: 241397 - DNA, 33 bp, Homo sapien
ttgcttttttttggtaactgctatgaggtatga

SEQ ID NO: 241398 - DNA, 33 bp, Homo sapien
ttgcttttttttggtatctgctatgaggtatga

SEQ ID NO: 241399 - DNA, 33 bp, Homo sapien
accatctgtgccaacactaattcagataatgca

SEQ ID NO: 241400 - DNA, 33 bp, Homo sapien
accatctgtgccaacagtaattcagataatgca

SEQ ID NO: 241401 - DNA, 33 bp, Homo sapien
gagccctacagctggcaacaaatacaaatcatg

SEQ ID NO: 241402 - DNA, 33 bp, Homo sapien
gagccctacagctggcgacaaatacaaatcatg

SEQ ID NO: 241403 - DNA, 33 bp, Homo sapien
aaatgttgcaattggccaacatttaaaaattac

SEQ ID NO: 241404 - DNA, 33 bp, Homo sapien
aaatgttgcaattggctaacatttaaaaattac

SEQ ID NO: 241405 - DNA, 33 bp, Homo sapien
acagctaagaaatgacagagaaaaaattcagcc

SEQ ID NO: 241406 - DNA, 33 bp, Homo sapien
acagctaagaaatgactgagaaaaaattcagcc

SEQ ID NO: 241407 - DNA, 33 bp, Homo sapien
cgctttcaagtcagaacctaaaagtccaggtgc

SEQ ID NO: 241408 - DNA, 33 bp, Homo sapien
cgctttcaagtcagaatctaaaagtccaggtgc

SEQ ID NO: 241409 - DNA, 33 bp, Homo sapien
ggccttgctgtagtccaatacttgccaagagag

SEQ ID NO: 241410 - DNA, 33 bp, Homo sapien
ggccttgctgtagtccgatacttgccaagagag

SEQ ID NO: 241411 - DNA, 33 bp, Homo sapien
gcactgaatatcaaggaaagtcttactgcattt

SEQ ID NO: 241412 - DNA, 33 bp, Homo sapien
gcactgaatatcaagggaagtcttactgcattt

SEQ ID NO: 241413 - DNA, 33 bp, Homo sapien
ccaacaatgagcccaaatggctttctcttgggc

SEQ ID NO: 241414 - DNA, 33 bp, Homo sapien
ccaacaatgagcccaagtggctttctcttgggc

SEQ ID NO: 241415 - DNA, 33 bp, Homo sapien
atgaatttatctttgaggagaacaatgtaagca

SEQ ID NO: 241416 - DNA, 33 bp, Homo sapien
atgaatttatctttgatgagaacaatgtaagca

SEQ ID NO: 241417 - DNA, 33 bp, Homo sapien
catatttgaatggcaaacatgttcaatctgttg

SEQ ID NO: 241418 - DNA, 33 bp, Homo sapien
catatttgaatggcaagcatgttcaatctgttg

SEQ ID NO: 241419 - DNA, 33 bp, Homo sapien
caagtccaagaactgaacgatatgaagtttttt

SEQ ID NO: 241420 - DNA, 33 bp, Homo sapien
caagtccaagaactgaccgatatgaagtttttt

SEQ ID NO: 241421 - DNA, 33 bp, Homo sapien
gagaacaatgaccttaagtttaatattctccag

SEQ ID NO: 241422 - DNA, 33 bp, Homo sapien
gagaacaatgaccttacgtttaatattctccag

SEQ ID NO: 241423 - DNA, 33 bp, Homo sapien
gtaccttgcttcacgaacctaattactaagtgt

SEQ ID NO: 241424 - DNA, 33 bp, Homo sapien
gtaccttgcttcacgaccctaattactaagtgt

SEQ ID NO: 241425 - DNA, 33 bp, Homo sapien
tgaagacaccggaagacgatggccatttacaaa

SEQ ID NO: 241426 - DNA, 33 bp, Homo sapien
tgaagacaccggaagatgatggccatttacaaa

SEQ ID NO: 241427 - DNA, 33 bp, Homo sapien
acttggaatgaataagcctagcaacctaatgca

SEQ ID NO: 241428 - DNA, 33 bp, Homo sapien
acttggaatgaataagtctagcaacctaatgca

SEQ ID NO: 241429 - DNA, 33 bp, Homo sapien
tcacaattcaggaggcaagaactcagacactga

SEQ ID NO: 241430 - DNA, 33 bp, Homo sapien
tcacaattcaggaggccagaactcagacactga

SEQ ID NO: 241431 - DNA, 33 bp, Homo sapien
aatttacacgttgatcaatttataacaaggaaa

SEQ ID NO: 241432 - DNA, 33 bp, Homo sapien
aatttacacgttgatctatttataacaaggaaa

SEQ ID NO: 241433 - DNA, 33 bp, Homo sapien
aaatttttgaaaaatacagcatttcttgttagc

SEQ ID NO: 241434 - DNA, 33 bp, Homo sapien
aaatttttgaaaaatagagcatttcttgttagc

SEQ ID NO: 241435 - DNA, 33 bp, Homo sapien
agcaccatcccgagtacgtcagaggtcttcgca

SEQ ID NO: 241436 - DNA, 33 bp, Homo sapien
agcaccatcccgagtatgtcagaggtcttcgca

SEQ ID NO: 241437 - DNA, 33 bp, Homo sapien
actcctctatgaggaaaaaccttacgtccaaca

SEQ ID NO: 241438 - DNA, 33 bp, Homo sapien
actcctctatgaggaataaccttacgtccaaca

SEQ ID NO: 241439 - DNA, 33 bp, Homo sapien
ttataggagtcctttacatatgtagccaaaacc

SEQ ID NO: 241440 - DNA, 33 bp, Homo sapien
ttataggagtcctttatatatgtagccaaaacc

SEQ ID NO: 241441 - DNA, 33 bp, Homo sapien
tgctagcaggagcaaaactctatcaggccccac

SEQ ID NO: 241442 - DNA, 33 bp, Homo sapien
tgctagcaggagcaaatctctatcaggccccac

SEQ ID NO: 241443 - DNA, 33 bp, Homo sapien
ggagtgcatccaagggcagaagagttaataaac

SEQ ID NO: 241444 - DNA, 33 bp, Homo sapien
ggagtgcatccaagggtagaagagttaataaac

SEQ ID NO: 241445 - DNA, 33 bp, Homo sapien
attcatctttgtactcagagaatctcatatata

SEQ ID NO: 241446 - DNA, 33 bp, Homo sapien
attcatctttgtactctgagaatctcatatata

SEQ ID NO: 241447 - DNA, 33 bp, Homo sapien
catatcaatcacattacacattttggaatcaca

SEQ ID NO: 241448 - DNA, 33 bp, Homo sapien
catatcaatcacattatacattttggaatcaca

SEQ ID NO: 241449 - DNA, 33 bp, Homo sapien
taagaacagttatatacagcaaaagtcaactga

SEQ ID NO: 241450 - DNA, 33 bp, Homo sapien
taagaacagttatatatagcaaaagtcaactga

SEQ ID NO: 241451 - DNA, 33 bp, Homo sapien
gcgttgttgtggtatgaattttctattatcaga

SEQ ID NO: 241452 - DNA, 33 bp, Homo sapien
gcgttgttgtggtatggattttctattatcaga

SEQ ID NO: 241453 - DNA, 33 bp, Homo sapien
tattatctggttctcaaggatattactataata

SEQ ID NO: 241454 - DNA, 33 bp, Homo sapien
tattatctggttctcagggatattactataata

SEQ ID NO: 241455 - DNA, 33 bp, Homo sapien
atactcggaggcaaaggaaactcacaaaaacct

SEQ ID NO: 241456 - DNA, 33 bp, Homo sapien
atactcggaggcaaagtaaactcacaaaaacct

SEQ ID NO: 241457 - DNA, 33 bp, Homo sapien
attgtgttgctgaaacaaatatgcagggaaaac

SEQ ID NO: 241458 - DNA, 33 bp, Homo sapien
attgtgttgctgaaaccaatatgcagggaaaac

SEQ ID NO: 241459 - DNA, 33 bp, Homo sapien
acatttgttgaatgaccaactgaagaaactgga

SEQ ID NO: 241460 - DNA, 33 bp, Homo sapien
acatttgttgaatgacgaactgaagaaactgga

SEQ ID NO: 241461 - DNA, 33 bp, Homo sapien
gatataaacatgaccaaagggctgatctagata

SEQ ID NO: 241462 - DNA, 33 bp, Homo sapien
gatataaacatgaccatagggctgatctagata

SEQ ID NO: 241463 - DNA, 33 bp, Homo sapien
ctagaagctagtcctgcagtaatatcacacatc

SEQ ID NO: 241464 - DNA, 33 bp, Homo sapien
ctagaagctagtcctggagtaatatcacacatc

SEQ ID NO: 241465 - DNA, 33 bp, Homo sapien
tgagaatattgtaatacgtcgcagactgtgggt

SEQ ID NO: 241466 - DNA, 33 bp, Homo sapien
tgagaatattgtaatatgtcgcagactgtgggt

SEQ ID NO: 241467 - DNA, 33 bp, Homo sapien
taatgtcagggccagacctaaaaacaatgtgaa

SEQ ID NO: 241468 - DNA, 33 bp, Homo sapien
taatgtcagggccagatctaaaaacaatgtgaa

SEQ ID NO: 241469 - DNA, 33 bp, Homo sapien
tcaaaatttgcctctagcgatcttttggaatgc

SEQ ID NO: 241470 - DNA, 33 bp, Homo sapien
tcaaaatttgcctctatcgatcttttggaatgc

SEQ ID NO: 241471 - DNA, 33 bp, Homo sapien
gactggcctacagcaaatactcaaaaaatgtag

SEQ ID NO: 241472 - DNA, 33 bp, Homo sapien
gactggcctacagcaagtactcaaaaaatgtag

SEQ ID NO: 241473 - DNA, 33 bp, Homo sapien
ttgcaagcagttccagcctaaaacaaacacaga

SEQ ID NO: 241474 - DNA, 33 bp, Homo sapien
ttgcaagcagttccagtctaaaacaaacacaga

SEQ ID NO: 241475 - DNA, 33 bp, Homo sapien
cttgaacctcataagccatcattacgtttggaa

SEQ ID NO: 241476 - DNA, 33 bp, Homo sapien
cttgaacctcataagctatcattacgtttggaa

SEQ ID NO: 241477 - DNA, 33 bp, Homo sapien
tgcctaggtttaagcacagttctatcttgaaca

SEQ ID NO: 241478 - DNA, 33 bp, Homo sapien
tgcctaggtttaagcagagttctatcttgaaca

SEQ ID NO: 241479 - DNA, 33 bp, Homo sapien
ctgacatctctcctaccatagatctgtttttta

SEQ ID NO: 241480 - DNA, 33 bp, Homo sapien
ctgacatctctcctactatagatctgtttttta

SEQ ID NO: 241481 - DNA, 33 bp, Homo sapien
tttcactctgaattcactagagctcagagggaa

SEQ ID NO: 241482 - DNA, 33 bp, Homo sapien
tttcactctgaattcattagagctcagagggaa

SEQ ID NO: 241483 - DNA, 33 bp, Homo sapien
ttcaacatggcatcccagctgatcaaagtgcag

SEQ ID NO: 241484 - DNA, 33 bp, Homo sapien
ttcaacatggcatccctgctgatcaaagtgcag

SEQ ID NO: 241485 - DNA, 33 bp, Homo sapien
ttgaaaagccagacacagagatgaggagacaac

SEQ ID NO: 241486 - DNA, 33 bp, Homo sapien
ttgaaaagccagacaccgagatgaggagacaac

SEQ ID NO: 241487 - DNA, 33 bp, Homo sapien
actactcaactacacaatgtcttacagtatcta

SEQ ID NO: 241488 - DNA, 33 bp, Homo sapien
actactcaactacacagtgtcttacagtatcta

SEQ ID NO: 241489 - DNA, 33 bp, Homo sapien
gcttggggagacaaccacttattgagtttttgc

SEQ ID NO: 241490 - DNA, 33 bp, Homo sapien
gcttggggagacaaccgcttattgagtttttgc

SEQ ID NO: 241491 - DNA, 33 bp, Homo sapien
ggaacgttttatctgaagccaatagtatagtat

SEQ ID NO: 241492 - DNA, 33 bp, Homo sapien
ggaacgttttatctgaggccaatagtatagtat

SEQ ID NO: 241493 - DNA, 33 bp, Homo sapien
gttctgaccatgcgtacacttattttccctccc

SEQ ID NO: 241494 - DNA, 33 bp, Homo sapien
gttctgaccatgcgtatacttattttccctccc

SEQ ID NO: 241495 - DNA, 33 bp, Homo sapien
atgtagatctggaagcaaaatatagatttaaat

SEQ ID NO: 241496 - DNA, 33 bp, Homo sapien
atgtagatctggaagcgaaatatagatttaaat

SEQ ID NO: 241497 - DNA, 33 bp, Homo sapien
attaactctcggctacacaaattggattgagag

SEQ ID NO: 241498 - DNA, 33 bp, Homo sapien
attaactctcggctacgcaaattggattgagag

SEQ ID NO: 241499 - DNA, 33 bp, Homo sapien
ccaaatgcttgtttgtcaaaacttaaaagagga

SEQ ID NO: 241500 - DNA, 33 bp, Homo sapien
ccaaatgcttgtttgtgaaaacttaaaagagga

SEQ ID NO: 241501 - DNA, 33 bp, Homo sapien
taatctctgttccacaacttttgtcataattac

SEQ ID NO: 241502 - DNA, 33 bp, Homo sapien
taatctctgttccacatcttttgtcataattac

SEQ ID NO: 241503 - DNA, 33 bp, Homo sapien
tcttacagtttacagaagacttttcatataagc

SEQ ID NO: 241504 - DNA, 33 bp, Homo sapien
tcttacagtttacagaggacttttcatataagc

SEQ ID NO: 241505 - DNA, 33 bp, Homo sapien
gtgaaagtaagcttcaatactcttaatcattca

SEQ ID NO: 241506 - DNA, 33 bp, Homo sapien
gtgaaagtaagcttcagtactcttaatcattca

SEQ ID NO: 241507 - DNA, 33 bp, Homo sapien
tttccctgtcagcatccgacctcaaactctact

SEQ ID NO: 241508 - DNA, 33 bp, Homo sapien
tttccctgtcagcatcggacctcaaactctact

SEQ ID NO: 241509 - DNA, 33 bp, Homo sapien
cccaaaaccctttagacgaggttgagtcttatc

SEQ ID NO: 241510 - DNA, 33 bp, Homo sapien
cccaaaaccctttagatgaggttgagtcttatc

SEQ ID NO: 241511 - DNA, 33 bp, Homo sapien
tttccctacgcccctcaaagtattggttttgtt

SEQ ID NO: 241512 - DNA, 33 bp, Homo sapien
tttccctacgcccctctaagtattggttttgtt

SEQ ID NO: 241513 - DNA, 33 bp, Homo sapien
atgttcagagagatatgactgggctcaataaga

SEQ ID NO: 241514 - DNA, 33 bp, Homo sapien
atgttcagagagatattactgggctcaataaga

SEQ ID NO: 241515 - DNA, 33 bp, Homo sapien
ggtgggaaattccaaaatccaatcatcaaaaac

SEQ ID NO: 241516 - DNA, 33 bp, Homo sapien
ggtgggaaattccaaagtccaatcatcaaaaac

SEQ ID NO: 241517 - DNA, 33 bp, Homo sapien
cggtctaagttccccaaaaagcagacaaagcgc

SEQ ID NO: 241518 - DNA, 33 bp, Homo sapien
cggtctaagttccccagaaagcagacaaagcgc

SEQ ID NO: 241519 - DNA, 33 bp, Homo sapien
ttcatcaacatttttacagccttattgatgtat

SEQ ID NO: 241520 - DNA, 33 bp, Homo sapien
ttcatcaacatttttatagccttattgatgtat

SEQ ID NO: 241521 - DNA, 33 bp, Homo sapien
ggatggaattatctgaaagtgcaactaaatgtc

SEQ ID NO: 241522 - DNA, 33 bp, Homo sapien
ggatggaattatctgacagtgcaactaaatgtc

SEQ ID NO: 241523 - DNA, 33 bp, Homo sapien
agcagagcttccataaagccatttggacagctt

SEQ ID NO: 241524 - DNA, 33 bp, Homo sapien
agcagagcttccataaggccatttggacagctt

SEQ ID NO: 241525 - DNA, 33 bp, Homo sapien
ggctgtctcaccagcaaataggggataaggcaa

SEQ ID NO: 241526 - DNA, 33 bp, Homo sapien
ggctgtctcaccagcacataggggataaggcaa

SEQ ID NO: 241527 - DNA, 33 bp, Homo sapien
ccatgagatatcttgccaaatgtttcaactgta

SEQ ID NO: 241528 - DNA, 33 bp, Homo sapien
ccatgagatatcttgctaaatgtttcaactgta

SEQ ID NO: 241529 - DNA, 33 bp, Homo sapien
tgttcccttttacacaacagtttcttgaaaaaa

SEQ ID NO: 241530 - DNA, 33 bp, Homo sapien
tgttcccttttacacagcagtttcttgaaaaaa

SEQ ID NO: 241531 - DNA, 33 bp, Homo sapien
aattgctgtgtaggagcatctttgggttcccag

SEQ ID NO: 241532 - DNA, 33 bp, Homo sapien
aattgctgtgtaggagtatctttgggttcccag

SEQ ID NO: 241533 - DNA, 33 bp, Homo sapien
actcaggagctaggaaaggtattctgatactgc

SEQ ID NO: 241534 - DNA, 33 bp, Homo sapien
actcaggagctaggaagggtattctgatactgc

SEQ ID NO: 241535 - DNA, 33 bp, Homo sapien
ctgggcttgttaggaacgcagaaatctcagaca

SEQ ID NO: 241536 - DNA, 33 bp, Homo sapien
ctgggcttgttaggaatgcagaaatctcagaca

SEQ ID NO: 241537 - DNA, 33 bp, Homo sapien
tctgaatttcctctccaattagcacatctcaca

SEQ ID NO: 241538 - DNA, 33 bp, Homo sapien
tctgaatttcctctccgattagcacatctcaca

SEQ ID NO: 241539 - DNA, 33 bp, Homo sapien
aagaaggatgaaaacaaagaactggaattatac

SEQ ID NO: 241540 - DNA, 33 bp, Homo sapien
aagaaggatgaaaacagagaactggaattatac

SEQ ID NO: 241541 - DNA, 33 bp, Homo sapien
ccttcaacatgaaaaacgagaagtcacctgcgc

SEQ ID NO: 241542 - DNA, 33 bp, Homo sapien
ccttcaacatgaaaaatgagaagtcacctgcgc

SEQ ID NO: 241543 - DNA, 33 bp, Homo sapien
ttacaggaaacaaatacatcggaaggtgcttta

SEQ ID NO: 241544 - DNA, 33 bp, Homo sapien
ttacaggaaacaaatatatcggaaggtgcttta

SEQ ID NO: 241545 - DNA, 33 bp, Homo sapien
gttctcaattctgagcacttctctccttctgca

SEQ ID NO: 241546 - DNA, 33 bp, Homo sapien
gttctcaattctgagcgcttctctccttctgca

SEQ ID NO: 241547 - DNA, 33 bp, Homo sapien
gaaaaatgaaaagacacaatgtagtgtattcat

SEQ ID NO: 241548 - DNA, 33 bp, Homo sapien
gaaaaatgaaaagacagaatgtagtgtattcat

SEQ ID NO: 241549 - DNA, 33 bp, Homo sapien
tgaccagaattaaaaaagatctgagcattacat

SEQ ID NO: 241550 - DNA, 33 bp, Homo sapien
tgaccagaattaaaaaggatctgagcattacat

SEQ ID NO: 241551 - DNA, 33 bp, Homo sapien
cttccatcagttgctccgacactttcttggggt

SEQ ID NO: 241552 - DNA, 33 bp, Homo sapien
cttccatcagttgctctgacactttcttggggt

SEQ ID NO: 241553 - DNA, 33 bp, Homo sapien
tcaatattcccactcccatctgcatggctcact

SEQ ID NO: 241554 - DNA, 33 bp, Homo sapien
tcaatattcccactcctatctgcatggctcact

SEQ ID NO: 241555 - DNA, 33 bp, Homo sapien
tccatgtttgttagaacgtatataaaactgcct

SEQ ID NO: 241556 - DNA, 33 bp, Homo sapien
tccatgtttgttagaatgtatataaaactgcct

SEQ ID NO: 241557 - DNA, 33 bp, Homo sapien
tgcccaaaactctactaaaaggctagatccctt

SEQ ID NO: 241558 - DNA, 33 bp, Homo sapien
tgcccaaaactctactgaaaggctagatccctt

SEQ ID NO: 241559 - DNA, 33 bp, Homo sapien
gataaaacaaacattaacatcaccatgtgcact

SEQ ID NO: 241560 - DNA, 33 bp, Homo sapien
gataaaacaaacattaccatcaccatgtgcact

SEQ ID NO: 241561 - DNA, 33 bp, Homo sapien
tcaaaagcagattaaactggctatgcctccaca

SEQ ID NO: 241562 - DNA, 33 bp, Homo sapien
tcaaaagcagattaaattggctatgcctccaca

SEQ ID NO: 241563 - DNA, 33 bp, Homo sapien
tttagagggtgtagaccaatcaaattccttcta

SEQ ID NO: 241564 - DNA, 33 bp, Homo sapien
tttagagggtgtagactaatcaaattccttcta

SEQ ID NO: 241565 - DNA, 33 bp, Homo sapien
cactcttgagtgtccgaatttttagaaacaaga

SEQ ID NO: 241566 - DNA, 33 bp, Homo sapien
cactcttgagtgtccgcatttttagaaacaaga

SEQ ID NO: 241567 - DNA, 33 bp, Homo sapien
tattagatgaactgtcaagaatgtaattatttc

SEQ ID NO: 241568 - DNA, 33 bp, Homo sapien
tattagatgaactgtcgagaatgtaattatttc

SEQ ID NO: 241569 - DNA, 33 bp, Homo sapien
tgatctcatctataacagctgcctggcacacca

SEQ ID NO: 241570 - DNA, 33 bp, Homo sapien
tgatctcatctataacggctgcctggcacacca

SEQ ID NO: 241571 - DNA, 33 bp, Homo sapien
aaaagttaatatggtaaactgaaaatctctagg

SEQ ID NO: 241572 - DNA, 33 bp, Homo sapien
aaaagttaatatggtagactgaaaatctctagg

SEQ ID NO: 241573 - DNA, 33 bp, Homo sapien
atatggatttgccaagaagatgtgtgctcttgg

SEQ ID NO: 241574 - DNA, 33 bp, Homo sapien
atatggatttgccaaggagatgtgtgctcttgg

SEQ ID NO: 241575 - DNA, 33 bp, Homo sapien
agtctggagctgtaaaactccattttgttctgt

SEQ ID NO: 241576 - DNA, 33 bp, Homo sapien
agtctggagctgtaaacctccattttgttctgt

SEQ ID NO: 241577 - DNA, 33 bp, Homo sapien
caagtcctactcaaaacgatgctgggggtcttt

SEQ ID NO: 241578 - DNA, 33 bp, Homo sapien
caagtcctactcaaaatgatgctgggggtcttt

SEQ ID NO: 241579 - DNA, 33 bp, Homo sapien
tttaagacatagtccaagttctatttcctcttg

SEQ ID NO: 241580 - DNA, 33 bp, Homo sapien
tttaagacatagtccaggttctatttcctcttg

SEQ ID NO: 241581 - DNA, 33 bp, Homo sapien
caactcccacattttccacaaagacttctctaa

SEQ ID NO: 241582 - DNA, 33 bp, Homo sapien
caactcccacattttctacaaagacttctctaa

SEQ ID NO: 241583 - DNA, 33 bp, Homo sapien
tcactttgcttgctgaatatcttgaggataagc

SEQ ID NO: 241584 - DNA, 33 bp, Homo sapien
tcactttgcttgctgagtatcttgaggataagc

SEQ ID NO: 241585 - DNA, 33 bp, Homo sapien
agctgctattgctaaactgagcttcaaggatac

SEQ ID NO: 241586 - DNA, 33 bp, Homo sapien
agctgctattgctaaattgagcttcaaggatac

SEQ ID NO: 241587 - DNA, 33 bp, Homo sapien
ttttcaaacaggaaagcctactggtttaataca

SEQ ID NO: 241588 - DNA, 33 bp, Homo sapien
ttttcaaacaggaaaggctactggtttaataca

SEQ ID NO: 241589 - DNA, 33 bp, Homo sapien
ttctttctgcataatacaggagttctgggattt

SEQ ID NO: 241590 - DNA, 33 bp, Homo sapien
ttctttctgcataatagaggagttctgggattt

SEQ ID NO: 241591 - DNA, 33 bp, Homo sapien
cataggaaattctggcacgggcaaatagaaacc

SEQ ID NO: 241592 - DNA, 33 bp, Homo sapien
cataggaaattctggcccgggcaaatagaaacc

SEQ ID NO: 241593 - DNA, 33 bp, Homo sapien
ggccagccttgcatgacctctgttatctccttc

SEQ ID NO: 241594 - DNA, 33 bp, Homo sapien
ggccagccttgcatgatctctgttatctccttc

SEQ ID NO: 241595 - DNA, 33 bp, Homo sapien
gggaacagaaatagaaagaggtccaaaatatat

SEQ ID NO: 241596 - DNA, 33 bp, Homo sapien
gggaacagaaatagaaggaggtccaaaatatat

SEQ ID NO: 241597 - DNA, 33 bp, Homo sapien
tactgtcactgtgaaacgcaaagttatttgaaa

SEQ ID NO: 241598 - DNA, 33 bp, Homo sapien
tactgtcactgtgaaatgcaaagttatttgaaa

SEQ ID NO: 241599 - DNA, 33 bp, Homo sapien
gttatgcaacaaacaaaagtcctggcattagtg

SEQ ID NO: 241600 - DNA, 33 bp, Homo sapien
gttatgcaacaaacaagagtcctggcattagtg

SEQ ID NO: 241601 - DNA, 33 bp, Homo sapien
cacaatgtctcagtcacgtatgaggttggactc

SEQ ID NO: 241602 - DNA, 33 bp, Homo sapien
cacaatgtctcagtcaggtatgaggttggactc

SEQ ID NO: 241603 - DNA, 33 bp, Homo sapien
tttcattgcattcatacatttttctgggatgct

SEQ ID NO: 241604 - DNA, 33 bp, Homo sapien
tttcattgcattcatatatttttctgggatgct

SEQ ID NO: 241605 - DNA, 33 bp, Homo sapien
ccctaagctgactttacagattcttcatttgtt

SEQ ID NO: 241606 - DNA, 33 bp, Homo sapien
ccctaagctgactttagagattcttcatttgtt

SEQ ID NO: 241607 - DNA, 33 bp, Homo sapien
tggatgttcttaatcacctacaaggaatccatg

SEQ ID NO: 241608 - DNA, 33 bp, Homo sapien
tggatgttcttaatcatctacaaggaatccatg

SEQ ID NO: 241609 - DNA, 33 bp, Homo sapien
gttataacctctggggacactcaccgttagcca

SEQ ID NO: 241610 - DNA, 33 bp, Homo sapien
gttataacctctgggggcactcaccgttagcca

SEQ ID NO: 241611 - DNA, 33 bp, Homo sapien
tatagatgaaactaaaattcagagaaataatag

SEQ ID NO: 241612 - DNA, 33 bp, Homo sapien
tatagatgaaactaaagttcagagaaataatag

SEQ ID NO: 241613 - DNA, 33 bp, Homo sapien
gggctttagagaggaaacaaagatagtagtgaa

SEQ ID NO: 241614 - DNA, 33 bp, Homo sapien
gggctttagagaggaatcaaagatagtagtgaa

SEQ ID NO: 241615 - DNA, 33 bp, Homo sapien
ccctagcataacacacagcagcgcaaccctaat

SEQ ID NO: 241616 - DNA, 33 bp, Homo sapien
ccctagcataacacaccgcagcgcaaccctaat

SEQ ID NO: 241617 - DNA, 33 bp, Homo sapien
tcctttctttttaaaaaatgccatcaaattcct

SEQ ID NO: 241618 - DNA, 33 bp, Homo sapien
tcctttctttttaaaatatgccatcaaattcct

SEQ ID NO: 241619 - DNA, 33 bp, Homo sapien
tctgtcaatggtcccccatcagaaatatcctgc

SEQ ID NO: 241620 - DNA, 33 bp, Homo sapien
tctgtcaatggtcccctatcagaaatatcctgc

SEQ ID NO: 241621 - DNA, 33 bp, Homo sapien
attgagatcacaaaaagcttcatgaactgggaa

SEQ ID NO: 241622 - DNA, 33 bp, Homo sapien
attgagatcacaaaaatcttcatgaactgggaa

SEQ ID NO: 241623 - DNA, 33 bp, Homo sapien
tattttgtttaaccctcacatatgttcctcaca

SEQ ID NO: 241624 - DNA, 33 bp, Homo sapien
tattttgtttaacccttacatatgttcctcaca

SEQ ID NO: 241625 - DNA, 33 bp, Homo sapien
ggtacccacgttgtagcactgttgttaagatta

SEQ ID NO: 241626 - DNA, 33 bp, Homo sapien
ggtacccacgttgtaggactgttgttaagatta

SEQ ID NO: 241627 - DNA, 33 bp, Homo sapien
tcagtcctcactggacaccccgcatctatacct

SEQ ID NO: 241628 - DNA, 33 bp, Homo sapien
tcagtcctcactggacgccccgcatctatacct

SEQ ID NO: 241629 - DNA, 33 bp, Homo sapien
gcagccttgaggaaagaagtcacaactcaaaga

SEQ ID NO: 241630 - DNA, 33 bp, Homo sapien
gcagccttgaggaaaggagtcacaactcaaaga

SEQ ID NO: 241631 - DNA, 33 bp, Homo sapien
gaatcatcactgctacagcaatgctccacaatc

SEQ ID NO: 241632 - DNA, 33 bp, Homo sapien
gaatcatcactgctactgcaatgctccacaatc

SEQ ID NO: 241633 - DNA, 33 bp, Homo sapien
tgggtggaagtggagcaagatgaagttccagaa

SEQ ID NO: 241634 - DNA, 33 bp, Homo sapien
tgggtggaagtggagcgagatgaagttccagaa

SEQ ID NO: 241635 - DNA, 33 bp, Homo sapien
atgagaccagaaactgcagcagcacaacaggga

SEQ ID NO: 241636 - DNA, 33 bp, Homo sapien
atgagaccagaaactgtagcagcacaacaggga

SEQ ID NO: 241637 - DNA, 33 bp, Homo sapien
tcctttgatgcaaccaccagtgccaagctttga

SEQ ID NO: 241638 - DNA, 33 bp, Homo sapien
tcctttgatgcaaccatcagtgccaagctttga

SEQ ID NO: 241639 - DNA, 33 bp, Homo sapien
acatgcaacgtccagaagacaaggtgacgtggg

SEQ ID NO: 241640 - DNA, 33 bp, Homo sapien
acatgcaacgtccagaggacaaggtgacgtggg

SEQ ID NO: 241641 - DNA, 33 bp, Homo sapien
cttacactcaaagatgacagggttcattgtaaa

SEQ ID NO: 241642 - DNA, 33 bp, Homo sapien
cttacactcaaagatgtcagggttcattgtaaa

SEQ ID NO: 241643 - DNA, 33 bp, Homo sapien
tgacacagcgacaaccagaacagaatacagagc

SEQ ID NO: 241644 - DNA, 33 bp, Homo sapien
tgacacagcgacaaccggaacagaatacagagc

SEQ ID NO: 241645 - DNA, 33 bp, Homo sapien
tgagtttattaatacaaattgttggcaaggacg

SEQ ID NO: 241646 - DNA, 33 bp, Homo sapien
tgagtttattaatacatattgttggcaaggacg

SEQ ID NO: 241647 - DNA, 33 bp, Homo sapien
aaattaggcctggtccaaagagaacattcttct

SEQ ID NO: 241648 - DNA, 33 bp, Homo sapien
aaattaggcctggtccgaagagaacattcttct

SEQ ID NO: 241649 - DNA, 33 bp, Homo sapien
cctgggaggaaacagaggattggtgactggtgt

SEQ ID NO: 241650 - DNA, 33 bp, Homo sapien
cctgggaggaaacagatgattggtgactggtgt

SEQ ID NO: 241651 - DNA, 33 bp, Homo sapien
aaaattccttgaagtacaccacaaagtataagc

SEQ ID NO: 241652 - DNA, 33 bp, Homo sapien
aaaattccttgaagtataccacaaagtataagc

SEQ ID NO: 241653 - DNA, 33 bp, Homo sapien
ctggggtggaagccaaatgaacccattccaatg

SEQ ID NO: 241654 - DNA, 33 bp, Homo sapien
ctggggtggaagccaattgaacccattccaatg

SEQ ID NO: 241655 - DNA, 33 bp, Homo sapien
tccctgaggagaaaatcaatatgcaaaaacaga

SEQ ID NO: 241656 - DNA, 33 bp, Homo sapien
tccctgaggagaaaatgaatatgcaaaaacaga

SEQ ID NO: 241657 - DNA, 33 bp, Homo sapien
tcctttcttactgactcaggctctttgaaccaa

SEQ ID NO: 241658 - DNA, 33 bp, Homo sapien
tcctttcttactgacttaggctctttgaaccaa

SEQ ID NO: 241659 - DNA, 33 bp, Homo sapien
gagcagagaggagcgaaagtggatataatgggc

SEQ ID NO: 241660 - DNA, 33 bp, Homo sapien
gagcagagaggagcgagagtggatataatgggc

SEQ ID NO: 241661 - DNA, 33 bp, Homo sapien
agttgtaaccacctaacagctagtcaggagctt

SEQ ID NO: 241662 - DNA, 33 bp, Homo sapien
agttgtaaccacctaatagctagtcaggagctt

SEQ ID NO: 241663 - DNA, 33 bp, Homo sapien
aacggggcaggtaaataaactccaagaatgtta

SEQ ID NO: 241664 - DNA, 33 bp, Homo sapien
aacggggcaggtaaatgaactccaagaatgtta

SEQ ID NO: 241665 - DNA, 33 bp, Homo sapien
ctacccctcactgaatcataccttccaaccctg

SEQ ID NO: 241666 - DNA, 33 bp, Homo sapien
ctacccctcactgaattataccttccaaccctg

SEQ ID NO: 241667 - DNA, 33 bp, Homo sapien
atttgtcttaattgggaacaaaactagtaccag

SEQ ID NO: 241668 - DNA, 33 bp, Homo sapien
atttgtcttaattggggacaaaactagtaccag

SEQ ID NO: 241669 - DNA, 33 bp, Homo sapien
ttcgatcttgaaaaacagaaagcacctaaacaa

SEQ ID NO: 241670 - DNA, 33 bp, Homo sapien
ttcgatcttgaaaaacggaaagcacctaaacaa

SEQ ID NO: 241671 - DNA, 33 bp, Homo sapien
tgatgctgcaaaagggaatctattaaagaacaa

SEQ ID NO: 241672 - DNA, 33 bp, Homo sapien
tgatgctgcaaaaggggatctattaaagaacaa

SEQ ID NO: 241673 - DNA, 33 bp, Homo sapien
gaaagtgtacattaaacaaatccaagtaagagg

SEQ ID NO: 241674 - DNA, 33 bp, Homo sapien
gaaagtgtacattaaataaatccaagtaagagg

SEQ ID NO: 241675 - DNA, 33 bp, Homo sapien
agagatgttgttctaaatcctaatctgggacct

SEQ ID NO: 241676 - DNA, 33 bp, Homo sapien
agagatgttgttctaagtcctaatctgggacct

SEQ ID NO: 241677 - DNA, 33 bp, Homo sapien
atataggcaaggattaagcagggtgtgcaaggg

SEQ ID NO: 241678 - DNA, 33 bp, Homo sapien
atataggcaaggattacgcagggtgtgcaaggg

SEQ ID NO: 241679 - DNA, 33 bp, Homo sapien
tcaagtcaagtcgatcacttgacttttctgacc

SEQ ID NO: 241680 - DNA, 33 bp, Homo sapien
tcaagtcaagtcgatcgcttgacttttctgacc

SEQ ID NO: 241681 - DNA, 33 bp, Homo sapien
tcatctcatttacaaccccttgtgaccaataat

SEQ ID NO: 241682 - DNA, 33 bp, Homo sapien
tcatctcatttacaactccttgtgaccaataat

SEQ ID NO: 241683 - DNA, 33 bp, Homo sapien
cacatgaaccaagtccacagagagtcatcagtg

SEQ ID NO: 241684 - DNA, 33 bp, Homo sapien
cacatgaaccaagtccgcagagagtcatcagtg

SEQ ID NO: 241685 - DNA, 33 bp, Homo sapien
gtccaagatttagtccgcagccttgtagtctca

SEQ ID NO: 241686 - DNA, 33 bp, Homo sapien
gtccaagatttagtcctcagccttgtagtctca

SEQ ID NO: 241687 - DNA, 33 bp, Homo sapien
ctactgcttcttcttcaatcataactctatccc

SEQ ID NO: 241688 - DNA, 33 bp, Homo sapien
ctactgcttcttcttcgatcataactctatccc

SEQ ID NO: 241689 - DNA, 33 bp, Homo sapien
catgctatgagctaggaaatcagcttaattgga

SEQ ID NO: 241690 - DNA, 33 bp, Homo sapien
catgctatgagctagggaatcagcttaattgga

SEQ ID NO: 241691 - DNA, 33 bp, Homo sapien
gagaagaggcaatacaaataggcaggtccgtgc

SEQ ID NO: 241692 - DNA, 33 bp, Homo sapien
gagaagaggcaatacagataggcaggtccgtgc

SEQ ID NO: 241693 - DNA, 33 bp, Homo sapien
ttcttgtagaaactgcaataaaatggtgtttaa

SEQ ID NO: 241694 - DNA, 33 bp, Homo sapien
ttcttgtagaaactgcgataaaatggtgtttaa

SEQ ID NO: 241695 - DNA, 33 bp, Homo sapien
ctgcaagaccaagaacaaagaggactcaaggta

SEQ ID NO: 241696 - DNA, 33 bp, Homo sapien
ctgcaagaccaagaactaagaggactcaaggta

SEQ ID NO: 241697 - DNA, 33 bp, Homo sapien
gaggatttgattttcagcagtctttatgagacc

SEQ ID NO: 241698 - DNA, 33 bp, Homo sapien
gaggatttgattttcatcagtctttatgagacc

SEQ ID NO: 241699 - DNA, 33 bp, Homo sapien
atttctgcttcctaaaaccaaaagaaactgaac

SEQ ID NO: 241700 - DNA, 33 bp, Homo sapien
atttctgcttcctaaagccaaaagaaactgaac

SEQ ID NO: 241701 - DNA, 33 bp, Homo sapien
aagagaatttgacaaacgtggtagagatggtca

SEQ ID NO: 241702 - DNA, 33 bp, Homo sapien
aagagaatttgacaaatgtggtagagatggtca

SEQ ID NO: 241703 - DNA, 33 bp, Homo sapien
aaatggaatcataccacacgtgctgttctataa

SEQ ID NO: 241704 - DNA, 33 bp, Homo sapien
aaatggaatcataccatacgtgctgttctataa

SEQ ID NO: 241705 - DNA, 33 bp, Homo sapien
tacatgaggaacatggcagacagagttggttgc

SEQ ID NO: 241706 - DNA, 33 bp, Homo sapien
tacatgaggaacatgggagacagagttggttgc

SEQ ID NO: 241707 - DNA, 33 bp, Homo sapien
gaagtatgagcatccccaatatcttccccaccc

SEQ ID NO: 241708 - DNA, 33 bp, Homo sapien
gaagtatgagcatcccgaatatcttccccaccc

SEQ ID NO: 241709 - DNA, 33 bp, Homo sapien
aaattgagcttttggacacgcagaattgaaatg

SEQ ID NO: 241710 - DNA, 33 bp, Homo sapien
aaattgagcttttggatacgcagaattgaaatg

SEQ ID NO: 241711 - DNA, 33 bp, Homo sapien
ttgacatttaagaatacgaggctggcttggtgg

SEQ ID NO: 241712 - DNA, 33 bp, Homo sapien
ttgacatttaagaatatgaggctggcttggtgg

SEQ ID NO: 241713 - DNA, 33 bp, Homo sapien
tgcctgccgagttaccaggcttcaaatcgtaat

SEQ ID NO: 241714 - DNA, 33 bp, Homo sapien
tgcctgccgagttaccgggcttcaaatcgtaat

SEQ ID NO: 241715 - DNA, 33 bp, Homo sapien
tggtcctctgtgcaaaagtattaaaccgtgaag

SEQ ID NO: 241716 - DNA, 33 bp, Homo sapien
tggtcctctgtgcaaatgtattaaaccgtgaag

SEQ ID NO: 241717 - DNA, 33 bp, Homo sapien
taggccttagcaattcaattaaattaagagcaa

SEQ ID NO: 241718 - DNA, 33 bp, Homo sapien
taggccttagcaattccattaaattaagagcaa

SEQ ID NO: 241719 - DNA, 33 bp, Homo sapien
taaacatgcaaactcaataccaaattggtttat

SEQ ID NO: 241720 - DNA, 33 bp, Homo sapien
taaacatgcaaactcactaccaaattggtttat

SEQ ID NO: 241721 - DNA, 33 bp, Homo sapien
cattgatctagactaccatgattgatgttgcag

SEQ ID NO: 241722 - DNA, 33 bp, Homo sapien
cattgatctagactactatgattgatgttgcag

SEQ ID NO: 241723 - DNA, 33 bp, Homo sapien
aaacatgataatacaccgctttatacagacata

SEQ ID NO: 241724 - DNA, 33 bp, Homo sapien
aaacatgataatacactgctttatacagacata

SEQ ID NO: 241725 - DNA, 33 bp, Homo sapien
aacagtagaaaattgacacatataaagcagtga

SEQ ID NO: 241726 - DNA, 33 bp, Homo sapien
aacagtagaaaattgatacatataaagcagtga

SEQ ID NO: 241727 - DNA, 33 bp, Homo sapien
attctatcctgatgagaaagtatagtttgtttc

SEQ ID NO: 241728 - DNA, 33 bp, Homo sapien
attctatcctgatgaggaagtatagtttgtttc

SEQ ID NO: 241729 - DNA, 33 bp, Homo sapien
ggtagactctttccttcaaccatgtataaaatt

SEQ ID NO: 241730 - DNA, 33 bp, Homo sapien
ggtagactctttccttgaaccatgtataaaatt

SEQ ID NO: 241731 - DNA, 33 bp, Homo sapien
tgggcaatggaagtacaagcctgtctcaaaaaa

SEQ ID NO: 241732 - DNA, 33 bp, Homo sapien
tgggcaatggaagtacgagcctgtctcaaaaaa

SEQ ID NO: 241733 - DNA, 33 bp, Homo sapien
atgtaaaggaactaaacgctttctcagcctgag

SEQ ID NO: 241734 - DNA, 33 bp, Homo sapien
atgtaaaggaactaaatgctttctcagcctgag

SEQ ID NO: 241735 - DNA, 33 bp, Homo sapien
agcatcccttctatgacattcttgcctaatgca

SEQ ID NO: 241736 - DNA, 33 bp, Homo sapien
agcatcccttctatgatattcttgcctaatgca

SEQ ID NO: 241737 - DNA, 33 bp, Homo sapien
aaccaatccagacaaccgagaacaaattcaggg

SEQ ID NO: 241738 - DNA, 33 bp, Homo sapien
aaccaatccagacaacggagaacaaattcaggg

SEQ ID NO: 241739 - DNA, 33 bp, Homo sapien
agtctatgagaactcaatgagataatgtctaaa

SEQ ID NO: 241740 - DNA, 33 bp, Homo sapien
agtctatgagaactcagtgagataatgtctaaa

SEQ ID NO: 241741 - DNA, 33 bp, Homo sapien
ttactattaacttttacggagggcttgttagta

SEQ ID NO: 241742 - DNA, 33 bp, Homo sapien
ttactattaacttttagggagggcttgttagta

SEQ ID NO: 241743 - DNA, 33 bp, Homo sapien
tgtccgcacacgagtcaagtcctgatagtaaca

SEQ ID NO: 241744 - DNA, 33 bp, Homo sapien
tgtccgcacacgagtcgagtcctgatagtaaca

SEQ ID NO: 241745 - DNA, 33 bp, Homo sapien
ttgagttactttgatacgcctcatcttatccta

SEQ ID NO: 241746 - DNA, 33 bp, Homo sapien
ttgagttactttgatatgcctcatcttatccta

SEQ ID NO: 241747 - DNA, 33 bp, Homo sapien
tccctggtacccagaaaaggcctacatgatgcc

SEQ ID NO: 241748 - DNA, 33 bp, Homo sapien
tccctggtacccagaataggcctacatgatgcc

SEQ ID NO: 241749 - DNA, 33 bp, Homo sapien
gtctcattatattgctcagactggcgcatatat

SEQ ID NO: 241750 - DNA, 33 bp, Homo sapien
gtctcattatattgcttagactggcgcatatat

SEQ ID NO: 241751 - DNA, 33 bp, Homo sapien
agaaagatttcattcaataagttcctgattatc

SEQ ID NO: 241752 - DNA, 33 bp, Homo sapien
agaaagatttcattcagtaagttcctgattatc

SEQ ID NO: 241753 - DNA, 33 bp, Homo sapien
agctactcaggaccaaccgagcccaggagttta

SEQ ID NO: 241754 - DNA, 33 bp, Homo sapien
agctactcaggaccaatcgagcccaggagttta

SEQ ID NO: 241755 - DNA, 33 bp, Homo sapien
gtcataatcttgcaaaaactaaaagtatcctaa

SEQ ID NO: 241756 - DNA, 33 bp, Homo sapien
gtcataatcttgcaaagactaaaagtatcctaa

SEQ ID NO: 241757 - DNA, 33 bp, Homo sapien
ttagtttgttcatccacctggttttccactgaa

SEQ ID NO: 241758 - DNA, 33 bp, Homo sapien
ttagtttgttcatccatctggttttccactgaa

SEQ ID NO: 241759 - DNA, 33 bp, Homo sapien
gttttacagctttcttgaacatttggcaaccta

SEQ ID NO: 241760 - DNA, 33 bp, Homo sapien
gttttacagctttctttaacatttggcaaccta

SEQ ID NO: 241761 - DNA, 33 bp, Homo sapien
ttctccaccaagctgaaaaagtaagccaagaaa

SEQ ID NO: 241762 - DNA, 33 bp, Homo sapien
ttctccaccaagctgagaaagtaagccaagaaa

SEQ ID NO: 241763 - DNA, 33 bp, Homo sapien
atgagatacaaaataccgtaaactttgctcact

SEQ ID NO: 241764 - DNA, 33 bp, Homo sapien
atgagatacaaaatactgtaaactttgctcact

SEQ ID NO: 241765 - DNA, 33 bp, Homo sapien
tggaaattacagaggcagatttttctattcatt

SEQ ID NO: 241766 - DNA, 33 bp, Homo sapien
tggaaattacagaggcggatttttctattcatt

SEQ ID NO: 241767 - DNA, 33 bp, Homo sapien
gccttttgacttcccacgtgtcttactgccact

SEQ ID NO: 241768 - DNA, 33 bp, Homo sapien
gccttttgacttcccatgtgtcttactgccact

SEQ ID NO: 241769 - DNA, 33 bp, Homo sapien
aaaacaagttactgaaagcgagatctacttaaa

SEQ ID NO: 241770 - DNA, 33 bp, Homo sapien
aaaacaagttactgaacgcgagatctacttaaa

SEQ ID NO: 241771 - DNA, 33 bp, Homo sapien
atgtaagcggaaccagaagaagccattaggcag

SEQ ID NO: 241772 - DNA, 33 bp, Homo sapien
atgtaagcggaaccaggagaagccattaggcag

SEQ ID NO: 241773 - DNA, 33 bp, Homo sapien
tctgcgaattaagaaccgctacattagaggagc

SEQ ID NO: 241774 - DNA, 33 bp, Homo sapien
tctgcgaattaagaactgctacattagaggagc

SEQ ID NO: 241775 - DNA, 33 bp, Homo sapien
ttccagcaatcacccccaaatgctattccaaat

SEQ ID NO: 241776 - DNA, 33 bp, Homo sapien
ttccagcaatcacccctaaatgctattccaaat

SEQ ID NO: 241777 - DNA, 33 bp, Homo sapien
cagtccagtcttgaagccttaaaattcttttga

SEQ ID NO: 241778 - DNA, 33 bp, Homo sapien
cagtccagtcttgaaggcttaaaattcttttga

SEQ ID NO: 241779 - DNA, 33 bp, Homo sapien
aacaagcttcacttgcactaaaaaaagcttctt

SEQ ID NO: 241780 - DNA, 33 bp, Homo sapien
aacaagcttcacttgccctaaaaaaagcttctt

SEQ ID NO: 241781 - DNA, 33 bp, Homo sapien
ccattttaatcttctccaggtgaacagtttgtc

SEQ ID NO: 241782 - DNA, 33 bp, Homo sapien
ccattttaatcttctctaggtgaacagtttgtc

SEQ ID NO: 241783 - DNA, 33 bp, Homo sapien
agcccccagttcaatgccatgggtagaagactg

SEQ ID NO: 241784 - DNA, 33 bp, Homo sapien
agcccccagttcaatgtcatgggtagaagactg

SEQ ID NO: 241785 - DNA, 33 bp, Homo sapien
aatattttaactagcacgagctttccttatagc

SEQ ID NO: 241786 - DNA, 33 bp, Homo sapien
aatattttaactagcatgagctttccttatagc

SEQ ID NO: 241787 - DNA, 33 bp, Homo sapien
ggtatttttgaacagaactttgtgatatattgc

SEQ ID NO: 241788 - DNA, 33 bp, Homo sapien
ggtatttttgaacagacctttgtgatatattgc

SEQ ID NO: 241789 - DNA, 33 bp, Homo sapien
gcatagcacccttcaacagggagagatggtttt

SEQ ID NO: 241790 - DNA, 33 bp, Homo sapien
gcatagcacccttcaatagggagagatggtttt

SEQ ID NO: 241791 - DNA, 33 bp, Homo sapien
agctcaatcacccctaataggccgtcattgtct

SEQ ID NO: 241792 - DNA, 33 bp, Homo sapien
agctcaatcacccctagtaggccgtcattgtct

SEQ ID NO: 241793 - DNA, 33 bp, Homo sapien
gatatccagtaggaaacgagaatcagatctgga

SEQ ID NO: 241794 - DNA, 33 bp, Homo sapien
gatatccagtaggaaatgagaatcagatctgga

SEQ ID NO: 241795 - DNA, 33 bp, Homo sapien
aagctactcttaatgaaatcagcaacaattttt

SEQ ID NO: 241796 - DNA, 33 bp, Homo sapien
aagctactcttaatgatatcagcaacaattttt

SEQ ID NO: 241797 - DNA, 33 bp, Homo sapien
aactctaaaatgtagacgctatattaacatacc

SEQ ID NO: 241798 - DNA, 33 bp, Homo sapien
aactctaaaatgtagatgctatattaacatacc

SEQ ID NO: 241799 - DNA, 33 bp, Homo sapien
tttccctgccatcataacaagtagcctggagag

SEQ ID NO: 241800 - DNA, 33 bp, Homo sapien
tttccctgccatcatagcaagtagcctggagag

SEQ ID NO: 241801 - DNA, 33 bp, Homo sapien
ctgtgaacagccactgcattctagccggggcaa

SEQ ID NO: 241802 - DNA, 33 bp, Homo sapien
ctgtgaacagccactgtattctagccggggcaa

SEQ ID NO: 241803 - DNA, 33 bp, Homo sapien
ttctggttttgaaagactctggtgaaatgtagt

SEQ ID NO: 241804 - DNA, 33 bp, Homo sapien
ttctggttttgaaagattctggtgaaatgtagt

SEQ ID NO: 241805 - DNA, 33 bp, Homo sapien
gttttaagcacgcactcaatagtctgagaatat

SEQ ID NO: 241806 - DNA, 33 bp, Homo sapien
gttttaagcacgcactgaatagtctgagaatat

SEQ ID NO: 241807 - DNA, 33 bp, Homo sapien
ctgtaaagaaggagaacagtacttgacctactt

SEQ ID NO: 241808 - DNA, 33 bp, Homo sapien
ctgtaaagaaggagaatagtacttgacctactt

SEQ ID NO: 241809 - DNA, 33 bp, Homo sapien
gcttctgtatggctcaccttctacttcccttcc

SEQ ID NO: 241810 - DNA, 33 bp, Homo sapien
gcttctgtatggctcagcttctacttcccttcc

SEQ ID NO: 241811 - DNA, 33 bp, Homo sapien
acaatgtgtttttaagaagctggtaacatttgg

SEQ ID NO: 241812 - DNA, 33 bp, Homo sapien
acaatgtgtttttaaggagctggtaacatttgg

SEQ ID NO: 241813 - DNA, 33 bp, Homo sapien
atgaggcttcttaagacgttgcttcttactttg

SEQ ID NO: 241814 - DNA, 33 bp, Homo sapien
atgaggcttcttaagatgttgcttcttactttg

SEQ ID NO: 241815 - DNA, 33 bp, Homo sapien
gggtttgtgattttcccaggagttggtccagcc

SEQ ID NO: 241816 - DNA, 33 bp, Homo sapien
gggtttgtgattttcctaggagttggtccagcc

SEQ ID NO: 241817 - DNA, 33 bp, Homo sapien
agtattataaggaaagcagaggttgagtcccaa

SEQ ID NO: 241818 - DNA, 33 bp, Homo sapien
agtattataaggaaagtagaggttgagtcccaa

SEQ ID NO: 241819 - DNA, 33 bp, Homo sapien
gcagcattagtcacaacgtcctaagacaaggaa

SEQ ID NO: 241820 - DNA, 33 bp, Homo sapien
gcagcattagtcacaatgtcctaagacaaggaa

SEQ ID NO: 241821 - DNA, 33 bp, Homo sapien
agaagctgccagtaggaacttagaactgtagta

SEQ ID NO: 241822 - DNA, 33 bp, Homo sapien
agaagctgccagtagggacttagaactgtagta

SEQ ID NO: 241823 - DNA, 33 bp, Homo sapien
tgggaagttttggaaacgcatttgttctcctcc

SEQ ID NO: 241824 - DNA, 33 bp, Homo sapien
tgggaagttttggaaatgcatttgttctcctcc

SEQ ID NO: 241825 - DNA, 33 bp, Homo sapien
cgtcctctaagacctcacttaaaatatcctcac

SEQ ID NO: 241826 - DNA, 33 bp, Homo sapien
cgtcctctaagacctcgcttaaaatatcctcac

SEQ ID NO: 241827 - DNA, 33 bp, Homo sapien
tccctttttatctccaaagccaataactccatc

SEQ ID NO: 241828 - DNA, 33 bp, Homo sapien
tccctttttatctccacagccaataactccatc

SEQ ID NO: 241829 - DNA, 33 bp, Homo sapien
tgttgttcacctcccacgtataaatgagaacac

SEQ ID NO: 241830 - DNA, 33 bp, Homo sapien
tgttgttcacctcccatgtataaatgagaacac

SEQ ID NO: 241831 - DNA, 33 bp, Homo sapien
acccagttatatcatccacatcacggtcaactt

SEQ ID NO: 241832 - DNA, 33 bp, Homo sapien
acccagttatatcatcgacatcacggtcaactt

SEQ ID NO: 241833 - DNA, 33 bp, Homo sapien
tcccccaacttttctaacacttgcacgtgaggt

SEQ ID NO: 241834 - DNA, 33 bp, Homo sapien
tcccccaacttttctatcacttgcacgtgaggt

SEQ ID NO: 241835 - DNA, 33 bp, Homo sapien
tcaggcattctgttagcagcttgatgtactgtt

SEQ ID NO: 241836 - DNA, 33 bp, Homo sapien
tcaggcattctgttaggagcttgatgtactgtt

SEQ ID NO: 241837 - DNA, 33 bp, Homo sapien
tgttaggtgtatccaacggcacaagatgattgg

SEQ ID NO: 241838 - DNA, 33 bp, Homo sapien
tgttaggtgtatccaagggcacaagatgattgg

SEQ ID NO: 241839 - DNA, 33 bp, Homo sapien
ggaaactgtaacagtacggttgtctcccgtttc

SEQ ID NO: 241840 - DNA, 33 bp, Homo sapien
ggaaactgtaacagtatggttgtctcccgtttc

SEQ ID NO: 241841 - DNA, 33 bp, Homo sapien
aagcagacagtggcacaaaggtggacaaaacag

SEQ ID NO: 241842 - DNA, 33 bp, Homo sapien
aagcagacagtggcacgaaggtggacaaaacag

SEQ ID NO: 241843 - DNA, 33 bp, Homo sapien
ataaatctttgcataaggagtaaaagtattttt

SEQ ID NO: 241844 - DNA, 33 bp, Homo sapien
ataaatctttgcataatgagtaaaagtattttt

SEQ ID NO: 241845 - DNA, 33 bp, Homo sapien
gctctctacatattggaaggtaaagttccacaa

SEQ ID NO: 241846 - DNA, 33 bp, Homo sapien
gctctctacatattgggaggtaaagttccacaa

SEQ ID NO: 241847 - DNA, 33 bp, Homo sapien
atccttgcccttcctacgattttctcttgtaat

SEQ ID NO: 241848 - DNA, 33 bp, Homo sapien
atccttgcccttcctatgattttctcttgtaat

SEQ ID NO: 241849 - DNA, 33 bp, Homo sapien
agtaaacaaagaagacaaacaagcctgccctca

SEQ ID NO: 241850 - DNA, 33 bp, Homo sapien
agtaaacaaagaagacgaacaagcctgccctca

SEQ ID NO: 241851 - DNA, 33 bp, Homo sapien
tgagcagaggatgaaactgggaagtcacccatc

SEQ ID NO: 241852 - DNA, 33 bp, Homo sapien
tgagcagaggatgaaattgggaagtcacccatc

SEQ ID NO: 241853 - DNA, 33 bp, Homo sapien
agtcttagagcttttaagaacctaggctagtgg

SEQ ID NO: 241854 - DNA, 33 bp, Homo sapien
agtcttagagcttttatgaacctaggctagtgg

SEQ ID NO: 241855 - DNA, 33 bp, Homo sapien
ctaatggataataacaggggctctgggattagg

SEQ ID NO: 241856 - DNA, 33 bp, Homo sapien
ctaatggataataacatgggctctgggattagg

SEQ ID NO: 241857 - DNA, 33 bp, Homo sapien
tcaaactcaacctgtgaaggcccatagacttta

SEQ ID NO: 241858 - DNA, 33 bp, Homo sapien
tcaaactcaacctgtggaggcccatagacttta

SEQ ID NO: 241859 - DNA, 33 bp, Homo sapien
gttgggagattcgacacagcagagttggaagca

SEQ ID NO: 241860 - DNA, 33 bp, Homo sapien
gttgggagattcgacatagcagagttggaagca

SEQ ID NO: 241861 - DNA, 33 bp, Homo sapien
tacaggcagattaagaacaactccagcattatt

SEQ ID NO: 241862 - DNA, 33 bp, Homo sapien
tacaggcagattaagagcaactccagcattatt

SEQ ID NO: 241863 - DNA, 33 bp, Homo sapien
gtacacccactgataacaatagtgtgccatgaa

SEQ ID NO: 241864 - DNA, 33 bp, Homo sapien
gtacacccactgataataatagtgtgccatgaa

SEQ ID NO: 241865 - DNA, 33 bp, Homo sapien
gccttgggaacagtcaagaaaccataatgtgtt

SEQ ID NO: 241866 - DNA, 33 bp, Homo sapien
gccttgggaacagtcacgaaaccataatgtgtt

SEQ ID NO: 241867 - DNA, 33 bp, Homo sapien
acttcactggagaagacactgcaatgacatatt

SEQ ID NO: 241868 - DNA, 33 bp, Homo sapien
acttcactggagaagagactgcaatgacatatt

SEQ ID NO: 241869 - DNA, 33 bp, Homo sapien
gcgcgatgaacccacacaaatacaagggctggt

SEQ ID NO: 241870 - DNA, 33 bp, Homo sapien
gcgcgatgaacccacataaatacaagggctggt

SEQ ID NO: 241871 - DNA, 33 bp, Homo sapien
taacacagagtattcaccctgaagttagctcca

SEQ ID NO: 241872 - DNA, 33 bp, Homo sapien
taacacagagtattcatcctgaagttagctcca

SEQ ID NO: 241873 - DNA, 33 bp, Homo sapien
aaatagctgtatcatgaaacatttttggacatt

SEQ ID NO: 241874 - DNA, 33 bp, Homo sapien
aaatagctgtatcatggaacatttttggacatt

SEQ ID NO: 241875 - DNA, 33 bp, Homo sapien
ctgggcgtgagagcacacaattcaaacatactt

SEQ ID NO: 241876 - DNA, 33 bp, Homo sapien
ctgggcgtgagagcacgcaattcaaacatactt

SEQ ID NO: 241877 - DNA, 33 bp, Homo sapien
ttcttaaaagaatgtccatgtattgggttaagc

SEQ ID NO: 241878 - DNA, 33 bp, Homo sapien
ttcttaaaagaatgtctatgtattgggttaagc

SEQ ID NO: 241879 - DNA, 33 bp, Homo sapien
tctgaattcttgaacccctatagacgcctcaat

SEQ ID NO: 241880 - DNA, 33 bp, Homo sapien
tctgaattcttgaacctctatagacgcctcaat

SEQ ID NO: 241881 - DNA, 33 bp, Homo sapien
aaatgtggaatacacaaaaattcaaggcttggg

SEQ ID NO: 241882 - DNA, 33 bp, Homo sapien
aaatgtggaatacacacaaattcaaggcttggg

SEQ ID NO: 241883 - DNA, 33 bp, Homo sapien
taatatcagactatgcaataaatggataactgg

SEQ ID NO: 241884 - DNA, 33 bp, Homo sapien
taatatcagactatgctataaatggataactgg

SEQ ID NO: 241885 - DNA, 33 bp, Homo sapien
gccactggaatggcacaacagctagggatttaa

SEQ ID NO: 241886 - DNA, 33 bp, Homo sapien
gccactggaatggcaccacagctagggatttaa

SEQ ID NO: 241887 - DNA, 33 bp, Homo sapien
ttctgcaaaaaaaccaagtcctctattctacat

SEQ ID NO: 241888 - DNA, 33 bp, Homo sapien
ttctgcaaaaaaaccaggtcctctattctacat

SEQ ID NO: 241889 - DNA, 33 bp, Homo sapien
cgacctgactggtcaaatgggaaaatgaagttc

SEQ ID NO: 241890 - DNA, 33 bp, Homo sapien
cgacctgactggtcaactgggaaaatgaagttc

SEQ ID NO: 241891 - DNA, 33 bp, Homo sapien
cctgtcaaaaaggagactcgttaattcttcaaa

SEQ ID NO: 241892 - DNA, 33 bp, Homo sapien
cctgtcaaaaaggagattcgttaattcttcaaa

SEQ ID NO: 241893 - DNA, 33 bp, Homo sapien
gtgaatggcgattattcaaagagttgactgata

SEQ ID NO: 241894 - DNA, 33 bp, Homo sapien
gtgaatggcgattattgaaagagttgactgata

SEQ ID NO: 241895 - DNA, 33 bp, Homo sapien
aggattgtgagacaaaaggggtggagacaatga

SEQ ID NO: 241896 - DNA, 33 bp, Homo sapien
aggattgtgagacaaacggggtggagacaatga

SEQ ID NO: 241897 - DNA, 33 bp, Homo sapien
ttttcactcgtaagaacaggaggtgactgggtg

SEQ ID NO: 241898 - DNA, 33 bp, Homo sapien
ttttcactcgtaagaataggaggtgactgggtg

SEQ ID NO: 241899 - DNA, 33 bp, Homo sapien
actccaggttgggtgacagagtaagatcctgtc

SEQ ID NO: 241900 - DNA, 33 bp, Homo sapien
actccaggttgggtgatagagtaagatcctgtc

SEQ ID NO: 241901 - DNA, 33 bp, Homo sapien
atattgcctaaggccaatctagaggaatgtgtt

SEQ ID NO: 241902 - DNA, 33 bp, Homo sapien
atattgcctaaggccagtctagaggaatgtgtt

SEQ ID NO: 241903 - DNA, 33 bp, Homo sapien
tggttgaacaaatttacgatcccatcgtgtgta

SEQ ID NO: 241904 - DNA, 33 bp, Homo sapien
tggttgaacaaatttatgatcccatcgtgtgta

SEQ ID NO: 241905 - DNA, 33 bp, Homo sapien
tatgagaactcatgaacacaaagaagagaataa

SEQ ID NO: 241906 - DNA, 33 bp, Homo sapien
tatgagaactcatgaatacaaagaagagaataa

SEQ ID NO: 241907 - DNA, 33 bp, Homo sapien
tatatttctggtcaaaaaaagtaatcaccaaac

SEQ ID NO: 241908 - DNA, 33 bp, Homo sapien
tatatttctggtcaaagaaagtaatcaccaaac

SEQ ID NO: 241909 - DNA, 33 bp, Homo sapien
actgggtcaggccatacgccacatttttttctc

SEQ ID NO: 241910 - DNA, 33 bp, Homo sapien
actgggtcaggccatatgccacatttttttctc

SEQ ID NO: 241911 - DNA, 33 bp, Homo sapien
ttttctcaggatcaccaagtgatagaaatggca

SEQ ID NO: 241912 - DNA, 33 bp, Homo sapien
ttttctcaggatcaccgagtgatagaaatggca

SEQ ID NO: 241913 - DNA, 33 bp, Homo sapien
agaatggagttgtggacgccttaatgttgagat

SEQ ID NO: 241914 - DNA, 33 bp, Homo sapien
agaatggagttgtggatgccttaatgttgagat

SEQ ID NO: 241915 - DNA, 33 bp, Homo sapien
agcacacagttctcaaatctatcacctcgactt

SEQ ID NO: 241916 - DNA, 33 bp, Homo sapien
agcacacagttctcaagtctatcacctcgactt

SEQ ID NO: 241917 - DNA, 33 bp, Homo sapien
acttaagaccaaatcaaacccaaagtggcatgt

SEQ ID NO: 241918 - DNA, 33 bp, Homo sapien
acttaagaccaaatcagacccaaagtggcatgt

SEQ ID NO: 241919 - DNA, 33 bp, Homo sapien
aagacgagtaggcaacaaacagccactggtttt

SEQ ID NO: 241920 - DNA, 33 bp, Homo sapien
aagacgagtaggcaacgaacagccactggtttt

SEQ ID NO: 241921 - DNA, 33 bp, Homo sapien
tctgcttcctgttaccccacaaccaagacaatg

SEQ ID NO: 241922 - DNA, 33 bp, Homo sapien
tctgcttcctgttaccgcacaaccaagacaatg

SEQ ID NO: 241923 - DNA, 33 bp, Homo sapien
agcaaaggcgggtgagcatggaaacagctgtct

SEQ ID NO: 241924 - DNA, 33 bp, Homo sapien
agcaaaggcgggtgagtatggaaacagctgtct

SEQ ID NO: 241925 - DNA, 33 bp, Homo sapien
cttgtctatataaccactgacagtacttgataa

SEQ ID NO: 241926 - DNA, 33 bp, Homo sapien
cttgtctatataaccagtgacagtacttgataa

SEQ ID NO: 241927 - DNA, 33 bp, Homo sapien
actccaaatggttcaaataagacttccaatacc

SEQ ID NO: 241928 - DNA, 33 bp, Homo sapien
actccaaatggttcaagtaagacttccaatacc

SEQ ID NO: 241929 - DNA, 33 bp, Homo sapien
taggaaattttcttaacaaagagcagactccta

SEQ ID NO: 241930 - DNA, 33 bp, Homo sapien
taggaaattttcttaataaagagcagactccta

SEQ ID NO: 241931 - DNA, 33 bp, Homo sapien
ataggtccaatctgaacggagagatattgtact

SEQ ID NO: 241932 - DNA, 33 bp, Homo sapien
ataggtccaatctgaatggagagatattgtact

SEQ ID NO: 241933 - DNA, 33 bp, Homo sapien
cactctgcattcttccactatagtatttaaagt

SEQ ID NO: 241934 - DNA, 33 bp, Homo sapien
cactctgcattcttccgctatagtatttaaagt

SEQ ID NO: 241935 - DNA, 33 bp, Homo sapien
ggtgagggcctgatcacgcatggtgtaggaggt

SEQ ID NO: 241936 - DNA, 33 bp, Homo sapien
ggtgagggcctgatcatgcatggtgtaggaggt

SEQ ID NO: 241937 - DNA, 33 bp, Homo sapien
ccacactgtgtttccacggatcaagtttttagt

SEQ ID NO: 241938 - DNA, 33 bp, Homo sapien
ccacactgtgtttccatggatcaagtttttagt

SEQ ID NO: 241939 - DNA, 33 bp, Homo sapien
agagaatgttcctgacaaaaatcagccagaagc

SEQ ID NO: 241940 - DNA, 33 bp, Homo sapien
agagaatgttcctgaccaaaatcagccagaagc

SEQ ID NO: 241941 - DNA, 33 bp, Homo sapien
tggcgataatgccaagaatattaggaatgccaa

SEQ ID NO: 241942 - DNA, 33 bp, Homo sapien
tggcgataatgccaaggatattaggaatgccaa

SEQ ID NO: 241943 - DNA, 33 bp, Homo sapien
aagtctcaaggtatacaagtccagctctaggcc

SEQ ID NO: 241944 - DNA, 33 bp, Homo sapien
aagtctcaaggtatacgagtccagctctaggcc

SEQ ID NO: 241945 - DNA, 33 bp, Homo sapien
ctcagagacaaagacaaagaaatagcagaaact

SEQ ID NO: 241946 - DNA, 33 bp, Homo sapien
ctcagagacaaagacagagaaatagcagaaact

SEQ ID NO: 241947 - DNA, 33 bp, Homo sapien
ttccccagtgctgctacacttcgggagttgcca

SEQ ID NO: 241948 - DNA, 33 bp, Homo sapien
ttccccagtgctgctagacttcgggagttgcca

SEQ ID NO: 241949 - DNA, 33 bp, Homo sapien
gcttcttggatgaaaacatgctctccttctaac

SEQ ID NO: 241950 - DNA, 33 bp, Homo sapien
gcttcttggatgaaaagatgctctccttctaac

SEQ ID NO: 241951 - DNA, 33 bp, Homo sapien
cacttcttcatatggaaaacagctataataaat

SEQ ID NO: 241952 - DNA, 33 bp, Homo sapien
cacttcttcatatggataacagctataataaat

SEQ ID NO: 241953 - DNA, 33 bp, Homo sapien
ttttaaaccattgatacgtcataagcaaatatt

SEQ ID NO: 241954 - DNA, 33 bp, Homo sapien
ttttaaaccattgatatgtcataagcaaatatt

SEQ ID NO: 241955 - DNA, 33 bp, Homo sapien
aaaagcttctctgaaacgctttgcaacaggcat

SEQ ID NO: 241956 - DNA, 33 bp, Homo sapien
aaaagcttctctgaaatgctttgcaacaggcat

SEQ ID NO: 241957 - DNA, 33 bp, Homo sapien
ttgcttatcttttgatcactgaggattgtagtt

SEQ ID NO: 241958 - DNA, 33 bp, Homo sapien
ttgcttatcttttgatgactgaggattgtagtt

SEQ ID NO: 241959 - DNA, 33 bp, Homo sapien
gggtgcagcccacagacggcgagctgaagcagg

SEQ ID NO: 241960 - DNA, 33 bp, Homo sapien
gggtgcagcccacagagggcgagctgaagcagg

SEQ ID NO: 241961 - DNA, 33 bp, Homo sapien
aagcatacggctccaactggaatgaaatggttc

SEQ ID NO: 241962 - DNA, 33 bp, Homo sapien
aagcatacggctccaagtggaatgaaatggttc

SEQ ID NO: 241963 - DNA, 33 bp, Homo sapien
caatagaaaataactcagaacctttggtaaaga

SEQ ID NO: 241964 - DNA, 33 bp, Homo sapien
caatagaaaataactcggaacctttggtaaaga

SEQ ID NO: 241965 - DNA, 33 bp, Homo sapien
agtaatgagatagaaacgaaaggaagatgctat

SEQ ID NO: 241966 - DNA, 33 bp, Homo sapien
agtaatgagatagaaatgaaaggaagatgctat

SEQ ID NO: 241967 - DNA, 33 bp, Homo sapien
ctttctgaaaagccacccaggtaagctctgttg

SEQ ID NO: 241968 - DNA, 33 bp, Homo sapien
ctttctgaaaagccactcaggtaagctctgttg

SEQ ID NO: 241969 - DNA, 33 bp, Homo sapien
tagaaggcaaagtgaactggattgaagactgaa

SEQ ID NO: 241970 - DNA, 33 bp, Homo sapien
tagaaggcaaagtgaagtggattgaagactgaa

SEQ ID NO: 241971 - DNA, 33 bp, Homo sapien
catcattttctgcataccagagacccttacaaa

SEQ ID NO: 241972 - DNA, 33 bp, Homo sapien
catcattttctgcatatcagagacccttacaaa

SEQ ID NO: 241973 - DNA, 33 bp, Homo sapien
cttggagttgcaatcaaggtgcctatttgttcc

SEQ ID NO: 241974 - DNA, 33 bp, Homo sapien
cttggagttgcaatcagggtgcctatttgttcc

SEQ ID NO: 241975 - DNA, 33 bp, Homo sapien
gttgagtgaaaatcagaccggctaagttctcag

SEQ ID NO: 241976 - DNA, 33 bp, Homo sapien
gttgagtgaaaatcagtccggctaagttctcag

SEQ ID NO: 241977 - DNA, 33 bp, Homo sapien
attataatccaaactcccaaaatgtatgttatg

SEQ ID NO: 241978 - DNA, 33 bp, Homo sapien
attataatccaaactctcaaaatgtatgttatg

SEQ ID NO: 241979 - DNA, 33 bp, Homo sapien
ctccttttgattgcaaatatctgtagaggttat

SEQ ID NO: 241980 - DNA, 33 bp, Homo sapien
ctccttttgattgcaactatctgtagaggttat

SEQ ID NO: 241981 - DNA, 33 bp, Homo sapien
gacattcaaatggagaggtcaaatagtcaagta

SEQ ID NO: 241982 - DNA, 33 bp, Homo sapien
gacattcaaatggagatgtcaaatagtcaagta

SEQ ID NO: 241983 - DNA, 33 bp, Homo sapien
gccacgtaaggaccacagtagaacaaaatcagg

SEQ ID NO: 241984 - DNA, 33 bp, Homo sapien
gccacgtaaggaccacggtagaacaaaatcagg

SEQ ID NO: 241985 - DNA, 33 bp, Homo sapien
ctgcacagccaaagtaggcctctaaaccttcac

SEQ ID NO: 241986 - DNA, 33 bp, Homo sapien
ctgcacagccaaagtatgcctctaaaccttcac

SEQ ID NO: 241987 - DNA, 33 bp, Homo sapien
tctaattaagggcaggaacaatgccatatttat

SEQ ID NO: 241988 - DNA, 33 bp, Homo sapien
tctaattaagggcagggacaatgccatatttat

SEQ ID NO: 241989 - DNA, 33 bp, Homo sapien
ttctctgaataggccaacctgtttcttgccctt

SEQ ID NO: 241990 - DNA, 33 bp, Homo sapien
ttctctgaataggccagcctgtttcttgccctt

SEQ ID NO: 241991 - DNA, 33 bp, Homo sapien
tacctaccacctagtgaaatcagtgcttctaag

SEQ ID NO: 241992 - DNA, 33 bp, Homo sapien
tacctaccacctagtggaatcagtgcttctaag

SEQ ID NO: 241993 - DNA, 33 bp, Homo sapien
atttggatgaatacccaaaagaaatgctcattg

SEQ ID NO: 241994 - DNA, 33 bp, Homo sapien
atttggatgaatacccgaaagaaatgctcattg

SEQ ID NO: 241995 - DNA, 33 bp, Homo sapien
ctagatatccatggaaagtagtagagtttaaag

SEQ ID NO: 241996 - DNA, 33 bp, Homo sapien
ctagatatccatggaacgtagtagagtttaaag

SEQ ID NO: 241997 - DNA, 33 bp, Homo sapien
tgacaaagatggatgtcaaacccagcttactgt

SEQ ID NO: 241998 - DNA, 33 bp, Homo sapien
tgacaaagatggatgtgaaacccagcttactgt

SEQ ID NO: 241999 - DNA, 33 bp, Homo sapien
aacagaatgatctccaataaaccgcaaaatctt

SEQ ID NO: 242000 - DNA, 33 bp, Homo sapien
aacagaatgatctccagtaaaccgcaaaatctt

SEQ ID NO: 242001 - DNA, 33 bp, Homo sapien
cagcacaatctgatagaccaatttcatgtgatc

SEQ ID NO: 242002 - DNA, 33 bp, Homo sapien
cagcacaatctgatagtccaatttcatgtgatc

SEQ ID NO: 242003 - DNA, 33 bp, Homo sapien
cagaagaggtacctgacagagaccgccacttct

SEQ ID NO: 242004 - DNA, 33 bp, Homo sapien
cagaagaggtacctgatagagaccgccacttct

SEQ ID NO: 242005 - DNA, 33 bp, Homo sapien
agctgttatccataaacgaacagttgttttgaa

SEQ ID NO: 242006 - DNA, 33 bp, Homo sapien
agctgttatccataaatgaacagttgttttgaa

SEQ ID NO: 242007 - DNA, 33 bp, Homo sapien
gcaattttctatcctaccattcccaaaatacca

SEQ ID NO: 242008 - DNA, 33 bp, Homo sapien
gcaattttctatcctatcattcccaaaatacca

SEQ ID NO: 242009 - DNA, 33 bp, Homo sapien
tagatgttcatgtcaaattcaaatgcatccaga

SEQ ID NO: 242010 - DNA, 33 bp, Homo sapien
tagatgttcatgtcaacttcaaatgcatccaga

SEQ ID NO: 242011 - DNA, 33 bp, Homo sapien
tggttgatgtgttcggaatacaaaaaggaagaa

SEQ ID NO: 242012 - DNA, 33 bp, Homo sapien
tggttgatgtgttcgggatacaaaaaggaagaa

SEQ ID NO: 242013 - DNA, 33 bp, Homo sapien
cctcctagtctactcaaataatttaatcctcac

SEQ ID NO: 242014 - DNA, 33 bp, Homo sapien
cctcctagtctactcagataatttaatcctcac

SEQ ID NO: 242015 - DNA, 33 bp, Homo sapien
tttatatccacagtaacagttgtctttcttctt

SEQ ID NO: 242016 - DNA, 33 bp, Homo sapien
tttatatccacagtaagagttgtctttcttctt

SEQ ID NO: 242017 - DNA, 33 bp, Homo sapien
gacactttggataaagaattagcagtagataga

SEQ ID NO: 242018 - DNA, 33 bp, Homo sapien
gacactttggataaagcattagcagtagataga

SEQ ID NO: 242019 - DNA, 33 bp, Homo sapien
gcaaatcacagagtagcagaaaatatttagagt

SEQ ID NO: 242020 - DNA, 33 bp, Homo sapien
gcaaatcacagagtaggagaaaatatttagagt

SEQ ID NO: 242021 - DNA, 33 bp, Homo sapien
caacagtatacttctcaagggcagggattcttt

SEQ ID NO: 242022 - DNA, 33 bp, Homo sapien
caacagtatacttctcgagggcagggattcttt

SEQ ID NO: 242023 - DNA, 33 bp, Homo sapien
atcagttctcaagttacattgcattgtaatttg

SEQ ID NO: 242024 - DNA, 33 bp, Homo sapien
atcagttctcaagttatattgcattgtaatttg

SEQ ID NO: 242025 - DNA, 33 bp, Homo sapien
tacattttgctcaacccgcttccaactcatgga

SEQ ID NO: 242026 - DNA, 33 bp, Homo sapien
tacattttgctcaacctgcttccaactcatgga

SEQ ID NO: 242027 - DNA, 33 bp, Homo sapien
gcctttcacatagtgtaacaaagacaaatgagg

SEQ ID NO: 242028 - DNA, 33 bp, Homo sapien
gcctttcacatagtgttacaaagacaaatgagg

SEQ ID NO: 242029 - DNA, 33 bp, Homo sapien
tgactagcagcttcaaaccaataagaactttgg

SEQ ID NO: 242030 - DNA, 33 bp, Homo sapien
tgactagcagcttcaagccaataagaactttgg

SEQ ID NO: 242031 - DNA, 33 bp, Homo sapien
gggaccactaagagtaaaaccggagaaaagaat

SEQ ID NO: 242032 - DNA, 33 bp, Homo sapien
gggaccactaagagtacaaccggagaaaagaat

SEQ ID NO: 242033 - DNA, 33 bp, Homo sapien
acatatcctttgattaccttatagctagacaca

SEQ ID NO: 242034 - DNA, 33 bp, Homo sapien
acatatcctttgattatcttatagctagacaca

SEQ ID NO: 242035 - DNA, 33 bp, Homo sapien
ctataaaggaaacaaacaggattcaatagtggt

SEQ ID NO: 242036 - DNA, 33 bp, Homo sapien
ctataaaggaaacaaataggattcaatagtggt

SEQ ID NO: 242037 - DNA, 33 bp, Homo sapien
gaacaaggacgtaatacaaatgatgcagcttcc

SEQ ID NO: 242038 - DNA, 33 bp, Homo sapien
gaacaaggacgtaatataaatgatgcagcttcc

SEQ ID NO: 242039 - DNA, 33 bp, Homo sapien
cttgttctgctcacaaaaaatcatctttccttg

SEQ ID NO: 242040 - DNA, 33 bp, Homo sapien
cttgttctgctcacaacaaatcatctttccttg

SEQ ID NO: 242041 - DNA, 33 bp, Homo sapien
tttcttgacattgaaacatttggttacaaaagc

SEQ ID NO: 242042 - DNA, 33 bp, Homo sapien
tttcttgacattgaaatatttggttacaaaagc

SEQ ID NO: 242043 - DNA, 33 bp, Homo sapien
gttaaaatttaacacaatccaagcaattaaaaa

SEQ ID NO: 242044 - DNA, 33 bp, Homo sapien
gttaaaatttaacacagtccaagcaattaaaaa

SEQ ID NO: 242045 - DNA, 33 bp, Homo sapien
ttgtggtggttgaaaccaaactcacaacatttg

SEQ ID NO: 242046 - DNA, 33 bp, Homo sapien
ttgtggtggttgaaactaaactcacaacatttg

SEQ ID NO: 242047 - DNA, 33 bp, Homo sapien
ataattaatgccttggaaaagattaacatgatg

SEQ ID NO: 242048 - DNA, 33 bp, Homo sapien
ataattaatgccttgggaaagattaacatgatg

SEQ ID NO: 242049 - DNA, 33 bp, Homo sapien
aaggatctctcttttacggttgaataggtactc

SEQ ID NO: 242050 - DNA, 33 bp, Homo sapien
aaggatctctcttttatggttgaataggtactc

SEQ ID NO: 242051 - DNA, 33 bp, Homo sapien
tttgtggctctccccgaaattcttactaaatcg

SEQ ID NO: 242052 - DNA, 33 bp, Homo sapien
tttgtggctctccccggaattcttactaaatcg

SEQ ID NO: 242053 - DNA, 33 bp, Homo sapien
agacacaacaaccttcaacaaaatgctggcaaa

SEQ ID NO: 242054 - DNA, 33 bp, Homo sapien
agacacaacaaccttccacaaaatgctggcaaa

SEQ ID NO: 242055 - DNA, 33 bp, Homo sapien
cttcttctggctaaaaatgcctgctgttttaac

SEQ ID NO: 242056 - DNA, 33 bp, Homo sapien
cttcttctggctaaaagtgcctgctgttttaac

SEQ ID NO: 242057 - DNA, 33 bp, Homo sapien
gaatgtaagataaagaagatcctgttagcccaa

SEQ ID NO: 242058 - DNA, 33 bp, Homo sapien
gaatgtaagataaagaggatcctgttagcccaa

SEQ ID NO: 242059 - DNA, 33 bp, Homo sapien
ttagttctagtgtcaacattctttacttctgaa

SEQ ID NO: 242060 - DNA, 33 bp, Homo sapien
ttagttctagtgtcaagattctttacttctgaa

SEQ ID NO: 242061 - DNA, 33 bp, Homo sapien
ctagagtctctgtttaagagcagaatgatacac

SEQ ID NO: 242062 - DNA, 33 bp, Homo sapien
ctagagtctctgtttaggagcagaatgatacac

SEQ ID NO: 242063 - DNA, 33 bp, Homo sapien
cttggtctgaatccaccgaaagtgtgtcatatg

SEQ ID NO: 242064 - DNA, 33 bp, Homo sapien
cttggtctgaatccactgaaagtgtgtcatatg

SEQ ID NO: 242065 - DNA, 33 bp, Homo sapien
tcttgtgacctactataagacaaggtagaccag

SEQ ID NO: 242066 - DNA, 33 bp, Homo sapien
tcttgtgacctactatgagacaaggtagaccag

SEQ ID NO: 242067 - DNA, 33 bp, Homo sapien
actcaaggaaactgaagggaagatagacggtgg

SEQ ID NO: 242068 - DNA, 33 bp, Homo sapien
actcaaggaaactgaatggaagatagacggtgg

SEQ ID NO: 242069 - DNA, 33 bp, Homo sapien
tgatgattagagcaaaattgtcagttaaaaaat

SEQ ID NO: 242070 - DNA, 33 bp, Homo sapien
tgatgattagagcaaatttgtcagttaaaaaat

SEQ ID NO: 242071 - DNA, 33 bp, Homo sapien
agcaacacaaaacagagtaaggcaataagggtc

SEQ ID NO: 242072 - DNA, 33 bp, Homo sapien
agcaacacaaaacagattaaggcaataagggtc

SEQ ID NO: 242073 - DNA, 33 bp, Homo sapien
tgcccgaatggtaacaatgggcatcgttcgcac

SEQ ID NO: 242074 - DNA, 33 bp, Homo sapien
tgcccgaatggtaacagtgggcatcgttcgcac

SEQ ID NO: 242075 - DNA, 33 bp, Homo sapien
tcctggacctctgaagcctgcttttgccagtgc

SEQ ID NO: 242076 - DNA, 33 bp, Homo sapien
tcctggacctctgaaggctgcttttgccagtgc

SEQ ID NO: 242077 - DNA, 33 bp, Homo sapien
ctacacatggtgcagaagtggacatctcaccta

SEQ ID NO: 242078 - DNA, 33 bp, Homo sapien
ctacacatggtgcagaggtggacatctcaccta

SEQ ID NO: 242079 - DNA, 33 bp, Homo sapien
gaaaacagttttagaagaattctcctaatgtag

SEQ ID NO: 242080 - DNA, 33 bp, Homo sapien
gaaaacagttttagaataattctcctaatgtag

SEQ ID NO: 242081 - DNA, 33 bp, Homo sapien
tggcaatgctgtgattcaaacctggagagagag

SEQ ID NO: 242082 - DNA, 33 bp, Homo sapien
tggcaatgctgtgatttaaacctggagagagag

SEQ ID NO: 242083 - DNA, 33 bp, Homo sapien
taaatgaaaagcatacaaaagacttgaaaagat

SEQ ID NO: 242084 - DNA, 33 bp, Homo sapien
taaatgaaaagcatacgaaagacttgaaaagat

SEQ ID NO: 242085 - DNA, 33 bp, Homo sapien
ttcaagaaagagaaaacaatcacactttatcaa

SEQ ID NO: 242086 - DNA, 33 bp, Homo sapien
ttcaagaaagagaaaagaatcacactttatcaa

SEQ ID NO: 242087 - DNA, 33 bp, Homo sapien
tcccatcttaccgccaaccatacaaaacaaaat

SEQ ID NO: 242088 - DNA, 33 bp, Homo sapien
tcccatcttaccgccacccatacaaaacaaaat

SEQ ID NO: 242089 - DNA, 33 bp, Homo sapien
taaagccaaaactttaaccagttcaggatagtc

SEQ ID NO: 242090 - DNA, 33 bp, Homo sapien
taaagccaaaactttagccagttcaggatagtc

SEQ ID NO: 242091 - DNA, 33 bp, Homo sapien
tatgcttcagcttgaaaatgtccactaagaagc

SEQ ID NO: 242092 - DNA, 33 bp, Homo sapien
tatgcttcagcttgaatatgtccactaagaagc

SEQ ID NO: 242093 - DNA, 33 bp, Homo sapien
cagaaggtataggaaacaggtaggatttctctg

SEQ ID NO: 242094 - DNA, 33 bp, Homo sapien
cagaaggtataggaaagaggtaggatttctctg

SEQ ID NO: 242095 - DNA, 33 bp, Homo sapien
ttctgataggtatcaaccttgcaattcttctcc

SEQ ID NO: 242096 - DNA, 33 bp, Homo sapien
ttctgataggtatcaatcttgcaattcttctcc

SEQ ID NO: 242097 - DNA, 33 bp, Homo sapien
agaaaagatgaatctggaattgtgttgactata

SEQ ID NO: 242098 - DNA, 33 bp, Homo sapien
agaaaagatgaatctgtaattgtgttgactata

SEQ ID NO: 242099 - DNA, 33 bp, Homo sapien
cacctgagggtgtaaccatgtttgaaggtgtgt

SEQ ID NO: 242100 - DNA, 33 bp, Homo sapien
cacctgagggtgtaactatgtttgaaggtgtgt

SEQ ID NO: 242101 - DNA, 33 bp, Homo sapien
gttaattaaggctcacgacaacagatgctgcag

SEQ ID NO: 242102 - DNA, 33 bp, Homo sapien
gttaattaaggctcactacaacagatgctgcag

SEQ ID NO: 242103 - DNA, 33 bp, Homo sapien
aactagtcaataaatacaggctactgttgtaat

SEQ ID NO: 242104 - DNA, 33 bp, Homo sapien
aactagtcaataaatataggctactgttgtaat

SEQ ID NO: 242105 - DNA, 33 bp, Homo sapien
gttcttagagactttcaaaaagacttagacttc

SEQ ID NO: 242106 - DNA, 33 bp, Homo sapien
gttcttagagactttcgaaaagacttagacttc

SEQ ID NO: 242107 - DNA, 33 bp, Homo sapien
ctctgtatcactgaaaagttaccccataattat

SEQ ID NO: 242108 - DNA, 33 bp, Homo sapien
ctctgtatcactgaaaggttaccccataattat

SEQ ID NO: 242109 - DNA, 33 bp, Homo sapien
catcagtgaagtccataaaaatgtgcaagaatc

SEQ ID NO: 242110 - DNA, 33 bp, Homo sapien
catcagtgaagtccatcaaaatgtgcaagaatc

SEQ ID NO: 242111 - DNA, 33 bp, Homo sapien
gttctaaaagtgactaaagatttcttatcagaa

SEQ ID NO: 242112 - DNA, 33 bp, Homo sapien
gttctaaaagtgactacagatttcttatcagaa

SEQ ID NO: 242113 - DNA, 33 bp, Homo sapien
tggatgttccacatcaatctatattttccttat

SEQ ID NO: 242114 - DNA, 33 bp, Homo sapien
tggatgttccacatcagtctatattttccttat

SEQ ID NO: 242115 - DNA, 33 bp, Homo sapien
cggcagatatggctaacgaagtgcctatgccat

SEQ ID NO: 242116 - DNA, 33 bp, Homo sapien
cggcagatatggctaaggaagtgcctatgccat

SEQ ID NO: 242117 - DNA, 33 bp, Homo sapien
acatataataaatgctaaaacaaagagctgtgg

SEQ ID NO: 242118 - DNA, 33 bp, Homo sapien
acatataataaatgctgaaacaaagagctgtgg

SEQ ID NO: 242119 - DNA, 33 bp, Homo sapien
gtgtgaaatcaactgcaaatcagttatgtgttt

SEQ ID NO: 242120 - DNA, 33 bp, Homo sapien
gtgtgaaatcaactgctaatcagttatgtgttt

SEQ ID NO: 242121 - DNA, 33 bp, Homo sapien
atatccaatgtaaataactgcaatattttgcag

SEQ ID NO: 242122 - DNA, 33 bp, Homo sapien
atatccaatgtaaatagctgcaatattttgcag

SEQ ID NO: 242123 - DNA, 33 bp, Homo sapien
aatttcattttttctacgagtagcttgtttata

SEQ ID NO: 242124 - DNA, 33 bp, Homo sapien
aatttcattttttctatgagtagcttgtttata

SEQ ID NO: 242125 - DNA, 33 bp, Homo sapien
taggttcaagggtagacatgcataacgtgcagg

SEQ ID NO: 242126 - DNA, 33 bp, Homo sapien
taggttcaagggtagatatgcataacgtgcagg

SEQ ID NO: 242127 - DNA, 33 bp, Homo sapien
tagtattctttgtgaaggtactacagtttattc

SEQ ID NO: 242128 - DNA, 33 bp, Homo sapien
tagtattctttgtgaatgtactacagtttattc

SEQ ID NO: 242129 - DNA, 33 bp, Homo sapien
ctgttttcgtttttcaacttgttcagatggaat

SEQ ID NO: 242130 - DNA, 33 bp, Homo sapien
ctgttttcgtttttcagcttgttcagatggaat

SEQ ID NO: 242131 - DNA, 33 bp, Homo sapien
ggaatgacagtacccaactgaaatatgttttcc

SEQ ID NO: 242132 - DNA, 33 bp, Homo sapien
ggaatgacagtacccagctgaaatatgttttcc

SEQ ID NO: 242133 - DNA, 33 bp, Homo sapien
ccgttgaagtaagcagcaacatagagtggaaaa

SEQ ID NO: 242134 - DNA, 33 bp, Homo sapien
ccgttgaagtaagcagtaacatagagtggaaaa

SEQ ID NO: 242135 - DNA, 33 bp, Homo sapien
aacctaaataacttaaactctcctggccttggg

SEQ ID NO: 242136 - DNA, 33 bp, Homo sapien
aacctaaataacttaacctctcctggccttggg

SEQ ID NO: 242137 - DNA, 33 bp, Homo sapien
aagaataaagttgctgcatgaagttgctaccta

SEQ ID NO: 242138 - DNA, 33 bp, Homo sapien
aagaataaagttgctgtatgaagttgctaccta

SEQ ID NO: 242139 - DNA, 33 bp, Homo sapien
cagcaacttagtgtacaagagctgtggtttata

SEQ ID NO: 242140 - DNA, 33 bp, Homo sapien
cagcaacttagtgtacgagagctgtggtttata

SEQ ID NO: 242141 - DNA, 33 bp, Homo sapien
tacagtactagtacgaagttaaataatacatta

SEQ ID NO: 242142 - DNA, 33 bp, Homo sapien
tacagtactagtacgaggttaaataatacatta

SEQ ID NO: 242143 - DNA, 33 bp, Homo sapien
gggctcaaatagtgaaaaacagcatatctgctc

SEQ ID NO: 242144 - DNA, 33 bp, Homo sapien
gggctcaaatagtgaataacagcatatctgctc

SEQ ID NO: 242145 - DNA, 33 bp, Homo sapien
taacataattatccaaaatctccaacctaacaa

SEQ ID NO: 242146 - DNA, 33 bp, Homo sapien
taacataattatccaagatctccaacctaacaa

SEQ ID NO: 242147 - DNA, 33 bp, Homo sapien
aactccaggctgagaactgtcatagttgaaaac

SEQ ID NO: 242148 - DNA, 33 bp, Homo sapien
aactccaggctgagaattgtcatagttgaaaac

SEQ ID NO: 242149 - DNA, 33 bp, Homo sapien
gactcattgatctccaggtagctgttattcttg

SEQ ID NO: 242150 - DNA, 33 bp, Homo sapien
gactcattgatctccatgtagctgttattcttg

SEQ ID NO: 242151 - DNA, 33 bp, Homo sapien
gactcaaaaatctgtcaagttaaaacactaaac

SEQ ID NO: 242152 - DNA, 33 bp, Homo sapien
gactcaaaaatctgtcgagttaaaacactaaac

SEQ ID NO: 242153 - DNA, 33 bp, Homo sapien
ttaaacatgaaagatccaaaccagcggtttcaa

SEQ ID NO: 242154 - DNA, 33 bp, Homo sapien
ttaaacatgaaagatctaaaccagcggtttcaa

SEQ ID NO: 242155 - DNA, 33 bp, Homo sapien
taactttacatgaagaaagaagtggtttgaggt

SEQ ID NO: 242156 - DNA, 33 bp, Homo sapien
taactttacatgaagagagaagtggtttgaggt

SEQ ID NO: 242157 - DNA, 33 bp, Homo sapien
tatgccacgttgtcagaaaagactagcaactgt

SEQ ID NO: 242158 - DNA, 33 bp, Homo sapien
tatgccacgttgtcaggaaagactagcaactgt

SEQ ID NO: 242159 - DNA, 33 bp, Homo sapien
tctgccaacagctgaaatgagcttgaaaacatc

SEQ ID NO: 242160 - DNA, 33 bp, Homo sapien
tctgccaacagctgaagtgagcttgaaaacatc

SEQ ID NO: 242161 - DNA, 33 bp, Homo sapien
gcacacaagggaaagacggacattctgggagag

SEQ ID NO: 242162 - DNA, 33 bp, Homo sapien
gcacacaagggaaagatggacattctgggagag

SEQ ID NO: 242163 - DNA, 33 bp, Homo sapien
atagtatccaggagaactgccacacagtgctca

SEQ ID NO: 242164 - DNA, 33 bp, Homo sapien
atagtatccaggagaattgccacacagtgctca

SEQ ID NO: 242165 - DNA, 33 bp, Homo sapien
gcctgaaaattggactaactgacaacaatctca

SEQ ID NO: 242166 - DNA, 33 bp, Homo sapien
gcctgaaaattggactgactgacaacaatctca

SEQ ID NO: 242167 - DNA, 33 bp, Homo sapien
tacctcctctctgttacacttttgcctttcaca

SEQ ID NO: 242168 - DNA, 33 bp, Homo sapien
tacctcctctctgttatacttttgcctttcaca

SEQ ID NO: 242169 - DNA, 33 bp, Homo sapien
atccatcacatcagaaaagaccaccacggaaga

SEQ ID NO: 242170 - DNA, 33 bp, Homo sapien
atccatcacatcagaagagaccaccacggaaga

SEQ ID NO: 242171 - DNA, 33 bp, Homo sapien
tgcagtcttcaagtcaactgcttcatgttttct

SEQ ID NO: 242172 - DNA, 33 bp, Homo sapien
tgcagtcttcaagtcagctgcttcatgttttct

SEQ ID NO: 242173 - DNA, 33 bp, Homo sapien
ttatattttaagagtacgttttgttgcttcttg

SEQ ID NO: 242174 - DNA, 33 bp, Homo sapien
ttatattttaagagtatgttttgttgcttcttg

SEQ ID NO: 242175 - DNA, 33 bp, Homo sapien
actgatagtgatcaacaaattcaataacacaag

SEQ ID NO: 242176 - DNA, 33 bp, Homo sapien
actgatagtgatcaacgaattcaataacacaag

SEQ ID NO: 242177 - DNA, 33 bp, Homo sapien
aaatccagttttcagaactctccatgactatac

SEQ ID NO: 242178 - DNA, 33 bp, Homo sapien
aaatccagttttcagacctctccatgactatac

SEQ ID NO: 242179 - DNA, 33 bp, Homo sapien
aaggctttggaaaccacgtcttttgaggaataa

SEQ ID NO: 242180 - DNA, 33 bp, Homo sapien
aaggctttggaaaccatgtcttttgaggaataa

SEQ ID NO: 242181 - DNA, 33 bp, Homo sapien
aaattagattttcacaatggaacttttaaagat

SEQ ID NO: 242182 - DNA, 33 bp, Homo sapien
aaattagattttcacagtggaacttttaaagat

SEQ ID NO: 242183 - DNA, 33 bp, Homo sapien
ttttgcaccttcctcactaaattgggtccttaa

SEQ ID NO: 242184 - DNA, 33 bp, Homo sapien
ttttgcaccttcctcattaaattgggtccttaa

SEQ ID NO: 242185 - DNA, 33 bp, Homo sapien
agtcacaaaaagagccacagacttgtaatcagg

SEQ ID NO: 242186 - DNA, 33 bp, Homo sapien
agtcacaaaaagagccgcagacttgtaatcagg

SEQ ID NO: 242187 - DNA, 33 bp, Homo sapien
aagctgagagaagaagacctattatgaagagat

SEQ ID NO: 242188 - DNA, 33 bp, Homo sapien
aagctgagagaagaaggcctattatgaagagat

SEQ ID NO: 242189 - DNA, 33 bp, Homo sapien
taaaaactagccctaaagactcaattttcaata

SEQ ID NO: 242190 - DNA, 33 bp, Homo sapien
taaaaactagccctaaggactcaattttcaata

SEQ ID NO: 242191 - DNA, 33 bp, Homo sapien
ccagtagactctccagaaagggcatttgcacta

SEQ ID NO: 242192 - DNA, 33 bp, Homo sapien
ccagtagactctccaggaagggcatttgcacta

SEQ ID NO: 242193 - DNA, 33 bp, Homo sapien
tatgggatctaggaacaaaaggtttcaagctgc

SEQ ID NO: 242194 - DNA, 33 bp, Homo sapien
tatgggatctaggaacgaaaggtttcaagctgc

SEQ ID NO: 242195 - DNA, 33 bp, Homo sapien
gtgcaaatatgttagaatcctagaagcaagaga

SEQ ID NO: 242196 - DNA, 33 bp, Homo sapien
gtgcaaatatgttagactcctagaagcaagaga

SEQ ID NO: 242197 - DNA, 33 bp, Homo sapien
tatttctactgcaaaaaaatacaggttgttatc

SEQ ID NO: 242198 - DNA, 33 bp, Homo sapien
tatttctactgcaaaataatacaggttgttatc

SEQ ID NO: 242199 - DNA, 33 bp, Homo sapien
ctccctcttggtcctaagtaaataagccatgag

SEQ ID NO: 242200 - DNA, 33 bp, Homo sapien
ctccctcttggtcctaggtaaataagccatgag

SEQ ID NO: 242201 - DNA, 33 bp, Homo sapien
tacaaataccacgttacggctcctggacaggaa

SEQ ID NO: 242202 - DNA, 33 bp, Homo sapien
tacaaataccacgttatggctcctggacaggaa

SEQ ID NO: 242203 - DNA, 33 bp, Homo sapien
gaccccactacataaacaccagaactgaaaatt

SEQ ID NO: 242204 - DNA, 33 bp, Homo sapien
gaccccactacataaataccagaactgaaaatt

SEQ ID NO: 242205 - DNA, 33 bp, Homo sapien
gtttgtgagagtaatcaacattgacacttatag

SEQ ID NO: 242206 - DNA, 33 bp, Homo sapien
gtttgtgagagtaatccacattgacacttatag

SEQ ID NO: 242207 - DNA, 33 bp, Homo sapien
ttagaaaaagaactatcagccaaaagatagcac

SEQ ID NO: 242208 - DNA, 33 bp, Homo sapien
ttagaaaaagaactattagccaaaagatagcac

SEQ ID NO: 242209 - DNA, 33 bp, Homo sapien
agtgacgcaatcctaactgactgtaacctcaaa

SEQ ID NO: 242210 - DNA, 33 bp, Homo sapien
agtgacgcaatcctaagtgactgtaacctcaaa

SEQ ID NO: 242211 - DNA, 33 bp, Homo sapien
tgtgactgtgactaaactattttattttaaaat

SEQ ID NO: 242212 - DNA, 33 bp, Homo sapien
tgtgactgtgactaaagtattttattttaaaat

SEQ ID NO: 242213 - DNA, 33 bp, Homo sapien
atgaatggatcaggtacgcttttctgattgcaa

SEQ ID NO: 242214 - DNA, 33 bp, Homo sapien
atgaatggatcaggtatgcttttctgattgcaa

SEQ ID NO: 242215 - DNA, 33 bp, Homo sapien
cctagttaggggaaaacactgctagaaatttga

SEQ ID NO: 242216 - DNA, 33 bp, Homo sapien
cctagttaggggaaaagactgctagaaatttga

SEQ ID NO: 242217 - DNA, 33 bp, Homo sapien
ttagctttctactctccgaagtttaggaagaca

SEQ ID NO: 242218 - DNA, 33 bp, Homo sapien
ttagctttctactctctgaagtttaggaagaca

SEQ ID NO: 242219 - DNA, 33 bp, Homo sapien
gcttgttacacaatgacgcctttccatacctaa

SEQ ID NO: 242220 - DNA, 33 bp, Homo sapien
gcttgttacacaatgatgcctttccatacctaa

SEQ ID NO: 242221 - DNA, 33 bp, Homo sapien
catgttctgagactgaagaaagttgacagagag

SEQ ID NO: 242222 - DNA, 33 bp, Homo sapien
catgttctgagactgaggaaagttgacagagag

SEQ ID NO: 242223 - DNA, 33 bp, Homo sapien
tgtgccagttttagcacacttctagcatttctt

SEQ ID NO: 242224 - DNA, 33 bp, Homo sapien
tgtgccagttttagcatacttctagcatttctt

SEQ ID NO: 242225 - DNA, 33 bp, Homo sapien
tcaaagcaaacattaaatggctgccgttactgc

SEQ ID NO: 242226 - DNA, 33 bp, Homo sapien
tcaaagcaaacattaattggctgccgttactgc

SEQ ID NO: 242227 - DNA, 33 bp, Homo sapien
aaggtagcctgcgagccaggatgaaggagctat

SEQ ID NO: 242228 - DNA, 33 bp, Homo sapien
aaggtagcctgcgagctaggatgaaggagctat

SEQ ID NO: 242229 - DNA, 33 bp, Homo sapien
acccgtctaatcactcaagaaatcttatcccca

SEQ ID NO: 242230 - DNA, 33 bp, Homo sapien
acccgtctaatcactcgagaaatcttatcccca

SEQ ID NO: 242231 - DNA, 33 bp, Homo sapien
atagagaataggagaactgtaggagtaaaatca

SEQ ID NO: 242232 - DNA, 33 bp, Homo sapien
atagagaataggagaattgtaggagtaaaatca

SEQ ID NO: 242233 - DNA, 33 bp, Homo sapien
tagcacaatgcttggcacatataaatacgcaaa

SEQ ID NO: 242234 - DNA, 33 bp, Homo sapien
tagcacaatgcttggcgcatataaatacgcaaa

SEQ ID NO: 242235 - DNA, 33 bp, Homo sapien
aaatttattctatggcactgaagatattatttt

SEQ ID NO: 242236 - DNA, 33 bp, Homo sapien
aaatttattctatggcgctgaagatattatttt

SEQ ID NO: 242237 - DNA, 33 bp, Homo sapien
ataaggtgccatatcaccaaggatcttctatgc

SEQ ID NO: 242238 - DNA, 33 bp, Homo sapien
ataaggtgccatatcatcaaggatcttctatgc

SEQ ID NO: 242239 - DNA, 33 bp, Homo sapien
tgaaatgctatatacacgaaaggagagtataat

SEQ ID NO: 242240 - DNA, 33 bp, Homo sapien
tgaaatgctatatacatgaaaggagagtataat

SEQ ID NO: 242241 - DNA, 33 bp, Homo sapien
gagatttcggagcatacgggtagtataacacat

SEQ ID NO: 242242 - DNA, 33 bp, Homo sapien
gagatttcggagcatatgggtagtataacacat

SEQ ID NO: 242243 - DNA, 33 bp, Homo sapien
tccatcaacaggtcaacggagatacaaaattgt

SEQ ID NO: 242244 - DNA, 33 bp, Homo sapien
tccatcaacaggtcaatggagatacaaaattgt

SEQ ID NO: 242245 - DNA, 33 bp, Homo sapien
atccagaacagtctagaagtatatgttctctgc

SEQ ID NO: 242246 - DNA, 33 bp, Homo sapien
atccagaacagtctagcagtatatgttctctgc

SEQ ID NO: 242247 - DNA, 33 bp, Homo sapien
tattctgccagaggaaaacagcaccatggagat

SEQ ID NO: 242248 - DNA, 33 bp, Homo sapien
tattctgccagaggaatacagcaccatggagat

SEQ ID NO: 242249 - DNA, 33 bp, Homo sapien
ctgagccaaacccatacgcagtaaaataccatc

SEQ ID NO: 242250 - DNA, 33 bp, Homo sapien
ctgagccaaacccatatgcagtaaaataccatc

SEQ ID NO: 242251 - DNA, 33 bp, Homo sapien
gatagtgaatcatcaaacatcatcataagataa

SEQ ID NO: 242252 - DNA, 33 bp, Homo sapien
gatagtgaatcatcaaccatcatcataagataa

SEQ ID NO: 242253 - DNA, 33 bp, Homo sapien
ctatttccatagctacacagataggtaagatag

SEQ ID NO: 242254 - DNA, 33 bp, Homo sapien
ctatttccatagctacgcagataggtaagatag

SEQ ID NO: 242255 - DNA, 33 bp, Homo sapien
tgtatctcaagtggacccggttaaatgatattc

SEQ ID NO: 242256 - DNA, 33 bp, Homo sapien
tgtatctcaagtggactcggttaaatgatattc

SEQ ID NO: 242257 - DNA, 33 bp, Homo sapien
atacataccaagatcaataagagtggcctttgc

SEQ ID NO: 242258 - DNA, 33 bp, Homo sapien
atacataccaagatcagtaagagtggcctttgc

SEQ ID NO: 242259 - DNA, 33 bp, Homo sapien
ctggtaacactagtcacgtgcctctaggggaca

SEQ ID NO: 242260 - DNA, 33 bp, Homo sapien
ctggtaacactagtcatgtgcctctaggggaca

SEQ ID NO: 242261 - DNA, 33 bp, Homo sapien
taaactgtgaccttacaacagtgttaccttgaa

SEQ ID NO: 242262 - DNA, 33 bp, Homo sapien
taaactgtgaccttacgacagtgttaccttgaa

SEQ ID NO: 242263 - DNA, 33 bp, Homo sapien
gaacataaatagatgactacacctatcttgttc

SEQ ID NO: 242264 - DNA, 33 bp, Homo sapien
gaacataaatagatgattacacctatcttgttc

SEQ ID NO: 242265 - DNA, 33 bp, Homo sapien
gcaaaccacctaaaaaaccatcaacagtggaat

SEQ ID NO: 242266 - DNA, 33 bp, Homo sapien
gcaaaccacctaaaaagccatcaacagtggaat

SEQ ID NO: 242267 - DNA, 33 bp, Homo sapien
taagacagaggttaaggcatcacaaacaaagct

SEQ ID NO: 242268 - DNA, 33 bp, Homo sapien
taagacagaggttaagtcatcacaaacaaagct

SEQ ID NO: 242269 - DNA, 33 bp, Homo sapien
agtatcttttatgcaaacacgtatcttgggcat

SEQ ID NO: 242270 - DNA, 33 bp, Homo sapien
agtatcttttatgcaagcacgtatcttgggcat

SEQ ID NO: 242271 - DNA, 33 bp, Homo sapien
ggaagtggtgacttaacggtactcacttggtac

SEQ ID NO: 242272 - DNA, 33 bp, Homo sapien
ggaagtggtgacttaatggtactcacttggtac

SEQ ID NO: 242273 - DNA, 33 bp, Homo sapien
gcacttattggaagcacatacaatcatttcttt

SEQ ID NO: 242274 - DNA, 33 bp, Homo sapien
gcacttattggaagcatatacaatcatttcttt

SEQ ID NO: 242275 - DNA, 33 bp, Homo sapien
aacttccatggagaaccgtcacaaaggaatcct

SEQ ID NO: 242276 - DNA, 33 bp, Homo sapien
aacttccatggagaactgtcacaaaggaatcct

SEQ ID NO: 242277 - DNA, 33 bp, Homo sapien
agatgtggagggagtaaaggtagttcgacttta

SEQ ID NO: 242278 - DNA, 33 bp, Homo sapien
agatgtggagggagtagaggtagttcgacttta

SEQ ID NO: 242279 - DNA, 33 bp, Homo sapien
ttatttttgtcctaacccttgacatccccactt

SEQ ID NO: 242280 - DNA, 33 bp, Homo sapien
ttatttttgtcctaacgcttgacatccccactt

SEQ ID NO: 242281 - DNA, 33 bp, Homo sapien
gttggctctcttctgactactttctccatctcc

SEQ ID NO: 242282 - DNA, 33 bp, Homo sapien
gttggctctcttctgattactttctccatctcc

SEQ ID NO: 242283 - DNA, 33 bp, Homo sapien
gtttgtcttgcctcatcacctatatgtttatgt

SEQ ID NO: 242284 - DNA, 33 bp, Homo sapien
gtttgtcttgcctcatgacctatatgtttatgt

SEQ ID NO: 242285 - DNA, 33 bp, Homo sapien
ggcactttaaatggtcactgaaggtatccaaag

SEQ ID NO: 242286 - DNA, 33 bp, Homo sapien
ggcactttaaatggtcgctgaaggtatccaaag

SEQ ID NO: 242287 - DNA, 33 bp, Homo sapien
tataacatatcttacaccacaaaggtttctaaa

SEQ ID NO: 242288 - DNA, 33 bp, Homo sapien
tataacatatcttacatcacaaaggtttctaaa

SEQ ID NO: 242289 - DNA, 33 bp, Homo sapien
tcatagatactgatagacagcttaatagttaac

SEQ ID NO: 242290 - DNA, 33 bp, Homo sapien
tcatagatactgataggcagcttaatagttaac

SEQ ID NO: 242291 - DNA, 33 bp, Homo sapien
tgtgcattcatctggacggacctaatagcagaa

SEQ ID NO: 242292 - DNA, 33 bp, Homo sapien
tgtgcattcatctggagggacctaatagcagaa

SEQ ID NO: 242293 - DNA, 33 bp, Homo sapien
tagttgagagagctccaaaaaagttttattggc

SEQ ID NO: 242294 - DNA, 33 bp, Homo sapien
tagttgagagagctccgaaaaagttttattggc

SEQ ID NO: 242295 - DNA, 33 bp, Homo sapien
tatggcagacattgcacccctctttttcattgt

SEQ ID NO: 242296 - DNA, 33 bp, Homo sapien
tatggcagacattgcatccctctttttcattgt

SEQ ID NO: 242297 - DNA, 33 bp, Homo sapien
acacggcacacaaagccacatctgccttctgct

SEQ ID NO: 242298 - DNA, 33 bp, Homo sapien
acacggcacacaaagctacatctgccttctgct

SEQ ID NO: 242299 - DNA, 33 bp, Homo sapien
ctgtaatcatgggtaaactgctttaagaaaatc

SEQ ID NO: 242300 - DNA, 33 bp, Homo sapien
ctgtaatcatgggtaacctgctttaagaaaatc

SEQ ID NO: 242301 - DNA, 33 bp, Homo sapien
tactacttttgaaacaaccaattctccaaacat

SEQ ID NO: 242302 - DNA, 33 bp, Homo sapien
tactacttttgaaacagccaattctccaaacat

SEQ ID NO: 242303 - DNA, 33 bp, Homo sapien
gtcataatactataaactctaggatgcttacag

SEQ ID NO: 242304 - DNA, 33 bp, Homo sapien
gtcataatactataaattctaggatgcttacag

SEQ ID NO: 242305 - DNA, 33 bp, Homo sapien
cactcttacctgtctaaattctattcctccaaa

SEQ ID NO: 242306 - DNA, 33 bp, Homo sapien
cactcttacctgtctagattctattcctccaaa

SEQ ID NO: 242307 - DNA, 33 bp, Homo sapien
gtgaaagcatggcgctcagaaggatctttaaca

SEQ ID NO: 242308 - DNA, 33 bp, Homo sapien
gtgaaagcatggcgcttagaaggatctttaaca

SEQ ID NO: 242309 - DNA, 33 bp, Homo sapien
gaatggatggatgaatgatagatgtacaaaggc

SEQ ID NO: 242310 - DNA, 33 bp, Homo sapien
gaatggatggatgaattatagatgtacaaaggc

SEQ ID NO: 242311 - DNA, 33 bp, Homo sapien
acctcccatatttgggaagaaaaagtcagatgc

SEQ ID NO: 242312 - DNA, 33 bp, Homo sapien
acctcccatatttgggtagaaaaagtcagatgc

SEQ ID NO: 242313 - DNA, 33 bp, Homo sapien
tgatacttggtcatacactttttcagttctctc

SEQ ID NO: 242314 - DNA, 33 bp, Homo sapien
tgatacttggtcatacgctttttcagttctctc

SEQ ID NO: 242315 - DNA, 33 bp, Homo sapien
catttctggtccttaacggcaggaagcatctag

SEQ ID NO: 242316 - DNA, 33 bp, Homo sapien
catttctggtccttaatggcaggaagcatctag

SEQ ID NO: 242317 - DNA, 33 bp, Homo sapien; identical to SEQ ID NO: 242315

SEQ ID NO: 242318 - DNA, 33 bp, Homo sapien; identical to SEQ ID NO: 242316

SEQ ID NO: 242319 - DNA, 33 bp, Homo sapien
tgctcatgccagttaacgccaggaaaaaaatca

SEQ ID NO: 242320 - DNA, 33 bp, Homo sapien
tgctcatgccagttaatgccaggaaaaaaatca

SEQ ID NO: 242321 - DNA, 33 bp, Homo sapien
tcttaagtaaactccaggtgtagtagacagaat

SEQ ID NO: 242322 - DNA, 33 bp, Homo sapien
tcttaagtaaactccatgtgtagtagacagaat

SEQ ID NO: 242323 - DNA, 33 bp, Homo sapien
tggagttaagaacaaacggatttggcaactgtc

SEQ ID NO: 242324 - DNA, 33 bp, Homo sapien
tggagttaagaacaaatggatttggcaactgtc

SEQ ID NO: 242325 - DNA, 33 bp, Homo sapien
attctgtgaagaatgacggtggtatttcgatgg

SEQ ID NO: 242326 - DNA, 33 bp, Homo sapien
attctgtgaagaatgatggtggtatttcgatgg

SEQ ID NO: 242327 - DNA, 33 bp, Homo sapien
aagacatcaattaataacagctattcactggat

SEQ ID NO: 242328 - DNA, 33 bp, Homo sapien
aagacatcaattaatagcagctattcactggat

SEQ ID NO: 242329 - DNA, 33 bp, Homo sapien
atctactatgcatcaaacactatgttagacact

SEQ ID NO: 242330 - DNA, 33 bp, Homo sapien
atctactatgcatcaagcactatgttagacact

SEQ ID NO: 242331 - DNA, 33 bp, Homo sapien
attacagtttgccacactagaacaaaaaatttt

SEQ ID NO: 242332 - DNA, 33 bp, Homo sapien
attacagtttgccacattagaacaaaaaatttt

SEQ ID NO: 242333 - DNA, 33 bp, Homo sapien
tgaaagtgtggtcagagggctattaggaagcta

SEQ ID NO: 242334 - DNA, 33 bp, Homo sapien
tgaaagtgtggtcagatggctattaggaagcta

SEQ ID NO: 242335 - DNA, 33 bp, Homo sapien
tctttccatttgaggaagctgaaaccacaaaag

SEQ ID NO: 242336 - DNA, 33 bp, Homo sapien
tctttccatttgaggaggctgaaaccacaaaag

SEQ ID NO: 242337 - DNA, 33 bp, Homo sapien
taagagccgacactgcagactgtaatgtttccc

SEQ ID NO: 242338 - DNA, 33 bp, Homo sapien
taagagccgacactgcggactgtaatgtttccc

SEQ ID NO: 242339 - DNA, 33 bp, Homo sapien
ttctctgcatgtggaccaaaggtgaccactaga

SEQ ID NO: 242340 - DNA, 33 bp, Homo sapien
ttctctgcatgtggactaaaggtgaccactaga

SEQ ID NO: 242341 - DNA, 33 bp, Homo sapien
ttatctcttataaacacaatggtgtcaaaatga

SEQ ID NO: 242342 - DNA, 33 bp, Homo sapien
ttatctcttataaacagaatggtgtcaaaatga

SEQ ID NO: 242343 - DNA, 33 bp, Homo sapien
ccccttagaagggccaatacactgaaagagaga

SEQ ID NO: 242344 - DNA, 33 bp, Homo sapien
ccccttagaagggccagtacactgaaagagaga

SEQ ID NO: 242345 - DNA, 33 bp, Homo sapien
agtcttgttgagtatacgtaaaccatccgattg

SEQ ID NO: 242346 - DNA, 33 bp, Homo sapien
agtcttgttgagtatatgtaaaccatccgattg

SEQ ID NO: 242347 - DNA, 33 bp, Homo sapien
atttcccagatttataacaatgaaagtagctac

SEQ ID NO: 242348 - DNA, 33 bp, Homo sapien
atttcccagatttatagcaatgaaagtagctac

SEQ ID NO: 242349 - DNA, 33 bp, Homo sapien
agatttttagtagtaaacctgacccaatagaga

SEQ ID NO: 242350 - DNA, 33 bp, Homo sapien
agatttttagtagtaagcctgacccaatagaga

SEQ ID NO: 242351 - DNA, 33 bp, Homo sapien
agtttttaaaacttccacatggtgtactgcccc

SEQ ID NO: 242352 - DNA, 33 bp, Homo sapien
agtttttaaaacttccgcatggtgtactgcccc

SEQ ID NO: 242353 - DNA, 33 bp, Homo sapien
agtggaatcaaagggacgccgggataatgagca

SEQ ID NO: 242354 - DNA, 33 bp, Homo sapien
agtggaatcaaagggatgccgggataatgagca

SEQ ID NO: 242355 - DNA, 33 bp, Homo sapien
gagagcttgagcagaaataatgtcagtagggat

SEQ ID NO: 242356 - DNA, 33 bp, Homo sapien
gagagcttgagcagaagtaatgtcagtagggat

SEQ ID NO: 242357 - DNA, 33 bp, Homo sapien
agtgaacatgggacaacgagttagggaccacgt

SEQ ID NO: 242358 - DNA, 33 bp, Homo sapien
agtgaacatgggacaatgagttagggaccacgt

SEQ ID NO: 242359 - DNA, 33 bp, Homo sapien
tcccagagaaccagaactaagacagctaagctc

SEQ ID NO: 242360 - DNA, 33 bp, Homo sapien
tcccagagaaccagaattaagacagctaagctc

SEQ ID NO: 242361 - DNA, 33 bp, Homo sapien
tcataggtgcacattacattgtgagttatgtgt

SEQ ID NO: 242362 - DNA, 33 bp, Homo sapien
tcataggtgcacattatattgtgagttatgtgt

SEQ ID NO: 242363 - DNA, 33 bp, Homo sapien
ccataaaagcaaaggaatccaaaagaaaggtga

SEQ ID NO: 242364 - DNA, 33 bp, Homo sapien
ccataaaagcaaaggagtccaaaagaaaggtga

SEQ ID NO: 242365 - DNA, 33 bp, Homo sapien
tgatctttagtgtgaaatatgtgtccatttaac

SEQ ID NO: 242366 - DNA, 33 bp, Homo sapien
tgatctttagtgtgaattatgtgtccatttaac

SEQ ID NO: 242367 - DNA, 33 bp, Homo sapien
cctgcttcctcattcacagatggtatttttcag

SEQ ID NO: 242368 - DNA, 33 bp, Homo sapien
cctgcttcctcattcatagatggtatttttcag

SEQ ID NO: 242369 - DNA, 33 bp, Homo sapien
gtatttttctcagacacgtagttgccattgctt

SEQ ID NO: 242370 - DNA, 33 bp, Homo sapien
gtatttttctcagacatgtagttgccattgctt

SEQ ID NO: 242371 - DNA, 33 bp, Homo sapien
aaaacaggatgtagcaaagaaatgggccaaaac

SEQ ID NO: 242372 - DNA, 33 bp, Homo sapien
aaaacaggatgtagcacagaaatgggccaaaac

SEQ ID NO: 242373 - DNA, 33 bp, Homo sapien
accctgggtgttgctgaagaaaaacctcacatc

SEQ ID NO: 242374 - DNA, 33 bp, Homo sapien
accctgggtgttgctgcagaaaaacctcacatc

SEQ ID NO: 242375 - DNA, 33 bp, Homo sapien
gcaagcaagaaagcccacttaggcaattgcagg

SEQ ID NO: 242376 - DNA, 33 bp, Homo sapien
gcaagcaagaaagcccgcttaggcaattgcagg

SEQ ID NO: 242377 - DNA, 33 bp, Homo sapien
ctgtgtgatcggtgccaaaacttggagatgggt

SEQ ID NO: 242378 - DNA, 33 bp, Homo sapien
ctgtgtgatcggtgccgaaacttggagatgggt

SEQ ID NO: 242379 - DNA, 33 bp, Homo sapien
catctgcatgtccccaatggagtaacccatctc

SEQ ID NO: 242380 - DNA, 33 bp, Homo sapien
catctgcatgtccccagtggagtaacccatctc

SEQ ID NO: 242381 - DNA, 33 bp, Homo sapien
tgatggcaagaagaaaagtaggagagcagtcat

SEQ ID NO: 242382 - DNA, 33 bp, Homo sapien
tgatggcaagaagaaaggtaggagagcagtcat

SEQ ID NO: 242383 - DNA, 33 bp, Homo sapien
aagccctctgcaacctgacttcagtctacattt

SEQ ID NO: 242384 - DNA, 33 bp, Homo sapien
aagccctctgcaaccttacttcagtctacattt

SEQ ID NO: 242385 - DNA, 33 bp, Homo sapien
gcagtaaaatggaacactgatgctgaattaaag

SEQ ID NO: 242386 - DNA, 33 bp, Homo sapien
gcagtaaaatggaacattgatgctgaattaaag

SEQ ID NO: 242387 - DNA, 33 bp, Homo sapien
gtagtctacaatctgaccttttcttgctcacaa

SEQ ID NO: 242388 - DNA, 33 bp, Homo sapien
gtagtctacaatctgatcttttcttgctcacaa

SEQ ID NO: 242389 - DNA, 33 bp, Homo sapien
gctctccatatggctaccagagttatgtagtct

SEQ ID NO: 242390 - DNA, 33 bp, Homo sapien
gctctccatatggctatcagagttatgtagtct

SEQ ID NO: 242391 - DNA, 33 bp, Homo sapien
ccctacctgattattacgtagcatgagaattga

SEQ ID NO: 242392 - DNA, 33 bp, Homo sapien
ccctacctgattattatgtagcatgagaattga

SEQ ID NO: 242393 - DNA, 33 bp, Homo sapien
cacttttgaatgaaaccgctgatggttgtcgaa

SEQ ID NO: 242394 - DNA, 33 bp, Homo sapien
cacttttgaatgaaactgctgatggttgtcgaa

SEQ ID NO: 242395 - DNA, 33 bp, Homo sapien
gagaaattactttttaactctcaatcctcagtt

SEQ ID NO: 242396 - DNA, 33 bp, Homo sapien
gagaaattactttttatctctcaatcctcagtt

SEQ ID NO: 242397 - DNA, 33 bp, Homo sapien
ggtaaaaactagcaaaagtcatcggttctaggt

SEQ ID NO: 242398 - DNA, 33 bp, Homo sapien
ggtaaaaactagcaaatgtcatcggttctaggt

SEQ ID NO: 242399 - DNA, 33 bp, Homo sapien
ctagtgttcacaaataagttgcgaaaataagct

SEQ ID NO: 242400 - DNA, 33 bp, Homo sapien
ctagtgttcacaaatacgttgcgaaaataagct

SEQ ID NO: 242401 - DNA, 33 bp, Homo sapien
tgttagaatgggggtactaaactaagaagtaat

SEQ ID NO: 242402 - DNA, 33 bp, Homo sapien
tgttagaatgggggtattaaactaagaagtaat

SEQ ID NO: 242403 - DNA, 33 bp, Homo sapien
gactttgaccactcaaacctttatttgaccact

SEQ ID NO: 242404 - DNA, 33 bp, Homo sapien
gactttgaccactcaaccctttatttgaccact

SEQ ID NO: 242405 - DNA, 33 bp, Homo sapien
gaaggtagcttgatcaaaaatgtgctgttggga

SEQ ID NO: 242406 - DNA, 33 bp, Homo sapien
gaaggtagcttgatcagaaatgtgctgttggga

SEQ ID NO: 242407 - DNA, 33 bp, Homo sapien
cttaaaacacaagtccaaaaatgtcatagaaga

SEQ ID NO: 242408 - DNA, 33 bp, Homo sapien
cttaaaacacaagtccgaaaatgtcatagaaga

SEQ ID NO: 242409 - DNA, 33 bp, Homo sapien
atgaactaagacaggaccttaataaaagtgttc

SEQ ID NO: 242410 - DNA, 33 bp, Homo sapien
atgaactaagacaggatcttaataaaagtgttc

SEQ ID NO: 242411 - DNA, 33 bp, Homo sapien
tacagtgtacactccacgaaggcaggcaccttg

SEQ ID NO: 242412 - DNA, 33 bp, Homo sapien
tacagtgtacactccatgaaggcaggcaccttg

SEQ ID NO: 242413 - DNA, 33 bp, Homo sapien
tcatcattcttgtctccaagtatctcatttcct

SEQ ID NO: 242414 - DNA, 33 bp, Homo sapien
tcatcattcttgtctctaagtatctcatttcct

SEQ ID NO: 242415 - DNA, 33 bp, Homo sapien
caaggttttgggacaccacagatttaacactga

SEQ ID NO: 242416 - DNA, 33 bp, Homo sapien
caaggttttgggacactacagatttaacactga

SEQ ID NO: 242417 - DNA, 33 bp, Homo sapien
aaatggatctagtgccacagacagctgactttg

SEQ ID NO: 242418 - DNA, 33 bp, Homo sapien
aaatggatctagtgccgcagacagctgactttg

SEQ ID NO: 242419 - DNA, 33 bp, Homo sapien
ggaataaattcacataccgacataaatttaata

SEQ ID NO: 242420 - DNA, 33 bp, Homo sapien
ggaataaattcacatagcgacataaatttaata

SEQ ID NO: 242421 - DNA, 33 bp, Homo sapien
tagtttccaaatgcaccgtagactttttcatac

SEQ ID NO: 242422 - DNA, 33 bp, Homo sapien
tagtttccaaatgcactgtagactttttcatac

SEQ ID NO: 242423 - DNA, 33 bp, Homo sapien
tacagtatagggtcaaattctgtagccagctgg

SEQ ID NO: 242424 - DNA, 33 bp, Homo sapien
tacagtatagggtcaacttctgtagccagctgg

SEQ ID NO: 242425 - DNA, 33 bp, Homo sapien
ctgaaatgcctgagagaacatccagggacattt

SEQ ID NO: 242426 - DNA, 33 bp, Homo sapien
ctgaaatgcctgagaggacatccagggacattt

SEQ ID NO: 242427 - DNA, 33 bp, Homo sapien
actaactctctacacccgactgtctttgagctg

SEQ ID NO: 242428 - DNA, 33 bp, Homo sapien
actaactctctacacctgactgtctttgagctg

SEQ ID NO: 242429 - DNA, 33 bp, Homo sapien
attgctattactaccactgctattactgagaca

SEQ ID NO: 242430 - DNA, 33 bp, Homo sapien
attgctattactaccattgctattactgagaca

SEQ ID NO: 242431 - DNA, 33 bp, Homo sapien
agcgagattccatcccaaaaaacaaaggccata

SEQ ID NO: 242432 - DNA, 33 bp, Homo sapien
agcgagattccatcccgaaaaacaaaggccata

SEQ ID NO: 242433 - DNA, 33 bp, Homo sapien
tgagaaatctacccagaaatgaggcttagtgac

SEQ ID NO: 242434 - DNA, 33 bp, Homo sapien
tgagaaatctacccagcaatgaggcttagtgac

SEQ ID NO: 242435 - DNA, 33 bp, Homo sapien
tactgtagacccaaaaacagccacagacaatac

SEQ ID NO: 242436 - DNA, 33 bp, Homo sapien
tactgtagacccaaaagcagccacagacaatac

SEQ ID NO: 242437 - DNA, 33 bp, Homo sapien
gggctcctgctcttgcacggctccaatattgcc

SEQ ID NO: 242438 - DNA, 33 bp, Homo sapien
gggctcctgctcttgcgcggctccaatattgcc

SEQ ID NO: 242439 - DNA, 33 bp, Homo sapien
ttaaggctgaaagggacgaatttccaaggtgtt

SEQ ID NO: 242440 - DNA, 33 bp, Homo sapien
ttaaggctgaaagggatgaatttccaaggtgtt

SEQ ID NO: 242441 - DNA, 33 bp, Homo sapien
agctgcctgaaaaaaccctgaacaaaaagacaa

SEQ ID NO: 242442 - DNA, 33 bp, Homo sapien
agctgcctgaaaaaactctgaacaaaaagacaa

SEQ ID NO: 242443 - DNA, 33 bp, Homo sapien
aaaatcttgtttgaacccatcctggttgtggta

SEQ ID NO: 242444 - DNA, 33 bp, Homo sapien
aaaatcttgtttgaactcatcctggttgtggta

SEQ ID NO: 242445 - DNA, 33 bp, Homo sapien
agactggagtgggtcacaggaactgaaatgtgt

SEQ ID NO: 242446 - DNA, 33 bp, Homo sapien
agactggagtgggtcagaggaactgaaatgtgt

SEQ ID NO: 242447 - DNA, 33 bp, Homo sapien
gatttaagactgaaaacaaagactgcagatatt

SEQ ID NO: 242448 - DNA, 33 bp, Homo sapien
gatttaagactgaaaataaagactgcagatatt

SEQ ID NO: 242449 - DNA, 33 bp, Homo sapien
ttgtgcaaagatcatacagtgtacttacacaaa

SEQ ID NO: 242450 - DNA, 33 bp, Homo sapien
ttgtgcaaagatcatagagtgtacttacacaaa

SEQ ID NO: 242451 - DNA, 33 bp, Homo sapien
acagaattctgaacatcagtataattcctctcc

SEQ ID NO: 242452 - DNA, 33 bp, Homo sapien
acagaattctgaacattagtataattcctctcc

SEQ ID NO: 242453 - DNA, 33 bp, Homo sapien
caacatttgaagaaaaaagtgaaaattttccat

SEQ ID NO: 242454 - DNA, 33 bp, Homo sapien
caacatttgaagaaaagagtgaaaattttccat

SEQ ID NO: 242455 - DNA, 33 bp, Homo sapien
gaagggtgagaatagacaggaagggacaaataa

SEQ ID NO: 242456 - DNA, 33 bp, Homo sapien
gaagggtgagaatagagaggaagggacaaataa

SEQ ID NO: 242457 - DNA, 33 bp, Homo sapien
ctccagtgattccacacgttcactcaatcacta

SEQ ID NO: 242458 - DNA, 33 bp, Homo sapien
ctccagtgattccacaggttcactcaatcacta

SEQ ID NO: 242459 - DNA, 33 bp, Homo sapien
gaagccggtggaatggaaacttgcagatagatt

SEQ ID NO: 242460 - DNA, 33 bp, Homo sapien
gaagccggtggaatgggaacttgcagatagatt

SEQ ID NO: 242461 - DNA, 33 bp, Homo sapien
gagctgagctaggaaccggggctgaagtactgg

SEQ ID NO: 242462 - DNA, 33 bp, Homo sapien
gagctgagctaggaactggggctgaagtactgg

SEQ ID NO: 242463 - DNA, 33 bp, Homo sapien
acctcctgctatcatgaaagacaaattatattt

SEQ ID NO: 242464 - DNA, 33 bp, Homo sapien
acctcctgctatcatggaagacaaattatattt

SEQ ID NO: 242465 - DNA, 33 bp, Homo sapien
gttgtacagcaagcccaaagagcctggatgaaa

SEQ ID NO: 242466 - DNA, 33 bp, Homo sapien
gttgtacagcaagcccgaagagcctggatgaaa

SEQ ID NO: 242467 - DNA, 33 bp, Homo sapien
gttgtgtatcctaaagcatcacctgtactgcag

SEQ ID NO: 242468 - DNA, 33 bp, Homo sapien
gttgtgtatcctaaagtatcacctgtactgcag

SEQ ID NO: 242469 - DNA, 33 bp, Homo sapien
tcacaaaggacttcaactcctttcataaatata

SEQ ID NO: 242470 - DNA, 33 bp, Homo sapien
tcacaaaggacttcaattcctttcataaatata

SEQ ID NO: 242471 - DNA, 33 bp, Homo sapien
cacattatatatgctcacttagcaatttcccat

SEQ ID NO: 242472 - DNA, 33 bp, Homo sapien
cacattatatatgctcgcttagcaatttcccat

SEQ ID NO: 242473 - DNA, 33 bp, Homo sapien
cattatgtgacataagaaatcaagactaacagt

SEQ ID NO: 242474 - DNA, 33 bp, Homo sapien
cattatgtgacataaggaatcaagactaacagt

SEQ ID NO: 242475 - DNA, 33 bp, Homo sapien
tgacaggcagaagctacataaagctatggaact

SEQ ID NO: 242476 - DNA, 33 bp, Homo sapien
tgacaggcagaagctatataaagctatggaact

SEQ ID NO: 242477 - DNA, 33 bp, Homo sapien
ggtcttgcttatttcacggctgttaatctctgc

SEQ ID NO: 242478 - DNA, 33 bp, Homo sapien
ggtcttgcttatttcatggctgttaatctctgc

SEQ ID NO: 242479 - DNA, 33 bp, Homo sapien
ttatctgagtttccaactagaaattaatatctc

SEQ ID NO: 242480 - DNA, 33 bp, Homo sapien
ttatctgagtttccaattagaaattaatatctc

SEQ ID NO: 242481 - DNA, 33 bp, Homo sapien
aagatggtggttagaaccagaacgaaaggagaa

SEQ ID NO: 242482 - DNA, 33 bp, Homo sapien
aagatggtggttagaatcagaacgaaaggagaa

SEQ ID NO: 242483 - DNA, 33 bp, Homo sapien
tccaagtgcacaagagccaaagtgaaaagaaat

SEQ ID NO: 242484 - DNA, 33 bp, Homo sapien
tccaagtgcacaagagtcaaagtgaaaagaaat

SEQ ID NO: 242485 - DNA, 33 bp, Homo sapien
gaaggccattagaggaaggaatctttcaaatgt

SEQ ID NO: 242486 - DNA, 33 bp, Homo sapien
gaaggccattagaggagggaatctttcaaatgt

SEQ ID NO: 242487 - DNA, 33 bp, Homo sapien
ttacttatttaattcacctaaagccagggccag

SEQ ID NO: 242488 - DNA, 33 bp, Homo sapien
ttacttatttaattcatctaaagccagggccag

SEQ ID NO: 242489 - DNA, 33 bp, Homo sapien
atgttgtttctcaaaaattgcctgcgagcaagc

SEQ ID NO: 242490 - DNA, 33 bp, Homo sapien
atgttgtttctcaaaagttgcctgcgagcaagc

SEQ ID NO: 242491 - DNA, 33 bp, Homo sapien
tgagcaaatgttttcaccccaaggctgtgtctg

SEQ ID NO: 242492 - DNA, 33 bp, Homo sapien
tgagcaaatgttttcatcccaaggctgtgtctg

SEQ ID NO: 242493 - DNA, 33 bp, Homo sapien
gataacctaatcagaccgaattaaatgaagcag

SEQ ID NO: 242494 - DNA, 33 bp, Homo sapien
gataacctaatcagactgaattaaatgaagcag

SEQ ID NO: 242495 - DNA, 33 bp, Homo sapien
ttgaggccacttggtgaaatcaaaacaacacta

SEQ ID NO: 242496 - DNA, 33 bp, Homo sapien
ttgaggccacttggtgcaatcaaaacaacacta

SEQ ID NO: 242497 - DNA, 33 bp, Homo sapien
tggcctatggctccacagagtataccatttacc

SEQ ID NO: 242498 - DNA, 33 bp, Homo sapien
tggcctatggctccacggagtataccatttacc

SEQ ID NO: 242499 - DNA, 33 bp, Homo sapien
tatattgtacctatctaaataatccaggtaatc

SEQ ID NO: 242500 - DNA, 33 bp, Homo sapien
tatattgtacctatctgaataatccaggtaatc

SEQ ID NO: 242501 - DNA, 33 bp, Homo sapien
gggccaaaaaagagcaatgaaaacagggggatc

SEQ ID NO: 242502 - DNA, 33 bp, Homo sapien
gggccaaaaaagagcagtgaaaacagggggatc

SEQ ID NO: 242503 - DNA, 33 bp, Homo sapien
aaaatgcactggtgaacgacatcaaacacctat

SEQ ID NO: 242504 - DNA, 33 bp, Homo sapien
aaaatgcactggtgaatgacatcaaacacctat

SEQ ID NO: 242505 - DNA, 33 bp, Homo sapien
tagacaatttaggtaaactctgccaaataactg

SEQ ID NO: 242506 - DNA, 33 bp, Homo sapien
tagacaatttaggtaagctctgccaaataactg

SEQ ID NO: 242507 - DNA, 33 bp, Homo sapien
tcctgcggggtgtggaacactttcattttctgg

SEQ ID NO: 242508 - DNA, 33 bp, Homo sapien
tcctgcggggtgtggagcactttcattttctgg

SEQ ID NO: 242509 - DNA, 33 bp, Homo sapien
gcttgacaagaaaattcaaggccaaaagcccat

SEQ ID NO: 242510 - DNA, 33 bp, Homo sapien
gcttgacaagaaaattgaaggccaaaagcccat

SEQ ID NO: 242511 - DNA, 33 bp, Homo sapien
tggactagatcccagcgccaatctgatttaata

SEQ ID NO: 242512 - DNA, 33 bp, Homo sapien
tggactagatcccagctccaatctgatttaata

SEQ ID NO: 242513 - DNA, 33 bp, Homo sapien
aaagccaactgggagaaaatgtaagacaaccag

SEQ ID NO: 242514 - DNA, 33 bp, Homo sapien
aaagccaactgggagagaatgtaagacaaccag

SEQ ID NO: 242515 - DNA, 33 bp, Homo sapien
tatccgaatcacggtgcatgatactaatagatt

SEQ ID NO: 242516 - DNA, 33 bp, Homo sapien
tatccgaatcacggtgtatgatactaatagatt

SEQ ID NO: 242517 - DNA, 33 bp, Homo sapien
tcttatctacatgttcaacaaaaaaatggtaat

SEQ ID NO: 242518 - DNA, 33 bp, Homo sapien
tcttatctacatgttccacaaaaaaatggtaat

SEQ ID NO: 242519 - DNA, 33 bp, Homo sapien
gggtttatgtagtcaacttcctgaggcaaaagg

SEQ ID NO: 242520 - DNA, 33 bp, Homo sapien
gggtttatgtagtcaagttcctgaggcaaaagg

SEQ ID NO: 242521 - DNA, 33 bp, Homo sapien
ttacagcgtgaagccacgttctgttgtagctca

SEQ ID NO: 242522 - DNA, 33 bp, Homo sapien
ttacagcgtgaagccatgttctgttgtagctca

SEQ ID NO: 242523 - DNA, 33 bp, Homo sapien
gtagatgaaatcaaaaatttcacaatccattat

SEQ ID NO: 242524 - DNA, 33 bp, Homo sapien
gtagatgaaatcaaaattttcacaatccattat

SEQ ID NO: 242525 - DNA, 33 bp, Homo sapien; identical to SEQ ID NO: 242523

SEQ ID NO: 242526 - DNA, 33 bp, Homo sapien; identical to SEQ ID NO: 242524

SEQ ID NO: 242527 - DNA, 33 bp, Homo sapien
atgtcaagttggctaaagtacactaggaggagt

SEQ ID NO: 242528 - DNA, 33 bp, Homo sapien
atgtcaagttggctaaggtacactaggaggagt

SEQ ID NO: 242529 - DNA, 33 bp, Homo sapien; identical to SEQ ID NO: 242527

SEQ ID NO: 242530 - DNA, 33 bp, Homo sapien; identical to SEQ ID NO: 242528

SEQ ID NO: 242531 - DNA, 33 bp, Homo sapien
tcatcttcatgccttcaatgcaatgtcttagtg

SEQ ID NO: 242532 - DNA, 33 bp, Homo sapien
tcatcttcatgccttcgatgcaatgtcttagtg

SEQ ID NO: 242533 - DNA, 33 bp, Homo sapien
atttttttgacatggccatttacataatttact

SEQ ID NO: 242534 - DNA, 33 bp, Homo sapien
atttttttgacatggctatttacataatttact

SEQ ID NO: 242535 - DNA, 33 bp, Homo sapien
gactggcctagaagacactaagggacagtggtg

SEQ ID NO: 242536 - DNA, 33 bp, Homo sapien
gactggcctagaagacgctaagggacagtggtg

SEQ ID NO: 242537 - DNA, 33 bp, Homo sapien
gtggaagcagacaaaacgctactgtattaaata

SEQ ID NO: 242538 - DNA, 33 bp, Homo sapien
gtggaagcagacaaaatgctactgtattaaata

SEQ ID NO: 242539 - DNA, 33 bp, Homo sapien
gtgatatgaattaaaacctctaaagatgatgcc

SEQ ID NO: 242540 - DNA, 33 bp, Homo sapien
gtgatatgaattaaaagctctaaagatgatgcc

SEQ ID NO: 242541 - DNA, 33 bp, Homo sapien
ttgtgtatggaactaacacaacacttctatttg

SEQ ID NO: 242542 - DNA, 33 bp, Homo sapien
ttgtgtatggaactaatacaacacttctatttg

SEQ ID NO: 242543 - DNA, 33 bp, Homo sapien
aactccttggggtcgaccagctacaatggctgt

SEQ ID NO: 242544 - DNA, 33 bp, Homo sapien
aactccttggggtcgatcagctacaatggctgt

SEQ ID NO: 242545 - DNA, 33 bp, Homo sapien
actgtcaatctcaacaatgcattaaaagcacat

SEQ ID NO: 242546 - DNA, 33 bp, Homo sapien
actgtcaatctcaacagtgcattaaaagcacat

SEQ ID NO: 242547 - DNA, 33 bp, Homo sapien
ttgttctgcttctctcccttgcccagagtatat

SEQ ID NO: 242548 - DNA, 33 bp, Homo sapien
ttgttctgcttctctctcttgcccagagtatat

SEQ ID NO: 242549 - DNA, 33 bp, Homo sapien
ccacttgccactagaaaagtccttcctaatgta

SEQ ID NO: 242550 - DNA, 33 bp, Homo sapien
ccacttgccactagaagagtccttcctaatgta

SEQ ID NO: 242551 - DNA, 33 bp, Homo sapien
ggtgggttcagtcgcaccccaaacctcaacatc

SEQ ID NO: 242552 - DNA, 33 bp, Homo sapien
ggtgggttcagtcgcatcccaaacctcaacatc

SEQ ID NO: 242553 - DNA, 33 bp, Homo sapien
aatttgtaaccccaaacggagtcagggatggta

SEQ ID NO: 242554 - DNA, 33 bp, Homo sapien
aatttgtaaccccaaatggagtcagggatggta

SEQ ID NO: 242555 - DNA, 33 bp, Homo sapien
ctatctatccatagaccattcttgaccaagcaa

SEQ ID NO: 242556 - DNA, 33 bp, Homo sapien
ctatctatccatagacgattcttgaccaagcaa

SEQ ID NO: 242557 - DNA, 33 bp, Homo sapien
aattccatgtcaccaacaacacagacaagaccc

SEQ ID NO: 242558 - DNA, 33 bp, Homo sapien
aattccatgtcaccaagaacacagacaagaccc

SEQ ID NO: 242559 - DNA, 33 bp, Homo sapien
actatttaaatgtgaaaattcactcatgtcagt

SEQ ID NO: 242560 - DNA, 33 bp, Homo sapien
actatttaaatgtgaacattcactcatgtcagt

SEQ ID NO: 242561 - DNA, 33 bp, Homo sapien
ttaggacacaaagaaccaatggggatataggcc

SEQ ID NO: 242562 - DNA, 33 bp, Homo sapien
ttaggacacaaagaacgaatggggatataggcc

SEQ ID NO: 242563 - DNA, 33 bp, Homo sapien
tggcccaatgaggtggaaagggagtctacaagg

SEQ ID NO: 242564 - DNA, 33 bp, Homo sapien
tggcccaatgaggtgggaagggagtctacaagg

SEQ ID NO: 242565 - DNA, 33 bp, Homo sapien
ctgaaaacatatgctcgcatagaaacttgtaca

SEQ ID NO: 242566 - DNA, 33 bp, Homo sapien
ctgaaaacatatgctctcatagaaacttgtaca

SEQ ID NO: 242567 - DNA, 33 bp, Homo sapien
cctggctgctacaaaaccattgaaattctgggt

SEQ ID NO: 242568 - DNA, 33 bp, Homo sapien
cctggctgctacaaaatcattgaaattctgggt

SEQ ID NO: 242569 - DNA, 33 bp, Homo sapien
caagcatgacttcccacagtctggctggtgccc

SEQ ID NO: 242570 - DNA, 33 bp, Homo sapien
caagcatgacttcccatagtctggctggtgccc

SEQ ID NO: 242571 - DNA, 33 bp, Homo sapien
aattttgagaaaggtaaattctcaggacccacc

SEQ ID NO: 242572 - DNA, 33 bp, Homo sapien
aattttgagaaaggtagattctcaggacccacc

SEQ ID NO: 242573 - DNA, 33 bp, Homo sapien
ggctttggaaagttaacgaaagcagaaatggag

SEQ ID NO: 242574 - DNA, 33 bp, Homo sapien
ggctttggaaagttaaggaaagcagaaatggag

SEQ ID NO: 242575 - DNA, 33 bp, Homo sapien
agttggtccaagttaactgttgataatatcagg

SEQ ID NO: 242576 - DNA, 33 bp, Homo sapien
agttggtccaagttaattgttgataatatcagg

SEQ ID NO: 242577 - DNA, 33 bp, Homo sapien
tgttgccacatacttggagtcccagttattagg

SEQ ID NO: 242578 - DNA, 33 bp, Homo sapien
tgttgccacatacttgtagtcccagttattagg

SEQ ID NO: 242579 - DNA, 33 bp, Homo sapien
gccattatccaagcaaattaatgcaggcacaga

SEQ ID NO: 242580 - DNA, 33 bp, Homo sapien
gccattatccaagcaagttaatgcaggcacaga

SEQ ID NO: 242581 - DNA, 33 bp, Homo sapien
tttgatacaggattgaacaacgaagtcatcttc

SEQ ID NO: 242582 - DNA, 33 bp, Homo sapien
tttgatacaggattgagcaacgaagtcatcttc

SEQ ID NO: 242583 - DNA, 33 bp, Homo sapien
aggcttaggcagtggaagaggtagagaggaagg

SEQ ID NO: 242584 - DNA, 33 bp, Homo sapien
aggcttaggcagtggacgaggtagagaggaagg

SEQ ID NO: 242585 - DNA, 33 bp, Homo sapien
gatcttgaacacggcccgatgaagccaaagttc

SEQ ID NO: 242586 - DNA, 33 bp, Homo sapien
gatcttgaacacggcctgatgaagccaaagttc

SEQ ID NO: 242587 - DNA, 33 bp, Homo sapien
gctattcaggcctggcaaatagcacccccagaa

SEQ ID NO: 242588 - DNA, 33 bp, Homo sapien
gctattcaggcctggcgaatagcacccccagaa

SEQ ID NO: 242589 - DNA, 33 bp, Homo sapien
cccatgttgtcttgaactagcctatcttctctt

SEQ ID NO: 242590 - DNA, 33 bp, Homo sapien
cccatgttgtcttgaattagcctatcttctctt

SEQ ID NO: 242591 - DNA, 33 bp, Homo sapien
cttatcaaaatgttagcaaatcgaattcggtaa

SEQ ID NO: 242592 - DNA, 33 bp, Homo sapien
cttatcaaaatgttaggaaatcgaattcggtaa

SEQ ID NO: 242593 - DNA, 33 bp, Homo sapien
ttgtaatgttaatgtgaaaagttacattgactg

SEQ ID NO: 242594 - DNA, 33 bp, Homo sapien
ttgtaatgttaatgtggaaagttacattgactg

SEQ ID NO: 242595 - DNA, 33 bp, Homo sapien
tagcttgtgtgactaccaccccgctcaagatat

SEQ ID NO: 242596 - DNA, 33 bp, Homo sapien
tagcttgtgtgactactaccccgctcaagatat

SEQ ID NO: 242597 - DNA, 33 bp, Homo sapien
actgtgatctctgttcactacagattgtcacct

SEQ ID NO: 242598 - DNA, 33 bp, Homo sapien
actgtgatctctgttcgctacagattgtcacct

SEQ ID NO: 242599 - DNA, 33 bp, Homo sapien
attaacaataatatccactttttaatgagcctt

SEQ ID NO: 242600 - DNA, 33 bp, Homo sapien
attaacaataatatccgctttttaatgagcctt

SEQ ID NO: 242601 - DNA, 33 bp, Homo sapien
ggttttccttaggtcacgtatctcttgacctct

SEQ ID NO: 242602 - DNA, 33 bp, Homo sapien
ggttttccttaggtcatgtatctcttgacctct

SEQ ID NO: 242603 - DNA, 33 bp, Homo sapien
cagctcataaacagaacttaaagctgcgggaca

SEQ ID NO: 242604 - DNA, 33 bp, Homo sapien
cagctcataaacagaagttaaagctgcgggaca

SEQ ID NO: 242605 - DNA, 33 bp, Homo sapien
tctgtttatgagctgaacattccatatagctca

SEQ ID NO: 242606 - DNA, 33 bp, Homo sapien
tctgtttatgagctgatcattccatatagctca

SEQ ID NO: 242607 - DNA, 33 bp, Homo sapien
atgagtaagatcataccacccccagcaaaataa

SEQ ID NO: 242608 - DNA, 33 bp, Homo sapien
atgagtaagatcatactacccccagcaaaataa

SEQ ID NO: 242609 - DNA, 33 bp, Homo sapien
ccattagctctggttccaggaacacatcaggaa

SEQ ID NO: 242610 - DNA, 33 bp, Homo sapien
ccattagctctggttctaggaacacatcaggaa

SEQ ID NO: 242611 - DNA, 33 bp, Homo sapien
caaatctagaactacaacaatatggatgaaact

SEQ ID NO: 242612 - DNA, 33 bp, Homo sapien
caaatctagaactacagcaatatggatgaaact

SEQ ID NO: 242613 - DNA, 33 bp, Homo sapien
acccaagccaaccactaagagaactctatccaa

SEQ ID NO: 242614 - DNA, 33 bp, Homo sapien
acccaagccaaccactcagagaactctatccaa

SEQ ID NO: 242615 - DNA, 33 bp, Homo sapien
ggctgaggttgcattcaaaagcttgactgggga

SEQ ID NO: 242616 - DNA, 33 bp, Homo sapien
ggctgaggttgcattcgaaagcttgactgggga

SEQ ID NO: 242617 - DNA, 33 bp, Homo sapien
aacaaaaaaacttgtacatgtggtgaaggtcaa

SEQ ID NO: 242618 - DNA, 33 bp, Homo sapien
aacaaaaaaacttgtatatgtggtgaaggtcaa

SEQ ID NO: 242619 - DNA, 33 bp, Homo sapien
caacaacatggaccaccgacaatatacatggta

SEQ ID NO: 242620 - DNA, 33 bp, Homo sapien
caacaacatggaccactgacaatatacatggta

SEQ ID NO: 242621 - DNA, 33 bp, Homo sapien
tgacagacatctataaactgactgcaactgaga

SEQ ID NO: 242622 - DNA, 33 bp, Homo sapien
tgacagacatctataacctgactgcaactgaga

SEQ ID NO: 242623 - DNA, 33 bp, Homo sapien
tgagacaccgcttctgaactgcctcacgtcctc

SEQ ID NO: 242624 - DNA, 33 bp, Homo sapien
tgagacaccgcttctgcactgcctcacgtcctc

SEQ ID NO: 242625 - DNA, 33 bp, Homo sapien
aaatgtgtgaaactaacgctgtaaaatatgaaa

SEQ ID NO: 242626 - DNA, 33 bp, Homo sapien
aaatgtgtgaaactaatgctgtaaaatatgaaa

SEQ ID NO: 242627 - DNA, 33 bp, Homo sapien
aaggtaaagccaataaattatcatacatgtatg

SEQ ID NO: 242628 - DNA, 33 bp, Homo sapien
aaggtaaagccaataagttatcatacatgtatg

SEQ ID NO: 242629 - DNA, 33 bp, Homo sapien
ttttcttccaaagcaaaagaatgggaaaagttg

SEQ ID NO: 242630 - DNA, 33 bp, Homo sapien
ttttcttccaaagcaagagaatgggaaaagttg

SEQ ID NO: 242631 - DNA, 33 bp, Homo sapien
ccaacttaatatgctcaagagtctggtttttaa

SEQ ID NO: 242632 - DNA, 33 bp, Homo sapien
ccaacttaatatgctcgagagtctggtttttaa

SEQ ID NO: 242633 - DNA, 33 bp, Homo sapien
aaaatgtttccttgccagagaccctcatcaaag

SEQ ID NO: 242634 - DNA, 33 bp, Homo sapien
aaaatgtttccttgccggagaccctcatcaaag

SEQ ID NO: 242635 - DNA, 33 bp, Homo sapien
tgagaaatgatacaataaatcttctcatgtatg

SEQ ID NO: 242636 - DNA, 33 bp, Homo sapien
tgagaaatgatacaatgaatcttctcatgtatg

SEQ ID NO: 242637 - DNA, 33 bp, Homo sapien
gtaagtagttgtcaaacgacagtaagtttatct

SEQ ID NO: 242638 - DNA, 33 bp, Homo sapien
gtaagtagttgtcaaatgacagtaagtttatct

SEQ ID NO: 242639 - DNA, 33 bp, Homo sapien
acagaatgtcatgtcgaaaaatgtcattgagca

SEQ ID NO: 242640 - DNA, 33 bp, Homo sapien
acagaatgtcatgtcggaaaatgtcattgagca

SEQ ID NO: 242641 - DNA, 33 bp, Homo sapien
gggtaacttaattatacataaaagatggtccaa

SEQ ID NO: 242642 - DNA, 33 bp, Homo sapien
gggtaacttaattatagataaaagatggtccaa

SEQ ID NO: 242643 - DNA, 33 bp, Homo sapien
ttgactaatgattaaactcccttctaacaaatg

SEQ ID NO: 242644 - DNA, 33 bp, Homo sapien
ttgactaatgattaaattcccttctaacaaatg

SEQ ID NO: 242645 - DNA, 33 bp, Homo sapien
gttgtccaacttgggacgtttgcatttcagtac

SEQ ID NO: 242646 - DNA, 33 bp, Homo sapien
gttgtccaacttgggatgtttgcatttcagtac

SEQ ID NO: 242647 - DNA, 33 bp, Homo sapien
cacacaaagagacacacgtataatattggaact

SEQ ID NO: 242648 - DNA, 33 bp, Homo sapien
cacacaaagagacacaggtataatattggaact

SEQ ID NO: 242649 - DNA, 33 bp, Homo sapien
aaataaacattcactaactacatgaaacaactt

SEQ ID NO: 242650 - DNA, 33 bp, Homo sapien
aaataaacattcactatctacatgaaacaactt

SEQ ID NO: 242651 - DNA, 33 bp, Homo sapien
tttcttgaacatgaacacagtgagcctgccact

SEQ ID NO: 242652 - DNA, 33 bp, Homo sapien
tttcttgaacatgaacgcagtgagcctgccact

SEQ ID NO: 242653 - DNA, 33 bp, Homo sapien
attcttacaacatgtcaagaccattcccaacca

SEQ ID NO: 242654 - DNA, 33 bp, Homo sapien
attcttacaacatgtctagaccattcccaacca

SEQ ID NO: 242655 - DNA, 33 bp, Homo sapien
aatataatactgtaaaaggctgaaaaaccacgc

SEQ ID NO: 242656 - DNA, 33 bp, Homo sapien
aatataatactgtaaatggctgaaaaaccacgc

SEQ ID NO: 242657 - DNA, 33 bp, Homo sapien
taaaaatgcctactaaacaagttcccacaaata

SEQ ID NO: 242658 - DNA, 33 bp, Homo sapien
taaaaatgcctactaagcaagttcccacaaata

SEQ ID NO: 242659 - DNA, 33 bp, Homo sapien
gtattaaatcatttaaccctcactcatccaatc

SEQ ID NO: 242660 - DNA, 33 bp, Homo sapien
gtattaaatcatttaagcctcactcatccaatc

SEQ ID NO: 242661 - DNA, 33 bp, Homo sapien
tgcttcctagatcttacgttttcctagtgtgac

SEQ ID NO: 242662 - DNA, 33 bp, Homo sapien
tgcttcctagatcttatgttttcctagtgtgac

SEQ ID NO: 242663 - DNA, 33 bp, Homo sapien
gcattctaggagtaatcatggagttcatctagc

SEQ ID NO: 242664 - DNA, 33 bp, Homo sapien
gcattctaggagtaattatggagttcatctagc

SEQ ID NO: 242665 - DNA, 33 bp, Homo sapien
tttcttgcttttctctaaacatcatttcacatt

SEQ ID NO: 242666 - DNA, 33 bp, Homo sapien
tttcttgcttttctctgaacatcatttcacatt

SEQ ID NO: 242667 - DNA, 33 bp, Homo sapien
attcttctacaaccagaaattgtaaatgtcttt

SEQ ID NO: 242668 - DNA, 33 bp, Homo sapien
attcttctacaaccaggaattgtaaatgtcttt

SEQ ID NO: 242669 - DNA, 33 bp, Homo sapien
tagtctgaaattacagcaggttgtctggggtag

SEQ ID NO: 242670 - DNA, 33 bp, Homo sapien
tagtctgaaattacagtaggttgtctggggtag

SEQ ID NO: 242671 - DNA, 33 bp, Homo sapien
aaaatgcagaaagcaaattcacttacagcctga

SEQ ID NO: 242672 - DNA, 33 bp, Homo sapien
aaaatgcagaaagcaagttcacttacagcctga

SEQ ID NO: 242673 - DNA, 33 bp, Homo sapien
ctacgttcaaaccataacaggaagtgctgtcat

SEQ ID NO: 242674 - DNA, 33 bp, Homo sapien
ctacgttcaaaccatagcaggaagtgctgtcat

SEQ ID NO: 242675 - DNA, 33 bp, Homo sapien
aaattggccaaaaaaaattatctgagctatctt

SEQ ID NO: 242676 - DNA, 33 bp, Homo sapien
aaattggccaaaaaaatttatctgagctatctt

SEQ ID NO: 242677 - DNA, 33 bp, Homo sapien
tatgaatacttcagccccacttctttccttagc

SEQ ID NO: 242678 - DNA, 33 bp, Homo sapien
tatgaatacttcagcctcacttctttccttagc

SEQ ID NO: 242679 - DNA, 33 bp, Homo sapien
gttttttggccagaacaaatcatatggccctat

SEQ ID NO: 242680 - DNA, 33 bp, Homo sapien
gttttttggccagaacgaatcatatggccctat

SEQ ID NO: 242681 - DNA, 33 bp, Homo sapien
agcaagtgaaatagcaactcctcacgcctgtaa

SEQ ID NO: 242682 - DNA, 33 bp, Homo sapien
agcaagtgaaatagcagctcctcacgcctgtaa

SEQ ID NO: 242683 - DNA, 33 bp, Homo sapien
cccacagatgttcacacgattaacttcttcacc

SEQ ID NO: 242684 - DNA, 33 bp, Homo sapien
cccacagatgttcacatgattaacttcttcacc

SEQ ID NO: 242685 - DNA, 33 bp, Homo sapien
agagggtccccctttacatagagtgatccagcc

SEQ ID NO: 242686 - DNA, 33 bp, Homo sapien
agagggtccccctttatatagagtgatccagcc

SEQ ID NO: 242687 - DNA, 33 bp, Homo sapien
aaaattaaccctgtgcaatggcgtgggcctgta

SEQ ID NO: 242688 - DNA, 33 bp, Homo sapien
aaaattaaccctgtgcgatggcgtgggcctgta

SEQ ID NO: 242689 - DNA, 33 bp, Homo sapien
gaagcactgacaggaaacacatggaagcagaag

SEQ ID NO: 242690 - DNA, 33 bp, Homo sapien
gaagcactgacaggaagcacatggaagcagaag

SEQ ID NO: 242691 - DNA, 33 bp, Homo sapien
gggaaggagatggagacgagattgagctctttt

SEQ ID NO: 242692 - DNA, 33 bp, Homo sapien
gggaaggagatggagatgagattgagctctttt

SEQ ID NO: 242693 - DNA, 33 bp, Homo sapien
acggctgagaaacctgaatgctacagattcatc

SEQ ID NO: 242694 - DNA, 33 bp, Homo sapien
acggctgagaaacctggatgctacagattcatc

SEQ ID NO: 242695 - DNA, 33 bp, Homo sapien
tgatgtaagcgaacaacaagtttttatataacc

SEQ ID NO: 242696 - DNA, 33 bp, Homo sapien
tgatgtaagcgaacaataagtttttatataacc

SEQ ID NO: 242697 - DNA, 33 bp, Homo sapien
atgccgctgaccaagaagtccaaaggaagagtg

SEQ ID NO: 242698 - DNA, 33 bp, Homo sapien
atgccgctgaccaagacgtccaaaggaagagtg

SEQ ID NO: 242699 - DNA, 33 bp, Homo sapien
caactgaacgttacaccgcaatcctgggcttgg

SEQ ID NO: 242700 - DNA, 33 bp, Homo sapien
caactgaacgttacactgcaatcctgggcttgg

SEQ ID NO: 242701 - DNA, 33 bp, Homo sapien
ctattccaccctactcactgactaaggactatc

SEQ ID NO: 242702 - DNA, 33 bp, Homo sapien
ctattccaccctactcgctgactaaggactatc

SEQ ID NO: 242703 - DNA, 33 bp, Homo sapien
gaagaaatcctctgacccaccttgtctgatagt

SEQ ID NO: 242704 - DNA, 33 bp, Homo sapien
gaagaaatcctctgactcaccttgtctgatagt

SEQ ID NO: 242705 - DNA, 33 bp, Homo sapien
gctggagcctgactgaagcactcaaggcacaag

SEQ ID NO: 242706 - DNA, 33 bp, Homo sapien
gctggagcctgactgaggcactcaaggcacaag

SEQ ID NO: 242707 - DNA, 33 bp, Homo sapien
tattgaaggtgacttaccatgttttcctcattt

SEQ ID NO: 242708 - DNA, 33 bp, Homo sapien
tattgaaggtgacttatcatgttttcctcattt

SEQ ID NO: 242709 - DNA, 33 bp, Homo sapien
atgtataaccttgccaaacctgctccataattt

SEQ ID NO: 242710 - DNA, 33 bp, Homo sapien
atgtataaccttgccagacctgctccataattt

SEQ ID NO: 242711 - DNA, 33 bp, Homo sapien
gtaccttttgtaagccaattatacattcatcaa

SEQ ID NO: 242712 - DNA, 33 bp, Homo sapien
gtaccttttgtaagccgattatacattcatcaa

SEQ ID NO: 242713 - DNA, 33 bp, Homo sapien
gtgaaaaatggacccccaactcttctgtagggc

SEQ ID NO: 242714 - DNA, 33 bp, Homo sapien
gtgaaaaatggaccccgaactcttctgtagggc

SEQ ID NO: 242715 - DNA, 33 bp, Homo sapien
ctttcagcattccagacatgagctctttgccca

SEQ ID NO: 242716 - DNA, 33 bp, Homo sapien
ctttcagcattccagagatgagctctttgccca

SEQ ID NO: 242717 - DNA, 33 bp, Homo sapien
acacactgggcattccagagatgagcttcctag

SEQ ID NO: 242718 - DNA, 33 bp, Homo sapien
acacactgggcattcccgagatgagcttcctag

SEQ ID NO: 242719 - DNA, 33 bp, Homo sapien
ttttctgtatcttgtacgcagtctcttcattga

SEQ ID NO: 242720 - DNA, 33 bp, Homo sapien
ttttctgtatcttgtatgcagtctcttcattga

SEQ ID NO: 242721 - DNA, 33 bp, Homo sapien
gacacagtgtcaagaccaacattgggctctgag

SEQ ID NO: 242722 - DNA, 33 bp, Homo sapien
gacacagtgtcaagactaacattgggctctgag

SEQ ID NO: 242723 - DNA, 33 bp, Homo sapien
tttacattccctatgccagtgctacaccatccc

SEQ ID NO: 242724 - DNA, 33 bp, Homo sapien
tttacattccctatgctagtgctacaccatccc

SEQ ID NO: 242725 - DNA, 33 bp, Homo sapien
ttaacagcaacatatcacaatgtctattgcaca

SEQ ID NO: 242726 - DNA, 33 bp, Homo sapien
ttaacagcaacatatcgcaatgtctattgcaca

SEQ ID NO: 242727 - DNA, 33 bp, Homo sapien
ggctgaaaagcaggcactagttaagcaaaccac

SEQ ID NO: 242728 - DNA, 33 bp, Homo sapien
ggctgaaaagcaggcagtagttaagcaaaccac

SEQ ID NO: 242729 - DNA, 33 bp, Homo sapien
gcatcagaataaatcaacagtgcatgcagggct

SEQ ID NO: 242730 - DNA, 33 bp, Homo sapien
gcatcagaataaatcaccagtgcatgcagggct

SEQ ID NO: 242731 - DNA, 33 bp, Homo sapien
cccctggtccttagtacagcagacgagtcccct

SEQ ID NO: 242732 - DNA, 33 bp, Homo sapien
cccctggtccttagtagagcagacgagtcccct

SEQ ID NO: 242733 - DNA, 33 bp, Homo sapien
aagctctatatcatcaaaaggtttaatagaaga

SEQ ID NO: 242734 - DNA, 33 bp, Homo sapien
aagctctatatcatcagaaggtttaatagaaga

SEQ ID NO: 242735 - DNA, 33 bp, Homo sapien
tttaacttctgacatacgaagtgctaatggttt

SEQ ID NO: 242736 - DNA, 33 bp, Homo sapien
tttaacttctgacatatgaagtgctaatggttt

SEQ ID NO: 242737 - DNA, 33 bp, Homo sapien
gaccattataaatgccacagaaaaacagggcga

SEQ ID NO: 242738 - DNA, 33 bp, Homo sapien
gaccattataaatgccgcagaaaaacagggcga

SEQ ID NO: 242739 - DNA, 33 bp, Homo sapien
gcaaagcacttggataaatttttctgtcaacac

SEQ ID NO: 242740 - DNA, 33 bp, Homo sapien
gcaaagcacttggatacatttttctgtcaacac

SEQ ID NO: 242741 - DNA, 33 bp, Homo sapien
agaaaggaaggaaataaaccaatgacattgaat

SEQ ID NO: 242742 - DNA, 33 bp, Homo sapien
agaaaggaaggaaatacaccaatgacattgaat

SEQ ID NO: 242743 - DNA, 33 bp, Homo sapien
atctcaaacacattaccccatgtcaatatgtat

SEQ ID NO: 242744 - DNA, 33 bp, Homo sapien
atctcaaacacattactccatgtcaatatgtat

SEQ ID NO: 242745 - DNA, 33 bp, Homo sapien
gctgcttaacccattcaccagcctgatttggaa

SEQ ID NO: 242746 - DNA, 33 bp, Homo sapien
gctgcttaacccattcgccagcctgatttggaa

SEQ ID NO: 242747 - DNA, 33 bp, Homo sapien
aaggggaatgagagaggagcatttgtatgtgat

SEQ ID NO: 242748 - DNA, 33 bp, Homo sapien
aaggggaatgagagagtagcatttgtatgtgat

SEQ ID NO: 242749 - DNA, 33 bp, Homo sapien
aaaagatgaagcaggggatttggctttctccag

SEQ ID NO: 242750 - DNA, 33 bp, Homo sapien
aaaagatgaagcagggtatttggctttctccag

SEQ ID NO: 242751 - DNA, 33 bp, Homo sapien
attaattgaactgtacacgtattatatactcac

SEQ ID NO: 242752 - DNA, 33 bp, Homo sapien
attaattgaactgtacgcgtattatatactcac

SEQ ID NO: 242753 - DNA, 33 bp, Homo sapien
aataaatcagagccccagaatctcatcgtgcag

SEQ ID NO: 242754 - DNA, 33 bp, Homo sapien
aataaatcagagcccccgaatctcatcgtgcag

SEQ ID NO: 242755 - DNA, 33 bp, Homo sapien
gagtaaactctgaatactaaggagccattttta

SEQ ID NO: 242756 - DNA, 33 bp, Homo sapien
gagtaaactctgaatattaaggagccattttta

SEQ ID NO: 242757 - DNA, 33 bp, Homo sapien
acgttcctttgctgagaccgctctggggatatc

SEQ ID NO: 242758 - DNA, 33 bp, Homo sapien
acgttcctttgctgagtccgctctggggatatc

SEQ ID NO: 242759 - DNA, 33 bp, Homo sapien
ataaataaggtgacagcctgtaagagccaataa

SEQ ID NO: 242760 - DNA, 33 bp, Homo sapien
ataaataaggtgacaggctgtaagagccaataa

SEQ ID NO: 242761 - DNA, 33 bp, Homo sapien
ggaaattttaatttcacgtgtgtacctgagagc

SEQ ID NO: 242762 - DNA, 33 bp, Homo sapien
ggaaattttaatttcatgtgtgtacctgagagc

SEQ ID NO: 242763 - DNA, 33 bp, Homo sapien
aaaaataaaattccaccgcaataaacacagtga

SEQ ID NO: 242764 - DNA, 33 bp, Homo sapien
aaaaataaaattccactgcaataaacacagtga

SEQ ID NO: 242765 - DNA, 33 bp, Homo sapien
ctcatgcatctctctcactctaattcatatgtt

SEQ ID NO: 242766 - DNA, 33 bp, Homo sapien
ctcatgcatctctctcgctctaattcatatgtt

SEQ ID NO: 242767 - DNA, 33 bp, Homo sapien
gtagagaacatggcaaatgtcacatagacttta

SEQ ID NO: 242768 - DNA, 33 bp, Homo sapien
gtagagaacatggcaagtgtcacatagacttta

SEQ ID NO: 242769 - DNA, 33 bp, Homo sapien
tgtgttttcagcaataaaatgagataccaggga

SEQ ID NO: 242770 - DNA, 33 bp, Homo sapien
tgtgttttcagcaatacaatgagataccaggga

SEQ ID NO: 242771 - DNA, 33 bp, Homo sapien
cttctcttactacgtcccagtggcctctctgtt

SEQ ID NO: 242772 - DNA, 33 bp, Homo sapien
cttctcttactacgtctcagtggcctctctgtt

SEQ ID NO: 242773 - DNA, 33 bp, Homo sapien
agaacatactatttccaagtaggtaaaggcatc

SEQ ID NO: 242774 - DNA, 33 bp, Homo sapien
agaacatactatttcccagtaggtaaaggcatc

SEQ ID NO: 242775 - DNA, 33 bp, Homo sapien
tgaatttagaaattataacttagagccacacta

SEQ ID NO: 242776 - DNA, 33 bp, Homo sapien
tgaatttagaaattatgacttagagccacacta

SEQ ID NO: 242777 - DNA, 33 bp, Homo sapien
taatattattctctacaaggccaatgggcatac

SEQ ID NO: 242778 - DNA, 33 bp, Homo sapien
taatattattctctactaggccaatgggcatac

SEQ ID NO: 242779 - DNA, 33 bp, Homo sapien
gcttatcttctgcaaacgtcagaaaaatgctac

SEQ ID NO: 242780 - DNA, 33 bp, Homo sapien
gcttatcttctgcaaatgtcagaaaaatgctac

SEQ ID NO: 242781 - DNA, 33 bp, Homo sapien
taattactgctacttggatatccccagttgaga

SEQ ID NO: 242782 - DNA, 33 bp, Homo sapien
taattactgctacttgtatatccccagttgaga

SEQ ID NO: 242783 - DNA, 33 bp, Homo sapien
tcacttcctcatctgccagtcacattcatgaaa

SEQ ID NO: 242784 - DNA, 33 bp, Homo sapien
tcacttcctcatctgctagtcacattcatgaaa

SEQ ID NO: 242785 - DNA, 33 bp, Homo sapien
aaatcatggttttataagcatcaaagtgtgaag

SEQ ID NO: 242786 - DNA, 33 bp, Homo sapien
aaatcatggttttataggcatcaaagtgtgaag

SEQ ID NO: 242787 - DNA, 33 bp, Homo sapien
tcccacatgacccagtaaatcacctcttggatt

SEQ ID NO: 242788 - DNA, 33 bp, Homo sapien
tcccacatgacccagtgaatcacctcttggatt

SEQ ID NO: 242789 - DNA, 33 bp, Homo sapien
actacaagtattacccactggcctgaaatttct

SEQ ID NO: 242790 - DNA, 33 bp, Homo sapien
actacaagtattacccgctggcctgaaatttct

SEQ ID NO: 242791 - DNA, 33 bp, Homo sapien
gaggtgaattttgtctcaacgttaggatgagct

SEQ ID NO: 242792 - DNA, 33 bp, Homo sapien
gaggtgaattttgtcttaacgttaggatgagct

SEQ ID NO: 242793 - DNA, 33 bp, Homo sapien
catggttcagtagctccctgagtgatttctaga

SEQ ID NO: 242794 - DNA, 33 bp, Homo sapien
catggttcagtagctctctgagtgatttctaga

SEQ ID NO: 242795 - DNA, 33 bp, Homo sapien
tctggttcttttttcaatctcatgagtggaaaa

SEQ ID NO: 242796 - DNA, 33 bp, Homo sapien
tctggttcttttttcagtctcatgagtggaaaa

SEQ ID NO: 242797 - DNA, 33 bp, Homo sapien
ctatttgaccccaaagcctatggatgctcttaa

SEQ ID NO: 242798 - DNA, 33 bp, Homo sapien
ctatttgaccccaaaggctatggatgctcttaa

SEQ ID NO: 242799 - DNA, 33 bp, Homo sapien
ctctgaagattttgacacctctgactgatcaga

SEQ ID NO: 242800 - DNA, 33 bp, Homo sapien
ctctgaagattttgactcctctgactgatcaga

SEQ ID NO: 242801 - DNA, 33 bp, Homo sapien
atttcaccctcacttgcatttctcccaatcatt

SEQ ID NO: 242802 - DNA, 33 bp, Homo sapien
atttcaccctcacttgtatttctcccaatcatt

SEQ ID NO: 242803 - DNA, 33 bp, Homo sapien
tttcatctgtaggtgactagatttggatctttt

SEQ ID NO: 242804 - DNA, 33 bp, Homo sapien
tttcatctgtaggtgattagatttggatctttt

SEQ ID NO: 242805 - DNA, 33 bp, Homo sapien
atgacagatattgatccagctataccaatattt

SEQ ID NO: 242806 - DNA, 33 bp, Homo sapien
atgacagatattgatcgagctataccaatattt

SEQ ID NO: 242807 - DNA, 33 bp, Homo sapien
aatatacaaattagaaacccaaaattgtcagag

SEQ ID NO: 242808 - DNA, 33 bp, Homo sapien
aatatacaaattagaagcccaaaattgtcagag

SEQ ID NO: 242809 - DNA, 33 bp, Homo sapien
attgtcagagtagagcaaaaacatgacccaaag

SEQ ID NO: 242810 - DNA, 33 bp, Homo sapien
attgtcagagtagagcgaaaacatgacccaaag

SEQ ID NO: 242811 - DNA, 33 bp, Homo sapien
gttttacaagactcaaaatgttggctggtagaa

SEQ ID NO: 242812 - DNA, 33 bp, Homo sapien
gttttacaagactcaagatgttggctggtagaa

SEQ ID NO: 242813 - DNA, 33 bp, Homo sapien
tcatacaagttagtaactaatttgggcaaaaat

SEQ ID NO: 242814 - DNA, 33 bp, Homo sapien
tcatacaagttagtaattaatttgggcaaaaat

SEQ ID NO: 242815 - DNA, 33 bp, Homo sapien
agcataattcagtaaacatgggaaagtactcag

SEQ ID NO: 242816 - DNA, 33 bp, Homo sapien
agcataattcagtaaatatgggaaagtactcag

SEQ ID NO: 242817 - DNA, 33 bp, Homo sapien
ttcttggtgataatcactgaaactgttatttct

SEQ ID NO: 242818 - DNA, 33 bp, Homo sapien
ttcttggtgataatcattgaaactgttatttct

SEQ ID NO: 242819 - DNA, 33 bp, Homo sapien
agttgtgtcctctttacgcatcttagtacagag

SEQ ID NO: 242820 - DNA, 33 bp, Homo sapien
agttgtgtcctctttaggcatcttagtacagag

SEQ ID NO: 242821 - DNA, 33 bp, Homo sapien
agttagggatcagagacaaagcagtcatactct

SEQ ID NO: 242822 - DNA, 33 bp, Homo sapien
agttagggatcagagagaaagcagtcatactct

SEQ ID NO: 242823 - DNA, 33 bp, Homo sapien
cattttagctttgtaagaatcaagcaagggata

SEQ ID NO: 242824 - DNA, 33 bp, Homo sapien
cattttagctttgtaataatcaagcaagggata

SEQ ID NO: 242825 - DNA, 33 bp, Homo sapien
agacaccagttagaacagaaagattctacaagg

SEQ ID NO: 242826 - DNA, 33 bp, Homo sapien
agacaccagttagaacggaaagattctacaagg

SEQ ID NO: 242827 - DNA, 33 bp, Homo sapien
ctacaatgagttaacaacatggacctatggatg

SEQ ID NO: 242828 - DNA, 33 bp, Homo sapien
ctacaatgagttaacatcatggacctatggatg

SEQ ID NO: 242829 - DNA, 33 bp, Homo sapien
ctggctttctttgttaaaactgttagtttgctt

SEQ ID NO: 242830 - DNA, 33 bp, Homo sapien
ctggctttctttgttagaactgttagtttgctt

SEQ ID NO: 242831 - DNA, 33 bp, Homo sapien
gttgctgaaaatattacgggttagtataaatgt

SEQ ID NO: 242832 - DNA, 33 bp, Homo sapien
gttgctgaaaatattatgggttagtataaatgt

SEQ ID NO: 242833 - DNA, 33 bp, Homo sapien
tctctgacaccatcgaactgccatgtagcccta

SEQ ID NO: 242834 - DNA, 33 bp, Homo sapien
tctctgacaccatcgagctgccatgtagcccta

SEQ ID NO: 242835 - DNA, 33 bp, Homo sapien
ttggtaattttttagaatacagctgggcaaact

SEQ ID NO: 242836 - DNA, 33 bp, Homo sapien
ttggtaattttttagactacagctgggcaaact

SEQ ID NO: 242837 - DNA, 33 bp, Homo sapien
cataattaagttctggccaatgagatacataat

SEQ ID NO: 242838 - DNA, 33 bp, Homo sapien
cataattaagttctggtcaatgagatacataat

SEQ ID NO: 242839 - DNA, 33 bp, Homo sapien
tatccctgctatataaaccacctgtcctttatt

SEQ ID NO: 242840 - DNA, 33 bp, Homo sapien
tatccctgctatataagccacctgtcctttatt

SEQ ID NO: 242841 - DNA, 33 bp, Homo sapien
actactgtatggagaaatgttgtttgggagttt

SEQ ID NO: 242842 - DNA, 33 bp, Homo sapien
actactgtatggagaagtgttgtttgggagttt

SEQ ID NO: 242843 - DNA, 33 bp, Homo sapien
cagagaggatattggaacagagagacagaaaag

SEQ ID NO: 242844 - DNA, 33 bp, Homo sapien
cagagaggatattggagcagagagacagaaaag

SEQ ID NO: 242845 - DNA, 33 bp, Homo sapien
tgacaaatgcaggaaaagaaatggaatgatgga

SEQ ID NO: 242846 - DNA, 33 bp, Homo sapien
tgacaaatgcaggaaaggaaatggaatgatgga

SEQ ID NO: 242847 - DNA, 33 bp, Homo sapien
ttcatataatttcacaacacaaaattgtattct

SEQ ID NO: 242848 - DNA, 33 bp, Homo sapien
ttcatataatttcacatcacaaaattgtattct

SEQ ID NO: 242849 - DNA, 33 bp, Homo sapien
gtgtttgactggtataaactgttactccattct

SEQ ID NO: 242850 - DNA, 33 bp, Homo sapien
gtgtttgactggtatatactgttactccattct

SEQ ID NO: 242851 - DNA, 33 bp, Homo sapien
cataggaatcaagggaagctacctccacattat

SEQ ID NO: 242852 - DNA, 33 bp, Homo sapien
cataggaatcaagggacgctacctccacattat

SEQ ID NO: 242853 - DNA, 33 bp, Homo sapien
ttcgttaggaattaagcatagtgaagccatagg

SEQ ID NO: 242854 - DNA, 33 bp, Homo sapien
ttcgttaggaattaagtatagtgaagccatagg

SEQ ID NO: 242855 - DNA, 33 bp, Homo sapien
aattcccctgaggccaaatctatcatccacatc

SEQ ID NO: 242856 - DNA, 33 bp, Homo sapien
aattcccctgaggccacatctatcatccacatc

SEQ ID NO: 242857 - DNA, 33 bp, Homo sapien
ttcttgttgaaaatgccagcctgtcactgtgct

SEQ ID NO: 242858 - DNA, 33 bp, Homo sapien
ttcttgttgaaaatgcgagcctgtcactgtgct

SEQ ID NO: 242859 - DNA, 33 bp, Homo sapien
tacctcagaaactatcaagtctaccattttcat

SEQ ID NO: 242860 - DNA, 33 bp, Homo sapien
tacctcagaaactatctagtctaccattttcat

SEQ ID NO: 242861 - DNA, 33 bp, Homo sapien
gctccagaaccatgagccaaataagtcttttct

SEQ ID NO: 242862 - DNA, 33 bp, Homo sapien
gctccagaaccatgagtcaaataagtcttttct

SEQ ID NO: 242863 - DNA, 33 bp, Homo sapien
gaagtgctggagctagaaattaaacagactgat

SEQ ID NO: 242864 - DNA, 33 bp, Homo sapien
gaagtgctggagctaggaattaaacagactgat

SEQ ID NO: 242865 - DNA, 33 bp, Homo sapien
caaggtgaaggcaagccgccatacttgaaagca

SEQ ID NO: 242866 - DNA, 33 bp, Homo sapien
caaggtgaaggcaagctgccatacttgaaagca

SEQ ID NO: 242867 - DNA, 33 bp, Homo sapien
ataaatacttcctgcggatatggagagatgaac

SEQ ID NO: 242868 - DNA, 33 bp, Homo sapien
ataaatacttcctgcgtatatggagagatgaac

SEQ ID NO: 242869 - DNA, 33 bp, Homo sapien
ggtggtccagggctcaagagaaatcatgccctg

SEQ ID NO: 242870 - DNA, 33 bp, Homo sapien
ggtggtccagggctcaggagaaatcatgccctg

SEQ ID NO: 242871 - DNA, 33 bp, Homo sapien
tagaataagacaatacaacacctgcaaacttaa

SEQ ID NO: 242872 - DNA, 33 bp, Homo sapien
tagaataagacaatacgacacctgcaaacttaa

SEQ ID NO: 242873 - DNA, 33 bp, Homo sapien
tacagggcaacgagcactccaactttgaggctt

SEQ ID NO: 242874 - DNA, 33 bp, Homo sapien
tacagggcaacgagcagtccaactttgaggctt

SEQ ID NO: 242875 - DNA, 33 bp, Homo sapien
caaaactgaattctacagcccagaagggttacg

SEQ ID NO: 242876 - DNA, 33 bp, Homo sapien
caaaactgaattctacggcccagaagggttacg

SEQ ID NO: 242877 - DNA, 33 bp, Homo sapien
aaacaaactccattaacacgctatcaacaaaat

SEQ ID NO: 242878 - DNA, 33 bp, Homo sapien
aaacaaactccattaatacgctatcaacaaaat

SEQ ID NO: 242879 - DNA, 33 bp, Homo sapien
cttgagcaaatgtaagacctgtacttgtaggtt

SEQ ID NO: 242880 - DNA, 33 bp, Homo sapien
cttgagcaaatgtaagccctgtacttgtaggtt

SEQ ID NO: 242881 - DNA, 33 bp, Homo sapien
acctccaaagagtccactgattactgatttgtt

SEQ ID NO: 242882 - DNA, 33 bp, Homo sapien
acctccaaagagtccattgattactgatttgtt

SEQ ID NO: 242883 - DNA, 33 bp, Homo sapien
agtttgcctgtacctacagtcattgtttagatc

SEQ ID NO: 242884 - DNA, 33 bp, Homo sapien
agtttgcctgtacctatagtcattgtttagatc

SEQ ID NO: 242885 - DNA, 33 bp, Homo sapien
gagctactgatagttacagaaaagcagtgactg

SEQ ID NO: 242886 - DNA, 33 bp, Homo sapien
gagctactgatagttatagaaaagcagtgactg

SEQ ID NO: 242887 - DNA, 33 bp, Homo sapien
aattttaaacattacaaaaaatgcaaaagattc

SEQ ID NO: 242888 - DNA, 33 bp, Homo sapien
aattttaaacattacagaaaatgcaaaagattc

SEQ ID NO: 242889 - DNA, 33 bp, Homo sapien
ctctcctctgacatgccacgtacacccctaatg

SEQ ID NO: 242890 - DNA, 33 bp, Homo sapien
ctctcctctgacatgcgacgtacacccctaatg

SEQ ID NO: 242891 - DNA, 33 bp, Homo sapien
cctaatgcaacacatccgaaactgagctctggg

SEQ ID NO: 242892 - DNA, 33 bp, Homo sapien
cctaatgcaacacatctgaaactgagctctggg

SEQ ID NO: 242893 - DNA, 33 bp, Homo sapien
agtaaatattggtgggaatcttattaatgggag

SEQ ID NO: 242894 - DNA, 33 bp, Homo sapien
agtaaatattggtggggatcttattaatgggag

SEQ ID NO: 242895 - DNA, 33 bp, Homo sapien
ccagaagtccgctgtaactttcccagataaagt

SEQ ID NO: 242896 - DNA, 33 bp, Homo sapien
ccagaagtccgctgtatctttcccagataaagt

SEQ ID NO: 242897 - DNA, 33 bp, Homo sapien
gcctagggcaaaccaaaaaatcctccagcttaa

SEQ ID NO: 242898 - DNA, 33 bp, Homo sapien
gcctagggcaaaccaacaaatcctccagcttaa

SEQ ID NO: 242899 - DNA, 33 bp, Homo sapien
ttggattacttcttcagagatttttttcataat

SEQ ID NO: 242900 - DNA, 33 bp, Homo sapien
ttggattacttcttcatagatttttttcataat

SEQ ID NO: 242901 - DNA, 33 bp, Homo sapien
cctgtgtcataagtcaaagtggcatgcatctgg

SEQ ID NO: 242902 - DNA, 33 bp, Homo sapien
cctgtgtcataagtcagagtggcatgcatctgg

SEQ ID NO: 242903 - DNA, 33 bp, Homo sapien
agccaaaagattggacactgctgatctaaagta

SEQ ID NO: 242904 - DNA, 33 bp, Homo sapien
agccaaaagattggacgctgctgatctaaagta

SEQ ID NO: 242905 - DNA, 33 bp, Homo sapien
ctcgaagtttggatgaatatagaaaaggcttat

SEQ ID NO: 242906 - DNA, 33 bp, Homo sapien
ctcgaagtttggatgagtatagaaaaggcttat

SEQ ID NO: 242907 - DNA, 33 bp, Homo sapien
taatccgactttgacaccaggtttttcccacga

SEQ ID NO: 242908 - DNA, 33 bp, Homo sapien
taatccgactttgacagcaggtttttcccacga

SEQ ID NO: 242909 - DNA, 33 bp, Homo sapien
gattaaaagaagtgacagcaaagtgtaaaaaat

SEQ ID NO: 242910 - DNA, 33 bp, Homo sapien
gattaaaagaagtgactgcaaagtgtaaaaaat

SEQ ID NO: 242911 - DNA, 33 bp, Homo sapien
aaataattgtctggaacaatacaatagctaact

SEQ ID NO: 242912 - DNA, 33 bp, Homo sapien
aaataattgtctggaataatacaatagctaact

SEQ ID NO: 242913 - DNA, 33 bp, Homo sapien
tgcttatctgcccaaaccgacctcttcttttcc

SEQ ID NO: 242914 - DNA, 33 bp, Homo sapien
tgcttatctgcccaaatcgacctcttcttttcc

SEQ ID NO: 242915 - DNA, 33 bp, Homo sapien
gtgctttgtgatcaagaatatggaaaggaaaca

SEQ ID NO: 242916 - DNA, 33 bp, Homo sapien
gtgctttgtgatcaaggatatggaaaggaaaca

SEQ ID NO: 242917 - DNA, 33 bp, Homo sapien
acaaaaaaacacagaacattgctcaccagacag

SEQ ID NO: 242918 - DNA, 33 bp, Homo sapien
acaaaaaaacacagaatattgctcaccagacag

SEQ ID NO: 242919 - DNA, 33 bp, Homo sapien
gaatcctctgtgtagccctgtgatcttgaacaa

SEQ ID NO: 242920 - DNA, 33 bp, Homo sapien
gaatcctctgtgtagctctgtgatcttgaacaa

SEQ ID NO: 242921 - DNA, 33 bp, Homo sapien
cagataagcaagaataaaacacgaccctggaat

SEQ ID NO: 242922 - DNA, 33 bp, Homo sapien
cagataagcaagaatagaacacgaccctggaat

SEQ ID NO: 242923 - DNA, 33 bp, Homo sapien
atagacagagtccccaagtctggtcttctcttc

SEQ ID NO: 242924 - DNA, 33 bp, Homo sapien
atagacagagtccccaggtctggtcttctcttc

SEQ ID NO: 242925 - DNA, 33 bp, Homo sapien
aacacagaggagaagcactgggaagaaggttgt

SEQ ID NO: 242926 - DNA, 33 bp, Homo sapien
aacacagaggagaagcgctgggaagaaggttgt

SEQ ID NO: 242927 - DNA, 33 bp, Homo sapien
ctgctacaaacaacacgccatgaatatccttgt

SEQ ID NO: 242928 - DNA, 33 bp, Homo sapien
ctgctacaaacaacactccatgaatatccttgt

SEQ ID NO: 242929 - DNA, 33 bp, Homo sapien
ataaagaaatgtcaccaggagcctcctctttga

SEQ ID NO: 242930 - DNA, 33 bp, Homo sapien
ataaagaaatgtcaccgggagcctcctctttga

SEQ ID NO: 242931 - DNA, 33 bp, Homo sapien
tttagaagctgcctttcaaaaaaaattagccag

SEQ ID NO: 242932 - DNA, 33 bp, Homo sapien
tttagaagctgcctttgaaaaaaaattagccag

SEQ ID NO: 242933 - DNA, 33 bp, Homo sapien
ggctcaaagcagcccaaagtgagagtgcttgcg

SEQ ID NO: 242934 - DNA, 33 bp, Homo sapien
ggctcaaagcagcccagagtgagagtgcttgcg

SEQ ID NO: 242935 - DNA, 33 bp, Homo sapien
aagcatttggaattaccctgatagctaattact

SEQ ID NO: 242936 - DNA, 33 bp, Homo sapien
aagcatttggaattactctgatagctaattact

SEQ ID NO: 242937 - DNA, 33 bp, Homo sapien
aagcctctgttctgtacctcctactgtaggctg

SEQ ID NO: 242938 - DNA, 33 bp, Homo sapien
aagcctctgttctgtatctcctactgtaggctg

SEQ ID NO: 242939 - DNA, 33 bp, Homo sapien
acccaacagatggtaacatcattgaccaaccta

SEQ ID NO: 242940 - DNA, 33 bp, Homo sapien
acccaacagatggtaatatcattgaccaaccta

SEQ ID NO: 242941 - DNA, 33 bp, Homo sapien
ttcttagtgtggcttacgaggttcctcacagat

SEQ ID NO: 242942 - DNA, 33 bp, Homo sapien
ttcttagtgtggcttatgaggttcctcacagat

SEQ ID NO: 242943 - DNA, 33 bp, Homo sapien
atataactggagaaagaagactatgtatttgga

SEQ ID NO: 242944 - DNA, 33 bp, Homo sapien
atataactggagaaaggagactatgtatttgga

SEQ ID NO: 242945 - DNA, 33 bp, Homo sapien
cagcacctggcatgtaacagacactcaataagc

SEQ ID NO: 242946 - DNA, 33 bp, Homo sapien
cagcacctggcatgtagcagacactcaataagc

SEQ ID NO: 242947 - DNA, 33 bp, Homo sapien
atgtggatgtactggtaaatttaggtgctattg

SEQ ID NO: 242948 - DNA, 33 bp, Homo sapien
atgtggatgtactggtgaatttaggtgctattg

SEQ ID NO: 242949 - DNA, 33 bp, Homo sapien
catatgagggaacttacggaaacaacgggacag

SEQ ID NO: 242950 - DNA, 33 bp, Homo sapien
catatgagggaacttatggaaacaacgggacag

SEQ ID NO: 242951 - DNA, 33 bp, Homo sapien
atattgcgaaaataaccaggcagcatgaactac

SEQ ID NO: 242952 - DNA, 33 bp, Homo sapien
atattgcgaaaataactaggcagcatgaactac

SEQ ID NO: 242953 - DNA, 33 bp, Homo sapien
gaaagatacttccccccctactatcttcagatt

SEQ ID NO: 242954 - DNA, 33 bp, Homo sapien
gaaagatacttccccctctactatcttcagatt

SEQ ID NO: 242955 - DNA, 33 bp, Homo sapien
atccagatgccatcaacagggatcaaggctttc

SEQ ID NO: 242956 - DNA, 33 bp, Homo sapien
atccagatgccatcaagagggatcaaggctttc

SEQ ID NO: 242957 - DNA, 33 bp, Homo sapien
tattttggatgttgggcatgaaactacacatta

SEQ ID NO: 242958 - DNA, 33 bp, Homo sapien
tattttggatgttggggatgaaactacacatta

SEQ ID NO: 242959 - DNA, 33 bp, Homo sapien
tgaacaatttttatgacctatccttcatacaca

SEQ ID NO: 242960 - DNA, 33 bp, Homo sapien
tgaacaatttttatgatctatccttcatacaca

SEQ ID NO: 242961 - DNA, 33 bp, Homo sapien
atgcactatttgagaacgcagttaagtttgcta

SEQ ID NO: 242962 - DNA, 33 bp, Homo sapien
atgcactatttgagaatgcagttaagtttgcta

SEQ ID NO: 242963 - DNA, 33 bp, Homo sapien
cagcagaggtatcaacagttcactctcatacct

SEQ ID NO: 242964 - DNA, 33 bp, Homo sapien
cagcagaggtatcaacggttcactctcatacct

SEQ ID NO: 242965 - DNA, 33 bp, Homo sapien
gaaattgtattcaacacgtagctggtacaaaaa

SEQ ID NO: 242966 - DNA, 33 bp, Homo sapien
gaaattgtattcaacatgtagctggtacaaaaa

SEQ ID NO: 242967 - DNA, 33 bp, Homo sapien
tttatgattgcaatatcaactttctatagaagt

SEQ ID NO: 242968 - DNA, 33 bp, Homo sapien
tttatgattgcaatatgaactttctatagaagt

SEQ ID NO: 242969 - DNA, 33 bp, Homo sapien
ttcataatagaaactaactaaaatgaagtctgg

SEQ ID NO: 242970 - DNA, 33 bp, Homo sapien
ttcataatagaaactacctaaaatgaagtctgg

SEQ ID NO: 242971 - DNA, 33 bp, Homo sapien
acataagttttatctgaaagcctacagagaatt

SEQ ID NO: 242972 - DNA, 33 bp, Homo sapien
acataagttttatctggaagcctacagagaatt

SEQ ID NO: 242973 - DNA, 33 bp, Homo sapien
gagcacatggacacaacttattctttaacagga

SEQ ID NO: 242974 - DNA, 33 bp, Homo sapien
gagcacatggacacaatttattctttaacagga

SEQ ID NO: 242975 - DNA, 33 bp, Homo sapien
aataaaaagttctggaaatcttgaatgtggctt

SEQ ID NO: 242976 - DNA, 33 bp, Homo sapien
aataaaaagttctggagatcttgaatgtggctt

SEQ ID NO: 242977 - DNA, 33 bp, Homo sapien
tgctgaaagtcagatacacaatgtaactgtaag

SEQ ID NO: 242978 - DNA, 33 bp, Homo sapien
tgctgaaagtcagatatacaatgtaactgtaag

SEQ ID NO: 242979 - DNA, 33 bp, Homo sapien
tttatctctttgccacgcggccttccttacagt

SEQ ID NO: 242980 - DNA, 33 bp, Homo sapien
tttatctctttgccactcggccttccttacagt

SEQ ID NO: 242981 - DNA, 33 bp, Homo sapien
atatcaagtgtttatacggaaaggatagcaata

SEQ ID NO: 242982 - DNA, 33 bp, Homo sapien
atatcaagtgtttatatggaaaggatagcaata

SEQ ID NO: 242983 - DNA, 33 bp, Homo sapien
cctgactctcttaagaacacctattgccatcgc

SEQ ID NO: 242984 - DNA, 33 bp, Homo sapien
cctgactctcttaagaccacctattgccatcgc

SEQ ID NO: 242985 - DNA, 33 bp, Homo sapien
catttttctaggaaaactgccaggatctcttct

SEQ ID NO: 242986 - DNA, 33 bp, Homo sapien
catttttctaggaaaattgccaggatctcttct

SEQ ID NO: 242987 - DNA, 33 bp, Homo sapien
ggcaggtctgactacaactaaaagaaagaagca

SEQ ID NO: 242988 - DNA, 33 bp, Homo sapien
ggcaggtctgactacagctaaaagaaagaagca

SEQ ID NO: 242989 - DNA, 33 bp, Homo sapien
gtaaggtgttaaaatgaatacacggattaatca

SEQ ID NO: 242990 - DNA, 33 bp, Homo sapien
gtaaggtgttaaaatgcatacacggattaatca

SEQ ID NO: 242991 - DNA, 33 bp, Homo sapien
gttagagagggatgggccatagtttcagatcat

SEQ ID NO: 242992 - DNA, 33 bp, Homo sapien
gttagagagggatgggtcatagtttcagatcat

SEQ ID NO: 242993 - DNA, 33 bp, Homo sapien
gggatagcattctcacaacatggtgccatgact

SEQ ID NO: 242994 - DNA, 33 bp, Homo sapien
gggatagcattctcacgacatggtgccatgact

SEQ ID NO: 242995 - DNA, 33 bp, Homo sapien
aaagtaaacattcatgaaatcacagaggtcaag

SEQ ID NO: 242996 - DNA, 33 bp, Homo sapien
aaagtaaacattcatgtaatcacagaggtcaag

SEQ ID NO: 242997 - DNA, 33 bp, Homo sapien
agagattcgaggtcaccaaattgttccgtccct

SEQ ID NO: 242998 - DNA, 33 bp, Homo sapien
agagattcgaggtcacgaaattgttccgtccct

SEQ ID NO: 242999 - DNA, 33 bp, Homo sapien
ttggacacttatgacaatcgagtgaggtaatca

SEQ ID NO: 243000 - DNA, 33 bp, Homo sapien
ttggacacttatgacagtcgagtgaggtaatca

SEQ ID NO: 243001 - DNA, 33 bp, Homo sapien
gtaactctgagagaaccactctatgtggtgcag

SEQ ID NO: 243002 - DNA, 33 bp, Homo sapien
gtaactctgagagaactactctatgtggtgcag

SEQ ID NO: 243003 - DNA, 33 bp, Homo sapien
tgcagctttctatggcagagaacaacaaacagg

SEQ ID NO: 243004 - DNA, 33 bp, Homo sapien
tgcagctttctatggcggagaacaacaaacagg

SEQ ID NO: 243005 - DNA, 33 bp, Homo sapien
aatcttttctaataaaatctgacatctaatatg

SEQ ID NO: 243006 - DNA, 33 bp, Homo sapien
aatcttttctaataaactctgacatctaatatg

SEQ ID NO: 243007 - DNA, 33 bp, Homo sapien
ccctctttatacaagtaacggtcttatcatcaa

SEQ ID NO: 243008 - DNA, 33 bp, Homo sapien
ccctctttatacaagtgacggtcttatcatcaa

SEQ ID NO: 243009 - DNA, 33 bp, Homo sapien
tatactttaagactcacgttctcaaacttcaga

SEQ ID NO: 243010 - DNA, 33 bp, Homo sapien
tatactttaagactcatgttctcaaacttcaga

SEQ ID NO: 243011 - DNA, 33 bp, Homo sapien
ttcaacattgggttaccaacaaagcttgttatt

SEQ ID NO: 243012 - DNA, 33 bp, Homo sapien
ttcaacattgggttactaacaaagcttgttatt

SEQ ID NO: 243013 - DNA, 33 bp, Homo sapien
accataatggtgaagaaacctgaaattatgaat

SEQ ID NO: 243014 - DNA, 33 bp, Homo sapien
accataatggtgaagacacctgaaattatgaat

SEQ ID NO: 243015 - DNA, 33 bp, Homo sapien
caacttaaaaatgacaccttttggcttaatgta

SEQ ID NO: 243016 - DNA, 33 bp, Homo sapien
caacttaaaaatgacatcttttggcttaatgta

SEQ ID NO: 243017 - DNA, 33 bp, Homo sapien
tttggtggaaagaataacagactacaagtcaag

SEQ ID NO: 243018 - DNA, 33 bp, Homo sapien
tttggtggaaagaataccagactacaagtcaag

SEQ ID NO: 243019 - DNA, 33 bp, Homo sapien
acttatattctcagtagctcttctgctcagttc

SEQ ID NO: 243020 - DNA, 33 bp, Homo sapien
acttatattctcagtatctcttctgctcagttc

SEQ ID NO: 243021 - DNA, 33 bp, Homo sapien
aaaataactggtgcaggcaaaaaagtatctgga

SEQ ID NO: 243022 - DNA, 33 bp, Homo sapien
aaaataactggtgcagtcaaaaaagtatctgga

SEQ ID NO: 243023 - DNA, 33 bp, Homo sapien
atagtaagctcctacaactttatgatgtttagt

SEQ ID NO: 243024 - DNA, 33 bp, Homo sapien
atagtaagctcctacacctttatgatgtttagt

SEQ ID NO: 243025 - DNA, 33 bp, Homo sapien
gcaggaaatatattcaatcatctttatcctact

SEQ ID NO: 243026 - DNA, 33 bp, Homo sapien
gcaggaaatatattcagtcatctttatcctact

SEQ ID NO: 243027 - DNA, 33 bp, Homo sapien
agtttgtcatcaaaacacacttcgtaaattgca

SEQ ID NO: 243028 - DNA, 33 bp, Homo sapien
agtttgtcatcaaaactcacttcgtaaattgca

SEQ ID NO: 243029 - DNA, 33 bp, Homo sapien
ggattaagaatatacacgtaacagctaaaacta

SEQ ID NO: 243030 - DNA, 33 bp, Homo sapien
ggattaagaatatacatgtaacagctaaaacta

SEQ ID NO: 243031 - DNA, 33 bp, Homo sapien
actgcagagactggtacgagtagctgattgagg

SEQ ID NO: 243032 - DNA, 33 bp, Homo sapien
actgcagagactggtatgagtagctgattgagg

SEQ ID NO: 243033 - DNA, 33 bp, Homo sapien
taaaacagtatccaaaaccagactttatgatgg

SEQ ID NO: 243034 - DNA, 33 bp, Homo sapien
taaaacagtatccaaatccagactttatgatgg

SEQ ID NO: 243035 - DNA, 33 bp, Homo sapien
tggaacagtttcagcccacgtatattgcaaaaa

SEQ ID NO: 243036 - DNA, 33 bp, Homo sapien
tggaacagtttcagcctacgtatattgcaaaaa

SEQ ID NO: 243037 - DNA, 33 bp, Homo sapien
cataacaacccattgtcaagagattaaacaaac

SEQ ID NO: 243038 - DNA, 33 bp, Homo sapien
cataacaacccattgtgaagagattaaacaaac

SEQ ID NO: 243039 - DNA, 33 bp, Homo sapien
ggcaagcgacaaagtcaatttaaaatcatcagt

SEQ ID NO: 243040 - DNA, 33 bp, Homo sapien
ggcaagcgacaaagtccatttaaaatcatcagt

SEQ ID NO: 243041 - DNA, 33 bp, Homo sapien
cttcttttggggaggaagaagcactataccgta

SEQ ID NO: 243042 - DNA, 33 bp, Homo sapien
cttcttttggggaggaggaagcactataccgta

SEQ ID NO: 243043 - DNA, 33 bp, Homo sapien
atttgtggctctcataagtctattggacagtac

SEQ ID NO: 243044 - DNA, 33 bp, Homo sapien
atttgtggctctcatatgtctattggacagtac

SEQ ID NO: 243045 - DNA, 33 bp, Homo sapien
agcccagcagtttcaaacctatcagacccaaag

SEQ ID NO: 243046 - DNA, 33 bp, Homo sapien
agcccagcagtttcaaccctatcagacccaaag

SEQ ID NO: 243047 - DNA, 33 bp, Homo sapien
cttgttgatgagtgaacgttaacaccaaattag

SEQ ID NO: 243048 - DNA, 33 bp, Homo sapien
cttgttgatgagtgaatgttaacaccaaattag

SEQ ID NO: 243049 - DNA, 33 bp, Homo sapien
gtgtaagaaaacctgccgatccctatgggcctt

SEQ ID NO: 243050 - DNA, 33 bp, Homo sapien
gtgtaagaaaacctgctgatccctatgggcctt

SEQ ID NO: 243051 - DNA, 33 bp, Homo sapien
gtacacgtttctcaaaatgtgcaccttgttctt

SEQ ID NO: 243052 - DNA, 33 bp, Homo sapien
gtacacgtttctcaaagtgtgcaccttgttctt

SEQ ID NO: 243053 - DNA, 33 bp, Homo sapien
ctttcttactcttttaaagactaccacctgact

SEQ ID NO: 243054 - DNA, 33 bp, Homo sapien
ctttcttactcttttatagactaccacctgact

SEQ ID NO: 243055 - DNA, 33 bp, Homo sapien
taaaatcagcttgatgcacctttagcattctta

SEQ ID NO: 243056 - DNA, 33 bp, Homo sapien
taaaatcagcttgatgtacctttagcattctta

SEQ ID NO: 243057 - DNA, 33 bp, Homo sapien
atggatgtcttagctgcagaacttagtatctcc

SEQ ID NO: 243058 - DNA, 33 bp, Homo sapien
atggatgtcttagctggagaacttagtatctcc

SEQ ID NO: 243059 - DNA, 33 bp, Homo sapien
gagaaatcgatcaagtaactaaatgtgcatcag

SEQ ID NO: 243060 - DNA, 33 bp, Homo sapien
gagaaatcgatcaagtgactaaatgtgcatcag

SEQ ID NO: 243061 - DNA, 33 bp, Homo sapien
gacatactggcattcaaaaagatacgtggggtc

SEQ ID NO: 243062 - DNA, 33 bp, Homo sapien
gacatactggcattcagaaagatacgtggggtc

SEQ ID NO: 243063 - DNA, 33 bp, Homo sapien
gtacacggtcaatagtcacaatgcttcttcaca

SEQ ID NO: 243064 - DNA, 33 bp, Homo sapien
gtacacggtcaatagtgacaatgcttcttcaca

SEQ ID NO: 243065 - DNA, 33 bp, Homo sapien
aatttaaaagtctatacgaagagtgctcaagca

SEQ ID NO: 243066 - DNA, 33 bp, Homo sapien
aatttaaaagtctatatgaagagtgctcaagca

SEQ ID NO: 243067 - DNA, 33 bp, Homo sapien
ctgagaatagcgtctacaattcagtaggtgctc

SEQ ID NO: 243068 - DNA, 33 bp, Homo sapien
ctgagaatagcgtctagaattcagtaggtgctc

SEQ ID NO: 243069 - DNA, 33 bp, Homo sapien
gtagtgcttctaaacacagaaggatgagatgac

SEQ ID NO: 243070 - DNA, 33 bp, Homo sapien
gtagtgcttctaaacagagaaggatgagatgac

SEQ ID NO: 243071 - DNA, 33 bp, Homo sapien
aatcttcctgcctagacagaagtgaatgggaaa

SEQ ID NO: 243072 - DNA, 33 bp, Homo sapien
aatcttcctgcctagatagaagtgaatgggaaa

SEQ ID NO: 243073 - DNA, 33 bp, Homo sapien
gtcattgatcttctcaaaattcatcctcaaata

SEQ ID NO: 243074 - DNA, 33 bp, Homo sapien
gtcattgatcttctcagaattcatcctcaaata

SEQ ID NO: 243075 - DNA, 33 bp, Homo sapien
ttggaaaaccatgagtcaaagtaacacatcaat

SEQ ID NO: 243076 - DNA, 33 bp, Homo sapien
ttggaaaaccatgagtgaaagtaacacatcaat

SEQ ID NO: 243077 - DNA, 33 bp, Homo sapien
cttctaagtttgtagcaatcttcaattttattt

SEQ ID NO: 243078 - DNA, 33 bp, Homo sapien
cttctaagtttgtagccatcttcaattttattt

SEQ ID NO: 243079 - DNA, 33 bp, Homo sapien
gtgacagctggtcaaagttaggggtacagtcac

SEQ ID NO: 243080 - DNA, 33 bp, Homo sapien
gtgacagctggtcaaatttaggggtacagtcac

SEQ ID NO: 243081 - DNA, 33 bp, Homo sapien
accagagctttgttaaatacaacctagactatg

SEQ ID NO: 243082 - DNA, 33 bp, Homo sapien
accagagctttgttaattacaacctagactatg

SEQ ID NO: 243083 - DNA, 33 bp, Homo sapien
aatgcaaacatcatagacatagaaagatccagt

SEQ ID NO: 243084 - DNA, 33 bp, Homo sapien
aatgcaaacatcataggcatagaaagatccagt

SEQ ID NO: 243085 - DNA, 33 bp, Homo sapien
gtgttaggtgaggggcgctattaaaagggttgt

SEQ ID NO: 243086 - DNA, 33 bp, Homo sapien
gtgttaggtgaggggctctattaaaagggttgt

SEQ ID NO: 243087 - DNA, 33 bp, Homo sapien
ctgagaatggaaactacaactacggccagcaat

SEQ ID NO: 243088 - DNA, 33 bp, Homo sapien
ctgagaatggaaactagaactacggccagcaat

SEQ ID NO: 243089 - DNA, 33 bp, Homo sapien
caccaaaatagctaacagcaaggatgtgcttat

SEQ ID NO: 243090 - DNA, 33 bp, Homo sapien
caccaaaatagctaaccgcaaggatgtgcttat

SEQ ID NO: 243091 - DNA, 33 bp, Homo sapien
cacaacttctctttggaaatgatcaagaaacag

SEQ ID NO: 243092 - DNA, 33 bp, Homo sapien
cacaacttctctttggcaatgatcaagaaacag

SEQ ID NO: 243093 - DNA, 33 bp, Homo sapien
gggagggacaggaggcaaatgctaccttaatga

SEQ ID NO: 243094 - DNA, 33 bp, Homo sapien
gggagggacaggaggcgaatgctaccttaatga

SEQ ID NO: 243095 - DNA, 33 bp, Homo sapien
caaacgcatttgatggcaaaagagtagagggga

SEQ ID NO: 243096 - DNA, 33 bp, Homo sapien
caaacgcatttgatgggaaaagagtagagggga

SEQ ID NO: 243097 - DNA, 33 bp, Homo sapien
ttgggtgaagagagaacttataaccttacccac

SEQ ID NO: 243098 - DNA, 33 bp, Homo sapien
ttgggtgaagagagaatttataaccttacccac

SEQ ID NO: 243099 - DNA, 33 bp, Homo sapien
gactgaaattcctgatcatcacctcaaatgctg

SEQ ID NO: 243100 - DNA, 33 bp, Homo sapien
gactgaaattcctgattatcacctcaaatgctg

SEQ ID NO: 243101 - DNA, 33 bp, Homo sapien
tttagagtatggagccaaaagtcaggggggaga

SEQ ID NO: 243102 - DNA, 33 bp, Homo sapien
tttagagtatggagccgaaagtcaggggggaga

SEQ ID NO: 243103 - DNA, 33 bp, Homo sapien
tctcttcttacagtaagactttgacattcttct

SEQ ID NO: 243104 - DNA, 33 bp, Homo sapien
tctcttcttacagtaatactttgacattcttct

SEQ ID NO: 243105 - DNA, 33 bp, Homo sapien
gaggagaatgtgtactcaagagaaagagtcagg

SEQ ID NO: 243106 - DNA, 33 bp, Homo sapien
gaggagaatgtgtacttaagagaaagagtcagg

SEQ ID NO: 243107 - DNA, 33 bp, Homo sapien
ttcagctatggtggtgaaagtagaaatggagag

SEQ ID NO: 243108 - DNA, 33 bp, Homo sapien
ttcagctatggtggtggaagtagaaatggagag

SEQ ID NO: 243109 - DNA, 33 bp, Homo sapien
ctagcgttcctgcttgaattcttctatggctcc

SEQ ID NO: 243110 - DNA, 33 bp, Homo sapien
ctagcgttcctgcttgcattcttctatggctcc

SEQ ID NO: 243111 - DNA, 33 bp, Homo sapien
ttaaaatgttcaactcaatggttcgtctgtgac

SEQ ID NO: 243112 - DNA, 33 bp, Homo sapien
ttaaaatgttcaactcgatggttcgtctgtgac

SEQ ID NO: 243113 - DNA, 33 bp, Homo sapien
aaagattgcaaaggttcaaaaataggactgaca

SEQ ID NO: 243114 - DNA, 33 bp, Homo sapien
aaagattgcaaaggttgaaaaataggactgaca

SEQ ID NO: 243115 - DNA, 33 bp, Homo sapien
gttttcttggaagagaagaaattttagctgaat

SEQ ID NO: 243116 - DNA, 33 bp, Homo sapien
gttttcttggaagagacgaaattttagctgaat

SEQ ID NO: 243117 - DNA, 33 bp, Homo sapien
ggaaagcaacgaaagcaacggcagttggacttc

SEQ ID NO: 243118 - DNA, 33 bp, Homo sapien
ggaaagcaacgaaagcgacggcagttggacttc

SEQ ID NO: 243119 - DNA, 33 bp, Homo sapien
ggaaatctgcaaagtgcatgagtcagtccacag

SEQ ID NO: 243120 - DNA, 33 bp, Homo sapien
ggaaatctgcaaagtgtatgagtcagtccacag

SEQ ID NO: 243121 - DNA, 33 bp, Homo sapien
atacacaatacagtaccgcacaatctagactct

SEQ ID NO: 243122 - DNA, 33 bp, Homo sapien
atacacaatacagtacggcacaatctagactct

SEQ ID NO: 243123 - DNA, 33 bp, Homo sapien
cttgctagatggagcaccatatacatacagtgg

SEQ ID NO: 243124 - DNA, 33 bp, Homo sapien
cttgctagatggagcagcatatacatacagtgg

SEQ ID NO: 243125 - DNA, 33 bp, Homo sapien
gcctagaaaatcctaaataaccactaccagaca

SEQ ID NO: 243126 - DNA, 33 bp, Homo sapien
gcctagaaaatcctaagtaaccactaccagaca

SEQ ID NO: 243127 - DNA, 33 bp, Homo sapien
tgttaggttccagaaacgtagtggtgagtttgg

SEQ ID NO: 243128 - DNA, 33 bp, Homo sapien
tgttaggttccagaaatgtagtggtgagtttgg

SEQ ID NO: 243129 - DNA, 33 bp, Homo sapien
acagagataaaaaatacgtggttcctgtctcca

SEQ ID NO: 243130 - DNA, 33 bp, Homo sapien
acagagataaaaaatatgtggttcctgtctcca

SEQ ID NO: 243131 - DNA, 33 bp, Homo sapien
tgattttggtttcatacgagctactgttgcaat

SEQ ID NO: 243132 - DNA, 33 bp, Homo sapien
tgattttggtttcatatgagctactgttgcaat

SEQ ID NO: 243133 - DNA, 33 bp, Homo sapien
tattggaatactcaaaagaagaacctatttctg

SEQ ID NO: 243134 - DNA, 33 bp, Homo sapien
tattggaatactcaaaggaagaacctatttctg

SEQ ID NO: 243135 - DNA, 33 bp, Homo sapien
cattttgttttgcttcaattttcagtaggttaa

SEQ ID NO: 243136 - DNA, 33 bp, Homo sapien
cattttgttttgcttctattttcagtaggttaa

SEQ ID NO: 243137 - DNA, 33 bp, Homo sapien
tttataaaatcagtaaaaggaaagctccaaaac

SEQ ID NO: 243138 - DNA, 33 bp, Homo sapien
tttataaaatcagtaacaggaaagctccaaaac

SEQ ID NO: 243139 - DNA, 33 bp, Homo sapien
cagtagtcttgaattacaaggttgagatgtatg

SEQ ID NO: 243140 - DNA, 33 bp, Homo sapien
cagtagtcttgaattataaggttgagatgtatg

SEQ ID NO: 243141 - DNA, 33 bp, Homo sapien
agagaggaaagcaaagaaagtaagttggtgcaa

SEQ ID NO: 243142 - DNA, 33 bp, Homo sapien
agagaggaaagcaaagcaagtaagttggtgcaa

SEQ ID NO: 243143 - DNA, 33 bp, Homo sapien
atgaggttgcataaacaaattgcagatagtaaa

SEQ ID NO: 243144 - DNA, 33 bp, Homo sapien
atgaggttgcataaacgaattgcagatagtaaa

SEQ ID NO: 243145 - DNA, 33 bp, Homo sapien
attaactatagtcactaacctacattttctttt

SEQ ID NO: 243146 - DNA, 33 bp, Homo sapien
attaactatagtcactgacctacattttctttt

SEQ ID NO: 243147 - DNA, 33 bp, Homo sapien
gttgataatactttgccgaacttattccctggg

SEQ ID NO: 243148 - DNA, 33 bp, Homo sapien
gttgataatactttgctgaacttattccctggg

SEQ ID NO: 243149 - DNA, 33 bp, Homo sapien
ggtaatttgaatgatcaattgtctttaggcttg

SEQ ID NO: 243150 - DNA, 33 bp, Homo sapien
ggtaatttgaatgatctattgtctttaggcttg

SEQ ID NO: 243151 - DNA, 33 bp, Homo sapien
ggagaaatttgaccacaggagataaatacatta

SEQ ID NO: 243152 - DNA, 33 bp, Homo sapien
ggagaaatttgaccacgggagataaatacatta

SEQ ID NO: 243153 - DNA, 33 bp, Homo sapien
agaaatgcatctgagacccgtcacacactgtga

SEQ ID NO: 243154 - DNA, 33 bp, Homo sapien
agaaatgcatctgagatccgtcacacactgtga

SEQ ID NO: 243155 - DNA, 33 bp, Homo sapien
accttcaaagactgcacccttttcgatcttgga

SEQ ID NO: 243156 - DNA, 33 bp, Homo sapien
accttcaaagactgcatccttttcgatcttgga

SEQ ID NO: 243157 - DNA, 33 bp, Homo sapien
atctctagattcagaaacctaaaatatggtagc

SEQ ID NO: 243158 - DNA, 33 bp, Homo sapien
atctctagattcagaagcctaaaatatggtagc

SEQ ID NO: 243159 - DNA, 33 bp, Homo sapien
atctaaagatactgtcaaatgacaacacacaca

SEQ ID NO: 243160 - DNA, 33 bp, Homo sapien
atctaaagatactgtcgaatgacaacacacaca

SEQ ID NO: 243161 - DNA, 33 bp, Homo sapien
aatacccaaccgagttaaaatgaatgtttggac

SEQ ID NO: 243162 - DNA, 33 bp, Homo sapien
aatacccaaccgagtttaaatgaatgtttggac

SEQ ID NO: 243163 - DNA, 33 bp, Homo sapien
atgtgtcttctctgtaccttccactgtttacat

SEQ ID NO: 243164 - DNA, 33 bp, Homo sapien
atgtgtcttctctgtatcttccactgtttacat

SEQ ID NO: 243165 - DNA, 33 bp, Homo sapien
agtgaacacactcctgaaagcccattttatact

SEQ ID NO: 243166 - DNA, 33 bp, Homo sapien
agtgaacacactcctggaagcccattttatact

SEQ ID NO: 243167 - DNA, 33 bp, Homo sapien
tcaacccagaaattcaactactggccatatacc

SEQ ID NO: 243168 - DNA, 33 bp, Homo sapien
tcaacccagaaattcagctactggccatatacc

SEQ ID NO: 243169 - DNA, 33 bp, Homo sapien
aattctctattcaataaatcatgctaggacaac

SEQ ID NO: 243170 - DNA, 33 bp, Homo sapien
aattctctattcaatagatcatgctaggacaac

SEQ ID NO: 243171 - DNA, 33 bp, Homo sapien
tggacaaaagaggacacaagaggaggttctggg

SEQ ID NO: 243172 - DNA, 33 bp, Homo sapien
tggacaaaagaggacataagaggaggttctggg

SEQ ID NO: 243173 - DNA, 33 bp, Homo sapien
cagctgcagatacccaatcttgaactttccaat

SEQ ID NO: 243174 - DNA, 33 bp, Homo sapien
cagctgcagatacccattcttgaactttccaat

SEQ ID NO: 243175 - DNA, 33 bp, Homo sapien
atagtggcttgaactacgtaaagggtgaaagga

SEQ ID NO: 243176 - DNA, 33 bp, Homo sapien
atagtggcttgaactatgtaaagggtgaaagga

SEQ ID NO: 243177 - DNA, 33 bp, Homo sapien
taatgtgaggtatgacacaaaaagaggaatcat

SEQ ID NO: 243178 - DNA, 33 bp, Homo sapien
taatgtgaggtatgacgcaaaaagaggaatcat

SEQ ID NO: 243179 - DNA, 33 bp, Homo sapien
aagggagactgaagacaagcaaccagtgaggca

SEQ ID NO: 243180 - DNA, 33 bp, Homo sapien
aagggagactgaagacgagcaaccagtgaggca

SEQ ID NO: 243181 - DNA, 33 bp, Homo sapien
tccttccagtaaacagactgtcctctccaaggc

SEQ ID NO: 243182 - DNA, 33 bp, Homo sapien
tccttccagtaaacagtctgtcctctccaaggc

SEQ ID NO: 243183 - DNA, 33 bp, Homo sapien
gctccaaagcacttgcccttacccaccacaatt

SEQ ID NO: 243184 - DNA, 33 bp, Homo sapien
gctccaaagcacttgctcttacccaccacaatt

SEQ ID NO: 243185 - DNA, 33 bp, Homo sapien
caaagatatttgcagaaatttgtgatacccaca

SEQ ID NO: 243186 - DNA, 33 bp, Homo sapien
caaagatatttgcagatatttgtgatacccaca

SEQ ID NO: 243187 - DNA, 33 bp, Homo sapien
ggcatagagatgttaaatgactcgctcaaggtt

SEQ ID NO: 243188 - DNA, 33 bp, Homo sapien
ggcatagagatgttaagtgactcgctcaaggtt

SEQ ID NO: 243189 - DNA, 33 bp, Homo sapien
gttagcctaaagccaccgatgcataatggggag

SEQ ID NO: 243190 - DNA, 33 bp, Homo sapien
gttagcctaaagccactgatgcataatggggag

SEQ ID NO: 243191 - DNA, 33 bp, Homo sapien
aacaccttggataaggaaggaatcaagagcaac

SEQ ID NO: 243192 - DNA, 33 bp, Homo sapien
aacaccttggataagggaggaatcaagagcaac

SEQ ID NO: 243193 - DNA, 33 bp, Homo sapien
cctatggtaagctgaacagttctggtctgggtg

SEQ ID NO: 243194 - DNA, 33 bp, Homo sapien
cctatggtaagctgaatagttctggtctgggtg

SEQ ID NO: 243195 - DNA, 33 bp, Homo sapien
tttgcctgaaccatgaaaagattgctttatccc

SEQ ID NO: 243196 - DNA, 33 bp, Homo sapien
tttgcctgaaccatgacaagattgctttatccc

SEQ ID NO: 243197 - DNA, 33 bp, Homo sapien
agaacaaacattggctaaaaaaaatgttaacct

SEQ ID NO: 243198 - DNA, 33 bp, Homo sapien
agaacaaacattggcttaaaaaaatgttaacct

SEQ ID NO: 243199 - DNA, 33 bp, Homo sapien
ttccactctctccccaaaaaggtactttgggaa

SEQ ID NO: 243200 - DNA, 33 bp, Homo sapien
ttccactctctccccagaaaggtactttgggaa

SEQ ID NO: 243201 - DNA, 33 bp, Homo sapien
ggaatgttgcaaaaggcaaacttccagattgcc

SEQ ID NO: 243202 - DNA, 33 bp, Homo sapien
ggaatgttgcaaaaggtaaacttccagattgcc

SEQ ID NO: 243203 - DNA, 33 bp, Homo sapien
aggtaacttttgcagaaatgcagctatgttcca

SEQ ID NO: 243204 - DNA, 33 bp, Homo sapien
aggtaacttttgcagagatgcagctatgttcca

SEQ ID NO: 243205 - DNA, 33 bp, Homo sapien
gtgtgcttgactaagaaactgaaatgtcagcat

SEQ ID NO: 243206 - DNA, 33 bp, Homo sapien
gtgtgcttgactaagagactgaaatgtcagcat

SEQ ID NO: 243207 - DNA, 33 bp, Homo sapien
cacaggagaagtacgcacaaaagcacagagaag

SEQ ID NO: 243208 - DNA, 33 bp, Homo sapien
cacaggagaagtacgcgcaaaagcacagagaag

SEQ ID NO: 243209 - DNA, 33 bp, Homo sapien
ataataagtgtgataactgccacaggagaagta

SEQ ID NO: 243210 - DNA, 33 bp, Homo sapien
ataataagtgtgataagtgccacaggagaagta

SEQ ID NO: 243211 - DNA, 33 bp, Homo sapien
ttctaggaaccgaggacgcaggtttgaatgtaa

SEQ ID NO: 243212 - DNA, 33 bp, Homo sapien
ttctaggaaccgaggaggcaggtttgaatgtaa

SEQ ID NO: 243213 - DNA, 33 bp, Homo sapien
taaacttctgggtaaactgattgttcatggaga

SEQ ID NO: 243214 - DNA, 33 bp, Homo sapien
taaacttctgggtaaattgattgttcatggaga

SEQ ID NO: 243215 - DNA, 33 bp, Homo sapien
tggacagggagctggcaagtcgcaatcctggct

SEQ ID NO: 243216 - DNA, 33 bp, Homo sapien
tggacagggagctggcgagtcgcaatcctggct

SEQ ID NO: 243217 - DNA, 33 bp, Homo sapien
taggggagaagattgaaaagaaagcctattatt

SEQ ID NO: 243218 - DNA, 33 bp, Homo sapien
taggggagaagattgagaagaaagcctattatt

SEQ ID NO: 243219 - DNA, 33 bp, Homo sapien
gtggtcccactaaaagcattctccgtagtagca

SEQ ID NO: 243220 - DNA, 33 bp, Homo sapien
gtggtcccactaaaagtattctccgtagtagca

SEQ ID NO: 243221 - DNA, 33 bp, Homo sapien
aagcctcggtgctttacagaaaaaaattcactg

SEQ ID NO: 243222 - DNA, 33 bp, Homo sapien
aagcctcggtgctttatagaaaaaaattcactg

SEQ ID NO: 243223 - DNA, 33 bp, Homo sapien
ctaactctcctgaagcaaatattttctttcatg

SEQ ID NO: 243224 - DNA, 33 bp, Homo sapien
ctaactctcctgaagcgaatattttctttcatg

SEQ ID NO: 243225 - DNA, 33 bp, Homo sapien
attagcaaatacatagaagacaggttttaattc

SEQ ID NO: 243226 - DNA, 33 bp, Homo sapien
attagcaaatacatagtagacaggttttaattc

SEQ ID NO: 243227 - DNA, 33 bp, Homo sapien
taactatatcgattcacgtttgttttctattct

SEQ ID NO: 243228 - DNA, 33 bp, Homo sapien
taactatatcgattcatgtttgttttctattct

SEQ ID NO: 243229 - DNA, 33 bp, Homo sapien
gctttgcatatatataaccacagtaagggctaa

SEQ ID NO: 243230 - DNA, 33 bp, Homo sapien
gctttgcatatatatagccacagtaagggctaa

SEQ ID NO: 243231 - DNA, 33 bp, Homo sapien
cggatcaagaaacatgaaaatgtgaataaagtt

SEQ ID NO: 243232 - DNA, 33 bp, Homo sapien
cggatcaagaaacatggaaatgtgaataaagtt

SEQ ID NO: 243233 - DNA, 33 bp, Homo sapien
cttatgatgctaattaaaagttttgtacataca

SEQ ID NO: 243234 - DNA, 33 bp, Homo sapien
cttatgatgctaattagaagttttgtacataca

SEQ ID NO: 243235 - DNA, 33 bp, Homo sapien
ttttcttggtaagctcccttttcttcatgttga

SEQ ID NO: 243236 - DNA, 33 bp, Homo sapien
ttttcttggtaagctcgcttttcttcatgttga

SEQ ID NO: 243237 - DNA, 33 bp, Homo sapien
gggaaccaggaagctgccagatcaacagagttg

SEQ ID NO: 243238 - DNA, 33 bp, Homo sapien
gggaaccaggaagctgtcagatcaacagagttg

SEQ ID NO: 243239 - DNA, 33 bp, Homo sapien
tgtccttccaactctacagctagcatcacattt

SEQ ID NO: 243240 - DNA, 33 bp, Homo sapien
tgtccttccaactctatagctagcatcacattt

SEQ ID NO: 243241 - DNA, 33 bp, Homo sapien
aggactatgatgagaaactcttcacagggatgt

SEQ ID NO: 243242 - DNA, 33 bp, Homo sapien
aggactatgatgagaacctcttcacagggatgt

SEQ ID NO: 243243 - DNA, 33 bp, Homo sapien
gtcaaaagtcaacccacggtgagaagtggagag

SEQ ID NO: 243244 - DNA, 33 bp, Homo sapien
gtcaaaagtcaacccagggtgagaagtggagag

SEQ ID NO: 243245 - DNA, 33 bp, Homo sapien
tgcaaagcccttacccagagaatctacaccaca

SEQ ID NO: 243246 - DNA, 33 bp, Homo sapien
tgcaaagcccttacccggagaatctacaccaca

SEQ ID NO: 243247 - DNA, 33 bp, Homo sapien
ttccctcctctcctacaaagaacacccatttcc

SEQ ID NO: 243248 - DNA, 33 bp, Homo sapien
ttccctcctctcctacgaagaacacccatttcc

SEQ ID NO: 243249 - DNA, 33 bp, Homo sapien
taactcatttgccttaaacaggtaccattctca

SEQ ID NO: 243250 - DNA, 33 bp, Homo sapien
taactcatttgccttagacaggtaccattctca

SEQ ID NO: 243251 - DNA, 33 bp, Homo sapien
taatatttcagaggcccgctttgaccctacccc

SEQ ID NO: 243252 - DNA, 33 bp, Homo sapien
taatatttcagaggcctgctttgaccctacccc

SEQ ID NO: 243253 - DNA, 33 bp, Homo sapien
tcttcttgggacctaaaggtagtaatgtgtccc

SEQ ID NO: 243254 - DNA, 33 bp, Homo sapien
tcttcttgggacctaagggtagtaatgtgtccc

SEQ ID NO: 243255 - DNA, 33 bp, Homo sapien
actccctgaaagccggaatttggccttaagcat

SEQ ID NO: 243256 - DNA, 33 bp, Homo sapien
actccctgaaagccgggatttggccttaagcat

SEQ ID NO: 243257 - DNA, 33 bp, Homo sapien
tgcatggaggtcccaacgaattgaggaaaagcc

SEQ ID NO: 243258 - DNA, 33 bp, Homo sapien
tgcatggaggtcccaaggaattgaggaaaagcc

SEQ ID NO: 243259 - DNA, 33 bp, Homo sapien
ttcttcctgctgttaccggcttttcctcaattc

SEQ ID NO: 243260 - DNA, 33 bp, Homo sapien
ttcttcctgctgttactggcttttcctcaattc

SEQ ID NO: 243261 - DNA, 33 bp, Homo sapien
tgggtcaacaggtcgacggaatccaattaatca

SEQ ID NO: 243262 - DNA, 33 bp, Homo sapien
tgggtcaacaggtcgatggaatccaattaatca

SEQ ID NO: 243263 - DNA, 33 bp, Homo sapien
tcacaataatccagccaaaagctgtggtatgca

SEQ ID NO: 243264 - DNA, 33 bp, Homo sapien
tcacaataatccagccgaaagctgtggtatgca

SEQ ID NO: 243265 - DNA, 33 bp, Homo sapien
cccctggctccaagaaaacagagatagcttaca

SEQ ID NO: 243266 - DNA, 33 bp, Homo sapien
cccctggctccaagaagacagagatagcttaca

SEQ ID NO: 243267 - DNA, 33 bp, Homo sapien
aaccctcctgcatacaaagtggccacagaagtc

SEQ ID NO: 243268 - DNA, 33 bp, Homo sapien
aaccctcctgcatacagagtggccacagaagtc

SEQ ID NO: 243269 - DNA, 33 bp, Homo sapien
tctctgccacgtaatacaggggctggaactccg

SEQ ID NO: 243270 - DNA, 33 bp, Homo sapien
tctctgccacgtaatagaggggctggaactccg

SEQ ID NO: 243271 - DNA, 33 bp, Homo sapien
aggttgcatatcaaaacggatacaaatagggtt

SEQ ID NO: 243272 - DNA, 33 bp, Homo sapien
aggttgcatatcaaaatggatacaaatagggtt

SEQ ID NO: 243273 - DNA, 33 bp, Homo sapien
taggcaattcaatatgcaagtctgaatttgggg

SEQ ID NO: 243274 - DNA, 33 bp, Homo sapien
taggcaattcaatatgtaagtctgaatttgggg

SEQ ID NO: 243275 - DNA, 33 bp, Homo sapien
acatggtctgcatctccatatcactccctgggc

SEQ ID NO: 243276 - DNA, 33 bp, Homo sapien
acatggtctgcatctctatatcactccctgggc

SEQ ID NO: 243277 - DNA, 33 bp, Homo sapien
tgaaatctgagtagctcaataggtaagtacatt

SEQ ID NO: 243278 - DNA, 33 bp, Homo sapien
tgaaatctgagtagcttaataggtaagtacatt

SEQ ID NO: 243279 - DNA, 33 bp, Homo sapien
tatgaatcctgccttcaatcctctccagctgag

SEQ ID NO: 243280 - DNA, 33 bp, Homo sapien
tatgaatcctgccttcgatcctctccagctgag

SEQ ID NO: 243281 - DNA, 33 bp, Homo sapien
gtgatttggttaagcaatgatacaggctacaat

SEQ ID NO: 243282 - DNA, 33 bp, Homo sapien
gtgatttggttaagcagtgatacaggctacaat

SEQ ID NO: 243283 - DNA, 33 bp, Homo sapien
caccctccacccttcaatagactcagtgtgtgt

SEQ ID NO: 243284 - DNA, 33 bp, Homo sapien
caccctccacccttcattagactcagtgtgtgt

SEQ ID NO: 243285 - DNA, 33 bp, Homo sapien
tccataattctgagatcaacagtctcactttgt

SEQ ID NO: 243286 - DNA, 33 bp, Homo sapien
tccataattctgagatgaacagtctcactttgt

SEQ ID NO: 243287 - DNA, 33 bp, Homo sapien
tcatgctaaatcaaagaagttactaataaggtg

SEQ ID NO: 243288 - DNA, 33 bp, Homo sapien
tcatgctaaatcaaaggagttactaataaggtg

SEQ ID NO: 243289 - DNA, 33 bp, Homo sapien
catgcacattggaatccacagcaaggaggctca

SEQ ID NO: 243290 - DNA, 33 bp, Homo sapien
catgcacattggaatctacagcaaggaggctca

SEQ ID NO: 243291 - DNA, 33 bp, Homo sapien
aactaagcaaagttcacaggatggatgtctatg

SEQ ID NO: 243292 - DNA, 33 bp, Homo sapien
aactaagcaaagttcataggatggatgtctatg

SEQ ID NO: 243293 - DNA, 33 bp, Homo sapien
caatctgtactcaggacgttgccttctctgtgt

SEQ ID NO: 243294 - DNA, 33 bp, Homo sapien
caatctgtactcaggatgttgccttctctgtgt

SEQ ID NO: 243295 - DNA, 33 bp, Homo sapien
caggaatgaacagagacaagggcattttggacc

SEQ ID NO: 243296 - DNA, 33 bp, Homo sapien
caggaatgaacagagagaagggcattttggacc

SEQ ID NO: 243297 - DNA, 33 bp, Homo sapien
tccttgccaactcttacctcttgtccttttgat

SEQ ID NO: 243298 - DNA, 33 bp, Homo sapien
tccttgccaactcttatctcttgtccttttgat

SEQ ID NO: 243299 - DNA, 33 bp, Homo sapien
cacttatttcgttgtgaaactggcaagtgtctt

SEQ ID NO: 243300 - DNA, 33 bp, Homo sapien
cacttatttcgttgtgtaactggcaagtgtctt

SEQ ID NO: 243301 - DNA, 33 bp, Homo sapien
tgtttgagaaggagtactaagagaaggaagaaa

SEQ ID NO: 243302 - DNA, 33 bp, Homo sapien
tgtttgagaaggagtagtaagagaaggaagaaa

SEQ ID NO: 243303 - DNA, 33 bp, Homo sapien
taagtttactccaagacaacagcacatagtggt

SEQ ID NO: 243304 - DNA, 33 bp, Homo sapien
taagtttactccaagataacagcacatagtggt

SEQ ID NO: 243305 - DNA, 33 bp, Homo sapien
acattatccaagacaaacatgattgtagcactg

SEQ ID NO: 243306 - DNA, 33 bp, Homo sapien
acattatccaagacaagcatgattgtagcactg

SEQ ID NO: 243307 - DNA, 33 bp, Homo sapien
tagggaaaagttctcacagcattatgtacatct

SEQ ID NO: 243308 - DNA, 33 bp, Homo sapien
tagggaaaagttctcagagcattatgtacatct

SEQ ID NO: 243309 - DNA, 33 bp, Homo sapien
gataggtatttgttgactaaatggacaaatggg

SEQ ID NO: 243310 - DNA, 33 bp, Homo sapien
gataggtatttgttgagtaaatggacaaatggg

SEQ ID NO: 243311 - DNA, 33 bp, Homo sapien
ctgctgttgataatcccagaaatgtttgataat

SEQ ID NO: 243312 - DNA, 33 bp, Homo sapien
ctgctgttgataatcctagaaatgtttgataat

SEQ ID NO: 243313 - DNA, 33 bp, Homo sapien
tggtgatgcagatttacgtttattaccatagaa

SEQ ID NO: 243314 - DNA, 33 bp, Homo sapien
tggtgatgcagatttatgtttattaccatagaa

SEQ ID NO: 243315 - DNA, 33 bp, Homo sapien
ctttttcactactgtaccttgagggcttacaac

SEQ ID NO: 243316 - DNA, 33 bp, Homo sapien
ctttttcactactgtatcttgagggcttacaac

SEQ ID NO: 243317 - DNA, 33 bp, Homo sapien
tgttattgtaccttcaatcaacattttaacatt

SEQ ID NO: 243318 - DNA, 33 bp, Homo sapien
tgttattgtaccttcattcaacattttaacatt

SEQ ID NO: 243319 - DNA, 33 bp, Homo sapien
aactcctggtggtcaagatgaaaattttcatcc

SEQ ID NO: 243320 - DNA, 33 bp, Homo sapien
aactcctggtggtcaatatgaaaattttcatcc

SEQ ID NO: 243321 - DNA, 33 bp, Homo sapien
gattttagatagtgcacggataaacatttgtca

SEQ ID NO: 243322 - DNA, 33 bp, Homo sapien
gattttagatagtgcatggataaacatttgtca

SEQ ID NO: 243323 - DNA, 33 bp, Homo sapien
agtcctagctggtgaaaatgactccctttggaa

SEQ ID NO: 243324 - DNA, 33 bp, Homo sapien
agtcctagctggtgaagatgactccctttggaa

SEQ ID NO: 243325 - DNA, 33 bp, Homo sapien
cacctaagaaatggcaagtggtcctacaacata

SEQ ID NO: 243326 - DNA, 33 bp, Homo sapien
cacctaagaaatggcacgtggtcctacaacata

SEQ ID NO: 243327 - DNA, 33 bp, Homo sapien
actgtgtaagccttcagacattgagtccaatca

SEQ ID NO: 243328 - DNA, 33 bp, Homo sapien
actgtgtaagccttcatacattgagtccaatca

SEQ ID NO: 243329 - DNA, 33 bp, Homo sapien
gaaaaaggtagcaatacagtttcttactgtgat

SEQ ID NO: 243330 - DNA, 33 bp, Homo sapien
gaaaaaggtagcaatagagtttcttactgtgat

SEQ ID NO: 243331 - DNA, 33 bp, Homo sapien
gatctttaactcctggaagctactactctgttc

SEQ ID NO: 243332 - DNA, 33 bp, Homo sapien
gatctttaactcctggcagctactactctgttc

SEQ ID NO: 243333 - DNA, 33 bp, Homo sapien
gaactgatccagtgtgaaaggaaaaaaaagcct

SEQ ID NO: 243334 - DNA, 33 bp, Homo sapien
gaactgatccagtgtggaaggaaaaaaaagcct

SEQ ID NO: 243335 - DNA, 33 bp, Homo sapien
tgcattaagaagcaaaggttcaaagccttgaaa

SEQ ID NO: 243336 - DNA, 33 bp, Homo sapien
tgcattaagaagcaaatgttcaaagccttgaaa

SEQ ID NO: 243337 - DNA, 33 bp, Homo sapien
ctgaaagccacagaagacctgattttggtaggt

SEQ ID NO: 243338 - DNA, 33 bp, Homo sapien
ctgaaagccacagaaggcctgattttggtaggt

SEQ ID NO: 243339 - DNA, 33 bp, Homo sapien
taaccttttatactcaacactacttagctcagg

SEQ ID NO: 243340 - DNA, 33 bp, Homo sapien
taaccttttatactcagcactacttagctcagg

SEQ ID NO: 243341 - DNA, 33 bp, Homo sapien
tctttatctgcccacaaactctaattaatgatc

SEQ ID NO: 243342 - DNA, 33 bp, Homo sapien
tctttatctgcccacacactctaattaatgatc

SEQ ID NO: 243343 - DNA, 33 bp, Homo sapien
ctgttttcatgatttccataagtgaatccagtc

SEQ ID NO: 243344 - DNA, 33 bp, Homo sapien
ctgttttcatgatttcgataagtgaatccagtc

SEQ ID NO: 243345 - DNA, 33 bp, Homo sapien
aagaccaaaaactgaactgtggactagagggta

SEQ ID NO: 243346 - DNA, 33 bp, Homo sapien
aagaccaaaaactgaattgtggactagagggta

SEQ ID NO: 243347 - DNA, 33 bp, Homo sapien
caaaggctgggttgcaagattaaaagacatatt

SEQ ID NO: 243348 - DNA, 33 bp, Homo sapien
caaaggctgggttgcaggattaaaagacatatt

SEQ ID NO: 243349 - DNA, 33 bp, Homo sapien
ttctggtgagtatatgcatgaatttctgttagg

SEQ ID NO: 243350 - DNA, 33 bp, Homo sapien
ttctggtgagtatatgtatgaatttctgttagg

SEQ ID NO: 243351 - DNA, 33 bp, Homo sapien
ttggattctgaggctacgatggtaagttggata

SEQ ID NO: 243352 - DNA, 33 bp, Homo sapien
ttggattctgaggctatgatggtaagttggata

SEQ ID NO: 243353 - DNA, 33 bp, Homo sapien
ttcgtgcactatgtaaatggaatacctggtcca

SEQ ID NO: 243354 - DNA, 33 bp, Homo sapien
ttcgtgcactatgtaagtggaatacctggtcca

SEQ ID NO: 243355 - DNA, 33 bp, Homo sapien
actaattttttcccaacctactggctatgcctt

SEQ ID NO: 243356 - DNA, 33 bp, Homo sapien
actaattttttcccaatctactggctatgcctt

SEQ ID NO: 243357 - DNA, 33 bp, Homo sapien
gaataaaattcagaataacggatttggtggtgc

SEQ ID NO: 243358 - DNA, 33 bp, Homo sapien
gaataaaattcagaatgacggatttggtggtgc

SEQ ID NO: 243359 - DNA, 33 bp, Homo sapien
actccatgttagccaacgaagtcaactctcttt

SEQ ID NO: 243360 - DNA, 33 bp, Homo sapien
actccatgttagccaatgaagtcaactctcttt

SEQ ID NO: 243361 - DNA, 33 bp, Homo sapien
ctagtaattagaatgaccactcttctggtggtt

SEQ ID NO: 243362 - DNA, 33 bp, Homo sapien
ctagtaattagaatgatcactcttctggtggtt

SEQ ID NO: 243363 - DNA, 33 bp, Homo sapien
aaggaggctaataaaaacacacatagtattgag

SEQ ID NO: 243364 - DNA, 33 bp, Homo sapien
aaggaggctaataaaagcacacatagtattgag

SEQ ID NO: 243365 - DNA, 33 bp, Homo sapien
tgtcttgtagtatgacaccaaattgtagctaat

SEQ ID NO: 243366 - DNA, 33 bp, Homo sapien
tgtcttgtagtatgacgccaaattgtagctaat

SEQ ID NO: 243367 - DNA, 33 bp, Homo sapien
tcccagagttttgggaaaagataatgtttcttt

SEQ ID NO: 243368 - DNA, 33 bp, Homo sapien
tcccagagttttgggagaagataatgtttcttt

SEQ ID NO: 243369 - DNA, 33 bp, Homo sapien
taacagaattcaaaccacattagaagcatcata

SEQ ID NO: 243370 - DNA, 33 bp, Homo sapien
taacagaattcaaaccgcattagaagcatcata

SEQ ID NO: 243371 - DNA, 33 bp, Homo sapien
ctatgctgactgatacagagccctaacagggga

SEQ ID NO: 243372 - DNA, 33 bp, Homo sapien
ctatgctgactgatacggagccctaacagggga

SEQ ID NO: 243373 - DNA, 33 bp, Homo sapien
cctttattacttcctaaaagccctatccaaaaa

SEQ ID NO: 243374 - DNA, 33 bp, Homo sapien
cctttattacttcctacaagccctatccaaaaa

SEQ ID NO: 243375 - DNA, 33 bp, Homo sapien
gagaatattcttgctcaagaggaatgttgcata

SEQ ID NO: 243376 - DNA, 33 bp, Homo sapien
gagaatattcttgctcgagaggaatgttgcata

SEQ ID NO: 243377 - DNA, 33 bp, Homo sapien
ctgataaatgaagaccagaaatatcctccttta

SEQ ID NO: 243378 - DNA, 33 bp, Homo sapien
ctgataaatgaagaccggaaatatcctccttta

SEQ ID NO: 243379 - DNA, 33 bp, Homo sapien
atttgtagccttacaaaaactccccatatgcac

SEQ ID NO: 243380 - DNA, 33 bp, Homo sapien
atttgtagccttacaagaactccccatatgcac

SEQ ID NO: 243381 - DNA, 33 bp, Homo sapien
ctaacaagggctcttgcagtgattggcagatac

SEQ ID NO: 243382 - DNA, 33 bp, Homo sapien
ctaacaagggctcttggagtgattggcagatac

SEQ ID NO: 243383 - DNA, 33 bp, Homo sapien
gattgtttattgctacacactgtattcactgca

SEQ ID NO: 243384 - DNA, 33 bp, Homo sapien
gattgtttattgctacgcactgtattcactgca

SEQ ID NO: 243385 - DNA, 33 bp, Homo sapien
tgattcccttcacttacgtgctttaactggaac

SEQ ID NO: 243386 - DNA, 33 bp, Homo sapien
tgattcccttcacttatgtgctttaactggaac

SEQ ID NO: 243387 - DNA, 33 bp, Homo sapien
cagtgcttagggagaacatttatttcattttac

SEQ ID NO: 243388 - DNA, 33 bp, Homo sapien
cagtgcttagggagaatatttatttcattttac

SEQ ID NO: 243389 - DNA, 33 bp, Homo sapien
agcaaaatcataccaaacgatactcactcttca

SEQ ID NO: 243390 - DNA, 33 bp, Homo sapien
agcaaaatcataccaagcgatactcactcttca

SEQ ID NO: 243391 - DNA, 33 bp, Homo sapien
aggttttcaaaactcaaagtgactctttcatgg

SEQ ID NO: 243392 - DNA, 33 bp, Homo sapien
aggttttcaaaactcagagtgactctttcatgg

SEQ ID NO: 243393 - DNA, 33 bp, Homo sapien
caccttactccatgccgacgtggtatactgatg

SEQ ID NO: 243394 - DNA, 33 bp, Homo sapien
caccttactccatgcctacgtggtatactgatg

SEQ ID NO: 243395 - DNA, 33 bp, Homo sapien
taaaaatgatctccaaagtcttctccaatttta

SEQ ID NO: 243396 - DNA, 33 bp, Homo sapien
taaaaatgatctccaaggtcttctccaatttta

SEQ ID NO: 243397 - DNA, 33 bp, Homo sapien
atattgaatgtagaaccgtctctaagcacaatt

SEQ ID NO: 243398 - DNA, 33 bp, Homo sapien
atattgaatgtagaactgtctctaagcacaatt

SEQ ID NO: 243399 - DNA, 33 bp, Homo sapien
ccaggagtatgcaagccatgttattgaaagaaa

SEQ ID NO: 243400 - DNA, 33 bp, Homo sapien
ccaggagtatgcaagctatgttattgaaagaaa

SEQ ID NO: 243401 - DNA, 33 bp, Homo sapien
tgatggggaattagcccaagactaactgcttct

SEQ ID NO: 243402 - DNA, 33 bp, Homo sapien
tgatggggaattagcctaagactaactgcttct

SEQ ID NO: 243403 - DNA, 33 bp, Homo sapien
aggattctgcttaggaggggcaaactactggaa

SEQ ID NO: 243404 - DNA, 33 bp, Homo sapien
aggattctgcttaggatgggcaaactactggaa

SEQ ID NO: 243405 - DNA, 33 bp, Homo sapien
atagcaaaatggatgaataaattgaataatcaa

SEQ ID NO: 243406 - DNA, 33 bp, Homo sapien
atagcaaaatggatgagtaaattgaataatcaa

SEQ ID NO: 243407 - DNA, 33 bp, Homo sapien
aaattcctgggctgaaacaatcttctcaggttg

SEQ ID NO: 243408 - DNA, 33 bp, Homo sapien
aaattcctgggctgaagcaatcttctcaggttg

SEQ ID NO: 243409 - DNA, 33 bp, Homo sapien
gctatttttgcattaaaaaacctccccatgtgg

SEQ ID NO: 243410 - DNA, 33 bp, Homo sapien
gctatttttgcattaagaaacctccccatgtgg

SEQ ID NO: 243411 - DNA, 33 bp, Homo sapien
acataatcccaagacacaccagagtttccaaag

SEQ ID NO: 243412 - DNA, 33 bp, Homo sapien
acataatcccaagacagaccagagtttccaaag

SEQ ID NO: 243413 - DNA, 33 bp, Homo sapien
gggctaatgctatcccacaacaactattacccc

SEQ ID NO: 243414 - DNA, 33 bp, Homo sapien
gggctaatgctatcccgcaacaactattacccc

SEQ ID NO: 243415 - DNA, 33 bp, Homo sapien
catgggcttcagagtaagaaagagtggatttga

SEQ ID NO: 243416 - DNA, 33 bp, Homo sapien
catgggcttcagagtaggaaagagtggatttga

SEQ ID NO: 243417 - DNA, 33 bp, Homo sapien
tgaggttgacaggaaacggctgtgcatagatct

SEQ ID NO: 243418 - DNA, 33 bp, Homo sapien
tgaggttgacaggaaatggctgtgcatagatct

SEQ ID NO: 243419 - DNA, 33 bp, Homo sapien
gctatgaataccattcaaaacgctggagtcatg

SEQ ID NO: 243420 - DNA, 33 bp, Homo sapien
gctatgaataccattcgaaacgctggagtcatg

SEQ ID NO: 243421 - DNA, 33 bp, Homo sapien
ttctgtgcatgttctagctctgggataactgtg

SEQ ID NO: 243422 - DNA, 33 bp, Homo sapien
ttctgtgcatgttctatctctgggataactgtg

SEQ ID NO: 243423 - DNA, 33 bp, Homo sapien
tctttaaaaatgtatacgcctggaactgaatac

SEQ ID NO: 243424 - DNA, 33 bp, Homo sapien
tctttaaaaatgtatatgcctggaactgaatac

SEQ ID NO: 243425 - DNA, 33 bp, Homo sapien
ataaacaacattggtcaaaggaaataatagtaa

SEQ ID NO: 243426 - DNA, 33 bp, Homo sapien
ataaacaacattggtctaaggaaataatagtaa

SEQ ID NO: 243427 - DNA, 33 bp, Homo sapien
ggtaacagaattcagaagaaagacatcaaatgc

SEQ ID NO: 243428 - DNA, 33 bp, Homo sapien
ggtaacagaattcagaggaaagacatcaaatgc

SEQ ID NO: 243429 - DNA, 33 bp, Homo sapien
aagggaaggatggaacgggttaacaagtccttg

SEQ ID NO: 243430 - DNA, 33 bp, Homo sapien
aagggaaggatggaactggttaacaagtccttg

SEQ ID NO: 243431 - DNA, 33 bp, Homo sapien
actctcctgtgtctccactatgctaataattta

SEQ ID NO: 243432 - DNA, 33 bp, Homo sapien
actctcctgtgtctccgctatgctaataattta

SEQ ID NO: 243433 - DNA, 33 bp, Homo sapien
tggaaattgttgagtcaaatttgtttgcattcc

SEQ ID NO: 243434 - DNA, 33 bp, Homo sapien
tggaaattgttgagtctaatttgtttgcattcc

SEQ ID NO: 243435 - DNA, 33 bp, Homo sapien
atgtattatatatttcaaagtagccagaagaaa

SEQ ID NO: 243436 - DNA, 33 bp, Homo sapien
atgtattatatatttcgaagtagccagaagaaa

SEQ ID NO: 243437 - DNA, 33 bp, Homo sapien
gcctggtaaacaaaaaagctattgtaatcaaca

SEQ ID NO: 243438 - DNA, 33 bp, Homo sapien
gcctggtaaacaaaaatgctattgtaatcaaca

SEQ ID NO: 243439 - DNA, 33 bp, Homo sapien
gttcaggtgtctcccaacaggatgattgcagag

SEQ ID NO: 243440 - DNA, 33 bp, Homo sapien
gttcaggtgtctcccatcaggatgattgcagag

SEQ ID NO: 243441 - DNA, 33 bp, Homo sapien
tgattgcagagggggagaggatgagacagccaa

SEQ ID NO: 243442 - DNA, 33 bp, Homo sapien
tgattgcagagggggataggatgagacagccaa

SEQ ID NO: 243443 - DNA, 33 bp, Homo sapien
tcagcatactcaatgtaaagacaataaggatga

SEQ ID NO: 243444 - DNA, 33 bp, Homo sapien
tcagcatactcaatgtgaagacaataaggatga

SEQ ID NO: 243445 - DNA, 33 bp, Homo sapien
acagaaaaatactagacagcagttgtttccatc

SEQ ID NO: 243446 - DNA, 33 bp, Homo sapien
acagaaaaatactagagagcagttgtttccatc

SEQ ID NO: 243447 - DNA, 33 bp, Homo sapien
taacaaaaaaattccacaactgtgattaattgt

SEQ ID NO: 243448 - DNA, 33 bp, Homo sapien
taacaaaaaaattccataactgtgattaattgt

SEQ ID NO: 243449 - DNA, 33 bp, Homo sapien
ggtgtattaatactggaagacttgatttgaaaa

SEQ ID NO: 243450 - DNA, 33 bp, Homo sapien
ggtgtattaatactgggagacttgatttgaaaa

SEQ ID NO: 243451 - DNA, 33 bp, Homo sapien
tgtatctctggggtcaactataataaggaaaat

SEQ ID NO: 243452 - DNA, 33 bp, Homo sapien
tgtatctctggggtcagctataataaggaaaat

SEQ ID NO: 243453 - DNA, 33 bp, Homo sapien
tactagttgacatttagcaagaatgtaatctct

SEQ ID NO: 243454 - DNA, 33 bp, Homo sapien
tactagttgacatttatcaagaatgtaatctct

SEQ ID NO: 243455 - DNA, 33 bp, Homo sapien
tcttggagaattacaaagtacagtagcttaggc

SEQ ID NO: 243456 - DNA, 33 bp, Homo sapien
tcttggagaattacaatgtacagtagcttaggc

SEQ ID NO: 243457 - DNA, 33 bp, Homo sapien
caaaatgtgggataacaacatgaacagacagtt

SEQ ID NO: 243458 - DNA, 33 bp, Homo sapien
caaaatgtgggataacgacatgaacagacagtt

SEQ ID NO: 243459 - DNA, 33 bp, Homo sapien
tagtaaaagaagctaccggcagggtatacactg

SEQ ID NO: 243460 - DNA, 33 bp, Homo sapien
tagtaaaagaagctactggcagggtatacactg

SEQ ID NO: 243461 - DNA, 33 bp, Homo sapien
agcatataaacgtgaaacttgtgggaagtggag

SEQ ID NO: 243462 - DNA, 33 bp, Homo sapien
agcatataaacgtgaagcttgtgggaagtggag

SEQ ID NO: 243463 - DNA, 33 bp, Homo sapien
tctgagaagtagacacaaagatgtattaaatgt

SEQ ID NO: 243464 - DNA, 33 bp, Homo sapien
tctgagaagtagacaccaagatgtattaaatgt

SEQ ID NO: 243465 - DNA, 33 bp, Homo sapien
ttactatgtgttagcactgcagtaagcttttat

SEQ ID NO: 243466 - DNA, 33 bp, Homo sapien
ttactatgtgttagcattgcagtaagcttttat

SEQ ID NO: 243467 - DNA, 33 bp, Homo sapien
ccatacttaacctaaacagccaacagaggtcaa

SEQ ID NO: 243468 - DNA, 33 bp, Homo sapien
ccatacttaacctaaagagccaacagaggtcaa

SEQ ID NO: 243469 - DNA, 33 bp, Homo sapien
taggtgaagaaacagacagtcagagagacccca

SEQ ID NO: 243470 - DNA, 33 bp, Homo sapien
taggtgaagaaacagatagtcagagagacccca

SEQ ID NO: 243471 - DNA, 33 bp, Homo sapien
cttgagggtctctaaaactttgtctatttactg

SEQ ID NO: 243472 - DNA, 33 bp, Homo sapien
cttgagggtctctaaacctttgtctatttactg

SEQ ID NO: 243473 - DNA, 33 bp, Homo sapien
cttctgttttagtcaactaaagtgtagctctcc

SEQ ID NO: 243474 - DNA, 33 bp, Homo sapien
cttctgttttagtcaattaaagtgtagctctcc

SEQ ID NO: 243475 - DNA, 33 bp, Homo sapien
cgtcagtagaaaaagcaacttgtctgccttacc

SEQ ID NO: 243476 - DNA, 33 bp, Homo sapien
cgtcagtagaaaaagcgacttgtctgccttacc

SEQ ID NO: 243477 - DNA, 33 bp, Homo sapien
gaccattagtctgagacggctccagcaccttga

SEQ ID NO: 243478 - DNA, 33 bp, Homo sapien
gaccattagtctgagatggctccagcaccttga

SEQ ID NO: 243479 - DNA, 33 bp, Homo sapien
agtgatcctcatattccaaaagctctacaacac

SEQ ID NO: 243480 - DNA, 33 bp, Homo sapien
agtgatcctcatattcgaaaagctctacaacac

SEQ ID NO: 243481 - DNA, 33 bp, Homo sapien
ctccctcaccacacaccgagtgggcactaatct

SEQ ID NO: 243482 - DNA, 33 bp, Homo sapien
ctccctcaccacacactgagtgggcactaatct

SEQ ID NO: 243483 - DNA, 33 bp, Homo sapien
ctcaacctttgtgttcacttattttactcctct

SEQ ID NO: 243484 - DNA, 33 bp, Homo sapien
ctcaacctttgtgttcgcttattttactcctct

SEQ ID NO: 243485 - DNA, 33 bp, Homo sapien
tgtattcaagggaaacagcccttgattctgtgc

SEQ ID NO: 243486 - DNA, 33 bp, Homo sapien
tgtattcaagggaaacggcccttgattctgtgc

SEQ ID NO: 243487 - DNA, 33 bp, Homo sapien
gaaatgtttgtatagccaacagcctgggaagac

SEQ ID NO: 243488 - DNA, 33 bp, Homo sapien
gaaatgtttgtatagcgaacagcctgggaagac

SEQ ID NO: 243489 - DNA, 33 bp, Homo sapien
cttaagttagaaaactcaggttcattattgact

SEQ ID NO: 243490 - DNA, 33 bp, Homo sapien
cttaagttagaaaactgaggttcattattgact

SEQ ID NO: 243491 - DNA, 33 bp, Homo sapien
tctttcctatatagaagtgctgagaagtggctg

SEQ ID NO: 243492 - DNA, 33 bp, Homo sapien
tctttcctatatagaattgctgagaagtggctg

SEQ ID NO: 243493 - DNA, 33 bp, Homo sapien
cagatatatgtctagaaatggactgcctaaact

SEQ ID NO: 243494 - DNA, 33 bp, Homo sapien
cagatatatgtctagagatggactgcctaaact

SEQ ID NO: 243495 - DNA, 33 bp, Homo sapien
ttattaatattgcaaccgcagctttcctgtggc

SEQ ID NO: 243496 - DNA, 33 bp, Homo sapien
ttattaatattgcaactgcagctttcctgtggc

SEQ ID NO: 243497 - DNA, 33 bp, Homo sapien
ttagatgacaggttgaacaaaataaacacttag

SEQ ID NO: 243498 - DNA, 33 bp, Homo sapien
ttagatgacaggttgagcaaaataaacacttag

SEQ ID NO: 243499 - DNA, 33 bp, Homo sapien
accatcaggcgactgaagttctatttttcccca

SEQ ID NO: 243500 - DNA, 33 bp, Homo sapien
accatcaggcgactgaggttctatttttcccca

SEQ ID NO: 243501 - DNA, 33 bp, Homo sapien
aagtgctaccaactaggaatctcccctgagtga

SEQ ID NO: 243502 - DNA, 33 bp, Homo sapien
aagtgctaccaactagtaatctcccctgagtga

SEQ ID NO: 243503 - DNA, 33 bp, Homo sapien
ggatcaaccgaatagacggagcctgggtcccag

SEQ ID NO: 243504 - DNA, 33 bp, Homo sapien
ggatcaaccgaatagatggagcctgggtcccag

SEQ ID NO: 243505 - DNA, 33 bp, Homo sapien
tatccatccaattgctcaagagtgatctatttt

SEQ ID NO: 243506 - DNA, 33 bp, Homo sapien
tatccatccaattgctgaagagtgatctatttt

SEQ ID NO: 243507 - DNA, 33 bp, Homo sapien
ctgcttgctaattctaagttagttaatgctggg

SEQ ID NO: 243508 - DNA, 33 bp, Homo sapien
ctgcttgctaattctaggttagttaatgctggg

SEQ ID NO: 243509 - DNA, 33 bp, Homo sapien
gcaaggtccacatctacaaccaaaagagtccaa

SEQ ID NO: 243510 - DNA, 33 bp, Homo sapien
gcaaggtccacatctataaccaaaagagtccaa

SEQ ID NO: 243511 - DNA, 33 bp, Homo sapien
gagaaggtaaagaagcacaatgaaaaaaattac

SEQ ID NO: 243512 - DNA, 33 bp, Homo sapien
gagaaggtaaagaagcgcaatgaaaaaaattac

SEQ ID NO: 243513 - DNA, 33 bp, Homo sapien
tttattctgccatgaaagttaatggatttgtgt

SEQ ID NO: 243514 - DNA, 33 bp, Homo sapien
tttattctgccatgaacgttaatggatttgtgt

SEQ ID NO: 243515 - DNA, 33 bp, Homo sapien
caggagagagtaatgaactagaactggggtctg

SEQ ID NO: 243516 - DNA, 33 bp, Homo sapien
caggagagagtaatgagctagaactggggtctg

SEQ ID NO: 243517 - DNA, 33 bp, Homo sapien
atcaccacatttgtaaaggttgacagtccatga

SEQ ID NO: 243518 - DNA, 33 bp, Homo sapien
atcaccacatttgtaagggttgacagtccatga

SEQ ID NO: 243519 - DNA, 33 bp, Homo sapien
tgtgataaaaaagaaacttcagcagaattaaat

SEQ ID NO: 243520 - DNA, 33 bp, Homo sapien
tgtgataaaaaagaaatttcagcagaattaaat

SEQ ID NO: 243521 - DNA, 33 bp, Homo sapien
tcatgtattcatccaaaaacagtgtagtgagtg

SEQ ID NO: 243522 - DNA, 33 bp, Homo sapien
tcatgtattcatccaacaacagtgtagtgagtg

SEQ ID NO: 243523 - DNA, 33 bp, Homo sapien
aaattagataatgcataacaacacacttggcaa

SEQ ID NO: 243524 - DNA, 33 bp, Homo sapien
aaattagataatgcatgacaacacacttggcaa

SEQ ID NO: 243525 - DNA, 33 bp, Homo sapien
tttaaggaggcatcaaaaaaactcagtaatcaa

SEQ ID NO: 243526 - DNA, 33 bp, Homo sapien
tttaaggaggcatcaagaaaactcagtaatcaa

SEQ ID NO: 243527 - DNA, 33 bp, Homo sapien
tactaccaccgctcacagcatctcaaccgcttc

SEQ ID NO: 243528 - DNA, 33 bp, Homo sapien
tactaccaccgctcacggcatctcaaccgcttc

SEQ ID NO: 243529 - DNA, 33 bp, Homo sapien
aaagggagaattgggacggcatagaagacaaat

SEQ ID NO: 243530 - DNA, 33 bp, Homo sapien
aaagggagaattgggatggcatagaagacaaat

SEQ ID NO: 243531 - DNA, 33 bp, Homo sapien
aaaaggcgtgaacttcacaaaagatgaaggggg

SEQ ID NO: 243532 - DNA, 33 bp, Homo sapien
aaaaggcgtgaacttcccaaaagatgaaggggg

SEQ ID NO: 243533 - DNA, 33 bp, Homo sapien
aatactgagaaccaaaaaagctggtgtatgcat

SEQ ID NO: 243534 - DNA, 33 bp, Homo sapien
aatactgagaaccaaacaagctggtgtatgcat

SEQ ID NO: 243535 - DNA, 33 bp, Homo sapien
agggtgggttgaaacaagaactctaccactccc

SEQ ID NO: 243536 - DNA, 33 bp, Homo sapien
agggtgggttgaaacatgaactctaccactccc

SEQ ID NO: 243537 - DNA, 33 bp, Homo sapien
gagctgggatttaaaaatagatccatctgagaa

SEQ ID NO: 243538 - DNA, 33 bp, Homo sapien
gagctgggatttaaaactagatccatctgagaa

SEQ ID NO: 243539 - DNA, 33 bp, Homo sapien
catttcactgtgttaactggtgacaggcattgc

SEQ ID NO: 243540 - DNA, 33 bp, Homo sapien
catttcactgtgttaattggtgacaggcattgc

SEQ ID NO: 243541 - DNA, 33 bp, Homo sapien
attaggagtaaatgtcccttgctgtcttaaggc

SEQ ID NO: 243542 - DNA, 33 bp, Homo sapien
attaggagtaaatgtctcttgctgtcttaaggc

SEQ ID NO: 243543 - DNA, 33 bp, Homo sapien
gctctggctatagcagaccacaactatgcagta

SEQ ID NO: 243544 - DNA, 33 bp, Homo sapien
gctctggctatagcaggccacaactatgcagta

SEQ ID NO: 243545 - DNA, 33 bp, Homo sapien
ctgccctttccctctcacctgcatgacccctcc

SEQ ID NO: 243546 - DNA, 33 bp, Homo sapien
ctgccctttccctctcgcctgcatgacccctcc

SEQ ID NO: 243547 - DNA, 33 bp, Homo sapien
acacaaagaaagaaaacgccaaatgagtcagtg

SEQ ID NO: 243548 - DNA, 33 bp, Homo sapien
acacaaagaaagaaaatgccaaatgagtcagtg

SEQ ID NO: 243549 - DNA, 33 bp, Homo sapien
atggacaagttagaacacacatttgagagcaac

SEQ ID NO: 243550 - DNA, 33 bp, Homo sapien
atggacaagttagaacccacatttgagagcaac

SEQ ID NO: 243551 - DNA, 33 bp, Homo sapien
gtttgtgctaggatcccgagcagagagaagaag

SEQ ID NO: 243552 - DNA, 33 bp, Homo sapien
gtttgtgctaggatcctgagcagagagaagaag

SEQ ID NO: 243553 - DNA, 33 bp, Homo sapien
taaagtgtttcctttcacagaaataatagcctt

SEQ ID NO: 243554 - DNA, 33 bp, Homo sapien
taaagtgtttcctttcccagaaataatagcctt

SEQ ID NO: 243555 - DNA, 33 bp, Homo sapien
gtccctgtgttcctcaactctgcagcctctctc

SEQ ID NO: 243556 - DNA, 33 bp, Homo sapien
gtccctgtgttcctcacctctgcagcctctctc

SEQ ID NO: 243557 - DNA, 33 bp, Homo sapien
aagagaacaaaaggcaaagatatttgggaccac

SEQ ID NO: 243558 - DNA, 33 bp, Homo sapien
aagagaacaaaaggcagagatatttgggaccac

SEQ ID NO: 243559 - DNA, 33 bp, Homo sapien
ataagaaagaacttaccaatgagaagtggcatt

SEQ ID NO: 243560 - DNA, 33 bp, Homo sapien
ataagaaagaacttactaatgagaagtggcatt

SEQ ID NO: 243561 - DNA, 33 bp, Homo sapien
taaaacaaaatttgaaccagagactaaattctc

SEQ ID NO: 243562 - DNA, 33 bp, Homo sapien
taaaacaaaatttgaatcagagactaaattctc

SEQ ID NO: 243563 - DNA, 33 bp, Homo sapien
ataaaaaatggcatgaaaaacatccacatagaa

SEQ ID NO: 243564 - DNA, 33 bp, Homo sapien
ataaaaaatggcatgagaaacatccacatagaa

SEQ ID NO: 243565 - DNA, 33 bp, Homo sapien
ccgcttgccttagaaccatgcctagtacaaaac

SEQ ID NO: 243566 - DNA, 33 bp, Homo sapien
ccgcttgccttagaactatgcctagtacaaaac

SEQ ID NO: 243567 - DNA, 33 bp, Homo sapien
ctctgtgccaaaagcccgaaattatggtctaat

SEQ ID NO: 243568 - DNA, 33 bp, Homo sapien
ctctgtgccaaaagcctgaaattatggtctaat

SEQ ID NO: 243569 - DNA, 33 bp, Homo sapien
gctgtgcacagtctcaaacaggggtctcgtacc

SEQ ID NO: 243570 - DNA, 33 bp, Homo sapien
gctgtgcacagtctcatacaggggtctcgtacc

SEQ ID NO: 243571 - DNA, 33 bp, Homo sapien
aggctaaactctccaaacaggaagtagttgaaa

SEQ ID NO: 243572 - DNA, 33 bp, Homo sapien
aggctaaactctccaaccaggaagtagttgaaa

SEQ ID NO: 243573 - DNA, 33 bp, Homo sapien
cagcctgtgggccctacgtgcagttctgtcaca

SEQ ID NO: 243574 - DNA, 33 bp, Homo sapien
cagcctgtgggccctatgtgcagttctgtcaca

SEQ ID NO: 243575 - DNA, 33 bp, Homo sapien
gaggccgaggtatgtgaatcacttggagtttga

SEQ ID NO: 243576 - DNA, 33 bp, Homo sapien
gaggccgaggtatgtgcatcacttggagtttga

SEQ ID NO: 243577 - DNA, 33 bp, Homo sapien
ttgaaaagataaccaacattgctggcagagcag

SEQ ID NO: 243578 - DNA, 33 bp, Homo sapien
ttgaaaagataaccaatattgctggcagagcag

SEQ ID NO: 243579 - DNA, 33 bp, Homo sapien
ttatcttttcaaggccaaacttcccctaaacaa

SEQ ID NO: 243580 - DNA, 33 bp, Homo sapien
ttatcttttcaaggccgaacttcccctaaacaa

SEQ ID NO: 243581 - DNA, 33 bp, Homo sapien
ccctgatgtaattctcaatggcattgttgtttg

SEQ ID NO: 243582 - DNA, 33 bp, Homo sapien
ccctgatgtaattctcgatggcattgttgtttg

SEQ ID NO: 243583 - DNA, 33 bp, Homo sapien
ggacatgatgagtggacagggataatttaggag

SEQ ID NO: 243584 - DNA, 33 bp, Homo sapien
ggacatgatgagtggatagggataatttaggag

SEQ ID NO: 243585 - DNA, 33 bp, Homo sapien
gaaaagacaaggtagaagatttccagttccatc

SEQ ID NO: 243586 - DNA, 33 bp, Homo sapien
gaaaagacaaggtagatgatttccagttccatc

SEQ ID NO: 243587 - DNA, 33 bp, Homo sapien
cccaattgtggtcaaggctgtgaacagttggtt

SEQ ID NO: 243588 - DNA, 33 bp, Homo sapien
cccaattgtggtcaagtctgtgaacagttggtt

SEQ ID NO: 243589 - DNA, 33 bp, Homo sapien
ggccttgtaggaagaacaagcaccccaagaagt

SEQ ID NO: 243590 - DNA, 33 bp, Homo sapien
ggccttgtaggaagaataagcaccccaagaagt

SEQ ID NO: 243591 - DNA, 33 bp, Homo sapien
tcagcccagtgttgacagtactcctgacatttt

SEQ ID NO: 243592 - DNA, 33 bp, Homo sapien
tcagcccagtgttgacggtactcctgacatttt

SEQ ID NO: 243593 - DNA, 33 bp, Homo sapien
aggaagaagtacttacagagaagcctcagtaaa

SEQ ID NO: 243594 - DNA, 33 bp, Homo sapien
aggaagaagtacttacggagaagcctcagtaaa

SEQ ID NO: 243595 - DNA, 33 bp, Homo sapien
ggttgttgttacaggaaggggtgagagggagtg

SEQ ID NO: 243596 - DNA, 33 bp, Homo sapien
ggttgttgttacaggagggggtgagagggagtg

SEQ ID NO: 243597 - DNA, 33 bp, Homo sapien
ggggaactgtaagcccaataaacctttcttttg

SEQ ID NO: 243598 - DNA, 33 bp, Homo sapien
ggggaactgtaagcccgataaacctttcttttg

SEQ ID NO: 243599 - DNA, 33 bp, Homo sapien
ctctagagagagggaaattaaatgtactgcaaa

SEQ ID NO: 243600 - DNA, 33 bp, Homo sapien
ctctagagagagggaagttaaatgtactgcaaa

SEQ ID NO: 243601 - DNA, 33 bp, Homo sapien
ggtaaccattatcagagagaaggcaggtggtac

SEQ ID NO: 243602 - DNA, 33 bp, Homo sapien
ggtaaccattatcagatagaaggcaggtggtac

SEQ ID NO: 243603 - DNA, 33 bp, Homo sapien
tcacccttgaaccatcaagagtcccagtaagcc

SEQ ID NO: 243604 - DNA, 33 bp, Homo sapien
tcacccttgaaccatccagagtcccagtaagcc

SEQ ID NO: 243605 - DNA, 33 bp, Homo sapien
atcccagtcagccaaaataggagatgaaaccag

SEQ ID NO: 243606 - DNA, 33 bp, Homo sapien
atcccagtcagccaaagtaggagatgaaaccag

SEQ ID NO: 243607 - DNA, 33 bp, Homo sapien
tttgaggcatttgttacgtgcacctgttgatgt

SEQ ID NO: 243608 - DNA, 33 bp, Homo sapien
tttgaggcatttgttatgtgcacctgttgatgt

SEQ ID NO: 243609 - DNA, 33 bp, Homo sapien
gggggtttgtgcactgcatttgaggatatctgg

SEQ ID NO: 243610 - DNA, 33 bp, Homo sapien
gggggtttgtgcactggatttgaggatatctgg

SEQ ID NO: 243611 - DNA, 33 bp, Homo sapien
taaggatcgagctatgacaatgattataaatga

SEQ ID NO: 243612 - DNA, 33 bp, Homo sapien
taaggatcgagctatggcaatgattataaatga

SEQ ID NO: 243613 - DNA, 33 bp, Homo sapien
actgcacaagctttcacatatggcaggaaggaa

SEQ ID NO: 243614 - DNA, 33 bp, Homo sapien
actgcacaagctttcagatatggcaggaaggaa

SEQ ID NO: 243615 - DNA, 33 bp, Homo sapien
aggggctttaaaatcacacgtactaggcattca

SEQ ID NO: 243616 - DNA, 33 bp, Homo sapien
aggggctttaaaatcatacgtactaggcattca

SEQ ID NO: 243617 - DNA, 33 bp, Homo sapien
acatgctgacattggcaaggtggtgctcgatgt

SEQ ID NO: 243618 - DNA, 33 bp, Homo sapien
acatgctgacattggcgaggtggtgctcgatgt

SEQ ID NO: 243619 - DNA, 33 bp, Homo sapien
ctgctggagagttccacagcatagtggttaagc

SEQ ID NO: 243620 - DNA, 33 bp, Homo sapien
ctgctggagagttccatagcatagtggttaagc

SEQ ID NO: 243621 - DNA, 33 bp, Homo sapien
agtttctctaaatctgcagttcttgacccagag

SEQ ID NO: 243622 - DNA, 33 bp, Homo sapien
agtttctctaaatctgtagttcttgacccagag

SEQ ID NO: 243623 - DNA, 33 bp, Homo sapien
acactgattaaaaaaaatcgtgtgaggataggc

SEQ ID NO: 243624 - DNA, 33 bp, Homo sapien
acactgattaaaaaaagtcgtgtgaggataggc

SEQ ID NO: 243625 - DNA, 33 bp, Homo sapien
ttcctggagttgtgaacgagcttataagacact

SEQ ID NO: 243626 - DNA, 33 bp, Homo sapien
ttcctggagttgtgaatgagcttataagacact

SEQ ID NO: 243627 - DNA, 33 bp, Homo sapien
cctaccctttcttgaacgcactagcagtgtcaa

SEQ ID NO: 243628 - DNA, 33 bp, Homo sapien
cctaccctttcttgaatgcactagcagtgtcaa

SEQ ID NO: 243629 - DNA, 33 bp, Homo sapien
attggtacaagggaaacgaatctgttttcagcc

SEQ ID NO: 243630 - DNA, 33 bp, Homo sapien
attggtacaagggaaatgaatctgttttcagcc

SEQ ID NO: 243631 - DNA, 33 bp, Homo sapien
tggcggtaacggggccaaacacagtcattccca

SEQ ID NO: 243632 - DNA, 33 bp, Homo sapien
tggcggtaacggggccgaacacagtcattccca

SEQ ID NO: 243633 - DNA, 33 bp, Homo sapien
aggtcaagcttgaaaccgttcttgactcctcca

SEQ ID NO: 243634 - DNA, 33 bp, Homo sapien
aggtcaagcttgaaacggttcttgactcctcca

SEQ ID NO: 243635 - DNA, 33 bp, Homo sapien
ctagctcctgtcttaaccattgggagaattatt

SEQ ID NO: 243636 - DNA, 33 bp, Homo sapien
ctagctcctgtcttaatcattgggagaattatt

SEQ ID NO: 243637 - DNA, 33 bp, Homo sapien
gtggagcctcctgagaacattccgtattcctct

SEQ ID NO: 243638 - DNA, 33 bp, Homo sapien
gtggagcctcctgagagcattccgtattcctct

SEQ ID NO: 243639 - DNA, 33 bp, Homo sapien
ctggatttgggctctgaaccctcaatgaattct

SEQ ID NO: 243640 - DNA, 33 bp, Homo sapien
ctggatttgggctctgtaccctcaatgaattct

SEQ ID NO: 243641 - DNA, 33 bp, Homo sapien
tggacagtatgtgaataaatggttgtagctgtg

SEQ ID NO: 243642 - DNA, 33 bp, Homo sapien
tggacagtatgtgaatgaatggttgtagctgtg

SEQ ID NO: 243643 - DNA, 33 bp, Homo sapien
cctgattctgccaaccaagaactgtgattctag

SEQ ID NO: 243644 - DNA, 33 bp, Homo sapien
cctgattctgccaaccgagaactgtgattctag

SEQ ID NO: 243645 - DNA, 33 bp, Homo sapien
tgatcacaaagatcacaaaaagtcaacgtcagt

SEQ ID NO: 243646 - DNA, 33 bp, Homo sapien
tgatcacaaagatcacgaaaagtcaacgtcagt

SEQ ID NO: 243647 - DNA, 33 bp, Homo sapien
aaaatagataatgtcaactgtccaacatcaggg

SEQ ID NO: 243648 - DNA, 33 bp, Homo sapien
aaaatagataatgtcagctgtccaacatcaggg

SEQ ID NO: 243649 - DNA, 33 bp, Homo sapien
ttttctgcctggtcaaataaatccgggaaatct

SEQ ID NO: 243650 - DNA, 33 bp, Homo sapien
ttttctgcctggtcaagtaaatccgggaaatct

SEQ ID NO: 243651 - DNA, 33 bp, Homo sapien
cctacagtagctgatacgatgccctcaccattt

SEQ ID NO: 243652 - DNA, 33 bp, Homo sapien
cctacagtagctgatatgatgccctcaccattt

SEQ ID NO: 243653 - DNA, 33 bp, Homo sapien
aactcccagacaccgagaaaggtttttatgata

SEQ ID NO: 243654 - DNA, 33 bp, Homo sapien
aactcccagacaccgataaaggtttttatgata

SEQ ID NO: 243655 - DNA, 33 bp, Homo sapien
agacactggaagaaaccagccctggcctggagc

SEQ ID NO: 243656 - DNA, 33 bp, Homo sapien
agacactggaagaaactagccctggcctggagc

SEQ ID NO: 243657 - DNA, 33 bp, Homo sapien
tttgtccggtggaacacgggtacatctggtgca

SEQ ID NO: 243658 - DNA, 33 bp, Homo sapien
tttgtccggtggaacatgggtacatctggtgca

SEQ ID NO: 243659 - DNA, 33 bp, Homo sapien
gtccctagaccccaacagcaaattctataacac

SEQ ID NO: 243660 - DNA, 33 bp, Homo sapien
gtccctagaccccaacggcaaattctataacac

SEQ ID NO: 243661 - DNA, 33 bp, Homo sapien
agacaaatagcttacaagttcctccttctctct

SEQ ID NO: 243662 - DNA, 33 bp, Homo sapien
agacaaatagcttacaggttcctccttctctct

SEQ ID NO: 243663 - DNA, 33 bp, Homo sapien
acgctgccaaaacttaaatttacttataaatat

SEQ ID NO: 243664 - DNA, 33 bp, Homo sapien
acgctgccaaaacttacatttacttataaatat

SEQ ID NO: 243665 - DNA, 33 bp, Homo sapien
tccagctgaggtaactgaagcaaagaaaggtca

SEQ ID NO: 243666 - DNA, 33 bp, Homo sapien
tccagctgaggtaacttaagcaaagaaaggtca

SEQ ID NO: 243667 - DNA, 33 bp, Homo sapien
catgtacctgttcaagcacaccaaagtaggaag

SEQ ID NO: 243668 - DNA, 33 bp, Homo sapien
catgtacctgttcaaggacaccaaagtaggaag

SEQ ID NO: 243669 - DNA, 33 bp, Homo sapien
gtctttgcctgcccggaatcctgtctctcttca

SEQ ID NO: 243670 - DNA, 33 bp, Homo sapien
gtctttgcctgcccggcatcctgtctctcttca

SEQ ID NO: 243671 - DNA, 33 bp, Homo sapien
cacactagacactttccatgactttctttatct

SEQ ID NO: 243672 - DNA, 33 bp, Homo sapien
cacactagacactttctatgactttctttatct

SEQ ID NO: 243673 - DNA, 33 bp, Homo sapien
ggaaatgggccaatcacgaggatgtttttgact

SEQ ID NO: 243674 - DNA, 33 bp, Homo sapien
ggaaatgggccaatcatgaggatgtttttgact

SEQ ID NO: 243675 - DNA, 33 bp, Homo sapien
ctagctgtatctgagacctgtaattacccagga

SEQ ID NO: 243676 - DNA, 33 bp, Homo sapien
ctagctgtatctgagagctgtaattacccagga

SEQ ID NO: 243677 - DNA, 33 bp, Homo sapien
aatccacacaaaacacgatgctagagtaaaatg

SEQ ID NO: 243678 - DNA, 33 bp, Homo sapien
aatccacacaaaacactatgctagagtaaaatg

SEQ ID NO: 243679 - DNA, 33 bp, Homo sapien
gaaaatatgctgaatcgaatggttaggatccaa

SEQ ID NO: 243680 - DNA, 33 bp, Homo sapien
gaaaatatgctgaatctaatggttaggatccaa

SEQ ID NO: 243681 - DNA, 33 bp, Homo sapien
acatgcacctgtctgaaatggagagctgagctg

SEQ ID NO: 243682 - DNA, 33 bp, Homo sapien
acatgcacctgtctgagatggagagctgagctg

SEQ ID NO: 243683 - DNA, 33 bp, Homo sapien
aaatggcatctggattcaacaagttgctcataa

SEQ ID NO: 243684 - DNA, 33 bp, Homo sapien
aaatggcatctggatttaacaagttgctcataa

SEQ ID NO: 243685 - DNA, 33 bp, Homo sapien
aaattcaaaatgctccaatgagtgattggacta

SEQ ID NO: 243686 - DNA, 33 bp, Homo sapien
aaattcaaaatgctcctatgagtgattggacta

SEQ ID NO: 243687 - DNA, 33 bp, Homo sapien
cagccaaagtgaaccaataagtccaatcaggtc

SEQ ID NO: 243688 - DNA, 33 bp, Homo sapien
cagccaaagtgaaccagtaagtccaatcaggtc

SEQ ID NO: 243689 - DNA, 33 bp, Homo sapien
ctccactacaggtgaaatcaaggtcctatatcc

SEQ ID NO: 243690 - DNA, 33 bp, Homo sapien
ctccactacaggtgaactcaaggtcctatatcc

SEQ ID NO: 243691 - DNA, 33 bp, Homo sapien
tggcagatgttgagacaaaacaaaatgcccaag

SEQ ID NO: 243692 - DNA, 33 bp, Homo sapien
tggcagatgttgagacgaaacaaaatgcccaag

SEQ ID NO: 243693 - DNA, 33 bp, Homo sapien
attttgcatcgtctccaaggagaagcaatccat

SEQ ID NO: 243694 - DNA, 33 bp, Homo sapien
attttgcatcgtctccgaggagaagcaatccat

SEQ ID NO: 243695 - DNA, 33 bp, Homo sapien
ttactcatctgactaactaataatgcacatgac

SEQ ID NO: 243696 - DNA, 33 bp, Homo sapien
ttactcatctgactaattaataatgcacatgac

SEQ ID NO: 243697 - DNA, 33 bp, Homo sapien
tgaatgaatagaaaaaagaagggactgacagtt

SEQ ID NO: 243698 - DNA, 33 bp, Homo sapien
tgaatgaatagaaaaatgaagggactgacagtt

SEQ ID NO: 243699 - DNA, 33 bp, Homo sapien
gagttactcaaattaaagaccaatcctttaaag

SEQ ID NO: 243700 - DNA, 33 bp, Homo sapien
gagttactcaaattaaggaccaatcctttaaag

SEQ ID NO: 243701 - DNA, 33 bp, Homo sapien
tcactctagtttgtcaatatccctttgaaagtg

SEQ ID NO: 243702 - DNA, 33 bp, Homo sapien
tcactctagtttgtcagtatccctttgaaagtg

SEQ ID NO: 243703 - DNA, 33 bp, Homo sapien
atcatcactgcaactcacctttgatttgatcat

SEQ ID NO: 243704 - DNA, 33 bp, Homo sapien
atcatcactgcaactcgcctttgatttgatcat

SEQ ID NO: 243705 - DNA, 33 bp, Homo sapien
atcgcaatggaggaaaccaaggtcagagaggaa

SEQ ID NO: 243706 - DNA, 33 bp, Homo sapien
atcgcaatggaggaaatcaaggtcagagaggaa

SEQ ID NO: 243707 - DNA, 33 bp, Homo sapien
aagacctgtgcaccgaaccgttagcgtgggcag

SEQ ID NO: 243708 - DNA, 33 bp, Homo sapien
aagacctgtgcaccgagccgttagcgtgggcag

SEQ ID NO: 243709 - DNA, 33 bp, Homo sapien
cattgttttccatagacaaaagtacaattgggt

SEQ ID NO: 243710 - DNA, 33 bp, Homo sapien
cattgttttccatagataaaagtacaattgggt

SEQ ID NO: 243711 - DNA, 33 bp, Homo sapien
cttctcagcctacctacagtgacagagccccat

SEQ ID NO: 243712 - DNA, 33 bp, Homo sapien
cttctcagcctacctatagtgacagagccccat

SEQ ID NO: 243713 - DNA, 33 bp, Homo sapien
gtctttaagtactttacaccttgtaatgcatat

SEQ ID NO: 243714 - DNA, 33 bp, Homo sapien
gtctttaagtactttataccttgtaatgcatat

SEQ ID NO: 243715 - DNA, 33 bp, Homo sapien
caaccttcgaaacaacagagtagccagccatct

SEQ ID NO: 243716 - DNA, 33 bp, Homo sapien
caaccttcgaaacaacggagtagccagccatct

SEQ ID NO: 243717 - DNA, 33 bp, Homo sapien
ccaaatcacaagacaccgagtactgcccggcca

SEQ ID NO: 243718 - DNA, 33 bp, Homo sapien
ccaaatcacaagacactgagtactgcccggcca

SEQ ID NO: 243719 - DNA, 33 bp, Homo sapien
aacagtgggtgctatacagtagtggtgagatgg

SEQ ID NO: 243720 - DNA, 33 bp, Homo sapien
aacagtgggtgctatatagtagtggtgagatgg

SEQ ID NO: 243721 - DNA, 33 bp, Homo sapien
ttaactccttgtgctacggaattcaggcttcat

SEQ ID NO: 243722 - DNA, 33 bp, Homo sapien
ttaactccttgtgctatggaattcaggcttcat

SEQ ID NO: 243723 - DNA, 33 bp, Homo sapien
tagaagtgagccaacccatgaaatgattgcaag

SEQ ID NO: 243724 - DNA, 33 bp, Homo sapien
tagaagtgagccaacctatgaaatgattgcaag

SEQ ID NO: 243725 - DNA, 33 bp, Homo sapien
gatgaagaggtgggaccgaggattccaccctga

SEQ ID NO: 243726 - DNA, 33 bp, Homo sapien
gatgaagaggtgggactgaggattccaccctga

SEQ ID NO: 243727 - DNA, 33 bp, Homo sapien
gattctattggttctaagatgcatactttctca

SEQ ID NO: 243728 - DNA, 33 bp, Homo sapien
gattctattggttctaggatgcatactttctca

SEQ ID NO: 243729 - DNA, 33 bp, Homo sapien
ttttgtccttcaagtaaatttccctttgggcct

SEQ ID NO: 243730 - DNA, 33 bp, Homo sapien
ttttgtccttcaagtacatttccctttgggcct

SEQ ID NO: 243731 - DNA, 33 bp, Homo sapien
gtaatagcaccgaaagaaaataaaatgggcata

SEQ ID NO: 243732 - DNA, 33 bp, Homo sapien
gtaatagcaccgaaagcaaataaaatgggcata

SEQ ID NO: 243733 - DNA, 33 bp, Homo sapien
ttggcttctttcattacagttttgtggttttct

SEQ ID NO: 243734 - DNA, 33 bp, Homo sapien
ttggcttctttcattagagttttgtggttttct

SEQ ID NO: 243735 - DNA, 33 bp, Homo sapien
tatgttcaattcctaaactccttatttaacctt

SEQ ID NO: 243736 - DNA, 33 bp, Homo sapien
tatgttcaattcctaacctccttatttaacctt

SEQ ID NO: 243737 - DNA, 33 bp, Homo sapien
tctacccagtcattcaagtcagagccgtgggag

SEQ ID NO: 243738 - DNA, 33 bp, Homo sapien
tctacccagtcattcacgtcagagccgtgggag

SEQ ID NO: 243739 - DNA, 33 bp, Homo sapien
ttggcccgagaaaagacgttcaaagtggtggtg

SEQ ID NO: 243740 - DNA, 33 bp, Homo sapien
ttggcccgagaaaagatgttcaaagtggtggtg

SEQ ID NO: 243741 - DNA, 33 bp, Homo sapien
ccttttgtaataaagaagtctgggcaaatgctg

SEQ ID NO: 243742 - DNA, 33 bp, Homo sapien
ccttttgtaataaagaggtctgggcaaatgctg

SEQ ID NO: 243743 - DNA, 33 bp, Homo sapien
ggaggcccagacagctaaccagaccactgtaat

SEQ ID NO: 243744 - DNA, 33 bp, Homo sapien
ggaggcccagacagctgaccagaccactgtaat

SEQ ID NO: 243745 - DNA, 33 bp, Homo sapien
aggtttaattacagcaagaatctcatatcatag

SEQ ID NO: 243746 - DNA, 33 bp, Homo sapien
aggtttaattacagcaggaatctcatatcatag

SEQ ID NO: 243747 - DNA, 33 bp, Homo sapien
aatcactcctgtctgaaaaagcagtccatgttc

SEQ ID NO: 243748 - DNA, 33 bp, Homo sapien
aatcactcctgtctgagaaagcagtccatgttc

SEQ ID NO: 243749 - DNA, 33 bp, Homo sapien
atcagtattaacaagacgtaatggcctataggc

SEQ ID NO: 243750 - DNA, 33 bp, Homo sapien
atcagtattaacaagatgtaatggcctataggc

SEQ ID NO: 243751 - DNA, 33 bp, Homo sapien
gcaagtgaacagaggaccatacataaatctaag

SEQ ID NO: 243752 - DNA, 33 bp, Homo sapien
gcaagtgaacagaggatcatacataaatctaag

SEQ ID NO: 243753 - DNA, 33 bp, Homo sapien
gagctctggttacacactggaaagcttgctgat

SEQ ID NO: 243754 - DNA, 33 bp, Homo sapien
gagctctggttacacagtggaaagcttgctgat

SEQ ID NO: 243755 - DNA, 33 bp, Homo sapien
tgctgatgattacaccaagcatttctgcctagc

SEQ ID NO: 243756 - DNA, 33 bp, Homo sapien
tgctgatgattacaccgagcatttctgcctagc

SEQ ID NO: 243757 - DNA, 33 bp, Homo sapien
gaattggttctcaaacactggattgaagactac

SEQ ID NO: 243758 - DNA, 33 bp, Homo sapien
gaattggttctcaaacgctggattgaagactac

SEQ ID NO: 243759 - DNA, 33 bp, Homo sapien
attgtggttgattctacattctttcaattcatt

SEQ ID NO: 243760 - DNA, 33 bp, Homo sapien
attgtggttgattctatattctttcaattcatt

SEQ ID NO: 243761 - DNA, 33 bp, Homo sapien
ctggttttttcctcaacgcctgtgtgctctgtt

SEQ ID NO: 243762 - DNA, 33 bp, Homo sapien
ctggttttttcctcaatgcctgtgtgctctgtt

SEQ ID NO: 243763 - DNA, 33 bp, Homo sapien
ttgattgtgcaaatgcaaactctaaaaagagga

SEQ ID NO: 243764 - DNA, 33 bp, Homo sapien
ttgattgtgcaaatgcgaactctaaaaagagga

SEQ ID NO: 243765 - DNA, 33 bp, Homo sapien
cctcaggccattcttccagaaagccatcccttc

SEQ ID NO: 243766 - DNA, 33 bp, Homo sapien
cctcaggccattcttctagaaagccatcccttc

SEQ ID NO: 243767 - DNA, 33 bp, Homo sapien
ttacacatacaaaatcacattcatgagttgtca

SEQ ID NO: 243768 - DNA, 33 bp, Homo sapien
ttacacatacaaaatcgcattcatgagttgtca

SEQ ID NO: 243769 - DNA, 33 bp, Homo sapien
tacaaagagttggatacgaagagaagccctgtg

SEQ ID NO: 243770 - DNA, 33 bp, Homo sapien
tacaaagagttggatatgaagagaagccctgtg

SEQ ID NO: 243771 - DNA, 33 bp, Homo sapien
aaaaataaaagcaagacggaatttgcagtaaaa

SEQ ID NO: 243772 - DNA, 33 bp, Homo sapien
aaaaataaaagcaagatggaatttgcagtaaaa

SEQ ID NO: 243773 - DNA, 33 bp, Homo sapien
atgctcatcccttcaaacaagagagacccccta

SEQ ID NO: 243774 - DNA, 33 bp, Homo sapien
atgctcatcccttcaagcaagagagacccccta

SEQ ID NO: 243775 - DNA, 33 bp, Homo sapien
catagaatcctacttacgattccaagttatttc

SEQ ID NO: 243776 - DNA, 33 bp, Homo sapien
catagaatcctacttatgattccaagttatttc

SEQ ID NO: 243777 - DNA, 33 bp, Homo sapien
tcagcttcaagtttcaagatcttagacagaatc

SEQ ID NO: 243778 - DNA, 33 bp, Homo sapien
tcagcttcaagtttcaggatcttagacagaatc

SEQ ID NO: 243779 - DNA, 33 bp, Homo sapien
atcttcaaggacctcaaaattacttctatgggt

SEQ ID NO: 243780 - DNA, 33 bp, Homo sapien
atcttcaaggacctcagaattacttctatgggt

SEQ ID NO: 243781 - DNA, 33 bp, Homo sapien
tgtaggatgcttgtcaatatcgctgatgccagt

SEQ ID NO: 243782 - DNA, 33 bp, Homo sapien
tgtaggatgcttgtcagtatcgctgatgccagt

SEQ ID NO: 243783 - DNA, 33 bp, Homo sapien
cagtattcttgtcttcactcccaacgtctgaag

SEQ ID NO: 243784 - DNA, 33 bp, Homo sapien
cagtattcttgtcttcgctcccaacgtctgaag

SEQ ID NO: 243785 - DNA, 33 bp, Homo sapien
gaaacacaagtgcagacaggataaacaggacat

SEQ ID NO: 243786 - DNA, 33 bp, Homo sapien
gaaacacaagtgcagagaggataaacaggacat

SEQ ID NO: 243787 - DNA, 33 bp, Homo sapien
cagctaactgactttggatgtcctgtttatcct

SEQ ID NO: 243788 - DNA, 33 bp, Homo sapien
cagctaactgactttgtatgtcctgtttatcct

SEQ ID NO: 243789 - DNA, 33 bp, Homo sapien
ttggtgggtgggaaacacctatgcaataagcag

SEQ ID NO: 243790 - DNA, 33 bp, Homo sapien
ttggtgggtgggaaactcctatgcaataagcag

SEQ ID NO: 243791 - DNA, 33 bp, Homo sapien
caatttcaagcagaacagccctccccgcagaac

SEQ ID NO: 243792 - DNA, 33 bp, Homo sapien
caatttcaagcagaacggccctccccgcagaac

SEQ ID NO: 243793 - DNA, 33 bp, Homo sapien
tgagtggcataagaatcagcaaacactttaagg

SEQ ID NO: 243794 - DNA, 33 bp, Homo sapien
tgagtggcataagaattagcaaacactttaagg

SEQ ID NO: 243795 - DNA, 33 bp, Homo sapien
atacataagaagtgaccgtaactcacaaggttc

SEQ ID NO: 243796 - DNA, 33 bp, Homo sapien
atacataagaagtgacggtaactcacaaggttc

SEQ ID NO: 243797 - DNA, 33 bp, Homo sapien
taaaaggcaattaaacacatgaacacagagccc

SEQ ID NO: 243798 - DNA, 33 bp, Homo sapien
taaaaggcaattaaacgcatgaacacagagccc

SEQ ID NO: 243799 - DNA, 33 bp, Homo sapien
ttacaagaagggatcaataaaagaagaagaaaa

SEQ ID NO: 243800 - DNA, 33 bp, Homo sapien
ttacaagaagggatcagtaaaagaagaagaaaa

SEQ ID NO: 243801 - DNA, 33 bp, Homo sapien
gctgttcctagcaggaaagcatcatactccttc

SEQ ID NO: 243802 - DNA, 33 bp, Homo sapien
gctgttcctagcaggagagcatcatactccttc

SEQ ID NO: 243803 - DNA, 33 bp, Homo sapien
atactcatatttgtaaagagtcttatggaggta

SEQ ID NO: 243804 - DNA, 33 bp, Homo sapien
atactcatatttgtaatgagtcttatggaggta

SEQ ID NO: 243805 - DNA, 33 bp, Homo sapien
ctcggagccaaatcccacgcgtactggccgtca

SEQ ID NO: 243806 - DNA, 33 bp, Homo sapien
ctcggagccaaatcccgcgcgtactggccgtca

SEQ ID NO: 243807 - DNA, 33 bp, Homo sapien
tgttgaggtaaacaaactaagtttaatgctcga

SEQ ID NO: 243808 - DNA, 33 bp, Homo sapien
tgttgaggtaaacaaattaagtttaatgctcga

SEQ ID NO: 243809 - DNA, 33 bp, Homo sapien
aaaataaagaggaaaaataatctgaacttttat

SEQ ID NO: 243810 - DNA, 33 bp, Homo sapien
aaaataaagaggaaaactaatctgaacttttat

SEQ ID NO: 243811 - DNA, 33 bp, Homo sapien
acatgggagagtggtaagtagattgccttcctg

SEQ ID NO: 243812 - DNA, 33 bp, Homo sapien
acatgggagagtggtaggtagattgccttcctg

SEQ ID NO: 243813 - DNA, 33 bp, Homo sapien
ctttcctctccaaatactaaagcaaacttttcc

SEQ ID NO: 243814 - DNA, 33 bp, Homo sapien
ctttcctctccaaatagtaaagcaaacttttcc

SEQ ID NO: 243815 - DNA, 33 bp, Homo sapien
ttcagtcactaaagagaaacatgaaatggatat

SEQ ID NO: 243816 - DNA, 33 bp, Homo sapien
ttcagtcactaaagaggaacatgaaatggatat

SEQ ID NO: 243817 - DNA, 33 bp, Homo sapien
ttgctgcgtcataaaacggcagaaggaatcaca

SEQ ID NO: 243818 - DNA, 33 bp, Homo sapien
ttgctgcgtcataaaatggcagaaggaatcaca

SEQ ID NO: 243819 - DNA, 33 bp, Homo sapien
actttctaagctctcacggtgaaactaccttgc

SEQ ID NO: 243820 - DNA, 33 bp, Homo sapien
actttctaagctctcatggtgaaactaccttgc

SEQ ID NO: 243821 - DNA, 33 bp, Homo sapien
ctctgatctttatcggaatgaagcctccacatt

SEQ ID NO: 243822 - DNA, 33 bp, Homo sapien
ctctgatctttatcgggatgaagcctccacatt

SEQ ID NO: 243823 - DNA, 33 bp, Homo sapien
caggctgagggagctacacaggctgggtacaga

SEQ ID NO: 243824 - DNA, 33 bp, Homo sapien
caggctgagggagctatacaggctgggtacaga

SEQ ID NO: 243825 - DNA, 33 bp, Homo sapien
ctgtaatgtgcagtacagccacccacaacaaaa

SEQ ID NO: 243826 - DNA, 33 bp, Homo sapien
ctgtaatgtgcagtacggccacccacaacaaaa

SEQ ID NO: 243827 - DNA, 33 bp, Homo sapien
atgatttctgaataaacctacttttaaaattgt

SEQ ID NO: 243828 - DNA, 33 bp, Homo sapien
atgatttctgaataaagctacttttaaaattgt

SEQ ID NO: 243829 - DNA, 33 bp, Homo sapien
tagatcaataaggttacggcattttatgatctt

SEQ ID NO: 243830 - DNA, 33 bp, Homo sapien
tagatcaataaggttatggcattttatgatctt

SEQ ID NO: 243831 - DNA, 33 bp, Homo sapien
tggttcatatcttagcaccatgccttaccaact

SEQ ID NO: 243832 - DNA, 33 bp, Homo sapien
tggttcatatcttagctccatgccttaccaact

SEQ ID NO: 243833 - DNA, 33 bp, Homo sapien
ccacctgaagtcccacaagtctgtttatgtcct

SEQ ID NO: 243834 - DNA, 33 bp, Homo sapien
ccacctgaagtcccacgagtctgtttatgtcct

SEQ ID NO: 243835 - DNA, 33 bp, Homo sapien
acaatcagagtgtcaactggattgtctcagtaa

SEQ ID NO: 243836 - DNA, 33 bp, Homo sapien
acaatcagagtgtcaattggattgtctcagtaa

SEQ ID NO: 243837 - DNA, 33 bp, Homo sapien
attttgagattatttcaaccaagaacctcatta

SEQ ID NO: 243838 - DNA, 33 bp, Homo sapien
attttgagattatttctaccaagaacctcatta

SEQ ID NO: 243839 - DNA, 33 bp, Homo sapien
acaaagcatttggaccacatgaatggatccatt

SEQ ID NO: 243840 - DNA, 33 bp, Homo sapien
acaaagcatttggaccgcatgaatggatccatt

SEQ ID NO: 243841 - DNA, 33 bp, Homo sapien
tgcacaaccatcaccaagatccaattttagaaa

SEQ ID NO: 243842 - DNA, 33 bp, Homo sapien
tgcacaaccatcaccacgatccaattttagaaa

SEQ ID NO: 243843 - DNA, 33 bp, Homo sapien
tgtgcccaagaatgacacaggtgagcagacatg

SEQ ID NO: 243844 - DNA, 33 bp, Homo sapien
tgtgcccaagaatgacgcaggtgagcagacatg

SEQ ID NO: 243845 - DNA, 33 bp, Homo sapien
gggttgaattaactgaaaagcagctgtgtcata

SEQ ID NO: 243846 - DNA, 33 bp, Homo sapien
gggttgaattaactgagaagcagctgtgtcata

SEQ ID NO: 243847 - DNA, 33 bp, Homo sapien
gagccatgtgtattcacgcggataagaactgta

SEQ ID NO: 243848 - DNA, 33 bp, Homo sapien
gagccatgtgtattcatgcggataagaactgta

SEQ ID NO: 243849 - DNA, 33 bp, Homo sapien
cttgcatagcttaaaacgaagtgctctgttaaa

SEQ ID NO: 243850 - DNA, 33 bp, Homo sapien
cttgcatagcttaaaatgaagtgctctgttaaa

SEQ ID NO: 243851 - DNA, 33 bp, Homo sapien
tataaactttcagttaccagatgagcaaattct

SEQ ID NO: 243852 - DNA, 33 bp, Homo sapien
tataaactttcagttatcagatgagcaaattct

SEQ ID NO: 243853 - DNA, 33 bp, Homo sapien
aagttatatactcagtaaaggcagacccagtta

SEQ ID NO: 243854 - DNA, 33 bp, Homo sapien
aagttatatactcagtcaaggcagacccagtta

SEQ ID NO: 243855 - DNA, 33 bp, Homo sapien
ggatttggtggatcaaagtcctggaggatcaag

SEQ ID NO: 243856 - DNA, 33 bp, Homo sapien
ggatttggtggatcaaggtcctggaggatcaag

SEQ ID NO: 243857 - DNA, 33 bp, Homo sapien
agctcatggtccaagacggctgctccagttcta

SEQ ID NO: 243858 - DNA, 33 bp, Homo sapien
agctcatggtccaagatggctgctccagttcta

SEQ ID NO: 243859 - DNA, 33 bp, Homo sapien
ttatggcaacatttaaaagcctcctatgttatg

SEQ ID NO: 243860 - DNA, 33 bp, Homo sapien
ttatggcaacatttaagagcctcctatgttatg

SEQ ID NO: 243861 - DNA, 33 bp, Homo sapien
ttggtatcaactgacagattcacaactttgaat

SEQ ID NO: 243862 - DNA, 33 bp, Homo sapien
ttggtatcaactgacatattcacaactttgaat

SEQ ID NO: 243863 - DNA, 33 bp, Homo sapien
actacaaaaatgaggaagtgccgagacagtgga

SEQ ID NO: 243864 - DNA, 33 bp, Homo sapien
actacaaaaatgaggacgtgccgagacagtgga

SEQ ID NO: 243865 - DNA, 33 bp, Homo sapien
gacctaacatctatcaatagtaaaaatacatca

SEQ ID NO: 243866 - DNA, 33 bp, Homo sapien
gacctaacatctatcagtagtaaaaatacatca

SEQ ID NO: 243867 - DNA, 33 bp, Homo sapien
ggactgcagtttgagaaagacagcgaaggagct

SEQ ID NO: 243868 - DNA, 33 bp, Homo sapien
ggactgcagtttgagagagacagcgaaggagct

SEQ ID NO: 243869 - DNA, 33 bp, Homo sapien
cttggaagggcttctaggagcagaagtggccta

SEQ ID NO: 243870 - DNA, 33 bp, Homo sapien
cttggaagggcttctatgagcagaagtggccta

SEQ ID NO: 243871 - DNA, 33 bp, Homo sapien
aggaagtggagagccaccacaacagtctttagg

SEQ ID NO: 243872 - DNA, 33 bp, Homo sapien
aggaagtggagagccagcacaacagtctttagg

SEQ ID NO: 243873 - DNA, 33 bp, Homo sapien
gagaattctactctatcgactatattgacaatt

SEQ ID NO: 243874 - DNA, 33 bp, Homo sapien
gagaattctactctattgactatattgacaatt

SEQ ID NO: 243875 - DNA, 33 bp, Homo sapien
gtgaatacagcacacaactgtctgcccagcatg

SEQ ID NO: 243876 - DNA, 33 bp, Homo sapien
gtgaatacagcacacacctgtctgcccagcatg

SEQ ID NO: 243877 - DNA, 33 bp, Homo sapien
tttccacttctatgtcactactgaaacatttta

SEQ ID NO: 243878 - DNA, 33 bp, Homo sapien
tttccacttctatgtcgctactgaaacatttta

SEQ ID NO: 243879 - DNA, 33 bp, Homo sapien
tcccttcctgagagcacaatttcaagtcaggtc

SEQ ID NO: 243880 - DNA, 33 bp, Homo sapien
tcccttcctgagagcataatttcaagtcaggtc

SEQ ID NO: 243881 - DNA, 33 bp, Homo sapien
gggtactaaagtcaacggcaaatccactttttt

SEQ ID NO: 243882 - DNA, 33 bp, Homo sapien
gggtactaaagtcaactgcaaatccactttttt

SEQ ID NO: 243883 - DNA, 33 bp, Homo sapien
gggacgggtgggaaaactattgtaaagatatag

SEQ ID NO: 243884 - DNA, 33 bp, Homo sapien
gggacgggtgggaaaattattgtaaagatatag

SEQ ID NO: 243885 - DNA, 33 bp, Homo sapien
tgagaaatcctacacactagtccctgtaaagaa

SEQ ID NO: 243886 - DNA, 33 bp, Homo sapien
tgagaaatcctacacattagtccctgtaaagaa

SEQ ID NO: 243887 - DNA, 33 bp, Homo sapien
agtgaggtgtttaggccagcgtcaaatcaccta

SEQ ID NO: 243888 - DNA, 33 bp, Homo sapien
agtgaggtgtttaggcgagcgtcaaatcaccta

SEQ ID NO: 243889 - DNA, 33 bp, Homo sapien
ttcactaaaatgttcagtcaatgtgaccaacaa

SEQ ID NO: 243890 - DNA, 33 bp, Homo sapien
ttcactaaaatgttcattcaatgtgaccaacaa

SEQ ID NO: 243891 - DNA, 33 bp, Homo sapien
atgataagagaaattacgccagaaatccatgta

SEQ ID NO: 243892 - DNA, 33 bp, Homo sapien
atgataagagaaattatgccagaaatccatgta

SEQ ID NO: 243893 - DNA, 33 bp, Homo sapien
agcacaagagctataaacaggatattgtagtcc

SEQ ID NO: 243894 - DNA, 33 bp, Homo sapien
agcacaagagctataaccaggatattgtagtcc

SEQ ID NO: 243895 - DNA, 33 bp, Homo sapien
aaacccagtggaacaaaacaggccacaggccta

SEQ ID NO: 243896 - DNA, 33 bp, Homo sapien
aaacccagtggaacaacacaggccacaggccta

SEQ ID NO: 243897 - DNA, 33 bp, Homo sapien
tagaactaccagtgaacatttaaagtatatgca

SEQ ID NO: 243898 - DNA, 33 bp, Homo sapien
tagaactaccagtgaatatttaaagtatatgca

SEQ ID NO: 243899 - DNA, 33 bp, Homo sapien
ttcaggcctatatagacggtcactctgtggtca

SEQ ID NO: 243900 - DNA, 33 bp, Homo sapien
ttcaggcctatatagatggtcactctgtggtca

SEQ ID NO: 243901 - DNA, 33 bp, Homo sapien
ccaacttttcattccaaaactacagcagggtta

SEQ ID NO: 243902 - DNA, 33 bp, Homo sapien
ccaacttttcattccagaactacagcagggtta

SEQ ID NO: 243903 - DNA, 33 bp, Homo sapien
tttgtcccaagcatagaaggaacaccgttctac

SEQ ID NO: 243904 - DNA, 33 bp, Homo sapien
tttgtcccaagcataggaggaacaccgttctac

SEQ ID NO: 243905 - DNA, 33 bp, Homo sapien
gtcatggaaggttctacgagatagtctcaggaa

SEQ ID NO: 243906 - DNA, 33 bp, Homo sapien
gtcatggaaggttctatgagatagtctcaggaa

SEQ ID NO: 243907 - DNA, 33 bp, Homo sapien
acagaattaattccaaaaaccacacaaagctgt

SEQ ID NO: 243908 - DNA, 33 bp, Homo sapien
acagaattaattccaacaaccacacaaagctgt

SEQ ID NO: 243909 - DNA, 33 bp, Homo sapien
taaataggtgcccaaaacaaatctgttgaatga

SEQ ID NO: 243910 - DNA, 33 bp, Homo sapien
taaataggtgcccaaagcaaatctgttgaatga

SEQ ID NO: 243911 - DNA, 33 bp, Homo sapien
aaatgatcttaaagaacgaggttgtgccttact

SEQ ID NO: 243912 - DNA, 33 bp, Homo sapien
aaatgatcttaaagaatgaggttgtgccttact

SEQ ID NO: 243913 - DNA, 33 bp, Homo sapien
atcacgggtggacaaaagtagtgggtaagacat

SEQ ID NO: 243914 - DNA, 33 bp, Homo sapien
atcacgggtggacaaaggtagtgggtaagacat

SEQ ID NO: 243915 - DNA, 33 bp, Homo sapien
gtaaacagctattagaacctaagatgaaagaag

SEQ ID NO: 243916 - DNA, 33 bp, Homo sapien
gtaaacagctattagatcctaagatgaaagaag

SEQ ID NO: 243917 - DNA, 33 bp, Homo sapien
aatagttataagagcccgcaatgaaatcacgta

SEQ ID NO: 243918 - DNA, 33 bp, Homo sapien
aatagttataagagcctgcaatgaaatcacgta

SEQ ID NO: 243919 - DNA, 33 bp, Homo sapien
cagaaactccattaagaaggctaaactctcagt

SEQ ID NO: 243920 - DNA, 33 bp, Homo sapien
cagaaactccattaagcaggctaaactctcagt

SEQ ID NO: 243921 - DNA, 33 bp, Homo sapien
atgaggttcttcaccaataatagagtagaggtt

SEQ ID NO: 243922 - DNA, 33 bp, Homo sapien
atgaggttcttcaccagtaatagagtagaggtt

SEQ ID NO: 243923 - DNA, 33 bp, Homo sapien
tcactgaatggagttcaagtcaatcactatagt

SEQ ID NO: 243924 - DNA, 33 bp, Homo sapien
tcactgaatggagttcgagtcaatcactatagt

SEQ ID NO: 243925 - DNA, 33 bp, Homo sapien
tactagcaccctgcaactacttaccacaaaaac

SEQ ID NO: 243926 - DNA, 33 bp, Homo sapien
tactagcaccctgcaagtacttaccacaaaaac

SEQ ID NO: 243927 - DNA, 33 bp, Homo sapien
ggaaccaagggtgcaaatcctaatctgagtcta

SEQ ID NO: 243928 - DNA, 33 bp, Homo sapien
ggaaccaagggtgcaagtcctaatctgagtcta

SEQ ID NO: 243929 - DNA, 33 bp, Homo sapien
gctttgcctatttagccctcagtttctgcatct

SEQ ID NO: 243930 - DNA, 33 bp, Homo sapien
gctttgcctatttagctctcagtttctgcatct

SEQ ID NO: 243931 - DNA, 33 bp, Homo sapien
ccagatatctgcttgacagaagaagccaaatgt

SEQ ID NO: 243932 - DNA, 33 bp, Homo sapien
ccagatatctgcttgatagaagaagccaaatgt

SEQ ID NO: 243933 - DNA, 33 bp, Homo sapien
cacctcctacctcataagcagaccgtcgaaatc

SEQ ID NO: 243934 - DNA, 33 bp, Homo sapien
cacctcctacctcatatgcagaccgtcgaaatc

SEQ ID NO: 243935 - DNA, 33 bp, Homo sapien
agggaatggcggttcacgtcaggtcataactga

SEQ ID NO: 243936 - DNA, 33 bp, Homo sapien
agggaatggcggttcaggtcaggtcataactga

SEQ ID NO: 243937 - DNA, 33 bp, Homo sapien
atctttcctccagctcaaagatccatcctcctc

SEQ ID NO: 243938 - DNA, 33 bp, Homo sapien
atctttcctccagctccaagatccatcctcctc

SEQ ID NO: 243939 - DNA, 33 bp, Homo sapien
ggctccagtatttatacagtgatcaaatatcac

SEQ ID NO: 243940 - DNA, 33 bp, Homo sapien
ggctccagtatttatatagtgatcaaatatcac

SEQ ID NO: 243941 - DNA, 33 bp, Homo sapien
agaagccatgtggggccactgagagaaattcca

SEQ ID NO: 243942 - DNA, 33 bp, Homo sapien
agaagccatgtggggcgactgagagaaattcca

SEQ ID NO: 243943 - DNA, 33 bp, Homo sapien
gtcagattcccagcaacgtctaacagatccaca

SEQ ID NO: 243944 - DNA, 33 bp, Homo sapien
gtcagattcccagcaaggtctaacagatccaca

SEQ ID NO: 243945 - DNA, 33 bp, Homo sapien
tagtaatctggaaaaaatattcattatagctag

SEQ ID NO: 243946 - DNA, 33 bp, Homo sapien
tagtaatctggaaaaagtattcattatagctag

SEQ ID NO: 243947 - DNA, 33 bp, Homo sapien
aagaacactgtgacaccgtgaatccgcttccac

SEQ ID NO: 243948 - DNA, 33 bp, Homo sapien
aagaacactgtgacactgtgaatccgcttccac

SEQ ID NO: 243949 - DNA, 33 bp, Homo sapien
cttagaatagtgctggacatatagaaagtgctc

SEQ ID NO: 243950 - DNA, 33 bp, Homo sapien
cttagaatagtgctgggcatatagaaagtgctc

SEQ ID NO: 243951 - DNA, 33 bp, Homo sapien
accccggccaggcctggaaagaatcttaaagaa

SEQ ID NO: 243952 - DNA, 33 bp, Homo sapien
accccggccaggcctgtaaagaatcttaaagaa

SEQ ID NO: 243953 - DNA, 33 bp, Homo sapien
gaactacttggacagtcacctgaacatctcaag

SEQ ID NO: 243954 - DNA, 33 bp, Homo sapien
gaactacttggacagtgacctgaacatctcaag

SEQ ID NO: 243955 - DNA, 33 bp, Homo sapien
ttcttgctgtctaagaagatgtttatggaatta

SEQ ID NO: 243956 - DNA, 33 bp, Homo sapien
ttcttgctgtctaagaggatgtttatggaatta

SEQ ID NO: 243957 - DNA, 33 bp, Homo sapien
cattgaatttaatgcaacaataatgctttaaat

SEQ ID NO: 243958 - DNA, 33 bp, Homo sapien
cattgaatttaatgcagcaataatgctttaaat

SEQ ID NO: 243959 - DNA, 33 bp, Homo sapien
agatattatcacttaggacaaggattggtttaa

SEQ ID NO: 243960 - DNA, 33 bp, Homo sapien
agatattatcacttagtacaaggattggtttaa

SEQ ID NO: 243961 - DNA, 33 bp, Homo sapien
ttaaggtgtgtgtgaggattgattttatgtgtc

SEQ ID NO: 243962 - DNA, 33 bp, Homo sapien
ttaaggtgtgtgtgagtattgattttatgtgtc

SEQ ID NO: 243963 - DNA, 33 bp, Homo sapien
tgtggctaacaacctaatagatgtaagaaatgg

SEQ ID NO: 243964 - DNA, 33 bp, Homo sapien
tgtggctaacaacctactagatgtaagaaatgg

SEQ ID NO: 243965 - DNA, 33 bp, Homo sapien
cttaaaatgaaaacacaatttacaaactaagag

SEQ ID NO: 243966 - DNA, 33 bp, Homo sapien
cttaaaatgaaaacacgatttacaaactaagag

SEQ ID NO: 243967 - DNA, 33 bp, Homo sapien
aacattaggccatgccaaaaaacccagatatga

SEQ ID NO: 243968 - DNA, 33 bp, Homo sapien
aacattaggccatgccgaaaaacccagatatga

SEQ ID NO: 243969 - DNA, 33 bp, Homo sapien
gtacaagtcttggtaaagatacgtgatttccag

SEQ ID NO: 243970 - DNA, 33 bp, Homo sapien
gtacaagtcttggtaaggatacgtgatttccag

SEQ ID NO: 243971 - DNA, 33 bp, Homo sapien
agggagagaagagattcaactgttcccccagtc

SEQ ID NO: 243972 - DNA, 33 bp, Homo sapien
agggagagaagagatttaactgttcccccagtc

SEQ ID NO: 243973 - DNA, 33 bp, Homo sapien
actgcatacttctccacggtgtgtattcactgt

SEQ ID NO: 243974 - DNA, 33 bp, Homo sapien
actgcatacttctccatggtgtgtattcactgt

SEQ ID NO: 243975 - DNA, 33 bp, Homo sapien
aagatataaattcaagcctaaactccaccatta

SEQ ID NO: 243976 - DNA, 33 bp, Homo sapien
aagatataaattcaagtctaaactccaccatta

SEQ ID NO: 243977 - DNA, 33 bp, Homo sapien
aagcagtatactgatgaacaagggttaggattt

SEQ ID NO: 243978 - DNA, 33 bp, Homo sapien
aagcagtatactgatgtacaagggttaggattt

SEQ ID NO: 243979 - DNA, 33 bp, Homo sapien
tgagttctggtaaataacaataaccttggaatg

SEQ ID NO: 243980 - DNA, 33 bp, Homo sapien
tgagttctggtaaatagcaataaccttggaatg

SEQ ID NO: 243981 - DNA, 33 bp, Homo sapien
gaaaatgcaaggatcgaaccaagtaacttttaa

SEQ ID NO: 243982 - DNA, 33 bp, Homo sapien
gaaaatgcaaggatcggaccaagtaacttttaa

SEQ ID NO: 243983 - DNA, 33 bp, Homo sapien
gcacacggttggtccactgaggccaccacggcc

SEQ ID NO: 243984 - DNA, 33 bp, Homo sapien
gcacacggttggtccagtgaggccaccacggcc

SEQ ID NO: 243985 - DNA, 33 bp, Homo sapien
atttgctgtggccatcacaaaagtgggttctct

SEQ ID NO: 243986 - DNA, 33 bp, Homo sapien
atttgctgtggccatcccaaaagtgggttctct

SEQ ID NO: 243987 - DNA, 33 bp, Homo sapien
ggcaactcaagtgaaagaagctggtggctgggt

SEQ ID NO: 243988 - DNA, 33 bp, Homo sapien
ggcaactcaagtgaaataagctggtggctgggt

SEQ ID NO: 243989 - DNA, 33 bp, Homo sapien
gagggtagatgggagacgaaccaatgaaatagt

SEQ ID NO: 243990 - DNA, 33 bp, Homo sapien
gagggtagatgggagatgaaccaatgaaatagt

SEQ ID NO: 243991 - DNA, 33 bp, Homo sapien
aggggatggatggtaacacaagaggtaatacat

SEQ ID NO: 243992 - DNA, 33 bp, Homo sapien
aggggatggatggtaatacaagaggtaatacat

SEQ ID NO: 243993 - DNA, 33 bp, Homo sapien
agtaccacagggatgacaggaaggacatctatc

SEQ ID NO: 243994 - DNA, 33 bp, Homo sapien
agtaccacagggatgagaggaaggacatctatc

SEQ ID NO: 243995 - DNA, 33 bp, Homo sapien
ctctttcttactttgcactttagtcgttcatga

SEQ ID NO: 243996 - DNA, 33 bp, Homo sapien
ctctttcttactttgctctttagtcgttcatga

SEQ ID NO: 243997 - DNA, 33 bp, Homo sapien
agataaccgaagctaactgaccacatcctactt

SEQ ID NO: 243998 - DNA, 33 bp, Homo sapien
agataaccgaagctaattgaccacatcctactt

SEQ ID NO: 243999 - DNA, 33 bp, Homo sapien
gtggcaaaaaacttccaagcatactacctacta

SEQ ID NO: 244000 - DNA, 33 bp, Homo sapien
gtggcaaaaaacttcctagcatactacctacta

SEQ ID NO: 244001 - DNA, 33 bp, Homo sapien
atatttttctcatgtacgcatgccacttgttga

SEQ ID NO: 244002 - DNA, 33 bp, Homo sapien
atatttttctcatgtatgcatgccacttgttga

SEQ ID NO: 244003 - DNA, 33 bp, Homo sapien
gcagatttcaactcgggcccaactcactccaga

SEQ ID NO: 244004 - DNA, 33 bp, Homo sapien
gcagatttcaactcggtcccaactcactccaga

SEQ ID NO: 244005 - DNA, 33 bp, Homo sapien
aaccacgttcaaaggaaggagaaagatgttgct

SEQ ID NO: 244006 - DNA, 33 bp, Homo sapien
aaccacgttcaaaggacggagaaagatgttgct

SEQ ID NO: 244007 - DNA, 33 bp, Homo sapien
aaagaatctcctcttaccatgtcactctgtttt

SEQ ID NO: 244008 - DNA, 33 bp, Homo sapien
aaagaatctcctcttatcatgtcactctgtttt

SEQ ID NO: 244009 - DNA, 33 bp, Homo sapien
tcctattctttacttgcaacttccaaagggcat

SEQ ID NO: 244010 - DNA, 33 bp, Homo sapien
tcctattctttacttgtaacttccaaagggcat

SEQ ID NO: 244011 - DNA, 33 bp, Homo sapien
cttaagaagaaaccacaaaggaaacagtgtaga

SEQ ID NO: 244012 - DNA, 33 bp, Homo sapien
cttaagaagaaaccaccaaggaaacagtgtaga

SEQ ID NO: 244013 - DNA, 33 bp, Homo sapien
ctccaaccacccaaaccaaatcagaacctccaa

SEQ ID NO: 244014 - DNA, 33 bp, Homo sapien
ctccaaccacccaaactaaatcagaacctccaa

SEQ ID NO: 244015 - DNA, 33 bp, Homo sapien
acactgatgaaactgggtatctgcgttcgcttg

SEQ ID NO: 244016 - DNA, 33 bp, Homo sapien
acactgatgaaactggttatctgcgttcgcttg

SEQ ID NO: 244017 - DNA, 33 bp, Homo sapien
attctggtgtccgacaaagatggaaacttcgca

SEQ ID NO: 244018 - DNA, 33 bp, Homo sapien
attctggtgtccgacagagatggaaacttcgca

SEQ ID NO: 244019 - DNA, 33 bp, Homo sapien
gccaagtaacgaatgacggcttggcaaagaaag

SEQ ID NO: 244020 - DNA, 33 bp, Homo sapien
gccaagtaacgaatgatggcttggcaaagaaag

SEQ ID NO: 244021 - DNA, 33 bp, Homo sapien
taagaattgtaaagcaagtatcagtgactacaa

SEQ ID NO: 244022 - DNA, 33 bp, Homo sapien
taagaattgtaaagcacgtatcagtgactacaa

SEQ ID NO: 244023 - DNA, 33 bp, Homo sapien
gagttctactctattccacacctctgcaaccat

SEQ ID NO: 244024 - DNA, 33 bp, Homo sapien
gagttctactctattctacacctctgcaaccat

SEQ ID NO: 244025 - DNA, 33 bp, Homo sapien
atatcaaaattagaggccccactggatctcagg

SEQ ID NO: 244026 - DNA, 33 bp, Homo sapien
atatcaaaattagaggtcccactggatctcagg

SEQ ID NO: 244027 - DNA, 33 bp, Homo sapien
tccatcatagctgttactgccacttaaagatga

SEQ ID NO: 244028 - DNA, 33 bp, Homo sapien
tccatcatagctgttattgccacttaaagatga

SEQ ID NO: 244029 - DNA, 33 bp, Homo sapien
cccctgtttgcaatcaccacttgtacaccagag

SEQ ID NO: 244030 - DNA, 33 bp, Homo sapien
cccctgtttgcaatcatcacttgtacaccagag

SEQ ID NO: 244031 - DNA, 33 bp, Homo sapien
tggtgtttttgttccacggaaggtagttctaca

SEQ ID NO: 244032 - DNA, 33 bp, Homo sapien
tggtgtttttgttccatggaaggtagttctaca

SEQ ID NO: 244033 - DNA, 33 bp, Homo sapien
aagctcctgtgtgatgaaaatggatcttaaagc

SEQ ID NO: 244034 - DNA, 33 bp, Homo sapien
aagctcctgtgtgatggaaatggatcttaaagc

SEQ ID NO: 244035 - DNA, 33 bp, Homo sapien
aaattagcctcactggaatttatactgacagag

SEQ ID NO: 244036 - DNA, 33 bp, Homo sapien
aaattagcctcactgggatttatactgacagag

SEQ ID NO: 244037 - DNA, 33 bp, Homo sapien
tatgaaagagatcataactctggattcaatgtg

SEQ ID NO: 244038 - DNA, 33 bp, Homo sapien
tatgaaagagatcatagctctggattcaatgtg

SEQ ID NO: 244039 - DNA, 33 bp, Homo sapien
ggaatagaaagatgaactggacagggaggctct

SEQ ID NO: 244040 - DNA, 33 bp, Homo sapien
ggaatagaaagatgaattggacagggaggctct

SEQ ID NO: 244041 - DNA, 33 bp, Homo sapien
taatgctgaattagaacatgcactggcaattgg

SEQ ID NO: 244042 - DNA, 33 bp, Homo sapien
taatgctgaattagaatatgcactggcaattgg

SEQ ID NO: 244043 - DNA, 33 bp, Homo sapien
aggtaacgaagccacacggtatgaaaaccaaaa

SEQ ID NO: 244044 - DNA, 33 bp, Homo sapien
aggtaacgaagccacatggtatgaaaaccaaaa

SEQ ID NO: 244045 - DNA, 33 bp, Homo sapien
catcttagctctgagacgacacaacctgaacgg

SEQ ID NO: 244046 - DNA, 33 bp, Homo sapien
catcttagctctgagatgacacaacctgaacgg

SEQ ID NO: 244047 - DNA, 33 bp, Homo sapien
ggtccgtacttgagacacactacagcttatttc

SEQ ID NO: 244048 - DNA, 33 bp, Homo sapien
ggtccgtacttgagacgcactacagcttatttc

SEQ ID NO: 244049 - DNA, 33 bp, Homo sapien
ggttgaattttgtccccgaaaaagaaatgtcca

SEQ ID NO: 244050 - DNA, 33 bp, Homo sapien
ggttgaattttgtccctgaaaaagaaatgtcca

SEQ ID NO: 244051 - DNA, 33 bp, Homo sapien
actccatctcactgaccgcggattcttctccca

SEQ ID NO: 244052 - DNA, 33 bp, Homo sapien
actccatctcactgactgcggattcttctccca

SEQ ID NO: 244053 - DNA, 33 bp, Homo sapien
gcgatgccggagccgcacaaatcccctgggtct

SEQ ID NO: 244054 - DNA, 33 bp, Homo sapien
gcgatgccggagccgcgcaaatcccctgggtct

SEQ ID NO: 244055 - DNA, 33 bp, Homo sapien
cttgctatgaacagaaaaggccccaggagcttg

SEQ ID NO: 244056 - DNA, 33 bp, Homo sapien
cttgctatgaacagaagaggccccaggagcttg

SEQ ID NO: 244057 - DNA, 33 bp, Homo sapien
ctttccctttctagtggacggtcacccggaacc

SEQ ID NO: 244058 - DNA, 33 bp, Homo sapien
ctttccctttctagtgtacggtcacccggaacc

SEQ ID NO: 244059 - DNA, 33 bp, Homo sapien
tcctccattcctgggcacctagtaccatgtggt

SEQ ID NO: 244060 - DNA, 33 bp, Homo sapien
tcctccattcctgggctcctagtaccatgtggt

SEQ ID NO: 244061 - DNA, 33 bp, Homo sapien
aagctggtggagagtacggtaattaacccagat

SEQ ID NO: 244062 - DNA, 33 bp, Homo sapien
aagctggtggagagtatggtaattaacccagat

SEQ ID NO: 244063 - DNA, 33 bp, Homo sapien
ggcttgagctggagtacgaaaggaaattgaaac

SEQ ID NO: 244064 - DNA, 33 bp, Homo sapien
ggcttgagctggagtatgaaaggaaattgaaac

SEQ ID NO: 244065 - DNA, 33 bp, Homo sapien
attccccttccttccaactgaagtatggagcct

SEQ ID NO: 244066 - DNA, 33 bp, Homo sapien
attccccttccttccagctgaagtatggagcct

SEQ ID NO: 244067 - DNA, 33 bp, Homo sapien
ccagcagaagctaatgaaagtcaacaccctgaa

SEQ ID NO: 244068 - DNA, 33 bp, Homo sapien
ccagcagaagctaatgcaagtcaacaccctgaa

SEQ ID NO: 244069 - DNA, 33 bp, Homo sapien
aagcttgataattgagaaaaatttatccctatt

SEQ ID NO: 244070 - DNA, 33 bp, Homo sapien
aagcttgataattgaggaaaatttatccctatt

SEQ ID NO: 244071 - DNA, 33 bp, Homo sapien
tcttagactggatgaaataaggatagaatgatg

SEQ ID NO: 244072 - DNA, 33 bp, Homo sapien
tcttagactggatgaagtaaggatagaatgatg

SEQ ID NO: 244073 - DNA, 33 bp, Homo sapien
ggcacaagatgccaacagagagaacactgattt

SEQ ID NO: 244074 - DNA, 33 bp, Homo sapien
ggcacaagatgccaacggagagaacactgattt

SEQ ID NO: 244075 - DNA, 33 bp, Homo sapien
gtacaatccactgtgacgtgctatgaccgtgat

SEQ ID NO: 244076 - DNA, 33 bp, Homo sapien
gtacaatccactgtgatgtgctatgaccgtgat

SEQ ID NO: 244077 - DNA, 33 bp, Homo sapien
gaaatagtccaggtaacctttatttaagctact

SEQ ID NO: 244078 - DNA, 33 bp, Homo sapien
gaaatagtccaggtaatctttatttaagctact

SEQ ID NO: 244079 - DNA, 33 bp, Homo sapien
tttacaacctggacacactgatgtctgcctctg

SEQ ID NO: 244080 - DNA, 33 bp, Homo sapien
tttacaacctggacacgctgatgtctgcctctg

SEQ ID NO: 244081 - DNA, 33 bp, Homo sapien
acaaacttaatctctaacgaattgaagagtctg

SEQ ID NO: 244082 - DNA, 33 bp, Homo sapien
acaaacttaatctctagcgaattgaagagtctg

SEQ ID NO: 244083 - DNA, 33 bp, Homo sapien
ggcctctttgaatagaactacattgcaatacaa

SEQ ID NO: 244084 - DNA, 33 bp, Homo sapien
ggcctctttgaatagatctacattgcaatacaa

SEQ ID NO: 244085 - DNA, 33 bp, Homo sapien
gattgcaaatgaagtgaaaaaaatgtccagaac

SEQ ID NO: 244086 - DNA, 33 bp, Homo sapien
gattgcaaatgaagtgcaaaaaatgtccagaac

SEQ ID NO: 244087 - DNA, 33 bp, Homo sapien
accctcaaattgaactcaaaggaagagtcaagt

SEQ ID NO: 244088 - DNA, 33 bp, Homo sapien
accctcaaattgaacttaaaggaagagtcaagt

SEQ ID NO: 244089 - DNA, 33 bp, Homo sapien
attgttcttttatgaactactagtcacaactca

SEQ ID NO: 244090 - DNA, 33 bp, Homo sapien
attgttcttttatgaattactagtcacaactca

SEQ ID NO: 244091 - DNA, 33 bp, Homo sapien
taaatcacatgcaaaaagagaaagggatgaggc

SEQ ID NO: 244092 - DNA, 33 bp, Homo sapien
taaatcacatgcaaaaggagaaagggatgaggc

SEQ ID NO: 244093 - DNA, 33 bp, Homo sapien
atgtcagtaaatctcacggctcttggatgaagc

SEQ ID NO: 244094 - DNA, 33 bp, Homo sapien
atgtcagtaaatctcatggctcttggatgaagc

SEQ ID NO: 244095 - DNA, 33 bp, Homo sapien
tgaattaaacttggcagatgaaggtcaagggag

SEQ ID NO: 244096 - DNA, 33 bp, Homo sapien
tgaattaaacttggcatatgaaggtcaagggag

SEQ ID NO: 244097 - DNA, 33 bp, Homo sapien
ttgtaaagctcctgaaagcctgattggtgggag

SEQ ID NO: 244098 - DNA, 33 bp, Homo sapien
ttgtaaagctcctgaaggcctgattggtgggag

SEQ ID NO: 244099 - DNA, 33 bp, Homo sapien
agagagagacagtaataaaggctcatgtttact

SEQ ID NO: 244100 - DNA, 33 bp, Homo sapien
agagagagacagtaatgaaggctcatgtttact

SEQ ID NO: 244101 - DNA, 33 bp, Homo sapien
ttggctaaggtaattaaaccactttgaggaagc

SEQ ID NO: 244102 - DNA, 33 bp, Homo sapien
ttggctaaggtaattagaccactttgaggaagc

SEQ ID NO: 244103 - DNA, 33 bp, Homo sapien
actcaaacttccctaacgccacttgtaagatac

SEQ ID NO: 244104 - DNA, 33 bp, Homo sapien
actcaaacttccctaatgccacttgtaagatac

SEQ ID NO: 244105 - DNA, 33 bp, Homo sapien
gctccatctacctcagaagacactgtagcatct

SEQ ID NO: 244106 - DNA, 33 bp, Homo sapien
gctccatctacctcaggagacactgtagcatct

SEQ ID NO: 244107 - DNA, 33 bp, Homo sapien
attacagaataaacaaattccacacaacctggc

SEQ ID NO: 244108 - DNA, 33 bp, Homo sapien
attacagaataaacaatttccacacaacctggc

SEQ ID NO: 244109 - DNA, 33 bp, Homo sapien
agatttactgaggcagccacttagcaaaaggtc

SEQ ID NO: 244110 - DNA, 33 bp, Homo sapien
agatttactgaggcagtcacttagcaaaaggtc

SEQ ID NO: 244111 - DNA, 33 bp, Homo sapien
aactgacccctaaagagaactcatcatatattc

SEQ ID NO: 244112 - DNA, 33 bp, Homo sapien
aactgacccctaaagataactcatcatatattc

SEQ ID NO: 244113 - DNA, 33 bp, Homo sapien
ttataatgtggcatgaacaatacctgccttgca

SEQ ID NO: 244114 - DNA, 33 bp, Homo sapien
ttataatgtggcatgagcaatacctgccttgca

SEQ ID NO: 244115 - DNA, 33 bp, Homo sapien
ctgtgtcttcagagaccggactcaaatcctgta

SEQ ID NO: 244116 - DNA, 33 bp, Homo sapien
ctgtgtcttcagagactggactcaaatcctgta

SEQ ID NO: 244117 - DNA, 33 bp, Homo sapien
ttttgggaaatgaccactgcgcaggcctcactg

SEQ ID NO: 244118 - DNA, 33 bp, Homo sapien
ttttgggaaatgaccagtgcgcaggcctcactg

SEQ ID NO: 244119 - DNA, 33 bp, Homo sapien
atgacctataacttgcaaatttagggagagaga

SEQ ID NO: 244120 - DNA, 33 bp, Homo sapien
atgacctataacttgcgaatttagggagagaga

SEQ ID NO: 244121 - DNA, 33 bp, Homo sapien
tgaggtcttatttagcaaccattacagagtacc

SEQ ID NO: 244122 - DNA, 33 bp, Homo sapien
tgaggtcttatttagccaccattacagagtacc

SEQ ID NO: 244123 - DNA, 33 bp, Homo sapien
tgatggcagattatccagcagacgatggagttc

SEQ ID NO: 244124 - DNA, 33 bp, Homo sapien
tgatggcagattatccggcagacgatggagttc

SEQ ID NO: 244125 - DNA, 33 bp, Homo sapien
gtctaggacagcaccaaagaaagacaggatgtc

SEQ ID NO: 244126 - DNA, 33 bp, Homo sapien
gtctaggacagcaccagagaaagacaggatgtc

SEQ ID NO: 244127 - DNA, 33 bp, Homo sapien
aactgcttccattctgaaggtcacaagtcctaa

SEQ ID NO: 244128 - DNA, 33 bp, Homo sapien
aactgcttccattctggaggtcacaagtcctaa

SEQ ID NO: 244129 - DNA, 33 bp, Homo sapien
gcagatcagcgcatacgctccccagagtcagac

SEQ ID NO: 244130 - DNA, 33 bp, Homo sapien
gcagatcagcgcatactctccccagagtcagac

SEQ ID NO: 244131 - DNA, 33 bp, Homo sapien
tcttgaatgtaaaaaacggaacctgaagagatg

SEQ ID NO: 244132 - DNA, 33 bp, Homo sapien
tcttgaatgtaaaaaatggaacctgaagagatg

SEQ ID NO: 244133 - DNA, 33 bp, Homo sapien
agtatctagctcatggaattgttgtaagaatca

SEQ ID NO: 244134 - DNA, 33 bp, Homo sapien
agtatctagctcatggtattgttgtaagaatca

SEQ ID NO: 244135 - DNA, 33 bp, Homo sapien
aaaaataggagtagtacgagttgcagtaagagc

SEQ ID NO: 244136 - DNA, 33 bp, Homo sapien
aaaaataggagtagtaggagttgcagtaagagc

SEQ ID NO: 244137 - DNA, 33 bp, Homo sapien
ctaaagttataccctacgaaagaagttgcagga

SEQ ID NO: 244138 - DNA, 33 bp, Homo sapien
ctaaagttataccctatgaaagaagttgcagga

SEQ ID NO: 244139 - DNA, 33 bp, Homo sapien
cctctacttgactacacatctagttgcataatt

SEQ ID NO: 244140 - DNA, 33 bp, Homo sapien
cctctacttgactacatatctagttgcataatt

SEQ ID NO: 244141 - DNA, 33 bp, Homo sapien
aaaacaacagcaccaaataagatgagttgacag

SEQ ID NO: 244142 - DNA, 33 bp, Homo sapien
aaaacaacagcaccaagtaagatgagttgacag

SEQ ID NO: 244143 - DNA, 33 bp, Homo sapien
gccacgtggaaaagtacgaacttgataaccatg

SEQ ID NO: 244144 - DNA, 33 bp, Homo sapien
gccacgtggaaaagtatgaacttgataaccatg

SEQ ID NO: 244145 - DNA, 33 bp, Homo sapien
catgcaaggaaagaatcagaacgaaatgttaac

SEQ ID NO: 244146 - DNA, 33 bp, Homo sapien
catgcaaggaaagaatgagaacgaaatgttaac

SEQ ID NO: 244147 - DNA, 33 bp, Homo sapien
agtggctgtaagaaaaccagaagtttcaagaca

SEQ ID NO: 244148 - DNA, 33 bp, Homo sapien
agtggctgtaagaaaatcagaagtttcaagaca

SEQ ID NO: 244149 - DNA, 33 bp, Homo sapien
tctgccatttccatcaactattactggacatga

SEQ ID NO: 244150 - DNA, 33 bp, Homo sapien
tctgccatttccatcagctattactggacatga

SEQ ID NO: 244151 - DNA, 33 bp, Homo sapien
ttgaagatgcttgctaaaccaggaaatatgatt

SEQ ID NO: 244152 - DNA, 33 bp, Homo sapien
ttgaagatgcttgctagaccaggaaatatgatt

SEQ ID NO: 244153 - DNA, 33 bp, Homo sapien
gagcagtgttcagggacgcagcccaccttcctg

SEQ ID NO: 244154 - DNA, 33 bp, Homo sapien
gagcagtgttcagggatgcagcccaccttcctg

SEQ ID NO: 244155 - DNA, 33 bp, Homo sapien
ttctattggactgtaccgggctagactagaaat

SEQ ID NO: 244156 - DNA, 33 bp, Homo sapien
ttctattggactgtactgggctagactagaaat

SEQ ID NO: 244157 - DNA, 33 bp, Homo sapien
accacatcctcagctcaatccactctgtccact

SEQ ID NO: 244158 - DNA, 33 bp, Homo sapien
accacatcctcagctcgatccactctgtccact

SEQ ID NO: 244159 - DNA, 33 bp, Homo sapien
atgaccttaggggagccatgaattcctctgggc

SEQ ID NO: 244160 - DNA, 33 bp, Homo sapien
atgaccttaggggagctatgaattcctctgggc

SEQ ID NO: 244161 - DNA, 33 bp, Homo sapien
ttctaaaggaactggactcatggggttttgtct

SEQ ID NO: 244162 - DNA, 33 bp, Homo sapien
ttctaaaggaactggattcatggggttttgtct

SEQ ID NO: 244163 - DNA, 33 bp, Homo sapien
tacttaaaatcacttgaaatttgttgccgtgtg

SEQ ID NO: 244164 - DNA, 33 bp, Homo sapien
tacttaaaatcacttggaatttgttgccgtgtg

SEQ ID NO: 244165 - DNA, 33 bp, Homo sapien
aacaatataaaaagataatcattgaacaggtct

SEQ ID NO: 244166 - DNA, 33 bp, Homo sapien
aacaatataaaaagatgatcattgaacaggtct

SEQ ID NO: 244167 - DNA, 33 bp, Homo sapien
tttgatttttgagtcacgtatctcatttgagca

SEQ ID NO: 244168 - DNA, 33 bp, Homo sapien
tttgatttttgagtcatgtatctcatttgagca

SEQ ID NO: 244169 - DNA, 33 bp, Homo sapien
tttgcgtgactgttgaaagcacaaaatgaagta

SEQ ID NO: 244170 - DNA, 33 bp, Homo sapien
tttgcgtgactgttgagagcacaaaatgaagta

SEQ ID NO: 244171 - DNA, 33 bp, Homo sapien
aagtgcctggtcctaactggctctcaaaaatgg

SEQ ID NO: 244172 - DNA, 33 bp, Homo sapien
aagtgcctggtcctaattggctctcaaaaatgg

SEQ ID NO: 244173 - DNA, 33 bp, Homo sapien
tccccttctgttcctcacccatcctctggtcag

SEQ ID NO: 244174 - DNA, 33 bp, Homo sapien
tccccttctgttcctcgcccatcctctggtcag

SEQ ID NO: 244175 - DNA, 33 bp, Homo sapien
ttggagaaggcctctcaaaggaggtgatatttc

SEQ ID NO: 244176 - DNA, 33 bp, Homo sapien
ttggagaaggcctctcgaaggaggtgatatttc

SEQ ID NO: 244177 - DNA, 33 bp, Homo sapien
tttttatttttcttcacggtgggggagataaaa

SEQ ID NO: 244178 - DNA, 33 bp, Homo sapien
tttttatttttcttcatggtgggggagataaaa

SEQ ID NO: 244179 - DNA, 33 bp, Homo sapien
gtgttgagaggcaagaacgtggcttaagagcaa

SEQ ID NO: 244180 - DNA, 33 bp, Homo sapien
gtgttgagaggcaagagcgtggcttaagagcaa

SEQ ID NO: 244181 - DNA, 33 bp, Homo sapien
agactgcaagaagagaaaacctttaaactgatc

SEQ ID NO: 244182 - DNA, 33 bp, Homo sapien
agactgcaagaagagagaacctttaaactgatc

SEQ ID NO: 244183 - DNA, 33 bp, Homo sapien
gagttgtgcaatcatcactgtaacctaatttta

SEQ ID NO: 244184 - DNA, 33 bp, Homo sapien
gagttgtgcaatcatcgctgtaacctaatttta

SEQ ID NO: 244185 - DNA, 33 bp, Homo sapien
gagctgagaggaggaaaaaaatccatgcagagt

SEQ ID NO: 244186 - DNA, 33 bp, Homo sapien
gagctgagaggaggaacaaaatccatgcagagt

SEQ ID NO: 244187 - DNA, 33 bp, Homo sapien
agaccagacgaattccgagtgtgtggcttggta

SEQ ID NO: 244188 - DNA, 33 bp, Homo sapien
agaccagacgaattcctagtgtgtggcttggta

SEQ ID NO: 244189 - DNA, 33 bp, Homo sapien
tcacggtgaagcgtcacgtccaagttactctgt

SEQ ID NO: 244190 - DNA, 33 bp, Homo sapien
tcacggtgaagcgtcatgtccaagttactctgt

SEQ ID NO: 244191 - DNA, 33 bp, Homo sapien
atgccataggaagtcgccctttacttggcaaag

SEQ ID NO: 244192 - DNA, 33 bp, Homo sapien
atgccataggaagtcgtcctttacttggcaaag

SEQ ID NO: 244193 - DNA, 33 bp, Homo sapien
ctttcctcgggctccaatgcaggactatctttt

SEQ ID NO: 244194 - DNA, 33 bp, Homo sapien
ctttcctcgggctccagtgcaggactatctttt

SEQ ID NO: 244195 - DNA, 33 bp, Homo sapien
gaactactctaaacagaagattgacaaggtttt

SEQ ID NO: 244196 - DNA, 33 bp, Homo sapien
gaactactctaaacagcagattgacaaggtttt

SEQ ID NO: 244197 - DNA, 33 bp, Homo sapien
atggcctggattgttacgtagaagcagctggga

SEQ ID NO: 244198 - DNA, 33 bp, Homo sapien
atggcctggattgttatgtagaagcagctggga

SEQ ID NO: 244199 - DNA, 33 bp, Homo sapien
tgatcataaatctacaagtgttgtcaaaatact

SEQ ID NO: 244200 - DNA, 33 bp, Homo sapien
tgatcataaatctacatgtgttgtcaaaatact

SEQ ID NO: 244201 - DNA, 33 bp, Homo sapien
ttctacagggctatagcaaccgaaacggcatgg

SEQ ID NO: 244202 - DNA, 33 bp, Homo sapien
ttctacagggctatagtaaccgaaacggcatgg

SEQ ID NO: 244203 - DNA, 33 bp, Homo sapien
aaggtatggcacaaaacaggtagttaatacgta

SEQ ID NO: 244204 - DNA, 33 bp, Homo sapien
aaggtatggcacaaaataggtagttaatacgta

SEQ ID NO: 244205 - DNA, 33 bp, Homo sapien
ttttgagggccaagaccattgggtttgttcaac

SEQ ID NO: 244206 - DNA, 33 bp, Homo sapien
ttttgagggccaagactattgggtttgttcaac

SEQ ID NO: 244207 - DNA, 33 bp, Homo sapien
acacaatctcagctgcaccattctgtgcaatcc

SEQ ID NO: 244208 - DNA, 33 bp, Homo sapien
acacaatctcagctgcgccattctgtgcaatcc

SEQ ID NO: 244209 - DNA, 33 bp, Homo sapien
tgttaatgagccatgaacaaaccatacacagaa

SEQ ID NO: 244210 - DNA, 33 bp, Homo sapien
tgttaatgagccatgagcaaaccatacacagaa

SEQ ID NO: 244211 - DNA, 33 bp, Homo sapien
atatctagcatggttgaaaacgggatctatttt

SEQ ID NO: 244212 - DNA, 33 bp, Homo sapien
atatctagcatggttggaaacgggatctatttt

SEQ ID NO: 244213 - DNA, 33 bp, Homo sapien
taaagtccctgtaaaccatcacgggccataggg

SEQ ID NO: 244214 - DNA, 33 bp, Homo sapien
taaagtccctgtaaactatcacgggccataggg

SEQ ID NO: 244215 - DNA, 33 bp, Homo sapien
attcagttactaaaagacataggttctatccca

SEQ ID NO: 244216 - DNA, 33 bp, Homo sapien
attcagttactaaaagccataggttctatccca

SEQ ID NO: 244217 - DNA, 33 bp, Homo sapien
cctcaaattacataaaccgaataatgttggcca

SEQ ID NO: 244218 - DNA, 33 bp, Homo sapien
cctcaaattacataaatcgaataatgttggcca

SEQ ID NO: 244219 - DNA, 33 bp, Homo sapien
aaatgatggtcatttaagcattcttctcagaaa

SEQ ID NO: 244220 - DNA, 33 bp, Homo sapien
aaatgatggtcatttaggcattcttctcagaaa

SEQ ID NO: 244221 - DNA, 33 bp, Homo sapien
aaacattaggtactcactactaaacaggacaaa

SEQ ID NO: 244222 - DNA, 33 bp, Homo sapien
aaacattaggtactcattactaaacaggacaaa

SEQ ID NO: 244223 - DNA, 33 bp, Homo sapien
atcctgtttctcacaaacttacaaaaaggaagg

SEQ ID NO: 244224 - DNA, 33 bp, Homo sapien
atcctgtttctcacaaccttacaaaaaggaagg

SEQ ID NO: 244225 - DNA, 33 bp, Homo sapien
actaggcttgtttgtacgggaagtattgtcaaa

SEQ ID NO: 244226 - DNA, 33 bp, Homo sapien
actaggcttgtttgtatgggaagtattgtcaaa

SEQ ID NO: 244227 - DNA, 33 bp, Homo sapien
ccttataattagtaaacgaatggtcagttttcc

SEQ ID NO: 244228 - DNA, 33 bp, Homo sapien
ccttataattagtaaatgaatggtcagttttcc

SEQ ID NO: 244229 - DNA, 33 bp, Homo sapien
agggcttaaagtacaaactctctctgacagatg

SEQ ID NO: 244230 - DNA, 33 bp, Homo sapien
agggcttaaagtacaacctctctctgacagatg

SEQ ID NO: 244231 - DNA, 33 bp, Homo sapien
aacctaacatgtaagaagtatctgtaagatgag

SEQ ID NO: 244232 - DNA, 33 bp, Homo sapien
aacctaacatgtaagatgtatctgtaagatgag

SEQ ID NO: 244233 - DNA, 33 bp, Homo sapien
aataactgttactgtcaacaagtgaaaaaaaaa

SEQ ID NO: 244234 - DNA, 33 bp, Homo sapien
aataactgttactgtctacaagtgaaaaaaaaa

SEQ ID NO: 244235 - DNA, 33 bp, Homo sapien
ccataagacccagaaactctactataggtattt

SEQ ID NO: 244236 - DNA, 33 bp, Homo sapien
ccataagacccagaaattctactataggtattt

SEQ ID NO: 244237 - DNA, 33 bp, Homo sapien
gcttaataactctgcagaacaattaatcttttc

SEQ ID NO: 244238 - DNA, 33 bp, Homo sapien
gcttaataactctgcataacaattaatcttttc

SEQ ID NO: 244239 - DNA, 33 bp, Homo sapien
gctagccaatcaatgaaagtccttgttcctgaa

SEQ ID NO: 244240 - DNA, 33 bp, Homo sapien
gctagccaatcaatgatagtccttgttcctgaa

SEQ ID NO: 244241 - DNA, 33 bp, Homo sapien
tttgccttacgccctacggtattcttcaaaggc

SEQ ID NO: 244242 - DNA, 33 bp, Homo sapien
tttgccttacgccctatggtattcttcaaaggc

SEQ ID NO: 244243 - DNA, 33 bp, Homo sapien
taagatgtgagccttacatcattgatatgaaag

SEQ ID NO: 244244 - DNA, 33 bp, Homo sapien
taagatgtgagccttagatcattgatatgaaag

SEQ ID NO: 244245 - DNA, 33 bp, Homo sapien
caacaataaagaaatcccgtagtaagcaagttt

SEQ ID NO: 244246 - DNA, 33 bp, Homo sapien
caacaataaagaaatctcgtagtaagcaagttt

SEQ ID NO: 244247 - DNA, 33 bp, Homo sapien
ttaagtacagcctagaccaatataatttaaaaa

SEQ ID NO: 244248 - DNA, 33 bp, Homo sapien
ttaagtacagcctagatcaatataatttaaaaa

SEQ ID NO: 244249 - DNA, 33 bp, Homo sapien
atctgaaagctgcaatgaggaagattggttgaa

SEQ ID NO: 244250 - DNA, 33 bp, Homo sapien
atctgaaagctgcaattaggaagattggttgaa

SEQ ID NO: 244251 - DNA, 33 bp, Homo sapien
tcacctcaaacagaaacgctgggcctgacatgg

SEQ ID NO: 244252 - DNA, 33 bp, Homo sapien
tcacctcaaacagaaatgctgggcctgacatgg

SEQ ID NO: 244253 - DNA, 33 bp, Homo sapien
ttctggaattagatcacggtgatccttgtacaa

SEQ ID NO: 244254 - DNA, 33 bp, Homo sapien
ttctggaattagatcatggtgatccttgtacaa

SEQ ID NO: 244255 - DNA, 33 bp, Homo sapien
accttaggtgaatccagataaagagtatgcagg

SEQ ID NO: 244256 - DNA, 33 bp, Homo sapien
accttaggtgaatccatataaagagtatgcagg

SEQ ID NO: 244257 - DNA, 33 bp, Homo sapien
gaagtttggggttacacgactgtaggagaagtt

SEQ ID NO: 244258 - DNA, 33 bp, Homo sapien
gaagtttggggttacatgactgtaggagaagtt

SEQ ID NO: 244259 - DNA, 33 bp, Homo sapien
ttttaaaataatgcatcaatggagactttcagt

SEQ ID NO: 244260 - DNA, 33 bp, Homo sapien
ttttaaaataatgcatgaatggagactttcagt

SEQ ID NO: 244261 - DNA, 33 bp, Homo sapien
ataatagcttagagataatattcaagatggtaa

SEQ ID NO: 244262 - DNA, 33 bp, Homo sapien
ataatagcttagagatgatattcaagatggtaa

SEQ ID NO: 244263 - DNA, 33 bp, Homo sapien
gataagctagccaaaacttcacttttcctgcca

SEQ ID NO: 244264 - DNA, 33 bp, Homo sapien
gataagctagccaaaatttcacttttcctgcca

SEQ ID NO: 244265 - DNA, 33 bp, Homo sapien
aggtagatagaactcaatccgagaggctttttg

SEQ ID NO: 244266 - DNA, 33 bp, Homo sapien
aggtagatagaactcagtccgagaggctttttg

SEQ ID NO: 244267 - DNA, 33 bp, Homo sapien
caaatgccccaaaaccaactgaaagaacactct

SEQ ID NO: 244268 - DNA, 33 bp, Homo sapien
caaatgccccaaaacccactgaaagaacactct

SEQ ID NO: 244269 - DNA, 33 bp, Homo sapien
agataatgcactaatacaaggatgtatcataat

SEQ ID NO: 244270 - DNA, 33 bp, Homo sapien
agataatgcactaatataaggatgtatcataat

SEQ ID NO: 244271 - DNA, 33 bp, Homo sapien
ggcaacaggtagagacaagaatcctcctgtagg

SEQ ID NO: 244272 - DNA, 33 bp, Homo sapien
ggcaacaggtagagacgagaatcctcctgtagg

SEQ ID NO: 244273 - DNA, 33 bp, Homo sapien
aagacagagtagggggaataaatatacctcttt

SEQ ID NO: 244274 - DNA, 33 bp, Homo sapien
aagacagagtaggggggataaatatacctcttt

SEQ ID NO: 244275 - DNA, 33 bp, Homo sapien
gtattccaggaagagggaactgcttgtacagaa

SEQ ID NO: 244276 - DNA, 33 bp, Homo sapien
gtattccaggaagaggtaactgcttgtacagaa

SEQ ID NO: 244277 - DNA, 33 bp, Homo sapien
atgtacttgtggagaaaaactctcagcagggac

SEQ ID NO: 244278 - DNA, 33 bp, Homo sapien
atgtacttgtggagaagaactctcagcagggac

SEQ ID NO: 244279 - DNA, 33 bp, Homo sapien
tgctttctgtcactctaagagaagccaactgac

SEQ ID NO: 244280 - DNA, 33 bp, Homo sapien
tgctttctgtcactctgagagaagccaactgac

SEQ ID NO: 244281 - DNA, 33 bp, Homo sapien
actctaggagagtatacgctgaaccctgaggct

SEQ ID NO: 244282 - DNA, 33 bp, Homo sapien
actctaggagagtatatgctgaaccctgaggct

SEQ ID NO: 244283 - DNA, 33 bp, Homo sapien
ttattgcctttctttcacctctggaacaagagt

SEQ ID NO: 244284 - DNA, 33 bp, Homo sapien
ttattgcctttctttcgcctctggaacaagagt

SEQ ID NO: 244285 - DNA, 33 bp, Homo sapien
atgtttctgtaagaggccagatagtaaatacat

SEQ ID NO: 244286 - DNA, 33 bp, Homo sapien
atgtttctgtaagaggtcagatagtaaatacat

SEQ ID NO: 244287 - DNA, 33 bp, Homo sapien
tatacttataaaagcaaactctctgtgccacag

SEQ ID NO: 244288 - DNA, 33 bp, Homo sapien
tatacttataaaagcatactctctgtgccacag

SEQ ID NO: 244289 - DNA, 33 bp, Homo sapien
ggtgataataagatcacagcttcatccttagca

SEQ ID NO: 244290 - DNA, 33 bp, Homo sapien
ggtgataataagatcatagcttcatccttagca

SEQ ID NO: 244291 - DNA, 33 bp, Homo sapien
tgacagaccacattcaaaggcagacatgtgatg

SEQ ID NO: 244292 - DNA, 33 bp, Homo sapien
tgacagaccacattcagaggcagacatgtgatg

SEQ ID NO: 244293 - DNA, 33 bp, Homo sapien
gcagagtctgtcatcaagtagggaaataaaaga

SEQ ID NO: 244294 - DNA, 33 bp, Homo sapien
gcagagtctgtcatcaggtagggaaataaaaga

SEQ ID NO: 244295 - DNA, 33 bp, Homo sapien
tattttggtagaaccaactatatagtgctgact

SEQ ID NO: 244296 - DNA, 33 bp, Homo sapien
tattttggtagaaccagctatatagtgctgact

SEQ ID NO: 244297 - DNA, 33 bp, Homo sapien
agcacatgtaatcccactcactcgcatttgacg

SEQ ID NO: 244298 - DNA, 33 bp, Homo sapien
agcacatgtaatcccattcactcgcatttgacg

SEQ ID NO: 244299 - DNA, 33 bp, Homo sapien
ctgttgctgctgccatcaatatatgcttgtcat

SEQ ID NO: 244300 - DNA, 33 bp, Homo sapien
ctgttgctgctgccattaatatatgcttgtcat

SEQ ID NO: 244301 - DNA, 33 bp, Homo sapien
ccgtttctagcatagacgggaaaattttcagaa

SEQ ID NO: 244302 - DNA, 33 bp, Homo sapien
ccgtttctagcatagatgggaaaattttcagaa

SEQ ID NO: 244303 - DNA, 33 bp, Homo sapien
tacagtagattccctcaaacctgacttctaatg

SEQ ID NO: 244304 - DNA, 33 bp, Homo sapien
tacagtagattccctccaacctgacttctaatg

SEQ ID NO: 244305 - DNA, 33 bp, Homo sapien
tttcatgtagtatcacaagccagcatgtcattt

SEQ ID NO: 244306 - DNA, 33 bp, Homo sapien
tttcatgtagtatcaccagccagcatgtcattt

SEQ ID NO: 244307 - DNA, 33 bp, Homo sapien
agaggtcctctgtgcaatattgtacctatagtt

SEQ ID NO: 244308 - DNA, 33 bp, Homo sapien
agaggtcctctgtgcagtattgtacctatagtt

SEQ ID NO: 244309 - DNA, 33 bp, Homo sapien
gttcttatcaacaaacactcttttcatatcagc

SEQ ID NO: 244310 - DNA, 33 bp, Homo sapien
gttcttatcaacaaacgctcttttcatatcagc

SEQ ID NO: 244311 - DNA, 33 bp, Homo sapien
cagtctccttagcagacagagatggccaaggag

SEQ ID NO: 244312 - DNA, 33 bp, Homo sapien
cagtctccttagcagatagagatggccaaggag

SEQ ID NO: 244313 - DNA, 33 bp, Homo sapien
tgaggccctatctgtaataataatcatcataat

SEQ ID NO: 244314 - DNA, 33 bp, Homo sapien
tgaggccctatctgtactaataatcatcataat

SEQ ID NO: 244315 - DNA, 33 bp, Homo sapien
aacagtgaatttcctacgcagcctgatccagaa

SEQ ID NO: 244316 - DNA, 33 bp, Homo sapien
aacagtgaatttcctatgcagcctgatccagaa

SEQ ID NO: 244317 - DNA, 33 bp, Homo sapien
aagctctgggtgagaacgctaacagtgaatttc

SEQ ID NO: 244318 - DNA, 33 bp, Homo sapien
aagctctgggtgagaatgctaacagtgaatttc

SEQ ID NO: 244319 - DNA, 33 bp, Homo sapien
ttagcaacaaagagaaataaacggatatatctg

SEQ ID NO: 244320 - DNA, 33 bp, Homo sapien
ttagcaacaaagagaactaaacggatatatctg

SEQ ID NO: 244321 - DNA, 33 bp, Homo sapien
tgccttggatgacttacgtgaaaaatcagtttg

SEQ ID NO: 244322 - DNA, 33 bp, Homo sapien
tgccttggatgacttatgtgaaaaatcagtttg

SEQ ID NO: 244323 - DNA, 33 bp, Homo sapien
ttatttggaaaaatacagattaaaagcattcac

SEQ ID NO: 244324 - DNA, 33 bp, Homo sapien
ttatttggaaaaatacggattaaaagcattcac

SEQ ID NO: 244325 - DNA, 33 bp, Homo sapien
atgatagcgtttatctcactgcactgagaatgt

SEQ ID NO: 244326 - DNA, 33 bp, Homo sapien
atgatagcgtttatcttactgcactgagaatgt

SEQ ID NO: 244327 - DNA, 33 bp, Homo sapien
ctctcccctttactcaacatgtattaagcattt

SEQ ID NO: 244328 - DNA, 33 bp, Homo sapien
ctctcccctttactcagcatgtattaagcattt

SEQ ID NO: 244329 - DNA, 33 bp, Homo sapien
gacaaaatctaggtgcagacaaagcagagagct

SEQ ID NO: 244330 - DNA, 33 bp, Homo sapien
gacaaaatctaggtgcggacaaagcagagagct

SEQ ID NO: 244331 - DNA, 33 bp, Homo sapien
aacacacaaaatgctacgttgattgtaatgatc

SEQ ID NO: 244332 - DNA, 33 bp, Homo sapien
aacacacaaaatgctatgttgattgtaatgatc

SEQ ID NO: 244333 - DNA, 33 bp, Homo sapien
tggaaaatagcaatacaaatgttgtgcaaagtc

SEQ ID NO: 244334 - DNA, 33 bp, Homo sapien
tggaaaatagcaatacgaatgttgtgcaaagtc

SEQ ID NO: 244335 - DNA, 33 bp, Homo sapien
atgctgtcctggttcacgctgtatgtctagatc

SEQ ID NO: 244336 - DNA, 33 bp, Homo sapien
atgctgtcctggttcatgctgtatgtctagatc

SEQ ID NO: 244337 - DNA, 33 bp, Homo sapien
aatttcttcaaaaacacagtttctcagtgaggc

SEQ ID NO: 244338 - DNA, 33 bp, Homo sapien
aatttcttcaaaaacagagtttctcagtgaggc

SEQ ID NO: 244339 - DNA, 33 bp, Homo sapien
cattttatgccctttcgcactaatgcgacagac

SEQ ID NO: 244340 - DNA, 33 bp, Homo sapien
cattttatgccctttctcactaatgcgacagac

SEQ ID NO: 244341 - DNA, 33 bp, Homo sapien
gctgactgttgctatacggcgccacagaccagg

SEQ ID NO: 244342 - DNA, 33 bp, Homo sapien
gctgactgttgctatatggcgccacagaccagg

SEQ ID NO: 244343 - DNA, 33 bp, Homo sapien
aggtttctatgcgggcaaataaggtttcatttc

SEQ ID NO: 244344 - DNA, 33 bp, Homo sapien
aggtttctatgcgggcgaataaggtttcatttc

SEQ ID NO: 244345 - DNA, 33 bp, Homo sapien
cgcctgtagacagatacgtagtgggggcgcctt

SEQ ID NO: 244346 - DNA, 33 bp, Homo sapien
cgcctgtagacagataggtagtgggggcgcctt

SEQ ID NO: 244347 - DNA, 33 bp, Homo sapien
atggagtcaacctaaacgctcctgaatgacaga

SEQ ID NO: 244348 - DNA, 33 bp, Homo sapien
atggagtcaacctaaatgctcctgaatgacaga

SEQ ID NO: 244349 - DNA, 33 bp, Homo sapien
attggcgtggtgtttcgctagcattgtcttttt

SEQ ID NO: 244350 - DNA, 33 bp, Homo sapien
attggcgtggtgtttctctagcattgtcttttt

SEQ ID NO: 244351 - DNA, 33 bp, Homo sapien
acatacagactatataagatagacctagaaaca

SEQ ID NO: 244352 - DNA, 33 bp, Homo sapien
acatacagactatataggatagacctagaaaca

SEQ ID NO: 244353 - DNA, 33 bp, Homo sapien
actcaactgcttctcaataaatttctaccctat

SEQ ID NO: 244354 - DNA, 33 bp, Homo sapien
actcaactgcttctcagtaaatttctaccctat

SEQ ID NO: 244355 - DNA, 33 bp, Homo sapien
gcccaagtttaaacaactagtaggtggcagatg

SEQ ID NO: 244356 - DNA, 33 bp, Homo sapien
gcccaagtttaaacaagtagtaggtggcagatg

SEQ ID NO: 244357 - DNA, 33 bp, Homo sapien
tccaataggacacttcacgatttttgtactctt

SEQ ID NO: 244358 - DNA, 33 bp, Homo sapien
tccaataggacacttcgcgatttttgtactctt

SEQ ID NO: 244359 - DNA, 33 bp, Homo sapien
actattgatattcccactgataatttatacgaa

SEQ ID NO: 244360 - DNA, 33 bp, Homo sapien
actattgatattcccattgataatttatacgaa

SEQ ID NO: 244361 - DNA, 33 bp, Homo sapien
gtaaacacttaaaatacggcaaatgcgactggg

SEQ ID NO: 244362 - DNA, 33 bp, Homo sapien
gtaaacacttaaaatatggcaaatgcgactggg

SEQ ID NO: 244363 - DNA, 33 bp, Homo sapien
ataacattgtcagttccaatgaaattttgtaaa

SEQ ID NO: 244364 - DNA, 33 bp, Homo sapien
ataacattgtcagttctaatgaaattttgtaaa

SEQ ID NO: 244365 - DNA, 33 bp, Homo sapien
ccactaataggactaacaggatactttttctca

SEQ ID NO: 244366 - DNA, 33 bp, Homo sapien
ccactaataggactaataggatactttttctca

SEQ ID NO: 244367 - DNA, 33 bp, Homo sapien
gaaatacgtgcagttacacttattaaaccgtaa

SEQ ID NO: 244368 - DNA, 33 bp, Homo sapien
gaaatacgtgcagttatacttattaaaccgtaa

SEQ ID NO: 244369 - DNA, 33 bp, Homo sapien
cacaagatcaggtgaggagccagggtagaactc

SEQ ID NO: 244370 - DNA, 33 bp, Homo sapien
cacaagatcaggtgagtagccagggtagaactc

SEQ ID NO: 244371 - DNA, 33 bp, Homo sapien
aagattgttcccaaagcaacagccagtctacct

SEQ ID NO: 244372 - DNA, 33 bp, Homo sapien
aagattgttcccaaagtaacagccagtctacct

SEQ ID NO: 244373 - DNA, 33 bp, Homo sapien
aagaggcaacaagtccaagaaacatttcagcac

SEQ ID NO: 244374 - DNA, 33 bp, Homo sapien
aagaggcaacaagtccgagaaacatttcagcac

SEQ ID NO: 244375 - DNA, 33 bp, Homo sapien
agagccgctcttctcacactgcattctattaag

SEQ ID NO: 244376 - DNA, 33 bp, Homo sapien
agagccgctcttctcagactgcattctattaag

SEQ ID NO: 244377 - DNA, 33 bp, Homo sapien
tagtgatacagttctacctttctgcggctcata

SEQ ID NO: 244378 - DNA, 33 bp, Homo sapien
tagtgatacagttctatctttctgcggctcata

SEQ ID NO: 244379 - DNA, 33 bp, Homo sapien
caacaagagatctggaaaaaactctgccaatgt

SEQ ID NO: 244380 - DNA, 33 bp, Homo sapien
caacaagagatctggagaaaactctgccaatgt

SEQ ID NO: 244381 - DNA, 33 bp, Homo sapien
gtgacctccagtgttacattgacgggacaggct

SEQ ID NO: 244382 - DNA, 33 bp, Homo sapien
gtgacctccagtgttatattgacgggacaggct

SEQ ID NO: 244383 - DNA, 33 bp, Homo sapien
tcggtcctcatgcctgaaaactgaggctctgta

SEQ ID NO: 244384 - DNA, 33 bp, Homo sapien
tcggtcctcatgcctgcaaactgaggctctgta

SEQ ID NO: 244385 - DNA, 33 bp, Homo sapien
actactgtgccctcaacgcgctgcagtacagaa

SEQ ID NO: 244386 - DNA, 33 bp, Homo sapien
actactgtgccctcaatgcgctgcagtacagaa

SEQ ID NO: 244387 - DNA, 33 bp, Homo sapien
cccggcggaagcagcacctctcctcccttcagt

SEQ ID NO: 244388 - DNA, 33 bp, Homo sapien
cccggcggaagcagcatctctcctcccttcagt

SEQ ID NO: 244389 - DNA, 33 bp, Homo sapien
tgatcataatcttacaatggctctaagctggtg

SEQ ID NO: 244390 - DNA, 33 bp, Homo sapien
tgatcataatcttacagtggctctaagctggtg

SEQ ID NO: 244391 - DNA, 33 bp, Homo sapien
tgacagatgagcaacaataaaaagcactaaaat

SEQ ID NO: 244392 - DNA, 33 bp, Homo sapien
tgacagatgagcaacactaaaaagcactaaaat

SEQ ID NO: 244393 - DNA, 33 bp, Homo sapien
gaagcaccggggcaaactgctaacactttccct

SEQ ID NO: 244394 - DNA, 33 bp, Homo sapien
gaagcaccggggcaaattgctaacactttccct

SEQ ID NO: 244395 - DNA, 33 bp, Homo sapien
caggcttagaacactcactggcaatgatggatg

SEQ ID NO: 244396 - DNA, 33 bp, Homo sapien
caggcttagaacactcgctggcaatgatggatg

SEQ ID NO: 244397 - DNA, 33 bp, Homo sapien
atagtggtagaaaaccgctgtgtagccagagat

SEQ ID NO: 244398 - DNA, 33 bp, Homo sapien
atagtggtagaaaacctctgtgtagccagagat

SEQ ID NO: 244399 - DNA, 33 bp, Homo sapien
aatagcataatagtcacaacatgagcttttgat

SEQ ID NO: 244400 - DNA, 33 bp, Homo sapien
aatagcataatagtcagaacatgagcttttgat

SEQ ID NO: 244401 - DNA, 33 bp, Homo sapien
gtgtgcatcctgtctcgaggggctcctgaacta

SEQ ID NO: 244402 - DNA, 33 bp, Homo sapien
gtgtgcatcctgtctctaggggctcctgaacta

SEQ ID NO: 244403 - DNA, 33 bp, Homo sapien
ttgcccagggagtgaacacagactcgccagaga

SEQ ID NO: 244404 - DNA, 33 bp, Homo sapien
ttgcccagggagtgaatacagactcgccagaga

SEQ ID NO: 244405 - DNA, 33 bp, Homo sapien
gaatggctcttggtaacgacttcttagacctgg

SEQ ID NO: 244406 - DNA, 33 bp, Homo sapien
gaatggctcttggtaatgacttcttagacctgg

SEQ ID NO: 244407 - DNA, 33 bp, Homo sapien
ctgggtcctgcctctaacgtattacaaagctgt

SEQ ID NO: 244408 - DNA, 33 bp, Homo sapien
ctgggtcctgcctctagcgtattacaaagctgt

SEQ ID NO: 244409 - DNA, 33 bp, Homo sapien
tagtggttaagagcgaacgcaggctttgcagtc

SEQ ID NO: 244410 - DNA, 33 bp, Homo sapien
tagtggttaagagcgagcgcaggctttgcagtc

SEQ ID NO: 244411 - DNA, 33 bp, Homo sapien
cccccatgacaaactcacactcctggatgctca

SEQ ID NO: 244412 - DNA, 33 bp, Homo sapien
cccccatgacaaactcgcactcctggatgctca

SEQ ID NO: 244413 - DNA, 33 bp, Homo sapien
actttccttcagcaaaacaggtttaatttaaca

SEQ ID NO: 244414 - DNA, 33 bp, Homo sapien
actttccttcagcaaagcaggtttaatttaaca

SEQ ID NO: 244415 - DNA, 33 bp, Homo sapien
ggtggctctcatcagcaagcatgatctttggtc

SEQ ID NO: 244416 - DNA, 33 bp, Homo sapien
ggtggctctcatcagcgagcatgatctttggtc

SEQ ID NO: 244417 - DNA, 33 bp, Homo sapien
tggaggcaggacagggacagactggagctggat

SEQ ID NO: 244418 - DNA, 33 bp, Homo sapien
tggaggcaggacaggggcagactggagctggat

SEQ ID NO: 244419 - DNA, 33 bp, Homo sapien
gctgttgggaatgtgaagataaataagagtgac

SEQ ID NO: 244420 - DNA, 33 bp, Homo sapien
gctgttgggaatgtgatgataaataagagtgac

SEQ ID NO: 244421 - DNA, 33 bp, Homo sapien
cagaggcttctaaacaacaatggaggcagattt

SEQ ID NO: 244422 - DNA, 33 bp, Homo sapien
cagaggcttctaaacagcaatggaggcagattt

SEQ ID NO: 244423 - DNA, 33 bp, Homo sapien
aagatgaggtggtacacgaaaaatgctgtgatt

SEQ ID NO: 244424 - DNA, 33 bp, Homo sapien
aagatgaggtggtacatgaaaaatgctgtgatt

SEQ ID NO: 244425 - DNA, 33 bp, Homo sapien
gcccataatgtagcaagaaaatgcagaaaagta

SEQ ID NO: 244426 - DNA, 33 bp, Homo sapien
gcccataatgtagcaataaaatgcagaaaagta

SEQ ID NO: 244427 - DNA, 33 bp, Homo sapien
tcaggttctgtatcaccgactgtcctctcattt

SEQ ID NO: 244428 - DNA, 33 bp, Homo sapien
tcaggttctgtatcacggactgtcctctcattt

SEQ ID NO: 244429 - DNA, 33 bp, Homo sapien
atgcatattaatgaagcatgtactttgttccaa

SEQ ID NO: 244430 - DNA, 33 bp, Homo sapien
atgcatattaatgaaggatgtactttgttccaa

SEQ ID NO: 244431 - DNA, 33 bp, Homo sapien
tcttttacgttattaaacctgcagtgcctacct

SEQ ID NO: 244432 - DNA, 33 bp, Homo sapien
tcttttacgttattaagcctgcagtgcctacct

SEQ ID NO: 244433 - DNA, 33 bp, Homo sapien
acctttctcctacacaatcctgtcctgtgcatc

SEQ ID NO: 244434 - DNA, 33 bp, Homo sapien
acctttctcctacacactcctgtcctgtgcatc

SEQ ID NO: 244435 - DNA, 33 bp, Homo sapien
tgttacttcttggaacacttctcaaaatattta

SEQ ID NO: 244436 - DNA, 33 bp, Homo sapien
tgttacttcttggaacgcttctcaaaatattta

SEQ ID NO: 244437 - DNA, 33 bp, Homo sapien
tagaaaataggaaagaagaccagctttgtgggc

SEQ ID NO: 244438 - DNA, 33 bp, Homo sapien
tagaaaataggaaagaggaccagctttgtgggc

SEQ ID NO: 244439 - DNA, 33 bp, Homo sapien
ctcggagaaacttggaatacatacaagagaaaa

SEQ ID NO: 244440 - DNA, 33 bp, Homo sapien
ctcggagaaacttggagtacatacaagagaaaa

SEQ ID NO: 244441 - DNA, 33 bp, Homo sapien
tgtgtttccaaacacacgcagtaggctcccttt

SEQ ID NO: 244442 - DNA, 33 bp, Homo sapien
tgtgtttccaaacacatgcagtaggctcccttt

SEQ ID NO: 244443 - DNA, 33 bp, Homo sapien
agaaacatacacaatagagagtgtctgggaact

SEQ ID NO: 244444 - DNA, 33 bp, Homo sapien
agaaacatacacaatatagagtgtctgggaact

SEQ ID NO: 244445 - DNA, 33 bp, Homo sapien
gaaatgtaatttcacagggatgttctaaaaaat

SEQ ID NO: 244446 - DNA, 33 bp, Homo sapien
gaaatgtaatttcacatggatgttctaaaaaat

SEQ ID NO: 244447 - DNA, 33 bp, Homo sapien
tacattaaccactgcaatcatccaggttcatct

SEQ ID NO: 244448 - DNA, 33 bp, Homo sapien
tacattaaccactgcagtcatccaggttcatct

SEQ ID NO: 244449 - DNA, 33 bp, Homo sapien
tctggttccaggcttgaaagaaatcattctacg

SEQ ID NO: 244450 - DNA, 33 bp, Homo sapien
tctggttccaggcttgcaagaaatcattctacg

SEQ ID NO: 244451 - DNA, 33 bp, Homo sapien
ttaagaaagattaaaacgtatcatgagaaacaa

SEQ ID NO: 244452 - DNA, 33 bp, Homo sapien
ttaagaaagattaaaatgtatcatgagaaacaa

SEQ ID NO: 244453 - DNA, 33 bp, Homo sapien
tgaaattacaatgttacacatgaagaattgggt

SEQ ID NO: 244454 - DNA, 33 bp, Homo sapien
tgaaattacaatgttatacatgaagaattgggt

SEQ ID NO: 244455 - DNA, 33 bp, Homo sapien
tcatgataaagtgagaaaaaacatggtcactgt

SEQ ID NO: 244456 - DNA, 33 bp, Homo sapien
tcatgataaagtgagacaaaacatggtcactgt

SEQ ID NO: 244457 - DNA, 33 bp, Homo sapien
cccaaagtccatacacaattaagctaccactcg

SEQ ID NO: 244458 - DNA, 33 bp, Homo sapien
cccaaagtccatacactattaagctaccactcg

SEQ ID NO: 244459 - DNA, 33 bp, Homo sapien
cataatagagttaactgacgcaaacctacatgg

SEQ ID NO: 244460 - DNA, 33 bp, Homo sapien
cataatagagttaacttacgcaaacctacatgg

SEQ ID NO: 244461 - DNA, 33 bp, Homo sapien
gaagtctcacttcactaacaaagctaagttcat

SEQ ID NO: 244462 - DNA, 33 bp, Homo sapien
gaagtctcacttcactcacaaagctaagttcat

SEQ ID NO: 244463 - DNA, 33 bp, Homo sapien
ttcacaaaaattccaaagagccctgggtagatg

SEQ ID NO: 244464 - DNA, 33 bp, Homo sapien
ttcacaaaaattccaaggagccctgggtagatg

SEQ ID NO: 244465 - DNA, 33 bp, Homo sapien
cacaccttgttgttaacgtctgcatcatttcag

SEQ ID NO: 244466 - DNA, 33 bp, Homo sapien
cacaccttgttgttaatgtctgcatcatttcag

SEQ ID NO: 244467 - DNA, 33 bp, Homo sapien
aggacttcccattccaggtttccgcagccctgt

SEQ ID NO: 244468 - DNA, 33 bp, Homo sapien
aggacttcccattccatgtttccgcagccctgt

SEQ ID NO: 244469 - DNA, 33 bp, Homo sapien
cagaaagatggggtgacagtttcttgacagagc

SEQ ID NO: 244470 - DNA, 33 bp, Homo sapien
cagaaagatggggtgatagtttcttgacagagc

SEQ ID NO: 244471 - DNA, 33 bp, Homo sapien
ggctgatcaatgagaaagcaattacagttagat

SEQ ID NO: 244472 - DNA, 33 bp, Homo sapien
ggctgatcaatgagaacgcaattacagttagat

SEQ ID NO: 244473 - DNA, 33 bp, Homo sapien
aggattctgataatcaaccagtttcagggacca

SEQ ID NO: 244474 - DNA, 33 bp, Homo sapien
aggattctgataatcagccagtttcagggacca

SEQ ID NO: 244475 - DNA, 33 bp, Homo sapien
atgatttcgagtgtaaaccagtctatgaactag

SEQ ID NO: 244476 - DNA, 33 bp, Homo sapien
atgatttcgagtgtaagccagtctatgaactag

SEQ ID NO: 244477 - DNA, 33 bp, Homo sapien
aagtttccttggcaacaggtggcaagtatggaa

SEQ ID NO: 244478 - DNA, 33 bp, Homo sapien
aagtttccttggcaactggtggcaagtatggaa

SEQ ID NO: 244479 - DNA, 33 bp, Homo sapien
agggaacagaagtagacacaacaatttgagttt

SEQ ID NO: 244480 - DNA, 33 bp, Homo sapien
agggaacagaagtagatacaacaatttgagttt

SEQ ID NO: 244481 - DNA, 33 bp, Homo sapien
cactcctcacaacagagcatcttcaagggtggt

SEQ ID NO: 244482 - DNA, 33 bp, Homo sapien
cactcctcacaacagatcatcttcaagggtggt

SEQ ID NO: 244483 - DNA, 33 bp, Homo sapien
gcagtctaacccaaagaagaactggatattggg

SEQ ID NO: 244484 - DNA, 33 bp, Homo sapien
gcagtctaacccaaaggagaactggatattggg

SEQ ID NO: 244485 - DNA, 33 bp, Homo sapien
tatctaattttgatcaaagcactttttgcataa

SEQ ID NO: 244486 - DNA, 33 bp, Homo sapien
tatctaattttgatcagagcactttttgcataa

SEQ ID NO: 244487 - DNA, 33 bp, Homo sapien
gggtctttggtttttacgctgtttggcggtaag

SEQ ID NO: 244488 - DNA, 33 bp, Homo sapien
gggtctttggtttttatgctgtttggcggtaag

SEQ ID NO: 244489 - DNA, 33 bp, Homo sapien
agaacatgtattcaccaatttggaccaggttta

SEQ ID NO: 244490 - DNA, 33 bp, Homo sapien
agaacatgtattcaccgatttggaccaggttta

SEQ ID NO: 244491 - DNA, 33 bp, Homo sapien
tacaggtacacatcaccgtaggcacacatagat

SEQ ID NO: 244492 - DNA, 33 bp, Homo sapien
tacaggtacacatcactgtaggcacacatagat

SEQ ID NO: 244493 - DNA, 33 bp, Homo sapien
ttagaatcgattttaactggtattagccagtgg

SEQ ID NO: 244494 - DNA, 33 bp, Homo sapien
ttagaatcgattttaagtggtattagccagtgg

SEQ ID NO: 244495 - DNA, 33 bp, Homo sapien
aacaagaacaacgacaagagaaaaatagctttc

SEQ ID NO: 244496 - DNA, 33 bp, Homo sapien
aacaagaacaacgacaggagaaaaatagctttc

SEQ ID NO: 244497 - DNA, 33 bp, Homo sapien
ccaagtaagaatacagccaagacgggcagtaga

SEQ ID NO: 244498 - DNA, 33 bp, Homo sapien
ccaagtaagaatacagtcaagacgggcagtaga

SEQ ID NO: 244499 - DNA, 33 bp, Homo sapien
agtgtcttcataatagcaggaagtttatgttct

SEQ ID NO: 244500 - DNA, 33 bp, Homo sapien
agtgtcttcataataggaggaagtttatgttct

SEQ ID NO: 244501 - DNA, 33 bp, Homo sapien
gggcttacagagtagaagttaagagcacagact

SEQ ID NO: 244502 - DNA, 33 bp, Homo sapien
gggcttacagagtagaggttaagagcacagact

SEQ ID NO: 244503 - DNA, 33 bp, Homo sapien
accaatttacttcaaacagcctacttccaggta

SEQ ID NO: 244504 - DNA, 33 bp, Homo sapien
accaatttacttcaaatagcctacttccaggta

SEQ ID NO: 244505 - DNA, 33 bp, Homo sapien
gacctcctgaaaacaacgaacgacatgtgcatg

SEQ ID NO: 244506 - DNA, 33 bp, Homo sapien
gacctcctgaaaacaatgaacgacatgtgcatg

SEQ ID NO: 244507 - DNA, 33 bp, Homo sapien
tcaagccttcagataaaggcatccttggccaac

SEQ ID NO: 244508 - DNA, 33 bp, Homo sapien
tcaagccttcagataagggcatccttggccaac

SEQ ID NO: 244509 - DNA, 33 bp, Homo sapien
gatacccatatgaatgaaaaagggagaaagaac

SEQ ID NO: 244510 - DNA, 33 bp, Homo sapien
gatacccatatgaatgtaaaagggagaaagaac

SEQ ID NO: 244511 - DNA, 33 bp, Homo sapien
gtgcaccatggaaagaactcaattgcattgata

SEQ ID NO: 244512 - DNA, 33 bp, Homo sapien
gtgcaccatggaaagatctcaattgcattgata

SEQ ID NO: 244513 - DNA, 33 bp, Homo sapien
cgcctatcaaatcaggcccctttgcatatatat

SEQ ID NO: 244514 - DNA, 33 bp, Homo sapien
cgcctatcaaatcaggtccctttgcatatatat

SEQ ID NO: 244515 - DNA, 33 bp, Homo sapien
tgttgaaaccagctgacgagtgcatgaggattt

SEQ ID NO: 244516 - DNA, 33 bp, Homo sapien
tgttgaaaccagctgatgagtgcatgaggattt

SEQ ID NO: 244517 - DNA, 33 bp, Homo sapien
taaagtattatatagacagttggccccagaatt

SEQ ID NO: 244518 - DNA, 33 bp, Homo sapien
taaagtattatatagagagttggccccagaatt

SEQ ID NO: 244519 - DNA, 33 bp, Homo sapien
ctctgcatttttctgacgtcactgccagtctct

SEQ ID NO: 244520 - DNA, 33 bp, Homo sapien
ctctgcatttttctgatgtcactgccagtctct

SEQ ID NO: 244521 - DNA, 33 bp, Homo sapien
accacccttagcaccaacaagtcttgaggaaat

SEQ ID NO: 244522 - DNA, 33 bp, Homo sapien
accacccttagcaccaccaagtcttgaggaaat

SEQ ID NO: 244523 - DNA, 33 bp, Homo sapien
ctcagatgacaggtaaggttttatgtcaaaaat

SEQ ID NO: 244524 - DNA, 33 bp, Homo sapien
ctcagatgacaggtaatgttttatgtcaaaaat

SEQ ID NO: 244525 - DNA, 33 bp, Homo sapien
tcctctgagagttgaaaagctggcccaagcccc

SEQ ID NO: 244526 - DNA, 33 bp, Homo sapien
tcctctgagagttgaagagctggcccaagcccc

SEQ ID NO: 244527 - DNA, 33 bp, Homo sapien
ttgagaagtaaaatgcccaaagagttcatcagt

SEQ ID NO: 244528 - DNA, 33 bp, Homo sapien
ttgagaagtaaaatgctcaaagagttcatcagt

SEQ ID NO: 244529 - DNA, 33 bp, Homo sapien
atgcttgaaaggcggacgaaactttggaaccag

SEQ ID NO: 244530 - DNA, 33 bp, Homo sapien
atgcttgaaaggcggatgaaactttggaaccag

SEQ ID NO: 244531 - DNA, 33 bp, Homo sapien
cgaactcccagcccaacaatgtcaggtgaccat

SEQ ID NO: 244532 - DNA, 33 bp, Homo sapien
cgaactcccagcccaagaatgtcaggtgaccat

SEQ ID NO: 244533 - DNA, 33 bp, Homo sapien
taaggccatcagcagaagacggccatcagcaag

SEQ ID NO: 244534 - DNA, 33 bp, Homo sapien
taaggccatcagcagaggacggccatcagcaag

SEQ ID NO: 244535 - DNA, 33 bp, Homo sapien
tgccttcagggaattacccaaccatcagcctac

SEQ ID NO: 244536 - DNA, 33 bp, Homo sapien
tgccttcagggaattatccaaccatcagcctac

SEQ ID NO: 244537 - DNA, 33 bp, Homo sapien
agccctaagaatctaacacagtactcaaatgtg

SEQ ID NO: 244538 - DNA, 33 bp, Homo sapien
agccctaagaatctaatacagtactcaaatgtg

SEQ ID NO: 244539 - DNA, 33 bp, Homo sapien
gccaccggaaccgtgcaagaataagtttctgtt

SEQ ID NO: 244540 - DNA, 33 bp, Homo sapien
gccaccggaaccgtgccagaataagtttctgtt

SEQ ID NO: 244541 - DNA, 33 bp, Homo sapien
atggaaggagaaagcaatgcttacaaatgatca

SEQ ID NO: 244542 - DNA, 33 bp, Homo sapien
atggaaggagaaagcagtgcttacaaatgatca

SEQ ID NO: 244543 - DNA, 33 bp, Homo sapien
gttctgggacagattccactgtttccaccggga

SEQ ID NO: 244544 - DNA, 33 bp, Homo sapien
gttctgggacagattctactgtttccaccggga

SEQ ID NO: 244545 - DNA, 33 bp, Homo sapien
cgtcagataggccacaatggcgaagtccctggg

SEQ ID NO: 244546 - DNA, 33 bp, Homo sapien
cgtcagataggccacagtggcgaagtccctggg

SEQ ID NO: 244547 - DNA, 33 bp, Homo sapien
acttccatccttcctacagcttcagatcacttg

SEQ ID NO: 244548 - DNA, 33 bp, Homo sapien
acttccatccttcctagagcttcagatcacttg

SEQ ID NO: 244549 - DNA, 33 bp, Homo sapien
gataaatcaggtatccaaaggacagatagaaga

SEQ ID NO: 244550 - DNA, 33 bp, Homo sapien
gataaatcaggtatccgaaggacagatagaaga

SEQ ID NO: 244551 - DNA, 33 bp, Homo sapien
aacactatgcaatttacaacacctttccacata

SEQ ID NO: 244552 - DNA, 33 bp, Homo sapien
aacactatgcaatttataacacctttccacata

SEQ ID NO: 244553 - DNA, 33 bp, Homo sapien
tctctcctttgttcaacgtgccagggggcaggg

SEQ ID NO: 244554 - DNA, 33 bp, Homo sapien
tctctcctttgttcaatgtgccagggggcaggg

SEQ ID NO: 244555 - DNA, 33 bp, Homo sapien
aaatctgcactctgtaaacatatctatgacttt

SEQ ID NO: 244556 - DNA, 33 bp, Homo sapien
aaatctgcactctgtagacatatctatgacttt

SEQ ID NO: 244557 - DNA, 33 bp, Homo sapien
aggagatcagaatctacgatcactaagtccatt

SEQ ID NO: 244558 - DNA, 33 bp, Homo sapien
aggagatcagaatctaggatcactaagtccatt

SEQ ID NO: 244559 - DNA, 33 bp, Homo sapien
tttcagtgtcttctaacatagtcagtgaaaatt

SEQ ID NO: 244560 - DNA, 33 bp, Homo sapien
tttcagtgtcttctaatatagtcagtgaaaatt

SEQ ID NO: 244561 - DNA, 33 bp, Homo sapien
tgcttacagagaaggaagataaaaggatgagag

SEQ ID NO: 244562 - DNA, 33 bp, Homo sapien
tgcttacagagaaggatgataaaaggatgagag

SEQ ID NO: 244563 - DNA, 33 bp, Homo sapien
cttccttttggaataacgggaggtagaatgcag

SEQ ID NO: 244564 - DNA, 33 bp, Homo sapien
cttccttttggaataatgggaggtagaatgcag

SEQ ID NO: 244565 - DNA, 33 bp, Homo sapien
ttggcttcacaatctcaatgtctaactcgacct

SEQ ID NO: 244566 - DNA, 33 bp, Homo sapien
ttggcttcacaatctcgatgtctaactcgacct

SEQ ID NO: 244567 - DNA, 33 bp, Homo sapien
ggcgagcaggacctgacggtaaagagcctcgtg

SEQ ID NO: 244568 - DNA, 33 bp, Homo sapien
ggcgagcaggacctgatggtaaagagcctcgtg

SEQ ID NO: 244569 - DNA, 33 bp, Homo sapien
attttatgattttcccaatcctttcattgtctc

SEQ ID NO: 244570 - DNA, 33 bp, Homo sapien
attttatgattttcccgatcctttcattgtctc

SEQ ID NO: 244571 - DNA, 33 bp, Homo sapien
tcacaaccactttggaacccatcggagagcctc

SEQ ID NO: 244572 - DNA, 33 bp, Homo sapien
tcacaaccactttggagcccatcggagagcctc

SEQ ID NO: 244573 - DNA, 33 bp, Homo sapien
ttgctgcatccaaaaccgaggactttactggtt

SEQ ID NO: 244574 - DNA, 33 bp, Homo sapien
ttgctgcatccaaaactgaggactttactggtt

SEQ ID NO: 244575 - DNA, 33 bp, Homo sapien
ggacccttgaactgacccgcttagtctcatccc

SEQ ID NO: 244576 - DNA, 33 bp, Homo sapien
ggacccttgaactgacgcgcttagtctcatccc

SEQ ID NO: 244577 - DNA, 33 bp, Homo sapien
atctccgtgagatagaccctggatgtgctgtag

SEQ ID NO: 244578 - DNA, 33 bp, Homo sapien
atctccgtgagatagagcctggatgtgctgtag

SEQ ID NO: 244579 - DNA, 33 bp, Homo sapien
tggtttgcatggcttacatgacatggcaaagtt

SEQ ID NO: 244580 - DNA, 33 bp, Homo sapien
tggtttgcatggcttatatgacatggcaaagtt

SEQ ID NO: 244581 - DNA, 33 bp, Homo sapien
aggtaattcagcaagacctaaaggcaccttcct

SEQ ID NO: 244582 - DNA, 33 bp, Homo sapien
aggtaattcagcaagatctaaaggcaccttcct

SEQ ID NO: 244583 - DNA, 33 bp, Homo sapien
gctggagtgatgataaacttatggagaagtggt

SEQ ID NO: 244584 - DNA, 33 bp, Homo sapien
gctggagtgatgataagcttatggagaagtggt

SEQ ID NO: 244585 - DNA, 33 bp, Homo sapien
acaaaatccacttagaagaagaacagtcttttg

SEQ ID NO: 244586 - DNA, 33 bp, Homo sapien
acaaaatccacttagaggaagaacagtcttttg

SEQ ID NO: 244587 - DNA, 33 bp, Homo sapien
ttccatgaactagatcaatcaaaaagaaagctc

SEQ ID NO: 244588 - DNA, 33 bp, Homo sapien
ttccatgaactagatccatcaaaaagaaagctc

SEQ ID NO: 244589 - DNA, 33 bp, Homo sapien
gcttctatctctacagaagaattcctgatgaag

SEQ ID NO: 244590 - DNA, 33 bp, Homo sapien
gcttctatctctacagcagaattcctgatgaag

SEQ ID NO: 244591 - DNA, 33 bp, Homo sapien
ggtgaatgaatgaagagagttttacacaggatt

SEQ ID NO: 244592 - DNA, 33 bp, Homo sapien
ggtgaatgaatgaagatagttttacacaggatt

SEQ ID NO: 244593 - DNA, 33 bp, Homo sapien
caaaactaactcatgagctcccttccagagcct

SEQ ID NO: 244594 - DNA, 33 bp, Homo sapien
caaaactaactcatgatctcccttccagagcct

SEQ ID NO: 244595 - DNA, 33 bp, Homo sapien
actgattaacgtgaaacgggcatccaaatggta

SEQ ID NO: 244596 - DNA, 33 bp, Homo sapien
actgattaacgtgaaatgggcatccaaatggta

SEQ ID NO: 244597 - DNA, 33 bp, Homo sapien
atttgttattgaaagagaatttgaagtgtggtt

SEQ ID NO: 244598 - DNA, 33 bp, Homo sapien
atttgttattgaaagataatttgaagtgtggtt

SEQ ID NO: 244599 - DNA, 33 bp, Homo sapien
ttaaagctcataaaacaggatcattttaacaaa

SEQ ID NO: 244600 - DNA, 33 bp, Homo sapien
ttaaagctcataaaacgggatcattttaacaaa

SEQ ID NO: 244601 - DNA, 33 bp, Homo sapien
tgcaactgtttgggccactgaaataaaatcttg

SEQ ID NO: 244602 - DNA, 33 bp, Homo sapien
tgcaactgtttgggcccctgaaataaaatcttg

SEQ ID NO: 244603 - DNA, 33 bp, Homo sapien
gaatctactttcttcacgctatacaattctctc

SEQ ID NO: 244604 - DNA, 33 bp, Homo sapien
gaatctactttcttcatgctatacaattctctc

SEQ ID NO: 244605 - DNA, 33 bp, Homo sapien
atgtcgatagtttccaaggcagaatctctgcca

SEQ ID NO: 244606 - DNA, 33 bp, Homo sapien
atgtcgatagtttccagggcagaatctctgcca

SEQ ID NO: 244607 - DNA, 33 bp, Homo sapien
catatgtatactcacaagcatatacgtaggcac

SEQ ID NO: 244608 - DNA, 33 bp, Homo sapien
catatgtatactcacaggcatatacgtaggcac

SEQ ID NO: 244609 - DNA, 33 bp, Homo sapien
tttatttgtatcagaacgaacttaagaagaagc

SEQ ID NO: 244610 - DNA, 33 bp, Homo sapien
tttatttgtatcagaatgaacttaagaagaagc

SEQ ID NO: 244611 - DNA, 33 bp, Homo sapien
caaggggaaaaacaaacgtgtatagagcccatt

SEQ ID NO: 244612 - DNA, 33 bp, Homo sapien
caaggggaaaaacaaatgtgtatagagcccatt

SEQ ID NO: 244613 - DNA, 33 bp, Homo sapien
ctgtctcttgcgggaaaaacctacattatgtag

SEQ ID NO: 244614 - DNA, 33 bp, Homo sapien
ctgtctcttgcgggaagaacctacattatgtag

SEQ ID NO: 244615 - DNA, 33 bp, Homo sapien
cttgtcaaacatattcacataaacgcttctcat

SEQ ID NO: 244616 - DNA, 33 bp, Homo sapien
cttgtcaaacatattcgcataaacgcttctcat

SEQ ID NO: 244617 - DNA, 33 bp, Homo sapien
tctgagagtgaaaagacggagctgaaacttaag

SEQ ID NO: 244618 - DNA, 33 bp, Homo sapien
tctgagagtgaaaagatggagctgaaacttaag

SEQ ID NO: 244619 - DNA, 33 bp, Homo sapien
tcataggcttacatagaagagctgggttcatga

SEQ ID NO: 244620 - DNA, 33 bp, Homo sapien
tcataggcttacataggagagctgggttcatga

SEQ ID NO: 244621 - DNA, 33 bp, Homo sapien
tgaagtagcaatgagacgacttttacctttggt

SEQ ID NO: 244622 - DNA, 33 bp, Homo sapien
tgaagtagcaatgagaggacttttacctttggt

SEQ ID NO: 244623 - DNA, 33 bp, Homo sapien
ctggtttttagttgctaaacatgataggctaaa

SEQ ID NO: 244624 - DNA, 33 bp, Homo sapien
ctggtttttagttgcttaacatgataggctaaa

SEQ ID NO: 244625 - DNA, 33 bp, Homo sapien
atcagtatcatttttgcattatcttctataaat

SEQ ID NO: 244626 - DNA, 33 bp, Homo sapien
atcagtatcatttttggattatcttctataaat

SEQ ID NO: 244627 - DNA, 33 bp, Homo sapien
tatgtggagcactatgaaaagagaaaggagata

SEQ ID NO: 244628 - DNA, 33 bp, Homo sapien
tatgtggagcactatggaaagagaaaggagata

SEQ ID NO: 244629 - DNA, 33 bp, Homo sapien
cattttgagacagttacggttggaaaattttct

SEQ ID NO: 244630 - DNA, 33 bp, Homo sapien
cattttgagacagttatggttggaaaattttct

SEQ ID NO: 244631 - DNA, 33 bp, Homo sapien
agttacaattgtgcaacagaggaccgagagaca

SEQ ID NO: 244632 - DNA, 33 bp, Homo sapien
agttacaattgtgcaatagaggaccgagagaca

SEQ ID NO: 244633 - DNA, 33 bp, Homo sapien
tgtcaattatacctcagtgaaacttggggaaaa

SEQ ID NO: 244634 - DNA, 33 bp, Homo sapien
tgtcaattatacctcattgaaacttggggaaaa

SEQ ID NO: 244635 - DNA, 33 bp, Homo sapien
aagattttaataaaagactgcccaagaaatgtg

SEQ ID NO: 244636 - DNA, 33 bp, Homo sapien
aagattttaataaaagcctgcccaagaaatgtg

SEQ ID NO: 244637 - DNA, 33 bp, Homo sapien
tccctcctgcctgataacctgtttgctccaggg

SEQ ID NO: 244638 - DNA, 33 bp, Homo sapien
tccctcctgcctgataccctgtttgctccaggg

SEQ ID NO: 244639 - DNA, 33 bp, Homo sapien
ggtcatcttcctccccaacatgaagcttgttgg

SEQ ID NO: 244640 - DNA, 33 bp, Homo sapien
ggtcatcttcctcccccacatgaagcttgttgg

SEQ ID NO: 244641 - DNA, 33 bp, Homo sapien
agcagaaatggtatcacaataacttttatcaat

SEQ ID NO: 244642 - DNA, 33 bp, Homo sapien
agcagaaatggtatcataataacttttatcaat

SEQ ID NO: 244643 - DNA, 33 bp, Homo sapien
agttcctatgacctcactgagcaaaatgatgag

SEQ ID NO: 244644 - DNA, 33 bp, Homo sapien
agttcctatgacctcattgagcaaaatgatgag

SEQ ID NO: 244645 - DNA, 33 bp, Homo sapien
ctcagtgtgcttcaaaggtaggtcaattgtctt

SEQ ID NO: 244646 - DNA, 33 bp, Homo sapien
ctcagtgtgcttcaaatgtaggtcaattgtctt

SEQ ID NO: 244647 - DNA, 33 bp, Homo sapien
ggtttctaaatcccagaagaagagctgtgagtg

SEQ ID NO: 244648 - DNA, 33 bp, Homo sapien
ggtttctaaatcccaggagaagagctgtgagtg

SEQ ID NO: 244649 - DNA, 33 bp, Homo sapien
ttacgtgtaagctggaagtactaattggctagc

SEQ ID NO: 244650 - DNA, 33 bp, Homo sapien
ttacgtgtaagctggatgtactaattggctagc

SEQ ID NO: 244651 - DNA, 33 bp, Homo sapien
gtgttattaaaatggacggcaaagggaagaaat

SEQ ID NO: 244652 - DNA, 33 bp, Homo sapien
gtgttattaaaatggatggcaaagggaagaaat

SEQ ID NO: 244653 - DNA, 33 bp, Homo sapien
aaagcattgctaaccacgactgtcttaattttg

SEQ ID NO: 244654 - DNA, 33 bp, Homo sapien
aaagcattgctaaccaggactgtcttaattttg

SEQ ID NO: 244655 - DNA, 33 bp, Homo sapien
ttttgtctgtatattaaatcttagcaaacaaag

SEQ ID NO: 244656 - DNA, 33 bp, Homo sapien
ttttgtctgtatattacatcttagcaaacaaag

SEQ ID NO: 244657 - DNA, 33 bp, Homo sapien
ttgaaaacagctctaaatccctgccctggttgt

SEQ ID NO: 244658 - DNA, 33 bp, Homo sapien
ttgaaaacagctctaactccctgccctggttgt

SEQ ID NO: 244659 - DNA, 33 bp, Homo sapien
ggcctactagagcaagacaggctttctcagtcc

SEQ ID NO: 244660 - DNA, 33 bp, Homo sapien
ggcctactagagcaaggcaggctttctcagtcc

SEQ ID NO: 244661 - DNA, 33 bp, Homo sapien
ttcttggacccgtgaaccttgaatatgggagaa

SEQ ID NO: 244662 - DNA, 33 bp, Homo sapien
ttcttggacccgtgaatcttgaatatgggagaa

SEQ ID NO: 244663 - DNA, 33 bp, Homo sapien
atggtagtagctaaaaagacatttaatcttggc

SEQ ID NO: 244664 - DNA, 33 bp, Homo sapien
atggtagtagctaaaaggacatttaatcttggc

SEQ ID NO: 244665 - DNA, 33 bp, Homo sapien
gttataatttcatgaacctatcaggaacctagg

SEQ ID NO: 244666 - DNA, 33 bp, Homo sapien
gttataatttcatgaatctatcaggaacctagg

SEQ ID NO: 244667 - DNA, 33 bp, Homo sapien
tggaagggggatgaggaatgaaatactacctat

SEQ ID NO: 244668 - DNA, 33 bp, Homo sapien
tggaagggggatgagggatgaaatactacctat

SEQ ID NO: 244669 - DNA, 33 bp, Homo sapien
cttcatatgagaaaacggaggctcatgttggtt

SEQ ID NO: 244670 - DNA, 33 bp, Homo sapien
cttcatatgagaaaactgaggctcatgttggtt

SEQ ID NO: 244671 - DNA, 33 bp, Homo sapien
catggtcacatttaagccctaccaaaactctgc

SEQ ID NO: 244672 - DNA, 33 bp, Homo sapien
catggtcacatttaagtcctaccaaaactctgc

SEQ ID NO: 244673 - DNA, 33 bp, Homo sapien
actacagccttagaaccctcttcctctgactag

SEQ ID NO: 244674 - DNA, 33 bp, Homo sapien
actacagccttagaactctcttcctctgactag

SEQ ID NO: 244675 - DNA, 33 bp, Homo sapien
gagatctgcagtagaaaatgtaaatggtttcta

SEQ ID NO: 244676 - DNA, 33 bp, Homo sapien
gagatctgcagtagaagatgtaaatggtttcta

SEQ ID NO: 244677 - DNA, 33 bp, Homo sapien
tagactcaaaaatatacatgggccagtagatta

SEQ ID NO: 244678 - DNA, 33 bp, Homo sapien
tagactcaaaaatatatatgggccagtagatta

SEQ ID NO: 244679 - DNA, 33 bp, Homo sapien
gggaagcagggactagaaaggtcagtttcagat

SEQ ID NO: 244680 - DNA, 33 bp, Homo sapien
gggaagcagggactagtaaggtcagtttcagat

SEQ ID NO: 244681 - DNA, 33 bp, Homo sapien
aagcaaagcaaaatgaagcaacgcaacaaacaa

SEQ ID NO: 244682 - DNA, 33 bp, Homo sapien
aagcaaagcaaaatgaggcaacgcaacaaacaa

SEQ ID NO: 244683 - DNA, 33 bp, Homo sapien
aatacaaaaaggaataccttgcctctgctctct

SEQ ID NO: 244684 - DNA, 33 bp, Homo sapien
aatacaaaaaggaatatcttgcctctgctctct

SEQ ID NO: 244685 - DNA, 33 bp, Homo sapien
ctctggaagtccttctcaacatctttgttccag

SEQ ID NO: 244686 - DNA, 33 bp, Homo sapien
ctctggaagtccttcttaacatctttgttccag

SEQ ID NO: 244687 - DNA, 33 bp, Homo sapien
taagattacctagaagcagcagtctgtctctaa

SEQ ID NO: 244688 - DNA, 33 bp, Homo sapien
taagattacctagaaggagcagtctgtctctaa

SEQ ID NO: 244689 - DNA, 33 bp, Homo sapien
gtagctgcctggtatacaaaatccaaaataaca

SEQ ID NO: 244690 - DNA, 33 bp, Homo sapien
gtagctgcctggtatagaaaatccaaaataaca

SEQ ID NO: 244691 - DNA, 33 bp, Homo sapien
ctaactcacaggggtacggtaaaggttaactga

SEQ ID NO: 244692 - DNA, 33 bp, Homo sapien
ctaactcacaggggtatggtaaaggttaactga

SEQ ID NO: 244693 - DNA, 33 bp, Homo sapien
aagcagtcatggttcaaactcaactctgctatc

SEQ ID NO: 244694 - DNA, 33 bp, Homo sapien
aagcagtcatggttcagactcaactctgctatc

SEQ ID NO: 244695 - DNA, 33 bp, Homo sapien
attaacattatgttcaaccaatcacttttgaga

SEQ ID NO: 244696 - DNA, 33 bp, Homo sapien
attaacattatgttcagccaatcacttttgaga

SEQ ID NO: 244697 - DNA, 33 bp, Homo sapien
tgtatatacatataaaaggacactccttaacaa

SEQ ID NO: 244698 - DNA, 33 bp, Homo sapien
tgtatatacatataaagggacactccttaacaa

SEQ ID NO: 244699 - DNA, 33 bp, Homo sapien
gtggaatgaattcttacggtcaccattacaaag

SEQ ID NO: 244700 - DNA, 33 bp, Homo sapien
gtggaatgaattcttatggtcaccattacaaag

SEQ ID NO: 244701 - DNA, 33 bp, Homo sapien
gcaggcaagtttgctacggctgtttcatttctg

SEQ ID NO: 244702 - DNA, 33 bp, Homo sapien
gcaggcaagtttgctatggctgtttcatttctg

SEQ ID NO: 244703 - DNA, 33 bp, Homo sapien
atggccccagagattcaatagctacacagaggc

SEQ ID NO: 244704 - DNA, 33 bp, Homo sapien
atggccccagagattcgatagctacacagaggc

SEQ ID NO: 244705 - DNA, 33 bp, Homo sapien
gagcctggagtactgaaagatctaagaaaagaa

SEQ ID NO: 244706 - DNA, 33 bp, Homo sapien
gagcctggagtactgagagatctaagaaaagaa

SEQ ID NO: 244707 - DNA, 33 bp, Homo sapien
cctttcttcgcttatcaatctcctagcatgcag

SEQ ID NO: 244708 - DNA, 33 bp, Homo sapien
cctttcttcgcttatcgatctcctagcatgcag

SEQ ID NO: 244709 - DNA, 33 bp, Homo sapien
tctgggactcttgtgaagcattttccccttgcc

SEQ ID NO: 244710 - DNA, 33 bp, Homo sapien
tctgggactcttgtgaggcattttccccttgcc

SEQ ID NO: 244711 - DNA, 33 bp, Homo sapien
gctcaaacagttctccagaatcaaagccactat

SEQ ID NO: 244712 - DNA, 33 bp, Homo sapien
gctcaaacagttctccggaatcaaagccactat

SEQ ID NO: 244713 - DNA, 33 bp, Homo sapien
tctcatgactatacagaagaggtgatgtgattc

SEQ ID NO: 244714 - DNA, 33 bp, Homo sapien
tctcatgactatacagcagaggtgatgtgattc

SEQ ID NO: 244715 - DNA, 33 bp, Homo sapien
caggatctcaacattgcagaactagaaatgaga

SEQ ID NO: 244716 - DNA, 33 bp, Homo sapien
caggatctcaacattggagaactagaaatgaga

SEQ ID NO: 244717 - DNA, 33 bp, Homo sapien
ttgcatatattatccaagtttagagatgggaaa

SEQ ID NO: 244718 - DNA, 33 bp, Homo sapien
ttgcatatattatccaggtttagagatgggaaa

SEQ ID NO: 244719 - DNA, 33 bp, Homo sapien
ctctggtgagttccaacagtcctacagggtttc

SEQ ID NO: 244720 - DNA, 33 bp, Homo sapien
ctctggtgagttccaatagtcctacagggtttc

SEQ ID NO: 244721 - DNA, 33 bp, Homo sapien
ctcttgataatctacactcgattgctacatttt

SEQ ID NO: 244722 - DNA, 33 bp, Homo sapien
ctcttgataatctacattcgattgctacatttt

SEQ ID NO: 244723 - DNA, 33 bp, Homo sapien
gtgtcatagccggtgaagttgcccagattacat

SEQ ID NO: 244724 - DNA, 33 bp, Homo sapien
gtgtcatagccggtgaggttgcccagattacat

SEQ ID NO: 244725 - DNA, 33 bp, Homo sapien
caggcaaagtcattccaccctgctcttcatttc

SEQ ID NO: 244726 - DNA, 33 bp, Homo sapien
caggcaaagtcattccgccctgctcttcatttc

SEQ ID NO: 244727 - DNA, 33 bp, Homo sapien
catggagcagctataacggtttcatactagtca

SEQ ID NO: 244728 - DNA, 33 bp, Homo sapien
catggagcagctataagggtttcatactagtca

SEQ ID NO: 244729 - DNA, 33 bp, Homo sapien
ctggtactctgccaaacaaaacaatataaacac

SEQ ID NO: 244730 - DNA, 33 bp, Homo sapien
ctggtactctgccaaataaaacaatataaacac

SEQ ID NO: 244731 - DNA, 33 bp, Homo sapien
gttagactctttattacgatccccatagcaact

SEQ ID NO: 244732 - DNA, 33 bp, Homo sapien
gttagactctttattatgatccccatagcaact

SEQ ID NO: 244733 - DNA, 33 bp, Homo sapien
agacttggcattagtaagtttctgttcaagttc

SEQ ID NO: 244734 - DNA, 33 bp, Homo sapien
agacttggcattagtaggtttctgttcaagttc

SEQ ID NO: 244735 - DNA, 33 bp, Homo sapien
tactcccagaggttgagcgataggtgaatggtc

SEQ ID NO: 244736 - DNA, 33 bp, Homo sapien
tactcccagaggttgatcgataggtgaatggtc

SEQ ID NO: 244737 - DNA, 33 bp, Homo sapien
gttaaataagatcatcagaataggctttaatct

SEQ ID NO: 244738 - DNA, 33 bp, Homo sapien
gttaaataagatcatcggaataggctttaatct

SEQ ID NO: 244739 - DNA, 33 bp, Homo sapien
tctattaacattttccaaaatataccatctctc

SEQ ID NO: 244740 - DNA, 33 bp, Homo sapien
tctattaacattttcccaaatataccatctctc

SEQ ID NO: 244741 - DNA, 33 bp, Homo sapien
ctgccataattctacccgattttagactgaaaa

SEQ ID NO: 244742 - DNA, 33 bp, Homo sapien
ctgccataattctacctgattttagactgaaaa

SEQ ID NO: 244743 - DNA, 33 bp, Homo sapien
ttttggggtcttagacaatacattttgacacaa

SEQ ID NO: 244744 - DNA, 33 bp, Homo sapien
ttttggggtcttagaccatacattttgacacaa

SEQ ID NO: 244745 - DNA, 33 bp, Homo sapien
gtggacccaggccatacgatggtcttctgtcta

SEQ ID NO: 244746 - DNA, 33 bp, Homo sapien
gtggacccaggccatatgatggtcttctgtcta

SEQ ID NO: 244747 - DNA, 33 bp, Homo sapien
ggtctaccccctatgaaatcttgaaactggcag

SEQ ID NO: 244748 - DNA, 33 bp, Homo sapien
ggtctaccccctatgacatcttgaaactggcag

SEQ ID NO: 244749 - DNA, 33 bp, Homo sapien
agatacatgaaagttacgaaattgtgtttgatt

SEQ ID NO: 244750 - DNA, 33 bp, Homo sapien
agatacatgaaagttatgaaattgtgtttgatt

SEQ ID NO: 244751 - DNA, 33 bp, Homo sapien
ttgtagaattgacctccattgttttctgtggaa

SEQ ID NO: 244752 - DNA, 33 bp, Homo sapien
ttgtagaattgacctctattgttttctgtggaa

SEQ ID NO: 244753 - DNA, 33 bp, Homo sapien
cattgaagacaggtaaagaagatccaatatatg

SEQ ID NO: 244754 - DNA, 33 bp, Homo sapien
cattgaagacaggtaaggaagatccaatatatg

SEQ ID NO: 244755 - DNA, 33 bp, Homo sapien
acggtatttggcatggaaaaagcagatacatat

SEQ ID NO: 244756 - DNA, 33 bp, Homo sapien
acggtatttggcatggtaaaagcagatacatat

SEQ ID NO: 244757 - DNA, 33 bp, Homo sapien
tctacacatattttccccactcaaatgaaagaa

SEQ ID NO: 244758 - DNA, 33 bp, Homo sapien
tctacacatattttccgcactcaaatgaaagaa

SEQ ID NO: 244759 - DNA, 33 bp, Homo sapien
atctttgcagtgtaaactgacttttggaagaag

SEQ ID NO: 244760 - DNA, 33 bp, Homo sapien
atctttgcagtgtaaattgacttttggaagaag

SEQ ID NO: 244761 - DNA, 33 bp, Homo sapien
aaacaataatcctggaggcactcctcagcacgt

SEQ ID NO: 244762 - DNA, 33 bp, Homo sapien
aaacaataatcctggatgcactcctcagcacgt

SEQ ID NO: 244763 - DNA, 33 bp, Homo sapien
tggcaagccttcagcccaattgggagcggcaat

SEQ ID NO: 244764 - DNA, 33 bp, Homo sapien
tggcaagccttcagcctaattgggagcggcaat

SEQ ID NO: 244765 - DNA, 33 bp, Homo sapien
cactgtctttcactccaacaccttgtcccactg

SEQ ID NO: 244766 - DNA, 33 bp, Homo sapien
cactgtctttcactccgacaccttgtcccactg

SEQ ID NO: 244767 - DNA, 33 bp, Homo sapien
taaaaggtaactgatacgcctgtgtaggacact

SEQ ID NO: 244768 - DNA, 33 bp, Homo sapien
taaaaggtaactgatatgcctgtgtaggacact

SEQ ID NO: 244769 - DNA, 33 bp, Homo sapien
tactatccaggtacacactctgatgttcgcgca

SEQ ID NO: 244770 - DNA, 33 bp, Homo sapien
tactatccaggtacacgctctgatgttcgcgca

SEQ ID NO: 244771 - DNA, 33 bp, Homo sapien
agcctgttgatgaaaacacccagagaggatgca

SEQ ID NO: 244772 - DNA, 33 bp, Homo sapien
agcctgttgatgaaaatacccagagaggatgca

SEQ ID NO: 244773 - DNA, 33 bp, Homo sapien
cttaaacgtgtcttaaagactgtacaggccaaa

SEQ ID NO: 244774 - DNA, 33 bp, Homo sapien
cttaaacgtgtcttaaggactgtacaggccaaa

SEQ ID NO: 244775 - DNA, 33 bp, Homo sapien
tcaatcatggagttacaaagatggaccaagata

SEQ ID NO: 244776 - DNA, 33 bp, Homo sapien
tcaatcatggagttacgaagatggaccaagata

SEQ ID NO: 244777 - DNA, 33 bp, Homo sapien
tgtttgatattcaagacggtatttgtcatttgg

SEQ ID NO: 244778 - DNA, 33 bp, Homo sapien
tgtttgatattcaagatggtatttgtcatttgg

SEQ ID NO: 244779 - DNA, 33 bp, Homo sapien
tttagagacccttgcactaagctcaagtataag

SEQ ID NO: 244780 - DNA, 33 bp, Homo sapien
tttagagacccttgcattaagctcaagtataag

SEQ ID NO: 244781 - DNA, 33 bp, Homo sapien
agagcaagggtctccacagatttgatctctctt

SEQ ID NO: 244782 - DNA, 33 bp, Homo sapien
agagcaagggtctccatagatttgatctctctt

SEQ ID NO: 244783 - DNA, 33 bp, Homo sapien
actccagctggttaaacttagggcctgaaataa

SEQ ID NO: 244784 - DNA, 33 bp, Homo sapien
actccagctggttaaatttagggcctgaaataa

SEQ ID NO: 244785 - DNA, 33 bp, Homo sapien
acattctgatatgttcccatctaatctttttaa

SEQ ID NO: 244786 - DNA, 33 bp, Homo sapien
acattctgatatgttctcatctaatctttttaa

SEQ ID NO: 244787 - DNA, 33 bp, Homo sapien
ttaggttgagtctataagctagctattgtgagt

SEQ ID NO: 244788 - DNA, 33 bp, Homo sapien
ttaggttgagtctatatgctagctattgtgagt

SEQ ID NO: 244789 - DNA, 33 bp, Homo sapien
gagcttctcggaagcaggagttttgtgaaatta

SEQ ID NO: 244790 - DNA, 33 bp, Homo sapien
gagcttctcggaagcatgagttttgtgaaatta

SEQ ID NO: 244791 - DNA, 33 bp, Homo sapien
gagcaaaaaagcaaaaattgccacgtcacttcc

SEQ ID NO: 244792 - DNA, 33 bp, Homo sapien
gagcaaaaaagcaaaatttgccacgtcacttcc

SEQ ID NO: 244793 - DNA, 33 bp, Homo sapien
atccccttcagggtcacgttcttgaagcacctc

SEQ ID NO: 244794 - DNA, 33 bp, Homo sapien
atccccttcagggtcatgttcttgaagcacctc

SEQ ID NO: 244795 - DNA, 33 bp, Homo sapien
taatgctaaaattccacgtatttgatgtatctt

SEQ ID NO: 244796 - DNA, 33 bp, Homo sapien
taatgctaaaattccatgtatttgatgtatctt

SEQ ID NO: 244797 - DNA, 33 bp, Homo sapien
catctcaggattactaactttatcacatttgca

SEQ ID NO: 244798 - DNA, 33 bp, Homo sapien
catctcaggattactagctttatcacatttgca

SEQ ID NO: 244799 - DNA, 33 bp, Homo sapien
accttctgccaaaatccattctctacaagggag

SEQ ID NO: 244800 - DNA, 33 bp, Homo sapien
accttctgccaaaatctattctctacaagggag

SEQ ID NO: 244801 - DNA, 33 bp, Homo sapien
catatttttaaatccaccacagagggagagcca

SEQ ID NO: 244802 - DNA, 33 bp, Homo sapien
catatttttaaatccatcacagagggagagcca

SEQ ID NO: 244803 - DNA, 33 bp, Homo sapien
aaggaggtcatgtcaaactggtgctgtctggag

SEQ ID NO: 244804 - DNA, 33 bp, Homo sapien
aaggaggtcatgtcaagctggtgctgtctggag

SEQ ID NO: 244805 - DNA, 33 bp, Homo sapien
ctcaatccaaggcaaaggcaagttctggaagct

SEQ ID NO: 244806 - DNA, 33 bp, Homo sapien
ctcaatccaaggcaaatgcaagttctggaagct

SEQ ID NO: 244807 - DNA, 33 bp, Homo sapien
cgtgtcataattcaaagaggaccttggttaaac

SEQ ID NO: 244808 - DNA, 33 bp, Homo sapien
cgtgtcataattcaaataggaccttggttaaac

SEQ ID NO: 244809 - DNA, 33 bp, Homo sapien
tttgaaaaatgtgccacgatggagtaagaggtt

SEQ ID NO: 244810 - DNA, 33 bp, Homo sapien
tttgaaaaatgtgccatgatggagtaagaggtt

SEQ ID NO: 244811 - DNA, 33 bp, Homo sapien
tttcctcccctaacaaatggagacagtggtatc

SEQ ID NO: 244812 - DNA, 33 bp, Homo sapien
tttcctcccctaacaactggagacagtggtatc

SEQ ID NO: 244813 - DNA, 33 bp, Homo sapien
ggggggaggagagcaaattctgaagtctgcttc

SEQ ID NO: 244814 - DNA, 33 bp, Homo sapien
ggggggaggagagcaatttctgaagtctgcttc

SEQ ID NO: 244815 - DNA, 33 bp, Homo sapien
gccaacccctgatagacaggatatgccctagaa

SEQ ID NO: 244816 - DNA, 33 bp, Homo sapien
gccaacccctgatagataggatatgccctagaa

SEQ ID NO: 244817 - DNA, 33 bp, Homo sapien
tcttgttttaagaagacggaagccacaaaaaga

SEQ ID NO: 244818 - DNA, 33 bp, Homo sapien
tcttgttttaagaagatggaagccacaaaaaga

SEQ ID NO: 244819 - DNA, 33 bp, Homo sapien
ttgagagcagactcaggccacatagattcagaa

SEQ ID NO: 244820 - DNA, 33 bp, Homo sapien
ttgagagcagactcagtccacatagattcagaa

SEQ ID NO: 244821 - DNA, 33 bp, Homo sapien
gttttgcttttacttcactggttgctaccactt

SEQ ID NO: 244822 - DNA, 33 bp, Homo sapien
gttttgcttttacttcgctggttgctaccactt

SEQ ID NO: 244823 - DNA, 33 bp, Homo sapien
aggccatggaagtacactattaaggacatggaa

SEQ ID NO: 244824 - DNA, 33 bp, Homo sapien
aggccatggaagtacattattaaggacatggaa

SEQ ID NO: 244825 - DNA, 33 bp, Homo sapien
acccatacctagaataagtgtcaatcccagtca

SEQ ID NO: 244826 - DNA, 33 bp, Homo sapien
acccatacctagaatatgtgtcaatcccagtca

SEQ ID NO: 244827 - DNA, 33 bp, Homo sapien
aacattactatgcaagaactcaaagattatcta

SEQ ID NO: 244828 - DNA, 33 bp, Homo sapien
aacattactatgcaaggactcaaagattatcta

SEQ ID NO: 244829 - DNA, 33 bp, Homo sapien
aaaggagaagggaaaacgataggacaggataaa

SEQ ID NO: 244830 - DNA, 33 bp, Homo sapien
aaaggagaagggaaaatgataggacaggataaa

SEQ ID NO: 244831 - DNA, 33 bp, Homo sapien
acaggaggcacacaaagtcctattggattgtgg

SEQ ID NO: 244832 - DNA, 33 bp, Homo sapien
acaggaggcacacaaattcctattggattgtgg

SEQ ID NO: 244833 - DNA, 33 bp, Homo sapien
gtggttccaggcaccccacatacattctcacag

SEQ ID NO: 244834 - DNA, 33 bp, Homo sapien
gtggttccaggcaccctacatacattctcacag

SEQ ID NO: 244835 - DNA, 33 bp, Homo sapien
ttggtagtagacaagacaggaaaatgtaagagg

SEQ ID NO: 244836 - DNA, 33 bp, Homo sapien
ttggtagtagacaagataggaaaatgtaagagg

SEQ ID NO: 244837 - DNA, 33 bp, Homo sapien
ggtaatatttatgcaaatgtggcttcaaaacaa

SEQ ID NO: 244838 - DNA, 33 bp, Homo sapien
ggtaatatttatgcaagtgtggcttcaaaacaa

SEQ ID NO: 244839 - DNA, 33 bp, Homo sapien
atgaggggctatctcaacatgcacaaaactagt

SEQ ID NO: 244840 - DNA, 33 bp, Homo sapien
atgaggggctatctcagcatgcacaaaactagt

SEQ ID NO: 244841 - DNA, 33 bp, Homo sapien
cctccaagagttgtgacggttactgagagaatg

SEQ ID NO: 244842 - DNA, 33 bp, Homo sapien
cctccaagagttgtgatggttactgagagaatg

SEQ ID NO: 244843 - DNA, 33 bp, Homo sapien
ggaaactgagaggcagaaaagaattgtccgtgc

SEQ ID NO: 244844 - DNA, 33 bp, Homo sapien
ggaaactgagaggcaggaaagaattgtccgtgc

SEQ ID NO: 244845 - DNA, 33 bp, Homo sapien
acccaccttataatcaggaggaagaatgccacg

SEQ ID NO: 244846 - DNA, 33 bp, Homo sapien
acccaccttataatcatgaggaagaatgccacg

SEQ ID NO: 244847 - DNA, 33 bp, Homo sapien
gctttggggtaaatgcagactgtatcccccttc

SEQ ID NO: 244848 - DNA, 33 bp, Homo sapien
gctttggggtaaatgcggactgtatcccccttc

SEQ ID NO: 244849 - DNA, 33 bp, Homo sapien
acattcatggagttcaatacaaaaatggtgaaa

SEQ ID NO: 244850 - DNA, 33 bp, Homo sapien
acattcatggagttcagtacaaaaatggtgaaa

SEQ ID NO: 244851 - DNA, 33 bp, Homo sapien
tgacaaccaagcataccagatactttaggagag

SEQ ID NO: 244852 - DNA, 33 bp, Homo sapien
tgacaaccaagcatactagatactttaggagag

SEQ ID NO: 244853 - DNA, 33 bp, Homo sapien
ctttaggagagttccacattcagcatctatcct

SEQ ID NO: 244854 - DNA, 33 bp, Homo sapien
ctttaggagagttccagattcagcatctatcct

SEQ ID NO: 244855 - DNA, 33 bp, Homo sapien
gcaaaagtctagtaaccggaggagggtgaagct

SEQ ID NO: 244856 - DNA, 33 bp, Homo sapien
gcaaaagtctagtaactggaggagggtgaagct

SEQ ID NO: 244857 - DNA, 33 bp, Homo sapien
ttagtgcctgcagtggccatcaaatttgtcaac

SEQ ID NO: 244858 - DNA, 33 bp, Homo sapien
ttagtgcctgcagtggtcatcaaatttgtcaac

SEQ ID NO: 244859 - DNA, 33 bp, Homo sapien
aaagctagcacaaagcagagcagagaggagaga

SEQ ID NO: 244860 - DNA, 33 bp, Homo sapien
aaagctagcacaaagcggagcagagaggagaga

SEQ ID NO: 244861 - DNA, 33 bp, Homo sapien
cttgtgtattgaaagaaggctcaactgactaga

SEQ ID NO: 244862 - DNA, 33 bp, Homo sapien
cttgtgtattgaaagagggctcaactgactaga

SEQ ID NO: 244863 - DNA, 33 bp, Homo sapien
atagtctgttatttcacagaaggaaaggaaaca

SEQ ID NO: 244864 - DNA, 33 bp, Homo sapien
atagtctgttatttcatagaaggaaaggaaaca

SEQ ID NO: 244865 - DNA, 33 bp, Homo sapien
ccaccttctgagtcaacggtccagagaacaagg

SEQ ID NO: 244866 - DNA, 33 bp, Homo sapien
ccaccttctgagtcaatggtccagagaacaagg

SEQ ID NO: 244867 - DNA, 33 bp, Homo sapien
tgtaaggatgttgtaaagattgaatgggattta

SEQ ID NO: 244868 - DNA, 33 bp, Homo sapien
tgtaaggatgttgtaaggattgaatgggattta

SEQ ID NO: 244869 - DNA, 33 bp, Homo sapien
ggatttaaaaacaagtaactggtgacctactca

SEQ ID NO: 244870 - DNA, 33 bp, Homo sapien
ggatttaaaaacaagtgactggtgacctactca

SEQ ID NO: 244871 - DNA, 33 bp, Homo sapien
ctcttgtctgattggaccctagctaccactgtg

SEQ ID NO: 244872 - DNA, 33 bp, Homo sapien
ctcttgtctgattggatcctagctaccactgtg

SEQ ID NO: 244873 - DNA, 33 bp, Homo sapien
ttaatgtatgccatcgaagtgaagcttaattta

SEQ ID NO: 244874 - DNA, 33 bp, Homo sapien
ttaatgtatgccatcggagtgaagcttaattta

SEQ ID NO: 244875 - DNA, 33 bp, Homo sapien
ccatttctgtctctgtaaatggcacctcctgga

SEQ ID NO: 244876 - DNA, 33 bp, Homo sapien
ccatttctgtctctgtgaatggcacctcctgga

SEQ ID NO: 244877 - DNA, 33 bp, Homo sapien
ttactattactgcttaaggtggaggccatggga

SEQ ID NO: 244878 - DNA, 33 bp, Homo sapien
ttactattactgcttagggtggaggccatggga

SEQ ID NO: 244879 - DNA, 33 bp, Homo sapien
ttgaatccacagacacagagcatgtagatatag

SEQ ID NO: 244880 - DNA, 33 bp, Homo sapien
ttgaatccacagacacggagcatgtagatatag

SEQ ID NO: 244881 - DNA, 33 bp, Homo sapien
ccacccttctcctagcacctatcatacgtggat

SEQ ID NO: 244882 - DNA, 33 bp, Homo sapien
ccacccttctcctagctcctatcatacgtggat

SEQ ID NO: 244883 - DNA, 33 bp, Homo sapien
actgtgagctctttggcatgaaggatcctatct

SEQ ID NO: 244884 - DNA, 33 bp, Homo sapien
actgtgagctctttgggatgaaggatcctatct

SEQ ID NO: 244885 - DNA, 33 bp, Homo sapien
cactttgcaatgctcaactttagggatgctagt

SEQ ID NO: 244886 - DNA, 33 bp, Homo sapien
cactttgcaatgctcagctttagggatgctagt

SEQ ID NO: 244887 - DNA, 33 bp, Homo sapien
aaaggcctacagccaccagccttggagatgtgc

SEQ ID NO: 244888 - DNA, 33 bp, Homo sapien
aaaggcctacagccacgagccttggagatgtgc

SEQ ID NO: 244889 - DNA, 33 bp, Homo sapien
ctctcttgttcatttacaagctggaggaatgag

SEQ ID NO: 244890 - DNA, 33 bp, Homo sapien
ctctcttgttcatttataagctggaggaatgag

SEQ ID NO: 244891 - DNA, 33 bp, Homo sapien
agaacaagttgcagcacggcccagtcattgtaa

SEQ ID NO: 244892 - DNA, 33 bp, Homo sapien
agaacaagttgcagcatggcccagtcattgtaa

SEQ ID NO: 244893 - DNA, 33 bp, Homo sapien
tcaagattctcaccacacactggagtgctccag

SEQ ID NO: 244894 - DNA, 33 bp, Homo sapien
tcaagattctcaccacgcactggagtgctccag

SEQ ID NO: 244895 - DNA, 33 bp, Homo sapien
ggtgactgagtcaagacgtcaaggttggttcct

SEQ ID NO: 244896 - DNA, 33 bp, Homo sapien
ggtgactgagtcaagatgtcaaggttggttcct

SEQ ID NO: 244897 - DNA, 33 bp, Homo sapien
ctttggcttgcagaaacgtcactccaatctctg

SEQ ID NO: 244898 - DNA, 33 bp, Homo sapien
ctttggcttgcagaaatgtcactccaatctctg

SEQ ID NO: 244899 - DNA, 33 bp, Homo sapien
ggtgtaatttagttgaaaatctcaagttgaaat

SEQ ID NO: 244900 - DNA, 33 bp, Homo sapien
ggtgtaatttagttgagaatctcaagttgaaat

SEQ ID NO: 244901 - DNA, 33 bp, Homo sapien
agaagctgaggagagccacttcctatgttcatt

SEQ ID NO: 244902 - DNA, 33 bp, Homo sapien
agaagctgaggagagcgacttcctatgttcatt

SEQ ID NO: 244903 - DNA, 33 bp, Homo sapien
tgtaaacttgaacaaaaccagttaccatgagat

SEQ ID NO: 244904 - DNA, 33 bp, Homo sapien
tgtaaacttgaacaaagccagttaccatgagat

SEQ ID NO: 244905 - DNA, 33 bp, Homo sapien
tatgatataacaccaactcttcttcaactgtat

SEQ ID NO: 244906 - DNA, 33 bp, Homo sapien
tatgatataacaccaagtcttcttcaactgtat

SEQ ID NO: 244907 - DNA, 33 bp, Homo sapien
aattccgagcttttaaacactacgctacattga

SEQ ID NO: 244908 - DNA, 33 bp, Homo sapien
aattccgagcttttaaccactacgctacattga

SEQ ID NO: 244909 - DNA, 33 bp, Homo sapien
gtcatcctcttcctgaagccatcactaacaacc

SEQ ID NO: 244910 - DNA, 33 bp, Homo sapien
gtcatcctcttcctgaggccatcactaacaacc

SEQ ID NO: 244911 - DNA, 33 bp, Homo sapien
ctgggttccctgctcactcttagggccatgcaa

SEQ ID NO: 244912 - DNA, 33 bp, Homo sapien
ctgggttccctgctcattcttagggccatgcaa

SEQ ID NO: 244913 - DNA, 33 bp, Homo sapien
aaggtatctcatgaaccggctggtccagttgct

SEQ ID NO: 244914 - DNA, 33 bp, Homo sapien
aaggtatctcatgaactggctggtccagttgct

SEQ ID NO: 244915 - DNA, 33 bp, Homo sapien
atgctatagtgagtatgagatggtgtgtgtgaa

SEQ ID NO: 244916 - DNA, 33 bp, Homo sapien
atgctatagtgagtattagatggtgtgtgtgaa

SEQ ID NO: 244917 - DNA, 33 bp, Homo sapien
cattaaacaacacgacagtatactcagccaggc

SEQ ID NO: 244918 - DNA, 33 bp, Homo sapien
cattaaacaacacgacggtatactcagccaggc

SEQ ID NO: 244919 - DNA, 33 bp, Homo sapien
cattgtactaaggtcccaaagtcttgatatgag

SEQ ID NO: 244920 - DNA, 33 bp, Homo sapien
cattgtactaaggtcctaaagtcttgatatgag

SEQ ID NO: 244921 - DNA, 33 bp, Homo sapien
aatgtgtggatattaacaaatgaggctgagcgc

SEQ ID NO: 244922 - DNA, 33 bp, Homo sapien
aatgtgtggatattaagaaatgaggctgagcgc

SEQ ID NO: 244923 - DNA, 33 bp, Homo sapien
ggagtgggaagatggcaaaaatttcaaatcctc

SEQ ID NO: 244924 - DNA, 33 bp, Homo sapien
ggagtgggaagatggcgaaaatttcaaatcctc

SEQ ID NO: 244925 - DNA, 33 bp, Homo sapien
ttgtaaatggtctcaacagcttctcataaaatg

SEQ ID NO: 244926 - DNA, 33 bp, Homo sapien
ttgtaaatggtctcaatagcttctcataaaatg

SEQ ID NO: 244927 - DNA, 33 bp, Homo sapien
tagttagcctgattcactgaactatttaacatc

SEQ ID NO: 244928 - DNA, 33 bp, Homo sapien
tagttagcctgattcattgaactatttaacatc

SEQ ID NO: 244929 - DNA, 33 bp, Homo sapien
atgcatcattttataactgccagacactatagt

SEQ ID NO: 244930 - DNA, 33 bp, Homo sapien
atgcatcattttataagtgccagacactatagt

SEQ ID NO: 244931 - DNA, 33 bp, Homo sapien
atttcttgtgctctaaagttatatggcactgct

SEQ ID NO: 244932 - DNA, 33 bp, Homo sapien
atttcttgtgctctaaggttatatggcactgct

SEQ ID NO: 244933 - DNA, 33 bp, Homo sapien
tggagatatccaaccactggaattagtaggctt

SEQ ID NO: 244934 - DNA, 33 bp, Homo sapien
tggagatatccaaccattggaattagtaggctt

SEQ ID NO: 244935 - DNA, 33 bp, Homo sapien
tgtcctaggtacttggaatatgagagtgaaaca

SEQ ID NO: 244936 - DNA, 33 bp, Homo sapien
tgtcctaggtacttgggatatgagagtgaaaca

SEQ ID NO: 244937 - DNA, 33 bp, Homo sapien
atgcttatacacaaaaaggctgtgacaacttct

SEQ ID NO: 244938 - DNA, 33 bp, Homo sapien
atgcttatacacaaaacggctgtgacaacttct

SEQ ID NO: 244939 - DNA, 33 bp, Homo sapien
tatcaaagccattacaaataatgcagaaagcaa

SEQ ID NO: 244940 - DNA, 33 bp, Homo sapien
tatcaaagccattacagataatgcagaaagcaa

SEQ ID NO: 244941 - DNA, 33 bp, Homo sapien
gtttcaaatttaactacatggatccccaaatcc

SEQ ID NO: 244942 - DNA, 33 bp, Homo sapien
gtttcaaatttaactatatggatccccaaatcc

SEQ ID NO: 244943 - DNA, 33 bp, Homo sapien
cttgatgagaaggtcaaagatacattggtttgt

SEQ ID NO: 244944 - DNA, 33 bp, Homo sapien
cttgatgagaaggtcagagatacattggtttgt

SEQ ID NO: 244945 - DNA, 33 bp, Homo sapien; identical to SEQ ID NO: 244943

SEQ ID NO: 244946 - DNA, 33 bp, Homo sapien; identical to SEQ ID NO: 244944

SEQ ID NO: 244947 - DNA, 33 bp, Homo sapien
ctgtgaaagcccctcacaggtcaaagcggaagg

SEQ ID NO: 244948 - DNA, 33 bp, Homo sapien
ctgtgaaagcccctcataggtcaaagcggaagg

SEQ ID NO: 244949 - DNA, 33 bp, Homo sapien
taggaagctaataaacacttgagccgggctggc

SEQ ID NO: 244950 - DNA, 33 bp, Homo sapien
taggaagctaataaacgcttgagccgggctggc

SEQ ID NO: 244951 - DNA, 33 bp, Homo sapien
tatttaagcacttaagaaatctcaggcatttta

SEQ ID NO: 244952 - DNA, 33 bp, Homo sapien
tatttaagcacttaaggaatctcaggcatttta

SEQ ID NO: 244953 - DNA, 33 bp, Homo sapien
aggtggtccaaaaccacaaaatcctgttaatta

SEQ ID NO: 244954 - DNA, 33 bp, Homo sapien
aggtggtccaaaaccataaaatcctgttaatta

SEQ ID NO: 244955 - DNA, 33 bp, Homo sapien
aaatgaaatgcaatcacaagggtgacttagagt

SEQ ID NO: 244956 - DNA, 33 bp, Homo sapien
aaatgaaatgcaatcataagggtgacttagagt

SEQ ID NO: 244957 - DNA, 33 bp, Homo sapien
tgcacctagttataagaaagcaataagggaggc

SEQ ID NO: 244958 - DNA, 33 bp, Homo sapien
tgcacctagttataaggaagcaataagggaggc

SEQ ID NO: 244959 - DNA, 33 bp, Homo sapien
tcctgtccaagtgagaacaaaactcactccctg

SEQ ID NO: 244960 - DNA, 33 bp, Homo sapien
tcctgtccaagtgagaccaaaactcactccctg

SEQ ID NO: 244961 - DNA, 33 bp, Homo sapien
atttctgagataggacacaaaaaccttaaccat

SEQ ID NO: 244962 - DNA, 33 bp, Homo sapien
atttctgagataggacccaaaaaccttaaccat

SEQ ID NO: 244963 - DNA, 33 bp, Homo sapien
catgaaagagttaacacagatcccacaggatga

SEQ ID NO: 244964 - DNA, 33 bp, Homo sapien
catgaaagagttaacatagatcccacaggatga

SEQ ID NO: 244965 - DNA, 33 bp, Homo sapien
gctcccacataatgcccgattctttttgtccct

SEQ ID NO: 244966 - DNA, 33 bp, Homo sapien
gctcccacataatgcctgattctttttgtccct

SEQ ID NO: 244967 - DNA, 33 bp, Homo sapien
ctagatgaaacatttgaatcaaacttgaaggtt

SEQ ID NO: 244968 - DNA, 33 bp, Homo sapien
ctagatgaaacatttgcatcaaacttgaaggtt

SEQ ID NO: 244969 - DNA, 33 bp, Homo sapien
gtaccaaaccaaataaactgattcatggaagtg

SEQ ID NO: 244970 - DNA, 33 bp, Homo sapien
gtaccaaaccaaataatctgattcatggaagtg

SEQ ID NO: 244971 - DNA, 33 bp, Homo sapien
aaggcagctgttcaccaatgtctcaggcaagcc

SEQ ID NO: 244972 - DNA, 33 bp, Homo sapien
aaggcagctgttcaccgatgtctcaggcaagcc

SEQ ID NO: 244973 - DNA, 33 bp, Homo sapien
gaaacatatttagaaaagacccatgctggcaaa

SEQ ID NO: 244974 - DNA, 33 bp, Homo sapien
gaaacatatttagaaaggacccatgctggcaaa

SEQ ID NO: 244975 - DNA, 33 bp, Homo sapien
taagcactcgtgtccaaatgagtcaaagttaaa

SEQ ID NO: 244976 - DNA, 33 bp, Homo sapien
taagcactcgtgtccagatgagtcaaagttaaa

SEQ ID NO: 244977 - DNA, 33 bp, Homo sapien
aatccagtggtaaagactagagttgggatttga

SEQ ID NO: 244978 - DNA, 33 bp, Homo sapien
aatccagtggtaaagagtagagttgggatttga

SEQ ID NO: 244979 - DNA, 33 bp, Homo sapien
caacttcttcatataaatgatctcaacatgggg

SEQ ID NO: 244980 - DNA, 33 bp, Homo sapien
caacttcttcatataagtgatctcaacatgggg

SEQ ID NO: 244981 - DNA, 33 bp, Homo sapien
attaaccactggatacagaccaggtagccggcc

SEQ ID NO: 244982 - DNA, 33 bp, Homo sapien
attaaccactggatacggaccaggtagccggcc

SEQ ID NO: 244983 - DNA, 33 bp, Homo sapien
cattgggtagaaagaaacatttacaagcatttg

SEQ ID NO: 244984 - DNA, 33 bp, Homo sapien
cattgggtagaaagaagcatttacaagcatttg

SEQ ID NO: 244985 - DNA, 33 bp, Homo sapien
aggggaaggaaaggcaagccaggtagaagggtc

SEQ ID NO: 244986 - DNA, 33 bp, Homo sapien
aggggaaggaaaggcaggccaggtagaagggtc

SEQ ID NO: 244987 - DNA, 33 bp, Homo sapien
gaataatctacgttgcccaatgtcgtcaaagat

SEQ ID NO: 244988 - DNA, 33 bp, Homo sapien
gaataatctacgttgctcaatgtcgtcaaagat

SEQ ID NO: 244989 - DNA, 33 bp, Homo sapien
gctatcagccatcaccacaggctcatgatacac

SEQ ID NO: 244990 - DNA, 33 bp, Homo sapien
gctatcagccatcaccgcaggctcatgatacac

SEQ ID NO: 244991 - DNA, 33 bp, Homo sapien
ctctgtgtaaatacaaacgtaactggcttctaa

SEQ ID NO: 244992 - DNA, 33 bp, Homo sapien
ctctgtgtaaatacaagcgtaactggcttctaa

SEQ ID NO: 244993 - DNA, 33 bp, Homo sapien
acatttcatgtgctcactagccacaggaggcta

SEQ ID NO: 244994 - DNA, 33 bp, Homo sapien
acatttcatgtgctcagtagccacaggaggcta

SEQ ID NO: 244995 - DNA, 33 bp, Homo sapien
cagagacaaaccttaacggaagaatatttagtt

SEQ ID NO: 244996 - DNA, 33 bp, Homo sapien
cagagacaaaccttaatggaagaatatttagtt

SEQ ID NO: 244997 - DNA, 33 bp, Homo sapien
caactggggtaaggaccgcaaaggagaaatccc

SEQ ID NO: 244998 - DNA, 33 bp, Homo sapien
caactggggtaaggactgcaaaggagaaatccc

SEQ ID NO: 244999 - DNA, 33 bp, Homo sapien
tgcttggcatacggtacacccgggaaaacattt

SEQ ID NO: 245000 - DNA, 33 bp, Homo sapien
tgcttggcatacggtagacccgggaaaacattt

SEQ ID NO: 245001 - DNA, 33 bp, Homo sapien
taagtccaggctaaaaccaccctctagctgtgt

SEQ ID NO: 245002 - DNA, 33 bp, Homo sapien
taagtccaggctaaaatcaccctctagctgtgt

SEQ ID NO: 245003 - DNA, 33 bp, Homo sapien
tcagaacctcttacaacattaaagggctgatga

SEQ ID NO: 245004 - DNA, 33 bp, Homo sapien
tcagaacctcttacaagattaaagggctgatga

SEQ ID NO: 245005 - DNA, 33 bp, Homo sapien
aaactaagtcacttgcccatgtttacactcctt

SEQ ID NO: 245006 - DNA, 33 bp, Homo sapien
aaactaagtcacttgctcatgtttacactcctt

SEQ ID NO: 245007 - DNA, 33 bp, Homo sapien
atgctgattcaggcaacttcattcattctgaaa

SEQ ID NO: 245008 - DNA, 33 bp, Homo sapien
atgctgattcaggcaatttcattcattctgaaa

SEQ ID NO: 245009 - DNA, 33 bp, Homo sapien
gctggaaattacaacaaaaggcaacatgagcta

SEQ ID NO: 245010 - DNA, 33 bp, Homo sapien
gctggaaattacaacacaaggcaacatgagcta

SEQ ID NO: 245011 - DNA, 33 bp, Homo sapien
tacttacgcttgaagcaaagaaatctcataaaa

SEQ ID NO: 245012 - DNA, 33 bp, Homo sapien
tacttacgcttgaagcgaagaaatctcataaaa

SEQ ID NO: 245013 - DNA, 33 bp, Homo sapien
ctcattttgtgaaagaagcgaagacaatctcct

SEQ ID NO: 245014 - DNA, 33 bp, Homo sapien
ctcattttgtgaaagaggcgaagacaatctcct

SEQ ID NO: 245015 - DNA, 33 bp, Homo sapien
cccacctcgaagatgacaagtttgaaccacatg

SEQ ID NO: 245016 - DNA, 33 bp, Homo sapien
cccacctcgaagatgagaagtttgaaccacatg

SEQ ID NO: 245017 - DNA, 33 bp, Homo sapien
ttgggatttttggcaacgctttgtgtggcctgt

SEQ ID NO: 245018 - DNA, 33 bp, Homo sapien
ttgggatttttggcaatgctttgtgtggcctgt

SEQ ID NO: 245019 - DNA, 33 bp, Homo sapien
tccagctaggcaatgcagagaaggcacacccac

SEQ ID NO: 245020 - DNA, 33 bp, Homo sapien
tccagctaggcaatgcggagaaggcacacccac

SEQ ID NO: 245021 - DNA, 33 bp, Homo sapien
tcaaggagataccagagtatttagggtcttgag

SEQ ID NO: 245022 - DNA, 33 bp, Homo sapien
tcaaggagataccagattatttagggtcttgag

SEQ ID NO: 245023 - DNA, 33 bp, Homo sapien
gagaagagttcttatccgagcatgacccagagc

SEQ ID NO: 245024 - DNA, 33 bp, Homo sapien
gagaagagttcttatcggagcatgacccagagc

SEQ ID NO: 245025 - DNA, 33 bp, Homo sapien
ctgactggctatatgcaaataagcaaggccaaa

SEQ ID NO: 245026 - DNA, 33 bp, Homo sapien
ctgactggctatatgcgaataagcaaggccaaa

SEQ ID NO: 245027 - DNA, 33 bp, Homo sapien
tccgcagctcttctccacctggacttcagtatg

SEQ ID NO: 245028 - DNA, 33 bp, Homo sapien
tccgcagctcttctccgcctggacttcagtatg

SEQ ID NO: 245029 - DNA, 33 bp, Homo sapien
ctgtatcgtaactctacgctccattctctcaaa

SEQ ID NO: 245030 - DNA, 33 bp, Homo sapien
ctgtatcgtaactctatgctccattctctcaaa

SEQ ID NO: 245031 - DNA, 33 bp, Homo sapien
tctgcgactccactccagatgtctattgcattc

SEQ ID NO: 245032 - DNA, 33 bp, Homo sapien
tctgcgactccactccggatgtctattgcattc

SEQ ID NO: 245033 - DNA, 33 bp, Homo sapien
gaagaggacaaacagaagacaaccgtgaacaat

SEQ ID NO: 245034 - DNA, 33 bp, Homo sapien
gaagaggacaaacagaggacaaccgtgaacaat

SEQ ID NO: 245035 - DNA, 33 bp, Homo sapien
cccaaattcccaattccaaatccaaatcaataa

SEQ ID NO: 245036 - DNA, 33 bp, Homo sapien
cccaaattcccaattcgaaatccaaatcaataa

SEQ ID NO: 245037 - DNA, 33 bp, Homo sapien
catatgctttgcactacagagaaatgtactgga

SEQ ID NO: 245038 - DNA, 33 bp, Homo sapien
catatgctttgcactatagagaaatgtactgga

SEQ ID NO: 245039 - DNA, 33 bp, Homo sapien
ggccctggctctgtataacttctcaccttcttt

SEQ ID NO: 245040 - DNA, 33 bp, Homo sapien
ggccctggctctgtatgacttctcaccttcttt

SEQ ID NO: 245041 - DNA, 33 bp, Homo sapien
cttagtgactggtgcacgactcatgcctgaagg

SEQ ID NO: 245042 - DNA, 33 bp, Homo sapien
cttagtgactggtgcaggactcatgcctgaagg

SEQ ID NO: 245043 - DNA, 33 bp, Homo sapien
atgattctgagcatggaattctgttcccaaact

SEQ ID NO: 245044 - DNA, 33 bp, Homo sapien
atgattctgagcatgggattctgttcccaaact

SEQ ID NO: 245045 - DNA, 33 bp, Homo sapien
ctggttgggccacttaccacctctgatgccttc

SEQ ID NO: 245046 - DNA, 33 bp, Homo sapien
ctggttgggccacttatcacctctgatgccttc

SEQ ID NO: 245047 - DNA, 33 bp, Homo sapien
atttgatcagaatccacgttatgtgccttacac

SEQ ID NO: 245048 - DNA, 33 bp, Homo sapien
atttgatcagaatccatgttatgtgccttacac

SEQ ID NO: 245049 - DNA, 33 bp, Homo sapien
gtgccttacactggtacattctcacctcctgtc

SEQ ID NO: 245050 - DNA, 33 bp, Homo sapien
gtgccttacactggtatattctcacctcctgtc

SEQ ID NO: 245051 - DNA, 33 bp, Homo sapien
ttaatacactgttaaacggagagtataagattt

SEQ ID NO: 245052 - DNA, 33 bp, Homo sapien
ttaatacactgttaaagggagagtataagattt

SEQ ID NO: 245053 - DNA, 33 bp, Homo sapien
gagtataagatttccaactgctgcacttagtgt

SEQ ID NO: 245054 - DNA, 33 bp, Homo sapien
gagtataagatttccagctgctgcacttagtgt

SEQ ID NO: 245055 - DNA, 33 bp, Homo sapien
aaaaaaaaccaccttgaaaatgtcttctcttca

SEQ ID NO: 245056 - DNA, 33 bp, Homo sapien
aaaaaaaaccaccttggaaatgtcttctcttca

SEQ ID NO: 245057 - DNA, 33 bp, Homo sapien
atgataatcaaggtgacagctcggtaaagatct

SEQ ID NO: 245058 - DNA, 33 bp, Homo sapien
atgataatcaaggtgatagctcggtaaagatct

SEQ ID NO: 245059 - DNA, 33 bp, Homo sapien
tacagcagcctgaatgcactcaatgtcttaagc

SEQ ID NO: 245060 - DNA, 33 bp, Homo sapien
tacagcagcctgaatggactcaatgtcttaagc

SEQ ID NO: 245061 - DNA, 33 bp, Homo sapien
gccctaagctaggaaggaatttggagtgttggc

SEQ ID NO: 245062 - DNA, 33 bp, Homo sapien
gccctaagctaggaagtaatttggagtgttggc

SEQ ID NO: 245063 - DNA, 33 bp, Homo sapien
ccttacttcacggaatcattcccggaacacaat

SEQ ID NO: 245064 - DNA, 33 bp, Homo sapien
ccttacttcacggaatgattcccggaacacaat

SEQ ID NO: 245065 - DNA, 33 bp, Homo sapien
tagggcagctatagcactcatttcatttgcttc

SEQ ID NO: 245066 - DNA, 33 bp, Homo sapien
tagggcagctatagcagtcatttcatttgcttc

SEQ ID NO: 245067 - DNA, 33 bp, Homo sapien
aggactggtggaggaaaagaagcctgcacagct

SEQ ID NO: 245068 - DNA, 33 bp, Homo sapien
aggactggtggaggaagagaagcctgcacagct

SEQ ID NO: 245069 - DNA, 33 bp, Homo sapien
cagagattcaggtgctgaaattattcaggcagg

SEQ ID NO: 245070 - DNA, 33 bp, Homo sapien
cagagattcaggtgcttaaattattcaggcagg

SEQ ID NO: 245071 - DNA, 33 bp, Homo sapien
aagccagaaagggttcacctgctgacttcactt

SEQ ID NO: 245072 - DNA, 33 bp, Homo sapien
aagccagaaagggttcgcctgctgacttcactt

SEQ ID NO: 245073 - DNA, 33 bp, Homo sapien
gcctctgagtggcacccgattttcaggactgtc

SEQ ID NO: 245074 - DNA, 33 bp, Homo sapien
gcctctgagtggcacctgattttcaggactgtc

SEQ ID NO: 245075 - DNA, 33 bp, Homo sapien
actatattgaatgaagaaacaagactgagctgc

SEQ ID NO: 245076 - DNA, 33 bp, Homo sapien
actatattgaatgaaggaacaagactgagctgc

SEQ ID NO: 245077 - DNA, 33 bp, Homo sapien
gcccctgtgaataacaggtggcttttcatggat

SEQ ID NO: 245078 - DNA, 33 bp, Homo sapien
gcccctgtgaataacatgtggcttttcatggat

SEQ ID NO: 245079 - DNA, 33 bp, Homo sapien
ggaatctgcagacttaacaggtgcttcagaaga

SEQ ID NO: 245080 - DNA, 33 bp, Homo sapien
ggaatctgcagacttaccaggtgcttcagaaga

SEQ ID NO: 245081 - DNA, 33 bp, Homo sapien
atagaggaaacaaaaccaggaggaaaagcagaa

SEQ ID NO: 245082 - DNA, 33 bp, Homo sapien
atagaggaaacaaaactaggaggaaaagcagaa

SEQ ID NO: 245083 - DNA, 33 bp, Homo sapien
aaacacaagacagggccacaagtacttaagcag

SEQ ID NO: 245084 - DNA, 33 bp, Homo sapien
aaacacaagacagggcgacaagtacttaagcag

SEQ ID NO: 245085 - DNA, 33 bp, Homo sapien
tagatgaaagcggggactaacagtggatgagat

SEQ ID NO: 245086 - DNA, 33 bp, Homo sapien
tagatgaaagcggggagtaacagtggatgagat

SEQ ID NO: 245087 - DNA, 33 bp, Homo sapien
gctgatgagggtggacagcttatccaaggtgac

SEQ ID NO: 245088 - DNA, 33 bp, Homo sapien
gctgatgagggtggactgcttatccaaggtgac

SEQ ID NO: 245089 - DNA, 33 bp, Homo sapien
gtgtcaggttgagatacggccctgccttcccct

SEQ ID NO: 245090 - DNA, 33 bp, Homo sapien
gtgtcaggttgagatatggccctgccttcccct

SEQ ID NO: 245091 - DNA, 33 bp, Homo sapien
atagttcaaaagaatgaataaaacctagtattt

SEQ ID NO: 245092 - DNA, 33 bp, Homo sapien
atagttcaaaagaatgcataaaacctagtattt

SEQ ID NO: 245093 - DNA, 33 bp, Homo sapien
catgttgctaatttaaccaagaaaatagaagag

SEQ ID NO: 245094 - DNA, 33 bp, Homo sapien
catgttgctaatttaatcaagaaaatagaagag

SEQ ID NO: 245095 - DNA, 33 bp, Homo sapien
atcagctctcaggacacgtgatgttattatcaa

SEQ ID NO: 245096 - DNA, 33 bp, Homo sapien
atcagctctcaggacatgtgatgttattatcaa

SEQ ID NO: 245097 - DNA, 33 bp, Homo sapien
taaagcccagctaacaataagactctttctggg

SEQ ID NO: 245098 - DNA, 33 bp, Homo sapien
taaagcccagctaacagtaagactctttctggg

SEQ ID NO: 245099 - DNA, 33 bp, Homo sapien
tggcttgagcaacagaagatactgagggttcta

SEQ ID NO: 245100 - DNA, 33 bp, Homo sapien
tggcttgagcaacagaggatactgagggttcta

SEQ ID NO: 245101 - DNA, 33 bp, Homo sapien
tttaaaagagttatcacgtcctgtcatttccct

SEQ ID NO: 245102 - DNA, 33 bp, Homo sapien
tttaaaagagttatcatgtcctgtcatttccct

SEQ ID NO: 245103 - DNA, 33 bp, Homo sapien
agtaaatccggtagtaagtcaatatctaaccat

SEQ ID NO: 245104 - DNA, 33 bp, Homo sapien
agtaaatccggtagtatgtcaatatctaaccat

SEQ ID NO: 245105 - DNA, 33 bp, Homo sapien
tctgaattatcttgtccataaaatgagaatgat

SEQ ID NO: 245106 - DNA, 33 bp, Homo sapien
tctgaattatcttgtctataaaatgagaatgat

SEQ ID NO: 245107 - DNA, 33 bp, Homo sapien
agcaatttaactgtctaaaggctgaactcagag

SEQ ID NO: 245108 - DNA, 33 bp, Homo sapien
agcaatttaactgtctgaaggctgaactcagag

SEQ ID NO: 245109 - DNA, 33 bp, Homo sapien
taatatttacagtttcaacaggtcctgggcaac

SEQ ID NO: 245110 - DNA, 33 bp, Homo sapien
taatatttacagtttcgacaggtcctgggcaac

SEQ ID NO: 245111 - DNA, 33 bp, Homo sapien
gactttttaaaagttacaagcattacgtagatc

SEQ ID NO: 245112 - DNA, 33 bp, Homo sapien
gactttttaaaagttagaagcattacgtagatc

SEQ ID NO: 245113 - DNA, 33 bp, Homo sapien
gttgttgtttttgaacagtggtggccaatctgc

SEQ ID NO: 245114 - DNA, 33 bp, Homo sapien
gttgttgtttttgaacggtggtggccaatctgc

SEQ ID NO: 245115 - DNA, 33 bp, Homo sapien
acgtgagtttctttaacctcctggaactgtggg

SEQ ID NO: 245116 - DNA, 33 bp, Homo sapien
acgtgagtttctttaagctcctggaactgtggg

SEQ ID NO: 245117 - DNA, 33 bp, Homo sapien
ctgcactggttcagaactgcaaagatacactga

SEQ ID NO: 245118 - DNA, 33 bp, Homo sapien
ctgcactggttcagaattgcaaagatacactga

SEQ ID NO: 245119 - DNA, 33 bp, Homo sapien
cttcaatcctgccacaaaaatgtatccttgctg

SEQ ID NO: 245120 - DNA, 33 bp, Homo sapien
cttcaatcctgccacagaaatgtatccttgctg

SEQ ID NO: 245121 - DNA, 33 bp, Homo sapien
cagaaaagaggtaaccggggggcatttgttgta

SEQ ID NO: 245122 - DNA, 33 bp, Homo sapien
cagaaaagaggtaacctgggggcatttgttgta

SEQ ID NO: 245123 - DNA, 33 bp, Homo sapien
aaagtacagagttaggacacattgcctttgttt

SEQ ID NO: 245124 - DNA, 33 bp, Homo sapien
aaagtacagagttaggtcacattgcctttgttt

SEQ ID NO: 245125 - DNA, 33 bp, Homo sapien
tttttccagccttcacactactccaggaggtgc

SEQ ID NO: 245126 - DNA, 33 bp, Homo sapien
tttttccagccttcacgctactccaggaggtgc

SEQ ID NO: 245127 - DNA, 33 bp, Homo sapien
atggtggtaggttaaactggggaagaaatgttt

SEQ ID NO: 245128 - DNA, 33 bp, Homo sapien
atggtggtaggttaaattggggaagaaatgttt

SEQ ID NO: 245129 - DNA, 33 bp, Homo sapien
cttgctcaggtccttacagtcctctccattcag

SEQ ID NO: 245130 - DNA, 33 bp, Homo sapien
cttgctcaggtccttagagtcctctccattcag

SEQ ID NO: 245131 - DNA, 33 bp, Homo sapien
gctagtgtgatgcttgaatagactactaaagtg

SEQ ID NO: 245132 - DNA, 33 bp, Homo sapien
gctagtgtgatgcttgcatagactactaaagtg

SEQ ID NO: 245133 - DNA, 33 bp, Homo sapien
agactatgaccttaaaaacaatgtccagttaga

SEQ ID NO: 245134 - DNA, 33 bp, Homo sapien
agactatgaccttaaagacaatgtccagttaga

SEQ ID NO: 245135 - DNA, 33 bp, Homo sapien
tctcttaccagattgacagtccccaggttacaa

SEQ ID NO: 245136 - DNA, 33 bp, Homo sapien
tctcttaccagattgatagtccccaggttacaa

SEQ ID NO: 245137 - DNA, 33 bp, Homo sapien
tggcactagttttcccacctccagctctcaaca

SEQ ID NO: 245138 - DNA, 33 bp, Homo sapien
tggcactagttttcccgcctccagctctcaaca

SEQ ID NO: 245139 - DNA, 33 bp, Homo sapien
gcaaggtttgatttaacgctcaagaatggcaaa

SEQ ID NO: 245140 - DNA, 33 bp, Homo sapien
gcaaggtttgatttaatgctcaagaatggcaaa

SEQ ID NO: 245141 - DNA, 33 bp, Homo sapien
gtggcaaagtcaatctcaatgtttcaagtctgg

SEQ ID NO: 245142 - DNA, 33 bp, Homo sapien
gtggcaaagtcaatcttaatgtttcaagtctgg

SEQ ID NO: 245143 - DNA, 33 bp, Homo sapien
gtggttgtgatacatacatgataaaacatactg

SEQ ID NO: 245144 - DNA, 33 bp, Homo sapien
gtggttgtgatacatagatgataaaacatactg

SEQ ID NO: 245145 - DNA, 33 bp, Homo sapien
accactagatacaataacctttcagtgaactct

SEQ ID NO: 245146 - DNA, 33 bp, Homo sapien
accactagatacaatagcctttcagtgaactct

SEQ ID NO: 245147 - DNA, 33 bp, Homo sapien
atgcttttgttgtaccaaatttttgttctatct

SEQ ID NO: 245148 - DNA, 33 bp, Homo sapien
atgcttttgttgtacccaatttttgttctatct

SEQ ID NO: 245149 - DNA, 33 bp, Homo sapien
ttctactactgcttcacggcactggctaacact

SEQ ID NO: 245150 - DNA, 33 bp, Homo sapien
ttctactactgcttcatggcactggctaacact

SEQ ID NO: 245151 - DNA, 33 bp, Homo sapien
tatgttagcttatagaacatgaaaggagattta

SEQ ID NO: 245152 - DNA, 33 bp, Homo sapien
tatgttagcttatagagcatgaaaggagattta

SEQ ID NO: 245153 - DNA, 33 bp, Homo sapien
cgtttcaggaaaataactggcaacatgcaccaa

SEQ ID NO: 245154 - DNA, 33 bp, Homo sapien
cgtttcaggaaaataattggcaacatgcaccaa

SEQ ID NO: 245155 - DNA, 33 bp, Homo sapien
agggacctggagactaaatcagagttcagtgac

SEQ ID NO: 245156 - DNA, 33 bp, Homo sapien
agggacctggagactatatcagagttcagtgac

SEQ ID NO: 245157 - DNA, 33 bp, Homo sapien
ctaaattcctaaaagaggatttggctgacacat

SEQ ID NO: 245158 - DNA, 33 bp, Homo sapien
ctaaattcctaaaagatgatttggctgacacat

SEQ ID NO: 245159 - DNA, 33 bp, Homo sapien
gtgacaattctacttaggagatcagtctttgtg

SEQ ID NO: 245160 - DNA, 33 bp, Homo sapien
gtgacaattctacttatgagatcagtctttgtg

SEQ ID NO: 245161 - DNA, 33 bp, Homo sapien
aaactacctatcagaaacattcaggaatatagt

SEQ ID NO: 245162 - DNA, 33 bp, Homo sapien
aaactacctatcagaagcattcaggaatatagt

SEQ ID NO: 245163 - DNA, 33 bp, Homo sapien
acttaaaagtttgatactaagtcatgggacgga

SEQ ID NO: 245164 - DNA, 33 bp, Homo sapien
acttaaaagtttgatagtaagtcatgggacgga

SEQ ID NO: 245165 - DNA, 33 bp, Homo sapien
cactataacagtgagcaaactgtaatttgtgag

SEQ ID NO: 245166 - DNA, 33 bp, Homo sapien
cactataacagtgagccaactgtaatttgtgag

SEQ ID NO: 245167 - DNA, 33 bp, Homo sapien
acacagtaaccacaaactgctgaaataaaaaca

SEQ ID NO: 245168 - DNA, 33 bp, Homo sapien
acacagtaaccacaaattgctgaaataaaaaca

SEQ ID NO: 245169 - DNA, 33 bp, Homo sapien
acacaaaaaaagtgcaataatgaccatgatcat

SEQ ID NO: 245170 - DNA, 33 bp, Homo sapien
acacaaaaaaagtgcagtaatgaccatgatcat

SEQ ID NO: 245171 - DNA, 33 bp, Homo sapien
acttctacagtatgaaaagctattttgcagtta

SEQ ID NO: 245172 - DNA, 33 bp, Homo sapien
acttctacagtatgaacagctattttgcagtta

SEQ ID NO: 245173 - DNA, 33 bp, Homo sapien
atctctttttctgtgcaaagttcatctctcctt

SEQ ID NO: 245174 - DNA, 33 bp, Homo sapien
atctctttttctgtgcgaagttcatctctcctt

SEQ ID NO: 245175 - DNA, 33 bp, Homo sapien
tggcattgagtaaagacctgagagaagtaagag

SEQ ID NO: 245176 - DNA, 33 bp, Homo sapien
tggcattgagtaaagatctgagagaagtaagag

SEQ ID NO: 245177 - DNA, 33 bp, Homo sapien
cagtaaaagccacaaaaagagggcacttgaaga

SEQ ID NO: 245178 - DNA, 33 bp, Homo sapien
cagtaaaagccacaaagagagggcacttgaaga

SEQ ID NO: 245179 - DNA, 33 bp, Homo sapien
aggagccacacaataacccagcgcttagtgtgg

SEQ ID NO: 245180 - DNA, 33 bp, Homo sapien
aggagccacacaataatccagcgcttagtgtgg

SEQ ID NO: 245181 - DNA, 33 bp, Homo sapien
acaaggtggacttgacggcattatcaattcttt

SEQ ID NO: 245182 - DNA, 33 bp, Homo sapien
acaaggtggacttgactgcattatcaattcttt

SEQ ID NO: 245183 - DNA, 33 bp, Homo sapien
aactgtccaagtacaacgaatgaggatggaaaa

SEQ ID NO: 245184 - DNA, 33 bp, Homo sapien
aactgtccaagtacaatgaatgaggatggaaaa

SEQ ID NO: 245185 - DNA, 33 bp, Homo sapien
aagacgagtcttaacacggagcaggcaagagag

SEQ ID NO: 245186 - DNA, 33 bp, Homo sapien
aagacgagtcttaacatggagcaggcaagagag

SEQ ID NO: 245187 - DNA, 33 bp, Homo sapien
agtagcagggagtggaaaggaagctagagggag

SEQ ID NO: 245188 - DNA, 33 bp, Homo sapien
agtagcagggagtggagaggaagctagagggag

SEQ ID NO: 245189 - DNA, 33 bp, Homo sapien
actcctgtgtaagcccacataggtcattaggtg

SEQ ID NO: 245190 - DNA, 33 bp, Homo sapien
actcctgtgtaagcccgcataggtcattaggtg

SEQ ID NO: 245191 - DNA, 33 bp, Homo sapien
cagagtaacgatgaagaaaacctacccgtaact

SEQ ID NO: 245192 - DNA, 33 bp, Homo sapien
cagagtaacgatgaaggaaacctacccgtaact

SEQ ID NO: 245193 - DNA, 33 bp, Homo sapien
actctgcgatcaaatcaactgccttcaaatcct

SEQ ID NO: 245194 - DNA, 33 bp, Homo sapien
actctgcgatcaaatcgactgccttcaaatcct

SEQ ID NO: 245195 - DNA, 33 bp, Homo sapien
cgttcctagaagagacagagagcgctgactgaa

SEQ ID NO: 245196 - DNA, 33 bp, Homo sapien
cgttcctagaagagacggagagcgctgactgaa

SEQ ID NO: 245197 - DNA, 33 bp, Homo sapien
accggtctgcagaccaagagttgggaaggactg

SEQ ID NO: 245198 - DNA, 33 bp, Homo sapien
accggtctgcagaccaggagttgggaaggactg

SEQ ID NO: 245199 - DNA, 33 bp, Homo sapien
ggggtgttactataaacatacctgacagtgtgg

SEQ ID NO: 245200 - DNA, 33 bp, Homo sapien
ggggtgttactataaagatacctgacagtgtgg

SEQ ID NO: 245201 - DNA, 33 bp, Homo sapien
gactgggactgcctacactatttccacagtgtt

SEQ ID NO: 245202 - DNA, 33 bp, Homo sapien
gactgggactgcctacgctatttccacagtgtt

SEQ ID NO: 245203 - DNA, 33 bp, Homo sapien
gtagattcagcatttcacccatcagtttcaact

SEQ ID NO: 245204 - DNA, 33 bp, Homo sapien
gtagattcagcatttcccccatcagtttcaact

SEQ ID NO: 245205 - DNA, 33 bp, Homo sapien
gaatcatcaagatgtcactaggtgatttttcaa

SEQ ID NO: 245206 - DNA, 33 bp, Homo sapien
gaatcatcaagatgtcgctaggtgatttttcaa

SEQ ID NO: 245207 - DNA, 33 bp, Homo sapien
tttagtaagttatgaacgactacccaaagaata

SEQ ID NO: 245208 - DNA, 33 bp, Homo sapien
tttagtaagttatgaatgactacccaaagaata

SEQ ID NO: 245209 - DNA, 33 bp, Homo sapien
tctgcaagaatgcaccagcgctattaccactac

SEQ ID NO: 245210 - DNA, 33 bp, Homo sapien
tctgcaagaatgcaccggcgctattaccactac

SEQ ID NO: 245211 - DNA, 33 bp, Homo sapien
ccagctcttgtgtgaactaacagagtgagagct

SEQ ID NO: 245212 - DNA, 33 bp, Homo sapien
ccagctcttgtgtgaagtaacagagtgagagct

SEQ ID NO: 245213 - DNA, 33 bp, Homo sapien
attccttcatggcaacacaaaacagattaacac

SEQ ID NO: 245214 - DNA, 33 bp, Homo sapien
attccttcatggcaacgcaaaacagattaacac

SEQ ID NO: 245215 - DNA, 33 bp, Homo sapien
cctggctattatcctcaaatcttgttcatatct

SEQ ID NO: 245216 - DNA, 33 bp, Homo sapien
cctggctattatcctcgaatcttgttcatatct

SEQ ID NO: 245217 - DNA, 33 bp, Homo sapien
cccttcacctctgacaagtttatttcaacacaa

SEQ ID NO: 245218 - DNA, 33 bp, Homo sapien
cccttcacctctgacaggtttatttcaacacaa

SEQ ID NO: 245219 - DNA, 33 bp, Homo sapien
tcactggtcctagaacaagagacacatggagcc

SEQ ID NO: 245220 - DNA, 33 bp, Homo sapien
tcactggtcctagaacgagagacacatggagcc

SEQ ID NO: 245221 - DNA, 33 bp, Homo sapien
cctttgttccgcacaccgagccagtaatatatt

SEQ ID NO: 245222 - DNA, 33 bp, Homo sapien
cctttgttccgcacactgagccagtaatatatt

SEQ ID NO: 245223 - DNA, 33 bp, Homo sapien
tttacattctagttcacctcctctactgcataa

SEQ ID NO: 245224 - DNA, 33 bp, Homo sapien
tttacattctagttcatctcctctactgcataa

SEQ ID NO: 245225 - DNA, 33 bp, Homo sapien
tgccatgggctggatacatgaactcagcaactt

SEQ ID NO: 245226 - DNA, 33 bp, Homo sapien
tgccatgggctggatatatgaactcagcaactt

SEQ ID NO: 245227 - DNA, 33 bp, Homo sapien
ttccagattggcttgaacagagaggttgaagaa

SEQ ID NO: 245228 - DNA, 33 bp, Homo sapien
ttccagattggcttgagcagagaggttgaagaa

SEQ ID NO: 245229 - DNA, 33 bp, Homo sapien
gtggaggttctatgcaagtggattcaagccagc

SEQ ID NO: 245230 - DNA, 33 bp, Homo sapien
gtggaggttctatgcaggtggattcaagccagc

SEQ ID NO: 245231 - DNA, 33 bp, Homo sapien
cttccaattccctccacgaggtatcagacacac

SEQ ID NO: 245232 - DNA, 33 bp, Homo sapien
cttccaattccctccatgaggtatcagacacac

SEQ ID NO: 245233 - DNA, 33 bp, Homo sapien
agaggatatctatagcaaatggtagggaaaagt

SEQ ID NO: 245234 - DNA, 33 bp, Homo sapien
agaggatatctatagcgaatggtagggaaaagt

SEQ ID NO: 245235 - DNA, 33 bp, Homo sapien
tatggagaaaatatctcagaatccaagctcctc

SEQ ID NO: 245236 - DNA, 33 bp, Homo sapien
tatggagaaaatatctgagaatccaagctcctc

SEQ ID NO: 245237 - DNA, 33 bp, Homo sapien
tgtaagggggcacatacgaagatgttctgcggg

SEQ ID NO: 245238 - DNA, 33 bp, Homo sapien
tgtaagggggcacatatgaagatgttctgcggg

SEQ ID NO: 245239 - DNA, 33 bp, Homo sapien
gagatgagtagagtacggggtataggtggaaag

SEQ ID NO: 245240 - DNA, 33 bp, Homo sapien
gagatgagtagagtactgggtataggtggaaag

SEQ ID NO: 245241 - DNA, 33 bp, Homo sapien
agtcatccaattcctacgctgggtttgacctac

SEQ ID NO: 245242 - DNA, 33 bp, Homo sapien
agtcatccaattcctatgctgggtttgacctac

SEQ ID NO: 245243 - DNA, 33 bp, Homo sapien
ggatgcataatgaacaaaaagtcctcatagagc

SEQ ID NO: 245244 - DNA, 33 bp, Homo sapien
ggatgcataatgaacagaaagtcctcatagagc

SEQ ID NO: 245245 - DNA, 33 bp, Homo sapien
gccacctcatttacacaggatgagttatttcag

SEQ ID NO: 245246 - DNA, 33 bp, Homo sapien
gccacctcatttacacgggatgagttatttcag

SEQ ID NO: 245247 - DNA, 33 bp, Homo sapien
ttagaccatgatcttcaaagtaattattgataa

SEQ ID NO: 245248 - DNA, 33 bp, Homo sapien
ttagaccatgatcttcgaagtaattattgataa

SEQ ID NO: 245249 - DNA, 33 bp, Homo sapien
ggtctctgagttattacaaaaattggggctgtg

SEQ ID NO: 245250 - DNA, 33 bp, Homo sapien
ggtctctgagttattataaaaattggggctgtg

SEQ ID NO: 245251 - DNA, 33 bp, Homo sapien
tgggacttcaccagccagaagtgggacaagagt

SEQ ID NO: 245252 - DNA, 33 bp, Homo sapien
tgggacttcaccagccggaagtgggacaagagt

SEQ ID NO: 245253 - DNA, 33 bp, Homo sapien
caggatgtctcctgaacctagccccttctctct

SEQ ID NO: 245254 - DNA, 33 bp, Homo sapien
caggatgtctcctgaatctagccccttctctct

SEQ ID NO: 245255 - DNA, 33 bp, Homo sapien
tgtgtttgtgattctacgcactgtgatcttgag

SEQ ID NO: 245256 - DNA, 33 bp, Homo sapien
tgtgtttgtgattctatgcactgtgatcttgag

SEQ ID NO: 245257 - DNA, 33 bp, Homo sapien
gtcaataaacatacaaatgaacttcctgcacca

SEQ ID NO: 245258 - DNA, 33 bp, Homo sapien
gtcaataaacatacaagtgaacttcctgcacca

SEQ ID NO: 245259 - DNA, 33 bp, Homo sapien
ggtgacatacactataccctgttctgtgccttg

SEQ ID NO: 245260 - DNA, 33 bp, Homo sapien
ggtgacatacactatatcctgttctgtgccttg

SEQ ID NO: 245261 - DNA, 33 bp, Homo sapien
aatgcaatgaactcccaaatagactgcctcaac

SEQ ID NO: 245262 - DNA, 33 bp, Homo sapien
aatgcaatgaactcccgaatagactgcctcaac

SEQ ID NO: 245263 - DNA, 33 bp, Homo sapien
cacctgcttagctccacgttatttagctaatct

SEQ ID NO: 245264 - DNA, 33 bp, Homo sapien
cacctgcttagctccatgttatttagctaatct

SEQ ID NO: 245265 - DNA, 33 bp, Homo sapien
gggcaaggagggagaagaatgttccggccagca

SEQ ID NO: 245266 - DNA, 33 bp, Homo sapien
gggcaaggagggagaataatgttccggccagca

SEQ ID NO: 245267 - DNA, 33 bp, Homo sapien
tcattatcattagagagtcacctaactcatata

SEQ ID NO: 245268 - DNA, 33 bp, Homo sapien
tcattatcattagagattcacctaactcatata

SEQ ID NO: 245269 - DNA, 33 bp, Homo sapien
tcaggaaaggtgttgaaagcatgcattcccatg

SEQ ID NO: 245270 - DNA, 33 bp, Homo sapien
tcaggaaaggtgttgagagcatgcattcccatg

SEQ ID NO: 245271 - DNA, 33 bp, Homo sapien
cccagctctcttttagacagaatctgctaaatt

SEQ ID NO: 245272 - DNA, 33 bp, Homo sapien
cccagctctcttttaggcagaatctgctaaatt

SEQ ID NO: 245273 - DNA, 33 bp, Homo sapien
ctgtttcaaaatcaaacctgcctgaccgcaaag

SEQ ID NO: 245274 - DNA, 33 bp, Homo sapien
ctgtttcaaaatcaaatctgcctgaccgcaaag

SEQ ID NO: 245275 - DNA, 33 bp, Homo sapien
aggatacaaataacatcaccaagtggtgcaatt

SEQ ID NO: 245276 - DNA, 33 bp, Homo sapien
aggatacaaataacattaccaagtggtgcaatt

SEQ ID NO: 245277 - DNA, 33 bp, Homo sapien
aaaaactgcattgaaaactttggatctagaatc

SEQ ID NO: 245278 - DNA, 33 bp, Homo sapien
aaaaactgcattgaaagctttggatctagaatc

SEQ ID NO: 245279 - DNA, 33 bp, Homo sapien
aactaagatgcgtcccaactttatactttttca

SEQ ID NO: 245280 - DNA, 33 bp, Homo sapien
aactaagatgcgtccccactttatactttttca

SEQ ID NO: 245281 - DNA, 33 bp, Homo sapien
acatggtagggcctaaactgagcaaatgtctga

SEQ ID NO: 245282 - DNA, 33 bp, Homo sapien
acatggtagggcctaagctgagcaaatgtctga

SEQ ID NO: 245283 - DNA, 33 bp, Homo sapien
ccttgtgactcttagacgagtgcctctgacact

SEQ ID NO: 245284 - DNA, 33 bp, Homo sapien
ccttgtgactcttagatgagtgcctctgacact

SEQ ID NO: 245285 - DNA, 33 bp, Homo sapien
cttaaggctcttgcccaagtctgaattctatgc

SEQ ID NO: 245286 - DNA, 33 bp, Homo sapien
cttaaggctcttgcccgagtctgaattctatgc

SEQ ID NO: 245287 - DNA, 33 bp, Homo sapien
aaaaaccaggttttccaattctcagtccgggtt

SEQ ID NO: 245288 - DNA, 33 bp, Homo sapien
aaaaaccaggttttccgattctcagtccgggtt

SEQ ID NO: 245289 - DNA, 33 bp, Homo sapien
aatccttactatagctaaaattgcaagatcaat

SEQ ID NO: 245290 - DNA, 33 bp, Homo sapien
aatccttactatagctgaaattgcaagatcaat

SEQ ID NO: 245291 - DNA, 33 bp, Homo sapien
agcatgccattcggcaagccagtaaattagatg

SEQ ID NO: 245292 - DNA, 33 bp, Homo sapien
agcatgccattcggcacgccagtaaattagatg

SEQ ID NO: 245293 - DNA, 33 bp, Homo sapien
agtgctgtcttcacagaagtgatggaatgtcag

SEQ ID NO: 245294 - DNA, 33 bp, Homo sapien
agtgctgtcttcacaggagtgatggaatgtcag

SEQ ID NO: 245295 - DNA, 33 bp, Homo sapien
tcatatgaattttagaactagcttgtcaatttc

SEQ ID NO: 245296 - DNA, 33 bp, Homo sapien
tcatatgaattttagacctagcttgtcaatttc

SEQ ID NO: 245297 - DNA, 33 bp, Homo sapien
acctctaaatccagaacacttaatctctagcac

SEQ ID NO: 245298 - DNA, 33 bp, Homo sapien
acctctaaatccagaatacttaatctctagcac

SEQ ID NO: 245299 - DNA, 33 bp, Homo sapien
gaggaaagactcaggacgtatcatggtcagggt

SEQ ID NO: 245300 - DNA, 33 bp, Homo sapien
gaggaaagactcaggatgtatcatggtcagggt

SEQ ID NO: 245301 - DNA, 33 bp, Homo sapien
gatgcagataattaaaacaggtgtaatggccca

SEQ ID NO: 245302 - DNA, 33 bp, Homo sapien
gatgcagataattaaagcaggtgtaatggccca

SEQ ID NO: 245303 - DNA, 33 bp, Homo sapien
gcagctttttctgatacgttgtctttgtaagac

SEQ ID NO: 245304 - DNA, 33 bp, Homo sapien
gcagctttttctgatatgttgtctttgtaagac

SEQ ID NO: 245305 - DNA, 33 bp, Homo sapien
caccttttttgctccactgaaggacatcctaat

SEQ ID NO: 245306 - DNA, 33 bp, Homo sapien
caccttttttgctccattgaaggacatcctaat

SEQ ID NO: 245307 - DNA, 33 bp, Homo sapien
ataagcttgttgattacggactggagtgctgaa

SEQ ID NO: 245308 - DNA, 33 bp, Homo sapien
ataagcttgttgattatggactggagtgctgaa

SEQ ID NO: 245309 - DNA, 33 bp, Homo sapien
gctacaaagaacaagaaatgactacagcagcaa

SEQ ID NO: 245310 - DNA, 33 bp, Homo sapien
gctacaaagaacaagagatgactacagcagcaa

SEQ ID NO: 245311 - DNA, 33 bp, Homo sapien
gctctagacttatacaatgaactgccgactcat

SEQ ID NO: 245312 - DNA, 33 bp, Homo sapien
gctctagacttatacagtgaactgccgactcat

SEQ ID NO: 245313 - DNA, 33 bp, Homo sapien
ccttgtggaaaaaagcaaaaatgcagaaaaaaa

SEQ ID NO: 245314 - DNA, 33 bp, Homo sapien
ccttgtggaaaaaagcgaaaatgcagaaaaaaa

SEQ ID NO: 245315 - DNA, 33 bp, Homo sapien
gcatattaaagtgtcccgaagtcatcctgttaa

SEQ ID NO: 245316 - DNA, 33 bp, Homo sapien
gcatattaaagtgtcctgaagtcatcctgttaa

SEQ ID NO: 245317 - DNA, 33 bp, Homo sapien
acatgaagcccattacaaaggtagacccaggag

SEQ ID NO: 245318 - DNA, 33 bp, Homo sapien
acatgaagcccattacgaaggtagacccaggag

SEQ ID NO: 245319 - DNA, 33 bp, Homo sapien
atggaagcattttttaaaccttaaagcactata

SEQ ID NO: 245320 - DNA, 33 bp, Homo sapien
atggaagcattttttataccttaaagcactata

SEQ ID NO: 245321 - DNA, 33 bp, Homo sapien
ggaatcctgtgcttaaaaaatggttcccaatta

SEQ ID NO: 245322 - DNA, 33 bp, Homo sapien
ggaatcctgtgcttaagaaatggttcccaatta

SEQ ID NO: 245323 - DNA, 33 bp, Homo sapien
tcatctttactatttgaagctccacttcctgta

SEQ ID NO: 245324 - DNA, 33 bp, Homo sapien
tcatctttactatttgtagctccacttcctgta

SEQ ID NO: 245325 - DNA, 33 bp, Homo sapien; identical to SEQ ID NO: 245323

SEQ ID NO: 245326 - DNA, 33 bp, Homo sapien; identical to SEQ ID NO: 245324

SEQ ID NO: 245327 - DNA, 33 bp, Homo sapien
tcaggaaatcccaataccgtgcaaattgagctt

SEQ ID NO: 245328 - DNA, 33 bp, Homo sapien
tcaggaaatcccaatatcgtgcaaattgagctt

SEQ ID NO: 245329 - DNA, 33 bp, Homo sapien
caagtatcagctcctcgaggaaagcatccttgt

SEQ ID NO: 245330 - DNA, 33 bp, Homo sapien
caagtatcagctcctctaggaaagcatccttgt

SEQ ID NO: 245331 - DNA, 33 bp, Homo sapien
tagagaaagatgggcaagctgatactacatagg

SEQ ID NO: 245332 - DNA, 33 bp, Homo sapien
tagagaaagatgggcaggctgatactacatagg

SEQ ID NO: 245333 - DNA, 33 bp, Homo sapien
actctagatatcagcaaactggttctagtctct

SEQ ID NO: 245334 - DNA, 33 bp, Homo sapien
actctagatatcagcacactggttctagtctct

SEQ ID NO: 245335 - DNA, 33 bp, Homo sapien
tcattgaatatgcaaacatcctacagcccctaa

SEQ ID NO: 245336 - DNA, 33 bp, Homo sapien
tcattgaatatgcaaagatcctacagcccctaa

SEQ ID NO: 245337 - DNA, 33 bp, Homo sapien
tccttaacaacgatgcacttagcatagtgtatt

SEQ ID NO: 245338 - DNA, 33 bp, Homo sapien
tccttaacaacgatgcgcttagcatagtgtatt

SEQ ID NO: 245339 - DNA, 33 bp, Homo sapien
caaatgaatttatggaacctgtttgcatcccat

SEQ ID NO: 245340 - DNA, 33 bp, Homo sapien
caaatgaatttatggaccctgtttgcatcccat

SEQ ID NO: 245341 - DNA, 33 bp, Homo sapien
ttgtgaactgcacatccgaagcatgtaggttgc

SEQ ID NO: 245342 - DNA, 33 bp, Homo sapien
ttgtgaactgcacatctgaagcatgtaggttgc

SEQ ID NO: 245343 - DNA, 33 bp, Homo sapien
actaatggtccttacccaacttcaactgtgatg

SEQ ID NO: 245344 - DNA, 33 bp, Homo sapien
actaatggtccttacctaacttcaactgtgatg

SEQ ID NO: 245345 - DNA, 33 bp, Homo sapien
tctgacttgagacatacattttgtttgcattat

SEQ ID NO: 245346 - DNA, 33 bp, Homo sapien
tctgacttgagacatatattttgtttgcattat

SEQ ID NO: 245347 - DNA, 33 bp, Homo sapien
cagttttgcagtactacataggggaaacatccc

SEQ ID NO: 245348 - DNA, 33 bp, Homo sapien
cagttttgcagtactagataggggaaacatccc

SEQ ID NO: 245349 - DNA, 33 bp, Homo sapien
gacaactgaaagcagggatggggggtgagagga

SEQ ID NO: 245350 - DNA, 33 bp, Homo sapien
gacaactgaaagcaggtatggggggtgagagga

SEQ ID NO: 245351 - DNA, 33 bp, Homo sapien
aaatagtaatgattccactctcataatttataa

SEQ ID NO: 245352 - DNA, 33 bp, Homo sapien
aaatagtaatgattccgctctcataatttataa

SEQ ID NO: 245353 - DNA, 33 bp, Homo sapien
ctctcacttagaataacgcacttgagatttatt

SEQ ID NO: 245354 - DNA, 33 bp, Homo sapien
ctctcacttagaataatgcacttgagatttatt

SEQ ID NO: 245355 - DNA, 33 bp, Homo sapien
ataccaaactagtctacgtagctgttgcctctt

SEQ ID NO: 245356 - DNA, 33 bp, Homo sapien
ataccaaactagtctatgtagctgttgcctctt

SEQ ID NO: 245357 - DNA, 33 bp, Homo sapien
atccttaactgtgtcacctgtacttttcattca

SEQ ID NO: 245358 - DNA, 33 bp, Homo sapien
atccttaactgtgtcatctgtacttttcattca

SEQ ID NO: 245359 - DNA, 33 bp, Homo sapien
attgaacctaatgagaaaaaatatcatgagaca

SEQ ID NO: 245360 - DNA, 33 bp, Homo sapien
attgaacctaatgagagaaaatatcatgagaca

SEQ ID NO: 245361 - DNA, 33 bp, Homo sapien
tgaaggtgagcttgtacgggagacagatagagg

SEQ ID NO: 245362 - DNA, 33 bp, Homo sapien
tgaaggtgagcttgtatgggagacagatagagg

SEQ ID NO: 245363 - DNA, 33 bp, Homo sapien
gtgaatttcactccccaaaaatgcttaagaaac

SEQ ID NO: 245364 - DNA, 33 bp, Homo sapien
gtgaatttcactcccccaaaatgcttaagaaac

SEQ ID NO: 245365 - DNA, 33 bp, Homo sapien
tggaggagctctgaagcaaaagcgtgggaaaag

SEQ ID NO: 245366 - DNA, 33 bp, Homo sapien
tggaggagctctgaaggaaaagcgtgggaaaag

SEQ ID NO: 245367 - DNA, 33 bp, Homo sapien
tgtgctgcacaaggacaactgaaacaaaagaat

SEQ ID NO: 245368 - DNA, 33 bp, Homo sapien
tgtgctgcacaaggacgactgaaacaaaagaat

SEQ ID NO: 245369 - DNA, 33 bp, Homo sapien
atatgatataccacaaaccagatgcatggctca

SEQ ID NO: 245370 - DNA, 33 bp, Homo sapien
atatgatataccacaacccagatgcatggctca

SEQ ID NO: 245371 - DNA, 33 bp, Homo sapien
ggtgacatttgagcaaacatatgaagagtgagc

SEQ ID NO: 245372 - DNA, 33 bp, Homo sapien
ggtgacatttgagcaagcatatgaagagtgagc

SEQ ID NO: 245373 - DNA, 33 bp, Homo sapien
tttctgcagggcctagaaagagccatcttgtta

SEQ ID NO: 245374 - DNA, 33 bp, Homo sapien
tttctgcagggcctagcaagagccatcttgtta

SEQ ID NO: 245375 - DNA, 33 bp, Homo sapien
aatgcaaattctagaaatgcactatctaatatg

SEQ ID NO: 245376 - DNA, 33 bp, Homo sapien
aatgcaaattctagaagtgcactatctaatatg

SEQ ID NO: 245377 - DNA, 33 bp, Homo sapien
tcagacctgactagtgcacttatgtcactaata

SEQ ID NO: 245378 - DNA, 33 bp, Homo sapien
tcagacctgactagtgtacttatgtcactaata

SEQ ID NO: 245379 - DNA, 33 bp, Homo sapien
attaaaaaaatcctccaagaatgaatcacctca

SEQ ID NO: 245380 - DNA, 33 bp, Homo sapien
attaaaaaaatcctccgagaatgaatcacctca

SEQ ID NO: 245381 - DNA, 33 bp, Homo sapien
tgaaagcttttgagcaaaggttggaacataata

SEQ ID NO: 245382 - DNA, 33 bp, Homo sapien
tgaaagcttttgagcagaggttggaacataata

SEQ ID NO: 245383 - DNA, 33 bp, Homo sapien
ctcttgccactctttcactctctgtgctgtggc

SEQ ID NO: 245384 - DNA, 33 bp, Homo sapien
ctcttgccactctttcgctctctgtgctgtggc

SEQ ID NO: 245385 - DNA, 33 bp, Homo sapien
ttttgaaggcagagccaatataatttaatcaac

SEQ ID NO: 245386 - DNA, 33 bp, Homo sapien
ttttgaaggcagagcccatataatttaatcaac

SEQ ID NO: 245387 - DNA, 33 bp, Homo sapien
tagaaatattctattacgaccgggatggaatac

SEQ ID NO: 245388 - DNA, 33 bp, Homo sapien
tagaaatattctattatgaccgggatggaatac

SEQ ID NO: 245389 - DNA, 33 bp, Homo sapien
aaagtaaccagagtcaatagaattctctttttt

SEQ ID NO: 245390 - DNA, 33 bp, Homo sapien
aaagtaaccagagtcagtagaattctctttttt

SEQ ID NO: 245391 - DNA, 33 bp, Homo sapien
aggctactgctttctaataagtccaattcctat

SEQ ID NO: 245392 - DNA, 33 bp, Homo sapien
aggctactgctttctagtaagtccaattcctat

SEQ ID NO: 245393 - DNA, 33 bp, Homo sapien
gtaaggactcaaatgggcaaatggaagtatcat

SEQ ID NO: 245394 - DNA, 33 bp, Homo sapien
gtaaggactcaaatggtcaaatggaagtatcat

SEQ ID NO: 245395 - DNA, 33 bp, Homo sapien
tttaccggtctctttgaaactggacgtttgtct

SEQ ID NO: 245396 - DNA, 33 bp, Homo sapien
tttaccggtctctttggaactggacgtttgtct

SEQ ID NO: 245397 - DNA, 33 bp, Homo sapien
aattagtcacttacttaaactggagacttcaag

SEQ ID NO: 245398 - DNA, 33 bp, Homo sapien
aattagtcacttactttaactggagacttcaag

SEQ ID NO: 245399 - DNA, 33 bp, Homo sapien
aatgttgcaacctagacggattcctggaacaga

SEQ ID NO: 245400 - DNA, 33 bp, Homo sapien
aatgttgcaacctagatggattcctggaacaga

SEQ ID NO: 245401 - DNA, 33 bp, Homo sapien
aacctcacagaacaaacgtatagcttcataagg

SEQ ID NO: 245402 - DNA, 33 bp, Homo sapien
aacctcacagaacaaatgtatagcttcataagg

SEQ ID NO: 245403 - DNA, 33 bp, Homo sapien
agctgggataactgacacctttctccatgtggt

SEQ ID NO: 245404 - DNA, 33 bp, Homo sapien
agctgggataactgactcctttctccatgtggt

SEQ ID NO: 245405 - DNA, 33 bp, Homo sapien
atattctgcctaatgccatttaaatttttataa

SEQ ID NO: 245406 - DNA, 33 bp, Homo sapien
atattctgcctaatgctatttaaatttttataa

SEQ ID NO: 245407 - DNA, 33 bp, Homo sapien
gcctgtgtacaggttacggggataggaagaata

SEQ ID NO: 245408 - DNA, 33 bp, Homo sapien
gcctgtgtacaggttagggggataggaagaata

SEQ ID NO: 245409 - DNA, 33 bp, Homo sapien
gggaaagatgagagacagcgtattcttcctatc

SEQ ID NO: 245410 - DNA, 33 bp, Homo sapien
gggaaagatgagagacggcgtattcttcctatc

SEQ ID NO: 245411 - DNA, 33 bp, Homo sapien
actaccagtcacccctcacataggactcaatgg

SEQ ID NO: 245412 - DNA, 33 bp, Homo sapien
actaccagtcaccccttacataggactcaatgg

SEQ ID NO: 245413 - DNA, 33 bp, Homo sapien
acaacacaacattatacaaagaaaggcattagt

SEQ ID NO: 245414 - DNA, 33 bp, Homo sapien
acaacacaacattatataaagaaaggcattagt

SEQ ID NO: 245415 - DNA, 33 bp, Homo sapien
ccttttctgtgcatatcagtcaagcctctttcc

SEQ ID NO: 245416 - DNA, 33 bp, Homo sapien
ccttttctgtgcatattagtcaagcctctttcc

SEQ ID NO: 245417 - DNA, 33 bp, Homo sapien
tctggccttaagaatcaatagccttagaaatgt

SEQ ID NO: 245418 - DNA, 33 bp, Homo sapien
tctggccttaagaatcgatagccttagaaatgt

SEQ ID NO: 245419 - DNA, 33 bp, Homo sapien
gttttacctgcaagacaataagtaaaacttcat

SEQ ID NO: 245420 - DNA, 33 bp, Homo sapien
gttttacctgcaagacgataagtaaaacttcat

SEQ ID NO: 245421 - DNA, 33 bp, Homo sapien
actgacttcagatagaatccatgcagataataa

SEQ ID NO: 245422 - DNA, 33 bp, Homo sapien
actgacttcagatagagtccatgcagataataa

SEQ ID NO: 245423 - DNA, 33 bp, Homo sapien
atgacatatcagttaagaattctgttcagctgc

SEQ ID NO: 245424 - DNA, 33 bp, Homo sapien
atgacatatcagttaataattctgttcagctgc

SEQ ID NO: 245425 - DNA, 33 bp, Homo sapien
attctgattcatttcacgtcagcaatgtgttca

SEQ ID NO: 245426 - DNA, 33 bp, Homo sapien
attctgattcatttcaggtcagcaatgtgttca

SEQ ID NO: 245427 - DNA, 33 bp, Homo sapien
ggtatcactggtaaaaggttagtgtgccctttt

SEQ ID NO: 245428 - DNA, 33 bp, Homo sapien
ggtatcactggtaaaatgttagtgtgccctttt

SEQ ID NO: 245429 - DNA, 33 bp, Homo sapien
ttaatttgtggaattacgtgacggcctaatcct

SEQ ID NO: 245430 - DNA, 33 bp, Homo sapien
ttaatttgtggaattatgtgacggcctaatcct

SEQ ID NO: 245431 - DNA, 33 bp, Homo sapien
atcccagtaacatttccctggctttaactactt

SEQ ID NO: 245432 - DNA, 33 bp, Homo sapien
atcccagtaacatttctctggctttaactactt

SEQ ID NO: 245433 - DNA, 33 bp, Homo sapien
atttcacgtttcagtacccaaaagtgttaagtc

SEQ ID NO: 245434 - DNA, 33 bp, Homo sapien
atttcacgtttcagtatccaaaagtgttaagtc

SEQ ID NO: 245435 - DNA, 33 bp, Homo sapien
gagcggtaagaagtcaatgaagaggtagccaag

SEQ ID NO: 245436 - DNA, 33 bp, Homo sapien
gagcggtaagaagtcagtgaagaggtagccaag

SEQ ID NO: 245437 - DNA, 33 bp, Homo sapien
ttgacctctattaaaacgggatcggtgctggga

SEQ ID NO: 245438 - DNA, 33 bp, Homo sapien
ttgacctctattaaaatgggatcggtgctggga

SEQ ID NO: 245439 - DNA, 33 bp, Homo sapien
taccttttcaatgccacgctgttcaaaagtttt

SEQ ID NO: 245440 - DNA, 33 bp, Homo sapien
taccttttcaatgccatgctgttcaaaagtttt

SEQ ID NO: 245441 - DNA, 33 bp, Homo sapien
agaaagggacctaccccaagccaacaatttgtc

SEQ ID NO: 245442 - DNA, 33 bp, Homo sapien
agaaagggacctaccctaagccaacaatttgtc

SEQ ID NO: 245443 - DNA, 33 bp, Homo sapien
cagtaactggcatatacagtcagctctccatat

SEQ ID NO: 245444 - DNA, 33 bp, Homo sapien
cagtaactggcatatatagtcagctctccatat

SEQ ID NO: 245445 - DNA, 33 bp, Homo sapien
acactgccactgagggacactcagcctcttttt

SEQ ID NO: 245446 - DNA, 33 bp, Homo sapien
acactgccactgaggggcactcagcctcttttt

SEQ ID NO: 245447 - DNA, 33 bp, Homo sapien
ctcagtcactttctaacgcaagcacttttcagg

SEQ ID NO: 245448 - DNA, 33 bp, Homo sapien
ctcagtcactttctaaggcaagcacttttcagg

SEQ ID NO: 245449 - DNA, 33 bp, Homo sapien
gaagtactgctttagcacactgtcatgattctt

SEQ ID NO: 245450 - DNA, 33 bp, Homo sapien
gaagtactgctttagcgcactgtcatgattctt

SEQ ID NO: 245451 - DNA, 33 bp, Homo sapien
cacactcggtcatccccacatccaatcagtcat

SEQ ID NO: 245452 - DNA, 33 bp, Homo sapien
cacactcggtcatccctacatccaatcagtcat

SEQ ID NO: 245453 - DNA, 33 bp, Homo sapien
aaggaaaatgaagtcacggaagaatgaaaaagt

SEQ ID NO: 245454 - DNA, 33 bp, Homo sapien
aaggaaaatgaagtcagggaagaatgaaaaagt

SEQ ID NO: 245455 - DNA, 33 bp, Homo sapien
ttcatgagcaagaccaatgagtagaagctccag

SEQ ID NO: 245456 - DNA, 33 bp, Homo sapien
ttcatgagcaagaccagtgagtagaagctccag

SEQ ID NO: 245457 - DNA, 33 bp, Homo sapien
ccaaagtaatctttcaccaatgctcatgtttaa

SEQ ID NO: 245458 - DNA, 33 bp, Homo sapien
ccaaagtaatctttcatcaatgctcatgtttaa

SEQ ID NO: 245459 - DNA, 33 bp, Homo sapien
actcaaaacttggaagcactaaaggagacttca

SEQ ID NO: 245460 - DNA, 33 bp, Homo sapien
actcaaaacttggaaggactaaaggagacttca

SEQ ID NO: 245461 - DNA, 33 bp, Homo sapien
ggctcaagtgggctgacggaaactcaccatgct

SEQ ID NO: 245462 - DNA, 33 bp, Homo sapien
ggctcaagtgggctgatggaaactcaccatgct

SEQ ID NO: 245463 - DNA, 33 bp, Homo sapien
ataaatcttttttgaacgaatgttgaacgagta

SEQ ID NO: 245464 - DNA, 33 bp, Homo sapien
ataaatcttttttgaatgaatgttgaacgagta

SEQ ID NO: 245465 - DNA, 33 bp, Homo sapien
aggttctagaaatcaacagggagcagcatttac

SEQ ID NO: 245466 - DNA, 33 bp, Homo sapien
aggttctagaaatcaatagggagcagcatttac

SEQ ID NO: 245467 - DNA, 33 bp, Homo sapien
atatctgtgtcccccaaaaatcctttgttgaag

SEQ ID NO: 245468 - DNA, 33 bp, Homo sapien
atatctgtgtcccccagaaatcctttgttgaag

SEQ ID NO: 245469 - DNA, 33 bp, Homo sapien
ggttagaaaagttgtacaatttgcccaaagttt

SEQ ID NO: 245470 - DNA, 33 bp, Homo sapien
ggttagaaaagttgtataatttgcccaaagttt

SEQ ID NO: 245471 - DNA, 33 bp, Homo sapien
tgtgtgtgtgttttctcacaacgatatccctag

SEQ ID NO: 245472 - DNA, 33 bp, Homo sapien
tgtgtgtgtgttttcttacaacgatatccctag

SEQ ID NO: 245473 - DNA, 33 bp, Homo sapien
tgcatctcctcagaaaaatgaatatttgcccac

SEQ ID NO: 245474 - DNA, 33 bp, Homo sapien
tgcatctcctcagaaacatgaatatttgcccac

SEQ ID NO: 245475 - DNA, 33 bp, Homo sapien
gtagatctttccactacgtcctcaggaaacccc

SEQ ID NO: 245476 - DNA, 33 bp, Homo sapien
gtagatctttccactatgtcctcaggaaacccc

SEQ ID NO: 245477 - DNA, 33 bp, Homo sapien
tcataaatacagcatccgacttcttacaaattc

SEQ ID NO: 245478 - DNA, 33 bp, Homo sapien
tcataaatacagcatcggacttcttacaaattc

SEQ ID NO: 245479 - DNA, 33 bp, Homo sapien
gtgtctattcaaggccaatttgataacttttag

SEQ ID NO: 245480 - DNA, 33 bp, Homo sapien
gtgtctattcaaggcccatttgataacttttag

SEQ ID NO: 245481 - DNA, 33 bp, Homo sapien
aacaaaagcagtgtaaaccttccatattgcaga

SEQ ID NO: 245482 - DNA, 33 bp, Homo sapien
aacaaaagcagtgtaacccttccatattgcaga

SEQ ID NO: 245483 - DNA, 33 bp, Homo sapien
catactgctatagatacggcattgtgacttagt

SEQ ID NO: 245484 - DNA, 33 bp, Homo sapien
catactgctatagatatggcattgtgacttagt

SEQ ID NO: 245485 - DNA, 33 bp, Homo sapien
taggctggggttgccgaatgaaggacaggcggg

SEQ ID NO: 245486 - DNA, 33 bp, Homo sapien
taggctggggttgccgtatgaaggacaggcggg

SEQ ID NO: 245487 - DNA, 33 bp, Homo sapien
atagcagctaaccaatgaccatttcctgaacaa

SEQ ID NO: 245488 - DNA, 33 bp, Homo sapien
atagcagctaaccaattaccatttcctgaacaa

SEQ ID NO: 245489 - DNA, 33 bp, Homo sapien
aaagcccttgccccaacagatggcccttgagca

SEQ ID NO: 245490 - DNA, 33 bp, Homo sapien
aaagcccttgccccaatagatggcccttgagca

SEQ ID NO: 245491 - DNA, 33 bp, Homo sapien
cccgccaaaccaggagaaccccaaatgctttgc

SEQ ID NO: 245492 - DNA, 33 bp, Homo sapien
cccgccaaaccaggaggaccccaaatgctttgc

SEQ ID NO: 245493 - DNA, 33 bp, Homo sapien
gatgcagcaaagtgagcaaggatgaggtagggt

SEQ ID NO: 245494 - DNA, 33 bp, Homo sapien
gatgcagcaaagtgagtaaggatgaggtagggt

SEQ ID NO: 245495 - DNA, 33 bp, Homo sapien
tacgggggaggatgggaattatagtctcctagc

SEQ ID NO: 245496 - DNA, 33 bp, Homo sapien
tacgggggaggatgggtattatagtctcctagc

SEQ ID NO: 245497 - DNA, 33 bp, Homo sapien
gagtgtctcactggcacattgccccatcagaaa

SEQ ID NO: 245498 - DNA, 33 bp, Homo sapien
gagtgtctcactggcatattgccccatcagaaa

SEQ ID NO: 245499 - DNA, 33 bp, Homo sapien
tgatgagtgattttaccgggataaggacagtgg

SEQ ID NO: 245500 - DNA, 33 bp, Homo sapien
tgatgagtgattttactgggataaggacagtgg

SEQ ID NO: 245501 - DNA, 33 bp, Homo sapien
aagtcttaccctaaaaatctctatttcctaagc

SEQ ID NO: 245502 - DNA, 33 bp, Homo sapien
aagtcttaccctaaaagtctctatttcctaagc

SEQ ID NO: 245503 - DNA, 33 bp, Homo sapien
ttcactactgtaaaccccatcaactagcacata

SEQ ID NO: 245504 - DNA, 33 bp, Homo sapien
ttcactactgtaaacctcatcaactagcacata

SEQ ID NO: 245505 - DNA, 33 bp, Homo sapien
acgtccatttggttgacgaaggtaaatcattca

SEQ ID NO: 245506 - DNA, 33 bp, Homo sapien
acgtccatttggttgatgaaggtaaatcattca

SEQ ID NO: 245507 - DNA, 33 bp, Homo sapien
ctctagggtctcatcaccccagccttctgaaca

SEQ ID NO: 245508 - DNA, 33 bp, Homo sapien
ctctagggtctcatcatcccagccttctgaaca

SEQ ID NO: 245509 - DNA, 33 bp, Homo sapien
tgtgcaacaaaggagaaacatacaggctattag

SEQ ID NO: 245510 - DNA, 33 bp, Homo sapien
tgtgcaacaaaggagagacatacaggctattag

SEQ ID NO: 245511 - DNA, 33 bp, Homo sapien
agtgaagccttactcccaaccacatcaagagct

SEQ ID NO: 245512 - DNA, 33 bp, Homo sapien
agtgaagccttactccgaaccacatcaagagct

SEQ ID NO: 245513 - DNA, 33 bp, Homo sapien
ggcaggcactgtacttgaagatttcacttaccc

SEQ ID NO: 245514 - DNA, 33 bp, Homo sapien
ggcaggcactgtactttaagatttcacttaccc

SEQ ID NO: 245515 - DNA, 33 bp, Homo sapien
gtggtcccttgcatcaagtggtatttgaggtag

SEQ ID NO: 245516 - DNA, 33 bp, Homo sapien
gtggtcccttgcatcaggtggtatttgaggtag

SEQ ID NO: 245517 - DNA, 33 bp, Homo sapien
tcctggacagcctcacagggttggggcagtggc

SEQ ID NO: 245518 - DNA, 33 bp, Homo sapien
tcctggacagcctcacggggttggggcagtggc

SEQ ID NO: 245519 - DNA, 33 bp, Homo sapien
ccctccacgaggtcaactgtagttcagtgattt

SEQ ID NO: 245520 - DNA, 33 bp, Homo sapien
ccctccacgaggtcaattgtagttcagtgattt

SEQ ID NO: 245521 - DNA, 33 bp, Homo sapien
gggacaaagcctgggagcttaagaggaaacagt

SEQ ID NO: 245522 - DNA, 33 bp, Homo sapien
gggacaaagcctgggatcttaagaggaaacagt

SEQ ID NO: 245523 - DNA, 33 bp, Homo sapien
gctctaccttatcactaagtactacctgaaatc

SEQ ID NO: 245524 - DNA, 33 bp, Homo sapien
gctctaccttatcactcagtactacctgaaatc

SEQ ID NO: 245525 - DNA, 33 bp, Homo sapien
ctttgtattacagctaaccttcaatcagtaggt

SEQ ID NO: 245526 - DNA, 33 bp, Homo sapien
ctttgtattacagctagccttcaatcagtaggt

SEQ ID NO: 245527 - DNA, 33 bp, Homo sapien
aatgatggtgctcagaacgtgcgtggcaccacg

SEQ ID NO: 245528 - DNA, 33 bp, Homo sapien
aatgatggtgctcagagcgtgcgtggcaccacg

SEQ ID NO: 245529 - DNA, 33 bp, Homo sapien
tcttgtaaggaaaaaacgtaaatgcataaaaac

SEQ ID NO: 245530 - DNA, 33 bp, Homo sapien
tcttgtaaggaaaaaatgtaaatgcataaaaac

SEQ ID NO: 245531 - DNA, 33 bp, Homo sapien
taaaacacatggtgaagtggttctttcaaaagc

SEQ ID NO: 245532 - DNA, 33 bp, Homo sapien
taaaacacatggtgaattggttctttcaaaagc

SEQ ID NO: 245533 - DNA, 33 bp, Homo sapien
aacctaaatgtgaaagcaaagttacaaagctaa

SEQ ID NO: 245534 - DNA, 33 bp, Homo sapien
aacctaaatgtgaaaggaaagttacaaagctaa

SEQ ID NO: 245535 - DNA, 33 bp, Homo sapien
ctctttgctgagctaccgtaaacatacaccatg

SEQ ID NO: 245536 - DNA, 33 bp, Homo sapien
ctctttgctgagctactgtaaacatacaccatg

SEQ ID NO: 245537 - DNA, 33 bp, Homo sapien
actgtcctattttatacatgaggatctgaggct

SEQ ID NO: 245538 - DNA, 33 bp, Homo sapien
actgtcctattttatagatgaggatctgaggct

SEQ ID NO: 245539 - DNA, 33 bp, Homo sapien
ctccctctgtctttggaactaagaatggatctt

SEQ ID NO: 245540 - DNA, 33 bp, Homo sapien
ctccctctgtctttgggactaagaatggatctt

SEQ ID NO: 245541 - DNA, 33 bp, Homo sapien
caggggacgttttcacaagtgacagaagatcca

SEQ ID NO: 245542 - DNA, 33 bp, Homo sapien
caggggacgttttcacgagtgacagaagatcca

SEQ ID NO: 245543 - DNA, 33 bp, Homo sapien
gcaaagtcacagagctaacaaataacagagcca

SEQ ID NO: 245544 - DNA, 33 bp, Homo sapien
gcaaagtcacagagctgacaaataacagagcca

SEQ ID NO: 245545 - DNA, 33 bp, Homo sapien
ggtcttattgctggccaatttgttcttgttaat

SEQ ID NO: 245546 - DNA, 33 bp, Homo sapien
ggtcttattgctggccgatttgttcttgttaat

SEQ ID NO: 245547 - DNA, 33 bp, Homo sapien
atggcaaacacacttacccttgcaggccttcga

SEQ ID NO: 245548 - DNA, 33 bp, Homo sapien
atggcaaacacacttatccttgcaggccttcga

SEQ ID NO: 245549 - DNA, 33 bp, Homo sapien
caaagaggatcttttaaaaaggagccaaatccc

SEQ ID NO: 245550 - DNA, 33 bp, Homo sapien
caaagaggatcttttacaaaggagccaaatccc

SEQ ID NO: 245551 - DNA, 33 bp, Homo sapien
cctcccttctgttgacggctttacagttataaa

SEQ ID NO: 245552 - DNA, 33 bp, Homo sapien
cctcccttctgttgactgctttacagttataaa

SEQ ID NO: 245553 - DNA, 33 bp, Homo sapien
gtgccttggtggaagacggttgcaagtgtgagg

SEQ ID NO: 245554 - DNA, 33 bp, Homo sapien
gtgccttggtggaagatggttgcaagtgtgagg

SEQ ID NO: 245555 - DNA, 33 bp, Homo sapien
gcacactgggattcacaaaattgacactcagga

SEQ ID NO: 245556 - DNA, 33 bp, Homo sapien
gcacactgggattcacgaaattgacactcagga

SEQ ID NO: 245557 - DNA, 33 bp, Homo sapien
aactctttacaaaatcaccagaaaaagattaat

SEQ ID NO: 245558 - DNA, 33 bp, Homo sapien
aactctttacaaaatcgccagaaaaagattaat

SEQ ID NO: 245559 - DNA, 33 bp, Homo sapien
gccgctgaagaagccaatgatttatacgtaggt

SEQ ID NO: 245560 - DNA, 33 bp, Homo sapien
gccgctgaagaagccagtgatttatacgtaggt

SEQ ID NO: 245561 - DNA, 33 bp, Homo sapien
gtctgtaccttcagcactccctccctgctgtgg

SEQ ID NO: 245562 - DNA, 33 bp, Homo sapien
gtctgtaccttcagcattccctccctgctgtgg

SEQ ID NO: 245563 - DNA, 33 bp, Homo sapien
ggtcctgcacttggccaaaggacttcccaggct

SEQ ID NO: 245564 - DNA, 33 bp, Homo sapien
ggtcctgcacttggccgaaggacttcccaggct

SEQ ID NO: 245565 - DNA, 33 bp, Homo sapien
tatgtatatgatcaacactcaaatgggcccatg

SEQ ID NO: 245566 - DNA, 33 bp, Homo sapien
tatgtatatgatcaacgctcaaatgggcccatg

SEQ ID NO: 245567 - DNA, 33 bp, Homo sapien
attcacatagccttcacagtgactagtgccctc

SEQ ID NO: 245568 - DNA, 33 bp, Homo sapien
attcacatagccttcatagtgactagtgccctc

SEQ ID NO: 245569 - DNA, 33 bp, Homo sapien
atcagaaaagcaatcaaatggtcaaactccaag

SEQ ID NO: 245570 - DNA, 33 bp, Homo sapien
atcagaaaagcaatcacatggtcaaactccaag

SEQ ID NO: 245571 - DNA, 33 bp, Homo sapien
caataaaaccccaagcagatgctaaaaatgtgt

SEQ ID NO: 245572 - DNA, 33 bp, Homo sapien
caataaaaccccaagcggatgctaaaaatgtgt

SEQ ID NO: 245573 - DNA, 33 bp, Homo sapien
gtgaggaagccttccaaagcacatcggcccagc

SEQ ID NO: 245574 - DNA, 33 bp, Homo sapien
gtgaggaagccttccagagcacatcggcccagc

SEQ ID NO: 245575 - DNA, 33 bp, Homo sapien
tgtgaatcaaatgctgaaatttatgtaaggcac

SEQ ID NO: 245576 - DNA, 33 bp, Homo sapien
tgtgaatcaaatgctgcaatttatgtaaggcac

SEQ ID NO: 245577 - DNA, 33 bp, Homo sapien
tgggaagcgctactcaaataattaaaatgggtg

SEQ ID NO: 245578 - DNA, 33 bp, Homo sapien
tgggaagcgctactcagataattaaaatgggtg

SEQ ID NO: 245579 - DNA, 33 bp, Homo sapien
acagagaggttgaataacttgcctgaggttgtt

SEQ ID NO: 245580 - DNA, 33 bp, Homo sapien
acagagaggttgaataccttgcctgaggttgtt

SEQ ID NO: 245581 - DNA, 33 bp, Homo sapien
gttggtagaagagatacgaaaatttggaaccaa

SEQ ID NO: 245582 - DNA, 33 bp, Homo sapien
gttggtagaagagatatgaaaatttggaaccaa

SEQ ID NO: 245583 - DNA, 33 bp, Homo sapien
gctctgcccaagctggaacagaactgactcaac

SEQ ID NO: 245584 - DNA, 33 bp, Homo sapien
gctctgcccaagctgggacagaactgactcaac

SEQ ID NO: 245585 - DNA, 33 bp, Homo sapien
ggatgctgagtcactcacaggcttgcatatgtt

SEQ ID NO: 245586 - DNA, 33 bp, Homo sapien
ggatgctgagtcactcgcaggcttgcatatgtt

SEQ ID NO: 245587 - DNA, 33 bp, Homo sapien
tgtagaaaccacacataagcagtcataagggag

SEQ ID NO: 245588 - DNA, 33 bp, Homo sapien
tgtagaaaccacacatgagcagtcataagggag

SEQ ID NO: 245589 - DNA, 33 bp, Homo sapien
gctcactgacaaaataaaacaggcggaggccat

SEQ ID NO: 245590 - DNA, 33 bp, Homo sapien
gctcactgacaaaatagaacaggcggaggccat

SEQ ID NO: 245591 - DNA, 33 bp, Homo sapien
tcacctaaggccacacaattaacaagtggccac

SEQ ID NO: 245592 - DNA, 33 bp, Homo sapien
tcacctaaggccacacgattaacaagtggccac

SEQ ID NO: 245593 - DNA, 33 bp, Homo sapien
gcccagtgcgaaatgaaaaggtgaggccccttg

SEQ ID NO: 245594 - DNA, 33 bp, Homo sapien
gcccagtgcgaaatgagaaggtgaggccccttg

SEQ ID NO: 245595 - DNA, 33 bp, Homo sapien
ttgacacataccaaagactgagtaattagcacc

SEQ ID NO: 245596 - DNA, 33 bp, Homo sapien
ttgacacataccaaaggctgagtaattagcacc

SEQ ID NO: 245597 - DNA, 33 bp, Homo sapien
taactgtcaccatggcaatttcgaagacattgg

SEQ ID NO: 245598 - DNA, 33 bp, Homo sapien
taactgtcaccatggcgatttcgaagacattgg

SEQ ID NO: 245599 - DNA, 33 bp, Homo sapien
gctattgctgatgttaacattattgcaagcact

SEQ ID NO: 245600 - DNA, 33 bp, Homo sapien
gctattgctgatgttatcattattgcaagcact

SEQ ID NO: 245601 - DNA, 33 bp, Homo sapien
tttcccacacgttttccctgaccgctattaaac

SEQ ID NO: 245602 - DNA, 33 bp, Homo sapien
tttcccacacgttttctctgaccgctattaaac

SEQ ID NO: 245603 - DNA, 33 bp, Homo sapien
actggggaccaaagagaaaacactgaggggctc

SEQ ID NO: 245604 - DNA, 33 bp, Homo sapien
actggggaccaaagaggaaacactgaggggctc

SEQ ID NO: 245605 - DNA, 33 bp, Homo sapien
caacagaggatgtcccaacagctgaaggttgaa

SEQ ID NO: 245606 - DNA, 33 bp, Homo sapien
caacagaggatgtcccgacagctgaaggttgaa

SEQ ID NO: 245607 - DNA, 33 bp, Homo sapien
ggtcccatcctgaagcactgttcaaccttcagc

SEQ ID NO: 245608 - DNA, 33 bp, Homo sapien
ggtcccatcctgaagcgctgttcaaccttcagc

SEQ ID NO: 245609 - DNA, 33 bp, Homo sapien
gaagagcagggaccaaagaaatcatgctggtgg

SEQ ID NO: 245610 - DNA, 33 bp, Homo sapien
gaagagcagggaccaaggaaatcatgctggtgg

SEQ ID NO: 245611 - DNA, 33 bp, Homo sapien
cccagaaattttcactcaattggtctggggtgg

SEQ ID NO: 245612 - DNA, 33 bp, Homo sapien
cccagaaattttcacttaattggtctggggtgg

SEQ ID NO: 245613 - DNA, 33 bp, Homo sapien
tttttgatggattgtgaaaggcctattagttct

SEQ ID NO: 245614 - DNA, 33 bp, Homo sapien
tttttgatggattgtggaaggcctattagttct

SEQ ID NO: 245615 - DNA, 33 bp, Homo sapien
acactacgttaacagcagcatttagtcagctct

SEQ ID NO: 245616 - DNA, 33 bp, Homo sapien
acactacgttaacagcggcatttagtcagctct

SEQ ID NO: 245617 - DNA, 33 bp, Homo sapien
gaggggctcgtatatcactgggaggaggcagct

SEQ ID NO: 245618 - DNA, 33 bp, Homo sapien
gaggggctcgtatatcgctgggaggaggcagct

SEQ ID NO: 245619 - DNA, 33 bp, Homo sapien
tgttccctccagtttgaacttccctatgccctc

SEQ ID NO: 245620 - DNA, 33 bp, Homo sapien
tgttccctccagtttggacttccctatgccctc

SEQ ID NO: 245621 - DNA, 33 bp, Homo sapien
taggatgattgaaagacgagctgatggtcatta

SEQ ID NO: 245622 - DNA, 33 bp, Homo sapien
taggatgattgaaagatgagctgatggtcatta

SEQ ID NO: 245623 - DNA, 33 bp, Homo sapien
agctggaggtctaaaaaaccattccatgcctgg

SEQ ID NO: 245624 - DNA, 33 bp, Homo sapien
agctggaggtctaaaataccattccatgcctgg

SEQ ID NO: 245625 - DNA, 33 bp, Homo sapien
tggaggtagtttgttaagctgcatatgcacaat

SEQ ID NO: 245626 - DNA, 33 bp, Homo sapien
tggaggtagtttgttatgctgcatatgcacaat

SEQ ID NO: 245627 - DNA, 33 bp, Homo sapien
agttccttccatcaacagtctatttgcccatcc

SEQ ID NO: 245628 - DNA, 33 bp, Homo sapien
agttccttccatcaacggtctatttgcccatcc

SEQ ID NO: 245629 - DNA, 33 bp, Homo sapien
atatggaaaccccaggaagcaaaagaaccagag

SEQ ID NO: 245630 - DNA, 33 bp, Homo sapien
atatggaaaccccagggagcaaaagaaccagag

SEQ ID NO: 245631 - DNA, 33 bp, Homo sapien
cattattacccaggaaatgataggcaagtatac

SEQ ID NO: 245632 - DNA, 33 bp, Homo sapien
cattattacccaggaactgataggcaagtatac

SEQ ID NO: 245633 - DNA, 33 bp, Homo sapien
tcctgggtaataatgcaagggaaaacatctcac

SEQ ID NO: 245634 - DNA, 33 bp, Homo sapien
tcctgggtaataatgccagggaaaacatctcac

SEQ ID NO: 245635 - DNA, 33 bp, Homo sapien
tgcccttctggaactcacagtataaccatatgt

SEQ ID NO: 245636 - DNA, 33 bp, Homo sapien
tgcccttctggaactcgcagtataaccatatgt

SEQ ID NO: 245637 - DNA, 33 bp, Homo sapien
gttgctcaatatgtgaagcaacattttaaaaca

SEQ ID NO: 245638 - DNA, 33 bp, Homo sapien
gttgctcaatatgtgaggcaacattttaaaaca

SEQ ID NO: 245639 - DNA, 33 bp, Homo sapien
ccaattttcagggtaaggagaccctctagttag

SEQ ID NO: 245640 - DNA, 33 bp, Homo sapien
ccaattttcagggtaatgagaccctctagttag

SEQ ID NO: 245641 - DNA, 33 bp, Homo sapien
gggtcatgattatatgacactttttgcagtgaa

SEQ ID NO: 245642 - DNA, 33 bp, Homo sapien
gggtcatgattatatggcactttttgcagtgaa

SEQ ID NO: 245643 - DNA, 33 bp, Homo sapien
aaagctgagggttcctaaagtacagcactaggt

SEQ ID NO: 245644 - DNA, 33 bp, Homo sapien
aaagctgagggttcctgaagtacagcactaggt

SEQ ID NO: 245645 - DNA, 33 bp, Homo sapien
atcccttcattcataaacttctcccaccataga

SEQ ID NO: 245646 - DNA, 33 bp, Homo sapien
atcccttcattcataaccttctcccaccataga

SEQ ID NO: 245647 - DNA, 33 bp, Homo sapien
gagctagatctgttgaacaaacaaagtgagccc

SEQ ID NO: 245648 - DNA, 33 bp, Homo sapien
gagctagatctgttgagcaaacaaagtgagccc

SEQ ID NO: 245649 - DNA, 33 bp, Homo sapien
caatgtaggaaccaacactctggactcctttta

SEQ ID NO: 245650 - DNA, 33 bp, Homo sapien
caatgtaggaaccaacgctctggactcctttta

SEQ ID NO: 245651 - DNA, 33 bp, Homo sapien
tggtactgcaaagaaaaccaatgtaggaaccaa

SEQ ID NO: 245652 - DNA, 33 bp, Homo sapien
tggtactgcaaagaaagccaatgtaggaaccaa

SEQ ID NO: 245653 - DNA, 33 bp, Homo sapien
caaagctatgtcccaactcggtagccagatcct

SEQ ID NO: 245654 - DNA, 33 bp, Homo sapien
caaagctatgtcccaattcggtagccagatcct

SEQ ID NO: 245655 - DNA, 33 bp, Homo sapien
tcctttcagcagccgacgtgacttatcaaagtg

SEQ ID NO: 245656 - DNA, 33 bp, Homo sapien
tcctttcagcagccgatgtgacttatcaaagtg

SEQ ID NO: 245657 - DNA, 33 bp, Homo sapien
gttcttcatattcaaacgttgctcagccaatgt

SEQ ID NO: 245658 - DNA, 33 bp, Homo sapien
gttcttcatattcaaaggttgctcagccaatgt

SEQ ID NO: 245659 - DNA, 33 bp, Homo sapien
ttttaatatgaggccccgaggaaacaggcaagg

SEQ ID NO: 245660 - DNA, 33 bp, Homo sapien
ttttaatatgaggccctgaggaaacaggcaagg

SEQ ID NO: 245661 - DNA, 33 bp, Homo sapien
agtactaggacaatataagttttccatttatgg

SEQ ID NO: 245662 - DNA, 33 bp, Homo sapien
agtactaggacaatatgagttttccatttatgg

SEQ ID NO: 245663 - DNA, 33 bp, Homo sapien
attccagcctctgcaacttcgtcccgcagtttt

SEQ ID NO: 245664 - DNA, 33 bp, Homo sapien
attccagcctctgcaagttcgtcccgcagtttt

SEQ ID NO: 245665 - DNA, 33 bp, Homo sapien
ctgccactgagtccaagaactggcctggaagct

SEQ ID NO: 245666 - DNA, 33 bp, Homo sapien
ctgccactgagtccaataactggcctggaagct

SEQ ID NO: 245667 - DNA, 33 bp, Homo sapien
acaggtctaaagtgctaagaattatcctgcaca

SEQ ID NO: 245668 - DNA, 33 bp, Homo sapien
acaggtctaaagtgctgagaattatcctgcaca

SEQ ID NO: 245669 - DNA, 33 bp, Homo sapien
agagctgctccctgaaagctatgaaaagttgga

SEQ ID NO: 245670 - DNA, 33 bp, Homo sapien
agagctgctccctgaaggctatgaaaagttgga

SEQ ID NO: 245671 - DNA, 33 bp, Homo sapien
tctttttatcctgcaaatctatcaaacaggatc

SEQ ID NO: 245672 - DNA, 33 bp, Homo sapien
tctttttatcctgcaattctatcaaacaggatc

SEQ ID NO: 245673 - DNA, 33 bp, Homo sapien
cacctgtatcattaccagaaatatccgtgattc

SEQ ID NO: 245674 - DNA, 33 bp, Homo sapien
cacctgtatcattaccggaaatatccgtgattc

SEQ ID NO: 245675 - DNA, 33 bp, Homo sapien
aggggaatctcaactacaaacatgagtatacaa

SEQ ID NO: 245676 - DNA, 33 bp, Homo sapien
aggggaatctcaactataaacatgagtatacaa

SEQ ID NO: 245677 - DNA, 33 bp, Homo sapien
gttctgtcattggacaagaaatttagtcaaaag

SEQ ID NO: 245678 - DNA, 33 bp, Homo sapien
gttctgtcattggacatgaaatttagtcaaaag

SEQ ID NO: 245679 - DNA, 33 bp, Homo sapien
ttagatctgtttagacacacaaatgccactatg

SEQ ID NO: 245680 - DNA, 33 bp, Homo sapien
ttagatctgtttagacgcacaaatgccactatg

SEQ ID NO: 245681 - DNA, 33 bp, Homo sapien
caagattcagtaactcacacagaatatcacaat

SEQ ID NO: 245682 - DNA, 33 bp, Homo sapien
caagattcagtaactcgcacagaatatcacaat

SEQ ID NO: 245683 - DNA, 33 bp, Homo sapien
tctacacacatcgtcaccacctttaccatgatt

SEQ ID NO: 245684 - DNA, 33 bp, Homo sapien
tctacacacatcgtcatcacctttaccatgatt

SEQ ID NO: 245685 - DNA, 33 bp, Homo sapien
ttttacttccaggctaagtctgtatgataaact

SEQ ID NO: 245686 - DNA, 33 bp, Homo sapien
ttttacttccaggctatgtctgtatgataaact

SEQ ID NO: 245687 - DNA, 33 bp, Homo sapien
ttggccacttaagcaacggtcagaagtccaggc

SEQ ID NO: 245688 - DNA, 33 bp, Homo sapien
ttggccacttaagcaatggtcagaagtccaggc

SEQ ID NO: 245689 - DNA, 33 bp, Homo sapien
gggaagggaaatgaagcctagaggatgtgtagc

SEQ ID NO: 245690 - DNA, 33 bp, Homo sapien
gggaagggaaatgaaggctagaggatgtgtagc

SEQ ID NO: 245691 - DNA, 33 bp, Homo sapien
ctactggtctgcggaccacattctcaaagaacc

SEQ ID NO: 245692 - DNA, 33 bp, Homo sapien
ctactggtctgcggacgacattctcaaagaacc

SEQ ID NO: 245693 - DNA, 33 bp, Homo sapien
acctcagtgacatttaagtcctgggcactccat

SEQ ID NO: 245694 - DNA, 33 bp, Homo sapien
acctcagtgacatttaggtcctgggcactccat

SEQ ID NO: 245695 - DNA, 33 bp, Homo sapien
tttaaagcaggagcatgaccctgtccctgcccc

SEQ ID NO: 245696 - DNA, 33 bp, Homo sapien
tttaaagcaggagcattaccctgtccctgcccc

SEQ ID NO: 245697 - DNA, 33 bp, Homo sapien
cccagcttcccaattcacctctttggagacaac

SEQ ID NO: 245698 - DNA, 33 bp, Homo sapien
cccagcttcccaattcccctctttggagacaac

SEQ ID NO: 245699 - DNA, 33 bp, Homo sapien
catgtcatgggcaaagaaaataagaataactgc

SEQ ID NO: 245700 - DNA, 33 bp, Homo sapien
catgtcatgggcaaaggaaataagaataactgc

SEQ ID NO: 245701 - DNA, 33 bp, Homo sapien
aattgaaataataaagacttacaaacacaaagg

SEQ ID NO: 245702 - DNA, 33 bp, Homo sapien
aattgaaataataaaggcttacaaacacaaagg

SEQ ID NO: 245703 - DNA, 33 bp, Homo sapien
tttgagtagaaaatgacgaggcagcattatctt

SEQ ID NO: 245704 - DNA, 33 bp, Homo sapien
tttgagtagaaaatgatgaggcagcattatctt

SEQ ID NO: 245705 - DNA, 33 bp, Homo sapien
ctgtgtgttaagtggaaagagagggctgatggc

SEQ ID NO: 245706 - DNA, 33 bp, Homo sapien
ctgtgtgttaagtggagagagagggctgatggc

SEQ ID NO: 245707 - DNA, 33 bp, Homo sapien
cagcagtcagctgctgaagaggtccctgttaaa

SEQ ID NO: 245708 - DNA, 33 bp, Homo sapien
cagcagtcagctgctggagaggtccctgttaaa

SEQ ID NO: 245709 - DNA, 33 bp, Homo sapien
cccgcgtggtctagtcacagcacctcagggtac

SEQ ID NO: 245710 - DNA, 33 bp, Homo sapien
cccgcgtggtctagtcgcagcacctcagggtac

SEQ ID NO: 245711 - DNA, 33 bp, Homo sapien
gaggtctaacttagacaaaacggtcaggaagtt

SEQ ID NO: 245712 - DNA, 33 bp, Homo sapien
gaggtctaacttagacgaaacggtcaggaagtt

SEQ ID NO: 245713 - DNA, 33 bp, Homo sapien
cacttaagcctggacacggatctaatgaaaatg

SEQ ID NO: 245714 - DNA, 33 bp, Homo sapien
cacttaagcctggacatggatctaatgaaaatg

SEQ ID NO: 245715 - DNA, 33 bp, Homo sapien
gaaaacacagagaacactgtcaacagcaaagac

SEQ ID NO: 245716 - DNA, 33 bp, Homo sapien
gaaaacacagagaacagtgtcaacagcaaagac

SEQ ID NO: 245717 - DNA, 33 bp, Homo sapien
aaaactccatttggtgaaaccaacatatccatt

SEQ ID NO: 245718 - DNA, 33 bp, Homo sapien
aaaactccatttggtggaaccaacatatccatt

SEQ ID NO: 245719 - DNA, 33 bp, Homo sapien
gagaatccactcaaaacgaacatcaggatgtga

SEQ ID NO: 245720 - DNA, 33 bp, Homo sapien
gagaatccactcaaaatgaacatcaggatgtga

SEQ ID NO: 245721 - DNA, 33 bp, Homo sapien
gaggcaggcagataacaagtgccctgtgaaagg

SEQ ID NO: 245722 - DNA, 33 bp, Homo sapien
gaggcaggcagataacgagtgccctgtgaaagg

SEQ ID NO: 245723 - DNA, 33 bp, Homo sapien
ctctaacagtctgaatcaagctaaggaattact

SEQ ID NO: 245724 - DNA, 33 bp, Homo sapien
ctctaacagtctgaattaagctaaggaattact

SEQ ID NO: 245725 - DNA, 33 bp, Homo sapien
agacttcaaagactcaacggcttctaaggcttt

SEQ ID NO: 245726 - DNA, 33 bp, Homo sapien
agacttcaaagactcatcggcttctaaggcttt

SEQ ID NO: 245727 - DNA, 33 bp, Homo sapien
tcattatcttggtcaaatacattcaaatcaacc

SEQ ID NO: 245728 - DNA, 33 bp, Homo sapien
tcattatcttggtcaagtacattcaaatcaacc

SEQ ID NO: 245729 - DNA, 33 bp, Homo sapien
ttttgaacctccccaaatgtgagattttcaatg

SEQ ID NO: 245730 - DNA, 33 bp, Homo sapien
ttttgaacctccccaagtgtgagattttcaatg

SEQ ID NO: 245731 - DNA, 33 bp, Homo sapien
ttgggagatagtgctacaaattaacaggttagc

SEQ ID NO: 245732 - DNA, 33 bp, Homo sapien
ttgggagatagtgctataaattaacaggttagc

SEQ ID NO: 245733 - DNA, 33 bp, Homo sapien
gctctcactcttcaggcacgcaacttccagaga

SEQ ID NO: 245734 - DNA, 33 bp, Homo sapien
gctctcactcttcaggtacgcaacttccagaga

SEQ ID NO: 245735 - DNA, 33 bp, Homo sapien
aaagttggcctaaaaacgttccatgcgtggcag

SEQ ID NO: 245736 - DNA, 33 bp, Homo sapien
aaagttggcctaaaaatgttccatgcgtggcag

SEQ ID NO: 245737 - DNA, 33 bp, Homo sapien
ccaccactgtaacctccgaatggaacacactgc

SEQ ID NO: 245738 - DNA, 33 bp, Homo sapien
ccaccactgtaacctcggaatggaacacactgc

SEQ ID NO: 245739 - DNA, 33 bp, Homo sapien
acatgactaacaagcacaatagaaaaaaacacc

SEQ ID NO: 245740 - DNA, 33 bp, Homo sapien
acatgactaacaagcagaatagaaaaaaacacc

SEQ ID NO: 245741 - DNA, 33 bp, Homo sapien
tgatctgttaattggtcaatagacacaacttct

SEQ ID NO: 245742 - DNA, 33 bp, Homo sapien
tgatctgttaattggttaatagacacaacttct

SEQ ID NO: 245743 - DNA, 33 bp, Homo sapien
ctccacgttacaataaccaggtgacttgctcag

SEQ ID NO: 245744 - DNA, 33 bp, Homo sapien
ctccacgttacaataagcaggtgacttgctcag

SEQ ID NO: 245745 - DNA, 33 bp, Homo sapien
agatggcactgaagaacccttagaattccctgg

SEQ ID NO: 245746 - DNA, 33 bp, Homo sapien
agatggcactgaagaatccttagaattccctgg

SEQ ID NO: 245747 - DNA, 33 bp, Homo sapien
tgtaaaagtatgtttccctatagacacgtccta

SEQ ID NO: 245748 - DNA, 33 bp, Homo sapien
tgtaaaagtatgtttctctatagacacgtccta

SEQ ID NO: 245749 - DNA, 33 bp, Homo sapien
cctctaactagactgaacagaatcagaaatcaa

SEQ ID NO: 245750 - DNA, 33 bp, Homo sapien
cctctaactagactgagcagaatcagaaatcaa

SEQ ID NO: 245751 - DNA, 33 bp, Homo sapien
gctaccttctcctaccacaagttttacaaggcc

SEQ ID NO: 245752 - DNA, 33 bp, Homo sapien
gctaccttctcctaccgcaagttttacaaggcc

SEQ ID NO: 245753 - DNA, 33 bp, Homo sapien
tttctgtctagacaaaagttttcttcaaagctt

SEQ ID NO: 245754 - DNA, 33 bp, Homo sapien
tttctgtctagacaaaggttttcttcaaagctt

SEQ ID NO: 245755 - DNA, 33 bp, Homo sapien
ttcacataggttttggaaaagaatctatgtggc

SEQ ID NO: 245756 - DNA, 33 bp, Homo sapien
ttcacataggttttggcaaagaatctatgtggc

SEQ ID NO: 245757 - DNA, 33 bp, Homo sapien
tagatttgcagagaaagaaacctttcaacacta

SEQ ID NO: 245758 - DNA, 33 bp, Homo sapien
tagatttgcagagaaataaacctttcaacacta

SEQ ID NO: 245759 - DNA, 33 bp, Homo sapien
tgaccaacaggtaaaacaaaaggacctcaatat

SEQ ID NO: 245760 - DNA, 33 bp, Homo sapien
tgaccaacaggtaaaagaaaaggacctcaatat

SEQ ID NO: 245761 - DNA, 33 bp, Homo sapien
atttggcaatacacctaaatagacaattctgca

SEQ ID NO: 245762 - DNA, 33 bp, Homo sapien
atttggcaatacacctgaatagacaattctgca

SEQ ID NO: 245763 - DNA, 33 bp, Homo sapien
gttcagccagtgccgcacaaccagaagctgcct

SEQ ID NO: 245764 - DNA, 33 bp, Homo sapien
gttcagccagtgccgcgcaaccagaagctgcct

SEQ ID NO: 245765 - DNA, 33 bp, Homo sapien
aggcagccctggtgggaaccgcgtgtgtctgag

SEQ ID NO: 245766 - DNA, 33 bp, Homo sapien
aggcagccctggtgggcaccgcgtgtgtctgag

SEQ ID NO: 245767 - DNA, 33 bp, Homo sapien
accatgtgctgaaccccaggatggactgtccca

SEQ ID NO: 245768 - DNA, 33 bp, Homo sapien
accatgtgctgaacccgaggatggactgtccca

SEQ ID NO: 245769 - DNA, 33 bp, Homo sapien
aaatggagatggtgcagaaaagaataaacccag

SEQ ID NO: 245770 - DNA, 33 bp, Homo sapien
aaatggagatggtgcataaaagaataaacccag

SEQ ID NO: 245771 - DNA, 33 bp, Homo sapien
ttgctactgagaaatacgctcactaccagacag

SEQ ID NO: 245772 - DNA, 33 bp, Homo sapien
ttgctactgagaaatatgctcactaccagacag

SEQ ID NO: 245773 - DNA, 33 bp, Homo sapien
ttggtcatggactctaactaaaggtcactaaag

SEQ ID NO: 245774 - DNA, 33 bp, Homo sapien
ttggtcatggactctagctaaaggtcactaaag

SEQ ID NO: 245775 - DNA, 33 bp, Homo sapien
ggtctaggagaacatagagtgacagttggtgca

SEQ ID NO: 245776 - DNA, 33 bp, Homo sapien
ggtctaggagaacatatagtgacagttggtgca

SEQ ID NO: 245777 - DNA, 33 bp, Homo sapien
aggtgactatttcacacggatgaagttgccctc

SEQ ID NO: 245778 - DNA, 33 bp, Homo sapien
aggtgactatttcacatggatgaagttgccctc

SEQ ID NO: 245779 - DNA, 33 bp, Homo sapien
aattaggattgtcagaactgagaaagcagaagc

SEQ ID NO: 245780 - DNA, 33 bp, Homo sapien
aattaggattgtcagagctgagaaagcagaagc

SEQ ID NO: 245781 - DNA, 33 bp, Homo sapien
cacagaaataatgcaaatggccaggtacagtgg

SEQ ID NO: 245782 - DNA, 33 bp, Homo sapien
cacagaaataatgcaagtggccaggtacagtgg

SEQ ID NO: 245783 - DNA, 33 bp, Homo sapien
gtcttgactccttttacgtttcctgccatcctc

SEQ ID NO: 245784 - DNA, 33 bp, Homo sapien
gtcttgactccttttaggtttcctgccatcctc

SEQ ID NO: 245785 - DNA, 33 bp, Homo sapien
tcagatctagtattggccaagtctctcctgtct

SEQ ID NO: 245786 - DNA, 33 bp, Homo sapien
tcagatctagtattggtcaagtctctcctgtct

SEQ ID NO: 245787 - DNA, 33 bp, Homo sapien
aaaaggacaaataataaggcaatcatgatgtct

SEQ ID NO: 245788 - DNA, 33 bp, Homo sapien
aaaaggacaaataatatggcaatcatgatgtct

SEQ ID NO: 245789 - DNA, 33 bp, Homo sapien
acttggccaagaactacgtctcatcttgctttc

SEQ ID NO: 245790 - DNA, 33 bp, Homo sapien
acttggccaagaactatgtctcatcttgctttc

SEQ ID NO: 245791 - DNA, 33 bp, Homo sapien
aatcaaccttgattgcaatgaagcactaagccc

SEQ ID NO: 245792 - DNA, 33 bp, Homo sapien
aatcaaccttgattgcgatgaagcactaagccc

SEQ ID NO: 245793 - DNA, 33 bp, Homo sapien
caagcaagttgatacacctctactttcttcaag

SEQ ID NO: 245794 - DNA, 33 bp, Homo sapien
caagcaagttgatacatctctactttcttcaag

SEQ ID NO: 245795 - DNA, 33 bp, Homo sapien
acttgcttggtatctcacagcttagcaagttcc

SEQ ID NO: 245796 - DNA, 33 bp, Homo sapien
acttgcttggtatctcgcagcttagcaagttcc

SEQ ID NO: 245797 - DNA, 33 bp, Homo sapien; identical to SEQ ID NO: 245795

SEQ ID NO: 245798 - DNA, 33 bp, Homo sapien; identical to SEQ ID NO: 245796

SEQ ID NO: 245799 - DNA, 33 bp, Homo sapien
ctgtagatcatttgtgcaatattgtgtattagt

SEQ ID NO: 245800 - DNA, 33 bp, Homo sapien
ctgtagatcatttgtgtaatattgtgtattagt

SEQ ID NO: 245801 - DNA, 33 bp, Homo sapien
agtgaaaggacaaacgaaatgttacttgcatca

SEQ ID NO: 245802 - DNA, 33 bp, Homo sapien
agtgaaaggacaaacgtaatgttacttgcatca

SEQ ID NO: 245803 - DNA, 33 bp, Homo sapien
atctaaaccattatgaagttgatacacctgata

SEQ ID NO: 245804 - DNA, 33 bp, Homo sapien
atctaaaccattatgacgttgatacacctgata

SEQ ID NO: 245805 - DNA, 33 bp, Homo sapien
tcagtttgattatatacccatacaggttgtgat

SEQ ID NO: 245806 - DNA, 33 bp, Homo sapien
tcagtttgattatatatccatacaggttgtgat

SEQ ID NO: 245807 - DNA, 33 bp, Homo sapien
cccctttcactcaccaatctcgtcttcggggct

SEQ ID NO: 245808 - DNA, 33 bp, Homo sapien
cccctttcactcaccattctcgtcttcggggct

SEQ ID NO: 245809 - DNA, 33 bp, Homo sapien
catccaccagcaagaacctctcacatggcatca

SEQ ID NO: 245810 - DNA, 33 bp, Homo sapien
catccaccagcaagaagctctcacatggcatca

SEQ ID NO: 245811 - DNA, 33 bp, Homo sapien
ggtgtatcttgtttaactgcactttgttttatt

SEQ ID NO: 245812 - DNA, 33 bp, Homo sapien
ggtgtatcttgtttaattgcactttgttttatt

SEQ ID NO: 245813 - DNA, 33 bp, Homo sapien
ataattgcaaacataacaggccgacacagaaaa

SEQ ID NO: 245814 - DNA, 33 bp, Homo sapien
ataattgcaaacataataggccgacacagaaaa

SEQ ID NO: 245815 - DNA, 33 bp, Homo sapien
aatgtaactacatgagaaaatatgaagctagca

SEQ ID NO: 245816 - DNA, 33 bp, Homo sapien
aatgtaactacatgaggaaatatgaagctagca

SEQ ID NO: 245817 - DNA, 33 bp, Homo sapien
gttgggtggcacgttccagagaggtctgttagg

SEQ ID NO: 245818 - DNA, 33 bp, Homo sapien
gttgggtggcacgttctagagaggtctgttagg

SEQ ID NO: 245819 - DNA, 33 bp, Homo sapien
ccagcatattctatccacaacatttctcagtag

SEQ ID NO: 245820 - DNA, 33 bp, Homo sapien
ccagcatattctatccgcaacatttctcagtag

SEQ ID NO: 245821 - DNA, 33 bp, Homo sapien
gcagccaacattttcaatagcctccacgcgtct

SEQ ID NO: 245822 - DNA, 33 bp, Homo sapien
gcagccaacattttcagtagcctccacgcgtct

SEQ ID NO: 245823 - DNA, 33 bp, Homo sapien
gacatttacatctctcaagacctgagattttcc

SEQ ID NO: 245824 - DNA, 33 bp, Homo sapien
gacatttacatctctcgagacctgagattttcc

SEQ ID NO: 245825 - DNA, 33 bp, Homo sapien
aatattcttagtaaaacccttcatcctgataat

SEQ ID NO: 245826 - DNA, 33 bp, Homo sapien
aatattcttagtaaaatccttcatcctgataat

SEQ ID NO: 245827 - DNA, 33 bp, Homo sapien
tggcttttctaagtaaactgtgcagatgggaca

SEQ ID NO: 245828 - DNA, 33 bp, Homo sapien
tggcttttctaagtaagctgtgcagatgggaca

SEQ ID NO: 245829 - DNA, 33 bp, Homo sapien
agccacgacatagacacgggtatattttgctgg

SEQ ID NO: 245830 - DNA, 33 bp, Homo sapien
agccacgacatagacatgggtatattttgctgg

SEQ ID NO: 245831 - DNA, 33 bp, Homo sapien
tacacaatgttgtaaaatgctcattctaataat

SEQ ID NO: 245832 - DNA, 33 bp, Homo sapien
tacacaatgttgtaaagtgctcattctaataat

SEQ ID NO: 245833 - DNA, 33 bp, Homo sapien
taattggttacaaatacggagaacaaaagcctg

SEQ ID NO: 245834 - DNA, 33 bp, Homo sapien
taattggttacaaatatggagaacaaaagcctg

SEQ ID NO: 245835 - DNA, 33 bp, Homo sapien
ttctcgaggcaacttccctgaatagttgaaatt

SEQ ID NO: 245836 - DNA, 33 bp, Homo sapien
ttctcgaggcaacttctctgaatagttgaaatt

SEQ ID NO: 245837 - DNA, 33 bp, Homo sapien
tatatttcactgcttgaatctggcctgagggtg

SEQ ID NO: 245838 - DNA, 33 bp, Homo sapien
tatatttcactgcttggatctggcctgagggtg

SEQ ID NO: 245839 - DNA, 33 bp, Homo sapien
ttccagggctaatgcccctcagcaaacagtgat

SEQ ID NO: 245840 - DNA, 33 bp, Homo sapien
ttccagggctaatgcctctcagcaaacagtgat

SEQ ID NO: 245841 - DNA, 33 bp, Homo sapien
tcaaagcttctttttcactgtctggaaaggaaa

SEQ ID NO: 245842 - DNA, 33 bp, Homo sapien
tcaaagcttctttttctctgtctggaaaggaaa

SEQ ID NO: 245843 - DNA, 33 bp, Homo sapien
aatcctttgatgaaggaacagccaaaagaaatg

SEQ ID NO: 245844 - DNA, 33 bp, Homo sapien
aatcctttgatgaagggacagccaaaagaaatg

SEQ ID NO: 245845 - DNA, 33 bp, Homo sapien
aatatttggataaggacgataagtttttcatgt

SEQ ID NO: 245846 - DNA, 33 bp, Homo sapien
aatatttggataaggatgataagtttttcatgt

SEQ ID NO: 245847 - DNA, 33 bp, Homo sapien
ctcagcagagactgacaaggttaagacataggc

SEQ ID NO: 245848 - DNA, 33 bp, Homo sapien
ctcagcagagactgacgaggttaagacataggc

SEQ ID NO: 245849 - DNA, 33 bp, Homo sapien
cagtgacagatttaacagattaaaatttcctgt

SEQ ID NO: 245850 - DNA, 33 bp, Homo sapien
cagtgacagatttaacggattaaaatttcctgt

SEQ ID NO: 245851 - DNA, 33 bp, Homo sapien
aaaacagagataagaacagtgccccctcctcag

SEQ ID NO: 245852 - DNA, 33 bp, Homo sapien
aaaacagagataagaatagtgccccctcctcag

SEQ ID NO: 245853 - DNA, 33 bp, Homo sapien
aaattgtctttgtttgaaaatgatatgattcta

SEQ ID NO: 245854 - DNA, 33 bp, Homo sapien
aaattgtctttgtttgtaaatgatatgattcta

SEQ ID NO: 245855 - DNA, 33 bp, Homo sapien
tgtcccaacaccgatacgtacttgtgtccatga

SEQ ID NO: 245856 - DNA, 33 bp, Homo sapien
tgtcccaacaccgatatgtacttgtgtccatga

SEQ ID NO: 245857 - DNA, 33 bp, Homo sapien
aatgacaacttctgacactagtttatggattcg

SEQ ID NO: 245858 - DNA, 33 bp, Homo sapien
aatgacaacttctgacgctagtttatggattcg

SEQ ID NO: 245859 - DNA, 33 bp, Homo sapien
cttacctactagctgaataaaacttgggtaagt

SEQ ID NO: 245860 - DNA, 33 bp, Homo sapien
cttacctactagctgagtaaaacttgggtaagt

SEQ ID NO: 245861 - DNA, 33 bp, Homo sapien
gtcattaacttttgtagtaaactctcctcaaat

SEQ ID NO: 245862 - DNA, 33 bp, Homo sapien
gtcattaacttttgtattaaactctcctcaaat

SEQ ID NO: 245863 - DNA, 33 bp, Homo sapien
ggccatcagataccaaaagcatgttcttctcat

SEQ ID NO: 245864 - DNA, 33 bp, Homo sapien
ggccatcagataccaagagcatgttcttctcat

SEQ ID NO: 245865 - DNA, 33 bp, Homo sapien
ggaaataaatatttgccgagagccttctttgtg

SEQ ID NO: 245866 - DNA, 33 bp, Homo sapien
ggaaataaatatttgctgagagccttctttgtg

SEQ ID NO: 245867 - DNA, 33 bp, Homo sapien
ggctacatgccttgtacgtgccaggaacaatat

SEQ ID NO: 245868 - DNA, 33 bp, Homo sapien
ggctacatgccttgtatgtgccaggaacaatat

SEQ ID NO: 245869 - DNA, 33 bp, Homo sapien
gtctcagctctcctaccagatgctaatctccta

SEQ ID NO: 245870 - DNA, 33 bp, Homo sapien
gtctcagctctcctactagatgctaatctccta

SEQ ID NO: 245871 - DNA, 33 bp, Homo sapien
tgtgtccttacccacaactgagtagatggagat

SEQ ID NO: 245872 - DNA, 33 bp, Homo sapien
tgtgtccttacccacacctgagtagatggagat

SEQ ID NO: 245873 - DNA, 33 bp, Homo sapien
agaggcacagttgaccaagaattaaggtttaga

SEQ ID NO: 245874 - DNA, 33 bp, Homo sapien
agaggcacagttgaccgagaattaaggtttaga

SEQ ID NO: 245875 - DNA, 33 bp, Homo sapien
ctctgaagtcatccccagacactctctcctaca

SEQ ID NO: 245876 - DNA, 33 bp, Homo sapien
ctctgaagtcatccccggacactctctcctaca

SEQ ID NO: 245877 - DNA, 33 bp, Homo sapien
tttccagcaccatccccgaaggcaattggaatg

SEQ ID NO: 245878 - DNA, 33 bp, Homo sapien
tttccagcaccatccctgaaggcaattggaatg

SEQ ID NO: 245879 - DNA, 33 bp, Homo sapien
taaaacaatattcataccagccctacttgtatt

SEQ ID NO: 245880 - DNA, 33 bp, Homo sapien
taaaacaatattcatatcagccctacttgtatt

SEQ ID NO: 245881 - DNA, 33 bp, Homo sapien
agtgcagctgcccatccaagttcagtgagtaga

SEQ ID NO: 245882 - DNA, 33 bp, Homo sapien
agtgcagctgcccatcgaagttcagtgagtaga

SEQ ID NO: 245883 - DNA, 33 bp, Homo sapien
taacaacatggtcaagaaaaaaattttaactac

SEQ ID NO: 245884 - DNA, 33 bp, Homo sapien
taacaacatggtcaagcaaaaaattttaactac

SEQ ID NO: 245885 - DNA, 33 bp, Homo sapien
ctagctggaatgaggaaaaatttgggcatcaga

SEQ ID NO: 245886 - DNA, 33 bp, Homo sapien
ctagctggaatgaggacaaatttgggcatcaga

SEQ ID NO: 245887 - DNA, 33 bp, Homo sapien
cttgcctctgccaccaacactgaacatggacac

SEQ ID NO: 245888 - DNA, 33 bp, Homo sapien
cttgcctctgccaccagcactgaacatggacac

SEQ ID NO: 245889 - DNA, 33 bp, Homo sapien
aattattcaggagatactaaagtgcattgttca

SEQ ID NO: 245890 - DNA, 33 bp, Homo sapien
aattattcaggagatattaaagtgcattgttca

SEQ ID NO: 245891 - DNA, 33 bp, Homo sapien
ttaatctacaaatacaacatgagttctgtgagg

SEQ ID NO: 245892 - DNA, 33 bp, Homo sapien
ttaatctacaaatacagcatgagttctgtgagg

SEQ ID NO: 245893 - DNA, 33 bp, Homo sapien
aatttaatcctttatgccagaacagccaaagta

SEQ ID NO: 245894 - DNA, 33 bp, Homo sapien
aatttaatcctttatgtcagaacagccaaagta

SEQ ID NO: 245895 - DNA, 33 bp, Homo sapien
gatgcatccatctggaaatgtttggccataaat

SEQ ID NO: 245896 - DNA, 33 bp, Homo sapien
gatgcatccatctggatatgtttggccataaat

SEQ ID NO: 245897 - DNA, 33 bp, Homo sapien
gtacactcaaaggaaaacagatcattatactaa

SEQ ID NO: 245898 - DNA, 33 bp, Homo sapien
gtacactcaaaggaaagcagatcattatactaa

SEQ ID NO: 245899 - DNA, 33 bp, Homo sapien
aagagagctatcttaccaccatggcttccaact

SEQ ID NO: 245900 - DNA, 33 bp, Homo sapien
aagagagctatcttactaccatggcttccaact

SEQ ID NO: 245901 - DNA, 33 bp, Homo sapien
atgagctaagtccagcacatttgctactggtat

SEQ ID NO: 245902 - DNA, 33 bp, Homo sapien
atgagctaagtccagcgcatttgctactggtat

SEQ ID NO: 245903 - DNA, 33 bp, Homo sapien
ctgtttctgtctggaacgtctttttcaccattt

SEQ ID NO: 245904 - DNA, 33 bp, Homo sapien
ctgtttctgtctggaatgtctttttcaccattt

SEQ ID NO: 245905 - DNA, 33 bp, Homo sapien
ccccccagaggtatgaccacagctacaactaag

SEQ ID NO: 245906 - DNA, 33 bp, Homo sapien
ccccccagaggtatgatcacagctacaactaag

SEQ ID NO: 245907 - DNA, 33 bp, Homo sapien
aacttgcagaaataaacggagaagatttgcaat

SEQ ID NO: 245908 - DNA, 33 bp, Homo sapien
aacttgcagaaataaatggagaagatttgcaat

SEQ ID NO: 245909 - DNA, 33 bp, Homo sapien
aataagggtttgcttaccagattgaatccccac

SEQ ID NO: 245910 - DNA, 33 bp, Homo sapien
aataagggtttgcttatcagattgaatccccac

SEQ ID NO: 245911 - DNA, 33 bp, Homo sapien
ttcaaggcccttcaaccaagccaaaagtgcaga

SEQ ID NO: 245912 - DNA, 33 bp, Homo sapien
ttcaaggcccttcaacgaagccaaaagtgcaga

SEQ ID NO: 245913 - DNA, 33 bp, Homo sapien
ttcttttccagatgaggaaagatatgatttctg

SEQ ID NO: 245914 - DNA, 33 bp, Homo sapien
ttcttttccagatgagtaaagatatgatttctg

SEQ ID NO: 245915 - DNA, 33 bp, Homo sapien
agaagaaaaggaagagccatcctggaagtatta

SEQ ID NO: 245916 - DNA, 33 bp, Homo sapien
agaagaaaaggaagaggcatcctggaagtatta

SEQ ID NO: 245917 - DNA, 33 bp, Homo sapien
aaatgcaaaatttagaaatcacttaaacaagac

SEQ ID NO: 245918 - DNA, 33 bp, Homo sapien
aaatgcaaaatttagagatcacttaaacaagac

SEQ ID NO: 245919 - DNA, 33 bp, Homo sapien
ctctggtttttaagcacagtatactggatgaaa

SEQ ID NO: 245920 - DNA, 33 bp, Homo sapien
ctctggtttttaagcatagtatactggatgaaa

SEQ ID NO: 245921 - DNA, 33 bp, Homo sapien
tgattccaacctctcactcactattgcactggg

SEQ ID NO: 245922 - DNA, 33 bp, Homo sapien
tgattccaacctctcattcactattgcactggg

SEQ ID NO: 245923 - DNA, 33 bp, Homo sapien
cacagggttgctaaataaaaaagacaggattct

SEQ ID NO: 245924 - DNA, 33 bp, Homo sapien
cacagggttgctaaatcaaaaagacaggattct

SEQ ID NO: 245925 - DNA, 33 bp, Homo sapien
catagtagtccagtgacggcaataacagtaaca

SEQ ID NO: 245926 - DNA, 33 bp, Homo sapien
catagtagtccagtgatggcaataacagtaaca

SEQ ID NO: 245927 - DNA, 33 bp, Homo sapien
tcaaaaaactgcaaaaaaggtctctgactctgt

SEQ ID NO: 245928 - DNA, 33 bp, Homo sapien
tcaaaaaactgcaaaagaggtctctgactctgt

SEQ ID NO: 245929 - DNA, 33 bp, Homo sapien
tgcagagggcttgcgacctccatttttgtgttt

SEQ ID NO: 245930 - DNA, 33 bp, Homo sapien
tgcagagggcttgcgatctccatttttgtgttt

SEQ ID NO: 245931 - DNA, 33 bp, Homo sapien
ggagttcgactgggctcaaatatccaagatggt

SEQ ID NO: 245932 - DNA, 33 bp, Homo sapien
ggagttcgactgggcttaaatatccaagatggt

SEQ ID NO: 245933 - DNA, 33 bp, Homo sapien
tctcttttctcggaagccctacagcattttgtc

SEQ ID NO: 245934 - DNA, 33 bp, Homo sapien
tctcttttctcggaaggcctacagcattttgtc

SEQ ID NO: 245935 - DNA, 33 bp, Homo sapien
gtaggagggcattctaaaagaggtgaggaggta

SEQ ID NO: 245936 - DNA, 33 bp, Homo sapien
gtaggagggcattctagaagaggtgaggaggta

SEQ ID NO: 245937 - DNA, 33 bp, Homo sapien
gctggagtgcagtacacgatcagagctcactac

SEQ ID NO: 245938 - DNA, 33 bp, Homo sapien
gctggagtgcagtacatgatcagagctcactac

SEQ ID NO: 245939 - DNA, 33 bp, Homo sapien
gggaagagatggcttaacatgatgagactactc

SEQ ID NO: 245940 - DNA, 33 bp, Homo sapien
gggaagagatggcttagcatgatgagactactc

SEQ ID NO: 245941 - DNA, 33 bp, Homo sapien
ggagacatgagttgagacattcaagcccccaag

SEQ ID NO: 245942 - DNA, 33 bp, Homo sapien
ggagacatgagttgaggcattcaagcccccaag

SEQ ID NO: 245943 - DNA, 33 bp, Homo sapien
tatgcatcttagcatcaataactgcagtataga

SEQ ID NO: 245944 - DNA, 33 bp, Homo sapien
tatgcatcttagcatcgataactgcagtataga

SEQ ID NO: 245945 - DNA, 33 bp, Homo sapien
cttcgtggactccctgaatctacctccactcca

SEQ ID NO: 245946 - DNA, 33 bp, Homo sapien
cttcgtggactccctggatctacctccactcca

SEQ ID NO: 245947 - DNA, 33 bp, Homo sapien
gtgacatgacaaagaacaaggactgagatacat

SEQ ID NO: 245948 - DNA, 33 bp, Homo sapien
gtgacatgacaaagaagaaggactgagatacat

SEQ ID NO: 245949 - DNA, 33 bp, Homo sapien
ttgtgggctttgtttcacctagtgaggctggta

SEQ ID NO: 245950 - DNA, 33 bp, Homo sapien
ttgtgggctttgtttcgcctagtgaggctggta

SEQ ID NO: 245951 - DNA, 33 bp, Homo sapien
attactaattgtaggaagtgtagaaaatacaga

SEQ ID NO: 245952 - DNA, 33 bp, Homo sapien
attactaattgtaggaggtgtagaaaatacaga

SEQ ID NO: 245953 - DNA, 33 bp, Homo sapien
acatagaagaaaactaaaatcatttgtgatcac

SEQ ID NO: 245954 - DNA, 33 bp, Homo sapien
acatagaagaaaactataatcatttgtgatcac

SEQ ID NO: 245955 - DNA, 33 bp, Homo sapien
tggatgtctaaagataaagcattggcataataa

SEQ ID NO: 245956 - DNA, 33 bp, Homo sapien
tggatgtctaaagatagagcattggcataataa

SEQ ID NO: 245957 - DNA, 33 bp, Homo sapien
aacaggctatgtggcactagaggctccaacaag

SEQ ID NO: 245958 - DNA, 33 bp, Homo sapien
aacaggctatgtggcattagaggctccaacaag

SEQ ID NO: 245959 - DNA, 33 bp, Homo sapien
gaggctccaacaagtcagaagtttgtttctcgc

SEQ ID NO: 245960 - DNA, 33 bp, Homo sapien
gaggctccaacaagtcggaagtttgtttctcgc

SEQ ID NO: 245961 - DNA, 33 bp, Homo sapien
tgctggttggttgacaaatgatccctttcaggt

SEQ ID NO: 245962 - DNA, 33 bp, Homo sapien
tgctggttggttgacagatgatccctttcaggt

SEQ ID NO: 245963 - DNA, 33 bp, Homo sapien
aagtgcctgatgaagcaaatctaactgcagctg

SEQ ID NO: 245964 - DNA, 33 bp, Homo sapien
aagtgcctgatgaagcgaatctaactgcagctg

SEQ ID NO: 245965 - DNA, 33 bp, Homo sapien
aagctgggaatcgatcaactcagctagaagcag

SEQ ID NO: 245966 - DNA, 33 bp, Homo sapien
aagctgggaatcgatcgactcagctagaagcag

SEQ ID NO: 245967 - DNA, 33 bp, Homo sapien
cccgagcttgcaaataccctacctgccgaagtg

SEQ ID NO: 245968 - DNA, 33 bp, Homo sapien
cccgagcttgcaaatatcctacctgccgaagtg

SEQ ID NO: 245969 - DNA, 33 bp, Homo sapien
tttgtggttgtatgcaagataattgcattgtga

SEQ ID NO: 245970 - DNA, 33 bp, Homo sapien
tttgtggttgtatgcaggataattgcattgtga

SEQ ID NO: 245971 - DNA, 33 bp, Homo sapien
ttgtatgtacgagaacagtgggtgtgggcagta

SEQ ID NO: 245972 - DNA, 33 bp, Homo sapien
ttgtatgtacgagaacggtgggtgtgggcagta

SEQ ID NO: 245973 - DNA, 33 bp, Homo sapien
agatgcctggaattgcagacagatccctggttc

SEQ ID NO: 245974 - DNA, 33 bp, Homo sapien
agatgcctggaattgccgacagatccctggttc

SEQ ID NO: 245975 - DNA, 33 bp, Homo sapien
ggcatcagttcacctaagtaacagaccttcaca

SEQ ID NO: 245976 - DNA, 33 bp, Homo sapien
ggcatcagttcacctatgtaacagaccttcaca

SEQ ID NO: 245977 - DNA, 33 bp, Homo sapien
tggcctgttgttatggcaattatcatcaatctt

SEQ ID NO: 245978 - DNA, 33 bp, Homo sapien
tggcctgttgttatggtaattatcatcaatctt

SEQ ID NO: 245979 - DNA, 33 bp, Homo sapien
acaggtccattatacactagtgcctcctcaagg

SEQ ID NO: 245980 - DNA, 33 bp, Homo sapien
acaggtccattatacattagtgcctcctcaagg

SEQ ID NO: 245981 - DNA, 33 bp, Homo sapien
ggaggaaagaaatggggcaagcattgtttaagg

SEQ ID NO: 245982 - DNA, 33 bp, Homo sapien
ggaggaaagaaatgggtcaagcattgtttaagg

SEQ ID NO: 245983 - DNA, 33 bp, Homo sapien
cccacatgacctgaccagaagagggcctatggg

SEQ ID NO: 245984 - DNA, 33 bp, Homo sapien
cccacatgacctgaccggaagagggcctatggg

SEQ ID NO: 245985 - DNA, 33 bp, Homo sapien
gatttctattgatgccactggaatagaattagg

SEQ ID NO: 245986 - DNA, 33 bp, Homo sapien
gatttctattgatgcctctggaatagaattagg

SEQ ID NO: 245987 - DNA, 33 bp, Homo sapien
ttaaagacaaaagtagaaaaggacattccctga

SEQ ID NO: 245988 - DNA, 33 bp, Homo sapien
ttaaagacaaaagtaggaaaggacattccctga

SEQ ID NO: 245989 - DNA, 33 bp, Homo sapien
agaaagccacagaaaaaattcagagaagcaagc

SEQ ID NO: 245990 - DNA, 33 bp, Homo sapien
agaaagccacagaaaacattcagagaagcaagc

SEQ ID NO: 245991 - DNA, 33 bp, Homo sapien
ctatatagtttgactacgtggtgctcctctctg

SEQ ID NO: 245992 - DNA, 33 bp, Homo sapien
ctatatagtttgactatgtggtgctcctctctg

SEQ ID NO: 245993 - DNA, 33 bp, Homo sapien
tactagtggctatgaaactccacatctttggcc

SEQ ID NO: 245994 - DNA, 33 bp, Homo sapien
tactagtggctatgaacctccacatctttggcc

SEQ ID NO: 245995 - DNA, 33 bp, Homo sapien
attaaagtaatgaggacgaagattgtgtagcaa

SEQ ID NO: 245996 - DNA, 33 bp, Homo sapien
attaaagtaatgaggatgaagattgtgtagcaa

SEQ ID NO: 245997 - DNA, 33 bp, Homo sapien
gggctggaccatacaacgtgtgttagccaacag

SEQ ID NO: 245998 - DNA, 33 bp, Homo sapien
gggctggaccatacaatgtgtgttagccaacag

SEQ ID NO: 245999 - DNA, 33 bp, Homo sapien
tctagaagttagacaaatgcaaactaaagtaac

SEQ ID NO: 246000 - DNA, 33 bp, Homo sapien
tctagaagttagacaagtgcaaactaaagtaac

SEQ ID NO: 246001 - DNA, 33 bp, Homo sapien
cagctgtatgtcctaaagtaaatgacttagcct

SEQ ID NO: 246002 - DNA, 33 bp, Homo sapien
cagctgtatgtcctaaggtaaatgacttagcct

SEQ ID NO: 246003 - DNA, 33 bp, Homo sapien
ccagcagagattttataagaaagcagagagagg

SEQ ID NO: 246004 - DNA, 33 bp, Homo sapien
ccagcagagattttatgagaaagcagagagagg

SEQ ID NO: 246005 - DNA, 33 bp, Homo sapien
acacttgtgaatgttacgcagttgtatatatgt

SEQ ID NO: 246006 - DNA, 33 bp, Homo sapien
acacttgtgaatgttatgcagttgtatatatgt

SEQ ID NO: 246007 - DNA, 33 bp, Homo sapien
gatgctgaatgcataacgcgtatgacccaggtt

SEQ ID NO: 246008 - DNA, 33 bp, Homo sapien
gatgctgaatgcataatgcgtatgacccaggtt

SEQ ID NO: 246009 - DNA, 33 bp, Homo sapien
ctaggatagaatcctcccgcacacataaggacg

SEQ ID NO: 246010 - DNA, 33 bp, Homo sapien
ctaggatagaatcctctcgcacacataaggacg

SEQ ID NO: 246011 - DNA, 33 bp, Homo sapien
ggctagagagcagagacgctgtgatttttatag

SEQ ID NO: 246012 - DNA, 33 bp, Homo sapien
ggctagagagcagagatgctgtgatttttatag

SEQ ID NO: 246013 - DNA, 33 bp, Homo sapien
tgaaactggagctggcgaggcctccttcttcaa

SEQ ID NO: 246014 - DNA, 33 bp, Homo sapien
tgaaactggagctggctaggcctccttcttcaa

SEQ ID NO: 246015 - DNA, 33 bp, Homo sapien
cttggcttctgtgcaacgttgggcaagcgactt

SEQ ID NO: 246016 - DNA, 33 bp, Homo sapien
cttggcttctgtgcaatgttgggcaagcgactt

SEQ ID NO: 246017 - DNA, 33 bp, Homo sapien
cccactgtcatcgcaaagatcttcataagaggg

SEQ ID NO: 246018 - DNA, 33 bp, Homo sapien
cccactgtcatcgcaaggatcttcataagaggg

SEQ ID NO: 246019 - DNA, 33 bp, Homo sapien
tttgggaccctaatgaacagaggtgctagggac

SEQ ID NO: 246020 - DNA, 33 bp, Homo sapien
tttgggaccctaatgagcagaggtgctagggac

SEQ ID NO: 246021 - DNA, 33 bp, Homo sapien
ggagacatatcccaaacttaaataatcagcaca

SEQ ID NO: 246022 - DNA, 33 bp, Homo sapien
ggagacatatcccaaatttaaataatcagcaca

SEQ ID NO: 246023 - DNA, 33 bp, Homo sapien
ccatgaccctggaaaacttactgtcctgtgccc

SEQ ID NO: 246024 - DNA, 33 bp, Homo sapien
ccatgaccctggaaaatttactgtcctgtgccc

SEQ ID NO: 246025 - DNA, 33 bp, Homo sapien
attaaagcacaccccaatgacctaattttaact

SEQ ID NO: 246026 - DNA, 33 bp, Homo sapien
attaaagcacaccccagtgacctaattttaact

SEQ ID NO: 246027 - DNA, 33 bp, Homo sapien
gctgtcactcaatgaaggtttgttgaatgaatg

SEQ ID NO: 246028 - DNA, 33 bp, Homo sapien
gctgtcactcaatgaatgtttgttgaatgaatg

SEQ ID NO: 246029 - DNA, 33 bp, Homo sapien
cctggcctgcacctaacggaagagagaaccaga

SEQ ID NO: 246030 - DNA, 33 bp, Homo sapien
cctggcctgcacctaatggaagagagaaccaga

SEQ ID NO: 246031 - DNA, 33 bp, Homo sapien
ttgaactctaatttaggaacggtgacagcacct

SEQ ID NO: 246032 - DNA, 33 bp, Homo sapien
ttgaactctaatttagtaacggtgacagcacct

SEQ ID NO: 246033 - DNA, 33 bp, Homo sapien
agagacactgaaccgacacaaagaagagacaaa

SEQ ID NO: 246034 - DNA, 33 bp, Homo sapien
agagacactgaaccgagacaaagaagagacaaa

SEQ ID NO: 246035 - DNA, 33 bp, Homo sapien
tgtccatagtggcccaccctgaccctgcaacaa

SEQ ID NO: 246036 - DNA, 33 bp, Homo sapien
tgtccatagtggcccagcctgaccctgcaacaa

SEQ ID NO: 246037 - DNA, 33 bp, Homo sapien
taaaaccttcaaacacagtatccagcatatagt

SEQ ID NO: 246038 - DNA, 33 bp, Homo sapien
taaaaccttcaaacacggtatccagcatatagt

SEQ ID NO: 246039 - DNA, 33 bp, Homo sapien
aaaggactagacccagaaatatcctgagagagg

SEQ ID NO: 246040 - DNA, 33 bp, Homo sapien
aaaggactagacccaggaatatcctgagagagg

SEQ ID NO: 246041 - DNA, 33 bp, Homo sapien
ctagcactgctcttaaactgtttcatgccattg

SEQ ID NO: 246042 - DNA, 33 bp, Homo sapien
ctagcactgctcttaagctgtttcatgccattg

SEQ ID NO: 246043 - DNA, 33 bp, Homo sapien
gctgggcacaggataacaggggccttgtttaag

SEQ ID NO: 246044 - DNA, 33 bp, Homo sapien
gctgggcacaggataataggggccttgtttaag

SEQ ID NO: 246045 - DNA, 33 bp, Homo sapien
tccgtgaaatggcactcaatatttttacctgat

SEQ ID NO: 246046 - DNA, 33 bp, Homo sapien
tccgtgaaatggcactgaatatttttacctgat

SEQ ID NO: 246047 - DNA, 33 bp, Homo sapien
cccttttaacaaatcaacttcattgaagagagc

SEQ ID NO: 246048 - DNA, 33 bp, Homo sapien
cccttttaacaaatcaccttcattgaagagagc

SEQ ID NO: 246049 - DNA, 33 bp, Homo sapien
tgcttttggaaaacacaggcatgttatgcatca

SEQ ID NO: 246050 - DNA, 33 bp, Homo sapien
tgcttttggaaaacacgggcatgttatgcatca

SEQ ID NO: 246051 - DNA, 33 bp, Homo sapien
caggtccagcacccacgggcagtcaacaaatat

SEQ ID NO: 246052 - DNA, 33 bp, Homo sapien
caggtccagcacccactggcagtcaacaaatat

SEQ ID NO: 246053 - DNA, 33 bp, Homo sapien
gctggacctgattccaagtgctggagatgaaga

SEQ ID NO: 246054 - DNA, 33 bp, Homo sapien
gctggacctgattccaggtgctggagatgaaga

SEQ ID NO: 246055 - DNA, 33 bp, Homo sapien
aacctaggaatgtctgaactccaagtttgcact

SEQ ID NO: 246056 - DNA, 33 bp, Homo sapien
aacctaggaatgtctgtactccaagtttgcact

SEQ ID NO: 246057 - DNA, 33 bp, Homo sapien
ttgatatatcttatccaatggaaccctcctaac

SEQ ID NO: 246058 - DNA, 33 bp, Homo sapien
ttgatatatcttatccgatggaaccctcctaac

SEQ ID NO: 246059 - DNA, 33 bp, Homo sapien
ggatagcatggcccagaaagaatctcatctcag

SEQ ID NO: 246060 - DNA, 33 bp, Homo sapien
ggatagcatggcccaggaagaatctcatctcag

SEQ ID NO: 246061 - DNA, 33 bp, Homo sapien
attaaactcacttcctcaaaggcaggaaaatct

SEQ ID NO: 246062 - DNA, 33 bp, Homo sapien
attaaactcacttccttaaaggcaggaaaatct

SEQ ID NO: 246063 - DNA, 33 bp, Homo sapien
acctctctaccctcaactactctctagaatgaa

SEQ ID NO: 246064 - DNA, 33 bp, Homo sapien
acctctctaccctcaagtactctctagaatgaa

SEQ ID NO: 246065 - DNA, 33 bp, Homo sapien
gtttactgtggacttcacatcactgaatgagat

SEQ ID NO: 246066 - DNA, 33 bp, Homo sapien
gtttactgtggacttctcatcactgaatgagat

SEQ ID NO: 246067 - DNA, 33 bp, Homo sapien
tatccaggacatgactcaagaaatgtttgtggg

SEQ ID NO: 246068 - DNA, 33 bp, Homo sapien
tatccaggacatgacttaagaaatgtttgtggg

SEQ ID NO: 246069 - DNA, 33 bp, Homo sapien
gatgtttactgagcaccggaatgttctggatgc

SEQ ID NO: 246070 - DNA, 33 bp, Homo sapien
gatgtttactgagcactggaatgttctggatgc

SEQ ID NO: 246071 - DNA, 33 bp, Homo sapien
attagagataagagtacgtacctcatgaggttg

SEQ ID NO: 246072 - DNA, 33 bp, Homo sapien
attagagataagagtatgtacctcatgaggttg

SEQ ID NO: 246073 - DNA, 33 bp, Homo sapien
atgagatctatcctctcaccaaaaccttaagta

SEQ ID NO: 246074 - DNA, 33 bp, Homo sapien
atgagatctatcctcttaccaaaaccttaagta

SEQ ID NO: 246075 - DNA, 33 bp, Homo sapien
aaccaatactaaggaaagagtcagaacaggctg

SEQ ID NO: 246076 - DNA, 33 bp, Homo sapien
aaccaatactaaggaaggagtcagaacaggctg

SEQ ID NO: 246077 - DNA, 33 bp, Homo sapien
atgttcacttttagagaaatgagaggagacaaa

SEQ ID NO: 246078 - DNA, 33 bp, Homo sapien
atgttcacttttagagcaatgagaggagacaaa

SEQ ID NO: 246079 - DNA, 33 bp, Homo sapien
tgtgcattggagtacactgagcagcatcattgc

SEQ ID NO: 246080 - DNA, 33 bp, Homo sapien
tgtgcattggagtacattgagcagcatcattgc

SEQ ID NO: 246081 - DNA, 33 bp, Homo sapien
atagcacggtgactaacacaacactcccataag

SEQ ID NO: 246082 - DNA, 33 bp, Homo sapien
atagcacggtgactaatacaacactcccataag

SEQ ID NO: 246083 - DNA, 33 bp, Homo sapien
ctaacaataatagcgacgataataaagataata

SEQ ID NO: 246084 - DNA, 33 bp, Homo sapien
ctaacaataatagcgatgataataaagataata

SEQ ID NO: 246085 - DNA, 33 bp, Homo sapien
aggtgaaagtgggaaacatatctgtacaattat

SEQ ID NO: 246086 - DNA, 33 bp, Homo sapien
aggtgaaagtgggaaatatatctgtacaattat

SEQ ID NO: 246087 - DNA, 33 bp, Homo sapien
aaggaagattttattacggatggatgtttatga

SEQ ID NO: 246088 - DNA, 33 bp, Homo sapien
aaggaagattttattatggatggatgtttatga

SEQ ID NO: 246089 - DNA, 33 bp, Homo sapien
attgttatcataggccactttccacctcattaa

SEQ ID NO: 246090 - DNA, 33 bp, Homo sapien
attgttatcataggccgctttccacctcattaa

SEQ ID NO: 246091 - DNA, 33 bp, Homo sapien
gctccttaccccaagaaaacagtgttcatgaaa

SEQ ID NO: 246092 - DNA, 33 bp, Homo sapien
gctccttaccccaagagaacagtgttcatgaaa

SEQ ID NO: 246093 - DNA, 33 bp, Homo sapien
gttgttcgacaataaaagcaatgtggtcaggtg

SEQ ID NO: 246094 - DNA, 33 bp, Homo sapien
gttgttcgacaataaaggcaatgtggtcaggtg

SEQ ID NO: 246095 - DNA, 33 bp, Homo sapien
ggcatgaaaacaagtaaggatgaagaattagag

SEQ ID NO: 246096 - DNA, 33 bp, Homo sapien
ggcatgaaaacaagtagggatgaagaattagag

SEQ ID NO: 246097 - DNA, 33 bp, Homo sapien
agacgtgctaaccccacactccagctcttaacc

SEQ ID NO: 246098 - DNA, 33 bp, Homo sapien
agacgtgctaaccccagactccagctcttaacc

SEQ ID NO: 246099 - DNA, 33 bp, Homo sapien
cacttatccatttcccaatgaaacagtgctcta

SEQ ID NO: 246100 - DNA, 33 bp, Homo sapien
cacttatccatttcccgatgaaacagtgctcta

SEQ ID NO: 246101 - DNA, 33 bp, Homo sapien
tgcatgtgagcatgataagaaaatctgaagaag

SEQ ID NO: 246102 - DNA, 33 bp, Homo sapien
tgcatgtgagcatgatgagaaaatctgaagaag

SEQ ID NO: 246103 - DNA, 33 bp, Homo sapien
cagccacctgtaagtgcaatacgtactgaatga

SEQ ID NO: 246104 - DNA, 33 bp, Homo sapien
cagccacctgtaagtgtaatacgtactgaatga

SEQ ID NO: 246105 - DNA, 33 bp, Homo sapien
tggcagccactaataaaatgagccagttggagc

SEQ ID NO: 246106 - DNA, 33 bp, Homo sapien
tggcagccactaataacatgagccagttggagc

SEQ ID NO: 246107 - DNA, 33 bp, Homo sapien
attctttctgctattcccaacaggctttggatc

SEQ ID NO: 246108 - DNA, 33 bp, Homo sapien
attctttctgctattcgcaacaggctttggatc

SEQ ID NO: 246109 - DNA, 33 bp, Homo sapien
agtccaaagagtgggacgaatttgatttcagaa

SEQ ID NO: 246110 - DNA, 33 bp, Homo sapien
agtccaaagagtgggaggaatttgatttcagaa

SEQ ID NO: 246111 - DNA, 33 bp, Homo sapien
acactgaaacctcaaactggccctggcagaagg

SEQ ID NO: 246112 - DNA, 33 bp, Homo sapien
acactgaaacctcaaattggccctggcagaagg

SEQ ID NO: 246113 - DNA, 33 bp, Homo sapien
ttgacaggaacctaagacagaacaggaagaccc

SEQ ID NO: 246114 - DNA, 33 bp, Homo sapien
ttgacaggaacctaagtcagaacaggaagaccc

SEQ ID NO: 246115 - DNA, 33 bp, Homo sapien
tgcgctgcagtttgcacacgatggtgaggtagc

SEQ ID NO: 246116 - DNA, 33 bp, Homo sapien
tgcgctgcagtttgcagacgatggtgaggtagc

SEQ ID NO: 246117 - DNA, 33 bp, Homo sapien
ggtaggtccaattagccattctgaaggaatgct

SEQ ID NO: 246118 - DNA, 33 bp, Homo sapien
ggtaggtccaattagctattctgaaggaatgct

SEQ ID NO: 246119 - DNA, 33 bp, Homo sapien
caccctgagatacctgaaaagtggcaactcaag

SEQ ID NO: 246120 - DNA, 33 bp, Homo sapien
caccctgagatacctgcaaagtggcaactcaag

SEQ ID NO: 246121 - DNA, 33 bp, Homo sapien
ccttgttaggtgttaacgccctgtcccgactga

SEQ ID NO: 246122 - DNA, 33 bp, Homo sapien
ccttgttaggtgttaatgccctgtcccgactga

SEQ ID NO: 246123 - DNA, 33 bp, Homo sapien
agcctcatctgtagcaactgtctcaaggagttg

SEQ ID NO: 246124 - DNA, 33 bp, Homo sapien
agcctcatctgtagcatctgtctcaaggagttg

SEQ ID NO: 246125 - DNA, 33 bp, Homo sapien
aagattcttccttccaatcctctaatcctcctg

SEQ ID NO: 246126 - DNA, 33 bp, Homo sapien
aagattcttccttccagtcctctaatcctcctg

SEQ ID NO: 246127 - DNA, 33 bp, Homo sapien
acatttttcatgtccacaaagacatacgtgctc

SEQ ID NO: 246128 - DNA, 33 bp, Homo sapien
acatttttcatgtccagaaagacatacgtgctc

SEQ ID NO: 246129 - DNA, 33 bp, Homo sapien
gctttcaacttttccccagtgaactgaagtcaa

SEQ ID NO: 246130 - DNA, 33 bp, Homo sapien
gctttcaacttttcccgagtgaactgaagtcaa

SEQ ID NO: 246131 - DNA, 33 bp, Homo sapien
cacttcctctgcatcactcttaaccctttgcca

SEQ ID NO: 246132 - DNA, 33 bp, Homo sapien
cacttcctctgcatcattcttaaccctttgcca

SEQ ID NO: 246133 - DNA, 33 bp, Homo sapien
gttggggaggggtgccacaatatggttttgctt

SEQ ID NO: 246134 - DNA, 33 bp, Homo sapien
gttggggaggggtgccgcaatatggttttgctt

SEQ ID NO: 246135 - DNA, 33 bp, Homo sapien
gtatgtgtgttgtaaactctaaggcccgtggtt

SEQ ID NO: 246136 - DNA, 33 bp, Homo sapien
gtatgtgtgttgtaaattctaaggcccgtggtt

SEQ ID NO: 246137 - DNA, 33 bp, Homo sapien
aacatcaccagttagaaggagttgtgatgcctg

SEQ ID NO: 246138 - DNA, 33 bp, Homo sapien
aacatcaccagttagatggagttgtgatgcctg

SEQ ID NO: 246139 - DNA, 33 bp, Homo sapien
ccagaaaaaagagaccagcaagaacccagtcgt

SEQ ID NO: 246140 - DNA, 33 bp, Homo sapien
ccagaaaaaagagaccggcaagaacccagtcgt

SEQ ID NO: 246141 - DNA, 33 bp, Homo sapien
ctaaaattatttcaagaccatgtgttttatttt

SEQ ID NO: 246142 - DNA, 33 bp, Homo sapien
ctaaaattatttcaaggccatgtgttttatttt

SEQ ID NO: 246143 - DNA, 33 bp, Homo sapien
ggacaagtttccagaacgactcatgaggcttgt

SEQ ID NO: 246144 - DNA, 33 bp, Homo sapien
ggacaagtttccagaatgactcatgaggcttgt

SEQ ID NO: 246145 - DNA, 33 bp, Homo sapien
gcctttctgcctttcacgtgctgcagacccttt

SEQ ID NO: 246146 - DNA, 33 bp, Homo sapien
gcctttctgcctttcatgtgctgcagacccttt

SEQ ID NO: 246147 - DNA, 33 bp, Homo sapien
atcgcatttcagaaagcatttcccaagggcctc

SEQ ID NO: 246148 - DNA, 33 bp, Homo sapien
atcgcatttcagaaagtatttcccaagggcctc

SEQ ID NO: 246149 - DNA, 33 bp, Homo sapien
gcgaatccatgaaaaaacacatagcagtgggac

SEQ ID NO: 246150 - DNA, 33 bp, Homo sapien
gcgaatccatgaaaaagcacatagcagtgggac

SEQ ID NO: 246151 - DNA, 33 bp, Homo sapien
ctttcaaagacagagacgggggttggctaagaa

SEQ ID NO: 246152 - DNA, 33 bp, Homo sapien
ctttcaaagacagagaggggggttggctaagaa

SEQ ID NO: 246153 - DNA, 33 bp, Homo sapien
aggcggtggaaccaacacaaaaggctcttggaa

SEQ ID NO: 246154 - DNA, 33 bp, Homo sapien
aggcggtggaaccaacgcaaaaggctcttggaa

SEQ ID NO: 246155 - DNA, 33 bp, Homo sapien
tccacatcctcaaaaacgaacctcctctcttac

SEQ ID NO: 246156 - DNA, 33 bp, Homo sapien
tccacatcctcaaaaatgaacctcctctcttac

SEQ ID NO: 246157 - DNA, 33 bp, Homo sapien
ttcggtcctgataatcactgaatactccctggt

SEQ ID NO: 246158 - DNA, 33 bp, Homo sapien
ttcggtcctgataatccctgaatactccctggt

SEQ ID NO: 246159 - DNA, 33 bp, Homo sapien
tcctttgttacctgaactggtttgaacagttat

SEQ ID NO: 246160 - DNA, 33 bp, Homo sapien
tcctttgttacctgaattggtttgaacagttat

SEQ ID NO: 246161 - DNA, 33 bp, Homo sapien
ttagagggttctcttacggttcactctctacat

SEQ ID NO: 246162 - DNA, 33 bp, Homo sapien
ttagagggttctcttatggttcactctctacat

SEQ ID NO: 246163 - DNA, 33 bp, Homo sapien
aacaaaacatcatatccaaacacttactgtaca

SEQ ID NO: 246164 - DNA, 33 bp, Homo sapien
aacaaaacatcatatcgaaacacttactgtaca

SEQ ID NO: 246165 - DNA, 33 bp, Homo sapien
attgactcacattttcacatagcaggggaggcc

SEQ ID NO: 246166 - DNA, 33 bp, Homo sapien
attgactcacattttcgcatagcaggggaggcc

SEQ ID NO: 246167 - DNA, 33 bp, Homo sapien
tacaagatccctgccacgttatggaaatatcct

SEQ ID NO: 246168 - DNA, 33 bp, Homo sapien
tacaagatccctgccatgttatggaaatatcct

SEQ ID NO: 246169 - DNA, 33 bp, Homo sapien
tgaatgaaccagagaacgtatatgagtccccca

SEQ ID NO: 246170 - DNA, 33 bp, Homo sapien
tgaatgaaccagagaaggtatatgagtccccca

SEQ ID NO: 246171 - DNA, 33 bp, Homo sapien
ggtcagctgaaatgtcactttctcccaacctct

SEQ ID NO: 246172 - DNA, 33 bp, Homo sapien
ggtcagctgaaatgtcgctttctcccaacctct

SEQ ID NO: 246173 - DNA, 33 bp, Homo sapien
tgaatgaataaatggacggccaaagtcagcaac

SEQ ID NO: 246174 - DNA, 33 bp, Homo sapien
tgaatgaataaatggatggccaaagtcagcaac

SEQ ID NO: 246175 - DNA, 33 bp, Homo sapien
cagttaccaagacaggaaagttgagcattgagc

SEQ ID NO: 246176 - DNA, 33 bp, Homo sapien
cagttaccaagacagggaagttgagcattgagc

SEQ ID NO: 246177 - DNA, 33 bp, Homo sapien
tgcccctttggccagaaataccctcttgctacc

SEQ ID NO: 246178 - DNA, 33 bp, Homo sapien
tgcccctttggccagatataccctcttgctacc

SEQ ID NO: 246179 - DNA, 33 bp, Homo sapien
gccacagtgccaggaaataggtacatgaatatg

SEQ ID NO: 246180 - DNA, 33 bp, Homo sapien
gccacagtgccaggaactaggtacatgaatatg

SEQ ID NO: 246181 - DNA, 33 bp, Homo sapien
tagaacgggggagccaacaggcaaggctacagt

SEQ ID NO: 246182 - DNA, 33 bp, Homo sapien
tagaacgggggagccagcaggcaaggctacagt

SEQ ID NO: 246183 - DNA, 33 bp, Homo sapien
tgtgatgtgtctttgcaatgccttcactagggg

SEQ ID NO: 246184 - DNA, 33 bp, Homo sapien
tgtgatgtgtctttgcgatgccttcactagggg

SEQ ID NO: 246185 - DNA, 33 bp, Homo sapien
atatgctatgtggacccccatttatcctcttgc

SEQ ID NO: 246186 - DNA, 33 bp, Homo sapien
atatgctatgtggacctccatttatcctcttgc

SEQ ID NO: 246187 - DNA, 33 bp, Homo sapien
tttgcaagattaatggcaaatacaaaattgctt

SEQ ID NO: 246188 - DNA, 33 bp, Homo sapien
tttgcaagattaatggtaaatacaaaattgctt

SEQ ID NO: 246189 - DNA, 33 bp, Homo sapien
tacattctgataacaacggatgtggcaaaaggc

SEQ ID NO: 246190 - DNA, 33 bp, Homo sapien
tacattctgataacaatggatgtggcaaaaggc

SEQ ID NO: 246191 - DNA, 33 bp, Homo sapien
ctatagaggacttgaaatgtggctaatgtgatg

SEQ ID NO: 246192 - DNA, 33 bp, Homo sapien
ctatagaggacttgaattgtggctaatgtgatg

SEQ ID NO: 246193 - DNA, 33 bp, Homo sapien
aattcgttaaaattcaatacaattaagaattca

SEQ ID NO: 246194 - DNA, 33 bp, Homo sapien
aattcgttaaaattcagtacaattaagaattca

SEQ ID NO: 246195 - DNA, 33 bp, Homo sapien
tatggagccatagataggccatgatgtggcagg

SEQ ID NO: 246196 - DNA, 33 bp, Homo sapien
tatggagccatagatatgccatgatgtggcagg

SEQ ID NO: 246197 - DNA, 33 bp, Homo sapien
ttgactgagagagaaagaattagaaatgtcctt

SEQ ID NO: 246198 - DNA, 33 bp, Homo sapien
ttgactgagagagaaataattagaaatgtcctt

SEQ ID NO: 246199 - DNA, 33 bp, Homo sapien
aaacagacagatagaccgaaggaactgaataga

SEQ ID NO: 246200 - DNA, 33 bp, Homo sapien
aaacagacagatagactgaaggaactgaataga

SEQ ID NO: 246201 - DNA, 33 bp, Homo sapien
aaaatatctttcagggccattgttgcattcaag

SEQ ID NO: 246202 - DNA, 33 bp, Homo sapien
aaaatatctttcagggtcattgttgcattcaag

SEQ ID NO: 246203 - DNA, 33 bp, Homo sapien
gggagggtgataaaaaggaccctgttctactca

SEQ ID NO: 246204 - DNA, 33 bp, Homo sapien
gggagggtgataaaaatgaccctgttctactca

SEQ ID NO: 246205 - DNA, 33 bp, Homo sapien
agaacagcagagatgaagcaggagaagagcagg

SEQ ID NO: 246206 - DNA, 33 bp, Homo sapien
agaacagcagagatgaggcaggagaagagcagg

SEQ ID NO: 246207 - DNA, 33 bp, Homo sapien
tgcaagaggcaagagacaacctgaaggaatgac

SEQ ID NO: 246208 - DNA, 33 bp, Homo sapien
tgcaagaggcaagagataacctgaaggaatgac

SEQ ID NO: 246209 - DNA, 33 bp, Homo sapien
gattcaacctttgcccagatatctttcttaatt

SEQ ID NO: 246210 - DNA, 33 bp, Homo sapien
gattcaacctttgcccggatatctttcttaatt

SEQ ID NO: 246211 - DNA, 33 bp, Homo sapien
caaggcagtggaggcacaatacccttgcttatt

SEQ ID NO: 246212 - DNA, 33 bp, Homo sapien
caaggcagtggaggcataatacccttgcttatt

SEQ ID NO: 246213 - DNA, 33 bp, Homo sapien
gacaaagcttagtcaacaaagttaaagacatcc

SEQ ID NO: 246214 - DNA, 33 bp, Homo sapien
gacaaagcttagtcaagaaagttaaagacatcc

SEQ ID NO: 246215 - DNA, 33 bp, Homo sapien
ctccttctggtttgacccctagattgtggagct

SEQ ID NO: 246216 - DNA, 33 bp, Homo sapien
ctccttctggtttgactcctagattgtggagct

SEQ ID NO: 246217 - DNA, 33 bp, Homo sapien
taggctttcgtatgaaccctaagcgtgaatcag

SEQ ID NO: 246218 - DNA, 33 bp, Homo sapien
taggctttcgtatgaatcctaagcgtgaatcag

SEQ ID NO: 246219 - DNA, 33 bp, Homo sapien
caccagatggaggcaacggccagtgcaaaggcc

SEQ ID NO: 246220 - DNA, 33 bp, Homo sapien
caccagatggaggcaatggccagtgcaaaggcc

SEQ ID NO: 246221 - DNA, 33 bp, Homo sapien
cctgagacagaacaagaaggacaacgaaagggg

SEQ ID NO: 246222 - DNA, 33 bp, Homo sapien
cctgagacagaacaaggaggacaacgaaagggg

SEQ ID NO: 246223 - DNA, 33 bp, Homo sapien
tggagacacaaggatacgacaggcaggagacaa

SEQ ID NO: 246224 - DNA, 33 bp, Homo sapien
tggagacacaaggataggacaggcaggagacaa

SEQ ID NO: 246225 - DNA, 33 bp, Homo sapien
cattgcctatttgatcacttgattaccaccaca

SEQ ID NO: 246226 - DNA, 33 bp, Homo sapien
cattgcctatttgatcgcttgattaccaccaca

SEQ ID NO: 246227 - DNA, 33 bp, Homo sapien
aggtagattttggaaaagagtcaaattttggag

SEQ ID NO: 246228 - DNA, 33 bp, Homo sapien
aggtagattttggaaaggagtcaaattttggag

SEQ ID NO: 246229 - DNA, 33 bp, Homo sapien
ctgatatacactgaaaaacccagagggccttgc

SEQ ID NO: 246230 - DNA, 33 bp, Homo sapien
ctgatatacactgaaagacccagagggccttgc

SEQ ID NO: 246231 - DNA, 33 bp, Homo sapien
cttctacagacggggaaaaccagcaacccttat

SEQ ID NO: 246232 - DNA, 33 bp, Homo sapien
cttctacagacggggagaaccagcaacccttat

SEQ ID NO: 246233 - DNA, 33 bp, Homo sapien
catgagatattcttaccaattcacttttgttca

SEQ ID NO: 246234 - DNA, 33 bp, Homo sapien
catgagatattcttactaattcacttttgttca

SEQ ID NO: 246235 - DNA, 33 bp, Homo sapien
attctctggtgagtcaactttagccctctatta

SEQ ID NO: 246236 - DNA, 33 bp, Homo sapien
attctctggtgagtcagctttagccctctatta

SEQ ID NO: 246237 - DNA, 33 bp, Homo sapien
ttgaaccctcttgtcacctctcctgcaccccgc

SEQ ID NO: 246238 - DNA, 33 bp, Homo sapien
ttgaaccctcttgtcatctctcctgcaccccgc

SEQ ID NO: 246239 - DNA, 33 bp, Homo sapien
cagaatatgtaattgacctcaggttacacagct

SEQ ID NO: 246240 - DNA, 33 bp, Homo sapien
cagaatatgtaattgatctcaggttacacagct

SEQ ID NO: 246241 - DNA, 33 bp, Homo sapien
atttaaaatttacaacaatcgtttgaggtaagt

SEQ ID NO: 246242 - DNA, 33 bp, Homo sapien
atttaaaatttacaacgatcgtttgaggtaagt

SEQ ID NO: 246243 - DNA, 33 bp, Homo sapien
ggatccagtctggaaagtcactcgatcacagtg

SEQ ID NO: 246244 - DNA, 33 bp, Homo sapien
ggatccagtctggaaattcactcgatcacagtg

SEQ ID NO: 246245 - DNA, 33 bp, Homo sapien
gcatatgtatctatcacgtgctggaagttttgc

SEQ ID NO: 246246 - DNA, 33 bp, Homo sapien
gcatatgtatctatcatgtgctggaagttttgc

SEQ ID NO: 246247 - DNA, 33 bp, Homo sapien
ttccaatcttgtacacaggggaaagatgaagaa

SEQ ID NO: 246248 - DNA, 33 bp, Homo sapien
ttccaatcttgtacacgggggaaagatgaagaa

SEQ ID NO: 246249 - DNA, 33 bp, Homo sapien
tagatgaaatgtattcaccgtaaattctagaag

SEQ ID NO: 246250 - DNA, 33 bp, Homo sapien
tagatgaaatgtattcgccgtaaattctagaag

SEQ ID NO: 246251 - DNA, 33 bp, Homo sapien
aaactcactgaacttaactctgtgaggtcaggg

SEQ ID NO: 246252 - DNA, 33 bp, Homo sapien
aaactcactgaacttagctctgtgaggtcaggg

SEQ ID NO: 246253 - DNA, 33 bp, Homo sapien
ttactataaatacttaccttgcatatactgtgc

SEQ ID NO: 246254 - DNA, 33 bp, Homo sapien
ttactataaatacttatcttgcatatactgtgc

SEQ ID NO: 246255 - DNA, 33 bp, Homo sapien
ttctgcagagttggatcataaactcaccagtaa

SEQ ID NO: 246256 - DNA, 33 bp, Homo sapien
ttctgcagagttggattataaactcaccagtaa

SEQ ID NO: 246257 - DNA, 33 bp, Homo sapien
ttgaactattacactcaattgcctctattttcc

SEQ ID NO: 246258 - DNA, 33 bp, Homo sapien
ttgaactattacactcgattgcctctattttcc

SEQ ID NO: 246259 - DNA, 33 bp, Homo sapien
tcaaggtctgactccaccttttacttaaatcag

SEQ ID NO: 246260 - DNA, 33 bp, Homo sapien
tcaaggtctgactccatcttttacttaaatcag

SEQ ID NO: 246261 - DNA, 33 bp, Homo sapien
gagatatagtaccgtgaagattaatttaaaatt

SEQ ID NO: 246262 - DNA, 33 bp, Homo sapien
gagatatagtaccgtgcagattaatttaaaatt

SEQ ID NO: 246263 - DNA, 33 bp, Homo sapien
aaaatattttagtacacggtcacatcctgggag

SEQ ID NO: 246264 - DNA, 33 bp, Homo sapien
aaaatattttagtacatggtcacatcctgggag

SEQ ID NO: 246265 - DNA, 33 bp, Homo sapien
ggatgagatcagtttccctttcaagtcgccttt

SEQ ID NO: 246266 - DNA, 33 bp, Homo sapien
ggatgagatcagtttctctttcaagtcgccttt

SEQ ID NO: 246267 - DNA, 33 bp, Homo sapien
tcgaagaccacctccaagatttgattttttgtc

SEQ ID NO: 246268 - DNA, 33 bp, Homo sapien
tcgaagaccacctccaggatttgattttttgtc

SEQ ID NO: 246269 - DNA, 33 bp, Homo sapien
acatgtctgtgcagggaaataagtactacataa

SEQ ID NO: 246270 - DNA, 33 bp, Homo sapien
acatgtctgtgcaggggaataagtactacataa

SEQ ID NO: 246271 - DNA, 33 bp, Homo sapien
cctaactaatacaacaactaaatcatcttatgt

SEQ ID NO: 246272 - DNA, 33 bp, Homo sapien
cctaactaatacaacatctaaatcatcttatgt

SEQ ID NO: 246273 - DNA, 33 bp, Homo sapien
tggcctgagagagtaaaccttcaattcactatt

SEQ ID NO: 246274 - DNA, 33 bp, Homo sapien
tggcctgagagagtaacccttcaattcactatt

SEQ ID NO: 246275 - DNA, 33 bp, Homo sapien
caagtgagatcaaagacacggatatgggatgaa

SEQ ID NO: 246276 - DNA, 33 bp, Homo sapien
caagtgagatcaaagatacggatatgggatgaa

SEQ ID NO: 246277 - DNA, 33 bp, Homo sapien
acctcatattttgcccagaaggtacagttgttg

SEQ ID NO: 246278 - DNA, 33 bp, Homo sapien
acctcatattttgccctgaaggtacagttgttg

SEQ ID NO: 246279 - DNA, 33 bp, Homo sapien
gggaaagacattaataagcaatttcagaagtat

SEQ ID NO: 246280 - DNA, 33 bp, Homo sapien
gggaaagacattaataggcaatttcagaagtat

SEQ ID NO: 246281 - DNA, 33 bp, Homo sapien
tgccaaattgccctacaaagctgctgcaggaat

SEQ ID NO: 246282 - DNA, 33 bp, Homo sapien
tgccaaattgccctacgaagctgctgcaggaat

SEQ ID NO: 246283 - DNA, 33 bp, Homo sapien
ccgtttactagtttgacagtgattgccaaattg

SEQ ID NO: 246284 - DNA, 33 bp, Homo sapien
ccgtttactagtttgatagtgattgccaaattg

SEQ ID NO: 246285 - DNA, 33 bp, Homo sapien
aatcacagcttctataacaacaagtgtggtcta

SEQ ID NO: 246286 - DNA, 33 bp, Homo sapien
aatcacagcttctatagcaacaagtgtggtcta

SEQ ID NO: 246287 - DNA, 33 bp, Homo sapien
gaatcagagaatctgacgttgtttttccacaag

SEQ ID NO: 246288 - DNA, 33 bp, Homo sapien
gaatcagagaatctgaggttgtttttccacaag

SEQ ID NO: 246289 - DNA, 33 bp, Homo sapien
tgtgtcctttacccaacgttccctaatgttgat

SEQ ID NO: 246290 - DNA, 33 bp, Homo sapien
tgtgtcctttacccaatgttccctaatgttgat

SEQ ID NO: 246291 - DNA, 33 bp, Homo sapien
atatcttgcataacaacacaacaactatctaaa

SEQ ID NO: 246292 - DNA, 33 bp, Homo sapien
atatcttgcataacaatacaacaactatctaaa

SEQ ID NO: 246293 - DNA, 33 bp, Homo sapien
gaaatttgaatgtccacagattcaccaatgttc

SEQ ID NO: 246294 - DNA, 33 bp, Homo sapien
gaaatttgaatgtccatagattcaccaatgttc

SEQ ID NO: 246295 - DNA, 33 bp, Homo sapien
ataaagtctcactcacagatcttggggttagga

SEQ ID NO: 246296 - DNA, 33 bp, Homo sapien
ataaagtctcactcacggatcttggggttagga

SEQ ID NO: 246297 - DNA, 33 bp, Homo sapien
cagaccccaaaagccaccatattataggattcc

SEQ ID NO: 246298 - DNA, 33 bp, Homo sapien
cagaccccaaaagccatcatattataggattcc

SEQ ID NO: 246299 - DNA, 33 bp, Homo sapien
gcagaaggatccacacagtatatatcatgcata

SEQ ID NO: 246300 - DNA, 33 bp, Homo sapien
gcagaaggatccacacggtatatatcatgcata

SEQ ID NO: 246301 - DNA, 33 bp, Homo sapien
aggcaattttcacctaatacagaatgcttaaga

SEQ ID NO: 246302 - DNA, 33 bp, Homo sapien
aggcaattttcacctagtacagaatgcttaaga

SEQ ID NO: 246303 - DNA, 33 bp, Homo sapien
aagccaccaaaataatcaccaccctgattttgt

SEQ ID NO: 246304 - DNA, 33 bp, Homo sapien
aagccaccaaaataatgaccaccctgattttgt

SEQ ID NO: 246305 - DNA, 33 bp, Homo sapien
ccaccctatgaaggaaaagctaccgctagctcc

SEQ ID NO: 246306 - DNA, 33 bp, Homo sapien
ccaccctatgaaggaagagctaccgctagctcc

SEQ ID NO: 246307 - DNA, 33 bp, Homo sapien
atgacagcttggaaacccggccatattacatag

SEQ ID NO: 246308 - DNA, 33 bp, Homo sapien
atgacagcttggaaactcggccatattacatag

SEQ ID NO: 246309 - DNA, 33 bp, Homo sapien
gtgtgtgagtgatggcaaatacgcagtgttgtc

SEQ ID NO: 246310 - DNA, 33 bp, Homo sapien
gtgtgtgagtgatggcgaatacgcagtgttgtc

SEQ ID NO: 246311 - DNA, 33 bp, Homo sapien
aagatcaatacagatacgaacaaatacgatttt

SEQ ID NO: 246312 - DNA, 33 bp, Homo sapien
aagatcaatacagatatgaacaaatacgatttt

SEQ ID NO: 246313 - DNA, 33 bp, Homo sapien
tttacctagcttgacacatatttgtaaatatgt

SEQ ID NO: 246314 - DNA, 33 bp, Homo sapien
tttacctagcttgacatatatttgtaaatatgt

SEQ ID NO: 246315 - DNA, 33 bp, Homo sapien
aaatgtaatccttcacagctttctcaaagaggt

SEQ ID NO: 246316 - DNA, 33 bp, Homo sapien
aaatgtaatccttcacggctttctcaaagaggt

SEQ ID NO: 246317 - DNA, 33 bp, Homo sapien
tctcaaagaggtcatacacgtgctctctgtcca

SEQ ID NO: 246318 - DNA, 33 bp, Homo sapien
tctcaaagaggtcatagacgtgctctctgtcca

SEQ ID NO: 246319 - DNA, 33 bp, Homo sapien
catgtgttaagtgttaaacgtagaatagctcat

SEQ ID NO: 246320 - DNA, 33 bp, Homo sapien
catgtgttaagtgttatacgtagaatagctcat

SEQ ID NO: 246321 - DNA, 33 bp, Homo sapien
tttaaaccattctcttaaaaccagaaaattgta

SEQ ID NO: 246322 - DNA, 33 bp, Homo sapien
tttaaaccattctcttgaaaccagaaaattgta

SEQ ID NO: 246323 - DNA, 33 bp, Homo sapien
cacaggatagacaaaccgaagagagagcccaaa

SEQ ID NO: 246324 - DNA, 33 bp, Homo sapien
cacaggatagacaaactgaagagagagcccaaa

SEQ ID NO: 246325 - DNA, 33 bp, Homo sapien
cactatgaataacttaaaggaaatcatttcatc

SEQ ID NO: 246326 - DNA, 33 bp, Homo sapien
cactatgaataacttacaggaaatcatttcatc

SEQ ID NO: 246327 - DNA, 33 bp, Homo sapien
ctaaagaatgccataaatcaacgtggcacaaaa

SEQ ID NO: 246328 - DNA, 33 bp, Homo sapien
ctaaagaatgccataagtcaacgtggcacaaaa

SEQ ID NO: 246329 - DNA, 33 bp, Homo sapien
tctcaataaaggatgccctatcttctagtgaaa

SEQ ID NO: 246330 - DNA, 33 bp, Homo sapien
tctcaataaaggatgctctatcttctagtgaaa

SEQ ID NO: 246331 - DNA, 33 bp, Homo sapien
gtcatgagaattaacaggattacagatgtaagg

SEQ ID NO: 246332 - DNA, 33 bp, Homo sapien
gtcatgagaattaacatgattacagatgtaagg

SEQ ID NO: 246333 - DNA, 33 bp, Homo sapien
gtgtttacaccagaacagtcatcacgatcaaaa

SEQ ID NO: 246334 - DNA, 33 bp, Homo sapien
gtgtttacaccagaacggtcatcacgatcaaaa

SEQ ID NO: 246335 - DNA, 33 bp, Homo sapien
cacctgtgctttcctcgcgggtactcatctaag

SEQ ID NO: 246336 - DNA, 33 bp, Homo sapien
cacctgtgctttcctctcgggtactcatctaag

SEQ ID NO: 246337 - DNA, 33 bp, Homo sapien
gaccagcgtgggtaaaagtatggtggctgggaa

SEQ ID NO: 246338 - DNA, 33 bp, Homo sapien
gaccagcgtgggtaaaggtatggtggctgggaa

SEQ ID NO: 246339 - DNA, 33 bp, Homo sapien
tttcttcacccgtccaagctagatgactgtcaa

SEQ ID NO: 246340 - DNA, 33 bp, Homo sapien
tttcttcacccgtccaggctagatgactgtcaa

SEQ ID NO: 246341 - DNA, 33 bp, Homo sapien
ggcactgcccattcacaaagcctctacagagct

SEQ ID NO: 246342 - DNA, 33 bp, Homo sapien
ggcactgcccattcacgaagcctctacagagct

SEQ ID NO: 246343 - DNA, 33 bp, Homo sapien
cagtgctgttcctcagcatttctggaggctccg

SEQ ID NO: 246344 - DNA, 33 bp, Homo sapien
cagtgctgttcctcagtatttctggaggctccg

SEQ ID NO: 246345 - DNA, 33 bp, Homo sapien
gaagcagaagcactaaatctttctacaccccag

SEQ ID NO: 246346 - DNA, 33 bp, Homo sapien
gaagcagaagcactaattctttctacaccccag

SEQ ID NO: 246347 - DNA, 33 bp, Homo sapien
atcagacactattctaaaagttgtgtgctgctg

SEQ ID NO: 246348 - DNA, 33 bp, Homo sapien
atcagacactattctagaagttgtgtgctgctg

SEQ ID NO: 246349 - DNA, 33 bp, Homo sapien
atccaatggggaggccagcgagtaaacaattcg

SEQ ID NO: 246350 - DNA, 33 bp, Homo sapien
atccaatggggaggccggcgagtaaacaattcg

SEQ ID NO: 246351 - DNA, 33 bp, Homo sapien
ggtggattcttgccaacaaagcaatttggaaat

SEQ ID NO: 246352 - DNA, 33 bp, Homo sapien
ggtggattcttgccaataaagcaatttggaaat

SEQ ID NO: 246353 - DNA, 33 bp, Homo sapien
ttgttaagttcaaaaccctccagttagaagcat

SEQ ID NO: 246354 - DNA, 33 bp, Homo sapien
ttgttaagttcaaaactctccagttagaagcat

SEQ ID NO: 246355 - DNA, 33 bp, Homo sapien
aatactgctttccagacactgcttccctatttt

SEQ ID NO: 246356 - DNA, 33 bp, Homo sapien
aatactgctttccagatactgcttccctatttt

SEQ ID NO: 246357 - DNA, 33 bp, Homo sapien
ccctgaaataagggaaaatggtctctaattaat

SEQ ID NO: 246358 - DNA, 33 bp, Homo sapien
ccctgaaataagggaagatggtctctaattaat

SEQ ID NO: 246359 - DNA, 33 bp, Homo sapien
agattgtgaggggccactcagaaagacatccac

SEQ ID NO: 246360 - DNA, 33 bp, Homo sapien
agattgtgaggggccattcagaaagacatccac

SEQ ID NO: 246361 - DNA, 33 bp, Homo sapien
ctaacctgcctgtctacaaccagaaacaaaaaa

SEQ ID NO: 246362 - DNA, 33 bp, Homo sapien
ctaacctgcctgtctataaccagaaacaaaaaa

SEQ ID NO: 246363 - DNA, 33 bp, Homo sapien
gcttcctagcccagtacctggctttgagcttgt

SEQ ID NO: 246364 - DNA, 33 bp, Homo sapien
gcttcctagcccagtatctggctttgagcttgt

SEQ ID NO: 246365 - DNA, 33 bp, Homo sapien
cttgtgctgtctgcaacggcaagagctgcagta

SEQ ID NO: 246366 - DNA, 33 bp, Homo sapien
cttgtgctgtctgcaatggcaagagctgcagta

SEQ ID NO: 246367 - DNA, 33 bp, Homo sapien
acaaatcagatattcaacctcacaggaaaagag

SEQ ID NO: 246368 - DNA, 33 bp, Homo sapien
acaaatcagatattcagcctcacaggaaaagag

SEQ ID NO: 246369 - DNA, 33 bp, Homo sapien
ataatgaatacaaataagtaatcttcccacttt

SEQ ID NO: 246370 - DNA, 33 bp, Homo sapien
ataatgaatacaaatacgtaatcttcccacttt

SEQ ID NO: 246371 - DNA, 33 bp, Homo sapien
aataaataaagcctccaagttaaaagtgaagag

SEQ ID NO: 246372 - DNA, 33 bp, Homo sapien
aataaataaagcctccgagttaaaagtgaagag

SEQ ID NO: 246373 - DNA, 33 bp, Homo sapien
tgtttcagcagcagacactcaacaatgcaggtg

SEQ ID NO: 246374 - DNA, 33 bp, Homo sapien
tgtttcagcagcagacgctcaacaatgcaggtg

SEQ ID NO: 246375 - DNA, 33 bp, Homo sapien
acttgatcgagaataaccactggcctgaggtgg

SEQ ID NO: 246376 - DNA, 33 bp, Homo sapien
acttgatcgagaataagcactggcctgaggtgg

SEQ ID NO: 246377 - DNA, 33 bp, Homo sapien
aagaacaattacaaccacaagacggtcaaacac

SEQ ID NO: 246378 - DNA, 33 bp, Homo sapien
aagaacaattacaaccgcaagacggtcaaacac

SEQ ID NO: 246379 - DNA, 33 bp, Homo sapien
atccgtagggaggatcacttggtcacttgtgag

SEQ ID NO: 246380 - DNA, 33 bp, Homo sapien
atccgtagggaggatcgcttggtcacttgtgag

SEQ ID NO: 246381 - DNA, 33 bp, Homo sapien
gaaactaaggcctgcccgagatcatataatagc

SEQ ID NO: 246382 - DNA, 33 bp, Homo sapien
gaaactaaggcctgccggagatcatataatagc

SEQ ID NO: 246383 - DNA, 33 bp, Homo sapien
atgcaaattaacacacagatgtgaatgagtttc

SEQ ID NO: 246384 - DNA, 33 bp, Homo sapien
atgcaaattaacacacggatgtgaatgagtttc

SEQ ID NO: 246385 - DNA, 33 bp, Homo sapien
ttaggttctggcttcaaattactataaatgggt

SEQ ID NO: 246386 - DNA, 33 bp, Homo sapien
ttaggttctggcttcagattactataaatgggt

SEQ ID NO: 246387 - DNA, 33 bp, Homo sapien
ccaacctaatttgcaccaacactttctgaggct

SEQ ID NO: 246388 - DNA, 33 bp, Homo sapien
ccaacctaatttgcactaacactttctgaggct

SEQ ID NO: 246389 - DNA, 33 bp, Homo sapien
gagttgtgagtgaagaggagggaaagttgaatt

SEQ ID NO: 246390 - DNA, 33 bp, Homo sapien
gagttgtgagtgaagatgagggaaagttgaatt

SEQ ID NO: 246391 - DNA, 33 bp, Homo sapien
ctggactggtggtccacaaaatctcctttgaga

SEQ ID NO: 246392 - DNA, 33 bp, Homo sapien
ctggactggtggtccagaaaatctcctttgaga

SEQ ID NO: 246393 - DNA, 33 bp, Homo sapien
ccaatttgtgcgttcaactcttattaaaacatg

SEQ ID NO: 246394 - DNA, 33 bp, Homo sapien
ccaatttgtgcgttcatctcttattaaaacatg

SEQ ID NO: 246395 - DNA, 33 bp, Homo sapien
ggggccaggaaagaagccggaaccgtggccttc

SEQ ID NO: 246396 - DNA, 33 bp, Homo sapien
ggggccaggaaagaagtcggaaccgtggccttc

SEQ ID NO: 246397 - DNA, 33 bp, Homo sapien
gtgatatctgcttgctaaaaaggatctggtgat

SEQ ID NO: 246398 - DNA, 33 bp, Homo sapien
gtgatatctgcttgctgaaaaggatctggtgat

SEQ ID NO: 246399 - DNA, 33 bp, Homo sapien
aacaacacacccgaggacagaagaaatattgcc

SEQ ID NO: 246400 - DNA, 33 bp, Homo sapien
aacaacacacccgagggcagaagaaatattgcc

SEQ ID NO: 246401 - DNA, 33 bp, Homo sapien
tcccgcaacttgcaaccgctaggattctgtgcc

SEQ ID NO: 246402 - DNA, 33 bp, Homo sapien
tcccgcaacttgcaactgctaggattctgtgcc

SEQ ID NO: 246403 - DNA, 33 bp, Homo sapien
aacaccaggcacactgaaaaggaacagtagagt

SEQ ID NO: 246404 - DNA, 33 bp, Homo sapien
aacaccaggcacactggaaaggaacagtagagt

SEQ ID NO: 246405 - DNA, 33 bp, Homo sapien
tgacatggtagcctggaccaaaagggcagctga

SEQ ID NO: 246406 - DNA, 33 bp, Homo sapien
tgacatggtagcctggtccaaaagggcagctga

SEQ ID NO: 246407 - DNA, 33 bp, Homo sapien
taaaatttttcctttaactcatctatcaccttg

SEQ ID NO: 246408 - DNA, 33 bp, Homo sapien
taaaatttttcctttatctcatctatcaccttg

SEQ ID NO: 246409 - DNA, 33 bp, Homo sapien
cttggtctttcaaaggacacaggatcacttccc

SEQ ID NO: 246410 - DNA, 33 bp, Homo sapien
cttggtctttcaaaggtcacaggatcacttccc

SEQ ID NO: 246411 - DNA, 33 bp, Homo sapien
tgaaacctaaggaaataaatcactggcttctga

SEQ ID NO: 246412 - DNA, 33 bp, Homo sapien
tgaaacctaaggaaatgaatcactggcttctga

SEQ ID NO: 246413 - DNA, 33 bp, Homo sapien
tctgccccgaattcctaagagctcaattaactc

SEQ ID NO: 246414 - DNA, 33 bp, Homo sapien
tctgccccgaattcctgagagctcaattaactc

SEQ ID NO: 246415 - DNA, 33 bp, Homo sapien
actgggatataatttaaaaggattgaaaggatt

SEQ ID NO: 246416 - DNA, 33 bp, Homo sapien
actgggatataatttacaaggattgaaaggatt

SEQ ID NO: 246417 - DNA, 33 bp, Homo sapien
atcaaactttgctttacgatgttctttaaaaaa

SEQ ID NO: 246418 - DNA, 33 bp, Homo sapien
atcaaactttgctttatgatgttctttaaaaaa

SEQ ID NO: 246419 - DNA, 33 bp, Homo sapien
tatatccatttaatcaaccctgtcctaatgatc

SEQ ID NO: 246420 - DNA, 33 bp, Homo sapien
tatatccatttaatcacccctgtcctaatgatc

SEQ ID NO: 246421 - DNA, 33 bp, Homo sapien
caaagcttaccctaataactctctttaaatttg

SEQ ID NO: 246422 - DNA, 33 bp, Homo sapien
caaagcttaccctaatgactctctttaaatttg

SEQ ID NO: 246423 - DNA, 33 bp, Homo sapien
tttgtcccatttggccagaaactttggagtcaa

SEQ ID NO: 246424 - DNA, 33 bp, Homo sapien
tttgtcccatttggccggaaactttggagtcaa

SEQ ID NO: 246425 - DNA, 33 bp, Homo sapien
tagtttgcaacacttcaaatatgcagagcttgc

SEQ ID NO: 246426 - DNA, 33 bp, Homo sapien
tagtttgcaacacttcgaatatgcagagcttgc

SEQ ID NO: 246427 - DNA, 33 bp, Homo sapien
tccggatctctttgtacgcttaaaaaggattga

SEQ ID NO: 246428 - DNA, 33 bp, Homo sapien
tccggatctctttgtatgcttaaaaaggattga

SEQ ID NO: 246429 - DNA, 33 bp, Homo sapien
gttccatgtggaagtgaagtgagaggcagaaaa

SEQ ID NO: 246430 - DNA, 33 bp, Homo sapien
gttccatgtggaagtggagtgagaggcagaaaa

SEQ ID NO: 246431 - DNA, 33 bp, Homo sapien
tatagtatagcagttacagagcaatgggctaga

SEQ ID NO: 246432 - DNA, 33 bp, Homo sapien
tatagtatagcagttatagagcaatgggctaga

SEQ ID NO: 246433 - DNA, 33 bp, Homo sapien
ccatactttgagcactcacacgttgtttttttt

SEQ ID NO: 246434 - DNA, 33 bp, Homo sapien
ccatactttgagcacttacacgttgtttttttt

SEQ ID NO: 246435 - DNA, 33 bp, Homo sapien
tgggcaagaaagaatgcatccagccagaacctc

SEQ ID NO: 246436 - DNA, 33 bp, Homo sapien
tgggcaagaaagaatgtatccagccagaacctc

SEQ ID NO: 246437 - DNA, 33 bp, Homo sapien
ataaaagtcttcgcaaatatgtttggtggagaa

SEQ ID NO: 246438 - DNA, 33 bp, Homo sapien
ataaaagtcttcgcaagtatgtttggtggagaa

SEQ ID NO: 246439 - DNA, 33 bp, Homo sapien
gtggctatgaataccaatcctgaaagatggtcc

SEQ ID NO: 246440 - DNA, 33 bp, Homo sapien
gtggctatgaataccagtcctgaaagatggtcc

SEQ ID NO: 246441 - DNA, 33 bp, Homo sapien
agcacagaaagattgacggaagtagaaaatcac

SEQ ID NO: 246442 - DNA, 33 bp, Homo sapien
agcacagaaagattgatggaagtagaaaatcac

SEQ ID NO: 246443 - DNA, 33 bp, Homo sapien
aaacagtcctgtaatcacaacagccctgggtag

SEQ ID NO: 246444 - DNA, 33 bp, Homo sapien
aaacagtcctgtaatcgcaacagccctgggtag

SEQ ID NO: 246445 - DNA, 33 bp, Homo sapien
gggactggaaaacagactcctgactcccgtcct

SEQ ID NO: 246446 - DNA, 33 bp, Homo sapien
gggactggaaaacagattcctgactcccgtcct

SEQ ID NO: 246447 - DNA, 33 bp, Homo sapien
ctcgtctggccttccccgctcatggaatcaaac

SEQ ID NO: 246448 - DNA, 33 bp, Homo sapien
ctcgtctggccttccctgctcatggaatcaaac

SEQ ID NO: 246449 - DNA, 33 bp, Homo sapien
gatagacattgctccaatgaagatatacaaatg

SEQ ID NO: 246450 - DNA, 33 bp, Homo sapien
gatagacattgctccattgaagatatacaaatg

SEQ ID NO: 246451 - DNA, 33 bp, Homo sapien
ggagcaatgtctatccaagtcttttgtccactt

SEQ ID NO: 246452 - DNA, 33 bp, Homo sapien
ggagcaatgtctatccgagtcttttgtccactt

SEQ ID NO: 246453 - DNA, 33 bp, Homo sapien
gagagagatagttttcacctttataaatgtacc

SEQ ID NO: 246454 - DNA, 33 bp, Homo sapien
gagagagatagttttcgcctttataaatgtacc

SEQ ID NO: 246455 - DNA, 33 bp, Homo sapien
taaagagcaacaactacaaaatgcctattcacc

SEQ ID NO: 246456 - DNA, 33 bp, Homo sapien
taaagagcaacaactataaaatgcctattcacc

SEQ ID NO: 246457 - DNA, 33 bp, Homo sapien
ttcccagggcctgatacgttttggaacttggaa

SEQ ID NO: 246458 - DNA, 33 bp, Homo sapien
ttcccagggcctgatatgttttggaacttggaa

SEQ ID NO: 246459 - DNA, 33 bp, Homo sapien
gcctactttcatagccaacaaaccaaccaaaaa

SEQ ID NO: 246460 - DNA, 33 bp, Homo sapien
gcctactttcatagcccacaaaccaaccaaaaa

SEQ ID NO: 246461 - DNA, 33 bp, Homo sapien
agaaaagagagggaagaaattgaaggtctgatt

SEQ ID NO: 246462 - DNA, 33 bp, Homo sapien
agaaaagagagggaaggaattgaaggtctgatt

SEQ ID NO: 246463 - DNA, 33 bp, Homo sapien
ggagggacagagcaggaaacctgttttgttgtt

SEQ ID NO: 246464 - DNA, 33 bp, Homo sapien
ggagggacagagcaggtaacctgttttgttgtt

SEQ ID NO: 246465 - DNA, 33 bp, Homo sapien
tcacaacaggtttacaatccacatacgttgaaa

SEQ ID NO: 246466 - DNA, 33 bp, Homo sapien
tcacaacaggtttacagtccacatacgttgaaa

SEQ ID NO: 246467 - DNA, 33 bp, Homo sapien
cagtcctaccagaacacggccccaaaacaccag

SEQ ID NO: 246468 - DNA, 33 bp, Homo sapien
cagtcctaccagaacatggccccaaaacaccag

SEQ ID NO: 246469 - DNA, 33 bp, Homo sapien
cccgtgtgctttttgccacagtatgaagtctgg

SEQ ID NO: 246470 - DNA, 33 bp, Homo sapien
cccgtgtgctttttgctacagtatgaagtctgg

SEQ ID NO: 246471 - DNA, 33 bp, Homo sapien
ctcatcggtaatgacacagcttgacaaattaag

SEQ ID NO: 246472 - DNA, 33 bp, Homo sapien
ctcatcggtaatgacagagcttgacaaattaag

SEQ ID NO: 246473 - DNA, 33 bp, Homo sapien
actcaccaagtgaagtcactcgatctcccagtc

SEQ ID NO: 246474 - DNA, 33 bp, Homo sapien
actcaccaagtgaagttactcgatctcccagtc

SEQ ID NO: 246475 - DNA, 33 bp, Homo sapien
aagttttctgtgctgaacataaatattaaagcc

SEQ ID NO: 246476 - DNA, 33 bp, Homo sapien
aagttttctgtgctgaccataaatattaaagcc

SEQ ID NO: 246477 - DNA, 33 bp, Homo sapien
caccatgcttgacttacagttactttttaaagt

SEQ ID NO: 246478 - DNA, 33 bp, Homo sapien
caccatgcttgacttatagttactttttaaagt

SEQ ID NO: 246479 - DNA, 33 bp, Homo sapien
gaactgcatccagtctaaatcgagctgtgctct

SEQ ID NO: 246480 - DNA, 33 bp, Homo sapien
gaactgcatccagtctgaatcgagctgtgctct

SEQ ID NO: 246481 - DNA, 33 bp, Homo sapien
gcacggtcatcctgtaaggtgatggcaagtcgg

SEQ ID NO: 246482 - DNA, 33 bp, Homo sapien
gcacggtcatcctgtagggtgatggcaagtcgg

SEQ ID NO: 246483 - DNA, 33 bp, Homo sapien
ccttccagctggaactcaaccggatgcgtaact

SEQ ID NO: 246484 - DNA, 33 bp, Homo sapien
ccttccagctggaacttaaccggatgcgtaact

SEQ ID NO: 246485 - DNA, 33 bp, Homo sapien
cagctgaaattaaccacgagcaaaattaaggag

SEQ ID NO: 246486 - DNA, 33 bp, Homo sapien
cagctgaaattaaccatgagcaaaattaaggag

SEQ ID NO: 246487 - DNA, 33 bp, Homo sapien
tttccaggacaagttacgtttttctcagtggga

SEQ ID NO: 246488 - DNA, 33 bp, Homo sapien
tttccaggacaagttatgtttttctcagtggga

SEQ ID NO: 246489 - DNA, 33 bp, Homo sapien
attgattgattgtgaacgggtttcctctgtgta

SEQ ID NO: 246490 - DNA, 33 bp, Homo sapien
attgattgattgtgaatgggtttcctctgtgta

SEQ ID NO: 246491 - DNA, 33 bp, Homo sapien
tgtctcagtgaaatatcaccctcggcccatatt

SEQ ID NO: 246492 - DNA, 33 bp, Homo sapien
tgtctcagtgaaatatgaccctcggcccatatt

SEQ ID NO: 246493 - DNA, 33 bp, Homo sapien
ttcactcctgctgagaaacttgcctcggtctct

SEQ ID NO: 246494 - DNA, 33 bp, Homo sapien
ttcactcctgctgagagacttgcctcggtctct

SEQ ID NO: 246495 - DNA, 33 bp, Homo sapien
gcggattctttgaccacggcagtttcaaggaaa

SEQ ID NO: 246496 - DNA, 33 bp, Homo sapien
gcggattctttgaccatggcagtttcaaggaaa

SEQ ID NO: 246497 - DNA, 33 bp, Homo sapien
tgtgaagttttctggggagagcacccaaggcca

SEQ ID NO: 246498 - DNA, 33 bp, Homo sapien
tgtgaagttttctgggtagagcacccaaggcca

SEQ ID NO: 246499 - DNA, 33 bp, Homo sapien
cagtggctggaacctgaaagtggtggagaaatg

SEQ ID NO: 246500 - DNA, 33 bp, Homo sapien
cagtggctggaacctgtaagtggtggagaaatg

SEQ ID NO: 246501 - DNA, 33 bp, Homo sapien
ctgacacccgtcttaacaaaaggcccaggagtg

SEQ ID NO: 246502 - DNA, 33 bp, Homo sapien
ctgacacccgtcttaataaaaggcccaggagtg

SEQ ID NO: 246503 - DNA, 33 bp, Homo sapien
gcatttgctgtataccaggccaaagcattccat

SEQ ID NO: 246504 - DNA, 33 bp, Homo sapien
gcatttgctgtataccgggccaaagcattccat

SEQ ID NO: 246505 - DNA, 33 bp, Homo sapien
ctatttatttaaccaaaccctattgtgagatgt

SEQ ID NO: 246506 - DNA, 33 bp, Homo sapien
ctatttatttaaccaacccctattgtgagatgt

SEQ ID NO: 246507 - DNA, 33 bp, Homo sapien
atggggaagtcttgggaagataactcaatgccc

SEQ ID NO: 246508 - DNA, 33 bp, Homo sapien
atggggaagtcttgggcagataactcaatgccc

SEQ ID NO: 246509 - DNA, 33 bp, Homo sapien
gatgtgttagctaaataaacacctccatgaaat

SEQ ID NO: 246510 - DNA, 33 bp, Homo sapien
gatgtgttagctaaatgaacacctccatgaaat

SEQ ID NO: 246511 - DNA, 33 bp, Homo sapien
agaaagtagtcagatacgctaagttctcagcca

SEQ ID NO: 246512 - DNA, 33 bp, Homo sapien
agaaagtagtcagatatgctaagttctcagcca

SEQ ID NO: 246513 - DNA, 33 bp, Homo sapien
aacttgaaccattaaactagaaccctccagggc

SEQ ID NO: 246514 - DNA, 33 bp, Homo sapien
aacttgaaccattaaattagaaccctccagggc

SEQ ID NO: 246515 - DNA, 33 bp, Homo sapien
aattcatttcaacatccgacaaaccaatggaac

SEQ ID NO: 246516 - DNA, 33 bp, Homo sapien
aattcatttcaacatcggacaaaccaatggaac

SEQ ID NO: 246517 - DNA, 33 bp, Homo sapien
cactgatttctttctacatttgttaccttatct

SEQ ID NO: 246518 - DNA, 33 bp, Homo sapien
cactgatttctttctagatttgttaccttatct

SEQ ID NO: 246519 - DNA, 33 bp, Homo sapien
atttgtcagttgatgaaaatctgagtggtttct

SEQ ID NO: 246520 - DNA, 33 bp, Homo sapien
atttgtcagttgatgagaatctgagtggtttct

SEQ ID NO: 246521 - DNA, 33 bp, Homo sapien
ctgtgttcatatgaaacgtccatgataggccaa

SEQ ID NO: 246522 - DNA, 33 bp, Homo sapien
ctgtgttcatatgaaatgtccatgataggccaa

SEQ ID NO: 246523 - DNA, 33 bp, Homo sapien
cttcctggtctgggccccatcgtataaagttct

SEQ ID NO: 246524 - DNA, 33 bp, Homo sapien
cttcctggtctgggcctcatcgtataaagttct

SEQ ID NO: 246525 - DNA, 33 bp, Homo sapien
tcacttcagcatctgaaaataataataaaatga

SEQ ID NO: 246526 - DNA, 33 bp, Homo sapien
tcacttcagcatctgacaataataataaaatga

SEQ ID NO: 246527 - DNA, 33 bp, Homo sapien
gcatgggagagttaccaattcatttcacattgg

SEQ ID NO: 246528 - DNA, 33 bp, Homo sapien
gcatgggagagttaccgattcatttcacattgg

SEQ ID NO: 246529 - DNA, 33 bp, Homo sapien
tagtattacaaatgagaaatagcctgacttgca

SEQ ID NO: 246530 - DNA, 33 bp, Homo sapien
tagtattacaaatgagcaatagcctgacttgca

SEQ ID NO: 246531 - DNA, 33 bp, Homo sapien
aatctatacatggcacagaatttattcactcat

SEQ ID NO: 246532 - DNA, 33 bp, Homo sapien
aatctatacatggcactgaatttattcactcat

SEQ ID NO: 246533 - DNA, 33 bp, Homo sapien
atagcattttgtacaacttacagttatgaaact

SEQ ID NO: 246534 - DNA, 33 bp, Homo sapien
atagcattttgtacaagttacagttatgaaact

SEQ ID NO: 246535 - DNA, 33 bp, Homo sapien
ttttggtgtaaaatataacatagatgtccagcc

SEQ ID NO: 246536 - DNA, 33 bp, Homo sapien
ttttggtgtaaaatatgacatagatgtccagcc

SEQ ID NO: 246537 - DNA, 33 bp, Homo sapien
tttggaattacatacccagtcctgtcgtacaat

SEQ ID NO: 246538 - DNA, 33 bp, Homo sapien
tttggaattacatacctagtcctgtcgtacaat

SEQ ID NO: 246539 - DNA, 33 bp, Homo sapien
atttaatgttgaaatccaggaatataagtgcca

SEQ ID NO: 246540 - DNA, 33 bp, Homo sapien
atttaatgttgaaatctaggaatataagtgcca

SEQ ID NO: 246541 - DNA, 33 bp, Homo sapien
ttagccagtttgtcctcaacattgagctccgtg

SEQ ID NO: 246542 - DNA, 33 bp, Homo sapien
ttagccagtttgtcctgaacattgagctccgtg

SEQ ID NO: 246543 - DNA, 33 bp, Homo sapien
ggtggacacatacgtaaaaattcactgggctat

SEQ ID NO: 246544 - DNA, 33 bp, Homo sapien
ggtggacacatacgtagaaattcactgggctat

SEQ ID NO: 246545 - DNA, 33 bp, Homo sapien
atgaatttttgaaaacaatatgcctgtgcaacc

SEQ ID NO: 246546 - DNA, 33 bp, Homo sapien
atgaatttttgaaaacgatatgcctgtgcaacc

SEQ ID NO: 246547 - DNA, 33 bp, Homo sapien
ctatgcatatttatacaacagctcatcaggatt

SEQ ID NO: 246548 - DNA, 33 bp, Homo sapien
ctatgcatatttatacgacagctcatcaggatt

SEQ ID NO: 246549 - DNA, 33 bp, Homo sapien
atagtgccaaggttgaaaaactatgagctaatc

SEQ ID NO: 246550 - DNA, 33 bp, Homo sapien
atagtgccaaggttgagaaactatgagctaatc

SEQ ID NO: 246551 - DNA, 33 bp, Homo sapien
ttgcttttcctgcctaacctctgtgagcctctg

SEQ ID NO: 246552 - DNA, 33 bp, Homo sapien
ttgcttttcctgcctagcctctgtgagcctctg

SEQ ID NO: 246553 - DNA, 33 bp, Homo sapien
tgttcagttttctgtcaatggacatctgggttg

SEQ ID NO: 246554 - DNA, 33 bp, Homo sapien
tgttcagttttctgtcgatggacatctgggttg

SEQ ID NO: 246555 - DNA, 33 bp, Homo sapien
gagggaaccagaggggccacctaacgtccgtgt

SEQ ID NO: 246556 - DNA, 33 bp, Homo sapien
gagggaaccagagggggcacctaacgtccgtgt

SEQ ID NO: 246557 - DNA, 33 bp, Homo sapien
ctactgggacctagacaatgtgagatcatctgt

SEQ ID NO: 246558 - DNA, 33 bp, Homo sapien
ctactgggacctagacgatgtgagatcatctgt

SEQ ID NO: 246559 - DNA, 33 bp, Homo sapien
gttttcgacactggaccggaagaacaagtctat

SEQ ID NO: 246560 - DNA, 33 bp, Homo sapien
gttttcgacactggactggaagaacaagtctat

SEQ ID NO: 246561 - DNA, 33 bp, Homo sapien
gagaagcatattagcactgacctaaatggccat

SEQ ID NO: 246562 - DNA, 33 bp, Homo sapien
gagaagcatattagcagtgacctaaatggccat

SEQ ID NO: 246563 - DNA, 33 bp, Homo sapien
cacaggggaaatcaccacactataattctgtgt

SEQ ID NO: 246564 - DNA, 33 bp, Homo sapien
cacaggggaaatcaccgcactataattctgtgt

SEQ ID NO: 246565 - DNA, 33 bp, Homo sapien
ctggcattcctttagcgccctaccttgctggct

SEQ ID NO: 246566 - DNA, 33 bp, Homo sapien
ctggcattcctttagctccctaccttgctggct

SEQ ID NO: 246567 - DNA, 33 bp, Homo sapien
agatttcatccccaataacatcctttatgaaca

SEQ ID NO: 246568 - DNA, 33 bp, Homo sapien
agatttcatccccaatgacatcctttatgaaca

SEQ ID NO: 246569 - DNA, 33 bp, Homo sapien
tctaaaattagatagtcgttatggcctcacaac

SEQ ID NO: 246570 - DNA, 33 bp, Homo sapien
tctaaaattagatagtggttatggcctcacaac

SEQ ID NO: 246571 - DNA, 33 bp, Homo sapien
tcctcatctgaaggtacgaagaagagctgggcc

SEQ ID NO: 246572 - DNA, 33 bp, Homo sapien
tcctcatctgaaggtatgaagaagagctgggcc

SEQ ID NO: 246573 - DNA, 33 bp, Homo sapien
tttctgctgccacgtcaagggtttatttttgag

SEQ ID NO: 246574 - DNA, 33 bp, Homo sapien
tttctgctgccacgtcgagggtttatttttgag

SEQ ID NO: 246575 - DNA, 33 bp, Homo sapien
aatccacaactaaatacctctcgttcagacatt

SEQ ID NO: 246576 - DNA, 33 bp, Homo sapien
aatccacaactaaatagctctcgttcagacatt

SEQ ID NO: 246577 - DNA, 33 bp, Homo sapien
gggcatgctcactgccacagtgtccttgtcttc

SEQ ID NO: 246578 - DNA, 33 bp, Homo sapien
gggcatgctcactgccgcagtgtccttgtcttc

SEQ ID NO: 246579 - DNA, 33 bp, Homo sapien
ccaactctgcaaaacactatcattcataactgg

SEQ ID NO: 246580 - DNA, 33 bp, Homo sapien
ccaactctgcaaaacattatcattcataactgg

SEQ ID NO: 246581 - DNA, 33 bp, Homo sapien
gctctctccaaggaccaacaggatcgctctgcc

SEQ ID NO: 246582 - DNA, 33 bp, Homo sapien
gctctctccaaggaccgacaggatcgctctgcc

SEQ ID NO: 246583 - DNA, 33 bp, Homo sapien
cataggtacctgataaacatcatcacatttagt

SEQ ID NO: 246584 - DNA, 33 bp, Homo sapien
cataggtacctgataagcatcatcacatttagt

SEQ ID NO: 246585 - DNA, 33 bp, Homo sapien
gctccatgagcgtagacatcttgcccgtcctgt

SEQ ID NO: 246586 - DNA, 33 bp, Homo sapien
gctccatgagcgtagagatcttgcccgtcctgt

SEQ ID NO: 246587 - DNA, 33 bp, Homo sapien
cttactctagctgccacgttactgaatatattc

SEQ ID NO: 246588 - DNA, 33 bp, Homo sapien
cttactctagctgccatgttactgaatatattc

SEQ ID NO: 246589 - DNA, 33 bp, Homo sapien
gaagtatgaaatgaagccacaattgtttattag

SEQ ID NO: 246590 - DNA, 33 bp, Homo sapien
gaagtatgaaatgaaggcacaattgtttattag

SEQ ID NO: 246591 - DNA, 33 bp, Homo sapien
aaaaggctttagagtaacctggccttaacaagt

SEQ ID NO: 246592 - DNA, 33 bp, Homo sapien
aaaaggctttagagtagcctggccttaacaagt

SEQ ID NO: 246593 - DNA, 33 bp, Homo sapien
gaggagtcagttaatacgtgtaaaagttttaga

SEQ ID NO: 246594 - DNA, 33 bp, Homo sapien
gaggagtcagttaatatgtgtaaaagttttaga

SEQ ID NO: 246595 - DNA, 33 bp, Homo sapien
ttaaaatgtaacactaactaaatatcacctacc

SEQ ID NO: 246596 - DNA, 33 bp, Homo sapien
ttaaaatgtaacactagctaaatatcacctacc

SEQ ID NO: 246597 - DNA, 33 bp, Homo sapien
ccgaagggccttttaaatctaaggagctttgtc

SEQ ID NO: 246598 - DNA, 33 bp, Homo sapien
ccgaagggccttttaagtctaaggagctttgtc

SEQ ID NO: 246599 - DNA, 33 bp, Homo sapien
agcagattggaggcacagtcttgtaccaacaaa

SEQ ID NO: 246600 - DNA, 33 bp, Homo sapien
agcagattggaggcacggtcttgtaccaacaaa

SEQ ID NO: 246601 - DNA, 33 bp, Homo sapien
ggagagactctgaggcccagcaactattgtcac

SEQ ID NO: 246602 - DNA, 33 bp, Homo sapien
ggagagactctgaggcgcagcaactattgtcac

SEQ ID NO: 246603 - DNA, 33 bp, Homo sapien
acagataagcaaaatactaaacaattgctgttc

SEQ ID NO: 246604 - DNA, 33 bp, Homo sapien
acagataagcaaaatattaaacaattgctgttc

SEQ ID NO: 246605 - DNA, 33 bp, Homo sapien
aatgggtatagagagacagtccctggtgagtag

SEQ ID NO: 246606 - DNA, 33 bp, Homo sapien
aatgggtatagagagatagtccctggtgagtag

SEQ ID NO: 246607 - DNA, 33 bp, Homo sapien
agagagtgatttataaacaccaatatcaacttc

SEQ ID NO: 246608 - DNA, 33 bp, Homo sapien
agagagtgatttataagcaccaatatcaacttc

SEQ ID NO: 246609 - DNA, 33 bp, Homo sapien
atttctctgtggttcacggcaagactgcatggt

SEQ ID NO: 246610 - DNA, 33 bp, Homo sapien
atttctctgtggttcatggcaagactgcatggt

SEQ ID NO: 246611 - DNA, 33 bp, Homo sapien
catagatggcacagacgggggcttttcagccca

SEQ ID NO: 246612 - DNA, 33 bp, Homo sapien
catagatggcacagactggggcttttcagccca

SEQ ID NO: 246613 - DNA, 33 bp, Homo sapien
tcatggctgtgataacggtcattattttgttcc

SEQ ID NO: 246614 - DNA, 33 bp, Homo sapien
tcatggctgtgataactgtcattattttgttcc

SEQ ID NO: 246615 - DNA, 33 bp, Homo sapien
tgggtgatggctggaaatccctgcgttccttgg

SEQ ID NO: 246616 - DNA, 33 bp, Homo sapien
tgggtgatggctggaagtccctgcgttccttgg

SEQ ID NO: 246617 - DNA, 33 bp, Homo sapien
gatttcagacttaacaacttctagaattgtgag

SEQ ID NO: 246618 - DNA, 33 bp, Homo sapien
gatttcagacttaacagcttctagaattgtgag

SEQ ID NO: 246619 - DNA, 33 bp, Homo sapien
gagtgtctagagtgaaggaggtaatagtcctat

SEQ ID NO: 246620 - DNA, 33 bp, Homo sapien
gagtgtctagagtgaatgaggtaatagtcctat

SEQ ID NO: 246621 - DNA, 33 bp, Homo sapien
aggaaaaactagcccacagccagagatggtacc

SEQ ID NO: 246622 - DNA, 33 bp, Homo sapien
aggaaaaactagcccatagccagagatggtacc

SEQ ID NO: 246623 - DNA, 33 bp, Homo sapien
atgaaagtcctagagacgtgtgtaccttacagt

SEQ ID NO: 246624 - DNA, 33 bp, Homo sapien
atgaaagtcctagagaggtgtgtaccttacagt

SEQ ID NO: 246625 - DNA, 33 bp, Homo sapien
aatacagccgtggcaccgatctcagaggcataa

SEQ ID NO: 246626 - DNA, 33 bp, Homo sapien
aatacagccgtggcacggatctcagaggcataa

SEQ ID NO: 246627 - DNA, 33 bp, Homo sapien
gcacccccatcacacacacttcaatctaagcca

SEQ ID NO: 246628 - DNA, 33 bp, Homo sapien
gcacccccatcacacagacttcaatctaagcca

SEQ ID NO: 246629 - DNA, 33 bp, Homo sapien
ctcgtgtgccatccatcaagtgcaagatggctg

SEQ ID NO: 246630 - DNA, 33 bp, Homo sapien
ctcgtgtgccatccattaagtgcaagatggctg

SEQ ID NO: 246631 - DNA, 33 bp, Homo sapien
ggagctatctgggcccaagagcctttcataaag

SEQ ID NO: 246632 - DNA, 33 bp, Homo sapien
ggagctatctgggcccgagagcctttcataaag

SEQ ID NO: 246633 - DNA, 33 bp, Homo sapien
gctatcagaccttgaactggctgacatttgaaa

SEQ ID NO: 246634 - DNA, 33 bp, Homo sapien
gctatcagaccttgaattggctgacatttgaaa

SEQ ID NO: 246635 - DNA, 33 bp, Homo sapien
gggaaagtggacctcaacttacccaacattggt

SEQ ID NO: 246636 - DNA, 33 bp, Homo sapien
gggaaagtggacctcagcttacccaacattggt

SEQ ID NO: 246637 - DNA, 33 bp, Homo sapien
acagctgttccatctcaattacaaagctctgaa

SEQ ID NO: 246638 - DNA, 33 bp, Homo sapien
acagctgttccatctcgattacaaagctctgaa

SEQ ID NO: 246639 - DNA, 33 bp, Homo sapien
tacttaaccagtgcccaaagtttcctaacacac

SEQ ID NO: 246640 - DNA, 33 bp, Homo sapien
tacttaaccagtgcccgaagtttcctaacacac

SEQ ID NO: 246641 - DNA, 33 bp, Homo sapien
acaagtccactctgaacctctccagctacggag

SEQ ID NO: 246642 - DNA, 33 bp, Homo sapien
acaagtccactctgaatctctccagctacggag

SEQ ID NO: 246643 - DNA, 33 bp, Homo sapien
tctgagcattcttaagacactctagcgaggcca

SEQ ID NO: 246644 - DNA, 33 bp, Homo sapien
tctgagcattcttaagtcactctagcgaggcca

SEQ ID NO: 246645 - DNA, 33 bp, Homo sapien
cgcccagcctgagctacgttttagatgtgcatt

SEQ ID NO: 246646 - DNA, 33 bp, Homo sapien
cgcccagcctgagctatgttttagatgtgcatt

SEQ ID NO: 246647 - DNA, 33 bp, Homo sapien
actcctcccataaaacacttctccaaatttctg

SEQ ID NO: 246648 - DNA, 33 bp, Homo sapien
actcctcccataaaacgcttctccaaatttctg

SEQ ID NO: 246649 - DNA, 33 bp, Homo sapien
caacaagctgaatgcaaaagcacatatgagaat

SEQ ID NO: 246650 - DNA, 33 bp, Homo sapien
caacaagctgaatgcagaagcacatatgagaat

SEQ ID NO: 246651 - DNA, 33 bp, Homo sapien
tttgcaaaaatgttaaacaataaatgaattccc

SEQ ID NO: 246652 - DNA, 33 bp, Homo sapien
tttgcaaaaatgttaagcaataaatgaattccc

SEQ ID NO: 246653 - DNA, 33 bp, Homo sapien
aatagatgagtggaagaatgggtatgaggtgag

SEQ ID NO: 246654 - DNA, 33 bp, Homo sapien
aatagatgagtggaaggatgggtatgaggtgag

SEQ ID NO: 246655 - DNA, 33 bp, Homo sapien
ctgcctctgtgatcacacggtgttttcctctct

SEQ ID NO: 246656 - DNA, 33 bp, Homo sapien
ctgcctctgtgatcacccggtgttttcctctct

SEQ ID NO: 246657 - DNA, 33 bp, Homo sapien
ggccaactctgaggacagcactccaaagggtgg

SEQ ID NO: 246658 - DNA, 33 bp, Homo sapien
ggccaactctgaggacggcactccaaagggtgg

SEQ ID NO: 246659 - DNA, 33 bp, Homo sapien
tgaatgactattgatacggtatggatgtgtccc

SEQ ID NO: 246660 - DNA, 33 bp, Homo sapien
tgaatgactattgatatggtatggatgtgtccc

SEQ ID NO: 246661 - DNA, 33 bp, Homo sapien
tgaagctgctgctaaccgagaagaggaagactc

SEQ ID NO: 246662 - DNA, 33 bp, Homo sapien
tgaagctgctgctaactgagaagaggaagactc

SEQ ID NO: 246663 - DNA, 33 bp, Homo sapien
tgtagataggaggtaacactgacaggactggct

SEQ ID NO: 246664 - DNA, 33 bp, Homo sapien
tgtagataggaggtaatactgacaggactggct

SEQ ID NO: 246665 - DNA, 33 bp, Homo sapien
ttcatttatataaatgaatagaataggcgtatc

SEQ ID NO: 246666 - DNA, 33 bp, Homo sapien
ttcatttatataaatggatagaataggcgtatc

SEQ ID NO: 246667 - DNA, 33 bp, Homo sapien
cctctctgttatctccaagacgaccatctctca

SEQ ID NO: 246668 - DNA, 33 bp, Homo sapien
cctctctgttatctccgagacgaccatctctca

SEQ ID NO: 246669 - DNA, 33 bp, Homo sapien
tgaacatgccagggtacggtagatgtctcctaa

SEQ ID NO: 246670 - DNA, 33 bp, Homo sapien
tgaacatgccagggtatggtagatgtctcctaa

SEQ ID NO: 246671 - DNA, 33 bp, Homo sapien
gcacccgtcagggtaacggactgtgcttgtctt

SEQ ID NO: 246672 - DNA, 33 bp, Homo sapien
gcacccgtcagggtaatggactgtgcttgtctt

SEQ ID NO: 246673 - DNA, 33 bp, Homo sapien
catctccaaaataaatcacttgctttccagtcc

SEQ ID NO: 246674 - DNA, 33 bp, Homo sapien
catctccaaaataaatgacttgctttccagtcc

SEQ ID NO: 246675 - DNA, 33 bp, Homo sapien
atttgattccacgcagaataaagtcacatgtga

SEQ ID NO: 246676 - DNA, 33 bp, Homo sapien
atttgattccacgcaggataaagtcacatgtga

SEQ ID NO: 246677 - DNA, 33 bp, Homo sapien
cctggaattccagcaacgctcacagaggaacgg

SEQ ID NO: 246678 - DNA, 33 bp, Homo sapien
cctggaattccagcaatgctcacagaggaacgg

SEQ ID NO: 246679 - DNA, 33 bp, Homo sapien
cccttttgactctaatcaggccgggtctgtgag

SEQ ID NO: 246680 - DNA, 33 bp, Homo sapien
cccttttgactctaatgaggccgggtctgtgag

SEQ ID NO: 246681 - DNA, 33 bp, Homo sapien
ctatcagggagatctgcattcacaggtaagagg

SEQ ID NO: 246682 - DNA, 33 bp, Homo sapien
ctatcagggagatctggattcacaggtaagagg

SEQ ID NO: 246683 - DNA, 33 bp, Homo sapien
tcctgctaccgcacacactgtcccctgaaccag

SEQ ID NO: 246684 - DNA, 33 bp, Homo sapien
tcctgctaccgcacacgctgtcccctgaaccag

SEQ ID NO: 246685 - DNA, 33 bp, Homo sapien
gatctagcagaacccagcgaggagagtgtcatg

SEQ ID NO: 246686 - DNA, 33 bp, Homo sapien
gatctagcagaacccatcgaggagagtgtcatg

SEQ ID NO: 246687 - DNA, 33 bp, Homo sapien
ctctctcttctccaggccactgaagatctttgt

SEQ ID NO: 246688 - DNA, 33 bp, Homo sapien
ctctctcttctccaggtcactgaagatctttgt

SEQ ID NO: 246689 - DNA, 33 bp, Homo sapien
aactcccccaaacacacataaagggcttagcac

SEQ ID NO: 246690 - DNA, 33 bp, Homo sapien
aactcccccaaacacatataaagggcttagcac

SEQ ID NO: 246691 - DNA, 33 bp, Homo sapien
cctccataaaggttaacgcttatttctccttca

SEQ ID NO: 246692 - DNA, 33 bp, Homo sapien
cctccataaaggttaaggcttatttctccttca

SEQ ID NO: 246693 - DNA, 33 bp, Homo sapien
ctccctgtttatgtaacgcctgaactttgcaca

SEQ ID NO: 246694 - DNA, 33 bp, Homo sapien
ctccctgtttatgtaatgcctgaactttgcaca

SEQ ID NO: 246695 - DNA, 33 bp, Homo sapien
caccaggagcaaatccgcttcctctcggagcct

SEQ ID NO: 246696 - DNA, 33 bp, Homo sapien
caccaggagcaaatcctcttcctctcggagcct

SEQ ID NO: 246697 - DNA, 33 bp, Homo sapien
gacttgaagaatccccagcttgagagatcagga

SEQ ID NO: 246698 - DNA, 33 bp, Homo sapien
gacttgaagaatccccggcttgagagatcagga

SEQ ID NO: 246699 - DNA, 33 bp, Homo sapien
tagctgtgacagccaaacatgtctctacacaca

SEQ ID NO: 246700 - DNA, 33 bp, Homo sapien
tagctgtgacagccaatcatgtctctacacaca

SEQ ID NO: 246701 - DNA, 33 bp, Homo sapien
gtgccccgtgcagtgacagccgctttcctgcag

SEQ ID NO: 246702 - DNA, 33 bp, Homo sapien
gtgccccgtgcagtgagagccgctttcctgcag

SEQ ID NO: 246703 - DNA, 33 bp, Homo sapien
atgctggagagaaagcactctggtccctgggca

SEQ ID NO: 246704 - DNA, 33 bp, Homo sapien
atgctggagagaaagcgctctggtccctgggca

SEQ ID NO: 246705 - DNA, 33 bp, Homo sapien
catttgcaaaaaggaccgtagtagatgctactg

SEQ ID NO: 246706 - DNA, 33 bp, Homo sapien
catttgcaaaaaggactgtagtagatgctactg

SEQ ID NO: 246707 - DNA, 33 bp, Homo sapien
aatgaacccaccatccaagtctctgcttccccc

SEQ ID NO: 246708 - DNA, 33 bp, Homo sapien
aatgaacccaccatccgagtctctgcttccccc

SEQ ID NO: 246709 - DNA, 33 bp, Homo sapien
ttcttggaaccctaagaccaccatgtggacaag

SEQ ID NO: 246710 - DNA, 33 bp, Homo sapien
ttcttggaaccctaaggccaccatgtggacaag

SEQ ID NO: 246711 - DNA, 33 bp, Homo sapien
taaaagtacagaacgacgttcacaaaatactgc

SEQ ID NO: 246712 - DNA, 33 bp, Homo sapien
taaaagtacagaacgatgttcacaaaatactgc

SEQ ID NO: 246713 - DNA, 33 bp, Homo sapien
cccattcctgcagagcaaagcccaaatgcatgt

SEQ ID NO: 246714 - DNA, 33 bp, Homo sapien
cccattcctgcagagccaagcccaaatgcatgt

SEQ ID NO: 246715 - DNA, 33 bp, Homo sapien
tggctgctgttggaatcatcagtatcagtgtac

SEQ ID NO: 246716 - DNA, 33 bp, Homo sapien
tggctgctgttggaatgatcagtatcagtgtac

SEQ ID NO: 246717 - DNA, 33 bp, Homo sapien
aaaagaaaatttcacaacagctttattaagata

SEQ ID NO: 246718 - DNA, 33 bp, Homo sapien
aaaagaaaatttcacagcagctttattaagata

SEQ ID NO: 246719 - DNA, 33 bp, Homo sapien
ccctactcacaggagcaatgacttcccctgttc

SEQ ID NO: 246720 - DNA, 33 bp, Homo sapien
ccctactcacaggagcgatgacttcccctgttc

SEQ ID NO: 246721 - DNA, 33 bp, Homo sapien
tattatatgatgctccaacatattataacccac

SEQ ID NO: 246722 - DNA, 33 bp, Homo sapien
tattatatgatgctccgacatattataacccac

SEQ ID NO: 246723 - DNA, 33 bp, Homo sapien
ccctggattctttgcccgcacccctggcgcagc

SEQ ID NO: 246724 - DNA, 33 bp, Homo sapien
ccctggattctttgcctgcacccctggcgcagc

SEQ ID NO: 246725 - DNA, 33 bp, Homo sapien
cagtgctggaagagaacaccttccagggctaac

SEQ ID NO: 246726 - DNA, 33 bp, Homo sapien
cagtgctggaagagaataccttccagggctaac

SEQ ID NO: 246727 - DNA, 33 bp, Homo sapien
ctgggctgtagaaaccaaagggcctgaacctgg

SEQ ID NO: 246728 - DNA, 33 bp, Homo sapien
ctgggctgtagaaaccgaagggcctgaacctgg

SEQ ID NO: 246729 - DNA, 33 bp, Homo sapien
cgtgccggatacctagaaggccacattccacag

SEQ ID NO: 246730 - DNA, 33 bp, Homo sapien
cgtgccggatacctaggaggccacattccacag

SEQ ID NO: 246731 - DNA, 33 bp, Homo sapien
tgggaactaccacccccaacaagccttctttgc

SEQ ID NO: 246732 - DNA, 33 bp, Homo sapien
tgggaactaccacccctaacaagccttctttgc

SEQ ID NO: 246733 - DNA, 33 bp, Homo sapien
tcttgaggaggtgagaaagttggctcgtcgcga

SEQ ID NO: 246734 - DNA, 33 bp, Homo sapien
tcttgaggaggtgagagagttggctcgtcgcga

SEQ ID NO: 246735 - DNA, 33 bp, Homo sapien
cagacaggtccgggaaaaaagacactgagaggc

SEQ ID NO: 246736 - DNA, 33 bp, Homo sapien
cagacaggtccgggaacaaagacactgagaggc

SEQ ID NO: 246737 - DNA, 33 bp, Homo sapien
atgccatctatcctgccagttgattatgcctta

SEQ ID NO: 246738 - DNA, 33 bp, Homo sapien
atgccatctatcctgctagttgattatgcctta

SEQ ID NO: 246739 - DNA, 33 bp, Homo sapien
atggccacgtcattccaccggggaacttgtttg

SEQ ID NO: 246740 - DNA, 33 bp, Homo sapien
atggccacgtcattccgccggggaacttgtttg

SEQ ID NO: 246741 - DNA, 33 bp, Homo sapien
tgaagggtacaacacaatgtcagggagtaggtg

SEQ ID NO: 246742 - DNA, 33 bp, Homo sapien
tgaagggtacaacacagtgtcagggagtaggtg

SEQ ID NO: 246743 - DNA, 33 bp, Homo sapien
caagatgacaagaaaacatcaagagataggagc

SEQ ID NO: 246744 - DNA, 33 bp, Homo sapien
caagatgacaagaaaatatcaagagataggagc

SEQ ID NO: 246745 - DNA, 33 bp, Homo sapien
gggaatataactgcaacaatattgaagaagtta

SEQ ID NO: 246746 - DNA, 33 bp, Homo sapien
gggaatataactgcaagaatattgaagaagtta

SEQ ID NO: 246747 - DNA, 33 bp, Homo sapien
acgggttacaagcacactcactttgctcaggac

SEQ ID NO: 246748 - DNA, 33 bp, Homo sapien
acgggttacaagcacattcactttgctcaggac

SEQ ID NO: 246749 - DNA, 33 bp, Homo sapien
tgatcttcctgctataaacttctagcagccaaa

SEQ ID NO: 246750 - DNA, 33 bp, Homo sapien
tgatcttcctgctatagacttctagcagccaaa

SEQ ID NO: 246751 - DNA, 33 bp, Homo sapien
gtcttgtaagcctttccctcgttcactcttgtt

SEQ ID NO: 246752 - DNA, 33 bp, Homo sapien
gtcttgtaagcctttctctcgttcactcttgtt

SEQ ID NO: 246753 - DNA, 33 bp, Homo sapien
gattttatctgttcaaccaggaataaggaagtt

SEQ ID NO: 246754 - DNA, 33 bp, Homo sapien
gattttatctgttcaagcaggaataaggaagtt

SEQ ID NO: 246755 - DNA, 33 bp, Homo sapien
gaagaaagtatttgcaaaagtctgtcaatagtc

SEQ ID NO: 246756 - DNA, 33 bp, Homo sapien
gaagaaagtatttgcagaagtctgtcaatagtc

SEQ ID NO: 246757 - DNA, 33 bp, Homo sapien
gctattaattaatgaacgtgcagaaatgagttt

SEQ ID NO: 246758 - DNA, 33 bp, Homo sapien
gctattaattaatgaatgtgcagaaatgagttt

SEQ ID NO: 246759 - DNA, 33 bp, Homo sapien
ccgccagatggcaaaaaatgactgaagtttggt

SEQ ID NO: 246760 - DNA, 33 bp, Homo sapien
ccgccagatggcaaaagatgactgaagtttggt

SEQ ID NO: 246761 - DNA, 33 bp, Homo sapien
gtcctttgaaacaaggaataatttcatacttgg

SEQ ID NO: 246762 - DNA, 33 bp, Homo sapien
gtcctttgaaacaagggataatttcatacttgg

SEQ ID NO: 246763 - DNA, 33 bp, Homo sapien
aaatgtgcttgacagacatttcaagtacaaaaa

SEQ ID NO: 246764 - DNA, 33 bp, Homo sapien
aaatgtgcttgacagatatttcaagtacaaaaa

SEQ ID NO: 246765 - DNA, 33 bp, Homo sapien
cattatcaggatttcgcaaccagtggtaagaat

SEQ ID NO: 246766 - DNA, 33 bp, Homo sapien
cattatcaggatttcggaaccagtggtaagaat

SEQ ID NO: 246767 - DNA, 33 bp, Homo sapien
taatcactgatagtcccagttaaacacaactgt

SEQ ID NO: 246768 - DNA, 33 bp, Homo sapien
taatcactgatagtcctagttaaacacaactgt

SEQ ID NO: 246769 - DNA, 33 bp, Homo sapien
tttctagaatatgcccaaatgatgtctgtcgca

SEQ ID NO: 246770 - DNA, 33 bp, Homo sapien
tttctagaatatgcccgaatgatgtctgtcgca

SEQ ID NO: 246771 - DNA, 33 bp, Homo sapien
gtcaaaccctcttgtaaataaccatcgcacaac

SEQ ID NO: 246772 - DNA, 33 bp, Homo sapien
gtcaaaccctcttgtatataaccatcgcacaac

SEQ ID NO: 246773 - DNA, 33 bp, Homo sapien
agtccacgagcacagcaattttgttcttgctct

SEQ ID NO: 246774 - DNA, 33 bp, Homo sapien
agtccacgagcacagcgattttgttcttgctct

SEQ ID NO: 246775 - DNA, 33 bp, Homo sapien
gccctcatatcccttacctcatgactaacccag

SEQ ID NO: 246776 - DNA, 33 bp, Homo sapien
gccctcatatcccttagctcatgactaacccag

SEQ ID NO: 246777 - DNA, 33 bp, Homo sapien
aaaggatctcaggcaaacaattaaacaccgcct

SEQ ID NO: 246778 - DNA, 33 bp, Homo sapien
aaaggatctcaggcaagcaattaaacaccgcct

SEQ ID NO: 246779 - DNA, 33 bp, Homo sapien
agctctctatgtagcaagaaatccttacattct

SEQ ID NO: 246780 - DNA, 33 bp, Homo sapien
agctctctatgtagcatgaaatccttacattct

SEQ ID NO: 246781 - DNA, 33 bp, Homo sapien
aagtgggatgagtgtcaagaagattcaaaatag

SEQ ID NO: 246782 - DNA, 33 bp, Homo sapien
aagtgggatgagtgtcgagaagattcaaaatag

SEQ ID NO: 246783 - DNA, 33 bp, Homo sapien
caagggagttaggcacaagatgagatagaacca

SEQ ID NO: 246784 - DNA, 33 bp, Homo sapien
caagggagttaggcacgagatgagatagaacca

SEQ ID NO: 246785 - DNA, 33 bp, Homo sapien
cacatgaaacaattaccaaaacagaccgtatgc

SEQ ID NO: 246786 - DNA, 33 bp, Homo sapien
cacatgaaacaattacgaaaacagaccgtatgc

SEQ ID NO: 246787 - DNA, 33 bp, Homo sapien
cgaaccatgatccccaatgatccactttaggga

SEQ ID NO: 246788 - DNA, 33 bp, Homo sapien
cgaaccatgatccccagtgatccactttaggga

SEQ ID NO: 246789 - DNA, 33 bp, Homo sapien
gctatcactaaactccactgatggttgaagaga

SEQ ID NO: 246790 - DNA, 33 bp, Homo sapien
gctatcactaaactcccctgatggttgaagaga

SEQ ID NO: 246791 - DNA, 33 bp, Homo sapien
aataatggacagcattcaacttctgtgcacact

SEQ ID NO: 246792 - DNA, 33 bp, Homo sapien
aataatggacagcatttaacttctgtgcacact

SEQ ID NO: 246793 - DNA, 33 bp, Homo sapien
cttattctgatggaccccatctcttcttgctac

SEQ ID NO: 246794 - DNA, 33 bp, Homo sapien
cttattctgatggacctcatctcttcttgctac

SEQ ID NO: 246795 - DNA, 33 bp, Homo sapien
tgatagaaaaaccaatcaggacttcaggtaggg

SEQ ID NO: 246796 - DNA, 33 bp, Homo sapien
tgatagaaaaaccaattaggacttcaggtaggg

SEQ ID NO: 246797 - DNA, 33 bp, Homo sapien
gaacaagataatccaacagaaaagtaggcaaaa

SEQ ID NO: 246798 - DNA, 33 bp, Homo sapien
gaacaagataatccaatagaaaagtaggcaaaa

SEQ ID NO: 246799 - DNA, 33 bp, Homo sapien
taactggtagaagaaaagttgagactgggcaca

SEQ ID NO: 246800 - DNA, 33 bp, Homo sapien
taactggtagaagaaaggttgagactgggcaca

SEQ ID NO: 246801 - DNA, 33 bp, Homo sapien
aataatataccatgccaacattaacagtgattc

SEQ ID NO: 246802 - DNA, 33 bp, Homo sapien
aataatataccatgccgacattaacagtgattc

SEQ ID NO: 246803 - DNA, 33 bp, Homo sapien
atctgactcagaagagaacccttcctccctcct

SEQ ID NO: 246804 - DNA, 33 bp, Homo sapien
atctgactcagaagaggacccttcctccctcct

SEQ ID NO: 246805 - DNA, 33 bp, Homo sapien
aaatgcattgtgaaaagaaacgacttaaagctg

SEQ ID NO: 246806 - DNA, 33 bp, Homo sapien
aaatgcattgtgaaaataaacgacttaaagctg

SEQ ID NO: 246807 - DNA, 33 bp, Homo sapien
ctttaatactgctgtcaactctagaggttggag

SEQ ID NO: 246808 - DNA, 33 bp, Homo sapien
ctttaatactgctgtccactctagaggttggag

SEQ ID NO: 246809 - DNA, 33 bp, Homo sapien
tcaaaggactgtgagaataagaaaatgtggagt

SEQ ID NO: 246810 - DNA, 33 bp, Homo sapien
tcaaaggactgtgagagtaagaaaatgtggagt

SEQ ID NO: 246811 - DNA, 33 bp, Homo sapien
cacgcctcccacgcgggatggacacccactggc

SEQ ID NO: 246812 - DNA, 33 bp, Homo sapien
cacgcctcccacgcggtatggacacccactggc

SEQ ID NO: 246813 - DNA, 33 bp, Homo sapien
tgctgtatgtgtctgacgtctttgaatcctctt

SEQ ID NO: 246814 - DNA, 33 bp, Homo sapien
tgctgtatgtgtctgatgtctttgaatcctctt

SEQ ID NO: 246815 - DNA, 33 bp, Homo sapien
gaggcaacattgctaaaaaggggcaaaaatcag

SEQ ID NO: 246816 - DNA, 33 bp, Homo sapien
gaggcaacattgctaacaaggggcaaaaatcag

SEQ ID NO: 246817 - DNA, 33 bp, Homo sapien
tcccttctgaggaggactaataactgcacatct

SEQ ID NO: 246818 - DNA, 33 bp, Homo sapien
tcccttctgaggaggagtaataactgcacatct

SEQ ID NO: 246819 - DNA, 33 bp, Homo sapien
gctttcttttcatttacctaatttcatcaattg

SEQ ID NO: 246820 - DNA, 33 bp, Homo sapien
gctttcttttcatttatctaatttcatcaattg

SEQ ID NO: 246821 - DNA, 33 bp, Homo sapien
aattgccaagataatgacaggttaattttcaga

SEQ ID NO: 246822 - DNA, 33 bp, Homo sapien
aattgccaagataatggcaggttaattttcaga

SEQ ID NO: 246823 - DNA, 33 bp, Homo sapien
ttccctgcctcatgaaatcttgttccacacaca

SEQ ID NO: 246824 - DNA, 33 bp, Homo sapien
ttccctgcctcatgaactcttgttccacacaca

SEQ ID NO: 246825 - DNA, 33 bp, Homo sapien
tcagctgtagctccaacggacttgttgtcatcc

SEQ ID NO: 246826 - DNA, 33 bp, Homo sapien
tcagctgtagctccaatggacttgttgtcatcc

SEQ ID NO: 246827 - DNA, 33 bp, Homo sapien
actcttctgaagctcacacgttggcaaggatga

SEQ ID NO: 246828 - DNA, 33 bp, Homo sapien
actcttctgaagctcagacgttggcaaggatga

SEQ ID NO: 246829 - DNA, 33 bp, Homo sapien
cattgtcaaactctccacaataattgggcgcag

SEQ ID NO: 246830 - DNA, 33 bp, Homo sapien
cattgtcaaactctccgcaataattgggcgcag

SEQ ID NO: 246831 - DNA, 33 bp, Homo sapien
gttgacctgagagattaaaatatgaaggagata

SEQ ID NO: 246832 - DNA, 33 bp, Homo sapien
gttgacctgagagattgaaatatgaaggagata

SEQ ID NO: 246833 - DNA, 33 bp, Homo sapien
aggtcacctacgcagacgctcttcatgtgacct

SEQ ID NO: 246834 - DNA, 33 bp, Homo sapien
aggtcacctacgcagatgctcttcatgtgacct

SEQ ID NO: 246835 - DNA, 33 bp, Homo sapien
agttgtcccgtgggaacctgaaacagtgacagt

SEQ ID NO: 246836 - DNA, 33 bp, Homo sapien
agttgtcccgtgggaatctgaaacagtgacagt

SEQ ID NO: 246837 - DNA, 33 bp, Homo sapien
tcacttggtagctgtcccagttatcagatcaaa

SEQ ID NO: 246838 - DNA, 33 bp, Homo sapien
tcacttggtagctgtctcagttatcagatcaaa

SEQ ID NO: 246839 - DNA, 33 bp, Homo sapien
ggcactcatttagggccaccaaccataaattcg

SEQ ID NO: 246840 - DNA, 33 bp, Homo sapien
ggcactcatttagggcgaccaaccataaattcg

SEQ ID NO: 246841 - DNA, 33 bp, Homo sapien
ctggtgataagtcaaaccaatgtgggcatggat

SEQ ID NO: 246842 - DNA, 33 bp, Homo sapien
ctggtgataagtcaaatcaatgtgggcatggat

SEQ ID NO: 246843 - DNA, 33 bp, Homo sapien
tgctgacagtagatcacatgaggcatcctaagg

SEQ ID NO: 246844 - DNA, 33 bp, Homo sapien
tgctgacagtagatcatatgaggcatcctaagg

SEQ ID NO: 246845 - DNA, 33 bp, Homo sapien
gctggaactaaagcacaagcccaggaagaagat

SEQ ID NO: 246846 - DNA, 33 bp, Homo sapien
gctggaactaaagcacgagcccaggaagaagat

SEQ ID NO: 246847 - DNA, 33 bp, Homo sapien
ttgtccttccgtttccaacattctagatttttg

SEQ ID NO: 246848 - DNA, 33 bp, Homo sapien
ttgtccttccgtttccgacattctagatttttg

SEQ ID NO: 246849 - DNA, 33 bp, Homo sapien
cacatcctcatacaaccacctctaaaggaagca

SEQ ID NO: 246850 - DNA, 33 bp, Homo sapien
cacatcctcatacaactacctctaaaggaagca

SEQ ID NO: 246851 - DNA, 33 bp, Homo sapien
tataaagcacttccaacagatctagtacgtaat

SEQ ID NO: 246852 - DNA, 33 bp, Homo sapien
tataaagcacttccaatagatctagtacgtaat

SEQ ID NO: 246853 - DNA, 33 bp, Homo sapien
aaagatccagatgcaaatgattaattcgggaaa

SEQ ID NO: 246854 - DNA, 33 bp, Homo sapien
aaagatccagatgcaagtgattaattcgggaaa

SEQ ID NO: 246855 - DNA, 33 bp, Homo sapien
gagatcaaggctaacaaacgatggagggaggag

SEQ ID NO: 246856 - DNA, 33 bp, Homo sapien
gagatcaaggctaacacacgatggagggaggag

SEQ ID NO: 246857 - DNA, 33 bp, Homo sapien
acaagacaggtccccacatctacttgtagaaga

SEQ ID NO: 246858 - DNA, 33 bp, Homo sapien
acaagacaggtccccagatctacttgtagaaga

SEQ ID NO: 246859 - DNA, 33 bp, Homo sapien
caggcagagaagaaaaattggaggttgggggcg

SEQ ID NO: 246860 - DNA, 33 bp, Homo sapien
caggcagagaagaaaagttggaggttgggggcg

SEQ ID NO: 246861 - DNA, 33 bp, Homo sapien
tcataggcaggatttacggcactttgcaggctg

SEQ ID NO: 246862 - DNA, 33 bp, Homo sapien
tcataggcaggatttatggcactttgcaggctg

SEQ ID NO: 246863 - DNA, 33 bp, Homo sapien
acttgaacttcatctaacccatagttattcaga

SEQ ID NO: 246864 - DNA, 33 bp, Homo sapien
acttgaacttcatctagcccatagttattcaga

SEQ ID NO: 246865 - DNA, 33 bp, Homo sapien
agagagagagagaacaaaagtcatgtgcggaga

SEQ ID NO: 246866 - DNA, 33 bp, Homo sapien
agagagagagagaacagaagtcatgtgcggaga

SEQ ID NO: 246867 - DNA, 33 bp, Homo sapien
tgagaagttcacaggaaggggaaaaggaatttt

SEQ ID NO: 246868 - DNA, 33 bp, Homo sapien
tgagaagttcacaggatggggaaaaggaatttt

SEQ ID NO: 246869 - DNA, 33 bp, Homo sapien
ttagaagcattaggaaaaggcaacacagcgtgg

SEQ ID NO: 246870 - DNA, 33 bp, Homo sapien
ttagaagcattaggaagaggcaacacagcgtgg

SEQ ID NO: 246871 - DNA, 33 bp, Homo sapien
atttgctaaggtggacagtaaatcctaaaggct

SEQ ID NO: 246872 - DNA, 33 bp, Homo sapien
atttgctaaggtggacggtaaatcctaaaggct

SEQ ID NO: 246873 - DNA, 33 bp, Homo sapien
agtgaaggtgactttagcaattagggttgtcac

SEQ ID NO: 246874 - DNA, 33 bp, Homo sapien
agtgaaggtgactttatcaattagggttgtcac

SEQ ID NO: 246875 - DNA, 33 bp, Homo sapien
ccagtttttctggctcacatgataacaacaaca

SEQ ID NO: 246876 - DNA, 33 bp, Homo sapien
ccagtttttctggctcgcatgataacaacaaca

SEQ ID NO: 246877 - DNA, 33 bp, Homo sapien
tatatactgagtcctgaaagtcctctagcaaat

SEQ ID NO: 246878 - DNA, 33 bp, Homo sapien
tatatactgagtcctggaagtcctctagcaaat

SEQ ID NO: 246879 - DNA, 33 bp, Homo sapien
tcctctctttatgagcccttgtggcctgccagt

SEQ ID NO: 246880 - DNA, 33 bp, Homo sapien
tcctctctttatgagctcttgtggcctgccagt

SEQ ID NO: 246881 - DNA, 33 bp, Homo sapien
ctacttactaaagtcacgcaaggtcattgtaag

SEQ ID NO: 246882 - DNA, 33 bp, Homo sapien
ctacttactaaagtcatgcaaggtcattgtaag

SEQ ID NO: 246883 - DNA, 33 bp, Homo sapien
tggatcctgagacgcccctggccacccgaggtg

SEQ ID NO: 246884 - DNA, 33 bp, Homo sapien
tggatcctgagacgccgctggccacccgaggtg

SEQ ID NO: 246885 - DNA, 33 bp, Homo sapien
ggagcttgttcaaagcacacagcaggtggaaag

SEQ ID NO: 246886 - DNA, 33 bp, Homo sapien
ggagcttgttcaaagcgcacagcaggtggaaag

SEQ ID NO: 246887 - DNA, 33 bp, Homo sapien
tcatctaaaataacaacaatcacacctgtaatc

SEQ ID NO: 246888 - DNA, 33 bp, Homo sapien
tcatctaaaataacaataatcacacctgtaatc

SEQ ID NO: 246889 - DNA, 33 bp, Homo sapien
atgctctattcttatcaccagtttacagatggg

SEQ ID NO: 246890 - DNA, 33 bp, Homo sapien
atgctctattcttatccccagtttacagatggg

SEQ ID NO: 246891 - DNA, 33 bp, Homo sapien
cttctgccagcccccccgaagaaacatagacac

SEQ ID NO: 246892 - DNA, 33 bp, Homo sapien
cttctgccagcccccctgaagaaacatagacac

SEQ ID NO: 246893 - DNA, 33 bp, Homo sapien
tcagatcgttcttgtcaatgaagccatccctgt

SEQ ID NO: 246894 - DNA, 33 bp, Homo sapien
tcagatcgttcttgtcgatgaagccatccctgt

SEQ ID NO: 246895 - DNA, 33 bp, Homo sapien
atataatacttttactcaagacagctttcctgc

SEQ ID NO: 246896 - DNA, 33 bp, Homo sapien
atataatacttttactgaagacagctttcctgc

SEQ ID NO: 246897 - DNA, 33 bp, Homo sapien
caggaagtttggtcaacagtaatgcatcaatat

SEQ ID NO: 246898 - DNA, 33 bp, Homo sapien
caggaagtttggtcaatagtaatgcatcaatat

SEQ ID NO: 246899 - DNA, 33 bp, Homo sapien
cacagcaccactgggacaagcagcatcagctcc

SEQ ID NO: 246900 - DNA, 33 bp, Homo sapien
cacagcaccactgggagaagcagcatcagctcc

SEQ ID NO: 246901 - DNA, 33 bp, Homo sapien
cacatcattactgaaacggttgtagaatgttcc

SEQ ID NO: 246902 - DNA, 33 bp, Homo sapien
cacatcattactgaaatggttgtagaatgttcc

SEQ ID NO: 246903 - DNA, 33 bp, Homo sapien
gatttcctgccaaatgaaacattctcaggctgc

SEQ ID NO: 246904 - DNA, 33 bp, Homo sapien
gatttcctgccaaatggaacattctcaggctgc

SEQ ID NO: 246905 - DNA, 33 bp, Homo sapien
ttcaagtgctagcccaacaataactggcctggt

SEQ ID NO: 246906 - DNA, 33 bp, Homo sapien
ttcaagtgctagcccagcaataactggcctggt

SEQ ID NO: 246907 - DNA, 33 bp, Homo sapien
ctcagctctttcccacacatttttagcccagaa

SEQ ID NO: 246908 - DNA, 33 bp, Homo sapien
ctcagctctttcccacgcatttttagcccagaa

SEQ ID NO: 246909 - DNA, 33 bp, Homo sapien
ggaggcgacagaccgaggtgctatcctctctgg

SEQ ID NO: 246910 - DNA, 33 bp, Homo sapien
ggaggcgacagaccgatgtgctatcctctctgg

SEQ ID NO: 246911 - DNA, 33 bp, Homo sapien
ttccttcaattatacaatgcagcagctctcctt

SEQ ID NO: 246912 - DNA, 33 bp, Homo sapien
ttccttcaattatacagtgcagcagctctcctt

SEQ ID NO: 246913 - DNA, 33 bp, Homo sapien
acagtgtctgccataacattccctccgactacc

SEQ ID NO: 246914 - DNA, 33 bp, Homo sapien
acagtgtctgccataatattccctccgactacc

SEQ ID NO: 246915 - DNA, 33 bp, Homo sapien
gaaagtttttcttccccgataagaggaaaacat

SEQ ID NO: 246916 - DNA, 33 bp, Homo sapien
gaaagtttttcttccctgataagaggaaaacat

SEQ ID NO: 246917 - DNA, 33 bp, Homo sapien
tgacattactatctgacgtgaaatttgttacat

SEQ ID NO: 246918 - DNA, 33 bp, Homo sapien
tgacattactatctgatgtgaaatttgttacat

SEQ ID NO: 246919 - DNA, 33 bp, Homo sapien
ataatataaacaatcaccaggctgggcatggtg

SEQ ID NO: 246920 - DNA, 33 bp, Homo sapien
ataatataaacaatcatcaggctgggcatggtg

SEQ ID NO: 246921 - DNA, 33 bp, Homo sapien
tgccagagtcatgtgaacttgtggagtagatgc

SEQ ID NO: 246922 - DNA, 33 bp, Homo sapien
tgccagagtcatgtgaccttgtggagtagatgc

SEQ ID NO: 246923 - DNA, 33 bp, Homo sapien
agaaacactgaaataacgcccaatgcctggtac

SEQ ID NO: 246924 - DNA, 33 bp, Homo sapien
agaaacactgaaataatgcccaatgcctggtac

SEQ ID NO: 246925 - DNA, 33 bp, Homo sapien
cattgattccccaggacgatgaaaacttgctgt

SEQ ID NO: 246926 - DNA, 33 bp, Homo sapien
cattgattccccaggatgatgaaaacttgctgt

SEQ ID NO: 246927 - DNA, 33 bp, Homo sapien
ggtacttgcatttgcagtatggaaattatttgt

SEQ ID NO: 246928 - DNA, 33 bp, Homo sapien
ggtacttgcatttgcattatggaaattatttgt

SEQ ID NO: 246929 - DNA, 33 bp, Homo sapien
ggtaccctatgcataactgaatattttctcaat

SEQ ID NO: 246930 - DNA, 33 bp, Homo sapien
ggtaccctatgcataattgaatattttctcaat

SEQ ID NO: 246931 - DNA, 33 bp, Homo sapien
aggtgggcttcacccaaaccttgcactggggtg

SEQ ID NO: 246932 - DNA, 33 bp, Homo sapien
aggtgggcttcacccagaccttgcactggggtg

SEQ ID NO: 246933 - DNA, 33 bp, Homo sapien
gacactttcagatacacccaatccaaccagaac

SEQ ID NO: 246934 - DNA, 33 bp, Homo sapien
gacactttcagatacatccaatccaaccagaac

SEQ ID NO: 246935 - DNA, 33 bp, Homo sapien
cagggtgtgggttctacggacttggagaggcag

SEQ ID NO: 246936 - DNA, 33 bp, Homo sapien
cagggtgtgggttctatggacttggagaggcag

SEQ ID NO: 246937 - DNA, 33 bp, Homo sapien
ctgaaccctactaaccaggtatcttcatgcatt

SEQ ID NO: 246938 - DNA, 33 bp, Homo sapien
ctgaaccctactaaccgggtatcttcatgcatt

SEQ ID NO: 246939 - DNA, 33 bp, Homo sapien
aaggttgtttggttgacggaagctcctagacta

SEQ ID NO: 246940 - DNA, 33 bp, Homo sapien
aaggttgtttggttgatggaagctcctagacta

SEQ ID NO: 246941 - DNA, 33 bp, Homo sapien
attcaagcaaaggaccaaactaactgaagggag

SEQ ID NO: 246942 - DNA, 33 bp, Homo sapien
attcaagcaaaggaccgaactaactgaagggag

SEQ ID NO: 246943 - DNA, 33 bp, Homo sapien
ccttctctccatgctaaaccagaatcatattaa

SEQ ID NO: 246944 - DNA, 33 bp, Homo sapien
ccttctctccatgctagaccagaatcatattaa

SEQ ID NO: 246945 - DNA, 33 bp, Homo sapien
ctaagagacagagtcccgatttgaatcatcctg

SEQ ID NO: 246946 - DNA, 33 bp, Homo sapien
ctaagagacagagtcctgatttgaatcatcctg

SEQ ID NO: 246947 - DNA, 33 bp, Homo sapien
gtctttctgtttgtgcagatgtgtgtgtgtatc

SEQ ID NO: 246948 - DNA, 33 bp, Homo sapien
gtctttctgtttgtgcggatgtgtgtgtgtatc

SEQ ID NO: 246949 - DNA, 33 bp, Homo sapien
gtattacattgtctcaaaatgtttccacacaag

SEQ ID NO: 246950 - DNA, 33 bp, Homo sapien
gtattacattgtctcagaatgtttccacacaag

SEQ ID NO: 246951 - DNA, 33 bp, Homo sapien
gatgggctgtggttaacggtttggttcgatggt

SEQ ID NO: 246952 - DNA, 33 bp, Homo sapien
gatgggctgtggttaatggtttggttcgatggt

SEQ ID NO: 246953 - DNA, 33 bp, Homo sapien
tttggtctaagaatccactgtttattttttatg

SEQ ID NO: 246954 - DNA, 33 bp, Homo sapien
tttggtctaagaatccgctgtttattttttatg

SEQ ID NO: 246955 - DNA, 33 bp, Homo sapien
cacacgtcccgaatacacccagatgcccgcaca

SEQ ID NO: 246956 - DNA, 33 bp, Homo sapien
cacacgtcccgaatacgcccagatgcccgcaca

SEQ ID NO: 246957 - DNA, 33 bp, Homo sapien
ctttagctccaagagcagagcaaactgccgtgc

SEQ ID NO: 246958 - DNA, 33 bp, Homo sapien
ctttagctccaagagctgagcaaactgccgtgc

SEQ ID NO: 246959 - DNA, 33 bp, Homo sapien
tacaaggcacaggacgaccctgcaatgagaaat

SEQ ID NO: 246960 - DNA, 33 bp, Homo sapien
tacaaggcacaggacggccctgcaatgagaaat

SEQ ID NO: 246961 - DNA, 33 bp, Homo sapien
atataatttgctgtcacgttgacaagtccagcc

SEQ ID NO: 246962 - DNA, 33 bp, Homo sapien
atataatttgctgtcaggttgacaagtccagcc

SEQ ID NO: 246963 - DNA, 33 bp, Homo sapien
ctgctggagaattagaccctgataaggaatgta

SEQ ID NO: 246964 - DNA, 33 bp, Homo sapien
ctgctggagaattagatcctgataaggaatgta

SEQ ID NO: 246965 - DNA, 33 bp, Homo sapien
aaaaaaaaaacatacacacatcatatcgatttt

SEQ ID NO: 246966 - DNA, 33 bp, Homo sapien
aaaaaaaaaacatacatacatcatatcgatttt

SEQ ID NO: 246967 - DNA, 33 bp, Homo sapien
agacagtgaaggaaaccaacattctggatgcca

SEQ ID NO: 246968 - DNA, 33 bp, Homo sapien
agacagtgaaggaaactaacattctggatgcca

SEQ ID NO: 246969 - DNA, 33 bp, Homo sapien
aacaaagacaatactaagcccagatactgctgg

SEQ ID NO: 246970 - DNA, 33 bp, Homo sapien
aacaaagacaatactacgcccagatactgctgg

SEQ ID NO: 246971 - DNA, 33 bp, Homo sapien
gtgccaggtagggaagcatttattaagcgccca

SEQ ID NO: 246972 - DNA, 33 bp, Homo sapien
gtgccaggtagggaaggatttattaagcgccca

SEQ ID NO: 246973 - DNA, 33 bp, Homo sapien
caatcccttctaacacaggctctactgaatgct

SEQ ID NO: 246974 - DNA, 33 bp, Homo sapien
caatcccttctaacactggctctactgaatgct

SEQ ID NO: 246975 - DNA, 33 bp, Homo sapien
accccctaaaagtaaccatgatttggaccctgg

SEQ ID NO: 246976 - DNA, 33 bp, Homo sapien
accccctaaaagtaacgatgatttggaccctgg

SEQ ID NO: 246977 - DNA, 33 bp, Homo sapien
ttggacttgacgtttcccagtctggtgtggctt

SEQ ID NO: 246978 - DNA, 33 bp, Homo sapien
ttggacttgacgtttctcagtctggtgtggctt

SEQ ID NO: 246979 - DNA, 33 bp, Homo sapien
gtgattagagggagaaagttctcagtcccacac

SEQ ID NO: 246980 - DNA, 33 bp, Homo sapien
gtgattagagggagaacgttctcagtcccacac

SEQ ID NO: 246981 - DNA, 33 bp, Homo sapien
aagattaaaaaaatcaatcaatatcgttcttta

SEQ ID NO: 246982 - DNA, 33 bp, Homo sapien
aagattaaaaaaatcagtcaatatcgttcttta

SEQ ID NO: 246983 - DNA, 33 bp, Homo sapien
tcaaatccttcctgaacgcatgagtaaatagta

SEQ ID NO: 246984 - DNA, 33 bp, Homo sapien
tcaaatccttcctgaatgcatgagtaaatagta

SEQ ID NO: 246985 - DNA, 33 bp, Homo sapien
aataagacaaagacgagtccctcacagagctga

SEQ ID NO: 246986 - DNA, 33 bp, Homo sapien
aataagacaaagacgattccctcacagagctga

SEQ ID NO: 246987 - DNA, 33 bp, Homo sapien
agagcccaatagtctgcagtttgtccagaagtc

SEQ ID NO: 246988 - DNA, 33 bp, Homo sapien
agagcccaatagtctgtagtttgtccagaagtc

SEQ ID NO: 246989 - DNA, 33 bp, Homo sapien
gccattgaagatcatccagtaggccaggcgtag

SEQ ID NO: 246990 - DNA, 33 bp, Homo sapien
gccattgaagatcatctagtaggccaggcgtag

SEQ ID NO: 246991 - DNA, 33 bp, Homo sapien
ttgaaatgtgtgataaatgatgaaattattaga

SEQ ID NO: 246992 - DNA, 33 bp, Homo sapien
ttgaaatgtgtgataagtgatgaaattattaga

SEQ ID NO: 246993 - DNA, 33 bp, Homo sapien
ccaggctgctttgagacggagcatgagggccct

SEQ ID NO: 246994 - DNA, 33 bp, Homo sapien
ccaggctgctttgagatggagcatgagggccct

SEQ ID NO: 246995 - DNA, 33 bp, Homo sapien
ccaccaactctccagcagatttcagggataata

SEQ ID NO: 246996 - DNA, 33 bp, Homo sapien
ccaccaactctccagcggatttcagggataata

SEQ ID NO: 246997 - DNA, 33 bp, Homo sapien
ctccttgactgaggacagggtcatgttctcatg

SEQ ID NO: 246998 - DNA, 33 bp, Homo sapien
ctccttgactgaggaccgggtcatgttctcatg

SEQ ID NO: 246999 - DNA, 33 bp, Homo sapien
ctgaaacccagcttcaaaatgtcttccaagagg

SEQ ID NO: 247000 - DNA, 33 bp, Homo sapien
ctgaaacccagcttcagaatgtcttccaagagg

SEQ ID NO: 247001 - DNA, 33 bp, Homo sapien
ccacttcatgaaagccactgcagctcaagaagg

SEQ ID NO: 247002 - DNA, 33 bp, Homo sapien
ccacttcatgaaagccgctgcagctcaagaagg

SEQ ID NO: 247003 - DNA, 33 bp, Homo sapien
tcagtagtagttagtacagtcagtgttatgcaa

SEQ ID NO: 247004 - DNA, 33 bp, Homo sapien
tcagtagtagttagtatagtcagtgttatgcaa

SEQ ID NO: 247005 - DNA, 33 bp, Homo sapien
tttccaaaggttcaaaatccattggaagataag

SEQ ID NO: 247006 - DNA, 33 bp, Homo sapien
tttccaaaggttcaaagtccattggaagataag

SEQ ID NO: 247007 - DNA, 33 bp, Homo sapien
ggaaggagaggagctcaatggtctgctgcgagg

SEQ ID NO: 247008 - DNA, 33 bp, Homo sapien
ggaaggagaggagctcgatggtctgctgcgagg

SEQ ID NO: 247009 - DNA, 33 bp, Homo sapien
aactatcaaagggttacaattacagaagaacac

SEQ ID NO: 247010 - DNA, 33 bp, Homo sapien
aactatcaaagggttataattacagaagaacac

SEQ ID NO: 247011 - DNA, 33 bp, Homo sapien
gcccaaccgtcctatacgagatgtagcatggta

SEQ ID NO: 247012 - DNA, 33 bp, Homo sapien
gcccaaccgtcctatatgagatgtagcatggta

SEQ ID NO: 247013 - DNA, 33 bp, Homo sapien
gactgtaagacacccaatgagtatctgttctgt

SEQ ID NO: 247014 - DNA, 33 bp, Homo sapien
gactgtaagacacccagtgagtatctgttctgt

SEQ ID NO: 247015 - DNA, 33 bp, Homo sapien
cctgtgttgtgcttccaatctcagcaaatggcc

SEQ ID NO: 247016 - DNA, 33 bp, Homo sapien
cctgtgttgtgcttccgatctcagcaaatggcc

SEQ ID NO: 247017 - DNA, 33 bp, Homo sapien
gcgagcaagtaaaccccagcttagaatctgagt

SEQ ID NO: 247018 - DNA, 33 bp, Homo sapien
gcgagcaagtaaacccgagcttagaatctgagt

SEQ ID NO: 247019 - DNA, 33 bp, Homo sapien
ccggaacgcctccatccgagttggctgcagggc

SEQ ID NO: 247020 - DNA, 33 bp, Homo sapien
ccggaacgcctccatctgagttggctgcagggc

SEQ ID NO: 247021 - DNA, 33 bp, Homo sapien
aaagttgcaaagatagcagtgttcctttacaca

SEQ ID NO: 247022 - DNA, 33 bp, Homo sapien
aaagttgcaaagatagtagtgttcctttacaca

SEQ ID NO: 247023 - DNA, 33 bp, Homo sapien
ggtgctcagaccacaactcttgcatgtgcttgc

SEQ ID NO: 247024 - DNA, 33 bp, Homo sapien
ggtgctcagaccacaattcttgcatgtgcttgc

SEQ ID NO: 247025 - DNA, 33 bp, Homo sapien
aaaatgatagtaatgacagtccgtgccgggtgg

SEQ ID NO: 247026 - DNA, 33 bp, Homo sapien
aaaatgatagtaatgagagtccgtgccgggtgg

SEQ ID NO: 247027 - DNA, 33 bp, Homo sapien
atctcaaagtcaaagacgtaggccagctctgac

SEQ ID NO: 247028 - DNA, 33 bp, Homo sapien
atctcaaagtcaaagatgtaggccagctctgac

SEQ ID NO: 247029 - DNA, 33 bp, Homo sapien
ttagtctctgtgctccaagaggtcaaatttttg

SEQ ID NO: 247030 - DNA, 33 bp, Homo sapien
ttagtctctgtgctccgagaggtcaaatttttg

SEQ ID NO: 247031 - DNA, 33 bp, Homo sapien
aaacaatacataaaaaattgccaaataccttct

SEQ ID NO: 247032 - DNA, 33 bp, Homo sapien
aaacaatacataaaaatttgccaaataccttct

SEQ ID NO: 247033 - DNA, 33 bp, Homo sapien; identical to SEQ ID NO: 247031

SEQ ID NO: 247034 - DNA, 33 bp, Homo sapien; identical to SEQ ID NO: 247032

SEQ ID NO: 247035 - DNA, 33 bp, Homo sapien
cacgattgatttatcacgctggcttttatgcaa

SEQ ID NO: 247036 - DNA, 33 bp, Homo sapien
cacgattgatttatcatgctggcttttatgcaa

SEQ ID NO: 247037 - DNA, 33 bp, Homo sapien
accaaacagctggatacgggaaagtttttcttt

SEQ ID NO: 247038 - DNA, 33 bp, Homo sapien
accaaacagctggatatgggaaagtttttcttt

SEQ ID NO: 247039 - DNA, 33 bp, Homo sapien
gtaactttttattacgaatgtattgagacatta

SEQ ID NO: 247040 - DNA, 33 bp, Homo sapien
gtaactttttattacgcatgtattgagacatta

SEQ ID NO: 247041 - DNA, 33 bp, Homo sapien
ggttgacagctgaaaacaaacacacacatgatg

SEQ ID NO: 247042 - DNA, 33 bp, Homo sapien
ggttgacagctgaaaataaacacacacatgatg

SEQ ID NO: 247043 - DNA, 33 bp, Homo sapien
aatctttagtagaggcaatccacataacagacc

SEQ ID NO: 247044 - DNA, 33 bp, Homo sapien
aatctttagtagaggcgatccacataacagacc

SEQ ID NO: 247045 - DNA, 33 bp, Homo sapien
atttagtcttcacaacagccctatttgatgtag

SEQ ID NO: 247046 - DNA, 33 bp, Homo sapien
atttagtcttcacaacggccctatttgatgtag

SEQ ID NO: 247047 - DNA, 33 bp, Homo sapien
atttactataggtatcaaggtagattttgagac

SEQ ID NO: 247048 - DNA, 33 bp, Homo sapien
atttactataggtatcgaggtagattttgagac

SEQ ID NO: 247049 - DNA, 33 bp, Homo sapien
cccagggtttattcaccccatctccttccaaca

SEQ ID NO: 247050 - DNA, 33 bp, Homo sapien
cccagggtttattcactccatctccttccaaca

SEQ ID NO: 247051 - DNA, 33 bp, Homo sapien
tgttccagcagttctacctctagtaatttattt

SEQ ID NO: 247052 - DNA, 33 bp, Homo sapien
tgttccagcagttctatctctagtaatttattt

SEQ ID NO: 247053 - DNA, 33 bp, Homo sapien
cttggttgtaatttaaatgtgcttttgttgttg

SEQ ID NO: 247054 - DNA, 33 bp, Homo sapien
cttggttgtaatttaagtgtgcttttgttgttg

SEQ ID NO: 247055 - DNA, 33 bp, Homo sapien
agtaaatgctacggaaatagttgtggtactgct

SEQ ID NO: 247056 - DNA, 33 bp, Homo sapien
agtaaatgctacggaagtagttgtggtactgct

SEQ ID NO: 247057 - DNA, 33 bp, Homo sapien
gaacacctgttatctgcaagtcactgtatatat

SEQ ID NO: 247058 - DNA, 33 bp, Homo sapien
gaacacctgttatctgtaagtcactgtatatat

SEQ ID NO: 247059 - DNA, 33 bp, Homo sapien
gtcctggaaacatatgcattacttacctattct

SEQ ID NO: 247060 - DNA, 33 bp, Homo sapien
gtcctggaaacatatggattacttacctattct

SEQ ID NO: 247061 - DNA, 33 bp, Homo sapien
gacttcttacggtacaatgaataagtttccttt

SEQ ID NO: 247062 - DNA, 33 bp, Homo sapien
gacttcttacggtacagtgaataagtttccttt

SEQ ID NO: 247063 - DNA, 33 bp, Homo sapien
aatcagtaatcgttgacgttaccctgatttctt

SEQ ID NO: 247064 - DNA, 33 bp, Homo sapien
aatcagtaatcgttgatgttaccctgatttctt

SEQ ID NO: 247065 - DNA, 33 bp, Homo sapien
ttaaggcaccacaaacggtccatataagacagc

SEQ ID NO: 247066 - DNA, 33 bp, Homo sapien
ttaaggcaccacaaactgtccatataagacagc

SEQ ID NO: 247067 - DNA, 33 bp, Homo sapien
gaaacgctaaactgtagccattcatactgtact

SEQ ID NO: 247068 - DNA, 33 bp, Homo sapien
gaaacgctaaactgtatccattcatactgtact

SEQ ID NO: 247069 - DNA, 33 bp, Homo sapien
tttcccattaactcttcaaaaatatgacctcca

SEQ ID NO: 247070 - DNA, 33 bp, Homo sapien
tttcccattaactcttgaaaaatatgacctcca

SEQ ID NO: 247071 - DNA, 33 bp, Homo sapien
agagccgacctcaaaacaatgtgcgaactttag

SEQ ID NO: 247072 - DNA, 33 bp, Homo sapien
agagccgacctcaaaagaatgtgcgaactttag

SEQ ID NO: 247073 - DNA, 33 bp, Homo sapien
ctatgactctatcctacgcctttctacccgcca

SEQ ID NO: 247074 - DNA, 33 bp, Homo sapien
ctatgactctatcctatgcctttctacccgcca

SEQ ID NO: 247075 - DNA, 33 bp, Homo sapien
ctgtggtaactaagcacgcaggtgaaaaaagcc

SEQ ID NO: 247076 - DNA, 33 bp, Homo sapien
ctgtggtaactaagcatgcaggtgaaaaaagcc

SEQ ID NO: 247077 - DNA, 33 bp, Homo sapien
gcgccaggtataaactaaatgccctcagacggc

SEQ ID NO: 247078 - DNA, 33 bp, Homo sapien
gcgccaggtataaactgaatgccctcagacggc

SEQ ID NO: 247079 - DNA, 33 bp, Homo sapien
ctgaaaatctcatctacctctttgcattctcac

SEQ ID NO: 247080 - DNA, 33 bp, Homo sapien
ctgaaaatctcatctagctctttgcattctcac

SEQ ID NO: 247081 - DNA, 33 bp, Homo sapien
tataactcatgtaaccacaatagctctactaaa

SEQ ID NO: 247082 - DNA, 33 bp, Homo sapien
tataactcatgtaaccgcaatagctctactaaa

SEQ ID NO: 247083 - DNA, 33 bp, Homo sapien
actctataggagattaagccctggggacactgt

SEQ ID NO: 247084 - DNA, 33 bp, Homo sapien
actctataggagattacgccctggggacactgt

SEQ ID NO: 247085 - DNA, 33 bp, Homo sapien
cttggggctaaacagaacagaagaaaagctgta

SEQ ID NO: 247086 - DNA, 33 bp, Homo sapien
cttggggctaaacagagcagaagaaaagctgta

SEQ ID NO: 247087 - DNA, 33 bp, Homo sapien
tttgtcattttggaacccacttaagtttcattt

SEQ ID NO: 247088 - DNA, 33 bp, Homo sapien
tttgtcattttggaactcacttaagtttcattt

SEQ ID NO: 247089 - DNA, 33 bp, Homo sapien
cagggtcactcttcaactaagagcagagttggg

SEQ ID NO: 247090 - DNA, 33 bp, Homo sapien
cagggtcactcttcaagtaagagcagagttggg

SEQ ID NO: 247091 - DNA, 33 bp, Homo sapien
gagtgtgacaaccaaaaatcttcgcagacctgg

SEQ ID NO: 247092 - DNA, 33 bp, Homo sapien
gagtgtgacaaccaaagatcttcgcagacctgg

SEQ ID NO: 247093 - DNA, 33 bp, Homo sapien
cctttcattgttttccacggttcaaaataaaat

SEQ ID NO: 247094 - DNA, 33 bp, Homo sapien
cctttcattgttttccgcggttcaaaataaaat

SEQ ID NO: 247095 - DNA, 33 bp, Homo sapien
aaaaaggctacaaaacaatatatagagtgtggc

SEQ ID NO: 247096 - DNA, 33 bp, Homo sapien
aaaaaggctacaaaaccatatatagagtgtggc

SEQ ID NO: 247097 - DNA, 33 bp, Homo sapien
ctgcatgtagcagttacaaatcattggctcaac

SEQ ID NO: 247098 - DNA, 33 bp, Homo sapien
ctgcatgtagcagttataaatcattggctcaac

SEQ ID NO: 247099 - DNA, 33 bp, Homo sapien
cacattttgatttttccattaatctgttgacag

SEQ ID NO: 247100 - DNA, 33 bp, Homo sapien
cacattttgatttttctattaatctgttgacag

SEQ ID NO: 247101 - DNA, 33 bp, Homo sapien
ctatgattttgatgaacagttataggccaatga

SEQ ID NO: 247102 - DNA, 33 bp, Homo sapien
ctatgattttgatgaagagttataggccaatga

SEQ ID NO: 247103 - DNA, 33 bp, Homo sapien
acatagaaaatcttcccagaagtaatatcatcc

SEQ ID NO: 247104 - DNA, 33 bp, Homo sapien
acatagaaaatcttcctagaagtaatatcatcc

SEQ ID NO: 247105 - DNA, 33 bp, Homo sapien
tgcttggttggctatacgcatccagttttccat

SEQ ID NO: 247106 - DNA, 33 bp, Homo sapien
tgcttggttggctatatgcatccagttttccat

SEQ ID NO: 247107 - DNA, 33 bp, Homo sapien
cccacaagccgcagaaaccagcaagtttttatt

SEQ ID NO: 247108 - DNA, 33 bp, Homo sapien
cccacaagccgcagaatccagcaagtttttatt

SEQ ID NO: 247109 - DNA, 33 bp, Homo sapien
ctttttaggtatctcacgtggtggtcatttcct

SEQ ID NO: 247110 - DNA, 33 bp, Homo sapien
ctttttaggtatctcatgtggtggtcatttcct

SEQ ID NO: 247111 - DNA, 33 bp, Homo sapien
actcaaagtaagtaaacggtcaacacaagttta

SEQ ID NO: 247112 - DNA, 33 bp, Homo sapien
actcaaagtaagtaaatggtcaacacaagttta

SEQ ID NO: 247113 - DNA, 33 bp, Homo sapien
aaatctgcagttggaaaaaggtggttcgccgta

SEQ ID NO: 247114 - DNA, 33 bp, Homo sapien
aaatctgcagttggaagaaggtggttcgccgta

SEQ ID NO: 247115 - DNA, 33 bp, Homo sapien
aatatctaaaacctaaaagactccctctcaccc

SEQ ID NO: 247116 - DNA, 33 bp, Homo sapien
aatatctaaaacctaagagactccctctcaccc

SEQ ID NO: 247117 - DNA, 33 bp, Homo sapien
tgcacctgacactgccaattaagtctaaactag

SEQ ID NO: 247118 - DNA, 33 bp, Homo sapien
tgcacctgacactgcccattaagtctaaactag

SEQ ID NO: 247119 - DNA, 33 bp, Homo sapien
gcataagtaacaagtaagacagtccttccactg

SEQ ID NO: 247120 - DNA, 33 bp, Homo sapien
gcataagtaacaagtaggacagtccttccactg

SEQ ID NO: 247121 - DNA, 33 bp, Homo sapien
ctggccaacagcttcactaggggaataaacaca

SEQ ID NO: 247122 - DNA, 33 bp, Homo sapien
ctggccaacagcttcattaggggaataaacaca

SEQ ID NO: 247123 - DNA, 33 bp, Homo sapien
tttacaaaagcaggccaagtggtcgtgctgaat

SEQ ID NO: 247124 - DNA, 33 bp, Homo sapien
tttacaaaagcaggccgagtggtcgtgctgaat

SEQ ID NO: 247125 - DNA, 33 bp, Homo sapien
gaacgactagaaggacagcaaggatatccctta

SEQ ID NO: 247126 - DNA, 33 bp, Homo sapien
gaacgactagaaggacggcaaggatatccctta

SEQ ID NO: 247127 - DNA, 33 bp, Homo sapien
caaacaaagtctgcctaaattccgcctgcacag

SEQ ID NO: 247128 - DNA, 33 bp, Homo sapien
caaacaaagtctgcctgaattccgcctgcacag

SEQ ID NO: 247129 - DNA, 33 bp, Homo sapien
agatagctttagtggccctgactcagatatact

SEQ ID NO: 247130 - DNA, 33 bp, Homo sapien
agatagctttagtggctctgactcagatatact

SEQ ID NO: 247131 - DNA, 33 bp, Homo sapien
attaaaagaagttaacacagctttctaggtgag

SEQ ID NO: 247132 - DNA, 33 bp, Homo sapien
attaaaagaagttaacgcagctttctaggtgag

SEQ ID NO: 247133 - DNA, 33 bp, Homo sapien
cttcttcaaacatgaacgtctagaacaacataa

SEQ ID NO: 247134 - DNA, 33 bp, Homo sapien
cttcttcaaacatgaatgtctagaacaacataa

SEQ ID NO: 247135 - DNA, 33 bp, Homo sapien
gacctcttgattaagtgacaccattattatgaa

SEQ ID NO: 247136 - DNA, 33 bp, Homo sapien
gacctcttgattaagttacaccattattatgaa

SEQ ID NO: 247137 - DNA, 33 bp, Homo sapien
atatacaaatccacaagtatagtcagatatcaa

SEQ ID NO: 247138 - DNA, 33 bp, Homo sapien
atatacaaatccacaattatagtcagatatcaa

SEQ ID NO: 247139 - DNA, 33 bp, Homo sapien
atgcatttgaaagaaaaattacattctgctgtt

SEQ ID NO: 247140 - DNA, 33 bp, Homo sapien
atgcatttgaaagaaagattacattctgctgtt

SEQ ID NO: 247141 - DNA, 33 bp, Homo sapien
ataacacgatcttataggtagaaaactctaaag

SEQ ID NO: 247142 - DNA, 33 bp, Homo sapien
ataacacgatcttatatgtagaaaactctaaag

SEQ ID NO: 247143 - DNA, 33 bp, Homo sapien
accagaaaacatgtacaagaatgcttatagcag

SEQ ID NO: 247144 - DNA, 33 bp, Homo sapien
accagaaaacatgtacgagaatgcttatagcag

SEQ ID NO: 247145 - DNA, 33 bp, Homo sapien
agtcggcaaactctgaatagtgagtgaccgtgg

SEQ ID NO: 247146 - DNA, 33 bp, Homo sapien
agtcggcaaactctgattagtgagtgaccgtgg

SEQ ID NO: 247147 - DNA, 33 bp, Homo sapien
gtttgctcatctcataatacagttttaaacaga

SEQ ID NO: 247148 - DNA, 33 bp, Homo sapien
gtttgctcatctcatagtacagttttaaacaga

SEQ ID NO: 247149 - DNA, 33 bp, Homo sapien
ggaacagccagttgcaaaaaggacctaccctcc

SEQ ID NO: 247150 - DNA, 33 bp, Homo sapien
ggaacagccagttgcagaaaggacctaccctcc

SEQ ID NO: 247151 - DNA, 33 bp, Homo sapien
ttgaatgagaattacacctgtcaaagacctggg

SEQ ID NO: 247152 - DNA, 33 bp, Homo sapien
ttgaatgagaattacatctgtcaaagacctggg

SEQ ID NO: 247153 - DNA, 33 bp, Homo sapien
cctgagcccatctctcaagaaaattaagaatgg

SEQ ID NO: 247154 - DNA, 33 bp, Homo sapien
cctgagcccatctctcgagaaaattaagaatgg

SEQ ID NO: 247155 - DNA, 33 bp, Homo sapien
atgacatgaattttgacaggtcttttgtttggt

SEQ ID NO: 247156 - DNA, 33 bp, Homo sapien
atgacatgaattttgataggtcttttgtttggt

SEQ ID NO: 247157 - DNA, 33 bp, Homo sapien
attttcctactgggcaaattattcagacgtaat

SEQ ID NO: 247158 - DNA, 33 bp, Homo sapien
attttcctactgggcagattattcagacgtaat

SEQ ID NO: 247159 - DNA, 33 bp, Homo sapien
atgagccattaactaaccagcaatattgtctta

SEQ ID NO: 247160 - DNA, 33 bp, Homo sapien
atgagccattaactaatcagcaatattgtctta

SEQ ID NO: 247161 - DNA, 33 bp, Homo sapien
gatggggagtgaagaaataagcggcttctcaaa

SEQ ID NO: 247162 - DNA, 33 bp, Homo sapien
gatggggagtgaagaagtaagcggcttctcaaa

SEQ ID NO: 247163 - DNA, 33 bp, Homo sapien
ttttttgtcagcttacagtaacagcacttgtat

SEQ ID NO: 247164 - DNA, 33 bp, Homo sapien
ttttttgtcagcttactgtaacagcacttgtat

SEQ ID NO: 247165 - DNA, 33 bp, Homo sapien
gactccagcttttggacagtcaaaggggaaggg

SEQ ID NO: 247166 - DNA, 33 bp, Homo sapien
gactccagcttttggatagtcaaaggggaaggg

SEQ ID NO: 247167 - DNA, 33 bp, Homo sapien
gctgcttctccgagagcacattgaggtccagac

SEQ ID NO: 247168 - DNA, 33 bp, Homo sapien
gctgcttctccgagagtacattgaggtccagac

SEQ ID NO: 247169 - DNA, 33 bp, Homo sapien
gtgtcagcatccgcccagcatataccctttgtc

SEQ ID NO: 247170 - DNA, 33 bp, Homo sapien
gtgtcagcatccgcccggcatataccctttgtc

SEQ ID NO: 247171 - DNA, 33 bp, Homo sapien
ggtggttaacagttcacatctgaagtcatactg

SEQ ID NO: 247172 - DNA, 33 bp, Homo sapien
ggtggttaacagttcatatctgaagtcatactg

SEQ ID NO: 247173 - DNA, 33 bp, Homo sapien
actgtggggtcaacacaaaggaagacacacact

SEQ ID NO: 247174 - DNA, 33 bp, Homo sapien
actgtggggtcaacacgaaggaagacacacact

SEQ ID NO: 247175 - DNA, 33 bp, Homo sapien
atgtacatcagtgctcgagacagaacctaaata

SEQ ID NO: 247176 - DNA, 33 bp, Homo sapien
atgtacatcagtgctctagacagaacctaaata

SEQ ID NO: 247177 - DNA, 33 bp, Homo sapien
ggtgagatagttgaaaataggtgaaaggttgct

SEQ ID NO: 247178 - DNA, 33 bp, Homo sapien
ggtgagatagttgaaactaggtgaaaggttgct

SEQ ID NO: 247179 - DNA, 33 bp, Homo sapien
atataaccagcacagaatatcttcttttaaaga

SEQ ID NO: 247180 - DNA, 33 bp, Homo sapien
atataaccagcacagagtatcttcttttaaaga

SEQ ID NO: 247181 - DNA, 33 bp, Homo sapien
aaaacttacagcattacgatgagactgaatgat

SEQ ID NO: 247182 - DNA, 33 bp, Homo sapien
aaaacttacagcattatgatgagactgaatgat

SEQ ID NO: 247183 - DNA, 33 bp, Homo sapien
ttccatcatggcaacactgagttgattccatcg

SEQ ID NO: 247184 - DNA, 33 bp, Homo sapien
ttccatcatggcaacattgagttgattccatcg

SEQ ID NO: 247185 - DNA, 33 bp, Homo sapien
cttattattgagttccaacatgactaaatgcag

SEQ ID NO: 247186 - DNA, 33 bp, Homo sapien
cttattattgagttcctacatgactaaatgcag

SEQ ID NO: 247187 - DNA, 33 bp, Homo sapien
aagcgaatggcctctccacaagcaggggacatt

SEQ ID NO: 247188 - DNA, 33 bp, Homo sapien
aagcgaatggcctctctacaagcaggggacatt

SEQ ID NO: 247189 - DNA, 33 bp, Homo sapien
ttggtatagaatcggccctatgttgtgttttgc

SEQ ID NO: 247190 - DNA, 33 bp, Homo sapien
ttggtatagaatcggctctatgttgtgttttgc

SEQ ID NO: 247191 - DNA, 33 bp, Homo sapien
aatctgataagtctgacatatgtatacaccaat

SEQ ID NO: 247192 - DNA, 33 bp, Homo sapien
aatctgataagtctgatatatgtatacaccaat

SEQ ID NO: 247193 - DNA, 33 bp, Homo sapien
caccttttgtaagtcaaaggtctattctttggg

SEQ ID NO: 247194 - DNA, 33 bp, Homo sapien
caccttttgtaagtcagaggtctattctttggg

SEQ ID NO: 247195 - DNA, 33 bp, Homo sapien
caagtgttttcaccccagcacctgtggcaggga

SEQ ID NO: 247196 - DNA, 33 bp, Homo sapien
caagtgttttcaccccggcacctgtggcaggga

SEQ ID NO: 247197 - DNA, 33 bp, Homo sapien
aactgatcactttgttcaaatgatgtctgccag

SEQ ID NO: 247198 - DNA, 33 bp, Homo sapien
aactgatcactttgtttaaatgatgtctgccag

SEQ ID NO: 247199 - DNA, 33 bp, Homo sapien
ctgtctgagcctcagtaaccacgtagtgatccc

SEQ ID NO: 247200 - DNA, 33 bp, Homo sapien
ctgtctgagcctcagtgaccacgtagtgatccc

SEQ ID NO: 247201 - DNA, 33 bp, Homo sapien
cgggccatttcacaaaataggtgagttctcttt

SEQ ID NO: 247202 - DNA, 33 bp, Homo sapien
cgggccatttcacaaagtaggtgagttctcttt

SEQ ID NO: 247203 - DNA, 33 bp, Homo sapien; identical to SEQ ID NO: 247201

SEQ ID NO: 247204 - DNA, 33 bp, Homo sapien; identical to SEQ ID NO: 247202

SEQ ID NO: 247205 - DNA, 33 bp, Homo sapien
tatttaaaatggctacccaaaagatagagatac

SEQ ID NO: 247206 - DNA, 33 bp, Homo sapien
tatttaaaatggctactcaaaagatagagatac

SEQ ID NO: 247207 - DNA, 33 bp, Homo sapien
aaggatgcaggttaaaacttttacaacatattt

SEQ ID NO: 247208 - DNA, 33 bp, Homo sapien
aaggatgcaggttaaaccttttacaacatattt

SEQ ID NO: 247209 - DNA, 33 bp, Homo sapien
tagttggcgtcctccaagcaagttcatctcaac

SEQ ID NO: 247210 - DNA, 33 bp, Homo sapien
tagttggcgtcctccaggcaagttcatctcaac

SEQ ID NO: 247211 - DNA, 33 bp, Homo sapien
gctaatggatattttaccaaacctgtcttattt

SEQ ID NO: 247212 - DNA, 33 bp, Homo sapien
gctaatggatattttatcaaacctgtcttattt

SEQ ID NO: 247213 - DNA, 33 bp, Homo sapien
gctatttccacagaagaatggttttcaaaggaa

SEQ ID NO: 247214 - DNA, 33 bp, Homo sapien
gctatttccacagaagtatggttttcaaaggaa

SEQ ID NO: 247215 - DNA, 33 bp, Homo sapien
agacttggaaaaggtcaattatgcttctgcatc

SEQ ID NO: 247216 - DNA, 33 bp, Homo sapien
agacttggaaaaggtcgattatgcttctgcatc

SEQ ID NO: 247217 - DNA, 33 bp, Homo sapien
gtcaaccaactcaacacaaaggtctttattagt

SEQ ID NO: 247218 - DNA, 33 bp, Homo sapien
gtcaaccaactcaacagaaaggtctttattagt

SEQ ID NO: 247219 - DNA, 33 bp, Homo sapien
ccctttctcccatttccacttgacagctacatt

SEQ ID NO: 247220 - DNA, 33 bp, Homo sapien
ccctttctcccatttctacttgacagctacatt

SEQ ID NO: 247221 - DNA, 33 bp, Homo sapien
aaccctacaagggagacgacgggaatgaaaggc

SEQ ID NO: 247222 - DNA, 33 bp, Homo sapien
aaccctacaagggagatgacgggaatgaaaggc

SEQ ID NO: 247223 - DNA, 33 bp, Homo sapien
accccttccatactgcaatgtgcatctcttaag

SEQ ID NO: 247224 - DNA, 33 bp, Homo sapien
accccttccatactgcgatgtgcatctcttaag

SEQ ID NO: 247225 - DNA, 33 bp, Homo sapien
tttctcctgagttacaaaatggcagttgttaat

SEQ ID NO: 247226 - DNA, 33 bp, Homo sapien
tttctcctgagttacacaatggcagttgttaat

SEQ ID NO: 247227 - DNA, 33 bp, Homo sapien
gtctctggcagaagaactgtaagcatatgcaaa

SEQ ID NO: 247228 - DNA, 33 bp, Homo sapien
gtctctggcagaagaattgtaagcatatgcaaa

SEQ ID NO: 247229 - DNA, 33 bp, Homo sapien
acttgaattaatttcaaaaaccaaaggagaaca

SEQ ID NO: 247230 - DNA, 33 bp, Homo sapien
acttgaattaatttcacaaaccaaaggagaaca

SEQ ID NO: 247231 - DNA, 33 bp, Homo sapien
caagggacctccttaacatgtcaactggatgct

SEQ ID NO: 247232 - DNA, 33 bp, Homo sapien
caagggacctccttaatatgtcaactggatgct

SEQ ID NO: 247233 - DNA, 33 bp, Homo sapien
ttgtgtgcagagcagaagctaacttttgttgta

SEQ ID NO: 247234 - DNA, 33 bp, Homo sapien
ttgtgtgcagagcagatgctaacttttgttgta

SEQ ID NO: 247235 - DNA, 33 bp, Homo sapien
cagcaatgcaaataaacgttttacaactacata

SEQ ID NO: 247236 - DNA, 33 bp, Homo sapien
cagcaatgcaaataaatgttttacaactacata

SEQ ID NO: 247237 - DNA, 33 bp, Homo sapien
actgaacatgcatgcacactccaacccagcaat

SEQ ID NO: 247238 - DNA, 33 bp, Homo sapien
actgaacatgcatgcatactccaacccagcaat

SEQ ID NO: 247239 - DNA, 33 bp, Homo sapien
cctgcaagcttgagaacagtgacttccattata

SEQ ID NO: 247240 - DNA, 33 bp, Homo sapien
cctgcaagcttgagaagagtgacttccattata

SEQ ID NO: 247241 - DNA, 33 bp, Homo sapien
ttgacatttcatgctcagaccctgtaagcagtt

SEQ ID NO: 247242 - DNA, 33 bp, Homo sapien
ttgacatttcatgctcggaccctgtaagcagtt

SEQ ID NO: 247243 - DNA, 33 bp, Homo sapien
gattgttgagaaaagacggtgttcaagagggaa

SEQ ID NO: 247244 - DNA, 33 bp, Homo sapien
gattgttgagaaaagatggtgttcaagagggaa

SEQ ID NO: 247245 - DNA, 33 bp, Homo sapien
ctcagatatcttagacaccagtaattaacctct

SEQ ID NO: 247246 - DNA, 33 bp, Homo sapien
ctcagatatcttagacgccagtaattaacctct

SEQ ID NO: 247247 - DNA, 33 bp, Homo sapien
gatctggcatcgtccaatgagatcactacaaac

SEQ ID NO: 247248 - DNA, 33 bp, Homo sapien
gatctggcatcgtccagtgagatcactacaaac

SEQ ID NO: 247249 - DNA, 33 bp, Homo sapien
tgttcaatgaatgaacaattagataattcagct

SEQ ID NO: 247250 - DNA, 33 bp, Homo sapien
tgttcaatgaatgaaccattagataattcagct

SEQ ID NO: 247251 - DNA, 33 bp, Homo sapien
acagcaacctgaatccaaccagcctttgtccaa

SEQ ID NO: 247252 - DNA, 33 bp, Homo sapien
acagcaacctgaatcccaccagcctttgtccaa

SEQ ID NO: 247253 - DNA, 33 bp, Homo sapien
tcacaataagcatgaacgattttgtcattctta

SEQ ID NO: 247254 - DNA, 33 bp, Homo sapien
tcacaataagcatgaatgattttgtcattctta

SEQ ID NO: 247255 - DNA, 33 bp, Homo sapien
gaatctagcatgtctccgaattcttgcagaaga

SEQ ID NO: 247256 - DNA, 33 bp, Homo sapien
gaatctagcatgtctctgaattcttgcagaaga

SEQ ID NO: 247257 - DNA, 33 bp, Homo sapien
acactgctggtggaaacatcaaatggtgcagtt

SEQ ID NO: 247258 - DNA, 33 bp, Homo sapien
acactgctggtggaaatatcaaatggtgcagtt

SEQ ID NO: 247259 - DNA, 33 bp, Homo sapien
tcatatggcaaattgaggtctatctcaagccta

SEQ ID NO: 247260 - DNA, 33 bp, Homo sapien
tcatatggcaaattgatgtctatctcaagccta

SEQ ID NO: 247261 - DNA, 33 bp, Homo sapien
gcattgcccataggaaaagcataaagtatatat

SEQ ID NO: 247262 - DNA, 33 bp, Homo sapien
gcattgcccataggaagagcataaagtatatat

SEQ ID NO: 247263 - DNA, 33 bp, Homo sapien
tgggctcacattattggagaatctaagggtata

SEQ ID NO: 247264 - DNA, 33 bp, Homo sapien
tgggctcacattattgtagaatctaagggtata

SEQ ID NO: 247265 - DNA, 33 bp, Homo sapien
tctcaatggcttccaaagctcttaaaataaaga

SEQ ID NO: 247266 - DNA, 33 bp, Homo sapien
tctcaatggcttccaaggctcttaaaataaaga

SEQ ID NO: 247267 - DNA, 33 bp, Homo sapien
ctttttccaagttcctcaaaagcagagtgcctc

SEQ ID NO: 247268 - DNA, 33 bp, Homo sapien
ctttttccaagttccttaaaagcagagtgcctc

SEQ ID NO: 247269 - DNA, 33 bp, Homo sapien
agaaccaatctcgggcaataaaattaaagaatt

SEQ ID NO: 247270 - DNA, 33 bp, Homo sapien
agaaccaatctcgggcgataaaattaaagaatt

SEQ ID NO: 247271 - DNA, 33 bp, Homo sapien
cattatcagatacctacgtgtgccatgtgatgc

SEQ ID NO: 247272 - DNA, 33 bp, Homo sapien
cattatcagatacctatgtgtgccatgtgatgc

SEQ ID NO: 247273 - DNA, 33 bp, Homo sapien
gcagctggtcttgtcccgactaatccaaacacc

SEQ ID NO: 247274 - DNA, 33 bp, Homo sapien
gcagctggtcttgtcctgactaatccaaacacc

SEQ ID NO: 247275 - DNA, 33 bp, Homo sapien
tgctctttctgcccaacgattctcatacaagct

SEQ ID NO: 247276 - DNA, 33 bp, Homo sapien
tgctctttctgcccaaggattctcatacaagct

SEQ ID NO: 247277 - DNA, 33 bp, Homo sapien
gcctccctaatagccaaataaatttgtatttaa

SEQ ID NO: 247278 - DNA, 33 bp, Homo sapien
gcctccctaatagccatataaatttgtatttaa

SEQ ID NO: 247279 - DNA, 33 bp, Homo sapien
attgctgcatagtacaaccccaaaactcagtga

SEQ ID NO: 247280 - DNA, 33 bp, Homo sapien
attgctgcatagtacatccccaaaactcagtga

SEQ ID NO: 247281 - DNA, 33 bp, Homo sapien
gaggctggggacatgagactctgatttagttgg

SEQ ID NO: 247282 - DNA, 33 bp, Homo sapien
gaggctggggacatgatactctgatttagttgg

SEQ ID NO: 247283 - DNA, 33 bp, Homo sapien
atgcaaattatacctcaataaggttgatataaa

SEQ ID NO: 247284 - DNA, 33 bp, Homo sapien
atgcaaattatacctcgataaggttgatataaa

SEQ ID NO: 247285 - DNA, 33 bp, Homo sapien
tccaaccaagaaaccaaggtagtagaggatctt

SEQ ID NO: 247286 - DNA, 33 bp, Homo sapien
tccaaccaagaaaccagggtagtagaggatctt

SEQ ID NO: 247287 - DNA, 33 bp, Homo sapien
gctttaaatgtcaaagaaaatggtttaggatgt

SEQ ID NO: 247288 - DNA, 33 bp, Homo sapien
gctttaaatgtcaaaggaaatggtttaggatgt

SEQ ID NO: 247289 - DNA, 33 bp, Homo sapien
tgcttgattagagcgaagcctggctcctgcacg

SEQ ID NO: 247290 - DNA, 33 bp, Homo sapien
tgcttgattagagcgaggcctggctcctgcacg

SEQ ID NO: 247291 - DNA, 33 bp, Homo sapien
ctactcccctcagcaacgcgcagtggcaatagt

SEQ ID NO: 247292 - DNA, 33 bp, Homo sapien
ctactcccctcagcaatgcgcagtggcaatagt

SEQ ID NO: 247293 - DNA, 33 bp, Homo sapien
ggaagaaaagaaaaaaactataggctcgaagtt

SEQ ID NO: 247294 - DNA, 33 bp, Homo sapien
ggaagaaaagaaaaaagctataggctcgaagtt

SEQ ID NO: 247295 - DNA, 33 bp, Homo sapien
gcaggtagctccgatccgatcacgggtctctcc

SEQ ID NO: 247296 - DNA, 33 bp, Homo sapien
gcaggtagctccgatctgatcacgggtctctcc

SEQ ID NO: 247297 - DNA, 33 bp, Homo sapien
cccatgaatatgtaaagtagacctactgaagaa

SEQ ID NO: 247298 - DNA, 33 bp, Homo sapien
cccatgaatatgtaaattagacctactgaagaa

SEQ ID NO: 247299 - DNA, 33 bp, Homo sapien
gaacatgagtatgaagcagaaaactggtgcctt

SEQ ID NO: 247300 - DNA, 33 bp, Homo sapien
gaacatgagtatgaaggagaaaactggtgcctt

SEQ ID NO: 247301 - DNA, 33 bp, Homo sapien
ttaagagcttagtatcaattatcctggctgaca

SEQ ID NO: 247302 - DNA, 33 bp, Homo sapien
ttaagagcttagtatcgattatcctggctgaca

SEQ ID NO: 247303 - DNA, 33 bp, Homo sapien
ttagggttcactagacactgggacagagatggt

SEQ ID NO: 247304 - DNA, 33 bp, Homo sapien
ttagggttcactagacgctgggacagagatggt

SEQ ID NO: 247305 - DNA, 33 bp, Homo sapien
agagcagatgactcaccggatggttttgtgctg

SEQ ID NO: 247306 - DNA, 33 bp, Homo sapien
agagcagatgactcactggatggttttgtgctg

SEQ ID NO: 247307 - DNA, 33 bp, Homo sapien
gccttccaaaccaaaggctcatcataacagatc

SEQ ID NO: 247308 - DNA, 33 bp, Homo sapien
gccttccaaaccaaagtctcatcataacagatc

SEQ ID NO: 247309 - DNA, 33 bp, Homo sapien
aactctgaggatttccacagctctgggactttt

SEQ ID NO: 247310 - DNA, 33 bp, Homo sapien
aactctgaggatttccgcagctctgggactttt

SEQ ID NO: 247311 - DNA, 33 bp, Homo sapien
gacgagtcataaaccaagcagatttctacctca

SEQ ID NO: 247312 - DNA, 33 bp, Homo sapien
gacgagtcataaaccaggcagatttctacctca

SEQ ID NO: 247313 - DNA, 33 bp, Homo sapien
ctgcctaataaatcaccgcaaaagttttttaaa

SEQ ID NO: 247314 - DNA, 33 bp, Homo sapien
ctgcctaataaatcactgcaaaagttttttaaa

SEQ ID NO: 247315 - DNA, 33 bp, Homo sapien
tctcatgaaaagttgcaatctagttgttaaaga

SEQ ID NO: 247316 - DNA, 33 bp, Homo sapien
tctcatgaaaagttgctatctagttgttaaaga

SEQ ID NO: 247317 - DNA, 33 bp, Homo sapien
aaaggtgtccactggggcatacaaataattaga

SEQ ID NO: 247318 - DNA, 33 bp, Homo sapien
aaaggtgtccactgggtcatacaaataattaga

SEQ ID NO: 247319 - DNA, 33 bp, Homo sapien
ctccaaggagcagcggcccattcatattagctg

SEQ ID NO: 247320 - DNA, 33 bp, Homo sapien
ctccaaggagcagcggtccattcatattagctg

SEQ ID NO: 247321 - DNA, 33 bp, Homo sapien
atgttgtatggatggcaacaccaaatacctcat

SEQ ID NO: 247322 - DNA, 33 bp, Homo sapien
atgttgtatggatggcgacaccaaatacctcat

SEQ ID NO: 247323 - DNA, 33 bp, Homo sapien
ctgggagttcccttaaaccatgactgacaggcg

SEQ ID NO: 247324 - DNA, 33 bp, Homo sapien
ctgggagttcccttaatccatgactgacaggcg

SEQ ID NO: 247325 - DNA, 33 bp, Homo sapien
cactcacctgggtccaatcatatttctgctgct

SEQ ID NO: 247326 - DNA, 33 bp, Homo sapien
cactcacctgggtccagtcatatttctgctgct

SEQ ID NO: 247327 - DNA, 33 bp, Homo sapien
aaaaccacccagcacagtacctgactcaataaa

SEQ ID NO: 247328 - DNA, 33 bp, Homo sapien
aaaaccacccagcacattacctgactcaataaa

SEQ ID NO: 247329 - DNA, 33 bp, Homo sapien
ggtcagagtgtgagtccacttcttcactaacta

SEQ ID NO: 247330 - DNA, 33 bp, Homo sapien
ggtcagagtgtgagtctacttcttcactaacta

SEQ ID NO: 247331 - DNA, 33 bp, Homo sapien
taagattgtgttttgggactcactggcttaact

SEQ ID NO: 247332 - DNA, 33 bp, Homo sapien
taagattgtgttttggtactcactggcttaact

SEQ ID NO: 247333 - DNA, 33 bp, Homo sapien
tgcaaagcaaatgataacacttccttatatggt

SEQ ID NO: 247334 - DNA, 33 bp, Homo sapien
tgcaaagcaaatgatagcacttccttatatggt

SEQ ID NO: 247335 - DNA, 33 bp, Homo sapien
tggattcacccaaataacccaggataatctccc

SEQ ID NO: 247336 - DNA, 33 bp, Homo sapien
tggattcacccaaatagcccaggataatctccc

SEQ ID NO: 247337 - DNA, 33 bp, Homo sapien
ctccaggtacaggtcaaaaatctgcagcaatgg

SEQ ID NO: 247338 - DNA, 33 bp, Homo sapien
ctccaggtacaggtcagaaatctgcagcaatgg

SEQ ID NO: 247339 - DNA, 33 bp, Homo sapien
gggaatgggagcgacacgctaaatccaggtcac

SEQ ID NO: 247340 - DNA, 33 bp, Homo sapien
gggaatgggagcgacatgctaaatccaggtcac

SEQ ID NO: 247341 - DNA, 33 bp, Homo sapien
tcctgcctagcaaaaaatgactccttggaattg

SEQ ID NO: 247342 - DNA, 33 bp, Homo sapien
tcctgcctagcaaaaagtgactccttggaattg

SEQ ID NO: 247343 - DNA, 33 bp, Homo sapien
catactgctgagtggaaaagaagtgagaaccta

SEQ ID NO: 247344 - DNA, 33 bp, Homo sapien
catactgctgagtggagaagaagtgagaaccta

SEQ ID NO: 247345 - DNA, 33 bp, Homo sapien
ctgcctgtgttttctacgggccagaagctgcac

SEQ ID NO: 247346 - DNA, 33 bp, Homo sapien
ctgcctgtgttttctatgggccagaagctgcac

SEQ ID NO: 247347 - DNA, 33 bp, Homo sapien
tgtttcgaccaaagaacgtttccaagtggaagc

SEQ ID NO: 247348 - DNA, 33 bp, Homo sapien
tgtttcgaccaaagaaggtttccaagtggaagc

SEQ ID NO: 247349 - DNA, 33 bp, Homo sapien
tgcagggttgttgagaagaaccaatgagttaat

SEQ ID NO: 247350 - DNA, 33 bp, Homo sapien
tgcagggttgttgagaggaaccaatgagttaat

SEQ ID NO: 247351 - DNA, 33 bp, Homo sapien
gagggcctccctgaccactcagtttaaaacagc

SEQ ID NO: 247352 - DNA, 33 bp, Homo sapien
gagggcctccctgaccgctcagtttaaaacagc

SEQ ID NO: 247353 - DNA, 33 bp, Homo sapien
ttcaccaactgatgagaagatcaacaaaatgtg

SEQ ID NO: 247354 - DNA, 33 bp, Homo sapien
ttcaccaactgatgagcagatcaacaaaatgtg

SEQ ID NO: 247355 - DNA, 33 bp, Homo sapien
agtgaaataattgaaacgtgtttaactttgagt

SEQ ID NO: 247356 - DNA, 33 bp, Homo sapien
agtgaaataattgaaatgtgtttaactttgagt

SEQ ID NO: 247357 - DNA, 33 bp, Homo sapien
ttgctagtttccaaagcccttttcatgatgtct

SEQ ID NO: 247358 - DNA, 33 bp, Homo sapien
ttgctagtttccaaagtccttttcatgatgtct

SEQ ID NO: 247359 - DNA, 33 bp, Homo sapien
cccctgaaatacaaacagggcaaaatggaaggc

SEQ ID NO: 247360 - DNA, 33 bp, Homo sapien
cccctgaaatacaaacggggcaaaatggaaggc

SEQ ID NO: 247361 - DNA, 33 bp, Homo sapien
ctgctctggtgcaccacgaggggtcagaatgaa

SEQ ID NO: 247362 - DNA, 33 bp, Homo sapien
ctgctctggtgcaccatgaggggtcagaatgaa

SEQ ID NO: 247363 - DNA, 33 bp, Homo sapien
tcttatctgcctcaaagatttagcttctgaata

SEQ ID NO: 247364 - DNA, 33 bp, Homo sapien
tcttatctgcctcaaatatttagcttctgaata

SEQ ID NO: 247365 - DNA, 33 bp, Homo sapien
ggcaattcagtgaaaaattacctaatagcactg

SEQ ID NO: 247366 - DNA, 33 bp, Homo sapien
ggcaattcagtgaaaagttacctaatagcactg

SEQ ID NO: 247367 - DNA, 33 bp, Homo sapien
ctctccaggcgagtaccggcattttcacagtaa

SEQ ID NO: 247368 - DNA, 33 bp, Homo sapien
ctctccaggcgagtactggcattttcacagtaa

SEQ ID NO: 247369 - DNA, 33 bp, Homo sapien
tcttatcccaaggaccaattcttgaggccctcg

SEQ ID NO: 247370 - DNA, 33 bp, Homo sapien
tcttatcccaaggaccgattcttgaggccctcg

SEQ ID NO: 247371 - DNA, 33 bp, Homo sapien
acagatacagaatcaaaaagagtggttaccagg

SEQ ID NO: 247372 - DNA, 33 bp, Homo sapien
acagatacagaatcaagaagagtggttaccagg

SEQ ID NO: 247373 - DNA, 33 bp, Homo sapien
tgtaaaatgagagttacaaaagcaactatgccc

SEQ ID NO: 247374 - DNA, 33 bp, Homo sapien
tgtaaaatgagagttataaaagcaactatgccc

SEQ ID NO: 247375 - DNA, 33 bp, Homo sapien
gcagggtaggggttcaatcctagtcaattactt

SEQ ID NO: 247376 - DNA, 33 bp, Homo sapien
gcagggtaggggttcagtcctagtcaattactt

SEQ ID NO: 247377 - DNA, 33 bp, Homo sapien
ccacctcatcctgtgaatagcaaagccattgca

SEQ ID NO: 247378 - DNA, 33 bp, Homo sapien
ccacctcatcctgtgagtagcaaagccattgca

SEQ ID NO: 247379 - DNA, 33 bp, Homo sapien
tagaaacaacctgtatcaacagcagaattatta

SEQ ID NO: 247380 - DNA, 33 bp, Homo sapien
tagaaacaacctgtattaacagcagaattatta

SEQ ID NO: 247381 - DNA, 33 bp, Homo sapien
tcctctttggaggctaagccatctgctgtccct

SEQ ID NO: 247382 - DNA, 33 bp, Homo sapien
tcctctttggaggctaggccatctgctgtccct

SEQ ID NO: 247383 - DNA, 33 bp, Homo sapien
ctcccctgccctgcaacagtttcactaccttaa

SEQ ID NO: 247384 - DNA, 33 bp, Homo sapien
ctcccctgccctgcaagagtttcactaccttaa

SEQ ID NO: 247385 - DNA, 33 bp, Homo sapien
aaataagaaaccaccagcccagaagatctcagc

SEQ ID NO: 247386 - DNA, 33 bp, Homo sapien
aaataagaaaccaccatcccagaagatctcagc

SEQ ID NO: 247387 - DNA, 33 bp, Homo sapien
gcagctgaatgcaaaaaacttttataagaaacc

SEQ ID NO: 247388 - DNA, 33 bp, Homo sapien
gcagctgaatgcaaaacacttttataagaaacc

SEQ ID NO: 247389 - DNA, 33 bp, Homo sapien
tgttagaggtgtaagaaagaatgaatagtgaag

SEQ ID NO: 247390 - DNA, 33 bp, Homo sapien
tgttagaggtgtaagacagaatgaatagtgaag

SEQ ID NO: 247391 - DNA, 33 bp, Homo sapien
actcttgatccagagaagacaaagctcctcagt

SEQ ID NO: 247392 - DNA, 33 bp, Homo sapien
actcttgatccagagaggacaaagctcctcagt

SEQ ID NO: 247393 - DNA, 33 bp, Homo sapien
tctcagagccagggaaatacagaaattagcacc

SEQ ID NO: 247394 - DNA, 33 bp, Homo sapien
tctcagagccagggaagtacagaaattagcacc

SEQ ID NO: 247395 - DNA, 33 bp, Homo sapien
caatgactataatgaacggtgaggttggagggg

SEQ ID NO: 247396 - DNA, 33 bp, Homo sapien
caatgactataatgaatggtgaggttggagggg

SEQ ID NO: 247397 - DNA, 33 bp, Homo sapien
gaatgaacaaaagataacaagtgtgaggatgtg

SEQ ID NO: 247398 - DNA, 33 bp, Homo sapien
gaatgaacaaaagatagcaagtgtgaggatgtg

SEQ ID NO: 247399 - DNA, 33 bp, Homo sapien
caaggttgtgttaactcaaggacacaaaaaata

SEQ ID NO: 247400 - DNA, 33 bp, Homo sapien
caaggttgtgttaactgaaggacacaaaaaata

SEQ ID NO: 247401 - DNA, 33 bp, Homo sapien
atttggaaacagaggaccaagtgtgtaaggacg

SEQ ID NO: 247402 - DNA, 33 bp, Homo sapien
atttggaaacagaggagcaagtgtgtaaggacg

SEQ ID NO: 247403 - DNA, 33 bp, Homo sapien
acccatcaaccctggacctcaaacttgacattg

SEQ ID NO: 247404 - DNA, 33 bp, Homo sapien
acccatcaaccctggatctcaaacttgacattg

SEQ ID NO: 247405 - DNA, 33 bp, Homo sapien
ggatgatggatttatgccagtacctcacatata

SEQ ID NO: 247406 - DNA, 33 bp, Homo sapien
ggatgatggatttatggcagtacctcacatata

SEQ ID NO: 247407 - DNA, 33 bp, Homo sapien
cctatgctctgaatgaagtgtgaccagagaatt

SEQ ID NO: 247408 - DNA, 33 bp, Homo sapien
cctatgctctgaatgacgtgtgaccagagaatt

SEQ ID NO: 247409 - DNA, 33 bp, Homo sapien
tgatcttggtttgatgaattagttaggataaca

SEQ ID NO: 247410 - DNA, 33 bp, Homo sapien
tgatcttggtttgatgtattagttaggataaca

SEQ ID NO: 247411 - DNA, 33 bp, Homo sapien
cctacattagcacagcagaaaaaaaaatcagaa

SEQ ID NO: 247412 - DNA, 33 bp, Homo sapien
cctacattagcacagcggaaaaaaaaatcagaa

SEQ ID NO: 247413 - DNA, 33 bp, Homo sapien
atccagcatacttgtagcttgtccataattaca

SEQ ID NO: 247414 - DNA, 33 bp, Homo sapien
atccagcatacttgtatcttgtccataattaca

SEQ ID NO: 247415 - DNA, 33 bp, Homo sapien
gtctggcagatggctaaaagtggcgctttctct

SEQ ID NO: 247416 - DNA, 33 bp, Homo sapien
gtctggcagatggctagaagtggcgctttctct

SEQ ID NO: 247417 - DNA, 33 bp, Homo sapien
gagcgtaacatttgaaagaacacagtttgatgg

SEQ ID NO: 247418 - DNA, 33 bp, Homo sapien
gagcgtaacatttgaaggaacacagtttgatgg

SEQ ID NO: 247419 - DNA, 33 bp, Homo sapien
tattgcttattgcctacatataaaaggtgacag

SEQ ID NO: 247420 - DNA, 33 bp, Homo sapien
tattgcttattgcctatatataaaaggtgacag

SEQ ID NO: 247421 - DNA, 33 bp, Homo sapien
gctatgaacataaaaactcacatgtaaggacac

SEQ ID NO: 247422 - DNA, 33 bp, Homo sapien
gctatgaacataaaaagtcacatgtaaggacac

SEQ ID NO: 247423 - DNA, 33 bp, Homo sapien
tttcctccttcatccaatctcatatctctgaca

SEQ ID NO: 247424 - DNA, 33 bp, Homo sapien
tttcctccttcatccagtctcatatctctgaca

SEQ ID NO: 247425 - DNA, 33 bp, Homo sapien
gaaatcaacagggttgaaaactgagaaaaagtg

SEQ ID NO: 247426 - DNA, 33 bp, Homo sapien
gaaatcaacagggttggaaactgagaaaaagtg

SEQ ID NO: 247427 - DNA, 33 bp, Homo sapien
tcagtatgtacccatacgttctgtgggtatact

SEQ ID NO: 247428 - DNA, 33 bp, Homo sapien
tcagtatgtacccatatgttctgtgggtatact

SEQ ID NO: 247429 - DNA, 33 bp, Homo sapien
tcacccaggctggaacacatagctcactgcggc

SEQ ID NO: 247430 - DNA, 33 bp, Homo sapien
tcacccaggctggaacgcatagctcactgcggc

SEQ ID NO: 247431 - DNA, 33 bp, Homo sapien
gtaggggcctggggacaaaaccagaattctgca

SEQ ID NO: 247432 - DNA, 33 bp, Homo sapien
gtaggggcctggggacgaaaccagaattctgca

SEQ ID NO: 247433 - DNA, 33 bp, Homo sapien
ttaatatatgtaatcaagcttagaagtgtgtct

SEQ ID NO: 247434 - DNA, 33 bp, Homo sapien
ttaatatatgtaatcaggcttagaagtgtgtct

SEQ ID NO: 247435 - DNA, 33 bp, Homo sapien
agcgcaagatgatgtcaatggcctttttcacct

SEQ ID NO: 247436 - DNA, 33 bp, Homo sapien
agcgcaagatgatgtcgatggcctttttcacct

SEQ ID NO: 247437 - DNA, 33 bp, Homo sapien
tttgttcataggcttcaattctttcactgtggt

SEQ ID NO: 247438 - DNA, 33 bp, Homo sapien
tttgttcataggcttcgattctttcactgtggt

SEQ ID NO: 247439 - DNA, 33 bp, Homo sapien
atccccaggtctactcaaggctcctcaccagtg

SEQ ID NO: 247440 - DNA, 33 bp, Homo sapien
atccccaggtctactcgaggctcctcaccagtg

SEQ ID NO: 247441 - DNA, 33 bp, Homo sapien
ctcacagtccagaaccaacaggctaagccatgc

SEQ ID NO: 247442 - DNA, 33 bp, Homo sapien
ctcacagtccagaaccgacaggctaagccatgc

SEQ ID NO: 247443 - DNA, 33 bp, Homo sapien
tgttgacatgcctccaactgggctcggatctcg

SEQ ID NO: 247444 - DNA, 33 bp, Homo sapien
tgttgacatgcctccagctgggctcggatctcg

SEQ ID NO: 247445 - DNA, 33 bp, Homo sapien
ttcctgcaaagtatctaaagaagagggcccctt

SEQ ID NO: 247446 - DNA, 33 bp, Homo sapien
ttcctgcaaagtatctgaagaagagggcccctt

SEQ ID NO: 247447 - DNA, 33 bp, Homo sapien
aaacattactaatcaaccacggtgctaccgctt

SEQ ID NO: 247448 - DNA, 33 bp, Homo sapien
aaacattactaatcaatcacggtgctaccgctt

SEQ ID NO: 247449 - DNA, 33 bp, Homo sapien
ggtctaatattgaaaccaatagtccagtggtgg

SEQ ID NO: 247450 - DNA, 33 bp, Homo sapien
ggtctaatattgaaacgaatagtccagtggtgg

SEQ ID NO: 247451 - DNA, 33 bp, Homo sapien
gctgccagagctgcggaaagacggatcccacct

SEQ ID NO: 247452 - DNA, 33 bp, Homo sapien
gctgccagagctgcgggaagacggatcccacct

SEQ ID NO: 247453 - DNA, 33 bp, Homo sapien
acttggcacccattcaatcatacatgtctcaga

SEQ ID NO: 247454 - DNA, 33 bp, Homo sapien
acttggcacccattcagtcatacatgtctcaga

SEQ ID NO: 247455 - DNA, 33 bp, Homo sapien
ctttagcgtcaacttacctggttccatcgaaaa

SEQ ID NO: 247456 - DNA, 33 bp, Homo sapien
ctttagcgtcaacttatctggttccatcgaaaa

SEQ ID NO: 247457 - DNA, 33 bp, Homo sapien
ggaggcaatcaaatacacatttatctcagcaga

SEQ ID NO: 247458 - DNA, 33 bp, Homo sapien
ggaggcaatcaaatacgcatttatctcagcaga

SEQ ID NO: 247459 - DNA, 33 bp, Homo sapien
ctatggtctctagtacaatgttcattattaata

SEQ ID NO: 247460 - DNA, 33 bp, Homo sapien
ctatggtctctagtacgatgttcattattaata

SEQ ID NO: 247461 - DNA, 33 bp, Homo sapien
tgtatgtttcactgtacataaaaggcttagagt

SEQ ID NO: 247462 - DNA, 33 bp, Homo sapien
tgtatgtttcactgtatataaaaggcttagagt

SEQ ID NO: 247463 - DNA, 33 bp, Homo sapien
tcccgttgagccaaagaaggcagacatgaagta

SEQ ID NO: 247464 - DNA, 33 bp, Homo sapien
tcccgttgagccaaaggaggcagacatgaagta

SEQ ID NO: 247465 - DNA, 33 bp, Homo sapien
taagaactagatccccaaatgagctgctaccct

SEQ ID NO: 247466 - DNA, 33 bp, Homo sapien
taagaactagatcccccaatgagctgctaccct

SEQ ID NO: 247467 - DNA, 33 bp, Homo sapien
caacaagacatgagaaaggccagtgctcacccg

SEQ ID NO: 247468 - DNA, 33 bp, Homo sapien
caacaagacatgagaagggccagtgctcacccg

SEQ ID NO: 247469 - DNA, 33 bp, Homo sapien
ggaccaaaattgtctaaaagtgtgaagtattac

SEQ ID NO: 247470 - DNA, 33 bp, Homo sapien
ggaccaaaattgtctacaagtgtgaagtattac

SEQ ID NO: 247471 - DNA, 33 bp, Homo sapien
attatgtggtctacacaggtgcagctggtatta

SEQ ID NO: 247472 - DNA, 33 bp, Homo sapien
attatgtggtctacacgggtgcagctggtatta

SEQ ID NO: 247473 - DNA, 33 bp, Homo sapien
atgctaatactattcacagtaatttccaagaat

SEQ ID NO: 247474 - DNA, 33 bp, Homo sapien
atgctaatactattcagagtaatttccaagaat

SEQ ID NO: 247475 - DNA, 33 bp, Homo sapien
attgccagatgatctccagaagtttcttttaga

SEQ ID NO: 247476 - DNA, 33 bp, Homo sapien
attgccagatgatctctagaagtttcttttaga

SEQ ID NO: 247477 - DNA, 33 bp, Homo sapien
gaagcaccgagagcaagatcacagagttatgag

SEQ ID NO: 247478 - DNA, 33 bp, Homo sapien
gaagcaccgagagcaatatcacagagttatgag

SEQ ID NO: 247479 - DNA, 33 bp, Homo sapien
attttctgcaaagacaatatctgaattttgaat

SEQ ID NO: 247480 - DNA, 33 bp, Homo sapien
attttctgcaaagacagtatctgaattttgaat

SEQ ID NO: 247481 - DNA, 33 bp, Homo sapien
gccattagagctggcacgtaaaaactcaaaatc

SEQ ID NO: 247482 - DNA, 33 bp, Homo sapien
gccattagagctggcatgtaaaaactcaaaatc

SEQ ID NO: 247483 - DNA, 33 bp, Homo sapien; identical to SEQ ID NO: 247481

SEQ ID NO: 247484 - DNA, 33 bp, Homo sapien; identical to SEQ ID NO: 247482

SEQ ID NO: 247485 - DNA, 33 bp, Homo sapien
gactcactcttgtgggcagaattctgttccatg

SEQ ID NO: 247486 - DNA, 33 bp, Homo sapien
gactcactcttgtgggtagaattctgttccatg

SEQ ID NO: 247487 - DNA, 33 bp, Homo sapien
atcaccccaacctctcaatttcctcatcacatc

SEQ ID NO: 247488 - DNA, 33 bp, Homo sapien
atcaccccaacctctcgatttcctcatcacatc

SEQ ID NO: 247489 - DNA, 33 bp, Homo sapien
ttaggaatgaggactcaccttcgtctctgcttt

SEQ ID NO: 247490 - DNA, 33 bp, Homo sapien
ttaggaatgaggactcgccttcgtctctgcttt

SEQ ID NO: 247491 - DNA, 33 bp, Homo sapien
cgcagacagaggccacaagattcctaacctccc

SEQ ID NO: 247492 - DNA, 33 bp, Homo sapien
cgcagacagaggccacgagattcctaacctccc

SEQ ID NO: 247493 - DNA, 33 bp, Homo sapien
ttcctgtctgcacccaatgactttcttgattat

SEQ ID NO: 247494 - DNA, 33 bp, Homo sapien
ttcctgtctgcacccagtgactttcttgattat

SEQ ID NO: 247495 - DNA, 33 bp, Homo sapien
ccactgttccaatcaaatggcaccagggtggtc

SEQ ID NO: 247496 - DNA, 33 bp, Homo sapien
ccactgttccaatcaagtggcaccagggtggtc

SEQ ID NO: 247497 - DNA, 33 bp, Homo sapien
cctcttctttcttctgaacttctacctgaacac

SEQ ID NO: 247498 - DNA, 33 bp, Homo sapien
cctcttctttcttctggacttctacctgaacac

SEQ ID NO: 247499 - DNA, 33 bp, Homo sapien
ctcagccagtcctcagccaggtagccgtgatag

SEQ ID NO: 247500 - DNA, 33 bp, Homo sapien
ctcagccagtcctcagtcaggtagccgtgatag

SEQ ID NO: 247501 - DNA, 33 bp, Homo sapien
agaattagcattgtcacctcaaggtcacaagat

SEQ ID NO: 247502 - DNA, 33 bp, Homo sapien
agaattagcattgtcatctcaaggtcacaagat

SEQ ID NO: 247503 - DNA, 33 bp, Homo sapien
ctttttataaagtcaaaggcaactaaaattatg

SEQ ID NO: 247504 - DNA, 33 bp, Homo sapien
ctttttataaagtcaacggcaactaaaattatg

SEQ ID NO: 247505 - DNA, 33 bp, Homo sapien
tagtgctatgaaaaaaaaattcagtaaggtaag

SEQ ID NO: 247506 - DNA, 33 bp, Homo sapien
tagtgctatgaaaaaagaattcagtaaggtaag

SEQ ID NO: 247507 - DNA, 33 bp, Homo sapien
gcaggaggatgagcgcaatgacttcagaccact

SEQ ID NO: 247508 - DNA, 33 bp, Homo sapien
gcaggaggatgagcgcgatgacttcagaccact

SEQ ID NO: 247509 - DNA, 33 bp, Homo sapien
tctcctgtctctgccacggtccccagtggatac

SEQ ID NO: 247510 - DNA, 33 bp, Homo sapien
tctcctgtctctgccatggtccccagtggatac

SEQ ID NO: 247511 - DNA, 33 bp, Homo sapien
caaccgtgcctggcataatcagattttttaaaa

SEQ ID NO: 247512 - DNA, 33 bp, Homo sapien
caaccgtgcctggcatgatcagattttttaaaa

SEQ ID NO: 247513 - DNA, 33 bp, Homo sapien
cggggactggctgggcactttctggactatctc

SEQ ID NO: 247514 - DNA, 33 bp, Homo sapien
cggggactggctgggcgctttctggactatctc

SEQ ID NO: 247515 - DNA, 33 bp, Homo sapien
caaggtgtttacataaatccacataagttcact

SEQ ID NO: 247516 - DNA, 33 bp, Homo sapien
caaggtgtttacataagtccacataagttcact

SEQ ID NO: 247517 - DNA, 33 bp, Homo sapien
acgcagacagattttaaaaaagcaccaaataaa

SEQ ID NO: 247518 - DNA, 33 bp, Homo sapien
acgcagacagattttagaaaagcaccaaataaa

SEQ ID NO: 247519 - DNA, 33 bp, Homo sapien
tttccctgaaagcagacgtcagtatcaattcta

SEQ ID NO: 247520 - DNA, 33 bp, Homo sapien
tttccctgaaagcagatgtcagtatcaattcta

SEQ ID NO: 247521 - DNA, 33 bp, Homo sapien
gtgtaaatgaatactgcatggctctttcaaaaa

SEQ ID NO: 247522 - DNA, 33 bp, Homo sapien
gtgtaaatgaatactgtatggctctttcaaaaa

SEQ ID NO: 247523 - DNA, 33 bp, Homo sapien
gttctgaggaggaggactagacgggaggtagag

SEQ ID NO: 247524 - DNA, 33 bp, Homo sapien
gttctgaggaggaggagtagacgggaggtagag

SEQ ID NO: 247525 - DNA, 33 bp, Homo sapien
aaagggtgccttttacaaggaaagagatttgga

SEQ ID NO: 247526 - DNA, 33 bp, Homo sapien
aaagggtgccttttacgaggaaagagatttgga

SEQ ID NO: 247527 - DNA, 33 bp, Homo sapien
gccaggcatacagacaccattctaaggatttaa

SEQ ID NO: 247528 - DNA, 33 bp, Homo sapien
gccaggcatacagacagcattctaaggatttaa

SEQ ID NO: 247529 - DNA, 33 bp, Homo sapien
tgattagccagaataaatcacagttgtcccttc

SEQ ID NO: 247530 - DNA, 33 bp, Homo sapien
tgattagccagaataagtcacagttgtcccttc

SEQ ID NO: 247531 - DNA, 33 bp, Homo sapien
ttcacatgtgatcagaccagaagtagcccagca

SEQ ID NO: 247532 - DNA, 33 bp, Homo sapien
ttcacatgtgatcagatcagaagtagcccagca

SEQ ID NO: 247533 - DNA, 33 bp, Homo sapien
aggccaggtttttgtaactctgatatgtgttgg

SEQ ID NO: 247534 - DNA, 33 bp, Homo sapien
aggccaggtttttgtacctctgatatgtgttgg

SEQ ID NO: 247535 - DNA, 33 bp, Homo sapien
cggcactcctttcaagaacagaaaaggggatcc

SEQ ID NO: 247536 - DNA, 33 bp, Homo sapien
cggcactcctttcaaggacagaaaaggggatcc

SEQ ID NO: 247537 - DNA, 33 bp, Homo sapien
tacaggtgcacggaacaaggcctggctaaattt

SEQ ID NO: 247538 - DNA, 33 bp, Homo sapien
tacaggtgcacggaaccaggcctggctaaattt

SEQ ID NO: 247539 - DNA, 33 bp, Homo sapien
ggaagacgaaacgccacggtgcctagaaacagc

SEQ ID NO: 247540 - DNA, 33 bp, Homo sapien
ggaagacgaaacgccatggtgcctagaaacagc

SEQ ID NO: 247541 - DNA, 33 bp, Homo sapien
aagttgttcctggtgtcaaagagtggggtaaag

SEQ ID NO: 247542 - DNA, 33 bp, Homo sapien
aagttgttcctggtgtgaaagagtggggtaaag

SEQ ID NO: 247543 - DNA, 33 bp, Homo sapien
ccactcctgtgctagaaaaattttaggaggtgg

SEQ ID NO: 247544 - DNA, 33 bp, Homo sapien
ccactcctgtgctagagaaattttaggaggtgg

SEQ ID NO: 247545 - DNA, 33 bp, Homo sapien
gttccatttgcttcaccaagaatgtatcaggct

SEQ ID NO: 247546 - DNA, 33 bp, Homo sapien
gttccatttgcttcactaagaatgtatcaggct

SEQ ID NO: 247547 - DNA, 33 bp, Homo sapien
ggaagtggagatgacacaggcacttgacaaagc

SEQ ID NO: 247548 - DNA, 33 bp, Homo sapien
ggaagtggagatgacagaggcacttgacaaagc

SEQ ID NO: 247549 - DNA, 33 bp, Homo sapien
gttaattcattaccaactgaaatgaacaaaata

SEQ ID NO: 247550 - DNA, 33 bp, Homo sapien
gttaattcattaccaagtgaaatgaacaaaata

SEQ ID NO: 247551 - DNA, 33 bp, Homo sapien
tggctgtgtgacccaaacaagtgtcacaacctc

SEQ ID NO: 247552 - DNA, 33 bp, Homo sapien
tggctgtgtgacccaagcaagtgtcacaacctc

SEQ ID NO: 247553 - DNA, 33 bp, Homo sapien
aggaggccattgtctaccatttagtttctgtat

SEQ ID NO: 247554 - DNA, 33 bp, Homo sapien
aggaggccattgtctatcatttagtttctgtat

SEQ ID NO: 247555 - DNA, 33 bp, Homo sapien
tttcatgcaaaccacacgacctggtctaagcct

SEQ ID NO: 247556 - DNA, 33 bp, Homo sapien
tttcatgcaaaccacatgacctggtctaagcct

SEQ ID NO: 247557 - DNA, 33 bp, Homo sapien
ctgagtattcacaagtaaagcgggttggcagcc

SEQ ID NO: 247558 - DNA, 33 bp, Homo sapien
ctgagtattcacaagtgaagcgggttggcagcc

SEQ ID NO: 247559 - DNA, 33 bp, Homo sapien
agaagccagatttcggacaaggtagaacgtgag

SEQ ID NO: 247560 - DNA, 33 bp, Homo sapien
agaagccagatttcgggcaaggtagaacgtgag

SEQ ID NO: 247561 - DNA, 33 bp, Homo sapien
gagggacccaatggcaacttttgaggttctgag

SEQ ID NO: 247562 - DNA, 33 bp, Homo sapien
gagggacccaatggcaccttttgaggttctgag

SEQ ID NO: 247563 - DNA, 33 bp, Homo sapien
actcttccaggatttcacagccagtcattagca

SEQ ID NO: 247564 - DNA, 33 bp, Homo sapien
actcttccaggatttcgcagccagtcattagca

SEQ ID NO: 247565 - DNA, 33 bp, Homo sapien
ctaggacctattccacaatccattcatcatgcc

SEQ ID NO: 247566 - DNA, 33 bp, Homo sapien
ctaggacctattccacgatccattcatcatgcc

SEQ ID NO: 247567 - DNA, 33 bp, Homo sapien
ccagttagtggttaatcactgcctgtcgttccc

SEQ ID NO: 247568 - DNA, 33 bp, Homo sapien
ccagttagtggttaattactgcctgtcgttccc

SEQ ID NO: 247569 - DNA, 33 bp, Homo sapien
gtgtatgactttatgacctgacataggggtagg

SEQ ID NO: 247570 - DNA, 33 bp, Homo sapien
gtgtatgactttatgagctgacataggggtagg

SEQ ID NO: 247571 - DNA, 33 bp, Homo sapien
aaagcgctggaattacaggaatgagggactgta

SEQ ID NO: 247572 - DNA, 33 bp, Homo sapien
aaagcgctggaattacgggaatgagggactgta

SEQ ID NO: 247573 - DNA, 33 bp, Homo sapien
tttagtgggagacaaacggaaagcaagtaaaca

SEQ ID NO: 247574 - DNA, 33 bp, Homo sapien
tttagtgggagacaaatggaaagcaagtaaaca

SEQ ID NO: 247575 - DNA, 33 bp, Homo sapien
tgtcctgctcccagaactcgtagactgggcctt

SEQ ID NO: 247576 - DNA, 33 bp, Homo sapien
tgtcctgctcccagaattcgtagactgggcctt

SEQ ID NO: 247577 - DNA, 33 bp, Homo sapien
aggctggcaacgcctccagaccattggcactct

SEQ ID NO: 247578 - DNA, 33 bp, Homo sapien
aggctggcaacgcctctagaccattggcactct

SEQ ID NO: 247579 - DNA, 33 bp, Homo sapien
aaagaagacagccggaaacccttctgagtggca

SEQ ID NO: 247580 - DNA, 33 bp, Homo sapien
aaagaagacagccggagacccttctgagtggca

SEQ ID NO: 247581 - DNA, 33 bp, Homo sapien
agtgagacaccttgaaagcagatagaccctctg

SEQ ID NO: 247582 - DNA, 33 bp, Homo sapien
agtgagacaccttgaaggcagatagaccctctg

SEQ ID NO: 247583 - DNA, 33 bp, Homo sapien
ttcttcatcctcaacactagagtgcccttaaac

SEQ ID NO: 247584 - DNA, 33 bp, Homo sapien
ttcttcatcctcaacagtagagtgcccttaaac

SEQ ID NO: 247585 - DNA, 33 bp, Homo sapien
actcctggttctaggcaagctcaaaggacaaag

SEQ ID NO: 247586 - DNA, 33 bp, Homo sapien
actcctggttctaggcgagctcaaaggacaaag

SEQ ID NO: 247587 - DNA, 33 bp, Homo sapien
ttccatctgtcaaacacacgtaacaagagtagt

SEQ ID NO: 247588 - DNA, 33 bp, Homo sapien
ttccatctgtcaaacagacgtaacaagagtagt

SEQ ID NO: 247589 - DNA, 33 bp, Homo sapien
cctctaggccaaccctcagaagcttgagaaagc

SEQ ID NO: 247590 - DNA, 33 bp, Homo sapien
cctctaggccaacccttagaagcttgagaaagc

SEQ ID NO: 247591 - DNA, 33 bp, Homo sapien
ggaagaagatgagagacatatggacatggctgg

SEQ ID NO: 247592 - DNA, 33 bp, Homo sapien
ggaagaagatgagagagatatggacatggctgg

SEQ ID NO: 247593 - DNA, 33 bp, Homo sapien
ccccaagaggtgaacactctcctgtttgagtct

SEQ ID NO: 247594 - DNA, 33 bp, Homo sapien
ccccaagaggtgaacattctcctgtttgagtct

SEQ ID NO: 247595 - DNA, 33 bp, Homo sapien
ggagagaagaagctataaggcgtcttgaggcct

SEQ ID NO: 247596 - DNA, 33 bp, Homo sapien
ggagagaagaagctatgaggcgtcttgaggcct

SEQ ID NO: 247597 - DNA, 33 bp, Homo sapien
atggttaaaaccttccagagtctaacagatcaa

SEQ ID NO: 247598 - DNA, 33 bp, Homo sapien
atggttaaaaccttccggagtctaacagatcaa

SEQ ID NO: 247599 - DNA, 33 bp, Homo sapien
ttgaaaacaattggaaagaaatggagaccagga

SEQ ID NO: 247600 - DNA, 33 bp, Homo sapien
ttgaaaacaattggaaggaaatggagaccagga

SEQ ID NO: 247601 - DNA, 33 bp, Homo sapien
actctgtggcaaatgcgactatcaatccccaaa

SEQ ID NO: 247602 - DNA, 33 bp, Homo sapien
actctgtggcaaatgctactatcaatccccaaa

SEQ ID NO: 247603 - DNA, 33 bp, Homo sapien
gctgtcctgtgaactgaagggtgtttagcaaca

SEQ ID NO: 247604 - DNA, 33 bp, Homo sapien
gctgtcctgtgaactggagggtgtttagcaaca

SEQ ID NO: 247605 - DNA, 33 bp, Homo sapien
gattaaatcaagctatgagtgtctggcatatag

SEQ ID NO: 247606 - DNA, 33 bp, Homo sapien
gattaaatcaagctattagtgtctggcatatag

SEQ ID NO: 247607 - DNA, 33 bp, Homo sapien
taataggcaaaaattaaatggtgcaactatgct

SEQ ID NO: 247608 - DNA, 33 bp, Homo sapien
taataggcaaaaattagatggtgcaactatgct

SEQ ID NO: 247609 - DNA, 33 bp, Homo sapien
tagttgcttttcagaccgaccacaagtccagag

SEQ ID NO: 247610 - DNA, 33 bp, Homo sapien
tagttgcttttcagactgaccacaagtccagag

SEQ ID NO: 247611 - DNA, 33 bp, Homo sapien
caaccgctggcccatcaaagtccagtcctgccc

SEQ ID NO: 247612 - DNA, 33 bp, Homo sapien
caaccgctggcccatcgaagtccagtcctgccc

SEQ ID NO: 247613 - DNA, 33 bp, Homo sapien
aagaatacacatctccaccacaccgcattgcct

SEQ ID NO: 247614 - DNA, 33 bp, Homo sapien
aagaatacacatctccgccacaccgcattgcct

SEQ ID NO: 247615 - DNA, 33 bp, Homo sapien
atcatgttggtgcttaggattatcagcaatttt

SEQ ID NO: 247616 - DNA, 33 bp, Homo sapien
atcatgttggtgcttatgattatcagcaatttt

SEQ ID NO: 247617 - DNA, 33 bp, Homo sapien
aagtttgagaatcaaaggctgagtttttctctc

SEQ ID NO: 247618 - DNA, 33 bp, Homo sapien
aagtttgagaatcaaatgctgagtttttctctc

SEQ ID NO: 247619 - DNA, 33 bp, Homo sapien
catgcaacccccacaactgtcaagaaacagaac

SEQ ID NO: 247620 - DNA, 33 bp, Homo sapien
catgcaacccccacaattgtcaagaaacagaac

SEQ ID NO: 247621 - DNA, 33 bp, Homo sapien
gggtttgactttctccaacattgtgttccttac

SEQ ID NO: 247622 - DNA, 33 bp, Homo sapien
gggtttgactttctccgacattgtgttccttac

SEQ ID NO: 247623 - DNA, 33 bp, Homo sapien
caagaaatatttgtgaagtcatttcatagagca

SEQ ID NO: 247624 - DNA, 33 bp, Homo sapien
caagaaatatttgtgacgtcatttcatagagca

SEQ ID NO: 247625 - DNA, 33 bp, Homo sapien
gagtcagcccagataactgtgaaagctcttcac

SEQ ID NO: 247626 - DNA, 33 bp, Homo sapien
gagtcagcccagataagtgtgaaagctcttcac

SEQ ID NO: 247627 - DNA, 33 bp, Homo sapien
ctttccttctccagggccacatcatcccaggac

SEQ ID NO: 247628 - DNA, 33 bp, Homo sapien
ctttccttctccagggtcacatcatcccaggac

SEQ ID NO: 247629 - DNA, 33 bp, Homo sapien
tctcatggccacaaccacaagaagagcgtcctg

SEQ ID NO: 247630 - DNA, 33 bp, Homo sapien
tctcatggccacaacctcaagaagagcgtcctg

SEQ ID NO: 247631 - DNA, 33 bp, Homo sapien
ccccaggtaatcccaacgtgagcctgggctatg

SEQ ID NO: 247632 - DNA, 33 bp, Homo sapien
ccccaggtaatcccaatgtgagcctgggctatg

SEQ ID NO: 247633 - DNA, 33 bp, Homo sapien
ctgcattgctgggagaagtcctgagtctcagtc

SEQ ID NO: 247634 - DNA, 33 bp, Homo sapien
ctgcattgctgggagaggtcctgagtctcagtc

SEQ ID NO: 247635 - DNA, 33 bp, Homo sapien
caatcctcccttaacaccagaatcacctgcagc

SEQ ID NO: 247636 - DNA, 33 bp, Homo sapien
caatcctcccttaacatcagaatcacctgcagc

SEQ ID NO: 247637 - DNA, 33 bp, Homo sapien
agctgaccagagtgggaagtcagaagtctccat

SEQ ID NO: 247638 - DNA, 33 bp, Homo sapien
agctgaccagagtggggagtcagaagtctccat

SEQ ID NO: 247639 - DNA, 33 bp, Homo sapien
aagcatattctcaggccctacctcaaacctaca

SEQ ID NO: 247640 - DNA, 33 bp, Homo sapien
aagcatattctcaggctctacctcaaacctaca

SEQ ID NO: 247641 - DNA, 33 bp, Homo sapien
tttgtttaactgtctaccttccctactaagtgt

SEQ ID NO: 247642 - DNA, 33 bp, Homo sapien
tttgtttaactgtctatcttccctactaagtgt

SEQ ID NO: 247643 - DNA, 33 bp, Homo sapien
actgagcttagcaatccccaacgtattgatttt

SEQ ID NO: 247644 - DNA, 33 bp, Homo sapien
actgagcttagcaatctccaacgtattgatttt

SEQ ID NO: 247645 - DNA, 33 bp, Homo sapien
tgtcaggtctgcacgaagatctaggaatacagc

SEQ ID NO: 247646 - DNA, 33 bp, Homo sapien
tgtcaggtctgcacgaggatctaggaatacagc

SEQ ID NO: 247647 - DNA, 33 bp, Homo sapien
actatgatggcacatacaaaactttccaaatta

SEQ ID NO: 247648 - DNA, 33 bp, Homo sapien
actatgatggcacatagaaaactttccaaatta

SEQ ID NO: 247649 - DNA, 33 bp, Homo sapien
attcagcaagtatttgaaatgcctactgtgtcc

SEQ ID NO: 247650 - DNA, 33 bp, Homo sapien
attcagcaagtatttggaatgcctactgtgtcc

SEQ ID NO: 247651 - DNA, 33 bp, Homo sapien
tatgactcaaggtccaataacttggctgatcct

SEQ ID NO: 247652 - DNA, 33 bp, Homo sapien
tatgactcaaggtccagtaacttggctgatcct

SEQ ID NO: 247653 - DNA, 33 bp, Homo sapien
gcactttcctgtatgaacgactcaggctaaatg

SEQ ID NO: 247654 - DNA, 33 bp, Homo sapien
gcactttcctgtatgagcgactcaggctaaatg

SEQ ID NO: 247655 - DNA, 33 bp, Homo sapien
tgtgtaagcttggcaagttacttaaacactctg

SEQ ID NO: 247656 - DNA, 33 bp, Homo sapien
tgtgtaagcttggcaatttacttaaacactctg

SEQ ID NO: 247657 - DNA, 33 bp, Homo sapien
aatcagtgcttctttcaaacttaaatgattctc

SEQ ID NO: 247658 - DNA, 33 bp, Homo sapien
aatcagtgcttctttcgaacttaaatgattctc

SEQ ID NO: 247659 - DNA, 33 bp, Homo sapien
cttacctggggcgccaaattgacattctttttt

SEQ ID NO: 247660 - DNA, 33 bp, Homo sapien
cttacctggggcgccagattgacattctttttt

SEQ ID NO: 247661 - DNA, 33 bp, Homo sapien
tatgggcaaacccacaaatattttcttgccagt

SEQ ID NO: 247662 - DNA, 33 bp, Homo sapien
tatgggcaaacccacagatattttcttgccagt

SEQ ID NO: 247663 - DNA, 33 bp, Homo sapien
ttatgtgatcgacatgcagcatttcatcctaga

SEQ ID NO: 247664 - DNA, 33 bp, Homo sapien
ttatgtgatcgacatggagcatttcatcctaga

SEQ ID NO: 247665 - DNA, 33 bp, Homo sapien
agaatattcagaattcacggcccatgggcctaa

SEQ ID NO: 247666 - DNA, 33 bp, Homo sapien
agaatattcagaattcgcggcccatgggcctaa

SEQ ID NO: 247667 - DNA, 33 bp, Homo sapien
ctcatgatcttgaaaccaaattataacgagcaa

SEQ ID NO: 247668 - DNA, 33 bp, Homo sapien
ctcatgatcttgaaactaaattataacgagcaa

SEQ ID NO: 247669 - DNA, 33 bp, Homo sapien
ctcttctgaagaagctaaaatgcgctccctgaa

SEQ ID NO: 247670 - DNA, 33 bp, Homo sapien
ctcttctgaagaagctgaaatgcgctccctgaa

SEQ ID NO: 247671 - DNA, 33 bp, Homo sapien
tattgttaacggtcaactggatggaggctttgg

SEQ ID NO: 247672 - DNA, 33 bp, Homo sapien
tattgttaacggtcaattggatggaggctttgg

SEQ ID NO: 247673 - DNA, 33 bp, Homo sapien
tcttttgggtcatcaaagatagccatatccact

SEQ ID NO: 247674 - DNA, 33 bp, Homo sapien
tcttttgggtcatcaacgatagccatatccact

SEQ ID NO: 247675 - DNA, 33 bp, Homo sapien
agcctatggtattctgcaggaactcagtcatat

SEQ ID NO: 247676 - DNA, 33 bp, Homo sapien
agcctatggtattctgtaggaactcagtcatat

SEQ ID NO: 247677 - DNA, 33 bp, Homo sapien
aaaactaataggaaaacgccctggtgtttggat

SEQ ID NO: 247678 - DNA, 33 bp, Homo sapien
aaaactaataggaaaatgccctggtgtttggat

SEQ ID NO: 247679 - DNA, 33 bp, Homo sapien
gtctactgaagaagaacttcatttagcagataa

SEQ ID NO: 247680 - DNA, 33 bp, Homo sapien
gtctactgaagaagaatttcatttagcagataa

SEQ ID NO: 247681 - DNA, 33 bp, Homo sapien
agctaagagagttttccctggaagtgagggaga

SEQ ID NO: 247682 - DNA, 33 bp, Homo sapien
agctaagagagttttctctggaagtgagggaga

SEQ ID NO: 247683 - DNA, 33 bp, Homo sapien
aaggctgctcttcccaaaacaatttcaaattta

SEQ ID NO: 247684 - DNA, 33 bp, Homo sapien
aaggctgctcttcccagaacaatttcaaattta

SEQ ID NO: 247685 - DNA, 33 bp, Homo sapien
tacttactccaaatcaacggagtgatgtgcctg

SEQ ID NO: 247686 - DNA, 33 bp, Homo sapien
tacttactccaaatcatcggagtgatgtgcctg

SEQ ID NO: 247687 - DNA, 33 bp, Homo sapien
cgaatgactacatagcacttaataataacacgt

SEQ ID NO: 247688 - DNA, 33 bp, Homo sapien
cgaatgactacatagcccttaataataacacgt

SEQ ID NO: 247689 - DNA, 33 bp, Homo sapien
ggggcaatgaggcttaagtatttgtgtttcttg

SEQ ID NO: 247690 - DNA, 33 bp, Homo sapien
ggggcaatgaggcttacgtatttgtgtttcttg

SEQ ID NO: 247691 - DNA, 33 bp, Homo sapien
tccagtcaaattggccccctattctgagtcatt

SEQ ID NO: 247692 - DNA, 33 bp, Homo sapien
tccagtcaaattggcctcctattctgagtcatt

SEQ ID NO: 247693 - DNA, 33 bp, Homo sapien
cacagcaactcagagacaaaagaggggagatgg

SEQ ID NO: 247694 - DNA, 33 bp, Homo sapien
cacagcaactcagagagaaaagaggggagatgg

SEQ ID NO: 247695 - DNA, 33 bp, Homo sapien
ggcatccaggcttgtaccttgacagtctgactc

SEQ ID NO: 247696 - DNA, 33 bp, Homo sapien
ggcatccaggcttgtatcttgacagtctgactc

SEQ ID NO: 247697 - DNA, 33 bp, Homo sapien
ctctcaatgaggtcatcatcatgatattcagga

SEQ ID NO: 247698 - DNA, 33 bp, Homo sapien
ctctcaatgaggtcattatcatgatattcagga

SEQ ID NO: 247699 - DNA, 33 bp, Homo sapien
gtggaaaggacaagtcaagcccagacctgcatt

SEQ ID NO: 247700 - DNA, 33 bp, Homo sapien
gtggaaaggacaagtcgagcccagacctgcatt

SEQ ID NO: 247701 - DNA, 33 bp, Homo sapien
gtacataaatccatcaccccattcagactctcc

SEQ ID NO: 247702 - DNA, 33 bp, Homo sapien
gtacataaatccatcatcccattcagactctcc

SEQ ID NO: 247703 - DNA, 33 bp, Homo sapien
gtaaatatatgaaaagccattgagttgtacact

SEQ ID NO: 247704 - DNA, 33 bp, Homo sapien
gtaaatatatgaaaagtcattgagttgtacact

SEQ ID NO: 247705 - DNA, 33 bp, Homo sapien
ggttacacaatgagaacgctgcagagctggagt

SEQ ID NO: 247706 - DNA, 33 bp, Homo sapien
ggttacacaatgagaatgctgcagagctggagt

SEQ ID NO: 247707 - DNA, 33 bp, Homo sapien
aagtgacccaaacctcactttccaaatctgacc

SEQ ID NO: 247708 - DNA, 33 bp, Homo sapien
aagtgacccaaacctcgctttccaaatctgacc

SEQ ID NO: 247709 - DNA, 33 bp, Homo sapien
taaagagccacaatgaatacttattggataaca

SEQ ID NO: 247710 - DNA, 33 bp, Homo sapien
taaagagccacaatgactacttattggataaca

SEQ ID NO: 247711 - DNA, 33 bp, Homo sapien
tctgcagaccttggaacagcctcaggaatgtag

SEQ ID NO: 247712 - DNA, 33 bp, Homo sapien
tctgcagaccttggaagagcctcaggaatgtag

SEQ ID NO: 247713 - DNA, 33 bp, Homo sapien
tctgcattatcatctccaccccatccagggagg

SEQ ID NO: 247714 - DNA, 33 bp, Homo sapien
tctgcattatcatctctaccccatccagggagg

SEQ ID NO: 247715 - DNA, 33 bp, Homo sapien
tcattcacacaccaaccactaacacgcttgcac

SEQ ID NO: 247716 - DNA, 33 bp, Homo sapien
tcattcacacaccaactactaacacgcttgcac

SEQ ID NO: 247717 - DNA, 33 bp, Homo sapien
tgttttccgccctgccgcatcttgtatctaacg

SEQ ID NO: 247718 - DNA, 33 bp, Homo sapien
tgttttccgccctgcctcatcttgtatctaacg

SEQ ID NO: 247719 - DNA, 33 bp, Homo sapien
tcacagccaggtcaccagaaacttcccacagat

SEQ ID NO: 247720 - DNA, 33 bp, Homo sapien
tcacagccaggtcaccggaaacttcccacagat

SEQ ID NO: 247721 - DNA, 33 bp, Homo sapien
tctttaactaatcatcacaggcagagatatgga

SEQ ID NO: 247722 - DNA, 33 bp, Homo sapien
tctttaactaatcatcgcaggcagagatatgga

SEQ ID NO: 247723 - DNA, 33 bp, Homo sapien
ggatgtgtgaatgccacagtaagaatgctggac

SEQ ID NO: 247724 - DNA, 33 bp, Homo sapien
ggatgtgtgaatgccagagtaagaatgctggac

SEQ ID NO: 247725 - DNA, 33 bp, Homo sapien
ggtgaaatcttgccaccatcccttatttgccct

SEQ ID NO: 247726 - DNA, 33 bp, Homo sapien
ggtgaaatcttgccactatcccttatttgccct

SEQ ID NO: 247727 - DNA, 33 bp, Homo sapien
tgctgacctccctgcacagagaacacatccccc

SEQ ID NO: 247728 - DNA, 33 bp, Homo sapien
tgctgacctccctgcagagagaacacatccccc

SEQ ID NO: 247729 - DNA, 33 bp, Homo sapien
ctggctctttctgtggaaggttagaaccaggac

SEQ ID NO: 247730 - DNA, 33 bp, Homo sapien
ctggctctttctgtgggaggttagaaccaggac

SEQ ID NO: 247731 - DNA, 33 bp, Homo sapien
gagacagaagtgtggagaaaaaaatacatgttt

SEQ ID NO: 247732 - DNA, 33 bp, Homo sapien
gagacagaagtgtggataaaaaaatacatgttt

SEQ ID NO: 247733 - DNA, 33 bp, Homo sapien
attggagacaggattcaattccagaagaacttt

SEQ ID NO: 247734 - DNA, 33 bp, Homo sapien
attggagacaggattcgattccagaagaacttt

SEQ ID NO: 247735 - DNA, 33 bp, Homo sapien
tgcattggaggagatcaataagcaattataatt

SEQ ID NO: 247736 - DNA, 33 bp, Homo sapien
tgcattggaggagatcgataagcaattataatt

SEQ ID NO: 247737 - DNA, 33 bp, Homo sapien
cttgggagcagagaaacaaagagaggaagaggg

SEQ ID NO: 247738 - DNA, 33 bp, Homo sapien
cttgggagcagagaaagaaagagaggaagaggg

SEQ ID NO: 247739 - DNA, 33 bp, Homo sapien
ataacaggaatgatgccatcttgtaaacagcgt

SEQ ID NO: 247740 - DNA, 33 bp, Homo sapien
ataacaggaatgatgctatcttgtaaacagcgt

SEQ ID NO: 247741 - DNA, 33 bp, Homo sapien
gcatcatttgcaatccaaataatctgataatat

SEQ ID NO: 247742 - DNA, 33 bp, Homo sapien
gcatcatttgcaatccgaataatctgataatat

SEQ ID NO: 247743 - DNA, 33 bp, Homo sapien
gcctgctaagcaccacacctgagataagcattt

SEQ ID NO: 247744 - DNA, 33 bp, Homo sapien
gcctgctaagcaccacgcctgagataagcattt

SEQ ID NO: 247745 - DNA, 33 bp, Homo sapien
aacctcctctggaggacggagaagtcaaatacc

SEQ ID NO: 247746 - DNA, 33 bp, Homo sapien
aacctcctctggaggatggagaagtcaaatacc

SEQ ID NO: 247747 - DNA, 33 bp, Homo sapien
cttccatcactctccaatgagaaccaggaactc

SEQ ID NO: 247748 - DNA, 33 bp, Homo sapien
cttccatcactctccagtgagaaccaggaactc

SEQ ID NO: 247749 - DNA, 33 bp, Homo sapien
tgcaaataaactccagaatccttatggctctag

SEQ ID NO: 247750 - DNA, 33 bp, Homo sapien
tgcaaataaactccaggatccttatggctctag

SEQ ID NO: 247751 - DNA, 33 bp, Homo sapien
ccacagtctgaaaatgccatccgttataagagg

SEQ ID NO: 247752 - DNA, 33 bp, Homo sapien
ccacagtctgaaaatgtcatccgttataagagg

SEQ ID NO: 247753 - DNA, 33 bp, Homo sapien
tatagttccagctactcaaaagtgaaaggtagg

SEQ ID NO: 247754 - DNA, 33 bp, Homo sapien
tatagttccagctactgaaaagtgaaaggtagg

SEQ ID NO: 247755 - DNA, 33 bp, Homo sapien
accctgcacagaacagacctttgagaaatggtc

SEQ ID NO: 247756 - DNA, 33 bp, Homo sapien
accctgcacagaacaggcctttgagaaatggtc

SEQ ID NO: 247757 - DNA, 33 bp, Homo sapien
gaaagaggagtctctcaaaattcagcaactgct

SEQ ID NO: 247758 - DNA, 33 bp, Homo sapien
gaaagaggagtctctcgaaattcagcaactgct

SEQ ID NO: 247759 - DNA, 33 bp, Homo sapien
cacaaacaacctggcacgaaggagtgtgtctaa

SEQ ID NO: 247760 - DNA, 33 bp, Homo sapien
cacaaacaacctggcatgaaggagtgtgtctaa

SEQ ID NO: 247761 - DNA, 33 bp, Homo sapien
atttgttgaagaaatacctacctactgtgcaca

SEQ ID NO: 247762 - DNA, 33 bp, Homo sapien
atttgttgaagaaatatctacctactgtgcaca

SEQ ID NO: 247763 - DNA, 33 bp, Homo sapien
taaatcatacggatggccacaggttctagatag

SEQ ID NO: 247764 - DNA, 33 bp, Homo sapien
taaatcatacggatggtcacaggttctagatag

SEQ ID NO: 247765 - DNA, 33 bp, Homo sapien
aagactctaagatggacaccatgcttgaaagag

SEQ ID NO: 247766 - DNA, 33 bp, Homo sapien
aagactctaagatggataccatgcttgaaagag

SEQ ID NO: 247767 - DNA, 33 bp, Homo sapien
caactttacatcctcaaacacaaagtctccccg

SEQ ID NO: 247768 - DNA, 33 bp, Homo sapien
caactttacatcctcagacacaaagtctccccg

SEQ ID NO: 247769 - DNA, 33 bp, Homo sapien
ccggcaggaatgccacaccagcttattccaagc

SEQ ID NO: 247770 - DNA, 33 bp, Homo sapien
ccggcaggaatgccacgccagcttattccaagc

SEQ ID NO: 247771 - DNA, 33 bp, Homo sapien
cccatcagctcctgctaaaaacccaacgctcct

SEQ ID NO: 247772 - DNA, 33 bp, Homo sapien
cccatcagctcctgctgaaaacccaacgctcct

SEQ ID NO: 247773 - DNA, 33 bp, Homo sapien
tcttaaaagcagtccccattcttcagtctctct

SEQ ID NO: 247774 - DNA, 33 bp, Homo sapien
tcttaaaagcagtcccgattcttcagtctctct

SEQ ID NO: 247775 - DNA, 33 bp, Homo sapien
ttttcctctaggcataactttagctgtcatcag

SEQ ID NO: 247776 - DNA, 33 bp, Homo sapien
ttttcctctaggcatagctttagctgtcatcag

SEQ ID NO: 247777 - DNA, 33 bp, Homo sapien
ctttatacgaattcaccggtattccttagagct

SEQ ID NO: 247778 - DNA, 33 bp, Homo sapien
ctttatacgaattcactggtattccttagagct

SEQ ID NO: 247779 - DNA, 33 bp, Homo sapien
caccaggccactgagcacagcatgctatcactt

SEQ ID NO: 247780 - DNA, 33 bp, Homo sapien
caccaggccactgagcgcagcatgctatcactt

SEQ ID NO: 247781 - DNA, 33 bp, Homo sapien
ggttctctttcccggcgctctggtgaccatatc

SEQ ID NO: 247782 - DNA, 33 bp, Homo sapien
ggttctctttcccggctctctggtgaccatatc

SEQ ID NO: 247783 - DNA, 33 bp, Homo sapien
caatggcctttgaaaacgaaattgctgctacat

SEQ ID NO: 247784 - DNA, 33 bp, Homo sapien
caatggcctttgaaaaggaaattgctgctacat

SEQ ID NO: 247785 - DNA, 33 bp, Homo sapien
gagtgccccgaaggacaatgaggcccctcaaca

SEQ ID NO: 247786 - DNA, 33 bp, Homo sapien
gagtgccccgaaggaccatgaggcccctcaaca

SEQ ID NO: 247787 - DNA, 33 bp, Homo sapien
tgcgccatctcctttacaggcatccttcccttg

SEQ ID NO: 247788 - DNA, 33 bp, Homo sapien
tgcgccatctcctttataggcatccttcccttg

SEQ ID NO: 247789 - DNA, 33 bp, Homo sapien
gtcacagaacgggtataaggacacattcaggta

SEQ ID NO: 247790 - DNA, 33 bp, Homo sapien
gtcacagaacgggtatgaggacacattcaggta

SEQ ID NO: 247791 - DNA, 33 bp, Homo sapien
gctgcaccggtcaggcaagggaataatcactcc

SEQ ID NO: 247792 - DNA, 33 bp, Homo sapien
gctgcaccggtcaggcgagggaataatcactcc

SEQ ID NO: 247793 - DNA, 33 bp, Homo sapien
gtgtatcgtttcaaaaagccaaatgtcccactc

SEQ ID NO: 247794 - DNA, 33 bp, Homo sapien
gtgtatcgtttcaaaaggccaaatgtcccactc

SEQ ID NO: 247795 - DNA, 33 bp, Homo sapien
gcgatctctcgagccacagtggtgcaggttact

SEQ ID NO: 247796 - DNA, 33 bp, Homo sapien
gcgatctctcgagccatagtggtgcaggttact

SEQ ID NO: 247797 - DNA, 33 bp, Homo sapien
agggacacaattagcaggggggtccgtcctggc

SEQ ID NO: 247798 - DNA, 33 bp, Homo sapien
agggacacaattagcatgggggtccgtcctggc

SEQ ID NO: 247799 - DNA, 33 bp, Homo sapien
ctgacaatctaatagcaatggtttactgtgcac

SEQ ID NO: 247800 - DNA, 33 bp, Homo sapien
ctgacaatctaatagcgatggtttactgtgcac

SEQ ID NO: 247801 - DNA, 33 bp, Homo sapien
tcgcactgggcctctcaaggagtgttctgtgag

SEQ ID NO: 247802 - DNA, 33 bp, Homo sapien
tcgcactgggcctctcgaggagtgttctgtgag

SEQ ID NO: 247803 - DNA, 33 bp, Homo sapien
tggggtggggcagtgcaagtgtggtgaatgtca

SEQ ID NO: 247804 - DNA, 33 bp, Homo sapien
tggggtggggcagtgcgagtgtggtgaatgtca

SEQ ID NO: 247805 - DNA, 33 bp, Homo sapien
actaatatgcagtgtgcacgattctacgggtca

SEQ ID NO: 247806 - DNA, 33 bp, Homo sapien
actaatatgcagtgtggacgattctacgggtca

SEQ ID NO: 247807 - DNA, 33 bp, Homo sapien
tgatgaggaggcggaaagcattggtggtgacag

SEQ ID NO: 247808 - DNA, 33 bp, Homo sapien
tgatgaggaggcggaaggcattggtggtgacag

SEQ ID NO: 247809 - DNA, 33 bp, Homo sapien
gtggggaagggattcacggtctcaccttcgcat

SEQ ID NO: 247810 - DNA, 33 bp, Homo sapien
gtggggaagggattcatggtctcaccttcgcat

SEQ ID NO: 247811 - DNA, 33 bp, Homo sapien
cctcttcctcagatgcacaagaagactatggga

SEQ ID NO: 247812 - DNA, 33 bp, Homo sapien
cctcttcctcagatgctcaagaagactatggga

SEQ ID NO: 247813 - DNA, 33 bp, Homo sapien
gggctgccttgggtaccacgtcctacatttggg

SEQ ID NO: 247814 - DNA, 33 bp, Homo sapien
gggctgccttgggtacgacgtcctacatttggg

SEQ ID NO: 247815 - DNA, 33 bp, Homo sapien
accggcttaaaatccacgccccctggaggccgg

SEQ ID NO: 247816 - DNA, 33 bp, Homo sapien
accggcttaaaatccatgccccctggaggccgg

SEQ ID NO: 247817 - DNA, 33 bp, Homo sapien
aggtctcacaccaaagcctgatgaaaccccaaa

SEQ ID NO: 247818 - DNA, 33 bp, Homo sapien
aggtctcacaccaaaggctgatgaaaccccaaa

SEQ ID NO: 247819 - DNA, 33 bp, Homo sapien
gcctaagcaaaagaggccagatgtgattctgtg

SEQ ID NO: 247820 - DNA, 33 bp, Homo sapien
gcctaagcaaaagaggtcagatgtgattctgtg

SEQ ID NO: 247821 - DNA, 33 bp, Homo sapien
ttatccacatggataactggaagaaattgtccc

SEQ ID NO: 247822 - DNA, 33 bp, Homo sapien
ttatccacatggataattggaagaaattgtccc

SEQ ID NO: 247823 - DNA, 33 bp, Homo sapien
ttggtgctgttagtgcagagacgatacatggag

SEQ ID NO: 247824 - DNA, 33 bp, Homo sapien
ttggtgctgttagtgcggagacgatacatggag

SEQ ID NO: 247825 - DNA, 33 bp, Homo sapien
ctgttctgggtgccggccattcagtagttagca

SEQ ID NO: 247826 - DNA, 33 bp, Homo sapien
ctgttctgggtgccggtcattcagtagttagca

SEQ ID NO: 247827 - DNA, 33 bp, Homo sapien
tgccttttcctatcacaaccaggaaccagcctt

SEQ ID NO: 247828 - DNA, 33 bp, Homo sapien
tgccttttcctatcaccaccaggaaccagcctt

SEQ ID NO: 247829 - DNA, 33 bp, Homo sapien
taggatcatgctttaaagtttacagagccttga

SEQ ID NO: 247830 - DNA, 33 bp, Homo sapien
taggatcatgctttaaggtttacagagccttga

SEQ ID NO: 247831 - DNA, 33 bp, Homo sapien
gagaatccattagttccaactttaacacgagtt

SEQ ID NO: 247832 - DNA, 33 bp, Homo sapien
gagaatccattagttctaactttaacacgagtt

SEQ ID NO: 247833 - DNA, 33 bp, Homo sapien
tcccgtcttcatctctaaaatggaggtaaaaac

SEQ ID NO: 247834 - DNA, 33 bp, Homo sapien
tcccgtcttcatctctcaaatggaggtaaaaac

SEQ ID NO: 247835 - DNA, 33 bp, Homo sapien
tagtatgaaaaacaaaggtcagcgacactagaa

SEQ ID NO: 247836 - DNA, 33 bp, Homo sapien
tagtatgaaaaacaaatgtcagcgacactagaa

SEQ ID NO: 247837 - DNA, 33 bp, Homo sapien
gaacattccccgatacactcggaagccagtggg

SEQ ID NO: 247838 - DNA, 33 bp, Homo sapien
gaacattccccgatacgctcggaagccagtggg

SEQ ID NO: 247839 - DNA, 33 bp, Homo sapien
ctcttgccaggaacaccgggaggcacagacatt

SEQ ID NO: 247840 - DNA, 33 bp, Homo sapien
ctcttgccaggaacactgggaggcacagacatt

SEQ ID NO: 247841 - DNA, 33 bp, Homo sapien
cctgcagccatctcaacggggtgtcacaagagc

SEQ ID NO: 247842 - DNA, 33 bp, Homo sapien
cctgcagccatctcaatggggtgtcacaagagc

SEQ ID NO: 247843 - DNA, 33 bp, Homo sapien
cgatggtgaaatgtaccaagagtcgaaacaaaa

SEQ ID NO: 247844 - DNA, 33 bp, Homo sapien
cgatggtgaaatgtacgaagagtcgaaacaaaa

SEQ ID NO: 247845 - DNA, 33 bp, Homo sapien
attgcaacatattcacacaatggaattctagat

SEQ ID NO: 247846 - DNA, 33 bp, Homo sapien
attgcaacatattcacgcaatggaattctagat

SEQ ID NO: 247847 - DNA, 33 bp, Homo sapien
cttacctaactgcccaatctaagattccctgta

SEQ ID NO: 247848 - DNA, 33 bp, Homo sapien
cttacctaactgcccagtctaagattccctgta

SEQ ID NO: 247849 - DNA, 33 bp, Homo sapien
cttttccaaaagcttccagccctttgagccctt

SEQ ID NO: 247850 - DNA, 33 bp, Homo sapien
cttttccaaaagcttcgagccctttgagccctt

SEQ ID NO: 247851 - DNA, 33 bp, Homo sapien
acacttcgcgtttctaccaggattgtattgaga

SEQ ID NO: 247852 - DNA, 33 bp, Homo sapien
acacttcgcgtttctatcaggattgtattgaga

SEQ ID NO: 247853 - DNA, 33 bp, Homo sapien
acatagtgggtatgcactccacaaacattatca

SEQ ID NO: 247854 - DNA, 33 bp, Homo sapien
acatagtgggtatgcattccacaaacattatca

SEQ ID NO: 247855 - DNA, 33 bp, Homo sapien
ctgtccaatatggtagccaattgccacacatgg

SEQ ID NO: 247856 - DNA, 33 bp, Homo sapien
ctgtccaatatggtagtcaattgccacacatgg

SEQ ID NO: 247857 - DNA, 33 bp, Homo sapien
ggtactggaaagaaaccgctggctcagtgctca

SEQ ID NO: 247858 - DNA, 33 bp, Homo sapien
ggtactggaaagaaactgctggctcagtgctca

SEQ ID NO: 247859 - DNA, 33 bp, Homo sapien
gcccctgtgcattaaacattcacccaaaggact

SEQ ID NO: 247860 - DNA, 33 bp, Homo sapien
gcccctgtgcattaaatattcacccaaaggact

SEQ ID NO: 247861 - DNA, 33 bp, Homo sapien
tggcatttaccaagtccgaccctgattttccca

SEQ ID NO: 247862 - DNA, 33 bp, Homo sapien
tggcatttaccaagtctgaccctgattttccca

SEQ ID NO: 247863 - DNA, 33 bp, Homo sapien
caggagatacgcctacacctagaaaggtaggca

SEQ ID NO: 247864 - DNA, 33 bp, Homo sapien
caggagatacgcctacgcctagaaaggtaggca

SEQ ID NO: 247865 - DNA, 33 bp, Homo sapien
attccgcatgaaattcagaaagtgttcagtatt

SEQ ID NO: 247866 - DNA, 33 bp, Homo sapien
attccgcatgaaattcggaaagtgttcagtatt

SEQ ID NO: 247867 - DNA, 33 bp, Homo sapien
tcctcctaagatttctcaaaagatcatgacact

SEQ ID NO: 247868 - DNA, 33 bp, Homo sapien
tcctcctaagatttctgaaaagatcatgacact

SEQ ID NO: 247869 - DNA, 33 bp, Homo sapien
gccattctgtgactggccaagccacctgcctct

SEQ ID NO: 247870 - DNA, 33 bp, Homo sapien
gccattctgtgactgggcaagccacctgcctct

SEQ ID NO: 247871 - DNA, 33 bp, Homo sapien
ttttgctcttgggttcactcacacacacttcct

SEQ ID NO: 247872 - DNA, 33 bp, Homo sapien
ttttgctcttgggttcgctcacacacacttcct

SEQ ID NO: 247873 - DNA, 33 bp, Homo sapien
accctgagatgcagcacgggggccgaatgttgt

SEQ ID NO: 247874 - DNA, 33 bp, Homo sapien
accctgagatgcagcatgggggccgaatgttgt

SEQ ID NO: 247875 - DNA, 33 bp, Homo sapien
catcttgcattatcccagcagagcctaaatcca

SEQ ID NO: 247876 - DNA, 33 bp, Homo sapien
catcttgcattatcccggcagagcctaaatcca

SEQ ID NO: 247877 - DNA, 33 bp, Homo sapien
tgaggggagtgaaaaccatctgcaggtgggaaa

SEQ ID NO: 247878 - DNA, 33 bp, Homo sapien
tgaggggagtgaaaactatctgcaggtgggaaa

SEQ ID NO: 247879 - DNA, 33 bp, Homo sapien
ttcagatacggaggaacgccgtgtaggtatatt

SEQ ID NO: 247880 - DNA, 33 bp, Homo sapien
ttcagatacggaggaatgccgtgtaggtatatt

SEQ ID NO: 247881 - DNA, 33 bp, Homo sapien
ggacttgaacccaggacgtcagagtgagagccc

SEQ ID NO: 247882 - DNA, 33 bp, Homo sapien
ggacttgaacccaggatgtcagagtgagagccc

SEQ ID NO: 247883 - DNA, 33 bp, Homo sapien
agctcttctccaaatacggtaggggtgtggcct

SEQ ID NO: 247884 - DNA, 33 bp, Homo sapien
agctcttctccaaatatggtaggggtgtggcct

SEQ ID NO: 247885 - DNA, 33 bp, Homo sapien
tctctgctgccttccaaaaaacacaatcaaggt

SEQ ID NO: 247886 - DNA, 33 bp, Homo sapien
tctctgctgccttccagaaaacacaatcaaggt

SEQ ID NO: 247887 - DNA, 33 bp, Homo sapien
gtgttggcttggcttacgctgccgcctcaggtg

SEQ ID NO: 247888 - DNA, 33 bp, Homo sapien
gtgttggcttggcttatgctgccgcctcaggtg

SEQ ID NO: 247889 - DNA, 33 bp, Homo sapien
acagaggacaatgacaaaggtaaaatctgcagg

SEQ ID NO: 247890 - DNA, 33 bp, Homo sapien
acagaggacaatgacagaggtaaaatctgcagg

SEQ ID NO: 247891 - DNA, 33 bp, Homo sapien
taaaatagcgatgtcacgatccgcatttcaagg

SEQ ID NO: 247892 - DNA, 33 bp, Homo sapien
taaaatagcgatgtcatgatccgcatttcaagg

SEQ ID NO: 247893 - DNA, 33 bp, Homo sapien
ctaaggctttggcacagaatatcagttgccctc

SEQ ID NO: 247894 - DNA, 33 bp, Homo sapien
ctaaggctttggcacataatatcagttgccctc

SEQ ID NO: 247895 - DNA, 33 bp, Homo sapien
acaactccggaatccaaacacctctgaaaaaac

SEQ ID NO: 247896 - DNA, 33 bp, Homo sapien
acaactccggaatccagacacctctgaaaaaac

SEQ ID NO: 247897 - DNA, 33 bp, Homo sapien
cttactgaggaactccacatgccaggtactgtc

SEQ ID NO: 247898 - DNA, 33 bp, Homo sapien
cttactgaggaactccgcatgccaggtactgtc

SEQ ID NO: 247899 - DNA, 33 bp, Homo sapien
ttttctaagcagataccgggatatttgtgtgtg

SEQ ID NO: 247900 - DNA, 33 bp, Homo sapien
ttttctaagcagatactgggatatttgtgtgtg

SEQ ID NO: 247901 - DNA, 33 bp, Homo sapien
ggaaagtacactcctcaaatatacagagataca

SEQ ID NO: 247902 - DNA, 33 bp, Homo sapien
ggaaagtacactcctcgaatatacagagataca

SEQ ID NO: 247903 - DNA, 33 bp, Homo sapien
caacagtgggagtcacagtaggctgagaaatgg

SEQ ID NO: 247904 - DNA, 33 bp, Homo sapien
caacagtgggagtcacggtaggctgagaaatgg

SEQ ID NO: 247905 - DNA, 33 bp, Homo sapien
gaaaatggggtgactgaataaatgtgagtcagg

SEQ ID NO: 247906 - DNA, 33 bp, Homo sapien
gaaaatggggtgactggataaatgtgagtcagg

SEQ ID NO: 247907 - DNA, 33 bp, Homo sapien
ggacatgacatacatcacgtcatggcctttagt

SEQ ID NO: 247908 - DNA, 33 bp, Homo sapien
ggacatgacatacatcgcgtcatggcctttagt

SEQ ID NO: 247909 - DNA, 33 bp, Homo sapien
ttaaccaggcagccaaatacttatgtgcttgct

SEQ ID NO: 247910 - DNA, 33 bp, Homo sapien
ttaaccaggcagccaactacttatgtgcttgct

SEQ ID NO: 247911 - DNA, 33 bp, Homo sapien
tagctcaggaacttgccccaagtccattctatg

SEQ ID NO: 247912 - DNA, 33 bp, Homo sapien
tagctcaggaacttgctccaagtccattctatg

SEQ ID NO: 247913 - DNA, 33 bp, Homo sapien
tttcacatagaacctacgttagttgtgtcattt

SEQ ID NO: 247914 - DNA, 33 bp, Homo sapien
tttcacatagaacctatgttagttgtgtcattt

SEQ ID NO: 247915 - DNA, 33 bp, Homo sapien
acacttccatacatacacaagctgcactgttct

SEQ ID NO: 247916 - DNA, 33 bp, Homo sapien
acacttccatacatacgcaagctgcactgttct

SEQ ID NO: 247917 - DNA, 33 bp, Homo sapien
ctttgcgcatttaccccatgacctgaagtcttg

SEQ ID NO: 247918 - DNA, 33 bp, Homo sapien
ctttgcgcatttacccgatgacctgaagtcttg

SEQ ID NO: 247919 - DNA, 33 bp, Homo sapien
aagtccaattccagaaagacagtatttgggata

SEQ ID NO: 247920 - DNA, 33 bp, Homo sapien
aagtccaattccagaaggacagtatttgggata

SEQ ID NO: 247921 - DNA, 33 bp, Homo sapien
tacactggggactcaaactaaggaaggtgggag

SEQ ID NO: 247922 - DNA, 33 bp, Homo sapien
tacactggggactcaagctaaggaaggtgggag

SEQ ID NO: 247923 - DNA, 33 bp, Homo sapien
catgaaaatgaaatcacgtgctttatagcaaca

SEQ ID NO: 247924 - DNA, 33 bp, Homo sapien
catgaaaatgaaatcatgtgctttatagcaaca

SEQ ID NO: 247925 - DNA, 33 bp, Homo sapien
tctatggataggaaaaaagaggtctgggcctgc

SEQ ID NO: 247926 - DNA, 33 bp, Homo sapien
tctatggataggaaaagagaggtctgggcctgc

SEQ ID NO: 247927 - DNA, 33 bp, Homo sapien
gccttctcatttgtagccgctactattttaata

SEQ ID NO: 247928 - DNA, 33 bp, Homo sapien
gccttctcatttgtagtcgctactattttaata

SEQ ID NO: 247929 - DNA, 33 bp, Homo sapien
aaggatcctccataacagccacgcaagtctgtg

SEQ ID NO: 247930 - DNA, 33 bp, Homo sapien
aaggatcctccataacggccacgcaagtctgtg

SEQ ID NO: 247931 - DNA, 33 bp, Homo sapien
cttagtcataaggagagtccctccacattgtgc

SEQ ID NO: 247932 - DNA, 33 bp, Homo sapien
cttagtcataaggagattccctccacattgtgc

SEQ ID NO: 247933 - DNA, 33 bp, Homo sapien
ctttatggggagtgaacatcattttgttggttg

SEQ ID NO: 247934 - DNA, 33 bp, Homo sapien
ctttatggggagtgaagatcattttgttggttg

SEQ ID NO: 247935 - DNA, 33 bp, Homo sapien
tgcataacgtaggtgacgaaagagtccaggccc

SEQ ID NO: 247936 - DNA, 33 bp, Homo sapien
tgcataacgtaggtgatgaaagagtccaggccc

SEQ ID NO: 247937 - DNA, 33 bp, Homo sapien
tatatgcttaaacttccagtccaccttgaatat

SEQ ID NO: 247938 - DNA, 33 bp, Homo sapien
tatatgcttaaacttctagtccaccttgaatat

SEQ ID NO: 247939 - DNA, 33 bp, Homo sapien
gtactgagaaaatctgacaacatacttattcct

SEQ ID NO: 247940 - DNA, 33 bp, Homo sapien
gtactgagaaaatctggcaacatacttattcct

SEQ ID NO: 247941 - DNA, 33 bp, Homo sapien
attctccatatgcctgaacatttgattggatgc

SEQ ID NO: 247942 - DNA, 33 bp, Homo sapien
attctccatatgcctggacatttgattggatgc

SEQ ID NO: 247943 - DNA, 33 bp, Homo sapien
cttattctaagatagtaacttggtcagctagat

SEQ ID NO: 247944 - DNA, 33 bp, Homo sapien
cttattctaagatagttacttggtcagctagat

SEQ ID NO: 247945 - DNA, 33 bp, Homo sapien
tgggtttctcaaggtacacatttctctcatggg

SEQ ID NO: 247946 - DNA, 33 bp, Homo sapien
tgggtttctcaaggtatacatttctctcatggg

SEQ ID NO: 247947 - DNA, 33 bp, Homo sapien
cctgctttttcacgtcaagggagtgctttgctc

SEQ ID NO: 247948 - DNA, 33 bp, Homo sapien
cctgctttttcacgtctagggagtgctttgctc

SEQ ID NO: 247949 - DNA, 33 bp, Homo sapien
ctcatgacttgtcttccgaactcagagggtcat

SEQ ID NO: 247950 - DNA, 33 bp, Homo sapien
ctcatgacttgtcttctgaactcagagggtcat

SEQ ID NO: 247951 - DNA, 33 bp, Homo sapien
gaaggccatgttgtaaactactgaatagaacat

SEQ ID NO: 247952 - DNA, 33 bp, Homo sapien
gaaggccatgttgtaacctactgaatagaacat

SEQ ID NO: 247953 - DNA, 33 bp, Homo sapien
ttatctgtaacgacaccaaaacccgggctgctc

SEQ ID NO: 247954 - DNA, 33 bp, Homo sapien
ttatctgtaacgacacgaaaacccgggctgctc

SEQ ID NO: 247955 - DNA, 33 bp, Homo sapien
cttagaataatctttgcatagctcttgtcccca

SEQ ID NO: 247956 - DNA, 33 bp, Homo sapien
cttagaataatctttgtatagctcttgtcccca

SEQ ID NO: 247957 - DNA, 33 bp, Homo sapien
aggacttgacccttccaacagtatctctctacc

SEQ ID NO: 247958 - DNA, 33 bp, Homo sapien
aggacttgacccttcccacagtatctctctacc

SEQ ID NO: 247959 - DNA, 33 bp, Homo sapien
aagggtcaagtcctaccgacagccctgtgggta

SEQ ID NO: 247960 - DNA, 33 bp, Homo sapien
aagggtcaagtcctactgacagccctgtgggta

SEQ ID NO: 247961 - DNA, 33 bp, Homo sapien
tgccactcaatctcccaccttcctctgagaaac

SEQ ID NO: 247962 - DNA, 33 bp, Homo sapien
tgccactcaatctccctccttcctctgagaaac

SEQ ID NO: 247963 - DNA, 33 bp, Homo sapien
tgatgttctattgcaacagtctcaagcaaaatt

SEQ ID NO: 247964 - DNA, 33 bp, Homo sapien
tgatgttctattgcaagagtctcaagcaaaatt

SEQ ID NO: 247965 - DNA, 33 bp, Homo sapien
atatacagttaccaaacaggagtgacagcacag

SEQ ID NO: 247966 - DNA, 33 bp, Homo sapien
atatacagttaccaaagaggagtgacagcacag

SEQ ID NO: 247967 - DNA, 33 bp, Homo sapien
tgctccttccttcgagaagttgagagtggcagg

SEQ ID NO: 247968 - DNA, 33 bp, Homo sapien
tgctccttccttcgaggagttgagagtggcagg

SEQ ID NO: 247969 - DNA, 33 bp, Homo sapien
ggccctccactctttcacataaggcagctgccc

SEQ ID NO: 247970 - DNA, 33 bp, Homo sapien
ggccctccactctttctcataaggcagctgccc

SEQ ID NO: 247971 - DNA, 33 bp, Homo sapien
cctgagttcagcttccaaggcctgttcactact

SEQ ID NO: 247972 - DNA, 33 bp, Homo sapien
cctgagttcagcttccgaggcctgttcactact

SEQ ID NO: 247973 - DNA, 33 bp, Homo sapien
tagctctagaagggccactatctaatgaagctg

SEQ ID NO: 247974 - DNA, 33 bp, Homo sapien
tagctctagaagggccgctatctaatgaagctg

SEQ ID NO: 247975 - DNA, 33 bp, Homo sapien
cactctcagaaggaaaattagagaaaagatata

SEQ ID NO: 247976 - DNA, 33 bp, Homo sapien
cactctcagaaggaaagttagagaaaagatata

SEQ ID NO: 247977 - DNA, 33 bp, Homo sapien
gtaaacagattaacaacgcctctggaaagctta

SEQ ID NO: 247978 - DNA, 33 bp, Homo sapien
gtaaacagattaacaatgcctctggaaagctta

SEQ ID NO: 247979 - DNA, 33 bp, Homo sapien
accaatgaaagattgaaactttgcgaggatact

SEQ ID NO: 247980 - DNA, 33 bp, Homo sapien
accaatgaaagattgagactttgcgaggatact

SEQ ID NO: 247981 - DNA, 33 bp, Homo sapien
tcttcatacttccagagagcgttgggtactttt

SEQ ID NO: 247982 - DNA, 33 bp, Homo sapien
tcttcatacttccagatagcgttgggtactttt

SEQ ID NO: 247983 - DNA, 33 bp, Homo sapien
ggtacttttgtaaaggcatttgatatggtttgt

SEQ ID NO: 247984 - DNA, 33 bp, Homo sapien
ggtacttttgtaaaggtatttgatatggtttgt

SEQ ID NO: 247985 - DNA, 33 bp, Homo sapien
atgctcccagttgtcagatctttacccaagaag

SEQ ID NO: 247986 - DNA, 33 bp, Homo sapien
atgctcccagttgtcatatctttacccaagaag

SEQ ID NO: 247987 - DNA, 33 bp, Homo sapien
ttgccagacagatcaagctaagctaccactctt

SEQ ID NO: 247988 - DNA, 33 bp, Homo sapien
ttgccagacagatcaatctaagctaccactctt

SEQ ID NO: 247989 - DNA, 33 bp, Homo sapien
ggataggaaccctcaaactgtgggcatccatgt

SEQ ID NO: 247990 - DNA, 33 bp, Homo sapien
ggataggaaccctcaacctgtgggcatccatgt

SEQ ID NO: 247991 - DNA, 33 bp, Homo sapien
tgcatcaaggatagtgaagggccagtcaagccc

SEQ ID NO: 247992 - DNA, 33 bp, Homo sapien
tgcatcaaggatagtgtagggccagtcaagccc

SEQ ID NO: 247993 - DNA, 33 bp, Homo sapien
cgggtatcctctattccatcccgtggtctccac

SEQ ID NO: 247994 - DNA, 33 bp, Homo sapien
cgggtatcctctattctatcccgtggtctccac

SEQ ID NO: 247995 - DNA, 33 bp, Homo sapien
tttcttctattcctggaaagcactatagacttg

SEQ ID NO: 247996 - DNA, 33 bp, Homo sapien
tttcttctattcctggtaagcactatagacttg

SEQ ID NO: 247997 - DNA, 33 bp, Homo sapien
ccttcctggtaggtggcagaaatgcttaggggt

SEQ ID NO: 247998 - DNA, 33 bp, Homo sapien
ccttcctggtaggtggtagaaatgcttaggggt

SEQ ID NO: 247999 - DNA, 33 bp, Homo sapien
gatgttgtaaatggggaacactgatttcaggta

SEQ ID NO: 248000 - DNA, 33 bp, Homo sapien
gatgttgtaaatgggggacactgatttcaggta

SEQ ID NO: 248001 - DNA, 33 bp, Homo sapien
gatgtttcgagttactaaaagacagcacattga

SEQ ID NO: 248002 - DNA, 33 bp, Homo sapien
gatgtttcgagttactgaaagacagcacattga

SEQ ID NO: 248003 - DNA, 33 bp, Homo sapien
ttatggctactacataagtgagatccttgattc

SEQ ID NO: 248004 - DNA, 33 bp, Homo sapien
ttatggctactacataggtgagatccttgattc

SEQ ID NO: 248005 - DNA, 33 bp, Homo sapien
ggctattttagcatccccagctgtgggacaccc

SEQ ID NO: 248006 - DNA, 33 bp, Homo sapien
ggctattttagcatcctcagctgtgggacaccc

SEQ ID NO: 248007 - DNA, 33 bp, Homo sapien
ctatccacctcttagaaggatcctgggtgtctt

SEQ ID NO: 248008 - DNA, 33 bp, Homo sapien
ctatccacctcttagagggatcctgggtgtctt

SEQ ID NO: 248009 - DNA, 33 bp, Homo sapien
ataggtttagtatttgaatcttgactgctgtga

SEQ ID NO: 248010 - DNA, 33 bp, Homo sapien
ataggtttagtatttggatcttgactgctgtga

SEQ ID NO: 248011 - DNA, 33 bp, Homo sapien
accataagtagtcaaacttcaaattcaggtgtc

SEQ ID NO: 248012 - DNA, 33 bp, Homo sapien
accataagtagtcaaagttcaaattcaggtgtc

SEQ ID NO: 248013 - DNA, 33 bp, Homo sapien
acataagactactctgaacagtaagaaaaaata

SEQ ID NO: 248014 - DNA, 33 bp, Homo sapien
acataagactactctggacagtaagaaaaaata

SEQ ID NO: 248015 - DNA, 33 bp, Homo sapien
tcccaagtctgcataccggggcaatcctacagc

SEQ ID NO: 248016 - DNA, 33 bp, Homo sapien
tcccaagtctgcatactggggcaatcctacagc

SEQ ID NO: 248017 - DNA, 33 bp, Homo sapien
tgtacttccttaggcaccgctctgggttccact

SEQ ID NO: 248018 - DNA, 33 bp, Homo sapien
tgtacttccttaggcatcgctctgggttccact

SEQ ID NO: 248019 - DNA, 33 bp, Homo sapien
ggaaaggccaatatgagctgcttcaggctggtt

SEQ ID NO: 248020 - DNA, 33 bp, Homo sapien
ggaaaggccaatatgatctgcttcaggctggtt

SEQ ID NO: 248021 - DNA, 33 bp, Homo sapien
tatctctcaagtgtgactacttgctcatgaagt

SEQ ID NO: 248022 - DNA, 33 bp, Homo sapien
tatctctcaagtgtgattacttgctcatgaagt

SEQ ID NO: 248023 - DNA, 33 bp, Homo sapien
agggctaagaataccaccagggctttgtcttca

SEQ ID NO: 248024 - DNA, 33 bp, Homo sapien
agggctaagaataccatcagggctttgtcttca

SEQ ID NO: 248025 - DNA, 33 bp, Homo sapien
tagtgatcaaacaatgccagagatcttgactaa

SEQ ID NO: 248026 - DNA, 33 bp, Homo sapien
tagtgatcaaacaatggcagagatcttgactaa

SEQ ID NO: 248027 - DNA, 33 bp, Homo sapien
gcatggccattctagcactatgaccacagccac

SEQ ID NO: 248028 - DNA, 33 bp, Homo sapien
gcatggccattctagcgctatgaccacagccac

SEQ ID NO: 248029 - DNA, 33 bp, Homo sapien
ttccaacactgctttggttcacataagtgattg

SEQ ID NO: 248030 - DNA, 33 bp, Homo sapien
ttccaacactgctttgtttcacataagtgattg

SEQ ID NO: 248031 - DNA, 33 bp, Homo sapien
aaacaccagtcaggaacggatggtacttccaac

SEQ ID NO: 248032 - DNA, 33 bp, Homo sapien
aaacaccagtcaggaatggatggtacttccaac

SEQ ID NO: 248033 - DNA, 33 bp, Homo sapien
ttctgtacctctgtcccaataatcttgctgacc

SEQ ID NO: 248034 - DNA, 33 bp, Homo sapien
ttctgtacctctgtcctaataatcttgctgacc

SEQ ID NO: 248035 - DNA, 33 bp, Homo sapien
aggaggccaagtagggcacctagttcagagcac

SEQ ID NO: 248036 - DNA, 33 bp, Homo sapien
aggaggccaagtagggtacctagttcagagcac

SEQ ID NO: 248037 - DNA, 33 bp, Homo sapien
gtgggacagctgtttgcacttagcagttaagtg

SEQ ID NO: 248038 - DNA, 33 bp, Homo sapien
gtgggacagctgtttgtacttagcagttaagtg

SEQ ID NO: 248039 - DNA, 33 bp, Homo sapien
tgtttacatacaactcacatttctctgaagatt

SEQ ID NO: 248040 - DNA, 33 bp, Homo sapien
tgtttacatacaactcgcatttctctgaagatt

SEQ ID NO: 248041 - DNA, 33 bp, Homo sapien
aaaaacttcagtagctcaactcctaacttgacc

SEQ ID NO: 248042 - DNA, 33 bp, Homo sapien
aaaaacttcagtagcttaactcctaacttgacc

SEQ ID NO: 248043 - DNA, 33 bp, Homo sapien
ggcccaatgtatgtcaactgatctgtaactgtc

SEQ ID NO: 248044 - DNA, 33 bp, Homo sapien
ggcccaatgtatgtcacctgatctgtaactgtc

SEQ ID NO: 248045 - DNA, 33 bp, Homo sapien
gattggaaagggtcccagctcccactgtgcttg

SEQ ID NO: 248046 - DNA, 33 bp, Homo sapien
gattggaaagggtcccggctcccactgtgcttg

SEQ ID NO: 248047 - DNA, 33 bp, Homo sapien
catattttttgaataaggatatgtccagtggtt

SEQ ID NO: 248048 - DNA, 33 bp, Homo sapien
catattttttgaataatgatatgtccagtggtt

SEQ ID NO: 248049 - DNA, 33 bp, Homo sapien
ttagccttataaacaacgtatccacattctcgc

SEQ ID NO: 248050 - DNA, 33 bp, Homo sapien
ttagccttataaacaaggtatccacattctcgc

SEQ ID NO: 248051 - DNA, 33 bp, Homo sapien
ctgcatccacgtaagcaatgttttttcattcat

SEQ ID NO: 248052 - DNA, 33 bp, Homo sapien
ctgcatccacgtaagccatgttttttcattcat

SEQ ID NO: 248053 - DNA, 33 bp, Homo sapien
tgaggcagtccaagaaagtttggcaaggccaat

SEQ ID NO: 248054 - DNA, 33 bp, Homo sapien
tgaggcagtccaagaaggtttggcaaggccaat

SEQ ID NO: 248055 - DNA, 33 bp, Homo sapien
tcctatgtgtgaaatacgcttctaatgatccta

SEQ ID NO: 248056 - DNA, 33 bp, Homo sapien
tcctatgtgtgaaatatgcttctaatgatccta

SEQ ID NO: 248057 - DNA, 33 bp, Homo sapien
gtaagaaaaattctaacactggccacttgtcca

SEQ ID NO: 248058 - DNA, 33 bp, Homo sapien
gtaagaaaaattctaatactggccacttgtcca

SEQ ID NO: 248059 - DNA, 33 bp, Homo sapien
tactgacttcactttaaactcaggggtaggaaa

SEQ ID NO: 248060 - DNA, 33 bp, Homo sapien
tactgacttcactttagactcaggggtaggaaa

SEQ ID NO: 248061 - DNA, 33 bp, Homo sapien
cctgttctgggttcacacaccctctggatccct

SEQ ID NO: 248062 - DNA, 33 bp, Homo sapien
cctgttctgggttcacgcaccctctggatccct

SEQ ID NO: 248063 - DNA, 33 bp, Homo sapien
tgggcaggtgtagtgaaggaagggaatggtcag

SEQ ID NO: 248064 - DNA, 33 bp, Homo sapien
tgggcaggtgtagtgacggaagggaatggtcag

SEQ ID NO: 248065 - DNA, 33 bp, Homo sapien
aaaaatctaattcacaagggctatctcataata

SEQ ID NO: 248066 - DNA, 33 bp, Homo sapien
aaaaatctaattcacacgggctatctcataata

SEQ ID NO: 248067 - DNA, 33 bp, Homo sapien
aatgcctttgagccataagatgtaagctggcaa

SEQ ID NO: 248068 - DNA, 33 bp, Homo sapien
aatgcctttgagccatgagatgtaagctggcaa

SEQ ID NO: 248069 - DNA, 33 bp, Homo sapien
ttaagttgtgattaacccagtcagacagtcgca

SEQ ID NO: 248070 - DNA, 33 bp, Homo sapien
ttaagttgtgattaactcagtcagacagtcgca

SEQ ID NO: 248071 - DNA, 33 bp, Homo sapien
gtaggcttctacacaacggctttatctctatcc

SEQ ID NO: 248072 - DNA, 33 bp, Homo sapien
gtaggcttctacacaatggctttatctctatcc

SEQ ID NO: 248073 - DNA, 33 bp, Homo sapien
tatgagttcagttcaaatcatagttcagatgat

SEQ ID NO: 248074 - DNA, 33 bp, Homo sapien
tatgagttcagttcaattcatagttcagatgat

SEQ ID NO: 248075 - DNA, 33 bp, Homo sapien
ccagtcattatggaagccaaatttgtttaccca

SEQ ID NO: 248076 - DNA, 33 bp, Homo sapien
ccagtcattatggaagtcaaatttgtttaccca

SEQ ID NO: 248077 - DNA, 33 bp, Homo sapien
ctaaatgcagtcatgaacatcctgtaagactca

SEQ ID NO: 248078 - DNA, 33 bp, Homo sapien
ctaaatgcagtcatgagcatcctgtaagactca

SEQ ID NO: 248079 - DNA, 33 bp, Homo sapien
taccctctgaagaatacgtagagtaagtgcccc

SEQ ID NO: 248080 - DNA, 33 bp, Homo sapien
taccctctgaagaatatgtagagtaagtgcccc

SEQ ID NO: 248081 - DNA, 33 bp, Homo sapien
tgtttgctatattgcaatcaactgctagtagct

SEQ ID NO: 248082 - DNA, 33 bp, Homo sapien
tgtttgctatattgcattcaactgctagtagct

SEQ ID NO: 248083 - DNA, 33 bp, Homo sapien
ctgctgcaggagctaagtgttacttgagatctg

SEQ ID NO: 248084 - DNA, 33 bp, Homo sapien
ctgctgcaggagctaattgttacttgagatctg

SEQ ID NO: 248085 - DNA, 33 bp, Homo sapien
gatcataggccttccccaggtgagtgcaggaat

SEQ ID NO: 248086 - DNA, 33 bp, Homo sapien
gatcataggccttcccgaggtgagtgcaggaat

SEQ ID NO: 248087 - DNA, 33 bp, Homo sapien
aagactggaacccatcaacaaacttgccagcat

SEQ ID NO: 248088 - DNA, 33 bp, Homo sapien
aagactggaacccatccacaaacttgccagcat

SEQ ID NO: 248089 - DNA, 33 bp, Homo sapien
agcttatccagaagaccgataattggagtttac

SEQ ID NO: 248090 - DNA, 33 bp, Homo sapien
agcttatccagaagacggataattggagtttac

SEQ ID NO: 248091 - DNA, 33 bp, Homo sapien
tgctagtacttaatagacatgtttactgggtgg

SEQ ID NO: 248092 - DNA, 33 bp, Homo sapien
tgctagtacttaataggcatgtttactgggtgg

SEQ ID NO: 248093 - DNA, 33 bp, Homo sapien
tactcttgagcctgaacgacagaggtgtatttt

SEQ ID NO: 248094 - DNA, 33 bp, Homo sapien
tactcttgagcctgaatgacagaggtgtatttt

SEQ ID NO: 248095 - DNA, 33 bp, Homo sapien
ataacactttatccgacgtgctagactataggg

SEQ ID NO: 248096 - DNA, 33 bp, Homo sapien
ataacactttatccgatgtgctagactataggg

SEQ ID NO: 248097 - DNA, 33 bp, Homo sapien
acaatgaatctactaacaaggtaatttcaagag

SEQ ID NO: 248098 - DNA, 33 bp, Homo sapien
acaatgaatctactaataaggtaatttcaagag

SEQ ID NO: 248099 - DNA, 33 bp, Homo sapien
cttctaatttctgacaagatacatagacatgca

SEQ ID NO: 248100 - DNA, 33 bp, Homo sapien
cttctaatttctgacaggatacatagacatgca

SEQ ID NO: 248101 - DNA, 33 bp, Homo sapien
tgaggtaggcatttcaaaagcatgggttgaatg

SEQ ID NO: 248102 - DNA, 33 bp, Homo sapien
tgaggtaggcatttcacaagcatgggttgaatg

SEQ ID NO: 248103 - DNA, 33 bp, Homo sapien
aaggctccagatggtccacatagcactgaagca

SEQ ID NO: 248104 - DNA, 33 bp, Homo sapien
aaggctccagatggtctacatagcactgaagca

SEQ ID NO: 248105 - DNA, 33 bp, Homo sapien
atgaacatttggtctacccgatgtcaagtcatc

SEQ ID NO: 248106 - DNA, 33 bp, Homo sapien
atgaacatttggtctatccgatgtcaagtcatc

SEQ ID NO: 248107 - DNA, 33 bp, Homo sapien
gaaggcagagcttttcaagtaaactttgtgctc

SEQ ID NO: 248108 - DNA, 33 bp, Homo sapien
gaaggcagagcttttcgagtaaactttgtgctc

SEQ ID NO: 248109 - DNA, 33 bp, Homo sapien
atgaaggaacataggaaattcattgcttgaaat

SEQ ID NO: 248110 - DNA, 33 bp, Homo sapien
atgaaggaacataggacattcattgcttgaaat

SEQ ID NO: 248111 - DNA, 33 bp, Homo sapien
cattctagtgctgggaaacagaaaacagaacaa

SEQ ID NO: 248112 - DNA, 33 bp, Homo sapien
cattctagtgctgggagacagaaaacagaacaa

SEQ ID NO: 248113 - DNA, 33 bp, Homo sapien
accgacagcctaatccccagtcctggctgtgag

SEQ ID NO: 248114 - DNA, 33 bp, Homo sapien
accgacagcctaatcctcagtcctggctgtgag

SEQ ID NO: 248115 - DNA, 33 bp, Homo sapien
attgtaacaatactaacccggaaatagtgcaat

SEQ ID NO: 248116 - DNA, 33 bp, Homo sapien
attgtaacaatactaatccggaaatagtgcaat

SEQ ID NO: 248117 - DNA, 33 bp, Homo sapien
ctgactgatgttcaaccgatagggactttccaa

SEQ ID NO: 248118 - DNA, 33 bp, Homo sapien
ctgactgatgttcaactgatagggactttccaa

SEQ ID NO: 248119 - DNA, 33 bp, Homo sapien
caaataagagacatccaaattatgtcaggttgc

SEQ ID NO: 248120 - DNA, 33 bp, Homo sapien
caaataagagacatcccaattatgtcaggttgc

SEQ ID NO: 248121 - DNA, 33 bp, Homo sapien
ggcaggagatgttttacgcccagatccaaagaa

SEQ ID NO: 248122 - DNA, 33 bp, Homo sapien
ggcaggagatgttttatgcccagatccaaagaa

SEQ ID NO: 248123 - DNA, 33 bp, Homo sapien
cacaacacaagtgtaaagcaggtcaacagggga

SEQ ID NO: 248124 - DNA, 33 bp, Homo sapien
cacaacacaagtgtaaggcaggtcaacagggga

SEQ ID NO: 248125 - DNA, 33 bp, Homo sapien
ttattctacaccaagagctgtcttcaactcttt

SEQ ID NO: 248126 - DNA, 33 bp, Homo sapien
ttattctacaccaagatctgtcttcaactcttt

SEQ ID NO: 248127 - DNA, 33 bp, Homo sapien
aagggcatgaaatatacgtttatctctttcttc

SEQ ID NO: 248128 - DNA, 33 bp, Homo sapien
aagggcatgaaatatatgtttatctctttcttc

SEQ ID NO: 248129 - DNA, 33 bp, Homo sapien
gagattgccttggagaacaccctcagataggaa

SEQ ID NO: 248130 - DNA, 33 bp, Homo sapien
gagattgccttggagagcaccctcagataggaa

SEQ ID NO: 248131 - DNA, 33 bp, Homo sapien
ggttttcagaaaggcacgaaggacataacttac

SEQ ID NO: 248132 - DNA, 33 bp, Homo sapien
ggttttcagaaaggcaggaaggacataacttac

SEQ ID NO: 248133 - DNA, 33 bp, Homo sapien
ccagagtgactggttcaatcacaacactgctgg

SEQ ID NO: 248134 - DNA, 33 bp, Homo sapien
ccagagtgactggttcgatcacaacactgctgg

SEQ ID NO: 248135 - DNA, 33 bp, Homo sapien
aagaacttgagtggcacctccaagaataaatag

SEQ ID NO: 248136 - DNA, 33 bp, Homo sapien
aagaacttgagtggcatctccaagaataaatag

SEQ ID NO: 248137 - DNA, 33 bp, Homo sapien
atcctgaccactgctccacactccctctctgtt

SEQ ID NO: 248138 - DNA, 33 bp, Homo sapien
atcctgaccactgctctacactccctctctgtt

SEQ ID NO: 248139 - DNA, 33 bp, Homo sapien
aatcttagcacacaggaaccagagagagccagg

SEQ ID NO: 248140 - DNA, 33 bp, Homo sapien
aatcttagcacacagggaccagagagagccagg

SEQ ID NO: 248141 - DNA, 33 bp, Homo sapien
gcacaaaatactccttcaagcaccattgtccct

SEQ ID NO: 248142 - DNA, 33 bp, Homo sapien
gcacaaaatactcctttaagcaccattgtccct

SEQ ID NO: 248143 - DNA, 33 bp, Homo sapien
ccatcctgagtcgcacacccattgtagctgggg

SEQ ID NO: 248144 - DNA, 33 bp, Homo sapien
ccatcctgagtcgcacgcccattgtagctgggg

SEQ ID NO: 248145 - DNA, 33 bp, Homo sapien
catttgttacatggcaacagataactggaaggt

SEQ ID NO: 248146 - DNA, 33 bp, Homo sapien
catttgttacatggcagcagataactggaaggt

SEQ ID NO: 248147 - DNA, 33 bp, Homo sapien
gcaatttaaggagcaacgataaaatggacacca

SEQ ID NO: 248148 - DNA, 33 bp, Homo sapien
gcaatttaaggagcaatgataaaatggacacca

SEQ ID NO: 248149 - DNA, 33 bp, Homo sapien
agacttagtagcccacaggaccattgtaccagc

SEQ ID NO: 248150 - DNA, 33 bp, Homo sapien
agacttagtagcccacgggaccattgtaccagc

SEQ ID NO: 248151 - DNA, 33 bp, Homo sapien
tattagactgctgcaccgacagagagttgttta

SEQ ID NO: 248152 - DNA, 33 bp, Homo sapien
tattagactgctgcactgacagagagttgttta

SEQ ID NO: 248153 - DNA, 33 bp, Homo sapien
caatctgtctcatatccactcccaaaagaaatc

SEQ ID NO: 248154 - DNA, 33 bp, Homo sapien
caatctgtctcatatctactcccaaaagaaatc

SEQ ID NO: 248155 - DNA, 33 bp, Homo sapien
tacacttttgtaacaaatctatctatattacct

SEQ ID NO: 248156 - DNA, 33 bp, Homo sapien
tacacttttgtaacaattctatctatattacct

SEQ ID NO: 248157 - DNA, 33 bp, Homo sapien
tctcacctctgccttacagatctacttctctta

SEQ ID NO: 248158 - DNA, 33 bp, Homo sapien
tctcacctctgccttagagatctacttctctta

SEQ ID NO: 248159 - DNA, 33 bp, Homo sapien
atttactattaatggacagaaatgagtcagtaa

SEQ ID NO: 248160 - DNA, 33 bp, Homo sapien
atttactattaatggagagaaatgagtcagtaa

SEQ ID NO: 248161 - DNA, 33 bp, Homo sapien
ttgcagtagggtgtgccatttaaaaggtgtgtc

SEQ ID NO: 248162 - DNA, 33 bp, Homo sapien
ttgcagtagggtgtgctatttaaaaggtgtgtc

SEQ ID NO: 248163 - DNA, 33 bp, Homo sapien
tgatgtgagaggcccaaggttatgtttcacagg

SEQ ID NO: 248164 - DNA, 33 bp, Homo sapien
tgatgtgagaggcccagggttatgtttcacagg

SEQ ID NO: 248165 - DNA, 33 bp, Homo sapien
ttatatctctaaaacacgttaactctgtgctga

SEQ ID NO: 248166 - DNA, 33 bp, Homo sapien
ttatatctctaaaacatgttaactctgtgctga

SEQ ID NO: 248167 - DNA, 33 bp, Homo sapien
aattccatcgaaagtccctggtctaacacttta

SEQ ID NO: 248168 - DNA, 33 bp, Homo sapien
aattccatcgaaagtctctggtctaacacttta

SEQ ID NO: 248169 - DNA, 33 bp, Homo sapien
ttagaaacatagacaccggtcgggtgcagtggc

SEQ ID NO: 248170 - DNA, 33 bp, Homo sapien
ttagaaacatagacactggtcgggtgcagtggc

SEQ ID NO: 248171 - DNA, 33 bp, Homo sapien
tctgatttgctaatgaaatcactatcccttcct

SEQ ID NO: 248172 - DNA, 33 bp, Homo sapien
tctgatttgctaatgagatcactatcccttcct

SEQ ID NO: 248173 - DNA, 33 bp, Homo sapien
aattcagcaggtcagcaatttgtactgggctca

SEQ ID NO: 248174 - DNA, 33 bp, Homo sapien
aattcagcaggtcagctatttgtactgggctca

SEQ ID NO: 248175 - DNA, 33 bp, Homo sapien
ttatttatgacatttgcacaggccctctgtcct

SEQ ID NO: 248176 - DNA, 33 bp, Homo sapien
ttatttatgacatttgtacaggccctctgtcct

SEQ ID NO: 248177 - DNA, 33 bp, Homo sapien
taaaggccggcacttaggcaatacctgttgtgt

SEQ ID NO: 248178 - DNA, 33 bp, Homo sapien
taaaggccggcacttatgcaatacctgttgtgt

SEQ ID NO: 248179 - DNA, 33 bp, Homo sapien
cctcttgccaaataagaagccagtatttctttt

SEQ ID NO: 248180 - DNA, 33 bp, Homo sapien
cctcttgccaaataaggagccagtatttctttt

SEQ ID NO: 248181 - DNA, 33 bp, Homo sapien
ggggtatatgccaatgcaaaaagaaatactggc

SEQ ID NO: 248182 - DNA, 33 bp, Homo sapien
ggggtatatgccaatggaaaaagaaatactggc

SEQ ID NO: 248183 - DNA, 33 bp, Homo sapien
ccacacatataaatccaattaagtagcccaggg

SEQ ID NO: 248184 - DNA, 33 bp, Homo sapien
ccacacatataaatcccattaagtagcccaggg

SEQ ID NO: 248185 - DNA, 33 bp, Homo sapien
tacctacctggtagcaccatgcttttctctgcc

SEQ ID NO: 248186 - DNA, 33 bp, Homo sapien
tacctacctggtagcatcatgcttttctctgcc

SEQ ID NO: 248187 - DNA, 33 bp, Homo sapien
ttgagcaaagacctaaatgaattaagtgaatga

SEQ ID NO: 248188 - DNA, 33 bp, Homo sapien
ttgagcaaagacctaagtgaattaagtgaatga

SEQ ID NO: 248189 - DNA, 33 bp, Homo sapien
agcccctatgactaccaatttcatatagaccta

SEQ ID NO: 248190 - DNA, 33 bp, Homo sapien
agcccctatgactaccgatttcatatagaccta

SEQ ID NO: 248191 - DNA, 33 bp, Homo sapien
ttcactggttcattacactgacacccagctggc

SEQ ID NO: 248192 - DNA, 33 bp, Homo sapien
ttcactggttcattacgctgacacccagctggc

SEQ ID NO: 248193 - DNA, 33 bp, Homo sapien
cagccaaagcctcagacgcagttccagtggaac

SEQ ID NO: 248194 - DNA, 33 bp, Homo sapien
cagccaaagcctcagatgcagttccagtggaac

SEQ ID NO: 248195 - DNA, 33 bp, Homo sapien
acgtaaaaacaaccccgctagctctaggcaccc

SEQ ID NO: 248196 - DNA, 33 bp, Homo sapien
acgtaaaaacaacccctctagctctaggcaccc

SEQ ID NO: 248197 - DNA, 33 bp, Homo sapien
aataggcgtaagacccacctcactgtcttcttg

SEQ ID NO: 248198 - DNA, 33 bp, Homo sapien
aataggcgtaagaccctcctcactgtcttcttg

SEQ ID NO: 248199 - DNA, 33 bp, Homo sapien
ctgtttcctgccaacaaatgtcatcggaattcc

SEQ ID NO: 248200 - DNA, 33 bp, Homo sapien
ctgtttcctgccaacacatgtcatcggaattcc

SEQ ID NO: 248201 - DNA, 33 bp, Homo sapien
tcagggagcaccattcactgtttatgctgtgaa

SEQ ID NO: 248202 - DNA, 33 bp, Homo sapien
tcagggagcaccattcgctgtttatgctgtgaa

SEQ ID NO: 248203 - DNA, 33 bp, Homo sapien
ctcttctcatggttcaaggcaggagtacaaaga

SEQ ID NO: 248204 - DNA, 33 bp, Homo sapien
ctcttctcatggttcagggcaggagtacaaaga

SEQ ID NO: 248205 - DNA, 33 bp, Homo sapien
gagcatgaccaacaccactggacgggatggagt

SEQ ID NO: 248206 - DNA, 33 bp, Homo sapien
gagcatgaccaacaccgctggacgggatggagt

SEQ ID NO: 248207 - DNA, 33 bp, Homo sapien
tgctggtggaaatatcaaacattggcaatattt

SEQ ID NO: 248208 - DNA, 33 bp, Homo sapien
tgctggtggaaatatcgaacattggcaatattt

SEQ ID NO: 248209 - DNA, 33 bp, Homo sapien
gctgttgcagctgctcaataatttcgtcaaaga

SEQ ID NO: 248210 - DNA, 33 bp, Homo sapien
gctgttgcagctgctcgataatttcgtcaaaga

SEQ ID NO: 248211 - DNA, 33 bp, Homo sapien
catgacataaatcagccatattgacaggtgttc

SEQ ID NO: 248212 - DNA, 33 bp, Homo sapien
catgacataaatcagctatattgacaggtgttc

SEQ ID NO: 248213 - DNA, 33 bp, Homo sapien
tttttgtatacagtgacaggtagtggttcagct

SEQ ID NO: 248214 - DNA, 33 bp, Homo sapien
tttttgtatacagtgagaggtagtggttcagct

SEQ ID NO: 248215 - DNA, 33 bp, Homo sapien
gcctgtgggaaagctacgttttaattattgttg

SEQ ID NO: 248216 - DNA, 33 bp, Homo sapien
gcctgtgggaaagctatgttttaattattgttg

SEQ ID NO: 248217 - DNA, 33 bp, Homo sapien
cacagcagatgttcagcaaatgcttgaaagact

SEQ ID NO: 248218 - DNA, 33 bp, Homo sapien
cacagcagatgttcagtaaatgcttgaaagact

SEQ ID NO: 248219 - DNA, 33 bp, Homo sapien
gccaagagaaccccacagacaagatttttcatt

SEQ ID NO: 248220 - DNA, 33 bp, Homo sapien
gccaagagaaccccacggacaagatttttcatt

SEQ ID NO: 248221 - DNA, 33 bp, Homo sapien
tttcaatgcagttttccaggaaagagcccagca

SEQ ID NO: 248222 - DNA, 33 bp, Homo sapien
tttcaatgcagttttctaggaaagagcccagca

SEQ ID NO: 248223 - DNA, 33 bp, Homo sapien
ctaacaccaccagtcaagctcatggcagacata

SEQ ID NO: 248224 - DNA, 33 bp, Homo sapien
ctaacaccaccagtcaggctcatggcagacata

SEQ ID NO: 248225 - DNA, 33 bp, Homo sapien
ttccaaatccacaaagaagtggggtaattcttc

SEQ ID NO: 248226 - DNA, 33 bp, Homo sapien
ttccaaatccacaaagtagtggggtaattcttc

SEQ ID NO: 248227 - DNA, 33 bp, Homo sapien
aatcgattagagctcccgaattcaaacctggtg

SEQ ID NO: 248228 - DNA, 33 bp, Homo sapien
aatcgattagagctcctgaattcaaacctggtg

SEQ ID NO: 248229 - DNA, 33 bp, Homo sapien
gctctgtgaaaattgccccgctgttgtttgatt

SEQ ID NO: 248230 - DNA, 33 bp, Homo sapien
gctctgtgaaaattgctccgctgttgtttgatt

SEQ ID NO: 248231 - DNA, 33 bp, Homo sapien
agagggcacacccaagactggatttcgcctagt

SEQ ID NO: 248232 - DNA, 33 bp, Homo sapien
agagggcacacccaaggctggatttcgcctagt

SEQ ID NO: 248233 - DNA, 33 bp, Homo sapien
tactgactttctaccaatgactagccacacttt

SEQ ID NO: 248234 - DNA, 33 bp, Homo sapien
tactgactttctaccagtgactagccacacttt

SEQ ID NO: 248235 - DNA, 33 bp, Homo sapien
gcaataccttgacagacggttaggacagccaat

SEQ ID NO: 248236 - DNA, 33 bp, Homo sapien
gcaataccttgacagatggttaggacagccaat

SEQ ID NO: 248237 - DNA, 33 bp, Homo sapien
tttgcctggttagccacgaccttcccatctggc

SEQ ID NO: 248238 - DNA, 33 bp, Homo sapien
tttgcctggttagccatgaccttcccatctggc

SEQ ID NO: 248239 - DNA, 33 bp, Homo sapien
gaacgggctgtagcaaatgtacatagtgggaat

SEQ ID NO: 248240 - DNA, 33 bp, Homo sapien
gaacgggctgtagcaagtgtacatagtgggaat

SEQ ID NO: 248241 - DNA, 33 bp, Homo sapien
cttctctttcatttaccaagagctgttgccaaa

SEQ ID NO: 248242 - DNA, 33 bp, Homo sapien
cttctctttcatttactaagagctgttgccaaa

SEQ ID NO: 248243 - DNA, 33 bp, Homo sapien
aataggtgtctggctccgaaaagggcggttagc

SEQ ID NO: 248244 - DNA, 33 bp, Homo sapien
aataggtgtctggctctgaaaagggcggttagc

SEQ ID NO: 248245 - DNA, 33 bp, Homo sapien
tacagtgtgcttattacacaccaagtattttct

SEQ ID NO: 248246 - DNA, 33 bp, Homo sapien
tacagtgtgcttattagacaccaagtattttct

SEQ ID NO: 248247 - DNA, 33 bp, Homo sapien
gagctccctggtcctacgcactttattgattcc

SEQ ID NO: 248248 - DNA, 33 bp, Homo sapien
gagctccctggtcctatgcactttattgattcc

SEQ ID NO: 248249 - DNA, 33 bp, Homo sapien
caggggtacaatatacaaagagacctctggagg

SEQ ID NO: 248250 - DNA, 33 bp, Homo sapien
caggggtacaatataccaagagacctctggagg

SEQ ID NO: 248251 - DNA, 33 bp, Homo sapien
ggaattcaacagagaaaaaagcagaaccaaaag

SEQ ID NO: 248252 - DNA, 33 bp, Homo sapien
ggaattcaacagagaagaaagcagaaccaaaag

SEQ ID NO: 248253 - DNA, 33 bp, Homo sapien
ccaaaattcgtgttctaaagttctaatccctag

SEQ ID NO: 248254 - DNA, 33 bp, Homo sapien
ccaaaattcgtgttctcaagttctaatccctag

SEQ ID NO: 248255 - DNA, 33 bp, Homo sapien
ttatgtaatgaactcacctaatcctcacacctg

SEQ ID NO: 248256 - DNA, 33 bp, Homo sapien
ttatgtaatgaactcatctaatcctcacacctg

SEQ ID NO: 248257 - DNA, 33 bp, Homo sapien
tgtatatgaatagaccccaataagacataaaat

SEQ ID NO: 248258 - DNA, 33 bp, Homo sapien
tgtatatgaatagacctcaataagacataaaat

SEQ ID NO: 248259 - DNA, 33 bp, Homo sapien
cagagccaactaaataactgaagaaggaaaatc

SEQ ID NO: 248260 - DNA, 33 bp, Homo sapien
cagagccaactaaatagctgaagaaggaaaatc

SEQ ID NO: 248261 - DNA, 33 bp, Homo sapien
cttttagctcgggctcactaattagacttaatc

SEQ ID NO: 248262 - DNA, 33 bp, Homo sapien
cttttagctcgggctcgctaattagacttaatc

SEQ ID NO: 248263 - DNA, 33 bp, Homo sapien
aggaaagcttcgtgtccagctatgttggtggat

SEQ ID NO: 248264 - DNA, 33 bp, Homo sapien
aggaaagcttcgtgtcgagctatgttggtggat

SEQ ID NO: 248265 - DNA, 33 bp, Homo sapien
gcagcatgcacgctggcagcggctcctctcagc

SEQ ID NO: 248266 - DNA, 33 bp, Homo sapien
gcagcatgcacgctggtagcggctcctctcagc

SEQ ID NO: 248267 - DNA, 33 bp, Homo sapien
ttgggacaaccgtgtcaatgttttctatttagg

SEQ ID NO: 248268 - DNA, 33 bp, Homo sapien
ttgggacaaccgtgtcgatgttttctatttagg

SEQ ID NO: 248269 - DNA, 33 bp, Homo sapien
aacactgtgctaatacaatctggacggttgtcc

SEQ ID NO: 248270 - DNA, 33 bp, Homo sapien
aacactgtgctaatacgatctggacggttgtcc

SEQ ID NO: 248271 - DNA, 33 bp, Homo sapien
acggattcctccatcacgagtctcttgaattac

SEQ ID NO: 248272 - DNA, 33 bp, Homo sapien
acggattcctccatcatgagtctcttgaattac

SEQ ID NO: 248273 - DNA, 33 bp, Homo sapien
atttcctttgatgccaaattcttgcccgcgccg

SEQ ID NO: 248274 - DNA, 33 bp, Homo sapien
atttcctttgatgccacattcttgcccgcgccg

SEQ ID NO: 248275 - DNA, 33 bp, Homo sapien
tgtttctgtggttatcacttcttatgactgagt

SEQ ID NO: 248276 - DNA, 33 bp, Homo sapien
tgtttctgtggttatcgcttcttatgactgagt

SEQ ID NO: 248277 - DNA, 33 bp, Homo sapien
cagatcaagaaccaacagcccatgtgttacttt

SEQ ID NO: 248278 - DNA, 33 bp, Homo sapien
cagatcaagaaccaacggcccatgtgttacttt

SEQ ID NO: 248279 - DNA, 33 bp, Homo sapien
cctggcctctcagaataacctcttattgcaagc

SEQ ID NO: 248280 - DNA, 33 bp, Homo sapien
cctggcctctcagaatcacctcttattgcaagc

SEQ ID NO: 248281 - DNA, 33 bp, Homo sapien
tcagagaaagactacaaggttctctgctatagc

SEQ ID NO: 248282 - DNA, 33 bp, Homo sapien
tcagagaaagactacagggttctctgctatagc

SEQ ID NO: 248283 - DNA, 33 bp, Homo sapien
gggaagccagttatcacgtgagaagtctgattg

SEQ ID NO: 248284 - DNA, 33 bp, Homo sapien
gggaagccagttatcatgtgagaagtctgattg

SEQ ID NO: 248285 - DNA, 33 bp, Homo sapien
cctccatcaaggtggacatcctgacactatggt

SEQ ID NO: 248286 - DNA, 33 bp, Homo sapien
cctccatcaaggtggagatcctgacactatggt

SEQ ID NO: 248287 - DNA, 33 bp, Homo sapien
gatctgcatttctgtacctcgaattgcccttca

SEQ ID NO: 248288 - DNA, 33 bp, Homo sapien
gatctgcatttctgtatctcgaattgcccttca

SEQ ID NO: 248289 - DNA, 33 bp, Homo sapien
gcatgcatctgatcacagcgcttaatctctcaa

SEQ ID NO: 248290 - DNA, 33 bp, Homo sapien
gcatgcatctgatcacggcgcttaatctctcaa

SEQ ID NO: 248291 - DNA, 33 bp, Homo sapien
ggagagaaccgtaacgacacagaatgagtgtgg

SEQ ID NO: 248292 - DNA, 33 bp, Homo sapien
ggagagaaccgtaacggcacagaatgagtgtgg

SEQ ID NO: 248293 - DNA, 33 bp, Homo sapien
tgagccccaaaactccagacctgaattgccaga

SEQ ID NO: 248294 - DNA, 33 bp, Homo sapien
tgagccccaaaactccggacctgaattgccaga

SEQ ID NO: 248295 - DNA, 33 bp, Homo sapien
tctatgtcagaggtgaactcagaaaacataaaa

SEQ ID NO: 248296 - DNA, 33 bp, Homo sapien
tctatgtcagaggtgagctcagaaaacataaaa

SEQ ID NO: 248297 - DNA, 33 bp, Homo sapien
acaaatcttggccactaagctacataaaataga

SEQ ID NO: 248298 - DNA, 33 bp, Homo sapien
acaaatcttggccactgagctacataaaataga

SEQ ID NO: 248299 - DNA, 33 bp, Homo sapien
gagaggccaacttggcaatggtattctccagga

SEQ ID NO: 248300 - DNA, 33 bp, Homo sapien
gagaggccaacttggcgatggtattctccagga

SEQ ID NO: 248301 - DNA, 33 bp, Homo sapien
tcacagaatagcatctaaaccaaggttctgttt

SEQ ID NO: 248302 - DNA, 33 bp, Homo sapien
tcacagaatagcatctgaaccaaggttctgttt

SEQ ID NO: 248303 - DNA, 33 bp, Homo sapien
ctccctgtcaaggcagcattcatgaacaaagtg

SEQ ID NO: 248304 - DNA, 33 bp, Homo sapien
ctccctgtcaaggcagtattcatgaacaaagtg

SEQ ID NO: 248305 - DNA, 33 bp, Homo sapien
gctcttattgacactcaaaattctttctttttc

SEQ ID NO: 248306 - DNA, 33 bp, Homo sapien
gctcttattgacactccaaattctttctttttc

SEQ ID NO: 248307 - DNA, 33 bp, Homo sapien
cgtgtagctttaaccacgagaggaaatctatca

SEQ ID NO: 248308 - DNA, 33 bp, Homo sapien
cgtgtagctttaaccatgagaggaaatctatca

SEQ ID NO: 248309 - DNA, 33 bp, Homo sapien
gctggacattaaaagacatttttcaccatgagc

SEQ ID NO: 248310 - DNA, 33 bp, Homo sapien
gctggacattaaaagagatttttcaccatgagc

SEQ ID NO: 248311 - DNA, 33 bp, Homo sapien
cggtgtctcacacaaaacctcagtggtggttat

SEQ ID NO: 248312 - DNA, 33 bp, Homo sapien
cggtgtctcacacaaatcctcagtggtggttat

SEQ ID NO: 248313 - DNA, 33 bp, Homo sapien
taaatctacactgagtaaaattcaattgttttg

SEQ ID NO: 248314 - DNA, 33 bp, Homo sapien
taaatctacactgagttaaattcaattgttttg

SEQ ID NO: 248315 - DNA, 33 bp, Homo sapien
tgatgatgacaatttacatctctcagcttctag

SEQ ID NO: 248316 - DNA, 33 bp, Homo sapien
tgatgatgacaatttatatctctcagcttctag

SEQ ID NO: 248317 - DNA, 33 bp, Homo sapien
cccaccccaatattacacagtggtagaaacatc

SEQ ID NO: 248318 - DNA, 33 bp, Homo sapien
cccaccccaatattacgcagtggtagaaacatc

SEQ ID NO: 248319 - DNA, 33 bp, Homo sapien
tagcttccatctctcacgaatcaaagagtactc

SEQ ID NO: 248320 - DNA, 33 bp, Homo sapien
tagcttccatctctcatgaatcaaagagtactc

SEQ ID NO: 248321 - DNA, 33 bp, Homo sapien
ttttgccaccgggaaaccacaaagtgacagaac

SEQ ID NO: 248322 - DNA, 33 bp, Homo sapien
ttttgccaccgggaaagcacaaagtgacagaac

SEQ ID NO: 248323 - DNA, 33 bp, Homo sapien
gtgttgtcaggtgtaacggggacagaggagaag

SEQ ID NO: 248324 - DNA, 33 bp, Homo sapien
gtgttgtcaggtgtaatggggacagaggagaag

SEQ ID NO: 248325 - DNA, 33 bp, Homo sapien
tcccaaacaacttctaaggccattctgattttt

SEQ ID NO: 248326 - DNA, 33 bp, Homo sapien
tcccaaacaacttctagggccattctgattttt

SEQ ID NO: 248327 - DNA, 33 bp, Homo sapien
tcaccttatagtatcacaatcagaagttttgct

SEQ ID NO: 248328 - DNA, 33 bp, Homo sapien
tcaccttatagtatcataatcagaagttttgct

SEQ ID NO: 248329 - DNA, 33 bp, Homo sapien
tggtggcaaaaaaaatgagtttatctatctata

SEQ ID NO: 248330 - DNA, 33 bp, Homo sapien
tggtggcaaaaaaaattagtttatctatctata

SEQ ID NO: 248331 - DNA, 33 bp, Homo sapien
gcagacaaaagttttgaaatagcaagagcattg

SEQ ID NO: 248332 - DNA, 33 bp, Homo sapien
gcagacaaaagttttggaatagcaagagcattg

SEQ ID NO: 248333 - DNA, 33 bp, Homo sapien
ttaaacagttaaaaacaagagagaagtgaatgg

SEQ ID NO: 248334 - DNA, 33 bp, Homo sapien
ttaaacagttaaaaaccagagagaagtgaatgg

SEQ ID NO: 248335 - DNA, 33 bp, Homo sapien
tgcaaaaaccaagcctcaatgtgtgggtaagac

SEQ ID NO: 248336 - DNA, 33 bp, Homo sapien
tgcaaaaaccaagcctgaatgtgtgggtaagac

SEQ ID NO: 248337 - DNA, 33 bp, Homo sapien
gaggaaggtcaataaaaggtgcatagtcatacc

SEQ ID NO: 248338 - DNA, 33 bp, Homo sapien
gaggaaggtcaataaatggtgcatagtcatacc

SEQ ID NO: 248339 - DNA, 33 bp, Homo sapien
accagtgttactcttaaagtctggattccctga

SEQ ID NO: 248340 - DNA, 33 bp, Homo sapien
accagtgttactcttacagtctggattccctga

SEQ ID NO: 248341 - DNA, 33 bp, Homo sapien
cctttcaagtatgcaacgtggcttgactccaga

SEQ ID NO: 248342 - DNA, 33 bp, Homo sapien
cctttcaagtatgcaatgtggcttgactccaga

SEQ ID NO: 248343 - DNA, 33 bp, Homo sapien
tgccgcacctctttcccgaaatatcacattaga

SEQ ID NO: 248344 - DNA, 33 bp, Homo sapien
tgccgcacctctttcctgaaatatcacattaga

SEQ ID NO: 248345 - DNA, 33 bp, Homo sapien
gctgtgaatgcaactccgaaggggactggacca

SEQ ID NO: 248346 - DNA, 33 bp, Homo sapien
gctgtgaatgcaactcggaaggggactggacca

SEQ ID NO: 248347 - DNA, 33 bp, Homo sapien
agctttaagtcccttccagtgattgccaaaatc

SEQ ID NO: 248348 - DNA, 33 bp, Homo sapien
agctttaagtcccttctagtgattgccaaaatc

SEQ ID NO: 248349 - DNA, 33 bp, Homo sapien
agcttttatgtctcatcatcctccaccagaatg

SEQ ID NO: 248350 - DNA, 33 bp, Homo sapien
agcttttatgtctcatgatcctccaccagaatg

SEQ ID NO: 248351 - DNA, 33 bp, Homo sapien
tgaccaggaatcctcacgtctacctgctcaggg

SEQ ID NO: 248352 - DNA, 33 bp, Homo sapien
tgaccaggaatcctcatgtctacctgctcaggg

SEQ ID NO: 248353 - DNA, 33 bp, Homo sapien
tacctgtacctatgtccatatacctatgcccat

SEQ ID NO: 248354 - DNA, 33 bp, Homo sapien
tacctgtacctatgtctatatacctatgcccat

SEQ ID NO: 248355 - DNA, 33 bp, Homo sapien
aataccagccttctatcagttctgagcctgtcc

SEQ ID NO: 248356 - DNA, 33 bp, Homo sapien
aataccagccttctatgagttctgagcctgtcc

SEQ ID NO: 248357 - DNA, 33 bp, Homo sapien
ctcttctagaaaaagaagctaactgaagggggc

SEQ ID NO: 248358 - DNA, 33 bp, Homo sapien
ctcttctagaaaaagaggctaactgaagggggc

SEQ ID NO: 248359 - DNA, 33 bp, Homo sapien
caccttgacgataccccctaagtccaagcatag

SEQ ID NO: 248360 - DNA, 33 bp, Homo sapien
caccttgacgatacccgctaagtccaagcatag

SEQ ID NO: 248361 - DNA, 33 bp, Homo sapien
gagtccataggttttacgaatctctaaacaggc

SEQ ID NO: 248362 - DNA, 33 bp, Homo sapien
gagtccataggttttatgaatctctaaacaggc

SEQ ID NO: 248363 - DNA, 33 bp, Homo sapien
ccccaacctgtttagacctagatacccacagaa

SEQ ID NO: 248364 - DNA, 33 bp, Homo sapien
ccccaacctgtttagatctagatacccacagaa

SEQ ID NO: 248365 - DNA, 33 bp, Homo sapien
tatctgtactcgaacaagcgccaacacactggg

SEQ ID NO: 248366 - DNA, 33 bp, Homo sapien
tatctgtactcgaacacgcgccaacacactggg

SEQ ID NO: 248367 - DNA, 33 bp, Homo sapien
caatctccccaactcaaaaacttcataattcaa

SEQ ID NO: 248368 - DNA, 33 bp, Homo sapien
caatctccccaactcagaaacttcataattcaa

SEQ ID NO: 248369 - DNA, 33 bp, Homo sapien
tgcaagagaaaaggagcaactgtgtagctgcaa

SEQ ID NO: 248370 - DNA, 33 bp, Homo sapien
tgcaagagaaaaggagtaactgtgtagctgcaa

SEQ ID NO: 248371 - DNA, 33 bp, Homo sapien
cctcgacgaaacggaaaaatctcgcaggttcct

SEQ ID NO: 248372 - DNA, 33 bp, Homo sapien
cctcgacgaaacggaagaatctcgcaggttcct

SEQ ID NO: 248373 - DNA, 33 bp, Homo sapien
cagcagcggccctctccaaactctcctccctga

SEQ ID NO: 248374 - DNA, 33 bp, Homo sapien
cagcagcggccctctcgaaactctcctccctga

SEQ ID NO: 248375 - DNA, 33 bp, Homo sapien
ttttcttggtgaaatacagcttcaagaactctg

SEQ ID NO: 248376 - DNA, 33 bp, Homo sapien
ttttcttggtgaaatatagcttcaagaactctg

SEQ ID NO: 248377 - DNA, 33 bp, Homo sapien
tgttacccagacacaaaccattttttcccctcc

SEQ ID NO: 248378 - DNA, 33 bp, Homo sapien
tgttacccagacacaagccattttttcccctcc

SEQ ID NO: 248379 - DNA, 33 bp, Homo sapien
ccgacactgttaagcacgtgtccaaattgctga

SEQ ID NO: 248380 - DNA, 33 bp, Homo sapien
ccgacactgttaagcatgtgtccaaattgctga

SEQ ID NO: 248381 - DNA, 33 bp, Homo sapien
cagccaggcactcttacatcttcagctcaccct

SEQ ID NO: 248382 - DNA, 33 bp, Homo sapien
cagccaggcactcttatatcttcagctcaccct

SEQ ID NO: 248383 - DNA, 33 bp, Homo sapien
ctgttcaaaaaccttcaaggatttgccatagct

SEQ ID NO: 248384 - DNA, 33 bp, Homo sapien
ctgttcaaaaaccttccaggatttgccatagct

SEQ ID NO: 248385 - DNA, 33 bp, Homo sapien
aggatgaactcggtcacgttgtgatacattcct

SEQ ID NO: 248386 - DNA, 33 bp, Homo sapien
aggatgaactcggtcatgttgtgatacattcct

SEQ ID NO: 248387 - DNA, 33 bp, Homo sapien
gacaccaattaagtgcacagtatttgatagtta

SEQ ID NO: 248388 - DNA, 33 bp, Homo sapien
gacaccaattaagtgcgcagtatttgatagtta

SEQ ID NO: 248389 - DNA, 33 bp, Homo sapien
ttcctaaatgcctgacccacagaatctgtgaac

SEQ ID NO: 248390 - DNA, 33 bp, Homo sapien
ttcctaaatgcctgacgcacagaatctgtgaac

SEQ ID NO: 248391 - DNA, 33 bp, Homo sapien
cagtgggggtgacctgaaggatcttagcattcc

SEQ ID NO: 248392 - DNA, 33 bp, Homo sapien
cagtgggggtgacctggaggatcttagcattcc

SEQ ID NO: 248393 - DNA, 33 bp, Homo sapien
gagccatccatgtcaaaataagggtcttaactc

SEQ ID NO: 248394 - DNA, 33 bp, Homo sapien
gagccatccatgtcaagataagggtcttaactc

SEQ ID NO: 248395 - DNA, 33 bp, Homo sapien
tcctatctgtcacgtgaaaagtacctaatgcat

SEQ ID NO: 248396 - DNA, 33 bp, Homo sapien
tcctatctgtcacgtggaaagtacctaatgcat

SEQ ID NO: 248397 - DNA, 33 bp, Homo sapien
gtttaagtcctgcaaccagctctttctagctgt

SEQ ID NO: 248398 - DNA, 33 bp, Homo sapien
gtttaagtcctgcaactagctctttctagctgt

SEQ ID NO: 248399 - DNA, 33 bp, Homo sapien
gccacctttgaagtgaccgccttatgtaactgc

SEQ ID NO: 248400 - DNA, 33 bp, Homo sapien
gccacctttgaagtgatcgccttatgtaactgc

SEQ ID NO: 248401 - DNA, 33 bp, Homo sapien
tccctctggatccagggcataaggactgcccct

SEQ ID NO: 248402 - DNA, 33 bp, Homo sapien
tccctctggatccaggtcataaggactgcccct

SEQ ID NO: 248403 - DNA, 33 bp, Homo sapien
acatttagacttaagcagcatcacagacttggg

SEQ ID NO: 248404 - DNA, 33 bp, Homo sapien
acatttagacttaagcggcatcacagacttggg

SEQ ID NO: 248405 - DNA, 33 bp, Homo sapien
aaaactcagctacataaggagaaatagagaccg

SEQ ID NO: 248406 - DNA, 33 bp, Homo sapien
aaaactcagctacatacggagaaatagagaccg

SEQ ID NO: 248407 - DNA, 33 bp, Homo sapien
cccaggggatgctgggacagggctattgatact

SEQ ID NO: 248408 - DNA, 33 bp, Homo sapien
cccaggggatgctggggcagggctattgatact

SEQ ID NO: 248409 - DNA, 33 bp, Homo sapien
cattggttttgatgccagaaattctttggacat

SEQ ID NO: 248410 - DNA, 33 bp, Homo sapien
cattggttttgatgccggaaattctttggacat

SEQ ID NO: 248411 - DNA, 33 bp, Homo sapien
cgagcgcgtgtctttcgctggcccctagataaa

SEQ ID NO: 248412 - DNA, 33 bp, Homo sapien
cgagcgcgtgtctttctctggcccctagataaa

SEQ ID NO: 248413 - DNA, 33 bp, Homo sapien
aattgaagtgagttcgaaccgatactgtttatc

SEQ ID NO: 248414 - DNA, 33 bp, Homo sapien
aattgaagtgagttcggaccgatactgtttatc

SEQ ID NO: 248415 - DNA, 33 bp, Homo sapien
cttctgcattcagaaacgttttcaccttctctt

SEQ ID NO: 248416 - DNA, 33 bp, Homo sapien
cttctgcattcagaaatgttttcaccttctctt

SEQ ID NO: 248417 - DNA, 33 bp, Homo sapien
aggagaaatccccaaacgcttggactgatccca

SEQ ID NO: 248418 - DNA, 33 bp, Homo sapien
aggagaaatccccaaatgcttggactgatccca

SEQ ID NO: 248419 - DNA, 33 bp, Homo sapien
gctcataaacttctaaagcaagcaggagataaa

SEQ ID NO: 248420 - DNA, 33 bp, Homo sapien
gctcataaacttctaaggcaagcaggagataaa

SEQ ID NO: 248421 - DNA, 33 bp, Homo sapien
aatttcggggaaggaagcgggagagctaactgg

SEQ ID NO: 248422 - DNA, 33 bp, Homo sapien
aatttcggggaaggaatcgggagagctaactgg

SEQ ID NO: 248423 - DNA, 33 bp, Homo sapien
acatctcctggaaaccagcttgctcccctgact

SEQ ID NO: 248424 - DNA, 33 bp, Homo sapien
acatctcctggaaaccggcttgctcccctgact

SEQ ID NO: 248425 - DNA, 33 bp, Homo sapien
ctctacattgcttgataactctgagcttcattt

SEQ ID NO: 248426 - DNA, 33 bp, Homo sapien
ctctacattgcttgatgactctgagcttcattt

SEQ ID NO: 248427 - DNA, 33 bp, Homo sapien
tctctttctttctcacaggtcccatatgcagga

SEQ ID NO: 248428 - DNA, 33 bp, Homo sapien
tctctttctttctcacgggtcccatatgcagga

SEQ ID NO: 248429 - DNA, 33 bp, Homo sapien
cgcctgttcgggcttcactacagggggctagac

SEQ ID NO: 248430 - DNA, 33 bp, Homo sapien
cgcctgttcgggcttcgctacagggggctagac

SEQ ID NO: 248431 - DNA, 33 bp, Homo sapien
aatgttcaaaggctgaaaagaaggtgagtcttg

SEQ ID NO: 248432 - DNA, 33 bp, Homo sapien
aatgttcaaaggctgagaagaaggtgagtcttg

SEQ ID NO: 248433 - DNA, 33 bp, Homo sapien
ctcatgaatgcaaaccaaggcctgggtaattaa

SEQ ID NO: 248434 - DNA, 33 bp, Homo sapien
ctcatgaatgcaaaccgaggcctgggtaattaa

SEQ ID NO: 248435 - DNA, 33 bp, Homo sapien
ttctctagctacaagacgcctccattgctctca

SEQ ID NO: 248436 - DNA, 33 bp, Homo sapien
ttctctagctacaagatgcctccattgctctca

SEQ ID NO: 248437 - DNA, 33 bp, Homo sapien
agtttgaggctacagtcactaatgattgcccca

SEQ ID NO: 248438 - DNA, 33 bp, Homo sapien
agtttgaggctacagttactaatgattgcccca

SEQ ID NO: 248439 - DNA, 33 bp, Homo sapien
gcctctttagtaagaacgaagataagataatgc

SEQ ID NO: 248440 - DNA, 33 bp, Homo sapien
gcctctttagtaagaatgaagataagataatgc

SEQ ID NO: 248441 - DNA, 33 bp, Homo sapien
ggtttttccagaacagaagaattttttccattt

SEQ ID NO: 248442 - DNA, 33 bp, Homo sapien
ggtttttccagaacagtagaattttttccattt

SEQ ID NO: 248443 - DNA, 33 bp, Homo sapien
tacaagagatgaagaaaataagttctgggccct

SEQ ID NO: 248444 - DNA, 33 bp, Homo sapien
tacaagagatgaagaagataagttctgggccct

SEQ ID NO: 248445 - DNA, 33 bp, Homo sapien
ttaggtacacatacaaggccatagcagaactta

SEQ ID NO: 248446 - DNA, 33 bp, Homo sapien
ttaggtacacatacaatgccatagcagaactta

SEQ ID NO: 248447 - DNA, 33 bp, Homo sapien
ctatggctgggcattcaaattgtttccagtttt

SEQ ID NO: 248448 - DNA, 33 bp, Homo sapien
ctatggctgggcattcgaattgtttccagtttt

SEQ ID NO: 248449 - DNA, 33 bp, Homo sapien
acttgcatatttataacaggtacgtagcagtat

SEQ ID NO: 248450 - DNA, 33 bp, Homo sapien
acttgcatatttataataggtacgtagcagtat

SEQ ID NO: 248451 - DNA, 33 bp, Homo sapien
aatcactgtggtcagaagtggaatgctgtgatt

SEQ ID NO: 248452 - DNA, 33 bp, Homo sapien
aatcactgtggtcagaggtggaatgctgtgatt

SEQ ID NO: 248453 - DNA, 33 bp, Homo sapien
taggaaaactgcagcccagggaggttaaataac

SEQ ID NO: 248454 - DNA, 33 bp, Homo sapien
taggaaaactgcagccgagggaggttaaataac

SEQ ID NO: 248455 - DNA, 33 bp, Homo sapien
catctttccagcacccaaagatgaggttagtga

SEQ ID NO: 248456 - DNA, 33 bp, Homo sapien
catctttccagcacccgaagatgaggttagtga

SEQ ID NO: 248457 - DNA, 33 bp, Homo sapien
actctgaaaaatgtgacctgttagtaatgtgtg

SEQ ID NO: 248458 - DNA, 33 bp, Homo sapien
actctgaaaaatgtgagctgttagtaatgtgtg

SEQ ID NO: 248459 - DNA, 33 bp, Homo sapien
ggaaggacaacggctcaacacatatggattaaa

SEQ ID NO: 248460 - DNA, 33 bp, Homo sapien
ggaaggacaacggctcgacacatatggattaaa

SEQ ID NO: 248461 - DNA, 33 bp, Homo sapien
gggcctctgaaaaggtaacattggagcagaaag

SEQ ID NO: 248462 - DNA, 33 bp, Homo sapien
gggcctctgaaaaggtgacattggagcagaaag

SEQ ID NO: 248463 - DNA, 33 bp, Homo sapien
cacactcacacacaccccatttcatttgaacca

SEQ ID NO: 248464 - DNA, 33 bp, Homo sapien
cacactcacacacacctcatttcatttgaacca

SEQ ID NO: 248465 - DNA, 33 bp, Homo sapien
atattggccacaggggaacaaagaggctttaaa

SEQ ID NO: 248466 - DNA, 33 bp, Homo sapien
atattggccacagggggacaaagaggctttaaa

SEQ ID NO: 248467 - DNA, 33 bp, Homo sapien
ttgtcctaatagccacaattttgctcccctttt

SEQ ID NO: 248468 - DNA, 33 bp, Homo sapien
ttgtcctaatagccacgattttgctcccctttt

SEQ ID NO: 248469 - DNA, 33 bp, Homo sapien
aatctaggtttacatcagaactccaccactatg

SEQ ID NO: 248470 - DNA, 33 bp, Homo sapien
aatctaggtttacatcggaactccaccactatg

SEQ ID NO: 248471 - DNA, 33 bp, Homo sapien
gttcagaggcctgaagcaactgtcctgaggttg

SEQ ID NO: 248472 - DNA, 33 bp, Homo sapien
gttcagaggcctgaagtaactgtcctgaggttg

SEQ ID NO: 248473 - DNA, 33 bp, Homo sapien
tcctgccatctaacagacactcctctaagaatt

SEQ ID NO: 248474 - DNA, 33 bp, Homo sapien
tcctgccatctaacaggcactcctctaagaatt

SEQ ID NO: 248475 - DNA, 33 bp, Homo sapien
ttcatttgctacaggacaaagtcaatttgcacc

SEQ ID NO: 248476 - DNA, 33 bp, Homo sapien
ttcatttgctacaggataaagtcaatttgcacc

SEQ ID NO: 248477 - DNA, 33 bp, Homo sapien
gtcaggcagcatctagaaactggaaactgttgg

SEQ ID NO: 248478 - DNA, 33 bp, Homo sapien
gtcaggcagcatctaggaactggaaactgttgg

SEQ ID NO: 248479 - DNA, 33 bp, Homo sapien
tgaaaattagaattggaaccagctctctccttg

SEQ ID NO: 248480 - DNA, 33 bp, Homo sapien
tgaaaattagaattggcaccagctctctccttg

SEQ ID NO: 248481 - DNA, 33 bp, Homo sapien
aactcttggggccaaaaagatatttacaaatat

SEQ ID NO: 248482 - DNA, 33 bp, Homo sapien
aactcttggggccaaatagatatttacaaatat

SEQ ID NO: 248483 - DNA, 33 bp, Homo sapien
cccccagagtagtaaacctcaagccctcgggcc

SEQ ID NO: 248484 - DNA, 33 bp, Homo sapien
cccccagagtagtaaatctcaagccctcgggcc

SEQ ID NO: 248485 - DNA, 33 bp, Homo sapien
ctcagcccgttttacaggagtgtaactactcac

SEQ ID NO: 248486 - DNA, 33 bp, Homo sapien
ctcagcccgttttacatgagtgtaactactcac

SEQ ID NO: 248487 - DNA, 33 bp, Homo sapien
gaggcccttaggaaaactgatgaagccctccag

SEQ ID NO: 248488 - DNA, 33 bp, Homo sapien
gaggcccttaggaaaattgatgaagccctccag

SEQ ID NO: 248489 - DNA, 33 bp, Homo sapien
ggaccttatgcaagggaattcgccattcaatgt

SEQ ID NO: 248490 - DNA, 33 bp, Homo sapien
ggaccttatgcaagggtattcgccattcaatgt

SEQ ID NO: 248491 - DNA, 33 bp, Homo sapien
gtaaattctttcttcagtctaaaacctctgaat

SEQ ID NO: 248492 - DNA, 33 bp, Homo sapien
gtaaattctttcttcattctaaaacctctgaat

SEQ ID NO: 248493 - DNA, 33 bp, Homo sapien
tagcttagagttttaaatgacccatcaaatgac

SEQ ID NO: 248494 - DNA, 33 bp, Homo sapien
tagcttagagttttaagtgacccatcaaatgac

SEQ ID NO: 248495 - DNA, 33 bp, Homo sapien
atctccaaatatcaaaacagagtactaaatcac

SEQ ID NO: 248496 - DNA, 33 bp, Homo sapien
atctccaaatatcaaagcagagtactaaatcac

SEQ ID NO: 248497 - DNA, 33 bp, Homo sapien
ccacttagagcccaagacatgacttctttcccg

SEQ ID NO: 248498 - DNA, 33 bp, Homo sapien
ccacttagagcccaagtcatgacttctttcccg

SEQ ID NO: 248499 - DNA, 33 bp, Homo sapien
gaaaatagaatgttagaaattggcacccttctc

SEQ ID NO: 248500 - DNA, 33 bp, Homo sapien
gaaaatagaatgttaggaattggcacccttctc

SEQ ID NO: 248501 - DNA, 33 bp, Homo sapien
caacagttttgctatcacatgaccttagatgac

SEQ ID NO: 248502 - DNA, 33 bp, Homo sapien
caacagttttgctatcgcatgaccttagatgac

SEQ ID NO: 248503 - DNA, 33 bp, Homo sapien
cattttcataacatggccactggctgcttccct

SEQ ID NO: 248504 - DNA, 33 bp, Homo sapien
cattttcataacatggtcactggctgcttccct

SEQ ID NO: 248505 - DNA, 33 bp, Homo sapien
aaggaagtagccacagaatcagtaagttgttat

SEQ ID NO: 248506 - DNA, 33 bp, Homo sapien
aaggaagtagccacaggatcagtaagttgttat

SEQ ID NO: 248507 - DNA, 33 bp, Homo sapien
aataccaaaatgtatcacaaagtgtggaaagga

SEQ ID NO: 248508 - DNA, 33 bp, Homo sapien
aataccaaaatgtatctcaaagtgtggaaagga

SEQ ID NO: 248509 - DNA, 33 bp, Homo sapien
gggtgcaagagagagacggaggggtgccacact

SEQ ID NO: 248510 - DNA, 33 bp, Homo sapien
gggtgcaagagagagagggaggggtgccacact

SEQ ID NO: 248511 - DNA, 33 bp, Homo sapien
aatgccacagcagaaaccaatcctaaaatcact

SEQ ID NO: 248512 - DNA, 33 bp, Homo sapien
aatgccacagcagaaatcaatcctaaaatcact

SEQ ID NO: 248513 - DNA, 33 bp, Homo sapien
cttttattatgtaccacaggcattgccaccttc

SEQ ID NO: 248514 - DNA, 33 bp, Homo sapien
cttttattatgtaccagaggcattgccaccttc

SEQ ID NO: 248515 - DNA, 33 bp, Homo sapien
agagagagtagagaaactggtcaggtggtgata

SEQ ID NO: 248516 - DNA, 33 bp, Homo sapien
agagagagtagagaaattggtcaggtggtgata

SEQ ID NO: 248517 - DNA, 33 bp, Homo sapien
tccatccaggaaagacagtagcacctgaaaatc

SEQ ID NO: 248518 - DNA, 33 bp, Homo sapien
tccatccaggaaagacggtagcacctgaaaatc

SEQ ID NO: 248519 - DNA, 33 bp, Homo sapien
catggaaacaagccaacggttacatgcaagaaa

SEQ ID NO: 248520 - DNA, 33 bp, Homo sapien
catggaaacaagccaatggttacatgcaagaaa

SEQ ID NO: 248521 - DNA, 33 bp, Homo sapien
gatgtcttttgtgaacaccaccctctgagacag

SEQ ID NO: 248522 - DNA, 33 bp, Homo sapien
gatgtcttttgtgaacgccaccctctgagacag

SEQ ID NO: 248523 - DNA, 33 bp, Homo sapien
agatatgtctggtacaaattagaactcaataaa

SEQ ID NO: 248524 - DNA, 33 bp, Homo sapien
agatatgtctggtacacattagaactcaataaa

SEQ ID NO: 248525 - DNA, 33 bp, Homo sapien
agattacagacgagagccatggtgcctgatcct

SEQ ID NO: 248526 - DNA, 33 bp, Homo sapien
agattacagacgagagtcatggtgcctgatcct

SEQ ID NO: 248527 - DNA, 33 bp, Homo sapien
ccatcctcagattgtaggacagtaactagtatg

SEQ ID NO: 248528 - DNA, 33 bp, Homo sapien
ccatcctcagattgtatgacagtaactagtatg

SEQ ID NO: 248529 - DNA, 33 bp, Homo sapien
ctttagctaggacctccatgtttgcaagagaca

SEQ ID NO: 248530 - DNA, 33 bp, Homo sapien
ctttagctaggacctctatgtttgcaagagaca

SEQ ID NO: 248531 - DNA, 33 bp, Homo sapien
accgaggctcagggaaataaatgatgtctctaa

SEQ ID NO: 248532 - DNA, 33 bp, Homo sapien
accgaggctcagggaagtaaatgatgtctctaa

SEQ ID NO: 248533 - DNA, 33 bp, Homo sapien
tgttatggcccttggaccagtctaaacaatccc

SEQ ID NO: 248534 - DNA, 33 bp, Homo sapien
tgttatggcccttggatcagtctaaacaatccc

SEQ ID NO: 248535 - DNA, 33 bp, Homo sapien
ggactaccaccttctacgatcttaatctcagtt

SEQ ID NO: 248536 - DNA, 33 bp, Homo sapien
ggactaccaccttctatgatcttaatctcagtt

SEQ ID NO: 248537 - DNA, 33 bp, Homo sapien
atacagcaacaaataacgagaacaaaagagctg

SEQ ID NO: 248538 - DNA, 33 bp, Homo sapien
atacagcaacaaataatgagaacaaaagagctg

SEQ ID NO: 248539 - DNA, 33 bp, Homo sapien
tttcttctcaatttgcagaaaaggccactgagg

SEQ ID NO: 248540 - DNA, 33 bp, Homo sapien
tttcttctcaatttgcggaaaaggccactgagg

SEQ ID NO: 248541 - DNA, 33 bp, Homo sapien
tcactgagaagcagtcaatggttagttacaaat

SEQ ID NO: 248542 - DNA, 33 bp, Homo sapien
tcactgagaagcagtcgatggttagttacaaat

SEQ ID NO: 248543 - DNA, 33 bp, Homo sapien
agtctgctttgcattaccaatttgttaagaaac

SEQ ID NO: 248544 - DNA, 33 bp, Homo sapien
agtctgctttgcattatcaatttgttaagaaac

SEQ ID NO: 248545 - DNA, 33 bp, Homo sapien
ggctttcctgaaagtacgctagaacataaataa

SEQ ID NO: 248546 - DNA, 33 bp, Homo sapien
ggctttcctgaaagtatgctagaacataaataa

SEQ ID NO: 248547 - DNA, 33 bp, Homo sapien
aaaagtgagtacaagaaacatggccacaaagtg

SEQ ID NO: 248548 - DNA, 33 bp, Homo sapien
aaaagtgagtacaagagacatggccacaaagtg

SEQ ID NO: 248549 - DNA, 33 bp, Homo sapien
catagacctcaaagcaagaaaggaacagaagtg

SEQ ID NO: 248550 - DNA, 33 bp, Homo sapien
catagacctcaaagcaggaaaggaacagaagtg

SEQ ID NO: 248551 - DNA, 33 bp, Homo sapien
acccaggagcccaaaggcctcgaggaaccacct

SEQ ID NO: 248552 - DNA, 33 bp, Homo sapien
acccaggagcccaaagtcctcgaggaaccacct

SEQ ID NO: 248553 - DNA, 33 bp, Homo sapien
cctgtgtattactcagaccacactatttaacag

SEQ ID NO: 248554 - DNA, 33 bp, Homo sapien
cctgtgtattactcaggccacactatttaacag

SEQ ID NO: 248555 - DNA, 33 bp, Homo sapien
aagagaagtcaagtcacgataagttccaaagtg

SEQ ID NO: 248556 - DNA, 33 bp, Homo sapien
aagagaagtcaagtcatgataagttccaaagtg

SEQ ID NO: 248557 - DNA, 33 bp, Homo sapien
aggaggcctcactttcgcccagcgtgggccttt

SEQ ID NO: 248558 - DNA, 33 bp, Homo sapien
aggaggcctcactttctcccagcgtgggccttt

SEQ ID NO: 248559 - DNA, 33 bp, Homo sapien
tacttgtcctctgccacgacctacacagaatac

SEQ ID NO: 248560 - DNA, 33 bp, Homo sapien
tacttgtcctctgccatgacctacacagaatac

SEQ ID NO: 248561 - DNA, 33 bp, Homo sapien
gagaaattgagagctcaaaacaccagccaaatt

SEQ ID NO: 248562 - DNA, 33 bp, Homo sapien
gagaaattgagagctccaaacaccagccaaatt

SEQ ID NO: 248563 - DNA, 33 bp, Homo sapien
acaggggtgatgagtagtaagaagagaaggtag

SEQ ID NO: 248564 - DNA, 33 bp, Homo sapien
acaggggtgatgagtattaagaagagaaggtag

SEQ ID NO: 248565 - DNA, 33 bp, Homo sapien
aggcttcctggaggcagtgacggttggattagg

SEQ ID NO: 248566 - DNA, 33 bp, Homo sapien
aggcttcctggaggcattgacggttggattagg

SEQ ID NO: 248567 - DNA, 33 bp, Homo sapien
atgcaggtatgagatacagctgcaagatgcaac

SEQ ID NO: 248568 - DNA, 33 bp, Homo sapien
atgcaggtatgagatatagctgcaagatgcaac

SEQ ID NO: 248569 - DNA, 33 bp, Homo sapien
gtcctaacatcccccaccacgtaactgtgaatg

SEQ ID NO: 248570 - DNA, 33 bp, Homo sapien
gtcctaacatcccccatcacgtaactgtgaatg

SEQ ID NO: 248571 - DNA, 33 bp, Homo sapien
ctttttccttgtaataagcaggatggaaagaga

SEQ ID NO: 248572 - DNA, 33 bp, Homo sapien
ctttttccttgtaataggcaggatggaaagaga

SEQ ID NO: 248573 - DNA, 33 bp, Homo sapien
ctcctgcattatatacactaacctatgctgcct

SEQ ID NO: 248574 - DNA, 33 bp, Homo sapien
ctcctgcattatatacgctaacctatgctgcct

SEQ ID NO: 248575 - DNA, 33 bp, Homo sapien
acaccttgaaaaaggaaatacagcccttaccag

SEQ ID NO: 248576 - DNA, 33 bp, Homo sapien
acaccttgaaaaaggagatacagcccttaccag

SEQ ID NO: 248577 - DNA, 33 bp, Homo sapien
acctggagttttggacagcatacatagctctca

SEQ ID NO: 248578 - DNA, 33 bp, Homo sapien
acctggagttttggacggcatacatagctctca

SEQ ID NO: 248579 - DNA, 33 bp, Homo sapien
gaggtcagcgtccccccactacctgcggactcc

SEQ ID NO: 248580 - DNA, 33 bp, Homo sapien
gaggtcagcgtccccctactacctgcggactcc

SEQ ID NO: 248581 - DNA, 33 bp, Homo sapien
ggccagggaggccggcacagcccccagacacat

SEQ ID NO: 248582 - DNA, 33 bp, Homo sapien
ggccagggaggccggcgcagcccccagacacat

SEQ ID NO: 248583 - DNA, 33 bp, Homo sapien
taaggccagacggggcaaattaaaccagaaaga

SEQ ID NO: 248584 - DNA, 33 bp, Homo sapien
taaggccagacggggcgaattaaaccagaaaga

SEQ ID NO: 248585 - DNA, 33 bp, Homo sapien
atcgtcattcttagtaaccaacaatcctctaca

SEQ ID NO: 248586 - DNA, 33 bp, Homo sapien
atcgtcattcttagtatccaacaatcctctaca

SEQ ID NO: 248587 - DNA, 33 bp, Homo sapien
aggtagacatctacgacccaccactgaccagct

SEQ ID NO: 248588 - DNA, 33 bp, Homo sapien
aggtagacatctacgatccaccactgaccagct

SEQ ID NO: 248589 - DNA, 33 bp, Homo sapien
cctgatagaaaagaacagtgctaggattcaacc

SEQ ID NO: 248590 - DNA, 33 bp, Homo sapien
cctgatagaaaagaaccgtgctaggattcaacc

SEQ ID NO: 248591 - DNA, 33 bp, Homo sapien
tagaattactctcagacccatcaatgcaaacgc

SEQ ID NO: 248592 - DNA, 33 bp, Homo sapien
tagaattactctcagagccatcaatgcaaacgc

SEQ ID NO: 248593 - DNA, 33 bp, Homo sapien
gttgcaaagattaaaccagtgattcttaacccc

SEQ ID NO: 248594 - DNA, 33 bp, Homo sapien
gttgcaaagattaaacgagtgattcttaacccc

SEQ ID NO: 248595 - DNA, 33 bp, Homo sapien
aagcagagattggaccagaaacactcttggatt

SEQ ID NO: 248596 - DNA, 33 bp, Homo sapien
aagcagagattggaccggaaacactcttggatt

SEQ ID NO: 248597 - DNA, 33 bp, Homo sapien
agggctgcaggaatgaaacgaggctgtggcttc

SEQ ID NO: 248598 - DNA, 33 bp, Homo sapien
agggctgcaggaatgacacgaggctgtggcttc

SEQ ID NO: 248599 - DNA, 33 bp, Homo sapien
tctccagctgcagtgacgaggaaaagtcatatt

SEQ ID NO: 248600 - DNA, 33 bp, Homo sapien
tctccagctgcagtgatgaggaaaagtcatatt

SEQ ID NO: 248601 - DNA, 33 bp, Homo sapien
ttttgaaaagtgtaaacataaaagagagacagt

SEQ ID NO: 248602 - DNA, 33 bp, Homo sapien
ttttgaaaagtgtaaagataaaagagagacagt

SEQ ID NO: 248603 - DNA, 33 bp, Homo sapien
tgggtggtctctttggaaggggactccatttaa

SEQ ID NO: 248604 - DNA, 33 bp, Homo sapien
tgggtggtctctttgggaggggactccatttaa

SEQ ID NO: 248605 - DNA, 33 bp, Homo sapien
atcttctcttggaagaacttggatctcttcggt

SEQ ID NO: 248606 - DNA, 33 bp, Homo sapien
atcttctcttggaagaccttggatctcttcggt

SEQ ID NO: 248607 - DNA, 33 bp, Homo sapien
cacactgacaaagaaacggtgtacaaacccagg

SEQ ID NO: 248608 - DNA, 33 bp, Homo sapien
cacactgacaaagaaatggtgtacaaacccagg

SEQ ID NO: 248609 - DNA, 33 bp, Homo sapien
aacaagggatggagtaggaaaatggcactaacc

SEQ ID NO: 248610 - DNA, 33 bp, Homo sapien
aacaagggatggagtatgaaaatggcactaacc

SEQ ID NO: 248611 - DNA, 33 bp, Homo sapien
gtcctctcactgtttacattagcagatttcatt

SEQ ID NO: 248612 - DNA, 33 bp, Homo sapien
gtcctctcactgtttatattagcagatttcatt

SEQ ID NO: 248613 - DNA, 33 bp, Homo sapien
accaccctgttgaatgccaccccaaactattgc

SEQ ID NO: 248614 - DNA, 33 bp, Homo sapien
accaccctgttgaatgtcaccccaaactattgc

SEQ ID NO: 248615 - DNA, 33 bp, Homo sapien
gtgcctactacttagcgcctgtacatactgcta

SEQ ID NO: 248616 - DNA, 33 bp, Homo sapien
gtgcctactacttagctcctgtacatactgcta

SEQ ID NO: 248617 - DNA, 33 bp, Homo sapien
agtttctgagagcaaacggtggtagctatttta

SEQ ID NO: 248618 - DNA, 33 bp, Homo sapien
agtttctgagagcaaagggtggtagctatttta

SEQ ID NO: 248619 - DNA, 33 bp, Homo sapien
taaaactttgatgaaaatgtagttagattctaa

SEQ ID NO: 248620 - DNA, 33 bp, Homo sapien
taaaactttgatgaaagtgtagttagattctaa

SEQ ID NO: 248621 - DNA, 33 bp, Homo sapien
ggtgaaatcacttgccaagcaaaacaccacata

SEQ ID NO: 248622 - DNA, 33 bp, Homo sapien
ggtgaaatcacttgcccagcaaaacaccacata

SEQ ID NO: 248623 - DNA, 33 bp, Homo sapien
tctgttgctgtctctacaaaacagaggtaagaa

SEQ ID NO: 248624 - DNA, 33 bp, Homo sapien
tctgttgctgtctctataaaacagaggtaagaa

SEQ ID NO: 248625 - DNA, 33 bp, Homo sapien
agcttagggtttagaaggaaagtgcattgtaag

SEQ ID NO: 248626 - DNA, 33 bp, Homo sapien
agcttagggtttagaatgaaagtgcattgtaag

SEQ ID NO: 248627 - DNA, 33 bp, Homo sapien
cccattggatatgagtaaacagggggccaatgt

SEQ ID NO: 248628 - DNA, 33 bp, Homo sapien
cccattggatatgagtgaacagggggccaatgt

SEQ ID NO: 248629 - DNA, 33 bp, Homo sapien
tgaattgtacccttaagctttatgttgtatata

SEQ ID NO: 248630 - DNA, 33 bp, Homo sapien
tgaattgtacccttaatctttatgttgtatata

SEQ ID NO: 248631 - DNA, 33 bp, Homo sapien
gagaaaaaatgacaaacgaaagaacaatccggg

SEQ ID NO: 248632 - DNA, 33 bp, Homo sapien
gagaaaaaatgacaaatgaaagaacaatccggg

SEQ ID NO: 248633 - DNA, 33 bp, Homo sapien
taaactgttatggtgccaaaccattattgttgg

SEQ ID NO: 248634 - DNA, 33 bp, Homo sapien
taaactgttatggtgctaaaccattattgttgg

SEQ ID NO: 248635 - DNA, 33 bp, Homo sapien
gagctgaggacaacagaaaaatgggtttggtga

SEQ ID NO: 248636 - DNA, 33 bp, Homo sapien
gagctgaggacaacaggaaaatgggtttggtga

SEQ ID NO: 248637 - DNA, 33 bp, Homo sapien
cactgcataaatcctcactgaatgaaagaagag

SEQ ID NO: 248638 - DNA, 33 bp, Homo sapien
cactgcataaatcctcgctgaatgaaagaagag

SEQ ID NO: 248639 - DNA, 33 bp, Homo sapien
aagtgttctcacggaacgcaaagagaaaaaaag

SEQ ID NO: 248640 - DNA, 33 bp, Homo sapien
aagtgttctcacggaatgcaaagagaaaaaaag

SEQ ID NO: 248641 - DNA, 33 bp, Homo sapien
aattgacagaaggctgcaatgctaattccttga

SEQ ID NO: 248642 - DNA, 33 bp, Homo sapien
aattgacagaaggctgtaatgctaattccttga

SEQ ID NO: 248643 - DNA, 33 bp, Homo sapien
catttagtgatttaccgatatccagcagaatgc

SEQ ID NO: 248644 - DNA, 33 bp, Homo sapien
catttagtgatttacctatatccagcagaatgc

SEQ ID NO: 248645 - DNA, 33 bp, Homo sapien
ggagatgtaaaaatgactaacacacagtcttta

SEQ ID NO: 248646 - DNA, 33 bp, Homo sapien
ggagatgtaaaaatgattaacacacagtcttta

SEQ ID NO: 248647 - DNA, 33 bp, Homo sapien
actataggttctgacaatatggtttaagtgcct

SEQ ID NO: 248648 - DNA, 33 bp, Homo sapien
actataggttctgacagtatggtttaagtgcct

SEQ ID NO: 248649 - DNA, 33 bp, Homo sapien
gaagtgactctcattgcgtgaattcaagtcaca

SEQ ID NO: 248650 - DNA, 33 bp, Homo sapien
gaagtgactctcattgtgtgaattcaagtcaca

SEQ ID NO: 248651 - DNA, 33 bp, Homo sapien
tgacttatccagcaaccgagcatctggcgaggt

SEQ ID NO: 248652 - DNA, 33 bp, Homo sapien
tgacttatccagcaacggagcatctggcgaggt

SEQ ID NO: 248653 - DNA, 33 bp, Homo sapien
tgagcccataacctaaccctgttttattcatta

SEQ ID NO: 248654 - DNA, 33 bp, Homo sapien
tgagcccataacctaatcctgttttattcatta

SEQ ID NO: 248655 - DNA, 33 bp, Homo sapien
tcctgcaagactttcaggtaggtgaaaacactg

SEQ ID NO: 248656 - DNA, 33 bp, Homo sapien
tcctgcaagactttcatgtaggtgaaaacactg

SEQ ID NO: 248657 - DNA, 33 bp, Homo sapien
cttgaacagtggcttaagagagtcctccaagat

SEQ ID NO: 248658 - DNA, 33 bp, Homo sapien
cttgaacagtggcttaggagagtcctccaagat

SEQ ID NO: 248659 - DNA, 33 bp, Homo sapien
ctatctgtttcatttacgtattgttgcataacc

SEQ ID NO: 248660 - DNA, 33 bp, Homo sapien
ctatctgtttcatttatgtattgttgcataacc

SEQ ID NO: 248661 - DNA, 33 bp, Homo sapien
tacacactaacactcaataagtacatattatat

SEQ ID NO: 248662 - DNA, 33 bp, Homo sapien
tacacactaacactcagtaagtacatattatat

SEQ ID NO: 248663 - DNA, 33 bp, Homo sapien
atttgtcaaaaagcagacagtttgggcctgtct

SEQ ID NO: 248664 - DNA, 33 bp, Homo sapien
atttgtcaaaaagcagccagtttgggcctgtct

SEQ ID NO: 248665 - DNA, 33 bp, Homo sapien
gaaagtcttaccaggagacccaccttgagaaat

SEQ ID NO: 248666 - DNA, 33 bp, Homo sapien
gaaagtcttaccaggatacccaccttgagaaat

SEQ ID NO: 248667 - DNA, 33 bp, Homo sapien
ctgtgagagtgttgccaaagaagattaacagtt

SEQ ID NO: 248668 - DNA, 33 bp, Homo sapien
ctgtgagagtgttgccgaagaagattaacagtt

SEQ ID NO: 248669 - DNA, 33 bp, Homo sapien
ctcaagagctgcatacaattagtttcacacaac

SEQ ID NO: 248670 - DNA, 33 bp, Homo sapien
ctcaagagctgcatacgattagtttcacacaac

SEQ ID NO: 248671 - DNA, 33 bp, Homo sapien
tttccgttcaacaaaccggatggtaagaaatgt

SEQ ID NO: 248672 - DNA, 33 bp, Homo sapien
tttccgttcaacaaactggatggtaagaaatgt

SEQ ID NO: 248673 - DNA, 33 bp, Homo sapien
catcaatgtcatgctgcacgtagatgaaaacag

SEQ ID NO: 248674 - DNA, 33 bp, Homo sapien
catcaatgtcatgctgtacgtagatgaaaacag

SEQ ID NO: 248675 - DNA, 33 bp, Homo sapien
cttttgtgagcattaaatattaacatacgtcac

SEQ ID NO: 248676 - DNA, 33 bp, Homo sapien
cttttgtgagcattaagtattaacatacgtcac

SEQ ID NO: 248677 - DNA, 33 bp, Homo sapien
ttcaggagactttagagaacgtggcattctctg

SEQ ID NO: 248678 - DNA, 33 bp, Homo sapien
ttcaggagactttagataacgtggcattctctg

SEQ ID NO: 248679 - DNA, 33 bp, Homo sapien
agcccagagaggggaccatttcctgtgtaaggt

SEQ ID NO: 248680 - DNA, 33 bp, Homo sapien
agcccagagaggggactatttcctgtgtaaggt

SEQ ID NO: 248681 - DNA, 33 bp, Homo sapien
cacctgggaaagtctaagggaaaaattatgtac

SEQ ID NO: 248682 - DNA, 33 bp, Homo sapien
cacctgggaaagtctatgggaaaaattatgtac

SEQ ID NO: 248683 - DNA, 33 bp, Homo sapien
gcttcctcagccatcaaaaaagcaaataaaaag

SEQ ID NO: 248684 - DNA, 33 bp, Homo sapien
gcttcctcagccatcataaaagcaaataaaaag

SEQ ID NO: 248685 - DNA, 33 bp, Homo sapien
caccataatagaatcactccaactcttagcaat

SEQ ID NO: 248686 - DNA, 33 bp, Homo sapien
caccataatagaatcattccaactcttagcaat

SEQ ID NO: 248687 - DNA, 33 bp, Homo sapien
gcttcggttttacttccagcttcatgagttcct

SEQ ID NO: 248688 - DNA, 33 bp, Homo sapien
gcttcggttttacttcgagcttcatgagttcct

SEQ ID NO: 248689 - DNA, 33 bp, Homo sapien
aagtctgtctgatccccaaagccccacttttaa

SEQ ID NO: 248690 - DNA, 33 bp, Homo sapien
aagtctgtctgatccctaaagccccacttttaa

SEQ ID NO: 248691 - DNA, 33 bp, Homo sapien
cattactgataggtagcagagaaggtgccatga

SEQ ID NO: 248692 - DNA, 33 bp, Homo sapien
cattactgataggtagtagagaaggtgccatga

SEQ ID NO: 248693 - DNA, 33 bp, Homo sapien
atagagagaagacaaagacctgctgtagacctc

SEQ ID NO: 248694 - DNA, 33 bp, Homo sapien
atagagagaagacaaatacctgctgtagacctc

SEQ ID NO: 248695 - DNA, 33 bp, Homo sapien
gatcaacagattcacaatcatttctgtgaaaac

SEQ ID NO: 248696 - DNA, 33 bp, Homo sapien
gatcaacagattcacactcatttctgtgaaaac

SEQ ID NO: 248697 - DNA, 33 bp, Homo sapien
ctgctagcaatcaaaacctcaaatgcagtcatg

SEQ ID NO: 248698 - DNA, 33 bp, Homo sapien
ctgctagcaatcaaaatctcaaatgcagtcatg

SEQ ID NO: 248699 - DNA, 33 bp, Homo sapien
cccatgaattggaaacaagaagttaccaattgc

SEQ ID NO: 248700 - DNA, 33 bp, Homo sapien
cccatgaattggaaacgagaagttaccaattgc

SEQ ID NO: 248701 - DNA, 33 bp, Homo sapien
gcccagcattaggtagaccgtgttaaattagca

SEQ ID NO: 248702 - DNA, 33 bp, Homo sapien
gcccagcattaggtaggccgtgttaaattagca

SEQ ID NO: 248703 - DNA, 33 bp, Homo sapien
gcttgtgcagaagctaaataaagagagtctctt

SEQ ID NO: 248704 - DNA, 33 bp, Homo sapien
gcttgtgcagaagctatataaagagagtctctt

SEQ ID NO: 248705 - DNA, 33 bp, Homo sapien
ttctctttgtgcatacagcatattgccttaggc

SEQ ID NO: 248706 - DNA, 33 bp, Homo sapien
ttctctttgtgcatacggcatattgccttaggc

SEQ ID NO: 248707 - DNA, 33 bp, Homo sapien
aaggactgttaactgaagactgagcgttaatgc

SEQ ID NO: 248708 - DNA, 33 bp, Homo sapien
aaggactgttaactgaggactgagcgttaatgc

SEQ ID NO: 248709 - DNA, 33 bp, Homo sapien
ctaggccggtacaaaacgaaaagagcatttcgg

SEQ ID NO: 248710 - DNA, 33 bp, Homo sapien
ctaggccggtacaaaaggaaaagagcatttcgg

SEQ ID NO: 248711 - DNA, 33 bp, Homo sapien
gaacaggggcggctcactcatgtctttattgag

SEQ ID NO: 248712 - DNA, 33 bp, Homo sapien
gaacaggggcggctcagtcatgtctttattgag

SEQ ID NO: 248713 - DNA, 33 bp, Homo sapien
tggattctgaagggaccgaggagtatttggtac

SEQ ID NO: 248714 - DNA, 33 bp, Homo sapien
tggattctgaagggactgaggagtatttggtac

SEQ ID NO: 248715 - DNA, 33 bp, Homo sapien
agagtagcgagtccaaaacacccggtgagcaga

SEQ ID NO: 248716 - DNA, 33 bp, Homo sapien
agagtagcgagtccaagacacccggtgagcaga

SEQ ID NO: 248717 - DNA, 33 bp, Homo sapien
ttcccaaagcattcacaaagactcaacttcttt

SEQ ID NO: 248718 - DNA, 33 bp, Homo sapien
ttcccaaagcattcacgaagactcaacttcttt

SEQ ID NO: 248719 - DNA, 33 bp, Homo sapien
tgaatgctttgggaaccaagagaaggtccagct

SEQ ID NO: 248720 - DNA, 33 bp, Homo sapien
tgaatgctttgggaacgaagagaaggtccagct

SEQ ID NO: 248721 - DNA, 33 bp, Homo sapien
gaaaaaagctatagaacccttccaaacagcctt

SEQ ID NO: 248722 - DNA, 33 bp, Homo sapien
gaaaaaagctatagaatccttccaaacagcctt

SEQ ID NO: 248723 - DNA, 33 bp, Homo sapien
agacttcccatagagacgaaacagcatcaccaa

SEQ ID NO: 248724 - DNA, 33 bp, Homo sapien
agacttcccatagagatgaaacagcatcaccaa

SEQ ID NO: 248725 - DNA, 33 bp, Homo sapien
cctgtccattcccagaatccaggtttgcattat

SEQ ID NO: 248726 - DNA, 33 bp, Homo sapien
cctgtccattcccagattccaggtttgcattat

SEQ ID NO: 248727 - DNA, 33 bp, Homo sapien
gtgatggagcccccaacagttgcctgagtcttg

SEQ ID NO: 248728 - DNA, 33 bp, Homo sapien
gtgatggagcccccaatagttgcctgagtcttg

SEQ ID NO: 248729 - DNA, 33 bp, Homo sapien
cagagaagagctgacaaaactctctgagctggg

SEQ ID NO: 248730 - DNA, 33 bp, Homo sapien
cagagaagagctgacacaactctctgagctggg

SEQ ID NO: 248731 - DNA, 33 bp, Homo sapien
gagctggggacattttaaaaagaaagcacgaac

SEQ ID NO: 248732 - DNA, 33 bp, Homo sapien
gagctggggacattttgaaaagaaagcacgaac

SEQ ID NO: 248733 - DNA, 33 bp, Homo sapien
tgaatgtggaggcagagggagaaataaatatct

SEQ ID NO: 248734 - DNA, 33 bp, Homo sapien
tgaatgtggaggcagatggagaaataaatatct

SEQ ID NO: 248735 - DNA, 33 bp, Homo sapien
tgctttactaaaacaactggaagatgattttgc

SEQ ID NO: 248736 - DNA, 33 bp, Homo sapien
tgctttactaaaacaattggaagatgattttgc

SEQ ID NO: 248737 - DNA, 33 bp, Homo sapien
aaaatacgagcgtgcaaatggatatgtataaaa

SEQ ID NO: 248738 - DNA, 33 bp, Homo sapien
aaaatacgagcgtgcagatggatatgtataaaa

SEQ ID NO: 248739 - DNA, 33 bp, Homo sapien
tagccaagatttaccacgtacttactctgtgtc

SEQ ID NO: 248740 - DNA, 33 bp, Homo sapien
tagccaagatttaccatgtacttactctgtgtc

SEQ ID NO: 248741 - DNA, 33 bp, Homo sapien
gttcgtgttcctacaccgcacagcctagcttcc

SEQ ID NO: 248742 - DNA, 33 bp, Homo sapien
gttcgtgttcctacactgcacagcctagcttcc

SEQ ID NO: 248743 - DNA, 33 bp, Homo sapien
aatcagagggaaacaaacataccaatcatataa

SEQ ID NO: 248744 - DNA, 33 bp, Homo sapien
aatcagagggaaacaatcataccaatcatataa

SEQ ID NO: 248745 - DNA, 33 bp, Homo sapien
atgttgcacttgaaaaattccagttatggcttc

SEQ ID NO: 248746 - DNA, 33 bp, Homo sapien
atgttgcacttgaaaatttccagttatggcttc

SEQ ID NO: 248747 - DNA, 33 bp, Homo sapien
tgaatgagataacacacgcttgaattaagatac

SEQ ID NO: 248748 - DNA, 33 bp, Homo sapien
tgaatgagataacacatgcttgaattaagatac

SEQ ID NO: 248749 - DNA, 33 bp, Homo sapien
ttcatctctagatctcaaaacacctttatctag

SEQ ID NO: 248750 - DNA, 33 bp, Homo sapien
ttcatctctagatctcgaaacacctttatctag

SEQ ID NO: 248751 - DNA, 33 bp, Homo sapien
taacagaatactcaacaaagagtgaggcagaga

SEQ ID NO: 248752 - DNA, 33 bp, Homo sapien
taacagaatactcaacgaagagtgaggcagaga

SEQ ID NO: 248753 - DNA, 33 bp, Homo sapien
aaagctaccattggaaacaattggacactgctg

SEQ ID NO: 248754 - DNA, 33 bp, Homo sapien
aaagctaccattggaagcaattggacactgctg

SEQ ID NO: 248755 - DNA, 33 bp, Homo sapien
aagatggtatgagagaccaagaggaagagggag

SEQ ID NO: 248756 - DNA, 33 bp, Homo sapien
aagatggtatgagagatcaagaggaagagggag

SEQ ID NO: 248757 - DNA, 33 bp, Homo sapien
tgaaagctagaggcagcactgtatgctctaggg

SEQ ID NO: 248758 - DNA, 33 bp, Homo sapien
tgaaagctagaggcaggactgtatgctctaggg

SEQ ID NO: 248759 - DNA, 33 bp, Homo sapien
tttccactgagctggagaatttaacatattagt

SEQ ID NO: 248760 - DNA, 33 bp, Homo sapien
tttccactgagctggataatttaacatattagt

SEQ ID NO: 248761 - DNA, 33 bp, Homo sapien
atatgaacccgttctacagctggacaagctgac

SEQ ID NO: 248762 - DNA, 33 bp, Homo sapien
atatgaacccgttctatagctggacaagctgac

SEQ ID NO: 248763 - DNA, 33 bp, Homo sapien
tcttcagtgaaaattaacagagactgacagaga

SEQ ID NO: 248764 - DNA, 33 bp, Homo sapien
tcttcagtgaaaattagcagagactgacagaga

SEQ ID NO: 248765 - DNA, 33 bp, Homo sapien
aggagcatttgtttcccattagaataccttttg

SEQ ID NO: 248766 - DNA, 33 bp, Homo sapien
aggagcatttgtttcctattagaataccttttg

SEQ ID NO: 248767 - DNA, 33 bp, Homo sapien
ctaaactttagccagggatgtcaaaccatgacc

SEQ ID NO: 248768 - DNA, 33 bp, Homo sapien
ctaaactttagccaggtatgtcaaaccatgacc

SEQ ID NO: 248769 - DNA, 33 bp, Homo sapien
acctccagggaagagacgtactgccatctcagt

SEQ ID NO: 248770 - DNA, 33 bp, Homo sapien
acctccagggaagagaggtactgccatctcagt

SEQ ID NO: 248771 - DNA, 33 bp, Homo sapien
agtaagtggggatagaccaaagttccaggaggc

SEQ ID NO: 248772 - DNA, 33 bp, Homo sapien
agtaagtggggatagagcaaagttccaggaggc

SEQ ID NO: 248773 - DNA, 33 bp, Homo sapien
cataactagtttgttgaagagaaactagaagaa

SEQ ID NO: 248774 - DNA, 33 bp, Homo sapien
cataactagtttgttgcagagaaactagaagaa

SEQ ID NO: 248775 - DNA, 33 bp, Homo sapien
actgccaagtttttcaatcagtaagcgcatctt

SEQ ID NO: 248776 - DNA, 33 bp, Homo sapien
actgccaagtttttcagtcagtaagcgcatctt

SEQ ID NO: 248777 - DNA, 33 bp, Homo sapien
gttaaacagctgaacgaattttttttttttctg

SEQ ID NO: 248778 - DNA, 33 bp, Homo sapien
gttaaacagctgaacgcattttttttttttctg

SEQ ID NO: 248779 - DNA, 33 bp, Homo sapien
gtgaacagtctaatcaccattgtgtttacccag

SEQ ID NO: 248780 - DNA, 33 bp, Homo sapien
gtgaacagtctaatcatcattgtgtttacccag

SEQ ID NO: 248781 - DNA, 33 bp, Homo sapien
atcacatgaccctaaccaactgcaaggagagct

SEQ ID NO: 248782 - DNA, 33 bp, Homo sapien
atcacatgaccctaactaactgcaaggagagct

SEQ ID NO: 248783 - DNA, 33 bp, Homo sapien
agtgtttaccaagcaccgattaaacaaccaaca

SEQ ID NO: 248784 - DNA, 33 bp, Homo sapien
agtgtttaccaagcactgattaaacaaccaaca

SEQ ID NO: 248785 - DNA, 33 bp, Homo sapien
taaacaaccaacactacgggtgatattcaaaaa

SEQ ID NO: 248786 - DNA, 33 bp, Homo sapien
taaacaaccaacactatgggtgatattcaaaaa

SEQ ID NO: 248787 - DNA, 33 bp, Homo sapien
tgtcctttccagagataagcctgatggacttga

SEQ ID NO: 248788 - DNA, 33 bp, Homo sapien
tgtcctttccagagatgagcctgatggacttga

SEQ ID NO: 248789 - DNA, 33 bp, Homo sapien
ttaagaatgtaccagaagatccctttactcact

SEQ ID NO: 248790 - DNA, 33 bp, Homo sapien
ttaagaatgtaccagaggatccctttactcact

SEQ ID NO: 248791 - DNA, 33 bp, Homo sapien
gggcaattttgggcaaattacacagcctcaatt

SEQ ID NO: 248792 - DNA, 33 bp, Homo sapien
gggcaattttgggcaagttacacagcctcaatt

SEQ ID NO: 248793 - DNA, 33 bp, Homo sapien
ggttaagagaaagtataagttaacacgggtgag

SEQ ID NO: 248794 - DNA, 33 bp, Homo sapien
ggttaagagaaagtatgagttaacacgggtgag

SEQ ID NO: 248795 - DNA, 33 bp, Homo sapien
acaggaatgacggcccagagcactgctcaagaa

SEQ ID NO: 248796 - DNA, 33 bp, Homo sapien
acaggaatgacggcccggagcactgctcaagaa

SEQ ID NO: 248797 - DNA, 33 bp, Homo sapien
atgggaaagtactacactgagtcccattttcca

SEQ ID NO: 248798 - DNA, 33 bp, Homo sapien
atgggaaagtactacattgagtcccattttcca

SEQ ID NO: 248799 - DNA, 33 bp, Homo sapien
ggctccaataaagtcacctgctcaaagtcacac

SEQ ID NO: 248800 - DNA, 33 bp, Homo sapien
ggctccaataaagtcatctgctcaaagtcacac

SEQ ID NO: 248801 - DNA, 33 bp, Homo sapien
gagaaggctcactgagaaggtgacagatggcag

SEQ ID NO: 248802 - DNA, 33 bp, Homo sapien
gagaaggctcactgaggaggtgacagatggcag

SEQ ID NO: 248803 - DNA, 33 bp, Homo sapien
aagaaagcagacagtgcagcacagagaatcttc

SEQ ID NO: 248804 - DNA, 33 bp, Homo sapien
aagaaagcagacagtgtagcacagagaatcttc

SEQ ID NO: 248805 - DNA, 33 bp, Homo sapien
aagatggcaacagagacagtctacttgcaagac

SEQ ID NO: 248806 - DNA, 33 bp, Homo sapien
aagatggcaacagagagagtctacttgcaagac

SEQ ID NO: 248807 - DNA, 33 bp, Homo sapien
aggcaagtcaaaatgtcaaccctctgatgaccc

SEQ ID NO: 248808 - DNA, 33 bp, Homo sapien
aggcaagtcaaaatgttaaccctctgatgaccc

SEQ ID NO: 248809 - DNA, 33 bp, Homo sapien
agattacatgaaaagaaacctattctatatctc

SEQ ID NO: 248810 - DNA, 33 bp, Homo sapien
agattacatgaaaagagacctattctatatctc

SEQ ID NO: 248811 - DNA, 33 bp, Homo sapien
acttagtaacctcaaggcatcttaatcaacacc

SEQ ID NO: 248812 - DNA, 33 bp, Homo sapien
acttagtaacctcaagtcatcttaatcaacacc

SEQ ID NO: 248813 - DNA, 33 bp, Homo sapien
agaatatattttgaaaacaggcagatctatatt

SEQ ID NO: 248814 - DNA, 33 bp, Homo sapien
agaatatattttgaaaccaggcagatctatatt

SEQ ID NO: 248815 - DNA, 33 bp, Homo sapien
taaatcagttaatggacggaaatgtgtgtcaca

SEQ ID NO: 248816 - DNA, 33 bp, Homo sapien
taaatcagttaatggatggaaatgtgtgtcaca

SEQ ID NO: 248817 - DNA, 33 bp, Homo sapien
tattgaggctgaccaacagtttatatgtttgcc

SEQ ID NO: 248818 - DNA, 33 bp, Homo sapien
tattgaggctgaccaatagtttatatgtttgcc

SEQ ID NO: 248819 - DNA, 33 bp, Homo sapien
catacataaaaatataaatgcatgctttaactg

SEQ ID NO: 248820 - DNA, 33 bp, Homo sapien
catacataaaaatatacatgcatgctttaactg

SEQ ID NO: 248821 - DNA, 33 bp, Homo sapien
taaatgaatggctcaaagaaattgcaaacgttt

SEQ ID NO: 248822 - DNA, 33 bp, Homo sapien
taaatgaatggctcaatgaaattgcaaacgttt

SEQ ID NO: 248823 - DNA, 33 bp, Homo sapien
ctggcctgaggccaaccggatgtagcagacttg

SEQ ID NO: 248824 - DNA, 33 bp, Homo sapien
ctggcctgaggccaactggatgtagcagacttg

SEQ ID NO: 248825 - DNA, 33 bp, Homo sapien
ctctctgtctctctgaaccacagtttgctcatt

SEQ ID NO: 248826 - DNA, 33 bp, Homo sapien
ctctctgtctctctgagccacagtttgctcatt

SEQ ID NO: 248827 - DNA, 33 bp, Homo sapien
attgttataaaatacaagagcatcggagagaaa

SEQ ID NO: 248828 - DNA, 33 bp, Homo sapien
attgttataaaatacaggagcatcggagagaaa

SEQ ID NO: 248829 - DNA, 33 bp, Homo sapien
caatgaacttccttgagagtaaactgttgtagc

SEQ ID NO: 248830 - DNA, 33 bp, Homo sapien
caatgaacttccttgatagtaaactgttgtagc

SEQ ID NO: 248831 - DNA, 33 bp, Homo sapien
cctcttcatgtgaacacgcatatttatcccaat

SEQ ID NO: 248832 - DNA, 33 bp, Homo sapien
cctcttcatgtgaacatgcatatttatcccaat

SEQ ID NO: 248833 - DNA, 33 bp, Homo sapien
caggacctctataccacctaagaaacattctta

SEQ ID NO: 248834 - DNA, 33 bp, Homo sapien
caggacctctataccagctaagaaacattctta

SEQ ID NO: 248835 - DNA, 33 bp, Homo sapien
cattatatctggcacccgccttcatctgtagcc

SEQ ID NO: 248836 - DNA, 33 bp, Homo sapien
cattatatctggcacctgccttcatctgtagcc

SEQ ID NO: 248837 - DNA, 33 bp, Homo sapien
tggagtgacttgttaaactctgttgattttgga

SEQ ID NO: 248838 - DNA, 33 bp, Homo sapien
tggagtgacttgttaatctctgttgattttgga

SEQ ID NO: 248839 - DNA, 33 bp, Homo sapien
agggtttgacagacaaattgggacagaagtcta

SEQ ID NO: 248840 - DNA, 33 bp, Homo sapien
agggtttgacagacaagttgggacagaagtcta

SEQ ID NO: 248841 - DNA, 33 bp, Homo sapien
ctggcccattgagacaatcaaaactgattaatt

SEQ ID NO: 248842 - DNA, 33 bp, Homo sapien
ctggcccattgagacagtcaaaactgattaatt

SEQ ID NO: 248843 - DNA, 33 bp, Homo sapien
acctggaactgcaaacaatgaaagaaaagtcca

SEQ ID NO: 248844 - DNA, 33 bp, Homo sapien
acctggaactgcaaacgatgaaagaaaagtcca

SEQ ID NO: 248845 - DNA, 33 bp, Homo sapien
atcaggcatttactatcagctagattttgtgct

SEQ ID NO: 248846 - DNA, 33 bp, Homo sapien
atcaggcatttactatgagctagattttgtgct

SEQ ID NO: 248847 - DNA, 33 bp, Homo sapien
tattatcattatttcccattagaagctgttttt

SEQ ID NO: 248848 - DNA, 33 bp, Homo sapien
tattatcattatttcctattagaagctgttttt

SEQ ID NO: 248849 - DNA, 33 bp, Homo sapien
gagtcagtatgctgcccaaaatgcttggaacag

SEQ ID NO: 248850 - DNA, 33 bp, Homo sapien
gagtcagtatgctgcctaaaatgcttggaacag

SEQ ID NO: 248851 - DNA, 33 bp, Homo sapien
ctctccttaaggggaacggggatcacatcttac

SEQ ID NO: 248852 - DNA, 33 bp, Homo sapien
ctctccttaaggggaatggggatcacatcttac

SEQ ID NO: 248853 - DNA, 33 bp, Homo sapien
ttttatgttaatgctccaccaggtgattcatgt

SEQ ID NO: 248854 - DNA, 33 bp, Homo sapien
ttttatgttaatgctctaccaggtgattcatgt

SEQ ID NO: 248855 - DNA, 33 bp, Homo sapien
taaggagaaattatccacacatgagatgttaaa

SEQ ID NO: 248856 - DNA, 33 bp, Homo sapien
taaggagaaattatccgcacatgagatgttaaa

SEQ ID NO: 248857 - DNA, 33 bp, Homo sapien
cactgggccaagaaggccaacaaggtggtgcca

SEQ ID NO: 248858 - DNA, 33 bp, Homo sapien
cactgggccaagaaggtcaacaaggtggtgcca

SEQ ID NO: 248859 - DNA, 33 bp, Homo sapien
tttaaataatttttaagagcatcacttactttg

SEQ ID NO: 248860 - DNA, 33 bp, Homo sapien
tttaaataatttttaatagcatcacttactttg

SEQ ID NO: 248861 - DNA, 33 bp, Homo sapien
ccagctttcctgtttacatgaacaattttataa

SEQ ID NO: 248862 - DNA, 33 bp, Homo sapien
ccagctttcctgtttatatgaacaattttataa

SEQ ID NO: 248863 - DNA, 33 bp, Homo sapien
caaagcttttactacacggatcaatttcctgac

SEQ ID NO: 248864 - DNA, 33 bp, Homo sapien
caaagcttttactacatggatcaatttcctgac

SEQ ID NO: 248865 - DNA, 33 bp, Homo sapien
agatgttttcccagaccgccacaataaaaaaaa

SEQ ID NO: 248866 - DNA, 33 bp, Homo sapien
agatgttttcccagactgccacaataaaaaaaa

SEQ ID NO: 248867 - DNA, 33 bp, Homo sapien
tggagccacagttgtgcacaaacagaggtcagg

SEQ ID NO: 248868 - DNA, 33 bp, Homo sapien
tggagccacagttgtgtacaaacagaggtcagg

SEQ ID NO: 248869 - DNA, 33 bp, Homo sapien
tatcttgttccaaaacactttcatcaccccaaa

SEQ ID NO: 248870 - DNA, 33 bp, Homo sapien
tatcttgttccaaaacgctttcatcaccccaaa

SEQ ID NO: 248871 - DNA, 33 bp, Homo sapien
gatgcttgcacccagtcaaccatcagtacccag

SEQ ID NO: 248872 - DNA, 33 bp, Homo sapien
gatgcttgcacccagtgaaccatcagtacccag

SEQ ID NO: 248873 - DNA, 33 bp, Homo sapien
aagggaataacaaacaactgctaagagaataag

SEQ ID NO: 248874 - DNA, 33 bp, Homo sapien
aagggaataacaaacacctgctaagagaataag

SEQ ID NO: 248875 - DNA, 33 bp, Homo sapien
tcccagtttagaggaaattactctgctacaccc

SEQ ID NO: 248876 - DNA, 33 bp, Homo sapien
tcccagtttagaggaatttactctgctacaccc

SEQ ID NO: 248877 - DNA, 33 bp, Homo sapien
ggtgctctatccaggagtcagcacaatattaca

SEQ ID NO: 248878 - DNA, 33 bp, Homo sapien
ggtgctctatccaggattcagcacaatattaca

SEQ ID NO: 248879 - DNA, 33 bp, Homo sapien
tggagtaaagtctaaggatcttaccccagaatt

SEQ ID NO: 248880 - DNA, 33 bp, Homo sapien
tggagtaaagtctaagtatcttaccccagaatt

SEQ ID NO: 248881 - DNA, 33 bp, Homo sapien
ttcttgatcgtccttcacctgacatcatggtaa

SEQ ID NO: 248882 - DNA, 33 bp, Homo sapien
ttcttgatcgtccttcgcctgacatcatggtaa

SEQ ID NO: 248883 - DNA, 33 bp, Homo sapien
ctgctcctgcaaccacgactaaaaccctggctt

SEQ ID NO: 248884 - DNA, 33 bp, Homo sapien
ctgctcctgcaaccactactaaaaccctggctt

SEQ ID NO: 248885 - DNA, 33 bp, Homo sapien
agcggttgcccttgacactcaactctcactagg

SEQ ID NO: 248886 - DNA, 33 bp, Homo sapien
agcggttgcccttgacgctcaactctcactagg

SEQ ID NO: 248887 - DNA, 33 bp, Homo sapien
tgccaagatgatgccaataggttgaactttcat

SEQ ID NO: 248888 - DNA, 33 bp, Homo sapien
tgccaagatgatgccagtaggttgaactttcat

SEQ ID NO: 248889 - DNA, 33 bp, Homo sapien
tttttctgccattgcacatccttgaacttgcca

SEQ ID NO: 248890 - DNA, 33 bp, Homo sapien
tttttctgccattgcatatccttgaacttgcca

SEQ ID NO: 248891 - DNA, 33 bp, Homo sapien
tgcatgaatggagaaacggggaagagtattcta

SEQ ID NO: 248892 - DNA, 33 bp, Homo sapien
tgcatgaatggagaaatggggaagagtattcta

SEQ ID NO: 248893 - DNA, 33 bp, Homo sapien
tggctctatggtgagacctagcatgtctatccc

SEQ ID NO: 248894 - DNA, 33 bp, Homo sapien
tggctctatggtgagatctagcatgtctatccc

SEQ ID NO: 248895 - DNA, 33 bp, Homo sapien
gtcactttccataaggacattgtaggctatatt

SEQ ID NO: 248896 - DNA, 33 bp, Homo sapien
gtcactttccataagggcattgtaggctatatt

SEQ ID NO: 248897 - DNA, 33 bp, Homo sapien
gtcaccctgtgggtaaatgatggagataggaat

SEQ ID NO: 248898 - DNA, 33 bp, Homo sapien
gtcaccctgtgggtaagtgatggagataggaat

SEQ ID NO: 248899 - DNA, 33 bp, Homo sapien
aacccagcttaagcaacgtcatttcctctgcct

SEQ ID NO: 248900 - DNA, 33 bp, Homo sapien
aacccagcttaagcaatgtcatttcctctgcct

SEQ ID NO: 248901 - DNA, 33 bp, Homo sapien
caaataaggccgatgacaggaggtaagaggtca

SEQ ID NO: 248902 - DNA, 33 bp, Homo sapien
caaataaggccgatgataggaggtaagaggtca

SEQ ID NO: 248903 - DNA, 33 bp, Homo sapien
acattatcagttgaaaaaatccgctctaggata

SEQ ID NO: 248904 - DNA, 33 bp, Homo sapien
acattatcagttgaaacaatccgctctaggata

SEQ ID NO: 248905 - DNA, 33 bp, Homo sapien
aacaaaatgtattggacgtgttatatacaaaga

SEQ ID NO: 248906 - DNA, 33 bp, Homo sapien
aacaaaatgtattggatgtgttatatacaaaga

SEQ ID NO: 248907 - DNA, 33 bp, Homo sapien
ggagccaagaacccaaaatggttatgctgtgct

SEQ ID NO: 248908 - DNA, 33 bp, Homo sapien
ggagccaagaacccaacatggttatgctgtgct

SEQ ID NO: 248909 - DNA, 33 bp, Homo sapien
taactcttgttaggcacgtcagatctcagctta

SEQ ID NO: 248910 - DNA, 33 bp, Homo sapien
taactcttgttaggcatgtcagatctcagctta

SEQ ID NO: 248911 - DNA, 33 bp, Homo sapien
actgtggaaatacagagaatacagcaaagaata

SEQ ID NO: 248912 - DNA, 33 bp, Homo sapien
actgtggaaatacagataatacagcaaagaata

SEQ ID NO: 248913 - DNA, 33 bp, Homo sapien
ttccttgataggacccaaactgatatcgagagc

SEQ ID NO: 248914 - DNA, 33 bp, Homo sapien
ttccttgataggacccgaactgatatcgagagc

SEQ ID NO: 248915 - DNA, 33 bp, Homo sapien
catctgttggttttcaatatccgttcacccttc

SEQ ID NO: 248916 - DNA, 33 bp, Homo sapien
catctgttggttttcagtatccgttcacccttc

SEQ ID NO: 248917 - DNA, 33 bp, Homo sapien
cccttgcaacagaagccctaaatgttcctctta

SEQ ID NO: 248918 - DNA, 33 bp, Homo sapien
cccttgcaacagaagctctaaatgttcctctta

SEQ ID NO: 248919 - DNA, 33 bp, Homo sapien
accacggaaaccgatcaaaaagtatcagccatg

SEQ ID NO: 248920 - DNA, 33 bp, Homo sapien
accacggaaaccgatcgaaaagtatcagccatg

SEQ ID NO: 248921 - DNA, 33 bp, Homo sapien
gtatcagccatgatgaagaatgtagaacactcg

SEQ ID NO: 248922 - DNA, 33 bp, Homo sapien
gtatcagccatgatgatgaatgtagaacactcg

SEQ ID NO: 248923 - DNA, 33 bp, Homo sapien
agcatgtaatcttgaccgctctggcatggtgct

SEQ ID NO: 248924 - DNA, 33 bp, Homo sapien
agcatgtaatcttgactgctctggcatggtgct

SEQ ID NO: 248925 - DNA, 33 bp, Homo sapien
aacccagtgagcatttcaaaaccctgtaagtct

SEQ ID NO: 248926 - DNA, 33 bp, Homo sapien
aacccagtgagcatttgaaaaccctgtaagtct

SEQ ID NO: 248927 - DNA, 33 bp, Homo sapien
atcccatagaatctgaaatgactctaaagttga

SEQ ID NO: 248928 - DNA, 33 bp, Homo sapien
atcccatagaatctgagatgactctaaagttga

SEQ ID NO: 248929 - DNA, 33 bp, Homo sapien
ccctggccttggatgacaccttgattggagcct

SEQ ID NO: 248930 - DNA, 33 bp, Homo sapien
ccctggccttggatgataccttgattggagcct

SEQ ID NO: 248931 - DNA, 33 bp, Homo sapien
tgtaatactgacctcaaatctaatatttatact

SEQ ID NO: 248932 - DNA, 33 bp, Homo sapien
tgtaatactgacctcatatctaatatttatact

SEQ ID NO: 248933 - DNA, 33 bp, Homo sapien
cctgaccacataaggagacaagtgaacagcagc

SEQ ID NO: 248934 - DNA, 33 bp, Homo sapien
cctgaccacataaggatacaagtgaacagcagc

SEQ ID NO: 248935 - DNA, 33 bp, Homo sapien
gtcttggtcaaacttacctcctctgccctgtat

SEQ ID NO: 248936 - DNA, 33 bp, Homo sapien
gtcttggtcaaacttatctcctctgccctgtat

SEQ ID NO: 248937 - DNA, 33 bp, Homo sapien
tccctcttattcactgaacctgatggtagtttt

SEQ ID NO: 248938 - DNA, 33 bp, Homo sapien
tccctcttattcactgtacctgatggtagtttt

SEQ ID NO: 248939 - DNA, 33 bp, Homo sapien
atactctgtgccagccactgttctaggagatag

SEQ ID NO: 248940 - DNA, 33 bp, Homo sapien
atactctgtgccagccgctgttctaggagatag

SEQ ID NO: 248941 - DNA, 33 bp, Homo sapien
caaggtgtagaggccacgagggtgcaccttgca

SEQ ID NO: 248942 - DNA, 33 bp, Homo sapien
caaggtgtagaggccatgagggtgcaccttgca

SEQ ID NO: 248943 - DNA, 33 bp, Homo sapien
catgggactttatggagggtggactttggcttg

SEQ ID NO: 248944 - DNA, 33 bp, Homo sapien
catgggactttatggatggtggactttggcttg

SEQ ID NO: 248945 - DNA, 33 bp, Homo sapien
agaaggagttacctgccaaacatcacccagcta

SEQ ID NO: 248946 - DNA, 33 bp, Homo sapien
agaaggagttacctgctaaacatcacccagcta

SEQ ID NO: 248947 - DNA, 33 bp, Homo sapien
catcttgtcggcactcagaatgcccacgacagc

SEQ ID NO: 248948 - DNA, 33 bp, Homo sapien
catcttgtcggcactcggaatgcccacgacagc

SEQ ID NO: 248949 - DNA, 33 bp, Homo sapien
ctggatggtgttaaaaactgatttctcctcctc

SEQ ID NO: 248950 - DNA, 33 bp, Homo sapien
ctggatggtgttaaaagctgatttctcctcctc

SEQ ID NO: 248951 - DNA, 33 bp, Homo sapien
acagaagaaagtagaaaagaggaatgacaaaga

SEQ ID NO: 248952 - DNA, 33 bp, Homo sapien
acagaagaaagtagaacagaggaatgacaaaga

SEQ ID NO: 248953 - DNA, 33 bp, Homo sapien
tcctcaagataacttacagatggctgactttta

SEQ ID NO: 248954 - DNA, 33 bp, Homo sapien
tcctcaagataacttatagatggctgactttta

SEQ ID NO: 248955 - DNA, 33 bp, Homo sapien
tctctatataacaaagactcatttggctggtga

SEQ ID NO: 248956 - DNA, 33 bp, Homo sapien
tctctatataacaaaggctcatttggctggtga

SEQ ID NO: 248957 - DNA, 33 bp, Homo sapien
gaagaaggttatgttaacttaaacacccacagg

SEQ ID NO: 248958 - DNA, 33 bp, Homo sapien
gaagaaggttatgttaccttaaacacccacagg

SEQ ID NO: 248959 - DNA, 33 bp, Homo sapien
cagtttttgtcatggagatttgtataagactag

SEQ ID NO: 248960 - DNA, 33 bp, Homo sapien
cagtttttgtcatggatatttgtataagactag

SEQ ID NO: 248961 - DNA, 33 bp, Homo sapien
ggccagaagtgggaaactgaagtgtccacagtg

SEQ ID NO: 248962 - DNA, 33 bp, Homo sapien
ggccagaagtgggaaattgaagtgtccacagtg

SEQ ID NO: 248963 - DNA, 33 bp, Homo sapien
gacctatgctctacaacattagaaacaagcaca

SEQ ID NO: 248964 - DNA, 33 bp, Homo sapien
gacctatgctctacaatattagaaacaagcaca

SEQ ID NO: 248965 - DNA, 33 bp, Homo sapien
ctcacttcagacactgcaaactgtgttttgttt

SEQ ID NO: 248966 - DNA, 33 bp, Homo sapien
ctcacttcagacactggaaactgtgttttgttt

SEQ ID NO: 248967 - DNA, 33 bp, Homo sapien
ttcttccctgaaaataagcagcagagtcatagt

SEQ ID NO: 248968 - DNA, 33 bp, Homo sapien
ttcttccctgaaaatacgcagcagagtcatagt

SEQ ID NO: 248969 - DNA, 33 bp, Homo sapien
atttgaataacgagaaagaggcagagaccagca

SEQ ID NO: 248970 - DNA, 33 bp, Homo sapien
atttgaataacgagaaggaggcagagaccagca

SEQ ID NO: 248971 - DNA, 33 bp, Homo sapien
acagatgagaaacttgaaggagtcagtccacaa

SEQ ID NO: 248972 - DNA, 33 bp, Homo sapien
acagatgagaaacttgcaggagtcagtccacaa

SEQ ID NO: 248973 - DNA, 33 bp, Homo sapien
tatggaaaatttttaaagcacaaatatagtcac

SEQ ID NO: 248974 - DNA, 33 bp, Homo sapien
tatggaaaatttttaaggcacaaatatagtcac

SEQ ID NO: 248975 - DNA, 33 bp, Homo sapien
gaaaaaaaaagttactcagctgttatggaaaat

SEQ ID NO: 248976 - DNA, 33 bp, Homo sapien
gaaaaaaaaagttacttagctgttatggaaaat

SEQ ID NO: 248977 - DNA, 33 bp, Homo sapien
ctaagtgtggttcatgcacaggtaatatcagcg

SEQ ID NO: 248978 - DNA, 33 bp, Homo sapien
ctaagtgtggttcatggacaggtaatatcagcg

SEQ ID NO: 248979 - DNA, 33 bp, Homo sapien
cttctccacctggctgaatggtccacaaatgga

SEQ ID NO: 248980 - DNA, 33 bp, Homo sapien
cttctccacctggctgcatggtccacaaatgga

SEQ ID NO: 248981 - DNA, 33 bp, Homo sapien
cataactccttcttgaaccaataaattctaaat

SEQ ID NO: 248982 - DNA, 33 bp, Homo sapien
cataactccttcttgagccaataaattctaaat

SEQ ID NO: 248983 - DNA, 33 bp, Homo sapien
tggcatttctgaacataaggtgctgaagtgaag

SEQ ID NO: 248984 - DNA, 33 bp, Homo sapien
tggcatttctgaacatgaggtgctgaagtgaag

SEQ ID NO: 248985 - DNA, 33 bp, Homo sapien
aacaatagagaactaactcactaacctgttatc

SEQ ID NO: 248986 - DNA, 33 bp, Homo sapien
aacaatagagaactaattcactaacctgttatc

SEQ ID NO: 248987 - DNA, 33 bp, Homo sapien
gctcctcaaggaagacaagtacttttctctcca

SEQ ID NO: 248988 - DNA, 33 bp, Homo sapien
gctcctcaaggaagacgagtacttttctctcca

SEQ ID NO: 248989 - DNA, 33 bp, Homo sapien
actctcaagagtcagaatcagggtcagcatcaa

SEQ ID NO: 248990 - DNA, 33 bp, Homo sapien
actctcaagagtcagagtcagggtcagcatcaa

SEQ ID NO: 248991 - DNA, 33 bp, Homo sapien
tcagtcgagtttatggacattgctcagactgaa

SEQ ID NO: 248992 - DNA, 33 bp, Homo sapien
tcagtcgagtttatgggcattgctcagactgaa

SEQ ID NO: 248993 - DNA, 33 bp, Homo sapien
ctgattaaaaccataactctgtaactccatccc

SEQ ID NO: 248994 - DNA, 33 bp, Homo sapien
ctgattaaaaccataagtctgtaactccatccc

SEQ ID NO: 248995 - DNA, 33 bp, Homo sapien
tcgggttagattaccaatgcccaccaaataaca

SEQ ID NO: 248996 - DNA, 33 bp, Homo sapien
tcgggttagattaccagtgcccaccaaataaca

SEQ ID NO: 248997 - DNA, 33 bp, Homo sapien
ctgggtttgaactcaggatgggtcccttacttg

SEQ ID NO: 248998 - DNA, 33 bp, Homo sapien
ctgggtttgaactcagtatgggtcccttacttg

SEQ ID NO: 248999 - DNA, 33 bp, Homo sapien
gctttctgaaaaaaaaatcactagttttcagga

SEQ ID NO: 249000 - DNA, 33 bp, Homo sapien
gctttctgaaaaaaaagtcactagttttcagga

SEQ ID NO: 249001 - DNA, 33 bp, Homo sapien
ggtacattatctgataccaggttggggaggagt

SEQ ID NO: 249002 - DNA, 33 bp, Homo sapien
ggtacattatctgatagcaggttggggaggagt

SEQ ID NO: 249003 - DNA, 33 bp, Homo sapien
gtggtggttttagcaactagtctatcctgagta

SEQ ID NO: 249004 - DNA, 33 bp, Homo sapien
gtggtggttttagcaagtagtctatcctgagta

SEQ ID NO: 249005 - DNA, 33 bp, Homo sapien
ttataaacaaactgccgacttttgattcttttt

SEQ ID NO: 249006 - DNA, 33 bp, Homo sapien
ttataaacaaactgcctacttttgattcttttt

SEQ ID NO: 249007 - DNA, 33 bp, Homo sapien
gcatccgtaggcgtcacgctctttctccaaggc

SEQ ID NO: 249008 - DNA, 33 bp, Homo sapien
gcatccgtaggcgtcatgctctttctccaaggc

SEQ ID NO: 249009 - DNA, 33 bp, Homo sapien
aactgcccagggtgtagagttagcaaaataggg

SEQ ID NO: 249010 - DNA, 33 bp, Homo sapien
aactgcccagggtgtatagttagcaaaataggg

SEQ ID NO: 249011 - DNA, 33 bp, Homo sapien
attggaaataatcacacgtccaattctagaaaa

SEQ ID NO: 249012 - DNA, 33 bp, Homo sapien
attggaaataatcacaggtccaattctagaaaa

SEQ ID NO: 249013 - DNA, 33 bp, Homo sapien
gcaattgacaattcccccttctttctattataa

SEQ ID NO: 249014 - DNA, 33 bp, Homo sapien
gcaattgacaattccctcttctttctattataa

SEQ ID NO: 249015 - DNA, 33 bp, Homo sapien
atcaacttgattgacaactcagtgtaaagtggt

SEQ ID NO: 249016 - DNA, 33 bp, Homo sapien
atcaacttgattgacagctcagtgtaaagtggt

SEQ ID NO: 249017 - DNA, 33 bp, Homo sapien
tggatgtgttttataaaaatggcaaagtagaac

SEQ ID NO: 249018 - DNA, 33 bp, Homo sapien
tggatgtgttttataacaatggcaaagtagaac

SEQ ID NO: 249019 - DNA, 33 bp, Homo sapien
tcagtaagtaggcatactaagaggaggaacagt

SEQ ID NO: 249020 - DNA, 33 bp, Homo sapien
tcagtaagtaggcatagtaagaggaggaacagt

SEQ ID NO: 249021 - DNA, 33 bp, Homo sapien
gagcttctactacataccagacagtgtgctaag

SEQ ID NO: 249022 - DNA, 33 bp, Homo sapien
gagcttctactacatatcagacagtgtgctaag

SEQ ID NO: 249023 - DNA, 33 bp, Homo sapien
gcctcgctttctgatccatcctacaagctgggt

SEQ ID NO: 249024 - DNA, 33 bp, Homo sapien
gcctcgctttctgatctatcctacaagctgggt

SEQ ID NO: 249025 - DNA, 33 bp, Homo sapien
tgtgtgagtggatgcagtagaatcgcacagatt

SEQ ID NO: 249026 - DNA, 33 bp, Homo sapien
tgtgtgagtggatgcattagaatcgcacagatt

SEQ ID NO: 249027 - DNA, 33 bp, Homo sapien
gatgtggcagaccctcagactgaatcagaaata

SEQ ID NO: 249028 - DNA, 33 bp, Homo sapien
gatgtggcagaccctcggactgaatcagaaata

SEQ ID NO: 249029 - DNA, 33 bp, Homo sapien
ggcctccatgagatgacggttataaagtgtgtg

SEQ ID NO: 249030 - DNA, 33 bp, Homo sapien
ggcctccatgagatgatggttataaagtgtgtg

SEQ ID NO: 249031 - DNA, 33 bp, Homo sapien
ttggttatggctaagacgcccttcaagtccaat

SEQ ID NO: 249032 - DNA, 33 bp, Homo sapien
ttggttatggctaagatgcccttcaagtccaat

SEQ ID NO: 249033 - DNA, 33 bp, Homo sapien
ttcatgtggaaagccaaatcttctatccacgaa

SEQ ID NO: 249034 - DNA, 33 bp, Homo sapien
ttcatgtggaaagccagatcttctatccacgaa

SEQ ID NO: 249035 - DNA, 33 bp, Homo sapien
gacagtgggaaagacccagttccttgtttgtaa

SEQ ID NO: 249036 - DNA, 33 bp, Homo sapien
gacagtgggaaagaccgagttccttgtttgtaa

SEQ ID NO: 249037 - DNA, 33 bp, Homo sapien
tgaggtgtttgccttacgtctggttctcttgga

SEQ ID NO: 249038 - DNA, 33 bp, Homo sapien
tgaggtgtttgccttaggtctggttctcttgga

SEQ ID NO: 249039 - DNA, 33 bp, Homo sapien
aacatccaacaacaaagatccaattaaataaag

SEQ ID NO: 249040 - DNA, 33 bp, Homo sapien
aacatccaacaacaaatatccaattaaataaag

SEQ ID NO: 249041 - DNA, 33 bp, Homo sapien
tttgatgcacaaattaacaaagtcaggttggat

SEQ ID NO: 249042 - DNA, 33 bp, Homo sapien
tttgatgcacaaattagcaaagtcaggttggat

SEQ ID NO: 249043 - DNA, 33 bp, Homo sapien
caagtgcaaggcatgaaaggtatttgctattag

SEQ ID NO: 249044 - DNA, 33 bp, Homo sapien
caagtgcaaggcatgagaggtatttgctattag

SEQ ID NO: 249045 - DNA, 33 bp, Homo sapien
caagagaagatcaacaatgagcagactaaatgc

SEQ ID NO: 249046 - DNA, 33 bp, Homo sapien
caagagaagatcaacagtgagcagactaaatgc

SEQ ID NO: 249047 - DNA, 33 bp, Homo sapien
agttaaggcaatagcaagagtgtacctggacta

SEQ ID NO: 249048 - DNA, 33 bp, Homo sapien
agttaaggcaatagcaggagtgtacctggacta

SEQ ID NO: 249049 - DNA, 33 bp, Homo sapien
atttacatgacagaccaattaagtccctgaaag

SEQ ID NO: 249050 - DNA, 33 bp, Homo sapien
atttacatgacagaccgattaagtccctgaaag

SEQ ID NO: 249051 - DNA, 33 bp, Homo sapien
atgactgcacaaagatactaataacaaacagag

SEQ ID NO: 249052 - DNA, 33 bp, Homo sapien
atgactgcacaaagatgctaataacaaacagag

SEQ ID NO: 249053 - DNA, 33 bp, Homo sapien
aaagtaatgcaaaaacaaaatccataagggctg

SEQ ID NO: 249054 - DNA, 33 bp, Homo sapien
aaagtaatgcaaaaacgaaatccataagggctg

SEQ ID NO: 249055 - DNA, 33 bp, Homo sapien
ggattcacatactttgcaatggcactttgcagc

SEQ ID NO: 249056 - DNA, 33 bp, Homo sapien
ggattcacatactttggaatggcactttgcagc

SEQ ID NO: 249057 - DNA, 33 bp, Homo sapien
attcaaaccctttgcactcttgaaggtccagtt

SEQ ID NO: 249058 - DNA, 33 bp, Homo sapien
attcaaaccctttgcattcttgaaggtccagtt

SEQ ID NO: 249059 - DNA, 33 bp, Homo sapien
tgaacacaggtttaaacaggctctctatagaag

SEQ ID NO: 249060 - DNA, 33 bp, Homo sapien
tgaacacaggtttaaataggctctctatagaag

SEQ ID NO: 249061 - DNA, 33 bp, Homo sapien
caaggaaaccaagcacaaaatatatttggttac

SEQ ID NO: 249062 - DNA, 33 bp, Homo sapien
caaggaaaccaagcacgaaatatatttggttac

SEQ ID NO: 249063 - DNA, 33 bp, Homo sapien
gcagagagaactgagcagcacatgttcatgagt

SEQ ID NO: 249064 - DNA, 33 bp, Homo sapien
gcagagagaactgagcggcacatgttcatgagt

SEQ ID NO: 249065 - DNA, 33 bp, Homo sapien
aaattaacagatgtccactatcaccctcaagac

SEQ ID NO: 249066 - DNA, 33 bp, Homo sapien
aaattaacagatgtccgctatcaccctcaagac

SEQ ID NO: 249067 - DNA, 33 bp, Homo sapien
tttttctgttgaggacacagcaccatgtagcgg

SEQ ID NO: 249068 - DNA, 33 bp, Homo sapien
tttttctgttgaggacccagcaccatgtagcgg

SEQ ID NO: 249069 - DNA, 33 bp, Homo sapien
agaggaataatgagaaactgatggccaatatca

SEQ ID NO: 249070 - DNA, 33 bp, Homo sapien
agaggaataatgagaatctgatggccaatatca

SEQ ID NO: 249071 - DNA, 33 bp, Homo sapien
atctgtcgtggttctcaaataagtatctgtctc

SEQ ID NO: 249072 - DNA, 33 bp, Homo sapien
atctgtcgtggttctcgaataagtatctgtctc

SEQ ID NO: 249073 - DNA, 33 bp, Homo sapien
tccctgctctaaaaaacgatgtggctcctacgc

SEQ ID NO: 249074 - DNA, 33 bp, Homo sapien
tccctgctctaaaaaatgatgtggctcctacgc

SEQ ID NO: 249075 - DNA, 33 bp, Homo sapien
taaaaatgtaaagtaaagcttaccctagcacat

SEQ ID NO: 249076 - DNA, 33 bp, Homo sapien
taaaaatgtaaagtaaggcttaccctagcacat

SEQ ID NO: 249077 - DNA, 33 bp, Homo sapien
tgaaatggattcttacaaaaatgggcttgatgg

SEQ ID NO: 249078 - DNA, 33 bp, Homo sapien
tgaaatggattcttaccaaaatgggcttgatgg

SEQ ID NO: 249079 - DNA, 33 bp, Homo sapien
acccagaaaatagtgaaaaatgaaaatcatgtt

SEQ ID NO: 249080 - DNA, 33 bp, Homo sapien
acccagaaaatagtgagaaatgaaaatcatgtt

SEQ ID NO: 249081 - DNA, 33 bp, Homo sapien
tgacacaaacctagacgggacagcctactacac

SEQ ID NO: 249082 - DNA, 33 bp, Homo sapien
tgacacaaacctagactggacagcctactacac

SEQ ID NO: 249083 - DNA, 33 bp, Homo sapien
ggtctgcagtagagcacggtaatatcctaggcc

SEQ ID NO: 249084 - DNA, 33 bp, Homo sapien
ggtctgcagtagagcatggtaatatcctaggcc

SEQ ID NO: 249085 - DNA, 33 bp, Homo sapien
tgtctgtctcaaagcccggctcttccgcttgtg

SEQ ID NO: 249086 - DNA, 33 bp, Homo sapien
tgtctgtctcaaagcctggctcttccgcttgtg

SEQ ID NO: 249087 - DNA, 33 bp, Homo sapien
ggcccctccagcaaagaaaggcatggcgaggtg

SEQ ID NO: 249088 - DNA, 33 bp, Homo sapien
ggcccctccagcaaaggaaggcatggcgaggtg

SEQ ID NO: 249089 - DNA, 33 bp, Homo sapien
cagaggcagaggagggacactcattgctggagt

SEQ ID NO: 249090 - DNA, 33 bp, Homo sapien
cagaggcagaggaggggcactcattgctggagt

SEQ ID NO: 249091 - DNA, 33 bp, Homo sapien
catcttggctattaacgatcagcatgacatgtg

SEQ ID NO: 249092 - DNA, 33 bp, Homo sapien
catcttggctattaactatcagcatgacatgtg

SEQ ID NO: 249093 - DNA, 33 bp, Homo sapien
tgtgatatttacaacacgtgagataccttgaag

SEQ ID NO: 249094 - DNA, 33 bp, Homo sapien
tgtgatatttacaacatgtgagataccttgaag

SEQ ID NO: 249095 - DNA, 33 bp, Homo sapien
ttggcctgcaagataacgagtgaatagtatttg

SEQ ID NO: 249096 - DNA, 33 bp, Homo sapien
ttggcctgcaagataatgagtgaatagtatttg

SEQ ID NO: 249097 - DNA, 33 bp, Homo sapien
agcacaagggccagaacgcccatcccagtagct

SEQ ID NO: 249098 - DNA, 33 bp, Homo sapien
agcacaagggccagaatgcccatcccagtagct

SEQ ID NO: 249099 - DNA, 33 bp, Homo sapien
gtgttttcataaggaacatcatctttccaaaat

SEQ ID NO: 249100 - DNA, 33 bp, Homo sapien
gtgttttcataaggaatatcatctttccaaaat

SEQ ID NO: 249101 - DNA, 33 bp, Homo sapien
tcccaaatctttgaaaacaacatctctagcatc

SEQ ID NO: 249102 - DNA, 33 bp, Homo sapien
tcccaaatctttgaaagcaacatctctagcatc

SEQ ID NO: 249103 - DNA, 33 bp, Homo sapien
gcagtggcttcataaaatagccttatcatttaa

SEQ ID NO: 249104 - DNA, 33 bp, Homo sapien
gcagtggcttcataaagtagccttatcatttaa

SEQ ID NO: 249105 - DNA, 33 bp, Homo sapien
gatcattgcaaggaaaagtagaagtactagata

SEQ ID NO: 249106 - DNA, 33 bp, Homo sapien
gatcattgcaaggaaacgtagaagtactagata

SEQ ID NO: 249107 - DNA, 33 bp, Homo sapien
ctttcaaatacgagccaaagagtgacccgcatc

SEQ ID NO: 249108 - DNA, 33 bp, Homo sapien
ctttcaaatacgagcccaagagtgacccgcatc

SEQ ID NO: 249109 - DNA, 33 bp, Homo sapien
caccacttctcagcaacgtcactgcctttccct

SEQ ID NO: 249110 - DNA, 33 bp, Homo sapien
caccacttctcagcaatgtcactgcctttccct

SEQ ID NO: 249111 - DNA, 33 bp, Homo sapien
cctgggaaacaaagcaagattttgactctacaa

SEQ ID NO: 249112 - DNA, 33 bp, Homo sapien
cctgggaaacaaagcacgattttgactctacaa

SEQ ID NO: 249113 - DNA, 33 bp, Homo sapien
aggatttattacacataaggcagtaattctgta

SEQ ID NO: 249114 - DNA, 33 bp, Homo sapien
aggatttattacacatgaggcagtaattctgta

SEQ ID NO: 249115 - DNA, 33 bp, Homo sapien
tgcatggattccattacggggatgaacataatt

SEQ ID NO: 249116 - DNA, 33 bp, Homo sapien
tgcatggattccattatggggatgaacataatt

SEQ ID NO: 249117 - DNA, 33 bp, Homo sapien
agtcaaatacttatcacgtgaaatttatcaatt

SEQ ID NO: 249118 - DNA, 33 bp, Homo sapien
agtcaaatacttatcatgtgaaatttatcaatt

SEQ ID NO: 249119 - DNA, 33 bp, Homo sapien
tatgggtacaaatatacggctagatagaaggac

SEQ ID NO: 249120 - DNA, 33 bp, Homo sapien
tatgggtacaaatatatggctagatagaaggac

SEQ ID NO: 249121 - DNA, 33 bp, Homo sapien
agtggagatgaagagacgtctgctatgggtaca

SEQ ID NO: 249122 - DNA, 33 bp, Homo sapien
agtggagatgaagagatgtctgctatgggtaca

SEQ ID NO: 249123 - DNA, 33 bp, Homo sapien
agaaaaagatgcaggcaaagaattggaatcaaa

SEQ ID NO: 249124 - DNA, 33 bp, Homo sapien
agaaaaagatgcaggcgaagaattggaatcaaa

SEQ ID NO: 249125 - DNA, 33 bp, Homo sapien
aaacacaaccattttaaacccatgcattgtact

SEQ ID NO: 249126 - DNA, 33 bp, Homo sapien
aaacacaaccattttagacccatgcattgtact

SEQ ID NO: 249127 - DNA, 33 bp, Homo sapien
ccagactgcaagtaccaatactcataacatggg

SEQ ID NO: 249128 - DNA, 33 bp, Homo sapien
ccagactgcaagtaccgatactcataacatggg

SEQ ID NO: 249129 - DNA, 33 bp, Homo sapien
ctctaggtgtttgtgacctccgcaacctaacta

SEQ ID NO: 249130 - DNA, 33 bp, Homo sapien
ctctaggtgtttgtgatctccgcaacctaacta

SEQ ID NO: 249131 - DNA, 33 bp, Homo sapien
tggcaggtctgagtcacagttcctgaaattagt

SEQ ID NO: 249132 - DNA, 33 bp, Homo sapien
tggcaggtctgagtcatagttcctgaaattagt

SEQ ID NO: 249133 - DNA, 33 bp, Homo sapien
aaaaattattgatataaggaaaacactcaattg

SEQ ID NO: 249134 - DNA, 33 bp, Homo sapien
aaaaattattgatatagggaaaacactcaattg

SEQ ID NO: 249135 - DNA, 33 bp, Homo sapien
gtaatcagctaaattagcccattgatagaacag

SEQ ID NO: 249136 - DNA, 33 bp, Homo sapien
gtaatcagctaaattatcccattgatagaacag

SEQ ID NO: 249137 - DNA, 33 bp, Homo sapien
ggaggtggacagggaacaaataaggatacagtt

SEQ ID NO: 249138 - DNA, 33 bp, Homo sapien
ggaggtggacagggaagaaataaggatacagtt

SEQ ID NO: 249139 - DNA, 33 bp, Homo sapien
gtggtagcttccaggaatcaagagtcaagatga

SEQ ID NO: 249140 - DNA, 33 bp, Homo sapien
gtggtagcttccaggagtcaagagtcaagatga

SEQ ID NO: 249141 - DNA, 33 bp, Homo sapien
tgagtggtaccataacaccgtttctccaaagag

SEQ ID NO: 249142 - DNA, 33 bp, Homo sapien
tgagtggtaccataacgccgtttctccaaagag

SEQ ID NO: 249143 - DNA, 33 bp, Homo sapien
gtcttatcgcctgttaccttaattgctttttaa

SEQ ID NO: 249144 - DNA, 33 bp, Homo sapien
gtcttatcgcctgttatcttaattgctttttaa

SEQ ID NO: 249145 - DNA, 33 bp, Homo sapien
gataacactgagtcacaagtattcacagtctga

SEQ ID NO: 249146 - DNA, 33 bp, Homo sapien
gataacactgagtcacgagtattcacagtctga

SEQ ID NO: 249147 - DNA, 33 bp, Homo sapien
tatttatgaaaacaaaatgtggaggtttgttac

SEQ ID NO: 249148 - DNA, 33 bp, Homo sapien
tatttatgaaaacaaagtgtggaggtttgttac

SEQ ID NO: 249149 - DNA, 33 bp, Homo sapien
tcacagttaatacacaatatgtaaatgaacagt

SEQ ID NO: 249150 - DNA, 33 bp, Homo sapien
tcacagttaatacacagtatgtaaatgaacagt

SEQ ID NO: 249151 - DNA, 33 bp, Homo sapien
gtgcatcatcaaaaataaattgatctgtgtgaa

SEQ ID NO: 249152 - DNA, 33 bp, Homo sapien
gtgcatcatcaaaaatgaattgatctgtgtgaa

SEQ ID NO: 249153 - DNA, 33 bp, Homo sapien
gaacaatgatattaaaattcagatccaattatg

SEQ ID NO: 249154 - DNA, 33 bp, Homo sapien
gaacaatgatattaaagttcagatccaattatg

SEQ ID NO: 249155 - DNA, 33 bp, Homo sapien
cttctaaccattttccaccaatggacggaccag

SEQ ID NO: 249156 - DNA, 33 bp, Homo sapien
cttctaaccattttccgccaatggacggaccag

SEQ ID NO: 249157 - DNA, 33 bp, Homo sapien
catgaaattgcattccaatcagaagcatggcca

SEQ ID NO: 249158 - DNA, 33 bp, Homo sapien
catgaaattgcattccgatcagaagcatggcca

SEQ ID NO: 249159 - DNA, 33 bp, Homo sapien
ctggataacttcctccaatttttcacgtctctg

SEQ ID NO: 249160 - DNA, 33 bp, Homo sapien
ctggataacttcctcctatttttcacgtctctg

SEQ ID NO: 249161 - DNA, 33 bp, Homo sapien
gaagaaatgtgtttacaaaaaagcctcccttga

SEQ ID NO: 249162 - DNA, 33 bp, Homo sapien
gaagaaatgtgtttacgaaaaagcctcccttga

SEQ ID NO: 249163 - DNA, 33 bp, Homo sapien
gtgacttaagacgacaacaatcttaaaacaaca

SEQ ID NO: 249164 - DNA, 33 bp, Homo sapien
gtgacttaagacgacagcaatcttaaaacaaca

SEQ ID NO: 249165 - DNA, 33 bp, Homo sapien
ttacagcagccacagtaaactacgctattttca

SEQ ID NO: 249166 - DNA, 33 bp, Homo sapien
ttacagcagccacagtgaactacgctattttca

SEQ ID NO: 249167 - DNA, 33 bp, Homo sapien
gagtggagctggagggacaagcagaaaagatct

SEQ ID NO: 249168 - DNA, 33 bp, Homo sapien
gagtggagctggaggggcaagcagaaaagatct

SEQ ID NO: 249169 - DNA, 33 bp, Homo sapien
agatctggaacaaacaatgtgctcagaaaagaa

SEQ ID NO: 249170 - DNA, 33 bp, Homo sapien
agatctggaacaaacagtgtgctcagaaaagaa

SEQ ID NO: 249171 - DNA, 33 bp, Homo sapien
gtgctcagaaaagaaaagacaagaggatcccac

SEQ ID NO: 249172 - DNA, 33 bp, Homo sapien
gtgctcagaaaagaaaggacaagaggatcccac

SEQ ID NO: 249173 - DNA, 33 bp, Homo sapien
tgactctttatagggaacccatgccattctggt

SEQ ID NO: 249174 - DNA, 33 bp, Homo sapien
tgactctttatagggagcccatgccattctggt

SEQ ID NO: 249175 - DNA, 33 bp, Homo sapien
atgctcttcacagaggcatatttttatctctgc

SEQ ID NO: 249176 - DNA, 33 bp, Homo sapien
atgctcttcacagaggtatatttttatctctgc

SEQ ID NO: 249177 - DNA, 33 bp, Homo sapien
gtgaaatgcaagaagacatttgtttggattttt

SEQ ID NO: 249178 - DNA, 33 bp, Homo sapien
gtgaaatgcaagaagatatttgtttggattttt

SEQ ID NO: 249179 - DNA, 33 bp, Homo sapien
ctgttctccctagcagcattacctagcattttt

SEQ ID NO: 249180 - DNA, 33 bp, Homo sapien
ctgttctccctagcaggattacctagcattttt

SEQ ID NO: 249181 - DNA, 33 bp, Homo sapien
tacagaagctctctaaaggacagaatgaaggct

SEQ ID NO: 249182 - DNA, 33 bp, Homo sapien
tacagaagctctctaagggacagaatgaaggct

SEQ ID NO: 249183 - DNA, 33 bp, Homo sapien
gctttgtgaatagcaaatgactgacaaccagtg

SEQ ID NO: 249184 - DNA, 33 bp, Homo sapien
gctttgtgaatagcaagtgactgacaaccagtg

SEQ ID NO: 249185 - DNA, 33 bp, Homo sapien
tcagctatgaaacaaactgcctattgaggaagg

SEQ ID NO: 249186 - DNA, 33 bp, Homo sapien
tcagctatgaaacaaattgcctattgaggaagg

SEQ ID NO: 249187 - DNA, 33 bp, Homo sapien
ctgtagaagatttacaatgacagtgagctttct

SEQ ID NO: 249188 - DNA, 33 bp, Homo sapien
ctgtagaagatttacagtgacagtgagctttct

SEQ ID NO: 249189 - DNA, 33 bp, Homo sapien
tcatgactcggcctgccattcccctggcttatg

SEQ ID NO: 249190 - DNA, 33 bp, Homo sapien
tcatgactcggcctgctattcccctggcttatg

SEQ ID NO: 249191 - DNA, 33 bp, Homo sapien
tatctgtgtatcaatcaagtttataaaatgtaa

SEQ ID NO: 249192 - DNA, 33 bp, Homo sapien
tatctgtgtatcaatcgagtttataaaatgtaa

SEQ ID NO: 249193 - DNA, 33 bp, Homo sapien
aaaaaatacgatataccggctgtatgcatcagt

SEQ ID NO: 249194 - DNA, 33 bp, Homo sapien
aaaaaatacgatatactggctgtatgcatcagt

SEQ ID NO: 249195 - DNA, 33 bp, Homo sapien
caatgggtgggttttgcataaaggagcaatcta

SEQ ID NO: 249196 - DNA, 33 bp, Homo sapien
caatgggtgggttttgtataaaggagcaatcta

SEQ ID NO: 249197 - DNA, 33 bp, Homo sapien
gaatcatttgtgaataactacagtgtgcagggc

SEQ ID NO: 249198 - DNA, 33 bp, Homo sapien
gaatcatttgtgaatacctacagtgtgcagggc

SEQ ID NO: 249199 - DNA, 33 bp, Homo sapien
atgggactcattctaaactccacatatggaatg

SEQ ID NO: 249200 - DNA, 33 bp, Homo sapien
atgggactcattctaatctccacatatggaatg

SEQ ID NO: 249201 - DNA, 33 bp, Homo sapien
ttgttggagttaccaacaaaaagtctatggcat

SEQ ID NO: 249202 - DNA, 33 bp, Homo sapien
ttgttggagttaccaataaaaagtctatggcat

SEQ ID NO: 249203 - DNA, 33 bp, Homo sapien
gggcagatcaccaaaccggatcacgtcccagta

SEQ ID NO: 249204 - DNA, 33 bp, Homo sapien
gggcagatcaccaaactggatcacgtcccagta

SEQ ID NO: 249205 - DNA, 33 bp, Homo sapien
aatgaaccgtgcccaaatctaggccgacaacat

SEQ ID NO: 249206 - DNA, 33 bp, Homo sapien
aatgaaccgtgcccaactctaggccgacaacat

SEQ ID NO: 249207 - DNA, 33 bp, Homo sapien
ttcacacggttaagtaactcattgtaatgttga

SEQ ID NO: 249208 - DNA, 33 bp, Homo sapien
ttcacacggttaagtatctcattgtaatgttga

SEQ ID NO: 249209 - DNA, 33 bp, Homo sapien
tctttccagactctgaacttttgctcactgttc

SEQ ID NO: 249210 - DNA, 33 bp, Homo sapien
tctttccagactctgaccttttgctcactgttc

SEQ ID NO: 249211 - DNA, 33 bp, Homo sapien
cctggttcattttgtcaataccttcgcccccag

SEQ ID NO: 249212 - DNA, 33 bp, Homo sapien
cctggttcattttgtcgataccttcgcccccag

SEQ ID NO: 249213 - DNA, 33 bp, Homo sapien
acaatgtggacactcacgataccacctatgaca

SEQ ID NO: 249214 - DNA, 33 bp, Homo sapien
acaatgtggacactcatgataccacctatgaca

SEQ ID NO: 249215 - DNA, 33 bp, Homo sapien
catagataaatgttaacgtcattgttggccact

SEQ ID NO: 249216 - DNA, 33 bp, Homo sapien
catagataaatgttaatgtcattgttggccact

SEQ ID NO: 249217 - DNA, 33 bp, Homo sapien
atcttacagcagtccaaattgctattattaatt

SEQ ID NO: 249218 - DNA, 33 bp, Homo sapien
atcttacagcagtccagattgctattattaatt

SEQ ID NO: 249219 - DNA, 33 bp, Homo sapien
gaaaaattactaggtcacaggattataattttt

SEQ ID NO: 249220 - DNA, 33 bp, Homo sapien
gaaaaattactaggtctcaggattataattttt

SEQ ID NO: 249221 - DNA, 33 bp, Homo sapien
ggacaagaaatgaatacgcagataaacactatg

SEQ ID NO: 249222 - DNA, 33 bp, Homo sapien
ggacaagaaatgaatatgcagataaacactatg

SEQ ID NO: 249223 - DNA, 33 bp, Homo sapien
gaaactggacatgtacagaaggggctgcccgat

SEQ ID NO: 249224 - DNA, 33 bp, Homo sapien
gaaactggacatgtacggaaggggctgcccgat

SEQ ID NO: 249225 - DNA, 33 bp, Homo sapien
tgttttgcagacagcaagttattgggtaattac

SEQ ID NO: 249226 - DNA, 33 bp, Homo sapien
tgttttgcagacagcaggttattgggtaattac

SEQ ID NO: 249227 - DNA, 33 bp, Homo sapien
gaccttctattctatgccaggataaaaattgct

SEQ ID NO: 249228 - DNA, 33 bp, Homo sapien
gaccttctattctatgtcaggataaaaattgct

SEQ ID NO: 249229 - DNA, 33 bp, Homo sapien
aaaattttgaactaaaactctcattattctgat

SEQ ID NO: 249230 - DNA, 33 bp, Homo sapien
aaaattttgaactaaagctctcattattctgat

SEQ ID NO: 249231 - DNA, 33 bp, Homo sapien
gtaggtggtgtttgctcaatgaagaagggaaaa

SEQ ID NO: 249232 - DNA, 33 bp, Homo sapien
gtaggtggtgtttgcttaatgaagaagggaaaa

SEQ ID NO: 249233 - DNA, 33 bp, Homo sapien
atacaagccacaatacggatgaatctcaaaaac

SEQ ID NO: 249234 - DNA, 33 bp, Homo sapien
atacaagccacaatactgatgaatctcaaaaac

SEQ ID NO: 249235 - DNA, 33 bp, Homo sapien
atattatacacaatagacccagaattggtttat

SEQ ID NO: 249236 - DNA, 33 bp, Homo sapien
atattatacacaataggcccagaattggtttat

SEQ ID NO: 249237 - DNA, 33 bp, Homo sapien
atttatattgacttccaccatacactttcctga

SEQ ID NO: 249238 - DNA, 33 bp, Homo sapien
atttatattgacttccgccatacactttcctga

SEQ ID NO: 249239 - DNA, 33 bp, Homo sapien
atcttattgcacaaaaatatattgagtgtctcc

SEQ ID NO: 249240 - DNA, 33 bp, Homo sapien
atcttattgcacaaaattatattgagtgtctcc

SEQ ID NO: 249241 - DNA, 33 bp, Homo sapien
ggaggagtaagttcaaaatatctgttattacac

SEQ ID NO: 249242 - DNA, 33 bp, Homo sapien
ggaggagtaagttcaagatatctgttattacac

SEQ ID NO: 249243 - DNA, 33 bp, Homo sapien
cagtgtgcgtaattacaggtacaatcaagtaat

SEQ ID NO: 249244 - DNA, 33 bp, Homo sapien
cagtgtgcgtaattacgggtacaatcaagtaat

SEQ ID NO: 249245 - DNA, 33 bp, Homo sapien
aaaagcctactgatgacggcactccaggtggct

SEQ ID NO: 249246 - DNA, 33 bp, Homo sapien
aaaagcctactgatgatggcactccaggtggct

SEQ ID NO: 249247 - DNA, 33 bp, Homo sapien
ctgcatcttcaatgccaagaatggtgcccagaa

SEQ ID NO: 249248 - DNA, 33 bp, Homo sapien
ctgcatcttcaatgccgagaatggtgcccagaa

SEQ ID NO: 249249 - DNA, 33 bp, Homo sapien
aacctggagcagaggacgtagccatgcacacag

SEQ ID NO: 249250 - DNA, 33 bp, Homo sapien
aacctggagcagaggatgtagccatgcacacag

SEQ ID NO: 249251 - DNA, 33 bp, Homo sapien
ttgcaatttttaggagacacagtaagctgtagg

SEQ ID NO: 249252 - DNA, 33 bp, Homo sapien
ttgcaatttttaggaggcacagtaagctgtagg

SEQ ID NO: 249253 - DNA, 33 bp, Homo sapien
agtgcaagaaggaggaagtgccagactttaaaa

SEQ ID NO: 249254 - DNA, 33 bp, Homo sapien
agtgcaagaaggaggacgtgccagactttaaaa

SEQ ID NO: 249255 - DNA, 33 bp, Homo sapien
ctttagttgaagccaccgatttttcttttcacc

SEQ ID NO: 249256 - DNA, 33 bp, Homo sapien
ctttagttgaagccactgatttttcttttcacc

SEQ ID NO: 249257 - DNA, 33 bp, Homo sapien
agaaggatgaatttggaatcatgaggcaatatg

SEQ ID NO: 249258 - DNA, 33 bp, Homo sapien
agaaggatgaatttgggatcatgaggcaatatg

SEQ ID NO: 249259 - DNA, 33 bp, Homo sapien
ttcttgcgatggtgtcactctgaagaatcctaa

SEQ ID NO: 249260 - DNA, 33 bp, Homo sapien
ttcttgcgatggtgtctctctgaagaatcctaa

SEQ ID NO: 249261 - DNA, 33 bp, Homo sapien
catcatccttgtgacactcagttgatgatgaca

SEQ ID NO: 249262 - DNA, 33 bp, Homo sapien
catcatccttgtgacattcagttgatgatgaca

SEQ ID NO: 249263 - DNA, 33 bp, Homo sapien
tgccctgagacaaccacgtggaaaactccaggc

SEQ ID NO: 249264 - DNA, 33 bp, Homo sapien
tgccctgagacaaccatgtggaaaactccaggc

SEQ ID NO: 249265 - DNA, 33 bp, Homo sapien
cactccaatggcggaacggagtcattgtgacag

SEQ ID NO: 249266 - DNA, 33 bp, Homo sapien
cactccaatggcggaatggagtcattgtgacag

SEQ ID NO: 249267 - DNA, 33 bp, Homo sapien
aactagaagagaagaagtgtagtgttcccagca

SEQ ID NO: 249268 - DNA, 33 bp, Homo sapien
aactagaagagaagaattgtagtgttcccagca

SEQ ID NO: 249269 - DNA, 33 bp, Homo sapien
gggccaacagtaaagacacattgacaggtaccc

SEQ ID NO: 249270 - DNA, 33 bp, Homo sapien
gggccaacagtaaagatacattgacaggtaccc

SEQ ID NO: 249271 - DNA, 33 bp, Homo sapien
ccctagacacgccctactacagaaccttgttcc

SEQ ID NO: 249272 - DNA, 33 bp, Homo sapien
ccctagacacgccctagtacagaaccttgttcc

SEQ ID NO: 249273 - DNA, 33 bp, Homo sapien
ttctttgtagcacttacccttgtctgaaattat

SEQ ID NO: 249274 - DNA, 33 bp, Homo sapien
ttctttgtagcacttatccttgtctgaaattat

SEQ ID NO: 249275 - DNA, 33 bp, Homo sapien
tgtaaactctgccctacgtttagaggacatttt

SEQ ID NO: 249276 - DNA, 33 bp, Homo sapien
tgtaaactctgccctatgtttagaggacatttt

SEQ ID NO: 249277 - DNA, 33 bp, Homo sapien
gggctgttcacccaaacgagagctcaaacaaga

SEQ ID NO: 249278 - DNA, 33 bp, Homo sapien
gggctgttcacccaaatgagagctcaaacaaga

SEQ ID NO: 249279 - DNA, 33 bp, Homo sapien
tgtgagccgcatgcaaagtggagctttagtcaa

SEQ ID NO: 249280 - DNA, 33 bp, Homo sapien
tgtgagccgcatgcaaggtggagctttagtcaa

SEQ ID NO: 249281 - DNA, 33 bp, Homo sapien
tgcatcactatcagtaaagttaagcctgtgtcg

SEQ ID NO: 249282 - DNA, 33 bp, Homo sapien
tgcatcactatcagtatagttaagcctgtgtcg

SEQ ID NO: 249283 - DNA, 33 bp, Homo sapien
agaaagtatctcaataacttatgaaggtactta

SEQ ID NO: 249284 - DNA, 33 bp, Homo sapien
agaaagtatctcaatatcttatgaaggtactta

SEQ ID NO: 249285 - DNA, 33 bp, Homo sapien
gtagattcagcactgaaaaaagtgaagtctgta

SEQ ID NO: 249286 - DNA, 33 bp, Homo sapien
gtagattcagcactgagaaaagtgaagtctgta

SEQ ID NO: 249287 - DNA, 33 bp, Homo sapien
acacgaaagaaagcgcaagtgaatgttagctct

SEQ ID NO: 249288 - DNA, 33 bp, Homo sapien
acacgaaagaaagcgcgagtgaatgttagctct

SEQ ID NO: 249289 - DNA, 33 bp, Homo sapien
ggtctttgtatgaaaaccagagacttttgtttg

SEQ ID NO: 249290 - DNA, 33 bp, Homo sapien
ggtctttgtatgaaaatcagagacttttgtttg

SEQ ID NO: 249291 - DNA, 33 bp, Homo sapien
ttaattttagtaactaccatgtcctgaaggtta

SEQ ID NO: 249292 - DNA, 33 bp, Homo sapien
ttaattttagtaactatcatgtcctgaaggtta

SEQ ID NO: 249293 - DNA, 33 bp, Homo sapien
acagattctgcagttacgtgcttgtatagctcc

SEQ ID NO: 249294 - DNA, 33 bp, Homo sapien
acagattctgcagttatgtgcttgtatagctcc

SEQ ID NO: 249295 - DNA, 33 bp, Homo sapien
gagagctagcatgttgaaactcaaatagacttc

SEQ ID NO: 249296 - DNA, 33 bp, Homo sapien
gagagctagcatgttggaactcaaatagacttc

SEQ ID NO: 249297 - DNA, 33 bp, Homo sapien
caggtgttctgagatccgaaagttatggaataa

SEQ ID NO: 249298 - DNA, 33 bp, Homo sapien
caggtgttctgagatctgaaagttatggaataa

SEQ ID NO: 249299 - DNA, 33 bp, Homo sapien
tttcactgttctttaaaggtcacaaatttagtg

SEQ ID NO: 249300 - DNA, 33 bp, Homo sapien
tttcactgttctttaagggtcacaaatttagtg

SEQ ID NO: 249301 - DNA, 33 bp, Homo sapien
ctacacaattgacaccacattatgttcttctat

SEQ ID NO: 249302 - DNA, 33 bp, Homo sapien
ctacacaattgacaccccattatgttcttctat

SEQ ID NO: 249303 - DNA, 33 bp, Homo sapien
gactctcagaaaatgactaaatgttttatagag

SEQ ID NO: 249304 - DNA, 33 bp, Homo sapien
gactctcagaaaatgagtaaatgttttatagag

SEQ ID NO: 249305 - DNA, 33 bp, Homo sapien
tatggacttcccatcaacaagcccttattaaca

SEQ ID NO: 249306 - DNA, 33 bp, Homo sapien
tatggacttcccatcagcaagcccttattaaca

SEQ ID NO: 249307 - DNA, 33 bp, Homo sapien
gtatttaatatggaaactcagagccaaggacat

SEQ ID NO: 249308 - DNA, 33 bp, Homo sapien
gtatttaatatggaaattcagagccaaggacat

SEQ ID NO: 249309 - DNA, 33 bp, Homo sapien
aatcttcagtgggatacgatgggctataaagaa

SEQ ID NO: 249310 - DNA, 33 bp, Homo sapien
aatcttcagtgggataggatgggctataaagaa

SEQ ID NO: 249311 - DNA, 33 bp, Homo sapien
ttcagtatcacttaacaaatctatgttggaaat

SEQ ID NO: 249312 - DNA, 33 bp, Homo sapien
ttcagtatcacttaactaatctatgttggaaat

SEQ ID NO: 249313 - DNA, 33 bp, Homo sapien
gacatggattgggcaccgacagtagaaattgta

SEQ ID NO: 249314 - DNA, 33 bp, Homo sapien
gacatggattgggcactgacagtagaaattgta

SEQ ID NO: 249315 - DNA, 33 bp, Homo sapien
tatctgttgtatagcacggaatagtacttgttt

SEQ ID NO: 249316 - DNA, 33 bp, Homo sapien
tatctgttgtatagcatggaatagtacttgttt

SEQ ID NO: 249317 - DNA, 33 bp, Homo sapien
gcatggcacactagaacaactcaggaaaaaaaa

SEQ ID NO: 249318 - DNA, 33 bp, Homo sapien
gcatggcacactagaagaactcaggaaaaaaaa

SEQ ID NO: 249319 - DNA, 33 bp, Homo sapien
ctcatcagctacacttgaaaaggcaaatttata

SEQ ID NO: 249320 - DNA, 33 bp, Homo sapien
ctcatcagctacactttaaaaggcaaatttata

SEQ ID NO: 249321 - DNA, 33 bp, Homo sapien
aaaacagggccaataactaaggtgcaattaaca

SEQ ID NO: 249322 - DNA, 33 bp, Homo sapien
aaaacagggccaataagtaaggtgcaattaaca

SEQ ID NO: 249323 - DNA, 33 bp, Homo sapien
taaaggcagtagtgccacctacatttgcaatac

SEQ ID NO: 249324 - DNA, 33 bp, Homo sapien
taaaggcagtagtgccgcctacatttgcaatac

SEQ ID NO: 249325 - DNA, 33 bp, Homo sapien
ggcaggatgatggacactaagaaagatgtaatt

SEQ ID NO: 249326 - DNA, 33 bp, Homo sapien
ggcaggatgatggacattaagaaagatgtaatt

SEQ ID NO: 249327 - DNA, 33 bp, Homo sapien
agaaaaaacacaataagcaaagcgttctggtgc

SEQ ID NO: 249328 - DNA, 33 bp, Homo sapien
agaaaaaacacaataatcaaagcgttctggtgc

SEQ ID NO: 249329 - DNA, 33 bp, Homo sapien
gagacccctaaggccacgatgaggaaatatttt

SEQ ID NO: 249330 - DNA, 33 bp, Homo sapien
gagacccctaaggccatgatgaggaaatatttt

SEQ ID NO: 249331 - DNA, 33 bp, Homo sapien
tcatgaaaccaataaacggcatgacaaatgttt

SEQ ID NO: 249332 - DNA, 33 bp, Homo sapien
tcatgaaaccaataaatggcatgacaaatgttt

SEQ ID NO: 249333 - DNA, 33 bp, Homo sapien
agattacaacaaaacaaggataaatgcacttcc

SEQ ID NO: 249334 - DNA, 33 bp, Homo sapien
agattacaacaaaacagggataaatgcacttcc

SEQ ID NO: 249335 - DNA, 33 bp, Homo sapien
aagcaatgcacacatacagtccattaattttta

SEQ ID NO: 249336 - DNA, 33 bp, Homo sapien
aagcaatgcacacatagagtccattaattttta

SEQ ID NO: 249337 - DNA, 33 bp, Homo sapien
gtgtaaatcgtttagaagtatacacaatatttt

SEQ ID NO: 249338 - DNA, 33 bp, Homo sapien
gtgtaaatcgtttagaggtatacacaatatttt

SEQ ID NO: 249339 - DNA, 33 bp, Homo sapien
tgattgatggtagagacggggtcttgatgtgtg

SEQ ID NO: 249340 - DNA, 33 bp, Homo sapien
tgattgatggtagagatggggtcttgatgtgtg

SEQ ID NO: 249341 - DNA, 33 bp, Homo sapien
agtgtactcagttctcacgagctaatatttggc

SEQ ID NO: 249342 - DNA, 33 bp, Homo sapien
agtgtactcagttctcgcgagctaatatttggc

SEQ ID NO: 249343 - DNA, 33 bp, Homo sapien
tggggccctgacaatcgaatcatttagagtaga

SEQ ID NO: 249344 - DNA, 33 bp, Homo sapien
tggggccctgacaatctaatcatttagagtaga

SEQ ID NO: 249345 - DNA, 33 bp, Homo sapien
cattgggtgtcaatcaacagaatgattttggtc

SEQ ID NO: 249346 - DNA, 33 bp, Homo sapien
cattgggtgtcaatcaccagaatgattttggtc

SEQ ID NO: 249347 - DNA, 33 bp, Homo sapien
cccagacttggagtcacaatatttgcccagaac

SEQ ID NO: 249348 - DNA, 33 bp, Homo sapien
cccagacttggagtcataatatttgcccagaac

SEQ ID NO: 249349 - DNA, 33 bp, Homo sapien
agcatatagtgtcacaatgacagagtcaaatgt

SEQ ID NO: 249350 - DNA, 33 bp, Homo sapien
agcatatagtgtcacagtgacagagtcaaatgt

SEQ ID NO: 249351 - DNA, 33 bp, Homo sapien
gagccaacagtgtgtacagtatttcaggtgcta

SEQ ID NO: 249352 - DNA, 33 bp, Homo sapien
gagccaacagtgtgtatagtatttcaggtgcta

SEQ ID NO: 249353 - DNA, 33 bp, Homo sapien
aagaagaagtggggaaatggtggtactggcaac

SEQ ID NO: 249354 - DNA, 33 bp, Homo sapien
aagaagaagtggggaagtggtggtactggcaac

SEQ ID NO: 249355 - DNA, 33 bp, Homo sapien
tacagtggagtgaagacgaacctagcaaagaga

SEQ ID NO: 249356 - DNA, 33 bp, Homo sapien
tacagtggagtgaagatgaacctagcaaagaga

SEQ ID NO: 249357 - DNA, 33 bp, Homo sapien
actgcttacctgttgcagaagacaagcaggagg

SEQ ID NO: 249358 - DNA, 33 bp, Homo sapien
actgcttacctgttgccgaagacaagcaggagg

SEQ ID NO: 249359 - DNA, 33 bp, Homo sapien
tgccaagtatttgcagacatgtcataatttctg

SEQ ID NO: 249360 - DNA, 33 bp, Homo sapien
tgccaagtatttgcaggcatgtcataatttctg

SEQ ID NO: 249361 - DNA, 33 bp, Homo sapien
gttctctgtttaatccccactgtctagaacggt

SEQ ID NO: 249362 - DNA, 33 bp, Homo sapien
gttctctgtttaatccgcactgtctagaacggt

SEQ ID NO: 249363 - DNA, 33 bp, Homo sapien
gatcgagaccatcctgcataatacggtgaaacc

SEQ ID NO: 249364 - DNA, 33 bp, Homo sapien
gatcgagaccatcctggataatacggtgaaacc

SEQ ID NO: 249365 - DNA, 33 bp, Homo sapien
ctgtgctattcccttgcactgggatatggaggc

SEQ ID NO: 249366 - DNA, 33 bp, Homo sapien
ctgtgctattcccttgtactgggatatggaggc

SEQ ID NO: 249367 - DNA, 33 bp, Homo sapien
tgaaccattcgcttcaacgtagctagcttggat

SEQ ID NO: 249368 - DNA, 33 bp, Homo sapien
tgaaccattcgcttcaccgtagctagcttggat

SEQ ID NO: 249369 - DNA, 33 bp, Homo sapien
ttccttatctataaaacgtaaaagcggtggtga

SEQ ID NO: 249370 - DNA, 33 bp, Homo sapien
ttccttatctataaaaggtaaaagcggtggtga

SEQ ID NO: 249371 - DNA, 33 bp, Homo sapien
taatgtgaaggaattcaaactgggttcagacac

SEQ ID NO: 249372 - DNA, 33 bp, Homo sapien
taatgtgaaggaattcgaactgggttcagacac

SEQ ID NO: 249373 - DNA, 33 bp, Homo sapien
ccccttaatggactgaacactcacttcccatcc

SEQ ID NO: 249374 - DNA, 33 bp, Homo sapien
ccccttaatggactgagcactcacttcccatcc

SEQ ID NO: 249375 - DNA, 33 bp, Homo sapien
aagagttccctgggaaagtaaagtcatcagtat

SEQ ID NO: 249376 - DNA, 33 bp, Homo sapien
aagagttccctgggaaggtaaagtcatcagtat

SEQ ID NO: 249377 - DNA, 33 bp, Homo sapien
caagctctgccgacaccgtaatagtcatttgaa

SEQ ID NO: 249378 - DNA, 33 bp, Homo sapien
caagctctgccgacactgtaatagtcatttgaa

SEQ ID NO: 249379 - DNA, 33 bp, Homo sapien
cgagggctgcagtttacgccggaaaattaggtg

SEQ ID NO: 249380 - DNA, 33 bp, Homo sapien
cgagggctgcagtttatgccggaaaattaggtg

SEQ ID NO: 249381 - DNA, 33 bp, Homo sapien
taaaatgccagtctcacaaggttgttgtttaag

SEQ ID NO: 249382 - DNA, 33 bp, Homo sapien
taaaatgccagtctcagaaggttgttgtttaag

SEQ ID NO: 249383 - DNA, 33 bp, Homo sapien
tctcatggctaatcccacgaggaccccttagct

SEQ ID NO: 249384 - DNA, 33 bp, Homo sapien
tctcatggctaatcccgcgaggaccccttagct

SEQ ID NO: 249385 - DNA, 33 bp, Homo sapien
aaagagcgagcgagaaagaaagatctcatttag

SEQ ID NO: 249386 - DNA, 33 bp, Homo sapien
aaagagcgagcgagaaggaaagatctcatttag

SEQ ID NO: 249387 - DNA, 33 bp, Homo sapien
tagtggttgccttggaaattacaagtaacatct

SEQ ID NO: 249388 - DNA, 33 bp, Homo sapien
tagtggttgccttggagattacaagtaacatct

SEQ ID NO: 249389 - DNA, 33 bp, Homo sapien
attctgtgtggccctcaaattatctcaagtgca

SEQ ID NO: 249390 - DNA, 33 bp, Homo sapien
attctgtgtggccctccaattatctcaagtgca

SEQ ID NO: 249391 - DNA, 33 bp, Homo sapien
cctcaggggaatactacggaacccagtttgaaa

SEQ ID NO: 249392 - DNA, 33 bp, Homo sapien
cctcaggggaatactagggaacccagtttgaaa

SEQ ID NO: 249393 - DNA, 33 bp, Homo sapien
tcaataatcacacagaataagaatggttcacac

SEQ ID NO: 249394 - DNA, 33 bp, Homo sapien
tcaataatcacacagagtaagaatggttcacac

SEQ ID NO: 249395 - DNA, 33 bp, Homo sapien
agaggctgggatactcgacagtcccaggaagct

SEQ ID NO: 249396 - DNA, 33 bp, Homo sapien
agaggctgggatactctacagtcccaggaagct

SEQ ID NO: 249397 - DNA, 33 bp, Homo sapien
ccaggggacgctcttacgcaatctgccttgatt

SEQ ID NO: 249398 - DNA, 33 bp, Homo sapien
ccaggggacgctcttatgcaatctgccttgatt

SEQ ID NO: 249399 - DNA, 33 bp, Homo sapien
gacatgcaaaaatagcgcagctgatggattggt

SEQ ID NO: 249400 - DNA, 33 bp, Homo sapien
gacatgcaaaaatagctcagctgatggattggt

SEQ ID NO: 249401 - DNA, 33 bp, Homo sapien
ataataatggctactactactacgatctttacg

SEQ ID NO: 249402 - DNA, 33 bp, Homo sapien
ataataatggctactattactacgatctttacg

SEQ ID NO: 249403 - DNA, 33 bp, Homo sapien
tggtggatttggggtacacttcttaacctctcc

SEQ ID NO: 249404 - DNA, 33 bp, Homo sapien
tggtggatttggggtagacttcttaacctctcc

SEQ ID NO: 249405 - DNA, 33 bp, Homo sapien
ggagctttgttgaaataagtgactaagcccctg

SEQ ID NO: 249406 - DNA, 33 bp, Homo sapien
ggagctttgttgaaatgagtgactaagcccctg

SEQ ID NO: 249407 - DNA, 33 bp, Homo sapien
ccctaatgctctagatcaaatgtctccctgacc

SEQ ID NO: 249408 - DNA, 33 bp, Homo sapien
ccctaatgctctagattaaatgtctccctgacc

SEQ ID NO: 249409 - DNA, 33 bp, Homo sapien
agaaactgcaacaatcacctacttactcagccc

SEQ ID NO: 249410 - DNA, 33 bp, Homo sapien
agaaactgcaacaatcgcctacttactcagccc

SEQ ID NO: 249411 - DNA, 33 bp, Homo sapien
gcattgccctcgctccacagtggtcttttaaaa

SEQ ID NO: 249412 - DNA, 33 bp, Homo sapien
gcattgccctcgctccgcagtggtcttttaaaa

SEQ ID NO: 249413 - DNA, 33 bp, Homo sapien
tggcccatgcagctccaaaatgatgcaattatt

SEQ ID NO: 249414 - DNA, 33 bp, Homo sapien
tggcccatgcagctccgaaatgatgcaattatt

SEQ ID NO: 249415 - DNA, 33 bp, Homo sapien
gaaacaccggcattagcagattgcagagttcta

SEQ ID NO: 249416 - DNA, 33 bp, Homo sapien
gaaacaccggcattagtagattgcagagttcta

SEQ ID NO: 249417 - DNA, 33 bp, Homo sapien
aaggggaatcctagccaggcccgaaagacccta

SEQ ID NO: 249418 - DNA, 33 bp, Homo sapien
aaggggaatcctagccgggcccgaaagacccta

SEQ ID NO: 249419 - DNA, 33 bp, Homo sapien
gggcctcatctccaccagcatgaaaaattggtg

SEQ ID NO: 249420 - DNA, 33 bp, Homo sapien
gggcctcatctccaccggcatgaaaaattggtg

SEQ ID NO: 249421 - DNA, 33 bp, Homo sapien
cgatgggcctgttggcacttgtcagatcctagc

SEQ ID NO: 249422 - DNA, 33 bp, Homo sapien
cgatgggcctgttggcgcttgtcagatcctagc

SEQ ID NO: 249423 - DNA, 33 bp, Homo sapien
gctctccagcaaaatcagaagactggacacaaa

SEQ ID NO: 249424 - DNA, 33 bp, Homo sapien
gctctccagcaaaatcggaagactggacacaaa

SEQ ID NO: 249425 - DNA, 33 bp, Homo sapien
agacaatttcctcccacgcaagaaaggctgttg

SEQ ID NO: 249426 - DNA, 33 bp, Homo sapien
agacaatttcctcccatgcaagaaaggctgttg

SEQ ID NO: 249427 - DNA, 33 bp, Homo sapien
gctctagctgagttaccggtgttcctactgagt

SEQ ID NO: 249428 - DNA, 33 bp, Homo sapien
gctctagctgagttactggtgttcctactgagt

SEQ ID NO: 249429 - DNA, 33 bp, Homo sapien
atacctggctgtggaaccttgagtgtgttactc

SEQ ID NO: 249430 - DNA, 33 bp, Homo sapien
atacctggctgtggaatcttgagtgtgttactc

SEQ ID NO: 249431 - DNA, 33 bp, Homo sapien
aagagatcaggtttggcatggttcagagattac

SEQ ID NO: 249432 - DNA, 33 bp, Homo sapien
aagagatcaggtttgggatggttcagagattac

SEQ ID NO: 249433 - DNA, 33 bp, Homo sapien
atgcagaaaagcccacagtctgagtaaggctaa

SEQ ID NO: 249434 - DNA, 33 bp, Homo sapien
atgcagaaaagcccacggtctgagtaaggctaa

SEQ ID NO: 249435 - DNA, 33 bp, Homo sapien
aatgcagcaccaacaaacgtaaatggagaaaca

SEQ ID NO: 249436 - DNA, 33 bp, Homo sapien
aatgcagcaccaacaagcgtaaatggagaaaca

SEQ ID NO: 249437 - DNA, 33 bp, Homo sapien
ttacatctcccatatcaatgctcgtctgaggtc

SEQ ID NO: 249438 - DNA, 33 bp, Homo sapien
ttacatctcccatatcgatgctcgtctgaggtc

SEQ ID NO: 249439 - DNA, 33 bp, Homo sapien
atgtcagtcccctcacaagacatgatggcctaa

SEQ ID NO: 249440 - DNA, 33 bp, Homo sapien
atgtcagtcccctcacgagacatgatggcctaa

SEQ ID NO: 249441 - DNA, 33 bp, Homo sapien
tttatccttcatggacacggaaacctttctgta

SEQ ID NO: 249442 - DNA, 33 bp, Homo sapien
tttatccttcatggacgcggaaacctttctgta

SEQ ID NO: 249443 - DNA, 33 bp, Homo sapien
gcagcaaagtgagaaacgataccgatgcccatt

SEQ ID NO: 249444 - DNA, 33 bp, Homo sapien
gcagcaaagtgagaaatgataccgatgcccatt

SEQ ID NO: 249445 - DNA, 33 bp, Homo sapien
agcaaagaaggctggacggtatcttgtaagcat

SEQ ID NO: 249446 - DNA, 33 bp, Homo sapien
agcaaagaaggctggagggtatcttgtaagcat

SEQ ID NO: 249447 - DNA, 33 bp, Homo sapien
tttgcagtgtgcagacaactttttccaggaagc

SEQ ID NO: 249448 - DNA, 33 bp, Homo sapien
tttgcagtgtgcagacgactttttccaggaagc

SEQ ID NO: 249449 - DNA, 33 bp, Homo sapien
gtggatctcgtatgccaaatgagatctttatca

SEQ ID NO: 249450 - DNA, 33 bp, Homo sapien
gtggatctcgtatgccgaatgagatctttatca

SEQ ID NO: 249451 - DNA, 33 bp, Homo sapien
tctctcttcatgcttcaactccaccatccctag

SEQ ID NO: 249452 - DNA, 33 bp, Homo sapien
tctctcttcatgcttcgactccaccatccctag

SEQ ID NO: 249453 - DNA, 33 bp, Homo sapien
atccttggtgctttccaaaagagatgatgtcat

SEQ ID NO: 249454 - DNA, 33 bp, Homo sapien
atccttggtgctttccgaaagagatgatgtcat

SEQ ID NO: 249455 - DNA, 33 bp, Homo sapien
gaggtagaaggaaaacagctttattgaagaggc

SEQ ID NO: 249456 - DNA, 33 bp, Homo sapien
gaggtagaaggaaaacggctttattgaagaggc

SEQ ID NO: 249457 - DNA, 33 bp, Homo sapien
gggcaaagccaagaacccaggcgctaagctgca

SEQ ID NO: 249458 - DNA, 33 bp, Homo sapien
gggcaaagccaagaactcaggcgctaagctgca

SEQ ID NO: 249459 - DNA, 33 bp, Homo sapien
ctgggtcatcttgcaaacaacgcttttcttcat

SEQ ID NO: 249460 - DNA, 33 bp, Homo sapien
ctgggtcatcttgcaaccaacgcttttcttcat

SEQ ID NO: 249461 - DNA, 33 bp, Homo sapien
agctcatcgcatgaagaaaacacagagttgtac

SEQ ID NO: 249462 - DNA, 33 bp, Homo sapien
agctcatcgcatgaaggaaacacagagttgtac

SEQ ID NO: 249463 - DNA, 33 bp, Homo sapien
ttaagtgaggaatgccacatttgttcttgcttc

SEQ ID NO: 249464 - DNA, 33 bp, Homo sapien
ttaagtgaggaatgccgcatttgttcttgcttc

SEQ ID NO: 249465 - DNA, 33 bp, Homo sapien
ataataacaagcaaaaatctcacccccatttcc

SEQ ID NO: 249466 - DNA, 33 bp, Homo sapien
ataataacaagcaaaactctcacccccatttcc

SEQ ID NO: 249467 - DNA, 33 bp, Homo sapien
tcagaaaactggctccaagatcgctgtggacaa

SEQ ID NO: 249468 - DNA, 33 bp, Homo sapien
tcagaaaactggctccgagatcgctgtggacaa

SEQ ID NO: 249469 - DNA, 33 bp, Homo sapien
ggacccactttggatcacattcccatccctgaa

SEQ ID NO: 249470 - DNA, 33 bp, Homo sapien
ggacccactttggatcgcattcccatccctgaa

SEQ ID NO: 249471 - DNA, 33 bp, Homo sapien
agagcaaatagttgccaaaactcgtagggaaaa

SEQ ID NO: 249472 - DNA, 33 bp, Homo sapien
agagcaaatagttgccgaaactcgtagggaaaa

SEQ ID NO: 249473 - DNA, 33 bp, Homo sapien
cactttctcttggttccactatgtggtgggata

SEQ ID NO: 249474 - DNA, 33 bp, Homo sapien
cactttctcttggttctactatgtggtgggata

SEQ ID NO: 249475 - DNA, 33 bp, Homo sapien
agaaagcagagataaaagatagtgggagagtcc

SEQ ID NO: 249476 - DNA, 33 bp, Homo sapien
agaaagcagagataaaggatagtgggagagtcc

SEQ ID NO: 249477 - DNA, 33 bp, Homo sapien
agattatcacataagacactgcatgagtcagga

SEQ ID NO: 249478 - DNA, 33 bp, Homo sapien
agattatcacataagatactgcatgagtcagga

SEQ ID NO: 249479 - DNA, 33 bp, Homo sapien
atcaagacacagaaacaaggagctatatagtat

SEQ ID NO: 249480 - DNA, 33 bp, Homo sapien
atcaagacacagaaacgaggagctatatagtat

SEQ ID NO: 249481 - DNA, 33 bp, Homo sapien
tcctccctgtgctgcaatctaaaaagctcttcc

SEQ ID NO: 249482 - DNA, 33 bp, Homo sapien
tcctccctgtgctgcagtctaaaaagctcttcc

SEQ ID NO: 249483 - DNA, 33 bp, Homo sapien
tacactaacattttcacctcaaaagaatcaaaa

SEQ ID NO: 249484 - DNA, 33 bp, Homo sapien
tacactaacattttcatctcaaaagaatcaaaa

SEQ ID NO: 249485 - DNA, 33 bp, Homo sapien
acttaactctatgcctaactggggtgccttcta

SEQ ID NO: 249486 - DNA, 33 bp, Homo sapien
acttaactctatgcctgactggggtgccttcta

SEQ ID NO: 249487 - DNA, 33 bp, Homo sapien
tgaacatatctttggacccatatttacacatca

SEQ ID NO: 249488 - DNA, 33 bp, Homo sapien
tgaacatatctttggatccatatttacacatca

SEQ ID NO: 249489 - DNA, 33 bp, Homo sapien
ttgggggttgagaacacacccttgaaataagga

SEQ ID NO: 249490 - DNA, 33 bp, Homo sapien
ttgggggttgagaacatacccttgaaataagga

SEQ ID NO: 249491 - DNA, 33 bp, Homo sapien
atttcctccaacaacaagtaggattcccccgac

SEQ ID NO: 249492 - DNA, 33 bp, Homo sapien
atttcctccaacaacaggtaggattcccccgac

SEQ ID NO: 249493 - DNA, 33 bp, Homo sapien
tctggagatgggactcagaatgtgggctcagga

SEQ ID NO: 249494 - DNA, 33 bp, Homo sapien
tctggagatgggactcggaatgtgggctcagga

SEQ ID NO: 249495 - DNA, 33 bp, Homo sapien
gggctctctggaacaaatggtgtccctcctgac

SEQ ID NO: 249496 - DNA, 33 bp, Homo sapien
gggctctctggaacaagtggtgtccctcctgac

SEQ ID NO: 249497 - DNA, 33 bp, Homo sapien
gactctaactttgaaacgccaattccctcgtga

SEQ ID NO: 249498 - DNA, 33 bp, Homo sapien
gactctaactttgaaatgccaattccctcgtga

SEQ ID NO: 249499 - DNA, 33 bp, Homo sapien
ttcattagcaatggtaaaaattatcaaaacatc

SEQ ID NO: 249500 - DNA, 33 bp, Homo sapien
ttcattagcaatggtagaaattatcaaaacatc

SEQ ID NO: 249501 - DNA, 33 bp, Homo sapien
gatcgatcagccacaaagaaagttattggttca

SEQ ID NO: 249502 - DNA, 33 bp, Homo sapien
gatcgatcagccacaaggaaagttattggttca

SEQ ID NO: 249503 - DNA, 33 bp, Homo sapien
gtcattgaccaagtccaacttcactttgttcac

SEQ ID NO: 249504 - DNA, 33 bp, Homo sapien
gtcattgaccaagtccgacttcactttgttcac

SEQ ID NO: 249505 - DNA, 33 bp, Homo sapien
atcttgtgctcccagactatccctgagttgttg

SEQ ID NO: 249506 - DNA, 33 bp, Homo sapien
atcttgtgctcccagagtatccctgagttgttg

SEQ ID NO: 249507 - DNA, 33 bp, Homo sapien
gttttcagctgtaaaacgggaatcatcatatat

SEQ ID NO: 249508 - DNA, 33 bp, Homo sapien
gttttcagctgtaaaatgggaatcatcatatat

SEQ ID NO: 249509 - DNA, 33 bp, Homo sapien
gctggagctggggataagactcgcaatctaatc

SEQ ID NO: 249510 - DNA, 33 bp, Homo sapien
gctggagctggggataggactcgcaatctaatc

SEQ ID NO: 249511 - DNA, 33 bp, Homo sapien
tggcttcagtgggatacgttggtaaatgtattc

SEQ ID NO: 249512 - DNA, 33 bp, Homo sapien
tggcttcagtgggatatgttggtaaatgtattc

SEQ ID NO: 249513 - DNA, 33 bp, Homo sapien
gtctctgaatcagagccgagagatgacctctgg

SEQ ID NO: 249514 - DNA, 33 bp, Homo sapien
gtctctgaatcagagctgagagatgacctctgg

SEQ ID NO: 249515 - DNA, 33 bp, Homo sapien
taccatatgatgttaactgctttgtttgacaag

SEQ ID NO: 249516 - DNA, 33 bp, Homo sapien
taccatatgatgttaattgctttgtttgacaag

SEQ ID NO: 249517 - DNA, 33 bp, Homo sapien
ttccccttcctcctgcacctcaactggatgctt

SEQ ID NO: 249518 - DNA, 33 bp, Homo sapien
ttccccttcctcctgcgcctcaactggatgctt

SEQ ID NO: 249519 - DNA, 33 bp, Homo sapien
cctatgattttcccgcgctgcaggccaaactac

SEQ ID NO: 249520 - DNA, 33 bp, Homo sapien
cctatgattttcccgctctgcaggccaaactac

SEQ ID NO: 249521 - DNA, 33 bp, Homo sapien
tctcccagcacttcaacgcgtttccaaacacga

SEQ ID NO: 249522 - DNA, 33 bp, Homo sapien
tctcccagcacttcaatgcgtttccaaacacga

SEQ ID NO: 249523 - DNA, 33 bp, Homo sapien
ccctggattatttgaccccaaactccaatctta

SEQ ID NO: 249524 - DNA, 33 bp, Homo sapien
ccctggattatttgactccaaactccaatctta

SEQ ID NO: 249525 - DNA, 33 bp, Homo sapien
agaaaaagaaagaagccgaagagaaaggtacct

SEQ ID NO: 249526 - DNA, 33 bp, Homo sapien
agaaaaagaaagaagcggaagagaaaggtacct

SEQ ID NO: 249527 - DNA, 33 bp, Homo sapien; identical to SEQ ID NO: 249525

SEQ ID NO: 249528 - DNA, 33 bp, Homo sapien; identical to SEQ ID NO: 249526

SEQ ID NO: 249529 - DNA, 33 bp, Homo sapien
agcccagtccctttacaccgcagacattcagct

SEQ ID NO: 249530 - DNA, 33 bp, Homo sapien
agcccagtccctttacgccgcagacattcagct

SEQ ID NO: 249531 - DNA, 33 bp, Homo sapien
gagtgagactccgtctcaaagttaactgtaagg

SEQ ID NO: 249532 - DNA, 33 bp, Homo sapien
gagtgagactccgtcttaaagttaactgtaagg

SEQ ID NO: 249533 - DNA, 33 bp, Homo sapien
ctgtaatctcctacgacagcaatgtcttcttct

SEQ ID NO: 249534 - DNA, 33 bp, Homo sapien
ctgtaatctcctacgatagcaatgtcttcttct

SEQ ID NO: 249535 - DNA, 33 bp, Homo sapien
tctcgtttcaaaagaacttccaggtgcatggct

SEQ ID NO: 249536 - DNA, 33 bp, Homo sapien
tctcgtttcaaaagaatttccaggtgcatggct

SEQ ID NO: 249537 - DNA, 33 bp, Homo sapien
agttgctgccccatcaatatttgtcaaataaat

SEQ ID NO: 249538 - DNA, 33 bp, Homo sapien
agttgctgccccatcagtatttgtcaaataaat

SEQ ID NO: 249539 - DNA, 33 bp, Homo sapien
taagtaactttacaaactgtgaccaggtgtggt

SEQ ID NO: 249540 - DNA, 33 bp, Homo sapien
taagtaactttacaaattgtgaccaggtgtggt

SEQ ID NO: 249541 - DNA, 33 bp, Homo sapien
gacgggagctcagggccgcaaacctctccctgt

SEQ ID NO: 249542 - DNA, 33 bp, Homo sapien
gacgggagctcagggctgcaaacctctccctgt

SEQ ID NO: 249543 - DNA, 33 bp, Homo sapien
accagtactcaacccacgctggtccctctcctt

SEQ ID NO: 249544 - DNA, 33 bp, Homo sapien
accagtactcaacccatgctggtccctctcctt

SEQ ID NO: 249545 - DNA, 33 bp, Homo sapien
tcctcagaaggcacccggaatcctctgcatgat

SEQ ID NO: 249546 - DNA, 33 bp, Homo sapien
tcctcagaaggcaccctgaatcctctgcatgat

SEQ ID NO: 249547 - DNA, 33 bp, Homo sapien
ctgccatcactgactcagaagacggaggaagaa

SEQ ID NO: 249548 - DNA, 33 bp, Homo sapien
ctgccatcactgactcggaagacggaggaagaa

SEQ ID NO: 249549 - DNA, 33 bp, Homo sapien
gtagtaaaggaaataacggccactcaaggatac

SEQ ID NO: 249550 - DNA, 33 bp, Homo sapien
gtagtaaaggaaataatggccactcaaggatac

SEQ ID NO: 249551 - DNA, 33 bp, Homo sapien
cctctagcacctggccaatctggcagatgatct

SEQ ID NO: 249552 - DNA, 33 bp, Homo sapien
cctctagcacctggccgatctggcagatgatct

SEQ ID NO: 249553 - DNA, 33 bp, Homo sapien
tacagtatctaaagaacgctactgttaacatct

SEQ ID NO: 249554 - DNA, 33 bp, Homo sapien
tacagtatctaaagaatgctactgttaacatct

SEQ ID NO: 249555 - DNA, 33 bp, Homo sapien
tggataataaaagcaacgtgggagctgtatata

SEQ ID NO: 249556 - DNA, 33 bp, Homo sapien
tggataataaaagcaaggtgggagctgtatata

SEQ ID NO: 249557 - DNA, 33 bp, Homo sapien
cgttccaagagtttcaataccttgtccataatc

SEQ ID NO: 249558 - DNA, 33 bp, Homo sapien
cgttccaagagtttcagtaccttgtccataatc

SEQ ID NO: 249559 - DNA, 33 bp, Homo sapien
agttggaagggtctaccagacttggagtcaagc

SEQ ID NO: 249560 - DNA, 33 bp, Homo sapien
agttggaagggtctactagacttggagtcaagc

SEQ ID NO: 249561 - DNA, 33 bp, Homo sapien
agcttatctgtccccaagtcagctatagtctta

SEQ ID NO: 249562 - DNA, 33 bp, Homo sapien
agcttatctgtccccatgtcagctatagtctta

SEQ ID NO: 249563 - DNA, 33 bp, Homo sapien
agaggcctaattataacatgttgatgattaagc

SEQ ID NO: 249564 - DNA, 33 bp, Homo sapien
agaggcctaattataagatgttgatgattaagc

SEQ ID NO: 249565 - DNA, 33 bp, Homo sapien
atcccagctactcggaagctactcaagcgaggc

SEQ ID NO: 249566 - DNA, 33 bp, Homo sapien
atcccagctactcggaggctactcaagcgaggc

SEQ ID NO: 249567 - DNA, 33 bp, Homo sapien
aattgataactgatacaaaaagcatctgacttt

SEQ ID NO: 249568 - DNA, 33 bp, Homo sapien
aattgataactgatactaaaagcatctgacttt

SEQ ID NO: 249569 - DNA, 33 bp, Homo sapien
tgtccaagttatacagccagagaacggtggaac

SEQ ID NO: 249570 - DNA, 33 bp, Homo sapien
tgtccaagttatacaggcagagaacggtggaac

SEQ ID NO: 249571 - DNA, 33 bp, Homo sapien
atgttctcactcataaatcagagctgaacaatg

SEQ ID NO: 249572 - DNA, 33 bp, Homo sapien
atgttctcactcataagtcagagctgaacaatg

SEQ ID NO: 249573 - DNA, 33 bp, Homo sapien
cagtattttggagtcgcattgtctccccaacgc

SEQ ID NO: 249574 - DNA, 33 bp, Homo sapien
cagtattttggagtcgtattgtctccccaacgc

SEQ ID NO: 249575 - DNA, 33 bp, Homo sapien
actcaagttccacgaaatccttagaaatggacc

SEQ ID NO: 249576 - DNA, 33 bp, Homo sapien
actcaagttccacgaagtccttagaaatggacc

SEQ ID NO: 249577 - DNA, 33 bp, Homo sapien
atgtgatttattacagaagtgctcccacgagaa

SEQ ID NO: 249578 - DNA, 33 bp, Homo sapien
atgtgatttattacagcagtgctcccacgagaa

SEQ ID NO: 249579 - DNA, 33 bp, Homo sapien
taactggaggttttgcagaccaaaaatgtatag

SEQ ID NO: 249580 - DNA, 33 bp, Homo sapien
taactggaggttttgcggaccaaaaatgtatag

SEQ ID NO: 249581 - DNA, 33 bp, Homo sapien
agcagtgctgtgggacaacctcatgaagggacc

SEQ ID NO: 249582 - DNA, 33 bp, Homo sapien
agcagtgctgtgggacgacctcatgaagggacc

SEQ ID NO: 249583 - DNA, 33 bp, Homo sapien
gataaccatgcttagcacgatgtccacacactc

SEQ ID NO: 249584 - DNA, 33 bp, Homo sapien
gataaccatgcttagcgcgatgtccacacactc

SEQ ID NO: 249585 - DNA, 33 bp, Homo sapien
cacaggagactgtggaaaggaagctgaaaagat

SEQ ID NO: 249586 - DNA, 33 bp, Homo sapien
cacaggagactgtggagaggaagctgaaaagat

SEQ ID NO: 249587 - DNA, 33 bp, Homo sapien
tacaccaaataagaacaacacatatcataggct

SEQ ID NO: 249588 - DNA, 33 bp, Homo sapien
tacaccaaataagaacgacacatatcataggct

SEQ ID NO: 249589 - DNA, 33 bp, Homo sapien
gaacaaatgcctgtgagatatggaaaaggtcag

SEQ ID NO: 249590 - DNA, 33 bp, Homo sapien
gaacaaatgcctgtgatatatggaaaaggtcag

SEQ ID NO: 249591 - DNA, 33 bp, Homo sapien
ggcaggacactttgaaaaggaaccaggggaata

SEQ ID NO: 249592 - DNA, 33 bp, Homo sapien
ggcaggacactttgaagaggaaccaggggaata

SEQ ID NO: 249593 - DNA, 33 bp, Homo sapien
ctgttacttttgcccaatgcatactagctaata

SEQ ID NO: 249594 - DNA, 33 bp, Homo sapien
ctgttacttttgcccagtgcatactagctaata

SEQ ID NO: 249595 - DNA, 33 bp, Homo sapien
tgcttgaatgcctgtcacacttttacattccca

SEQ ID NO: 249596 - DNA, 33 bp, Homo sapien
tgcttgaatgcctgtcgcacttttacattccca

SEQ ID NO: 249597 - DNA, 33 bp, Homo sapien
aaggcagtttcttcaactgaggcaattcccata

SEQ ID NO: 249598 - DNA, 33 bp, Homo sapien
aaggcagtttcttcaagtgaggcaattcccata

SEQ ID NO: 249599 - DNA, 33 bp, Homo sapien
gagggagcaattctgacaggtttactgcctgag

SEQ ID NO: 249600 - DNA, 33 bp, Homo sapien
gagggagcaattctgataggtttactgcctgag

SEQ ID NO: 249601 - DNA, 33 bp, Homo sapien
taatgtagtgacattgccaaaaaactttattta

SEQ ID NO: 249602 - DNA, 33 bp, Homo sapien
taatgtagtgacattggcaaaaaactttattta

SEQ ID NO: 249603 - DNA, 33 bp, Homo sapien
caattcccatcaacaggagataagatgtggcat

SEQ ID NO: 249604 - DNA, 33 bp, Homo sapien
caattcccatcaacagtagataagatgtggcat

SEQ ID NO: 249605 - DNA, 33 bp, Homo sapien
gggaatgagtgggaccggaagcgggatctgagt

SEQ ID NO: 249606 - DNA, 33 bp, Homo sapien
gggaatgagtgggacctgaagcgggatctgagt

SEQ ID NO: 249607 - DNA, 33 bp, Homo sapien
cactgcagtatctatgacaaggaccattgatag

SEQ ID NO: 249608 - DNA, 33 bp, Homo sapien
cactgcagtatctatggcaaggaccattgatag

SEQ ID NO: 249609 - DNA, 33 bp, Homo sapien
acggcacaggaatcaccgtcaaggtctgtggaa

SEQ ID NO: 249610 - DNA, 33 bp, Homo sapien
acggcacaggaatcactgtcaaggtctgtggaa

SEQ ID NO: 249611 - DNA, 33 bp, Homo sapien
gagatatcatttaggccaaactgcattgtgttt

SEQ ID NO: 249612 - DNA, 33 bp, Homo sapien
gagatatcatttaggctaaactgcattgtgttt

SEQ ID NO: 249613 - DNA, 33 bp, Homo sapien
acactaaggagaaaacagatgatacaaataaat

SEQ ID NO: 249614 - DNA, 33 bp, Homo sapien
acactaaggagaaaacggatgatacaaataaat

SEQ ID NO: 249615 - DNA, 33 bp, Homo sapien
ctccggaactataagcaaataaatctgtattgt

SEQ ID NO: 249616 - DNA, 33 bp, Homo sapien
ctccggaactataagcgaataaatctgtattgt

SEQ ID NO: 249617 - DNA, 33 bp, Homo sapien
gtcagaataatgcaaacgtctgaaatccaaaat

SEQ ID NO: 249618 - DNA, 33 bp, Homo sapien
gtcagaataatgcaaatgtctgaaatccaaaat

SEQ ID NO: 249619 - DNA, 33 bp, Homo sapien
gatgggttaggcaggcaatttggtttggtacct

SEQ ID NO: 249620 - DNA, 33 bp, Homo sapien
gatgggttaggcaggcgatttggtttggtacct

SEQ ID NO: 249621 - DNA, 33 bp, Homo sapien
ttacaataacagaaaagctcttgtgagggaaaa

SEQ ID NO: 249622 - DNA, 33 bp, Homo sapien
ttacaataacagaaaatctcttgtgagggaaaa

SEQ ID NO: 249623 - DNA, 33 bp, Homo sapien
atcaaagaataccaatcaataaaagcaagagta

SEQ ID NO: 249624 - DNA, 33 bp, Homo sapien
atcaaagaataccaatgaataaaagcaagagta

SEQ ID NO: 249625 - DNA, 33 bp, Homo sapien
aaaaggaaatccatcaatagtgtctactaacat

SEQ ID NO: 249626 - DNA, 33 bp, Homo sapien
aaaaggaaatccatcagtagtgtctactaacat

SEQ ID NO: 249627 - DNA, 33 bp, Homo sapien
gattactacatttttacggttcaaagatcaaaa

SEQ ID NO: 249628 - DNA, 33 bp, Homo sapien
gattactacatttttagggttcaaagatcaaaa

SEQ ID NO: 249629 - DNA, 33 bp, Homo sapien
agcagtcctctttatacggtgccatcaagcacg

SEQ ID NO: 249630 - DNA, 33 bp, Homo sapien
agcagtcctctttatatggtgccatcaagcacg

SEQ ID NO: 249631 - DNA, 33 bp, Homo sapien
cattagtacgtgcttacattagacccagagatt

SEQ ID NO: 249632 - DNA, 33 bp, Homo sapien
cattagtacgtgcttatattagacccagagatt

SEQ ID NO: 249633 - DNA, 33 bp, Homo sapien
actggcatcttaagtaagtatctgggtccatac

SEQ ID NO: 249634 - DNA, 33 bp, Homo sapien
actggcatcttaagtatgtatctgggtccatac

SEQ ID NO: 249635 - DNA, 33 bp, Homo sapien
attcacctaattcaggaatcaaaagataggaag

SEQ ID NO: 249636 - DNA, 33 bp, Homo sapien
attcacctaattcagggatcaaaagataggaag

SEQ ID NO: 249637 - DNA, 33 bp, Homo sapien
tggtccagtcctcaaaagcatctaagccagagg

SEQ ID NO: 249638 - DNA, 33 bp, Homo sapien
tggtccagtcctcaaaggcatctaagccagagg

SEQ ID NO: 249639 - DNA, 33 bp, Homo sapien
gagattcaaatggaagaatattccgaaggaatt

SEQ ID NO: 249640 - DNA, 33 bp, Homo sapien
gagattcaaatggaaggatattccgaaggaatt

SEQ ID NO: 249641 - DNA, 33 bp, Homo sapien
gtgaggcttggtaacacggccgtatctgtgaac

SEQ ID NO: 249642 - DNA, 33 bp, Homo sapien
gtgaggcttggtaacatggccgtatctgtgaac

SEQ ID NO: 249643 - DNA, 33 bp, Homo sapien
aaggtgtgcctatcaacgttcatgcacaaagct

SEQ ID NO: 249644 - DNA, 33 bp, Homo sapien
aaggtgtgcctatcaatgttcatgcacaaagct

SEQ ID NO: 249645 - DNA, 33 bp, Homo sapien
cttcatactattcagacgccagagtgccccaac

SEQ ID NO: 249646 - DNA, 33 bp, Homo sapien
cttcatactattcagatgccagagtgccccaac

SEQ ID NO: 249647 - DNA, 33 bp, Homo sapien
gaaagccatttactcacctaagttttcagattt

SEQ ID NO: 249648 - DNA, 33 bp, Homo sapien
gaaagccatttactcatctaagttttcagattt

SEQ ID NO: 249649 - DNA, 33 bp, Homo sapien
aggtaggtttacgccaatggcacctaactggtt

SEQ ID NO: 249650 - DNA, 33 bp, Homo sapien
aggtaggtttacgccagtggcacctaactggtt

SEQ ID NO: 249651 - DNA, 33 bp, Homo sapien
tgcttaaggctgcaaacgcacggagcccagatg

SEQ ID NO: 249652 - DNA, 33 bp, Homo sapien
tgcttaaggctgcaaatgcacggagcccagatg

SEQ ID NO: 249653 - DNA, 33 bp, Homo sapien
ctaacagtttacaaaacgcgtccatgatgagga

SEQ ID NO: 249654 - DNA, 33 bp, Homo sapien
ctaacagtttacaaaatgcgtccatgatgagga

SEQ ID NO: 249655 - DNA, 33 bp, Homo sapien
tcccttatcccagggaagttgtaaagaccacac

SEQ ID NO: 249656 - DNA, 33 bp, Homo sapien
tcccttatcccagggaggttgtaaagaccacac

SEQ ID NO: 249657 - DNA, 33 bp, Homo sapien
gacaaactcaagcccaaaaaggtcatttctacc

SEQ ID NO: 249658 - DNA, 33 bp, Homo sapien
gacaaactcaagcccataaaggtcatttctacc

SEQ ID NO: 249659 - DNA, 33 bp, Homo sapien
agaacgtgggtatgccaatcatgcgtggttctg

SEQ ID NO: 249660 - DNA, 33 bp, Homo sapien
agaacgtgggtatgccgatcatgcgtggttctg

SEQ ID NO: 249661 - DNA, 33 bp, Homo sapien
gtctcccgttcccggcaccttcatcctaaacat

SEQ ID NO: 249662 - DNA, 33 bp, Homo sapien
gtctcccgttcccggctccttcatcctaaacat

SEQ ID NO: 249663 - DNA, 33 bp, Homo sapien
gctgccctgccttacgaattggaggggtgggga

SEQ ID NO: 249664 - DNA, 33 bp, Homo sapien
gctgccctgccttacgcattggaggggtgggga

SEQ ID NO: 249665 - DNA, 33 bp, Homo sapien
gtagggtagagcccaactgtgattccagaggct

SEQ ID NO: 249666 - DNA, 33 bp, Homo sapien
gtagggtagagcccaagtgtgattccagaggct

SEQ ID NO: 249667 - DNA, 33 bp, Homo sapien
tgcaccacagatggcaccttgcaggatggggac

SEQ ID NO: 249668 - DNA, 33 bp, Homo sapien
tgcaccacagatggcagcttgcaggatggggac

SEQ ID NO: 249669 - DNA, 33 bp, Homo sapien
ttccttgttaggttgacgtaatccaggtgaaag

SEQ ID NO: 249670 - DNA, 33 bp, Homo sapien
ttccttgttaggttgatgtaatccaggtgaaag

SEQ ID NO: 249671 - DNA, 33 bp, Homo sapien
ggtgcttggtacctacactggtagctgcagccg

SEQ ID NO: 249672 - DNA, 33 bp, Homo sapien
ggtgcttggtacctacgctggtagctgcagccg

SEQ ID NO: 249673 - DNA, 33 bp, Homo sapien
ctgccctgtctcaggaactattagtaatagttg

SEQ ID NO: 249674 - DNA, 33 bp, Homo sapien
ctgccctgtctcaggagctattagtaatagttg

SEQ ID NO: 249675 - DNA, 33 bp, Homo sapien
gacgctaatattgtaactgacttttggaggatg

SEQ ID NO: 249676 - DNA, 33 bp, Homo sapien
gacgctaatattgtaattgacttttggaggatg

SEQ ID NO: 249677 - DNA, 33 bp, Homo sapien
gggcttttgtccccaccagagcaactgtgccaa

SEQ ID NO: 249678 - DNA, 33 bp, Homo sapien
gggcttttgtccccacgagagcaactgtgccaa

SEQ ID NO: 249679 - DNA, 33 bp, Homo sapien
gaaattgactatggcacgagtatttacacacag

SEQ ID NO: 249680 - DNA, 33 bp, Homo sapien
gaaattgactatggcatgagtatttacacacag

SEQ ID NO: 249681 - DNA, 33 bp, Homo sapien
acgggggataccttcacgccactcacactgagg

SEQ ID NO: 249682 - DNA, 33 bp, Homo sapien
acgggggataccttcatgccactcacactgagg

SEQ ID NO: 249683 - DNA, 33 bp, Homo sapien
ccaggtgcagaatgaaacagagcggccgttctt

SEQ ID NO: 249684 - DNA, 33 bp, Homo sapien
ccaggtgcagaatgaaccagagcggccgttctt

SEQ ID NO: 249685 - DNA, 33 bp, Homo sapien
cagctgcaaaagagaccaacctggagagctcta

SEQ ID NO: 249686 - DNA, 33 bp, Homo sapien
cagctgcaaaagagacgaacctggagagctcta

SEQ ID NO: 249687 - DNA, 33 bp, Homo sapien
gtactggtggccttaacggctttccatttttaa

SEQ ID NO: 249688 - DNA, 33 bp, Homo sapien
gtactggtggccttaatggctttccatttttaa

SEQ ID NO: 249689 - DNA, 33 bp, Homo sapien
taatcttaaaagctcaataagctctggctgttt

SEQ ID NO: 249690 - DNA, 33 bp, Homo sapien
taatcttaaaagctcattaagctctggctgttt

SEQ ID NO: 249691 - DNA, 33 bp, Homo sapien
tgcatgttatggtcacacttatttacatgacac

SEQ ID NO: 249692 - DNA, 33 bp, Homo sapien
tgcatgttatggtcacgcttatttacatgacac

SEQ ID NO: 249693 - DNA, 33 bp, Homo sapien
aacaggtgacagattacacaggtgacgtcagag

SEQ ID NO: 249694 - DNA, 33 bp, Homo sapien
aacaggtgacagattagacaggtgacgtcagag

SEQ ID NO: 249695 - DNA, 33 bp, Homo sapien
ctctacctgctgcaaccctgtcataagcaagat

SEQ ID NO: 249696 - DNA, 33 bp, Homo sapien
ctctacctgctgcaactctgtcataagcaagat

SEQ ID NO: 249697 - DNA, 33 bp, Homo sapien
aaggtttaaggaactcactcgtattgcctgtgg

SEQ ID NO: 249698 - DNA, 33 bp, Homo sapien
aaggtttaaggaactcgctcgtattgcctgtgg

SEQ ID NO: 249699 - DNA, 33 bp, Homo sapien
caactggacaaaatgcaaaatttggatgtggga

SEQ ID NO: 249700 - DNA, 33 bp, Homo sapien
caactggacaaaatgccaaatttggatgtggga

SEQ ID NO: 249701 - DNA, 33 bp, Homo sapien
cattttgctgtgtaaacgcgcttataatgggga

SEQ ID NO: 249702 - DNA, 33 bp, Homo sapien
cattttgctgtgtaaatgcgcttataatgggga

SEQ ID NO: 249703 - DNA, 33 bp, Homo sapien
agtctggtcttcaaggcaacaggggagccaccc

SEQ ID NO: 249704 - DNA, 33 bp, Homo sapien
agtctggtcttcaaggtaacaggggagccaccc

SEQ ID NO: 249705 - DNA, 33 bp, Homo sapien
gaccagcatatccacacacctgctacacccctg

SEQ ID NO: 249706 - DNA, 33 bp, Homo sapien
gaccagcatatccacatacctgctacacccctg

SEQ ID NO: 249707 - DNA, 33 bp, Homo sapien
cggatttctatgctgacgagtgtgcagtttgag

SEQ ID NO: 249708 - DNA, 33 bp, Homo sapien
cggatttctatgctgatgagtgtgcagtttgag

SEQ ID NO: 249709 - DNA, 33 bp, Homo sapien
tagtgggcttcagatacaagatgaaacaatagc

SEQ ID NO: 249710 - DNA, 33 bp, Homo sapien
tagtgggcttcagatataagatgaaacaatagc

SEQ ID NO: 249711 - DNA, 33 bp, Homo sapien
tgtctgctgtagcacaagaaggaaaaatgatgt

SEQ ID NO: 249712 - DNA, 33 bp, Homo sapien
tgtctgctgtagcacacgaaggaaaaatgatgt

SEQ ID NO: 249713 - DNA, 33 bp, Homo sapien
tatcatgggggatcaaataatagacggggaggt

SEQ ID NO: 249714 - DNA, 33 bp, Homo sapien
tatcatgggggatcaagtaatagacggggaggt

SEQ ID NO: 249715 - DNA, 33 bp, Homo sapien
actgcacaaagagatccgaggagaactgtggag

SEQ ID NO: 249716 - DNA, 33 bp, Homo sapien
actgcacaaagagatctgaggagaactgtggag

SEQ ID NO: 249717 - DNA, 33 bp, Homo sapien
cctctggtagctagacagaaaccattctaacct

SEQ ID NO: 249718 - DNA, 33 bp, Homo sapien
cctctggtagctagacggaaaccattctaacct

SEQ ID NO: 249719 - DNA, 33 bp, Homo sapien
cgtgcacacacatgtacacaggtgctcacatgc

SEQ ID NO: 249720 - DNA, 33 bp, Homo sapien
cgtgcacacacatgtagacaggtgctcacatgc

SEQ ID NO: 249721 - DNA, 33 bp, Homo sapien
gcataggacagtgccacgacaaaggagtgttca

SEQ ID NO: 249722 - DNA, 33 bp, Homo sapien
gcataggacagtgccatgacaaaggagtgttca

SEQ ID NO: 249723 - DNA, 33 bp, Homo sapien
gcccagcaagccaccaaaagcacccttcaatag

SEQ ID NO: 249724 - DNA, 33 bp, Homo sapien
gcccagcaagccaccagaagcacccttcaatag

SEQ ID NO: 249725 - DNA, 33 bp, Homo sapien
aaggcaaaataaaagtaacagttggcaggtgca

SEQ ID NO: 249726 - DNA, 33 bp, Homo sapien
aaggcaaaataaaagtcacagttggcaggtgca

SEQ ID NO: 249727 - DNA, 33 bp, Homo sapien
tgtaaaatgaaccaaacgtagcctctaccacct

SEQ ID NO: 249728 - DNA, 33 bp, Homo sapien
tgtaaaatgaaccaaatgtagcctctaccacct

SEQ ID NO: 249729 - DNA, 33 bp, Homo sapien
tggctcaccattgaaaaaagggggctgctacct

SEQ ID NO: 249730 - DNA, 33 bp, Homo sapien
tggctcaccattgaaagaagggggctgctacct

SEQ ID NO: 249731 - DNA, 33 bp, Homo sapien
tcggttgagccaaaaactcctttaaatagcgag

SEQ ID NO: 249732 - DNA, 33 bp, Homo sapien
tcggttgagccaaaaagtcctttaaatagcgag

SEQ ID NO: 249733 - DNA, 33 bp, Homo sapien
ggaataaatgacgcaacagaattatatcttaag

SEQ ID NO: 249734 - DNA, 33 bp, Homo sapien
ggaataaatgacgcaatagaattatatcttaag

SEQ ID NO: 249735 - DNA, 33 bp, Homo sapien
ccgttttcctccaaaaatggtaagttgtgctct

SEQ ID NO: 249736 - DNA, 33 bp, Homo sapien
ccgttttcctccaaaagtggtaagttgtgctct

SEQ ID NO: 249737 - DNA, 33 bp, Homo sapien
taagtttgatacccagaagactgaccgttgctg

SEQ ID NO: 249738 - DNA, 33 bp, Homo sapien
taagtttgatacccaggagactgaccgttgctg

SEQ ID NO: 249739 - DNA, 33 bp, Homo sapien
tcctgaccccagttaggccgggaatgatctggc

SEQ ID NO: 249740 - DNA, 33 bp, Homo sapien
tcctgaccccagttagtccgggaatgatctggc

SEQ ID NO: 249741 - DNA, 33 bp, Homo sapien
ctagcttcttgaagccaatggctcgccgctttg

SEQ ID NO: 249742 - DNA, 33 bp, Homo sapien
ctagcttcttgaagccgatggctcgccgctttg

SEQ ID NO: 249743 - DNA, 33 bp, Homo sapien
ttgcaactgaaatgtaaacagagatcagagagc

SEQ ID NO: 249744 - DNA, 33 bp, Homo sapien
ttgcaactgaaatgtagacagagatcagagagc

SEQ ID NO: 249745 - DNA, 33 bp, Homo sapien
gaatataggctagtacaggagtatgcagaacgg

SEQ ID NO: 249746 - DNA, 33 bp, Homo sapien
gaatataggctagtaccggagtatgcagaacgg

SEQ ID NO: 249747 - DNA, 33 bp, Homo sapien
agacttatcattaaaaagcaatcagcttgcatt

SEQ ID NO: 249748 - DNA, 33 bp, Homo sapien
agacttatcattaaaaggcaatcagcttgcatt

SEQ ID NO: 249749 - DNA, 33 bp, Homo sapien
gagatctataagcaaggagttggacccgagatg

SEQ ID NO: 249750 - DNA, 33 bp, Homo sapien
gagatctataagcaagtagttggacccgagatg

SEQ ID NO: 249751 - DNA, 33 bp, Homo sapien
tgcatcaccccagcagaattacatgctacgttg

SEQ ID NO: 249752 - DNA, 33 bp, Homo sapien
tgcatcaccccagcaggattacatgctacgttg

SEQ ID NO: 249753 - DNA, 33 bp, Homo sapien
tcccttttgtcttgcacctacttagcctattta

SEQ ID NO: 249754 - DNA, 33 bp, Homo sapien
tcccttttgtcttgcatctacttagcctattta

SEQ ID NO: 249755 - DNA, 33 bp, Homo sapien
gagatgtggctttacaacaattctccatgaaga

SEQ ID NO: 249756 - DNA, 33 bp, Homo sapien
gagatgtggctttacagcaattctccatgaaga

SEQ ID NO: 249757 - DNA, 33 bp, Homo sapien
tatctgcaagctattacaatgtaacaaattgcc

SEQ ID NO: 249758 - DNA, 33 bp, Homo sapien
tatctgcaagctattataatgtaacaaattgcc

SEQ ID NO: 249759 - DNA, 33 bp, Homo sapien
acactggtcagcctgaaatttatcccccctcac

SEQ ID NO: 249760 - DNA, 33 bp, Homo sapien
acactggtcagcctgagatttatcccccctcac

SEQ ID NO: 249761 - DNA, 33 bp, Homo sapien
aaggactaatactgaaaactaacattaaatgag

SEQ ID NO: 249762 - DNA, 33 bp, Homo sapien
aaggactaatactgaagactaacattaaatgag

SEQ ID NO: 249763 - DNA, 33 bp, Homo sapien
ggctgttgtacttggcactttgatgttttaatt

SEQ ID NO: 249764 - DNA, 33 bp, Homo sapien
ggctgttgtacttggcgctttgatgttttaatt

SEQ ID NO: 249765 - DNA, 33 bp, Homo sapien
ttgacaaggctatgaaaatgcccatgagatcat

SEQ ID NO: 249766 - DNA, 33 bp, Homo sapien
ttgacaaggctatgaagatgcccatgagatcat

SEQ ID NO: 249767 - DNA, 33 bp, Homo sapien
acaccaagacacagagaccaagcacctgccctt

SEQ ID NO: 249768 - DNA, 33 bp, Homo sapien
acaccaagacacagaggccaagcacctgccctt

SEQ ID NO: 249769 - DNA, 33 bp, Homo sapien
aagttgaggtgcatatcaaatgagaagagggga

SEQ ID NO: 249770 - DNA, 33 bp, Homo sapien
aagttgaggtgcatattaaatgagaagagggga

SEQ ID NO: 249771 - DNA, 33 bp, Homo sapien
gctcccaggaactctccaggctaaaactgctcg

SEQ ID NO: 249772 - DNA, 33 bp, Homo sapien
gctcccaggaactctctaggctaaaactgctcg

SEQ ID NO: 249773 - DNA, 33 bp, Homo sapien
ccatcatctttatcaccaccactaccacaatca

SEQ ID NO: 249774 - DNA, 33 bp, Homo sapien
ccatcatctttatcacgaccactaccacaatca

SEQ ID NO: 249775 - DNA, 33 bp, Homo sapien
caggaagccaggaaaacttagtgggtaagaagt

SEQ ID NO: 249776 - DNA, 33 bp, Homo sapien
caggaagccaggaaaatttagtgggtaagaagt

SEQ ID NO: 249777 - DNA, 33 bp, Homo sapien
ctttaaaatgtcaccaaaacatacccagagtgg

SEQ ID NO: 249778 - DNA, 33 bp, Homo sapien
ctttaaaatgtcaccagaacatacccagagtgg

SEQ ID NO: 249779 - DNA, 33 bp, Homo sapien
aatatggctggaggaacggaagtcaatttcaac

SEQ ID NO: 249780 - DNA, 33 bp, Homo sapien
aatatggctggaggaatggaagtcaatttcaac

SEQ ID NO: 249781 - DNA, 33 bp, Homo sapien
aacatcacttctcctcccacgtaagtgccacca

SEQ ID NO: 249782 - DNA, 33 bp, Homo sapien
aacatcacttctcctcgcacgtaagtgccacca

SEQ ID NO: 249783 - DNA, 33 bp, Homo sapien
ttggtgcttggtgacacgagggctcccgtgaag

SEQ ID NO: 249784 - DNA, 33 bp, Homo sapien
ttggtgcttggtgacatgagggctcccgtgaag

SEQ ID NO: 249785 - DNA, 33 bp, Homo sapien
ggaggaggaagaccaaaagtcttggaccgaata

SEQ ID NO: 249786 - DNA, 33 bp, Homo sapien
ggaggaggaagaccaatagtcttggaccgaata

SEQ ID NO: 249787 - DNA, 33 bp, Homo sapien
gggggctcttgggtctcactggaattggcccca

SEQ ID NO: 249788 - DNA, 33 bp, Homo sapien
gggggctcttgggtcttactggaattggcccca

SEQ ID NO: 249789 - DNA, 33 bp, Homo sapien
tttgtctggtgctcaccgcttagccagactaca

SEQ ID NO: 249790 - DNA, 33 bp, Homo sapien
tttgtctggtgctcactgcttagccagactaca

SEQ ID NO: 249791 - DNA, 33 bp, Homo sapien
tgtggaagacagcataaacctccaggcaccctc

SEQ ID NO: 249792 - DNA, 33 bp, Homo sapien
tgtggaagacagcatagacctccaggcaccctc

SEQ ID NO: 249793 - DNA, 33 bp, Homo sapien
ttgtgtatatcctcacaacatccccaggcccat

SEQ ID NO: 249794 - DNA, 33 bp, Homo sapien
ttgtgtatatcctcacgacatccccaggcccat

SEQ ID NO: 249795 - DNA, 33 bp, Homo sapien
ctgagcatttactatacgtctagcaccatgtca

SEQ ID NO: 249796 - DNA, 33 bp, Homo sapien
ctgagcatttactatatgtctagcaccatgtca

SEQ ID NO: 249797 - DNA, 33 bp, Homo sapien
ctgcaggatatgaggcccgttttcttccctttc

SEQ ID NO: 249798 - DNA, 33 bp, Homo sapien
ctgcaggatatgaggctcgttttcttccctttc

SEQ ID NO: 249799 - DNA, 33 bp, Homo sapien
gataatataatgtcaaatgatgatgaggactct

SEQ ID NO: 249800 - DNA, 33 bp, Homo sapien
gataatataatgtcaagtgatgatgaggactct

SEQ ID NO: 249801 - DNA, 33 bp, Homo sapien
ggaaccagagtcccacaactgtgagtgaaggag

SEQ ID NO: 249802 - DNA, 33 bp, Homo sapien
ggaaccagagtcccacgactgtgagtgaaggag

SEQ ID NO: 249803 - DNA, 33 bp, Homo sapien
cacacagccactaagaagatggtttgatgactc

SEQ ID NO: 249804 - DNA, 33 bp, Homo sapien
cacacagccactaagaggatggtttgatgactc

SEQ ID NO: 249805 - DNA, 33 bp, Homo sapien
taattctcaacaggataactttgtgccccggga

SEQ ID NO: 249806 - DNA, 33 bp, Homo sapien
taattctcaacaggatgactttgtgccccggga

SEQ ID NO: 249807 - DNA, 33 bp, Homo sapien
ggccactgagagggtaaaataggagataatgca

SEQ ID NO: 249808 - DNA, 33 bp, Homo sapien
ggccactgagagggtagaataggagataatgca

SEQ ID NO: 249809 - DNA, 33 bp, Homo sapien
caggccacagaggaagcagatacttgctagatc

SEQ ID NO: 249810 - DNA, 33 bp, Homo sapien
caggccacagaggaaggagatacttgctagatc

SEQ ID NO: 249811 - DNA, 33 bp, Homo sapien
tacacacacttttaaccatcacaccaagagtct

SEQ ID NO: 249812 - DNA, 33 bp, Homo sapien
tacacacacttttaactatcacaccaagagtct

SEQ ID NO: 249813 - DNA, 33 bp, Homo sapien
tcctgggttttcctgaccagctctatcccccct

SEQ ID NO: 249814 - DNA, 33 bp, Homo sapien
tcctgggttttcctgatcagctctatcccccct

SEQ ID NO: 249815 - DNA, 33 bp, Homo sapien
cagggaatgagaaaacaacttatgggttagggg

SEQ ID NO: 249816 - DNA, 33 bp, Homo sapien
cagggaatgagaaaacgacttatgggttagggg

SEQ ID NO: 249817 - DNA, 33 bp, Homo sapien
tgtggagtagaataagacagacatagggtccag

SEQ ID NO: 249818 - DNA, 33 bp, Homo sapien
tgtggagtagaataagccagacatagggtccag

SEQ ID NO: 249819 - DNA, 33 bp, Homo sapien
cagaggctatgtggacaagaacttggtaatgac

SEQ ID NO: 249820 - DNA, 33 bp, Homo sapien
cagaggctatgtggacgagaacttggtaatgac

SEQ ID NO: 249821 - DNA, 33 bp, Homo sapien
cattcccagcctttaacaaccatcattccactc

SEQ ID NO: 249822 - DNA, 33 bp, Homo sapien
cattcccagcctttaataaccatcattccactc

SEQ ID NO: 249823 - DNA, 33 bp, Homo sapien
aagccccctttttcaaatgcagtcctatgccct

SEQ ID NO: 249824 - DNA, 33 bp, Homo sapien
aagccccctttttcaagtgcagtcctatgccct

SEQ ID NO: 249825 - DNA, 33 bp, Homo sapien
tttcccaggactgtcccaacacattgccacaaa

SEQ ID NO: 249826 - DNA, 33 bp, Homo sapien
tttcccaggactgtcctaacacattgccacaaa

SEQ ID NO: 249827 - DNA, 33 bp, Homo sapien
ggagaatccctttgagcatctggtaacagtgaa

SEQ ID NO: 249828 - DNA, 33 bp, Homo sapien
ggagaatccctttgagtatctggtaacagtgaa

SEQ ID NO: 249829 - DNA, 33 bp, Homo sapien
gggccaactattactccacgatgtgtgttttga

SEQ ID NO: 249830 - DNA, 33 bp, Homo sapien
gggccaactattactctacgatgtgtgttttga

SEQ ID NO: 249831 - DNA, 33 bp, Homo sapien
tactacacaggcataaaaaagaatgaaatcacc

SEQ ID NO: 249832 - DNA, 33 bp, Homo sapien
tactacacaggcataacaaagaatgaaatcacc

SEQ ID NO: 249833 - DNA, 33 bp, Homo sapien
cttctctgcctatgaacactttgtccggtgcct

SEQ ID NO: 249834 - DNA, 33 bp, Homo sapien
cttctctgcctatgaagactttgtccggtgcct

SEQ ID NO: 249835 - DNA, 33 bp, Homo sapien
gtcacaaagtttcagacgctgactaagcccctt

SEQ ID NO: 249836 - DNA, 33 bp, Homo sapien
gtcacaaagtttcagatgctgactaagcccctt

SEQ ID NO: 249837 - DNA, 33 bp, Homo sapien
acccgagagtagacccgggacatatctggggct

SEQ ID NO: 249838 - DNA, 33 bp, Homo sapien
acccgagagtagaccctggacatatctggggct

SEQ ID NO: 249839 - DNA, 33 bp, Homo sapien
attggttaaatgagaacaagaccttccctgcgc

SEQ ID NO: 249840 - DNA, 33 bp, Homo sapien
attggttaaatgagaataagaccttccctgcgc

SEQ ID NO: 249841 - DNA, 33 bp, Homo sapien
tgggggtccacaatacactatgatcacgttgta

SEQ ID NO: 249842 - DNA, 33 bp, Homo sapien
tgggggtccacaatacgctatgatcacgttgta

SEQ ID NO: 249843 - DNA, 33 bp, Homo sapien
tcgtttatttcacccaacatgcattaaacattt

SEQ ID NO: 249844 - DNA, 33 bp, Homo sapien
tcgtttatttcacccatcatgcattaaacattt

SEQ ID NO: 249845 - DNA, 33 bp, Homo sapien
acacatcatgtccttcaaattagccactttgag

SEQ ID NO: 249846 - DNA, 33 bp, Homo sapien
acacatcatgtccttccaattagccactttgag

SEQ ID NO: 249847 - DNA, 33 bp, Homo sapien
ttctcctttctaaaaacgtgctcccgggcgctc

SEQ ID NO: 249848 - DNA, 33 bp, Homo sapien
ttctcctttctaaaaatgtgctcccgggcgctc

SEQ ID NO: 249849 - DNA, 33 bp, Homo sapien
tattgttcctgtaaaaattatatccccagcaca

SEQ ID NO: 249850 - DNA, 33 bp, Homo sapien
tattgttcctgtaaaacttatatccccagcaca

SEQ ID NO: 249851 - DNA, 33 bp, Homo sapien
tgtcagatgtatccacaagactgagctctacct

SEQ ID NO: 249852 - DNA, 33 bp, Homo sapien
tgtcagatgtatccaccagactgagctctacct

SEQ ID NO: 249853 - DNA, 33 bp, Homo sapien
actgtggttcatttctaacattagtgcctaagg

SEQ ID NO: 249854 - DNA, 33 bp, Homo sapien
actgtggttcatttctgacattagtgcctaagg

SEQ ID NO: 249855 - DNA, 33 bp, Homo sapien
aagttcagaacccaaaactcatagccctcttgg

SEQ ID NO: 249856 - DNA, 33 bp, Homo sapien
aagttcagaacccaaagctcatagccctcttgg

SEQ ID NO: 249857 - DNA, 33 bp, Homo sapien
ctggaagaatacttggccagactgtgataactt

SEQ ID NO: 249858 - DNA, 33 bp, Homo sapien
ctggaagaatacttggtcagactgtgataactt

SEQ ID NO: 249859 - DNA, 33 bp, Homo sapien
gcttgctggagtcagaccagtactcaggccacc

SEQ ID NO: 249860 - DNA, 33 bp, Homo sapien
gcttgctggagtcagatcagtactcaggccacc

SEQ ID NO: 249861 - DNA, 33 bp, Homo sapien
tatgtacccatctaaaaattattacttgtaaca

SEQ ID NO: 249862 - DNA, 33 bp, Homo sapien
tatgtacccatctaaacattattacttgtaaca

SEQ ID NO: 249863 - DNA, 33 bp, Homo sapien
gttgtctccaggccacacgactaggattcaaat

SEQ ID NO: 249864 - DNA, 33 bp, Homo sapien
gttgtctccaggccacgcgactaggattcaaat

SEQ ID NO: 249865 - DNA, 33 bp, Homo sapien
ccaaggagtacaaatacgtaatggatctaccac

SEQ ID NO: 249866 - DNA, 33 bp, Homo sapien
ccaaggagtacaaatatgtaatggatctaccac

SEQ ID NO: 249867 - DNA, 33 bp, Homo sapien
tccttggttttatgaacaatctgtatcctggaa

SEQ ID NO: 249868 - DNA, 33 bp, Homo sapien
tccttggttttatgaataatctgtatcctggaa

SEQ ID NO: 249869 - DNA, 33 bp, Homo sapien
ctgagtcagtgacttacgtgtacagggcacctg

SEQ ID NO: 249870 - DNA, 33 bp, Homo sapien
ctgagtcagtgacttatgtgtacagggcacctg

SEQ ID NO: 249871 - DNA, 33 bp, Homo sapien
tggaaatggggcagataagtggacaaattggca

SEQ ID NO: 249872 - DNA, 33 bp, Homo sapien
tggaaatggggcagatgagtggacaaattggca

SEQ ID NO: 249873 - DNA, 33 bp, Homo sapien
tcctgttgcttgggaacctcgtgctcagaaatg

SEQ ID NO: 249874 - DNA, 33 bp, Homo sapien
tcctgttgcttgggaatctcgtgctcagaaatg

SEQ ID NO: 249875 - DNA, 33 bp, Homo sapien
attttaattatttgtacgatgcttatcacaatc

SEQ ID NO: 249876 - DNA, 33 bp, Homo sapien
attttaattatttgtatgatgcttatcacaatc

SEQ ID NO: 249877 - DNA, 33 bp, Homo sapien
catcaagacaaaaggaggcccagtaagagtttt

SEQ ID NO: 249878 - DNA, 33 bp, Homo sapien
catcaagacaaaaggatgcccagtaagagtttt

SEQ ID NO: 249879 - DNA, 33 bp, Homo sapien
cccacctcaagacatacagtaagtaaggagcag

SEQ ID NO: 249880 - DNA, 33 bp, Homo sapien
cccacctcaagacatatagtaagtaaggagcag

SEQ ID NO: 249881 - DNA, 33 bp, Homo sapien
tgagtcaacaaaaagaactcagcgttttgatat

SEQ ID NO: 249882 - DNA, 33 bp, Homo sapien
tgagtcaacaaaaagatctcagcgttttgatat

SEQ ID NO: 249883 - DNA, 33 bp, Homo sapien
cagctaatttaatgtccaggagctgcctgggaa

SEQ ID NO: 249884 - DNA, 33 bp, Homo sapien
cagctaatttaatgtctaggagctgcctgggaa

SEQ ID NO: 249885 - DNA, 33 bp, Homo sapien
ggccatgagaaaagaaaacagacagggacaaca

SEQ ID NO: 249886 - DNA, 33 bp, Homo sapien
ggccatgagaaaagaagacagacagggacaaca

SEQ ID NO: 249887 - DNA, 33 bp, Homo sapien
ccatgtaatcctattacgaatatttccattagc

SEQ ID NO: 249888 - DNA, 33 bp, Homo sapien
ccatgtaatcctattatgaatatttccattagc

SEQ ID NO: 249889 - DNA, 33 bp, Homo sapien
gccattattaagtaacccaggaatggaaaccaa

SEQ ID NO: 249890 - DNA, 33 bp, Homo sapien
gccattattaagtaactcaggaatggaaaccaa

SEQ ID NO: 249891 - DNA, 33 bp, Homo sapien
ggttgtcacaacttgacgcttagtgctactggc

SEQ ID NO: 249892 - DNA, 33 bp, Homo sapien
ggttgtcacaacttgaggcttagtgctactggc

SEQ ID NO: 249893 - DNA, 33 bp, Homo sapien
ccatgtgattggcaagacctacctcaaacactg

SEQ ID NO: 249894 - DNA, 33 bp, Homo sapien
ccatgtgattggcaaggcctacctcaaacactg

SEQ ID NO: 249895 - DNA, 33 bp, Homo sapien
cattgggctaaaaaccaagatgtcaatagggct

SEQ ID NO: 249896 - DNA, 33 bp, Homo sapien
cattgggctaaaaaccgagatgtcaatagggct

SEQ ID NO: 249897 - DNA, 33 bp, Homo sapien
ggaggaaacactctcacgagcccacatggccca

SEQ ID NO: 249898 - DNA, 33 bp, Homo sapien
ggaggaaacactctcatgagcccacatggccca

SEQ ID NO: 249899 - DNA, 33 bp, Homo sapien
tgtcctgagattaacaaatgagttaaatggctg

SEQ ID NO: 249900 - DNA, 33 bp, Homo sapien
tgtcctgagattaacagatgagttaaatggctg

SEQ ID NO: 249901 - DNA, 33 bp, Homo sapien
acatggacaaagcttaacagggtgacagtttca

SEQ ID NO: 249902 - DNA, 33 bp, Homo sapien
acatggacaaagcttagcagggtgacagtttca

SEQ ID NO: 249903 - DNA, 33 bp, Homo sapien
ttctcctggaaagggacagattggtgctgcctg

SEQ ID NO: 249904 - DNA, 33 bp, Homo sapien
ttctcctggaaagggatagattggtgctgcctg

SEQ ID NO: 249905 - DNA, 33 bp, Homo sapien
aacagcctttgttcaacggactgtcctaaacag

SEQ ID NO: 249906 - DNA, 33 bp, Homo sapien
aacagcctttgttcaatggactgtcctaaacag

SEQ ID NO: 249907 - DNA, 33 bp, Homo sapien
gctgaccagtgacctacaatatgggatggaatg

SEQ ID NO: 249908 - DNA, 33 bp, Homo sapien
gctgaccagtgacctataatatgggatggaatg

SEQ ID NO: 249909 - DNA, 33 bp, Homo sapien
gaggcagaagcaatgacagaggaaagaaagaca

SEQ ID NO: 249910 - DNA, 33 bp, Homo sapien
gaggcagaagcaatgatagaggaaagaaagaca

SEQ ID NO: 249911 - DNA, 33 bp, Homo sapien
tttttggagataaacaatgcaacgatcatcgaa

SEQ ID NO: 249912 - DNA, 33 bp, Homo sapien
tttttggagataaacagtgcaacgatcatcgaa

SEQ ID NO: 249913 - DNA, 33 bp, Homo sapien
tgataaatgtataagcagataaatcaaataatt

SEQ ID NO: 249914 - DNA, 33 bp, Homo sapien
tgataaatgtataagctgataaatcaaataatt

SEQ ID NO: 249915 - DNA, 33 bp, Homo sapien
tgcaggatatcaaaacaaaaagtgcaggttcac

SEQ ID NO: 249916 - DNA, 33 bp, Homo sapien
tgcaggatatcaaaaccaaaagtgcaggttcac

SEQ ID NO: 249917 - DNA, 33 bp, Homo sapien
tgatcgctcagattcaagatcccagacttttaa

SEQ ID NO: 249918 - DNA, 33 bp, Homo sapien
tgatcgctcagattcacgatcccagacttttaa

SEQ ID NO: 249919 - DNA, 33 bp, Homo sapien
ccactcctagaaaagccatcttggactcaggct

SEQ ID NO: 249920 - DNA, 33 bp, Homo sapien
ccactcctagaaaagcgatcttggactcaggct

SEQ ID NO: 249921 - DNA, 33 bp, Homo sapien
ggtacaaggatgaacacgtcattgaacaattac

SEQ ID NO: 249922 - DNA, 33 bp, Homo sapien
ggtacaaggatgaacatgtcattgaacaattac

SEQ ID NO: 249923 - DNA, 33 bp, Homo sapien
agagtcagggttcaaagataggcgtgtctgacc

SEQ ID NO: 249924 - DNA, 33 bp, Homo sapien
agagtcagggttcaaatataggcgtgtctgacc

SEQ ID NO: 249925 - DNA, 33 bp, Homo sapien
tgtaagtctttgctgacggtttttcaggctctt

SEQ ID NO: 249926 - DNA, 33 bp, Homo sapien
tgtaagtctttgctgatggtttttcaggctctt

SEQ ID NO: 249927 - DNA, 33 bp, Homo sapien
tgacgtgtctatcacacacttctcacttcttcc

SEQ ID NO: 249928 - DNA, 33 bp, Homo sapien
tgacgtgtctatcacatacttctcacttcttcc

SEQ ID NO: 249929 - DNA, 33 bp, Homo sapien
aggggatacggtgaacaagataaccatgtttcc

SEQ ID NO: 249930 - DNA, 33 bp, Homo sapien
aggggatacggtgaacgagataaccatgtttcc

SEQ ID NO: 249931 - DNA, 33 bp, Homo sapien
ttccttatctgtaaacgatggatacaaactcat

SEQ ID NO: 249932 - DNA, 33 bp, Homo sapien
ttccttatctgtaaactatggatacaaactcat

SEQ ID NO: 249933 - DNA, 33 bp, Homo sapien
aagaaaatgagtttcacagctctaaatcaggac

SEQ ID NO: 249934 - DNA, 33 bp, Homo sapien
aagaaaatgagtttcatagctctaaatcaggac

SEQ ID NO: 249935 - DNA, 33 bp, Homo sapien
ggcagtggggtgacacaaagtggttatacgtat

SEQ ID NO: 249936 - DNA, 33 bp, Homo sapien
ggcagtggggtgacaccaagtggttatacgtat

SEQ ID NO: 249937 - DNA, 33 bp, Homo sapien
ggagggctacaggagtaacaggcttaagcactg

SEQ ID NO: 249938 - DNA, 33 bp, Homo sapien
ggagggctacaggagtgacaggcttaagcactg

SEQ ID NO: 249939 - DNA, 33 bp, Homo sapien
actactgccatatggcccacaaaacctacaata

SEQ ID NO: 249940 - DNA, 33 bp, Homo sapien
actactgccatatggcgcacaaaacctacaata

SEQ ID NO: 249941 - DNA, 33 bp, Homo sapien
ttttcaagtattgacaacatttcatgaagctca

SEQ ID NO: 249942 - DNA, 33 bp, Homo sapien
ttttcaagtattgacagcatttcatgaagctca

SEQ ID NO: 249943 - DNA, 33 bp, Homo sapien
tgacgagtggatgggacgtagcatggttatgtt

SEQ ID NO: 249944 - DNA, 33 bp, Homo sapien
tgacgagtggatgggatgtagcatggttatgtt

SEQ ID NO: 249945 - DNA, 33 bp, Homo sapien
aataggagttccagaaatgattgttataagagg

SEQ ID NO: 249946 - DNA, 33 bp, Homo sapien
aataggagttccagaagtgattgttataagagg

SEQ ID NO: 249947 - DNA, 33 bp, Homo sapien
cagggtgacaacttagacagggccagtagctga

SEQ ID NO: 249948 - DNA, 33 bp, Homo sapien
cagggtgacaacttaggcagggccagtagctga

SEQ ID NO: 249949 - DNA, 33 bp, Homo sapien
gcatttcctctcaagacacttgctaattccaaa

SEQ ID NO: 249950 - DNA, 33 bp, Homo sapien
gcatttcctctcaagatacttgctaattccaaa

SEQ ID NO: 249951 - DNA, 33 bp, Homo sapien
ggattttgatgatggtcacatttctgcaagttt

SEQ ID NO: 249952 - DNA, 33 bp, Homo sapien
ggattttgatgatggttacatttctgcaagttt

SEQ ID NO: 249953 - DNA, 33 bp, Homo sapien
cacaacaaaaatttgcaaaggatgaaagataaa

SEQ ID NO: 249954 - DNA, 33 bp, Homo sapien
cacaacaaaaatttgcgaaggatgaaagataaa

SEQ ID NO: 249955 - DNA, 33 bp, Homo sapien
gggagtcactgatgaaaatggtctcaaattctc

SEQ ID NO: 249956 - DNA, 33 bp, Homo sapien
gggagtcactgatgaagatggtctcaaattctc

SEQ ID NO: 249957 - DNA, 33 bp, Homo sapien
gatgctggaaatcccactgaattgaagctttat

SEQ ID NO: 249958 - DNA, 33 bp, Homo sapien
gatgctggaaatcccattgaattgaagctttat

SEQ ID NO: 249959 - DNA, 33 bp, Homo sapien
actcagaggtgaataccagttaaattccataac

SEQ ID NO: 249960 - DNA, 33 bp, Homo sapien
actcagaggtgaatactagttaaattccataac

SEQ ID NO: 249961 - DNA, 33 bp, Homo sapien
agagatacaccagtggaacaggtctcagaaata

SEQ ID NO: 249962 - DNA, 33 bp, Homo sapien
agagatacaccagtgggacaggtctcagaaata

SEQ ID NO: 249963 - DNA, 33 bp, Homo sapien
gcagctctggcatcacccaaagactaattctgg

SEQ ID NO: 249964 - DNA, 33 bp, Homo sapien
gcagctctggcatcacgcaaagactaattctgg

SEQ ID NO: 249965 - DNA, 33 bp, Homo sapien
gtcatctgttggcctgaagtttggtagataagt

SEQ ID NO: 249966 - DNA, 33 bp, Homo sapien
gtcatctgttggcctgcagtttggtagataagt

SEQ ID NO: 249967 - DNA, 33 bp, Homo sapien
aaatatgcaagacggaacttccaaaagccattg

SEQ ID NO: 249968 - DNA, 33 bp, Homo sapien
aaatatgcaagacggagcttccaaaagccattg

SEQ ID NO: 249969 - DNA, 33 bp, Homo sapien
ctaagtgggcaatgtacgtgaaccagctgcctt

SEQ ID NO: 249970 - DNA, 33 bp, Homo sapien
ctaagtgggcaatgtatgtgaaccagctgcctt

SEQ ID NO: 249971 - DNA, 33 bp, Homo sapien
atgtaatagtaaactaagtgaagcgtgtcttga

SEQ ID NO: 249972 - DNA, 33 bp, Homo sapien
atgtaatagtaaactaggtgaagcgtgtcttga

SEQ ID NO: 249973 - DNA, 33 bp, Homo sapien
aatgtgttcgagtgataacctcacagatggccc

SEQ ID NO: 249974 - DNA, 33 bp, Homo sapien
aatgtgttcgagtgatcacctcacagatggccc

SEQ ID NO: 249975 - DNA, 33 bp, Homo sapien
cttaaaacaatggaaacgcattctctcacagtt

SEQ ID NO: 249976 - DNA, 33 bp, Homo sapien
cttaaaacaatggaaatgcattctctcacagtt

SEQ ID NO: 249977 - DNA, 33 bp, Homo sapien
agcctctgctgaaagaacttggcaggtttcagg

SEQ ID NO: 249978 - DNA, 33 bp, Homo sapien
agcctctgctgaaagagcttggcaggtttcagg

SEQ ID NO: 249979 - DNA, 33 bp, Homo sapien
ctgagtagggccagccagatgatgaacggggat

SEQ ID NO: 249980 - DNA, 33 bp, Homo sapien
ctgagtagggccagccggatgatgaacggggat

SEQ ID NO: 249981 - DNA, 33 bp, Homo sapien
gtctaaaacctcagtagatgaatgagcagataa

SEQ ID NO: 249982 - DNA, 33 bp, Homo sapien
gtctaaaacctcagtatatgaatgagcagataa

SEQ ID NO: 249983 - DNA, 33 bp, Homo sapien
tcttatttagcaataaaacctctcttctaaaag

SEQ ID NO: 249984 - DNA, 33 bp, Homo sapien
tcttatttagcaataatacctctcttctaaaag

SEQ ID NO: 249985 - DNA, 33 bp, Homo sapien
accagataatctgacaataatcagtgtgttagt

SEQ ID NO: 249986 - DNA, 33 bp, Homo sapien
accagataatctgacagtaatcagtgtgttagt

SEQ ID NO: 249987 - DNA, 33 bp, Homo sapien
tccatgtagatgctgcaaactttttcttctcat

SEQ ID NO: 249988 - DNA, 33 bp, Homo sapien
tccatgtagatgctgcgaactttttcttctcat

SEQ ID NO: 249989 - DNA, 33 bp, Homo sapien
tttacacccatgtagaggtcatattgttccttg

SEQ ID NO: 249990 - DNA, 33 bp, Homo sapien
tttacacccatgtagatgtcatattgttccttg

SEQ ID NO: 249991 - DNA, 33 bp, Homo sapien
cactgaaaaacaattacgtcttctggaatgtgc

SEQ ID NO: 249992 - DNA, 33 bp, Homo sapien
cactgaaaaacaattatgtcttctggaatgtgc

SEQ ID NO: 249993 - DNA, 33 bp, Homo sapien
ttcattctctcttttaagcaaatgtcatggtta

SEQ ID NO: 249994 - DNA, 33 bp, Homo sapien
ttcattctctcttttaggcaaatgtcatggtta

SEQ ID NO: 249995 - DNA, 33 bp, Homo sapien
taggtgctcttcaccaatggatcatctttaccc

SEQ ID NO: 249996 - DNA, 33 bp, Homo sapien
taggtgctcttcaccagtggatcatctttaccc

SEQ ID NO: 249997 - DNA, 33 bp, Homo sapien
ctgtgtctagcactgagcccttttgctctggag

SEQ ID NO: 249998 - DNA, 33 bp, Homo sapien
ctgtgtctagcactgatcccttttgctctggag

SEQ ID NO: 249999 - DNA, 33 bp, Homo sapien
ctctggagtaactaaacagaaaaatgctgtaat

SEQ ID NO: 250000 - DNA, 33 bp, Homo sapien
ctctggagtaactaaatagaaaaatgctgtaat

SEQ ID NO: 250001 - DNA, 33 bp, Homo sapien
ggtggtggagacagcacatacaaagagtgagaa

SEQ ID NO: 250002 - DNA, 33 bp, Homo sapien
ggtggtggagacagcatatacaaagagtgagaa

SEQ ID NO: 250003 - DNA, 33 bp, Homo sapien
ttacttgggaattaaccgggaagatgctgctaa

SEQ ID NO: 250004 - DNA, 33 bp, Homo sapien
ttacttgggaattaactgggaagatgctgctaa

SEQ ID NO: 250005 - DNA, 33 bp, Homo sapien
ttgtttgagttatggcaccaaagaatcccttga

SEQ ID NO: 250006 - DNA, 33 bp, Homo sapien
ttgtttgagttatggcgccaaagaatcccttga

SEQ ID NO: 250007 - DNA, 33 bp, Homo sapien
atatttggtctgtaaccgatttatgggtttggg

SEQ ID NO: 250008 - DNA, 33 bp, Homo sapien
atatttggtctgtaactgatttatgggtttggg

SEQ ID NO: 250009 - DNA, 33 bp, Homo sapien
tctctgggggcccatcacttactgggctgatgg

SEQ ID NO: 250010 - DNA, 33 bp, Homo sapien
tctctgggggcccatcgcttactgggctgatgg

SEQ ID NO: 250011 - DNA, 33 bp, Homo sapien
aaagccaggcatgtaggaagggtgaaatgaatg

SEQ ID NO: 250012 - DNA, 33 bp, Homo sapien
aaagccaggcatgtagtaagggtgaaatgaatg

SEQ ID NO: 250013 - DNA, 33 bp, Homo sapien
gggggaagctagggaactgggagtaactgctta

SEQ ID NO: 250014 - DNA, 33 bp, Homo sapien
gggggaagctagggaattgggagtaactgctta

SEQ ID NO: 250015 - DNA, 33 bp, Homo sapien
gcatataaagcatctcacatagggcctggcagt

SEQ ID NO: 250016 - DNA, 33 bp, Homo sapien
gcatataaagcatctcgcatagggcctggcagt

SEQ ID NO: 250017 - DNA, 33 bp, Homo sapien
aaaagaatctgtcctacgcttcttgcctagctt

SEQ ID NO: 250018 - DNA, 33 bp, Homo sapien
aaaagaatctgtcctatgcttcttgcctagctt

SEQ ID NO: 250019 - DNA, 33 bp, Homo sapien
tggatacacaaataatgacattgcattacagtt

SEQ ID NO: 250020 - DNA, 33 bp, Homo sapien
tggatacacaaataattacattgcattacagtt

SEQ ID NO: 250021 - DNA, 33 bp, Homo sapien
gagaagacacagaacagagaagaaggccttgtg

SEQ ID NO: 250022 - DNA, 33 bp, Homo sapien
gagaagacacagaacatagaagaaggccttgtg

SEQ ID NO: 250023 - DNA, 33 bp, Homo sapien
ctcctcagccgcaccacccttccttgtcactca

SEQ ID NO: 250024 - DNA, 33 bp, Homo sapien
ctcctcagccgcaccatccttccttgtcactca

SEQ ID NO: 250025 - DNA, 33 bp, Homo sapien
gcttcgttatggcccaatctatcaggaaccaat

SEQ ID NO: 250026 - DNA, 33 bp, Homo sapien
gcttcgttatggcccagtctatcaggaaccaat

SEQ ID NO: 250027 - DNA, 33 bp, Homo sapien
cttagaacctgccagacaagttgaggatgaaga

SEQ ID NO: 250028 - DNA, 33 bp, Homo sapien
cttagaacctgccagagaagttgaggatgaaga

SEQ ID NO: 250029 - DNA, 33 bp, Homo sapien
aatgagtagtagcaccagaacctgaatctagcc

SEQ ID NO: 250030 - DNA, 33 bp, Homo sapien
aatgagtagtagcaccggaacctgaatctagcc

SEQ ID NO: 250031 - DNA, 33 bp, Homo sapien
tacagtatccactacactaggtattagctacta

SEQ ID NO: 250032 - DNA, 33 bp, Homo sapien
tacagtatccactacattaggtattagctacta

SEQ ID NO: 250033 - DNA, 33 bp, Homo sapien
aaatggtaggccgctcacattccctgaatcatg

SEQ ID NO: 250034 - DNA, 33 bp, Homo sapien
aaatggtaggccgctcgcattccctgaatcatg

SEQ ID NO: 250035 - DNA, 33 bp, Homo sapien
acaagagccttaacttaaacacacctgcgaagt

SEQ ID NO: 250036 - DNA, 33 bp, Homo sapien
acaagagccttaacttgaacacacctgcgaagt

SEQ ID NO: 250037 - DNA, 33 bp, Homo sapien
tcttctaaagtttgggaatgcaaagaggatcat

SEQ ID NO: 250038 - DNA, 33 bp, Homo sapien
tcttctaaagtttgggtatgcaaagaggatcat

SEQ ID NO: 250039 - DNA, 33 bp, Homo sapien
agagattgctcagcaaaactaaattttagacaa

SEQ ID NO: 250040 - DNA, 33 bp, Homo sapien
agagattgctcagcaacactaaattttagacaa

SEQ ID NO: 250041 - DNA, 33 bp, Homo sapien
cacctgggggtagagagagaactgtggcacctc

SEQ ID NO: 250042 - DNA, 33 bp, Homo sapien
cacctgggggtagagatagaactgtggcacctc

SEQ ID NO: 250043 - DNA, 33 bp, Homo sapien
aagaactgttttaccacaagcggaatgatacat

SEQ ID NO: 250044 - DNA, 33 bp, Homo sapien
aagaactgttttaccagaagcggaatgatacat

SEQ ID NO: 250045 - DNA, 33 bp, Homo sapien
aaagtaattgcactacaatgttatgacagctac

SEQ ID NO: 250046 - DNA, 33 bp, Homo sapien
aaagtaattgcactaccatgttatgacagctac

SEQ ID NO: 250047 - DNA, 33 bp, Homo sapien
ctgagctctcagtgaaaacacagatgctgtata

SEQ ID NO: 250048 - DNA, 33 bp, Homo sapien
ctgagctctcagtgaagacacagatgctgtata

SEQ ID NO: 250049 - DNA, 33 bp, Homo sapien
cataccacttattcacacttctatctctgaaaa

SEQ ID NO: 250050 - DNA, 33 bp, Homo sapien
cataccacttattcactcttctatctctgaaaa

SEQ ID NO: 250051 - DNA, 33 bp, Homo sapien
gggctgaaaacctaaacggtgtaatgaagagtt

SEQ ID NO: 250052 - DNA, 33 bp, Homo sapien
gggctgaaaacctaaatggtgtaatgaagagtt

SEQ ID NO: 250053 - DNA, 33 bp, Homo sapien
gaggttttccagaacacgaactatgctatggca

SEQ ID NO: 250054 - DNA, 33 bp, Homo sapien
gaggttttccagaacatgaactatgctatggca

SEQ ID NO: 250055 - DNA, 33 bp, Homo sapien
aaagtgataatcttcccatgcgtccatgtgttc

SEQ ID NO: 250056 - DNA, 33 bp, Homo sapien
aaagtgataatcttccgatgcgtccatgtgttc

SEQ ID NO: 250057 - DNA, 33 bp, Homo sapien
gcctgaattaaagcccaataagagattctccat

SEQ ID NO: 250058 - DNA, 33 bp, Homo sapien
gcctgaattaaagcccgataagagattctccat

SEQ ID NO: 250059 - DNA, 33 bp, Homo sapien
gcaatagatgataaaaatctccatttcccttgt

SEQ ID NO: 250060 - DNA, 33 bp, Homo sapien
gcaatagatgataaaattctccatttcccttgt

SEQ ID NO: 250061 - DNA, 33 bp, Homo sapien
accatatctgcgcttacgaaaatttcactggag

SEQ ID NO: 250062 - DNA, 33 bp, Homo sapien
accatatctgcgcttatgaaaatttcactggag

SEQ ID NO: 250063 - DNA, 33 bp, Homo sapien
atgaagacagtgggaaatatgtgctgatgttct

SEQ ID NO: 250064 - DNA, 33 bp, Homo sapien
atgaagacagtgggaagtatgtgctgatgttct

SEQ ID NO: 250065 - DNA, 33 bp, Homo sapien
aaaggcacgtgagatactactggggacaggagg

SEQ ID NO: 250066 - DNA, 33 bp, Homo sapien
aaaggcacgtgagatattactggggacaggagg

SEQ ID NO: 250067 - DNA, 33 bp, Homo sapien
ctgatcaggatttataaaggaggcgttagttga

SEQ ID NO: 250068 - DNA, 33 bp, Homo sapien
ctgatcaggatttatacaggaggcgttagttga

SEQ ID NO: 250069 - DNA, 33 bp, Homo sapien
aataggtctaagagccagaacagaacagagaat

SEQ ID NO: 250070 - DNA, 33 bp, Homo sapien
aataggtctaagagccggaacagaacagagaat

SEQ ID NO: 250071 - DNA, 33 bp, Homo sapien
agagcaaaaccctgggaagtcctcccttcactt

SEQ ID NO: 250072 - DNA, 33 bp, Homo sapien
agagcaaaaccctgggtagtcctcccttcactt

SEQ ID NO: 250073 - DNA, 33 bp, Homo sapien
agacagttatcaacaaataatgctataaagcac

SEQ ID NO: 250074 - DNA, 33 bp, Homo sapien
agacagttatcaacaagtaatgctataaagcac

SEQ ID NO: 250075 - DNA, 33 bp, Homo sapien
aatagtaacaaagataacaggcccactgcttgc

SEQ ID NO: 250076 - DNA, 33 bp, Homo sapien
aatagtaacaaagatagcaggcccactgcttgc

SEQ ID NO: 250077 - DNA, 33 bp, Homo sapien
tctgtgtggatggagaaactgtgcatcttcaga

SEQ ID NO: 250078 - DNA, 33 bp, Homo sapien
tctgtgtggatggagagactgtgcatcttcaga

SEQ ID NO: 250079 - DNA, 33 bp, Homo sapien
tttgtagcttaaaacacgtaaaacacagacccc

SEQ ID NO: 250080 - DNA, 33 bp, Homo sapien
tttgtagcttaaaacatgtaaaacacagacccc

SEQ ID NO: 250081 - DNA, 33 bp, Homo sapien
atctgaagcatggccagtatggcggtggtgagt

SEQ ID NO: 250082 - DNA, 33 bp, Homo sapien
atctgaagcatggccattatggcggtggtgagt

SEQ ID NO: 250083 - DNA, 33 bp, Homo sapien
ggaactgtgctttggaaatgaggagtaaacact

SEQ ID NO: 250084 - DNA, 33 bp, Homo sapien
ggaactgtgctttggagatgaggagtaaacact

SEQ ID NO: 250085 - DNA, 33 bp, Homo sapien
aagggtaagtaaaccacgtggctaggcacaaga

SEQ ID NO: 250086 - DNA, 33 bp, Homo sapien
aagggtaagtaaaccatgtggctaggcacaaga

SEQ ID NO: 250087 - DNA, 33 bp, Homo sapien
agtggttttgctcatccgaaagctccttcttgt

SEQ ID NO: 250088 - DNA, 33 bp, Homo sapien
agtggttttgctcatctgaaagctccttcttgt

SEQ ID NO: 250089 - DNA, 33 bp, Homo sapien
cactggactcaccaaaacagactaaccagaaag

SEQ ID NO: 250090 - DNA, 33 bp, Homo sapien
cactggactcaccaaagcagactaaccagaaag

SEQ ID NO: 250091 - DNA, 33 bp, Homo sapien
atagaattgcttataggaggaattggtggaggg

SEQ ID NO: 250092 - DNA, 33 bp, Homo sapien
atagaattgcttatagtaggaattggtggaggg

SEQ ID NO: 250093 - DNA, 33 bp, Homo sapien
gtgagagaagtatgtcactttttaatctttgta

SEQ ID NO: 250094 - DNA, 33 bp, Homo sapien
gtgagagaagtatgtcgctttttaatctttgta

SEQ ID NO: 250095 - DNA, 33 bp, Homo sapien
gaaggtgacaccattgacaagttggatttcgtc

SEQ ID NO: 250096 - DNA, 33 bp, Homo sapien
gaaggtgacaccattggcaagttggatttcgtc

SEQ ID NO: 250097 - DNA, 33 bp, Homo sapien
catgcacttgctcacaaaggcctaactagtaag

SEQ ID NO: 250098 - DNA, 33 bp, Homo sapien
catgcacttgctcacagaggcctaactagtaag

SEQ ID NO: 250099 - DNA, 33 bp, Homo sapien
tgagcccttcctggcacgtttatcatcccctct

SEQ ID NO: 250100 - DNA, 33 bp, Homo sapien
tgagcccttcctggcatgtttatcatcccctct

SEQ ID NO: 250101 - DNA, 33 bp, Homo sapien
aaggaggccagcccaaagtttcttaattcccct

SEQ ID NO: 250102 - DNA, 33 bp, Homo sapien
aaggaggccagcccaaggtttcttaattcccct

SEQ ID NO: 250103 - DNA, 33 bp, Homo sapien
gaacatttgcataccaagatttgtttgagcacc

SEQ ID NO: 250104 - DNA, 33 bp, Homo sapien
gaacatttgcataccaggatttgtttgagcacc

SEQ ID NO: 250105 - DNA, 33 bp, Homo sapien
ggatcagggatcaagcagactggtattgaggct

SEQ ID NO: 250106 - DNA, 33 bp, Homo sapien
ggatcagggatcaagcggactggtattgaggct

SEQ ID NO: 250107 - DNA, 33 bp, Homo sapien
agaacttcttgttaaacgctaatctcccacaca

SEQ ID NO: 250108 - DNA, 33 bp, Homo sapien
agaacttcttgttaaatgctaatctcccacaca

SEQ ID NO: 250109 - DNA, 33 bp, Homo sapien
gaaatcaaggttggaaaatcaaatgaggaagtt

SEQ ID NO: 250110 - DNA, 33 bp, Homo sapien
gaaatcaaggttggaatatcaaatgaggaagtt

SEQ ID NO: 250111 - DNA, 33 bp, Homo sapien
tcctctagccacagaaagttttcagcaggatca

SEQ ID NO: 250112 - DNA, 33 bp, Homo sapien
tcctctagccacagaacgttttcagcaggatca

SEQ ID NO: 250113 - DNA, 33 bp, Homo sapien
atgctacatattttggccacagtgagggggcgg

SEQ ID NO: 250114 - DNA, 33 bp, Homo sapien
atgctacatattttgggcacagtgagggggcgg

SEQ ID NO: 250115 - DNA, 33 bp, Homo sapien
tatctacacacccagcagagtttagttgcattc

SEQ ID NO: 250116 - DNA, 33 bp, Homo sapien
tatctacacacccagcggagtttagttgcattc

SEQ ID NO: 250117 - DNA, 33 bp, Homo sapien
gctaatcataggttgaaacaagtgattatgaag

SEQ ID NO: 250118 - DNA, 33 bp, Homo sapien
gctaatcataggttgagacaagtgattatgaag

SEQ ID NO: 250119 - DNA, 33 bp, Homo sapien
tcaggcatacggaaaaacctgtagtgaggcaca

SEQ ID NO: 250120 - DNA, 33 bp, Homo sapien
tcaggcatacggaaaagcctgtagtgaggcaca

SEQ ID NO: 250121 - DNA, 33 bp, Homo sapien
gaggaaaatagaggaaaacttgctaagcatgag

SEQ ID NO: 250122 - DNA, 33 bp, Homo sapien
gaggaaaatagaggaagacttgctaagcatgag

SEQ ID NO: 250123 - DNA, 33 bp, Homo sapien
agtgtgaccaccatcccgatgggattcagaaat

SEQ ID NO: 250124 - DNA, 33 bp, Homo sapien
agtgtgaccaccatcctgatgggattcagaaat

SEQ ID NO: 250125 - DNA, 33 bp, Homo sapien
gaactcagtctgatgcagaacagaccccaaaag

SEQ ID NO: 250126 - DNA, 33 bp, Homo sapien
gaactcagtctgatgccgaacagaccccaaaag

SEQ ID NO: 250127 - DNA, 33 bp, Homo sapien
gctaaactaaatccatcagtcaatttcccttcc

SEQ ID NO: 250128 - DNA, 33 bp, Homo sapien
gctaaactaaatccatgagtcaatttcccttcc

SEQ ID NO: 250129 - DNA, 33 bp, Homo sapien
gctgagacttgaatgacaagaaagcatcagaca

SEQ ID NO: 250130 - DNA, 33 bp, Homo sapien
gctgagacttgaatgataagaaagcatcagaca

SEQ ID NO: 250131 - DNA, 33 bp, Homo sapien
tcttctattatcttgaccagaggtttttccttg

SEQ ID NO: 250132 - DNA, 33 bp, Homo sapien
tcttctattatcttgatcagaggtttttccttg

SEQ ID NO: 250133 - DNA, 33 bp, Homo sapien
gctctgtagtaaccacagaggaaaactagggct

SEQ ID NO: 250134 - DNA, 33 bp, Homo sapien
gctctgtagtaaccacggaggaaaactagggct

SEQ ID NO: 250135 - DNA, 33 bp, Homo sapien
actctttcggtttttaagtattggctcaaaata

SEQ ID NO: 250136 - DNA, 33 bp, Homo sapien
actctttcggtttttaggtattggctcaaaata

SEQ ID NO: 250137 - DNA, 33 bp, Homo sapien
ctgctctctttataacagagcacaggacacagt

SEQ ID NO: 250138 - DNA, 33 bp, Homo sapien
ctgctctctttataacggagcacaggacacagt

SEQ ID NO: 250139 - DNA, 33 bp, Homo sapien
aaattgagacctagaaatgtcaaataacttgcc

SEQ ID NO: 250140 - DNA, 33 bp, Homo sapien
aaattgagacctagaagtgtcaaataacttgcc

SEQ ID NO: 250141 - DNA, 33 bp, Homo sapien
tgcttgtcccaccggcgagagctcttctgtcag

SEQ ID NO: 250142 - DNA, 33 bp, Homo sapien
tgcttgtcccaccggctagagctcttctgtcag

SEQ ID NO: 250143 - DNA, 33 bp, Homo sapien
ttgagaactcctggtccaggataaagcaagttc

SEQ ID NO: 250144 - DNA, 33 bp, Homo sapien
ttgagaactcctggtctaggataaagcaagttc

SEQ ID NO: 250145 - DNA, 33 bp, Homo sapien
aggacaaaatcacttacagttgagaactcctgg

SEQ ID NO: 250146 - DNA, 33 bp, Homo sapien
aggacaaaatcacttatagttgagaactcctgg

SEQ ID NO: 250147 - DNA, 33 bp, Homo sapien
tgctggcactattagagcctgtctttatttaag

SEQ ID NO: 250148 - DNA, 33 bp, Homo sapien
tgctggcactattagatcctgtctttatttaag

SEQ ID NO: 250149 - DNA, 33 bp, Homo sapien
ttgggtatatacctataagcgggatttctaggt

SEQ ID NO: 250150 - DNA, 33 bp, Homo sapien
ttgggtatatacctatgagcgggatttctaggt

SEQ ID NO: 250151 - DNA, 33 bp, Homo sapien
gacaacagttatcctccatgtttcagagactca

SEQ ID NO: 250152 - DNA, 33 bp, Homo sapien
gacaacagttatcctctatgtttcagagactca

SEQ ID NO: 250153 - DNA, 33 bp, Homo sapien
accacacttcggtaaacaatatcttggataatt

SEQ ID NO: 250154 - DNA, 33 bp, Homo sapien
accacacttcggtaaataatatcttggataatt

SEQ ID NO: 250155 - DNA, 33 bp, Homo sapien
taagcaccaaccattacgtgcaaagcaccccaa

SEQ ID NO: 250156 - DNA, 33 bp, Homo sapien
taagcaccaaccattatgtgcaaagcaccccaa

SEQ ID NO: 250157 - DNA, 33 bp, Homo sapien
aattttatacgagtacacattgatgactttgct

SEQ ID NO: 250158 - DNA, 33 bp, Homo sapien
aattttatacgagtacgcattgatgactttgct

SEQ ID NO: 250159 - DNA, 33 bp, Homo sapien
tgaggcttggcaaggaaagatcatttggcacag

SEQ ID NO: 250160 - DNA, 33 bp, Homo sapien
tgaggcttggcaaggagagatcatttggcacag

SEQ ID NO: 250161 - DNA, 33 bp, Homo sapien
ggattcagaagatcaactatgtggaaggtgctg

SEQ ID NO: 250162 - DNA, 33 bp, Homo sapien
ggattcagaagatcaagtatgtggaaggtgctg

SEQ ID NO: 250163 - DNA, 33 bp, Homo sapien
tggactgtttattaaacgcagattccttgaccc

SEQ ID NO: 250164 - DNA, 33 bp, Homo sapien
tggactgtttattaaatgcagattccttgaccc

SEQ ID NO: 250165 - DNA, 33 bp, Homo sapien
tcatctattttctccaacttttcatttttctta

SEQ ID NO: 250166 - DNA, 33 bp, Homo sapien
tcatctattttctccatcttttcatttttctta

SEQ ID NO: 250167 - DNA, 33 bp, Homo sapien
atggcatacagatcaagtatcttaatccaatca

SEQ ID NO: 250168 - DNA, 33 bp, Homo sapien
atggcatacagatcaattatcttaatccaatca

SEQ ID NO: 250169 - DNA, 33 bp, Homo sapien
aatttaagatatatataacatttgacccatcaa

SEQ ID NO: 250170 - DNA, 33 bp, Homo sapien
aatttaagatatatatcacatttgacccatcaa

SEQ ID NO: 250171 - DNA, 33 bp, Homo sapien
cacctgtgacaactaaatatgtttctagatatc

SEQ ID NO: 250172 - DNA, 33 bp, Homo sapien
cacctgtgacaactaagtatgtttctagatatc

SEQ ID NO: 250173 - DNA, 33 bp, Homo sapien
ggattcttttgcacataaaatattcttgcattt

SEQ ID NO: 250174 - DNA, 33 bp, Homo sapien
ggattcttttgcacatgaaatattcttgcattt

SEQ ID NO: 250175 - DNA, 33 bp, Homo sapien
ttggcaggttgatgacacttcaccttctatggg

SEQ ID NO: 250176 - DNA, 33 bp, Homo sapien
ttggcaggttgatgactcttcaccttctatggg

SEQ ID NO: 250177 - DNA, 33 bp, Homo sapien
gaaaaacaaaatcaaacgagttaggtcactctc

SEQ ID NO: 250178 - DNA, 33 bp, Homo sapien
gaaaaacaaaatcaaatgagttaggtcactctc

SEQ ID NO: 250179 - DNA, 33 bp, Homo sapien
aagaattaaaactgggacaagaagtactcactc

SEQ ID NO: 250180 - DNA, 33 bp, Homo sapien
aagaattaaaactggggcaagaagtactcactc

SEQ ID NO: 250181 - DNA, 33 bp, Homo sapien
tcataactggactgaaaatttaacgtaaggctc

SEQ ID NO: 250182 - DNA, 33 bp, Homo sapien
tcataactggactgaagatttaacgtaaggctc

SEQ ID NO: 250183 - DNA, 33 bp, Homo sapien
ctgtgtgcttctctccagaaggcttgtaccttg

SEQ ID NO: 250184 - DNA, 33 bp, Homo sapien
ctgtgtgcttctctccggaaggcttgtaccttg

SEQ ID NO: 250185 - DNA, 33 bp, Homo sapien
caggtatgaggtaccacgctcggctggcagtgc

SEQ ID NO: 250186 - DNA, 33 bp, Homo sapien
caggtatgaggtaccatgctcggctggcagtgc

SEQ ID NO: 250187 - DNA, 33 bp, Homo sapien
agattgctttcagattgaactgtaaggaggcaa

SEQ ID NO: 250188 - DNA, 33 bp, Homo sapien
agattgctttcagatttaactgtaaggaggcaa

SEQ ID NO: 250189 - DNA, 33 bp, Homo sapien
tttcagaacgagacaacaataagtgagcagctt

SEQ ID NO: 250190 - DNA, 33 bp, Homo sapien
tttcagaacgagacaataataagtgagcagctt

SEQ ID NO: 250191 - DNA, 33 bp, Homo sapien
taccatcatctgaagcaatttgtggcagcatct

SEQ ID NO: 250192 - DNA, 33 bp, Homo sapien
taccatcatctgaagccatttgtggcagcatct

SEQ ID NO: 250193 - DNA, 33 bp, Homo sapien
aaggagcaggggagtaataaaccagcatgagat

SEQ ID NO: 250194 - DNA, 33 bp, Homo sapien
aaggagcaggggagtactaaaccagcatgagat

SEQ ID NO: 250195 - DNA, 33 bp, Homo sapien
gtgaaaggaagggaacaaaacagaagtgaagac

SEQ ID NO: 250196 - DNA, 33 bp, Homo sapien
gtgaaaggaagggaacgaaacagaagtgaagac

SEQ ID NO: 250197 - DNA, 33 bp, Homo sapien
ctcagggcttctgttgcattatagccctgtgtt

SEQ ID NO: 250198 - DNA, 33 bp, Homo sapien
ctcagggcttctgttgtattatagccctgtgtt

SEQ ID NO: 250199 - DNA, 33 bp, Homo sapien
agaactggatccacgcagagaaagggaggtgtt

SEQ ID NO: 250200 - DNA, 33 bp, Homo sapien
agaactggatccacgcggagaaagggaggtgtt

SEQ ID NO: 250201 - DNA, 33 bp, Homo sapien
ccaaacactcccatacacaaatatcttggacga

SEQ ID NO: 250202 - DNA, 33 bp, Homo sapien
ccaaacactcccatacgcaaatatcttggacga

SEQ ID NO: 250203 - DNA, 33 bp, Homo sapien
tgagataaagattcacacgctacttgttcataa

SEQ ID NO: 250204 - DNA, 33 bp, Homo sapien
tgagataaagattcacgcgctacttgttcataa

SEQ ID NO: 250205 - DNA, 33 bp, Homo sapien
agcctcccaaagtgccaagattatgggtgtgag

SEQ ID NO: 250206 - DNA, 33 bp, Homo sapien
agcctcccaaagtgccgagattatgggtgtgag

SEQ ID NO: 250207 - DNA, 33 bp, Homo sapien
aaaggtcacatgagaacgtcgttgggcgatgga

SEQ ID NO: 250208 - DNA, 33 bp, Homo sapien
aaaggtcacatgagaatgtcgttgggcgatgga

SEQ ID NO: 250209 - DNA, 33 bp, Homo sapien
ctttctacctccaaaacttacttgcttagaaaa

SEQ ID NO: 250210 - DNA, 33 bp, Homo sapien
ctttctacctccaaaatttacttgcttagaaaa

SEQ ID NO: 250211 - DNA, 33 bp, Homo sapien
agtctggcgcggacaccgtaacaatgcctaaga

SEQ ID NO: 250212 - DNA, 33 bp, Homo sapien
agtctggcgcggacactgtaacaatgcctaaga

SEQ ID NO: 250213 - DNA, 33 bp, Homo sapien
tcattgcttagcttagaatttgactgaagagac

SEQ ID NO: 250214 - DNA, 33 bp, Homo sapien
tcattgcttagcttaggatttgactgaagagac

SEQ ID NO: 250215 - DNA, 33 bp, Homo sapien
gaatagcagtaatacaactagacctactggagg

SEQ ID NO: 250216 - DNA, 33 bp, Homo sapien
gaatagcagtaatacagctagacctactggagg

SEQ ID NO: 250217 - DNA, 33 bp, Homo sapien
ttgtcgaaaaggtgaaaatgggctgatgctggt

SEQ ID NO: 250218 - DNA, 33 bp, Homo sapien
ttgtcgaaaaggtgaagatgggctgatgctggt

SEQ ID NO: 250219 - DNA, 33 bp, Homo sapien
aaggaagtagtgacaacactgagagaagcagac

SEQ ID NO: 250220 - DNA, 33 bp, Homo sapien
aaggaagtagtgacaagactgagagaagcagac

SEQ ID NO: 250221 - DNA, 33 bp, Homo sapien
gatgttaccctcttaaaagatcaaagccaactt

SEQ ID NO: 250222 - DNA, 33 bp, Homo sapien
gatgttaccctcttaagagatcaaagccaactt

SEQ ID NO: 250223 - DNA, 33 bp, Homo sapien
catgaatagaacaataatacttttctcctacat

SEQ ID NO: 250224 - DNA, 33 bp, Homo sapien
catgaatagaacaatactacttttctcctacat

SEQ ID NO: 250225 - DNA, 33 bp, Homo sapien
ataacacatgagcccaatatgaacttccttaca

SEQ ID NO: 250226 - DNA, 33 bp, Homo sapien
ataacacatgagcccagtatgaacttccttaca

SEQ ID NO: 250227 - DNA, 33 bp, Homo sapien
tcctagtctgttctaccggatactagtctttcc

SEQ ID NO: 250228 - DNA, 33 bp, Homo sapien
tcctagtctgttctactggatactagtctttcc

SEQ ID NO: 250229 - DNA, 33 bp, Homo sapien
acaaggcagagaaaagccctagaataggagtca

SEQ ID NO: 250230 - DNA, 33 bp, Homo sapien
acaaggcagagaaaagtcctagaataggagtca

SEQ ID NO: 250231 - DNA, 33 bp, Homo sapien
acagaatatataccaaatgacacaccaaagtat

SEQ ID NO: 250232 - DNA, 33 bp, Homo sapien
acagaatatataccaagtgacacaccaaagtat

SEQ ID NO: 250233 - DNA, 33 bp, Homo sapien
ttggcagggcagagtgccaaatagaagagagca

SEQ ID NO: 250234 - DNA, 33 bp, Homo sapien
ttggcagggcagagtgtcaaatagaagagagca

SEQ ID NO: 250235 - DNA, 33 bp, Homo sapien
actaaccaatcaataactgcaatgtttgcatgt

SEQ ID NO: 250236 - DNA, 33 bp, Homo sapien
actaaccaatcaataattgcaatgtttgcatgt

SEQ ID NO: 250237 - DNA, 33 bp, Homo sapien
aatgtctctccaaatcaaactcaacaattgctt

SEQ ID NO: 250238 - DNA, 33 bp, Homo sapien
aatgtctctccaaatcgaactcaacaattgctt

SEQ ID NO: 250239 - DNA, 33 bp, Homo sapien
agcattccatactgaaaaataagaaacacagta

SEQ ID NO: 250240 - DNA, 33 bp, Homo sapien
agcattccatactgaataataagaaacacagta

SEQ ID NO: 250241 - DNA, 33 bp, Homo sapien
tcatcttatgttgtggaagttcattgaaatgta

SEQ ID NO: 250242 - DNA, 33 bp, Homo sapien
tcatcttatgttgtgggagttcattgaaatgta

SEQ ID NO: 250243 - DNA, 33 bp, Homo sapien
tactatctctaaatacaaacacagatgtttaca

SEQ ID NO: 250244 - DNA, 33 bp, Homo sapien
tactatctctaaatacgaacacagatgtttaca

SEQ ID NO: 250245 - DNA, 33 bp, Homo sapien
gtttatatagggaagaaaaaactgttgaaacaa

SEQ ID NO: 250246 - DNA, 33 bp, Homo sapien
gtttatatagggaagagaaaactgttgaaacaa

SEQ ID NO: 250247 - DNA, 33 bp, Homo sapien
aaaattccaatatcacaactaccattttgtaaa

SEQ ID NO: 250248 - DNA, 33 bp, Homo sapien
aaaattccaatatcacgactaccattttgtaaa

SEQ ID NO: 250249 - DNA, 33 bp, Homo sapien
tatttgaatgtactgacgaagcagaacaaactc

SEQ ID NO: 250250 - DNA, 33 bp, Homo sapien
tatttgaatgtactgatgaagcagaacaaactc

SEQ ID NO: 250251 - DNA, 33 bp, Homo sapien
tgtttattttcagaatgacacttgcttatataa

SEQ ID NO: 250252 - DNA, 33 bp, Homo sapien
tgtttattttcagaattacacttgcttatataa

SEQ ID NO: 250253 - DNA, 33 bp, Homo sapien
tgacatcttggggccacgtagcacttatcctgt

SEQ ID NO: 250254 - DNA, 33 bp, Homo sapien
tgacatcttggggccatgtagcacttatcctgt

SEQ ID NO: 250255 - DNA, 33 bp, Homo sapien
gctatggagaaggatacggtaggaaagatggaa

SEQ ID NO: 250256 - DNA, 33 bp, Homo sapien
gctatggagaaggatatggtaggaaagatggaa

SEQ ID NO: 250257 - DNA, 33 bp, Homo sapien
tctttaccttttaacaagatgatccacattcat

SEQ ID NO: 250258 - DNA, 33 bp, Homo sapien
tctttaccttttaacaggatgatccacattcat

SEQ ID NO: 250259 - DNA, 33 bp, Homo sapien
atcttctgggtttgcaagccctgtctgagactg

SEQ ID NO: 250260 - DNA, 33 bp, Homo sapien
atcttctgggtttgcaggccctgtctgagactg

SEQ ID NO: 250261 - DNA, 33 bp, Homo sapien
cctgctggttgatagccgataccacaagtcatt

SEQ ID NO: 250262 - DNA, 33 bp, Homo sapien
cctgctggttgatagctgataccacaagtcatt

SEQ ID NO: 250263 - DNA, 33 bp, Homo sapien
caaggtaatgtgttgaaatggagggcccctaaa

SEQ ID NO: 250264 - DNA, 33 bp, Homo sapien
caaggtaatgtgttgagatggagggcccctaaa

SEQ ID NO: 250265 - DNA, 33 bp, Homo sapien
tccgtttgctagggtacacatggccgttgtcct

SEQ ID NO: 250266 - DNA, 33 bp, Homo sapien
tccgtttgctagggtatacatggccgttgtcct

SEQ ID NO: 250267 - DNA, 33 bp, Homo sapien
cacctttccaaatcacaactctatacatctctc

SEQ ID NO: 250268 - DNA, 33 bp, Homo sapien
cacctttccaaatcacgactctatacatctctc

SEQ ID NO: 250269 - DNA, 33 bp, Homo sapien
aaaagtccttacattcacttgactacaacatat

SEQ ID NO: 250270 - DNA, 33 bp, Homo sapien
aaaagtccttacattcgcttgactacaacatat

SEQ ID NO: 250271 - DNA, 33 bp, Homo sapien
caaaatgctagaagtacaaacactattatttgc

SEQ ID NO: 250272 - DNA, 33 bp, Homo sapien
caaaatgctagaagtataaacactattatttgc

SEQ ID NO: 250273 - DNA, 33 bp, Homo sapien
gggttttgtttggcaaaaggcttattcttgaga

SEQ ID NO: 250274 - DNA, 33 bp, Homo sapien
gggttttgtttggcaagaggcttattcttgaga

SEQ ID NO: 250275 - DNA, 33 bp, Homo sapien
gtgagaggtgctggaaataggccagcctataaa

SEQ ID NO: 250276 - DNA, 33 bp, Homo sapien
gtgagaggtgctggaagtaggccagcctataaa

SEQ ID NO: 250277 - DNA, 33 bp, Homo sapien
tcatggttctttatcacagcagtgtggtataaa

SEQ ID NO: 250278 - DNA, 33 bp, Homo sapien
tcatggttctttatcatagcagtgtggtataaa

SEQ ID NO: 250279 - DNA, 33 bp, Homo sapien
cttccaagctagctggcatttgatttcagatgc

SEQ ID NO: 250280 - DNA, 33 bp, Homo sapien
cttccaagctagctggtatttgatttcagatgc

SEQ ID NO: 250281 - DNA, 33 bp, Homo sapien
aaggagcagactgggacgcttgtgcttgttttg

SEQ ID NO: 250282 - DNA, 33 bp, Homo sapien
aaggagcagactgggatgcttgtgcttgttttg

SEQ ID NO: 250283 - DNA, 33 bp, Homo sapien
ggcagcaagagcagctcaaggaagacaggactg

SEQ ID NO: 250284 - DNA, 33 bp, Homo sapien
ggcagcaagagcagcttaaggaagacaggactg

SEQ ID NO: 250285 - DNA, 33 bp, Homo sapien
ccaattatcccaagaacgccttttataactggg

SEQ ID NO: 250286 - DNA, 33 bp, Homo sapien
ccaattatcccaagaatgccttttataactggg

SEQ ID NO: 250287 - DNA, 33 bp, Homo sapien
gtccggagtcctaacaagaaggcatagcaataa

SEQ ID NO: 250288 - DNA, 33 bp, Homo sapien
gtccggagtcctaacaggaaggcatagcaataa

SEQ ID NO: 250289 - DNA, 33 bp, Homo sapien
gtcattatttcttccaatgaacatttattacaa

SEQ ID NO: 250290 - DNA, 33 bp, Homo sapien
gtcattatttcttccagtgaacatttattacaa

SEQ ID NO: 250291 - DNA, 33 bp, Homo sapien
cttccaccaggctaccagatttttaaatgatct

SEQ ID NO: 250292 - DNA, 33 bp, Homo sapien
cttccaccaggctacccgatttttaaatgatct

SEQ ID NO: 250293 - DNA, 33 bp, Homo sapien
agatactatttaaagacgctgtattataaacca

SEQ ID NO: 250294 - DNA, 33 bp, Homo sapien
agatactatttaaagatgctgtattataaacca

SEQ ID NO: 250295 - DNA, 33 bp, Homo sapien
ttgctttctctataaaattcaccctttctgctc

SEQ ID NO: 250296 - DNA, 33 bp, Homo sapien
ttgctttctctataaatttcaccctttctgctc

SEQ ID NO: 250297 - DNA, 33 bp, Homo sapien
gcatagaacagcccccacatcaaataattatct

SEQ ID NO: 250298 - DNA, 33 bp, Homo sapien
gcatagaacagcccccgcatcaaataattatct

SEQ ID NO: 250299 - DNA, 33 bp, Homo sapien
tgacccatcctggaaaagtatcaaccagaacta

SEQ ID NO: 250300 - DNA, 33 bp, Homo sapien
tgacccatcctggaaaggtatcaaccagaacta

SEQ ID NO: 250301 - DNA, 33 bp, Homo sapien; identical to SEQ ID NO: 250299

SEQ ID NO: 250302 - DNA, 33 bp, Homo sapien; identical to SEQ ID NO: 250300

SEQ ID NO: 250303 - DNA, 33 bp, Homo sapien
atcccactaatctgagaaaagaaagtcagtctc

SEQ ID NO: 250304 - DNA, 33 bp, Homo sapien
atcccactaatctgaggaaagaaagtcagtctc

SEQ ID NO: 250305 - DNA, 33 bp, Homo sapien
ccacattcagccaaaaaatttaaaagcttggtg

SEQ ID NO: 250306 - DNA, 33 bp, Homo sapien
ccacattcagccaaaacatttaaaagcttggtg

SEQ ID NO: 250307 - DNA, 33 bp, Homo sapien
aacacttgacatcaaacagacttaagtcccaaa

SEQ ID NO: 250308 - DNA, 33 bp, Homo sapien
aacacttgacatcaaatagacttaagtcccaaa

SEQ ID NO: 250309 - DNA, 33 bp, Homo sapien
ggttttccatgcttggcaacagagtgaagagag

SEQ ID NO: 250310 - DNA, 33 bp, Homo sapien
ggttttccatgcttgggaacagagtgaagagag

SEQ ID NO: 250311 - DNA, 33 bp, Homo sapien
cttcagcttggcttgacgcgagaggacgtactt

SEQ ID NO: 250312 - DNA, 33 bp, Homo sapien
cttcagcttggcttgatgcgagaggacgtactt

SEQ ID NO: 250313 - DNA, 33 bp, Homo sapien
catgcacacaaatactaactgccatgttcaggg

SEQ ID NO: 250314 - DNA, 33 bp, Homo sapien
catgcacacaaatactcactgccatgttcaggg

SEQ ID NO: 250315 - DNA, 33 bp, Homo sapien
tcctttttcaatctaactctaagagaacctctc

SEQ ID NO: 250316 - DNA, 33 bp, Homo sapien
tcctttttcaatctaagtctaagagaacctctc

SEQ ID NO: 250317 - DNA, 33 bp, Homo sapien
tgcacaccccccactacacacacaagttctgtt

SEQ ID NO: 250318 - DNA, 33 bp, Homo sapien
tgcacaccccccactatacacacaagttctgtt

SEQ ID NO: 250319 - DNA, 33 bp, Homo sapien
ccaactgataaatctagccagaacttctccgct

SEQ ID NO: 250320 - DNA, 33 bp, Homo sapien
ccaactgataaatctatccagaacttctccgct

SEQ ID NO: 250321 - DNA, 33 bp, Homo sapien
cgaaccaaattcttaaactacccttcacctgta

SEQ ID NO: 250322 - DNA, 33 bp, Homo sapien
cgaaccaaattcttaatctacccttcacctgta

SEQ ID NO: 250323 - DNA, 33 bp, Homo sapien
gcaactactcacgtgcacttgagcagacccttc

SEQ ID NO: 250324 - DNA, 33 bp, Homo sapien
gcaactactcacgtgcgcttgagcagacccttc

SEQ ID NO: 250325 - DNA, 33 bp, Homo sapien
gttttaagaaacaaacacaggttctagaaccag

SEQ ID NO: 250326 - DNA, 33 bp, Homo sapien
gttttaagaaacaaacgcaggttctagaaccag

SEQ ID NO: 250327 - DNA, 33 bp, Homo sapien
aactcctgtaccatgaagatgaaagaaagggag

SEQ ID NO: 250328 - DNA, 33 bp, Homo sapien
aactcctgtaccatgaggatgaaagaaagggag

SEQ ID NO: 250329 - DNA, 33 bp, Homo sapien
aatggatatcacctgcagagaagcaaacttgat

SEQ ID NO: 250330 - DNA, 33 bp, Homo sapien
aatggatatcacctgcggagaagcaaacttgat

SEQ ID NO: 250331 - DNA, 33 bp, Homo sapien
gtgcaaatggggcatacacagataagattccat

SEQ ID NO: 250332 - DNA, 33 bp, Homo sapien
gtgcaaatggggcatatacagataagattccat

SEQ ID NO: 250333 - DNA, 33 bp, Homo sapien
taatagattgcttttacagacgaccagatggag

SEQ ID NO: 250334 - DNA, 33 bp, Homo sapien
taatagattgcttttatagacgaccagatggag

SEQ ID NO: 250335 - DNA, 33 bp, Homo sapien
ttctcccaattggcaaaagaccacctacagggg

SEQ ID NO: 250336 - DNA, 33 bp, Homo sapien
ttctcccaattggcaagagaccacctacagggg

SEQ ID NO: 250337 - DNA, 33 bp, Homo sapien
caaaatgttgatcataccacactaaactccctt

SEQ ID NO: 250338 - DNA, 33 bp, Homo sapien
caaaatgttgatcatagcacactaaactccctt

SEQ ID NO: 250339 - DNA, 33 bp, Homo sapien
acaaatttgaaatgtacgcatgtttagatgaat

SEQ ID NO: 250340 - DNA, 33 bp, Homo sapien
acaaatttgaaatgtatgcatgtttagatgaat

SEQ ID NO: 250341 - DNA, 33 bp, Homo sapien
tcccaaaatgttggaaagtttgtaaagaaaata

SEQ ID NO: 250342 - DNA, 33 bp, Homo sapien
tcccaaaatgttggaacgtttgtaaagaaaata

SEQ ID NO: 250343 - DNA, 33 bp, Homo sapien
gaaggatgtatgttcaagacgttggataagagc

SEQ ID NO: 250344 - DNA, 33 bp, Homo sapien
gaaggatgtatgttcatgacgttggataagagc

SEQ ID NO: 250345 - DNA, 33 bp, Homo sapien
tgatttagtagaaaagccttcatgctagcaaag

SEQ ID NO: 250346 - DNA, 33 bp, Homo sapien
tgatttagtagaaaaggcttcatgctagcaaag

SEQ ID NO: 250347 - DNA, 33 bp, Homo sapien
ggggtgggccatgacccaagagcatctattcca

SEQ ID NO: 250348 - DNA, 33 bp, Homo sapien
ggggtgggccatgaccgaagagcatctattcca

SEQ ID NO: 250349 - DNA, 33 bp, Homo sapien
cagagttagctagataccacgatgaccctgata

SEQ ID NO: 250350 - DNA, 33 bp, Homo sapien
cagagttagctagatatcacgatgaccctgata

SEQ ID NO: 250351 - DNA, 33 bp, Homo sapien
gagaagagtacccaacacatatgacacagaaga

SEQ ID NO: 250352 - DNA, 33 bp, Homo sapien
gagaagagtacccaacgcatatgacacagaaga

SEQ ID NO: 250353 - DNA, 33 bp, Homo sapien
ttagttatgaaatgagcatgttgcctaacttaa

SEQ ID NO: 250354 - DNA, 33 bp, Homo sapien
ttagttatgaaatgagtatgttgcctaacttaa

SEQ ID NO: 250355 - DNA, 33 bp, Homo sapien
tctttaattggaagcccggatgctggaaaattc

SEQ ID NO: 250356 - DNA, 33 bp, Homo sapien
tctttaattggaagcctggatgctggaaaattc

SEQ ID NO: 250357 - DNA, 33 bp, Homo sapien
cttcagtattaaggtacggctaatgtgagtcta

SEQ ID NO: 250358 - DNA, 33 bp, Homo sapien
cttcagtattaaggtatggctaatgtgagtcta

SEQ ID NO: 250359 - DNA, 33 bp, Homo sapien
aaacatgaaatggttaaataaccgagcgcagca

SEQ ID NO: 250360 - DNA, 33 bp, Homo sapien
aaacatgaaatggttacataaccgagcgcagca

SEQ ID NO: 250361 - DNA, 33 bp, Homo sapien
acagtgctttcttatcacttagaatttttgttt

SEQ ID NO: 250362 - DNA, 33 bp, Homo sapien
acagtgctttcttatcgcttagaatttttgttt

SEQ ID NO: 250363 - DNA, 33 bp, Homo sapien
atcaagtgttctgtcacgtttttgtttctcaaa

SEQ ID NO: 250364 - DNA, 33 bp, Homo sapien
atcaagtgttctgtcatgtttttgtttctcaaa

SEQ ID NO: 250365 - DNA, 33 bp, Homo sapien
cttggccaatggaaaacggagctcggagatgct

SEQ ID NO: 250366 - DNA, 33 bp, Homo sapien
cttggccaatggaaaatggagctcggagatgct

SEQ ID NO: 250367 - DNA, 33 bp, Homo sapien
ctgcttatatcacgcaggtaagagtggcagcac

SEQ ID NO: 250368 - DNA, 33 bp, Homo sapien
ctgcttatatcacgcatgtaagagtggcagcac

SEQ ID NO: 250369 - DNA, 33 bp, Homo sapien
agcctggtaaaatcaccgcacttctcagaacct

SEQ ID NO: 250370 - DNA, 33 bp, Homo sapien
agcctggtaaaatcactgcacttctcagaacct

SEQ ID NO: 250371 - DNA, 33 bp, Homo sapien
ggcaaagagagaataactgaaccgctaatgcgc

SEQ ID NO: 250372 - DNA, 33 bp, Homo sapien
ggcaaagagagaataattgaaccgctaatgcgc

SEQ ID NO: 250373 - DNA, 33 bp, Homo sapien
tgaaggagaataattacaccagatgtaactgag

SEQ ID NO: 250374 - DNA, 33 bp, Homo sapien
tgaaggagaataattataccagatgtaactgag

SEQ ID NO: 250375 - DNA, 33 bp, Homo sapien
aggtgaagctgtcctcacagggataacaagaat

SEQ ID NO: 250376 - DNA, 33 bp, Homo sapien
aggtgaagctgtcctcgcagggataacaagaat

SEQ ID NO: 250377 - DNA, 33 bp, Homo sapien
agatggttataagtgccatagagaaaagtgagc

SEQ ID NO: 250378 - DNA, 33 bp, Homo sapien
agatggttataagtgctatagagaaaagtgagc

SEQ ID NO: 250379 - DNA, 33 bp, Homo sapien
tggataaagagatgacccacatgatgttgaact

SEQ ID NO: 250380 - DNA, 33 bp, Homo sapien
tggataaagagatgacgcacatgatgttgaact

SEQ ID NO: 250381 - DNA, 33 bp, Homo sapien
gtgatcctgtaagtcaatactccttaataaact

SEQ ID NO: 250382 - DNA, 33 bp, Homo sapien
gtgatcctgtaagtcagtactccttaataaact

SEQ ID NO: 250383 - DNA, 33 bp, Homo sapien
gacagaataaaacaaacgaccagagagcaagat

SEQ ID NO: 250384 - DNA, 33 bp, Homo sapien
gacagaataaaacaaatgaccagagagcaagat

SEQ ID NO: 250385 - DNA, 33 bp, Homo sapien
aatgtatgttaccttacaaagacccattttata

SEQ ID NO: 250386 - DNA, 33 bp, Homo sapien
aatgtatgttaccttagaaagacccattttata

SEQ ID NO: 250387 - DNA, 33 bp, Homo sapien
aggccatttccccaaacatcagaccaggtaaag

SEQ ID NO: 250388 - DNA, 33 bp, Homo sapien
aggccatttccccaaatatcagaccaggtaaag

SEQ ID NO: 250389 - DNA, 33 bp, Homo sapien
tttagaaatttcaacaaagcagaaagtagacat

SEQ ID NO: 250390 - DNA, 33 bp, Homo sapien
tttagaaatttcaacagagcagaaagtagacat

SEQ ID NO: 250391 - DNA, 33 bp, Homo sapien
cctcagggcctatcacagtcccaaatatgtgac

SEQ ID NO: 250392 - DNA, 33 bp, Homo sapien
cctcagggcctatcacggtcccaaatatgtgac

SEQ ID NO: 250393 - DNA, 33 bp, Homo sapien
ccaaagtaagaagcagaaaatagtgacaaggtc

SEQ ID NO: 250394 - DNA, 33 bp, Homo sapien
ccaaagtaagaagcaggaaatagtgacaaggtc

SEQ ID NO: 250395 - DNA, 33 bp, Homo sapien
ttgcatcaggtgaggaataaaagagagagagag

SEQ ID NO: 250396 - DNA, 33 bp, Homo sapien
ttgcatcaggtgaggagtaaaagagagagagag

SEQ ID NO: 250397 - DNA, 33 bp, Homo sapien
caaacacttaagtccccggcctaaggtcacaca

SEQ ID NO: 250398 - DNA, 33 bp, Homo sapien
caaacacttaagtccctggcctaaggtcacaca

SEQ ID NO: 250399 - DNA, 33 bp, Homo sapien
gaactaagtggaattaggactgtcaagtgcttg

SEQ ID NO: 250400 - DNA, 33 bp, Homo sapien
gaactaagtggaattatgactgtcaagtgcttg

SEQ ID NO: 250401 - DNA, 33 bp, Homo sapien
tcctttcatttatgtacctcagaacctagcact

SEQ ID NO: 250402 - DNA, 33 bp, Homo sapien
tcctttcatttatgtatctcagaacctagcact

SEQ ID NO: 250403 - DNA, 33 bp, Homo sapien
catatgcctgtaaaccacgcacaggtggcagaa

SEQ ID NO: 250404 - DNA, 33 bp, Homo sapien
catatgcctgtaaacctcgcacaggtggcagaa

SEQ ID NO: 250405 - DNA, 33 bp, Homo sapien
atatgttgaaaactggaaaatggctttctcttc

SEQ ID NO: 250406 - DNA, 33 bp, Homo sapien
atatgttgaaaactgggaaatggctttctcttc

SEQ ID NO: 250407 - DNA, 33 bp, Homo sapien
gctcacatttatggaacgctaaccatgtgctca

SEQ ID NO: 250408 - DNA, 33 bp, Homo sapien
gctcacatttatggaatgctaaccatgtgctca

SEQ ID NO: 250409 - DNA, 33 bp, Homo sapien
ttctgattatctgggagagtgaagaactccaga

SEQ ID NO: 250410 - DNA, 33 bp, Homo sapien
ttctgattatctgggatagtgaagaactccaga

SEQ ID NO: 250411 - DNA, 33 bp, Homo sapien
ctgaaacaactctagaaccatctgcccttaaac

SEQ ID NO: 250412 - DNA, 33 bp, Homo sapien
ctgaaacaactctagagccatctgcccttaaac

SEQ ID NO: 250413 - DNA, 33 bp, Homo sapien
taccaaatgtctctcacataccaaacaatgggc

SEQ ID NO: 250414 - DNA, 33 bp, Homo sapien
taccaaatgtctctcatataccaaacaatgggc

SEQ ID NO: 250415 - DNA, 33 bp, Homo sapien
acaataactgaagctcaatttccttctaggtaa

SEQ ID NO: 250416 - DNA, 33 bp, Homo sapien
acaataactgaagctccatttccttctaggtaa

SEQ ID NO: 250417 - DNA, 33 bp, Homo sapien
tgaaatagctgattccagatgcatcgacaatcc

SEQ ID NO: 250418 - DNA, 33 bp, Homo sapien
tgaaatagctgattccggatgcatcgacaatcc

SEQ ID NO: 250419 - DNA, 33 bp, Homo sapien
aacccagtctcttaaccacgactcattcttcac

SEQ ID NO: 250420 - DNA, 33 bp, Homo sapien
aacccagtctcttaacgacgactcattcttcac

SEQ ID NO: 250421 - DNA, 33 bp, Homo sapien
tacaccgctagaaaagacagtgccaatttgagg

SEQ ID NO: 250422 - DNA, 33 bp, Homo sapien
tacaccgctagaaaaggcagtgccaatttgagg

SEQ ID NO: 250423 - DNA, 33 bp, Homo sapien
cctgcaagcctcaatccattaacttaggtggtg

SEQ ID NO: 250424 - DNA, 33 bp, Homo sapien
cctgcaagcctcaatctattaacttaggtggtg

SEQ ID NO: 250425 - DNA, 33 bp, Homo sapien
attcccaggtcccacccagatctactgaaccag

SEQ ID NO: 250426 - DNA, 33 bp, Homo sapien
attcccaggtcccaccgagatctactgaaccag

SEQ ID NO: 250427 - DNA, 33 bp, Homo sapien
tggcctcgcataagaactagctgctaaggtttc

SEQ ID NO: 250428 - DNA, 33 bp, Homo sapien
tggcctcgcataagaagtagctgctaaggtttc

SEQ ID NO: 250429 - DNA, 33 bp, Homo sapien
atggaagtgggttagactagtgtggcttagatt

SEQ ID NO: 250430 - DNA, 33 bp, Homo sapien
atggaagtgggttagattagtgtggcttagatt

SEQ ID NO: 250431 - DNA, 33 bp, Homo sapien
gtcatgtttcctgttacgggcagagaaatatta

SEQ ID NO: 250432 - DNA, 33 bp, Homo sapien
gtcatgtttcctgttatgggcagagaaatatta

SEQ ID NO: 250433 - DNA, 33 bp, Homo sapien
gcacagagagggtgagaaacttatccaaggtca

SEQ ID NO: 250434 - DNA, 33 bp, Homo sapien
gcacagagagggtgagcaacttatccaaggtca

SEQ ID NO: 250435 - DNA, 33 bp, Homo sapien
gtggtgccatagtttggatatttgaccacccaa

SEQ ID NO: 250436 - DNA, 33 bp, Homo sapien
gtggtgccatagtttgtatatttgaccacccaa

SEQ ID NO: 250437 - DNA, 33 bp, Homo sapien
tatggcaccacagttacctttgcttcttccaac

SEQ ID NO: 250438 - DNA, 33 bp, Homo sapien
tatggcaccacagttatctttgcttcttccaac

SEQ ID NO: 250439 - DNA, 33 bp, Homo sapien
acaaccttatttaaaactgcaacacacactgcc

SEQ ID NO: 250440 - DNA, 33 bp, Homo sapien
acaaccttatttaaaattgcaacacacactgcc

SEQ ID NO: 250441 - DNA, 33 bp, Homo sapien
tggcctggacagctgtaaaaagtggagaagaca

SEQ ID NO: 250442 - DNA, 33 bp, Homo sapien
tggcctggacagctgtgaaaagtggagaagaca

SEQ ID NO: 250443 - DNA, 33 bp, Homo sapien
atcacatagcaccaacaggtctcaacttccagc

SEQ ID NO: 250444 - DNA, 33 bp, Homo sapien
atcacatagcaccaacgggtctcaacttccagc

SEQ ID NO: 250445 - DNA, 33 bp, Homo sapien
ctgaaacatatcaataccagttacattattatt

SEQ ID NO: 250446 - DNA, 33 bp, Homo sapien
ctgaaacatatcaatatcagttacattattatt

SEQ ID NO: 250447 - DNA, 33 bp, Homo sapien
aggatacctgagctaaagtgtgtaccatgatga

SEQ ID NO: 250448 - DNA, 33 bp, Homo sapien
aggatacctgagctaaggtgtgtaccatgatga

SEQ ID NO: 250449 - DNA, 33 bp, Homo sapien
aattagctaagcccagaataccaagcaagtaag

SEQ ID NO: 250450 - DNA, 33 bp, Homo sapien
aattagctaagcccaggataccaagcaagtaag

SEQ ID NO: 250451 - DNA, 33 bp, Homo sapien
agtgacagctcctgccaaagagtaaacacagag

SEQ ID NO: 250452 - DNA, 33 bp, Homo sapien
agtgacagctcctgccgaagagtaaacacagag

SEQ ID NO: 250453 - DNA, 33 bp, Homo sapien
tgtctccttagtggagcaatggcattgtcagtc

SEQ ID NO: 250454 - DNA, 33 bp, Homo sapien
tgtctccttagtggagtaatggcattgtcagtc

SEQ ID NO: 250455 - DNA, 33 bp, Homo sapien
caaccccttgctaacacagaatagtggttaagg

SEQ ID NO: 250456 - DNA, 33 bp, Homo sapien
caaccccttgctaacatagaatagtggttaagg

SEQ ID NO: 250457 - DNA, 33 bp, Homo sapien
atggaatgagaggcagcatagtaaagtagttag

SEQ ID NO: 250458 - DNA, 33 bp, Homo sapien
atggaatgagaggcagtatagtaaagtagttag

SEQ ID NO: 250459 - DNA, 33 bp, Homo sapien
tatacaggctgttaacaatttgatccaaaagat

SEQ ID NO: 250460 - DNA, 33 bp, Homo sapien
tatacaggctgttaaccatttgatccaaaagat

SEQ ID NO: 250461 - DNA, 33 bp, Homo sapien
tggatgaaattagtgaaaaggaggatggtggga

SEQ ID NO: 250462 - DNA, 33 bp, Homo sapien
tggatgaaattagtgagaaggaggatggtggga

SEQ ID NO: 250463 - DNA, 33 bp, Homo sapien
ctgtgtgaatttacctaagataatggtctacag

SEQ ID NO: 250464 - DNA, 33 bp, Homo sapien
ctgtgtgaatttacctgagataatggtctacag

SEQ ID NO: 250465 - DNA, 33 bp, Homo sapien
atggtaattgactaggaaagctataatggagat

SEQ ID NO: 250466 - DNA, 33 bp, Homo sapien
atggtaattgactagggaagctataatggagat

SEQ ID NO: 250467 - DNA, 33 bp, Homo sapien
caagcacaacaatccaaagtgaggtttccttat

SEQ ID NO: 250468 - DNA, 33 bp, Homo sapien
caagcacaacaatccagagtgaggtttccttat

SEQ ID NO: 250469 - DNA, 33 bp, Homo sapien
ctctggtaagtaacaaagaggtcagtttctggc

SEQ ID NO: 250470 - DNA, 33 bp, Homo sapien
ctctggtaagtaacaaggaggtcagtttctggc

SEQ ID NO: 250471 - DNA, 33 bp, Homo sapien
ttcttaaacaagacacaaagaaactgggatagg

SEQ ID NO: 250472 - DNA, 33 bp, Homo sapien
ttcttaaacaagacacgaagaaactgggatagg

SEQ ID NO: 250473 - DNA, 33 bp, Homo sapien
ataaagagctcagaatcaaacccctcacacata

SEQ ID NO: 250474 - DNA, 33 bp, Homo sapien
ataaagagctcagaatgaaacccctcacacata

SEQ ID NO: 250475 - DNA, 33 bp, Homo sapien
atccttagcttgcaaacgcatcactctagtctc

SEQ ID NO: 250476 - DNA, 33 bp, Homo sapien
atccttagcttgcaaatgcatcactctagtctc

SEQ ID NO: 250477 - DNA, 33 bp, Homo sapien
atttggaaaatatctcagaaattgccaccgtag

SEQ ID NO: 250478 - DNA, 33 bp, Homo sapien
atttggaaaatatctccgaaattgccaccgtag

SEQ ID NO: 250479 - DNA, 33 bp, Homo sapien
cttcataagtacgtgaaatcatgaagtatttgt

SEQ ID NO: 250480 - DNA, 33 bp, Homo sapien
cttcataagtacgtgacatcatgaagtatttgt

SEQ ID NO: 250481 - DNA, 33 bp, Homo sapien
tcctaaaaaagcctcaacctttggcaggtaaga

SEQ ID NO: 250482 - DNA, 33 bp, Homo sapien
tcctaaaaaagcctcagcctttggcaggtaaga

SEQ ID NO: 250483 - DNA, 33 bp, Homo sapien
gaccctaccaatgtaaagctgagacactataat

SEQ ID NO: 250484 - DNA, 33 bp, Homo sapien
gaccctaccaatgtaaggctgagacactataat

SEQ ID NO: 250485 - DNA, 33 bp, Homo sapien
attcttggtctttccacgtctggtctggagtaa

SEQ ID NO: 250486 - DNA, 33 bp, Homo sapien
attcttggtctttccatgtctggtctggagtaa

SEQ ID NO: 250487 - DNA, 33 bp, Homo sapien
agtggttctatcttcacagagttgttacggtta

SEQ ID NO: 250488 - DNA, 33 bp, Homo sapien
agtggttctatcttcatagagttgttacggtta

SEQ ID NO: 250489 - DNA, 33 bp, Homo sapien
ctaggccctggggatacaataggagctaaaata

SEQ ID NO: 250490 - DNA, 33 bp, Homo sapien
ctaggccctggggatataataggagctaaaata

SEQ ID NO: 250491 - DNA, 33 bp, Homo sapien
ccattctcagtcatgagtcagaagaagagcagc

SEQ ID NO: 250492 - DNA, 33 bp, Homo sapien
ccattctcagtcatgattcagaagaagagcagc

SEQ ID NO: 250493 - DNA, 33 bp, Homo sapien
tgctgtggatagcaaactgatggtggcaggagg

SEQ ID NO: 250494 - DNA, 33 bp, Homo sapien
tgctgtggatagcaaattgatggtggcaggagg

SEQ ID NO: 250495 - DNA, 33 bp, Homo sapien
ggtagattctgtaagacgaatggctccagagat

SEQ ID NO: 250496 - DNA, 33 bp, Homo sapien
ggtagattctgtaagatgaatggctccagagat

SEQ ID NO: 250497 - DNA, 33 bp, Homo sapien
cttgtcaagtaagtaacgatacattcacatcat

SEQ ID NO: 250498 - DNA, 33 bp, Homo sapien
cttgtcaagtaagtaatgatacattcacatcat

SEQ ID NO: 250499 - DNA, 33 bp, Homo sapien
tttatccattcatataaccatcactgtcctggc

SEQ ID NO: 250500 - DNA, 33 bp, Homo sapien
tttatccattcatatatccatcactgtcctggc

SEQ ID NO: 250501 - DNA, 33 bp, Homo sapien
gtcatcagtgtatagaagctcttgaaagctatg

SEQ ID NO: 250502 - DNA, 33 bp, Homo sapien
gtcatcagtgtatagaggctcttgaaagctatg

SEQ ID NO: 250503 - DNA, 33 bp, Homo sapien
ttctcccttctcctcaaactttcactgcatgtc

SEQ ID NO: 250504 - DNA, 33 bp, Homo sapien
ttctcccttctcctcagactttcactgcatgtc

SEQ ID NO: 250505 - DNA, 33 bp, Homo sapien
gaaataaatcaagtgacgtgatagggagaaatt

SEQ ID NO: 250506 - DNA, 33 bp, Homo sapien
gaaataaatcaagtgatgtgatagggagaaatt

SEQ ID NO: 250507 - DNA, 33 bp, Homo sapien
aggaagcaagattttaaaactcccttcagtgta

SEQ ID NO: 250508 - DNA, 33 bp, Homo sapien
aggaagcaagattttagaactcccttcagtgta

SEQ ID NO: 250509 - DNA, 33 bp, Homo sapien
tcatgctttgtttcccactccaggttctgttct

SEQ ID NO: 250510 - DNA, 33 bp, Homo sapien
tcatgctttgtttccctctccaggttctgttct

SEQ ID NO: 250511 - DNA, 33 bp, Homo sapien
agaacaatgtgacaccagaaatgatcgacacat

SEQ ID NO: 250512 - DNA, 33 bp, Homo sapien
agaacaatgtgacaccggaaatgatcgacacat

SEQ ID NO: 250513 - DNA, 33 bp, Homo sapien
attgactgcaaagctacaataagcagaacaatg

SEQ ID NO: 250514 - DNA, 33 bp, Homo sapien
attgactgcaaagctataataagcagaacaatg

SEQ ID NO: 250515 - DNA, 33 bp, Homo sapien
atttctcacagttataaaagctgaaaagtccaa

SEQ ID NO: 250516 - DNA, 33 bp, Homo sapien
atttctcacagttatacaagctgaaaagtccaa

SEQ ID NO: 250517 - DNA, 33 bp, Homo sapien
tatatacccagtaatcagatatctcggtcaagt

SEQ ID NO: 250518 - DNA, 33 bp, Homo sapien
tatatacccagtaatcggatatctcggtcaagt

SEQ ID NO: 250519 - DNA, 33 bp, Homo sapien
cagcacttcaaaaagcgaatccattacgattaa

SEQ ID NO: 250520 - DNA, 33 bp, Homo sapien
cagcacttcaaaaagctaatccattacgattaa

SEQ ID NO: 250521 - DNA, 33 bp, Homo sapien
catcactccttttcaacgtagaactgaaagtcc

SEQ ID NO: 250522 - DNA, 33 bp, Homo sapien
catcactccttttcaatgtagaactgaaagtcc

SEQ ID NO: 250523 - DNA, 33 bp, Homo sapien
gtcattcgtagtttgacacgagtagcattggat

SEQ ID NO: 250524 - DNA, 33 bp, Homo sapien
gtcattcgtagtttgatacgagtagcattggat

SEQ ID NO: 250525 - DNA, 33 bp, Homo sapien
tcctcatctataaaccaaggacaaaagtggaat

SEQ ID NO: 250526 - DNA, 33 bp, Homo sapien
tcctcatctataaaccgaggacaaaagtggaat

SEQ ID NO: 250527 - DNA, 33 bp, Homo sapien
cccataattaactgcccagagaaaacaactttt

SEQ ID NO: 250528 - DNA, 33 bp, Homo sapien
cccataattaactgccgagagaaaacaactttt

SEQ ID NO: 250529 - DNA, 33 bp, Homo sapien
gtgatgggaaactggaatattgagaggctcttg

SEQ ID NO: 250530 - DNA, 33 bp, Homo sapien
gtgatgggaaactggactattgagaggctcttg

SEQ ID NO: 250531 - DNA, 33 bp, Homo sapien
cagctgtaggtgctgaaaactttccagttctaa

SEQ ID NO: 250532 - DNA, 33 bp, Homo sapien
cagctgtaggtgctgacaactttccagttctaa

SEQ ID NO: 250533 - DNA, 33 bp, Homo sapien
acctcttctctgtccacgagaacttcagctagt

SEQ ID NO: 250534 - DNA, 33 bp, Homo sapien
acctcttctctgtccatgagaacttcagctagt

SEQ ID NO: 250535 - DNA, 33 bp, Homo sapien
ggaaagccagagaaaaaatattgcagaggaaag

SEQ ID NO: 250536 - DNA, 33 bp, Homo sapien
ggaaagccagagaaaacatattgcagaggaaag

SEQ ID NO: 250537 - DNA, 33 bp, Homo sapien
tgtcataaaatcaggacgtgaagggactagtat

SEQ ID NO: 250538 - DNA, 33 bp, Homo sapien
tgtcataaaatcaggatgtgaagggactagtat

SEQ ID NO: 250539 - DNA, 33 bp, Homo sapien
taataagtgaaacctaccttgaggagataaaac

SEQ ID NO: 250540 - DNA, 33 bp, Homo sapien
taataagtgaaacctagcttgaggagataaaac

SEQ ID NO: 250541 - DNA, 33 bp, Homo sapien
gtgggctctccaaggacgtatgttgccctaagt

SEQ ID NO: 250542 - DNA, 33 bp, Homo sapien
gtgggctctccaaggatgtatgttgccctaagt

SEQ ID NO: 250543 - DNA, 33 bp, Homo sapien
tactatgtcatctaaaaccacagatgtgatgga

SEQ ID NO: 250544 - DNA, 33 bp, Homo sapien
tactatgtcatctaaagccacagatgtgatgga

SEQ ID NO: 250545 - DNA, 33 bp, Homo sapien
ggactagcaaatttataagacttcttcctgctc

SEQ ID NO: 250546 - DNA, 33 bp, Homo sapien
ggactagcaaatttatgagacttcttcctgctc

SEQ ID NO: 250547 - DNA, 33 bp, Homo sapien
caatcctcttgataaacttgaggctgttctctc

SEQ ID NO: 250548 - DNA, 33 bp, Homo sapien
caatcctcttgataaagttgaggctgttctctc

SEQ ID NO: 250549 - DNA, 33 bp, Homo sapien
taaatgttcttttcagaattgcaaggatttagg

SEQ ID NO: 250550 - DNA, 33 bp, Homo sapien
taaatgttcttttcaggattgcaaggatttagg

SEQ ID NO: 250551 - DNA, 33 bp, Homo sapien
atagccgagaaccagaactggagaattgaaacc

SEQ ID NO: 250552 - DNA, 33 bp, Homo sapien
atagccgagaaccagagctggagaattgaaacc

SEQ ID NO: 250553 - DNA, 33 bp, Homo sapien
ttgtaaagtgctgtgtaaatatcaactgctgga

SEQ ID NO: 250554 - DNA, 33 bp, Homo sapien
ttgtaaagtgctgtgtgaatatcaactgctgga

SEQ ID NO: 250555 - DNA, 33 bp, Homo sapien
attcaatgccagaagcaccctctgcctccacca

SEQ ID NO: 250556 - DNA, 33 bp, Homo sapien
attcaatgccagaagcgccctctgcctccacca

SEQ ID NO: 250557 - DNA, 33 bp, Homo sapien
caccccagactgacagaatggtttggagatggt

SEQ ID NO: 250558 - DNA, 33 bp, Homo sapien
caccccagactgacaggatggtttggagatggt

SEQ ID NO: 250559 - DNA, 33 bp, Homo sapien
tagttagagcttttcaaaactaaagaaccatgc

SEQ ID NO: 250560 - DNA, 33 bp, Homo sapien
tagttagagcttttcataactaaagaaccatgc

SEQ ID NO: 250561 - DNA, 33 bp, Homo sapien
ggttctgggtctctcacaagactcaactgggaa

SEQ ID NO: 250562 - DNA, 33 bp, Homo sapien
ggttctgggtctctcataagactcaactgggaa

SEQ ID NO: 250563 - DNA, 33 bp, Homo sapien
atagagagagggaaaaaatccacatagatcaat

SEQ ID NO: 250564 - DNA, 33 bp, Homo sapien
atagagagagggaaaatatccacatagatcaat

SEQ ID NO: 250565 - DNA, 33 bp, Homo sapien
cccaggtttctgacaacgccagtgccatttctc

SEQ ID NO: 250566 - DNA, 33 bp, Homo sapien
cccaggtttctgacaatgccagtgccatttctc

SEQ ID NO: 250567 - DNA, 33 bp, Homo sapien
agcgttttctctatgacggtttgcttaagagaa

SEQ ID NO: 250568 - DNA, 33 bp, Homo sapien
agcgttttctctatgatggtttgcttaagagaa

SEQ ID NO: 250569 - DNA, 33 bp, Homo sapien
acaagacttgggaaaacgaccactttcttctcc

SEQ ID NO: 250570 - DNA, 33 bp, Homo sapien
acaagacttgggaaaatgaccactttcttctcc

SEQ ID NO: 250571 - DNA, 33 bp, Homo sapien
ctgcaacccaactacaccccttctagcttggag

SEQ ID NO: 250572 - DNA, 33 bp, Homo sapien
ctgcaacccaactacatcccttctagcttggag

SEQ ID NO: 250573 - DNA, 33 bp, Homo sapien
tactgcagacaaggcacgctgactctgaacccc

SEQ ID NO: 250574 - DNA, 33 bp, Homo sapien
tactgcagacaaggcaggctgactctgaacccc

SEQ ID NO: 250575 - DNA, 33 bp, Homo sapien
tatcttggcaatcacacggcacaaaacttctct

SEQ ID NO: 250576 - DNA, 33 bp, Homo sapien
tatcttggcaatcacatggcacaaaacttctct

SEQ ID NO: 250577 - DNA, 33 bp, Homo sapien
gtaacaaatgaaacggaacagcaacagaagggc

SEQ ID NO: 250578 - DNA, 33 bp, Homo sapien
gtaacaaatgaaacggtacagcaacagaagggc

SEQ ID NO: 250579 - DNA, 33 bp, Homo sapien
atattgttaagtgagaaaaatggcttataaagc

SEQ ID NO: 250580 - DNA, 33 bp, Homo sapien
atattgttaagtgagagaaatggcttataaagc

SEQ ID NO: 250581 - DNA, 33 bp, Homo sapien
tgcaactggattttaaccatagctctgcactta

SEQ ID NO: 250582 - DNA, 33 bp, Homo sapien
tgcaactggattttaatcatagctctgcactta

SEQ ID NO: 250583 - DNA, 33 bp, Homo sapien
gatggtggatcacacacatcagaagtttgaatc

SEQ ID NO: 250584 - DNA, 33 bp, Homo sapien
gatggtggatcacacatatcagaagtttgaatc

SEQ ID NO: 250585 - DNA, 33 bp, Homo sapien
ctgagcccagcgatgacactaacaatgagagct

SEQ ID NO: 250586 - DNA, 33 bp, Homo sapien
ctgagcccagcgatgatactaacaatgagagct

SEQ ID NO: 250587 - DNA, 33 bp, Homo sapien
aacaaaccacatccaaactcaatgttctaaaag

SEQ ID NO: 250588 - DNA, 33 bp, Homo sapien
aacaaaccacatccaagctcaatgttctaaaag

SEQ ID NO: 250589 - DNA, 33 bp, Homo sapien
cacaggtagttatccaagtcacataaatgtgtg

SEQ ID NO: 250590 - DNA, 33 bp, Homo sapien
cacaggtagttatccatgtcacataaatgtgtg

SEQ ID NO: 250591 - DNA, 33 bp, Homo sapien
gtaacccaaataattaaccagccccatatgtca

SEQ ID NO: 250592 - DNA, 33 bp, Homo sapien
gtaacccaaataattatccagccccatatgtca

SEQ ID NO: 250593 - DNA, 33 bp, Homo sapien
accttttctgcatttacatatgcttatatacac

SEQ ID NO: 250594 - DNA, 33 bp, Homo sapien
accttttctgcatttagatatgcttatatacac

SEQ ID NO: 250595 - DNA, 33 bp, Homo sapien
ttctacgtgctctccacgcatttgagtctcaca

SEQ ID NO: 250596 - DNA, 33 bp, Homo sapien
ttctacgtgctctccatgcatttgagtctcaca

SEQ ID NO: 250597 - DNA, 33 bp, Homo sapien
ggggtctttgttcccaagttctaaaatgttggc

SEQ ID NO: 250598 - DNA, 33 bp, Homo sapien
ggggtctttgttcccaggttctaaaatgttggc

SEQ ID NO: 250599 - DNA, 33 bp, Homo sapien
ctccaaataggaacaacttctgttgctaccact

SEQ ID NO: 250600 - DNA, 33 bp, Homo sapien
ctccaaataggaacaatttctgttgctaccact

SEQ ID NO: 250601 - DNA, 33 bp, Homo sapien
agaaatgagataggacaaacagctaacagccaa

SEQ ID NO: 250602 - DNA, 33 bp, Homo sapien
agaaatgagataggacgaacagctaacagccaa

SEQ ID NO: 250603 - DNA, 33 bp, Homo sapien
atcttcatttatacaacgttcccaggtgattct

SEQ ID NO: 250604 - DNA, 33 bp, Homo sapien
atcttcatttatacaatgttcccaggtgattct

SEQ ID NO: 250605 - DNA, 33 bp, Homo sapien
tgggcatctgagagcaacacataatggggcaag

SEQ ID NO: 250606 - DNA, 33 bp, Homo sapien
tgggcatctgagagcatcacataatggggcaag

SEQ ID NO: 250607 - DNA, 33 bp, Homo sapien
ggagctgagggagcaaaggggagattagtagga

SEQ ID NO: 250608 - DNA, 33 bp, Homo sapien
ggagctgagggagcaagggggagattagtagga

SEQ ID NO: 250609 - DNA, 33 bp, Homo sapien
aacatcaggaaattagcccaaagcatctcaaaa

SEQ ID NO: 250610 - DNA, 33 bp, Homo sapien
aacatcaggaaattagtccaaagcatctcaaaa

SEQ ID NO: 250611 - DNA, 33 bp, Homo sapien
atcttcacaatagctcagaaatacatgaattga

SEQ ID NO: 250612 - DNA, 33 bp, Homo sapien
atcttcacaatagctcggaaatacatgaattga

SEQ ID NO: 250613 - DNA, 33 bp, Homo sapien
aaacaacttgacgagaaagggtggatggaggga

SEQ ID NO: 250614 - DNA, 33 bp, Homo sapien
aaacaacttgacgagagagggtggatggaggga

SEQ ID NO: 250615 - DNA, 33 bp, Homo sapien
ctgagagcaaaaaccaatgggatcccagctcat

SEQ ID NO: 250616 - DNA, 33 bp, Homo sapien
ctgagagcaaaaaccagtgggatcccagctcat

SEQ ID NO: 250617 - DNA, 33 bp, Homo sapien
ttctcattaatccctaccacaaccttgcacagt

SEQ ID NO: 250618 - DNA, 33 bp, Homo sapien
ttctcattaatccctatcacaaccttgcacagt

SEQ ID NO: 250619 - DNA, 33 bp, Homo sapien
aagcacattcaatacacgtggccaataattgtc

SEQ ID NO: 250620 - DNA, 33 bp, Homo sapien
aagcacattcaatacatgtggccaataattgtc

SEQ ID NO: 250621 - DNA, 33 bp, Homo sapien
gccacgacacttggggaatgtggaggcacaagt

SEQ ID NO: 250622 - DNA, 33 bp, Homo sapien
gccacgacacttgggggatgtggaggcacaagt

SEQ ID NO: 250623 - DNA, 33 bp, Homo sapien
ctctaaagagacagacaaacaggaagagagtca

SEQ ID NO: 250624 - DNA, 33 bp, Homo sapien
ctctaaagagacagacgaacaggaagagagtca

SEQ ID NO: 250625 - DNA, 33 bp, Homo sapien
acatgtagctagagaaaacagtccctttcacag

SEQ ID NO: 250626 - DNA, 33 bp, Homo sapien
acatgtagctagagaagacagtccctttcacag

SEQ ID NO: 250627 - DNA, 33 bp, Homo sapien
gggaaagcaatgacaacggttgggcctggttga

SEQ ID NO: 250628 - DNA, 33 bp, Homo sapien
gggaaagcaatgacaatggttgggcctggttga

SEQ ID NO: 250629 - DNA, 33 bp, Homo sapien
gggtgccttgactggtaaagaagattcctggaa

SEQ ID NO: 250630 - DNA, 33 bp, Homo sapien
gggtgccttgactggtgaagaagattcctggaa

SEQ ID NO: 250631 - DNA, 33 bp, Homo sapien
acaagtccagccaaaaaaagactcaaatctagg

SEQ ID NO: 250632 - DNA, 33 bp, Homo sapien
acaagtccagccaaaacaagactcaaatctagg

SEQ ID NO: 250633 - DNA, 33 bp, Homo sapien
cctcactgttcttcataagcctggccctatcag

SEQ ID NO: 250634 - DNA, 33 bp, Homo sapien
cctcactgttcttcatgagcctggccctatcag

SEQ ID NO: 250635 - DNA, 33 bp, Homo sapien
taagcaactactgtaccgaggaacagggctgtg

SEQ ID NO: 250636 - DNA, 33 bp, Homo sapien
taagcaactactgtactgaggaacagggctgtg

SEQ ID NO: 250637 - DNA, 33 bp, Homo sapien
agctgacatcctgaccacaggagttatgctatt

SEQ ID NO: 250638 - DNA, 33 bp, Homo sapien
agctgacatcctgaccgcaggagttatgctatt

SEQ ID NO: 250639 - DNA, 33 bp, Homo sapien
agcctactctttccccaaactttatcttgtgca

SEQ ID NO: 250640 - DNA, 33 bp, Homo sapien
agcctactctttcccccaactttatcttgtgca

SEQ ID NO: 250641 - DNA, 33 bp, Homo sapien
tccagtcactcgtcccaatccccaaatcccagg

SEQ ID NO: 250642 - DNA, 33 bp, Homo sapien
tccagtcactcgtcccgatccccaaatcccagg

SEQ ID NO: 250643 - DNA, 33 bp, Homo sapien
aaacttgaatgcagagcacacaatgtgccattg

SEQ ID NO: 250644 - DNA, 33 bp, Homo sapien
aaacttgaatgcagagtacacaatgtgccattg

SEQ ID NO: 250645 - DNA, 33 bp, Homo sapien
ttgcagaatgaggtcacagtcgttgagtcccac

SEQ ID NO: 250646 - DNA, 33 bp, Homo sapien
ttgcagaatgaggtcatagtcgttgagtcccac

SEQ ID NO: 250647 - DNA, 33 bp, Homo sapien
ggacattgagtcaagccgatctgagctcaaggg

SEQ ID NO: 250648 - DNA, 33 bp, Homo sapien
ggacattgagtcaagctgatctgagctcaaggg

SEQ ID NO: 250649 - DNA, 33 bp, Homo sapien
ccatctccttgagtaactgtcagcatagattat

SEQ ID NO: 250650 - DNA, 33 bp, Homo sapien
ccatctccttgagtaattgtcagcatagattat

SEQ ID NO: 250651 - DNA, 33 bp, Homo sapien
gatgtcactaattgcacgtctgaaaagctttgt

SEQ ID NO: 250652 - DNA, 33 bp, Homo sapien
gatgtcactaattgcatgtctgaaaagctttgt

SEQ ID NO: 250653 - DNA, 33 bp, Homo sapien
gcctcagagaaatgtacgtggaacactattggc

SEQ ID NO: 250654 - DNA, 33 bp, Homo sapien
gcctcagagaaatgtaggtggaacactattggc

SEQ ID NO: 250655 - DNA, 33 bp, Homo sapien
ttaaactgacaacttacagctaattacttttaa

SEQ ID NO: 250656 - DNA, 33 bp, Homo sapien
ttaaactgacaacttatagctaattacttttaa

SEQ ID NO: 250657 - DNA, 33 bp, Homo sapien
gaaacaaagggagaacaacgtctgggctcagag

SEQ ID NO: 250658 - DNA, 33 bp, Homo sapien
gaaacaaagggagaacgacgtctgggctcagag

SEQ ID NO: 250659 - DNA, 33 bp, Homo sapien
tacagcaatgtaagcacataaggcaaaaaatag

SEQ ID NO: 250660 - DNA, 33 bp, Homo sapien
tacagcaatgtaagcatataaggcaaaaaatag

SEQ ID NO: 250661 - DNA, 33 bp, Homo sapien
ctacaaaatgcattaacggtgatgcaagcacta

SEQ ID NO: 250662 - DNA, 33 bp, Homo sapien
ctacaaaatgcattaatggtgatgcaagcacta

SEQ ID NO: 250663 - DNA, 33 bp, Homo sapien
ccctctgtaaaaatcccgacttaaacacagggg

SEQ ID NO: 250664 - DNA, 33 bp, Homo sapien
ccctctgtaaaaatcctgacttaaacacagggg

SEQ ID NO: 250665 - DNA, 33 bp, Homo sapien
taccttgtagagttgcagaaaggaataaatgaa

SEQ ID NO: 250666 - DNA, 33 bp, Homo sapien
taccttgtagagttgcggaaaggaataaatgaa

SEQ ID NO: 250667 - DNA, 33 bp, Homo sapien
taaataattttcacaaacgaacaactccgtggc

SEQ ID NO: 250668 - DNA, 33 bp, Homo sapien
taaataattttcacaagcgaacaactccgtggc

SEQ ID NO: 250669 - DNA, 33 bp, Homo sapien
tgagtaatattttaccaaggtcaatccagcttt

SEQ ID NO: 250670 - DNA, 33 bp, Homo sapien
tgagtaatattttaccgaggtcaatccagcttt

SEQ ID NO: 250671 - DNA, 33 bp, Homo sapien
ggcttggaataagttggaaacttctgatggaaa

SEQ ID NO: 250672 - DNA, 33 bp, Homo sapien
ggcttggaataagttgtaaacttctgatggaaa

SEQ ID NO: 250673 - DNA, 33 bp, Homo sapien
tcactgaaatatgtgcaaaagggtttcttttta

SEQ ID NO: 250674 - DNA, 33 bp, Homo sapien
tcactgaaatatgtgcgaaagggtttcttttta

SEQ ID NO: 250675 - DNA, 33 bp, Homo sapien
tagatataactcaacacgatccctaaacacaaa

SEQ ID NO: 250676 - DNA, 33 bp, Homo sapien
tagatataactcaacatgatccctaaacacaaa

SEQ ID NO: 250677 - DNA, 33 bp, Homo sapien
taccacaacttacttacccgttcacctgttaaa

SEQ ID NO: 250678 - DNA, 33 bp, Homo sapien
taccacaacttacttatccgttcacctgttaaa

SEQ ID NO: 250679 - DNA, 33 bp, Homo sapien
ccttgagataatgccaaagtcaattctacagag

SEQ ID NO: 250680 - DNA, 33 bp, Homo sapien
ccttgagataatgccatagtcaattctacagag

SEQ ID NO: 250681 - DNA, 33 bp, Homo sapien
ggaaataagaatgagtaaactctgtgatgaata

SEQ ID NO: 250682 - DNA, 33 bp, Homo sapien
ggaaataagaatgagtgaactctgtgatgaata

SEQ ID NO: 250683 - DNA, 33 bp, Homo sapien
agcagcaccaccaaccagcacagtcacgtaagg

SEQ ID NO: 250684 - DNA, 33 bp, Homo sapien
agcagcaccaccaaccggcacagtcacgtaagg

SEQ ID NO: 250685 - DNA, 33 bp, Homo sapien
ctggggagactgtacaagtggaaatgcatggct

SEQ ID NO: 250686 - DNA, 33 bp, Homo sapien
ctggggagactgtacacgtggaaatgcatggct

SEQ ID NO: 250687 - DNA, 33 bp, Homo sapien
agactgagggttttgcagagagattacacagca

SEQ ID NO: 250688 - DNA, 33 bp, Homo sapien
agactgagggttttgcggagagattacacagca

SEQ ID NO: 250689 - DNA, 33 bp, Homo sapien
ctcatcccactgatcaatattcatgttgctcag

SEQ ID NO: 250690 - DNA, 33 bp, Homo sapien
ctcatcccactgatcagtattcatgttgctcag

SEQ ID NO: 250691 - DNA, 33 bp, Homo sapien
cacatggattaactacccaagattgcatgacag

SEQ ID NO: 250692 - DNA, 33 bp, Homo sapien
cacatggattaactactcaagattgcatgacag

SEQ ID NO: 250693 - DNA, 33 bp, Homo sapien
ctggtcttcacaaaaactcagtgaagcaggtgg

SEQ ID NO: 250694 - DNA, 33 bp, Homo sapien
ctggtcttcacaaaaattcagtgaagcaggtgg

SEQ ID NO: 250695 - DNA, 33 bp, Homo sapien
gcgtgcttggcaaacaaaaggtagggttattaa

SEQ ID NO: 250696 - DNA, 33 bp, Homo sapien
gcgtgcttggcaaacagaaggtagggttattaa

SEQ ID NO: 250697 - DNA, 33 bp, Homo sapien
gggacattcaccacccaatgcagttctaatccc

SEQ ID NO: 250698 - DNA, 33 bp, Homo sapien
gggacattcaccacccgatgcagttctaatccc

SEQ ID NO: 250699 - DNA, 33 bp, Homo sapien
tcttttccccaatgcacctcttaaaactctgaa

SEQ ID NO: 250700 - DNA, 33 bp, Homo sapien
tcttttccccaatgcatctcttaaaactctgaa

SEQ ID NO: 250701 - DNA, 33 bp, Homo sapien
catgttatgtgtatcaacagttcattcatttct

SEQ ID NO: 250702 - DNA, 33 bp, Homo sapien
catgttatgtgtatcaccagttcattcatttct

SEQ ID NO: 250703 - DNA, 33 bp, Homo sapien
agagagtagaatgaacccacagaggaaataagc

SEQ ID NO: 250704 - DNA, 33 bp, Homo sapien
agagagtagaatgaactcacagaggaaataagc

SEQ ID NO: 250705 - DNA, 33 bp, Homo sapien
ctttagttgtgctacaatgctgggtaccaggta

SEQ ID NO: 250706 - DNA, 33 bp, Homo sapien
ctttagttgtgctacagtgctgggtaccaggta

SEQ ID NO: 250707 - DNA, 33 bp, Homo sapien
gagggaggcaagggccaaaaatactacctactg

SEQ ID NO: 250708 - DNA, 33 bp, Homo sapien
gagggaggcaagggccgaaaatactacctactg

SEQ ID NO: 250709 - DNA, 33 bp, Homo sapien
actttctatctacatcccaatcacaaaagccta

SEQ ID NO: 250710 - DNA, 33 bp, Homo sapien
actttctatctacatctcaatcacaaaagccta

SEQ ID NO: 250711 - DNA, 33 bp, Homo sapien
ggggagatttgcattacggtagaaaaaatagct

SEQ ID NO: 250712 - DNA, 33 bp, Homo sapien
ggggagatttgcattatggtagaaaaaatagct

SEQ ID NO: 250713 - DNA, 33 bp, Homo sapien
catacacctctggaccaatgctacaacccccct

SEQ ID NO: 250714 - DNA, 33 bp, Homo sapien
catacacctctggacccatgctacaacccccct

SEQ ID NO: 250715 - DNA, 33 bp, Homo sapien
acggtaggacaatgcaaaattcagttgggggcg

SEQ ID NO: 250716 - DNA, 33 bp, Homo sapien
acggtaggacaatgcagaattcagttgggggcg

SEQ ID NO: 250717 - DNA, 33 bp, Homo sapien
agtgatgtcattgagacctatgatgtggtctat

SEQ ID NO: 250718 - DNA, 33 bp, Homo sapien
agtgatgtcattgagagctatgatgtggtctat

SEQ ID NO: 250719 - DNA, 33 bp, Homo sapien
ctacctgttgcacacagcagggagacattcttt

SEQ ID NO: 250720 - DNA, 33 bp, Homo sapien
ctacctgttgcacacatcagggagacattcttt

SEQ ID NO: 250721 - DNA, 33 bp, Homo sapien
agatgagatattatgcagaaagcgcgggcccat

SEQ ID NO: 250722 - DNA, 33 bp, Homo sapien
agatgagatattatgcggaaagcgcgggcccat

SEQ ID NO: 250723 - DNA, 33 bp, Homo sapien
atggacagtttcagacacagataatggcttttg

SEQ ID NO: 250724 - DNA, 33 bp, Homo sapien
atggacagtttcagacgcagataatggcttttg

SEQ ID NO: 250725 - DNA, 33 bp, Homo sapien
tgtgttccccacaaaaagctccactacattctt

SEQ ID NO: 250726 - DNA, 33 bp, Homo sapien
tgtgttccccacaaaacgctccactacattctt

SEQ ID NO: 250727 - DNA, 33 bp, Homo sapien
tccaaagttccaggaacaatggtgccagcaacc

SEQ ID NO: 250728 - DNA, 33 bp, Homo sapien
tccaaagttccaggaataatggtgccagcaacc

SEQ ID NO: 250729 - DNA, 33 bp, Homo sapien
ataagagctcaggacacggtaaattgctcagta

SEQ ID NO: 250730 - DNA, 33 bp, Homo sapien
ataagagctcaggacatggtaaattgctcagta

SEQ ID NO: 250731 - DNA, 33 bp, Homo sapien
gcttcattccagatacaatggtggagtccagct

SEQ ID NO: 250732 - DNA, 33 bp, Homo sapien
gcttcattccagatacgatggtggagtccagct

SEQ ID NO: 250733 - DNA, 33 bp, Homo sapien
cttgagccaggctctcaaggaacctgaacactt

SEQ ID NO: 250734 - DNA, 33 bp, Homo sapien
cttgagccaggctctcgaggaacctgaacactt

SEQ ID NO: 250735 - DNA, 33 bp, Homo sapien
gcaaggtacaacttaactgagccatggagagga

SEQ ID NO: 250736 - DNA, 33 bp, Homo sapien
gcaaggtacaacttaattgagccatggagagga

SEQ ID NO: 250737 - DNA, 33 bp, Homo sapien
gtgaacagggaatagaccagcctttgcaaagac

SEQ ID NO: 250738 - DNA, 33 bp, Homo sapien
gtgaacagggaatagatcagcctttgcaaagac

SEQ ID NO: 250739 - DNA, 33 bp, Homo sapien
ttgtctcggttctgaaactagaaatccaaaatc

SEQ ID NO: 250740 - DNA, 33 bp, Homo sapien
ttgtctcggttctgaagctagaaatccaaaatc

SEQ ID NO: 250741 - DNA, 33 bp, Homo sapien
atcactcatggaggtaacttggatcccatccta

SEQ ID NO: 250742 - DNA, 33 bp, Homo sapien
atcactcatggaggtagcttggatcccatccta

SEQ ID NO: 250743 - DNA, 33 bp, Homo sapien
aactgactaatacaccggacataccaaagttaa

SEQ ID NO: 250744 - DNA, 33 bp, Homo sapien
aactgactaatacacctgacataccaaagttaa

SEQ ID NO: 250745 - DNA, 33 bp, Homo sapien
aaggacaggaatccacaaggtggtacaaataca

SEQ ID NO: 250746 - DNA, 33 bp, Homo sapien
aaggacaggaatccacgaggtggtacaaataca

SEQ ID NO: 250747 - DNA, 33 bp, Homo sapien
tttcaaagatatttcacgaaaggaatgtcgtgg

SEQ ID NO: 250748 - DNA, 33 bp, Homo sapien
tttcaaagatatttcatgaaaggaatgtcgtgg

SEQ ID NO: 250749 - DNA, 33 bp, Homo sapien
tgtccttaggaactatgaatgtcaagggacaat

SEQ ID NO: 250750 - DNA, 33 bp, Homo sapien
tgtccttaggaactattaatgtcaagggacaat

SEQ ID NO: 250751 - DNA, 33 bp, Homo sapien
acacgtgaaaaattgaagcttggagaagtgaac

SEQ ID NO: 250752 - DNA, 33 bp, Homo sapien
acacgtgaaaaattgaggcttggagaagtgaac

SEQ ID NO: 250753 - DNA, 33 bp, Homo sapien
agtatttgcaagcttccactagacaatgtggat

SEQ ID NO: 250754 - DNA, 33 bp, Homo sapien
agtatttgcaagcttctactagacaatgtggat

SEQ ID NO: 250755 - DNA, 33 bp, Homo sapien
tccagtagcttccctgaatcagttcaaaccagt

SEQ ID NO: 250756 - DNA, 33 bp, Homo sapien
tccagtagcttccctggatcagttcaaaccagt

SEQ ID NO: 250757 - DNA, 33 bp, Homo sapien
actgacagcagatcaaagctgaaagacaaattg

SEQ ID NO: 250758 - DNA, 33 bp, Homo sapien
actgacagcagatcaaggctgaaagacaaattg

SEQ ID NO: 250759 - DNA, 33 bp, Homo sapien
accatatttcctgcacaatgaaatctttgaaat

SEQ ID NO: 250760 - DNA, 33 bp, Homo sapien
accatatttcctgcacgatgaaatctttgaaat

SEQ ID NO: 250761 - DNA, 33 bp, Homo sapien
gaaggctcttttctaaaccactgggagaaaatt

SEQ ID NO: 250762 - DNA, 33 bp, Homo sapien
gaaggctcttttctaagccactgggagaaaatt

SEQ ID NO: 250763 - DNA, 33 bp, Homo sapien
attaaacttagtgaacacagaatgcctggcatg

SEQ ID NO: 250764 - DNA, 33 bp, Homo sapien
attaaacttagtgaacgcagaatgcctggcatg

SEQ ID NO: 250765 - DNA, 33 bp, Homo sapien
ggcttcataatggtgaggatacttaagttgggt

SEQ ID NO: 250766 - DNA, 33 bp, Homo sapien
ggcttcataatggtgatgatacttaagttgggt

SEQ ID NO: 250767 - DNA, 33 bp, Homo sapien
cagaataaagttccttcaaatgagtggccaatt

SEQ ID NO: 250768 - DNA, 33 bp, Homo sapien
cagaataaagttcctttaaatgagtggccaatt

SEQ ID NO: 250769 - DNA, 33 bp, Homo sapien
tcgaacattatctccagatacatactcttcttt

SEQ ID NO: 250770 - DNA, 33 bp, Homo sapien
tcgaacattatctccatatacatactcttcttt

SEQ ID NO: 250771 - DNA, 33 bp, Homo sapien
attgcactctgttccacagctttgcccagagat

SEQ ID NO: 250772 - DNA, 33 bp, Homo sapien
attgcactctgttccatagctttgcccagagat

SEQ ID NO: 250773 - DNA, 33 bp, Homo sapien
catctctccaagtggcacaaactccctgacccc

SEQ ID NO: 250774 - DNA, 33 bp, Homo sapien
catctctccaagtggcgcaaactccctgacccc

SEQ ID NO: 250775 - DNA, 33 bp, Homo sapien
aaggtgagctagtctccaacaggaggggaaaca

SEQ ID NO: 250776 - DNA, 33 bp, Homo sapien
aaggtgagctagtctctaacaggaggggaaaca

SEQ ID NO: 250777 - DNA, 33 bp, Homo sapien
attaaacaaaaatccaagagacagtaaaatagt

SEQ ID NO: 250778 - DNA, 33 bp, Homo sapien
attaaacaaaaatccaggagacagtaaaatagt

SEQ ID NO: 250779 - DNA, 33 bp, Homo sapien
gggaaaaaactaataagtgcattgaaacaatgc

SEQ ID NO: 250780 - DNA, 33 bp, Homo sapien
gggaaaaaactaataattgcattgaaacaatgc

SEQ ID NO: 250781 - DNA, 33 bp, Homo sapien
atgtaaataagaacacgcaataattcactttct

SEQ ID NO: 250782 - DNA, 33 bp, Homo sapien
atgtaaataagaacactcaataattcactttct

SEQ ID NO: 250783 - DNA, 33 bp, Homo sapien
tcagaaaggtctgttcaatgtcttctcactctt

SEQ ID NO: 250784 - DNA, 33 bp, Homo sapien
tcagaaaggtctgttcgatgtcttctcactctt

SEQ ID NO: 250785 - DNA, 33 bp, Homo sapien
gaacattttcattgaacggttgataatggtgca

SEQ ID NO: 250786 - DNA, 33 bp, Homo sapien
gaacattttcattgaatggttgataatggtgca

SEQ ID NO: 250787 - DNA, 33 bp, Homo sapien
ctctccctgctatatacacaaattctcagtaac

SEQ ID NO: 250788 - DNA, 33 bp, Homo sapien
ctctccctgctatatatacaaattctcagtaac

SEQ ID NO: 250789 - DNA, 33 bp, Homo sapien
ccgttgccaaaaatcaatccctactgagatgga

SEQ ID NO: 250790 - DNA, 33 bp, Homo sapien
ccgttgccaaaaatcagtccctactgagatgga

SEQ ID NO: 250791 - DNA, 33 bp, Homo sapien
ctgaggtgggcttatcaaaaggtcaagagatca

SEQ ID NO: 250792 - DNA, 33 bp, Homo sapien
ctgaggtgggcttatcgaaaggtcaagagatca

SEQ ID NO: 250793 - DNA, 33 bp, Homo sapien
ctgggatagagagagaccgttggtgggcatgga

SEQ ID NO: 250794 - DNA, 33 bp, Homo sapien
ctgggatagagagagagcgttggtgggcatgga

SEQ ID NO: 250795 - DNA, 33 bp, Homo sapien
tgcaagtgaacagaaaatggctatcacatgaaa

SEQ ID NO: 250796 - DNA, 33 bp, Homo sapien
tgcaagtgaacagaaactggctatcacatgaaa

SEQ ID NO: 250797 - DNA, 33 bp, Homo sapien
tttgaagtttcaagccagcaaccgatatgatta

SEQ ID NO: 250798 - DNA, 33 bp, Homo sapien
tttgaagtttcaagccggcaaccgatatgatta

SEQ ID NO: 250799 - DNA, 33 bp, Homo sapien
ataccatcaagttaaaatcttctagtcatggag

SEQ ID NO: 250800 - DNA, 33 bp, Homo sapien
ataccatcaagttaaactcttctagtcatggag

SEQ ID NO: 250801 - DNA, 33 bp, Homo sapien
aatggaaggaaccacgcaagagggaatatggtg

SEQ ID NO: 250802 - DNA, 33 bp, Homo sapien
aatggaaggaaccacggaagagggaatatggtg

SEQ ID NO: 250803 - DNA, 33 bp, Homo sapien
ttgggctttatctgcccggaaataggaatccat

SEQ ID NO: 250804 - DNA, 33 bp, Homo sapien
ttgggctttatctgcctggaaataggaatccat

SEQ ID NO: 250805 - DNA, 33 bp, Homo sapien
tggggtaaaaatcttaacagtgcaaaaggatct

SEQ ID NO: 250806 - DNA, 33 bp, Homo sapien
tggggtaaaaatcttagcagtgcaaaaggatct

SEQ ID NO: 250807 - DNA, 33 bp, Homo sapien
ctggagaggacgtgttaaaacctttcctgtgag

SEQ ID NO: 250808 - DNA, 33 bp, Homo sapien
ctggagaggacgtgttgaaacctttcctgtgag

SEQ ID NO: 250809 - DNA, 33 bp, Homo sapien
catagagcctggagacaatgtgaatgagaacat

SEQ ID NO: 250810 - DNA, 33 bp, Homo sapien
catagagcctggagacgatgtgaatgagaacat

SEQ ID NO: 250811 - DNA, 33 bp, Homo sapien
ttcagcagagaccatacgactcacaaagtctca

SEQ ID NO: 250812 - DNA, 33 bp, Homo sapien
ttcagcagagaccatatgactcacaaagtctca

SEQ ID NO: 250813 - DNA, 33 bp, Homo sapien
tgggatacaatagtaaaggaaggtttctgcttt

SEQ ID NO: 250814 - DNA, 33 bp, Homo sapien
tgggatacaatagtaagggaaggtttctgcttt

SEQ ID NO: 250815 - DNA, 33 bp, Homo sapien
gagcttgtgccttataaacctgtcaactgcttc

SEQ ID NO: 250816 - DNA, 33 bp, Homo sapien
gagcttgtgccttatacacctgtcaactgcttc

SEQ ID NO: 250817 - DNA, 33 bp, Homo sapien
taataatgtggcaatacctaccctctttcaaat

SEQ ID NO: 250818 - DNA, 33 bp, Homo sapien
taataatgtggcaatatctaccctctttcaaat

SEQ ID NO: 250819 - DNA, 33 bp, Homo sapien
tgtaggaattaaatgacatgatacacacaggga

SEQ ID NO: 250820 - DNA, 33 bp, Homo sapien
tgtaggaattaaatgagatgatacacacaggga

SEQ ID NO: 250821 - DNA, 33 bp, Homo sapien
ctgcttcattaataaaccaggatagaatgtggg

SEQ ID NO: 250822 - DNA, 33 bp, Homo sapien
ctgcttcattaataaagcaggatagaatgtggg

SEQ ID NO: 250823 - DNA, 33 bp, Homo sapien
tttggtggaaaaagccaaagtactaatgtctgc

SEQ ID NO: 250824 - DNA, 33 bp, Homo sapien
tttggtggaaaaagccgaagtactaatgtctgc

SEQ ID NO: 250825 - DNA, 33 bp, Homo sapien
ataccagtaatcatcaactgtccaaatggctag

SEQ ID NO: 250826 - DNA, 33 bp, Homo sapien
ataccagtaatcatcagctgtccaaatggctag

SEQ ID NO: 250827 - DNA, 33 bp, Homo sapien
tcaagagcacaaaggaaataaatcaggagctga

SEQ ID NO: 250828 - DNA, 33 bp, Homo sapien
tcaagagcacaaaggagataaatcaggagctga

SEQ ID NO: 250829 - DNA, 33 bp, Homo sapien
aggaagcacaatgttccaatcccatctacccac

SEQ ID NO: 250830 - DNA, 33 bp, Homo sapien
aggaagcacaatgttcgaatcccatctacccac

SEQ ID NO: 250831 - DNA, 33 bp, Homo sapien
acacatgggttctcatcacgtatttcataaggc

SEQ ID NO: 250832 - DNA, 33 bp, Homo sapien
acacatgggttctcatgacgtatttcataaggc

SEQ ID NO: 250833 - DNA, 33 bp, Homo sapien
tggatgctatagaagcacatgcagtcaatagta

SEQ ID NO: 250834 - DNA, 33 bp, Homo sapien
tggatgctatagaagcgcatgcagtcaatagta

SEQ ID NO: 250835 - DNA, 33 bp, Homo sapien
gccctgtagtttgtgcaatttaaccctcacagc

SEQ ID NO: 250836 - DNA, 33 bp, Homo sapien
gccctgtagtttgtgccatttaaccctcacagc

SEQ ID NO: 250837 - DNA, 33 bp, Homo sapien
gcatttttccatatccgcattttgtttgttgtt

SEQ ID NO: 250838 - DNA, 33 bp, Homo sapien
gcatttttccatatcctcattttgtttgttgtt

SEQ ID NO: 250839 - DNA, 33 bp, Homo sapien
atcacgataaggaatacgtgagaaagttttgag

SEQ ID NO: 250840 - DNA, 33 bp, Homo sapien
atcacgataaggaatatgtgagaaagttttgag

SEQ ID NO: 250841 - DNA, 33 bp, Homo sapien
ctccaacatgggattacatttcagtgtaagatt

SEQ ID NO: 250842 - DNA, 33 bp, Homo sapien
ctccaacatgggattatatttcagtgtaagatt

SEQ ID NO: 250843 - DNA, 33 bp, Homo sapien
gacacaggttcttggaacgctaagagaactctt

SEQ ID NO: 250844 - DNA, 33 bp, Homo sapien
gacacaggttcttggaccgctaagagaactctt

SEQ ID NO: 250845 - DNA, 33 bp, Homo sapien
gctgtcacagatgacaagattccttttgtaagg

SEQ ID NO: 250846 - DNA, 33 bp, Homo sapien
gctgtcacagatgacaggattccttttgtaagg

SEQ ID NO: 250847 - DNA, 33 bp, Homo sapien
gaagagaccatctgcaataaacgctcctgagca

SEQ ID NO: 250848 - DNA, 33 bp, Homo sapien
gaagagaccatctgcactaaacgctcctgagca

SEQ ID NO: 250849 - DNA, 33 bp, Homo sapien
ttcctggcaactggtacagaaccaacctagagg

SEQ ID NO: 250850 - DNA, 33 bp, Homo sapien
ttcctggcaactggtatagaaccaacctagagg

SEQ ID NO: 250851 - DNA, 33 bp, Homo sapien
ctccataccatgtgcccgacataatgtctatgg

SEQ ID NO: 250852 - DNA, 33 bp, Homo sapien
ctccataccatgtgcctgacataatgtctatgg

SEQ ID NO: 250853 - DNA, 33 bp, Homo sapien
tcatttcatttttgagactaatcatgaaagcac

SEQ ID NO: 250854 - DNA, 33 bp, Homo sapien
tcatttcatttttgaggctaatcatgaaagcac

SEQ ID NO: 250855 - DNA, 33 bp, Homo sapien
ttatgggcagcatagcagatacttgtattatag

SEQ ID NO: 250856 - DNA, 33 bp, Homo sapien
ttatgggcagcatagcggatacttgtattatag

SEQ ID NO: 250857 - DNA, 33 bp, Homo sapien
taaataacaggaatgcactttgaaactgtgtgg

SEQ ID NO: 250858 - DNA, 33 bp, Homo sapien
taaataacaggaatgcgctttgaaactgtgtgg

SEQ ID NO: 250859 - DNA, 33 bp, Homo sapien
cgtatgggccataaacaaagacactgagctagt

SEQ ID NO: 250860 - DNA, 33 bp, Homo sapien
cgtatgggccataaacgaagacactgagctagt

SEQ ID NO: 250861 - DNA, 33 bp, Homo sapien
tccacgaaccttcacgaagaaagaatattgagt

SEQ ID NO: 250862 - DNA, 33 bp, Homo sapien
tccacgaaccttcacggagaaagaatattgagt

SEQ ID NO: 250863 - DNA, 33 bp, Homo sapien
gaataaacaatgcccactagttcaactggtctc

SEQ ID NO: 250864 - DNA, 33 bp, Homo sapien
gaataaacaatgcccagtagttcaactggtctc

SEQ ID NO: 250865 - DNA, 33 bp, Homo sapien
taactttgggagaaaaagaagaggtggcagaaa

SEQ ID NO: 250866 - DNA, 33 bp, Homo sapien
taactttgggagaaaacgaagaggtggcagaaa

SEQ ID NO: 250867 - DNA, 33 bp, Homo sapien
cagaatgtgccttgaggagtaaacatgaggtct

SEQ ID NO: 250868 - DNA, 33 bp, Homo sapien
cagaatgtgccttgagtagtaaacatgaggtct

SEQ ID NO: 250869 - DNA, 33 bp, Homo sapien
atgtgaaatcggggcacgtaaggtgacattctt

SEQ ID NO: 250870 - DNA, 33 bp, Homo sapien
atgtgaaatcggggcatgtaaggtgacattctt

SEQ ID NO: 250871 - DNA, 33 bp, Homo sapien
ttctgtttaaatttgacaggatgggtgaagtga

SEQ ID NO: 250872 - DNA, 33 bp, Homo sapien
ttctgtttaaatttgataggatgggtgaagtga

SEQ ID NO: 250873 - DNA, 33 bp, Homo sapien
tgaatggaagcaaatgaaaatggagtttggatt

SEQ ID NO: 250874 - DNA, 33 bp, Homo sapien
tgaatggaagcaaatggaaatggagtttggatt

SEQ ID NO: 250875 - DNA, 33 bp, Homo sapien
gcatcttcatctgcaaaagcaacagagccctag

SEQ ID NO: 250876 - DNA, 33 bp, Homo sapien
gcatcttcatctgcaagagcaacagagccctag

SEQ ID NO: 250877 - DNA, 33 bp, Homo sapien
gggagaaaaagctaaaaacacagcattgggccc

SEQ ID NO: 250878 - DNA, 33 bp, Homo sapien
gggagaaaaagctaaagacacagcattgggccc

SEQ ID NO: 250879 - DNA, 33 bp, Homo sapien
ttaagaaaacccgactcaaaagtggcagagtga

SEQ ID NO: 250880 - DNA, 33 bp, Homo sapien
ttaagaaaacccgactgaaaagtggcagagtga

SEQ ID NO: 250881 - DNA, 33 bp, Homo sapien
agggtcatgagagaaaagaagaagctcaaaagg

SEQ ID NO: 250882 - DNA, 33 bp, Homo sapien
agggtcatgagagaaaggaagaagctcaaaagg

SEQ ID NO: 250883 - DNA, 33 bp, Homo sapien
gtaccacaggtaacgggcatctggtcctccatt

SEQ ID NO: 250884 - DNA, 33 bp, Homo sapien
gtaccacaggtaacggtcatctggtcctccatt

SEQ ID NO: 250885 - DNA, 33 bp, Homo sapien
aacgaaatgacaccaaagtttcaagcctggaat

SEQ ID NO: 250886 - DNA, 33 bp, Homo sapien
aacgaaatgacaccaaggtttcaagcctggaat

SEQ ID NO: 250887 - DNA, 33 bp, Homo sapien
ggaagagaaagaaaaaaccagtgatggagcttc

SEQ ID NO: 250888 - DNA, 33 bp, Homo sapien
ggaagagaaagaaaaacccagtgatggagcttc

SEQ ID NO: 250889 - DNA, 33 bp, Homo sapien
agtgggtaggtcagagaaaaataaacagaaaga

SEQ ID NO: 250890 - DNA, 33 bp, Homo sapien
agtgggtaggtcagaggaaaataaacagaaaga

SEQ ID NO: 250891 - DNA, 33 bp, Homo sapien
ctacttgaagctgctacgacaaatctttctttc

SEQ ID NO: 250892 - DNA, 33 bp, Homo sapien
ctacttgaagctgctatgacaaatctttctttc

SEQ ID NO: 250893 - DNA, 33 bp, Homo sapien
catcattagcatcttcaattcgatgcaacgtaa

SEQ ID NO: 250894 - DNA, 33 bp, Homo sapien
catcattagcatcttcgattcgatgcaacgtaa

SEQ ID NO: 250895 - DNA, 33 bp, Homo sapien
tgtgagggagccacaaatattacttacagatgt

SEQ ID NO: 250896 - DNA, 33 bp, Homo sapien
tgtgagggagccacaagtattacttacagatgt

SEQ ID NO: 250897 - DNA, 33 bp, Homo sapien
gacttgtcctttagaaatcatgtgctcctaaca

SEQ ID NO: 250898 - DNA, 33 bp, Homo sapien
gacttgtcctttagaagtcatgtgctcctaaca

SEQ ID NO: 250899 - DNA, 33 bp, Homo sapien
tgcaggagtgatgttacggtcatcattcagttt

SEQ ID NO: 250900 - DNA, 33 bp, Homo sapien
tgcaggagtgatgttatggtcatcattcagttt

SEQ ID NO: 250901 - DNA, 33 bp, Homo sapien
acttgcggcaaagatgaattactcccatctcca

SEQ ID NO: 250902 - DNA, 33 bp, Homo sapien
acttgcggcaaagatggattactcccatctcca

SEQ ID NO: 250903 - DNA, 33 bp, Homo sapien
tctttggcctctacccactacatattaatagca

SEQ ID NO: 250904 - DNA, 33 bp, Homo sapien
tctttggcctctacccgctacatattaatagca

SEQ ID NO: 250905 - DNA, 33 bp, Homo sapien
acagaagaaagagcagacatggtcattaccgct

SEQ ID NO: 250906 - DNA, 33 bp, Homo sapien
acagaagaaagagcaggcatggtcattaccgct

SEQ ID NO: 250907 - DNA, 33 bp, Homo sapien
ctttaatcactactgcaatgattaagttcgtgc

SEQ ID NO: 250908 - DNA, 33 bp, Homo sapien
ctttaatcactactgcgatgattaagttcgtgc

SEQ ID NO: 250909 - DNA, 33 bp, Homo sapien
actttagactgggtccacaaggaaaggttctct

SEQ ID NO: 250910 - DNA, 33 bp, Homo sapien
actttagactgggtccgcaaggaaaggttctct

SEQ ID NO: 250911 - DNA, 33 bp, Homo sapien
gtgttggtgccatgagcagaatgagtgttcatt

SEQ ID NO: 250912 - DNA, 33 bp, Homo sapien
gtgttggtgccatgagtagaatgagtgttcatt

SEQ ID NO: 250913 - DNA, 33 bp, Homo sapien
agttgaacaagtcaaaacaggttatgttgaaac

SEQ ID NO: 250914 - DNA, 33 bp, Homo sapien
agttgaacaagtcaaagcaggttatgttgaaac

SEQ ID NO: 250915 - DNA, 33 bp, Homo sapien
cacaggctcaaatccaatctggtttcaattatc

SEQ ID NO: 250916 - DNA, 33 bp, Homo sapien
cacaggctcaaatccagtctggtttcaattatc

SEQ ID NO: 250917 - DNA, 33 bp, Homo sapien
acaattcaagaaattaacatgactactggtcca

SEQ ID NO: 250918 - DNA, 33 bp, Homo sapien
acaattcaagaaattatcatgactactggtcca

SEQ ID NO: 250919 - DNA, 33 bp, Homo sapien
aaaaagggcccaaaacaaatatgtgcgtgctca

SEQ ID NO: 250920 - DNA, 33 bp, Homo sapien
aaaaagggcccaaaacgaatatgtgcgtgctca

SEQ ID NO: 250921 - DNA, 33 bp, Homo sapien
gtgcttatttctacacacaaaaatttgtaagac

SEQ ID NO: 250922 - DNA, 33 bp, Homo sapien
gtgcttatttctacacgcaaaaatttgtaagac

SEQ ID NO: 250923 - DNA, 33 bp, Homo sapien
ataatatggttgctcaataatcctgagggaaga

SEQ ID NO: 250924 - DNA, 33 bp, Homo sapien
ataatatggttgctcagtaatcctgagggaaga

SEQ ID NO: 250925 - DNA, 33 bp, Homo sapien
agggagagatggggaacgtggcaagatgagatg

SEQ ID NO: 250926 - DNA, 33 bp, Homo sapien
agggagagatggggaatgtggcaagatgagatg

SEQ ID NO: 250927 - DNA, 33 bp, Homo sapien
attcctggactaacaaacattgtattcccacaa

SEQ ID NO: 250928 - DNA, 33 bp, Homo sapien
attcctggactaacaatcattgtattcccacaa

SEQ ID NO: 250929 - DNA, 33 bp, Homo sapien
actggatggggcgttaacttgatcttgaaatca

SEQ ID NO: 250930 - DNA, 33 bp, Homo sapien
actggatggggcgttatcttgatcttgaaatca

SEQ ID NO: 250931 - DNA, 33 bp, Homo sapien
ttacccttttctcttacgtgagcctgtttatct

SEQ ID NO: 250932 - DNA, 33 bp, Homo sapien
ttacccttttctcttatgtgagcctgtttatct

SEQ ID NO: 250933 - DNA, 33 bp, Homo sapien
atatagagtcacagagaaaaacgtgcttgatcc

SEQ ID NO: 250934 - DNA, 33 bp, Homo sapien
atatagagtcacagaggaaaacgtgcttgatcc

SEQ ID NO: 250935 - DNA, 33 bp, Homo sapien
ttgtcagggtaaaaggaaaataccgtgcagctt

SEQ ID NO: 250936 - DNA, 33 bp, Homo sapien
ttgtcagggtaaaagggaaataccgtgcagctt

SEQ ID NO: 250937 - DNA, 33 bp, Homo sapien
gatggacatttatatcacttccagttttttgcg

SEQ ID NO: 250938 - DNA, 33 bp, Homo sapien
gatggacatttatatcgcttccagttttttgcg

SEQ ID NO: 250939 - DNA, 33 bp, Homo sapien
aatgaaggaagcaagaaaataacatatgattcc

SEQ ID NO: 250940 - DNA, 33 bp, Homo sapien
aatgaaggaagcaagacaataacatatgattcc

SEQ ID NO: 250941 - DNA, 33 bp, Homo sapien
atccatttataatgcaagaaactcaggcacctg

SEQ ID NO: 250942 - DNA, 33 bp, Homo sapien
atccatttataatgcaggaaactcaggcacctg

SEQ ID NO: 250943 - DNA, 33 bp, Homo sapien
ctgctgtctttccaacaccaaaaaacagtgtca

SEQ ID NO: 250944 - DNA, 33 bp, Homo sapien
ctgctgtctttccaacgccaaaaaacagtgtca

SEQ ID NO: 250945 - DNA, 33 bp, Homo sapien
cattagaagtggacacgcatttcaaaaccaaag

SEQ ID NO: 250946 - DNA, 33 bp, Homo sapien
cattagaagtggacactcatttcaaaaccaaag

SEQ ID NO: 250947 - DNA, 33 bp, Homo sapien
tgtatcccctgctgacacgctgatttcagtcca

SEQ ID NO: 250948 - DNA, 33 bp, Homo sapien
tgtatcccctgctgacgcgctgatttcagtcca

SEQ ID NO: 250949 - DNA, 33 bp, Homo sapien
ctaccatctaaggttcacacatttctgctttta

SEQ ID NO: 250950 - DNA, 33 bp, Homo sapien
ctaccatctaaggttcgcacatttctgctttta

SEQ ID NO: 250951 - DNA, 33 bp, Homo sapien
aaaataccatcatccaagatcgtcctcaatttg

SEQ ID NO: 250952 - DNA, 33 bp, Homo sapien
aaaataccatcatccaggatcgtcctcaatttg

SEQ ID NO: 250953 - DNA, 33 bp, Homo sapien
agtaattaatagcaaccgaggtgtttgttaatg

SEQ ID NO: 250954 - DNA, 33 bp, Homo sapien
agtaattaatagcaactgaggtgtttgttaatg

SEQ ID NO: 250955 - DNA, 33 bp, Homo sapien
ttttgagtaagaagccacaaattcaagtgctag

SEQ ID NO: 250956 - DNA, 33 bp, Homo sapien
ttttgagtaagaagccgcaaattcaagtgctag

SEQ ID NO: 250957 - DNA, 33 bp, Homo sapien
ttaaacagtacctgaaaaatggagtagaatgtt

SEQ ID NO: 250958 - DNA, 33 bp, Homo sapien
ttaaacagtacctgaacaatggagtagaatgtt

SEQ ID NO: 250959 - DNA, 33 bp, Homo sapien
agtacaaatgtattcaaattatgcctttctggt

SEQ ID NO: 250960 - DNA, 33 bp, Homo sapien
agtacaaatgtattcagattatgcctttctggt

SEQ ID NO: 250961 - DNA, 33 bp, Homo sapien
ctccaacttatcacataatagcctctatgcgat

SEQ ID NO: 250962 - DNA, 33 bp, Homo sapien
ctccaacttatcacatgatagcctctatgcgat

SEQ ID NO: 250963 - DNA, 33 bp, Homo sapien
atgctattcttcctcacgtttaaacagaaatgc

SEQ ID NO: 250964 - DNA, 33 bp, Homo sapien
atgctattcttcctcatgtttaaacagaaatgc

SEQ ID NO: 250965 - DNA, 33 bp, Homo sapien
ctttccctgactctcacaagatttgtctgtctc

SEQ ID NO: 250966 - DNA, 33 bp, Homo sapien
ctttccctgactctcataagatttgtctgtctc

SEQ ID NO: 250967 - DNA, 33 bp, Homo sapien
tttcctacttctccaaagtgttggaaattgatt

SEQ ID NO: 250968 - DNA, 33 bp, Homo sapien
tttcctacttctccaaggtgttggaaattgatt

SEQ ID NO: 250969 - DNA, 33 bp, Homo sapien
agataagattgggatgaagggaggaatcctgta

SEQ ID NO: 250970 - DNA, 33 bp, Homo sapien
agataagattgggatgcagggaggaatcctgta

SEQ ID NO: 250971 - DNA, 33 bp, Homo sapien
aggactagagccagataaaaggagcacttagcc

SEQ ID NO: 250972 - DNA, 33 bp, Homo sapien
aggactagagccagatgaaaggagcacttagcc

SEQ ID NO: 250973 - DNA, 33 bp, Homo sapien
agatattgacagatgacatagtaacttattttg

SEQ ID NO: 250974 - DNA, 33 bp, Homo sapien
agatattgacagatgagatagtaacttattttg

SEQ ID NO: 250975 - DNA, 33 bp, Homo sapien
ctggtcactcacagaaagaagaggacagtagat

SEQ ID NO: 250976 - DNA, 33 bp, Homo sapien
ctggtcactcacagaaggaagaggacagtagat

SEQ ID NO: 250977 - DNA, 33 bp, Homo sapien
tgggaagaaccgagttcaacaccaggatgtgtt

SEQ ID NO: 250978 - DNA, 33 bp, Homo sapien
tgggaagaaccgagtttaacaccaggatgtgtt

SEQ ID NO: 250979 - DNA, 33 bp, Homo sapien
ccaaaataaagcaagaacttcaaagatgtttca

SEQ ID NO: 250980 - DNA, 33 bp, Homo sapien
ccaaaataaagcaagaccttcaaagatgtttca

SEQ ID NO: 250981 - DNA, 33 bp, Homo sapien
gcttagagcacaaacaggtacacatctggcctc

SEQ ID NO: 250982 - DNA, 33 bp, Homo sapien
gcttagagcacaaacatgtacacatctggcctc

SEQ ID NO: 250983 - DNA, 33 bp, Homo sapien
gttgccagacgcaatacgcttcctcccacctgg

SEQ ID NO: 250984 - DNA, 33 bp, Homo sapien
gttgccagacgcaatatgcttcctcccacctgg

SEQ ID NO: 250985 - DNA, 33 bp, Homo sapien
ccaatgatgccagctacgatgctgtgcgacaga

SEQ ID NO: 250986 - DNA, 33 bp, Homo sapien
ccaatgatgccagctatgatgctgtgcgacaga

SEQ ID NO: 250987 - DNA, 33 bp, Homo sapien
gcagactccagccggccactgtgatgggcattg

SEQ ID NO: 250988 - DNA, 33 bp, Homo sapien
gcagactccagccggctactgtgatgggcattg

SEQ ID NO: 250989 - DNA, 33 bp, Homo sapien
ccatgctcatctctgcacccatccttctgttct

SEQ ID NO: 250990 - DNA, 33 bp, Homo sapien
ccatgctcatctctgcgcccatccttctgttct

SEQ ID NO: 250991 - DNA, 33 bp, Homo sapien
tcgtgagactccacaacggaaggacctgattta

SEQ ID NO: 250992 - DNA, 33 bp, Homo sapien
tcgtgagactccacaatggaaggacctgattta

SEQ ID NO: 250993 - DNA, 33 bp, Homo sapien
cctcagaaaacagatacgcttgtggccgggcgc

SEQ ID NO: 250994 - DNA, 33 bp, Homo sapien
cctcagaaaacagatatgcttgtggccgggcgc

SEQ ID NO: 250995 - DNA, 33 bp, Homo sapien
aaaccatctgtggcaactcaggacaagaagtcc

SEQ ID NO: 250996 - DNA, 33 bp, Homo sapien
aaaccatctgtggcaattcaggacaagaagtcc

SEQ ID NO: 250997 - DNA, 33 bp, Homo sapien
agaccagcttgtgcaacatctctacaaaaaaaa

SEQ ID NO: 250998 - DNA, 33 bp, Homo sapien
agaccagcttgtgcaatatctctacaaaaaaaa

SEQ ID NO: 250999 - DNA, 33 bp, Homo sapien
gcacatcactctgaacaagataatagtggggca

SEQ ID NO: 251000 - DNA, 33 bp, Homo sapien
gcacatcactctgaaccagataatagtggggca

SEQ ID NO: 251001 - DNA, 33 bp, Homo sapien
gctagctgggtatgaacgctgaaaattaggttt

SEQ ID NO: 251002 - DNA, 33 bp, Homo sapien
gctagctgggtatgaatgctgaaaattaggttt

SEQ ID NO: 251003 - DNA, 33 bp, Homo sapien
caaggctgagctggagaaacacagcaagctagt

SEQ ID NO: 251004 - DNA, 33 bp, Homo sapien
caaggctgagctggaggaacacagcaagctagt

SEQ ID NO: 251005 - DNA, 33 bp, Homo sapien
caaaccaggtgaatgacgatagaggtagtggtg

SEQ ID NO: 251006 - DNA, 33 bp, Homo sapien
caaaccaggtgaatgatgatagaggtagtggtg

SEQ ID NO: 251007 - DNA, 33 bp, Homo sapien
cttccaactaactaaccgattgcctaaccagtg

SEQ ID NO: 251008 - DNA, 33 bp, Homo sapien
cttccaactaactaactgattgcctaaccagtg

SEQ ID NO: 251009 - DNA, 33 bp, Homo sapien
tggagcgaggtaaagacgcaagagaagcttcag

SEQ ID NO: 251010 - DNA, 33 bp, Homo sapien
tggagcgaggtaaagatgcaagagaagcttcag

SEQ ID NO: 251011 - DNA, 33 bp, Homo sapien
gcccccaccaagtacactgagaacatgaacaga

SEQ ID NO: 251012 - DNA, 33 bp, Homo sapien
gcccccaccaagtacattgagaacatgaacaga

SEQ ID NO: 251013 - DNA, 33 bp, Homo sapien
ctcacctcggttcttcaatgatgctaatagcta

SEQ ID NO: 251014 - DNA, 33 bp, Homo sapien
ctcacctcggttcttcgatgatgctaatagcta

SEQ ID NO: 251015 - DNA, 33 bp, Homo sapien
ccagtcaaggatttagccattaattctggatgg

SEQ ID NO: 251016 - DNA, 33 bp, Homo sapien
ccagtcaaggatttagtcattaattctggatgg

SEQ ID NO: 251017 - DNA, 33 bp, Homo sapien
caaaacaaaacaaaaaaacacaggatgcccaga

SEQ ID NO: 251018 - DNA, 33 bp, Homo sapien
caaaacaaaacaaaaatacacaggatgcccaga

SEQ ID NO: 251019 - DNA, 33 bp, Homo sapien
ttttttatttgggaaaatttccatgtgcaggca

SEQ ID NO: 251020 - DNA, 33 bp, Homo sapien
ttttttatttgggaaagtttccatgtgcaggca

SEQ ID NO: 251021 - DNA, 33 bp, Homo sapien
aatatctattatggaaagtggaaggcatctata

SEQ ID NO: 251022 - DNA, 33 bp, Homo sapien
aatatctattatggaaggtggaaggcatctata

SEQ ID NO: 251023 - DNA, 33 bp, Homo sapien
ttgccgagccagagcacgagtatgaataggtgt

SEQ ID NO: 251024 - DNA, 33 bp, Homo sapien
ttgccgagccagagcatgagtatgaataggtgt

SEQ ID NO: 251025 - DNA, 33 bp, Homo sapien
cacatgacaactgctacgaccaggccaagaagc

SEQ ID NO: 251026 - DNA, 33 bp, Homo sapien
cacatgacaactgctatgaccaggccaagaagc

SEQ ID NO: 251027 - DNA, 33 bp, Homo sapien
ttctgccactggagggaagcatcgcccactgtt

SEQ ID NO: 251028 - DNA, 33 bp, Homo sapien
ttctgccactggagggcagcatcgcccactgtt

SEQ ID NO: 251029 - DNA, 33 bp, Homo sapien
atccttcaggcctaaacctaggagcagtgcctg

SEQ ID NO: 251030 - DNA, 33 bp, Homo sapien
atccttcaggcctaaatctaggagcagtgcctg

SEQ ID NO: 251031 - DNA, 33 bp, Homo sapien
ggaagatgatgacaaccatcacagtaataataa

SEQ ID NO: 251032 - DNA, 33 bp, Homo sapien
ggaagatgatgacaactatcacagtaataataa

SEQ ID NO: 251033 - DNA, 33 bp, Homo sapien
cggcaggtgcttaataactgctgaaagagtaga

SEQ ID NO: 251034 - DNA, 33 bp, Homo sapien
cggcaggtgcttaatacctgctgaaagagtaga

SEQ ID NO: 251035 - DNA, 33 bp, Homo sapien
tccctgtcgagaggcacgttctcgtgggtaggt

SEQ ID NO: 251036 - DNA, 33 bp, Homo sapien
tccctgtcgagaggcatgttctcgtgggtaggt

SEQ ID NO: 251037 - DNA, 33 bp, Homo sapien
gcttcccaaagataaacgcgactatgacctgtc

SEQ ID NO: 251038 - DNA, 33 bp, Homo sapien
gcttcccaaagataaatgcgactatgacctgtc

SEQ ID NO: 251039 - DNA, 33 bp, Homo sapien
aaggcttaaaggggccaatgtgtcttccccaca

SEQ ID NO: 251040 - DNA, 33 bp, Homo sapien
aaggcttaaaggggccgatgtgtcttccccaca

SEQ ID NO: 251041 - DNA, 33 bp, Homo sapien
gtctttgctgtcttaacaaatgatctccaaatt

SEQ ID NO: 251042 - DNA, 33 bp, Homo sapien
gtctttgctgtcttaagaaatgatctccaaatt

SEQ ID NO: 251043 - DNA, 33 bp, Homo sapien
gtgatgcttggaggagaaattggctagtttaag

SEQ ID NO: 251044 - DNA, 33 bp, Homo sapien
gtgatgcttggaggaggaattggctagtttaag

SEQ ID NO: 251045 - DNA, 33 bp, Homo sapien
acctccctgctcttcaatcatgataaaaatgac

SEQ ID NO: 251046 - DNA, 33 bp, Homo sapien
acctccctgctcttcattcatgataaaaatgac

SEQ ID NO: 251047 - DNA, 33 bp, Homo sapien
atatctaagtatatagacatggaacatttttgg

SEQ ID NO: 251048 - DNA, 33 bp, Homo sapien
atatctaagtatataggcatggaacatttttgg

SEQ ID NO: 251049 - DNA, 33 bp, Homo sapien
cgactgtatataaagcacaagaagagaaaagat

SEQ ID NO: 251050 - DNA, 33 bp, Homo sapien
cgactgtatataaagctcaagaagagaaaagat

SEQ ID NO: 251051 - DNA, 33 bp, Homo sapien
actcatgaattcctaaaaataatattagctttc

SEQ ID NO: 251052 - DNA, 33 bp, Homo sapien
actcatgaattcctaagaataatattagctttc

SEQ ID NO: 251053 - DNA, 33 bp, Homo sapien
cacactttgagaaacacggcctaataccaagat

SEQ ID NO: 251054 - DNA, 33 bp, Homo sapien
cacactttgagaaacatggcctaataccaagat

SEQ ID NO: 251055 - DNA, 33 bp, Homo sapien
atgggtagaagtcccaatcgacctctgatctgg

SEQ ID NO: 251056 - DNA, 33 bp, Homo sapien
atgggtagaagtcccagtcgacctctgatctgg

SEQ ID NO: 251057 - DNA, 33 bp, Homo sapien
ccacctgtctttcccaatcagggttctgtaaga

SEQ ID NO: 251058 - DNA, 33 bp, Homo sapien
ccacctgtctttcccagtcagggttctgtaaga

SEQ ID NO: 251059 - DNA, 33 bp, Homo sapien
attacaggatctggcacggtcttaactgtggct

SEQ ID NO: 251060 - DNA, 33 bp, Homo sapien
attacaggatctggcagggtcttaactgtggct

SEQ ID NO: 251061 - DNA, 33 bp, Homo sapien
gaattactgccattgacccccctcaaagctaag

SEQ ID NO: 251062 - DNA, 33 bp, Homo sapien
gaattactgccattgatccccctcaaagctaag

SEQ ID NO: 251063 - DNA, 33 bp, Homo sapien
ctcaaaacataaaaaaagacaccatgagaaatc

SEQ ID NO: 251064 - DNA, 33 bp, Homo sapien
ctcaaaacataaaaaaggacaccatgagaaatc

SEQ ID NO: 251065 - DNA, 33 bp, Homo sapien
actgaattatattgacacagttcattaaaaatc

SEQ ID NO: 251066 - DNA, 33 bp, Homo sapien
actgaattatattgacgcagttcattaaaaatc

SEQ ID NO: 251067 - DNA, 33 bp, Homo sapien
atccttttggagtttacattttatgtgtggaga

SEQ ID NO: 251068 - DNA, 33 bp, Homo sapien
atccttttggagtttagattttatgtgtggaga

SEQ ID NO: 251069 - DNA, 33 bp, Homo sapien
gcaacacctaaacaaaaggagttgatgcctccg

SEQ ID NO: 251070 - DNA, 33 bp, Homo sapien
gcaacacctaaacaaagggagttgatgcctccg

SEQ ID NO: 251071 - DNA, 33 bp, Homo sapien
gctgcttagaaatcccaatggcatcttagagat

SEQ ID NO: 251072 - DNA, 33 bp, Homo sapien
gctgcttagaaatccctatggcatcttagagat

SEQ ID NO: 251073 - DNA, 33 bp, Homo sapien
taagccaagaatggtgcatatgcctggagtccc

SEQ ID NO: 251074 - DNA, 33 bp, Homo sapien
taagccaagaatggtgtatatgcctggagtccc

SEQ ID NO: 251075 - DNA, 33 bp, Homo sapien
agtctggataagaaaccagcagaagagagcaca

SEQ ID NO: 251076 - DNA, 33 bp, Homo sapien
agtctggataagaaacgagcagaagagagcaca

SEQ ID NO: 251077 - DNA, 33 bp, Homo sapien
ttgccctgctacatataagtgtccatgtttcag

SEQ ID NO: 251078 - DNA, 33 bp, Homo sapien
ttgccctgctacatatgagtgtccatgtttcag

SEQ ID NO: 251079 - DNA, 33 bp, Homo sapien
acctctcattctaatacggctggacaaattgag

SEQ ID NO: 251080 - DNA, 33 bp, Homo sapien
acctctcattctaatatggctggacaaattgag

SEQ ID NO: 251081 - DNA, 33 bp, Homo sapien
cctctgattcaggtggaatttatctgttacata

SEQ ID NO: 251082 - DNA, 33 bp, Homo sapien
cctctgattcaggtggtatttatctgttacata

SEQ ID NO: 251083 - DNA, 33 bp, Homo sapien
gactcaagccagtcaccgaaaacaagctcgatc

SEQ ID NO: 251084 - DNA, 33 bp, Homo sapien
gactcaagccagtcactgaaaacaagctcgatc

SEQ ID NO: 251085 - DNA, 33 bp, Homo sapien
atcatagtagctgtcacgttaacctattcaaga

SEQ ID NO: 251086 - DNA, 33 bp, Homo sapien
atcatagtagctgtcatgttaacctattcaaga

SEQ ID NO: 251087 - DNA, 33 bp, Homo sapien
cgaagtctgtcagctccctcaagccccgcccaa

SEQ ID NO: 251088 - DNA, 33 bp, Homo sapien
cgaagtctgtcagctctctcaagccccgcccaa

SEQ ID NO: 251089 - DNA, 33 bp, Homo sapien
aaaatccaaatagccacggggcgttgtgcctct

SEQ ID NO: 251090 - DNA, 33 bp, Homo sapien
aaaatccaaatagccatggggcgttgtgcctct

SEQ ID NO: 251091 - DNA, 33 bp, Homo sapien; identical to SEQ ID NO: 251089

SEQ ID NO: 251092 - DNA, 33 bp, Homo sapien; identical to SEQ ID NO: 251090

SEQ ID NO: 251093 - DNA, 33 bp, Homo sapien
tctgggttcaaattcaagttgtcctctgcccct

SEQ ID NO: 251094 - DNA, 33 bp, Homo sapien
tctgggttcaaattcaggttgtcctctgcccct

SEQ ID NO: 251095 - DNA, 33 bp, Homo sapien
ttcgctgggattttcacggccttgctgtgtggc

SEQ ID NO: 251096 - DNA, 33 bp, Homo sapien
ttcgctgggattttcatggccttgctgtgtggc

SEQ ID NO: 251097 - DNA, 33 bp, Homo sapien
tttgctctatctgtcccgatggtttgatttttc

SEQ ID NO: 251098 - DNA, 33 bp, Homo sapien
tttgctctatctgtcctgatggtttgatttttc

SEQ ID NO: 251099 - DNA, 33 bp, Homo sapien
gagcaaaactcctaaaatgtacctggatctctc

SEQ ID NO: 251100 - DNA, 33 bp, Homo sapien
gagcaaaactcctaaagtgtacctggatctctc

SEQ ID NO: 251101 - DNA, 33 bp, Homo sapien
atgttccaggagaagcagagataaaggaggctg

SEQ ID NO: 251102 - DNA, 33 bp, Homo sapien
atgttccaggagaagcggagataaaggaggctg

SEQ ID NO: 251103 - DNA, 33 bp, Homo sapien
tggccacaaagagggaatacggaagatcctttg

SEQ ID NO: 251104 - DNA, 33 bp, Homo sapien
tggccacaaagagggagtacggaagatcctttg

SEQ ID NO: 251105 - DNA, 33 bp, Homo sapien
gagggacgaggaagagccagtcatctaaaaagc

SEQ ID NO: 251106 - DNA, 33 bp, Homo sapien
gagggacgaggaagagtcagtcatctaaaaagc

SEQ ID NO: 251107 - DNA, 33 bp, Homo sapien
gcgggctccactgggcaaacttacgtacaggct

SEQ ID NO: 251108 - DNA, 33 bp, Homo sapien
gcgggctccactgggccaacttacgtacaggct

SEQ ID NO: 251109 - DNA, 33 bp, Homo sapien
gtctcactgaatgcacactaaggccctgtgagg

SEQ ID NO: 251110 - DNA, 33 bp, Homo sapien
gtctcactgaatgcacgctaaggccctgtgagg

SEQ ID NO: 251111 - DNA, 33 bp, Homo sapien
tggaagtcacaaaatacctaacctgggggccat

SEQ ID NO: 251112 - DNA, 33 bp, Homo sapien
tggaagtcacaaaatatctaacctgggggccat

SEQ ID NO: 251113 - DNA, 33 bp, Homo sapien
gacttatcttttgaaggaaggacagaagtcacc

SEQ ID NO: 251114 - DNA, 33 bp, Homo sapien
gacttatcttttgaagtaaggacagaagtcacc

SEQ ID NO: 251115 - DNA, 33 bp, Homo sapien
tttctcaggaacctggcaagcgcaatgttgcaa

SEQ ID NO: 251116 - DNA, 33 bp, Homo sapien
tttctcaggaacctggtaagcgcaatgttgcaa

SEQ ID NO: 251117 - DNA, 33 bp, Homo sapien
ccacaagagtgggaaaaccagaatgagcagaag

SEQ ID NO: 251118 - DNA, 33 bp, Homo sapien
ccacaagagtgggaaagccagaatgagcagaag

SEQ ID NO: 251119 - DNA, 33 bp, Homo sapien
aggtaattgagctgatcactattttggaaacac

SEQ ID NO: 251120 - DNA, 33 bp, Homo sapien
aggtaattgagctgatgactattttggaaacac

SEQ ID NO: 251121 - DNA, 33 bp, Homo sapien
gaaagcccaaagcataaccatcctgccctttaa

SEQ ID NO: 251122 - DNA, 33 bp, Homo sapien
gaaagcccaaagcatacccatcctgccctttaa

SEQ ID NO: 251123 - DNA, 33 bp, Homo sapien
gtgctttatttcagtacgaggaaaaacaacaac

SEQ ID NO: 251124 - DNA, 33 bp, Homo sapien
gtgctttatttcagtatgaggaaaaacaacaac

SEQ ID NO: 251125 - DNA, 33 bp, Homo sapien
ggacataacaagtgaaagaagttttgggctaaa

SEQ ID NO: 251126 - DNA, 33 bp, Homo sapien
ggacataacaagtgaaggaagttttgggctaaa

SEQ ID NO: 251127 - DNA, 33 bp, Homo sapien
catccttcagtcctcagtataataccaacagta

SEQ ID NO: 251128 - DNA, 33 bp, Homo sapien
catccttcagtcctcattataataccaacagta

SEQ ID NO: 251129 - DNA, 33 bp, Homo sapien
gtgggagtgagtggaaatgccatgtctttcaca

SEQ ID NO: 251130 - DNA, 33 bp, Homo sapien
gtgggagtgagtggaactgccatgtctttcaca

SEQ ID NO: 251131 - DNA, 33 bp, Homo sapien
agaagtgtcgcattagccagagggaggcggcgc

SEQ ID NO: 251132 - DNA, 33 bp, Homo sapien
agaagtgtcgcattagtcagagggaggcggcgc

SEQ ID NO: 251133 - DNA, 33 bp, Homo sapien
ggagactcggagatgacgctccgccccgcactt

SEQ ID NO: 251134 - DNA, 33 bp, Homo sapien
ggagactcggagatgatgctccgccccgcactt

SEQ ID NO: 251135 - DNA, 33 bp, Homo sapien
ctatgactcgggctccaaagatgagggtcccaa

SEQ ID NO: 251136 - DNA, 33 bp, Homo sapien
ctatgactcgggctccgaagatgagggtcccaa

SEQ ID NO: 251137 - DNA, 33 bp, Homo sapien
tgtaaagtctgatgaaagcaggggtggtgattc

SEQ ID NO: 251138 - DNA, 33 bp, Homo sapien
tgtaaagtctgatgaaggcaggggtggtgattc

SEQ ID NO: 251139 - DNA, 33 bp, Homo sapien
tgggacaccatgcagcaatccacataaatgaac

SEQ ID NO: 251140 - DNA, 33 bp, Homo sapien
tgggacaccatgcagccatccacataaatgaac

SEQ ID NO: 251141 - DNA, 33 bp, Homo sapien
tcctgccttagccaaaccctgagtgctatagag

SEQ ID NO: 251142 - DNA, 33 bp, Homo sapien
tcctgccttagccaaagcctgagtgctatagag

SEQ ID NO: 251143 - DNA, 33 bp, Homo sapien
tgggctgttattcaaaccaatcctctggctaaa

SEQ ID NO: 251144 - DNA, 33 bp, Homo sapien
tgggctgttattcaaatcaatcctctggctaaa

SEQ ID NO: 251145 - DNA, 33 bp, Homo sapien
ggagccccctgagtccaagctgcttcatctgaa

SEQ ID NO: 251146 - DNA, 33 bp, Homo sapien
ggagccccctgagtccgagctgcttcatctgaa

SEQ ID NO: 251147 - DNA, 33 bp, Homo sapien
caggctgtctattacaacacccagaattcctgc

SEQ ID NO: 251148 - DNA, 33 bp, Homo sapien
caggctgtctattacagcacccagaattcctgc

SEQ ID NO: 251149 - DNA, 33 bp, Homo sapien
agaatgctgatgacataagagactgatcaaggc

SEQ ID NO: 251150 - DNA, 33 bp, Homo sapien
agaatgctgatgacattagagactgatcaaggc

SEQ ID NO: 251151 - DNA, 33 bp, Homo sapien
aattgaggaggagctacagagaagcctgaaaag

SEQ ID NO: 251152 - DNA, 33 bp, Homo sapien
aattgaggaggagctatagagaagcctgaaaag

SEQ ID NO: 251153 - DNA, 33 bp, Homo sapien
ccatgtttagtttagacgcaggtggaggaggat

SEQ ID NO: 251154 - DNA, 33 bp, Homo sapien
ccatgtttagtttagatgcaggtggaggaggat

SEQ ID NO: 251155 - DNA, 33 bp, Homo sapien
agtgtcattctatcctaaccttccaaataagaa

SEQ ID NO: 251156 - DNA, 33 bp, Homo sapien
agtgtcattctatccttaccttccaaataagaa

SEQ ID NO: 251157 - DNA, 33 bp, Homo sapien
gaaaccttacaggttacgtcatcctcgtagaga

SEQ ID NO: 251158 - DNA, 33 bp, Homo sapien
gaaaccttacaggttatgtcatcctcgtagaga

SEQ ID NO: 251159 - DNA, 33 bp, Homo sapien
taaggtttctttacaacagaaggtgggtttgac

SEQ ID NO: 251160 - DNA, 33 bp, Homo sapien
taaggtttctttacaagagaaggtgggtttgac

SEQ ID NO: 251161 - DNA, 33 bp, Homo sapien
tcagatttgaaaatacaagtgaaaagtcaatgt

SEQ ID NO: 251162 - DNA, 33 bp, Homo sapien
tcagatttgaaaatactagtgaaaagtcaatgt

SEQ ID NO: 251163 - DNA, 33 bp, Homo sapien
ctcatacctcagtcacacttagaggaatagcta

SEQ ID NO: 251164 - DNA, 33 bp, Homo sapien
ctcatacctcagtcacccttagaggaatagcta

SEQ ID NO: 251165 - DNA, 33 bp, Homo sapien
catatatttcccctgccaacgcacctgtggtag

SEQ ID NO: 251166 - DNA, 33 bp, Homo sapien
catatatttcccctgctaacgcacctgtggtag

SEQ ID NO: 251167 - DNA, 33 bp, Homo sapien
ggccttaagatcagacagacttttatcctaacg

SEQ ID NO: 251168 - DNA, 33 bp, Homo sapien
ggccttaagatcagacggacttttatcctaacg

SEQ ID NO: 251169 - DNA, 33 bp, Homo sapien
ctcattacctaagaaaccattggtaggtgcttg

SEQ ID NO: 251170 - DNA, 33 bp, Homo sapien
ctcattacctaagaaagcattggtaggtgcttg

SEQ ID NO: 251171 - DNA, 33 bp, Homo sapien
agatcagtttgaggaaaattgctatcttaatga

SEQ ID NO: 251172 - DNA, 33 bp, Homo sapien
agatcagtttgaggaagattgctatcttaatga

SEQ ID NO: 251173 - DNA, 33 bp, Homo sapien
attcacaatgcctatcaaaatccctgcaggctt

SEQ ID NO: 251174 - DNA, 33 bp, Homo sapien
attcacaatgcctatcgaaatccctgcaggctt

SEQ ID NO: 251175 - DNA, 33 bp, Homo sapien
cttccacctccaacttatatcaaccccatttga

SEQ ID NO: 251176 - DNA, 33 bp, Homo sapien
cttccacctccaacttgtatcaaccccatttga

SEQ ID NO: 251177 - DNA, 33 bp, Homo sapien
tgtaaattgttctgcaaccacaaagttagagaa

SEQ ID NO: 251178 - DNA, 33 bp, Homo sapien
tgtaaattgttctgcagccacaaagttagagaa

SEQ ID NO: 251179 - DNA, 33 bp, Homo sapien
cgcaccagaggttttaaccaccattgctttgcc

SEQ ID NO: 251180 - DNA, 33 bp, Homo sapien
cgcaccagaggttttacccaccattgctttgcc

SEQ ID NO: 251181 - DNA, 33 bp, Homo sapien
gaagcatattgccatcaaagcctttaatgtggg

SEQ ID NO: 251182 - DNA, 33 bp, Homo sapien
gaagcatattgccatcgaagcctttaatgtggg

SEQ ID NO: 251183 - DNA, 33 bp, Homo sapien
ttcctcaccaattcacactataaatactgtagt

SEQ ID NO: 251184 - DNA, 33 bp, Homo sapien
ttcctcaccaattcacgctataaatactgtagt

SEQ ID NO: 251185 - DNA, 33 bp, Homo sapien
caagctacagtaagcaaaactaagtgatggctg

SEQ ID NO: 251186 - DNA, 33 bp, Homo sapien
caagctacagtaagcagaactaagtgatggctg

SEQ ID NO: 251187 - DNA, 33 bp, Homo sapien
gaatcaagagtgggaacgtctaaggaccgaagt

SEQ ID NO: 251188 - DNA, 33 bp, Homo sapien
gaatcaagagtgggaatgtctaaggaccgaagt

SEQ ID NO: 251189 - DNA, 33 bp, Homo sapien
acatacacatcatatacaccctattggttctat

SEQ ID NO: 251190 - DNA, 33 bp, Homo sapien
acatacacatcatatataccctattggttctat

SEQ ID NO: 251191 - DNA, 33 bp, Homo sapien
tcttgacacatacacacgaagctgactgtgagt

SEQ ID NO: 251192 - DNA, 33 bp, Homo sapien
tcttgacacatacacatgaagctgactgtgagt

SEQ ID NO: 251193 - DNA, 33 bp, Homo sapien
gttatacatacagttacagatgatcaagaattc

SEQ ID NO: 251194 - DNA, 33 bp, Homo sapien
gttatacatacagttatagatgatcaagaattc

SEQ ID NO: 251195 - DNA, 33 bp, Homo sapien
ccttgcagtagttcaccgagaatgatgatttcc

SEQ ID NO: 251196 - DNA, 33 bp, Homo sapien
ccttgcagtagttcactgagaatgatgatttcc

SEQ ID NO: 251197 - DNA, 33 bp, Homo sapien
aactaactgagtctaccagtttgaggctgtaat

SEQ ID NO: 251198 - DNA, 33 bp, Homo sapien
aactaactgagtctactagtttgaggctgtaat

SEQ ID NO: 251199 - DNA, 33 bp, Homo sapien
ccacagccataagatcacactgaggactacagg

SEQ ID NO: 251200 - DNA, 33 bp, Homo sapien
ccacagccataagatcgcactgaggactacagg

SEQ ID NO: 251201 - DNA, 33 bp, Homo sapien
tctcacaatcacagaactaagacctcaagttaa

SEQ ID NO: 251202 - DNA, 33 bp, Homo sapien
tctcacaatcacagaattaagacctcaagttaa

SEQ ID NO: 251203 - DNA, 33 bp, Homo sapien
cgtcaaatctgctaccactcactctggtgtgcc

SEQ ID NO: 251204 - DNA, 33 bp, Homo sapien
cgtcaaatctgctaccgctcactctggtgtgcc

SEQ ID NO: 251205 - DNA, 33 bp, Homo sapien
aagagctcacaactgaagaaacaaatattaact

SEQ ID NO: 251206 - DNA, 33 bp, Homo sapien
aagagctcacaactgaggaaacaaatattaact

SEQ ID NO: 251207 - DNA, 33 bp, Homo sapien
cactcaaaaagtttcaaaatttagagcacttca

SEQ ID NO: 251208 - DNA, 33 bp, Homo sapien
cactcaaaaagtttcagaatttagagcacttca

SEQ ID NO: 251209 - DNA, 33 bp, Homo sapien
tacaacttcatgttccaaattgagagtcctcct

SEQ ID NO: 251210 - DNA, 33 bp, Homo sapien
tacaacttcatgttccgaattgagagtcctcct

SEQ ID NO: 251211 - DNA, 33 bp, Homo sapien
atgtcagtttatacttaaaagtctgctgtgatg

SEQ ID NO: 251212 - DNA, 33 bp, Homo sapien
atgtcagtttatacttcaaagtctgctgtgatg

SEQ ID NO: 251213 - DNA, 33 bp, Homo sapien
agtgcattgtcaaaacaggaagatggtcatatt

SEQ ID NO: 251214 - DNA, 33 bp, Homo sapien
agtgcattgtcaaaacgggaagatggtcatatt

SEQ ID NO: 251215 - DNA, 33 bp, Homo sapien
cgtctgtcatccctcaaagagacacacacaaga

SEQ ID NO: 251216 - DNA, 33 bp, Homo sapien
cgtctgtcatccctcagagagacacacacaaga

SEQ ID NO: 251217 - DNA, 33 bp, Homo sapien
catgtcacttttgaaacgaaaatgccacactga

SEQ ID NO: 251218 - DNA, 33 bp, Homo sapien
catgtcacttttgaaatgaaaatgccacactga

SEQ ID NO: 251219 - DNA, 33 bp, Homo sapien
agaacatcaaggcttacgtctgacctggctcta

SEQ ID NO: 251220 - DNA, 33 bp, Homo sapien
agaacatcaaggcttaggtctgacctggctcta

SEQ ID NO: 251221 - DNA, 33 bp, Homo sapien
taatagaattcttctaaagtgcacctggaatag

SEQ ID NO: 251222 - DNA, 33 bp, Homo sapien
taatagaattcttctagagtgcacctggaatag

SEQ ID NO: 251223 - DNA, 33 bp, Homo sapien
tgccagtgatcacaagccccgattttcatgagc

SEQ ID NO: 251224 - DNA, 33 bp, Homo sapien
tgccagtgatcacaagtcccgattttcatgagc

SEQ ID NO: 251225 - DNA, 33 bp, Homo sapien
tgagtcaaggtaaactcagcagtgatacgggaa

SEQ ID NO: 251226 - DNA, 33 bp, Homo sapien
tgagtcaaggtaaactgagcagtgatacgggaa

SEQ ID NO: 251227 - DNA, 33 bp, Homo sapien
agagcaggtgcagaaccggtatggatgagctgt

SEQ ID NO: 251228 - DNA, 33 bp, Homo sapien
agagcaggtgcagaactggtatggatgagctgt

SEQ ID NO: 251229 - DNA, 33 bp, Homo sapien
atcggaataaagaaacggagcctcagagcaggc

SEQ ID NO: 251230 - DNA, 33 bp, Homo sapien
atcggaataaagaaactgagcctcagagcaggc

SEQ ID NO: 251231 - DNA, 33 bp, Homo sapien
tgtgattatattgggccagataatccaggataa

SEQ ID NO: 251232 - DNA, 33 bp, Homo sapien
tgtgattatattgggctagataatccaggataa

SEQ ID NO: 251233 - DNA, 33 bp, Homo sapien
gtatgcctgtctcagactccacttctagggaat

SEQ ID NO: 251234 - DNA, 33 bp, Homo sapien
gtatgcctgtctcagattccacttctagggaat

SEQ ID NO: 251235 - DNA, 33 bp, Homo sapien
gtagtcacggggccacaccaaaatgcaagagag

SEQ ID NO: 251236 - DNA, 33 bp, Homo sapien
gtagtcacggggccacgccaaaatgcaagagag

SEQ ID NO: 251237 - DNA, 33 bp, Homo sapien
cggtgggatatctgtcaacggtaaatggcttta

SEQ ID NO: 251238 - DNA, 33 bp, Homo sapien
cggtgggatatctgtcgacggtaaatggcttta

SEQ ID NO: 251239 - DNA, 33 bp, Homo sapien
taaaggctgaaggtcacggggactcaactcaga

SEQ ID NO: 251240 - DNA, 33 bp, Homo sapien
taaaggctgaaggtcatggggactcaactcaga

SEQ ID NO: 251241 - DNA, 33 bp, Homo sapien
gcacgtgtaaaataccagagggcacgcaaggaa

SEQ ID NO: 251242 - DNA, 33 bp, Homo sapien
gcacgtgtaaaataccggagggcacgcaaggaa

SEQ ID NO: 251243 - DNA, 33 bp, Homo sapien
tagaaatcctcttttaactcacttcaaattatt

SEQ ID NO: 251244 - DNA, 33 bp, Homo sapien
tagaaatcctcttttacctcacttcaaattatt

SEQ ID NO: 251245 - DNA, 33 bp, Homo sapien
cccaaaaatgcatgataaatagtggccattatt

SEQ ID NO: 251246 - DNA, 33 bp, Homo sapien
cccaaaaatgcatgatgaatagtggccattatt

SEQ ID NO: 251247 - DNA, 33 bp, Homo sapien
ccctcaatcacggaaaaacacttgtcccagaga

SEQ ID NO: 251248 - DNA, 33 bp, Homo sapien
ccctcaatcacggaaacacacttgtcccagaga

SEQ ID NO: 251249 - DNA, 33 bp, Homo sapien
tctcagacgattctgtgaagtctatgtgggcta

SEQ ID NO: 251250 - DNA, 33 bp, Homo sapien
tctcagacgattctgttaagtctatgtgggcta

SEQ ID NO: 251251 - DNA, 33 bp, Homo sapien
agtcaggtgagctcaacggggaccaggtgtcgc

SEQ ID NO: 251252 - DNA, 33 bp, Homo sapien
agtcaggtgagctcaatggggaccaggtgtcgc

SEQ ID NO: 251253 - DNA, 33 bp, Homo sapien
tccacagccctggaacagtggagaaggaggcaa

SEQ ID NO: 251254 - DNA, 33 bp, Homo sapien
tccacagccctggaactgtggagaaggaggcaa

SEQ ID NO: 251255 - DNA, 33 bp, Homo sapien
cctcccgctgagctcacgatttctccagctgcc

SEQ ID NO: 251256 - DNA, 33 bp, Homo sapien
cctcccgctgagctcatgatttctccagctgcc

SEQ ID NO: 251257 - DNA, 33 bp, Homo sapien
cctgtgtaactgtttaacccagcattttccaaa

SEQ ID NO: 251258 - DNA, 33 bp, Homo sapien
cctgtgtaactgtttagcccagcattttccaaa

SEQ ID NO: 251259 - DNA, 33 bp, Homo sapien
caggactcaactgaaccgtctccctctgtaata

SEQ ID NO: 251260 - DNA, 33 bp, Homo sapien
caggactcaactgaactgtctccctctgtaata

SEQ ID NO: 251261 - DNA, 33 bp, Homo sapien
aaggaggcttgataacggcggtgttctccacaa

SEQ ID NO: 251262 - DNA, 33 bp, Homo sapien
aaggaggcttgataactgcggtgttctccacaa

SEQ ID NO: 251263 - DNA, 33 bp, Homo sapien
tcagtatcaaaatggaatcacttatgtcaaacc

SEQ ID NO: 251264 - DNA, 33 bp, Homo sapien
tcagtatcaaaatggagtcacttatgtcaaacc

SEQ ID NO: 251265 - DNA, 33 bp, Homo sapien
aaactggaacctacgacataggattgatgtaag

SEQ ID NO: 251266 - DNA, 33 bp, Homo sapien
aaactggaacctacgatataggattgatgtaag

SEQ ID NO: 251267 - DNA, 33 bp, Homo sapien
ttttgttaggtgtaacagtagttttgtggttat

SEQ ID NO: 251268 - DNA, 33 bp, Homo sapien
ttttgttaggtgtaacggtagttttgtggttat

SEQ ID NO: 251269 - DNA, 33 bp, Homo sapien
gatccactgggttaaaagagtgccaggtgaatc

SEQ ID NO: 251270 - DNA, 33 bp, Homo sapien
gatccactgggttaaatgagtgccaggtgaatc

SEQ ID NO: 251271 - DNA, 33 bp, Homo sapien
ttcccctggactcttacgggccattatatgcta

SEQ ID NO: 251272 - DNA, 33 bp, Homo sapien
ttcccctggactcttatgggccattatatgcta

SEQ ID NO: 251273 - DNA, 33 bp, Homo sapien
agctcactgtaacctcaaatacctgggcttatg

SEQ ID NO: 251274 - DNA, 33 bp, Homo sapien
agctcactgtaacctccaatacctgggcttatg

SEQ ID NO: 251275 - DNA, 33 bp, Homo sapien
atgataataggacctacatcctaagcctactgt

SEQ ID NO: 251276 - DNA, 33 bp, Homo sapien
atgataataggacctatatcctaagcctactgt

SEQ ID NO: 251277 - DNA, 33 bp, Homo sapien
aaggatgtaagtaaaacgtaaaactccactcct

SEQ ID NO: 251278 - DNA, 33 bp, Homo sapien
aaggatgtaagtaaaatgtaaaactccactcct

SEQ ID NO: 251279 - DNA, 33 bp, Homo sapien
attcttaataggaaacggcgacatttttgtcaa

SEQ ID NO: 251280 - DNA, 33 bp, Homo sapien
attcttaataggaaactgcgacatttttgtcaa

SEQ ID NO: 251281 - DNA, 33 bp, Homo sapien
cctttgtcattttacacagtgcatgtggcccaa

SEQ ID NO: 251282 - DNA, 33 bp, Homo sapien
cctttgtcattttacatagtgcatgtggcccaa

SEQ ID NO: 251283 - DNA, 33 bp, Homo sapien
aacataggacatcgaacggtcaattcattgtct

SEQ ID NO: 251284 - DNA, 33 bp, Homo sapien
aacataggacatcgaagggtcaattcattgtct

SEQ ID NO: 251285 - DNA, 33 bp, Homo sapien
ctcttccaaccctttaagaataatcgtgtaaga

SEQ ID NO: 251286 - DNA, 33 bp, Homo sapien
ctcttccaaccctttatgaataatcgtgtaaga

SEQ ID NO: 251287 - DNA, 33 bp, Homo sapien
tggacagatcatacacccagcaaagagcagcaa

SEQ ID NO: 251288 - DNA, 33 bp, Homo sapien
tggacagatcatacactcagcaaagagcagcaa

SEQ ID NO: 251289 - DNA, 33 bp, Homo sapien
ttaatttgctcctgtaagatatttatagacact

SEQ ID NO: 251290 - DNA, 33 bp, Homo sapien
ttaatttgctcctgtaggatatttatagacact

SEQ ID NO: 251291 - DNA, 33 bp, Homo sapien
tttactggttgttggaactccggcagcacccaa

SEQ ID NO: 251292 - DNA, 33 bp, Homo sapien
tttactggttgttggacctccggcagcacccaa

SEQ ID NO: 251293 - DNA, 33 bp, Homo sapien
cctcacagtgttatcaaattaaaagaaatatga

SEQ ID NO: 251294 - DNA, 33 bp, Homo sapien
cctcacagtgttatcagattaaaagaaatatga

SEQ ID NO: 251295 - DNA, 33 bp, Homo sapien
atttgccagcatttgacgtgatgcttcatggtt

SEQ ID NO: 251296 - DNA, 33 bp, Homo sapien
atttgccagcatttgatgtgatgcttcatggtt

SEQ ID NO: 251297 - DNA, 33 bp, Homo sapien
ttcattcacagtgttaggtaaccactatttctg

SEQ ID NO: 251298 - DNA, 33 bp, Homo sapien
ttcattcacagtgttatgtaaccactatttctg

SEQ ID NO: 251299 - DNA, 33 bp, Homo sapien
agagtctctggtactcaataaatatttgttgaa

SEQ ID NO: 251300 - DNA, 33 bp, Homo sapien
agagtctctggtactcgataaatatttgttgaa

SEQ ID NO: 251301 - DNA, 33 bp, Homo sapien
agctgcttcagaagggaacatttacaggaacct

SEQ ID NO: 251302 - DNA, 33 bp, Homo sapien
agctgcttcagaaggggacatttacaggaacct

SEQ ID NO: 251303 - DNA, 33 bp, Homo sapien
agccacgttatgaaggaacacaaagatgctaga

SEQ ID NO: 251304 - DNA, 33 bp, Homo sapien
agccacgttatgaagggacacaaagatgctaga

SEQ ID NO: 251305 - DNA, 33 bp, Homo sapien
tgctaagctggcaggacataagcctaaagctct

SEQ ID NO: 251306 - DNA, 33 bp, Homo sapien
tgctaagctggcaggatataagcctaaagctct

SEQ ID NO: 251307 - DNA, 33 bp, Homo sapien
atttcagattgagctagagggggatactgggca

SEQ ID NO: 251308 - DNA, 33 bp, Homo sapien
atttcagattgagctatagggggatactgggca

SEQ ID NO: 251309 - DNA, 33 bp, Homo sapien
ggaatggagatggtgacatgggataaagcaggt

SEQ ID NO: 251310 - DNA, 33 bp, Homo sapien
ggaatggagatggtgatatgggataaagcaggt

SEQ ID NO: 251311 - DNA, 33 bp, Homo sapien
tgctacacccctgatacggacgagctctaagga

SEQ ID NO: 251312 - DNA, 33 bp, Homo sapien
tgctacacccctgatatggacgagctctaagga

SEQ ID NO: 251313 - DNA, 33 bp, Homo sapien
ttacccagagtgtgggccatatccctacccggt

SEQ ID NO: 251314 - DNA, 33 bp, Homo sapien
ttacccagagtgtgggtcatatccctacccggt

SEQ ID NO: 251315 - DNA, 33 bp, Homo sapien
cccactcttccctttcaccatctcacaggctgg

SEQ ID NO: 251316 - DNA, 33 bp, Homo sapien
cccactcttccctttctccatctcacaggctgg

SEQ ID NO: 251317 - DNA, 33 bp, Homo sapien
atcaatgagaaggcacagaaggtggtacagcta

SEQ ID NO: 251318 - DNA, 33 bp, Homo sapien
atcaatgagaaggcacggaaggtggtacagcta

SEQ ID NO: 251319 - DNA, 33 bp, Homo sapien
ggaactggggcgagaaaggtaagccagttgcca

SEQ ID NO: 251320 - DNA, 33 bp, Homo sapien
ggaactggggcgagaagggtaagccagttgcca

SEQ ID NO: 251321 - DNA, 33 bp, Homo sapien
ttcttcataactgccaagactaaaacaacacgt

SEQ ID NO: 251322 - DNA, 33 bp, Homo sapien
ttcttcataactgccacgactaaaacaacacgt

SEQ ID NO: 251323 - DNA, 33 bp, Homo sapien
taatacgtgactccaccctgttccaataatgtg

SEQ ID NO: 251324 - DNA, 33 bp, Homo sapien
taatacgtgactccactctgttccaataatgtg

SEQ ID NO: 251325 - DNA, 33 bp, Homo sapien
gtatttttagcacagacggagtttccaccacgt

SEQ ID NO: 251326 - DNA, 33 bp, Homo sapien
gtatttttagcacagatggagtttccaccacgt

SEQ ID NO: 251327 - DNA, 33 bp, Homo sapien
cttaaaccagctatcacaggaccaatggtaaag

SEQ ID NO: 251328 - DNA, 33 bp, Homo sapien
cttaaaccagctatcataggaccaatggtaaag

SEQ ID NO: 251329 - DNA, 33 bp, Homo sapien
ggctttgtggttaacgcaagttgggtttctgtc

SEQ ID NO: 251330 - DNA, 33 bp, Homo sapien
ggctttgtggttaacgtaagttgggtttctgtc

SEQ ID NO: 251331 - DNA, 33 bp, Homo sapien
ctacggggtcacttcccgaactgggttacctct

SEQ ID NO: 251332 - DNA, 33 bp, Homo sapien
ctacggggtcacttcctgaactgggttacctct

SEQ ID NO: 251333 - DNA, 33 bp, Homo sapien
gaaatgatagatttgccaggaggtgaaagatgg

SEQ ID NO: 251334 - DNA, 33 bp, Homo sapien
gaaatgatagatttgctaggaggtgaaagatgg

SEQ ID NO: 251335 - DNA, 33 bp, Homo sapien
ttaccaacctgaagaaaaccaaggagaggcttg

SEQ ID NO: 251336 - DNA, 33 bp, Homo sapien
ttaccaacctgaagaagaccaaggagaggcttg

SEQ ID NO: 251337 - DNA, 33 bp, Homo sapien
atatcatgtcaaaagagaagcatgattctttca

SEQ ID NO: 251338 - DNA, 33 bp, Homo sapien
atatcatgtcaaaagataagcatgattctttca

SEQ ID NO: 251339 - DNA, 33 bp, Homo sapien
gtgtaacaaatagaaactaatacagcctcagac

SEQ ID NO: 251340 - DNA, 33 bp, Homo sapien
gtgtaacaaatagaaattaatacagcctcagac

SEQ ID NO: 251341 - DNA, 33 bp, Homo sapien
gctgtaagacggagagaaactttgctgaaaggg

SEQ ID NO: 251342 - DNA, 33 bp, Homo sapien
gctgtaagacggagaggaactttgctgaaaggg

SEQ ID NO: 251343 - DNA, 33 bp, Homo sapien
cgggtaaatcaagcgcaagtgaatcaaatcctg

SEQ ID NO: 251344 - DNA, 33 bp, Homo sapien
cgggtaaatcaagcgcgagtgaatcaaatcctg

SEQ ID NO: 251345 - DNA, 33 bp, Homo sapien
tgtatttgagcccacaaatatctactgagcacc

SEQ ID NO: 251346 - DNA, 33 bp, Homo sapien
tgtatttgagcccacagatatctactgagcacc

SEQ ID NO: 251347 - DNA, 33 bp, Homo sapien
cccagagaggaagagacgtctagctatccctgg

SEQ ID NO: 251348 - DNA, 33 bp, Homo sapien
cccagagaggaagagatgtctagctatccctgg

SEQ ID NO: 251349 - DNA, 33 bp, Homo sapien
atgacaaagagcagagaccattttcacacctat

SEQ ID NO: 251350 - DNA, 33 bp, Homo sapien
atgacaaagagcagaggccattttcacacctat

SEQ ID NO: 251351 - DNA, 33 bp, Homo sapien
gtcctgctgagtctccacacctgtttgccctgc

SEQ ID NO: 251352 - DNA, 33 bp, Homo sapien
gtcctgctgagtctccgcacctgtttgccctgc

SEQ ID NO: 251353 - DNA, 33 bp, Homo sapien
acgtgtgttactaagacgtggagaagtgattcg

SEQ ID NO: 251354 - DNA, 33 bp, Homo sapien
acgtgtgttactaagatgtggagaagtgattcg

SEQ ID NO: 251355 - DNA, 33 bp, Homo sapien
gatgtgaaagaactgcagagaggacgttctcca

SEQ ID NO: 251356 - DNA, 33 bp, Homo sapien
gatgtgaaagaactgcggagaggacgttctcca

SEQ ID NO: 251357 - DNA, 33 bp, Homo sapien
ctggattcaattcctaactctaacaccattttg

SEQ ID NO: 251358 - DNA, 33 bp, Homo sapien
ctggattcaattcctagctctaacaccattttg

SEQ ID NO: 251359 - DNA, 33 bp, Homo sapien
cagtagtcgcatttcacgtactcaatagccaca

SEQ ID NO: 251360 - DNA, 33 bp, Homo sapien
cagtagtcgcatttcatgtactcaatagccaca

SEQ ID NO: 251361 - DNA, 33 bp, Homo sapien
actggggctggagaacacttttccaagctctca

SEQ ID NO: 251362 - DNA, 33 bp, Homo sapien
actggggctggagaacccttttccaagctctca

SEQ ID NO: 251363 - DNA, 33 bp, Homo sapien
ggacaatgagtttaacagtgatgtgtcccagac

SEQ ID NO: 251364 - DNA, 33 bp, Homo sapien
ggacaatgagtttaacggtgatgtgtcccagac

SEQ ID NO: 251365 - DNA, 33 bp, Homo sapien
cttaaggtttttagagaaaaaatgctgattgaa

SEQ ID NO: 251366 - DNA, 33 bp, Homo sapien
cttaaggtttttagaggaaaaatgctgattgaa

SEQ ID NO: 251367 - DNA, 33 bp, Homo sapien
gggtttcaaactcaaacgtctacacaggggcca

SEQ ID NO: 251368 - DNA, 33 bp, Homo sapien
gggtttcaaactcaaatgtctacacaggggcca

SEQ ID NO: 251369 - DNA, 33 bp, Homo sapien
actcaatacatcagcaagagaaaaagctctctt

SEQ ID NO: 251370 - DNA, 33 bp, Homo sapien
actcaatacatcagcaggagaaaaagctctctt

SEQ ID NO: 251371 - DNA, 33 bp, Homo sapien
gagggtagtgattggaagggggcataaaaggga

SEQ ID NO: 251372 - DNA, 33 bp, Homo sapien
gagggtagtgattggaggggggcataaaaggga

SEQ ID NO: 251373 - DNA, 33 bp, Homo sapien
atatgttctgaaaaacgcatcagtagctgattc

SEQ ID NO: 251374 - DNA, 33 bp, Homo sapien
atatgttctgaaaaactcatcagtagctgattc

SEQ ID NO: 251375 - DNA, 33 bp, Homo sapien
tggtaactttgaagcacgaacttttcagttttg

SEQ ID NO: 251376 - DNA, 33 bp, Homo sapien
tggtaactttgaagcatgaacttttcagttttg

SEQ ID NO: 251377 - DNA, 33 bp, Homo sapien
atgtaagcgagtcccacaaacagtggcttgcaa

SEQ ID NO: 251378 - DNA, 33 bp, Homo sapien
atgtaagcgagtcccataaacagtggcttgcaa

SEQ ID NO: 251379 - DNA, 33 bp, Homo sapien
ggccttctgccttgtacgtgtctctgtgtcttt

SEQ ID NO: 251380 - DNA, 33 bp, Homo sapien
ggccttctgccttgtatgtgtctctgtgtcttt

SEQ ID NO: 251381 - DNA, 33 bp, Homo sapien
ccctaaaacggaaagaactcaggacgcctatcc

SEQ ID NO: 251382 - DNA, 33 bp, Homo sapien
ccctaaaacggaaagacctcaggacgcctatcc

SEQ ID NO: 251383 - DNA, 33 bp, Homo sapien
actctcaccctatgctaaactcaggcgaccgtg

SEQ ID NO: 251384 - DNA, 33 bp, Homo sapien
actctcaccctatgctgaactcaggcgaccgtg

SEQ ID NO: 251385 - DNA, 33 bp, Homo sapien
ccctgtctgaaaaaataaaaagtgcttgcttag

SEQ ID NO: 251386 - DNA, 33 bp, Homo sapien
ccctgtctgaaaaaattaaaagtgcttgcttag

SEQ ID NO: 251387 - DNA, 33 bp, Homo sapien
acatgaacttaagagaaaactaagcctttcgtg

SEQ ID NO: 251388 - DNA, 33 bp, Homo sapien
acatgaacttaagagacaactaagcctttcgtg

SEQ ID NO: 251389 - DNA, 33 bp, Homo sapien
atcacagagtagaaaaatctgcagtccccagaa

SEQ ID NO: 251390 - DNA, 33 bp, Homo sapien
atcacagagtagaaaagtctgcagtccccagaa

SEQ ID NO: 251391 - DNA, 33 bp, Homo sapien
gtgatcagttagagccaatgaaacctatgcccg

SEQ ID NO: 251392 - DNA, 33 bp, Homo sapien
gtgatcagttagagccgatgaaacctatgcccg

SEQ ID NO: 251393 - DNA, 33 bp, Homo sapien
ctctttgtcaaattacaaaaacttcagggtgaa

SEQ ID NO: 251394 - DNA, 33 bp, Homo sapien
ctctttgtcaaattacgaaaacttcagggtgaa

SEQ ID NO: 251395 - DNA, 33 bp, Homo sapien
aatgtcgtaaagttgacggtggtaatggctgca

SEQ ID NO: 251396 - DNA, 33 bp, Homo sapien
aatgtcgtaaagttgatggtggtaatggctgca

SEQ ID NO: 251397 - DNA, 33 bp, Homo sapien
ccaagtcaggtagccacgatgtgctcagtggga

SEQ ID NO: 251398 - DNA, 33 bp, Homo sapien
ccaagtcaggtagccatgatgtgctcagtggga

SEQ ID NO: 251399 - DNA, 33 bp, Homo sapien
caacaagtgtttcccgaataatgaatgcctact

SEQ ID NO: 251400 - DNA, 33 bp, Homo sapien
caacaagtgtttcccgtataatgaatgcctact

SEQ ID NO: 251401 - DNA, 33 bp, Homo sapien
ctaagccaggattcccacctagctggaatttta

SEQ ID NO: 251402 - DNA, 33 bp, Homo sapien
ctaagccaggattcccgcctagctggaatttta

SEQ ID NO: 251403 - DNA, 33 bp, Homo sapien
taaaagtgctttctgcaagagggtgggattcag

SEQ ID NO: 251404 - DNA, 33 bp, Homo sapien
taaaagtgctttctgcgagagggtgggattcag

SEQ ID NO: 251405 - DNA, 33 bp, Homo sapien
aggccctggggcatagaagaacagcggtgccaa

SEQ ID NO: 251406 - DNA, 33 bp, Homo sapien
aggccctggggcataggagaacagcggtgccaa

SEQ ID NO: 251407 - DNA, 33 bp, Homo sapien
ctccaaattaaacacacacaggtaaccagaacc

SEQ ID NO: 251408 - DNA, 33 bp, Homo sapien
ctccaaattaaacacatacaggtaaccagaacc

SEQ ID NO: 251409 - DNA, 33 bp, Homo sapien
tttgacaaagtacaacaagcaaaatcagcgttg

SEQ ID NO: 251410 - DNA, 33 bp, Homo sapien
tttgacaaagtacaacgagcaaaatcagcgttg

SEQ ID NO: 251411 - DNA, 33 bp, Homo sapien
ttagcgtatgtcttcacggttcgtctgtgttgt

SEQ ID NO: 251412 - DNA, 33 bp, Homo sapien
ttagcgtatgtcttcatggttcgtctgtgttgt

SEQ ID NO: 251413 - DNA, 33 bp, Homo sapien
cacagtgtcgagcagaactgtccaacacgtgtc

SEQ ID NO: 251414 - DNA, 33 bp, Homo sapien
cacagtgtcgagcagacctgtccaacacgtgtc

SEQ ID NO: 251415 - DNA, 33 bp, Homo sapien
atattcactgctgtacccgcatggacttagcac

SEQ ID NO: 251416 - DNA, 33 bp, Homo sapien
atattcactgctgtactcgcatggacttagcac

SEQ ID NO: 251417 - DNA, 33 bp, Homo sapien
aaccaaagtgggatgcaaaatactacatatccc

SEQ ID NO: 251418 - DNA, 33 bp, Homo sapien
aaccaaagtgggatgcgaaatactacatatccc

SEQ ID NO: 251419 - DNA, 33 bp, Homo sapien
gctatagtgtttagaacgaataggcttttgcct

SEQ ID NO: 251420 - DNA, 33 bp, Homo sapien
gctatagtgtttagaatgaataggcttttgcct

SEQ ID NO: 251421 - DNA, 33 bp, Homo sapien
tatgtacagtgcacaacgataatgccattccca

SEQ ID NO: 251422 - DNA, 33 bp, Homo sapien
tatgtacagtgcacaatgataatgccattccca

SEQ ID NO: 251423 - DNA, 33 bp, Homo sapien
ggttgttaggtggggacagttaagagctgtgtg

SEQ ID NO: 251424 - DNA, 33 bp, Homo sapien
ggttgttaggtggggagagttaagagctgtgtg

SEQ ID NO: 251425 - DNA, 33 bp, Homo sapien
tttccagagcctcagcagatggcaaacacaggc

SEQ ID NO: 251426 - DNA, 33 bp, Homo sapien
tttccagagcctcagcggatggcaaacacaggc

SEQ ID NO: 251427 - DNA, 33 bp, Homo sapien
gcccccctttctcctcaaatacagcctcgccac

SEQ ID NO: 251428 - DNA, 33 bp, Homo sapien
gcccccctttctcctcgaatacagcctcgccac

SEQ ID NO: 251429 - DNA, 33 bp, Homo sapien
acgtgactcggatggacgtgtgtagtgtgtggt

SEQ ID NO: 251430 - DNA, 33 bp, Homo sapien
acgtgactcggatggatgtgtgtagtgtgtggt

SEQ ID NO: 251431 - DNA, 33 bp, Homo sapien
caactgcaccgctccaatgcttcatgccagaga

SEQ ID NO: 251432 - DNA, 33 bp, Homo sapien
caactgcaccgctccagtgcttcatgccagaga

SEQ ID NO: 251433 - DNA, 33 bp, Homo sapien
tccaccctgggtgaccaaacaagacaagcggca

SEQ ID NO: 251434 - DNA, 33 bp, Homo sapien
tccaccctgggtgaccgaacaagacaagcggca

SEQ ID NO: 251435 - DNA, 33 bp, Homo sapien
aaagctctgccaaacaacgccagctaattcaca

SEQ ID NO: 251436 - DNA, 33 bp, Homo sapien
aaagctctgccaaacatcgccagctaattcaca

SEQ ID NO: 251437 - DNA, 33 bp, Homo sapien
acattctctgtgggcactcgttgattggaggtt

SEQ ID NO: 251438 - DNA, 33 bp, Homo sapien
acattctctgtgggcattcgttgattggaggtt

SEQ ID NO: 251439 - DNA, 33 bp, Homo sapien
actaatcccttcacacacgcagaaccttataac

SEQ ID NO: 251440 - DNA, 33 bp, Homo sapien
actaatcccttcacactcgcagaaccttataac

SEQ ID NO: 251441 - DNA, 33 bp, Homo sapien
ttacttcaaaaatggcaccctgttgctgtatct

SEQ ID NO: 251442 - DNA, 33 bp, Homo sapien
ttacttcaaaaatggcgccctgttgctgtatct

SEQ ID NO: 251443 - DNA, 33 bp, Homo sapien
ggaagagcagcgtgccaatgacggtggagaagg

SEQ ID NO: 251444 - DNA, 33 bp, Homo sapien
ggaagagcagcgtgccgatgacggtggagaagg

SEQ ID NO: 251445 - DNA, 33 bp, Homo sapien
aacagctcaggtgttaagactacagcctcctcc

SEQ ID NO: 251446 - DNA, 33 bp, Homo sapien
aacagctcaggtgttaggactacagcctcctcc

SEQ ID NO: 251447 - DNA, 33 bp, Homo sapien
cccaaatcacgtgccaagtagttccacaaaaag

SEQ ID NO: 251448 - DNA, 33 bp, Homo sapien
cccaaatcacgtgccaggtagttccacaaaaag

SEQ ID NO: 251449 - DNA, 33 bp, Homo sapien
atctagaaatctgagacgaaggtgtcagcaaag

SEQ ID NO: 251450 - DNA, 33 bp, Homo sapien
atctagaaatctgagaggaaggtgtcagcaaag

SEQ ID NO: 251451 - DNA, 33 bp, Homo sapien
tggagtagccaggttacaccacatccagctaat

SEQ ID NO: 251452 - DNA, 33 bp, Homo sapien
tggagtagccaggttataccacatccagctaat

SEQ ID NO: 251453 - DNA, 33 bp, Homo sapien
caattaacagcaattaaatagcaagtcttggca

SEQ ID NO: 251454 - DNA, 33 bp, Homo sapien
caattaacagcaattagatagcaagtcttggca

SEQ ID NO: 251455 - DNA, 33 bp, Homo sapien
agataaagaaactcaacctgagagaggtggctc

SEQ ID NO: 251456 - DNA, 33 bp, Homo sapien
agataaagaaactcaagctgagagaggtggctc

SEQ ID NO: 251457 - DNA, 33 bp, Homo sapien
ctgccatcaagttgcccgagttcagatccagag

SEQ ID NO: 251458 - DNA, 33 bp, Homo sapien
ctgccatcaagttgcctgagttcagatccagag

SEQ ID NO: 251459 - DNA, 33 bp, Homo sapien
gaaagtttaccaccagcaagaggcacagctcta

SEQ ID NO: 251460 - DNA, 33 bp, Homo sapien
gaaagtttaccaccaggaagaggcacagctcta

SEQ ID NO: 251461 - DNA, 33 bp, Homo sapien
ccccgcactctagtccaagtgtcagagaccttg

SEQ ID NO: 251462 - DNA, 33 bp, Homo sapien
ccccgcactctagtccgagtgtcagagaccttg

SEQ ID NO: 251463 - DNA, 33 bp, Homo sapien
ttctgtagtgtccaagaatccagagcgatcatc

SEQ ID NO: 251464 - DNA, 33 bp, Homo sapien
ttctgtagtgtccaaggatccagagcgatcatc

SEQ ID NO: 251465 - DNA, 33 bp, Homo sapien
gagctggaggagggcgaaggctaaatctccaac

SEQ ID NO: 251466 - DNA, 33 bp, Homo sapien
gagctggaggagggcggaggctaaatctccaac

SEQ ID NO: 251467 - DNA, 33 bp, Homo sapien
ggggtcagcccagacaagagatacccacaaact

SEQ ID NO: 251468 - DNA, 33 bp, Homo sapien
ggggtcagcccagacaggagatacccacaaact

SEQ ID NO: 251469 - DNA, 33 bp, Homo sapien
ttccttgtcttagcaaatcctactccattgcct

SEQ ID NO: 251470 - DNA, 33 bp, Homo sapien
ttccttgtcttagcaactcctactccattgcct

SEQ ID NO: 251471 - DNA, 33 bp, Homo sapien
acagctgttgtgtcaggaaccagcttaaagaat

SEQ ID NO: 251472 - DNA, 33 bp, Homo sapien
acagctgttgtgtcagtaaccagcttaaagaat

SEQ ID NO: 251473 - DNA, 33 bp, Homo sapien
caaacgcctaccaaagaagctcaggccagaatt

SEQ ID NO: 251474 - DNA, 33 bp, Homo sapien
caaacgcctaccaaagcagctcaggccagaatt

SEQ ID NO: 251475 - DNA, 33 bp, Homo sapien
atgatgagggtgaatacgggaaacgtgagggag

SEQ ID NO: 251476 - DNA, 33 bp, Homo sapien
atgatgagggtgaatatgggaaacgtgagggag

SEQ ID NO: 251477 - DNA, 33 bp, Homo sapien
atcttcaccaggctaccgggattacctgaggtt

SEQ ID NO: 251478 - DNA, 33 bp, Homo sapien
atcttcaccaggctactgggattacctgaggtt

SEQ ID NO: 251479 - DNA, 33 bp, Homo sapien
caccccacaagcgttcaaaatcggggatccttc

SEQ ID NO: 251480 - DNA, 33 bp, Homo sapien
caccccacaagcgttcgaaatcggggatccttc

SEQ ID NO: 251481 - DNA, 33 bp, Homo sapien
tttttaaaatgaggaaattaaggttgggcatgg

SEQ ID NO: 251482 - DNA, 33 bp, Homo sapien
tttttaaaatgaggaagttaaggttgggcatgg

SEQ ID NO: 251483 - DNA, 33 bp, Homo sapien
ggggactgtaatagtaaatgagttgacaaaata

SEQ ID NO: 251484 - DNA, 33 bp, Homo sapien
ggggactgtaatagtatatgagttgacaaaata

SEQ ID NO: 251485 - DNA, 33 bp, Homo sapien
tgtattacagtaacacaggtcctaaacagaatt

SEQ ID NO: 251486 - DNA, 33 bp, Homo sapien
tgtattacagtaacacgggtcctaaacagaatt

SEQ ID NO: 251487 - DNA, 33 bp, Homo sapien
atttgtaaaacaggaacgagaatagtgtggtgg

SEQ ID NO: 251488 - DNA, 33 bp, Homo sapien
atttgtaaaacaggaatgagaatagtgtggtgg

SEQ ID NO: 251489 - DNA, 33 bp, Homo sapien
attttcacaaatttccaaaatgggcttatataa

SEQ ID NO: 251490 - DNA, 33 bp, Homo sapien
attttcacaaatttccgaaatgggcttatataa

SEQ ID NO: 251491 - DNA, 33 bp, Homo sapien
tattgttattattttcaagggtctcaatctgtc

SEQ ID NO: 251492 - DNA, 33 bp, Homo sapien
tattgttattattttcgagggtctcaatctgtc

SEQ ID NO: 251493 - DNA, 33 bp, Homo sapien
tggcagctttctaaaacaaaggttttgctgggc

SEQ ID NO: 251494 - DNA, 33 bp, Homo sapien
tggcagctttctaaaataaaggttttgctgggc

SEQ ID NO: 251495 - DNA, 33 bp, Homo sapien
cagggaagatgaaacaaaacaactggaaagggg

SEQ ID NO: 251496 - DNA, 33 bp, Homo sapien
cagggaagatgaaacagaacaactggaaagggg

SEQ ID NO: 251497 - DNA, 33 bp, Homo sapien
ggtgtattcacagagccatgcattaccacaatc

SEQ ID NO: 251498 - DNA, 33 bp, Homo sapien
ggtgtattcacagagctatgcattaccacaatc

SEQ ID NO: 251499 - DNA, 33 bp, Homo sapien
ctgcctcaggaggagaagtgatgaaaatgtaca

SEQ ID NO: 251500 - DNA, 33 bp, Homo sapien
ctgcctcaggaggagaggtgatgaaaatgtaca

SEQ ID NO: 251501 - DNA, 33 bp, Homo sapien
accagaaaacctggtaaacaaattcttagagct

SEQ ID NO: 251502 - DNA, 33 bp, Homo sapien
accagaaaacctggtagacaaattcttagagct

SEQ ID NO: 251503 - DNA, 33 bp, Homo sapien
agggtgtttccagcgacgaccagaaaacctggt

SEQ ID NO: 251504 - DNA, 33 bp, Homo sapien
agggtgtttccagcgatgaccagaaaacctggt

SEQ ID NO: 251505 - DNA, 33 bp, Homo sapien
agcacgttcactgtagaaccttgtgtgacagca

SEQ ID NO: 251506 - DNA, 33 bp, Homo sapien
agcacgttcactgtaggaccttgtgtgacagca

SEQ ID NO: 251507 - DNA, 33 bp, Homo sapien
aataaaactttgctgtcaaaaccagatttcatt

SEQ ID NO: 251508 - DNA, 33 bp, Homo sapien
aataaaactttgctgtgaaaaccagatttcatt

SEQ ID NO: 251509 - DNA, 33 bp, Homo sapien
tgtgacatgctgtaatcaatgagaatgcagtag

SEQ ID NO: 251510 - DNA, 33 bp, Homo sapien
tgtgacatgctgtaatgaatgagaatgcagtag

SEQ ID NO: 251511 - DNA, 33 bp, Homo sapien
gagttaagaaagaaaacccatctaggatcctct

SEQ ID NO: 251512 - DNA, 33 bp, Homo sapien
gagttaagaaagaaaatccatctaggatcctct

SEQ ID NO: 251513 - DNA, 33 bp, Homo sapien
ccaacattcctcttgcgcctaaaaaattttttc

SEQ ID NO: 251514 - DNA, 33 bp, Homo sapien
ccaacattcctcttgctcctaaaaaattttttc

SEQ ID NO: 251515 - DNA, 33 bp, Homo sapien
cacatccttgaagatacgaactgctgaaagaaa

SEQ ID NO: 251516 - DNA, 33 bp, Homo sapien
cacatccttgaagatatgaactgctgaaagaaa

SEQ ID NO: 251517 - DNA, 33 bp, Homo sapien
gattcttttttaagtaaagctatctgctgagat

SEQ ID NO: 251518 - DNA, 33 bp, Homo sapien
gattcttttttaagtagagctatctgctgagat

SEQ ID NO: 251519 - DNA, 33 bp, Homo sapien
aggcagacttcacaaaacctgaaaatcagcctc

SEQ ID NO: 251520 - DNA, 33 bp, Homo sapien
aggcagacttcacaaagcctgaaaatcagcctc

SEQ ID NO: 251521 - DNA, 33 bp, Homo sapien
atcaggagggaggagacgccactctaggatgct

SEQ ID NO: 251522 - DNA, 33 bp, Homo sapien
atcaggagggaggagatgccactctaggatgct

SEQ ID NO: 251523 - DNA, 33 bp, Homo sapien
aagatctgaagtcccaactagaaaggaacacat

SEQ ID NO: 251524 - DNA, 33 bp, Homo sapien
aagatctgaagtcccacctagaaaggaacacat

SEQ ID NO: 251525 - DNA, 33 bp, Homo sapien
gaaatcattcacttgccgagtactttgctctgt

SEQ ID NO: 251526 - DNA, 33 bp, Homo sapien
gaaatcattcacttgctgagtactttgctctgt

SEQ ID NO: 251527 - DNA, 33 bp, Homo sapien
cagatgacagctaagacgtgggcaggtgtctca

SEQ ID NO: 251528 - DNA, 33 bp, Homo sapien
cagatgacagctaagatgtgggcaggtgtctca

SEQ ID NO: 251529 - DNA, 33 bp, Homo sapien
agaaggtgattgtttaactcttgaggctaagca

SEQ ID NO: 251530 - DNA, 33 bp, Homo sapien
agaaggtgattgtttagctcttgaggctaagca

SEQ ID NO: 251531 - DNA, 33 bp, Homo sapien
cccctatttttgcctactacatgttttgcggcc

SEQ ID NO: 251532 - DNA, 33 bp, Homo sapien
cccctatttttgcctattacatgttttgcggcc

SEQ ID NO: 251533 - DNA, 33 bp, Homo sapien
aacccacaaacacctgcagaaagaggttcccag

SEQ ID NO: 251534 - DNA, 33 bp, Homo sapien
aacccacaaacacctgtagaaagaggttcccag

SEQ ID NO: 251535 - DNA, 33 bp, Homo sapien
tcacgtaaattaaggacgtttcacatgaattga

SEQ ID NO: 251536 - DNA, 33 bp, Homo sapien
tcacgtaaattaaggatgtttcacatgaattga

SEQ ID NO: 251537 - DNA, 33 bp, Homo sapien
tgagtttgagtaaatacggaaggcagtccaggc

SEQ ID NO: 251538 - DNA, 33 bp, Homo sapien
tgagtttgagtaaatagggaaggcagtccaggc

SEQ ID NO: 251539 - DNA, 33 bp, Homo sapien
agtgacttctatgatacgtaaattgtcttaatc

SEQ ID NO: 251540 - DNA, 33 bp, Homo sapien
agtgacttctatgatatgtaaattgtcttaatc

SEQ ID NO: 251541 - DNA, 33 bp, Homo sapien
gtatgtttcttcgccccctcatataaattatat

SEQ ID NO: 251542 - DNA, 33 bp, Homo sapien
gtatgtttcttcgccctctcatataaattatat

SEQ ID NO: 251543 - DNA, 33 bp, Homo sapien
gcagaggagaggcctcaagtaggacatgcgatg

SEQ ID NO: 251544 - DNA, 33 bp, Homo sapien
gcagaggagaggcctcgagtaggacatgcgatg

SEQ ID NO: 251545 - DNA, 33 bp, Homo sapien
gcccgagtgtcatggacccggtagcttctccgg

SEQ ID NO: 251546 - DNA, 33 bp, Homo sapien
gcccgagtgtcatggatccggtagcttctccgg

SEQ ID NO: 251547 - DNA, 33 bp, Homo sapien
agattatacctgtctcaaaactgtctttcatta

SEQ ID NO: 251548 - DNA, 33 bp, Homo sapien
agattatacctgtctcgaaactgtctttcatta

SEQ ID NO: 251549 - DNA, 33 bp, Homo sapien
accacatcactcagaaagtacgtcccacttctt

SEQ ID NO: 251550 - DNA, 33 bp, Homo sapien
accacatcactcagaaggtacgtcccacttctt

SEQ ID NO: 251551 - DNA, 33 bp, Homo sapien
tgagtatccggcactacaatcaggccttaggca

SEQ ID NO: 251552 - DNA, 33 bp, Homo sapien
tgagtatccggcactataatcaggccttaggca

SEQ ID NO: 251553 - DNA, 33 bp, Homo sapien
tctagaatatacagaaatctcagggaggcaggt

SEQ ID NO: 251554 - DNA, 33 bp, Homo sapien
tctagaatatacagaactctcagggaggcaggt

SEQ ID NO: 251555 - DNA, 33 bp, Homo sapien
aggggagaaagaaagacgccttccaactgcccc

SEQ ID NO: 251556 - DNA, 33 bp, Homo sapien
aggggagaaagaaagatgccttccaactgcccc

SEQ ID NO: 251557 - DNA, 33 bp, Homo sapien
cgttttacaaaggcacagaagtagagaggggct

SEQ ID NO: 251558 - DNA, 33 bp, Homo sapien
cgttttacaaaggcacggaagtagagaggggct

SEQ ID NO: 251559 - DNA, 33 bp, Homo sapien
cttcaaggctcacacaacctaacagccttaaat

SEQ ID NO: 251560 - DNA, 33 bp, Homo sapien
cttcaaggctcacacatcctaacagccttaaat

SEQ ID NO: 251561 - DNA, 33 bp, Homo sapien
caccaagagaatgagtaacagaaatatctccaa

SEQ ID NO: 251562 - DNA, 33 bp, Homo sapien
caccaagagaatgagttacagaaatatctccaa

SEQ ID NO: 251563 - DNA, 33 bp, Homo sapien
tacccaaaggacgacgaagcatttggttagcgg

SEQ ID NO: 251564 - DNA, 33 bp, Homo sapien
tacccaaaggacgacggagcatttggttagcgg

SEQ ID NO: 251565 - DNA, 33 bp, Homo sapien
ctgtcactgaaagcccacagttctggagatgac

SEQ ID NO: 251566 - DNA, 33 bp, Homo sapien
ctgtcactgaaagcccgcagttctggagatgac

SEQ ID NO: 251567 - DNA, 33 bp, Homo sapien
cccgagataagatgaagatataggtgctggtag

SEQ ID NO: 251568 - DNA, 33 bp, Homo sapien
cccgagataagatgaatatataggtgctggtag

SEQ ID NO: 251569 - DNA, 33 bp, Homo sapien
gtctggggtgagacccaatgattgacatttcta

SEQ ID NO: 251570 - DNA, 33 bp, Homo sapien
gtctggggtgagacccgatgattgacatttcta

SEQ ID NO: 251571 - DNA, 33 bp, Homo sapien
gaagtcagagagattacgagcaagagaagggct

SEQ ID NO: 251572 - DNA, 33 bp, Homo sapien
gaagtcagagagattatgagcaagagaagggct

SEQ ID NO: 251573 - DNA, 33 bp, Homo sapien
gaaggctgaaaccccaataaggctgacatgtgg

SEQ ID NO: 251574 - DNA, 33 bp, Homo sapien
gaaggctgaaaccccagtaaggctgacatgtgg

SEQ ID NO: 251575 - DNA, 33 bp, Homo sapien
caggagaggttgttacaagaggttgtcaagaag

SEQ ID NO: 251576 - DNA, 33 bp, Homo sapien
caggagaggttgttacgagaggttgtcaagaag

SEQ ID NO: 251577 - DNA, 33 bp, Homo sapien
aatggctgatttgacacagtagacgcccattgg

SEQ ID NO: 251578 - DNA, 33 bp, Homo sapien
aatggctgatttgacagagtagacgcccattgg

SEQ ID NO: 251579 - DNA, 33 bp, Homo sapien
tcaagcatcctgtttgaaacaagttaaggtcca

SEQ ID NO: 251580 - DNA, 33 bp, Homo sapien
tcaagcatcctgtttggaacaagttaaggtcca

SEQ ID NO: 251581 - DNA, 33 bp, Homo sapien
atcacaggaatcaaagcctggtggaaagctctg

SEQ ID NO: 251582 - DNA, 33 bp, Homo sapien
atcacaggaatcaaagtctggtggaaagctctg

SEQ ID NO: 251583 - DNA, 33 bp, Homo sapien
tgttttcagctgagtacggagtggccacagact

SEQ ID NO: 251584 - DNA, 33 bp, Homo sapien
tgttttcagctgagtatggagtggccacagact

SEQ ID NO: 251585 - DNA, 33 bp, Homo sapien
agtccctaagctgagacgaggtggagaagtgtg

SEQ ID NO: 251586 - DNA, 33 bp, Homo sapien
agtccctaagctgagatgaggtggagaagtgtg

SEQ ID NO: 251587 - DNA, 33 bp, Homo sapien
ggcccaggttagaaacagcagaatgtatgtctg

SEQ ID NO: 251588 - DNA, 33 bp, Homo sapien
ggcccaggttagaaacggcagaatgtatgtctg

SEQ ID NO: 251589 - DNA, 33 bp, Homo sapien
acagagatgttcaatacgggcggctactcagga

SEQ ID NO: 251590 - DNA, 33 bp, Homo sapien
acagagatgttcaatatgggcggctactcagga

SEQ ID NO: 251591 - DNA, 33 bp, Homo sapien
acacttgcattcaccaaatgatcaaaattaaca

SEQ ID NO: 251592 - DNA, 33 bp, Homo sapien
acacttgcattcaccacatgatcaaaattaaca

SEQ ID NO: 251593 - DNA, 33 bp, Homo sapien
tggcataatgagaacacgatctgtcccctcctt

SEQ ID NO: 251594 - DNA, 33 bp, Homo sapien
tggcataatgagaacatgatctgtcccctcctt

SEQ ID NO: 251595 - DNA, 33 bp, Homo sapien
gcatcgcgcctccctcacttttctgacagcatc

SEQ ID NO: 251596 - DNA, 33 bp, Homo sapien
gcatcgcgcctccctcgcttttctgacagcatc

SEQ ID NO: 251597 - DNA, 33 bp, Homo sapien
tcagggcctttcaaataataaggtttagattta

SEQ ID NO: 251598 - DNA, 33 bp, Homo sapien
tcagggcctttcaaatgataaggtttagattta

SEQ ID NO: 251599 - DNA, 33 bp, Homo sapien
tgtaggtagtaattgaacagtttgcccatagct

SEQ ID NO: 251600 - DNA, 33 bp, Homo sapien
tgtaggtagtaattgagcagtttgcccatagct

SEQ ID NO: 251601 - DNA, 33 bp, Homo sapien
ctttgagacatacttactaaatttttcatcggt

SEQ ID NO: 251602 - DNA, 33 bp, Homo sapien
ctttgagacatacttattaaatttttcatcggt

SEQ ID NO: 251603 - DNA, 33 bp, Homo sapien
gtagaatacccggtaaacgcatgagtgagcggt

SEQ ID NO: 251604 - DNA, 33 bp, Homo sapien
gtagaatacccggtaagcgcatgagtgagcggt

SEQ ID NO: 251605 - DNA, 33 bp, Homo sapien
aagtcatacaaagtgaaagtctcgatttagtta

SEQ ID NO: 251606 - DNA, 33 bp, Homo sapien
aagtcatacaaagtgacagtctcgatttagtta

SEQ ID NO: 251607 - DNA, 33 bp, Homo sapien
agaacagctcaattgacgagacattgggaggtg

SEQ ID NO: 251608 - DNA, 33 bp, Homo sapien
agaacagctcaattgatgagacattgggaggtg

SEQ ID NO: 251609 - DNA, 33 bp, Homo sapien
aatccaactgattagcccattcaacaaagattt

SEQ ID NO: 251610 - DNA, 33 bp, Homo sapien
aatccaactgattagctcattcaacaaagattt

SEQ ID NO: 251611 - DNA, 33 bp, Homo sapien
gagttgccatgtgtgagaaatactagtgtgatg

SEQ ID NO: 251612 - DNA, 33 bp, Homo sapien
gagttgccatgtgtgataaatactagtgtgatg

SEQ ID NO: 251613 - DNA, 33 bp, Homo sapien
cagtgtagattagagaaaacaattgggggccag

SEQ ID NO: 251614 - DNA, 33 bp, Homo sapien
cagtgtagattagagagaacaattgggggccag

SEQ ID NO: 251615 - DNA, 33 bp, Homo sapien
aggatttttcaaaggaaagccaaaccttattac

SEQ ID NO: 251616 - DNA, 33 bp, Homo sapien
aggatttttcaaaggagagccaaaccttattac

SEQ ID NO: 251617 - DNA, 33 bp, Homo sapien
atttacttcagttacaacaaagtaataaggttt

SEQ ID NO: 251618 - DNA, 33 bp, Homo sapien
atttacttcagttacagcaaagtaataaggttt

SEQ ID NO: 251619 - DNA, 33 bp, Homo sapien
ggaaagaactcaaaaacgctgacacctgagtaa

SEQ ID NO: 251620 - DNA, 33 bp, Homo sapien
ggaaagaactcaaaaatgctgacacctgagtaa

SEQ ID NO: 251621 - DNA, 33 bp, Homo sapien
ggatttgtcctgttaacaaacactgaactttaa

SEQ ID NO: 251622 - DNA, 33 bp, Homo sapien
ggatttgtcctgttaagaaacactgaactttaa

SEQ ID NO: 251623 - DNA, 33 bp, Homo sapien
gagcagctgttgtacacgaaaggtttctataaa

SEQ ID NO: 251624 - DNA, 33 bp, Homo sapien
gagcagctgttgtacatgaaaggtttctataaa

SEQ ID NO: 251625 - DNA, 33 bp, Homo sapien
tttgccagttgataaacatttgagtttctattt

SEQ ID NO: 251626 - DNA, 33 bp, Homo sapien
tttgccagttgataaagatttgagtttctattt

SEQ ID NO: 251627 - DNA, 33 bp, Homo sapien
actcagagaaaagacaccagcaaattaaggtat

SEQ ID NO: 251628 - DNA, 33 bp, Homo sapien
actcagagaaaagacatcagcaaattaaggtat

SEQ ID NO: 251629 - DNA, 33 bp, Homo sapien
gctaaatacatgaagacgctctatttaatcctc

SEQ ID NO: 251630 - DNA, 33 bp, Homo sapien
gctaaatacatgaagatgctctatttaatcctc

SEQ ID NO: 251631 - DNA, 33 bp, Homo sapien
gactggcttaaactgaacaagactcagtttctg

SEQ ID NO: 251632 - DNA, 33 bp, Homo sapien
gactggcttaaactgatcaagactcagtttctg

SEQ ID NO: 251633 - DNA, 33 bp, Homo sapien
aagctcaagaaatatcagaggaggtgtctggca

SEQ ID NO: 251634 - DNA, 33 bp, Homo sapien
aagctcaagaaatatcggaggaggtgtctggca

SEQ ID NO: 251635 - DNA, 33 bp, Homo sapien
aaagaaaaggcataacaaataatgctacttcca

SEQ ID NO: 251636 - DNA, 33 bp, Homo sapien
aaagaaaaggcataacgaataatgctacttcca

SEQ ID NO: 251637 - DNA, 33 bp, Homo sapien
tggaaagagatgcatgcaggatatagtatgggg

SEQ ID NO: 251638 - DNA, 33 bp, Homo sapien
tggaaagagatgcatggaggatatagtatgggg

SEQ ID NO: 251639 - DNA, 33 bp, Homo sapien
agagtgattagtaatggaaatggaatgtagtga

SEQ ID NO: 251640 - DNA, 33 bp, Homo sapien
agagtgattagtaatgtaaatggaatgtagtga

SEQ ID NO: 251641 - DNA, 33 bp, Homo sapien
agaccatagcagacaaatactaaaagcaaatac

SEQ ID NO: 251642 - DNA, 33 bp, Homo sapien
agaccatagcagacaactactaaaagcaaatac

SEQ ID NO: 251643 - DNA, 33 bp, Homo sapien
atggtctgaatctgtcccctcttcctcccaaat

SEQ ID NO: 251644 - DNA, 33 bp, Homo sapien
atggtctgaatctgtctcctcttcctcccaaat

SEQ ID NO: 251645 - DNA, 33 bp, Homo sapien
gacctgccacctgatgaatagatttcctctctg

SEQ ID NO: 251646 - DNA, 33 bp, Homo sapien
gacctgccacctgatgcatagatttcctctctg

SEQ ID NO: 251647 - DNA, 33 bp, Homo sapien
gggaatgaaatttcagcaaagctaattttgttt

SEQ ID NO: 251648 - DNA, 33 bp, Homo sapien
gggaatgaaatttcaggaaagctaattttgttt

SEQ ID NO: 251649 - DNA, 33 bp, Homo sapien
gtagtctgttgttccacacacaagtacacagat

SEQ ID NO: 251650 - DNA, 33 bp, Homo sapien
gtagtctgttgttccatacacaagtacacagat

SEQ ID NO: 251651 - DNA, 33 bp, Homo sapien
ttcatctttcagacaagctttagcagaaatgga

SEQ ID NO: 251652 - DNA, 33 bp, Homo sapien
ttcatctttcagacaatctttagcagaaatgga

SEQ ID NO: 251653 - DNA, 33 bp, Homo sapien
gctcaccggagttggccattaacgcctctggag

SEQ ID NO: 251654 - DNA, 33 bp, Homo sapien
gctcaccggagttggcgattaacgcctctggag

SEQ ID NO: 251655 - DNA, 33 bp, Homo sapien
gcctccagaggaagataacaggtgagccagata

SEQ ID NO: 251656 - DNA, 33 bp, Homo sapien
gcctccagaggaagatgacaggtgagccagata

SEQ ID NO: 251657 - DNA, 33 bp, Homo sapien
gctgatccagaatggcactgcaaatgtgtgcat

SEQ ID NO: 251658 - DNA, 33 bp, Homo sapien
gctgatccagaatggccctgcaaatgtgtgcat

SEQ ID NO: 251659 - DNA, 33 bp, Homo sapien
catagtagtccatcacaaacggcaggcagatga

SEQ ID NO: 251660 - DNA, 33 bp, Homo sapien
catagtagtccatcacgaacggcaggcagatga

SEQ ID NO: 251661 - DNA, 33 bp, Homo sapien
ttctgagctcatccacaaagcagaggctgtaag

SEQ ID NO: 251662 - DNA, 33 bp, Homo sapien
ttctgagctcatccacgaagcagaggctgtaag

SEQ ID NO: 251663 - DNA, 33 bp, Homo sapien
cagtactctggggagaaagaaaccttcattttt

SEQ ID NO: 251664 - DNA, 33 bp, Homo sapien
cagtactctggggagagagaaaccttcattttt

SEQ ID NO: 251665 - DNA, 33 bp, Homo sapien
tcctccaaatacacaacccctggcagtgtctag

SEQ ID NO: 251666 - DNA, 33 bp, Homo sapien
tcctccaaatacacaatccctggcagtgtctag

SEQ ID NO: 251667 - DNA, 33 bp, Homo sapien
ctactatttgatgtccagctttgctttgtaaca

SEQ ID NO: 251668 - DNA, 33 bp, Homo sapien
ctactatttgatgtcctgctttgctttgtaaca

SEQ ID NO: 251669 - DNA, 33 bp, Homo sapien
acctttgaccaccatcaattttatcttacccca

SEQ ID NO: 251670 - DNA, 33 bp, Homo sapien
acctttgaccaccatcgattttatcttacccca

SEQ ID NO: 251671 - DNA, 33 bp, Homo sapien
gagtgttgaatagaagcaggggagcaaacatct

SEQ ID NO: 251672 - DNA, 33 bp, Homo sapien
gagtgttgaatagaaggaggggagcaaacatct

SEQ ID NO: 251673 - DNA, 33 bp, Homo sapien
cccaatataaatgcaacgcttcactaatgcctc

SEQ ID NO: 251674 - DNA, 33 bp, Homo sapien
cccaatataaatgcaatgcttcactaatgcctc

SEQ ID NO: 251675 - DNA, 33 bp, Homo sapien
aatacatccccattcccgaggaaattaacttgc

SEQ ID NO: 251676 - DNA, 33 bp, Homo sapien
aatacatccccattcctgaggaaattaacttgc

SEQ ID NO: 251677 - DNA, 33 bp, Homo sapien
attaaaaaggctaaataaggtggctcttccccg

SEQ ID NO: 251678 - DNA, 33 bp, Homo sapien
attaaaaaggctaaatgaggtggctcttccccg

SEQ ID NO: 251679 - DNA, 33 bp, Homo sapien
ctgagggagaaagcacacattgataaagaacat

SEQ ID NO: 251680 - DNA, 33 bp, Homo sapien
ctgagggagaaagcacgcattgataaagaacat

SEQ ID NO: 251681 - DNA, 33 bp, Homo sapien
tacaacagccctatacaatagctggaacgatct

SEQ ID NO: 251682 - DNA, 33 bp, Homo sapien
tacaacagccctatacgatagctggaacgatct

SEQ ID NO: 251683 - DNA, 33 bp, Homo sapien
ggtagtctgcaagcacaaggagaactgaggccc

SEQ ID NO: 251684 - DNA, 33 bp, Homo sapien
ggtagtctgcaagcacgaggagaactgaggccc

SEQ ID NO: 251685 - DNA, 33 bp, Homo sapien
gcattaaatgcagacacgaataggtccccgccc

SEQ ID NO: 251686 - DNA, 33 bp, Homo sapien
gcattaaatgcagacatgaataggtccccgccc

SEQ ID NO: 251687 - DNA, 33 bp, Homo sapien
ggcccataaatccccccagagagagatggaagg

SEQ ID NO: 251688 - DNA, 33 bp, Homo sapien
ggcccataaatcccccgagagagagatggaagg

SEQ ID NO: 251689 - DNA, 33 bp, Homo sapien
ctcctcctaatggctgcaaattaaagtatgcca

SEQ ID NO: 251690 - DNA, 33 bp, Homo sapien
ctcctcctaatggctggaaattaaagtatgcca

SEQ ID NO: 251691 - DNA, 33 bp, Homo sapien
aaagctaggagtgtccccgaaatgtgggtggta

SEQ ID NO: 251692 - DNA, 33 bp, Homo sapien
aaagctaggagtgtcctcgaaatgtgggtggta

SEQ ID NO: 251693 - DNA, 33 bp, Homo sapien
acaaggagcttcgtgacgattttggagcagaga

SEQ ID NO: 251694 - DNA, 33 bp, Homo sapien
acaaggagcttcgtgatgattttggagcagaga

SEQ ID NO: 251695 - DNA, 33 bp, Homo sapien
tatttgggtagagagacacctggatgatgacag

SEQ ID NO: 251696 - DNA, 33 bp, Homo sapien
tatttgggtagagagagacctggatgatgacag

SEQ ID NO: 251697 - DNA, 33 bp, Homo sapien
attctgccaactgtggcaactttgtctgcacct

SEQ ID NO: 251698 - DNA, 33 bp, Homo sapien
attctgccaactgtggtaactttgtctgcacct

SEQ ID NO: 251699 - DNA, 33 bp, Homo sapien
agactgctgaggctaactgctggcaatgacagc

SEQ ID NO: 251700 - DNA, 33 bp, Homo sapien
agactgctgaggctaattgctggcaatgacagc

SEQ ID NO: 251701 - DNA, 33 bp, Homo sapien
tgaagctgccactcagaatgtcagtgcgcaggc

SEQ ID NO: 251702 - DNA, 33 bp, Homo sapien
tgaagctgccactcaggatgtcagtgcgcaggc

SEQ ID NO: 251703 - DNA, 33 bp, Homo sapien
gggatatttttgcgtgcaggcagagggacagag

SEQ ID NO: 251704 - DNA, 33 bp, Homo sapien
gggatatttttgcgtgtaggcagagggacagag

SEQ ID NO: 251705 - DNA, 33 bp, Homo sapien
tttctgaacctttccaaagagcttgagtgtcct

SEQ ID NO: 251706 - DNA, 33 bp, Homo sapien
tttctgaacctttccagagagcttgagtgtcct

SEQ ID NO: 251707 - DNA, 33 bp, Homo sapien
catgcagataaaacaacgtgcaacgtaaaatgc

SEQ ID NO: 251708 - DNA, 33 bp, Homo sapien
catgcagataaaacaatgtgcaacgtaaaatgc

SEQ ID NO: 251709 - DNA, 33 bp, Homo sapien
cagaaatgcaaggaagcccccagcaaggtgtgt

SEQ ID NO: 251710 - DNA, 33 bp, Homo sapien
cagaaatgcaaggaagtccccagcaaggtgtgt

SEQ ID NO: 251711 - DNA, 33 bp, Homo sapien
gttccaatgtcatgaaccaggctgttctcggag

SEQ ID NO: 251712 - DNA, 33 bp, Homo sapien
gttccaatgtcatgaatcaggctgttctcggag

SEQ ID NO: 251713 - DNA, 33 bp, Homo sapien
ccagcctcattactctgaaaaacatagagactg

SEQ ID NO: 251714 - DNA, 33 bp, Homo sapien
ccagcctcattactcttaaaaacatagagactg

SEQ ID NO: 251715 - DNA, 33 bp, Homo sapien
taaggaatatctccaaccaggagctactttatc

SEQ ID NO: 251716 - DNA, 33 bp, Homo sapien
taaggaatatctccaatcaggagctactttatc

SEQ ID NO: 251717 - DNA, 33 bp, Homo sapien
agtgatgcatgcccaactgatggcgaaataggt

SEQ ID NO: 251718 - DNA, 33 bp, Homo sapien
agtgatgcatgcccaattgatggcgaaataggt

SEQ ID NO: 251719 - DNA, 33 bp, Homo sapien
cagtgtggtatagaaaaagccacacatagtgtg

SEQ ID NO: 251720 - DNA, 33 bp, Homo sapien
cagtgtggtatagaaagagccacacatagtgtg

SEQ ID NO: 251721 - DNA, 33 bp, Homo sapien
taagataagcattaccaaagagaaagacagcag

SEQ ID NO: 251722 - DNA, 33 bp, Homo sapien
taagataagcattaccgaagagaaagacagcag

SEQ ID NO: 251723 - DNA, 33 bp, Homo sapien
agacacgtttcaaatacgaattgcattatcatt

SEQ ID NO: 251724 - DNA, 33 bp, Homo sapien
agacacgtttcaaataggaattgcattatcatt

SEQ ID NO: 251725 - DNA, 33 bp, Homo sapien
ctatttagggatgttacgttttcttagagattt

SEQ ID NO: 251726 - DNA, 33 bp, Homo sapien
ctatttagggatgttatgttttcttagagattt

SEQ ID NO: 251727 - DNA, 33 bp, Homo sapien
ctgaattcctcagaaccacagtattccagataa

SEQ ID NO: 251728 - DNA, 33 bp, Homo sapien
ctgaattcctcagaacgacagtattccagataa

SEQ ID NO: 251729 - DNA, 33 bp, Homo sapien
caagcttattcacttacatagcatctacggcag

SEQ ID NO: 251730 - DNA, 33 bp, Homo sapien
caagcttattcacttatatagcatctacggcag

SEQ ID NO: 251731 - DNA, 33 bp, Homo sapien
ttgtccacattctgccaagtgaacgtgaacaat

SEQ ID NO: 251732 - DNA, 33 bp, Homo sapien
ttgtccacattctgccgagtgaacgtgaacaat

SEQ ID NO: 251733 - DNA, 33 bp, Homo sapien
gtctaggctctaaacactaaaactttgggctta

SEQ ID NO: 251734 - DNA, 33 bp, Homo sapien
gtctaggctctaaacattaaaactttgggctta

SEQ ID NO: 251735 - DNA, 33 bp, Homo sapien
aattgttacgaagttcaactagagaattcttct

SEQ ID NO: 251736 - DNA, 33 bp, Homo sapien
aattgttacgaagttcgactagagaattcttct

SEQ ID NO: 251737 - DNA, 33 bp, Homo sapien; identical to SEQ ID NO: 251735

SEQ ID NO: 251738 - DNA, 33 bp, Homo sapien; identical to SEQ ID NO: 251736

SEQ ID NO: 251739 - DNA, 33 bp, Homo sapien
ttcctgcagtgggaacagatttgaaagaaccat

SEQ ID NO: 251740 - DNA, 33 bp, Homo sapien
ttcctgcagtgggaacggatttgaaagaaccat

SEQ ID NO: 251741 - DNA, 33 bp, Homo sapien
tatgaagtagcttgaaattaggagccgtacttt

SEQ ID NO: 251742 - DNA, 33 bp, Homo sapien
tatgaagtagcttgaagttaggagccgtacttt

SEQ ID NO: 251743 - DNA, 33 bp, Homo sapien
tccaaatccaaaatacactggatggttacattt

SEQ ID NO: 251744 - DNA, 33 bp, Homo sapien
tccaaatccaaaataccctggatggttacattt

SEQ ID NO: 251745 - DNA, 33 bp, Homo sapien
cctgcactgttcaatacggtgacccctagctat

SEQ ID NO: 251746 - DNA, 33 bp, Homo sapien
cctgcactgttcaatatggtgacccctagctat

SEQ ID NO: 251747 - DNA, 33 bp, Homo sapien
acaagatccactcaccaatacaagggtggagag

SEQ ID NO: 251748 - DNA, 33 bp, Homo sapien
acaagatccactcaccgatacaagggtggagag

SEQ ID NO: 251749 - DNA, 33 bp, Homo sapien
ttaaaaatacatacctaaattccaacatttctc

SEQ ID NO: 251750 - DNA, 33 bp, Homo sapien
ttaaaaatacatacctgaattccaacatttctc

SEQ ID NO: 251751 - DNA, 33 bp, Homo sapien
tgattggtccacataaagtgttggttattttca

SEQ ID NO: 251752 - DNA, 33 bp, Homo sapien
tgattggtccacataaggtgttggttattttca

SEQ ID NO: 251753 - DNA, 33 bp, Homo sapien
acagtaagtttagaaaatgttgtgaagtatcgt

SEQ ID NO: 251754 - DNA, 33 bp, Homo sapien
acagtaagtttagaaagtgttgtgaagtatcgt

SEQ ID NO: 251755 - DNA, 33 bp, Homo sapien
ttaacatcacttttccgcactttttcatctcca

SEQ ID NO: 251756 - DNA, 33 bp, Homo sapien
ttaacatcacttttcctcactttttcatctcca

SEQ ID NO: 251757 - DNA, 33 bp, Homo sapien
gctttcaacaaaagcaataaagtcttaacccta

SEQ ID NO: 251758 - DNA, 33 bp, Homo sapien
gctttcaacaaaagcagtaaagtcttaacccta

SEQ ID NO: 251759 - DNA, 33 bp, Homo sapien
aaaactgctcaatgacagaagtattagcattgc

SEQ ID NO: 251760 - DNA, 33 bp, Homo sapien
aaaactgctcaatgacggaagtattagcattgc

SEQ ID NO: 251761 - DNA, 33 bp, Homo sapien
agatctgagatttcgagataagatataagacat

SEQ ID NO: 251762 - DNA, 33 bp, Homo sapien
agatctgagatttcgatataagatataagacat

SEQ ID NO: 251763 - DNA, 33 bp, Homo sapien
aacacactggcacacactgtctttcagcttaca

SEQ ID NO: 251764 - DNA, 33 bp, Homo sapien
aacacactggcacacattgtctttcagcttaca

SEQ ID NO: 251765 - DNA, 33 bp, Homo sapien
gttggtaatactgaagaaccactatatccaggg

SEQ ID NO: 251766 - DNA, 33 bp, Homo sapien
gttggtaatactgaaggaccactatatccaggg

SEQ ID NO: 251767 - DNA, 33 bp, Homo sapien
actgctaagccaataaaaaacttttggtatata

SEQ ID NO: 251768 - DNA, 33 bp, Homo sapien
actgctaagccaataagaaacttttggtatata

SEQ ID NO: 251769 - DNA, 33 bp, Homo sapien
gagctctaagaacaaacacctgctggtaacact

SEQ ID NO: 251770 - DNA, 33 bp, Homo sapien
gagctctaagaacaaagacctgctggtaacact

SEQ ID NO: 251771 - DNA, 33 bp, Homo sapien
ctgtctgcgccagagacaaaggtaagtatgtga

SEQ ID NO: 251772 - DNA, 33 bp, Homo sapien
ctgtctgcgccagagagaaaggtaagtatgtga

SEQ ID NO: 251773 - DNA, 33 bp, Homo sapien
tgatgctgaaagataactggatttcagcaaaca

SEQ ID NO: 251774 - DNA, 33 bp, Homo sapien
tgatgctgaaagataattggatttcagcaaaca

SEQ ID NO: 251775 - DNA, 33 bp, Homo sapien
ctgctggtttcttaaactcctgtcttctcctga

SEQ ID NO: 251776 - DNA, 33 bp, Homo sapien
ctgctggtttcttaaattcctgtcttctcctga

SEQ ID NO: 251777 - DNA, 33 bp, Homo sapien
tatgagtcccaacaagataagagagaaaaagtg

SEQ ID NO: 251778 - DNA, 33 bp, Homo sapien
tatgagtcccaacaaggtaagagagaaaaagtg

SEQ ID NO: 251779 - DNA, 33 bp, Homo sapien
acccaatgtcttcaaccccttcctggttcagag

SEQ ID NO: 251780 - DNA, 33 bp, Homo sapien
acccaatgtcttcaacgccttcctggttcagag

SEQ ID NO: 251781 - DNA, 33 bp, Homo sapien
tgtgacatacaaattaacttttacaggcagcag

SEQ ID NO: 251782 - DNA, 33 bp, Homo sapien
tgtgacatacaaattagcttttacaggcagcag

SEQ ID NO: 251783 - DNA, 33 bp, Homo sapien
gtccattttcttcgcaatcataagcaggagaaa

SEQ ID NO: 251784 - DNA, 33 bp, Homo sapien
gtccattttcttcgcagtcataagcaggagaaa

SEQ ID NO: 251785 - DNA, 33 bp, Homo sapien
gcagaggggtttctgaagaagctctttgctctc

SEQ ID NO: 251786 - DNA, 33 bp, Homo sapien
gcagaggggtttctgaggaagctctttgctctc

SEQ ID NO: 251787 - DNA, 33 bp, Homo sapien
aaaatgcaatattgaccatgacccacagtaaga

SEQ ID NO: 251788 - DNA, 33 bp, Homo sapien
aaaatgcaatattgacgatgacccacagtaaga

SEQ ID NO: 251789 - DNA, 33 bp, Homo sapien
aataaaatgaaaatgaccaataacctcaggagt

SEQ ID NO: 251790 - DNA, 33 bp, Homo sapien
aataaaatgaaaatgagcaataacctcaggagt

SEQ ID NO: 251791 - DNA, 33 bp, Homo sapien
acatttgtccctagaacttcagtctttcagtct

SEQ ID NO: 251792 - DNA, 33 bp, Homo sapien
acatttgtccctagaatttcagtctttcagtct

SEQ ID NO: 251793 - DNA, 33 bp, Homo sapien
tagtagaattcctcaaaatccttacttttgaac

SEQ ID NO: 251794 - DNA, 33 bp, Homo sapien
tagtagaattcctcaatatccttacttttgaac

SEQ ID NO: 251795 - DNA, 33 bp, Homo sapien
tcatgacaacgtaagaactctctccagattgaa

SEQ ID NO: 251796 - DNA, 33 bp, Homo sapien
tcatgacaacgtaagagctctctccagattgaa

SEQ ID NO: 251797 - DNA, 33 bp, Homo sapien
cccccagaacttcacacaatcattcaagtcggt

SEQ ID NO: 251798 - DNA, 33 bp, Homo sapien
cccccagaacttcacataatcattcaagtcggt

SEQ ID NO: 251799 - DNA, 33 bp, Homo sapien
caacttctctatcacgaccaataaggccctgca

SEQ ID NO: 251800 - DNA, 33 bp, Homo sapien
caacttctctatcacggccaataaggccctgca

SEQ ID NO: 251801 - DNA, 33 bp, Homo sapien
gatttgatgagtacggaccaaattgacagctac

SEQ ID NO: 251802 - DNA, 33 bp, Homo sapien
gatttgatgagtacgggccaaattgacagctac

SEQ ID NO: 251803 - DNA, 33 bp, Homo sapien
tctatgtggtacaaaacgtcacgcataagtcta

SEQ ID NO: 251804 - DNA, 33 bp, Homo sapien
tctatgtggtacaaaatgtcacgcataagtcta

SEQ ID NO: 251805 - DNA, 33 bp, Homo sapien
cattcaaaaaatgaaactgactccttcgttatg

SEQ ID NO: 251806 - DNA, 33 bp, Homo sapien
cattcaaaaaatgaaattgactccttcgttatg

SEQ ID NO: 251807 - DNA, 33 bp, Homo sapien
tctctttatttaacaaagcatggctttctccat

SEQ ID NO: 251808 - DNA, 33 bp, Homo sapien
tctctttatttaacaaggcatggctttctccat

SEQ ID NO: 251809 - DNA, 33 bp, Homo sapien
aataagggaagcggcactaaaggagtctccagg

SEQ ID NO: 251810 - DNA, 33 bp, Homo sapien
aataagggaagcggcagtaaaggagtctccagg

SEQ ID NO: 251811 - DNA, 33 bp, Homo sapien
tggctgtggtacccaacagtgcaggtgggacaa

SEQ ID NO: 251812 - DNA, 33 bp, Homo sapien
tggctgtggtacccaatagtgcaggtgggacaa

SEQ ID NO: 251813 - DNA, 33 bp, Homo sapien
atatagagaaattataacccacatacattgctg

SEQ ID NO: 251814 - DNA, 33 bp, Homo sapien
atatagagaaattataccccacatacattgctg

SEQ ID NO: 251815 - DNA, 33 bp, Homo sapien
tggagtttctgacttgaaggcttatttggggaa

SEQ ID NO: 251816 - DNA, 33 bp, Homo sapien
tggagtttctgacttggaggcttatttggggaa

SEQ ID NO: 251817 - DNA, 33 bp, Homo sapien
actacatgaatatcaaagacagcatgaatatga

SEQ ID NO: 251818 - DNA, 33 bp, Homo sapien
actacatgaatatcaaggacagcatgaatatga

SEQ ID NO: 251819 - DNA, 33 bp, Homo sapien
ggaggtggcaaatttagcgagacaaaattgtcc

SEQ ID NO: 251820 - DNA, 33 bp, Homo sapien
ggaggtggcaaatttatcgagacaaaattgtcc

SEQ ID NO: 251821 - DNA, 33 bp, Homo sapien
cctttcttctcaaaaccatggaagatggtgatc

SEQ ID NO: 251822 - DNA, 33 bp, Homo sapien
cctttcttctcaaaactatggaagatggtgatc

SEQ ID NO: 251823 - DNA, 33 bp, Homo sapien
tcaccgaggatgctaacaagcagcacaggtgag

SEQ ID NO: 251824 - DNA, 33 bp, Homo sapien
tcaccgaggatgctaataagcagcacaggtgag

SEQ ID NO: 251825 - DNA, 33 bp, Homo sapien
aagcaaaaatccgtaaagcaaatcattgagtca

SEQ ID NO: 251826 - DNA, 33 bp, Homo sapien
aagcaaaaatccgtaaggcaaatcattgagtca

SEQ ID NO: 251827 - DNA, 33 bp, Homo sapien
catcctttatttgtaaaccaattgaagacattt

SEQ ID NO: 251828 - DNA, 33 bp, Homo sapien
catcctttatttgtaagccaattgaagacattt

SEQ ID NO: 251829 - DNA, 33 bp, Homo sapien
gacaagagttgaacacagtctcacatctgtcag

SEQ ID NO: 251830 - DNA, 33 bp, Homo sapien
gacaagagttgaacacggtctcacatctgtcag

SEQ ID NO: 251831 - DNA, 33 bp, Homo sapien
aagagacagggactataagcagtaagaggtggg

SEQ ID NO: 251832 - DNA, 33 bp, Homo sapien
aagagacagggactatgagcagtaagaggtggg

SEQ ID NO: 251833 - DNA, 33 bp, Homo sapien
aatgatatgtacagtacgattccgttttgtttt

SEQ ID NO: 251834 - DNA, 33 bp, Homo sapien
aatgatatgtacagtatgattccgttttgtttt

SEQ ID NO: 251835 - DNA, 33 bp, Homo sapien
gccacttgctgctggaagtcaagaaggcacagg

SEQ ID NO: 251836 - DNA, 33 bp, Homo sapien
gccacttgctgctggaggtcaagaaggcacagg

SEQ ID NO: 251837 - DNA, 33 bp, Homo sapien
ggtcagctgccaggtcagacacctctccctcca

SEQ ID NO: 251838 - DNA, 33 bp, Homo sapien
ggtcagctgccaggtcggacacctctccctcca

SEQ ID NO: 251839 - DNA, 33 bp, Homo sapien
taaaattcctccaaaacctgtccaatcaaacgg

SEQ ID NO: 251840 - DNA, 33 bp, Homo sapien
taaaattcctccaaaatctgtccaatcaaacgg

SEQ ID NO: 251841 - DNA, 33 bp, Homo sapien
tgtcatatatgcaatcaatttttggcccaaaac

SEQ ID NO: 251842 - DNA, 33 bp, Homo sapien
tgtcatatatgcaatccatttttggcccaaaac

SEQ ID NO: 251843 - DNA, 33 bp, Homo sapien
acagcaaggaactacactgagtacggccagcca

SEQ ID NO: 251844 - DNA, 33 bp, Homo sapien
acagcaaggaactacattgagtacggccagcca

SEQ ID NO: 251845 - DNA, 33 bp, Homo sapien
gtgtatattgggtacactgaacattgtgtgtat

SEQ ID NO: 251846 - DNA, 33 bp, Homo sapien
gtgtatattgggtacattgaacattgtgtgtat

SEQ ID NO: 251847 - DNA, 33 bp, Homo sapien
tgtgcactttacaatcactagttttatgttatt

SEQ ID NO: 251848 - DNA, 33 bp, Homo sapien
tgtgcactttacaatcgctagttttatgttatt

SEQ ID NO: 251849 - DNA, 33 bp, Homo sapien
cctgacatgagacagaaccaaatcaactcaggt

SEQ ID NO: 251850 - DNA, 33 bp, Homo sapien
cctgacatgagacagacccaaatcaactcaggt

SEQ ID NO: 251851 - DNA, 33 bp, Homo sapien
actcacgtacattatcaacctgaccctactagg

SEQ ID NO: 251852 - DNA, 33 bp, Homo sapien
actcacgtacattatctacctgaccctactagg

SEQ ID NO: 251853 - DNA, 33 bp, Homo sapien
aaattttgccttcataccttgtgaagttacggc

SEQ ID NO: 251854 - DNA, 33 bp, Homo sapien
aaattttgccttcatagcttgtgaagttacggc

SEQ ID NO: 251855 - DNA, 33 bp, Homo sapien
tgaggacaagtcagccacctcatctatggcaag

SEQ ID NO: 251856 - DNA, 33 bp, Homo sapien
tgaggacaagtcagccgcctcatctatggcaag

SEQ ID NO: 251857 - DNA, 33 bp, Homo sapien
ggtaccgggattgttcccagcttaccacagagg

SEQ ID NO: 251858 - DNA, 33 bp, Homo sapien
ggtaccgggattgttctcagcttaccacagagg

SEQ ID NO: 251859 - DNA, 33 bp, Homo sapien
gcggacaaacccaaaccgagaccattctctaaa

SEQ ID NO: 251860 - DNA, 33 bp, Homo sapien
gcggacaaacccaaactgagaccattctctaaa

SEQ ID NO: 251861 - DNA, 33 bp, Homo sapien
ctaatggacagtcatgaagcaaatcaaagatgt

SEQ ID NO: 251862 - DNA, 33 bp, Homo sapien
ctaatggacagtcatggagcaaatcaaagatgt

SEQ ID NO: 251863 - DNA, 33 bp, Homo sapien
gcttcaacaggaacaacggaagctgtctgatag

SEQ ID NO: 251864 - DNA, 33 bp, Homo sapien
gcttcaacaggaacaatggaagctgtctgatag

SEQ ID NO: 251865 - DNA, 33 bp, Homo sapien
gggacaatgtggcatacaagaaagtagactgag

SEQ ID NO: 251866 - DNA, 33 bp, Homo sapien
gggacaatgtggcatagaagaaagtagactgag

SEQ ID NO: 251867 - DNA, 33 bp, Homo sapien
ccatcctgaaaggccacacctcggtaacttgat

SEQ ID NO: 251868 - DNA, 33 bp, Homo sapien
ccatcctgaaaggccatacctcggtaacttgat

SEQ ID NO: 251869 - DNA, 33 bp, Homo sapien
aaccctgctgtgcctaaatggataagtcagccc

SEQ ID NO: 251870 - DNA, 33 bp, Homo sapien
aaccctgctgtgcctacatggataagtcagccc

SEQ ID NO: 251871 - DNA, 33 bp, Homo sapien
tccctgggaaagaaaggaggtccctgtaagcca

SEQ ID NO: 251872 - DNA, 33 bp, Homo sapien
tccctgggaaagaaagtaggtccctgtaagcca

SEQ ID NO: 251873 - DNA, 33 bp, Homo sapien
tgcagcaaactcaacacgctcctaatgccacaa

SEQ ID NO: 251874 - DNA, 33 bp, Homo sapien
tgcagcaaactcaacatgctcctaatgccacaa

SEQ ID NO: 251875 - DNA, 33 bp, Homo sapien
cagcagtgatccgtgccaatccttctttttttt

SEQ ID NO: 251876 - DNA, 33 bp, Homo sapien
cagcagtgatccgtgctaatccttctttttttt

SEQ ID NO: 251877 - DNA, 33 bp, Homo sapien
ctgccatacttgggacagcatcagccaaaatga

SEQ ID NO: 251878 - DNA, 33 bp, Homo sapien
ctgccatacttgggacggcatcagccaaaatga

SEQ ID NO: 251879 - DNA, 33 bp, Homo sapien
gtccaatcacagccaactctgggagctttgagg

SEQ ID NO: 251880 - DNA, 33 bp, Homo sapien
gtccaatcacagccaattctgggagctttgagg

SEQ ID NO: 251881 - DNA, 33 bp, Homo sapien
ggtattttgcatccatcaataaagagtctgttg

SEQ ID NO: 251882 - DNA, 33 bp, Homo sapien
ggtattttgcatccattaataaagagtctgttg

SEQ ID NO: 251883 - DNA, 33 bp, Homo sapien
ctcagggccaccctccaccagcttcacggggac

SEQ ID NO: 251884 - DNA, 33 bp, Homo sapien
ctcagggccaccctccgccagcttcacggggac

SEQ ID NO: 251885 - DNA, 33 bp, Homo sapien
tgagctgacagtcaaaagttcggaacagacagg

SEQ ID NO: 251886 - DNA, 33 bp, Homo sapien
tgagctgacagtcaaatgttcggaacagacagg

SEQ ID NO: 251887 - DNA, 33 bp, Homo sapien
ccacagactccactccaagggcaacctgagaac

SEQ ID NO: 251888 - DNA, 33 bp, Homo sapien
ccacagactccactccgagggcaacctgagaac

SEQ ID NO: 251889 - DNA, 33 bp, Homo sapien
aaatggataaaagaaggcctatcagttaagtca

SEQ ID NO: 251890 - DNA, 33 bp, Homo sapien
aaatggataaaagaagtcctatcagttaagtca

SEQ ID NO: 251891 - DNA, 33 bp, Homo sapien
cccagttttcagaatgcacaggatggtcacctg

SEQ ID NO: 251892 - DNA, 33 bp, Homo sapien
cccagttttcagaatggacaggatggtcacctg

SEQ ID NO: 251893 - DNA, 33 bp, Homo sapien
agtatcttctctggtgcagcttactgacacctg

SEQ ID NO: 251894 - DNA, 33 bp, Homo sapien
agtatcttctctggtggagcttactgacacctg

SEQ ID NO: 251895 - DNA, 33 bp, Homo sapien
agacacctgggctttacagattgttgctgaatc

SEQ ID NO: 251896 - DNA, 33 bp, Homo sapien
agacacctgggctttatagattgttgctgaatc

SEQ ID NO: 251897 - DNA, 33 bp, Homo sapien
gtttctgggatggctactaaacgcagcgtatgg

SEQ ID NO: 251898 - DNA, 33 bp, Homo sapien
gtttctgggatggctagtaaacgcagcgtatgg

SEQ ID NO: 251899 - DNA, 33 bp, Homo sapien
tgtaaccagaagcctccgaagcctactcagttt

SEQ ID NO: 251900 - DNA, 33 bp, Homo sapien
tgtaaccagaagcctctgaagcctactcagttt

SEQ ID NO: 251901 - DNA, 33 bp, Homo sapien
atttttgtaatgacaggctcttactatcttgcc

SEQ ID NO: 251902 - DNA, 33 bp, Homo sapien
atttttgtaatgacagtctcttactatcttgcc

SEQ ID NO: 251903 - DNA, 33 bp, Homo sapien
gattggaatttaaacaaaatcacaactacacgt

SEQ ID NO: 251904 - DNA, 33 bp, Homo sapien
gattggaatttaaacacaatcacaactacacgt

SEQ ID NO: 251905 - DNA, 33 bp, Homo sapien
gaatacttatgagtaaagaggtgagacaaatat

SEQ ID NO: 251906 - DNA, 33 bp, Homo sapien
gaatacttatgagtaatgaggtgagacaaatat

SEQ ID NO: 251907 - DNA, 33 bp, Homo sapien
gcatttacttttgtaaggaagatgttacaattt

SEQ ID NO: 251908 - DNA, 33 bp, Homo sapien
gcatttacttttgtaatgaagatgttacaattt

SEQ ID NO: 251909 - DNA, 33 bp, Homo sapien
gactaagaccaattcactcttctcactttcact

SEQ ID NO: 251910 - DNA, 33 bp, Homo sapien
gactaagaccaattcattcttctcactttcact

SEQ ID NO: 251911 - DNA, 33 bp, Homo sapien
gggactggtgcgaagacctgtgaaggccttaag

SEQ ID NO: 251912 - DNA, 33 bp, Homo sapien
gggactggtgcgaagatctgtgaaggccttaag

SEQ ID NO: 251913 - DNA, 33 bp, Homo sapien
accctgcctttatacccatgtgtctgctgctcc

SEQ ID NO: 251914 - DNA, 33 bp, Homo sapien
accctgcctttatacctatgtgtctgctgctcc

SEQ ID NO: 251915 - DNA, 33 bp, Homo sapien
ccaaagagatgctttaaaaaggattcagaattt

SEQ ID NO: 251916 - DNA, 33 bp, Homo sapien
ccaaagagatgctttataaaggattcagaattt

SEQ ID NO: 251917 - DNA, 33 bp, Homo sapien
catgcacgaaacttcagaattattttggaggac

SEQ ID NO: 251918 - DNA, 33 bp, Homo sapien
catgcacgaaacttcataattattttggaggac

SEQ ID NO: 251919 - DNA, 33 bp, Homo sapien
tccggccttgcatagacaatgtagttggaaaag

SEQ ID NO: 251920 - DNA, 33 bp, Homo sapien
tccggccttgcatagataatgtagttggaaaag

SEQ ID NO: 251921 - DNA, 33 bp, Homo sapien
ttttttggacgtgattaaaggtgaaatgactcc

SEQ ID NO: 251922 - DNA, 33 bp, Homo sapien
ttttttggacgtgattgaaggtgaaatgactcc

SEQ ID NO: 251923 - DNA, 33 bp, Homo sapien
aatccagaggcagatacaggttatggaacccca

SEQ ID NO: 251924 - DNA, 33 bp, Homo sapien
aatccagaggcagatagaggttatggaacccca

SEQ ID NO: 251925 - DNA, 33 bp, Homo sapien
cgatagggaactagccaagtcgagtatggcacc

SEQ ID NO: 251926 - DNA, 33 bp, Homo sapien
cgatagggaactagccgagtcgagtatggcacc

SEQ ID NO: 251927 - DNA, 33 bp, Homo sapien
tgaattccacaagtacaatttactgtagtgtct

SEQ ID NO: 251928 - DNA, 33 bp, Homo sapien
tgaattccacaagtacgatttactgtagtgtct

SEQ ID NO: 251929 - DNA, 33 bp, Homo sapien
taaacccccagagataagtgcagttttcacaat

SEQ ID NO: 251930 - DNA, 33 bp, Homo sapien
taaacccccagagatacgtgcagttttcacaat

SEQ ID NO: 251931 - DNA, 33 bp, Homo sapien
attatgtgggaaaccactgagcatccattcctc

SEQ ID NO: 251932 - DNA, 33 bp, Homo sapien
attatgtgggaaaccattgagcatccattcctc

SEQ ID NO: 251933 - DNA, 33 bp, Homo sapien
gcaagtcactgaggtacgaatgtgctaagagtg

SEQ ID NO: 251934 - DNA, 33 bp, Homo sapien
gcaagtcactgaggtaggaatgtgctaagagtg

SEQ ID NO: 251935 - DNA, 33 bp, Homo sapien
gcagcagccagtatgaagttgtcttaggtcctg

SEQ ID NO: 251936 - DNA, 33 bp, Homo sapien
gcagcagccagtatgaggttgtcttaggtcctg

SEQ ID NO: 251937 - DNA, 33 bp, Homo sapien
taaaactggtgctggaactattattcatccatg

SEQ ID NO: 251938 - DNA, 33 bp, Homo sapien
taaaactggtgctggagctattattcatccatg

SEQ ID NO: 251939 - DNA, 33 bp, Homo sapien
atccaatttaggttgacctttcaaaaggtgtgt

SEQ ID NO: 251940 - DNA, 33 bp, Homo sapien
atccaatttaggttgatctttcaaaaggtgtgt

SEQ ID NO: 251941 - DNA, 33 bp, Homo sapien
ctctcttttgtttgtgaagctacaatattttcc

SEQ ID NO: 251942 - DNA, 33 bp, Homo sapien
ctctcttttgtttgtggagctacaatattttcc

SEQ ID NO: 251943 - DNA, 33 bp, Homo sapien
cgatgtgccactccacactggcagttataaatg

SEQ ID NO: 251944 - DNA, 33 bp, Homo sapien
cgatgtgccactccacgctggcagttataaatg

SEQ ID NO: 251945 - DNA, 33 bp, Homo sapien
tggtctctgtcagaacaaaactctgcccttcca

SEQ ID NO: 251946 - DNA, 33 bp, Homo sapien
tggtctctgtcagaacgaaactctgcccttcca

SEQ ID NO: 251947 - DNA, 33 bp, Homo sapien
cagagaatatgaagaaagatggcctctctgaag

SEQ ID NO: 251948 - DNA, 33 bp, Homo sapien
cagagaatatgaagaaggatggcctctctgaag

SEQ ID NO: 251949 - DNA, 33 bp, Homo sapien
ctctcagaatccatcaaaggtcacacacgcaag

SEQ ID NO: 251950 - DNA, 33 bp, Homo sapien
ctctcagaatccatcagaggtcacacacgcaag

SEQ ID NO: 251951 - DNA, 33 bp, Homo sapien
aaagatggagtaagaccctttcttttggcttcc

SEQ ID NO: 251952 - DNA, 33 bp, Homo sapien
aaagatggagtaagactctttcttttggcttcc

SEQ ID NO: 251953 - DNA, 33 bp, Homo sapien
caaattcttcattcctaaaagctttggggtgag

SEQ ID NO: 251954 - DNA, 33 bp, Homo sapien
caaattcttcattcctgaaagctttggggtgag

SEQ ID NO: 251955 - DNA, 33 bp, Homo sapien
gggaaatgtagtttcactagctagaatagggaa

SEQ ID NO: 251956 - DNA, 33 bp, Homo sapien
gggaaatgtagtttcattagctagaatagggaa

SEQ ID NO: 251957 - DNA, 33 bp, Homo sapien
ccagagtaggaaaaccagagcgcacttggatag

SEQ ID NO: 251958 - DNA, 33 bp, Homo sapien
ccagagtaggaaaaccggagcgcacttggatag

SEQ ID NO: 251959 - DNA, 33 bp, Homo sapien
ttaaattgtgaacttcaagaaaaagagttctcg

SEQ ID NO: 251960 - DNA, 33 bp, Homo sapien
ttaaattgtgaacttcgagaaaaagagttctcg

SEQ ID NO: 251961 - DNA, 33 bp, Homo sapien
tgtgtttgtgtagctaccatgagatttgtggtc

SEQ ID NO: 251962 - DNA, 33 bp, Homo sapien
tgtgtttgtgtagctatcatgagatttgtggtc

SEQ ID NO: 251963 - DNA, 33 bp, Homo sapien
ctgtagatttgagaaacagttttttctttccag

SEQ ID NO: 251964 - DNA, 33 bp, Homo sapien
ctgtagatttgagaaatagttttttctttccag

SEQ ID NO: 251965 - DNA, 33 bp, Homo sapien
gttgtatctgtctcgacggcgttgtgtcaacgt

SEQ ID NO: 251966 - DNA, 33 bp, Homo sapien
gttgtatctgtctcgatggcgttgtgtcaacgt

SEQ ID NO: 251967 - DNA, 33 bp, Homo sapien
aaatagaaattttacaaaggagaatatcagcag

SEQ ID NO: 251968 - DNA, 33 bp, Homo sapien
aaatagaaattttacagaggagaatatcagcag

SEQ ID NO: 251969 - DNA, 33 bp, Homo sapien
acccaacagaatgttccgaaaaatgcgattatt

SEQ ID NO: 251970 - DNA, 33 bp, Homo sapien
acccaacagaatgttctgaaaaatgcgattatt

SEQ ID NO: 251971 - DNA, 33 bp, Homo sapien
gctacaaacaccaccacctcgcttgtcatcctg

SEQ ID NO: 251972 - DNA, 33 bp, Homo sapien
gctacaaacaccaccatctcgcttgtcatcctg

SEQ ID NO: 251973 - DNA, 33 bp, Homo sapien
gcatgggttatacttacactaaaaattattcct

SEQ ID NO: 251974 - DNA, 33 bp, Homo sapien
gcatgggttatacttagactaaaaattattcct

SEQ ID NO: 251975 - DNA, 33 bp, Homo sapien
aattctgttgtttgaaataagattcaacaacaa

SEQ ID NO: 251976 - DNA, 33 bp, Homo sapien
aattctgttgtttgaagtaagattcaacaacaa

SEQ ID NO: 251977 - DNA, 33 bp, Homo sapien
tatcaattctgtgtcacagtcaaaccatgaact

SEQ ID NO: 251978 - DNA, 33 bp, Homo sapien
tatcaattctgtgtcagagtcaaaccatgaact

SEQ ID NO: 251979 - DNA, 33 bp, Homo sapien
ggtcttttccggaaacggctattatcaattctg

SEQ ID NO: 251980 - DNA, 33 bp, Homo sapien
ggtcttttccggaaactgctattatcaattctg

SEQ ID NO: 251981 - DNA, 33 bp, Homo sapien
tatcattgaacaaaaaagcaagttacagaatga

SEQ ID NO: 251982 - DNA, 33 bp, Homo sapien
tatcattgaacaaaaacgcaagttacagaatga

SEQ ID NO: 251983 - DNA, 33 bp, Homo sapien
acattgaacattgtcaaacttctagttgtgaaa

SEQ ID NO: 251984 - DNA, 33 bp, Homo sapien
acattgaacattgtcagacttctagttgtgaaa

SEQ ID NO: 251985 - DNA, 33 bp, Homo sapien
agcaatgaatatgaaccaataattcacaaaaga

SEQ ID NO: 251986 - DNA, 33 bp, Homo sapien
agcaatgaatatgaacgaataattcacaaaaga

SEQ ID NO: 251987 - DNA, 33 bp, Homo sapien
acagtatggaatattacgcagttgctaaaaaga

SEQ ID NO: 251988 - DNA, 33 bp, Homo sapien
acagtatggaatattatgcagttgctaaaaaga

SEQ ID NO: 251989 - DNA, 33 bp, Homo sapien
ttatggtcgggagataccatcatttaagaagca

SEQ ID NO: 251990 - DNA, 33 bp, Homo sapien
ttatggtcgggagatagcatcatttaagaagca

SEQ ID NO: 251991 - DNA, 33 bp, Homo sapien
agagaactgaaactcactgaaatggagacgaga

SEQ ID NO: 251992 - DNA, 33 bp, Homo sapien
agagaactgaaactcattgaaatggagacgaga

SEQ ID NO: 251993 - DNA, 33 bp, Homo sapien
ttgcttggagagaaacaggaaggccctgcagtt

SEQ ID NO: 251994 - DNA, 33 bp, Homo sapien
ttgcttggagagaaacgggaaggccctgcagtt

SEQ ID NO: 251995 - DNA, 33 bp, Homo sapien
tctacactgctgatggcaatgaaactagtacag

SEQ ID NO: 251996 - DNA, 33 bp, Homo sapien
tctacactgctgatgggaatgaaactagtacag

SEQ ID NO: 251997 - DNA, 33 bp, Homo sapien
tatctcaccggtaagacgggctgggactggatg

SEQ ID NO: 251998 - DNA, 33 bp, Homo sapien
tatctcaccggtaagatgggctgggactggatg

SEQ ID NO: 251999 - DNA, 33 bp, Homo sapien
acaagtgaaacagtagaaaattgaatcaatgat

SEQ ID NO: 252000 - DNA, 33 bp, Homo sapien
acaagtgaaacagtagcaaattgaatcaatgat

SEQ ID NO: 252001 - DNA, 33 bp, Homo sapien
tggacagaattcacagcaaaatactgttcaaat

SEQ ID NO: 252002 - DNA, 33 bp, Homo sapien
tggacagaattcacaggaaaatactgttcaaat

SEQ ID NO: 252003 - DNA, 33 bp, Homo sapien
cactgccaccacagacaagggaacaaagctgtg

SEQ ID NO: 252004 - DNA, 33 bp, Homo sapien
cactgccaccacagaccagggaacaaagctgtg

SEQ ID NO: 252005 - DNA, 33 bp, Homo sapien
aagcaggatgctgagccgaagaggattattctt

SEQ ID NO: 252006 - DNA, 33 bp, Homo sapien
aagcaggatgctgagctgaagaggattattctt

SEQ ID NO: 252007 - DNA, 33 bp, Homo sapien
ttatgtgcttccaagacacagtggtgggaccaa

SEQ ID NO: 252008 - DNA, 33 bp, Homo sapien
ttatgtgcttccaagatacagtggtgggaccaa

SEQ ID NO: 252009 - DNA, 33 bp, Homo sapien
gaatttgcctgctcaccgaaatgcatctataac

SEQ ID NO: 252010 - DNA, 33 bp, Homo sapien
gaatttgcctgctcactgaaatgcatctataac

SEQ ID NO: 252011 - DNA, 33 bp, Homo sapien
acaatatttcatccaccgatcaatgcataacct

SEQ ID NO: 252012 - DNA, 33 bp, Homo sapien
acaatatttcatccactgatcaatgcataacct

SEQ ID NO: 252013 - DNA, 33 bp, Homo sapien
ctgcaagcctgttctgaagcttctttcacttct

SEQ ID NO: 252014 - DNA, 33 bp, Homo sapien
ctgcaagcctgttctgcagcttctttcacttct

SEQ ID NO: 252015 - DNA, 33 bp, Homo sapien
ctgggttgatttctgccaggaatcccgcaggct

SEQ ID NO: 252016 - DNA, 33 bp, Homo sapien
ctgggttgatttctgctaggaatcccgcaggct

SEQ ID NO: 252017 - DNA, 33 bp, Homo sapien
cacagagtatgcaggcactattctaaatgcttt

SEQ ID NO: 252018 - DNA, 33 bp, Homo sapien
cacagagtatgcaggcgctattctaaatgcttt

SEQ ID NO: 252019 - DNA, 33 bp, Homo sapien
tgtcaccacccacagactcaagatcaagaccct

SEQ ID NO: 252020 - DNA, 33 bp, Homo sapien
tgtcaccacccacagattcaagatcaagaccct

SEQ ID NO: 252021 - DNA, 33 bp, Homo sapien
atgcaaagaagggagacagtcttccagcagagg

SEQ ID NO: 252022 - DNA, 33 bp, Homo sapien
atgcaaagaagggagagagtcttccagcagagg

SEQ ID NO: 252023 - DNA, 33 bp, Homo sapien
gtgcatgtctcggctcgaatgttatctcctcgg

SEQ ID NO: 252024 - DNA, 33 bp, Homo sapien
gtgcatgtctcggctctaatgttatctcctcgg

SEQ ID NO: 252025 - DNA, 33 bp, Homo sapien
ttctttgtcacagccacaatcttgagaattacc

SEQ ID NO: 252026 - DNA, 33 bp, Homo sapien
ttctttgtcacagccataatcttgagaattacc

SEQ ID NO: 252027 - DNA, 33 bp, Homo sapien
cccggaggcctgaagacggtgcagatgcgctgt

SEQ ID NO: 252028 - DNA, 33 bp, Homo sapien
cccggaggcctgaagatggtgcagatgcgctgt

SEQ ID NO: 252029 - DNA, 33 bp, Homo sapien
tgccggaagcatcaaacacaccctggatttcaa

SEQ ID NO: 252030 - DNA, 33 bp, Homo sapien
tgccggaagcatcaaatacaccctggatttcaa

SEQ ID NO: 252031 - DNA, 33 bp, Homo sapien
taacgggtattgcccacagaataaaatatgtat

SEQ ID NO: 252032 - DNA, 33 bp, Homo sapien
taacgggtattgcccagagaataaaatatgtat

SEQ ID NO: 252033 - DNA, 33 bp, Homo sapien
agcacccaaagcccaaatctgagaatattcaag

SEQ ID NO: 252034 - DNA, 33 bp, Homo sapien
agcacccaaagcccaagtctgagaatattcaag

SEQ ID NO: 252035 - DNA, 33 bp, Homo sapien
ggtgtaattagaaaaccgaatcataacttagat

SEQ ID NO: 252036 - DNA, 33 bp, Homo sapien
ggtgtaattagaaaactgaatcataacttagat

SEQ ID NO: 252037 - DNA, 33 bp, Homo sapien
catttccataaaaaaacgctctgtttgtgcact

SEQ ID NO: 252038 - DNA, 33 bp, Homo sapien
catttccataaaaaaatgctctgtttgtgcact

SEQ ID NO: 252039 - DNA, 33 bp, Homo sapien
ctccctgaaatcctcaaactctttttcaaacag

SEQ ID NO: 252040 - DNA, 33 bp, Homo sapien
ctccctgaaatcctcagactctttttcaaacag

SEQ ID NO: 252041 - DNA, 33 bp, Homo sapien
aacaaagtaccatacacggagcagcttaagcaa

SEQ ID NO: 252042 - DNA, 33 bp, Homo sapien
aacaaagtaccatacatggagcagcttaagcaa

SEQ ID NO: 252043 - DNA, 33 bp, Homo sapien
tctctgtgctctctgaagctgtctaatatgctg

SEQ ID NO: 252044 - DNA, 33 bp, Homo sapien
tctctgtgctctctgaggctgtctaatatgctg

SEQ ID NO: 252045 - DNA, 33 bp, Homo sapien
ttatctgaaattcaaacttaattgagtgtcctg

SEQ ID NO: 252046 - DNA, 33 bp, Homo sapien
ttatctgaaattcaaagttaattgagtgtcctg

SEQ ID NO: 252047 - DNA, 33 bp, Homo sapien
catttttcaacataaaatctcaggcaaaacctt

SEQ ID NO: 252048 - DNA, 33 bp, Homo sapien
catttttcaacataaagtctcaggcaaaacctt

SEQ ID NO: 252049 - DNA, 33 bp, Homo sapien
aaaaggctgcataaggaaacaacaaatctgggc

SEQ ID NO: 252050 - DNA, 33 bp, Homo sapien
aaaaggctgcataagggaacaacaaatctgggc

SEQ ID NO: 252051 - DNA, 33 bp, Homo sapien
gagcagggtctggaaacgaaggtgtgctccgct

SEQ ID NO: 252052 - DNA, 33 bp, Homo sapien
gagcagggtctggaaatgaaggtgtgctccgct

SEQ ID NO: 252053 - DNA, 33 bp, Homo sapien
tgggaacacaggggtcaccactgcagagtcagg

SEQ ID NO: 252054 - DNA, 33 bp, Homo sapien
tgggaacacaggggtcgccactgcagagtcagg

SEQ ID NO: 252055 - DNA, 33 bp, Homo sapien
aggtaacttgcccaacaacacacagagagtaag

SEQ ID NO: 252056 - DNA, 33 bp, Homo sapien
aggtaacttgcccaacgacacacagagagtaag

SEQ ID NO: 252057 - DNA, 33 bp, Homo sapien
tgagctattcaatcacactttcacttcttttgg

SEQ ID NO: 252058 - DNA, 33 bp, Homo sapien
tgagctattcaatcactctttcacttcttttgg

SEQ ID NO: 252059 - DNA, 33 bp, Homo sapien
ggaacacacacagggacaaatgacaggcaaata

SEQ ID NO: 252060 - DNA, 33 bp, Homo sapien
ggaacacacacagggagaaatgacaggcaaata

SEQ ID NO: 252061 - DNA, 33 bp, Homo sapien
gaattgtaacagagatcaaacaacgtcttaaaa

SEQ ID NO: 252062 - DNA, 33 bp, Homo sapien
gaattgtaacagagatgaaacaacgtcttaaaa

SEQ ID NO: 252063 - DNA, 33 bp, Homo sapien
cactgcaaaaataatccaagttgaggaaaatac

SEQ ID NO: 252064 - DNA, 33 bp, Homo sapien
cactgcaaaaataatctaagttgaggaaaatac

SEQ ID NO: 252065 - DNA, 33 bp, Homo sapien
cctgcaaaattgtttagcctacatcgaatcctg

SEQ ID NO: 252066 - DNA, 33 bp, Homo sapien
cctgcaaaattgtttatcctacatcgaatcctg

SEQ ID NO: 252067 - DNA, 33 bp, Homo sapien
ccacacacgtatacacacatgtctacacatcta

SEQ ID NO: 252068 - DNA, 33 bp, Homo sapien
ccacacacgtatacacgcatgtctacacatcta

SEQ ID NO: 252069 - DNA, 33 bp, Homo sapien
atgttaaacctgcctaagcttcacttcattaaa

SEQ ID NO: 252070 - DNA, 33 bp, Homo sapien
atgttaaacctgcctacgcttcacttcattaaa

SEQ ID NO: 252071 - DNA, 33 bp, Homo sapien
cccagagaacacaatggaagatcccaaatgcca

SEQ ID NO: 252072 - DNA, 33 bp, Homo sapien
cccagagaacacaatgtaagatcccaaatgcca

SEQ ID NO: 252073 - DNA, 33 bp, Homo sapien
caagaagtctgaaatcaagctgacggcgggggc

SEQ ID NO: 252074 - DNA, 33 bp, Homo sapien
caagaagtctgaaatcgagctgacggcgggggc

SEQ ID NO: 252075 - DNA, 33 bp, Homo sapien
gtggcttcaaacggcacgaatttgttatcatct

SEQ ID NO: 252076 - DNA, 33 bp, Homo sapien
gtggcttcaaacggcatgaatttgttatcatct

SEQ ID NO: 252077 - DNA, 33 bp, Homo sapien
ctctgaccccctggaaagctgtgatgacatcag

SEQ ID NO: 252078 - DNA, 33 bp, Homo sapien
ctctgaccccctggaacgctgtgatgacatcag

SEQ ID NO: 252079 - DNA, 33 bp, Homo sapien
ccacagggagaggatcaaggactgaagaagcag

SEQ ID NO: 252080 - DNA, 33 bp, Homo sapien
ccacagggagaggatcgaggactgaagaagcag

SEQ ID NO: 252081 - DNA, 33 bp, Homo sapien
tgcttcaagggcactccatggacccattctttt

SEQ ID NO: 252082 - DNA, 33 bp, Homo sapien
tgcttcaagggcactctatggacccattctttt

SEQ ID NO: 252083 - DNA, 33 bp, Homo sapien
tccctgcgctacctccagatggagcctcagaaa

SEQ ID NO: 252084 - DNA, 33 bp, Homo sapien
tccctgcgctacctccggatggagcctcagaaa

SEQ ID NO: 252085 - DNA, 33 bp, Homo sapien
gttctttacagtttagaaaacaaactcatggcc

SEQ ID NO: 252086 - DNA, 33 bp, Homo sapien
gttctttacagtttaggaaacaaactcatggcc

SEQ ID NO: 252087 - DNA, 33 bp, Homo sapien
ttacactttgcccttcgctgaaatctgcaggtt

SEQ ID NO: 252088 - DNA, 33 bp, Homo sapien
ttacactttgcccttctctgaaatctgcaggtt

SEQ ID NO: 252089 - DNA, 33 bp, Homo sapien
agctccactgttagaacatgcatgcacgtgtgc

SEQ ID NO: 252090 - DNA, 33 bp, Homo sapien
agctccactgttagaatatgcatgcacgtgtgc

SEQ ID NO: 252091 - DNA, 33 bp, Homo sapien
gccaggaggtggcaaacggtatctcagagggtc

SEQ ID NO: 252092 - DNA, 33 bp, Homo sapien
gccaggaggtggcaaatggtatctcagagggtc

SEQ ID NO: 252093 - DNA, 33 bp, Homo sapien
gaagtgagcattcacaaagggtgtctgaaagtg

SEQ ID NO: 252094 - DNA, 33 bp, Homo sapien
gaagtgagcattcacagagggtgtctgaaagtg

SEQ ID NO: 252095 - DNA, 33 bp, Homo sapien
ccatacccgcaaacacagtccaggctgcctcca

SEQ ID NO: 252096 - DNA, 33 bp, Homo sapien
ccatacccgcaaacacggtccaggctgcctcca

SEQ ID NO: 252097 - DNA, 33 bp, Homo sapien
gaattcagccagagggcaaaacttctgggtgcc

SEQ ID NO: 252098 - DNA, 33 bp, Homo sapien
gaattcagccagagggtaaaacttctgggtgcc

SEQ ID NO: 252099 - DNA, 33 bp, Homo sapien
gtgaccacagtgacgacgtcctatgcagactat

SEQ ID NO: 252100 - DNA, 33 bp, Homo sapien
gtgaccacagtgacgatgtcctatgcagactat

SEQ ID NO: 252101 - DNA, 33 bp, Homo sapien
atgatatcttaataacggttacaaaatgaaatg

SEQ ID NO: 252102 - DNA, 33 bp, Homo sapien
atgatatcttaataactgttacaaaatgaaatg

SEQ ID NO: 252103 - DNA, 33 bp, Homo sapien
ttgtggaacctatagaaatccgggtgaacctca

SEQ ID NO: 252104 - DNA, 33 bp, Homo sapien
ttgtggaacctatagagatccgggtgaacctca

SEQ ID NO: 252105 - DNA, 33 bp, Homo sapien
catccctgagaatgccaccttttacccattttc

SEQ ID NO: 252106 - DNA, 33 bp, Homo sapien
catccctgagaatgccgccttttacccattttc

SEQ ID NO: 252107 - DNA, 33 bp, Homo sapien
acacccaaacaggacgacactggggtcctccag

SEQ ID NO: 252108 - DNA, 33 bp, Homo sapien
acacccaaacaggacggcactggggtcctccag

SEQ ID NO: 252109 - DNA, 33 bp, Homo sapien
actgttgcgtttgagactcacgttccccctggt

SEQ ID NO: 252110 - DNA, 33 bp, Homo sapien
actgttgcgtttgagattcacgttccccctggt

SEQ ID NO: 252111 - DNA, 33 bp, Homo sapien
gggaaaacgcgaaaccaaggagaaggagaatga

SEQ ID NO: 252112 - DNA, 33 bp, Homo sapien
gggaaaacgcgaaaccgaggagaaggagaatga

SEQ ID NO: 252113 - DNA, 33 bp, Homo sapien
tgcactgtgcagtttgcaccctgcggacttgac

SEQ ID NO: 252114 - DNA, 33 bp, Homo sapien
tgcactgtgcagtttgtaccctgcggacttgac

SEQ ID NO: 252115 - DNA, 33 bp, Homo sapien
atagtttgtcttccaactgggctacccctgtcc

SEQ ID NO: 252116 - DNA, 33 bp, Homo sapien
atagtttgtcttccaattgggctacccctgtcc

SEQ ID NO: 252117 - DNA, 33 bp, Homo sapien
gacctccaggatccacagacagaggaagccaag

SEQ ID NO: 252118 - DNA, 33 bp, Homo sapien
gacctccaggatccacggacagaggaagccaag

SEQ ID NO: 252119 - DNA, 33 bp, Homo sapien
tatacagatacacaaacaagtggtcgtggctgt

SEQ ID NO: 252120 - DNA, 33 bp, Homo sapien
tatacagatacacaaataagtggtcgtggctgt

SEQ ID NO: 252121 - DNA, 33 bp, Homo sapien
agaatggagggtgaaaattcaggatttctagcc

SEQ ID NO: 252122 - DNA, 33 bp, Homo sapien
agaatggagggtgaaagttcaggatttctagcc

SEQ ID NO: 252123 - DNA, 33 bp, Homo sapien
ggatggatggtggcaaatgatggcgacaaacac

SEQ ID NO: 252124 - DNA, 33 bp, Homo sapien
ggatggatggtggcaagtgatggcgacaaacac

SEQ ID NO: 252125 - DNA, 33 bp, Homo sapien
tatgattaatgttgtcacgttggggagctctcc

SEQ ID NO: 252126 - DNA, 33 bp, Homo sapien
tatgattaatgttgtcgcgttggggagctctcc

SEQ ID NO: 252127 - DNA, 33 bp, Homo sapien
gtacctgcagctaaacactctaaatatattagt

SEQ ID NO: 252128 - DNA, 33 bp, Homo sapien
gtacctgcagctaaacgctctaaatatattagt

SEQ ID NO: 252129 - DNA, 33 bp, Homo sapien
agcagctaagttgatacccatctggtgatgagt

SEQ ID NO: 252130 - DNA, 33 bp, Homo sapien
agcagctaagttgatatccatctggtgatgagt

SEQ ID NO: 252131 - DNA, 33 bp, Homo sapien
cacaaccctcaccacccgcgatagcacttgctt

SEQ ID NO: 252132 - DNA, 33 bp, Homo sapien
cacaaccctcaccacctgcgatagcacttgctt

SEQ ID NO: 252133 - DNA, 33 bp, Homo sapien
tgcagcagccttagaaagtaggtgctattatga

SEQ ID NO: 252134 - DNA, 33 bp, Homo sapien
tgcagcagccttagaaggtaggtgctattatga

SEQ ID NO: 252135 - DNA, 33 bp, Homo sapien
ttagtgcacgcatagcaagtgtcggccctgagg

SEQ ID NO: 252136 - DNA, 33 bp, Homo sapien
ttagtgcacgcatagcgagtgtcggccctgagg

SEQ ID NO: 252137 - DNA, 33 bp, Homo sapien
ggccatctggttccaacctggacttgtggctga

SEQ ID NO: 252138 - DNA, 33 bp, Homo sapien
ggccatctggttccaatctggacttgtggctga

SEQ ID NO: 252139 - DNA, 33 bp, Homo sapien
gatgtattaagtcataacataacaaaataagta

SEQ ID NO: 252140 - DNA, 33 bp, Homo sapien
gatgtattaagtcatatcataacaaaataagta

SEQ ID NO: 252141 - DNA, 33 bp, Homo sapien
gtccagttggcgccaaattctgccccttgggct

SEQ ID NO: 252142 - DNA, 33 bp, Homo sapien
gtccagttggcgccaatttctgccccttgggct

SEQ ID NO: 252143 - DNA, 33 bp, Homo sapien
tatatcattccctggacgagaaggtggtaagtg

SEQ ID NO: 252144 - DNA, 33 bp, Homo sapien
tatatcattccctggatgagaaggtggtaagtg

SEQ ID NO: 252145 - DNA, 33 bp, Homo sapien
tgaagcagccacaagaatctaaactgtaagaac

SEQ ID NO: 252146 - DNA, 33 bp, Homo sapien
tgaagcagccacaagagtctaaactgtaagaac

SEQ ID NO: 252147 - DNA, 33 bp, Homo sapien
cattggtaatccatcccatcactcttgtccact

SEQ ID NO: 252148 - DNA, 33 bp, Homo sapien
cattggtaatccatcctatcactcttgtccact

SEQ ID NO: 252149 - DNA, 33 bp, Homo sapien
ttcaacctttggcatcaattgccttcgacactc

SEQ ID NO: 252150 - DNA, 33 bp, Homo sapien
ttcaacctttggcatctattgccttcgacactc

SEQ ID NO: 252151 - DNA, 33 bp, Homo sapien
tggcattctcacctgaccgtatttagaatcacc

SEQ ID NO: 252152 - DNA, 33 bp, Homo sapien
tggcattctcacctgagcgtatttagaatcacc

SEQ ID NO: 252153 - DNA, 33 bp, Homo sapien
aattttatcccaggccacaaatatccttttgca

SEQ ID NO: 252154 - DNA, 33 bp, Homo sapien
aattttatcccaggccgcaaatatccttttgca

SEQ ID NO: 252155 - DNA, 33 bp, Homo sapien
gcagattcaaaaaatgccatgtctccaaagttc

SEQ ID NO: 252156 - DNA, 33 bp, Homo sapien
gcagattcaaaaaatgtcatgtctccaaagttc

SEQ ID NO: 252157 - DNA, 33 bp, Homo sapien
gtgccatctgcacaacacaactcaattctggga

SEQ ID NO: 252158 - DNA, 33 bp, Homo sapien
gtgccatctgcacaacgcaactcaattctggga

SEQ ID NO: 252159 - DNA, 33 bp, Homo sapien
caaagtgaagatccccccaacaatcgtcttgta

SEQ ID NO: 252160 - DNA, 33 bp, Homo sapien
caaagtgaagatccccgcaacaatcgtcttgta

SEQ ID NO: 252161 - DNA, 33 bp, Homo sapien
acaccgtggatgatgacaggtacacactttgga

SEQ ID NO: 252162 - DNA, 33 bp, Homo sapien
acaccgtggatgatgagaggtacacactttgga

SEQ ID NO: 252163 - DNA, 33 bp, Homo sapien
ttagccctcttggttacgtgtccttactgagtg

SEQ ID NO: 252164 - DNA, 33 bp, Homo sapien
ttagccctcttggttatgtgtccttactgagtg

SEQ ID NO: 252165 - DNA, 33 bp, Homo sapien
cagaaagctctagctcaaggacagaaaatccac

SEQ ID NO: 252166 - DNA, 33 bp, Homo sapien
cagaaagctctagctcgaggacagaaaatccac

SEQ ID NO: 252167 - DNA, 33 bp, Homo sapien
acatagtaacaatatactaacagctaacatttc

SEQ ID NO: 252168 - DNA, 33 bp, Homo sapien
acatagtaacaatatagtaacagctaacatttc

SEQ ID NO: 252169 - DNA, 33 bp, Homo sapien
gcatggggcagtcaaaaaacttggaccaggtca

SEQ ID NO: 252170 - DNA, 33 bp, Homo sapien
gcatggggcagtcaaagaacttggaccaggtca

SEQ ID NO: 252171 - DNA, 33 bp, Homo sapien
taatacgaggttgcaaaggaggtattaagatct

SEQ ID NO: 252172 - DNA, 33 bp, Homo sapien
taatacgaggttgcaagggaggtattaagatct

SEQ ID NO: 252173 - DNA, 33 bp, Homo sapien
cctgccaagaggacaaccggaggcgggatttgg

SEQ ID NO: 252174 - DNA, 33 bp, Homo sapien
cctgccaagaggacaagcggaggcgggatttgg

SEQ ID NO: 252175 - DNA, 33 bp, Homo sapien
ctgagctcatctcccaactgtccggaaactggg

SEQ ID NO: 252176 - DNA, 33 bp, Homo sapien
ctgagctcatctcccagctgtccggaaactggg

SEQ ID NO: 252177 - DNA, 33 bp, Homo sapien
gtgatattccaggcacgactttttttaacccat

SEQ ID NO: 252178 - DNA, 33 bp, Homo sapien
gtgatattccaggcactactttttttaacccat

SEQ ID NO: 252179 - DNA, 33 bp, Homo sapien
tttaaaagaattaagaaagaagcgaaggatgag

SEQ ID NO: 252180 - DNA, 33 bp, Homo sapien
tttaaaagaattaagacagaagcgaaggatgag

SEQ ID NO: 252181 - DNA, 33 bp, Homo sapien
gaccatcatgggctgaacactcatcacaggccc

SEQ ID NO: 252182 - DNA, 33 bp, Homo sapien
gaccatcatgggctgagcactcatcacaggccc

SEQ ID NO: 252183 - DNA, 33 bp, Homo sapien
cagcagaggctcatacagaatctaatcccccaa

SEQ ID NO: 252184 - DNA, 33 bp, Homo sapien
cagcagaggctcataccgaatctaatcccccaa

SEQ ID NO: 252185 - DNA, 33 bp, Homo sapien
tagttatccactgccacgtaacaaaatatccta

SEQ ID NO: 252186 - DNA, 33 bp, Homo sapien
tagttatccactgccatgtaacaaaatatccta

SEQ ID NO: 252187 - DNA, 33 bp, Homo sapien
gctaagctgctctccaatctctgacccacagaa

SEQ ID NO: 252188 - DNA, 33 bp, Homo sapien
gctaagctgctctccattctctgacccacagaa

SEQ ID NO: 252189 - DNA, 33 bp, Homo sapien
aattttatatcatgtacattttcacacacacac

SEQ ID NO: 252190 - DNA, 33 bp, Homo sapien
aattttatatcatgtatattttcacacacacac

SEQ ID NO: 252191 - DNA, 33 bp, Homo sapien
atccccaaacccctgacgcagattgtgtgtgtg

SEQ ID NO: 252192 - DNA, 33 bp, Homo sapien
atccccaaacccctgatgcagattgtgtgtgtg

SEQ ID NO: 252193 - DNA, 33 bp, Homo sapien
cactcagggagcctcaacttgaactattatttt

SEQ ID NO: 252194 - DNA, 33 bp, Homo sapien
cactcagggagcctcagcttgaactattatttt

SEQ ID NO: 252195 - DNA, 33 bp, Homo sapien
tgctccttcaggattaagactactaagggggtc

SEQ ID NO: 252196 - DNA, 33 bp, Homo sapien
tgctccttcaggattaggactactaagggggtc

SEQ ID NO: 252197 - DNA, 33 bp, Homo sapien
ggcaagctcaaacatcaagccttgaaggcagag

SEQ ID NO: 252198 - DNA, 33 bp, Homo sapien
ggcaagctcaaacatcgagccttgaaggcagag

SEQ ID NO: 252199 - DNA, 33 bp, Homo sapien
ggaggcgagcagtccaccccaaaactaaaagcg

SEQ ID NO: 252200 - DNA, 33 bp, Homo sapien
ggaggcgagcagtccatcccaaaactaaaagcg

SEQ ID NO: 252201 - DNA, 33 bp, Homo sapien
cacagacgttggagccagatgacctgggttcac

SEQ ID NO: 252202 - DNA, 33 bp, Homo sapien
cacagacgttggagccggatgacctgggttcac

SEQ ID NO: 252203 - DNA, 33 bp, Homo sapien
tatacacatgacatacacacgaaacatactctt

SEQ ID NO: 252204 - DNA, 33 bp, Homo sapien
tatacacatgacatacgcacgaaacatactctt

SEQ ID NO: 252205 - DNA, 33 bp, Homo sapien
tccccagtgcccagaaagcatacagcctggtgc

SEQ ID NO: 252206 - DNA, 33 bp, Homo sapien
tccccagtgcccagaacgcatacagcctggtgc

SEQ ID NO: 252207 - DNA, 33 bp, Homo sapien
ctgggcactggggataaagcagtgaatttattg

SEQ ID NO: 252208 - DNA, 33 bp, Homo sapien
ctgggcactggggatagagcagtgaatttattg

SEQ ID NO: 252209 - DNA, 33 bp, Homo sapien
gggataggggtagtaaaaaacagtctggcaggg

SEQ ID NO: 252210 - DNA, 33 bp, Homo sapien
gggataggggtagtaagaaacagtctggcaggg

SEQ ID NO: 252211 - DNA, 33 bp, Homo sapien
cctagaagagtgactcaaccctttacagagaaa

SEQ ID NO: 252212 - DNA, 33 bp, Homo sapien
cctagaagagtgactcgaccctttacagagaaa

SEQ ID NO: 252213 - DNA, 33 bp, Homo sapien
ttacttcctcgtacaccgagcacgtgagtttta

SEQ ID NO: 252214 - DNA, 33 bp, Homo sapien
ttacttcctcgtacactgagcacgtgagtttta

SEQ ID NO: 252215 - DNA, 33 bp, Homo sapien
catttctcccctgttcaaagttaactcgctcct

SEQ ID NO: 252216 - DNA, 33 bp, Homo sapien
catttctcccctgttcgaagttaactcgctcct

SEQ ID NO: 252217 - DNA, 33 bp, Homo sapien
tctaattctttgccaacgtggccacacagaact

SEQ ID NO: 252218 - DNA, 33 bp, Homo sapien
tctaattctttgccaatgtggccacacagaact

SEQ ID NO: 252219 - DNA, 33 bp, Homo sapien
aaggcctgatacagcaatagctcaattttattg

SEQ ID NO: 252220 - DNA, 33 bp, Homo sapien
aaggcctgatacagcagtagctcaattttattg

SEQ ID NO: 252221 - DNA, 33 bp, Homo sapien
cccattggccggggcaaaaaccttagaactgtc

SEQ ID NO: 252222 - DNA, 33 bp, Homo sapien
cccattggccggggcagaaaccttagaactgtc

SEQ ID NO: 252223 - DNA, 33 bp, Homo sapien
tacatcactcctgttccaaacccacttcctcaa

SEQ ID NO: 252224 - DNA, 33 bp, Homo sapien
tacatcactcctgttctaaacccacttcctcaa

SEQ ID NO: 252225 - DNA, 33 bp, Homo sapien
tgtacaacaatcactacgtacctggctggtgtg

SEQ ID NO: 252226 - DNA, 33 bp, Homo sapien
tgtacaacaatcactatgtacctggctggtgtg

SEQ ID NO: 252227 - DNA, 33 bp, Homo sapien
ctcaaagtgtcctccacggatcagcagccccag

SEQ ID NO: 252228 - DNA, 33 bp, Homo sapien
ctcaaagtgtcctccatggatcagcagccccag

SEQ ID NO: 252229 - DNA, 33 bp, Homo sapien
tcctggcaaattaaaccgcatctatgctcagtg

SEQ ID NO: 252230 - DNA, 33 bp, Homo sapien
tcctggcaaattaaacggcatctatgctcagtg

SEQ ID NO: 252231 - DNA, 33 bp, Homo sapien
ttcagttatatcatgacgattaaatttcctttt

SEQ ID NO: 252232 - DNA, 33 bp, Homo sapien
ttcagttatatcatgatgattaaatttcctttt

SEQ ID NO: 252233 - DNA, 33 bp, Homo sapien
gaaagctccactttaccggaaaatgttggcatt

SEQ ID NO: 252234 - DNA, 33 bp, Homo sapien
gaaagctccactttactggaaaatgttggcatt

SEQ ID NO: 252235 - DNA, 33 bp, Homo sapien
tccaaaccaggcaacccgacctcagatctgccc

SEQ ID NO: 252236 - DNA, 33 bp, Homo sapien
tccaaaccaggcaacctgacctcagatctgccc

SEQ ID NO: 252237 - DNA, 33 bp, Homo sapien
ctttcggatataaacccagaagtggaagctgag

SEQ ID NO: 252238 - DNA, 33 bp, Homo sapien
ctttcggatataaaccgagaagtggaagctgag

SEQ ID NO: 252239 - DNA, 33 bp, Homo sapien
cagactgtgaggactacggggtttcaggccagg

SEQ ID NO: 252240 - DNA, 33 bp, Homo sapien
cagactgtgaggactatggggtttcaggccagg

SEQ ID NO: 252241 - DNA, 33 bp, Homo sapien
ctcttcattcattcagcagatggttatggaaca

SEQ ID NO: 252242 - DNA, 33 bp, Homo sapien
ctcttcattcattcagtagatggttatggaaca

SEQ ID NO: 252243 - DNA, 33 bp, Homo sapien
ctaatattaacactccaccccaacatggtcaga

SEQ ID NO: 252244 - DNA, 33 bp, Homo sapien
ctaatattaacactccgccccaacatggtcaga

SEQ ID NO: 252245 - DNA, 33 bp, Homo sapien
ccaagatgctctgaaactggaactttctctctg

SEQ ID NO: 252246 - DNA, 33 bp, Homo sapien
ccaagatgctctgaaattggaactttctctctg

SEQ ID NO: 252247 - DNA, 33 bp, Homo sapien
gttttacagatgaggaagcgactctcagttaag

SEQ ID NO: 252248 - DNA, 33 bp, Homo sapien
gttttacagatgaggacgcgactctcagttaag

SEQ ID NO: 252249 - DNA, 33 bp, Homo sapien
ttgaattctgtcattacaataagtcttagctgt

SEQ ID NO: 252250 - DNA, 33 bp, Homo sapien
ttgaattctgtcattataataagtcttagctgt

SEQ ID NO: 252251 - DNA, 33 bp, Homo sapien
gccttgaaatctgttggactcagacaactccct

SEQ ID NO: 252252 - DNA, 33 bp, Homo sapien
gccttgaaatctgttgtactcagacaactccct

SEQ ID NO: 252253 - DNA, 33 bp, Homo sapien
cagattggatgctttcccctatttcaggcagaa

SEQ ID NO: 252254 - DNA, 33 bp, Homo sapien
cagattggatgctttctcctatttcaggcagaa

SEQ ID NO: 252255 - DNA, 33 bp, Homo sapien
tttgatttataggaaaatgccagcttagataac

SEQ ID NO: 252256 - DNA, 33 bp, Homo sapien
tttgatttataggaaagtgccagcttagataac

SEQ ID NO: 252257 - DNA, 33 bp, Homo sapien
actacaaaggggagcactaaagggactcatgtg

SEQ ID NO: 252258 - DNA, 33 bp, Homo sapien
actacaaaggggagcattaaagggactcatgtg

SEQ ID NO: 252259 - DNA, 33 bp, Homo sapien
cgacagcctcatgtgcaaagggctttcccacca

SEQ ID NO: 252260 - DNA, 33 bp, Homo sapien
cgacagcctcatgtgcgaagggctttcccacca

SEQ ID NO: 252261 - DNA, 33 bp, Homo sapien
ttgtgtggatatgtggaaattcatttatctgtt

SEQ ID NO: 252262 - DNA, 33 bp, Homo sapien
ttgtgtggatatgtggcaattcatttatctgtt

SEQ ID NO: 252263 - DNA, 33 bp, Homo sapien
gtgagtaaacgccatcaacttgcagatatctca

SEQ ID NO: 252264 - DNA, 33 bp, Homo sapien
gtgagtaaacgccatcgacttgcagatatctca

SEQ ID NO: 252265 - DNA, 33 bp, Homo sapien
tccttgctatcctgtccaagaggccacgctcct

SEQ ID NO: 252266 - DNA, 33 bp, Homo sapien
tccttgctatcctgtctaagaggccacgctcct

SEQ ID NO: 252267 - DNA, 33 bp, Homo sapien
caagaagccaatttgcccagacgaagcctagtt

SEQ ID NO: 252268 - DNA, 33 bp, Homo sapien
caagaagccaatttgctcagacgaagcctagtt

SEQ ID NO: 252269 - DNA, 33 bp, Homo sapien
aacagggtgatgaatacaatgtgatgggggaag

SEQ ID NO: 252270 - DNA, 33 bp, Homo sapien
aacagggtgatgaatataatgtgatgggggaag

SEQ ID NO: 252271 - DNA, 33 bp, Homo sapien
ttgttgctatgaatgaaccagtgttgatacatc

SEQ ID NO: 252272 - DNA, 33 bp, Homo sapien
ttgttgctatgaatgacccagtgttgatacatc

SEQ ID NO: 252273 - DNA, 33 bp, Homo sapien
cggcctagaacagttcaactttcagaaaaattg

SEQ ID NO: 252274 - DNA, 33 bp, Homo sapien
cggcctagaacagttcgactttcagaaaaattg

SEQ ID NO: 252275 - DNA, 33 bp, Homo sapien
accctgactctgaaaaaagccctgaaagacaca

SEQ ID NO: 252276 - DNA, 33 bp, Homo sapien
accctgactctgaaaacagccctgaaagacaca

SEQ ID NO: 252277 - DNA, 33 bp, Homo sapien
acaaggtcctatttgcaaagcctgctgggagac

SEQ ID NO: 252278 - DNA, 33 bp, Homo sapien
acaaggtcctatttgcgaagcctgctgggagac

SEQ ID NO: 252279 - DNA, 33 bp, Homo sapien
ccacctgaggacttataaaaggaagaagactca

SEQ ID NO: 252280 - DNA, 33 bp, Homo sapien
ccacctgaggacttatgaaaggaagaagactca

SEQ ID NO: 252281 - DNA, 33 bp, Homo sapien
acacacataggaacacagatagattttaaacag

SEQ ID NO: 252282 - DNA, 33 bp, Homo sapien
acacacataggaacacggatagattttaaacag

SEQ ID NO: 252283 - DNA, 33 bp, Homo sapien
tttccatgccatgcacagtaactcgtgtcaaca

SEQ ID NO: 252284 - DNA, 33 bp, Homo sapien
tttccatgccatgcacggtaactcgtgtcaaca

SEQ ID NO: 252285 - DNA, 33 bp, Homo sapien
ttttaatgaacaactacgacaaaaagtgttatt

SEQ ID NO: 252286 - DNA, 33 bp, Homo sapien
ttttaatgaacaactatgacaaaaagtgttatt

SEQ ID NO: 252287 - DNA, 33 bp, Homo sapien
ctacattgacactaacaaagtctacttatgagg

SEQ ID NO: 252288 - DNA, 33 bp, Homo sapien
ctacattgacactaaccaagtctacttatgagg

SEQ ID NO: 252289 - DNA, 33 bp, Homo sapien
ggcactcgttgtggccagatactgttccaagtg

SEQ ID NO: 252290 - DNA, 33 bp, Homo sapien
ggcactcgttgtggccggatactgttccaagtg

SEQ ID NO: 252291 - DNA, 33 bp, Homo sapien
catgaagttcacaatcacggcccttagtgtgcc

SEQ ID NO: 252292 - DNA, 33 bp, Homo sapien
catgaagttcacaatcgcggcccttagtgtgcc

SEQ ID NO: 252293 - DNA, 33 bp, Homo sapien
tgtttttatggcctacccatgctgagacatatt

SEQ ID NO: 252294 - DNA, 33 bp, Homo sapien
tgtttttatggcctactcatgctgagacatatt

SEQ ID NO: 252295 - DNA, 33 bp, Homo sapien
acacacatgaccactacgctgtttgctgaggga

SEQ ID NO: 252296 - DNA, 33 bp, Homo sapien
acacacatgaccactatgctgtttgctgaggga

SEQ ID NO: 252297 - DNA, 33 bp, Homo sapien
tattttgtcctttctcgcacccgtctctttgct

SEQ ID NO: 252298 - DNA, 33 bp, Homo sapien
tattttgtcctttctctcacccgtctctttgct

SEQ ID NO: 252299 - DNA, 33 bp, Homo sapien
caaggggatccctgaaaagccaggttctctgca

SEQ ID NO: 252300 - DNA, 33 bp, Homo sapien
caaggggatccctgaagagccaggttctctgca

SEQ ID NO: 252301 - DNA, 33 bp, Homo sapien
gctcttcattcagttccctgttagatgtcacct

SEQ ID NO: 252302 - DNA, 33 bp, Homo sapien
gctcttcattcagttctctgttagatgtcacct

SEQ ID NO: 252303 - DNA, 33 bp, Homo sapien
ctgagatagcactgaaaccggtatagactgttt

SEQ ID NO: 252304 - DNA, 33 bp, Homo sapien
ctgagatagcactgaacccggtatagactgttt

SEQ ID NO: 252305 - DNA, 33 bp, Homo sapien
acagagtagtttagcaaggcacctgtttacatt

SEQ ID NO: 252306 - DNA, 33 bp, Homo sapien
acagagtagtttagcatggcacctgtttacatt

SEQ ID NO: 252307 - DNA, 33 bp, Homo sapien
tgaatagtgttaaagacgtacacttggtgtcag

SEQ ID NO: 252308 - DNA, 33 bp, Homo sapien
tgaatagtgttaaagatgtacacttggtgtcag

SEQ ID NO: 252309 - DNA, 33 bp, Homo sapien
ttgagtaatagtaaaactcccgtctcccacact

SEQ ID NO: 252310 - DNA, 33 bp, Homo sapien
ttgagtaatagtaaaattcccgtctcccacact

SEQ ID NO: 252311 - DNA, 33 bp, Homo sapien
aaccattacataaaccaaacagtttgcaggagg

SEQ ID NO: 252312 - DNA, 33 bp, Homo sapien
aaccattacataaaccgaacagtttgcaggagg

SEQ ID NO: 252313 - DNA, 33 bp, Homo sapien
ctccaaaaaaaaagaacgaaatggatgaacact

SEQ ID NO: 252314 - DNA, 33 bp, Homo sapien
ctccaaaaaaaaagaaggaaatggatgaacact

SEQ ID NO: 252315 - DNA, 33 bp, Homo sapien
tccaagcttttgtaaccacgtgactgtaatttg

SEQ ID NO: 252316 - DNA, 33 bp, Homo sapien
tccaagcttttgtaactacgtgactgtaatttg

SEQ ID NO: 252317 - DNA, 33 bp, Homo sapien
ttgcacaactgtgatacactaaaagcaactgta

SEQ ID NO: 252318 - DNA, 33 bp, Homo sapien
ttgcacaactgtgatatactaaaagcaactgta

SEQ ID NO: 252319 - DNA, 33 bp, Homo sapien
tgagttcgcaccactacactctaatctgggcaa

SEQ ID NO: 252320 - DNA, 33 bp, Homo sapien
tgagttcgcaccactatactctaatctgggcaa

SEQ ID NO: 252321 - DNA, 33 bp, Homo sapien
ggacccacagctgagaaggaacaagcctcccca

SEQ ID NO: 252322 - DNA, 33 bp, Homo sapien
ggacccacagctgagagggaacaagcctcccca

SEQ ID NO: 252323 - DNA, 33 bp, Homo sapien
ggatggaaggcacagcaaatggcaggaggatgg

SEQ ID NO: 252324 - DNA, 33 bp, Homo sapien
ggatggaaggcacagcgaatggcaggaggatgg

SEQ ID NO: 252325 - DNA, 33 bp, Homo sapien
tgatccatagagtccacgtttgcaaacttgcta

SEQ ID NO: 252326 - DNA, 33 bp, Homo sapien
tgatccatagagtccatgtttgcaaacttgcta

SEQ ID NO: 252327 - DNA, 33 bp, Homo sapien
atctcatttcctcaaactaaaactctgtccgtg

SEQ ID NO: 252328 - DNA, 33 bp, Homo sapien
atctcatttcctcaaattaaaactctgtccgtg

SEQ ID NO: 252329 - DNA, 33 bp, Homo sapien
ccttgagcgtcttcacagtccctggcctcagaa

SEQ ID NO: 252330 - DNA, 33 bp, Homo sapien
ccttgagcgtcttcacggtccctggcctcagaa

SEQ ID NO: 252331 - DNA, 33 bp, Homo sapien
cacccccagaggaccccataacctgtgcgccct

SEQ ID NO: 252332 - DNA, 33 bp, Homo sapien
cacccccagaggaccctataacctgtgcgccct

SEQ ID NO: 252333 - DNA, 33 bp, Homo sapien
aaactgtagtcatataaacataaagttggccat

SEQ ID NO: 252334 - DNA, 33 bp, Homo sapien
aaactgtagtcatatacacataaagttggccat

SEQ ID NO: 252335 - DNA, 33 bp, Homo sapien
gtgtgggcattgtttccagtattttgcggtgca

SEQ ID NO: 252336 - DNA, 33 bp, Homo sapien
gtgtgggcattgtttctagtattttgcggtgca

SEQ ID NO: 252337 - DNA, 33 bp, Homo sapien
gttgctgggtcatacacgaactttttgtttaac

SEQ ID NO: 252338 - DNA, 33 bp, Homo sapien
gttgctgggtcatacaggaactttttgtttaac

SEQ ID NO: 252339 - DNA, 33 bp, Homo sapien
cagaggaaggcagagaccctgacccaagaggaa

SEQ ID NO: 252340 - DNA, 33 bp, Homo sapien
cagaggaaggcagagatcctgacccaagaggaa

SEQ ID NO: 252341 - DNA, 33 bp, Homo sapien
acaagaaaacggtcatcacccaatcactgtttt

SEQ ID NO: 252342 - DNA, 33 bp, Homo sapien
acaagaaaacggtcattacccaatcactgtttt

SEQ ID NO: 252343 - DNA, 33 bp, Homo sapien
gaacattggtgaggcacggcccctccctttcta

SEQ ID NO: 252344 - DNA, 33 bp, Homo sapien
gaacattggtgaggcatggcccctccctttcta

SEQ ID NO: 252345 - DNA, 33 bp, Homo sapien
cacctggcacaaagagaccctttttgtttgttt

SEQ ID NO: 252346 - DNA, 33 bp, Homo sapien
cacctggcacaaagaggccctttttgtttgttt

SEQ ID NO: 252347 - DNA, 33 bp, Homo sapien
tatcattggtctggtacatgagcttgatgggtt

SEQ ID NO: 252348 - DNA, 33 bp, Homo sapien
tatcattggtctggtagatgagcttgatgggtt

SEQ ID NO: 252349 - DNA, 33 bp, Homo sapien
ttgggttttattcaaactgtgatgagaagccac

SEQ ID NO: 252350 - DNA, 33 bp, Homo sapien
ttgggttttattcaaagtgtgatgagaagccac

SEQ ID NO: 252351 - DNA, 33 bp, Homo sapien
gcaagcaggatgcaaacggatggaaaagcagga

SEQ ID NO: 252352 - DNA, 33 bp, Homo sapien
gcaagcaggatgcaaatggatggaaaagcagga

SEQ ID NO: 252353 - DNA, 33 bp, Homo sapien
tgggccctgttctcaaatagctccgggtggcta

SEQ ID NO: 252354 - DNA, 33 bp, Homo sapien
tgggccctgttctcaagtagctccgggtggcta

SEQ ID NO: 252355 - DNA, 33 bp, Homo sapien
ctgtgaaatggggctactactaccacctacttg

SEQ ID NO: 252356 - DNA, 33 bp, Homo sapien
ctgtgaaatggggctattactaccacctacttg

SEQ ID NO: 252357 - DNA, 33 bp, Homo sapien
cattgtccacaccacacagtgaggattagctag

SEQ ID NO: 252358 - DNA, 33 bp, Homo sapien
cattgtccacaccacatagtgaggattagctag

SEQ ID NO: 252359 - DNA, 33 bp, Homo sapien
tgtaaaaaggagatacaattcagtattccccaa

SEQ ID NO: 252360 - DNA, 33 bp, Homo sapien
tgtaaaaaggagatacgattcagtattccccaa

SEQ ID NO: 252361 - DNA, 33 bp, Homo sapien
gtgagagatcctaaagacaaagacgacacccaa

SEQ ID NO: 252362 - DNA, 33 bp, Homo sapien
gtgagagatcctaaagtcaaagacgacacccaa

SEQ ID NO: 252363 - DNA, 33 bp, Homo sapien
gcctgggccccagccccggaagatgtgtcccag

SEQ ID NO: 252364 - DNA, 33 bp, Homo sapien
gcctgggccccagccctggaagatgtgtcccag

SEQ ID NO: 252365 - DNA, 33 bp, Homo sapien
agttccagaacatttccattttccgaaaggaaa

SEQ ID NO: 252366 - DNA, 33 bp, Homo sapien
agttccagaacatttctattttccgaaaggaaa

SEQ ID NO: 252367 - DNA, 33 bp, Homo sapien
tcctgagaaggagaacaagaacgctgcgtctct

SEQ ID NO: 252368 - DNA, 33 bp, Homo sapien
tcctgagaaggagaacgagaacgctgcgtctct

SEQ ID NO: 252369 - DNA, 33 bp, Homo sapien
atcctccataaacagaatacaccagcaaagaca

SEQ ID NO: 252370 - DNA, 33 bp, Homo sapien
atcctccataaacagagtacaccagcaaagaca

SEQ ID NO: 252371 - DNA, 33 bp, Homo sapien
ttttctgacatttgtaaaagaataagccacatg

SEQ ID NO: 252372 - DNA, 33 bp, Homo sapien
ttttctgacatttgtagaagaataagccacatg

SEQ ID NO: 252373 - DNA, 33 bp, Homo sapien
aaagcagaaacgggtacgtgcccatctgtggag

SEQ ID NO: 252374 - DNA, 33 bp, Homo sapien
aaagcagaaacgggtatgtgcccatctgtggag

SEQ ID NO: 252375 - DNA, 33 bp, Homo sapien
cccattataaagtgccagatctaatcagatact

SEQ ID NO: 252376 - DNA, 33 bp, Homo sapien
cccattataaagtgccggatctaatcagatact

SEQ ID NO: 252377 - DNA, 33 bp, Homo sapien
caaagcgtttgctaatcaggtgatcaatagcaa

SEQ ID NO: 252378 - DNA, 33 bp, Homo sapien
caaagcgtttgctaattaggtgatcaatagcaa

SEQ ID NO: 252379 - DNA, 33 bp, Homo sapien
agagagaatgagaaccaaatgaaatgggcttcc

SEQ ID NO: 252380 - DNA, 33 bp, Homo sapien
agagagaatgagaacctaatgaaatgggcttcc

SEQ ID NO: 252381 - DNA, 33 bp, Homo sapien
tacagagatggtccacacccacacacctgtcac

SEQ ID NO: 252382 - DNA, 33 bp, Homo sapien
tacagagatggtccacgcccacacacctgtcac

SEQ ID NO: 252383 - DNA, 33 bp, Homo sapien
gtgactcacagccttacagcctaggtgctggca

SEQ ID NO: 252384 - DNA, 33 bp, Homo sapien
gtgactcacagccttatagcctaggtgctggca

SEQ ID NO: 252385 - DNA, 33 bp, Homo sapien
ataaaaatggacatcagattagagatacaagtt

SEQ ID NO: 252386 - DNA, 33 bp, Homo sapien
ataaaaatggacatcatattagagatacaagtt

SEQ ID NO: 252387 - DNA, 33 bp, Homo sapien
atgtataatgaactaaactgaaatggaaatctc

SEQ ID NO: 252388 - DNA, 33 bp, Homo sapien
atgtataatgaactaacctgaaatggaaatctc

SEQ ID NO: 252389 - DNA, 33 bp, Homo sapien
caaatgtttggcatcacaaaaattggttaaaca

SEQ ID NO: 252390 - DNA, 33 bp, Homo sapien
caaatgtttggcatcataaaaattggttaaaca

SEQ ID NO: 252391 - DNA, 33 bp, Homo sapien
cttaactcctcacctacgactttctaaccctgt

SEQ ID NO: 252392 - DNA, 33 bp, Homo sapien
cttaactcctcacctatgactttctaaccctgt

SEQ ID NO: 252393 - DNA, 33 bp, Homo sapien
ttcttttaatcttagcaatttccatggacacac

SEQ ID NO: 252394 - DNA, 33 bp, Homo sapien
ttcttttaatcttagcgatttccatggacacac

SEQ ID NO: 252395 - DNA, 33 bp, Homo sapien
catagggctgtcatgaaaatcaaatgagtccgt

SEQ ID NO: 252396 - DNA, 33 bp, Homo sapien
catagggctgtcatgagaatcaaatgagtccgt

SEQ ID NO: 252397 - DNA, 33 bp, Homo sapien
cgacagagaagggcctaaatcgctatcgtcact

SEQ ID NO: 252398 - DNA, 33 bp, Homo sapien
cgacagagaagggcctgaatcgctatcgtcact

SEQ ID NO: 252399 - DNA, 33 bp, Homo sapien
tacctgaagcagttccaagaacaaatgttcaga

SEQ ID NO: 252400 - DNA, 33 bp, Homo sapien
tacctgaagcagttccgagaacaaatgttcaga

SEQ ID NO: 252401 - DNA, 33 bp, Homo sapien
agcacagaattgcaagccccgcggaggtaagtg

SEQ ID NO: 252402 - DNA, 33 bp, Homo sapien
agcacagaattgcaagtcccgcggaggtaagtg

SEQ ID NO: 252403 - DNA, 33 bp, Homo sapien
actttcctacttgctaacatctcttgagcagtg

SEQ ID NO: 252404 - DNA, 33 bp, Homo sapien
actttcctacttgctaccatctcttgagcagtg

SEQ ID NO: 252405 - DNA, 33 bp, Homo sapien
gtgtatatagagcttaagacactgctcaagaga

SEQ ID NO: 252406 - DNA, 33 bp, Homo sapien
gtgtatatagagcttaggacactgctcaagaga

SEQ ID NO: 252407 - DNA, 33 bp, Homo sapien
cctaattctaaagctaacctcttaccactgtgc

SEQ ID NO: 252408 - DNA, 33 bp, Homo sapien
cctaattctaaagctagcctcttaccactgtgc

SEQ ID NO: 252409 - DNA, 33 bp, Homo sapien
ggcacagagaggttgaagagcttagtcaaggac

SEQ ID NO: 252410 - DNA, 33 bp, Homo sapien
ggcacagagaggttgaggagcttagtcaaggac

SEQ ID NO: 252411 - DNA, 33 bp, Homo sapien
ctgccctttgctgcccagcaggtatttccaacc

SEQ ID NO: 252412 - DNA, 33 bp, Homo sapien
ctgccctttgctgcccggcaggtatttccaacc

SEQ ID NO: 252413 - DNA, 33 bp, Homo sapien
atccaaccattcctgaagccagaaaccctaaac

SEQ ID NO: 252414 - DNA, 33 bp, Homo sapien
atccaaccattcctgacgccagaaaccctaaac

SEQ ID NO: 252415 - DNA, 33 bp, Homo sapien
ctggtctccagggccaagagaaaatacgtttct

SEQ ID NO: 252416 - DNA, 33 bp, Homo sapien
ctggtctccagggccatgagaaaatacgtttct

SEQ ID NO: 252417 - DNA, 33 bp, Homo sapien
cctagccaccatttaactgtgtacaaactctat

SEQ ID NO: 252418 - DNA, 33 bp, Homo sapien
cctagccaccatttaagtgtgtacaaactctat

SEQ ID NO: 252419 - DNA, 33 bp, Homo sapien
catgcagttccctgcaataaaatgacacacctt

SEQ ID NO: 252420 - DNA, 33 bp, Homo sapien
catgcagttccctgcagtaaaatgacacacctt

SEQ ID NO: 252421 - DNA, 33 bp, Homo sapien
ccttttattcatggaaacccccaacacacaagg

SEQ ID NO: 252422 - DNA, 33 bp, Homo sapien
ccttttattcatggaaccccccaacacacaagg

SEQ ID NO: 252423 - DNA, 33 bp, Homo sapien
tgccaatcgctggaccaaagagggagtttttgc

SEQ ID NO: 252424 - DNA, 33 bp, Homo sapien
tgccaatcgctggaccgaagagggagtttttgc

SEQ ID NO: 252425 - DNA, 33 bp, Homo sapien
ggtgaaaggaactatccatcccggactttgttc

SEQ ID NO: 252426 - DNA, 33 bp, Homo sapien
ggtgaaaggaactatctatcccggactttgttc

SEQ ID NO: 252427 - DNA, 33 bp, Homo sapien
tattcacagagggccaacattctccgatgggaa

SEQ ID NO: 252428 - DNA, 33 bp, Homo sapien
tattcacagagggccagcattctccgatgggaa

SEQ ID NO: 252429 - DNA, 33 bp, Homo sapien
ttcaaaaatttaactgccaatcaaggtcatctt

SEQ ID NO: 252430 - DNA, 33 bp, Homo sapien
ttcaaaaatttaactgtcaatcaaggtcatctt

SEQ ID NO: 252431 - DNA, 33 bp, Homo sapien
caggttggatgtaacccagcgagggaagatctg

SEQ ID NO: 252432 - DNA, 33 bp, Homo sapien
caggttggatgtaaccgagcgagggaagatctg

SEQ ID NO: 252433 - DNA, 33 bp, Homo sapien
catgcattatttgtataaaaacttcactatgta

SEQ ID NO: 252434 - DNA, 33 bp, Homo sapien
catgcattatttgtatcaaaacttcactatgta

SEQ ID NO: 252435 - DNA, 33 bp, Homo sapien
taaaaagaggctaactcaattggtcttcgcctt

SEQ ID NO: 252436 - DNA, 33 bp, Homo sapien
taaaaagaggctaacttaattggtcttcgcctt

SEQ ID NO: 252437 - DNA, 33 bp, Homo sapien
gtcctcagggcagataatacaactcttcggtca

SEQ ID NO: 252438 - DNA, 33 bp, Homo sapien
gtcctcagggcagatagtacaactcttcggtca

SEQ ID NO: 252439 - DNA, 33 bp, Homo sapien
ggacaagcctggatgacctgaggagtgagggag

SEQ ID NO: 252440 - DNA, 33 bp, Homo sapien
ggacaagcctggatgagctgaggagtgagggag

SEQ ID NO: 252441 - DNA, 33 bp, Homo sapien
gaatcctagatttccaagacagactttgagatc

SEQ ID NO: 252442 - DNA, 33 bp, Homo sapien
gaatcctagatttccaggacagactttgagatc

SEQ ID NO: 252443 - DNA, 33 bp, Homo sapien
tatcccattctctatacgtagaaactgaggcac

SEQ ID NO: 252444 - DNA, 33 bp, Homo sapien
tatcccattctctatatgtagaaactgaggcac

SEQ ID NO: 252445 - DNA, 33 bp, Homo sapien
tggttacctttggagacagactatgcagggagg

SEQ ID NO: 252446 - DNA, 33 bp, Homo sapien
tggttacctttggagagagactatgcagggagg

SEQ ID NO: 252447 - DNA, 33 bp, Homo sapien
gtctgggttccattgtcaaatagtgtggacctc

SEQ ID NO: 252448 - DNA, 33 bp, Homo sapien
gtctgggttccattgtgaaatagtgtggacctc

SEQ ID NO: 252449 - DNA, 33 bp, Homo sapien
gagcagaaagttgaaactgaagctctagaattg

SEQ ID NO: 252450 - DNA, 33 bp, Homo sapien
gagcagaaagttgaaagtgaagctctagaattg

SEQ ID NO: 252451 - DNA, 33 bp, Homo sapien
atatcgctcctgagaccggattgtgttttatgg

SEQ ID NO: 252452 - DNA, 33 bp, Homo sapien
atatcgctcctgagactggattgtgttttatgg

SEQ ID NO: 252453 - DNA, 33 bp, Homo sapien
tgcggtggcactggaaagtggggaccttaggaa

SEQ ID NO: 252454 - DNA, 33 bp, Homo sapien
tgcggtggcactggaaggtggggaccttaggaa

SEQ ID NO: 252455 - DNA, 33 bp, Homo sapien
taggtagtttttcagcaattgttcctctccttc

SEQ ID NO: 252456 - DNA, 33 bp, Homo sapien
taggtagtttttcagccattgttcctctccttc

SEQ ID NO: 252457 - DNA, 33 bp, Homo sapien
ctcccacattatccacactcctttctccgctgg

SEQ ID NO: 252458 - DNA, 33 bp, Homo sapien
ctcccacattatccacgctcctttctccgctgg

SEQ ID NO: 252459 - DNA, 33 bp, Homo sapien
ttgtcataataactacaatttatagagtgccta

SEQ ID NO: 252460 - DNA, 33 bp, Homo sapien
ttgtcataataactaccatttatagagtgccta

SEQ ID NO: 252461 - DNA, 33 bp, Homo sapien
ctgtttacttgctccaatctggccacactggcc

SEQ ID NO: 252462 - DNA, 33 bp, Homo sapien
ctgtttacttgctccagtctggccacactggcc

SEQ ID NO: 252463 - DNA, 33 bp, Homo sapien
acaacccaggtactacaatcagctccatctgag

SEQ ID NO: 252464 - DNA, 33 bp, Homo sapien
acaacccaggtactaccatcagctccatctgag

SEQ ID NO: 252465 - DNA, 33 bp, Homo sapien
gacttggttgaaaaagccacttgccctccttgt

SEQ ID NO: 252466 - DNA, 33 bp, Homo sapien
gacttggttgaaaaagtcacttgccctccttgt

SEQ ID NO: 252467 - DNA, 33 bp, Homo sapien
ttaagccgatgtttaccatacaggttgccagga

SEQ ID NO: 252468 - DNA, 33 bp, Homo sapien
ttaagccgatgtttactatacaggttgccagga

SEQ ID NO: 252469 - DNA, 33 bp, Homo sapien
agtttcaatagtaacaaggtggcaagaagcaca

SEQ ID NO: 252470 - DNA, 33 bp, Homo sapien
agtttcaatagtaacagggtggcaagaagcaca

SEQ ID NO: 252471 - DNA, 33 bp, Homo sapien
tatcaaaaactaaatacgtcccaagcagagctc

SEQ ID NO: 252472 - DNA, 33 bp, Homo sapien
tatcaaaaactaaatatgtcccaagcagagctc

SEQ ID NO: 252473 - DNA, 33 bp, Homo sapien
agcaggtcatattggacaaaggcagactttaaa

SEQ ID NO: 252474 - DNA, 33 bp, Homo sapien
agcaggtcatattggataaaggcagactttaaa

SEQ ID NO: 252475 - DNA, 33 bp, Homo sapien
tgagtgcttttataagcagagaaagaagtacca

SEQ ID NO: 252476 - DNA, 33 bp, Homo sapien
tgagtgcttttataagtagagaaagaagtacca

SEQ ID NO: 252477 - DNA, 33 bp, Homo sapien
gtgtgaaattagagccacaaaaaaggagagtaa

SEQ ID NO: 252478 - DNA, 33 bp, Homo sapien
gtgtgaaattagagccgcaaaaaaggagagtaa

SEQ ID NO: 252479 - DNA, 33 bp, Homo sapien
agtaactaaattctgaagatggaacacccactc

SEQ ID NO: 252480 - DNA, 33 bp, Homo sapien
agtaactaaattctgacgatggaacacccactc

SEQ ID NO: 252481 - DNA, 33 bp, Homo sapien
atgatacttaaagccaatctgtggactctgata

SEQ ID NO: 252482 - DNA, 33 bp, Homo sapien
atgatacttaaagccattctgtggactctgata

SEQ ID NO: 252483 - DNA, 33 bp, Homo sapien
tggctgcagaaaaatacgccaccaggagccaga

SEQ ID NO: 252484 - DNA, 33 bp, Homo sapien
tggctgcagaaaaatatgccaccaggagccaga

SEQ ID NO: 252485 - DNA, 33 bp, Homo sapien
aaatgcggtagagctacataaacatacttgaaa

SEQ ID NO: 252486 - DNA, 33 bp, Homo sapien
aaatgcggtagagctatataaacatacttgaaa

SEQ ID NO: 252487 - DNA, 33 bp, Homo sapien
atctgaaatttacactcacttcttaccagcctc

SEQ ID NO: 252488 - DNA, 33 bp, Homo sapien
atctgaaatttacacttacttcttaccagcctc

SEQ ID NO: 252489 - DNA, 33 bp, Homo sapien
gtatagttactttaccacagtatagtccattct

SEQ ID NO: 252490 - DNA, 33 bp, Homo sapien
gtatagttactttaccgcagtatagtccattct

SEQ ID NO: 252491 - DNA, 33 bp, Homo sapien
acaaactaattacacacagcagatctactgtga

SEQ ID NO: 252492 - DNA, 33 bp, Homo sapien
acaaactaattacacagagcagatctactgtga

SEQ ID NO: 252493 - DNA, 33 bp, Homo sapien
ctcatcgccacctgaaatgaagttatttatttg

SEQ ID NO: 252494 - DNA, 33 bp, Homo sapien
ctcatcgccacctgaagtgaagttatttatttg

SEQ ID NO: 252495 - DNA, 33 bp, Homo sapien
ccatcccaaaagtaaaatcctatgctcttggct

SEQ ID NO: 252496 - DNA, 33 bp, Homo sapien
ccatcccaaaagtaaagtcctatgctcttggct

SEQ ID NO: 252497 - DNA, 33 bp, Homo sapien
agcagcctgcgtttccccagtgctgctgctatg

SEQ ID NO: 252498 - DNA, 33 bp, Homo sapien
agcagcctgcgtttcctcagtgctgctgctatg

SEQ ID NO: 252499 - DNA, 33 bp, Homo sapien
caatgacagtgcctcaatcaagcagggccttag

SEQ ID NO: 252500 - DNA, 33 bp, Homo sapien
caatgacagtgcctcagtcaagcagggccttag

SEQ ID NO: 252501 - DNA, 33 bp, Homo sapien
cagtgagtcccaaatcaaatggccagtgtactt

SEQ ID NO: 252502 - DNA, 33 bp, Homo sapien
cagtgagtcccaaatcgaatggccagtgtactt

SEQ ID NO: 252503 - DNA, 33 bp, Homo sapien
tcctgttttaaatgctcagagttgcttctgtcc

SEQ ID NO: 252504 - DNA, 33 bp, Homo sapien
tcctgttttaaatgcttagagttgcttctgtcc

SEQ ID NO: 252505 - DNA, 33 bp, Homo sapien
ccctgtggttgagacactggggatttgatattc

SEQ ID NO: 252506 - DNA, 33 bp, Homo sapien
ccctgtggttgagacattggggatttgatattc

SEQ ID NO: 252507 - DNA, 33 bp, Homo sapien
atgaaatgattattagccacctgaaagttgata

SEQ ID NO: 252508 - DNA, 33 bp, Homo sapien
atgaaatgattattagtcacctgaaagttgata

SEQ ID NO: 252509 - DNA, 33 bp, Homo sapien
tgaaagttgatatgaccagacattttacaaata

SEQ ID NO: 252510 - DNA, 33 bp, Homo sapien
tgaaagttgatatgactagacattttacaaata

SEQ ID NO: 252511 - DNA, 33 bp, Homo sapien
cccaattaaaagtatccttgcagttttccttaa

SEQ ID NO: 252512 - DNA, 33 bp, Homo sapien
cccaattaaaagtatctttgcagttttccttaa

SEQ ID NO: 252513 - DNA, 33 bp, Homo sapien
ttacaactaacagacactggactcagttttgca

SEQ ID NO: 252514 - DNA, 33 bp, Homo sapien
ttacaactaacagacattggactcagttttgca

SEQ ID NO: 252515 - DNA, 33 bp, Homo sapien
tagcagagctggatacacccaggaatgaatgtc

SEQ ID NO: 252516 - DNA, 33 bp, Homo sapien
tagcagagctggatacgcccaggaatgaatgtc

SEQ ID NO: 252517 - DNA, 33 bp, Homo sapien
ttgtgggggatacagacgttcagaccctagcac

SEQ ID NO: 252518 - DNA, 33 bp, Homo sapien
ttgtgggggatacagatgttcagaccctagcac

SEQ ID NO: 252519 - DNA, 33 bp, Homo sapien
aagatggtggtccaacagcactgtgaatgtact

SEQ ID NO: 252520 - DNA, 33 bp, Homo sapien
aagatggtggtccaacggcactgtgaatgtact

SEQ ID NO: 252521 - DNA, 33 bp, Homo sapien
ttctcctttatgagacaatgtgagagtgtctca

SEQ ID NO: 252522 - DNA, 33 bp, Homo sapien
ttctcctttatgagacgatgtgagagtgtctca

SEQ ID NO: 252523 - DNA, 33 bp, Homo sapien
gcaacaccactctttaccttgtggttttcatct

SEQ ID NO: 252524 - DNA, 33 bp, Homo sapien
gcaacaccactctttatcttgtggttttcatct

SEQ ID NO: 252525 - DNA, 33 bp, Homo sapien
tgtctcaatttacacaactgttaaatgggaata

SEQ ID NO: 252526 - DNA, 33 bp, Homo sapien
tgtctcaatttacacatctgttaaatgggaata

SEQ ID NO: 252527 - DNA, 33 bp, Homo sapien
tgctttgaccacataccggctctgagacctcag

SEQ ID NO: 252528 - DNA, 33 bp, Homo sapien
tgctttgaccacatactggctctgagacctcag

SEQ ID NO: 252529 - DNA, 33 bp, Homo sapien
ctgtggagcctagaacactcttgggaagggaaa

SEQ ID NO: 252530 - DNA, 33 bp, Homo sapien
ctgtggagcctagaactctcttgggaagggaaa

SEQ ID NO: 252531 - DNA, 33 bp, Homo sapien
ctccctggaacatagaactatggctgaactatt

SEQ ID NO: 252532 - DNA, 33 bp, Homo sapien
ctccctggaacatagacctatggctgaactatt

SEQ ID NO: 252533 - DNA, 33 bp, Homo sapien
gataggatttggctataagcttctacaaaagag

SEQ ID NO: 252534 - DNA, 33 bp, Homo sapien
gataggatttggctatgagcttctacaaaagag

SEQ ID NO: 252535 - DNA, 33 bp, Homo sapien
atttctatgtgcctgaaactcaactccacttcc

SEQ ID NO: 252536 - DNA, 33 bp, Homo sapien
atttctatgtgcctgagactcaactccacttcc

SEQ ID NO: 252537 - DNA, 33 bp, Homo sapien
ataaacaacatatgccaattaacagacaaaggc

SEQ ID NO: 252538 - DNA, 33 bp, Homo sapien
ataaacaacatatgcccattaacagacaaaggc

SEQ ID NO: 252539 - DNA, 33 bp, Homo sapien
tactaaggcaataaaagggtatataactttgaa

SEQ ID NO: 252540 - DNA, 33 bp, Homo sapien
tactaaggcaataaaatggtatataactttgaa

SEQ ID NO: 252541 - DNA, 33 bp, Homo sapien
ccattttagctcctaactggggtggagggtgaa

SEQ ID NO: 252542 - DNA, 33 bp, Homo sapien
ccattttagctcctaattggggtggagggtgaa

SEQ ID NO: 252543 - DNA, 33 bp, Homo sapien
atcccaattccaactccgagcacaggagaccga

SEQ ID NO: 252544 - DNA, 33 bp, Homo sapien
atcccaattccaactctgagcacaggagaccga

SEQ ID NO: 252545 - DNA, 33 bp, Homo sapien
gtgatttctaaacaacagaaacttatcactcat

SEQ ID NO: 252546 - DNA, 33 bp, Homo sapien
gtgatttctaaacaaccgaaacttatcactcat

SEQ ID NO: 252547 - DNA, 33 bp, Homo sapien
gaataagattgagaaacgagtcaatattaaagg

SEQ ID NO: 252548 - DNA, 33 bp, Homo sapien
gaataagattgagaaatgagtcaatattaaagg

SEQ ID NO: 252549 - DNA, 33 bp, Homo sapien
aggaaatcaaggagccactactaaaggaagcag

SEQ ID NO: 252550 - DNA, 33 bp, Homo sapien
aggaaatcaaggagccgctactaaaggaagcag

SEQ ID NO: 252551 - DNA, 33 bp, Homo sapien
ggtgaaagcaatgtgccacttaaaagactaggt

SEQ ID NO: 252552 - DNA, 33 bp, Homo sapien
ggtgaaagcaatgtgcgacttaaaagactaggt

SEQ ID NO: 252553 - DNA, 33 bp, Homo sapien
agacacagcgccaaccaaaggctcagttccacc

SEQ ID NO: 252554 - DNA, 33 bp, Homo sapien
agacacagcgccaaccgaaggctcagttccacc

SEQ ID NO: 252555 - DNA, 33 bp, Homo sapien
aacaagacgtggcacaaggactgcaatgtccta

SEQ ID NO: 252556 - DNA, 33 bp, Homo sapien
aacaagacgtggcacatggactgcaatgtccta

SEQ ID NO: 252557 - DNA, 33 bp, Homo sapien
tccctatagctctcaactcaatcagtcttgctc

SEQ ID NO: 252558 - DNA, 33 bp, Homo sapien
tccctatagctctcaattcaatcagtcttgctc

SEQ ID NO: 252559 - DNA, 33 bp, Homo sapien
cttgagtcacgtacacgaggccttctcctgtcc

SEQ ID NO: 252560 - DNA, 33 bp, Homo sapien
cttgagtcacgtacactaggccttctcctgtcc

SEQ ID NO: 252561 - DNA, 33 bp, Homo sapien
ctttaattttagagaacgctggttgtcatttgt

SEQ ID NO: 252562 - DNA, 33 bp, Homo sapien
ctttaattttagagaatgctggttgtcatttgt

SEQ ID NO: 252563 - DNA, 33 bp, Homo sapien
gttagaacttaagtcacatactcttctctcttc

SEQ ID NO: 252564 - DNA, 33 bp, Homo sapien
gttagaacttaagtcagatactcttctctcttc

SEQ ID NO: 252565 - DNA, 33 bp, Homo sapien
cttccgtaaaagctaagcctcctctctggagcc

SEQ ID NO: 252566 - DNA, 33 bp, Homo sapien
cttccgtaaaagctaatcctcctctctggagcc

SEQ ID NO: 252567 - DNA, 33 bp, Homo sapien
cagttcttcagtcacactatcctaatttcaaat

SEQ ID NO: 252568 - DNA, 33 bp, Homo sapien
cagttcttcagtcacagtatcctaatttcaaat

SEQ ID NO: 252569 - DNA, 33 bp, Homo sapien
ctacccaaagggaaaccacattgtactccacat

SEQ ID NO: 252570 - DNA, 33 bp, Homo sapien
ctacccaaagggaaactacattgtactccacat

SEQ ID NO: 252571 - DNA, 33 bp, Homo sapien
gaggaacactggaatacagccacagcactgaca

SEQ ID NO: 252572 - DNA, 33 bp, Homo sapien
gaggaacactggaatatagccacagcactgaca

SEQ ID NO: 252573 - DNA, 33 bp, Homo sapien
attcttatttgtcaaccaaaagaatgactgcca

SEQ ID NO: 252574 - DNA, 33 bp, Homo sapien
attcttatttgtcaactaaaagaatgactgcca

SEQ ID NO: 252575 - DNA, 33 bp, Homo sapien
tctctgcaagtgtgatgaagttagggatcttga

SEQ ID NO: 252576 - DNA, 33 bp, Homo sapien
tctctgcaagtgtgattaagttagggatcttga

SEQ ID NO: 252577 - DNA, 33 bp, Homo sapien
gtagggatgcctgttacagaatatgaacaacaa

SEQ ID NO: 252578 - DNA, 33 bp, Homo sapien
gtagggatgcctgttatagaatatgaacaacaa

SEQ ID NO: 252579 - DNA, 33 bp, Homo sapien
ataataaatactctataaatctacctacatgag

SEQ ID NO: 252580 - DNA, 33 bp, Homo sapien
ataataaatactctatgaatctacctacatgag

SEQ ID NO: 252581 - DNA, 33 bp, Homo sapien
tccagaacttgaaggaagctcaaatctcttata

SEQ ID NO: 252582 - DNA, 33 bp, Homo sapien
tccagaacttgaaggatgctcaaatctcttata

SEQ ID NO: 252583 - DNA, 33 bp, Homo sapien
taatgtttgtataaataaagtgagtcagagact

SEQ ID NO: 252584 - DNA, 33 bp, Homo sapien
taatgtttgtataaatgaagtgagtcagagact

SEQ ID NO: 252585 - DNA, 33 bp, Homo sapien
agtgtgactgtgattaagacggttcaacgataa

SEQ ID NO: 252586 - DNA, 33 bp, Homo sapien
agtgtgactgtgattacgacggttcaacgataa

SEQ ID NO: 252587 - DNA, 33 bp, Homo sapien
gagacacgaaaagaaaacatttgtcatctcatg

SEQ ID NO: 252588 - DNA, 33 bp, Homo sapien
gagacacgaaaagaaaccatttgtcatctcatg

SEQ ID NO: 252589 - DNA, 33 bp, Homo sapien
ataaagtctgcattgtaaagtgatataaaggtt

SEQ ID NO: 252590 - DNA, 33 bp, Homo sapien
ataaagtctgcattgtgaagtgatataaaggtt

SEQ ID NO: 252591 - DNA, 33 bp, Homo sapien
gaatatttcaaccacacagttgagacctactgt

SEQ ID NO: 252592 - DNA, 33 bp, Homo sapien
gaatatttcaaccacatagttgagacctactgt

SEQ ID NO: 252593 - DNA, 33 bp, Homo sapien
tccttgcaccacctatcatactagcactccttc

SEQ ID NO: 252594 - DNA, 33 bp, Homo sapien
tccttgcaccacctattatactagcactccttc

SEQ ID NO: 252595 - DNA, 33 bp, Homo sapien
cagtctctgtatctgacagaatataaggcggca

SEQ ID NO: 252596 - DNA, 33 bp, Homo sapien
cagtctctgtatctgatagaatataaggcggca

SEQ ID NO: 252597 - DNA, 33 bp, Homo sapien
ttttgcagtgtgattcccacccagttctctggg

SEQ ID NO: 252598 - DNA, 33 bp, Homo sapien
ttttgcagtgtgattcgcacccagttctctggg

SEQ ID NO: 252599 - DNA, 33 bp, Homo sapien
aatgtccagctttgaaaaaaaacttatgagaca

SEQ ID NO: 252600 - DNA, 33 bp, Homo sapien
aatgtccagctttgaacaaaaacttatgagaca

SEQ ID NO: 252601 - DNA, 33 bp, Homo sapien
atagactctttcctggacatggaatgctcatcg

SEQ ID NO: 252602 - DNA, 33 bp, Homo sapien
atagactctttcctgggcatggaatgctcatcg

SEQ ID NO: 252603 - DNA, 33 bp, Homo sapien
cagggctatgtgtgcacgttttaagccagtcca

SEQ ID NO: 252604 - DNA, 33 bp, Homo sapien
cagggctatgtgtgcaggttttaagccagtcca

SEQ ID NO: 252605 - DNA, 33 bp, Homo sapien
aatcaaacctgcctacagaatacaaggaccacc

SEQ ID NO: 252606 - DNA, 33 bp, Homo sapien
aatcaaacctgcctacggaatacaaggaccacc

SEQ ID NO: 252607 - DNA, 33 bp, Homo sapien
atttgtcattggtgcagataatctcctgtgact

SEQ ID NO: 252608 - DNA, 33 bp, Homo sapien
atttgtcattggtgcatataatctcctgtgact

SEQ ID NO: 252609 - DNA, 33 bp, Homo sapien
aggtatatggcaataacgggatctgtgaacttg

SEQ ID NO: 252610 - DNA, 33 bp, Homo sapien
aggtatatggcaataatgggatctgtgaacttg

SEQ ID NO: 252611 - DNA, 33 bp, Homo sapien
caaacaaaaggcatgacgggaactcagtgtaga

SEQ ID NO: 252612 - DNA, 33 bp, Homo sapien
caaacaaaaggcatgatgggaactcagtgtaga

SEQ ID NO: 252613 - DNA, 33 bp, Homo sapien
cttgaatgtaggctaaaggtggagcttattggt

SEQ ID NO: 252614 - DNA, 33 bp, Homo sapien
cttgaatgtaggctaatggtggagcttattggt

SEQ ID NO: 252615 - DNA, 33 bp, Homo sapien
tcctacacaccacaaacgctcccattgccaatt

SEQ ID NO: 252616 - DNA, 33 bp, Homo sapien
tcctacacaccacaaatgctcccattgccaatt

SEQ ID NO: 252617 - DNA, 33 bp, Homo sapien
tcatctttatatcgggacacattcccttggtac

SEQ ID NO: 252618 - DNA, 33 bp, Homo sapien
tcatctttatatcgggtcacattcccttggtac

SEQ ID NO: 252619 - DNA, 33 bp, Homo sapien
agagtacagacgcccactgaaaattaagaggag

SEQ ID NO: 252620 - DNA, 33 bp, Homo sapien
agagtacagacgcccattgaaaattaagaggag

SEQ ID NO: 252621 - DNA, 33 bp, Homo sapien
aggcctgaatttaatgcatcagactgtggaaca

SEQ ID NO: 252622 - DNA, 33 bp, Homo sapien
aggcctgaatttaatgtatcagactgtggaaca

SEQ ID NO: 252623 - DNA, 33 bp, Homo sapien
ggacaaacctcagagacgcctcaaacactaccc

SEQ ID NO: 252624 - DNA, 33 bp, Homo sapien
ggacaaacctcagagatgcctcaaacactaccc

SEQ ID NO: 252625 - DNA, 33 bp, Homo sapien
agggtgcttgtttcaaaacagatttatggccac

SEQ ID NO: 252626 - DNA, 33 bp, Homo sapien
agggtgcttgtttcaacacagatttatggccac

SEQ ID NO: 252627 - DNA, 33 bp, Homo sapien
attctcaggggagaaaaagagaactgcagggct

SEQ ID NO: 252628 - DNA, 33 bp, Homo sapien
attctcaggggagaaagagagaactgcagggct

SEQ ID NO: 252629 - DNA, 33 bp, Homo sapien
ctgtaggtgggtatcaacaaatttggtatggtt

SEQ ID NO: 252630 - DNA, 33 bp, Homo sapien
ctgtaggtgggtatcagcaaatttggtatggtt

SEQ ID NO: 252631 - DNA, 33 bp, Homo sapien
acaggccgattgggaaaggcaagacctaaatac

SEQ ID NO: 252632 - DNA, 33 bp, Homo sapien
acaggccgattgggaagggcaagacctaaatac

SEQ ID NO: 252633 - DNA, 33 bp, Homo sapien
acagcatttggttttcaatgttcctcttgaggc

SEQ ID NO: 252634 - DNA, 33 bp, Homo sapien
acagcatttggttttcgatgttcctcttgaggc

SEQ ID NO: 252635 - DNA, 33 bp, Homo sapien
tatatcatgtcacttaaactgtattaattgcac

SEQ ID NO: 252636 - DNA, 33 bp, Homo sapien
tatatcatgtcacttacactgtattaattgcac

SEQ ID NO: 252637 - DNA, 33 bp, Homo sapien
attcagagtgatttgacgtgtgattgggggtgg

SEQ ID NO: 252638 - DNA, 33 bp, Homo sapien
attcagagtgatttgatgtgtgattgggggtgg

SEQ ID NO: 252639 - DNA, 33 bp, Homo sapien
aaacatttgagacctaataacatcatgaaatgc

SEQ ID NO: 252640 - DNA, 33 bp, Homo sapien
aaacatttgagacctagtaacatcatgaaatgc

SEQ ID NO: 252641 - DNA, 33 bp, Homo sapien
aaggaagtcacttggcaatcaagtccctccatg

SEQ ID NO: 252642 - DNA, 33 bp, Homo sapien
aaggaagtcacttggcgatcaagtccctccatg

SEQ ID NO: 252643 - DNA, 33 bp, Homo sapien
gtgggcataagcaaacaccataactatgaaagg

SEQ ID NO: 252644 - DNA, 33 bp, Homo sapien
gtgggcataagcaaacgccataactatgaaagg

SEQ ID NO: 252645 - DNA, 33 bp, Homo sapien
atcctggtgatgagaaatgtgtttggagaaggc

SEQ ID NO: 252646 - DNA, 33 bp, Homo sapien
atcctggtgatgagaagtgtgtttggagaaggc

SEQ ID NO: 252647 - DNA, 33 bp, Homo sapien
tagttctgaggagcacaccactgttggatgaag

SEQ ID NO: 252648 - DNA, 33 bp, Homo sapien
tagttctgaggagcacgccactgttggatgaag

SEQ ID NO: 252649 - DNA, 33 bp, Homo sapien
agattccctgcaatctcagaatcgttctcttcc

SEQ ID NO: 252650 - DNA, 33 bp, Homo sapien
agattccctgcaatcttagaatcgttctcttcc

SEQ ID NO: 252651 - DNA, 33 bp, Homo sapien
gacaaccagggaagagcatccggagagctgacg

SEQ ID NO: 252652 - DNA, 33 bp, Homo sapien
gacaaccagggaagagtatccggagagctgacg

SEQ ID NO: 252653 - DNA, 33 bp, Homo sapien
aagcagctgaaggtgacagattttccagctgtc

SEQ ID NO: 252654 - DNA, 33 bp, Homo sapien
aagcagctgaaggtgatagattttccagctgtc

SEQ ID NO: 252655 - DNA, 33 bp, Homo sapien
ccataaagaaatgccacggtgaaatagttcgta

SEQ ID NO: 252656 - DNA, 33 bp, Homo sapien
ccataaagaaatgccatggtgaaatagttcgta

SEQ ID NO: 252657 - DNA, 33 bp, Homo sapien
gcaaaagctactggtaaggctgacaatattcac

SEQ ID NO: 252658 - DNA, 33 bp, Homo sapien
gcaaaagctactggtatggctgacaatattcac

SEQ ID NO: 252659 - DNA, 33 bp, Homo sapien
acagcgtgatccagcacaggaccccagtgaata

SEQ ID NO: 252660 - DNA, 33 bp, Homo sapien
acagcgtgatccagcataggaccccagtgaata

SEQ ID NO: 252661 - DNA, 33 bp, Homo sapien
tatttaacagtgagcagaaaagccataggatct

SEQ ID NO: 252662 - DNA, 33 bp, Homo sapien
tatttaacagtgagcataaaagccataggatct

SEQ ID NO: 252663 - DNA, 33 bp, Homo sapien
ggacatctgaactagcagcgtttgtggaattgg

SEQ ID NO: 252664 - DNA, 33 bp, Homo sapien
ggacatctgaactagcggcgtttgtggaattgg

SEQ ID NO: 252665 - DNA, 33 bp, Homo sapien
agatgtccttaatttgaaagtcatgataattgg

SEQ ID NO: 252666 - DNA, 33 bp, Homo sapien
agatgtccttaatttggaagtcatgataattgg

SEQ ID NO: 252667 - DNA, 33 bp, Homo sapien
tgttggtacaatacacagtgctcattcatgttt

SEQ ID NO: 252668 - DNA, 33 bp, Homo sapien
tgttggtacaatacactgtgctcattcatgttt

SEQ ID NO: 252669 - DNA, 33 bp, Homo sapien
ttgtttattttttctacgtgcaatttgatgatt

SEQ ID NO: 252670 - DNA, 33 bp, Homo sapien
ttgtttattttttctatgtgcaatttgatgatt

SEQ ID NO: 252671 - DNA, 33 bp, Homo sapien
attaatatgactgccaactctactattgctgcc

SEQ ID NO: 252672 - DNA, 33 bp, Homo sapien
attaatatgactgccatctctactattgctgcc

SEQ ID NO: 252673 - DNA, 33 bp, Homo sapien
ttctttggttataaagcctgcccagtctatacg

SEQ ID NO: 252674 - DNA, 33 bp, Homo sapien
ttctttggttataaagtctgcccagtctatacg

SEQ ID NO: 252675 - DNA, 33 bp, Homo sapien
ccatgggagctacgaagtctggcagagttaaag

SEQ ID NO: 252676 - DNA, 33 bp, Homo sapien
ccatgggagctacgaattctggcagagttaaag

SEQ ID NO: 252677 - DNA, 33 bp, Homo sapien
ttattcactatcacgaaaaaattatggggggaa

SEQ ID NO: 252678 - DNA, 33 bp, Homo sapien
ttattcactatcacgagaaaattatggggggaa

SEQ ID NO: 252679 - DNA, 33 bp, Homo sapien
gaggttgaaggccacaagagaaggataaagtta

SEQ ID NO: 252680 - DNA, 33 bp, Homo sapien
gaggttgaaggccacatgagaaggataaagtta

SEQ ID NO: 252681 - DNA, 33 bp, Homo sapien
tcattgaacttctctcaactgtgcttcatagac

SEQ ID NO: 252682 - DNA, 33 bp, Homo sapien
tcattgaacttctctcgactgtgcttcatagac

SEQ ID NO: 252683 - DNA, 33 bp, Homo sapien
ggttatttgcatatcaaatgctcctggctgagt

SEQ ID NO: 252684 - DNA, 33 bp, Homo sapien
ggttatttgcatatcagatgctcctggctgagt

SEQ ID NO: 252685 - DNA, 33 bp, Homo sapien
cctgtaggagagaaacactttcgcttgtggtta

SEQ ID NO: 252686 - DNA, 33 bp, Homo sapien
cctgtaggagagaaacgctttcgcttgtggtta

SEQ ID NO: 252687 - DNA, 33 bp, Homo sapien
tcaaattgaagccaaaatagaattgtttcttcc

SEQ ID NO: 252688 - DNA, 33 bp, Homo sapien
tcaaattgaagccaaagtagaattgtttcttcc

SEQ ID NO: 252689 - DNA, 33 bp, Homo sapien
tatgaaatgcaaaaaaccaagtgcaaaataatt

SEQ ID NO: 252690 - DNA, 33 bp, Homo sapien
tatgaaatgcaaaaaatcaagtgcaaaataatt

SEQ ID NO: 252691 - DNA, 33 bp, Homo sapien
ggagggaaatgagaaccgctactttttgtaaaa

SEQ ID NO: 252692 - DNA, 33 bp, Homo sapien
ggagggaaatgagaactgctactttttgtaaaa

SEQ ID NO: 252693 - DNA, 33 bp, Homo sapien
ggaaatggagatgctacgggaagaaaaaaaaat

SEQ ID NO: 252694 - DNA, 33 bp, Homo sapien
ggaaatggagatgctatgggaagaaaaaaaaat

SEQ ID NO: 252695 - DNA, 33 bp, Homo sapien
gaccccaactggagaacggttttatgtctctgt

SEQ ID NO: 252696 - DNA, 33 bp, Homo sapien
gaccccaactggagaatggttttatgtctctgt

SEQ ID NO: 252697 - DNA, 33 bp, Homo sapien
ctttattccacctttcgctaattccacaaaatt

SEQ ID NO: 252698 - DNA, 33 bp, Homo sapien
ctttattccacctttctctaattccacaaaatt

SEQ ID NO: 252699 - DNA, 33 bp, Homo sapien
taagttttccctttaaaagctacattgattggg

SEQ ID NO: 252700 - DNA, 33 bp, Homo sapien
taagttttccctttaatagctacattgattggg

SEQ ID NO: 252701 - DNA, 33 bp, Homo sapien
tctaaaaatcatgaaactgagaaaggatgaagc

SEQ ID NO: 252702 - DNA, 33 bp, Homo sapien
tctaaaaatcatgaaattgagaaaggatgaagc

SEQ ID NO: 252703 - DNA, 33 bp, Homo sapien
gaaaatcatttctgtacggaatctttagatggg

SEQ ID NO: 252704 - DNA, 33 bp, Homo sapien
gaaaatcatttctgtatggaatctttagatggg

SEQ ID NO: 252705 - DNA, 33 bp, Homo sapien
atggtgggtgtgaagaaaggtcagttaatgggt

SEQ ID NO: 252706 - DNA, 33 bp, Homo sapien
atggtgggtgtgaagagaggtcagttaatgggt

SEQ ID NO: 252707 - DNA, 33 bp, Homo sapien
ctgttttacatctctacgttttggggtaatttg

SEQ ID NO: 252708 - DNA, 33 bp, Homo sapien
ctgttttacatctctatgttttggggtaatttg

SEQ ID NO: 252709 - DNA, 33 bp, Homo sapien
cttcctaccttcttgacctgtcttggactgccc

SEQ ID NO: 252710 - DNA, 33 bp, Homo sapien
cttcctaccttcttgagctgtcttggactgccc

SEQ ID NO: 252711 - DNA, 33 bp, Homo sapien
ctaagtctgcacgatacgactttgctgcatatt

SEQ ID NO: 252712 - DNA, 33 bp, Homo sapien
ctaagtctgcacgatatgactttgctgcatatt

SEQ ID NO: 252713 - DNA, 33 bp, Homo sapien
agggaaaggattacataatggtgtgaaattcca

SEQ ID NO: 252714 - DNA, 33 bp, Homo sapien
agggaaaggattacatgatggtgtgaaattcca

SEQ ID NO: 252715 - DNA, 33 bp, Homo sapien
aaaaattcatgaacctaaggcttagaactcata

SEQ ID NO: 252716 - DNA, 33 bp, Homo sapien
aaaaattcatgaacctgaggcttagaactcata

SEQ ID NO: 252717 - DNA, 33 bp, Homo sapien
gcagtgttcaatgtcaatatacaattcttccat

SEQ ID NO: 252718 - DNA, 33 bp, Homo sapien
gcagtgttcaatgtcagtatacaattcttccat

SEQ ID NO: 252719 - DNA, 33 bp, Homo sapien
aggacatttggcgttcaaggaaagtgctaattt

SEQ ID NO: 252720 - DNA, 33 bp, Homo sapien
aggacatttggcgttcgaggaaagtgctaattt

SEQ ID NO: 252721 - DNA, 33 bp, Homo sapien
tcaaatgtacaaaataccaatataacactatct

SEQ ID NO: 252722 - DNA, 33 bp, Homo sapien
tcaaatgtacaaaatagcaatataacactatct

SEQ ID NO: 252723 - DNA, 33 bp, Homo sapien
ctgactacaggacaagaaaatggccaaaataat

SEQ ID NO: 252724 - DNA, 33 bp, Homo sapien
ctgactacaggacaaggaaatggccaaaataat

SEQ ID NO: 252725 - DNA, 33 bp, Homo sapien
ttatttgagaagaagccgaaggaattttgacct

SEQ ID NO: 252726 - DNA, 33 bp, Homo sapien
ttatttgagaagaagctgaaggaattttgacct

SEQ ID NO: 252727 - DNA, 33 bp, Homo sapien
aactggccattagtaccgatttgccataaattg

SEQ ID NO: 252728 - DNA, 33 bp, Homo sapien
aactggccattagtactgatttgccataaattg

SEQ ID NO: 252729 - DNA, 33 bp, Homo sapien
gaatattacacataccacaaattcctcaagtca

SEQ ID NO: 252730 - DNA, 33 bp, Homo sapien
gaatattacacataccgcaaattcctcaagtca

SEQ ID NO: 252731 - DNA, 33 bp, Homo sapien
ttaagtatttgctcaaggactaaccctatgggc

SEQ ID NO: 252732 - DNA, 33 bp, Homo sapien
ttaagtatttgctcaatgactaaccctatgggc

SEQ ID NO: 252733 - DNA, 33 bp, Homo sapien
ggattaaatgaggtgacatatgcacagcacagt

SEQ ID NO: 252734 - DNA, 33 bp, Homo sapien
ggattaaatgaggtgatatatgcacagcacagt

SEQ ID NO: 252735 - DNA, 33 bp, Homo sapien
aaagcctctggcaataagtggccaagcctgggc

SEQ ID NO: 252736 - DNA, 33 bp, Homo sapien
aaagcctctggcaataggtggccaagcctgggc

SEQ ID NO: 252737 - DNA, 33 bp, Homo sapien
tgtactgcccttgaaaattccatgtaaatttgc

SEQ ID NO: 252738 - DNA, 33 bp, Homo sapien
tgtactgcccttgaaacttccatgtaaatttgc

SEQ ID NO: 252739 - DNA, 33 bp, Homo sapien
tatttatatgcatcccaaaattgcaacgagtcc

SEQ ID NO: 252740 - DNA, 33 bp, Homo sapien
tatttatatgcatccccaaattgcaacgagtcc

SEQ ID NO: 252741 - DNA, 33 bp, Homo sapien
acacatactttgaaggaagagccaaaggttatt

SEQ ID NO: 252742 - DNA, 33 bp, Homo sapien
acacatactttgaaggcagagccaaaggttatt

SEQ ID NO: 252743 - DNA, 33 bp, Homo sapien
gccatctcccaagccaccttttccatggatcta

SEQ ID NO: 252744 - DNA, 33 bp, Homo sapien
gccatctcccaagccatcttttccatggatcta

SEQ ID NO: 252745 - DNA, 33 bp, Homo sapien
gatgattgccctcttgaaccacatgccatctcc

SEQ ID NO: 252746 - DNA, 33 bp, Homo sapien
gatgattgccctcttgcaccacatgccatctcc

SEQ ID NO: 252747 - DNA, 33 bp, Homo sapien
tatgccatctcaaaaacgctgattgaaaccaga

SEQ ID NO: 252748 - DNA, 33 bp, Homo sapien
tatgccatctcaaaaatgctgattgaaaccaga

SEQ ID NO: 252749 - DNA, 33 bp, Homo sapien
agaggagctaagataaaggaggagtcaacatgg

SEQ ID NO: 252750 - DNA, 33 bp, Homo sapien
agaggagctaagataacggaggagtcaacatgg

SEQ ID NO: 252751 - DNA, 33 bp, Homo sapien
tccagagcttttaccacctgagtgctggcagag

SEQ ID NO: 252752 - DNA, 33 bp, Homo sapien
tccagagcttttaccatctgagtgctggcagag

SEQ ID NO: 252753 - DNA, 33 bp, Homo sapien
ctatgactcactgataatacaaatgtagggaaa

SEQ ID NO: 252754 - DNA, 33 bp, Homo sapien
ctatgactcactgatagtacaaatgtagggaaa

SEQ ID NO: 252755 - DNA, 33 bp, Homo sapien
agagaaatatatcacacacttactggaaaggaa

SEQ ID NO: 252756 - DNA, 33 bp, Homo sapien
agagaaatatatcacagacttactggaaaggaa

SEQ ID NO: 252757 - DNA, 33 bp, Homo sapien
ggcctggaggtcataaccttcccatgtgacctt

SEQ ID NO: 252758 - DNA, 33 bp, Homo sapien
ggcctggaggtcataatcttcccatgtgacctt

SEQ ID NO: 252759 - DNA, 33 bp, Homo sapien
agtatggtacatttgacgaaatgaatgaagcaa

SEQ ID NO: 252760 - DNA, 33 bp, Homo sapien
agtatggtacatttgatgaaatgaatgaagcaa

SEQ ID NO: 252761 - DNA, 33 bp, Homo sapien
tgtgtcttgaatgagaacccagaacagaaaaag

SEQ ID NO: 252762 - DNA, 33 bp, Homo sapien
tgtgtcttgaatgagatcccagaacagaaaaag

SEQ ID NO: 252763 - DNA, 33 bp, Homo sapien
tatttagtctccacccacagttttagcaaacat

SEQ ID NO: 252764 - DNA, 33 bp, Homo sapien
tatttagtctccaccctcagttttagcaaacat

SEQ ID NO: 252765 - DNA, 33 bp, Homo sapien
cacatagtaaacaccacgcaaccaaggacaaag

SEQ ID NO: 252766 - DNA, 33 bp, Homo sapien
cacatagtaaacaccaggcaaccaaggacaaag

SEQ ID NO: 252767 - DNA, 33 bp, Homo sapien
atagatgatgtttaaaaccacaagactccatga

SEQ ID NO: 252768 - DNA, 33 bp, Homo sapien
atagatgatgtttaaagccacaagactccatga

SEQ ID NO: 252769 - DNA, 33 bp, Homo sapien
aggctggagagcagccacaggatgtcaactcac

SEQ ID NO: 252770 - DNA, 33 bp, Homo sapien
aggctggagagcagccgcaggatgtcaactcac

SEQ ID NO: 252771 - DNA, 33 bp, Homo sapien
gatatcaagcaagaaagaattcatggcgagtcc

SEQ ID NO: 252772 - DNA, 33 bp, Homo sapien
gatatcaagcaagaaataattcatggcgagtcc

SEQ ID NO: 252773 - DNA, 33 bp, Homo sapien
atattacttcttcttacagtgtctctgcagtag

SEQ ID NO: 252774 - DNA, 33 bp, Homo sapien
atattacttcttcttagagtgtctctgcagtag

SEQ ID NO: 252775 - DNA, 33 bp, Homo sapien
cctccgtagtcactaacactctttccagcatta

SEQ ID NO: 252776 - DNA, 33 bp, Homo sapien
cctccgtagtcactaatactctttccagcatta

SEQ ID NO: 252777 - DNA, 33 bp, Homo sapien
tattttgctttacctaggttgataagtgtagct

SEQ ID NO: 252778 - DNA, 33 bp, Homo sapien
tattttgctttacctatgttgataagtgtagct

SEQ ID NO: 252779 - DNA, 33 bp, Homo sapien
agtatgacagtcaccaagacatttcacacatat

SEQ ID NO: 252780 - DNA, 33 bp, Homo sapien
agtatgacagtcaccaggacatttcacacatat

SEQ ID NO: 252781 - DNA, 33 bp, Homo sapien
tttctttacaggtgcagaatcaacacactgaat

SEQ ID NO: 252782 - DNA, 33 bp, Homo sapien
tttctttacaggtgcataatcaacacactgaat

SEQ ID NO: 252783 - DNA, 33 bp, Homo sapien
taatctgtacaacaaacgccaaaacacaagcgc

SEQ ID NO: 252784 - DNA, 33 bp, Homo sapien
taatctgtacaacaaatgccaaaacacaagcgc

SEQ ID NO: 252785 - DNA, 33 bp, Homo sapien
aagaatcaagtaatcacgagctctacagctgca

SEQ ID NO: 252786 - DNA, 33 bp, Homo sapien
aagaatcaagtaatcatgagctctacagctgca

SEQ ID NO: 252787 - DNA, 33 bp, Homo sapien
atgacattgttctgtaccttaattgtgggagtg

SEQ ID NO: 252788 - DNA, 33 bp, Homo sapien
atgacattgttctgtatcttaattgtgggagtg

SEQ ID NO: 252789 - DNA, 33 bp, Homo sapien
tcttggataccataaaaaatctttaatgacatt

SEQ ID NO: 252790 - DNA, 33 bp, Homo sapien
tcttggataccataaacaatctttaatgacatt

SEQ ID NO: 252791 - DNA, 33 bp, Homo sapien
caattgtacttttggaatcataggttagaagga

SEQ ID NO: 252792 - DNA, 33 bp, Homo sapien
caattgtacttttggagtcataggttagaagga

SEQ ID NO: 252793 - DNA, 33 bp, Homo sapien
gggttacaaagtggccaagctaggattcaaatt

SEQ ID NO: 252794 - DNA, 33 bp, Homo sapien
gggttacaaagtggccgagctaggattcaaatt

SEQ ID NO: 252795 - DNA, 33 bp, Homo sapien
cccagggcagttgtggaataattagtaatagca

SEQ ID NO: 252796 - DNA, 33 bp, Homo sapien
cccagggcagttgtgggataattagtaatagca

SEQ ID NO: 252797 - DNA, 33 bp, Homo sapien
gccccctctgcacagcccccaaaaaggttccag

SEQ ID NO: 252798 - DNA, 33 bp, Homo sapien
gccccctctgcacagctcccaaaaaggttccag

SEQ ID NO: 252799 - DNA, 33 bp, Homo sapien
ctatcgttgaaactgacgcacagagtgcgagga

SEQ ID NO: 252800 - DNA, 33 bp, Homo sapien
ctatcgttgaaactgatgcacagagtgcgagga

SEQ ID NO: 252801 - DNA, 33 bp, Homo sapien
tcctgtgccactgaggaattgtgtgaccatgag

SEQ ID NO: 252802 - DNA, 33 bp, Homo sapien
tcctgtgccactgaggtattgtgtgaccatgag

SEQ ID NO: 252803 - DNA, 33 bp, Homo sapien
agttcctaagcctttgaaagataaaaattcttc

SEQ ID NO: 252804 - DNA, 33 bp, Homo sapien
agttcctaagcctttgtaagataaaaattcttc

SEQ ID NO: 252805 - DNA, 33 bp, Homo sapien
atttaattttcacaacagcacatgagatactgt

SEQ ID NO: 252806 - DNA, 33 bp, Homo sapien
atttaattttcacaacggcacatgagatactgt

SEQ ID NO: 252807 - DNA, 33 bp, Homo sapien
ctaggagctggaaaagaaaaggaaatggactct

SEQ ID NO: 252808 - DNA, 33 bp, Homo sapien
ctaggagctggaaaaggaaaggaaatggactct

SEQ ID NO: 252809 - DNA, 33 bp, Homo sapien
aacagtaatagaacaaataagaaggtggttaca

SEQ ID NO: 252810 - DNA, 33 bp, Homo sapien
aacagtaatagaacaagtaagaaggtggttaca

SEQ ID NO: 252811 - DNA, 33 bp, Homo sapien
tttctagggatggaaactatattttgctttcac

SEQ ID NO: 252812 - DNA, 33 bp, Homo sapien
tttctagggatggaaattatattttgctttcac

SEQ ID NO: 252813 - DNA, 33 bp, Homo sapien
tatacttacaacagccagagatagaaatgtgtg

SEQ ID NO: 252814 - DNA, 33 bp, Homo sapien
tatacttacaacagccggagatagaaatgtgtg

SEQ ID NO: 252815 - DNA, 33 bp, Homo sapien
gcccttcacacgtgagccaagccctcgatagcc

SEQ ID NO: 252816 - DNA, 33 bp, Homo sapien
gcccttcacacgtgagtcaagccctcgatagcc

SEQ ID NO: 252817 - DNA, 33 bp, Homo sapien
aggcaactaataaacacaccacttcaagttgtg

SEQ ID NO: 252818 - DNA, 33 bp, Homo sapien
aggcaactaataaacataccacttcaagttgtg

SEQ ID NO: 252819 - DNA, 33 bp, Homo sapien
atacagtaactcattacggctccgattttcatc

SEQ ID NO: 252820 - DNA, 33 bp, Homo sapien
atacagtaactcattatggctccgattttcatc

SEQ ID NO: 252821 - DNA, 33 bp, Homo sapien
aaggtattgcttttgagacaaatttaactttgt

SEQ ID NO: 252822 - DNA, 33 bp, Homo sapien
aaggtattgcttttgatacaaatttaactttgt

SEQ ID NO: 252823 - DNA, 33 bp, Homo sapien
ttttggtacaataacagaattacttcatcttca

SEQ ID NO: 252824 - DNA, 33 bp, Homo sapien
ttttggtacaataacataattacttcatcttca

SEQ ID NO: 252825 - DNA, 33 bp, Homo sapien
taaccttccagtcatcagaattgtgggccaaat

SEQ ID NO: 252826 - DNA, 33 bp, Homo sapien
taaccttccagtcatcggaattgtgggccaaat

SEQ ID NO: 252827 - DNA, 33 bp, Homo sapien
ctcttccattttaacccaatatcaacgttagag

SEQ ID NO: 252828 - DNA, 33 bp, Homo sapien
ctcttccattttaaccgaatatcaacgttagag

SEQ ID NO: 252829 - DNA, 33 bp, Homo sapien
ccagccctttctataaaatctgctgacacaata

SEQ ID NO: 252830 - DNA, 33 bp, Homo sapien
ccagccctttctataacatctgctgacacaata

SEQ ID NO: 252831 - DNA, 33 bp, Homo sapien
cagttcctcattgtctaaactagtatcctgggt

SEQ ID NO: 252832 - DNA, 33 bp, Homo sapien
cagttcctcattgtctgaactagtatcctgggt

SEQ ID NO: 252833 - DNA, 33 bp, Homo sapien
ctaaataccactttcccagagcttaagaaaaga

SEQ ID NO: 252834 - DNA, 33 bp, Homo sapien
ctaaataccactttcctagagcttaagaaaaga

SEQ ID NO: 252835 - DNA, 33 bp, Homo sapien
ctgatgaaaggatgtacacccgtttacctccaa

SEQ ID NO: 252836 - DNA, 33 bp, Homo sapien
ctgatgaaaggatgtatacccgtttacctccaa

SEQ ID NO: 252837 - DNA, 33 bp, Homo sapien
tttgggagattttacaatgctactaatattcgc

SEQ ID NO: 252838 - DNA, 33 bp, Homo sapien
tttgggagattttacagtgctactaatattcgc

SEQ ID NO: 252839 - DNA, 33 bp, Homo sapien
taggtgaagacagtaaagcataagggttaaagc

SEQ ID NO: 252840 - DNA, 33 bp, Homo sapien
taggtgaagacagtaaggcataagggttaaagc

SEQ ID NO: 252841 - DNA, 33 bp, Homo sapien
caagtaagctctccacacttccatttcttcgtt

SEQ ID NO: 252842 - DNA, 33 bp, Homo sapien
caagtaagctctccacgcttccatttcttcgtt

SEQ ID NO: 252843 - DNA, 33 bp, Homo sapien
gtgcccctggttctgaaaggaggatgtgattga

SEQ ID NO: 252844 - DNA, 33 bp, Homo sapien
gtgcccctggttctgacaggaggatgtgattga

SEQ ID NO: 252845 - DNA, 33 bp, Homo sapien
accctaaatagaagacaggtgaacacatagcac

SEQ ID NO: 252846 - DNA, 33 bp, Homo sapien
accctaaatagaagacgggtgaacacatagcac

SEQ ID NO: 252847 - DNA, 33 bp, Homo sapien
agaggacctgggaaggacacctgttctgagcac

SEQ ID NO: 252848 - DNA, 33 bp, Homo sapien
agaggacctgggaagggcacctgttctgagcac

SEQ ID NO: 252849 - DNA, 33 bp, Homo sapien
cccggtgttcaaaagcaaacctcatgctgacca

SEQ ID NO: 252850 - DNA, 33 bp, Homo sapien
cccggtgttcaaaagcgaacctcatgctgacca

SEQ ID NO: 252851 - DNA, 33 bp, Homo sapien
ttctgctatggaattccaggaaaatgttccttt

SEQ ID NO: 252852 - DNA, 33 bp, Homo sapien
ttctgctatggaattctaggaaaatgttccttt

SEQ ID NO: 252853 - DNA, 33 bp, Homo sapien
tctcccgagggacagccgagaaagaaggaaaca

SEQ ID NO: 252854 - DNA, 33 bp, Homo sapien
tctcccgagggacagctgagaaagaaggaaaca

SEQ ID NO: 252855 - DNA, 33 bp, Homo sapien
agctccatagagttacagaaatattcacagaac

SEQ ID NO: 252856 - DNA, 33 bp, Homo sapien
agctccatagagttacggaaatattcacagaac

SEQ ID NO: 252857 - DNA, 33 bp, Homo sapien
agaaaaaacaatttctcaaatacaaggtgataa

SEQ ID NO: 252858 - DNA, 33 bp, Homo sapien
agaaaaaacaatttctgaaatacaaggtgataa

SEQ ID NO: 252859 - DNA, 33 bp, Homo sapien
atcaacattgaaagaaccaaagaggctcagaaa

SEQ ID NO: 252860 - DNA, 33 bp, Homo sapien
atcaacattgaaagaagcaaagaggctcagaaa

SEQ ID NO: 252861 - DNA, 33 bp, Homo sapien
caaagaggctcagaaacagaactttgagaacca

SEQ ID NO: 252862 - DNA, 33 bp, Homo sapien
caaagaggctcagaaatagaactttgagaacca

SEQ ID NO: 252863 - DNA, 33 bp, Homo sapien
atgtgaatgttatccacgcaccattactgactc

SEQ ID NO: 252864 - DNA, 33 bp, Homo sapien
atgtgaatgttatccatgcaccattactgactc

SEQ ID NO: 252865 - DNA, 33 bp, Homo sapien
taattctctagtacaacttgaatttgccactca

SEQ ID NO: 252866 - DNA, 33 bp, Homo sapien
taattctctagtacaatttgaatttgccactca

SEQ ID NO: 252867 - DNA, 33 bp, Homo sapien
tgctgggaaggttaccaacaaagatcactacac

SEQ ID NO: 252868 - DNA, 33 bp, Homo sapien
tgctgggaaggttaccgacaaagatcactacac

SEQ ID NO: 252869 - DNA, 33 bp, Homo sapien
ctcctagcacaatattaaagagaagtagtgaaa

SEQ ID NO: 252870 - DNA, 33 bp, Homo sapien
ctcctagcacaatattgaagagaagtagtgaaa

SEQ ID NO: 252871 - DNA, 33 bp, Homo sapien
atttatttaaaaatggaaccaacagaaaagcta

SEQ ID NO: 252872 - DNA, 33 bp, Homo sapien
atttatttaaaaatgggaccaacagaaaagcta

SEQ ID NO: 252873 - DNA, 33 bp, Homo sapien
tgtgtgaaatctgccaagtataacagagaagtc

SEQ ID NO: 252874 - DNA, 33 bp, Homo sapien
tgtgtgaaatctgccaggtataacagagaagtc

SEQ ID NO: 252875 - DNA, 33 bp, Homo sapien
cgggtcttgtaggcacaggaatgggaaaaatta

SEQ ID NO: 252876 - DNA, 33 bp, Homo sapien
cgggtcttgtaggcacgggaatgggaaaaatta

SEQ ID NO: 252877 - DNA, 33 bp, Homo sapien
tgcctaacaagacgaccgtacacttcttcctct

SEQ ID NO: 252878 - DNA, 33 bp, Homo sapien
tgcctaacaagacgactgtacacttcttcctct

SEQ ID NO: 252879 - DNA, 33 bp, Homo sapien
tttaggaaattcataaacatttgttgaacagca

SEQ ID NO: 252880 - DNA, 33 bp, Homo sapien
tttaggaaattcataaccatttgttgaacagca

SEQ ID NO: 252881 - DNA, 33 bp, Homo sapien
tgtgtgtgtgtgtgtccaacattccctgacccc

SEQ ID NO: 252882 - DNA, 33 bp, Homo sapien
tgtgtgtgtgtgtgtctaacattccctgacccc

SEQ ID NO: 252883 - DNA, 33 bp, Homo sapien
acaattcagtccctaacagctggtcacctatga

SEQ ID NO: 252884 - DNA, 33 bp, Homo sapien
acaattcagtccctaagagctggtcacctatga

SEQ ID NO: 252885 - DNA, 33 bp, Homo sapien
gtcttttgtactcagacgccagcagacttgaag

SEQ ID NO: 252886 - DNA, 33 bp, Homo sapien
gtcttttgtactcagatgccagcagacttgaag

SEQ ID NO: 252887 - DNA, 33 bp, Homo sapien
tgatttgaaacctcagcattgagacagacacag

SEQ ID NO: 252888 - DNA, 33 bp, Homo sapien
tgatttgaaacctcagtattgagacagacacag

SEQ ID NO: 252889 - DNA, 33 bp, Homo sapien
tcacaaacagaaactcaagggcagaagaacatt

SEQ ID NO: 252890 - DNA, 33 bp, Homo sapien
tcacaaacagaaactccagggcagaagaacatt

SEQ ID NO: 252891 - DNA, 33 bp, Homo sapien
ccagagatctgcagcacgtcccagtatgaaaag

SEQ ID NO: 252892 - DNA, 33 bp, Homo sapien
ccagagatctgcagcaggtcccagtatgaaaag

SEQ ID NO: 252893 - DNA, 33 bp, Homo sapien
tttcttaaaaacgtaaccattctcatccaatat

SEQ ID NO: 252894 - DNA, 33 bp, Homo sapien
tttcttaaaaacgtaagcattctcatccaatat

SEQ ID NO: 252895 - DNA, 33 bp, Homo sapien
accatgatagtgaataaggcattccgtgagtcc

SEQ ID NO: 252896 - DNA, 33 bp, Homo sapien
accatgatagtgaatacggcattccgtgagtcc

SEQ ID NO: 252897 - DNA, 33 bp, Homo sapien
ggtaccgggtgtgctcactccaagaccaggtag

SEQ ID NO: 252898 - DNA, 33 bp, Homo sapien
ggtaccgggtgtgctcgctccaagaccaggtag

SEQ ID NO: 252899 - DNA, 33 bp, Homo sapien
tgctcctgctcagggccgaaaggtttaagtgtg

SEQ ID NO: 252900 - DNA, 33 bp, Homo sapien
tgctcctgctcagggctgaaaggtttaagtgtg

SEQ ID NO: 252901 - DNA, 33 bp, Homo sapien
gacatgaatattcaagaagttgaggaaggacct

SEQ ID NO: 252902 - DNA, 33 bp, Homo sapien
gacatgaatattcaaggagttgaggaaggacct

SEQ ID NO: 252903 - DNA, 33 bp, Homo sapien
acaagcaatagacacaatcaaacattgataaat

SEQ ID NO: 252904 - DNA, 33 bp, Homo sapien
acaagcaatagacacagtcaaacattgataaat

SEQ ID NO: 252905 - DNA, 33 bp, Homo sapien
cttgaacagtgaagcccgataacttggaatcag

SEQ ID NO: 252906 - DNA, 33 bp, Homo sapien
cttgaacagtgaagcctgataacttggaatcag

SEQ ID NO: 252907 - DNA, 33 bp, Homo sapien
cattttttatgaaccactgattatagtataata

SEQ ID NO: 252908 - DNA, 33 bp, Homo sapien
cattttttatgaaccagtgattatagtataata

SEQ ID NO: 252909 - DNA, 33 bp, Homo sapien
gctctcattacaaggacatattttaagcaatca

SEQ ID NO: 252910 - DNA, 33 bp, Homo sapien
gctctcattacaaggatatattttaagcaatca

SEQ ID NO: 252911 - DNA, 33 bp, Homo sapien
gagcaggtaatctatacgaggaagctgacccct

SEQ ID NO: 252912 - DNA, 33 bp, Homo sapien
gagcaggtaatctatatgaggaagctgacccct

SEQ ID NO: 252913 - DNA, 33 bp, Homo sapien
atcctgaacttaaggtaaaatcttcaaacattt

SEQ ID NO: 252914 - DNA, 33 bp, Homo sapien
atcctgaacttaaggtgaaatcttcaaacattt

SEQ ID NO: 252915 - DNA, 33 bp, Homo sapien
gtacaatgtagggaacaatacttcaacctaaat

SEQ ID NO: 252916 - DNA, 33 bp, Homo sapien
gtacaatgtagggaacgatacttcaacctaaat

SEQ ID NO: 252917 - DNA, 33 bp, Homo sapien
cagcccagcctgggaacattgtcacaagcatta

SEQ ID NO: 252918 - DNA, 33 bp, Homo sapien
cagcccagcctgggaatattgtcacaagcatta

SEQ ID NO: 252919 - DNA, 33 bp, Homo sapien
catgtcaggggcataaagcaaatattactttat

SEQ ID NO: 252920 - DNA, 33 bp, Homo sapien
catgtcaggggcataaggcaaatattactttat

SEQ ID NO: 252921 - DNA, 33 bp, Homo sapien
aagtaatgctcaaatggcagctggatacttgaa

SEQ ID NO: 252922 - DNA, 33 bp, Homo sapien
aagtaatgctcaaatgtcagctggatacttgaa

SEQ ID NO: 252923 - DNA, 33 bp, Homo sapien
aatcaagctgactttcaaaggagaagccagaga

SEQ ID NO: 252924 - DNA, 33 bp, Homo sapien
aatcaagctgactttcgaaggagaagccagaga

SEQ ID NO: 252925 - DNA, 33 bp, Homo sapien
cataggagccttgttacatgctggcccctcagt

SEQ ID NO: 252926 - DNA, 33 bp, Homo sapien
cataggagccttgttatatgctggcccctcagt

SEQ ID NO: 252927 - DNA, 33 bp, Homo sapien
gctagataaggcagaacctgtgggacgcagtaa

SEQ ID NO: 252928 - DNA, 33 bp, Homo sapien
gctagataaggcagaatctgtgggacgcagtaa

SEQ ID NO: 252929 - DNA, 33 bp, Homo sapien
tggctcaggctatggaacttcattttcttatcc

SEQ ID NO: 252930 - DNA, 33 bp, Homo sapien
tggctcaggctatggagcttcattttcttatcc

SEQ ID NO: 252931 - DNA, 33 bp, Homo sapien
aagacgagattgcaaacacacaaagaagtagag

SEQ ID NO: 252932 - DNA, 33 bp, Homo sapien
aagacgagattgcaaatacacaaagaagtagag

SEQ ID NO: 252933 - DNA, 33 bp, Homo sapien
tagattaatagaagccagcagaactttcctgaa

SEQ ID NO: 252934 - DNA, 33 bp, Homo sapien
tagattaatagaagccggcagaactttcctgaa

SEQ ID NO: 252935 - DNA, 33 bp, Homo sapien
gcaggtgctctgggcccgcaggatgtttacttt

SEQ ID NO: 252936 - DNA, 33 bp, Homo sapien
gcaggtgctctgggcctgcaggatgtttacttt

SEQ ID NO: 252937 - DNA, 33 bp, Homo sapien
cgtattcagtgaaacacgaatgaaccaggggtc

SEQ ID NO: 252938 - DNA, 33 bp, Homo sapien
cgtattcagtgaaacatgaatgaaccaggggtc

SEQ ID NO: 252939 - DNA, 33 bp, Homo sapien
tggccatgcaaacaaacgttaatctaggagttg

SEQ ID NO: 252940 - DNA, 33 bp, Homo sapien
tggccatgcaaacaaatgttaatctaggagttg

SEQ ID NO: 252941 - DNA, 33 bp, Homo sapien
tcaaaaagcacatttaagtagatgttgtatctt

SEQ ID NO: 252942 - DNA, 33 bp, Homo sapien
tcaaaaagcacatttaggtagatgttgtatctt

SEQ ID NO: 252943 - DNA, 33 bp, Homo sapien
catcttggctgaaatagaacctcctcattgcaa

SEQ ID NO: 252944 - DNA, 33 bp, Homo sapien
catcttggctgaaatataacctcctcattgcaa

SEQ ID NO: 252945 - DNA, 33 bp, Homo sapien
aaactctatccctgtaataagctggacaattgt

SEQ ID NO: 252946 - DNA, 33 bp, Homo sapien
aaactctatccctgtagtaagctggacaattgt

SEQ ID NO: 252947 - DNA, 33 bp, Homo sapien
agcaatcacatgatacggggaatagtacctgtt

SEQ ID NO: 252948 - DNA, 33 bp, Homo sapien
agcaatcacatgatactgggaatagtacctgtt

SEQ ID NO: 252949 - DNA, 33 bp, Homo sapien
ttcactttctgccagaaggacatcctaaaatgt

SEQ ID NO: 252950 - DNA, 33 bp, Homo sapien
ttcactttctgccagagggacatcctaaaatgt

SEQ ID NO: 252951 - DNA, 33 bp, Homo sapien
ctgcagggaactgaaaattattctctgctccat

SEQ ID NO: 252952 - DNA, 33 bp, Homo sapien
ctgcagggaactgaaatttattctctgctccat

SEQ ID NO: 252953 - DNA, 33 bp, Homo sapien
ctttgctcactctttacggagttgttgcttttt

SEQ ID NO: 252954 - DNA, 33 bp, Homo sapien
ctttgctcactctttatggagttgttgcttttt

SEQ ID NO: 252955 - DNA, 33 bp, Homo sapien
aaacaaatgtacaagaaaaaaagcaacaactcc

SEQ ID NO: 252956 - DNA, 33 bp, Homo sapien
aaacaaatgtacaagagaaaaagcaacaactcc

SEQ ID NO: 252957 - DNA, 33 bp, Homo sapien
ttgtggagaaagaggaactcttatacactgttg

SEQ ID NO: 252958 - DNA, 33 bp, Homo sapien
ttgtggagaaagaggatctcttatacactgttg

SEQ ID NO: 252959 - DNA, 33 bp, Homo sapien
tttacccaggaaaagcacaacacatggtcatga

SEQ ID NO: 252960 - DNA, 33 bp, Homo sapien
tttacccaggaaaagcgcaacacatggtcatga

SEQ ID NO: 252961 - DNA, 33 bp, Homo sapien
gccgctgatacaggtacgtgtattactttagct

SEQ ID NO: 252962 - DNA, 33 bp, Homo sapien
gccgctgatacaggtaggtgtattactttagct

SEQ ID NO: 252963 - DNA, 33 bp, Homo sapien
atgtggctgagaagctcaattgaatggaagctc

SEQ ID NO: 252964 - DNA, 33 bp, Homo sapien
atgtggctgagaagcttaattgaatggaagctc

SEQ ID NO: 252965 - DNA, 33 bp, Homo sapien
ttatgaggtaaaatgaaatcaggtggaaccaat

SEQ ID NO: 252966 - DNA, 33 bp, Homo sapien
ttatgaggtaaaatgacatcaggtggaaccaat

SEQ ID NO: 252967 - DNA, 33 bp, Homo sapien
ttgaggataacagctcaattaaaatccatctct

SEQ ID NO: 252968 - DNA, 33 bp, Homo sapien
ttgaggataacagctccattaaaatccatctct

SEQ ID NO: 252969 - DNA, 33 bp, Homo sapien
aacacaaggagaccctaacgttacattggtggt

SEQ ID NO: 252970 - DNA, 33 bp, Homo sapien
aacacaaggagaccctgacgttacattggtggt

SEQ ID NO: 252971 - DNA, 33 bp, Homo sapien
tagaatgaatcttagaagcataaacaaacctgt

SEQ ID NO: 252972 - DNA, 33 bp, Homo sapien
tagaatgaatcttagacgcataaacaaacctgt

SEQ ID NO: 252973 - DNA, 33 bp, Homo sapien
atatgcaaaggaaaaacaaaattagaccatgtt

SEQ ID NO: 252974 - DNA, 33 bp, Homo sapien
atatgcaaaggaaaaagaaaattagaccatgtt

SEQ ID NO: 252975 - DNA, 33 bp, Homo sapien
gggtgggggaggcttccagctctcaaatcctga

SEQ ID NO: 252976 - DNA, 33 bp, Homo sapien
gggtgggggaggcttctagctctcaaatcctga

SEQ ID NO: 252977 - DNA, 33 bp, Homo sapien
tagcatgtctcagagaaaggaactcccagatcg

SEQ ID NO: 252978 - DNA, 33 bp, Homo sapien
tagcatgtctcagagataggaactcccagatcg

SEQ ID NO: 252979 - DNA, 33 bp, Homo sapien
aacagaaaatcaaataccacgttatcacttata

SEQ ID NO: 252980 - DNA, 33 bp, Homo sapien
aacagaaaatcaaatatcacgttatcacttata

SEQ ID NO: 252981 - DNA, 33 bp, Homo sapien
cttaaaactacaaaacagagaattacatttgac

SEQ ID NO: 252982 - DNA, 33 bp, Homo sapien
cttaaaactacaaaaccgagaattacatttgac

SEQ ID NO: 252983 - DNA, 33 bp, Homo sapien
tttaagaatgtgaagaaataaagaatgagaaga

SEQ ID NO: 252984 - DNA, 33 bp, Homo sapien
tttaagaatgtgaagagataaagaatgagaaga

SEQ ID NO: 252985 - DNA, 33 bp, Homo sapien
atagactcaatgcaaccaagtacagcagaaaag

SEQ ID NO: 252986 - DNA, 33 bp, Homo sapien
atagactcaatgcaactaagtacagcagaaaag

SEQ ID NO: 252987 - DNA, 33 bp, Homo sapien
ggaagatacaagaaaagccatagggccaaatgt

SEQ ID NO: 252988 - DNA, 33 bp, Homo sapien
ggaagatacaagaaaatccatagggccaaatgt

SEQ ID NO: 252989 - DNA, 33 bp, Homo sapien
actaatggacctttccaaatgataattgttctg

SEQ ID NO: 252990 - DNA, 33 bp, Homo sapien
actaatggacctttccgaatgataattgttctg

SEQ ID NO: 252991 - DNA, 33 bp, Homo sapien
gggacatcagctccctcaggccagtaagcagtc

SEQ ID NO: 252992 - DNA, 33 bp, Homo sapien
gggacatcagctccctgaggccagtaagcagtc

SEQ ID NO: 252993 - DNA, 33 bp, Homo sapien
gcttccctttctcttccagctcatattatctgc

SEQ ID NO: 252994 - DNA, 33 bp, Homo sapien
gcttccctttctcttcgagctcatattatctgc

SEQ ID NO: 252995 - DNA, 33 bp, Homo sapien
tataggagaggaaaaactcataggaaacacttg

SEQ ID NO: 252996 - DNA, 33 bp, Homo sapien
tataggagaggaaaaattcataggaaacacttg

SEQ ID NO: 252997 - DNA, 33 bp, Homo sapien
aaatgaagcccttggacggtcagtgacgaccct

SEQ ID NO: 252998 - DNA, 33 bp, Homo sapien
aaatgaagcccttggatggtcagtgacgaccct

SEQ ID NO: 252999 - DNA, 33 bp, Homo sapien
taaaccttctctgctaaccttgcccctggtcca

SEQ ID NO: 253000 - DNA, 33 bp, Homo sapien
taaaccttctctgctatccttgcccctggtcca

SEQ ID NO: 253001 - DNA, 33 bp, Homo sapien
agagtcactatattgcaaagttctaggaggctt

SEQ ID NO: 253002 - DNA, 33 bp, Homo sapien
agagtcactatattgcgaagttctaggaggctt

SEQ ID NO: 253003 - DNA, 33 bp, Homo sapien
ccagtcacttcctgataaatatcctgcataaac

SEQ ID NO: 253004 - DNA, 33 bp, Homo sapien
ccagtcacttcctgatgaatatcctgcataaac

SEQ ID NO: 253005 - DNA, 33 bp, Homo sapien
gtatttatcttggtgaaggtgacaaatcatggc

SEQ ID NO: 253006 - DNA, 33 bp, Homo sapien
gtatttatcttggtgagggtgacaaatcatggc

SEQ ID NO: 253007 - DNA, 33 bp, Homo sapien
ttccttgcaaagataaaccaaagaccaatgtat

SEQ ID NO: 253008 - DNA, 33 bp, Homo sapien
ttccttgcaaagataagccaaagaccaatgtat

SEQ ID NO: 253009 - DNA, 33 bp, Homo sapien
agttttgtaatagaaacgctgataatcaggtct

SEQ ID NO: 253010 - DNA, 33 bp, Homo sapien
agttttgtaatagaaatgctgataatcaggtct

SEQ ID NO: 253011 - DNA, 33 bp, Homo sapien
ccactctgattttcccactccaaacaaatgcta

SEQ ID NO: 253012 - DNA, 33 bp, Homo sapien
ccactctgattttcccgctccaaacaaatgcta

SEQ ID NO: 253013 - DNA, 33 bp, Homo sapien
acaattctgagatacaatgagaagctcggaaga

SEQ ID NO: 253014 - DNA, 33 bp, Homo sapien
acaattctgagatacagtgagaagctcggaaga

SEQ ID NO: 253015 - DNA, 33 bp, Homo sapien
catgaatggcatgaaccgaaggcctctctctgt

SEQ ID NO: 253016 - DNA, 33 bp, Homo sapien
catgaatggcatgaactgaaggcctctctctgt

SEQ ID NO: 253017 - DNA, 33 bp, Homo sapien
caacacacaaaaattacacttaccactcttaaa

SEQ ID NO: 253018 - DNA, 33 bp, Homo sapien
caacacacaaaaattatacttaccactcttaaa

SEQ ID NO: 253019 - DNA, 33 bp, Homo sapien
gttaagtgatttttaccggatgagaattctaat

SEQ ID NO: 253020 - DNA, 33 bp, Homo sapien
gttaagtgatttttactggatgagaattctaat

SEQ ID NO: 253021 - DNA, 33 bp, Homo sapien
caataggagagaagggccagaacttagactgag

SEQ ID NO: 253022 - DNA, 33 bp, Homo sapien
caataggagagaagggtcagaacttagactgag

SEQ ID NO: 253023 - DNA, 33 bp, Homo sapien
gttacttacaatccacaaagcagaaattgcact

SEQ ID NO: 253024 - DNA, 33 bp, Homo sapien
gttacttacaatccacgaagcagaaattgcact

SEQ ID NO: 253025 - DNA, 33 bp, Homo sapien
atggtctgtgtaataacaaaccagacagaatat

SEQ ID NO: 253026 - DNA, 33 bp, Homo sapien
atggtctgtgtaataagaaaccagacagaatat

SEQ ID NO: 253027 - DNA, 33 bp, Homo sapien
gaggtctcttcactgacgctttgacagatcaca

SEQ ID NO: 253028 - DNA, 33 bp, Homo sapien
gaggtctcttcactgatgctttgacagatcaca

SEQ ID NO: 253029 - DNA, 33 bp, Homo sapien
gaataaatgctagctacgtttttgtgctttttt

SEQ ID NO: 253030 - DNA, 33 bp, Homo sapien
gaataaatgctagctatgtttttgtgctttttt

SEQ ID NO: 253031 - DNA, 33 bp, Homo sapien
tttgttttttaagacacgatatacctctgctga

SEQ ID NO: 253032 - DNA, 33 bp, Homo sapien
tttgttttttaagacatgatatacctctgctga

SEQ ID NO: 253033 - DNA, 33 bp, Homo sapien
cattcttgaaaagctaccagttgcaacacttta

SEQ ID NO: 253034 - DNA, 33 bp, Homo sapien
cattcttgaaaagctatcagttgcaacacttta

SEQ ID NO: 253035 - DNA, 33 bp, Homo sapien
tggaacctagtgaccaactgaatttggaatgcg

SEQ ID NO: 253036 - DNA, 33 bp, Homo sapien
tggaacctagtgaccacctgaatttggaatgcg

SEQ ID NO: 253037 - DNA, 33 bp, Homo sapien
tggtttgctggacccaagatgcaaaggctgagt

SEQ ID NO: 253038 - DNA, 33 bp, Homo sapien
tggtttgctggacccaggatgcaaaggctgagt

SEQ ID NO: 253039 - DNA, 33 bp, Homo sapien
ctccataccaaagagaccttacaacactctctt

SEQ ID NO: 253040 - DNA, 33 bp, Homo sapien
ctccataccaaagagatcttacaacactctctt

SEQ ID NO: 253041 - DNA, 33 bp, Homo sapien
ttgtatgtcttgcagcagattggatcctgcctg

SEQ ID NO: 253042 - DNA, 33 bp, Homo sapien
ttgtatgtcttgcagcggattggatcctgcctg

SEQ ID NO: 253043 - DNA, 33 bp, Homo sapien
aaactagtcctgtgggaaagagccatacctgtc

SEQ ID NO: 253044 - DNA, 33 bp, Homo sapien
aaactagtcctgtggggaagagccatacctgtc

SEQ ID NO: 253045 - DNA, 33 bp, Homo sapien
gtagtgaatgctgcaaataccaccaaacttcat

SEQ ID NO: 253046 - DNA, 33 bp, Homo sapien
gtagtgaatgctgcaagtaccaccaaacttcat

SEQ ID NO: 253047 - DNA, 33 bp, Homo sapien
actggatttgtaagacacagtatggctgagatt

SEQ ID NO: 253048 - DNA, 33 bp, Homo sapien
actggatttgtaagacgcagtatggctgagatt

SEQ ID NO: 253049 - DNA, 33 bp, Homo sapien
atagataggaggaaagccttctagtgctctatg

SEQ ID NO: 253050 - DNA, 33 bp, Homo sapien
atagataggaggaaagtcttctagtgctctatg

SEQ ID NO: 253051 - DNA, 33 bp, Homo sapien
actgttctggaactacaaagtcaggttcaaatc

SEQ ID NO: 253052 - DNA, 33 bp, Homo sapien
actgttctggaactacgaagtcaggttcaaatc

SEQ ID NO: 253053 - DNA, 33 bp, Homo sapien
gattggatgcctgatcaacatctcacacaaaaa

SEQ ID NO: 253054 - DNA, 33 bp, Homo sapien
gattggatgcctgatcgacatctcacacaaaaa

SEQ ID NO: 253055 - DNA, 33 bp, Homo sapien
tgccagacatttcagaagtaaacatggcttatt

SEQ ID NO: 253056 - DNA, 33 bp, Homo sapien
tgccagacatttcagaggtaaacatggcttatt

SEQ ID NO: 253057 - DNA, 33 bp, Homo sapien
ctttatgtgtcagtcactagtgtatattgattt

SEQ ID NO: 253058 - DNA, 33 bp, Homo sapien
ctttatgtgtcagtcattagtgtatattgattt

SEQ ID NO: 253059 - DNA, 33 bp, Homo sapien
tggagagaaaaacaggaacaggtgtactagtaa

SEQ ID NO: 253060 - DNA, 33 bp, Homo sapien
tggagagaaaaacagggacaggtgtactagtaa

SEQ ID NO: 253061 - DNA, 33 bp, Homo sapien
cagacattggacattaggcagaagaattctgtg

SEQ ID NO: 253062 - DNA, 33 bp, Homo sapien
cagacattggacattatgcagaagaattctgtg

SEQ ID NO: 253063 - DNA, 33 bp, Homo sapien
ctaggaggtaactcccaagtcagtgtgagggag

SEQ ID NO: 253064 - DNA, 33 bp, Homo sapien
ctaggaggtaactcccgagtcagtgtgagggag

SEQ ID NO: 253065 - DNA, 33 bp, Homo sapien
aagaggacttaactccaaatcatctgccccagt

SEQ ID NO: 253066 - DNA, 33 bp, Homo sapien
aagaggacttaactccgaatcatctgccccagt

SEQ ID NO: 253067 - DNA, 33 bp, Homo sapien
ctaagccaactcttccaccgtctcttgactctg

SEQ ID NO: 253068 - DNA, 33 bp, Homo sapien
ctaagccaactcttccgccgtctcttgactctg

SEQ ID NO: 253069 - DNA, 33 bp, Homo sapien
aaaatgccctcagttcaagtccactggtctagg

SEQ ID NO: 253070 - DNA, 33 bp, Homo sapien
aaaatgccctcagttcgagtccactggtctagg

SEQ ID NO: 253071 - DNA, 33 bp, Homo sapien
ctgacatggccactgacatcaacactggggcac

SEQ ID NO: 253072 - DNA, 33 bp, Homo sapien
ctgacatggccactgagatcaacactggggcac

SEQ ID NO: 253073 - DNA, 33 bp, Homo sapien
tgtgcatttggaatgccactctgctcaccgctt

SEQ ID NO: 253074 - DNA, 33 bp, Homo sapien
tgtgcatttggaatgctactctgctcaccgctt

SEQ ID NO: 253075 - DNA, 33 bp, Homo sapien
ctgtctgtataaatgacacccattagtcatgta

SEQ ID NO: 253076 - DNA, 33 bp, Homo sapien
ctgtctgtataaatgagacccattagtcatgta

SEQ ID NO: 253077 - DNA, 33 bp, Homo sapien
gactacaatagcatcagcattattaaaagttgc

SEQ ID NO: 253078 - DNA, 33 bp, Homo sapien
gactacaatagcatcatcattattaaaagttgc

SEQ ID NO: 253079 - DNA, 33 bp, Homo sapien
aacctaaactagttaacagccaaaagggagtca

SEQ ID NO: 253080 - DNA, 33 bp, Homo sapien
aacctaaactagttaagagccaaaagggagtca

SEQ ID NO: 253081 - DNA, 33 bp, Homo sapien
agaaagcaaatgttcacgtggaaataacactct

SEQ ID NO: 253082 - DNA, 33 bp, Homo sapien
agaaagcaaatgttcatgtggaaataacactct

SEQ ID NO: 253083 - DNA, 33 bp, Homo sapien
tgatggacacatgtatcagcaagaaataaacct

SEQ ID NO: 253084 - DNA, 33 bp, Homo sapien
tgatggacacatgtatgagcaagaaataaacct

SEQ ID NO: 253085 - DNA, 33 bp, Homo sapien
aatgaggccaaagatgacaagttatgactgggt

SEQ ID NO: 253086 - DNA, 33 bp, Homo sapien
aatgaggccaaagatggcaagttatgactgggt

SEQ ID NO: 253087 - DNA, 33 bp, Homo sapien
gtttgtatgtcatggtaaaaattggaaataact

SEQ ID NO: 253088 - DNA, 33 bp, Homo sapien
gtttgtatgtcatggtgaaaattggaaataact

SEQ ID NO: 253089 - DNA, 33 bp, Homo sapien
tgcaggtttaaatagagacagaaacagagttca

SEQ ID NO: 253090 - DNA, 33 bp, Homo sapien
tgcaggtttaaatagatacagaaacagagttca

SEQ ID NO: 253091 - DNA, 33 bp, Homo sapien
acttaggcttggtgcaatcttacgtggtctctt

SEQ ID NO: 253092 - DNA, 33 bp, Homo sapien
acttaggcttggtgcactcttacgtggtctctt

SEQ ID NO: 253093 - DNA, 33 bp, Homo sapien
cagagcagtccaagtgaataccaaggcaagagc

SEQ ID NO: 253094 - DNA, 33 bp, Homo sapien
cagagcagtccaagtggataccaaggcaagagc

SEQ ID NO: 253095 - DNA, 33 bp, Homo sapien
aaccattatgtctatacaaccctgcccacctag

SEQ ID NO: 253096 - DNA, 33 bp, Homo sapien
aaccattatgtctatataaccctgcccacctag

SEQ ID NO: 253097 - DNA, 33 bp, Homo sapien
aaggtggaaactggtaaattaacattaaggatg

SEQ ID NO: 253098 - DNA, 33 bp, Homo sapien
aaggtggaaactggtacattaacattaaggatg

SEQ ID NO: 253099 - DNA, 33 bp, Homo sapien
acactaggagtcactaataaagaagacagttgg

SEQ ID NO: 253100 - DNA, 33 bp, Homo sapien
acactaggagtcactagtaaagaagacagttgg

SEQ ID NO: 253101 - DNA, 33 bp, Homo sapien
actttgggcctaatgtaacaagattagaagaaa

SEQ ID NO: 253102 - DNA, 33 bp, Homo sapien
actttgggcctaatgtgacaagattagaagaaa

SEQ ID NO: 253103 - DNA, 33 bp, Homo sapien
ggcttgtgcccttcaaccttaataccagagaca

SEQ ID NO: 253104 - DNA, 33 bp, Homo sapien
ggcttgtgcccttcaatcttaataccagagaca

SEQ ID NO: 253105 - DNA, 33 bp, Homo sapien
tctctttctcctcacacagttaagcacttgcac

SEQ ID NO: 253106 - DNA, 33 bp, Homo sapien
tctctttctcctcacatagttaagcacttgcac

SEQ ID NO: 253107 - DNA, 33 bp, Homo sapien
gtggtatgtgtgcacaatggaactctaggaagc

SEQ ID NO: 253108 - DNA, 33 bp, Homo sapien
gtggtatgtgtgcacagtggaactctaggaagc

SEQ ID NO: 253109 - DNA, 33 bp, Homo sapien
tagctaatactggggccgaaacaactgttctct

SEQ ID NO: 253110 - DNA, 33 bp, Homo sapien
tagctaatactggggctgaaacaactgttctct

SEQ ID NO: 253111 - DNA, 33 bp, Homo sapien
ccattcaaggtcataaatcatgtcttaattatg

SEQ ID NO: 253112 - DNA, 33 bp, Homo sapien
ccattcaaggtcataagtcatgtcttaattatg

SEQ ID NO: 253113 - DNA, 33 bp, Homo sapien
atttacaggtagggtaactaagaaagaatatca

SEQ ID NO: 253114 - DNA, 33 bp, Homo sapien
atttacaggtagggtatctaagaaagaatatca

SEQ ID NO: 253115 - DNA, 33 bp, Homo sapien
cacatctatgtaatcaagataaaataagtccca

SEQ ID NO: 253116 - DNA, 33 bp, Homo sapien
cacatctatgtaatcaggataaaataagtccca

SEQ ID NO: 253117 - DNA, 33 bp, Homo sapien
atcccattaacagaccaggatttctgaattgca

SEQ ID NO: 253118 - DNA, 33 bp, Homo sapien
atcccattaacagaccgggatttctgaattgca

SEQ ID NO: 253119 - DNA, 33 bp, Homo sapien
agagaagttatagacaggttgcacttatctgag

SEQ ID NO: 253120 - DNA, 33 bp, Homo sapien
agagaagttatagacatgttgcacttatctgag

SEQ ID NO: 253121 - DNA, 33 bp, Homo sapien
ctgtccttctatgagacggttggtaactcccaa

SEQ ID NO: 253122 - DNA, 33 bp, Homo sapien
ctgtccttctatgagatggttggtaactcccaa

SEQ ID NO: 253123 - DNA, 33 bp, Homo sapien
attttcttcaactgcaatcagagaattaacgaa

SEQ ID NO: 253124 - DNA, 33 bp, Homo sapien
attttcttcaactgcagtcagagaattaacgaa

SEQ ID NO: 253125 - DNA, 33 bp, Homo sapien
catggataatgatttccacaccctggtgctgtt

SEQ ID NO: 253126 - DNA, 33 bp, Homo sapien
catggataatgatttcgacaccctggtgctgtt

SEQ ID NO: 253127 - DNA, 33 bp, Homo sapien
gtagttgttttaagtacggaaattggttaatgc

SEQ ID NO: 253128 - DNA, 33 bp, Homo sapien
gtagttgttttaagtatggaaattggttaatgc

SEQ ID NO: 253129 - DNA, 33 bp, Homo sapien
accaagctcacatcccagaatagatactgaata

SEQ ID NO: 253130 - DNA, 33 bp, Homo sapien
accaagctcacatcccggaatagatactgaata

SEQ ID NO: 253131 - DNA, 33 bp, Homo sapien
tggattgtgtgggcaacgccattttactccatg

SEQ ID NO: 253132 - DNA, 33 bp, Homo sapien
tggattgtgtgggcaatgccattttactccatg

SEQ ID NO: 253133 - DNA, 33 bp, Homo sapien
tctgggggagtagacaagtgcctggtaagttgg

SEQ ID NO: 253134 - DNA, 33 bp, Homo sapien
tctgggggagtagacatgtgcctggtaagttgg

SEQ ID NO: 253135 - DNA, 33 bp, Homo sapien
cacacacacacacagacgattgtggactcctct

SEQ ID NO: 253136 - DNA, 33 bp, Homo sapien
cacacacacacacagatgattgtggactcctct

SEQ ID NO: 253137 - DNA, 33 bp, Homo sapien
catgagaaacatgaacactgcatctaggttaat

SEQ ID NO: 253138 - DNA, 33 bp, Homo sapien
catgagaaacatgaacgctgcatctaggttaat

SEQ ID NO: 253139 - DNA, 33 bp, Homo sapien
ggctttctattgaatgcacagatttagttctca

SEQ ID NO: 253140 - DNA, 33 bp, Homo sapien
ggctttctattgaatgtacagatttagttctca

SEQ ID NO: 253141 - DNA, 33 bp, Homo sapien
atttatagcattgtaaatattctcctagttata

SEQ ID NO: 253142 - DNA, 33 bp, Homo sapien
atttatagcattgtaagtattctcctagttata

SEQ ID NO: 253143 - DNA, 33 bp, Homo sapien
gtttagggctgattaacgtttattcttttgttt

SEQ ID NO: 253144 - DNA, 33 bp, Homo sapien
gtttagggctgattaatgtttattcttttgttt

SEQ ID NO: 253145 - DNA, 33 bp, Homo sapien
cccctttccagtaacactaagaactcgctcatc

SEQ ID NO: 253146 - DNA, 33 bp, Homo sapien
cccctttccagtaacagtaagaactcgctcatc

SEQ ID NO: 253147 - DNA, 33 bp, Homo sapien
acagaataacgttcaacatctttagtccttagg

SEQ ID NO: 253148 - DNA, 33 bp, Homo sapien
acagaataacgttcaatatctttagtccttagg

SEQ ID NO: 253149 - DNA, 33 bp, Homo sapien
ggaatgaataggaagggacaaaagtcagagcag

SEQ ID NO: 253150 - DNA, 33 bp, Homo sapien
ggaatgaataggaaggtacaaaagtcagagcag

SEQ ID NO: 253151 - DNA, 33 bp, Homo sapien
tgaacctgtagtaagacatcactgtcacccaaa

SEQ ID NO: 253152 - DNA, 33 bp, Homo sapien
tgaacctgtagtaagagatcactgtcacccaaa

SEQ ID NO: 253153 - DNA, 33 bp, Homo sapien
cctacaaaattgtgagcaatcaaataattctat

SEQ ID NO: 253154 - DNA, 33 bp, Homo sapien
cctacaaaattgtgagtaatcaaataattctat

SEQ ID NO: 253155 - DNA, 33 bp, Homo sapien
agactccaagagttgaagatctgggtagcttcc

SEQ ID NO: 253156 - DNA, 33 bp, Homo sapien
agactccaagagttgaggatctgggtagcttcc

SEQ ID NO: 253157 - DNA, 33 bp, Homo sapien
attctcctatggaaccaataggggtgattccat

SEQ ID NO: 253158 - DNA, 33 bp, Homo sapien
attctcctatggaaccgataggggtgattccat

SEQ ID NO: 253159 - DNA, 33 bp, Homo sapien
tccataggagaatgacacaagggcgactacata

SEQ ID NO: 253160 - DNA, 33 bp, Homo sapien
tccataggagaatgacgcaagggcgactacata

SEQ ID NO: 253161 - DNA, 33 bp, Homo sapien
gaggcaattgtattaactcacacccatacacac

SEQ ID NO: 253162 - DNA, 33 bp, Homo sapien
gaggcaattgtattaattcacacccatacacac

SEQ ID NO: 253163 - DNA, 33 bp, Homo sapien
agtgcagctaccacgacccagaaaagcaccaat

SEQ ID NO: 253164 - DNA, 33 bp, Homo sapien
agtgcagctaccacgatccagaaaagcaccaat

SEQ ID NO: 253165 - DNA, 33 bp, Homo sapien
acagataggttgggtcacatgaggaaggtcatg

SEQ ID NO: 253166 - DNA, 33 bp, Homo sapien
acagataggttgggtcccatgaggaaggtcatg

SEQ ID NO: 253167 - DNA, 33 bp, Homo sapien
ccagggctctagactaactgaactaaatatagc

SEQ ID NO: 253168 - DNA, 33 bp, Homo sapien
ccagggctctagactagctgaactaaatatagc

SEQ ID NO: 253169 - DNA, 33 bp, Homo sapien
aagaaggctgagtttcaccttattcaaagatag

SEQ ID NO: 253170 - DNA, 33 bp, Homo sapien
aagaaggctgagtttcgccttattcaaagatag

SEQ ID NO: 253171 - DNA, 33 bp, Homo sapien
gcaggctgtcattgcccgagcccctgtggaatg

SEQ ID NO: 253172 - DNA, 33 bp, Homo sapien
gcaggctgtcattgccggagcccctgtggaatg

SEQ ID NO: 253173 - DNA, 33 bp, Homo sapien
tgttggaaaacagaaacgtcctctcagtgcatg

SEQ ID NO: 253174 - DNA, 33 bp, Homo sapien
tgttggaaaacagaaatgtcctctcagtgcatg

SEQ ID NO: 253175 - DNA, 33 bp, Homo sapien
acccagatatcaggtgaaacagtcattaaaagc

SEQ ID NO: 253176 - DNA, 33 bp, Homo sapien
acccagatatcaggtggaacagtcattaaaagc

SEQ ID NO: 253177 - DNA, 33 bp, Homo sapien
accccctgactaatccaaaatatgtctttccaa

SEQ ID NO: 253178 - DNA, 33 bp, Homo sapien
accccctgactaatccgaaatatgtctttccaa

SEQ ID NO: 253179 - DNA, 33 bp, Homo sapien
tttgggaattgtgccaccgtggatgtattgtta

SEQ ID NO: 253180 - DNA, 33 bp, Homo sapien
tttgggaattgtgccatcgtggatgtattgtta

SEQ ID NO: 253181 - DNA, 33 bp, Homo sapien
aattaaaaacaacacaggacgaagagattaatg

SEQ ID NO: 253182 - DNA, 33 bp, Homo sapien
aattaaaaacaacacatgacgaagagattaatg

SEQ ID NO: 253183 - DNA, 33 bp, Homo sapien
ctacctcccagattcaagcaagtctccggcctt

SEQ ID NO: 253184 - DNA, 33 bp, Homo sapien
ctacctcccagattcaggcaagtctccggcctt

SEQ ID NO: 253185 - DNA, 33 bp, Homo sapien
ggactcatgtgttgaaatctttgttttcttttt

SEQ ID NO: 253186 - DNA, 33 bp, Homo sapien
ggactcatgtgttgaagtctttgttttcttttt

SEQ ID NO: 253187 - DNA, 33 bp, Homo sapien
gtctaagaaatgtgaaaggaaaatatcctgggc

SEQ ID NO: 253188 - DNA, 33 bp, Homo sapien
gtctaagaaatgtgaacggaaaatatcctgggc

SEQ ID NO: 253189 - DNA, 33 bp, Homo sapien
ggaacaagcatttctaacactgctaagaaaaag

SEQ ID NO: 253190 - DNA, 33 bp, Homo sapien
ggaacaagcatttctatcactgctaagaaaaag

SEQ ID NO: 253191 - DNA, 33 bp, Homo sapien
cctattgcagccaataaaaaacggacatagcag

SEQ ID NO: 253192 - DNA, 33 bp, Homo sapien
cctattgcagccaatagaaaacggacatagcag

SEQ ID NO: 253193 - DNA, 33 bp, Homo sapien
ctctgatgtcctacagaaaaccagacctttctg

SEQ ID NO: 253194 - DNA, 33 bp, Homo sapien
ctctgatgtcctacaggaaaccagacctttctg

SEQ ID NO: 253195 - DNA, 33 bp, Homo sapien
cacatggttttgtagcactaaaggataattaaa

SEQ ID NO: 253196 - DNA, 33 bp, Homo sapien
cacatggttttgtagcgctaaaggataattaaa

SEQ ID NO: 253197 - DNA, 33 bp, Homo sapien
ctaaaggataattaaaccaccagcattaaaact

SEQ ID NO: 253198 - DNA, 33 bp, Homo sapien
ctaaaggataattaaagcaccagcattaaaact

SEQ ID NO: 253199 - DNA, 33 bp, Homo sapien
tgtgtatttttgaggcactatcatacttcctca

SEQ ID NO: 253200 - DNA, 33 bp, Homo sapien
tgtgtatttttgaggcgctatcatacttcctca

SEQ ID NO: 253201 - DNA, 33 bp, Homo sapien
gttttcagggcctgtaactttctaggcttttga

SEQ ID NO: 253202 - DNA, 33 bp, Homo sapien
gttttcagggcctgtacctttctaggcttttga

SEQ ID NO: 253203 - DNA, 33 bp, Homo sapien
atttttatttcaaagggcaaatgcattttaaag

SEQ ID NO: 253204 - DNA, 33 bp, Homo sapien
atttttatttcaaaggtcaaatgcattttaaag

SEQ ID NO: 253205 - DNA, 33 bp, Homo sapien
ccagtaaccataactaacattaacctgtctgtt

SEQ ID NO: 253206 - DNA, 33 bp, Homo sapien
ccagtaaccataactatcattaacctgtctgtt

SEQ ID NO: 253207 - DNA, 33 bp, Homo sapien
ataagcagatccatagaaattaaaaacaaatac

SEQ ID NO: 253208 - DNA, 33 bp, Homo sapien
ataagcagatccataggaattaaaaacaaatac

SEQ ID NO: 253209 - DNA, 33 bp, Homo sapien
gttccaaaaaatcttccacggtgtttcaatttg

SEQ ID NO: 253210 - DNA, 33 bp, Homo sapien
gttccaaaaaatcttctacggtgtttcaatttg

SEQ ID NO: 253211 - DNA, 33 bp, Homo sapien
taagatgttaacacaaaatgaaactcagtgtgg

SEQ ID NO: 253212 - DNA, 33 bp, Homo sapien
taagatgttaacacaagatgaaactcagtgtgg

SEQ ID NO: 253213 - DNA, 33 bp, Homo sapien
taaggtcccaaatcaaagaatgcgtttgtggga

SEQ ID NO: 253214 - DNA, 33 bp, Homo sapien
taaggtcccaaatcaatgaatgcgtttgtggga

SEQ ID NO: 253215 - DNA, 33 bp, Homo sapien
tatataggaaagctgccatatagtcattttaat

SEQ ID NO: 253216 - DNA, 33 bp, Homo sapien
tatataggaaagctgctatatagtcattttaat

SEQ ID NO: 253217 - DNA, 33 bp, Homo sapien
cactgatcctccaagacgcttgctcccatttac

SEQ ID NO: 253218 - DNA, 33 bp, Homo sapien
cactgatcctccaagatgcttgctcccatttac

SEQ ID NO: 253219 - DNA, 33 bp, Homo sapien
ggtggtgaaaactctccgaacagcatgcatgaa

SEQ ID NO: 253220 - DNA, 33 bp, Homo sapien
ggtggtgaaaactctctgaacagcatgcatgaa

SEQ ID NO: 253221 - DNA, 33 bp, Homo sapien
cacaaaatccaggtccaaaaacgagtagcattt

SEQ ID NO: 253222 - DNA, 33 bp, Homo sapien
cacaaaatccaggtccgaaaacgagtagcattt

SEQ ID NO: 253223 - DNA, 33 bp, Homo sapien
tagaacatgaaaggccaagattcaggaaagaag

SEQ ID NO: 253224 - DNA, 33 bp, Homo sapien
tagaacatgaaaggcccagattcaggaaagaag

SEQ ID NO: 253225 - DNA, 33 bp, Homo sapien
gagactgatagaactgcacttgcgtctctgcgt

SEQ ID NO: 253226 - DNA, 33 bp, Homo sapien
gagactgatagaactgtacttgcgtctctgcgt

SEQ ID NO: 253227 - DNA, 33 bp, Homo sapien
catttaaatgtgtccaccttgttgcattacaaa

SEQ ID NO: 253228 - DNA, 33 bp, Homo sapien
catttaaatgtgtccatcttgttgcattacaaa

SEQ ID NO: 253229 - DNA, 33 bp, Homo sapien
aaattggatggctcaacatcataaaaatgtcag

SEQ ID NO: 253230 - DNA, 33 bp, Homo sapien
aaattggatggctcaagatcataaaaatgtcag

SEQ ID NO: 253231 - DNA, 33 bp, Homo sapien
ttaattgtaccttactaaatttatacctgttgt

SEQ ID NO: 253232 - DNA, 33 bp, Homo sapien
ttaattgtaccttacttaatttatacctgttgt

SEQ ID NO: 253233 - DNA, 33 bp, Homo sapien
tcccgatgaagttccacctacctctactgtgca

SEQ ID NO: 253234 - DNA, 33 bp, Homo sapien
tcccgatgaagttccatctacctctactgtgca

SEQ ID NO: 253235 - DNA, 33 bp, Homo sapien
aaaacagcacagactgaaaaagtaaaaagcaca

SEQ ID NO: 253236 - DNA, 33 bp, Homo sapien
aaaacagcacagactgcaaaagtaaaaagcaca

SEQ ID NO: 253237 - DNA, 33 bp, Homo sapien
caagtgatgggtttgccctacagatacacacat

SEQ ID NO: 253238 - DNA, 33 bp, Homo sapien
caagtgatgggtttgcgctacagatacacacat

SEQ ID NO: 253239 - DNA, 33 bp, Homo sapien
gttggactggaaaatgaattgacttctctatgg

SEQ ID NO: 253240 - DNA, 33 bp, Homo sapien
gttggactggaaaatgtattgacttctctatgg

SEQ ID NO: 253241 - DNA, 33 bp, Homo sapien
agtttacttcaaatacaaaatatatgcactttg

SEQ ID NO: 253242 - DNA, 33 bp, Homo sapien
agtttacttcaaatacgaaatatatgcactttg

SEQ ID NO: 253243 - DNA, 33 bp, Homo sapien
aggtactctagctgcagacggccacatagcttg

SEQ ID NO: 253244 - DNA, 33 bp, Homo sapien
aggtactctagctgcatacggccacatagcttg

SEQ ID NO: 253245 - DNA, 33 bp, Homo sapien
tcacatgtcttttacacagtgcatgattgtata

SEQ ID NO: 253246 - DNA, 33 bp, Homo sapien
tcacatgtcttttacatagtgcatgattgtata

SEQ ID NO: 253247 - DNA, 33 bp, Homo sapien
gatacataagacataaaaaagtgttcatcataa

SEQ ID NO: 253248 - DNA, 33 bp, Homo sapien
gatacataagacataagaaagtgttcatcataa

SEQ ID NO: 253249 - DNA, 33 bp, Homo sapien
cagatggactgaaatcgccagataaggacacat

SEQ ID NO: 253250 - DNA, 33 bp, Homo sapien
cagatggactgaaatctccagataaggacacat

SEQ ID NO: 253251 - DNA, 33 bp, Homo sapien
gacatgttaaatctgcactggtatcctgcctgt

SEQ ID NO: 253252 - DNA, 33 bp, Homo sapien
gacatgttaaatctgcgctggtatcctgcctgt

SEQ ID NO: 253253 - DNA, 33 bp, Homo sapien
actgtttctgtaactgcagcaataacaaagaag

SEQ ID NO: 253254 - DNA, 33 bp, Homo sapien
actgtttctgtaactgtagcaataacaaagaag

SEQ ID NO: 253255 - DNA, 33 bp, Homo sapien
gctgaatacgcaacggaagttcaatgtccttgt

SEQ ID NO: 253256 - DNA, 33 bp, Homo sapien
gctgaatacgcaacgggagttcaatgtccttgt

SEQ ID NO: 253257 - DNA, 33 bp, Homo sapien
gggatattattttccaagtaggtgaaagttgaa

SEQ ID NO: 253258 - DNA, 33 bp, Homo sapien
gggatattattttccaggtaggtgaaagttgaa

SEQ ID NO: 253259 - DNA, 33 bp, Homo sapien
tccggaaactcaattaaggctgtgacactgacg

SEQ ID NO: 253260 - DNA, 33 bp, Homo sapien
tccggaaactcaattagggctgtgacactgacg

SEQ ID NO: 253261 - DNA, 33 bp, Homo sapien
acctaactatggcataggaaggataaataactt

SEQ ID NO: 253262 - DNA, 33 bp, Homo sapien
acctaactatggcatatgaaggataaataactt

SEQ ID NO: 253263 - DNA, 33 bp, Homo sapien
aacaatattacacaggacaaattcagaatattt

SEQ ID NO: 253264 - DNA, 33 bp, Homo sapien
aacaatattacacagggcaaattcagaatattt

SEQ ID NO: 253265 - DNA, 33 bp, Homo sapien
atttgggtgagaagcaagagtgtagcaaaatga

SEQ ID NO: 253266 - DNA, 33 bp, Homo sapien
atttgggtgagaagcatgagtgtagcaaaatga

SEQ ID NO: 253267 - DNA, 33 bp, Homo sapien
aatagataccacccaaattagtaataaagcatc

SEQ ID NO: 253268 - DNA, 33 bp, Homo sapien
aatagataccacccaagttagtaataaagcatc

SEQ ID NO: 253269 - DNA, 33 bp, Homo sapien
gcggaaggggcagcaaagcatatcatacatgac

SEQ ID NO: 253270 - DNA, 33 bp, Homo sapien
gcggaaggggcagcaaggcatatcatacatgac

SEQ ID NO: 253271 - DNA, 33 bp, Homo sapien
acatctcacacataaacgagatcaaaatgaaac

SEQ ID NO: 253272 - DNA, 33 bp, Homo sapien
acatctcacacataaaggagatcaaaatgaaac

SEQ ID NO: 253273 - DNA, 33 bp, Homo sapien
gaatgcctgccctgaacaacttgatttgtttgt

SEQ ID NO: 253274 - DNA, 33 bp, Homo sapien
gaatgcctgccctgaataacttgatttgtttgt

SEQ ID NO: 253275 - DNA, 33 bp, Homo sapien
gatctgaaacaactcaatagtgagaaacaaata

SEQ ID NO: 253276 - DNA, 33 bp, Homo sapien
gatctgaaacaactcagtagtgagaaacaaata

SEQ ID NO: 253277 - DNA, 33 bp, Homo sapien
actgaatagaaagcccagaagtaaacccacaca

SEQ ID NO: 253278 - DNA, 33 bp, Homo sapien
actgaatagaaagcccggaagtaaacccacaca

SEQ ID NO: 253279 - DNA, 33 bp, Homo sapien
gactggtccttctcaacggtatcagagggacag

SEQ ID NO: 253280 - DNA, 33 bp, Homo sapien
gactggtccttctcaatggtatcagagggacag

SEQ ID NO: 253281 - DNA, 33 bp, Homo sapien
ccatctcccattcaaacggttggccgcccctac

SEQ ID NO: 253282 - DNA, 33 bp, Homo sapien
ccatctcccattcaaatggttggccgcccctac

SEQ ID NO: 253283 - DNA, 33 bp, Homo sapien
agcagaatctctccaggctcatgatccacccac

SEQ ID NO: 253284 - DNA, 33 bp, Homo sapien
agcagaatctctccagtctcatgatccacccac

SEQ ID NO: 253285 - DNA, 33 bp, Homo sapien
tttcattttcacattccctttcaatcccaaacc

SEQ ID NO: 253286 - DNA, 33 bp, Homo sapien
tttcattttcacattctctttcaatcccaaacc

SEQ ID NO: 253287 - DNA, 33 bp, Homo sapien
ccagttaccaggcagcagagagtgatggagact

SEQ ID NO: 253288 - DNA, 33 bp, Homo sapien
ccagttaccaggcagcggagagtgatggagact

SEQ ID NO: 253289 - DNA, 33 bp, Homo sapien
ggggagacactgaattcaatgtgtgctccttgc

SEQ ID NO: 253290 - DNA, 33 bp, Homo sapien
ggggagacactgaatttaatgtgtgctccttgc

SEQ ID NO: 253291 - DNA, 33 bp, Homo sapien
tcagcttccatctcccaaagtcaatttcacctc

SEQ ID NO: 253292 - DNA, 33 bp, Homo sapien
tcagcttccatctcccgaagtcaatttcacctc

SEQ ID NO: 253293 - DNA, 33 bp, Homo sapien
agcacacacaattaggaacagtacatacaactt

SEQ ID NO: 253294 - DNA, 33 bp, Homo sapien
agcacacacaattagggacagtacatacaactt

SEQ ID NO: 253295 - DNA, 33 bp, Homo sapien
ctcataagaaacaaaccagtctatggccaggtt

SEQ ID NO: 253296 - DNA, 33 bp, Homo sapien
ctcataagaaacaaactagtctatggccaggtt

SEQ ID NO: 253297 - DNA, 33 bp, Homo sapien
tgaagagcgaaaggaaagatcagggtcatcaga

SEQ ID NO: 253298 - DNA, 33 bp, Homo sapien
tgaagagcgaaaggaaggatcagggtcatcaga

SEQ ID NO: 253299 - DNA, 33 bp, Homo sapien
ccagcaagaccctagcaatggctgttcatccta

SEQ ID NO: 253300 - DNA, 33 bp, Homo sapien
ccagcaagaccctagcgatggctgttcatccta

SEQ ID NO: 253301 - DNA, 33 bp, Homo sapien
tgacccagcgatcagcaatcccattactgggta

SEQ ID NO: 253302 - DNA, 33 bp, Homo sapien
tgacccagcgatcagcgatcccattactgggta

SEQ ID NO: 253303 - DNA, 33 bp, Homo sapien
ttacagtggctggaaacgtttattcctttctat

SEQ ID NO: 253304 - DNA, 33 bp, Homo sapien
ttacagtggctggaaatgtttattcctttctat

SEQ ID NO: 253305 - DNA, 33 bp, Homo sapien; identical to SEQ ID NO: 253303

SEQ ID NO: 253306 - DNA, 33 bp, Homo sapien; identical to SEQ ID NO: 253304

SEQ ID NO: 253307 - DNA, 33 bp, Homo sapien
ccacagtcatgctcaaccaaatattttattttg

SEQ ID NO: 253308 - DNA, 33 bp, Homo sapien
ccacagtcatgctcaatcaaatattttattttg

SEQ ID NO: 253309 - DNA, 33 bp, Homo sapien
tcctgggtcatgtgtacgggctttggctacaca

SEQ ID NO: 253310 - DNA, 33 bp, Homo sapien
tcctgggtcatgtgtatgggctttggctacaca

SEQ ID NO: 253311 - DNA, 33 bp, Homo sapien
tgtccttacagtgctgcaccaacttcttgcctt

SEQ ID NO: 253312 - DNA, 33 bp, Homo sapien
tgtccttacagtgctggaccaacttcttgcctt

SEQ ID NO: 253313 - DNA, 33 bp, Homo sapien
cgaccaggctatgtcacgttgaactctgtgtgg

SEQ ID NO: 253314 - DNA, 33 bp, Homo sapien
cgaccaggctatgtcatgttgaactctgtgtgg

SEQ ID NO: 253315 - DNA, 33 bp, Homo sapien
tgctgggggaagaccactaacagaaggctgtga

SEQ ID NO: 253316 - DNA, 33 bp, Homo sapien
tgctgggggaagaccattaacagaaggctgtga

SEQ ID NO: 253317 - DNA, 33 bp, Homo sapien
gtttggagattgcctaaaatgtattagaaaaat

SEQ ID NO: 253318 - DNA, 33 bp, Homo sapien
gtttggagattgcctagaatgtattagaaaaat

SEQ ID NO: 253319 - DNA, 33 bp, Homo sapien
ctaagacctagaggcagggttcctgtcgaatta

SEQ ID NO: 253320 - DNA, 33 bp, Homo sapien
ctaagacctagaggcatggttcctgtcgaatta

SEQ ID NO: 253321 - DNA, 33 bp, Homo sapien
aatcatctgaaagaagaaggcccaaatcctaga

SEQ ID NO: 253322 - DNA, 33 bp, Homo sapien
aatcatctgaaagaaggaggcccaaatcctaga

SEQ ID NO: 253323 - DNA, 33 bp, Homo sapien
caaagcctcacttcacagaacctacccaaaaat

SEQ ID NO: 253324 - DNA, 33 bp, Homo sapien
caaagcctcacttcacggaacctacccaaaaat

SEQ ID NO: 253325 - DNA, 33 bp, Homo sapien
cttacctttgatctggcatttctgccttttaga

SEQ ID NO: 253326 - DNA, 33 bp, Homo sapien
cttacctttgatctggtatttctgccttttaga

SEQ ID NO: 253327 - DNA, 33 bp, Homo sapien
tctcccttcacaaaaacctgcttcaaataccat

SEQ ID NO: 253328 - DNA, 33 bp, Homo sapien
tctcccttcacaaaaatctgcttcaaataccat

SEQ ID NO: 253329 - DNA, 33 bp, Homo sapien
ttaagcaccaaacacagtacaggacatttggat

SEQ ID NO: 253330 - DNA, 33 bp, Homo sapien
ttaagcaccaaacacattacaggacatttggat

SEQ ID NO: 253331 - DNA, 33 bp, Homo sapien
gtggactcaaaatgaacggaattttaattctgc

SEQ ID NO: 253332 - DNA, 33 bp, Homo sapien
gtggactcaaaatgaatggaattttaattctgc

SEQ ID NO: 253333 - DNA, 33 bp, Homo sapien
gaaagagtcagtggaaatgaaggagttagaaaa

SEQ ID NO: 253334 - DNA, 33 bp, Homo sapien
gaaagagtcagtggaagtgaaggagttagaaaa

SEQ ID NO: 253335 - DNA, 33 bp, Homo sapien
catttcagcattcatgaacacctactctttcca

SEQ ID NO: 253336 - DNA, 33 bp, Homo sapien
catttcagcattcatggacacctactctttcca

SEQ ID NO: 253337 - DNA, 33 bp, Homo sapien
attctgtacaagcagaaaacacaaggacacacc

SEQ ID NO: 253338 - DNA, 33 bp, Homo sapien
attctgtacaagcagagaacacaaggacacacc

SEQ ID NO: 253339 - DNA, 33 bp, Homo sapien
ctgaaatagtaggtcagctaaagtgcattaaga

SEQ ID NO: 253340 - DNA, 33 bp, Homo sapien
ctgaaatagtaggtcatctaaagtgcattaaga

SEQ ID NO: 253341 - DNA, 33 bp, Homo sapien
agcctcaaggggctcacaattgttcaactaaat

SEQ ID NO: 253342 - DNA, 33 bp, Homo sapien
agcctcaaggggctcataattgttcaactaaat

SEQ ID NO: 253343 - DNA, 33 bp, Homo sapien
ttccctttttatagaacgttctgattagtcact

SEQ ID NO: 253344 - DNA, 33 bp, Homo sapien
ttccctttttatagaatgttctgattagtcact

SEQ ID NO: 253345 - DNA, 33 bp, Homo sapien
ccctctgcaccatcccaagtcacagttggtaaa

SEQ ID NO: 253346 - DNA, 33 bp, Homo sapien
ccctctgcaccatcccgagtcacagttggtaaa

SEQ ID NO: 253347 - DNA, 33 bp, Homo sapien
gcttatccatggtcgaagaaatgaaagactaac

SEQ ID NO: 253348 - DNA, 33 bp, Homo sapien
gcttatccatggtcgaggaaatgaaagactaac

SEQ ID NO: 253349 - DNA, 33 bp, Homo sapien
agtagggcagtttgaaaacaggctaatttataa

SEQ ID NO: 253350 - DNA, 33 bp, Homo sapien
agtagggcagtttgaatacaggctaatttataa

SEQ ID NO: 253351 - DNA, 33 bp, Homo sapien
catgtgctcatgagaacgaaatcaacaaataac

SEQ ID NO: 253352 - DNA, 33 bp, Homo sapien
catgtgctcatgagaatgaaatcaacaaataac

SEQ ID NO: 253353 - DNA, 33 bp, Homo sapien
agaaatagtaattaacacaatgcatacaaactg

SEQ ID NO: 253354 - DNA, 33 bp, Homo sapien
agaaatagtaattaacgcaatgcatacaaactg

SEQ ID NO: 253355 - DNA, 33 bp, Homo sapien
attggttggatctctacggatctgatggtctgg

SEQ ID NO: 253356 - DNA, 33 bp, Homo sapien
attggttggatctctatggatctgatggtctgg

SEQ ID NO: 253357 - DNA, 33 bp, Homo sapien
tcttcccttaaatcaactcatatgcttatttac

SEQ ID NO: 253358 - DNA, 33 bp, Homo sapien
tcttcccttaaatcaattcatatgcttatttac

SEQ ID NO: 253359 - DNA, 33 bp, Homo sapien
agccctctaggacaagccttcataaaaaagtga

SEQ ID NO: 253360 - DNA, 33 bp, Homo sapien
agccctctaggacaaggcttcataaaaaagtga

SEQ ID NO: 253361 - DNA, 33 bp, Homo sapien
ttttgctgtgtggagccaagatttttatttgca

SEQ ID NO: 253362 - DNA, 33 bp, Homo sapien
ttttgctgtgtggagctaagatttttatttgca

SEQ ID NO: 253363 - DNA, 33 bp, Homo sapien
tcagtcataaaccataaccttcctaacgggcca

SEQ ID NO: 253364 - DNA, 33 bp, Homo sapien
tcagtcataaaccatagccttcctaacgggcca

SEQ ID NO: 253365 - DNA, 33 bp, Homo sapien
cagaggaaacttagacaataacagctaagccaa

SEQ ID NO: 253366 - DNA, 33 bp, Homo sapien
cagaggaaacttagacgataacagctaagccaa

SEQ ID NO: 253367 - DNA, 33 bp, Homo sapien
gttttctgtgtaaaaaattatgcttgcttattg

SEQ ID NO: 253368 - DNA, 33 bp, Homo sapien
gttttctgtgtaaaaagttatgcttgcttattg

SEQ ID NO: 253369 - DNA, 33 bp, Homo sapien
cactaacaatgccaacagagtgggttgatatag

SEQ ID NO: 253370 - DNA, 33 bp, Homo sapien
cactaacaatgccaacggagtgggttgatatag

SEQ ID NO: 253371 - DNA, 33 bp, Homo sapien
tgaaagaacaaaaacacgagtgaatgaacaaat

SEQ ID NO: 253372 - DNA, 33 bp, Homo sapien
tgaaagaacaaaaacatgagtgaatgaacaaat

SEQ ID NO: 253373 - DNA, 33 bp, Homo sapien
actaacacaggatgtacgtgatttagatagtga

SEQ ID NO: 253374 - DNA, 33 bp, Homo sapien
actaacacaggatgtatgtgatttagatagtga

SEQ ID NO: 253375 - DNA, 33 bp, Homo sapien
ctttggtctgcccttaacaagaatctttctagg

SEQ ID NO: 253376 - DNA, 33 bp, Homo sapien
ctttggtctgcccttagcaagaatctttctagg

SEQ ID NO: 253377 - DNA, 33 bp, Homo sapien
agggtaacaggtgaccacagacatcaaggcatt

SEQ ID NO: 253378 - DNA, 33 bp, Homo sapien
agggtaacaggtgaccgcagacatcaaggcatt

SEQ ID NO: 253379 - DNA, 33 bp, Homo sapien
aattacatggttatgcacccttttttgcaccat

SEQ ID NO: 253380 - DNA, 33 bp, Homo sapien
aattacatggttatgcgcccttttttgcaccat

SEQ ID NO: 253381 - DNA, 33 bp, Homo sapien
tcctatatatctacaaacaattacatggttatg

SEQ ID NO: 253382 - DNA, 33 bp, Homo sapien
tcctatatatctacaagcaattacatggttatg

SEQ ID NO: 253383 - DNA, 33 bp, Homo sapien
ccgagcatccaaaatacgggcagacaatttaga

SEQ ID NO: 253384 - DNA, 33 bp, Homo sapien
ccgagcatccaaaatatgggcagacaatttaga

SEQ ID NO: 253385 - DNA, 33 bp, Homo sapien
agtcgagtcaatttccgagggtgaaacagtcag

SEQ ID NO: 253386 - DNA, 33 bp, Homo sapien
agtcgagtcaatttcctagggtgaaacagtcag

SEQ ID NO: 253387 - DNA, 33 bp, Homo sapien
agaacctgtgctcaaaatcaccagtgtgtgtac

SEQ ID NO: 253388 - DNA, 33 bp, Homo sapien
agaacctgtgctcaaagtcaccagtgtgtgtac

SEQ ID NO: 253389 - DNA, 33 bp, Homo sapien
aatggtgctagaacaagtatgaatacaaaatat

SEQ ID NO: 253390 - DNA, 33 bp, Homo sapien
aatggtgctagaacaattatgaatacaaaatat

SEQ ID NO: 253391 - DNA, 33 bp, Homo sapien
atccgatgtaagcttcacaaatattttctttca

SEQ ID NO: 253392 - DNA, 33 bp, Homo sapien
atccgatgtaagcttcgcaaatattttctttca

SEQ ID NO: 253393 - DNA, 33 bp, Homo sapien
agcatacacagtgaacacctataagcaacactt

SEQ ID NO: 253394 - DNA, 33 bp, Homo sapien
agcatacacagtgaacgcctataagcaacactt

SEQ ID NO: 253395 - DNA, 33 bp, Homo sapien
tctcctcagctcaggaaaaaagaatttcaggag

SEQ ID NO: 253396 - DNA, 33 bp, Homo sapien
tctcctcagctcaggagaaaagaatttcaggag

SEQ ID NO: 253397 - DNA, 33 bp, Homo sapien
ggagatgtgggggcacagatgtaaggtggccaa

SEQ ID NO: 253398 - DNA, 33 bp, Homo sapien
ggagatgtgggggcacggatgtaaggtggccaa

SEQ ID NO: 253399 - DNA, 33 bp, Homo sapien
tttttttaaccactgagatgtttttgaggcatt

SEQ ID NO: 253400 - DNA, 33 bp, Homo sapien
tttttttaaccactgatatgtttttgaggcatt

SEQ ID NO: 253401 - DNA, 33 bp, Homo sapien
tcaaatgattcctaccacaacacctcattcatg

SEQ ID NO: 253402 - DNA, 33 bp, Homo sapien
tcaaatgattcctaccgcaacacctcattcatg

SEQ ID NO: 253403 - DNA, 33 bp, Homo sapien
gtatttccatgtttaagtctcaatgtgcatgaa

SEQ ID NO: 253404 - DNA, 33 bp, Homo sapien
gtatttccatgtttaattctcaatgtgcatgaa

SEQ ID NO: 253405 - DNA, 33 bp, Homo sapien
agtctgttattgtatacgaaacacttcccaggg

SEQ ID NO: 253406 - DNA, 33 bp, Homo sapien
agtctgttattgtatatgaaacacttcccaggg

SEQ ID NO: 253407 - DNA, 33 bp, Homo sapien
agccatgttcgacaacgcttttctgatctatgc

SEQ ID NO: 253408 - DNA, 33 bp, Homo sapien
agccatgttcgacaactcttttctgatctatgc

SEQ ID NO: 253409 - DNA, 33 bp, Homo sapien
tcctctgaacacaagacagaaagaggaggagtg

SEQ ID NO: 253410 - DNA, 33 bp, Homo sapien
tcctctgaacacaagatagaaagaggaggagtg

SEQ ID NO: 253411 - DNA, 33 bp, Homo sapien
ctctgttcctgctacaaacagtgaggtaacgtg

SEQ ID NO: 253412 - DNA, 33 bp, Homo sapien
ctctgttcctgctacatacagtgaggtaacgtg

SEQ ID NO: 253413 - DNA, 33 bp, Homo sapien
gccagcatgagctgccgcaagttcagttactcc

SEQ ID NO: 253414 - DNA, 33 bp, Homo sapien
gccagcatgagctgcctcaagttcagttactcc

SEQ ID NO: 253415 - DNA, 33 bp, Homo sapien
gcacctttctttataaatgggcatatccagagc

SEQ ID NO: 253416 - DNA, 33 bp, Homo sapien
gcacctttctttataagtgggcatatccagagc

SEQ ID NO: 253417 - DNA, 33 bp, Homo sapien
cccacagagagaaaaacgacagtgtagcttatt

SEQ ID NO: 253418 - DNA, 33 bp, Homo sapien
cccacagagagaaaaatgacagtgtagcttatt

SEQ ID NO: 253419 - DNA, 33 bp, Homo sapien
atgaacgtagaggtgaaattcatgatcaaccta

SEQ ID NO: 253420 - DNA, 33 bp, Homo sapien
atgaacgtagaggtgagattcatgatcaaccta

SEQ ID NO: 253421 - DNA, 33 bp, Homo sapien
ctggtgtctccaaaggcatttcttccatattgt

SEQ ID NO: 253422 - DNA, 33 bp, Homo sapien
ctggtgtctccaaaggtatttcttccatattgt

SEQ ID NO: 253423 - DNA, 33 bp, Homo sapien
actagaccaaccttacaagaagtctttaatgga

SEQ ID NO: 253424 - DNA, 33 bp, Homo sapien
actagaccaaccttaccagaagtctttaatgga

SEQ ID NO: 253425 - DNA, 33 bp, Homo sapien
ggaaaccaactcagaccatctaaaggagggaat

SEQ ID NO: 253426 - DNA, 33 bp, Homo sapien
ggaaaccaactcagactatctaaaggagggaat

SEQ ID NO: 253427 - DNA, 33 bp, Homo sapien
catcaactaactgacaaagacaaagcatgatct

SEQ ID NO: 253428 - DNA, 33 bp, Homo sapien
catcaactaactgacagagacaaagcatgatct

SEQ ID NO: 253429 - DNA, 33 bp, Homo sapien
atggttcatttggtagaatgctcagaagattct

SEQ ID NO: 253430 - DNA, 33 bp, Homo sapien
atggttcatttggtaggatgctcagaagattct

SEQ ID NO: 253431 - DNA, 33 bp, Homo sapien
ttctgggagtaaattcaaaatcaagaaacacag

SEQ ID NO: 253432 - DNA, 33 bp, Homo sapien
ttctgggagtaaattccaaatcaagaaacacag

SEQ ID NO: 253433 - DNA, 33 bp, Homo sapien
aatttgcaaagtggtacgtggaacctacttagc

SEQ ID NO: 253434 - DNA, 33 bp, Homo sapien
aatttgcaaagtggtatgtggaacctacttagc

SEQ ID NO: 253435 - DNA, 33 bp, Homo sapien
acagagttcacaaatggcagtacatcaaacact

SEQ ID NO: 253436 - DNA, 33 bp, Homo sapien
acagagttcacaaatgtcagtacatcaaacact

SEQ ID NO: 253437 - DNA, 33 bp, Homo sapien
gaaatcccttcttgaaactttaatcatgaatct

SEQ ID NO: 253438 - DNA, 33 bp, Homo sapien
gaaatcccttcttgaacctttaatcatgaatct

SEQ ID NO: 253439 - DNA, 33 bp, Homo sapien
taaagaaagaaaggccaaccactgaatagaaac

SEQ ID NO: 253440 - DNA, 33 bp, Homo sapien
taaagaaagaaaggccgaccactgaatagaaac

SEQ ID NO: 253441 - DNA, 33 bp, Homo sapien
ttttcttttattcagaacctcaaaggattgaat

SEQ ID NO: 253442 - DNA, 33 bp, Homo sapien
ttttcttttattcagaccctcaaaggattgaat

SEQ ID NO: 253443 - DNA, 33 bp, Homo sapien
cacttacaaacagctaccctggaaggctggcct

SEQ ID NO: 253444 - DNA, 33 bp, Homo sapien
cacttacaaacagctatcctggaaggctggcct

SEQ ID NO: 253445 - DNA, 33 bp, Homo sapien
tgaaggtaatgaagtacggagggacaactaagc

SEQ ID NO: 253446 - DNA, 33 bp, Homo sapien
tgaaggtaatgaagtagggagggacaactaagc

SEQ ID NO: 253447 - DNA, 33 bp, Homo sapien
aaaagaggaatggagcaagtgtaataaaacagt

SEQ ID NO: 253448 - DNA, 33 bp, Homo sapien
aaaagaggaatggagcgagtgtaataaaacagt

SEQ ID NO: 253449 - DNA, 33 bp, Homo sapien
ttgttgactatgtctacgagaaagaaattaaaa

SEQ ID NO: 253450 - DNA, 33 bp, Homo sapien
ttgttgactatgtctatgagaaagaaattaaaa

SEQ ID NO: 253451 - DNA, 33 bp, Homo sapien
cacacaagcctagtctaacaccaagggcaataa

SEQ ID NO: 253452 - DNA, 33 bp, Homo sapien
cacacaagcctagtctcacaccaagggcaataa

SEQ ID NO: 253453 - DNA, 33 bp, Homo sapien
aaacctgtgatttgtacgttactcacaccctct

SEQ ID NO: 253454 - DNA, 33 bp, Homo sapien
aaacctgtgatttgtatgttactcacaccctct

SEQ ID NO: 253455 - DNA, 33 bp, Homo sapien
ctatgttctttcccaacccccacttcagtttac

SEQ ID NO: 253456 - DNA, 33 bp, Homo sapien
ctatgttctttcccaatccccacttcagtttac

SEQ ID NO: 253457 - DNA, 33 bp, Homo sapien
acagaaaaataatggacggcacaaaggtcttta

SEQ ID NO: 253458 - DNA, 33 bp, Homo sapien
acagaaaaataatggatggcacaaaggtcttta

SEQ ID NO: 253459 - DNA, 33 bp, Homo sapien
gacagcaccgggtttcacactggcaaggcagga

SEQ ID NO: 253460 - DNA, 33 bp, Homo sapien
gacagcaccgggtttcgcactggcaaggcagga

SEQ ID NO: 253461 - DNA, 33 bp, Homo sapien
gcgcaggcagtctaccccttgcacctcgttcta

SEQ ID NO: 253462 - DNA, 33 bp, Homo sapien
gcgcaggcagtctacctcttgcacctcgttcta

SEQ ID NO: 253463 - DNA, 33 bp, Homo sapien
gaagattttagcagaaagagaatttgatcagag

SEQ ID NO: 253464 - DNA, 33 bp, Homo sapien
gaagattttagcagaatgagaatttgatcagag

SEQ ID NO: 253465 - DNA, 33 bp, Homo sapien
aattttcttcagatcccaaaggagagaaaaaaa

SEQ ID NO: 253466 - DNA, 33 bp, Homo sapien
aattttcttcagatccgaaaggagagaaaaaaa

SEQ ID NO: 253467 - DNA, 33 bp, Homo sapien
aaatgtaatgagtgtacgttagggcttgctata

SEQ ID NO: 253468 - DNA, 33 bp, Homo sapien
aaatgtaatgagtgtatgttagggcttgctata

SEQ ID NO: 253469 - DNA, 33 bp, Homo sapien
gttgaatgatacaaagaagtaggttttgataag

SEQ ID NO: 253470 - DNA, 33 bp, Homo sapien
gttgaatgatacaaaggagtaggttttgataag

SEQ ID NO: 253471 - DNA, 33 bp, Homo sapien
tgtgttttctaagaaccacattgtccaatggta

SEQ ID NO: 253472 - DNA, 33 bp, Homo sapien
tgtgttttctaagaactacattgtccaatggta

SEQ ID NO: 253473 - DNA, 33 bp, Homo sapien
ttctagatagaagagacggaatttattggttta

SEQ ID NO: 253474 - DNA, 33 bp, Homo sapien
ttctagatagaagagatggaatttattggttta

SEQ ID NO: 253475 - DNA, 33 bp, Homo sapien
tccaagctcagtgcaaacatctgaaagaaatgc

SEQ ID NO: 253476 - DNA, 33 bp, Homo sapien
tccaagctcagtgcaagcatctgaaagaaatgc

SEQ ID NO: 253477 - DNA, 33 bp, Homo sapien
gcttggagtgacagaacacataatgagaaatgg

SEQ ID NO: 253478 - DNA, 33 bp, Homo sapien
gcttggagtgacagaatacataatgagaaatgg

SEQ ID NO: 253479 - DNA, 33 bp, Homo sapien
aatcaagacagaaaaagaagcatggtattttga

SEQ ID NO: 253480 - DNA, 33 bp, Homo sapien
aatcaagacagaaaaataagcatggtattttga

SEQ ID NO: 253481 - DNA, 33 bp, Homo sapien
tggtgactcctgctcaatatcttcatacatctg

SEQ ID NO: 253482 - DNA, 33 bp, Homo sapien
tggtgactcctgctcattatcttcatacatctg

SEQ ID NO: 253483 - DNA, 33 bp, Homo sapien
gttgccaagcattacacatagaagttattcagg

SEQ ID NO: 253484 - DNA, 33 bp, Homo sapien
gttgccaagcattacatatagaagttattcagg

SEQ ID NO: 253485 - DNA, 33 bp, Homo sapien
atcacagctcagaaaactcatgcatctgacgtt

SEQ ID NO: 253486 - DNA, 33 bp, Homo sapien
atcacagctcagaaaagtcatgcatctgacgtt

SEQ ID NO: 253487 - DNA, 33 bp, Homo sapien
tgactgaaaatcatcactatgagcattggctgt

SEQ ID NO: 253488 - DNA, 33 bp, Homo sapien
tgactgaaaatcatcattatgagcattggctgt

SEQ ID NO: 253489 - DNA, 33 bp, Homo sapien
ccttatcacattgccaacatcccacgtgaggac

SEQ ID NO: 253490 - DNA, 33 bp, Homo sapien
ccttatcacattgccagcatcccacgtgaggac

SEQ ID NO: 253491 - DNA, 33 bp, Homo sapien
tatgattctatgtataagaaaagtccagaatgg

SEQ ID NO: 253492 - DNA, 33 bp, Homo sapien
tatgattctatgtatatgaaaagtccagaatgg

SEQ ID NO: 253493 - DNA, 33 bp, Homo sapien
aagctgctatttttaactctataagcccatatt

SEQ ID NO: 253494 - DNA, 33 bp, Homo sapien
aagctgctatttttaattctataagcccatatt

SEQ ID NO: 253495 - DNA, 33 bp, Homo sapien
gagagagacagagaaaagacactccaatcctga

SEQ ID NO: 253496 - DNA, 33 bp, Homo sapien
gagagagacagagaaaggacactccaatcctga

SEQ ID NO: 253497 - DNA, 33 bp, Homo sapien
gtgctttcattcattaataacatttttcctagc

SEQ ID NO: 253498 - DNA, 33 bp, Homo sapien
gtgctttcattcattagtaacatttttcctagc

SEQ ID NO: 253499 - DNA, 33 bp, Homo sapien
gggatattaaacttgacgacttgactctaatgt

SEQ ID NO: 253500 - DNA, 33 bp, Homo sapien
gggatattaaacttgatgacttgactctaatgt

SEQ ID NO: 253501 - DNA, 33 bp, Homo sapien
gtaactaccttaaaaccgacaactgtgcaaaac

SEQ ID NO: 253502 - DNA, 33 bp, Homo sapien
gtaactaccttaaaactgacaactgtgcaaaac

SEQ ID NO: 253503 - DNA, 33 bp, Homo sapien
ttgccctatcaaaggacataaaattcagaaact

SEQ ID NO: 253504 - DNA, 33 bp, Homo sapien
ttgccctatcaaaggagataaaattcagaaact

SEQ ID NO: 253505 - DNA, 33 bp, Homo sapien
cccatactaatgccccaaaagaagatgcaagct

SEQ ID NO: 253506 - DNA, 33 bp, Homo sapien
cccatactaatgcccccaaagaagatgcaagct

SEQ ID NO: 253507 - DNA, 33 bp, Homo sapien
ttggagaagaataaagccgatacattcacatat

SEQ ID NO: 253508 - DNA, 33 bp, Homo sapien
ttggagaagaataaagtcgatacattcacatat

SEQ ID NO: 253509 - DNA, 33 bp, Homo sapien
aagatttttgaccaaaaacacttccactcatat

SEQ ID NO: 253510 - DNA, 33 bp, Homo sapien
aagatttttgaccaaatacacttccactcatat

SEQ ID NO: 253511 - DNA, 33 bp, Homo sapien
gtctgactattctctccaggtttatctttcttt

SEQ ID NO: 253512 - DNA, 33 bp, Homo sapien
gtctgactattctctctaggtttatctttcttt

SEQ ID NO: 253513 - DNA, 33 bp, Homo sapien
gtgggcacttttaaaaagttttgcagaggagga

SEQ ID NO: 253514 - DNA, 33 bp, Homo sapien
gtgggcacttttaaaaggttttgcagaggagga

SEQ ID NO: 253515 - DNA, 33 bp, Homo sapien
gaaagaattcaaggaaatccataaagtaaaagc

SEQ ID NO: 253516 - DNA, 33 bp, Homo sapien
gaaagaattcaaggaagtccataaagtaaaagc

SEQ ID NO: 253517 - DNA, 33 bp, Homo sapien
caccaagttctcacacaatctcgttcctaataa

SEQ ID NO: 253518 - DNA, 33 bp, Homo sapien
caccaagttctcacacgatctcgttcctaataa

SEQ ID NO: 253519 - DNA, 33 bp, Homo sapien
attgatttctacagcacaacctagcatatcctg

SEQ ID NO: 253520 - DNA, 33 bp, Homo sapien
attgatttctacagcataacctagcatatcctg

SEQ ID NO: 253521 - DNA, 33 bp, Homo sapien
caaaggatctttagaccgcacctgaagggagag

SEQ ID NO: 253522 - DNA, 33 bp, Homo sapien
caaaggatctttagactgcacctgaagggagag

SEQ ID NO: 253523 - DNA, 33 bp, Homo sapien
ttttcagttgtttgaacatggtttgtcgaaata

SEQ ID NO: 253524 - DNA, 33 bp, Homo sapien
ttttcagttgtttgaatatggtttgtcgaaata

SEQ ID NO: 253525 - DNA, 33 bp, Homo sapien
aactgtaggtcattgacaagccaaacatctgat

SEQ ID NO: 253526 - DNA, 33 bp, Homo sapien
aactgtaggtcattgataagccaaacatctgat

SEQ ID NO: 253527 - DNA, 33 bp, Homo sapien
acatgccctgaaaacactgtcaccattgtcttg

SEQ ID NO: 253528 - DNA, 33 bp, Homo sapien
acatgccctgaaaacattgtcaccattgtcttg

SEQ ID NO: 253529 - DNA, 33 bp, Homo sapien; identical to SEQ ID NO: 253527

SEQ ID NO: 253530 - DNA, 33 bp, Homo sapien; identical to SEQ ID NO: 253528

SEQ ID NO: 253531 - DNA, 33 bp, Homo sapien
aaccatatcaagtatccagccttgtgttcctcc

SEQ ID NO: 253532 - DNA, 33 bp, Homo sapien
aaccatatcaagtatctagccttgtgttcctcc

SEQ ID NO: 253533 - DNA, 33 bp, Homo sapien
atgtttctctgtagcccgaataaatatagcttg

SEQ ID NO: 253534 - DNA, 33 bp, Homo sapien
atgtttctctgtagcctgaataaatatagcttg

SEQ ID NO: 253535 - DNA, 33 bp, Homo sapien
attagcacgtcactcacccagaattgaggcagg

SEQ ID NO: 253536 - DNA, 33 bp, Homo sapien
attagcacgtcactcatccagaattgaggcagg

SEQ ID NO: 253537 - DNA, 33 bp, Homo sapien
cactgcttcagttttcaaccaactttcgcaacc

SEQ ID NO: 253538 - DNA, 33 bp, Homo sapien
cactgcttcagttttccaccaactttcgcaacc

SEQ ID NO: 253539 - DNA, 33 bp, Homo sapien
tcttttatatggtagcaatgaacagtcaggttg

SEQ ID NO: 253540 - DNA, 33 bp, Homo sapien
tcttttatatggtagcgatgaacagtcaggttg

SEQ ID NO: 253541 - DNA, 33 bp, Homo sapien
tccatacagatagttaaggcaatgtaagactta

SEQ ID NO: 253542 - DNA, 33 bp, Homo sapien
tccatacagatagttagggcaatgtaagactta

SEQ ID NO: 253543 - DNA, 33 bp, Homo sapien
gataagttaagcctgacagtaattatttgacac

SEQ ID NO: 253544 - DNA, 33 bp, Homo sapien
gataagttaagcctgagagtaattatttgacac

SEQ ID NO: 253545 - DNA, 33 bp, Homo sapien
ttgctcatttttatcccctgcatagaattgttg

SEQ ID NO: 253546 - DNA, 33 bp, Homo sapien
ttgctcatttttatcctctgcatagaattgttg

SEQ ID NO: 253547 - DNA, 33 bp, Homo sapien
aggcttctaaaagagacgattgattcccaggat

SEQ ID NO: 253548 - DNA, 33 bp, Homo sapien
aggcttctaaaagagatgattgattcccaggat

SEQ ID NO: 253549 - DNA, 33 bp, Homo sapien
tgacattccaatagcaatgaaaatacctagcgc

SEQ ID NO: 253550 - DNA, 33 bp, Homo sapien
tgacattccaatagcagtgaaaatacctagcgc

SEQ ID NO: 253551 - DNA, 33 bp, Homo sapien
tacaaatcctgtcaaaattctgtgtcaagctta

SEQ ID NO: 253552 - DNA, 33 bp, Homo sapien
tacaaatcctgtcaaacttctgtgtcaagctta

SEQ ID NO: 253553 - DNA, 33 bp, Homo sapien
ttgagatggagtcatacgggaggaggatgggcc

SEQ ID NO: 253554 - DNA, 33 bp, Homo sapien
ttgagatggagtcatatgggaggaggatgggcc

SEQ ID NO: 253555 - DNA, 33 bp, Homo sapien
taagccaagtagttgacggtaatggtactttat

SEQ ID NO: 253556 - DNA, 33 bp, Homo sapien
taagccaagtagttgatggtaatggtactttat

SEQ ID NO: 253557 - DNA, 33 bp, Homo sapien
cctgttttatgatgggaaaacaagacgttcaca

SEQ ID NO: 253558 - DNA, 33 bp, Homo sapien
cctgttttatgatggggaaacaagacgttcaca

SEQ ID NO: 253559 - DNA, 33 bp, Homo sapien
atgtggcagaactaggaaagctcaaatgaacat

SEQ ID NO: 253560 - DNA, 33 bp, Homo sapien
atgtggcagaactagggaagctcaaatgaacat

SEQ ID NO: 253561 - DNA, 33 bp, Homo sapien
atctctttctcctgtacaaacagaactcagata

SEQ ID NO: 253562 - DNA, 33 bp, Homo sapien
atctctttctcctgtataaacagaactcagata

SEQ ID NO: 253563 - DNA, 33 bp, Homo sapien
aagtgtaaaagaatgaataaaagcagaaggtcc

SEQ ID NO: 253564 - DNA, 33 bp, Homo sapien
aagtgtaaaagaatgagtaaaagcagaaggtcc

SEQ ID NO: 253565 - DNA, 33 bp, Homo sapien
gtagatttgaatgacacagtttcacaagactgt

SEQ ID NO: 253566 - DNA, 33 bp, Homo sapien
gtagatttgaatgacatagtttcacaagactgt

SEQ ID NO: 253567 - DNA, 33 bp, Homo sapien
attataaagctagagaaaatatttcgatggaat

SEQ ID NO: 253568 - DNA, 33 bp, Homo sapien
attataaagctagagagaatatttcgatggaat

SEQ ID NO: 253569 - DNA, 33 bp, Homo sapien
aattatagccgaagacagaaattgaaaagctga

SEQ ID NO: 253570 - DNA, 33 bp, Homo sapien
aattatagccgaagacggaaattgaaaagctga

SEQ ID NO: 253571 - DNA, 33 bp, Homo sapien
cttccctctgccttcaacaagcacagaaacaga

SEQ ID NO: 253572 - DNA, 33 bp, Homo sapien
cttccctctgccttcatcaagcacagaaacaga

SEQ ID NO: 253573 - DNA, 33 bp, Homo sapien
cagtacactgaaagaaactattagaacagtacg

SEQ ID NO: 253574 - DNA, 33 bp, Homo sapien
cagtacactgaaagaacctattagaacagtacg

SEQ ID NO: 253575 - DNA, 33 bp, Homo sapien
tcctgcttctgggttgcaggaaccacctgaatt

SEQ ID NO: 253576 - DNA, 33 bp, Homo sapien
tcctgcttctgggttgtaggaaccacctgaatt

SEQ ID NO: 253577 - DNA, 33 bp, Homo sapien
caataggaaaccaaaacgtgtcatctacttcac

SEQ ID NO: 253578 - DNA, 33 bp, Homo sapien
caataggaaaccaaaatgtgtcatctacttcac

SEQ ID NO: 253579 - DNA, 33 bp, Homo sapien
aattgtttgcccatgaaaaaagagcttataaat

SEQ ID NO: 253580 - DNA, 33 bp, Homo sapien
aattgtttgcccatgagaaaagagcttataaat

SEQ ID NO: 253581 - DNA, 33 bp, Homo sapien
caacctgcagcccacacagtttattcagtgcct

SEQ ID NO: 253582 - DNA, 33 bp, Homo sapien
caacctgcagcccacagagtttattcagtgcct

SEQ ID NO: 253583 - DNA, 33 bp, Homo sapien
ccttcctatgtgtatacaacatgagcttcatga

SEQ ID NO: 253584 - DNA, 33 bp, Homo sapien
ccttcctatgtgtatagaacatgagcttcatga

SEQ ID NO: 253585 - DNA, 33 bp, Homo sapien
aagggtttgtttctgacaaagtggtgcaggaac

SEQ ID NO: 253586 - DNA, 33 bp, Homo sapien
aagggtttgtttctgataaagtggtgcaggaac

SEQ ID NO: 253587 - DNA, 33 bp, Homo sapien
gtgcccagccttccagacccaaattaacggtta

SEQ ID NO: 253588 - DNA, 33 bp, Homo sapien
gtgcccagccttccaggcccaaattaacggtta

SEQ ID NO: 253589 - DNA, 33 bp, Homo sapien
ttctgaccttgcaactcaccacaaggttttcct

SEQ ID NO: 253590 - DNA, 33 bp, Homo sapien
ttctgaccttgcaacttaccacaaggttttcct

SEQ ID NO: 253591 - DNA, 33 bp, Homo sapien
cctattattatgagtacgtctattgattgggtt

SEQ ID NO: 253592 - DNA, 33 bp, Homo sapien
cctattattatgagtatgtctattgattgggtt

SEQ ID NO: 253593 - DNA, 33 bp, Homo sapien
atagtaaagaccaagacggataaattctatttt

SEQ ID NO: 253594 - DNA, 33 bp, Homo sapien
atagtaaagaccaagatggataaattctatttt

SEQ ID NO: 253595 - DNA, 33 bp, Homo sapien
ttctaaagtaggatgagcaaagtcatagtcatg

SEQ ID NO: 253596 - DNA, 33 bp, Homo sapien
ttctaaagtaggatgatcaaagtcatagtcatg

SEQ ID NO: 253597 - DNA, 33 bp, Homo sapien
aggtgaaactgccaccaaaggtccacgggcgtc

SEQ ID NO: 253598 - DNA, 33 bp, Homo sapien
aggtgaaactgccaccgaaggtccacgggcgtc

SEQ ID NO: 253599 - DNA, 33 bp, Homo sapien
tatgaccattaattgcacttcgtatgttacata

SEQ ID NO: 253600 - DNA, 33 bp, Homo sapien
tatgaccattaattgcgcttcgtatgttacata

SEQ ID NO: 253601 - DNA, 33 bp, Homo sapien
aaacaagtcatttgtaagtagtttctcaacaca

SEQ ID NO: 253602 - DNA, 33 bp, Homo sapien
aaacaagtcatttgtaggtagtttctcaacaca

SEQ ID NO: 253603 - DNA, 33 bp, Homo sapien
aagcaaaagttagcataaacagccactgcagca

SEQ ID NO: 253604 - DNA, 33 bp, Homo sapien
aagcaaaagttagcatcaacagccactgcagca

SEQ ID NO: 253605 - DNA, 33 bp, Homo sapien
ctataaggctacatcaaatggactcacccagcc

SEQ ID NO: 253606 - DNA, 33 bp, Homo sapien
ctataaggctacatcacatggactcacccagcc

SEQ ID NO: 253607 - DNA, 33 bp, Homo sapien
tgatatgacaagaatgacacttgactgtgtggt

SEQ ID NO: 253608 - DNA, 33 bp, Homo sapien
tgatatgacaagaatggcacttgactgtgtggt

SEQ ID NO: 253609 - DNA, 33 bp, Homo sapien
cctgaagcttcagagaagttgtttcatgtattt

SEQ ID NO: 253610 - DNA, 33 bp, Homo sapien
cctgaagcttcagagaggttgtttcatgtattt

SEQ ID NO: 253611 - DNA, 33 bp, Homo sapien
ctctctaagccttttagcctcatgggggagggg

SEQ ID NO: 253612 - DNA, 33 bp, Homo sapien
ctctctaagccttttatcctcatgggggagggg

SEQ ID NO: 253613 - DNA, 33 bp, Homo sapien
ttctcagttagtgttgaaccaagcctatgttca

SEQ ID NO: 253614 - DNA, 33 bp, Homo sapien
ttctcagttagtgttggaccaagcctatgttca

SEQ ID NO: 253615 - DNA, 33 bp, Homo sapien
cgaggaagtgtaggcaatgacagatgctcacat

SEQ ID NO: 253616 - DNA, 33 bp, Homo sapien
cgaggaagtgtaggcagtgacagatgctcacat

SEQ ID NO: 253617 - DNA, 33 bp, Homo sapien
acctacctcttccacaataacaacttctgtttc

SEQ ID NO: 253618 - DNA, 33 bp, Homo sapien
acctacctcttccacagtaacaacttctgtttc

SEQ ID NO: 253619 - DNA, 33 bp, Homo sapien
atccctttctcattccaaagagaacattaattt

SEQ ID NO: 253620 - DNA, 33 bp, Homo sapien
atccctttctcattcccaagagaacattaattt

SEQ ID NO: 253621 - DNA, 33 bp, Homo sapien
cctttccacatcaaaacatatccattcagtgtg

SEQ ID NO: 253622 - DNA, 33 bp, Homo sapien
cctttccacatcaaaatatatccattcagtgtg

SEQ ID NO: 253623 - DNA, 33 bp, Homo sapien
aaagcacatgagatgacaatgcttcttcaattt

SEQ ID NO: 253624 - DNA, 33 bp, Homo sapien
aaagcacatgagatgataatgcttcttcaattt

SEQ ID NO: 253625 - DNA, 33 bp, Homo sapien
gagctgcatttgggcaaaaaggacccagagacc

SEQ ID NO: 253626 - DNA, 33 bp, Homo sapien
gagctgcatttgggcagaaaggacccagagacc

SEQ ID NO: 253627 - DNA, 33 bp, Homo sapien
aacctaagtccctgtaacagtgtctgctttggg

SEQ ID NO: 253628 - DNA, 33 bp, Homo sapien
aacctaagtccctgtatcagtgtctgctttggg

SEQ ID NO: 253629 - DNA, 33 bp, Homo sapien
tgtgcctcagaaaagacgctctgtgggacagag

SEQ ID NO: 253630 - DNA, 33 bp, Homo sapien
tgtgcctcagaaaagatgctctgtgggacagag

SEQ ID NO: 253631 - DNA, 33 bp, Homo sapien
ggctctggatggaatcaaaactccacagctctg

SEQ ID NO: 253632 - DNA, 33 bp, Homo sapien
ggctctggatggaatcgaaactccacagctctg

SEQ ID NO: 253633 - DNA, 33 bp, Homo sapien
acttatactccacccactaagagtgattcatga

SEQ ID NO: 253634 - DNA, 33 bp, Homo sapien
acttatactccacccagtaagagtgattcatga

SEQ ID NO: 253635 - DNA, 33 bp, Homo sapien
acacccatttcatagacgtcaggaaagagggcc

SEQ ID NO: 253636 - DNA, 33 bp, Homo sapien
acacccatttcatagatgtcaggaaagagggcc

SEQ ID NO: 253637 - DNA, 33 bp, Homo sapien
gttattaattctagtcattatccatcaagacac

SEQ ID NO: 253638 - DNA, 33 bp, Homo sapien
gttattaattctagtcgttatccatcaagacac

SEQ ID NO: 253639 - DNA, 33 bp, Homo sapien
ttattctgcatagctacctcagaccgaggattt

SEQ ID NO: 253640 - DNA, 33 bp, Homo sapien
ttattctgcatagctagctcagaccgaggattt

SEQ ID NO: 253641 - DNA, 33 bp, Homo sapien
cagtactcactcagaaactaatatattttatga

SEQ ID NO: 253642 - DNA, 33 bp, Homo sapien
cagtactcactcagaagctaatatattttatga

SEQ ID NO: 253643 - DNA, 33 bp, Homo sapien
ctttctctctcttcaaactacaaaaccaggatt

SEQ ID NO: 253644 - DNA, 33 bp, Homo sapien
ctttctctctcttcaatctacaaaaccaggatt

SEQ ID NO: 253645 - DNA, 33 bp, Homo sapien
ggaaaagacaaggccacaagacacagtatctca

SEQ ID NO: 253646 - DNA, 33 bp, Homo sapien
ggaaaagacaaggccagaagacacagtatctca

SEQ ID NO: 253647 - DNA, 33 bp, Homo sapien
tgtgactcaagaatagcaaatgagagcacagaa

SEQ ID NO: 253648 - DNA, 33 bp, Homo sapien
tgtgactcaagaataggaaatgagagcacagaa

SEQ ID NO: 253649 - DNA, 33 bp, Homo sapien
ctttcagaaaccaaaagaagtatcttgaaagat

SEQ ID NO: 253650 - DNA, 33 bp, Homo sapien
ctttcagaaaccaaaataagtatcttgaaagat

SEQ ID NO: 253651 - DNA, 33 bp, Homo sapien
tatccagccttagcaccgtctagcggttaagat

SEQ ID NO: 253652 - DNA, 33 bp, Homo sapien
tatccagccttagcactgtctagcggttaagat

SEQ ID NO: 253653 - DNA, 33 bp, Homo sapien
catgaccgtttctcctaacaaatgatacagaag

SEQ ID NO: 253654 - DNA, 33 bp, Homo sapien
catgaccgtttctcctgacaaatgatacagaag

SEQ ID NO: 253655 - DNA, 33 bp, Homo sapien
aggaagttttattatgaaaaggcaaaatcctca

SEQ ID NO: 253656 - DNA, 33 bp, Homo sapien
aggaagttttattatgcaaaggcaaaatcctca

SEQ ID NO: 253657 - DNA, 33 bp, Homo sapien
aaatattgataggttgaaccttctttaatgaga

SEQ ID NO: 253658 - DNA, 33 bp, Homo sapien
aaatattgataggttggaccttctttaatgaga

SEQ ID NO: 253659 - DNA, 33 bp, Homo sapien
taaactgtattctggaccataaacaaatcttaa

SEQ ID NO: 253660 - DNA, 33 bp, Homo sapien
taaactgtattctggatcataaacaaatcttaa

SEQ ID NO: 253661 - DNA, 33 bp, Homo sapien
ccctgtgtgctgtctcgctcctgctggcgtgta

SEQ ID NO: 253662 - DNA, 33 bp, Homo sapien
ccctgtgtgctgtctctctcctgctggcgtgta

SEQ ID NO: 253663 - DNA, 33 bp, Homo sapien
ttgctgttcatttttcacaaagaggcctcagcc

SEQ ID NO: 253664 - DNA, 33 bp, Homo sapien
ttgctgttcatttttcgcaaagaggcctcagcc

SEQ ID NO: 253665 - DNA, 33 bp, Homo sapien
gcaaagttctaatgaaagatttgagaagaaaaa

SEQ ID NO: 253666 - DNA, 33 bp, Homo sapien
gcaaagttctaatgaacgatttgagaagaaaaa

SEQ ID NO: 253667 - DNA, 33 bp, Homo sapien
caacattgcaccagatgaagaaccacggcttgg

SEQ ID NO: 253668 - DNA, 33 bp, Homo sapien
caacattgcaccagattaagaaccacggcttgg

SEQ ID NO: 253669 - DNA, 33 bp, Homo sapien
gtgctgtgaatctctcccctagaatccaccacc

SEQ ID NO: 253670 - DNA, 33 bp, Homo sapien
gtgctgtgaatctctctcctagaatccaccacc

SEQ ID NO: 253671 - DNA, 33 bp, Homo sapien
caagcatggagtaaaacatctcctgttgcctca

SEQ ID NO: 253672 - DNA, 33 bp, Homo sapien
caagcatggagtaaaatatctcctgttgcctca

SEQ ID NO: 253673 - DNA, 33 bp, Homo sapien
cacaggccctcattccccaatgtggcctcacct

SEQ ID NO: 253674 - DNA, 33 bp, Homo sapien
cacaggccctcattcctcaatgtggcctcacct

SEQ ID NO: 253675 - DNA, 33 bp, Homo sapien
atttctgtatcaatgcacagatatggataaatg

SEQ ID NO: 253676 - DNA, 33 bp, Homo sapien
atttctgtatcaatgcgcagatatggataaatg

SEQ ID NO: 253677 - DNA, 33 bp, Homo sapien
agacagggaagcaccactagctctgaatcatgt

SEQ ID NO: 253678 - DNA, 33 bp, Homo sapien
agacagggaagcaccattagctctgaatcatgt

SEQ ID NO: 253679 - DNA, 33 bp, Homo sapien
gtcatgcatgtggtaaaggctgagcctagagtc

SEQ ID NO: 253680 - DNA, 33 bp, Homo sapien
gtcatgcatgtggtaatggctgagcctagagtc

SEQ ID NO: 253681 - DNA, 33 bp, Homo sapien
taagtcttcaaattaaagtgaggaacatcattc

SEQ ID NO: 253682 - DNA, 33 bp, Homo sapien
taagtcttcaaattaaggtgaggaacatcattc

SEQ ID NO: 253683 - DNA, 33 bp, Homo sapien
ttactagtttctttaactctggggcatgacatc

SEQ ID NO: 253684 - DNA, 33 bp, Homo sapien
ttactagtttctttaattctggggcatgacatc

SEQ ID NO: 253685 - DNA, 33 bp, Homo sapien
ctcacccattcacatccgaaggcaataagatgg

SEQ ID NO: 253686 - DNA, 33 bp, Homo sapien
ctcacccattcacatctgaaggcaataagatgg

SEQ ID NO: 253687 - DNA, 33 bp, Homo sapien
aatgaggttttgcaagacaacactttagcaggc

SEQ ID NO: 253688 - DNA, 33 bp, Homo sapien
aatgaggttttgcaaggcaacactttagcaggc

SEQ ID NO: 253689 - DNA, 33 bp, Homo sapien
gacaggcagaaaggaaacttagagtctccgtac

SEQ ID NO: 253690 - DNA, 33 bp, Homo sapien
gacaggcagaaaggaagcttagagtctccgtac

SEQ ID NO: 253691 - DNA, 33 bp, Homo sapien
tctatgctttgtgaaaaaatctaatactgcaaa

SEQ ID NO: 253692 - DNA, 33 bp, Homo sapien
tctatgctttgtgaaacaatctaatactgcaaa

SEQ ID NO: 253693 - DNA, 33 bp, Homo sapien
tctccaccactgaaaacgaagtagaaatgaaaa

SEQ ID NO: 253694 - DNA, 33 bp, Homo sapien
tctccaccactgaaaatgaagtagaaatgaaaa

SEQ ID NO: 253695 - DNA, 33 bp, Homo sapien
taaaaataatgttaccaatgcttaaaagataaa

SEQ ID NO: 253696 - DNA, 33 bp, Homo sapien
taaaaataatgttacccatgcttaaaagataaa

SEQ ID NO: 253697 - DNA, 33 bp, Homo sapien
ttaaatgagttcaagaaaaattggggaaacctg

SEQ ID NO: 253698 - DNA, 33 bp, Homo sapien
ttaaatgagttcaagagaaattggggaaacctg

SEQ ID NO: 253699 - DNA, 33 bp, Homo sapien
cctcggggaaagattacggctgaaagcagctta

SEQ ID NO: 253700 - DNA, 33 bp, Homo sapien
cctcggggaaagattatggctgaaagcagctta
